(19) United States
(12) Patent Application Publication
(10) Pub. No.: US 2005/0255487 A1
(43) Pub. Date: Nov. 17, 2005

(54) Methods and compositions for selecting siRNA of improved functionality

(75) Inventors: Anastasia Khvorova, Boulder, CO (US); Angela Reynolds, Conifer, CO (US); Devin Leake, Boulder, CO (US); William Marshall, Boulder, CO (US); Steven Read, Denver, CO (US); Stephen Scaringe, Lafayette, CO (US)

Correspondence Address: KALOW & SPRINGUT LLP, 488 MADISON AVENUE, 19TH FLOOR, NEW YORK, NY, 10022, US

(73) Assignee: Dharmacon, Inc., Lafayette, CO (US)

(21) Appl. No.: 10/940,892

(22) Filed: Sep. 14, 2004

Related U.S. Application Data
(63) Continuation of application No. PCT/US04/14885, filed on May 12, 2004.

(51) Int. Cl. C12Q 1/68; G06F 19/00; G01N 33/48; G01N 33/50; C07H 21/02; C12N 15/87

(52) U.S. Cl. 435/6; 435/455; 536/23.1; 702/20

(57) ABSTRACT

Efficient sequence specific gene silencing is possible through the use of siRNA technology. By selecting particular siRNAs by rational design, one can maximize the generation of an effective gene silencing reagent, as well as methods for silencing genes. Methods, compositions, and kits generated through rational design of siRNAs are disclosed.

### REFERENCE TO TABLES SUBMITTED IN ELECTRONIC FORM

[0001] In accordance with PCT Administrative Instructions Part 8, Applicant submits a compact disc of tables related to sequences and hereby incorporates by reference the material submitted herewith, on the compact disk labeled COPY 1—TABLES PART DISK 1/1, TABLES XII and XIII (provided in triplicate, which copies are identical), in files entitled table-xii.txt, date of creation 26 Apr. 2004, with a size of 110,486 kb, and table-xiii.txt, date of creation 26 Apr. 2004, with a size of 23,146 kb; and in accordance with PCT Administrative Instructions Section 801(a)(i) on the compact disk labeled CRF (with three further copies, which copies are identical) in a file entitled 13608PCT.txt, date of creation 26 Apr. 2004, with a size of 556,776 kb.

### FIELD OF INVENTION

[0002] The present invention relates to RNA interference (“RNAi”).

### BACKGROUND OF THE INVENTION

[0003] Relatively recently, researchers observed that double stranded RNA (“dsRNA”) could be used to inhibit protein expression. This ability to silence a gene has broad potential for treating human diseases, and many researchers and commercial entities are currently investing considerable resources in developing therapies based on this technology.

[0004] Double stranded RNA induced gene silencing can occur on at least three different levels: (i) transcription inactivation, which refers to RNA guided DNA or histone methylation; (ii) siRNA induced mRNA degradation; and (iii) mRNA induced transcriptional attenuation.

[0005] It is generally considered that the major mechanism of RNA induced silencing (RNA interference, or RNAi) in mammalian cells is mRNA degradation. Initial attempts to use RNAi in mammalian cells focused on the use of long strands of dsRNA. However, these attempts to induce RNAi met with limited success, due in part to the induction of the interferon response, which results in a general, as opposed to a target-specific, inhibition of protein synthesis. Thus, long dsRNA is not a viable option for RNAi in mammalian systems.

[0006] More recently it has been shown that when short (18-30 bp) RNA duplexes are introduced into mammalian cells in culture, sequence-specific inhibition of target mRNA can be realized without inducing an interferon response. Certain of these short dsRNAs, referred to as small inhibitory RNAs (“siRNAs”), can act catalytically at sub-molar concentrations to cleave greater than 95% of the target mRNA in the cell. A description of the mechanisms for siRNA activity, as well as some of its applications are described in Provost et al., Ribonuclease Activity and RNA Binding of Recombinant Human Dicer, E.M.B.O. J., 2002 Nov. 1; 21(21): 5864-5874; Tabara et al., The dsRNA Binding Protein RDE-4 Interacts with RDE-1, DCR-1 and a DexH-box Helicase to Direct RNAi in C. elegans, Cell 2002, Jun. 28;109(7):861-71; Ketting et al., Dicer Functions in RNA Interference and in Synthesis of Small RNA Involved in Developmental Timing in C. elegans; Martinez et al., Single-Stranded Antisense siRNAs Guide Target RNA Cleavage in RNAi, Cell 2002, Sep. 6; 110(5):563; Hutvagner & Zamore, A micro RNA in a multiple-turnover RNAi enzyme complex, Science 2002, 297:2056.

[0007] From a mechanistic perspective, introduction of long double stranded RNA into plants and invertebrate cells is broken down into siRNA by a Type III endonuclease known as Dicer. Sharp, RNA interference—2001, Genes Dev. 2001, 15:485. Dicer, a ribonuclease-III-like enzyme, processes the dsRNA into 19-23 base pair short interfering RNAs with characteristic two base 3′ overhangs. Bernstein, Caudy, Hammond, & Hannon, Role for a bidentate ribonuclease in the initiation step of RNA interference, Nature 2001, 409:363. The siRNAs are then incorporated into an RNA-induced silencing complex (RISC) where one or more helicases unwind the siRNA duplex, enabling the complementary antisense strand to guide target recognition. Nykanen, Haley, & Zamore, ATP requirements and small interfering RNA structure in the RNA interference pathway, Cell 2001, 107:309. Upon binding to the appropriate target mRNA, one or more endonucleases within the RISC cleaves the target to induce silencing. Elbashir, Lendeckel, & Tuschl, RNA interference is mediated by 21- and 22-nucleotide RNAs, Genes Dev 2001, 15:188, FIG. 1.

[0008] The interference effect can be long lasting and may be detectable after many cell divisions. Moreover, RNAi exhibits sequence specificity. Kisielow, M. et al. (2002) Isoform-specific knockdown and expression of adaptor protein ShcA using small interfering RNA, J. of Biochemistry 363: 1-5. Thus, the RNAi machinery can specifically knock down one type of transcript, while not affecting closely related mRNA. These properties make siRNA a potentially valuable tool for inhibiting gene expression and studying gene function and drug target validation. Moreover, siRNAs are potentially useful as therapeutic agents against: (1) diseases that are caused by over-expression or misexpression of genes; and (2) diseases brought about by expression of genes that contain mutations.

[0009] Successful siRNA-dependent gene silencing depends on a number of factors. One of the most contentious issues in RNAi is the question of the necessity of siRNA design, i.e., considering the sequence of the siRNA used. Early work in C. elegans and plants circumvented the issue of design by introducing long dsRNA (see, for instance, Fire, A. et al. (1998) Nature 391:806-811). In this primitive organism, long dsRNA molecules are cleaved into siRNA by Dicer, thus generating a diverse population of duplexes that can potentially cover the entire transcript. While some fraction of these molecules are non-functional (i.e., induce little or no silencing) one or more have the potential to be highly functional, thereby silencing the gene of interest and alleviating the need for siRNA design. Unfortunately, due to the interferon response, this same approach is unavailable for mammalian systems. While this effect can be circumvented by bypassing the Dicer cleavage step and directly introducing siRNA, this tactic carries with it the risk that the chosen siRNA sequence may be non-functional or semi-functional.

[0010] A number of researches have expressed the view that siRNA design is not a crucial element of RNAi. On the other hand, others in the field have begun to explore the possibility that RNAi can be made more efficient by paying attention to the design of the siRNA. Unfortunately, none of the reported methods have provided a satisfactory scheme for reliably selecting siRNA with acceptable levels of functionality. Accordingly, there is a need to develop rational criteria by which to select siRNA with an acceptable level of functionality, and to identify siRNA that have this improved level of functionality, as well as to identify siRNAs that are hyperfunctional.

### SUMMARY OF THE INVENTION

[0011] The present invention is directed to increasing the efficiency of RNAi, particularly in mammalian systems. Accordingly, the present invention provides kits, siRNAs and methods for increasing siRNA efficacy.

[0012] According to a first embodiment, the present invention provides a kit for gene silencing, wherein said kit is comprised of a pool of at least two siRNA duplexes, each of which is comprised of a sequence that is complementary to a portion of the sequence of one or more target messenger RNA, and each of which is selected using non-target specific criteria.

[0013] According to a second embodiment, the present invention provides a method for selecting an siRNA, said method comprising applying selection criteria to a set of potential siRNA that comprise 18-30 base pairs, wherein said selection criteria are non-target specific criteria, and said set comprises at least two siRNAs and each of said at least two siRNAs contains a sequence that is at least substantially complementary to a target gene; and determining the relative functionality of the at least two siRNAs.

[0014] In one embodiment, the present invention also provides a method wherein said selection criteria are embodied in a formula comprising:
(−14)*G₁₃−13*A₁−12*U₇−11*U₂−10*A₁₁−10*U₄−10*C₃−10*C₅−10*C₆−9*A₁₀−9*U₉−9*C₁₈−8*G₁₀−7*U₁−7*U₁₆−7*C₁₇−7*C₁₉+7*U₁₇+8*A₂+8*A₄+8*A₅+8*C₄+9*G₈+10*A₇+10*U₁₈+11*A₁₉+11*C₉+15*G₁+18*A₃+19*U₁₀−Tm−3* (GCₜₒₜₐₗ)−6*(GC₁₅₋₁₉)−30*X; or Formula VIII
(−8)*A1+(−1)*A2+(12)*A3+(7)*A4+(18)*A5+(12)*A6+(19)*A7+(6)*A8+(−4)*A9+(−5)*A10+(−2)*A11+(−5)*A12+(17)*A13+(−3)*A14+(4)*A15+(2)*A16+(8)*A17+(11)*A18+(30)*A19+(−13)*U1+(−10)*U2+(2)*U3+(−2)*U4+(−5)*U5+(5)*U6+(−2)*U7+(−10)*U8+(−5)*U9+(15)*U10+(−1)*U11+(0)*U12+(10)*U13+(−9)*U14+(−13)*U15+(−10)*U16+(3)*U17+(9)*U18+(9)*U19+(7)*C1+(3)*C2+(−21)*C3+(5)*C4+(−9)*C5+(−20)*C6+(−18)*C7+(−5)*C8+(5)*C9+(1)*C10+(2)*C11+(−5)*C12+(−3)*C13+(−6)*C14+(−2)*C15+(−5)*C16+(−3)*C17+(−12)*C18+(−18)*C19+(14)*G1+(8)*G2+(7)*G3+(−10)*G4+(−4)*G5+(2)*G6+(1)*G7+(9)*G8+(5)*G9+(−11)*G10+(1)*G11+(9)*G12+(−24)*G13+(18)*G14+(11)*G15+(13)*G16+(−7)*G17+(−9)*G18+(−22)*G19+6*(number of A+U in position 15-19)−3*(number of G+C in whole siRNA), Formula X
wherein position numbering begins at the 5′-most position of a sense strand, and
[0015] A₁=1 if A is the base at position 1 of the sense strand, otherwise its value is 0;
[0016] A₂=1 if A is the base at position 2 of the sense strand, otherwise its value is 0;
[0017] A₃=1 if A is the base at position 3 of the sense strand, otherwise its value is 0;
[0018] A₄=1 if A is the base at position 4 of the sense strand, otherwise its value is 0;
[0019] A₅=1 if A is the base at position 5 of the sense strand, otherwise its value is 0;
[0020] A₆=1 if A is the base at position 6 of the sense strand, otherwise its value is 0;
[0021] A₇=1 if A is the base at position 7 of the sense strand, otherwise its value is 0;
[0022] A₁₀=1 if A is the base at position 10 of the sense strand, otherwise its value is 0;
[0023] A₁₁=1 if A is the base at position 11 of the sense strand, otherwise its value is 0;
[0024] A₁₃=1 if A is the base at position 13 of the sense strand, otherwise its value is 0;
[0025] A₁₉=1 if A is the base at position 19 of the sense strand, otherwise if another base is present or the sense strand is only 18 base pairs in length, its value is 0;
[0026] C₃=1 if C is the base at position 3 of the sense strand, otherwise its value is 0;
[0027] C₄=1 if C is the base at position 4 of the sense strand, otherwise its value is 0;
[0028] C₅=1 if C is the base at position 5 of the sense strand, otherwise its value is 0;
[0029] C₆=1 if C is the base at position 6 of the sense strand, otherwise its value is 0;
[0030] C₇=1 if C is the base at position 7 of the sense strand, otherwise its value is 0;
[0031] C₉=1 if C is the base at position 9 of the sense strand, otherwise its value is 0;
[0032] C₁₇=1 if C is the base at position 17 of the sense strand, otherwise its value is 0;
[0033] C₁₈=1 if C is the base at position 18 of the sense strand, otherwise its value is 0;
[0034] C₁₉=1 if C is the base at position 19 of the sense strand, otherwise if another base is present or the sense strand is only 18 base pairs in length, its value is 0;
[0035] G₁=1 if G is the base at position 1 on the sense strand, otherwise its value is 0;
[0036] G₂=1 if G is the base at position 2 of the sense strand, otherwise its value is 0;
[0037] G₈=1 if G is the base at position 8 on the sense strand, otherwise its value is 0;
[0038] G₁₀=1 if G is the base at position 10 on the sense strand, otherwise its value is 0;
[0039] G₁₃=1 if G is the base at position 13 on the sense strand, otherwise its value is 0;
[0040] G₁₉=1 if G is the base at position 19 of the sense strand, otherwise if another base is present or the sense strand is only 18 base pairs in length, its value is 0;
[0041] U₁=1 if U is the base at position 1 on the sense strand, otherwise its value is 0;
[0042] U₂=1 if U is the base at position 2 on the sense strand, otherwise its value is 0;
[0043] U₃=1 if U is the base at position 3 on the sense strand, otherwise its value is 0;
[0044] U₄=1 if U is the base at position 4 on the sense strand, otherwise its value is 0;
[0045] U₇=1 if U is the base at position 7 on the sense strand, otherwise its value is 0;
[0046] U₉=1 if U is the base at position 9 on the sense strand, otherwise its value is 0;
[0047] U₁₀=1 if U is the base at position 10 on the sense strand, otherwise its value is 0;
[0048] U₁₅=1 if U is the base at position 15 on the sense strand, otherwise its value is 0;
[0049] U₁₆=1 if U is the base at position 16 on the sense strand, otherwise its value is 0;
[0050] U₁₇=1 if U is the base at position 17 on the sense strand, otherwise its value is 0;
[0051] U₁₈=1 if U is the base at position 18 on the sense strand, otherwise its value is 0.
[0052] GC₁₅₋₁₉=the number of G and C bases within positions 15-19 of the sense strand, or within positions 15-18 if the sense strand is only 18 base pairs in length;
[0053] GCₜₒₜₐₗ=the number of G and C bases in the sense strand;
[0054] Tm=100 if the siRNA oligo has the internal repeat longer then 4 base pairs, otherwise its value is 0; and
[0055] X=the number of times that the same nucleotide repeats four or more times in a row.

[0056] According to a third embodiment, the invention provides a method for developing an algorithm for selecting siRNA, said method comprising: (a) selecting a set of siRNA; (b) measuring gene silencing ability of each siRNA from said set; (c) determining relative functionality of each siRNA; (d) determining improved functionality by the presence or absence of at least one variable selected from the group consisting of the presence or absence of a particular nucleotide at a particular position, the total number of As and Us in positions 15-19, the number of times that the same nucleotide repeats within a given sequence, and the total number of Gs and Cs; and (e) developing an algorithm using the information of step (d).

[0057] According to a fourth embodiment, the present invention provides a kit, wherein said kit is comprised of at least two siRNAs, wherein said at least two siRNAs comprise a first optimized siRNA and a second optimized siRNA, wherein said first optimized siRNA and said second optimized siRNA are optimized according a formula comprising Formula X.

[0058] According to a fifth embodiment, the present invention provides a method for identifying a hyperfunctional siRNA, comprising applying selection criteria to a set of potential siRNA that comprise 18-30 base pairs, wherein said selection criteria are non-target specific criteria, and said set comprises at least two siRNAs and each of said at least two siRNAs contains a sequence that is at least substantially complementary to a target gene; determining the relative functionality of the at least two siRNAs and assigning each of the at least two siRNAs a functionality score; and selecting siRNAs from the at least two siRNAs that have a functionality score that reflects greater than 80 percent silencing at a concentration in the picomolar range, wherein said greater than 80 percent silencing endures for greater than 120 hours.

[0059] According to a sixth embodiment, the present invention provides a hyperfunctional siRNA that is capable of silencing Bc12.

[0060] According to a seventh embodiment, the present invention provides a method for developing an siRNA algorithm for selecting functional and hyperfunctional siRNAs for a given sequence. The method comprises:
[0061] (a) selecting a set of siRNAs;
[0062] (b) measuring the gene silencing ability of each siRNA from said set;
[0063] (c) determining the relative functionality of each siRNA;
[0064] (d) determining the amount of improved functionality by the presence or absence of at least one variable selected from the group consisting of the total GC content, melting temperature of the siRNA, GC content at positions 15-19, the presence or absence of a particular nucleotide at a particular position, relative thermodynamic stability at particular positions in a duplex, and the number of times that the same nucleotide repeats within a given sequence; and
[0065] (e) developing an algorithm using the information of step (d).
   According to this embodiment, preferably the set of siRNAs comprises at least 90 siRNAs from at least one gene, more preferably at least 180 siRNAs from at least two different genes, and most preferably at least 270 and 360 siRNAs from at least three and four different genes, respectively. Additionally, in step (d) the determination is made with preferably at least two, more preferably at least three, even more preferably at least four, and most preferably all of the variables. The resulting algorithm is not target sequence specific.

[0066] In another embodiment, the present invention provides rationally designed siRNAs identified using the formulas above.

[0067] In yet another embodiment, the present invention is directed to hyperfunctional siRNA.

[0068] The ability to use the above algorithms, which are not sequence or species specific, allows for the cost-effective selection of optimized siRNAs for specific target sequences. Accordingly, there will be both greater efficiency and reliability in the use of siRNA technologies.

[0069] For a better understanding of the present invention together with other and further advantages and embodiments, reference is made to the following description taken in conjunction with the examples, the scope of which is set forth in the appended claims.

### BRIEF DESCRIPTION OF THE FIGURES

[0070] FIG. 1 shows a model for siRNA-RISC interactions. RISC has the ability to interact with either end of the siRNA or miRNA molecule. Following binding, the duplex is unwound, and the relevant target is identified, cleaved, and released.

[0071] FIG. 2 is a representation of the functionality of two hundred and seventy siRNA duplexes that were generated to target human cyclophilin, human diazepam-binding inhibitor (DB), and firefly luciferase.

[0072] FIG. 3a is a representation of the silencing effect of 30 siRNAs in three different cells lines, HEK293, DU145, and Hela. FIG. 3b shows the frequency of different functional groups (>95% silencing (black), >80% silencing (gray), >50% silencing (dark gray), and <50% silencing (white)) based on GC content. In cases where a given bar is absent from a particular GC percentage, no siRNA were identified for that particular group. FIG. 3c shows the frequency of different functional groups based on melting temperature (Tm).

[0073] FIG. 4 is a representation of a statistical analysis that revealed correlations between silencing and five sequence-related properties of siRNA: (A) an A at position 19 of the sense strand, (B) an A at position 3 of the sense strand, (C) a U at position 10 of the sense strand, (D) a base other than G at position 13 of the sense strand, and (E) a base other than C at position 19 of the sense strand. All variables were correlated with siRNA silencing of firefly luciferase and human cyclophilin. siRNAs satisfying the criterion are grouped on the left (Selected) while those that do not, are grouped on the right (Eliminated). Y-axis is “% Silencing of Control.” Each position on the X-axis represents a unique siRNA.

[0074] FIGS. 5A and 5B are representations of firefly luciferase and cyclophilin siRNA panels sorted according to functionality and predicted values using Formula VIII. The siRNA found within the circle represent those that have Formula VIII values (SMARTscores™) above zero. siRNA outside the indicated area have calculated Formula VIII values that are below zero. Y-axis is “Expression (% Control).” Each position on the X-axis represents a unique siRNA.

[0075] FIG. 6A is a representation of the average internal stability profile (AISP) derived from 270 siRNAs taken from three separate genes (cyclophilin B, DBI and firefly luciferase). Graphs represent AISP values of highly functional, functional, and non-functional siRNA. FIG. 6B is a comparison between the AISP of naturally derived GFP siRNA (filled squares) and the AISP of siRNA from cyclophilin B, DBI, and luciferase having >90% silencing properties (no fill) for the antisense strand. “DG” is the symbol for ΔG, free energy.

[0076] FIG. 7 is a histogram showing the differences in duplex functionality upon introduction of basepair mismatches. The X-axis shows the mismatch introduced in the siRNA and the position it is introduced (e.g., 8C>A reveals that position 8 (which normally has a C) has been changed to an A). The Y-axis is “% Silencing (Normalized to Control).”

[0077] FIG. 8a is histogram that shows the effects of 5′ sense and antisense strand modification with 2′-O-methylation on functionality. FIG. 8b is an expression profile showing a comparison of sense strand off-target effects for IGF1R-3 and 2′-O-methyl IGF1R-3. Sense strand off-targets (lower box) are not induced when the 5′ end of the sense strand is modified with 2′-O-methyl groups (top box).

[0078] FIG. 9 shows a graph of SMARTscores™ versus RNAi silencing values for more than 360 siRNA directed against 30 different genes. siRNA to the right of the vertical bar represent those siRNA that have desirable SMARTscores™.

[0079] FIGS. 10A-E compare the RNAi of five different genes (SEAP, DBI, PLK, Firefly Luciferase, and Renila Luciferase) by varying numbers of randomly selected siRNA and four rationally designed (SMART-selected) siRNA chosen using the algorithm described in Formula VIII. In addition, RNAi induced by a pool of the four SMART-selected siRNA is reported at two different concentrations (100 and 400 nM). 10F is a comparison between a pool of randomly selected EGFR siRNA (Pool 1) and a pool of SMART selected EGFR siRNA (Pool 2). Pool 1, S1-S4 and Pool 2 S1-S4 represent the individual members that made up each respective pool. Note that numbers for random siRNAs represent the position of the 5′ end of the sense strand of the duplex. The Y-axis represents the % expression of the control(s). The X-axis is the percent expression of the control.

[0080] FIG. 11 shows the Western blot results from cells treated with siRNA directed against twelve different genes involved in the clathrin-dependent endocytosis pathway (CHC, DynII, CALM, CLCa, CLCb, Eps15, Eps15R, Rab5a, Rab5b, Rab5c, β2 subunit of AP-2 and EEA.1). siRNA were selected using Formula VIII. “Pool” represents a mixture of duplexes 1-4. Total concentration of each siRNA in the pool is 25 nM. Total concentration=4×25=100 nM.

[0081] FIG. 12 is a representation of the gene silencing capabilities of rationally-selected siRNA directed against ten different genes (human and mouse cyclophilin, C-myc, human lamin A/C, QB (ubiquinol-cytochrome c reductase core protein I), MEK1 and MEK2, ATE1 (arginyl-tRNA protein transferase), GAPDH, and Eg5). The Y-axis is the percent expression of the control. Numbers 1, 2, 3 and 4 represent individual rationally selected siRNA. “Pool” represents a mixture of the four individual siRNA.

[0082] FIG. 13 is the sequence of the top ten Bcl2 siRNAs as determined by Formula VIII. Sequences are listed 5′ to 3′.

[0083] FIG. 14 is the knockdown by the top ten Bcl2 siRNAs at 100 nM concentrations. The Y-axis represents the amount of expression relative to the non-specific (ns) and transfection mixture control.

[0084] FIG. 15 represents a functional walk where siRNA beginning on every other base pair of a region of the luciferase gene are tested for the ability to silence the luciferase gene. The Y-axis represents the percent expression relative to a control. The X-axis represents the position of each individual siRNA.

[0085] FIG. 16 is a histogram demonstrating the inhibition of target gene expression by pools of 2 and 3 siRNAs duplexes taken from the walk described in FIG. 15. The Y-axis represents the percent expression relative to control. The X-axis represents the position of the first siRNA in paired pools, or trios of siRNA. For instance, the first paired pool contains siRNA 1 and 3. The second paired pool contains siRNA 3 and 5. Pool 3 (of paired pools) contains siRNA 5 and 7, and so on.

[0086] FIG. 17 is a histogram demonstrating the inhibition of target gene expression by pools of 4 and 5 siRNA duplexes. The Y-axis represents the percent expression relative to a control. The X-axis represents the position of the first siRNA in each pool.

[0087] FIG. 18 is a histogram demonstrating the inhibition of target gene expression by siRNAs that are ten and twenty basepairs apart. The Y-axis represents the percent expression relative to a control. The X-axis represents the position of the first siRNA in each pool.

[0088] FIG. 19 shows that pools of siRNAs (dark gray bar) work as well (or better) than the best siRNA in the pool (light gray bar). The Y-axis represents the percent expression relative to a control. The-X axis represents the position of the first siRNA in each pool.

[0089] FIG. 20 shows that the combination of several semifunctional siRNAs (dark gray) result in a significant improvement of gene expression inhibition over individual (semi-functional; light gray) siRNA. The Y-axis represents the percent expression relative to a control.

[0090] FIG. 21 shows both pools (Library, Lib) and individual siRNAs in inhibition of gene expression of Beta-Galactosidase, Renilla Luciferase and SEAP (alkaline phosphatase). Numbers on the X-axis indicate the position of the 5′-most nucleotide of the sense strand of the duplex. The Y-axis represents the percent expression of each gene relative to a control. Libraries contain 19 nucleotide long siRNAs (not including overhangs) that begin at the following nucleotides: SEAP: Lib 1: 206, 766, 812,923, Lib 2: 1117, 1280, 1300, 1487, Lib 3: 206, 766, 812, 923, 1117, 1280, 1300,1487, Lib 4: 206, 812, 1117, 1300, Lib 5: 766, 923, 1280, 1487, Lib 6: 206, 1487; Bgal: Lib 1: 979, 1339, 2029, 2590, Lib 2: 1087,1783,2399,3257, Lib 3: 979, 1783, 2590, 3257, Lib 4: 979, 1087, 1339, 1783, 2029, 2399,2590,3257, Lib 5: 979, 1087, 1339, 1783, Lib 6: 2029,2399,2590,3257; Renilla: Lib 1: 174,300,432,568, Lib 2: 592, 633, 729,867, Lib 3: 174, 300, 432, 568, 592, 633,729,867, Lib 4: 174, 432, 592, 729, Lib 5: 300,568,633,867, Lib 6: 592,568.

[0091] FIG. 22 shows the results of an EGFR and TfnR internalization assay when single gene knockdowns are performed. The Y-axis represents percent internalization relative to control.

[0092] FIG. 23 shows the results of an EGFR and TfnR internalization assay when multiple genes are knocked down (e.g., Rab5a, b, c). The Y-axis represents the percent internalization relative to control.

[0093] FIG. 24 shows the simultaneous knockdown of four different genes. siRNAs directed against G6PD, GAPDH, PLK, and UQCwere simultaneously introduced into cells. Twenty-four hours later, cultures were harvested and assayed for mRNA target levels for each of the four genes. A comparison is made between cells transfected with individual siRNAs vs. a pool of siRNAs directed against all four genes.

[0094] FIG. 25 shows the functionality of ten siRNAs at 0.3 nM concentrations.

### DETAILED DESCRIPTION

### DEFINITIONS

[0095] Unless stated otherwise, the following terms and phrases have the meanings provided below:

siRNA

[0096] The term “siRNA” refers to small inhibitory RNA duplexes that induce the RNA interference (RNAi) pathway. These molecules can vary in length (generally 18-30 basepairs) and contain varying degrees of complementarity to their target mRNA in the antisense strand. Some, but not all, siRNA have unpaired overhanging bases on the 5′ or 3′ end of the sense strand and/or the antisense strand. The term “siRNA” includes duplexes of two separate strands, as well as single strands that can form hairpin structures comprising a duplex region.

[0097] siRNA may be divided into five (5) groups (non-functional, semi-functional, functional, highly functional, and hyper-functional) based on the level or degree of silencing that they induce in cultured cell lines. As used herein, these definitions are based on a set of conditions where the siRNA is transfected into said cell line at a concentration of 100 nM and the level of silencing is tested at a time of roughly 24 hours after transfection, and not exceeding 72 hours after transfection. In this context, “non-functional siRNA” are defined as those siRNA that induce less than 50% (<50%) target silencing. “Semi-functional siRNA” induce 50-79% target silencing. “Functional siRNA” are molecules that induce 80-95% gene silencing. “Highly-functional siRNA” are molecules that induce greater than 95% gene silencing. “Hyperfunctional siRNA” are a special class of molecules. For purposes of this document, hyperfunctional siRNA are defined as those molecules that: (1) induce greater than 95% silencing of a specific target when they are transfected at subnanomolar concentrations (i.e., less than one nanomolar); and/or (2) induce functional (or better) levels of silencing for greater than 96 hours. These relative functionalities (though not intended to be absolutes) may be used to compare siRNAs to a particular target for applications such as functional genomics, target identification and therapeutics.

miRNA

[0098] The term “miRNA” refers to microRNA.

Gene Silencing

[0099] The phrase “gene silencing” refers to a process by which the expression of a specific gene product is lessened or attenuated. Gene silencing can take place by a variety of pathways. Unless specified otherwise, as used herin, gene silencing refers to decreases in gene product expression that results from RNA interference (RNAi), a defined, though partially characterized pathway whereby small inhibitory RNA (siRNA) act in concert with host proteins (e.g., the RNA induced silencing complex, RISC) to degrade messenger RNA (mRNA) in a sequence-dependent fashion. The level of gene silencing can be measured by a variety of means, including, but not limited to, measurement of transcript levels by Northern Blot Analysis, B-DNA techniques, transcription-sensitive reporter constructs, expression profiling (e.g., DNA chips), and related technologies. Alternatively, the level of silencing can be measured by assessing the level of the protein encoded by a specific gene. This can be accomplished by performing a number of studies including Western Analysis, measuring the levels of expression of a reporter protein that has e.g., fluorescent properties (e.g., GFP) or enzymatic activity (e.g., alkaline phosphatases), or several other procedures.

Filters

[0100] The term “filter” refers to one or more procedures that are performed on sequences that are identified by the algorithm. In some instances, filtering includes in silico procedures where sequences identified by the algorithm can be screened to identify duplexes carrying desirable or undesirable motifs. Sequences carrying such motifs can be selected for, or selected against, to obtain a final set with the preferred properties. In other instances, filtering includes wet lab experiments. For instance, sequences identified by one or more versions of the algorithm can be screened using any one of a number of procedures to identify duplexes that have hyperfunctional traits (e.g., they exhibit a high degree of silencing at subnanomolar concentrations and/or exhibit high degrees of silencing longevity).

Transfection

[0101] The term “transfection” refers to a process by which agents are introduced into a cell. The list of agents that can be transfected is large and includes, but is not limited to, siRNA, sense and/or anti-sense sequences, DNA encoding one or more genes and organized into an expression plasmid, proteins, protein fragments, and more. There are multiple methods for transfecting agents into a cell including, but not limited to, electroporation, calcium phosphate-based transfections, DEAE-dextran-based transfections, lipid-based transfections, molecular conjugate-based transfections (e.g., polylysine-DNA conjugates), microinjection and others.

Target

[0102] The term “target” is used in a variety of different forms throughout this document and is defined by the context in which it is used. “Target mRNA” refers to a messenger RNA to which a given siRNA can be directed against. “Target sequence” and “target site” refer to a sequence within the mRNA to which the sense strand of an siRNA shows varying degrees of homology and the antisense strand exhibits varying degrees of complementarity. The phrase “siRNA target” can refer to the gene, mRNA, or protein against which an siRNA is directed. Similarly, “target silencing” can refer to the state of a gene, or the corresponding mRNA or protein.

Off-Target Silencing and Off-Target Interference

[0103] The phrases “off-target silencing” and “off-target interference” are defined as degradation of mRNA other than the intended target mRNA due to overlapping and/or partial homology with secondary mRNA messages.

SMARTscore™

[0104] The term “SMARTscore™” refers to a number determined by applying any of the Formulas I-Formula X to a given siRNA sequence. The phrases “SMART-selected” or “rationally selected” or “rational selection” refer to siRNA that have been selected on the basis of their SMARTscores™.

Complementary

[0105] The term “complementary” refers to the ability of polynucleotides to form base pairs with one another. Base pairs are typically formed by hydrogen bonds between nucleotide units in antiparallel polynucleotide strands. Complementary polynucleotide strands can base pair in the Watson-Crick manner (e.g., A to T, A to U, C to G), or in any other manner that allows for the formation of duplexes. As persons skilled in the art are aware, when using RNA as opposed to DNA, uracil rather than thymine is the base that is considered to be complementary to adenosine. However, when a U is denoted in the context of the present invention, the ability to substitute a T is implied, unless otherwise stated.

[0106] Perfect complementarity or 100% complementarity refers to the situation in which each nucleotide unit of one polynucleotide strand can hydrogen bond with a nucleotide unit of a second polynucleotide strand. Less than perfect complementarity refers to the situation in which some, but not all, nucleotide units of two strands can hydrogen bond with each other. For example, for two 20-mers, if only two base pairs on each strand can hydrogen bond with each other, the polynucleotide strands exhibit 10% complementarity. In the same example, if 18 base pairs on each strand can hydrogen bond with each other, the polynucleotide strands exhibit 90% complementarity. “Substantial complementarity” refers to polynucleotide strands exhibiting 79% or greater complementarity, excluding regions of the polynucleotide strands, such as overhangs, that are selected so as to be noncomplementary. (“Substantial similarity” refers to polynucleotide strands exhibiting 79% or greater similarity, excluding regions of the polynucleotide strands, such as overhangs, that are selected so as not to be similar.) Thus, for example, two polynucleotides of 29 nucleotide units each, wherein each comprises a di-dT at the 3′ terminus such that the duplex region spans 27 bases, and wherein 26 of the 27 bases of the duplex region on each strand are complementary, are substantially complementary since they are 96.3% complementary when excluding the di-dT overhangs.

Deoxynucleotide

[0107] The term “deoxynucleotide” refers to a nucleotide or polynucleotide lacking a hydroxyl group (OH group) at the 2′ and/or 3′ position of a sugar moiety. Instead, it has a hydrogen bonded to the 2′ and/or 3′ carbon. Within an RNA molecule that comprises one or more deoxynucleotides, “deoxynucleotide” refers to the lack of an OH group at the 2′ position of the sugar moiety, having instead a hydrogen bonded directly to the 2′ carbon.

Deoxyribonucleotide

[0108] The terms “deoxyribonucleotide” and “DNA” refer to a nucleotide or polynucleotide comprising at least one sugar moiety that has an H, rather than an OH, at its 2′ and/or 3′ position.

Substantially Similar

[0109] The phrase “substantially similar” refers to a similarity of at least 90% with respect to the identity of the bases of the sequence.

Duplex Region

[0110] The phrase “duplex region” refers to the region in two complementary or substantially complementary polynucleotides that form base pairs with one another, either by Watson-Crick base pairing or any other manner that allows for a stabilized duplex between polynucleotide strands that are complementary or substantially complementary. For example, a polynucleotide strand having 21 nucleotide units can base pair with another polynucleotide of 21 nucleotide units, yet only 19 bases on each strand are complementary or substantially complementary, such that the “duplex region” has 19 base pairs. The remaining bases may, for example, exist as 5′ and 3′ overhangs. Further, within the duplex region, 100% complementarity is not required; substantial complementarity is allowable within a duplex region. Substantial complementarity refers to 79% or greater complementarity. For example, a mismatch in a duplex region consisting of 19 base pairs results in 94.7% complementarity, rendering the duplex region substantially complementary.

Nucleotide

[0111] The term “nucleotide” refers to a ribonucleotide or a deoxyribonucleotide or modified form thereof, as well as an analog thereof. Nucleotides include species that comprise purines, e.g., adenine, hypoxanthine, guanine, and their derivatives and analogs, as well as pyrimidines, e.g., cytosine, uracil, thymine, and their derivatives and analogs.

[0112] Nucleotide analogs include nucleotides having modifications in the chemical structure of the base, sugar and/or phosphate, including, but not limited to, 5-position pyrimidine modifications, 8-position purine modifications, modifications at cytosine exocyclic amines, and substitution of 5-bromo-uracil; and 2′-position sugar modifications, including but not limited to, sugar-modified ribonucleotides in which the 2′—OH is replaced by a group such as an H, OR, R, halo, SH, SR, NH₂, NHR, NR₂, or CN, wherein R is an alkyl moiety. Nucleotide analogs are also meant to include nucleotides with bases such as inosine, queuosine, xanthine, sugars such as 2′-methyl ribose, non-natural phosphodiester linkages such as methylphosphonates, phosphorothioates and peptides.

[0113] Modified bases refer to nucleotide bases such as, for example, adenine, guanine, cytosine, thymine, uracil, xanthine, inosine, and queuosine that have been modified by the replacement or addition of one or more atoms or groups. Some examples of types of modifications that can comprise nucleotides that are modified with respect to the base moieties include but are not limited to, alkylated, halogenated, thiolated, aminated, amidated, or acetylated bases, individually or in combination. More specific examples include, for example, 5-propynyluridine, 5-propynylcytidine, 6-methyladenine, 6-methylguanine, N,N,-dimethyladenine, 2-propyladenine, 2-propylguanine, 2-aminoadenine, 1-methylinosine, 3-methyluridine, 5-methylcytidine, 5-methyluridine and other nucleotides having a modification at the 5 position, 5-(2-amino)propyl uridine, 5-halocytidine, 5-halouridine, 4-acetylcytidine, 1-methyladenosine, 2-methyladenosine, 3-methylcytidine, 6-methyluridine, 2-methylguanosine, 7-methylguanosine, 2,2-dimethylguanosine, 5-methylaminoethyluridine, 5-methyloxyuridine, deazanucleotides such as 7-deaza-adenosine, 6-azouridine, 6-azocytidine, 6-azothymidine, 5-methyl-2-thiouridine, other thio bases such as 2-thiouridine and 4-thiouridine and 2-thiocytidine, dihydrouridine, pseudouridine, queuosine, archaeosine, naphthyl and substituted naphthyl groups, any O- and N-alkylated purines and pyrimidines such as N6-methyladenosine, 5-methylcarbonylmethyluridine, uridine 5-oxyacetic acid, pyridine-4-one, pyridine-2-one, phenyl and modified phenyl groups such as aminophenol or 2,4,6-trimethoxy benzene, modified cytosines that act as G-clamp nucleotides, 8-substituted adenines and guanines, 5-substituted uracils and thymines, azapyrimidines, carboxyhydroxyalkyl nucleotides, carboxyalkylaminoalkyl nucleotides, and alkylcarbonylalkylated nucleotides. Modified nucleotides also include those nucleotides that are modified with respect to the sugar moiety, as well as nucleotides having sugars or analogs thereof that are not ribosyl. For example, the sugar moieties may be, or be based on, mannoses, arabinoses, glucopyranoses, galactopyranoses, 4′-thioribose, and other sugars, heterocycles, or carbocycles.

[0114] The term nucleotide is also meant to include what are known in the art as universal bases. By way of example, universal bases include but are not limited to 3-nitropyrrole, 5-nitroindole, or nebularine. The term “nucleotide” is also meant to include the N3′ to P5′ phosphoramidate, resulting from the substitution of a ribosyl 3′ oxygen with an amine group.

[0115] Further, the term nucleotide also includes those species that have a detectable label, such as for example a radioactive or fluorescent moiety, or mass label attached to the nucleotide.

Polynucleotide

[0116] The term “polynucleotide” refers to polymers of nucleotides, and includes but is not limited to DNA, RNA, DNA/RNA hybrids including polynucleotide chains of regularly and/or irregularly alternating deoxyribosyl moieties and ribosyl moieties (i.e., wherein alternate nucleotide units have an —OH, then and —H, then an —OH, then an —H, and so on at the 2′ position of a sugar moiety), and modifications of these kinds of polynucleotides, wherein the attachment of various entities or moieties to the nucleotide units at any position are included.

Polyribonucleotide

[0117] The term “polyribonucleotide” refers to a polynucleotide comprising two or more modified or unmodified ribonucleotides and/or their analogs. The term “polyribonucleotide” is used interchangeably with the term “oligoribonucleotide.”

Ribonucleotide and Ribonucleic Acid

[0118] The term “ribonucleotide” and the phrase “ribonucleic acid” (RNA), refer to a modified or unmodified nucleotide or polynucleotide comprising at least one ribonucleotide unit. A ribonucleotide unit comprises an hydroxyl group attached to the 2′ position of a ribosyl moiety that has a nitrogenous base attached in N-glycosidic linkage at the 1′ position of a ribosyl moiety, and a moiety that either allows for linkage to another nucleotide or precludes linkage.

### DETAILED DESCRIPTION OF THE INVENTION

[0119] The present invention is directed to improving the efficiency of gene silencing by siRNA. Through the inclusion of multiple siRNA sequences that are targeted to a particular gene and/or selecting an siRNA sequence based on certain defined criteria, improved efficiency may be achieved.

[0120] The present invention will now be described in connection with preferred embodiments. These embodiments are presented in order to aid in an understanding of the present invention and are not intended, and should not be construed, to limit the invention in any way. All alternatives, modifications and equivalents that may become apparent to those of ordinary skill upon reading this disclosure are included within the spirit and scope of the present invention.

[0121] Furthermore, this disclosure is not a primer on RNA interference. Basic concepts known to persons skilled in the art have not been set forth in detail.

[0122] The present invention is directed to increasing the efficiency of RNAi, particularly in mammalian systems. Accordingly, the present invention provides kits, siRNAs and methods for increasing siRNA efficacy.

[0123] According to a first embodiment, the present invention provides a kit for gene silencing, wherein said kit is comprised of a pool of at least two siRNA duplexes, each of which is comprised of a sequence that is complementary to a portion of the sequence of one or more target messenger RNA, and each of which is selected using non-target specific criteria. Each of the at least two siRNA duplexes of the kit complementary to a portion of the sequence of one or more target mRNAs is preferably selected using Formula X.

[0124] According to a second embodiment, the present invention provides a method for selecting an siRNA, said method comprising applying selection criteria to a set of potential siRNA that comprise 18-30 base pairs, wherein said selection criteria are non-target specific criteria, and said set comprises at least two siRNAs and each of said at least two siRNAs contains a sequence that is at least substantially complementary to a target gene; and determining the relative functionality of the at least two siRNAs.

[0125] In one embodiment, the present invention also provides a method wherein said selection criteria are embodied in a formula comprising:
(−14)*G₁₃−13*A₁−12*U₇−11*U₂−10*A₁₁−10*U₄−10*C₃−10*C₅−10*C₆−9*A₁₀−9*U₉−9*C₁₈−8*G₁₀−7*U₁−7*U₁₆−7*C₁₇−7*C₁₉+7*U₁₇+8*A₂+8*A₄+8*A₅+8*C₄+9*G₈+10*A₇+10*U₁₈+11*A₁₉+11*C₉+15*G₁+18*A₃+19*U₁₀−Tm−3* (GCₜₒₜₐₗ)−6*(GC₁₅₋₁₉)−30*X; or Formula VIII
(−8)*A1+(−1)*A2+(12)*A3+(7)*A4+(18)*A5+(12)*A6+(19)*A7+(6)*A8+(−4)*A9+(−5)*A10+(−2)*A11+(−5)*A12+(17)*A13+(−3)*A14+(4)*A15+(2)*A16+(8)*A17+(11)*A18+(30)*A19+(−13)*U1+(−10)*U2+(2)*U3+(−2)*U4+(−5)*U5+(5)*U6+(−2)*U7+(−10)*U8+(−5)*U9+(15)*U10+(−1)*U11+(0)*U12+(10)*U13+(−9)*U14+(−13)*U15+(−10)*U16+(3)*U17+(9)*U18+(9)*U19+(7)*C1+(3)*C2+(−21)*C3+(5)*C4+(−9)*C5+(−20)*C6+(−18)*C7+(−5)*C8+(5)*C9+(1)*C10+(2)*C11+(−5)*C12+(−3)*C13+(−6)*C14+(−2)*C15+(−5)*C16+(−3)*C17+(−12)*C18+(−18)*C19+(14)*G1+(8)*G2+(7)*G3+(−10)*G4+(−4)*G5+(2)*G6+(1)*G7+(9)*G8+(5)*G9+(−11)*G10+(1)*G11+(9)*G12+(−24)*G13+(18)*G14+(11)*G15+(13)*G16+(−7)*G17+(−9)*G18+(−22)*G19+6*(number of A+U in position 15-19)−3*(number of G+C in whole siRNA), Formula X
wherein position numbering begins at the 5′-most position of a sense strand, and
[0126] A₁=1 if A is the base at position 1 of the sense strand, otherwise its value is 0;
[0127] A₂=1 if A is the base at position 2 of the sense strand, otherwise its value is 0;
[0128] A₃=1 if A is the base at position 3 of the sense strand, otherwise its value is 0;
[0129] A₄=1 if A is the base at position 4 of the sense strand, otherwise its value is 0;
[0130] A₅=1 if A is the base at position 5 of the sense strand, otherwise its value is 0;
[0131] A₆=1 if A is the base at position 6 of the sense strand, otherwise its value is 0;
[0132] A₇=1 if A is the base at position 7 of the sense strand, otherwise its value is 0;
[0133] A₁₀=1 if A is the base at position 10 of the sense strand, otherwise its value is 0;
[0134] A₁₁=1 if A is the base at position 11 of the sense strand, otherwise its value is 0;
[0135] A₁₃=1 if A is the base at position 13 of the sense strand, otherwise its value is 0;
[0136] A₁₉=1 if A is the base at position 19 of the sense strand, otherwise if another base is present or the sense strand is only 18 base pairs in length, its value is 0;
[0137] C₃=1 if C is the base at position 3 of the sense strand, otherwise its value is 0;
[0138] C₄=1 if C is the base at position 4 of the sense strand, otherwise its value is 0;
[0139] C₅=1 if C is the base at position 5 of the sense strand, otherwise its value is 0;
[0140] C₆=1 if C is the base at position 6 of the sense strand, otherwise its value is 0;
[0141] C₇=1 if C is the base at position 7 of the sense strand, otherwise its value is 0;
[0142] C₉=1 if C is the base at position 9 of the sense strand, otherwise its value is 0;
[0143] C₁₇=1 if C is the base at position 17 of the sense strand, otherwise its value is 0;
[0144] C₁₈=1 if C is the base at position 18 of the sense strand, otherwise its value is 0;
[0145] C₁₉=1 if C is the base at position 19 of the sense strand, otherwise if another base is present or the sense strand is only 18 base pairs in length, its value is 0;
[0146] G₁=1 if G is the base at position 1 on the sense strand, otherwise its value is 0;
[0147] G₂=1 if G is the base at position 2 of the sense strand, otherwise its value is 0;
[0148] G₈=1 if G is the base at position 8 on the sense strand, otherwise its value is 0;
[0149] G₁₀=1 if G is the base at position 10 on the sense strand, otherwise its value is 0;
[0150] G₁₃=1 if G is the base at position 13 on the sense strand, otherwise its value is 0;
[0151] G₁₉=1 if G is the base at position 19 of the sense strand, otherwise if another base is present or the sense strand is only 18 base pairs in length, its value is 0;
[0152] U₁=1 if U is the base at position 1 on the sense strand, otherwise its value is 0;
[0153] U₂=1 if U is the base at position 2 on the sense strand, otherwise its value is 0;
[0154] U₃=1 if U is the base at position 3 on the sense strand, otherwise its value is 0;
[0155] U₄=1 if U is the base at position 4 on the sense strand, otherwise its value is 0;
[0156] U₇=1 if U is the base at position 7 on the sense strand, otherwise its value is 0;
[0157] U₉=1 if U is the base at position 9 on the sense strand, otherwise its value is 0;
[0158] U ₁₀=1 if U is the base at position 10 on the sense strand, otherwise its value is 0;
[0159] U₁₅=1 if U is the base at position 15 on the sense strand, otherwise its value is 0;
[0160] U₁₆=1 if U is the base at position 16 on the sense strand, otherwise its value is 0;
[0161] U₁₇=1 if U is the base at position 17 on the sense strand, otherwise its value is 0;
[0162] U₁₈=1 if U is the base at position 18 on the sense strand, otherwise its value is 0.
[0163] GC₁₅₋₁₉=the number of G and C bases within positions 15-19 of the sense strand, or within positions 15-18 if the sense strand is only 18 base pairs in length;
[0164] GCₜₒₜₐₗ=the number of G and C bases in the sense strand;
[0165] Tm=100 if the siRNA oligo has the internal repeat longer then 4 base pairs, otherwise its value is 0; and
[0166] X=the number of times that the same nucleotide repeats four or more times in a row.

[0167] Any of the methods of selecting siRNA in accordance with the invention can further comprise comparing the internal stability profiles of the siRNAs to be selected, and selecting those siRNAs with the most favorable internal stability profiles. Any of the methods of selecting siRNA can further comprise selecting either for or against sequences that contain motifs that induce cellular stress. Such motifs include, for example, toxicity motifs. Any of the methods of selecting siRNA can further comprise either selecting for or selecting against sequences that comprise stability motifs.

[0168] In another embodiment, the present invention provides a method of gene silencing, comprising introducing into a cell at least one siRNA selected according to any of the methods of the present invention. The siRNA can be introduced by allowing passive uptake of siRNA, or through the use of a vector.

[0169] According to a third embodiment, the invention provides a method for developing an algorithm for selecting siRNA, said method comprising: (a) selecting a set of siRNA; (b) measuring gene silencing ability of each siRNA from said set; (c) determining relative functionality of each siRNA; (d) determining improved functionality by the presence or absence of at least one variable selected from the group consisting of the presence or absence of a particular nucleotide at a particular position, the total number of As and Us in positions 15-19, the number of times that the same nucleotide repeats within a given sequence, and the total number of Gs and Cs; and (e) developing an algorithm using the information of step (d).

[0170] In another embodiment, the invention provides a method for selecting an siRNA with improved functionality, comprising using the above-mentioned algorithm to identify an siRNA of improved functionality.

[0171] According to a fourth embodiment, the present invention provides a kit, wherein said kit is comprised of at least two siRNAs, wherein said at least two siRNAs comprise a first optimized siRNA and a second optimized siRNA, wherein said first optimized siRNA and said second optimized siRNA are optimized according a formula comprising Formula X.

[0172] According to a fifth embodiment, the present invention provides a method for identifying a hyperfunctional siRNA, comprising applying selection criteria to a set of potential siRNA that comprise 18-30 base pairs, wherein said selection criteria are non-target specific criteria, and said set comprises at least two siRNAs and each of said at least two siRNAs contains a sequence that is at least substantially complementary to a target gene; determining the relative functionality of the at least two siRNAs and assigning each of the at least two siRNAs a functionality score; and selecting siRNAs from the at least two siRNAs that have a functionality score that reflects greater than 80 percent silencing at a concentration in the picomolar range, wherein said greater than 80 percent silencing endures for greater than 120 hours.

[0173] In other embodiments, the invention provides kits and/or methods wherein the siRNA are comprised of two separate polynucleotide strands; wherein the siRNA are comprised of a single contiguous molecule such as, for example, a unimolecular siRNA (comprising, for example, either a nucleotide or non-nucleotide loop); wherein the siRNA are expressed from one or more vectors; and wherein two or more genes are silenced by a single administration of siRNA.

[0174] According to a sixth embodiment, the present invention provides a hyperfunctional siRNA that is capable of silencing Bc12.

[0175] According to a seventh embodiment, the present invention provides a method for developing an siRNA algorithm for selecting functional and hyperfunctional siRNAs for a given sequence. The method comprises:
[0176] (a) selecting a set of siRNAs;
[0177] (b) measuring the gene silencing ability of each siRNA from said set;
[0178] (c) determining the relative functionality of each siRNA;
[0179] (d) determining the amount of improved functionality by the presence or absence of at least one variable selected from the group consisting of the total GC content, melting temperature of the siRNA, GC content at positions 15-19, the presence or absence of a particular nucleotide at a particular position, relative thermodynamic stability at particular positions in a duplex, and the number of times that the same nucleotide repeats within a given sequence; and
[0180] (e) developing an algorithm using the information of step (d).
   According to this embodiment, preferably the set of siRNAs comprises at least 90 siRNAs from at least one gene, more preferably at least 180 siRNAs from at least two different genes, and most preferably at least 270 and 360 siRNAs from at least three and four different genes, respectively. Additionally, in step (d) the determination is made with preferably at least two, more preferably at least three, even more preferably at least four, and most preferably all of the variables. The resulting algorithm is not target sequence specific.

[0181] In another embodiment, the present invention provides rationally designed siRNAs identified using the formulas above.

[0182] In yet another embodiment, the present invention is directed to hyperfunctional siRNA.

[0183] The ability to use the above algorithms, which are not sequence or species specific, allows for the cost-effective selection of optimized siRNAs for specific target sequences. Accordingly, there will be both greater efficiency and reliability in the use of siRNA technologies.

[0184] The methods disclosed herein can be used in conjunction with comparing internal stability profiles of selected siRNAs, and designing an siRNA with a desireable internal stability profile; and/or in conjunction with a selection either for or against sequences that contain motifs that induce cellular stress, for example, cellular toxicity.

[0185] Any of the methods disclosed herein can be used to silence one or more genes by introducing an siRNA selected, or designed, in accordance with any of the methods disclosed herein. The siRNA(s) can be introduced into the cell by any method known in the art, including passive uptake or through the use of one or more vectors.

[0186] Any of the methods and kits disclosed herein can employ either unimolecular siRNAs, siRNAs comprised of two separate polynucleotide strands, or combinations thereof. Any of the methods disclosed herein can be used in gene silencing, where two or more genes are silenced by a single administration of siRNA(s). The siRNA(s) can be directed against two or more target genes, and administered in a single dose or single transfection, as the case may be.

Optimizing siRNA

[0187] According to one embodiment, the present invention provides a method for improving the effectiveness of gene silencing for use to silence a particular gene through the selection of an optimal siRNA. An siRNA selected according to this method may be used individually, or in conjunction with the first embodiment, i.e., with one or more other siRNAs, each of which may or may not be selected by this criteria in order to maximize their efficiency.

[0188] The degree to which it is possible to select an siRNA for a given mRNA that maximizes these criteria will depend on the sequence of the mRNA itself. However, the selection criteria will be independent of the target sequence. According to this method, an siRNA is selected for a given gene by using a rational design. That said, rational design can be described in a variety of ways. Rational design is, in simplest terms, the application of a proven set of criteria that enhance the probability of identifying a functional or hyperfunctional siRNA. In one method, rationally designed siRNA can be identified by maximizing one or more of the following criteria:
[0189] 1. A low GC content, preferably between about 30-52%.
[0190] 2. At least 2, preferably at least 3 A or U bases at positions 15-19 of the siRNA on the sense strand.
[0191] 3. An A base at position 19 of the sense strand.
[0192] 4. An A base at position 3 of the sense strand.
[0193] 5. A U base at position 10 of the sense strand.
[0194] 6. An A base at position 14 of the sense strand.
[0195] 7. A base other than C at position 19 of the sense strand.
[0196] 8. A base other than G at position 13 of the sense strand.
[0197] 9. A Tm, which refers to the character of the internal repeat that results in inter- or intramolecular structures for one strand of the duplex, that is preferably not stable at greater than 50° C., more preferably not stable at greater than 37° C., even more preferably not stable at greater than 30° C. and most preferably not stable at greater than 20° C.
[0198] 10. A base other than U at position 5 of the sense strand.
[0199] 11. A base other than A at position 11 of the sense strand.
[0200] 12. A base other than an A at position 1 of the sense strand.
[0201] 13. A base other than an A at position 2 of the sense strand.
[0202] 14. An A base at position 4 of the sense strand.
[0203] 15. An A base at position 5 of the sense strand.
[0204] 16. An A base at position 6 of the sense strand.
[0205] 17. An A base at position 7 of the sense strand.
[0206] 18. An A base at position 8 of the sense strand.
[0207] 19. A base other than an A at position 9 of the sense strand.
[0208] 20. A base other than an A at position 10 of the sense strand.
[0209] 21. A base other than an A at position 11 of the sense strand.
[0210] 22. A base other than an A at position 12 of the sense strand.
[0211] 23. An A base at position 13 of the sense strand.
[0212] 24. A base other than an A at position 14 of the sense strand.
[0213] 25. An A base at position 15 of the sense strand
[0214] 26. An A base at position 16 of the sense strand.
[0215] 27. An A base at position 17 of the sense strand.
[0216] 28. An A base at position 18 of the sense strand.
[0217] 29. A base other than a U at position 1 of the sense strand.
[0218] 30. A base other than a U at position 2 of the sense strand.
[0219] 31. A U base at position 3 of the sense strand.
[0220] 32. A base other than a U at position 4 of the sense strand.
[0221] 33. A base other than a U at position 5 of the sense strand.
[0222] 34. A U base at position 6 of the sense strand.
[0223] 35. A base other than a U at position 7 of the sense strand.
[0224] 36. A base other than a U at position 8 of the sense strand.
[0225] 37. A base other than a U at position 9 of the sense strand.
[0226] 38. A base other than a U at position 11 of the sense strand.
[0227] 39. A U base at position 13 of the sense strand.
[0228] 40. A base other than a U at position 14 of the sense strand.
[0229] 41. A base other than a U at position 15 of the sense strand.
[0230] 42. A base other than a U at position 16 of the sense strand.
[0231] 43. A U base at position 17 of the sense strand.
[0232] 44. A U base at position 18 of the sense strand.
[0233] 45. A U base at position 19 of the sense strand.
[0234] 46. A C base at position 1 of the sense strand.
[0235] 47. A C base at position 2 of the sense strand.
[0236] 48. A base other than a C at position 3 of the sense strand.
[0237] 49. A C base at position 4 of the sense strand.
[0238] 50. A base other than a C at position 5 of the sense strand.
[0239] 51. A base other than a C at position 6 of the sense strand.
[0240] 52. A base other than a C at position 7 of the sense strand.
[0241] 53. A base other than a C at position 8 of the sense strand.
[0242] 54. A C base at position 9 of the sense strand.
[0243] 55. A C base at position 10 of the sense strand.
[0244] 56. A C base at position 11 of the sense strand.
[0245] 57. A base other than a C at position 12 of the sense strand.
[0246] 58. A base other than a C at position 13 of the sense strand.
[0247] 59. A base other than a C at position 14 of the sense strand.
[0248] 60. A base other than a C at position 15 of the sense strand.
[0249] 61. A base other than a C at position 16 of the sense strand.
[0250] 62. A base other than a C at position 17 of the sense strand.
[0251] 63. A base other than a C at position 18 of the sense strand.
[0252] 64. A G base at position 1 of the sense strand.
[0253] 65. A G base at position 2 of the sense strand.
[0254] 66. A G base at position 3 of the sense strand.
[0255] 67. A base other than a G at position 4 of the sense strand.
[0256] 68. A base other than a G at position 5 of the sense strand.
[0257] 69. A G base at position 6 of the sense strand.
[0258] 70. A G base at position 7 of the sense strand.
[0259] 71. A G base at position 8 of the sense strand.
[0260] 72. A G base at position 9 of the sense strand.
[0261] 73. A base other than a G at position 10 of the sense strand.
[0262] 74. A G base at position 11 of the sense strand.
[0263] 75. A G base at position 12 of the sense strand.
[0264] 76. A G base at position 14 of the sense strand.
[0265] 77. A G base at position 15 of the sense strand.
[0266] 78. A G base at position 16 of the sense strand.
[0267] 79. A base other than a G at position 17 of the sense strand.
[0268] 80. A base other than a G at position 18 of the sense strand.
[0269] 81. A base other than a G at position 19 of the sense strand.

[0270] The importance of various criteria can vary greatly. For instance, a C base at position 10 of the sense strand makes a minor contribution to duplex functionality. In contrast, the absence of a C at position 3 of the sense strand is very important. Accordingly, preferably an siRNA will satisfy as many of the aforementioned criteria as possible.

[0271] With respect to the criteria, GC content, as well as a high number of AU in positions 15-19 of the sense strand, may be important for easement of the unwinding of double stranded siRNA duplex. Duplex unwinding has been shown to be crucial for siRNA functionality in vivo.

[0272] With respect to criterion 9, the internal structure is measured in terms of the melting temperature of the single strand of siRNA, which is the temperature at which 50% of the molecules will become denatured. With respect to criteria 2-8 and 10-11, the positions refer to sequence positions on the sense strand, which is the strand that is identical to the mRNA.

[0273] In one preferred embodiment, at least criteria 1 and 8 are satisfied. In another preferred embodiment, at least criteria 7 and 8 are satisfied. In still another preferred embodiment, at least criteria 1, 8 and 9 are satisfied.

[0274] It should be noted that all of the aforementioned criteria regarding sequence position specifics are with respect to the 5′ end of the sense strand. Reference is made to the sense strand, because most databases contain information that describes the information of the mRNA. Because according to the present invention a chain can be from 18 to 30 bases in length, and the aforementioned criteria assumes a chain 19 base pairs in length, it is important to keep the aforementioned criteria applicable to the correct bases.

[0275] When there are only 18 bases, the base pair that is not present is the base pair that is located at the 3′ of the sense strand. When there are twenty to thirty bases present, then additional bases are added at the 5′ end of the sense chain and occupy positions ⁻1 to ⁻11. Accordingly, with respect to SEQ. ID NO. 0001 NNANANNNNUCNAANNNNA and SEQ. ID NO. 0028 GUCNNANANNNNUCNAANNNNA, both would have A at position 3, A at position 5, U at position 10, C at position 11, A and position 13, A and position 14 and A at position 19. However, SEQ. ID NO. 0028 would also have C at position −1, U at position −2 and G at position −3.

[0276] For a 19 base pair siRNA, an optimal sequence of one of the strands may be represented below, where N is any base, A, C, G, or U:

| | |
|---|---|
| NNANANNNNUCNAANNNNA. | SEQ. ID NO. 0001 |
| NNANANNNNUGNAANNNNA. | SEQ. ID NO. 0001 |
| NNANANNNNUUNAANNNNA. | SEQ. ID NO. 0002 |
| NNANANNNNUCNCANNNNA. | SEQ. ID NO. 0003 |
| NNANANNNNUGNCANNNNA. | SEQ. ID NO. 0004 |
| NNANANNNNUUNCANNNNA. | SEQ. ID NO. 0005 |
| NNANANNNNUCNUANNNNA. | SEQ. ID NO. 0006 |
| NNANANNNNUGNUANNNNA. | SEQ. ID NO. 0007 |
| NNANANNNNUUNUANNNNA. | SEQ. ID NO. 0008 |
| NNANCNNNNUCNAANNNNA. | SEQ. ID NO. 0010 |
| NNANCNNNNUGNAANNNNA. | SEQ. ID NO. 0011 |
| NNANCNNNNUUNAANNNNA. | SEQ. ID NO. 0012 |
| NNANCNNNNUCNCANNNNA. | SEQ. ID NO. 0013 |
| NNANCNNNNUGNCANNNNA. | SEQ. ID NO. 0014 |
| NNANCNNNNUUNCANNNNA. | SEQ. ID NO. 0015 |
| NANCNNNNUCNUANNNNA. | SEQ. ID NO. 0016 |
| NNANCNNNNUGNUANNNNA. | SEQ. ID NO. 0017 |
| NNANCNNNNUUNUANNNNA. | SEQ. ID NO. 0018 |
| NNANGNNNNUCNAANNNNA. | SEQ. ID NO. 0019 |
| NNANGNNNNUGNAANNNNA. | SEQ. ID NO. 0020 |
| NNANGNNNNUUNAANNNNA. | SEQ. ID NO. 0021 |
| NNANGNNNNUCNCANNNNA. | SEQ. ID NO. 0022 |
| NNANGNNNNUGNCANNNNA. | SEQ. ID NO. 0023 |
| NNANGNNNNUUNCANNNNA. | SEQ. ID NO. 0024 |
| NNANGNNNNUCNUANNNNA. | SEQ. ID NO. 0025 |
| NNANGNNNNUGNUANNNNA. | SEQ. ID NO. 0026 |
| NNANGNNNNNUNUANNNNA. | SEQ. ID NO. 0027 |

[0277] In one embodiment, the sequence used as an siRNA is selected by choosing the siRNA that score highest according to one of the following seven algorithms that are represented by Formulas I-VII:
Relative functionality of siRNA=−(GC/3)+(AU₁₅₋₁₉)−Tm_{20°C.})*3−(G₁₃)*3)−(C₁₉) Formula I
Relative functionality of siRNA=−(GC/3)−(AU₁₅₋₁₉)*3−(G₁₃)*3−(C₁₉)+(A₁₉)*2+(A₃) Formula II
Relative functionality of siRNA=−(GC/3)+(AU₁₅₋₁₉)−(Tm_{20°C.})*3 Formula III
Relative functionality of siRNA=GC/2+(AU₁₅₋₁₉)/2−(Tm_{20°C.})*2−(G₁₃)*3−(C₁₉)+(A₁₉)*2+(A₃)+(U₁₀)+(A₁₄)−(U₅)−(A₁₁) Formula IV
Relative functionality of siRNA=−(G₁₃)*3−(C₁₉)+(A₁₉)*2+(A₃)+(U₁₀)+(A₁₄)−(U₅)−(A₁₁) Formula V
Relative functionality of siRNA=−(G₁₃)*3−(C₁₉)+(A₁₉)*2+(A₃) Formula VI
Relative functionality of siRNA=−(GC/2)+(AU₁₅₋₁₉)/2−(Tm_{20°C.})*1−(G₁₃)*3−(C₁₉)+(A₁₉)*3+(A₃)*3+(U₁₀)/2+(A₁₄)/2−(U₅)/2−(A₁₁)/2 Formula VII
In Formulas I-VII:
[0278] wherein A₁₉=1 if A is the base at position 19 on the sense strand, otherwise its value is 0,
   [0279] AU₁₅₋₁₉=0-5 depending on the number of A or U bases on the sense strand at positions 15-19;
   [0280] G₁₃=1 if G is the base at position 13 on the sense strand, otherwise its value is 0;
   [0281] C₁₉=1 if C is the base at position 19 of the sense strand, otherwise its value is 0;
   [0282] GC=the number of G and C bases in the entire sense strand;
   [0283] Tm_{20° C.}=1 if the Tm is greater than 20° C.;
   [0284] A₃=1 if A is the base at position 3 on the sense strand, otherwise its value is 0;
   [0285] U₁₀=1 if U is the base at position 10 on the sense strand, otherwise its value is 0;
   [0286] A₁₄=1 if A is the base at position 14 on the sense strand, otherwise its value is 0;
   [0287] U₅=1 if U is the base at position 5 on the sense strand, otherwise its value is 0; and
   [0288] A₁₁=1 if A is the base at position 11 of the sense strand, otherwise its value is 0.

[0289] Formulas I-VII provide relative information regarding functionality. When the values for two sequences are compared for a given formula, the relative functionality is ascertained; a higher positive number indicates a greater functionality. For example, in many applications a value of 5 or greater is beneficial.

[0290] Additionally, in many applications, more than one of these formulas would provide useful information as to the relative functionality of potential siRNA sequences. However, it is beneficial to have more than one type of formula, because not every formula will be able to help to differentiate among potential siRNA sequences. For example, in particularly high GC mRNAs, formulas that take that parameter into account would not be useful and application of formulas that lack GC elements (e.g., formulas V and VI) might provide greater insights into duplex functionality. Similarly, formula II might by used in situations where hairpin structures are not observed in duplexes, and formula IV might be applicable for sequences that have higher AU content. Thus, one may consider a particular sequence in light of more than one or even all of these algorithms to obtain the best differentiation among sequences. In some instances, application of a given algorithim may identify an unususally large number of potential siRNA sequences, and in those cases, it may be appropriate to re-analyze that sequence with a second algorithm that is, for instance, more stringent. Alternatively, it is conceivable that analysis of a sequence with a given formula yields no acceptable siRNA sequences (i.e., low SMARTscores™). In this instance, it may be appropriate to re-analyze that sequences with a second algorithm that is, for instance, less stringent. In still other instances, analysis of a single sequence with two separate formulas may give rise to conflicting results (i.e., one formula generates a set of siRNA with high SMARTscores™ while the other formula identifies a set of siRNA with low SMARTscores™). In these instances, it may be necessary to determine which weighted factor(s) (e.g., GC content) are contributing to the discrepancy and assessing the sequence to decide whether these factors should or should not be included. Alternatively, the sequence could be analyzed by a third, fourth, or fifth algorithm to identify a set of rationally designed siRNA.

[0291] The above-referenced criteria are particularly advantageous when used in combination with pooling techniques as depicted in Table I:

TABLE I

Functional Probability

| | Oligos | | | Pools | | |
|---|---|---|---|---|---|---|
| Criteria | >95% | >80% | <70% | >95% | >80% | <70% |
| Current | 33.0 | 50.0 | 23.0 | 79.5 | 97.3 | 0.3 |
| New | 50.0 | 88.5 | 8.0 | 93.8 | 99.98 | 0.005 |
| (GC) | 28.0 | 58.9 | 36.0 | 72.8 | 97.1 | 1.6 |

The term “current” used in Table I refers to Tuschl's conventional siRNA parameters (Elbashir, S. M. et al. (2002) “Analysis of gene function in somatic mammalian cells using small interfering RNAs” Methods 26: 199-213). “New” refers to the design parameters described in Formulas I-VII. “GC” refers to criteria that select siRNA solely on the basis of GC content.

[0292] As Table I indicates, when more functional siRNA duplexes are chosen, siRNAs that produce <70% silencing drops from 23% to 8% and the number of siRNA duplexes that produce >80% silencing rises from 50% to 88.5%. Further, of the siRNA duplexes with >80% silencing, a larger portion of these siRNAs actually silence >95% of the target expression (the new criteria increases the portion from 33% to 50%). Using this new criteria in pooled siRNAs, shows that, with pooling, the amount of silencing >95% increases from 79.5% to 93.8% and essentially eliminates any siRNA pool from silencing less than 70%.

[0293] Table II similarly shows the particularly beneficial results of pooling in combination with the aforementioned criteria. However, Table II, which takes into account each of the aforementioned variables, demonstrates even a greater degree of improvement in functionality.

TABLE II
Functional Probability

| | Oligos | | | Pools | | |
|---|---|---|---|---|---|---|
| | Func- | | Non- | Func- | | Non- |
| | tional | Average | functional | tional | Average | functional |
| Random | 20 | 40 | 50 | 67 | 97 | 3 |
| Criteria 1 | 52 | 99 | 0.1 | 97 | 93 | 0.0040 |
| Criteria 4 | 89 | 99 | 0.1 | 99 | 99 | 0.0000 |

The terms “functional,” “Average,” and “Non-functional” used in Table II, refer to siRNA that exhibit >80%, >50%, and <50% functionality, respectively. Criteria 1 and 4 refer to specific criteria described above.

[0294] The above-described algorithms may be used with or without a computer program that allows for the inputting of the sequence of the mRNA and automatically outputs the optimal siRNA. The computer program may, for example, be accessible from a local terminal or personal computer, over an internal network or over the Internet.

[0295] In addition to the formulas above, more detailed algorithms may be used for selecting siRNA. Preferably, at least one RNA duplex of 18-30 base pairs is selected such that it is optimized according a formula selected from:
(−14)*G₁₃−13*A₁−12*U₇−11*U₂−10*A₁₁−10*U₄−10*C₃−10*C₅−10*C₆−9*A₁₀−9*U₉−9*C₁₈−8*G₁₀−7*U₁−7*U₁₆−7*C₁₇−7*C₁₉+7*U₁₇+8*A₂+8*A₄+8*A₅+8*C₄+9*G₈+10*A₇+10*U₁₈+11*A₁₉+11*C₉+15*G₁+18*A₃+19*U₁₀−Tm−3* (GCₜₒₜₐₗ)−6*(GC₁₅₋₁₉)−30*X; and Formula VIII
(14.1)*A₃+(14.9)*A₆+(17.6)*A₁₃+(24.7)*A₁₉+(14.2)*U₁₀+((10.5)* C₉+(23.9)*G₁+(16.3)*G₂+(−12.3)*A₁₁+(−19.3)*U₁+(−12.1)*U₂+(−11)*U₃+(−15.2)*U₁₅+(−11.3)*U₁₆+(−11.8)*C₃+(−17.4)*C₆+(−10.5)*C₇+(−13.7)*G₁₃+(−25.9)*G₁₉−Tm−3*(GCₜₒₜₐₗ)−6*(GC₁₅₋₁₉)−30*X; and Formula IX
(−8)*A1+(−1)*A2+(12)*A3+(7)*A4+(18)*A5+(12)*A6+(19)*A7+(6)*A8+(−4)*A9+(−5)*A10+(−2)*A11+(−5)*A12+(17)*A13+(−3)*A14+(4)*A15+(2)*A16+(8)*A17+(11)*A18+(30)*A19+(−13)*U1+(−10)*U2+(2)*U3+(−2)*U4+(−5)*U5+(5)*U6+(−2)*U7+(−10)*U8+(−5)*U9+(15)*U10+(−1)*U11+(0)*U12+(10)*U13+(−9)*U14+(−13)*U15+(−10)*U16+(3)*U17+(9)*U18+(9)*U19+(7)*C1+(3)*C2+(−21)*C3+(5)*C4+(−9)*C5+(−20)*C6+(−18)*C7+(−5)*C8+(5)*C9+(1)*C10+(2)*C11+(−5)*C12+(−3)*C13+(−6)*C14+(−2)*C15+(−5)*C16+(−3)*C17+(−12)*C18+(−18)*C19+(14)*G1+(8)*G2+(7)*G3+(−10)*G4+(−4)*G5+(2)*G6+(1)*G7+(9)*G8+(5)*G9+(−11)*G10+(1)*G11+(9)*G12+(−24)*G13+(18)*G14+(11)*G15+(13)*G16+(−7)*G17+(−9)*G18+(−22)*G19+6*(number of A+U in position 15-19)−3*(number of G+C in whole siRNA), Formula X
wherein
[0296] A₁=1 if A is the base at position 1 of the sense strand, otherwise its value is 0;
[0297] A₂=1 if A is the base at position 2 of the sense strand, otherwise its value is 0;
[0298] A₃=1 if A is the base at position 3 of the sense strand, otherwise its value is 0;
[0299] A₄=1 if A is the base at position 4 of the sense strand, otherwise its value is 0;
[0300] A₅=1 if A is the base at position 5 of the sense strand, otherwise its value is 0;
[0301] A₆=1 if A is the base at position 6 of the sense strand, otherwise its value is 0;
[0302] A₇=1 if A is the base at position 7 of the sense strand, otherwise its value is 0;
[0303] A₁₀=1 if A is the base at position 10 of the sense strand, otherwise its value is 0;
[0304] A₁₁=1 if A is the base at position 11 of the sense strand, otherwise its value is 0;
[0305] A₁₃=1 if A is the base at position 13 of the sense strand, otherwise its value is 0;
[0306] A₁₉=1 if A is the base at position 19 of the sense strand, otherwise if another base is present or the sense strand is only 18 base pairs in length, its value is 0;
[0307] C₃=1 if C is the base at position 3 of the sense strand, otherwise its value is 0;
[0308] C₄=1 if C is the base at position 4 of the sense strand, otherwise its value is 0;
[0309] C₅=1 if C is the base at position 5 of the sense strand, otherwise its value is 0;
[0310] C₆=1 if C is the base at position 6 of the sense strand, otherwise its value is 0;
[0311] C₇=1 if C is the base at position 7 of the sense strand, otherwise its value is 0;
[0312] C₉=1 if C is the base at position 9 of the sense strand, otherwise its value is 0;
[0313] C₁₇=1 if C is the base at position 17 of the sense strand, otherwise its value is 0;
[0314] C₁₈=1 if C is the base at position 18 of the sense strand, otherwise its value is 0;
[0315] C₁₉=1 if C is the base at position 19 of the sense strand, otherwise if another base is present or the sense strand is only 18 base pairs in length, its value is 0;
[0316] G₁=1 if G is the base at position 1 on the sense strand, otherwise its value is 0;
[0317] G₂=1 if G is the base at position 2 of the sense strand, otherwise its value is 0;
[0318] G₈=1 if G is the base at position 8 on the sense strand, otherwise its value is 0;
[0319] G₁₀=1 if G is the base at position 10 on the sense strand, otherwise its value is 0;
[0320] G₁₃=1 if G is the base at position 13 on the sense strand, otherwise its value is 0;
[0321] G₁₉=1 if G is the base at position 19 of the sense strand, otherwise if another base is present or the sense strand is only 18 base pairs in length, its value is 0;
[0322] U₁=1 if U is the base at position 1 on the sense strand, otherwise its value is 0;
[0323] U₂=1 if U is the base at position 2 on the sense strand, otherwise its value is 0;
[0324] U₃=1 if U is the base at position 3 on the sense strand, otherwise its value is 0;
[0325] U₄=1 if U is the base at position 4 on the sense strand, otherwise its value is 0;
[0326] U₇=1 if U is the base at position 7 on the sense strand, otherwise its value is 0;
[0327] U₉=1 if U is the base at position 9 on the sense strand, otherwise its value is 0;
[0328] U₁₀=1 if U is the base at position 10 on the sense strand, otherwise its value is 0;
[0329] U₁₅=1 if U is the base at position 15 on the sense strand, otherwise its value is 0;
[0330] U₁₆=1 if U is the base at position 16 on the sense strand, otherwise its value is 0;
[0331] U₁₇=1 if U is the base at position 17 on the sense strand, otherwise its value is 0;
[0332] U₁₈=1 if U is the base at position 18 on the sense strand, otherwise its value is 0;
[0333] GC₁₅₋₁₉=the number of G and C bases within positions 15-19 of the sense strand, or within positions 15-18 if the sense strand is only 18 base pairs in length;
[0334] GCₜₒₜₐₗ=the number of G and C bases in the sense strand;
[0335] Tm=100 if the siRNA oligo has the internal repeat longer then 4 base pairs, otherwise its value is 0; and
[0336] X=the number of times that the same nucleotide repeats four or more times in a row.

[0337] The above formulas VIII, IX, and X, as well as formulas I-VII, provide methods for selecting siRNA in order to increase the efficiency of gene silencing. A subset of variables of any of the formulas may be used, though when fewer variables are used, the optimization hierarchy becomes less reliable.

[0338] With respect to the variables of the above-referenced formulas, a single letter of A or C or G or U followed by a subscript refers to a binary condition. The binary condition is that either the particular base is present at that particular position (wherein the value is “1”) or the base is not present (wherein the value is “0”). Because position 19 is optional, i.e., there might be only 18 base pairs, when there are only 18 base pairs, any base with a subscript of 19 in the formulas above would have a zero value for that parameter. Before or after each variable is a number followed by *, which indicates that the value of the variable is to be multiplied or weighed by that number.

[0339] The numbers preceding the variables A, or G, or C, or U in Formulas VIII, IX, and X (or after the variables in Formula I-VII) were determined by comparing the difference in the frequency of individual bases at different positions in functional siRNA and total siRNA. Specifically, the frequency in which a given base was observed at a particular position in functional groups was compared with the frequency that that same base was observed in the total, randomly selected siRNA set. If the absolute value of the difference between the functional and total values was found to be greater than 6%, that parameter was included in the equation. Thus, for instance, if the frequency of finding a “G” at position 13 (G13) is found to be 6% in a given functional group, and the frequency of G₁₃ in the total population of siRNAs is 20%, the difference between the two values is 6%-20%=−14%. As the absolute value is greater than six (6), this factor (−14) is included in the equation. Thus, in Formula VIII, in cases where the siRNA under study has a G in position 13, the accrued value is (−14)*(1)=−14. In contrast, when a base other than G is found at position 13, the accrued value is (−14)*(0)=0.

[0340] When developing a means to optimize siRNAs, the inventors observed that a bias toward low internal thermodynamic stability of the duplex at the 5′-antisense (AS) end is characteristic of naturally occurring miRNA precursors. The inventors extended this observation to siRNAs for which functionality had been assessed in tissue culture.

[0341] With respect to the parameter GC₁₅₋₁₉, a value of 0-5 will be ascribed depending on the number of G or C bases at positions 15 to 19. If there are only 18 base pairs, the value is between 0 and 4.

[0342] With respect to the criterion GCₜₒₜₐₗ content, a number from 0-30 will be ascribed, which correlates to the total number of G and C nucleotides on the sense strand, excluding overhangs. Without wishing to be bound by any one theory, it is postulated that the significance of the GC content (as well as AU content at positions 15-19, which is a parameter for formulas III-VII) relates to the easement of the unwinding of a double-stranded siRNA duplex. Duplex unwinding is believed to be crucial for siRNA functionality in vivo and overall low internal stability, especially low internal stability of the first unwound base pair is believed to be important to maintain sufficient processivity of RISC complex-induced duplex unwinding. If the duplex has 19 base pairs, those at positions 15-19 on the sense strand will unwind first if the molecule exhibits a sufficiently low internal stability at that position. As persons skilled in the art are aware, RISC is a complex of approximately twelve proteins; Dicer is one, but not the only, helicase within this complex. Accordingly, although the GC parameters are believed to relate to activity with Dicer, they are also important for activity with other RISC proteins.

[0343] The value of the parameter Tm is 0 when there are no internal repeats longer than (or equal to) four base pairs present in the siRNA duplex; otherwise the value is 1. Thus for example, if the sequence ACGUACGU, or any other four nucleotide (or more) palindrome exists within the structure, the value will be one (1). Alternatively if the structure ACGGACG, or any other 3 nucleotide (or less) palindrome exists, the value will be zero (0).

[0344] The variable “X” refers to the number of times that the same nucleotide occurs contiguously in a stretch of four or more units. If there are, for example, four contiguous As in one part of the sequence and elsewhere in the sequence four contiguous Cs, X=2. Further, if there are two separate contiguous stretches of four of the same nucleotides or eight or more of the same nucleotides in a row, then X=2. However, X does not increase for five, six or seven contiguous nucleotides.

[0345] Again, when applying Formula VIII, Formula IX, or Formula X, to a given mRNA, (the “target RNA” or “target molecule”), one may use a computer program to evaluate the criteria for every sequence of 18-30 base pairs or only sequences of a fixed length, e.g., 19 base pairs. Preferably the computer program is designed such that it provides a report ranking of all of the potential siRNAs 18-30 base pairs, ranked according to which sequences generate the highest value. A higher value refers to a more efficient siRNA for a particular target gene. The computer program that may be used may be developed in any computer language that is known to be useful for scoring nucleotide sequences, or it may be developed with the assistance of commercially available product such as Microsoft's product.net. Additionally, rather than run every sequence through one and/or another formula, one may compare a subset of the sequences, which may be desirable if for example only a subset are available. For instance, it may be desirable to first perform a BLAST (Basic Local Alignment Search Tool) search and to identify sequences that have no homology to other targets. Alternatively, it may be desirable to scan the sequence and to identify regions of moderate GC context, then perform relevant calculations using one of the above-described formulas on these regions. These calculations can be done manually or with the aid of a computer.

[0346] As with Formulas I-VII, either Formula VIII, Formula IX, or Formula X may be used for a given mRNA target sequence. However, it is possible that according to one or the other formula more than one siRNA will have the same value. Accordingly, it is beneficial to have a second formula by which to differentiate sequences. Formulas IX and X were derived in a similar fashion as Formula VIII, yet used a larger data set and thus yields sequences with higher statistical correlations to highly functional duplexes. The sequence that has the highest value ascribed to it may be referred to as a “first optimized duplex.” The sequence that has the second highest value ascribed to it may be referred to as a “second optimized duplex.” Similarly, the sequences that have the third and fourth highest values ascribed to them may be referred to as a third optimized duplex and a fourth optimized duplex, respectively. When more than one sequence has the same value, each of them may, for example, be referred to as first optimized duplex sequences or co-first optimized duplexes. Formula X is similar to Formula IX, yet uses a greater numbers of variables and for that reason, identifies sequences on the basis of slightly different criteria.

[0347] It should also be noted that the output of a particular algorithm will depend on several of variables including: (1) the size of the data base(s) being analyzed by the algorithm, and (2) the number and stringency of the parameters being applied to screen each sequence. Thus, for example, in U.S. patent application Ser. No. 10/714,333, entitled “Functional and Hyperfunctional siRNA,” filed Nov. 14, 2003, Formula VIII was applied to the known human genome (ncbi refseq database) through Entrez (efetch). As a result of these procedures, roughly 1.6 million siRNA sequences were identified. Application of Formula VIII to the same database in March of 2004 yielded roughly 2.2 million sequences, a difference of approximately 600,000 sequences resulting from the growth of the database over the course of the months that span this period of time. Application of other formulas (e.g., Formula X) that change the emphasis of, include, or eliminate different variables can yield unequal numbers of siRNAs. Alternatively, in cases where application of one formula to one or more genes fails to yield sufficient numbers of siRNAs with scores that would be indicative of strong silencing, said genes can be reassessed with a second algorithm that is, for instance, less stringent.

[0348] siRNA sequences identified using Formula VIII and Formula X (minus sequences generated by Formula VIII) are contained within the enclosed compact disks. The data included on the enclosed compact disks is described more fully below. The sequences identified by Formula VIII and Formula X that are disclosed in the compacts disks may be used in gene silencing applications.

[0349] It should be noted that for Formulas VIII, IX, and X all of the aforementioned criteria are identified as positions on the sense strand when oriented in the 5′ to 3′ direction as they are identified in connection with Formulas I-VII unless otherwise specified.

[0350] Formulas I-X, may be used to select or to evaluate one, or more than one, siRNA in order to optimize silencing. Preferably, at least two optimized siRNAs that have been selected according to at least one of these formulas are used to silence a gene, more preferably at least three and most preferably at least four. The siRNAs may be used individually or together in a pool or kit. Further, they may be applied to a cell simultaneously or separately. Preferably, the at least two siRNAs are applied simultaneously. Pools are particularly beneficial for many research applications. However, for therapeutics, it may be more desirable to employ a single hyperfunctional siRNA as described elsewhere in this application.

[0351] When planning to conduct gene silencing, and it is necessary to choose between two or more siRNAs, one should do so by comparing the relative values when the siRNA are subjected to one of the formulas above. In general a higher scored siRNA should be used.

[0352] Useful applications include, but are not limited to, target validation, gene functional analysis, research and drug discovery, gene therapy and therapeutics. Methods for using siRNA in these applications are well known to persons of skill in the art.

[0353] Because the ability of siRNA to function is dependent on the sequence of the RNA and not the species into which it is introduced, the present invention is applicable across a broad range of species, including but not limited to all mammalian species, such as humans, dogs, horses, cats, cows, mice, hamsters, chimpanzees and gorillas, as well as other species and organisms such as bacteria, viruses, insects, plants and C. elegans.

[0354] The present invention is also applicable for use for silencing a broad range of genes, including but not limited to the roughly 45,000 genes of a human genome, and has particular relevance in cases where those genes are associated with diseases such as diabetes, Alzheimer's, cancer, as well as all genes in the genomes of the aforementioned organisms.

[0355] The siRNA selected according to the aforementioned criteria or one of the aforementioned algorithms are also, for example, useful in the simultaneous screening and functional analysis of multiple genes and gene families using high throughput strategies, as well as in direct gene suppression or silencing.

Development of the Algorithms

[0356] To identify siRNA sequence features that promote functionality and to quantify the importance of certain currently accepted conventional factors—such as G/C content and target site accessibility—the inventors synthesized an siRNA panel consisting of 270 siRNAs targeting three genes, Human Cyclophilin, Firefly Luciferase, and Human DBI. In all three cases, siRNAs were directed against specific regions of each gene. For Human Cyclophilin and Firefly Luciferase, ninety siRNAs were directed against a 199 bp segment of each respective mRNA. For DBI, 90 siRNAs were directed against a smaller, 109 base pair region of the mRNA. The sequences to which the siRNAs were directed are provided below.

[0357] It should be noted that in certain sequences, “t” is present. This is because many databases contain information in this manner. However, the t denotes a uracil residue in mRNA and siRNA. Any algorithm will, unless otherwise specified, process a t in a sequence as a u.

[0358] Human cyclophilin: 193-390 M60857

| | |
|---|---|
| gttccaaaaacagtggataattttgtggccttagct | SEQ. ID NO. 29 |
| acaggagagaaaggatttggctacaaaaacagcaaa | |
| ttccatcgtgtaatcaaggacttcatgatccagggc | |
| ggagacttcaccaggggagatggcacaggaggaaag | |
| agcatctacggtgagcgcttccccgatgagaacttc | |
| aaactgaagcactacgggcctggctggg: | |

[0359] Firefly luciferase: 1434-1631, U47298 (pGL3, Promega)

| | |
|---|---|
| tgaacttcccgccgccgttgttgttttggagcacgg | SEQ. ID NO. 30 |
| aaagacgatgacggaaaaagagatcgtggattacgt | |
| cgccagtcaagtaacaaccgcgaaaaagttgcgcgg | |
| aggagttgtgtttgtggacgaagtaccgaaaggtct | |
| taccggaaaactcgacgcaagaaaaatcagagagat | |
| cctcataaaggccaagaagg: | |

[0360] DBI, NM_{—}020548 (202-310) (Every Position)

| | |
|---|---|
| acgggcaaggccaagtgggatgcctggaatgagc | SEQ. ID NO. 0031 |
| tgaaagggacttccaaggaagatgccatgaaagc | |
| ttacatcaacaaagtagaagagctaaagaaaaaa | |
| tacggg: | |

A list of the siRNAs appears in Table III (see Examples Section, Example II)

[0361] The set of duplexes was analyzed to identify correlations between siRNA functionality and other biophysical or thermodynamic properties. When the siRNA panel was analyzed in functional and non-functional subgroups, certain nucleotides were much more abundant at certain positions in functional or non-functional groups. More specifically, the frequency of each nucleotide at each position in highly functional siRNA duplexes was compared with that of nonfunctional duplexes in order to assess the preference for or against any given nucleotide at every position. These analyses were used to determine important criteria to be included in the siRNA algorithms (Formulas VIII, IX, and X).

[0362] The data set was also analyzed for distinguishing biophysical properties of siRNAs in the functional group, such as optimal percent of GC content, propensity for internal structures and regional thermodynamic stability. Of the presented criteria, several are involved in duplex recognition, RISC activation/duplex unwinding, and target cleavage catalysis.

[0363] The original data set that was the source of the statistically derived criteria is shown in FIG. 2. Additionally, this figure shows that random selection yields siRNA duplexes with unpredictable and widely varying silencing potencies as measured in tissue culture using HEK293 cells. In the figure, duplexes are plotted such that each x-axis tick-mark represents an individual siRNA, with each subsequent siRNA differing in target position by two nucleotides for Human Cyclophilin B and Firefly Luciferase, and by one nucleotide for Human DBI. Furthermore, the y-axis denotes the level of target expression remaining after transfection of the duplex into cells and subsequent silencing of the target.

[0364] siRNA identified and optimized in this document work equally well in a wide range of cell types. FIG. 3a shows the evaluation of thirty siRNAs targeting the DBI gene in three cell lines derived from different tissues. Each DBI siRNA displays very similar functionality in HEK293 (ATCC, CRL-1573, human embryonic kidney), HeLa (ATCC, CCL-2, cervical epithelial adenocarcinoma) and DU145 (HTB-81, prostate) cells as deterimined by the B-DNA assay. Thus, siRNA functionality is determined by the primary sequence of the siRNA and not by the intracellular environment. Additionally, it should be noted that although the present invention provides for a determination of the functionality of siRNA for a given target, the same siRNA may silence more than one gene. For example, the complementary sequence of the silencing siRNA may be present in more than one gene. Accordingly, in these circumstances, it may be desirable not to use the siRNA with highest SMARTscore™. In such circumstances, it may be desirable to use the siRNA with the next highest SMARTscore™.

[0365] To determine the relevance of G/C content in siRNA function, the G/C content of each duplex in the panel was calculated and the functional classes of siRNAs (<F50,≧F50, ≧F80,≧F95 where F refers to the percent gene silencing) were sorted accordingly. The majority of the highly-functional siRNAs (≧F95) fell within the G/C content range of 36-52% (FIG. 3B). Twice as many non-functional (<F50) duplexes fell within the high G/C content groups (>57% GC content) compared to the 36%-52% group. The group with extremely low GC content (26% or less) contained a higher proportion of non-functional siRNAs and no highly-functional siRNAs. The G/C content range of 30%-52% was therefore selected as Criterion I for siRNA functionality, consistent with the observation that a G/C range 30%-70% promotes efficient RNAi targeting. Application of this criterion alone provided only a marginal increase in the probability of selecting functional siRNAs from the panel: selection of F50 and F95 siRNAs was improved by 3.6% and 2.2%, respectively. The siRNA panel presented here permitted a more systematic analysis and quantification of the importance of this criterion than that used previously.

[0366] A relative measure of local internal stability is the A/U base pair (bp) content; therefore, the frequency of A/U bp was determined for each of the five terminal positions of the duplex (5′ sense (S)/5′ antisense (AS)) of all siRNAs in the panel. Duplexes were then categorized by the number of A/U bp in positions 1-5 and 15-19 of the sense strand. The thermodynamic flexibility of the duplex 5′-end (positions 1-5; S) did not appear to correlate appreciably with silencing potency, while that of the 3′-end (positions 15-19; S) correlated with efficient silencing. No duplexes lacking A/U bp in positions 15-19 were functional. The presence of one A/U bp in this region conferred some degree of functionality, but the presence of three or more A/Us was preferable and therefore defined as Criterion II. When applied to the test panel, only a marginal increase in the probability of functional siRNA selection was achieved: a 1.8% and 2.3% increase for F50 and F95 duplexes, respectively (Table IV).

[0367] The complementary strands of siRNAs that contain internal repeats or palindromes may form internal fold-back structures. These hairpin-like structures exist in equilibrium with the duplexed form effectively reducing the concentration of functional duplexes. The propensity to form internal hairpins and their relative stability can be estimated by predicted melting temperatures. High Tm reflects a tendency to form hairpin structures. Lower Tm values indicate a lesser tendency to form hairpins. When the functional classes of siRNAs were sorted by Tₘ (FIG. 3c), the following trends were identified: duplexes lacking stable internal repeats were the most potent silencers (no F95 duplex with predicted hairpin structure Tₘ>60° C.). In contrast, about 60% of the duplexes in the groups having internal hairpins with calculated Tₘ values less than 20° C. were F80. Thus, the stability of internal repeats is inversely proportional to the silencing effect and defines Criterion III (predicted hairpin structure Tₘ≦20° C.).

Sequence-Based Determinants of siRNA Functionality

[0368] When the siRNA panel was sorted into functional and non-functional groups, the frequency of a specific nucleotide at each position in a functional siRNA duplex was compared with that of a nonfunctional duplex in order to assess the preference for or against a certain nucleotide. FIG. 4 shows the results of these queries and the subsequent resorting of the data set (from FIG. 2). The data is separated into two sets: those duplexes that meet the criteria, a specific nucleotide in a certain position—grouped on the left (Selected) and those that do not—grouped on the right (Eliminated). The duplexes are further sorted from most functional to least functional with the y-axis of FIG. 4a-e representing the % expression i.e., the amount of silencing that is elicited by the duplex (Note: each position on the X-axis represents a different duplex). Statistical analysis revealed correlations between silencing and several sequence-related properties of siRNAs. FIG. 4 and Table IV show quantitative analysis for the following five sequence-related properties of siRNA: (A) an A at position 19 of the sense strand; (B) an A at position 3 of the sense strand; (C) a U at position 10 of the sense strand; (D) a base other than G at position 13 of the sense strand; and (E) a base other than C at position 19 of the sense strand.

[0369] When the siRNAs in the panel were evaluated for the presence of an A at position 19 of the sense strand, the percentage of non-functional duplexes decreased from 20% to 11.8%, and the percentage of F95 duplexes increased from 21.7% to 29.4% (Table IV). Thus, the presence of an A in this position defined Criterion IV.

[0370] Another sequence-related property correlated with silencing was the presence of an A in position 3 of the sense strand (FIG. 4b). Of the siRNAs with A3, 34.4% were F95, compared with 21.7% randomly selected siRNAs. The presence of a U base in position 10 of the sense strand exhibited an even greater impact (FIG. 4c). Of the duplexes in this group, 41.7% were F95. These properties became criteria V and VI, respectively.

[0371] Two negative sequence-related criteria that were identified also appear on FIG. 4. The absence of a G at position 13 of the sense strand, conferred a marginal increase in selecting functional duplexes (FIG. 4d). Similarly, lack of a C at position 19 of the sense strand also correlated with functionality (FIG. 4e). Thus, among functional duplexes, position 19 was most likely occupied by A, and rarely occupied by C. These rules were defined as criteria VII and VIII, respectively.

[0372] Application of each criterion individually provided marginal but statistically significant increases in the probability of selecting a potent siRNA. Although the results were informative, the inventors sought to maximize potency and therefore consider multiple criteria or parameters. Optimization is particularly important when developing therapeutics. Interestingly, the probability of selecting a functional siRNA based on each thermodynamic criteria was 2%-4% higher than random, but 4%-8% higher for the sequence-related determinates. Presumably, these sequence-related increases reflect the complexity of the RNAi mechanism and the multitude of protein-RNA interactions that are involved in RNAi-mediated silencing.

TABLE IV

| | | | | Improvement |
|---|---|---|---|---|
| Criterion | | % Functional | | over Random |
| I. | 30%-52% G/C content | <F50 | 16.4% | −3.6% |
| | | ≧F50 | 83.6% | 3.6% |
| | | ≧F80 | 60.4% | 4.3% |
| | | ≧F95 | 23.9% | 2.2% |
| II. | At least 3 A/U bases at positions | <F50 | 18.2% | −1.8% |
| | 15-19 of the sense strand | ≧F50 | 81.8% | 1.8% |
| | | ≧F80 | 59.7% | 3.6% |
| | | ≧F95 | 24.0% | 2.3% |
| III. | Absence of internal repeats, | <F50 | 16.7% | −3.3% |
| | as measured by Tₘ of | ≧F50 | 83.3% | 3.3% |
| | secondary structure ≦20° C. | ≧F80 | 61.1% | 5.0% |
| | | ≧F95 | 24.6% | 2.9% |
| IV. | An A base at position 19 | <F50 | 11.8% | −8.2% |
| | of the sense strand | ≧F50 | 88.2% | 8.2% |
| | | ≧F80 | 75.0% | 18.9% |
| | | ≧F95 | 29.4% | 7.7% |
| V. | An A base at position 3 | <F50 | 17.2% | −2.8% |
| | of the sense strand | ≧F50 | 82.8% | 2.8% |
| | | ≧F80 | 62.5% | 6.4% |
| | | ≧F95 | 34.4% | 12.7% |
| VI. | A U base at position 10 | <F50 | 13.9% | −6.1% |
| | of the sense strand | ≧F50 | 86.1% | 6.1% |
| | | ≧F80 | 69.4% | 13.3% |
| | | ≧F95 | 41.7% | 20% |
| VII. | A base other than C at | <F50 | 18.8% | −1.2% |
| | position 19 of the sense strand | ≧F50 | 81.2% | 1.2% |
| | | ≧F80 | 59.7% | 3.6% |
| | | ≧F95 | 24.2% | 2.5% |
| VIII. | A base other than G at | <F50 | 15.2% | −4.8% |
| | position 13 of the sense strand | ≧F50 | 84.8% | 4.8% |
| | | ≧F80 | 61.4% | 5.3% |
| | | ≧F95 | 26.5% | 4.8% |

The siRNA Selection Algorithm

[0373] In an effort to improve selection further, all identified criteria, including but not limited to those listed in Table IV were combined into the algorithms embodied in Formula VIII, Formula IX, and Formula X. Each siRNA was then assigned a score (referred to as a SMARTscore™) according to the values derived from the formulas. Duplexes that scored higher than 0 or −20 (unadjusted), for Formulas VIII and IX, respectively, effectively selected a set of functional siRNAs and excluded all non-functional siRNAs. Conversely, all duplexes scoring lower than 0 and −20 (minus 20) according to formulas VIII and IX, respectively, contained some functional siRNAs but included all non-functional siRNAs. A graphical representation of this selection is shown in FIG. 5. It should be noted that the scores derived from the algorithm can also be provided as “adjusted” scores. To convert Formula VIII unadjusted scores into adjusted scores it is necessary to use the following equation:
(160+unadjusted score)/2.25
When this takes place, an unadjusted score of “0” (zero) is converted to 75. Similarly, unadjusted scores for Formula X can be converted to adjusted scores. In this instance, the following equation is applied:
(228+unadjusted score)/3.56
When these manipulations take place, an unadjusted score of 38 is converted to an adjusted score of 75.

[0374] The methods for obtaining the seven criteria embodied in Table IV are illustrative of the results of the process used to develop the information for Formulas VIII, IX, and X. Thus similar techniques were used to establish the other variables and their multipliers. As described above, basic statistical methods were use to determine the relative values for these multipliers.

[0375] To determine the value for “Improvement over Random” the difference in the frequency of a given attribute (e.g., GC content, base preference) at a particular position is determined between individual functional groups (e.g., <F50) and the total siRNA population studied (e.g., 270 siRNA molecules selected randomly). Thus, for instance, in Criterion I (30%-52% GC content) members of the <F50 group were observed to have GC contents between 30-52% in 16.4% of the cases. In contrast, the total group of 270 siRNAs had GC contents in this range, 20% of the time. Thus for this particular attribute, there is a small negative correlation between 30%-52% GC content and this functional group (i.e., 16.4%-20%=−3.6%). Similarly, for Criterion VI, (a “U” at position 10 of the sense strand), the >F95 group contained a “U” at this position 41.7% of the time. In contrast, the total group of 270 siRNAs had a “U” at this position 21.7% of the time, thus the improvement over random is calculated to be 20% (or 41.7%-21.7%).

Identifying the Average Internal Stability Profile of Strong siRNA

[0376] In order to identify an internal stability profile that is characteristic of strong siRNA, 270 different siRNAs derived from the cyclophilin B, the diazepam binding inhibitor (DBI), and the luciferase gene were individually transfected into HEK293 cells and tested for their ability to induce RNAi of the respective gene. Based on their performance in the in vivo assay, the sequences were then subdivided into three groups, (i) >95% silencing; (ii) 80-95% silencing; and (iii) less than 50% silencing. Sequences exhibiting 51-84% silencing were eliminated from further consideration to reduce the difficulties in identifying relevant thermodynamic patterns.

[0377] Following the division of siRNA into three groups, a statistical analysis was performed on each member of each group to determine the average internal stability profile (AISP) of the siRNA. To accomplish this the Oligo 5.0 Primer Analysis Software and other related statistical packages (e.g., Excel) were exploited to determine the internal stability of pentamers using the nearest neighbor method described by Freier et al., (1986) Improved free-energy parameters for predictions of RNA duplex stability, Proc Natl. Acad. Sci. U.S.A. 83(24): 9373-7. Values for each group at each position were then averaged, and the resulting data were graphed on a linear coordinate system with the Y-axis expressing the ΔG (free energy) values in kcal/mole and the X-axis identifying the position of the base relative to the 5′ end.

[0378] The results of the analysis identified multiple key regions in siRNA molecules that were critical for successful gene silencing. At the 3′-most end of the sense strand (5′antisense), highly functional siRNA (>95% gene silencing, see FIG. 6a, >F95) have a low internal stability (AISP of position 19=˜7.6 kcal/mol). In contrast low-efficiency siRNA (i.e., those exhibiting less than 50% silencing, <F50) display a distinctly different profile, having high ΔG values (˜−8.4 kcal/mol) for the same position. Moving in a 5′ (sense strand) direction, the internal stability of highly efficient siRNA rises (position 12=˜−8.3 kcal/mole) and then drops again (position 7=˜−7.7 kcal/mol) before leveling off at a value of approximately −8.1 kcal/mol for the 5′ terminus. siRNA with poor silencing capabilities show a distinctly different profile. While the AISP value at position 12 is nearly identical with that of strong siRNAs, the values at positions 7 and 8 rise considerably, peaking at a high of ˜−9.0 kcal/mol. In addition, at the 5′ end of the molecule the AISP profile of strong and weak siRNA differ dramatically. Unlike the relatively strong values exhibited by siRNA in the >95% silencing group, siRNAs that exhibit poor silencing activity have weak AISP values (−7.6, −7.5, and −7.5 kcal/mol for positions 1, 2 and 3 respectively).

[0379] Overall the profiles of both strong and weak siRNAs form distinct sinusoidal shapes that are roughly 180° out-of-phase with each other. While these thermodynamic descriptions define the archetypal profile of a strong siRNA, it will likely be the case that neither the ΔG values given for key positions in the profile or the absolute position of the profile along the Y-axis (i.e., the ΔG-axis) are absolutes. Profiles that are shifted upward or downward (i.e., having on an average, higher or lower values at every position) but retain the relative shape and position of the profile along the X-axis can be foreseen as being equally effective as the model profile described here. Moreover, it is likely that siRNA that have strong or even stronger gene-specific silencing effects might have exaggerated ΔG values (either higher or lower) at key positions. Thus, for instance, it is possible that the 5′-most position of the sense strand (position 19) could have ΔG values of 7.4 kcal/mol or lower and still be a strong siRNA if, for instance, a G-C→G-T/U mismatch were substituted at position 19 and altered duplex stability. Similarly, position 12 and position 7 could have values above 8.3 kcal/mol and below 7.7 kcal/mole, respectively, without abating the silencing effectiveness of the molecule. Thus, for instance, at position 12, a stabilizing chemical modification (e.g., a chemical modification of the 2′ position of the sugar backbone) could be added that increases the average internal stability at that position. Similarly, at position 7, mismatches similar to those described previously could be introduced that would lower the ΔG values at that position.

[0380] Lastly, it is important to note that while functional and non-functional siRNA were originally defined as those molecules having specific silencing properties, both broader or more limiting parameters can be used to define these molecules. As used herein, unless otherwise specified, “non-functional siRNA” are defined as those siRNA that induce less than 50% (<50%) target silencing, “semi-functional siRNA” induce 50-79% target silencing, “functional siRNA” are molecules that induce 80-95% gene silencing, and “highly-functional siRNA” are molecules that induce great than 95% gene silencing. These definitions are not intended to be rigid and can vary depending upon the design and needs of the application. For instance, it is possible that a researcher attempting to map a gene to a chromosome using a functional assay, may identify an siRNA that reduces gene activity by only 30%. While this level of gene silencing may be “non-functional” for, e.g., therapeutic needs, it is sufficient for gene mapping purposes and is, under these uses and conditions, “functional.” For these reasons, functional siRNA can be defined as those molecules having greater than 10%, 20%, 30%, 40%, 50%, 60%, 70%, 80%, or 90% silencing capabilities at 100 nM transfection conditions. Similarly, depending upon the needs of the study and/or application, non-functional and semi-functional siRNA can be defined as having different parameters. For instance, semi-functional siRNA can be defined as being those molecules that induce 20%, 30%, 40%, 50%, 60%, or 70% silencing at 100 nM transfection conditions. Similarly, non-functional siRNA can be defined as being those molecules that silence gene expression by less than 70%, 60%, 50%, 40%, 30%, or less. Nonetheless, unless otherwise stated, the descriptions stated in the “Definitions” section of this text should be applied.

[0381] Functional attributes can be assigned to each of the key positions in the AISP of strong siRNA. The low 5′ (sense strand) AISP values of strong siRNAs may be necessary for determining which end of the molecule enters the RISC complex. In contrast, the high and low AISP values observed in the central regions of the molecule may be critical for siRNA-target mRNA interactions and product release, respectively.

[0382] If the AISP values described above accurately define the thermodynamic parameters of strong siRNA, it would be expected that similar patterns would be observed in strong siRNA isolated from nature. Natural siRNAs exist in a harsh, RNase-rich environment and it can be hypothesized that only those siRNA that exhibit heightened affinity for RISC (i.e., siRNA that exhibit an average internal stability profile similar to those observed in strong siRNA) would survive in an intracellular environment. This hypothesis was tested using GFP-specific siRNA isolated from N. benthamiana. Llave et al. (2002) Endogenous and Silencing-Associated Small RNAs in Plants, The Plant Cell 14, 1605-1619, introduced long double-stranded GFP-encoding RNA into plants and subsequently re-isolated GFP-specific siRNA from the tissues. The AISP of fifty-nine of these GFP-siRNA were determined, averaged, and subsequently plotted alongside the AISP profile obtained from the cyclophilin B/DBI/luciferase siRNA having >90% silencing properties (FIG. 6b). Comparison of the two groups show that profiles are nearly identical. This finding validates the information provided by the internal stability profiles and demonstrates that: (1) the profile identified by analysis of the cyclophilin B/DBI/luciferase siRNAs are not gene specific; and (2) AISP values can be used to search for strong siRNAs in a variety of species.

[0383] Both chemical modifications and base-pair mismatches can be incorporated into siRNA to alter the duplex's AISP and functionality. For instance, introduction of mismatches at positions 1 or 2 of the sense strand destabilized the 5′ end of the sense strand and increases the functionality of the molecule (see Luc, FIG. 7). Similarly, addition of 2′-O-methyl groups to positions 1 and 2 of the sense strand can also alter the AISP and (as a result) increase both the functionality of the molecule and eliminate off-target effects that results from sense strand homology with the unrelated targets (FIGS. 8a, 8b).

Rationale for Criteria in a Biological Context

[0384] The fate of siRNA in the RNAi pathway may be described in 5 major steps: (1) duplex recognition and pre-RISC complex formation; (2) ATP-dependent duplex unwinding/strand selection and RISC activation; (3) mRNA target identification; (4) mRNA cleavage, and (5) product release (FIG. 1). Given the level of nucleic acid-protein interactions at each step, siRNA functionality is likely influenced by specific biophysical and molecular properties that promote efficient interactions within the context of the multi-component complexes. Indeed, the systematic analysis of the siRNA test set identified multiple factors that correlate well with functionality. When combined into a single algorithm, they proved to be very effective in selecting active siRNAs.

[0385] The factors described here may also be predictive of key functional associations important for each step in RNAi. For example, the potential formation of internal hairpin structures correlated negatively with siRNA functionality. Complementary strands with stable internal repeats are more likely to exist as stable hairpins thus decreasing the effective concentration of the functional duplex form. This suggests that the duplex is the preferred conformation for initial pre-RISC association. Indeed, although single complementary strands can induce gene silencing, the effective concentration required is at least two orders of magnitude higher than that of the duplex form.

[0386] siRNA-pre-RISC complex formation is followed by an ATP-dependent duplex unwinding step and “activation” of the RISC. The siRNA functionality was shown to correlate with overall low internal stability of the duplex and low internal stability of the 3′ sense end (or differential internal stability of the 3′ sense compare to the 5′ sense strand), which may reflect strand selection and entry into the RISC. Overall duplex stability and low internal stability at the 3′ end of the sense strand were also correlated with siRNA functionality. Interestingly, siRNAs with very high and very low overall stability profiles correlate strongly with non-functional duplexes. One interpretation is that high internal stability prevents efficient unwinding while very low stability reduces siRNA target affinity and subsequent mRNA cleavage by the RISC.

[0387] Several criteria describe base preferences at specific positions of the sense strand and are even more intriguing when considering their potential mechanistic roles in target recognition and mRNA cleavage. Base preferences for A at position 19 of the sense strand but not C, are particularly interesting because they reflect the same base preferences observed for naturally occurring miRNA precursors. That is, among the reported miRNA precursor sequences 75% contain a U at position 1 which corresponds to an A in position 19 of the sense strand of siRNAs, while G was under-represented in this same position for miRNA precursors. These observations support the hypothesis that both miRNA precursors and siRNA duplexes are processed by very similar if not identical protein machinery. The functional interpretation of the predominance of a U/A base pair is that it promotes flexibility at the 5′antisense ends of both siRNA duplexes and miRNA precursors and facilitates efficient unwinding and selective strand entrance into an activated RISC.

[0388] Among the criteria associated with base preferences that are likely to influence mRNA cleavage or possibly product release, the preference for U at position 10 of the sense strand exhibited the greatest impact, enhancing the probability of selecting an F80 sequence by 13.3%. Activated RISC preferentially cleaves target mRNA between nucleotides 10 and 11 relative to the 5′ end of the complementary targeting strand. Therefore, it may be that U, the preferred base for most endoribonucleases, at this position supports more efficient cleavage. Alternatively, a U/A bp between the targeting siRNA strand and its cognate target mRNA may create an optimal conformation for the RISC-associated “slicing” activity.

Post Algorithm Filters

[0389] According to another embodiment, the output of any one of the formulas previously listed can be filtered to remove or select for siRNAs containing undesirable or desirable motifs or properties, respectively. In one example, sequences identified by any of the formulas can be filtered to remove any and all sequences that induce toxicity or cellular stress. Introduction of an siRNA containing a toxic motif into a cell can induce cellular stress and/or cell death (apoptosis) which in turn can mislead researchers into associating a particular (e.g., nonessential) gene with, e.g., an essential function. Alternatively, sequences generated by any of the before mentioned formulas can be filtered to identify and retain duplexes that contain toxic motifs. Such duplexes may be valuable from a variety of perspectives including, for instance, uses as therapeutic molecules. A variety of toxic motifs exist and can exert their influence on the cell through RNAi and non-RNAi pathways. Examples of toxic motifs are explained more fully in commonly assigned U.S. Provisional Patent Application Ser. No. 60/538,874, entitled “Identification of Toxic Sequences,” filed Jan. 23, 2004. Briefly, toxic motifs include A/G UUU A/G/U, G/C AAA G/C, and GCCA, or a complement of any of the foregoing.

[0390] In another instance, sequences identified by any of the before mentioned formulas can be filtered to identify duplexes that contain motifs (or general properties) that provide serum stability or induce serum instability. In one envisioned application of siRNA as therapeutic molecules, duplexes targeting disease-associated genes will be introduced into patients intravenously. As the half-life of single and double stranded RNA in serum is short, post-algorithm filters designed to select molecules that contain motifs that enhance duplex stability in the presence of serum and/or (conversely) eliminate duplexes that contain motifs that destabilize siRNA in the presence of serum, would be beneficial.

[0391] In another instance, sequences identified by any of the before mentioned formulas can be filtered to identify duplexes that are hyperfunctional. Hyperfunctional sequences are defined as those sequences that (1) induce greater than 95% silencing of a specific target when they are transfected at subnanomolar concentrations (i.e., less than one nanomolar); and/or (2) induce functional (or better) levels of silencing for greater than 96 hours. Filters that identify hyperfunctional molecules can vary widely. In one example, the top ten, twenty, thirty, or forty siRNA can be assessed for the ability to silence a given target at, e.g., concentrations of 1 nM and 0.5 nM to identify hyperfunctional molecules.

Pooling

[0392] According to another embodiment, the present invention provides a pool of at least two siRNAs, preferably in the form of a kit or therapeutic reagent, wherein one strand of each of the siRNAs, the sense strand comprises a sequence that is substantially similar to a sequence within a target mRNA. The opposite strand, the antisense strand, will preferably comprise a sequence that is substantially complementary to that of the target mRNA. More preferably, one strand of each siRNA will comprise a sequence that is identical to a sequence that is contained in the target mRNA. Most preferably, each siRNA will be 19 base pairs in length, and one strand of each of the siRNAs will be 100% complementary to a portion of the target mRNA.

[0393] By increasing the number of siRNAs directed to a particular target using a pool or kit, one is able both to increase the likelihood that at least one siRNA with satisfactory functionality will be included, as well as to benefit from additive or synergistic effects. Further, when two or more siRNAs directed against a single gene do not have satisfactory levels of functionality alone, if combined, they may satisfactorily promote degradation of the target messenger RNA and successfully inhibit translation. By including multiple siRNAs in the system, not only is the probability of silencing increased, but the economics of operation are also improved when compared to adding different siRNAs sequentially. This effect is contrary to the conventional wisdom that the concurrent use of multiple siRNA will negatively impact gene silencing (e.g., Holen, T. et al. (2003) “Similar behavior of single strand and double strand siRNAs suggests they act through a common RNAi pathway.” NAR 31: 2401-21407).

[0394] In fact, when two siRNAs were pooled together, 54% of the pools of two siRNAs induced more than 95% gene silencing. Thus, a 2.5-fold increase in the percentage of functionality was achieved by randomly combining two siRNAs. Further, over 84% of pools containing two siRNAs induced more than 80% gene silencing.

[0395] More preferably, the kit is comprised of at least three siRNAs, wherein one strand of each siRNA comprises a sequence that is substantially similar to a sequence of the target mRNA and the other strand comprises a sequence that is substantially complementary to the region of the target mRNA. As with the kit that comprises at least two siRNAs, more preferably one strand will comprise a sequence that is identical to a sequence that is contained in the mRNA and another strand that is 100% complementary to a sequence that is contained in the mRNA. During experiments, when three siRNAs were combined together, 60% of the pools induced more than 95% gene silencing and 92% of the pools induced more than 80% gene silencing.

[0396] Further, even more preferably, the kit is comprised of at least four siRNAs, wherein one strand of each siRNA comprises a sequence that is substantially similar to a region of the sequence of the target mRNA, and the other strand comprises a sequence that is substantially complementary to the region of the target mRNA. As with the kit or pool that comprises at least two siRNAs, more preferably one strand of each of the siRNA duplexes will comprise a sequence that is identical to a sequence that is contained in the mRNA, and another strand that is 100% complementary to a sequence that is contained in the mRNA.

[0397] Additionally, kits and pools with at least five, at least six, and at least seven siRNAs may also be useful with the present invention. For example, pools of five siRNA induced 95% gene silencing with 77% probability and 80% silencing with 98.8% probability. Thus, pooling of siRNAs together can result in the creation of a target-specific silencing reagent with almost a 99% probability of being functional. The fact that such high levels of success are achievable using such pools of siRNA, enables one to dispense with costly and time-consuming target-specific validation procedures.

[0398] For this embodiment, as well as the other aforementioned embodiments, each of the siRNAs within a pool will preferably comprise 18-30 base pairs, more preferably 18-25 base pairs, and most preferably 19 base pairs. Within each siRNA, preferably at least 18 contiguous bases of the antisense strand will be 100% complementary to the target mRNA. More preferably, at least 19 contiguous bases of the antisense strand will be 100% complementary to the target mRNA. Additionally, there may be overhangs on either the sense strand or the antisense strand, and these overhangs may be at either the 5′ end or the 3′ end of either of the strands, for example there may be one or more overhangs of 1-6 bases. When overhangs are present, they are not included in the calculation of the number of base pairs. The two nucleotide 3′ overhangs mimic natural siRNAs and are commonly used but are not essential. Preferably, the overhangs should consist of two nucleotides, most often dTdT or UU at the 3′ end of the sense and antisense strand that are not complementary to the target sequence. The siRNAs may be produced by any method that is now known or that comes to be known for synthesizing double stranded RNA that one skilled in the art would appreciate would be useful in the present invention. Preferably, the siRNAs will be produced by Dharmacon's proprietary ACE® technology. However, other methods for synthesizing siRNAs are well known to persons skilled in the art and include, but are not limited to, any chemical synthesis of RNA oligonucleotides, ligation of shorter oligonucleotides, in vitro transcription of RNA oligonucleotides, the use of vectors for expression within cells, recombinant Dicer products and PCR products.

[0399] The siRNA duplexes within the aforementioned pools of siRNAs may correspond to overlapping sequences within a particular mRNA, or non-overlapping sequences of the mRNA. However, preferably they correspond to non-overlapping sequences. Further, each siRNA may be selected randomly, or one or more of the siRNA may be selected according to the criteria discussed above for maximizing the effectiveness of siRNA.

[0400] Included in the definition of siRNAs are siRNAs that contain substituted and/or labeled nucleotides that may, for example, be labeled by radioactivity, fluorescence or mass. The most common substitutions are at the 2′ position of the ribose sugar, where moieties such as H (hydrogen) F, NH₃, OCH₃ and other O- alkyl, alkenyl, alkynyl, and orthoesters, may be substituted, or in the phosphorous backbone, where sulfur, amines or hydrocarbons may be substituted for the bridging of non-bridging atoms in the phosphodiester bond. Examples of modified siRNAs are explained more fully in commonly assigned U.S. patent application Ser. No. 10/613,077, filed Jul. 1, 2003.

[0401] Additionally, as noted above, the cell type into which the siRNA is introduced may affect the ability of the siRNA to enter the cell; however, it does not appear to affect the ability of the siRNA to function once it enters the cell. Methods for introducing double-stranded RNA into various cell types are well known to persons skilled in the art.

[0402] As persons skilled in the art are aware, in certain species, the presence of proteins such as RdRP, the RNA-dependent RNA polymerase, may catalytically enhance the activity of the siRNA. For example, RdRP propagates the RNAi effect in C. elegans and other non-mammalian organisms. In fact, in organisms that contain these proteins, the siRNA may be inherited. Two other proteins that are well studied and known to be a part of the machinery are members of the Argonaute family and Dicer, as well as their homologues. There is also initial evidence that the RISC complex might be associated with the ribosome so the more efficiently translated mRNAs will be more susceptible to silencing than others.

[0403] Another very important factor in the efficacy of siRNA is mRNA localization. In general, only cytoplasmic mRNAs are considered to be accessible to RNAi to any appreciable degree. However, appropriately designed siRNAs, for example, siRNAs modified with internucleotide linkages or 2′-O-methyl groups, may be able to cause silencing by acting in the nucleus. Examples of these types of modifications are described in commonly assigned U.S. patent application Ser. Nos. 10/431,027 and 10/613,077.

[0404] As described above, even when one selects at least two siRNAs at random, the effectiveness of the two may be greater than one would predict based on the effectiveness of two individual siRNAs. This additive or synergistic effect is particularly noticeable as one increases to at least three siRNAs, and even more noticeable as one moves to at least four siRNAs. Surprisingly, the pooling of the non-functional and semi-functional siRNAs, particularly more than five siRNAs, can lead to a silencing mixture that is as effective if not more effective than any one particular functional siRNA.

[0405] Within the kits of the present invention, preferably each siRNA will be present in a concentration of between 0.001 and 200 μM, more preferably between 0.01 and 200 nM, and most preferably between 0.1 and 10 nM.

[0406] In addition to preferably comprising at least four or five siRNAs, the kits of the present invention will also preferably comprise a buffer to keep the siRNA duplex stable. Persons skilled in the art are aware of buffers suitable for keeping siRNA stable. For example, the buffer may be comprised of 100 mM KCl, 30 mM HEPES-pH 7.5, and 1 mM MgCl₂. Alternatively, kits might contain complementary strands that contain any one of a number of chemical modifications (e.g., a 2′-O-ACE) that protect the agents from degradation by nucleases. In this instance, the user may (or may not) remove the modifying protective group (e.g., deprotect) before annealing the two complementary strands together.

[0407] By way of example, the kits may be organized such that pools of siRNA duplexes are provided on an array or microarray of wells or drops for a particular gene set or for unrelated genes. The array may, for example, be in 96 wells, 384 wells or 1284 wells arrayed in a plastic plate or on a glass slide using techniques now known or that come to be known to persons skilled in the art. Within an array, preferably there will be controls such as functional anti-lamin A/C, cyclophilin and two siRNA duplexes that are not specific to the gene of interest.

[0408] In order to ensure stability of the siRNA pools prior to usage, they may be retained in lyophilized form at minus twenty degrees (−20° C.) until they are ready for use. Prior to usage, they should be resuspended; however, even once resuspended, for example, in the aforementioned buffer, they should be kept at minus twenty degrees, (−20° C.) until used. The aforementioned buffer, prior to use, may be stored at approximately 4° C. or room temperature. Effective temperatures at which to conduct transfections are well known to persons skilled in the art and include for example, room temperature.

[0409] The kits may be applied either in vivo or in vitro. Preferably, the siRNA of the pools or kits is applied to a cell through transfection, employing standard transfection protocols. These methods are well known to persons skilled in the art and include the use of lipid-based carriers, electroporation, cationic carriers, and microinjection. Further, one could apply the present invention by synthesizing equivalent DNA sequences (either as two separate, complementary strands, or as hairpin molecules) instead of siRNA sequences and introducing them into cells through vectors. Once in the cells, the cloned DNA could be transcribed, thereby forcing the cells to generate the siRNA. Examples of vectors suitable for use with the present application include but are not limited to the standard transient expression vectors, adenoviruses, retroviruses, lentivirus-based vectors, as well as other traditional expression vectors. Any vector that has an adequate siRNA expression and procession module may be used. Furthermore, certain chemical modifications to siRNAs, including but not limited to conjugations to other molecules, may be used to facilitate delivery. For certain applications it may be preferable to deliver molecules without transfection by simply formulating in a physiological acceptable solution.

[0410] This embodiment may be used in connection with any of the aforementioned embodiments. Accordingly, the sequences within any pool may be selected by rational design.

Multigene Silencing

[0411] In addition to developing kits that contain multiple siRNA directed against a single gene, another embodiment includes the use of multiple siRNA targeting multiple genes. Multiple genes may be targeted through the use of high- or hyper-functional siRNA. High- or hyper-functional siRNA that exhibit increased potency, require lower concentrations to induce desired phenotypic (and thus therapeutic) effects. This circumvents RISC saturation. It therefore reasons that if lower concentrations of a single siRNA are needed for knockout or knockdown expression of one gene, then the remaining (uncomplexed) RISC will be free and available to interact with siRNA directed against two, three, four, or more, genes. Thus in this embodiment, the authors describe the use of highly functional or hyper-functional siRNA to knock out three separate genes. More preferably, such reagents could be combined to knockout four distinct genes. Even more preferably, highly functional or hyperfunctional siRNA could be used to knock out five distinct genes. Most preferably, siRNA of this type could be used to knockout or knockdown the expression of six or more genes.

Hyperfunctional siRNA

[0412] The term hyperfunctional siRNA (hf-siRNA) describes a subset of the siRNA population that induces RNAi in cells at low- or sub-nanomolar concentrations for extended periods of time. These traits, heightened potency and extended longevity of the RNAi phenotype, are highly attractive from a therapeutic standpoint. Agents having higher potency require lesser amounts of the molecule to achieve the desired physiological response, thus reducing the probability of side effects due to “off-target” interference. In addition to the potential therapeutic benefits associated with hyperfunctional siRNA, hf-siRNA are also desirable from an economic perspective. Hyperfunctional siRNA may cost less on a per-treatment basis, thus reducing overall expenditures to both the manufacturer and the consumer.

[0413] Identification of hyperfunctional siRNA involves multiple steps that are designed to examine an individual siRNA agent's concentration- and/or longevity-profiles. In one non-limiting example, a population of siRNA directed against a single gene are first analyzed using the previously described algorithm (Formula VIII). Individual siRNA are then introduced into a test cell line and assessed for the ability to degrade the target mRNA. It is important to note that when performing this step it is not necessary to test all of the siRNA. Instead, it is sufficient to test only those siRNA having the highest SMARTscores™ (i.e., SMARTscore™>−10). Subsequently, the gene silencing data is plotted against the SMARTscores™ (see FIG. 9). siRNA that (1) induce a high degree of gene silencing (i.e., they induce greater than 80% gene knockdown) and (2) have superior SMARTscores™ (i.e., a SMARTscore™ of >−10, suggesting a desirable average internal stability profile) are selected for further investigations designed to better understand the molecule's potency and longevity. In one, non-limiting study dedicated to understanding a molecule's potency, an siRNA is introduced into one (or more) cell types in increasingly diminishing concentrations (e.g., 3.0→0.3 nM). Subsequently, the level of gene silencing induced by each concentration is examined and siRNA that exhibit hyperfunctional potency (i.e., those that induce 80% silencing or greater at, e.g., picomolar concentrations) are identified. In a second study, the longevity profiles of siRNA having high (>−10) SMARTscores™ and greater than 80% silencing are examined. In one non-limiting example of how this is achieved, siRNA are introduced into a test cell line and the levels of RNAi are measured over an extended period of time (e.g., 24-168 hrs). siRNAs that exhibit strong RNA interference patterns (i.e., >80% interference) for periods of time greater than, e.g., 120 hours, are thus identified. Studies similar to those described above can be performed on any and all of the >10⁶ siRNA included in this document to further define the most functional molecule for any given gene. Molecules possessing one or both properties (extended longevity and heightened potency) are labeled “hyperfunctional siRNA,” and earmarked as candidates for future therapeutic studies.

[0414] While the example(s) given above describe one means by which hyperfunctional siRNA can be isolated, neither the assays themselves nor the selection parameters used are rigid and can vary with each family of siRNA. Families of siRNA include siRNAs directed against a single gene, or directed against a related family of genes.

[0415] The highest quality siRNA achievable for any given gene may vary considerably. Thus, for example, in the case of one gene (gene X), rigorous studies such as those described above may enable the identification of an siRNA that, at picomolar concentrations, induces 99⁺% silencing for a period of 10 days. Yet identical studies of a second gene (gene Y) may yield an siRNA that at high nanomolar concentrations (e.g., 100 nM) induces only 75% silencing for a period of 2 days. Both molecules represent the very optimum siRNA for their respective gene targets and therefore are designated “hyperfunctional.” Yet due to a variety of factors including but not limited to target concentration, siRNA stability, cell type, off-target interference, and others, equivalent levels of potency and longevity are not achievable. Thus, for these reasons, the parameters described in the before mentioned assays can vary. While the initial screen selected siRNA that had SMARTscore™ above −10 and a gene silencing capability of greater than 80%, selections that have stronger (or weaker) parameters can be implemented. Similarly, in the subsequent studies designed to identify molecules with high potency and longevity, the desired cutoff criteria (i.e., the lowest concentration that induces a desirable level of interference, or the longest period of time that interference can be observed) can vary. The experimentation subsequent to application of the rational criteria of this application is significantly reduced where one is trying to obtain a suitable hyperfunctional siRNA for, for example, therapeutic use. When, for example, the additional experimentation of the type described herein is applied by one skilled in the art with this disclosure in hand, a hyperfunctional siRNA is readily identified.

[0416] The siRNA may be introduced into a cell by any method that is now known or that comes to be known and that from reading this disclosure, persons skilled in the art would determine would be useful in connection with the present invention in enabling siRNA to cross the cellular membrane. These methods include, but are not limited to, any manner of transfection, such as, for example, transfection employing DEAE-Dextran, calcium phosphate, cationic lipids/liposomes, micelles, manipulation of pressure, microinjection, electroporation, immunoporation, use of vectors such as viruses, plasmids, cosmids, bacteriophages, cell fusions, and coupling of the polynucleotides to specific conjugates or ligands such as antibodies, antigens, or receptors, passive introduction, adding moieties to the siRNA that facilitate its uptake, and the like.

[0417] Having described the invention with a degree of particularity, examples will now be provided. These examples are not intended to and should not be construed to limit the scope of the claims in any way.

### EXAMPLES

General Techniques and Nomenclatures

[0418] siRNA nomenclature. All siRNA duplexes are referred to by sense strand. The first nucleotide of the 5′-end of the sense strand is position 1, which corresponds to position 19 of the antisense strand for a 19-mer. In most cases, to compare results from different experiments, silencing was determined by measuring specific transcript mRNA levels or enzymatic activity associated with specific transcript levels, 24 hours post-transfection, with siRNA concentrations held constant at 100 nM. For all experiments, unless otherwise specified, transfection efficiency was ensured to be over 95%, and no detectable cellular toxicity was observed. The following system of nomenclature was used to compare and report siRNA-silencing functionality: “F” followed by the degree of minimal knockdown. For example, F50 signifies at least 50% knockdown, F80 means at least 80%, and so forth. For this study, all sub-F50 siRNAs were considered non-functional.

[0419] Cell culture and transfection. 96-well plates are coated with 50 μl of 50 mg/ml poly-L-lysine (Sigma) for 1 hr, and then washed 3× with distilled water before being dried for 20 min. HEK293 cells or HEK293Lucs or any other cell type of interest are released from their solid support by trypsinization, diluted to 3.5×10⁵ cells/ml, followed by the addition of 100 μL of cells/well. Plates are then incubated overnight at 37° C., 5% CO₂. Transfection procedures can vary widely depending on the cell type and transfection reagents. In one non-limiting example, a transfection mixture consisting of 2 mL Opti-MEM I (Gibco-BRL), 80 μl Lipofectamine 2000 (Invitrogen), 15 μL SUPERNasin at 20 U/μl (Ambion), and 1.5 μl of reporter gene plasmid at 1 μg/μl is prepared in 5-ml polystyrene round bottom tubes. One hundred μl of transfection reagent is then combined with 100 μl of siRNAs in polystyrene deep-well titer plates (Beckman) and incubated for 20 to 30 min at room temperature. Five hundred and fifty microliters of Opti-MEM is then added to each well to bring the final siRNA concentration to 100 nM. Plates are then sealed with parafilm and mixed. Media is removed from HEK293 cells and replaced with 95 μl of transfection mixture. Cells are incubated overnight at 37° C., 5% CO₂.

[0420] Quantification of gene knockdown. A variety of quantification procedures can be used to measure the level of silencing induced by siRNA or siRNA pools. In one non-limiting example: to measure mRNA levels 24 hrs post-transfection, QuantiGene branched-DNA (bDNA) kits (Bayer) (Wang, et al, Regulation of insulin preRNA splicing by glucose. Proc. Natl. Acad. Sci. USA 1997, 94:4360.) are used according to manufacturer instructions. To measure luciferase activity, media is removed from HEK293 cells 24 hrs post-transfection, and 50 μl of Steady-GLO reagent (Promega) is added. After 5 minutes, plates are analyzed on a plate reader.

### Example I

### Sequences Used to Develop the Algorithm

[0421] Anti-Firefly and anti-Cyclophilin siRNAs panels (FIG. 5a, b) sorted according to using Formula VIII predicted values. All siRNAs scoring more than 0 (formula VIII) and more then 20 (formula IX) are fully functional. All ninety sequences for each gene (and DBI) appear below in Table III.

TABLE III

| | | | |
|---|---|---|---|
| Cyclo | 1 | SEQ. ID 0032 | GUUCCAAAAACAGUGGAUA |
| Cyclo | 2 | SEQ. ID 0033 | UCCAAAAACAGUGGAUAAU |
| Cyclo | 3 | SEQ. ID 0034 | CAAAAACAGUGGAUAAUUU |
| Cyclo | 4 | SEQ. ID 0035 | AAAACAGUGGAUAAUUUUG |
| Cyclo | 5 | SEQ. ID 0036 | AACAGUGGAUAAUUUUGUG |
| Cyclo | 6 | SEQ. ID 0037 | CAGUGGAUAAUUUUGUGGC |
| Cyclo | 7 | SEQ. ID 0038 | GUGGAUAAUUUUGUGGCCU |
| Cyclo | 8 | SEQ. ID 0039 | GGAUAAUUUUGUGGCCUUA |
| Cyclo | 9 | SEQ. ID 0040 | AUAAUUUUGUGGCCUUAGC |
| Cyclo | 10 | SEQ. ID 0041 | AAUUUUGUGGCCUUAGCUA |
| Cyclo | 11 | SEQ. ID 0042 | UUUUGUGGCCUUAGCUACA |
| Cyclo | 12 | SEQ. ID 0043 | UUGUGGCCUUAGCUACAGG |
| Cyclo | 13 | SEQ. ID 0044 | GUGGCCUUAGCUACAGGAG |
| Cyclo | 14 | SEQ. ID 0045 | GGCCUUAGCUACAGGAGAG |
| Cyclo | 15 | SEQ. ID 0046 | CCUUAGCUACAGGAGAGAA |
| Cyclo | 16 | SEQ. ID 0047 | UUAGCUACAGGAGAGAAAG |
| Cyclo | 17 | SEQ. ID 0048 | AGCUACAGGAGAGAAAGGA |
| Cyclo | 18 | SEQ. ID 0049 | CUACAGGAGAGAAAGGAUU |
| Cyclo | 19 | SEQ. ID 0050 | ACAGGAGAGAAAGGAUUUG |
| Cyclo | 20 | SEQ. ID 0051 | AGGAGAGAAAGGAUUUGGC |
| Cyclo | 21 | SEQ. ID 0052 | GAGAGAAAGGAUUUGGCUA |
| Cyclo | 22 | SEQ. ID 0053 | GAGAAAGGAUUUGGCUACA |
| Cyclo | 23 | SEQ. ID 0054 | GAAAGGAUUUGGCUACAAA |
| Cyclo | 24 | SEQ. ID 0055 | AAGGAUUUGGCUACAAAAA |
| Cyclo | 25 | SEQ. ID 0056 | GGAUUUGGCUACAAAAACA |
| Cyclo | 26 | SEQ. ID 0057 | AUUUGGCUACAAAAACAGC |
| Cyclo | 27 | SEQ. ID 0058 | UUGGCUACAAAAACAGCAA |
| Cyclo | 28 | SEQ. ID 0059 | GGCUACAAAAACAGCAAAU |
| Cyclo | 29 | SEQ. ID 0060 | CUACAAAAACAGCAAAUUC |
| Cyclo | 30 | SEQ. ID 0061 | ACAAAAACAGCAAAUUCCA |
| Cyclo | 31 | SEQ. ID 0062 | AAAAACAGCAAAUUCCAUC |
| Cyclo | 32 | SEQ. ID 0063 | AAACAGCAAAUUCCAUCGU |
| Cyclo | 33 | SEQ. ID 0064 | ACAGCAAAUUCCAUCGUGU |
| Cyclo | 34 | SEQ. ID 0065 | AGCAAAUUCCAUCGUGUAA |
| Cyclo | 35 | SEQ. ID 0066 | CAAAUUCCAUCGUGUAAUC |
| Cyclo | 36 | SEQ. ID 0067 | AAUUCCAUCGUGUAAUCAA |
| Cyclo | 37 | SEQ. ID 0068 | UUCCAUCGUGUAAUCAAGG |
| Cyclo | 38 | SEQ. ID 0069 | CCAUCGUGUAAUCAAGGAC |
| Cyclo | 39 | SEQ. ID 0070 | AUCGUGUAAUCAAGGACUU |
| Cyclo | 40 | SEQ. ID 0071 | CGUGUAAUCAAGGACUUCA |
| Cyclo | 41 | SEQ. ID 0072 | UGUAAUCAAGGACUUCAUG |
| Cyclo | 42 | SEQ. ID 0073 | UAAUCAAGGACUUCAUGAU |
| Cyclo | 43 | SEQ. ID 0074 | AUCAAGGACUUCAUGAUCC |
| Cyclo | 44 | SEQ. ID 0075 | CAAGGACUUCAUGAUCCAG |
| Cyclo | 45 | SEQ. ID 0076 | AGGACUUCAUGAUCCAGGG |
| Cyclo | 46 | SEQ. ID 0077 | GACUUCAUGAUCCAGGGCG |
| Cyclo | 47 | SEQ. ID 0078 | CUUCAUGAUCCAGGGCGGA |
| Cyclo | 48 | SEQ. ID 0079 | UCAUGAUCCAGGGCGGAGA |
| Cyclo | 49 | SEQ. ID 0080 | AUGAUCCAGGGCGGAGACU |
| Cyclo | 50 | SEQ. ID 0081 | GAUCCAGGGCGGAGACUUC |
| Cyclo | 51 | SEQ. ID 0082 | UCCAGGGCGGAGACUUCAC |
| Cyclo | 52 | SEQ. ID 0083 | CAGGGCGGAGACUUCACCA |
| Cyclo | 53 | SEQ. ID 0084 | GGGCGGAGACUUCACCAGG |
| Cyclo | 54 | SEQ. ID 0085 | GCGGAGACUUCACCAGGGG |
| Cyclo | 55 | SEQ. ID 0086 | GGAGACUUCACCAGGGGAG |
| Cyclo | 56 | SEQ. ID 0087 | AGACUUCACCAGGGGAGAU |
| Cyclo | 57 | SEQ. ID 0088 | ACUUCACCAGGGGAGAUGG |
| Cyclo | 58 | SEQ. ID 0089 | UUCACCAGGGGAGAUGGCA |
| Cyclo | 59 | SEQ. ID 0090 | CACCAGGGGAGAUGGCACA |
| Cyclo | 60 | SEQ. ID 0091 | CCAGGGGAGAUGGCACAGG |
| Cyclo | 61 | SEQ. ID 0092 | AGGGGAGAUGGCACAGGAG |
| Cyclo | 62 | SEQ. ID 0093 | GGGAGAUGGCACAGGAGGA |
| Cyclo | 63 | SEQ. ID 0094 | GAGAUGGCACAGGAGGAAA |
| Cyclo | 64 | SEQ. ID 0095 | GAUGGCACAGGAGGAAAGA |
| Cyclo | 65 | SEQ. ID 0431 | UGGCACAGGAGGAAAGAGC |
| Cyclo | 66 | SEQ. ID 0096 | GCACAGGAGGAAAGAGCAU |
| Cyclo | 67 | SEQ. ID 0097 | ACAGGAGGAAAGAGCAUCU |
| Cyclo | 68 | SEQ. ID 0098 | AGGAGGAAAGAGCAUCUAC |
| Cyclo | 69 | SEQ. ID 0099 | GAGGAAAGAGCAUCUACGG |
| Cyclo | 70 | SEQ. ID 0100 | GGAAAGAGCAUCUACGGUG |
| Cyclo | 71 | SEQ. ID 0101 | AAAGAGCAUCUACGGUGAG |
| Cyclo | 72 | SEQ. ID 0102 | AGAGCAUCUACGGUGAGCG |
| Cyclo | 73 | SEQ. ID 0103 | AGCAUCUACGGUGAGCGCU |
| Cyclo | 74 | SEQ. ID 0104 | CAUCUACGGUGAGCGCUUC |
| Cyclo | 75 | SEQ. ID 0105 | UCUACGGUGAGCGCUUCCC |
| Cyclo | 76 | SEQ. ID 0106 | UACGGUGAGCGCUUCCCCG |
| Cyclo | 77 | SEQ. ID 0107 | CGGUGAGCGCUUCCCCGAU |
| Cyclo | 78 | SEQ. ID 0108 | GUGAGCGCUUCCCCGAUGA |
| Cyclo | 79 | SEQ. ID 0109 | GAGCGCUUCCCCGAUGAGA |
| Cyclo | 80 | SEQ. ID 0110 | GCGCUUCCCCGAUGAGAAC |
| Cyclo | 81 | SEQ. ID 0111 | GCUUCCCCGAUGAGAACUU |
| Cyclo | 82 | SEQ. ID 0112 | UUCCCCGAUGAGAACUUCA |
| Cyclo | 83 | SEQ. ID 0113 | CCCCGAUGAGAACUUCAAA |
| Cyclo | 84 | SEQ. ID 0114 | CCGAUGAGAACUUCAAACU |
| Cyclo | 85 | SEQ. ID 0115 | GAUGAGAACUUCAAACUGA |
| Cyclo | 86 | SEQ. ID 0116 | UGAGAACUUCAAACUGAAG |
| Cyclo | 87 | SEQ. ID 0117 | AGAACUUCAAACUGAAGCA |
| Cyclo | 88 | SEQ. ID 0118 | AACUUCAAACUGAAGCACU |
| Cyclo | 89 | SEQ. ID 0119 | CUUCAAACUGAAGCACUAC |
| Cyclo | 90 | SEQ. ID 0120 | UCAAACUGAAGCACUACGG |
| DB | 1 | SEQ. ID 0121 | ACGGGCAAGGCCAAGUGGG |
| DB | 2 | SEQ. ID 0122 | CGGGCAAGGCCAAGUGGGA |
| DB | 3 | SEQ. ID 0123 | GGGCAAGGCCAAGUGGGAU |
| DB | 4 | SEQ. ID 0124 | GGCAAGGCCAAGUGGGAUG |
| DB | 5 | SEQ. ID 0125 | GCAAGGCCAAGUGGGAUGC |
| DB | 6 | SEQ. ID 0126 | CAAGGCCAAGUGGGAUGCC |
| DB | 7 | SEQ. ID 0127 | AAGGCCAAGUGGGAUGCGU |
| DB | 8 | SEQ. ID 0128 | AGGCCAAGUGGGAUGCCUG |
| DB | 9 | SEQ. ID 0129 | GGCCAAGUGGGAUGCCUGG |
| DB | 10 | SEQ. ID 0130 | GCCAAGUGGGAUGCCUGGA |
| DB | 11 | SEQ. ID 0131 | CCAAGUGGGAUGCCUGGAA |
| DB | 12 | SEQ. ID 0132 | CAAGUGGGAUGCCUGGAAU |
| DB | 13 | SEQ. ID 0133 | AAGUGGGAUGCCUGGAAUG |
| DB | 14 | SEQ. ID 0134 | AGUGGGAUGCCUGGAAUGA |
| DB | 15 | SEQ. ID 0135 | GUGGGAUGCCUGGAAUGAG |
| DB | 16 | SEQ. ID 0136 | UGGGAUGCCUGGAAUGAGC |
| DB | 17 | SEQ. ID 0137 | GGGAUGCCUGGAAUGAGCU |
| DB | 18 | SEQ. ID 0138 | GGAUGCCUGGAAUGAGCUG |
| DB | 19 | SEQ. ID 0139 | GAUGCCUGGAAUGAGCUGA |
| DB | 20 | SEQ. ID 0140 | AUGCCUGGAAUGAGCUGAA |
| DB | 21 | SEQ. ID 0141 | UGCCUGGAAUGAGCUGAAA |
| DB | 22 | SEQ. ID 0142 | GCCUGGAAUGAGCUGAAAG |
| DB | 23 | SEQ. ID 0143 | CCUGGAAUGAGCUGAAAGG |
| DB | 24 | SEQ. ID 0144 | CUGGAAUGAGCUGAAAGGG |
| DB | 25 | SEQ. ID 0145 | UGGAAUGAGCUGAAAGGGA |
| DB | 26 | SEQ. ID 0146 | GGAAUGAGCUGAAAGGGAC |
| DB | 27 | SEQ. ID 0147 | GAAUGAGCUGAAAGGGACU |
| DB | 28 | SEQ. ID 0148 | AAUGAGCUGAAAGGGACUU |
| DB | 29 | SEQ. ID 0149 | AUGAGCUGAAAGGGACUUC |
| DB | 30 | SEQ. ID 0150 | UGAGCUGAAAGGGACUUCC |
| DB | 31 | SEQ. ID 0151 | GAGCUGAAAGGGACUUCCA |
| DB | 32 | SEQ. ID 0152 | AGCUGAAAGGGACUUCCAA |
| DB | 33 | SEQ. ID 0153 | GCUGAAAGGGACUUCCAAG |
| DB | 34 | SEQ. ID 0154 | CUGAAAGGGACUUCCAAGG |
| DB | 35 | SEQ. ID 0155 | UGAAAGGGACUUCCAAGGA |
| DB | 36 | SEQ. ID 0156 | GAAAGGGACUUCCAAGGAA |
| DB | 37 | SEQ. ID 0157 | AAAGGGACUUCCAAGGAAG |
| DB | 38 | SEQ. ID 0158 | AAGGGACUUCCAAGGAAGA |
| DB | 39 | SEQ. ID 0159 | AGGGACUUCCAAGGAAGAU |
| DB | 40 | SEQ. ID 0160 | GGGACUUCCAAGGAAGAUG |
| DB | 41 | SEQ. ID 0161 | GGACUUCCAAGGAAGAUGC |
| DB | 42 | SEQ. ID 0162 | GACUUCCAAGGAAGAUGCC |
| DB | 43 | SEQ. ID 0163 | ACUUCCAAGGAAGAUGCCA |
| DB | 44 | SEQ. ID 0164 | CUUCCAAGGAAGAUGCCAU |
| DB | 45 | SEQ. ID 0165 | UUCCAAGGAAGAUGCCAUG |
| DB | 46 | SEQ. ID 0166 | UCCAAGGAAGAUGCCAUGA |
| DB | 47 | SEQ. ID 0167 | CCAAGGAAGAUGCCAUGAA |
| DB | 48 | SEQ. ID 0168 | CAAGGAAGAUGCCAUGAAA |
| DB | 49 | SEQ. ID 0169 | AAGGAAGAUGCCAUGAAAG |
| DB | 50 | SEQ. ID 0170 | AGGAAGAUGCCAUGAAAGC |
| DB | 51 | SEQ. ID 0171 | GGAAGAUGCCAUGAAAGCU |
| DB | 52 | SEQ. ID 0172 | GAAGAUGCCAUGAAAGCUU |
| DB | 53 | SEQ. ID 0173 | AAGAUGCCAUGAAAGCUUA |
| DB | 54 | SEQ. ID 0174 | AGAUGCCAUGAAAGGUUAC |
| DB | 55 | SEQ. ID 0175 | GAUGCCAUGAAAGCUUACA |
| DB | 56 | SEQ. ID 0176 | AUGCCAUGAAAGCUUACAU |
| DB | 57 | SEQ. ID 0177 | UGCCAUGAAAGCUUACAUC |
| DB | 58 | SEQ. ID 0178 | GCCAUGAAAGCUUACAUCA |
| DB | 59 | SEQ. ID 0179 | CCAUGAAAGCUUACAUCAA |
| DB | 60 | SEQ. ID 0180 | CAUGAAAGCUUACAUCAAC |
| DB | 61 | SEQ. ID 0181 | AUGAAAGCUUACAUCAACA |
| DB | 62 | SEQ. ID 0182 | UGAAAGCUUACAUCAACAA |
| DB | 63 | SEQ. ID 0183 | GAAAGCUUACAUCAACAAA |
| DB | 64 | SEQ. ID 0184 | AAAGCUUACAUCAACAAAG |
| DB | 65 | SEQ. ID 0185 | AAGCUUACAUCAACAAAGU |
| DB | 66 | SEQ. ID 0186 | AGCUUACAUCAACAAAGUA |
| DB | 67 | SEQ. ID 0187 | GCUUACAUCAACAAAGUAG |
| DB | 68 | SEQ. ID 0188 | CUUACAUCAACAAAGUAGA |
| DB | 69 | SEQ. ID 0189 | UUACAUCAACAAAGUAGAA |
| DB | 70 | SEQ. ID 0190 | UACAUCAACAAAGUAGAAG |
| DB | 71 | SEQ. ID 0191 | ACAUCAACAAAGUAGAAGA |
| DB | 72 | SEQ. ID 0192 | CAUCAACAAAGUAGAAGAG |
| DB | 73 | SEQ. ID 0193 | AUCAACAAAGUAGAAGAGC |
| DB | 74 | SEQ. ID 0194 | UCAACAAAGUAGAAGAGCU |
| DB | 75 | SEQ. ID 0195 | CAACAAAGUAGAAGAGCUA |
| DB | 76 | SEQ. ID 0196 | AACAAAGUAGAAGAGCUAA |
| DB | 77 | SEQ. ID 0197 | ACAAAGUAGAAGAGCUAAA |
| DB | 78 | SEQ. ID 0198 | CAAAGUAGAAGAGCUAAAG |
| DB | 79 | SEQ. ID 0199 | AAAGUAGAAGAGCUAAAGA |
| DB | 80 | SEQ. ID 0200 | AAGUAGAAGAGCUAAAGAA |
| DB | 81 | SEQ. ID 0201 | AGUAGAAGAGCUAAAGAAA |
| DB | 82 | SEQ. ID 0202 | GUAGAAGAGCUAAAGAAAA |
| DB | 83 | SEQ. ID 0203 | UAGAAGAGCUAAAGAAAAA |
| DB | 84 | SEQ. ID 0204 | AGAAGAGCUAAAGAAAAAA |
| DB | 85 | SEQ. ID 0205 | GAAGAGCUAAAGAAAAAAU |
| DB | 86 | SEQ. ID 0206 | AAGAGCUAAAGAAAAAAUA |
| DB | 87 | SEQ. ID 0207 | AGAGCUAAAGAAAAAAUAC |
| DB | 88 | SEQ. ID 0208 | GAGCUAAAGAAAAAAUACG |
| DB | 89 | SEQ. ID 0209 | AGCUAAAGAAAAAAUACGG |
| DB | 90 | SEQ. ID 0210 | GCUAAAGAAAAAAUACGGG |
| Luc | 1 | SEQ. ID 0211 | AUCCUCAUAAAGGCCAAGA |
| Luc | 2 | SEQ. ID 0212 | AGAUCCUCAUAAAGGCCAA |
| Luc | 3 | SEQ. ID 0213 | AGAGAUCCUCAUAAAGGCG |
| Luc | 4 | SEQ. ID 0214 | AGAGAGAUCCUCAUAAAGG |
| Luc | 5 | SEQ. ID 0215 | UCAGAGAGAUCCUCAUAAA |
| Luc | 6 | SEQ. ID 0216 | AAUCAGAGAGAUCCUCAUA |
| Luc | 7 | SEQ. ID 0217 | AAAAUCAGAGAGAUCCUCA |
| Luc | 8 | SEQ. ID 0218 | GAAAAAUCAGAGAGAUCCU |
| Luc | 9 | SEQ. ID 0219 | AAGAAAAAUCAGAGAGAUC |
| Luc | 10 | SEQ. ID 0220 | GCAAGAAAAAUCAGAGAGA |
| Luc | 11 | SEQ. ID 0221 | ACGCAAGAAAAAUCAGAGA |
| Luc | 12 | SEQ. ID 0222 | CGACGCAAGAAAAAUCAGA |
| Luc | 13 | SEQ. ID 0223 | CUCGACGCAAGAAAAAUCA |
| Luc | 14 | SEQ. ID 0224 | AACUCGACGCAAGAAAAAU |
| Luc | 15 | SEQ. ID 0225 | AAAACUCGACGCAAGAAAA |
| Luc | 16 | SEQ. ID 0226 | GGAAAACUCGACGCAAGAA |
| Luc | 17 | SEQ. ID 0227 | CCGGAAAACUCGACGCAAG |
| Luc | 18 | SEQ. ID 0228 | UACCGGAAAACUCGACGCA |
| Luc | 19 | SEQ. ID 0229 | CUUACCGGAAAACUCGACG |
| Luc | 20 | SEQ. ID 0230 | GUCUUACCGGAAAACUCGA |
| Luc | 21 | SEQ. ID 0231 | AGGUCUUACCGGAAAACUC |
| Luc | 22 | SEQ. ID 0232 | AAAGGUCUUACCGGAAAAC |
| Luc | 23 | SEQ. ID 0233 | CGAAAGGUCUUACCGGAAA |
| Luc | 24 | SEQ. ID 0234 | ACCGAAAGGUCUUACCGGA |
| Luc | 25 | SEQ. ID 0235 | GUACCGAAAGGUCUUACCG |
| Luc | 26 | SEQ. ID 0236 | AAGUACCGAAAGGUCUUAC |
| Luc | 27 | SEQ. ID 0237 | CGAAGUACCGAAAGGUCUU |
| Luc | 28 | SEQ. ID 0238 | GACGAAGUACCGAAAGGUC |
| Luc | 29 | SEQ. ID 0239 | UGGACGAAGUACCGAAAGG |
| Luc | 30 | SEQ. ID 0240 | UGUGGACGAAGUACCGAAA |
| Luc | 31 | SEQ. ID 0241 | UUUGUGGACGAAGUACCGA |
| Luc | 32 | SEQ. ID 0242 | UGUUUGUGGACGAAGUACC |
| Luc | 33 | SEQ. ID 0243 | UGUGUUUGUGGACGAAGUA |
| Luc | 34 | SEQ. ID 0244 | GUUGUGUUUGUGGACGAAG |
| Luc | 35 | SEQ. ID 0245 | GAGUUGUGUUUGUGGACGA |
| Luc | 36 | SEQ. ID 0246 | AGGAGUUGUGUUUGUGGAC |
| Luc | 37 | SEQ. ID 0247 | GGAGGAGUUGUGUUUGUGG |
| Luc | 38 | SEQ. ID 0248 | GCGGAGGAGUUGUGUUUGU |
| Luc | 39 | SEQ. ID 0249 | GCGCGGAGGAGUUGUGUUU |
| Luc | 40 | SEQ. ID 0250 | UUGCGCGGAGGAGUUGUGU |
| Luc | 41 | SEQ. ID 0251 | AGUUGCGCGGAGGAGUUGU |
| Luc | 42 | SEQ. ID 0252 | AAAGUUGCGCGGAGGAGUU |
| Luc | 43 | SEQ. ID 0253 | AAAAAGUUGCGCGGAGGAG |
| Luc | 44 | SEQ. ID 0254 | CGAAAAAGUUGCGCGGAGG |
| Luc | 45 | SEQ. ID 0255 | GGCGAAAAAGUUGCGCGGA |
| Luc | 46 | SEQ. ID 0256 | ACCGCGAAAAAGUUGCGCG |
| Luc | 47 | SEQ. ID 0257 | CAACCGCGAAAAAGUUGCG |
| Luc | 48 | SEQ. ID 0258 | AACAACCGCGAAAAAGUUG |
| Luc | 49 | SEQ. ID 0259 | GUAACAACCGCGAAAAAGU |
| Luc | 50 | SEQ. ID 0260 | AAGUAACAACCGCGAAAAA |
| Luc | 51 | SEQ. ID 0261 | UCAAGUAACAACCGCGAAA |
| Luc | 52 | SEQ. ID 0262 | AGUCAAGUAACAACCGCGA |
| Luc | 53 | SEQ. ID 0263 | CCAGUCAAGUAACAACCGC |
| Luc | 54 | SEQ. ID 0264 | CGCCAGUCAAGUAACAACC |
| Luc | 55 | SEQ. ID 0265 | GUCGCCAGUCAAGUAACAA |
| Luc | 56 | SEQ. ID 0266 | ACGUCGCCAGUCAAGUAAC |
| Luc | 57 | SEQ. ID 0267 | UUACGUCGGCAGUCAAGUA |
| Luc | 58 | SEQ. ID 0268 | GAUUACGUCGCCAGUCAAG |
| Luc | 59 | SEQ. ID 0269 | UGGAUUACGUCGCCAGUCA |
| Luc | 60 | SEQ. ID 0270 | CGUGGAUUACGUCGCCAGU |
| Luc | 61 | SEQ. ID 0271 | AUCGUGGAUUACGUCGCCA |
| Luc | 62 | SEQ. ID 0272 | AGAUCGUGGAUUACGUCGC |
| Luc | 63 | SEQ. ID 0273 | AGAGAUCGUGGAUUACGUC |
| Luc | 64 | SEQ. ID 0274 | AAAGAGAUCGUGGAUUACG |
| Luc | 65 | SEQ. ID 0275 | AAAAAGAGAUCGUGGAUUA |
| Luc | 66 | SEQ. ID 0276 | GGAAAAAGAGAUCGUGGAU |
| Luc | 67 | SEQ. ID 0277 | ACGGAAAAAGAGAUCGUGG |
| Luc | 68 | SEQ. ID 0278 | UGACGGAAAAAGAGAUCGU |
| Luc | 69 | SEQ. ID 0279 | GAUGACGGAAAAAGAGAUC |
| Luc | 70 | SEQ. ID 0280 | ACGAUGACGGAAAAAGAGA |
| Luc | 71 | SEQ. ID 0281 | AGACGAUGACGGAAAAAGA |
| Luc | 72 | SEQ. ID 0282 | AAAGACGAUGACGGAAAAA |
| Luc | 73 | SEQ. ID 0283 | GGAAAGACGAUGACGGAAA |
| Luc | 74 | SEQ. ID 0284 | ACGGAAAGACGAUGACGGA |
| Luc | 75 | SEQ. ID 0285 | GCAGGGAAAGACGAUGACG |
| Luc | 76 | SEQ. ID 0286 | GAGCACGGAAAGACGAUGA |
| Luc | 77 | SEQ. ID 0287 | UGGAGCACGGAAAGACGAU |
| Luc | 78 | SEQ. ID 0288 | UUUGGAGCACGGAAAGACG |
| Luc | 79 | SEQ. ID 0289 | GUUUUGGAGCACGGAAAGA |
| Luc | 80 | SEQ. ID 0290 | UUGUUUUGGAGCACGGAAA |
| Luc | 81 | SEQ. ID 0291 | UGUUGUUUUGGAGCACGGA |
| Luc | 82 | SEQ. ID 0292 | GUUGUUGUUUUGGAGCAGG |
| Luc | 83 | SEQ. ID 0293 | CCGUUGUUGUUUUGGAGCA |
| Luc | 84 | SEQ. ID 0294 | CGCCGUUGUUGUUUUGGAG |
| Luc | 85 | SEQ. ID 0295 | GCCGCCGUUGUUGUUUUGG |
| Luc | 86 | SEQ. ID 0296 | CCGGCGCCGUUGUUGUUUU |
| Luc | 87 | SEQ. ID 0297 | UCCCGCCGCCGUUGUUGUU |
| Luc | 88 | SEQ. ID 0298 | CUUCCCGCCGCCGUUGUUG |
| Luc | 89 | SEQ. ID 0299 | AACUUCCCGCCGCCGUUGU |
| Luc | 90 | SEQ. ID 0300 | UGAACUUCCCGCCGCCGUU |

### Example II

### Validation of the Algorithm Using DBI, Luciferase, PLK, EGFR, and SEAP

[0422] The algorithm (Formula VIII) identified siRNAs for five genes, human DBI, firefly luciferase (fLuc), renilla luciferase (rLuc), human PLK, and human secreted alkaline phosphatase (SEAP). Four individual siRNAs were selected on the basis of their SMARTscores™ derived by analysis of their sequence using Formula VIII (all of the siRNAs would be selected with Formula IX as well) and analyzed for their ability to silence their targets' expression. In addition to the scoring, a BLAST search was conducted for each siRNA. To minimize the potential for off-target silencing effects, only those target sequences with more than three mismatches against un-related sequences were selected. Semizarov, et al, Specificity of short interfering RNA determined through gene expression signatures. Proc. Natl. Acad. Sci. U.S.A. 2003, 100:6347. These duplexes were analyzed individually and in pools of 4 and compared with several siRNAs that were randomly selected. The functionality was measured as a percentage of targeted gene knockdown as compared to controls. All siRNAs were transfected as described by the methods above at 100 nM concentration into HEK293 using Lipofectamine 2000. The level of the targeted gene expression was evaluated by B-DNA as described above and normalized to the non-specific control. FIG. 10 shows that the siRNAs selected by the algorithm disclosed herein were significantly more potent than randomly selected siRNAs. The algorithm increased the chances of identifying an F50 siRNA from 48% to 91%, and an F80 siRNA from 13% to 57%. In addition, pools of SMART siRNA silence the selected target better than randomly selected pools (see FIG. 10F).

### Example III

### Validation of the Algorithm Using Genes Involved in Clathrin-Dependent Endocytosis

[0423] Components of clathrin-mediated endocytosis pathway are key to modulating intracellular signaling and play important roles in disease. Chromosomal rearrangements that result in fusion transcripts between the Mixed-Lineage Leukemia gene (MLL) and CALM (clathrin assembly lymphoid myeloid leukemia gene) are believed to play a role in leukemogenesis. Similarly, disruptions in Rab7 and Rab9, as well as HIP1 (Huntingtin-interacting protein), genes that are believed to be involved in endocytosis, are potentially responsible for ailments resulting in lipid storage, and neuronal diseases, respectively. For these reasons, siRNA directed against clathrin and other genes involved in the clathrin-mediated endocytotic pathway are potentially important research and therapeutic tools.

[0424] siRNAs directed against genes involved in the clathrin-mediated endocytosis pathways were selected using Formula VIII. The targeted genes were clathrin heavy chain (CHC, accession # NM_{—}004859), clathrin light chain A (CLCa, NM_{—}001833), clathrin light chain B (CLCb, NM_{—}001834), CALM (U45976), β2 subunit of AP-2 (β2, NM_{—}001282), Eps15 (NM_{—}001981), Eps15R (NM_{—}021235), dynamin II (DYNII, NM_{—}004945), Rab5a (BC001267), Rab5b (NM_{—}002868), Rab5c (AF141304), and EEA.1 (XM_{—}018197).

[0425] For each gene, four siRNAs duplexes with the highest scores were selected and a BLAST search was conducted for each of them using the Human EST database. In order to minimize the potential for off-target silencing effects, only those sequences with more than three mismatches against un-related sequences were used. All duplexes were synthesized at Dharmacon, Inc. as 21-mers with 3′-UU overhangs using a modified method of 2′-ACE chemistry, Scaringe, Advanced 5′-silyl-2′-orthoester approach to RNA oligonucleotide synthesis, Methods Enzymol 2000, 317:3, and the antisense strand was chemically phosphorylated to insure maximized activity.

[0426] HeLa cells were grown in Dulbecco's modified Eagle's medium (DMEM) containing 10% fetal bovine serum, antibiotics and glutamine. siRNA duplexes were resuspended in 1× siRNA Universal buffer (Dharmacon, Inc.) to 20 μM prior to transfection. HeLa cells in 12-well plates were transfected twice with 4 μl of 20 μM siRNA duplex in 3 μl Lipofectamine 2000 reagent (Invitrogen, Carlsbad, Calif., USA) at 24-hour intervals. For the transfections in which 2 or 3 siRNA duplexes were included, the amount of each duplex was decreased, so that the total amount was the same as in transfections with single siRNAs. Cells were plated into normal culture medium 12 hours prior to experiments, and protein levels were measured 2 or 4 days after the first transfection.

[0427] Equal amounts of lysates were resolved by electrophoresis, blotted, and stained with the antibody specific to targeted protein, as well as antibodies specific to unrelated proteins, PP1 phosphatase and Tsg101 (not shown). The cells were lysed in Triton X-100/glycerol solubilization buffer as described previously. Tebar, Bohlander, & Sorkin, Clathrin Assembly Lymphoid Myeloid Leukemia (CALM) Protein: Localization in Endocytic-coated Pits, Interactions with Clathrin, and the Impact of Overexpression on Clathrin-mediated Traffic, Mol. Biol. Cell August 1999, 10:2687. Cell lysates were electrophoresed, transferred to nitrocellulose membranes, and Western blotting was performed with several antibodies followed by detection using enhanced chemiluminescence system (Pierce, Inc). Several x-ray films were analyzed to determine the linear range of the chemiluminescence signals, and the quantifications were performed using densitometry and AlphaImager v5.5 software (Alpha Innotech Corporation). In experiments with Eps15R-targeted siRNAs, cell lysates were subjected to immunoprecipitation with Ab860, and Eps15R was detected in immunoprecipitates by Western blotting as described above.

[0428] The antibodies to assess the levels of each protein by Western blot were obtained from the following sources: monoclonal antibody to clathrin heavy chain (TD.1) was obtained from American Type Culture Collection (Rockville, Md., USA); polyclonal antibody to dynamin II was obtained from Affinity Bioreagents, Inc. (Golden, Colo., USA); monoclonal antibodies to EEA.1 and Rab5a were purchased from BD Transduction Laboratories (Los Angeles, Calif., USA); the monoclonal antibody to Tsg101 was purchased from Santa Cruz Biotechnology, Inc. (Santa Cruz, Calif., USA); the monoclonal antibody to GFP was from ZYMED Laboratories Inc. (South San Francisco, Calif., USA); the rabbit polyclonal antibodies Ab32 specific to α-adaptins and Ab20 to CALM were described previously Sorkin, et al, Stoichiometric Interaction of the Epidermal Growth Factor Receptor with the Clathrin-associated Protein Complex AP-2, J. Biol. Chem. January 1995, 270:619, the polyclonal antibodies to clathrin light chains A and B were kindly provided by Dr. F. Brodsky (UCSF); monoclonal antibodies to PP1 (BD Transduction Laboratories) and α-Actinin (Chemicon) were kindly provided by Dr. M. Dell'Acqua (University of Colorado); Eps15 Ab577 and Eps15R Ab860 were kindly provided by Dr. P. P. Di Fiore (European Cancer Institute).

[0429] FIG. 11 demonstrates the in vivo functionality of 48 individual siRNAs, selected using Formula VIII (most of them will meet the criteria incorporated by Formula IX as well) targeting 12 genes. Various cell lines were transfected with siRNA duplexes (Dup1-4) or pools of siRNA duplexes (Pool), and the cells were lysed 3 days after transfection with the exception of CALM (2 days) and β2 (4 days).

[0430] Note a β1-adaptin band (part of AP-1 Golgi adaptor complex) that runs slightly slower than β2 adaptin. CALM has two splice variants, 66 and 72 kD. The full-length Eps15R (a doublet of ˜130 kD) and several truncated spliced forms of ˜100 kD and ˜70 kD were detected in Eps15R immunoprecipitates (shown by arrows). The cells were lysed 3 days after transfection. Equal amounts of lysates were resolved by electrophoresis and blotted with the antibody specific to a targeted protein (GFP antibody for YFP fusion proteins) and the antibody specific to unrelated proteins PP1 phosphatase or α-actinin, and TSG101. The amount of protein in each specific band was normalized to the amount of non-specific proteins in each lane of the gel. Nearly all of them appear to be functional, which establishes that Formula VIII and IX can be used to predict siRNAs' functionality in general in a genome wide manner.

[0431] To generate the fusion of yellow fluorescent protein (YFP) with Rab5b or Rab5c (YFP-Rab5b or YFP-Rab5c), a DNA fragment encoding the full-length human Rab5b or Rab5c was obtained by PCR using Pfu polymerase (Stratagene) with a SacI restriction site introduced into the 5′ end and a KpnI site into the 3′ end and cloned into pEYFP-C1 vector (CLONTECH, Palo Alto, Calif., USA). GFP-CALM and YFP-Rab5a were described previously Tebar, Bohlander, & Sorkin, Clathrin Assembly Lymphoid Myeloid Leukemia (CALM) Protein: Localization in Endocytic-coated Pits, Interactions with Clathrin, and the Impact of Overexpression on Clathrin-mediated Traffic, Mol. Biol. Cell August 1999, 10:2687.

### Example IV

### Validation of the Algorithm Using Eg5, GADPH, ATE1, MEK2, MEK1, QB, LaminA/C, c-myc, Human Cyclophilin, and Mouse Cyclophilin

[0432] A number of genes have been identified as playing potentially important roles in disease etiology. Expression profiles of normal and diseased kidneys has implicated Edg5 in immunoglobulin A neuropathy, a common renal glomerular disease. Myc1, MEK1/2 and other related kinases have been associated with one or more cancers, while lamins have been implicated in muscular dystrophy and other diseases. For these reasons, siRNA directed against the genes encoding these classes of molecules would be important research and therapeutic tools.

[0433] FIG. 12 illustrates four siRNAs targeting 10 different genes (Table V for sequence and accession number information) that were selected according to the Formula VIII and assayed as individuals and pools in HEK293 cells. The level of siRNA induced silencing was measured using the B-DNA assay. These studies demonstrated that thirty-six out of the forty individual SMART-selected siRNA tested are functional (90%) and all 10 pools are fully functional.

### Example V

### Validation of the Algorithm Using Bcl2

[0434] Bcl-2 is a ˜25 kD, 205-239 amino acid, anti-apoptotic protein that contains considerable homology with other members of the BCL family including BCLX, MCL1, BAX, BAD, and BIK. The protein exists in at least two forms (Bcl2a, which has a hydrophobic tail for membrane anchorage, and Bcl2b, which lacks the hydrophobic tail) and is predominantly localized to the mitochondrial membrane. While Bcl2 expression is widely distributed, particular interest has focused on the expression of this molecule in B and T cells. Bcl2 expression is down-regulated in normal germinal center B cells yet in a high percentage of follicular lymphomas, Bcl2 expression has been observed to be elevated. Cytological studies have identified a common translocation ((14;18)(q32;q32)) amongst a high percentage (>70%) of these lymphomas. This genetic lesion places the Bcl2 gene in juxtaposition to immunoglobulin heavy chain gene (IgH) encoding sequences and is believed to enforce inappropriate levels of gene expression, and resistance to programmed cell death in the follicle center B cells. In other cases, hypomethylation of the Bcl2 promoter leads to enhanced expression and again, inhibition of apoptosis. In addition to cancer, dysregulated expression of Bcl-2 has been correlated with multiple sclerosis and various neurological diseases.

[0435] The correlation between Bcl-2 translocation and cancer makes this gene an attractive target for RNAi. Identification of siRNA directed against the bcl2 transcript (or Bcl2-IgH fusions) would further our understanding Bcl2 gene function and possibly provide a future therapeutic agent to battle diseases that result from altered expression or function of this gene.

In Silico Identification of Functional siRNA.

[0436] To identify functional and hyperfunctional siRNA against the Bcl2 gene, the sequence for Bcl-2 was downloaded from the NCBI Unigene database and analyzed using the Formula VIII algorithm. As a result of these procedures, both the sequence and SMARTscores™ of the Bcl2 siRNA were obtained and ranked according to their functionality. Subsequently, these sequences were BLAST'ed (database) to insure that the selected sequences were specific and contained minimal overlap with unrealated genes. The SMARTscores™ for the top 10 Bcl-2 siRNA are identified in FIG. 13.

In Vivo Testing of Bcl-2 SiRNA

[0437] Bcl-2 siRNAs having the top ten SMARTscores™ were selected and tested in a functional assay to determine silencing efficiency. To accomplish this, each of the ten duplexes were synthesized using 2′-O-ACE chemistry and transfected at 100 nM concentrations into cells. Twenty-four hours later assays were performed on cell extracts to assess the degree of target silencing. Controls used in these experiments included mock transfected cells, and cells that were transfected with a non-specific siRNA duplex.

[0438] The results of these experiments are presented below (and in FIG. 14) and show that all ten of the selected siRNA induce 80% or better silencing of the Bcl2 message at 100 nM concentrations. These data verify that the algorithm successfully identified functional Bcl2 siRNA and provide a set of functional agents that can be used in experimental and therapeutic environments.

| | | |
|---|---|---|
| siRNA 1 | GGGAGAUAGUGAUGAAGUA | SEQ. ID NO. 301 |
| siRNA 2 | GAAGUACAUCCAUUAUAAG | SEQ. ID NO. 302 |
| siRNA 3 | GUACGACAACCGGGAGAUA | SEQ. ID NO. 303 |
| siRNA 4 | AGAUAGUGAUGAAGUACAU | SEQ. ID NO. 304 |
| siRNA 5 | UGAAGACUCUGCUCAGUUU | SEQ. ID NO. 305 |
| siRNA 6 | GCAUGCGGCCUCUGUUUGA | SEQ. ID NO. 306 |
| siRNA 7 | UGCGGCCUCUGUUUGAUUU | SEQ. ID NO. 307 |
| siRNA 8 | GAGAUAGUGAUGAAGUACA | SEQ. ID NO. 308 |
| siRNA 9 | GGAGAUAGUGAUGAAGUAC | SEQ. ID NO. 309 |
| siRNA 10 | GAAGACUCUGCUCAGUUUG | SEQ. ID NO. 310 |

[0439] Bcl2 siRNA: Sense Strand, 5′→3′

### Example VI

### Sequences Selected by the Algorithm

[0440] Sequences of the siRNAs selected using Formulas (Algorithms) VIII and IX with their corresponding ranking, which have been evaluated for the silencing activity in vivo in the present study (Formula VIII and IX, respectively) are shown in Table V. It should be noted that the “t” residues in Table V, and elsewhere, when referring to siRNA, should be replaced by “u” residues.

TABLE V

| | | | | | |
|---|---|---|---|---|---|
| Gene | Accession | | | Formula | Formula |
| Name | Number | SEQ. ID NO. | FTllSeqTence | VIII | IX |

| | | | | | |
|---|---|---|---|---|---|
| CLTC | NM_004859 | SEQ. ID NO. 2400 | GAAAGAATCTGTAGAGAAA | 76 | 94.2 |
| CLTC | NM_004859 | SEQ. ID NO. 2401 | GCAATGAGCTGTTTGAAGA | 65 | 39.9 |
| CLTC | NM_004859 | SEQ. ID NO. 2402 | TGACAAAGGTGGATAAATT | 57 | 38.2 |
| CLTC | NM_004859 | SEQ. ID NO. 2403 | GGAAATGGATCTCTTTGAA | 54 | 49.4 |
| CLTA | NM_001833 | SEQ. ID NO. 2404 | GGAAAGTAATGGTCCAACA | 22 | 55.5 |
| CLTA | NM_001833 | SEQ. ID NO. 2405 | AGACAGTTATGCAGCTATT | 4 | 22.9 |
| CLTA | NM_001833 | SEQ. ID NO. 2406 | CCAATTCTCGGAAGCAAGA | 1 | 17 |
| CLTA | NM_001833 | SEQ. ID NO. 2407 | GAAAGTAATGGTCCAACAG | −1 | −13 |
| CLTB | NM_001834 | SEQ. ID NO. 2408 | GCGCCAGAGTGAACAAGTA | 17 | 57.5 |
| CLTB | NM_001834 | SEQ. ID NO. 2409 | GAAGGTGGCCCAGCTATGT | 15 | −8.6 |
| CLTB | NM_001834 | SEQ. ID NO. 0311 | GGAACCAGCGCCAGAGTGA | 13 | 40.5 |
| CLTB | NM_001834 | SEQ. ID NO. 0312 | GAGCGAGATTGCAGGCATA | 20 | 61.7 |
| CALM | U45976 | SEQ. ID NO. 0313 | GTTAGTATCTGATGACTTG | 36 | −34.6 |
| CALM | U45976 | SEQ. ID NO. 0314 | GAAATGGAACCACTAAGAA | 33 | 46.1 |
| CALM | U45976 | SEQ. ID NO. 0315 | GGAAATGGAACCACTAAGA | 30 | 61.2 |
| CALM | U45976 | SEQ. ID NO. 0316 | CAACTACACTTTCCAATGC | 28 | 6.8 |
| EPS15 | NM_001981 | SEQ. ID NO. 0317 | CCACCAAGATTTCATGATA | 48 | 25.2 |
| EPS15 | NM_001981 | SEQ. ID NO. 0318 | GATCGGAACTCCAACAAGA | 43 | 49.3 |
| EPS15 | NM_001981 | SEQ. ID NO. 0319 | AAACGGAGCTACAGATTAT | 39 | 11.5 |
| EPS15 | NM_001981 | SEQ. ID NO. 0320 | CCACACAGCATTCTTGTAA | 33 | −23.6 |
| EPS15R | NM_021235 | SEQ. ID NO. 0321 | GAAGTTACCTTGAGCAATC | 48 | 33 |
| EPS15R | NM_021235 | SEQ. ID NO. 0322 | GGACTTGGCCGATCCAGAA | 27 | 33 |
| EPS15R | NM_021235 | SEQ. ID NO. 0323 | GCACTTGGATCGAGATGAG | 20 | 1.3 |
| EPS15R | NM_021235 | SEQ. ID NO. 0324 | CAAAGACCAATTCGCGTTA | 17 | 27.7 |
| DNM2 | NM_004945 | SEQ. ID NO. 0325 | CCGAATCAATCGCATCTTC | 6 | −29.6 |
| DNM2 | NM_004945 | SEQ. ID NO. 0326 | GACATGATCCTGCAGTTCA | 5 | −14 |
| DNM2 | NM_004945 | SEQ. ID NO. 0327 | GAGCGAATCGTCACCACTT | 5 | 24 |
| DNM2 | NM_004945 | SEQ. ID NO. 0328 | CCTCCGAGCTGGCGTCTAC | −4 | −63.6 |
| ARF6 | AF93885 | SEQ. ID NO. 0329 | TCACATGGTTAACCTCTAA | 27 | −21.1 |
| ARF6 | AF93885 | SEQ. ID NO. 0330 | GATGAGGGACGCCATAATC | 7 | −38.4 |
| ARF6 | AF93885 | SEQ. ID NO. 0331 | CCTCTAACTACAAATCTTA | 4 | 16.9 |
| ARF6 | AF93885 | SEQ. ID NO. 0332 | GGAAGGTGCTATCCAAAAT | 4 | 11.5 |
| RAB5A | BC001267 | SEQ. ID NO. 0333 | GCAAGCAAGTCCTAACATT | 40 | 25.1 |
| RAB5A | BC001267 | SEQ. ID NO. 0334 | GGAAGAGGAGTAGACCTTA | 17 | 50.1 |
| RAB5A | BC001267 | SEQ. ID NO. 0335 | AGGAATCAGTGTTGTAGTA | 16 | 11.5 |
| RAB5A | BC001267 | SEQ. ID NO. 0336 | GAAGAGGAGTAGACCTTAC | 12 | 7 |
| RAB5B | NM_002868 | SEQ. ID NO. 0337 | GAAAGTCAAGCCTGGTATT | 14 | 18.1 |
| RAB5B | NM_002868 | SEQ. ID NO. 0338 | AAAGTCAAGCCTGGTATTA | 6 | −17.8 |
| RAB5B | NM_002868 | SEQ. ID NO. 0339 | GGTATGAACGTGAATGATC | 3 | −21.1 |
| RAB5B | NM_002868 | SEQ. ID NO. 0340 | CAAGCCTGGTATTACGTTT | −7 | −37.5 |
| RAB5C | AF141304 | SEQ. ID NO. 0341 | GGAACAAGATCTGTCAATT | 38 | 51.9 |
| RAB5C | AF141304 | SEQ. ID NO. 0342 | GCAATGAACGTGAACGAAA | 29 | 43.7 |
| RAB5C | AF141304 | SEQ. ID NO. 0343 | CAATGAACGTGAACGAAAT | 18 | 43.3 |
| RAB5C | AF141304 | SEQ. ID NO. 0344 | GGACAGGAGCGGTATCACA | 6 | 18.2 |
| EEA1 | XM_018197 | SEQ. ID NO. 0345 | AGACAGAGCTTGAGAATAA | 67 | 64.1 |
| EEA1 | XM_018197 | SEQ. ID NO. 0346 | GAGAAGATCTTTATGCAAA | 60 | 48.7 |
| EEA1 | XM_018197 | SEQ. ID NO. 0347 | GAAGAGAAATCAGCAGATA | 58 | 45.7 |
| EEA1 | XM_018197 | SEQ. ID NO. 0348 | GCAAGTAACTCAACTAACA | 56 | 72.3 |
| AP2B1 | NM_001282 | SEQ. ID NO. 0349 | GAGCTAATCTGCCACATTG | 49 | −12.4 |
| AP2B1 | NM_001282 | SEQ. ID NO. 0350 | GCAGATGAGTTACTAGAAA | 44 | 48.9 |
| AP2B1 | NM_001282 | SEQ. ID NO. 0351 | CAACTTAATTGTCCAGAAA | 41 | 28.2 |
| AP2B1 | NM_001282 | SEQ. ID NO. 0352 | CAACACAGGATTCTGATAA | 33 | −5.8 |
| PLK | NM_005030 | SEQ. ID NO. 0353 | AGATTGTGCCTAAGTCTCT | −35 | −3.4 |
| PLK | NM_005030 | SEQ. ID NO. 0354 | ATGAAGATCTGGAGGTGAA | 0 | −4.3 |
| PLK | NM_005030 | SEQ. ID NO. 0355 | TTTGAGACTTCTTGCCTAA | −5 | −27.7 |
| PLK | NM_005030 | SEQ. ID NO. 0356 | AGATCACCCTCCTTAAATA | 15 | 72.3 |
| GAPDH | NM_002046 | SEQ. ID NO. 0357 | CAACGGATTTGGTCGTATT | 27 | −2.8 |
| GAPDH | NM_002046 | SEQ. ID NO. 0358 | GAAATCCCATCACCATCTT | 24 | 3.9 |
| GAPDH | NM_002046 | SEQ. ID NO. 0359 | GACCTCAACTACATGGTTT | 22 | −22.9 |
| GAPDH | NM_002046 | SEQ. ID NO. 0360 | TGGTTTACATGTTCCAATA | 9 | 9.8 |
| c-Myc | | SEQ. ID NO. 0361 | GAAGAAATCGATGTTGTTT | 31 | −11.7 |
| c-Myc | | SEQ. ID NO. 0362 | ACACAAACTTGAAGAGCTA | 22 | 51.3 |
| c-Myc | | SEQ. ID NO. 0363 | GGAAGAAATCGATGTTGTT | 18 | 26 |
| c-Myc | | SEQ. ID NO. 0364 | GAAACGACGAGAACAGTTG | 18 | −8.9 |
| MAP2K1 | NM_002755 | SEQ. ID NO. 0365 | GCACATGGATGGAGGTTCT | 26 | 16 |
| MAP2K1 | NM_002755 | SEQ. ID NO. 0366 | GCAGAGAGAGCAGATTTGA | 16 | 0.4 |
| MAP2K1 | NM_002755 | SEQ. ID NO. 0367 | GAGGTTCTCTGGATCAAGT | 14 | 15.5 |
| MAP2K1 | NM_002755 | SEQ. ID NO. 0368 | GAGCAGATTTGAAGCAACT | 14 | 18.5 |
| MAP2K2 | NM_030662 | SEQ. ID NO. 0369 | CAAAGACGATGACTTCGAA | 37 | 26.4 |
| MAP2K2 | NM_030662 | SEQ. ID NO. 0370 | GATCAGCATTTGCATGGAA | 24 | −0.7 |
| MAP2K2 | NM_030662 | SEQ. ID NO. 0371 | TCCAGGAGTTTGTCAATAA | 17 | −4.5 |
| MAP2K2 | NM_030662 | SEQ. ID NO. 0372 | GGAAGCTGATCCACCTTGA | 16 | 59.2 |
| KNSL1(EG5) | NM_004523 | SEQ. ID NO. 0373 | GCAGAAATCTAAGGATATA | 53 | 35.8 |
| KNSL1(EG5) | NM_004523 | SEQ. ID NO. 0374 | CAACAAGGATGAAGTCTAT | 50 | 18.3 |
| KNSL1(EGS) | NM_004523 | SEQ. ID NO. 0375 | CAGCAGAAATCTAAGGATA | 41 | 32.7 |
| KNSL1(EG5) | NM_004523 | SEQ. ID NO. 0376 | CTAGATGGCTTTCTCAGTA | 39 | 3.9 |
| CyclophilinA_ | NM_021130 | SEQ. ID NO. 0377 | AGACAAGGTCCCAAAGACA | −16 | 58.1 |
| CyclophilinA_ | NM_021130 | SEQ. ID NO. 0378 | GGAATGGCAAGACCAGCAA | −6 | 36 |
| CyclophilinA_ | NM_021130 | SEQ. ID NO. 0379 | AGAATTATTCCAGGGTTTA | −3 | 16.1 |
| CyclophilinA_ | NM_021130 | SEQ. ID NO. 0380 | GCAGACAAGGTCCCAAAGA | 8 | 8.9 |
| LAMIN A/C | NM_170707 | SEQ. ID NO. 0381 | AGAAGCAGCTTCAGGATGA | 31 | 38.8 |
| LAMIN A/C | NM_170707 | SEQ. ID NO. 0382 | GAGCTTGACTTCCAGAAGA | 33 | 22.4 |
| LAMIN A/C | NM_170707 | SEQ. ID NO. 0383 | CCACCGAAGTTCACCCTAA | 21 | 27.5 |
| LAMIN A/C | NM_170707 | SEQ. ID NO. 0384 | GAGAAGAGCTCCTCCATCA | 55 | 30.1 |
| CyclophilinB | M60857 | SEQ. ID NO. 0385 | GAAAGAGCATCTACGGTGA | 41 | 83.9 |
| CyclophilinB | M60857 | SEQ. ID NO. 0386 | GAAAGGATTTGGCTACAAA | 53 | 59.1 |
| CyclophilinB | M60857 | SEQ. ID NO. 0387 | ACAGCAAATTCCATCGTGT | −20 | 28.8 |
| CyclophilinB | M60857 | SEQ. ID NO. 0388 | GGAAAGACTGTTCCAAAAA | 2 | 27 |
| DBI1 | NM_020548 | SEQ. ID NO. 0389 | CAACACGCCTCATCCTCTA | 27 | −7.6 |
| DBI2 | NM_020548 | SEQ. ID NO. 0390 | CATGAAAGCTTACATCAAC | 25 | −30.8 |
| DBI3 | NM_020548 | SEQ. ID NO. 0391 | AAGATGCCATGAAAGCTTA | 17 | 22 |
| DBI4 | NM_020548 | SEQ. ID NO. 0392 | GCACATACCGCCTGAGTCT | 15 | 3.9 |
| rLUC1 | | SEQ. ID NO. 0393 | GATCAAATCTGAAGAAGGA | 57 | 49.2 |
| rLUC2 | | SEQ. ID NO. 0394 | GCCAAGAAGTTTCCTAATA | 50 | 13.7 |
| rLUC3 | | SEQ. ID NO. 0395 | CAGCATATCTTGAACCATT | 41 | −2.2 |
| rLUC4 | | SEQ. ID NO. 0396 | GAACAAAGGAAACGGATGA | 39 | 29.2 |
| SeAP1 | NM_031313 | SEQ. ID NO. 0397 | CGGAAACGGTCCAGGCTAT | 6 | 26.9 |
| SeAP2 | NM_031313 | SEQ. ID NO. 0398 | GCTTCGAGCAGACATGATA | 4 | −11.2 |
| SeAP3 | NM_031313 | SEQ. ID NO. 0399 | CCTACACGGTCCTCCTATA | 4 | 4.9 |
| SeAP4 | NM_031313 | SEQ. ID NO. 0400 | GCCAAGAACCTCATCATCT | 1 | −9.9 |
| fLUC1 | | SEQ. ID NO. 0401 | GATATGGGCTGAATACAAA | 54 | 40.4 |
| fLUC2 | | SEQ. ID NO. 0402 | GCACTCTGATTGACAAATA | 47 | 54.7 |
| fLUC3 | | SEQ. ID NO. 0403 | TGAAGTCTCTGATTAAGTA | 46 | 34.5 |
| fLUC4 | | SEQ. ID NO. 0404 | TCAGAGAGATCCTCATAAA | 40 | 11.4 |
| mCyclo_1 | NM_008907 | SEQ. ID NO. 0405 | GCAAGAAGATCACCATTTC | 52 | 46.4 |
| mCyclo_2 | NM_008907 | SEQ. ID NO. 0406 | GAGAGAAATTTGAGGATGA | 36 | 70.7 |
| mCyclo_3 | NM_008907 | SEQ. ID NO. 0407 | GAAAGGATTTGGCTATAAG | 35 | −1.5 |
| mCyclo_4 | NM_008907 | SEQ. ID NO. 0408 | GAAAGAAGGCATGAACATT | 27 | 10.3 |
| BCL2_1 | NM_000633 | SEQ. ID NO. 0409 | GGGAGATAGTGATGAAGTA | 21 | 72 |
| BCL2_2 | NM_000633 | SEQ. ID NO. 0410 | GAAGTACATCCATTATAAG | 1 | 3.3 |
| BCL2_3 | NM_000633 | SEQ. ID NO. 0411 | GTACGACAACCGGGAGATA | 1 | 35.9 |
| BCL2_4 | NM_000633 | SEQ. ID NO. 0412 | AGATAGTGATGAAGTACAT | −12 | 22.1 |
| BCL2_5 | NM_000633 | SEQ. ID NO. 0413 | TGAAGACTCTGCTCAGTTT | 36 | 19.1 |
| BCL2_6 | NM_000633 | SEQ. ID NO. 0414 | GCATGCGGCCTCTGTTTGA | 5 | −9.7 |
| QB1 | NM_003365.1 | SEQ. ID NO. 0415 | GCACACAGCUUACUACAUC | 52 | −4.8 |
| QB2 | NM_003365.1 | SEQ. ID NO. 0416 | GAAAUGCCCUGGUAUCUCA | 49 | 22.1 |
| QB3 | NM_003365.1 | SEQ. ID NO. 0417 | GAAGGAACGUGAUGUGAUC | 34 | 22.9 |
| QB4 | NM_003365.1 | SEQ. ID NO. 0418 | GCACUACUCCUGUGUGUGA | 28 | 20.4 |
| ATE1-1 | NM_007041 | SEQ. ID NO. 0419 | GAACCGAGCUGGAGAACUU | 45 | 15.5 |
| ATE1-2 | NM_007041 | SEQ. ID NO. 0420 | GAUAUACAGUGUGAUCUUA | 40 | 12.2 |
| ATE1-3 | NM_007041 | SEQ. ID NO. 0421 | GUACUACGAUCCUGAUUAU | 37 | 32.9 |
| ATE1-4 | NM_007041 | SEQ. ID NO. 0422 | GUGCCGACCUUUACAAUUU | 35 | 18.2 |
| EGFR-1 | NM_005228 | SEQ. ID NO. 0423 | GAAGGAAACTGAATTCAAA | 68 | 79.4 |
| EGFR-1 | NM_005228 | SEQ. ID NO. 0424 | GGAAATATGTACTACGAAA | 49 | 49.5 |
| EGFR-1 | NM_005228 | SEQ. ID NO. 0425 | CCACAAAGCAGTGAATTTA | 41 | 7.6 |
| EGFR-1 | NM 005228 | SEQ. ID NO. 0426 | GTAACAAGCTCACGCAGTT | 40 | 25.9 |

### Example VII

### Genome-Wide Application of Formula VIII or Formula X

[0441] The examples described above demonstrate that the algorithm(s) can successfully identify functional siRNA and that these duplexes can be used to induce the desirable phenotype of transcriptional knockdown or knockout. Each gene or family of genes in each organism plays an important role in maintaining physiological homeostasis and the algorithm can be used to develop functional, highly functional, or hyperfunctional siRNA to each gene. In one example of how this is accomplished, the entire online ncbi refseq, locuslink, and/or unigene database for the human genome is first downloaded to local servers. Concommitantly, the most current version of the BLAST algorithm/program is also downloaded to enable analysis of all siRNA identified by the algorithm. Prior to applying the algorithm, sequences are filtered to eliminate all non-coding sequences (e.g., 3′ and 5′ UTRs) and sequences that contain single nucleotide polymorphisms (SNPs). In addition, in one version of the siRNA selection process, only those sequences that are associated with all isoforms (e.g., splice variants) of a given gene are reserved and considered for targeting. Subsequently, a list of all potential siRNAs (including a 19 basepair “core” sequence with two basepair 3′ overhangs) is generated for each gene sequence. This group is then filtered to eliminate sequences that contain any one of a number of undesirable traits including, but not limited to: 1) sequences that contain more than two GC basepairs in the last 5 nucleotides of the 3′ end of the sense strand, and 2) sequences that contained internal repeats that could potentially form hairpin structures. The output of these procedures are then submitted for scoring by the algorithm. In this example, the pre-filtered database was processed with Formula VIII or Formula X and the top 5-100 siRNAs having scores of 75 (adjusted) or greater were selected. If desired, the sequences of these siRNA can be BLAST'ed against the Unigene database containing all sequences in the genome of choice (e.g., the human genome) to eliminate any duplexes that show undesirable degrees of homology to sequences other than the intended target. The sequences of the (roughly) top 100 sequences for each gene are provided on the enclosed CDs in electronic form. In this example, the Formula X sequences were first generated using the procedures described above and subsequently compared to Formula VIII generated sequences. Formula VIII sequences that were also identified by Formula X were then removed (subtracted) from this database (Table XIII) to eliminate duplications.

[0442] With respect to the material on disk which is part of this disclosure, there are two tables provided in text format. Table XII, which is located in a file entitled table-xii.txt, created 26 Apr. 2004, with a file size of 110,486 kb, provides a list of the 5-100 sequences for each target, identified by Formula VIII as having the highest relative SMARTscores™ for the target analyzed. Table XIII, which is located in a file entitled table-xiii.txt, created 26 Apr. 2004, with a file size of 23,146 kb, provides a list of the 5-100 sequences for each target identified by Formula X. In addition, each table provides information concerning: the gene name, an NCBI accession number, an adjusted SMARTscore, and a sequence ID number. Any of the provided sequences can be used for gene silencing either alone or in combination with other sequences. The information contained on the disks is part of this patent application and is incorporated into the specification by reference. One may use these tables in order to identify functional siRNAs for the gene provided therein, by simply looking for the gene of interest and an siRNA that is listed as functional. Preferably, one would select one or more of the siRNAs that is most optimized for the target of interest and is denoted as a pool pick.

### Table XII: siRNA Selected by Formula VIII

[0443] See data submitted herewith on a CD-ROM in accordance with PCT Administrative Instructions Part 8. Table XII is included on the compact disk labeled COPY 1—TABLES PART DISK 1/1, TABLES XII and XIII (provided in triplicate, which copies are identical), in a file entitled table-xii.txt, date of creation 26 Apr. 2004, with a size of 110,486 kb.

### Table XIII: siRNA Selected by Formula X

[0444] See data submitted herewith on a CD-ROM in accordance with PCT Administrative Instructions Part 8. Table XIII is included on the compact disk labeled COPY 1—TABLES PART DISK 1/1, TABLES XII and XIII (provided in triplicate, which copies are identical), in file entitled table-xiii.txt, date of creation 26 Apr. 2004, with a size of 23,146 kb.

[0445] Many of the genes to which the described siRNA are directed play critical roles in disease etiology. For this reason, the siRNAs listed in the accompanying compact disk may potentially act as therapeutic agents. A number of prophetic examples follow and should be understood in view of the siRNA that are identified on the accompanying CD. To isolate these siRNAs, the appropriate message sequence for each gene is analyzed using one of the before mentioned formulas (preferably formula VIII) to identify potential siRNA targets. Subsequently these targets are BLAST'ed to eliminate homology with potential off-targets.

[0446] The list of potential disease targets is extensive. For instance, over-expression of Bcl10 has been implicated in the development of MALT lymphoma (mucosa associated lymphoid tissue lymphoma) and thus, functional, highly functional, or hyperfunctional siRNA directed against that gene (e.g., SEQ. ID NO. 0427: GGAAACCUCUCAUUGCUAA; SEQ. ID NO. 0428: GAAAGAACCUUGCCGAUCA; SEQ. ID NO. 0429: GGAAAUACAUCAGAGCUUA, or SEQ. ID NO. 0430: GAAAGUAUGUGUCUUAAGU) may contribute to treatment of this disorder.

[0447] In another example, studies have shown that molecules that inhibit glutamine:fructose-6-phosphate aminotransferase (GFA) may act to limit the symptoms suffered by Type II diabetics. Thus, functional, highly functional, or hyperfunctional siRNA directed against GFA (also known as GFPT1: siRNA=SEQ. ID NO. 0433 UGAAACGGCUGCCUGAUUU; SEQ. ID NO. 0434 GAAGUUACCUCUUACAUUU; SEQ. ID NO. 0435 GUACGAAACUGUAUGAUUA; SEQ. ID NO. 0436 GGACGAGGCUAUCAUUAUG) may contribute to treatment of this disorder.

[0448] In another example, the von Hippel-Lindau (VHL) tumor suppressor has been observed to be inactivated at a high frequency in sporadic clear cell renal cell carcinoma (RCC) and RCCs associated with VHL disease. The VHL tumor suppressor targets hypoxia-inducible factor-1 alpha (HIF-1 alpha), a transcription factor that can induce vascular endothelial growth factor (VEGF) expression, for ubiquitination and degradation. Inactivation of VHL can lead to increased levels of HIF-1 alpha, and subsequent VEGF over expression. Such over expression of VEGF has been used to explain the increased (and possibly necessary) vascularity observed in RCC. Thus, functional, highly functional, or hyperfunctional siRNAs directed against either HIF-1 alpha (SEQ. ID NO. 0437 GAAGGAACCUGAUGCUUUA; SEQ. ID NO. 0438 GCAUAUAUCUAGAAGGUAU; SEQ. ID NO. 0439 GAACAAAUACAUGGGAUUA; SEQ. ID NO. 0440 GGACACAGAUUUAGACUUG) or VEGF (SEQ. ID NO. 0441 GAACGUACUUGCAGAUGUG; SEQ. ID NO. 0442 GAGAAAGCAUUUGUUUGUA; SEQ. ID NO. 0443 GGAGAAAGCAUUUGUUUGU; SEQ. ID NO. 0444 CGAGGCAGCUUGAGUUAAA) may be useful in the treatment of renal cell carcinoma.

[0449] In another example, gene expression of platelet derived growth factor A and B (PDGF-A and PDGF-B) has been observed to be increased 22- and 6-fold, respectively, in renal tissues taken from patients with diabetic nephropathy as compared with controls. These findings suggest that over expression of PDGF A and B may play a role in the development of the progressive fibrosis that characterizes human diabetic kidney disease. Thus, functional, highly functional, or hyperfunctional siRNAs directed against either PDGF A

[0450] (SEQ. ID NO. 0445: GGUAAGAUAUUGUGCUUUA;

[0451] SEQ. ID NO. 0446: CCGCAAAUAUGCAGAAUUA;

[0452] SEQ. ID NO. 0447: GGAUGUACAUGGCGUGUUA;

[0453] SEQ. ID NO. 0448: GGUGAAGUUUGUAUGUUUA) or

PDGF B

[0454] (SEQ. ID NO. 0449: CCGAGGAGCUUUAUGAGAU;

[0455] SEQ. ID NO. 0450: GCUCCGCGCUUUCCGAUUU;

[0456] SEQ. ID NO. 0451 GAGCAGGAAUGGUGAGAUG;

[0457] SEQ. ID NO. 0452: GAACUUGGGAUAAGAGUGU;

[0458] SEQ. ID NO. 0453 CCGAGGAGCUUUAUGAGAU;

[0459] SEQ. ID NO. 0454 UUUAUGAGAUGCUGAGUGA) may be useful in the treatment of this form of kidney disorder.

[0460] In another example, a strong correlation exists between the over-expression of glucose transporters (e.g., GLUT12) and cancer cells. It is predicted that cells undergoing uncontrolled cell growth up-regulate GLUT molecules so that they can cope with the heightened energy needs associated with increased rates of proliferation and metastasis. Thus, siRNA-based therapies that target the molecules such as GLUT1 (also known as SLC2A1: siRNA=

[0461] SEQ. ID NO.: 0455 GCAAUGAUGUCCAGAAGAA;

[0462] SEQ. ID NO.: 0456 GAAGAAUAUUCAGGACUUA;

[0463] SEQ. ID NO.: 0457 GAAGAGAGUCGGCAGAUGA;

[0464] SEQ. ID NO.: 0458 CCAAGAGUGUGCUAAAGAA)

[0465] GLUT12 (also known as SLCA12: siRNA=

[0466] SEQ. ID NO. 0459: GAGACACUCUGAAAUGAUA;

[0467] SEQ. ID NO. 0460: GAAAUGAUGUGGAUAAGAG;

[0468] SEQ. ID NO. 0461: GAUCAAAUCCUCCCUGAAA;

[0469] SEQ. ID NO. 0462: UGAAUGAGCUGAUGAUUGU) and other related transporters, may be of value in treating a multitude of malignancies.

[0470] The siRNA sequences listed above are presented in a 5′→3′ sense strand direction. In addition, siRNA directed against the targets listed above as well as those directed against other targets and listed in the accompanying compact disk may be useful as therapeutic agents.

### Example VIII

### Evidence for the Benefits of Pooling

[0471] Evidence for the benefits of pooling have been demonstrated using the reporter gene, luciferase. Ninety siRNA duplexes were synthesized using Dharmacon proprietary ACE® chemistry against one of the standard reporter genes: firefly luciferase. The duplexes were designed to start two base pairs apart and to cover approximately 180 base pairs of the luciferase gene (see sequences in Table III). Subsequently, the siRNA duplexes were co-transfected with a luciferase expression reporter plasmid into HEK293 cells using standard transfection protocols and luciferase activity was assayed at 24 and 48 hours.

[0472] Transfection of individual siRNAs showed standard distribution of inhibitory effect. Some duplexes were active, while others were not. FIG. 15 represents a typical screen of ninety siRNA duplexes (SEQ. ID NO. 0032-0120) positioned two base pairs apart. As the figure suggests, the functionality of the siRNA duplex is determined more by a particular sequence of the oligonucleotide than by the relative oligonucleotide position within a gene or excessively sensitive part of the mRNA, which is important for traditional anti-sense technology.

[0473] When two continuous oligonucleotides were pooled together, a significant increase in gene silencing activity was observed. (See FIG. 16) A gradual increase in efficacy and the frequency of pools functionality was observed when the number of siRNAs increased to 3 and 4. (FIGS. 16, 17). Further, the relative positioning of the oligonucleotides within a pool did not determine whether a particular pool was functional (see FIG. 18, in which 100% of pools of oligonucleotides distanced by 2, 10 and 20 base pairs were functional).

[0474] However, relative positioning may nonetheless have an impact. An increased functionality may exist when the siRNA are positioned continuously head to toe (5′ end of one directly adjacent to the 3′ end of the others).

[0475] Additionally, siRNA pools that were tested performed at least as well as the best oligonucleotide in the pool, under the experimental conditions whose results are depicted in FIG. 19. Moreover, when previously identified non-functional and marginally (semi) functional siRNA duplexes were pooled together in groups of five at a time, a significant functional cooperative action was observed. (See FIG. 20) In fact, pools of semi-active oligonucleotides were 5 to 25 times more functional than the most potent oligonucleotide in the pool. Therefore, pooling several siRNA duplexes together does not interfere with the functionality of the most potent siRNAs within a pool, and pooling provides an unexpected significant increase in overall functionality

### Example IX

### Additional Evidence of the Benefits of Pooling

[0476] Experiments were performed on the following genes: β-galactosidase, Renilla luciferase, and Secreted alkaline phosphatase, which demonstrates the benefits of pooling. (see FIG. 21). Individual and pools of siRNA (described in Figure legend 21) were transfected into cells and tested for silencing efficiency. Approximately 50% of individual siRNAs designed to silence the above-specified genes were functional, while 100% of the pools that contain the same siRNA duplexes were functional.

### Example X

### Highly Functional siRNA

[0477] Pools of five siRNAs in which each two siRNAs overlap to 10-90% resulted in 98% functional entities (>80% silencing). Pools of siRNAs distributed throughout the mRNA that were evenly spaced, covering an approximate 20-2000 base pair range, were also functional. When the pools of siRNA were positioned continuously head to tail relative to mRNA sequences and mimicked the natural products of Dicer cleaved long double stranded RNA, 98% of the pools evidenced highly functional activity (>95% silencing).

### Example XI

### Human Cyclophilin B

[0478] Table III above lists the siRNA sequences for the human cyclophilin B protein. A particularly functional siRNA may be selected by applying these sequences to any of Formula I to VII above.

[0479] Alternatively, one could pool 2, 3, 4, 5 or more of these sequences to create a kit for silencing a gene. Preferably, within the kit there would be at least one sequence that has a relatively high predicted functionality when any of Formulas I-VII is applied.

### Example XII

### Sample Pools of siRNAs and Their Application to Human Disease

[0480] The genetic basis behind human disease is well documented and siRNA may be used as both research or diagnostic tools and therapeutic agents, either individually or in pools. Genes involved in signal transduction, the immune response, apoptosis, DNA repair, cell cycle control, and a variety of other physiological functions have clinical relevance and therapeutic agents that can modulate expression of these genes may alleviate some or all of the associated symptoms. In some instances, these genes can be described as a member of a family or class of genes and siRNA (randomly, conventionally, or rationally designed) can be directed against one or multiple members of the family to induce a desired result.

[0481] To identify rationally designed siRNA to each gene, the sequence was analyzed using Formula VIII or Formula X to identify rationally designed siRNA. To confirm the activity of these sequences, the siRNA are introduced into a cell type of choice (e.g., HeLa cells, HEK293 cells) and the levels of the appropriate message are analyzed using one of several art proven techniques. siRNA having heightened levels of potency can be identified by testing each of the before mentioned duplexes at increasingly limiting concentrations. Similarly, siRNA having increased levels of longevity can be identified by introducing each duplex into cells and testing functionality at 24, 48, 72, 96, 120, 144, 168, and 192 hours after transfection. Agents that induce >95% silencing at sub-nanomolar concentrations and/or induce functional levels of silencing for >96 hours are considered hyperfunctional.

### Example XIII

[0482] The information presented in Tables XII and XIII provides the siRNA sequence (sense strand), the gene name, the NCBI accession number, the adjusted algorithm score, and the sequence ID number. All sequences have an adjusted score of 75 or above. For Table XIII, Formula X derived sequences were compared with Formula VIII sequences. Sequences that were in common with both were eliminated from Table XIII. Pool picks are typically identified as gene specific siRNA that have the hightest adjusted scores.

[0483] The following are non-limiting examples of families of proteins to which siRNA described in this document are targeted against:

Transporters, Pumps, and Channels

[0484] Transporters, pumps, and channels represent one class of genes that are attractive targets for siRNAs. One major class of transporter molecules are the ATP-binding cassette (ABC) transporters. To date, nearly 50 human ABC-transporter genes have been characterized and have been shown to be involved in a variety of physiological functions including transport of bile salts, nucleosides, chloride ions, cholesterol, toxins, and more. Predominant among this group are MDR1 (which encodes the P-glycoprotein, NP_{—}000918), the MDR-related proteins (MRP1-7), and the breast cancer resistance protein (BCRP). In general, these transporters share a common structure, with each protein containing a pair of ATP-binding domains (also known as nucleotide binding folds, NBF) and two sets of transmembrane (TM) domains, each of which typically contains six membrane-spanning α-helices. The genes encoding this class of transporter are organized as either full transporters (i.e., containing two TM and two NBF domains) or as half transporters that assemble as either homodimers or heterodimers to create functional transporters. As a whole, members of the family are widely dispersed throughout the genome and show a high degree of amino acid sequence identify among eukaryotes.

[0485] ABC-transporters have been implicated in several human diseases. For instance, molecular efflux pumps of this type play a major role in the development of drug resistance exhibited by a variety of cancers and pathogenic microorganisms. In the case of human cancers, increased expression of the MDR1 gene and related pumps have been observed to generate drug resistance to a broad collection of commonly used chemotherapeutics including doxorubicin, daunorubicin, vinblastine, vincristine, colchicines. In addition to the contribution these transporters make to the development of multi-drug resistance, there are currently 13 human genetic diseases associated with defects in 14 different transporters. The most common of these conditions include cystic fibrosis, Stargardt disease, age-related macular degeneration, adrenoleukodystrophy, Tangier disease, Dubin-Johnson syndrome and progressive familial intrahepatic cholestasis. For this reason, siRNAs directed against members of this, and related, families are potentially valuable research and therapeutic tools.

[0486] With respect to channels, analysis of Drosophila mutants has enabled the initial molecular isolation and characterization of several distinct channels including (but not limited to) potassium (K+) channels. This list includes shaker (Sh), which encodes a voltage activated K⁺ channel, slowpoke (Slo), a Ca²⁺ activated K⁺ channel, and ether-a-go-go (Eag). The Eag family is further divided into three subfamilies: Eag, Elk (eag-like K channels), and Erg (Eag related genes).

[0487] The Erg subfamily contains three separate family members (Erg1-3) that are distantly related to the sh family of voltage activated K⁺ channels. Like sh, erg polypetides contain the classic six membrane spanning architecture of K⁺ channels (S1-S6) but differ in that each includes a segment associated with the C-terminal cytoplasmic region that is homologous to cyclic nucleotide binding domains (cNBD). Like many isolated ion channel mutants, erg mutants are temperature-sensitive paralytics, a phenotype caused by spontaneous repetitive firing (hyperactivity) in neurons and enhanced transmitter release at the neuromuscular junction.

[0488] Initial studies on the tissue distribution of all three members of the erg subfamily show two general patterns of expression. Erg1 and erg3 are broadly expressed throughout the nervous system and are observed in the heart, the superior mesenteric ganglia, the celiac ganglia, the retina, and the brain. In contrast, erg2 shows a much more restricted pattern of expression and is only observed in celiac ganglia and superior mesenteric ganglia. Similarly, the kinetic properties of the three erg potassium channels are not homogeneous. Erg1 and erg2 channels are relatively slow activating delayed rectifiers whereas the erg3 current activates rapidly and then exhibits a predominantly transient component that decays to a sustained plateau. The current properties of all three channels are sensitive to methanesulfonanilides, suggesting a high degree of conservation in the pore structure of all three proteins.

[0489] Recently, the erg family of K⁺ channels has been implicated in human disease. Consistent with the observation that erg1 is expressed in the heart, single strand conformation polymorphism and DNA sequence analyses have identified HERG (human erg1) mutations in six long-QT-syndrome (LQT) families, an inherited disorder that results in sudden death from a ventricular tachyarrythmia. Thus siRNA directed against this group of molecules (e.g., KCNH1-8) will be of extreme therapeutic value.

[0490] Another group of channels that are potential targets of siRNAs are the CLCA family that mediate a Ca²⁺-activated Cl⁻ conductance in a variety of tissues. To date, two bovine (bCLC1; bCLCA2 (Lu-ECAM-1)), three mouse (mCLCA1; mCLCA2; mCLCA3) and four human (hCLCA1; hCLCA2; hCLCA3; hCLCA4) CLCA family members have been isolated and patch-clamp studies with transfected human embryonic kidney (HEK-293) cells have shown that bCLCA1, mCLCA1, and hCLCA1 mediate a Ca²⁺-activated Cl⁻ conductance that can be inhibited by the anion channel blocker DIDS and the reducing agent dithiothreitol (DTT).

[0491] The protein size, structure, and processing seem to be similar among different CLCA family members and has been studied in greatest detail for Lu-ECAM-1. The Lu-ECAM-1 open reading frame encodes a precursor glycoprotein of 130 kDa that is processed to a 90-kDa amino-terminal cleavage product and a group of 30- to 40-kDa glycoproteins that are glycosylation variants of a single polypeptide derived from its carboxy terminus. Both subunits are associated with the outer cell surface, but only the 90-kDa subunit is thought to be anchored to the cell membrane via four transmembrane domains.

[0492] Although the protein processing and function appear to be conserved among CLCA homologs, significant differences exist in their tissue expression patterns. For example, bovine Lu-ECAM-1 is expressed primarily in vascular endothelia, bCLCA1 is exclusively detected in the trachea, and hCLCA1 is selectively expressed in a subset of human intestinal epithelial cells. Thus the emerging picture is that of a multigene family with members that are highly tissue specific, similar to the ClC family of voltage-gated Cl⁻ channels. The human channel, hCLCA2, is particular interesting from a medical and pharmacological standpoint. CLCA2 is expressed on the luminal surface of lung vascular endothelia and serves as an adhesion molecule for lung metastatic cancer cells, thus mediating vascular arrest and lung colonization. Expression of this molecule in normal mammary epithelium is consistently lost in human breast cancer and in nearly all tumorigenic breast cancer cell lines. Moreover, re-expression of hCLCA2 in human breast cancer cells abrogates tumorigenicity in nude mice, implying that hCLCA2 acts as a tumour suppressor in breast cancer. For these reasons, siRNA directed against CLCA family members and related channels may prove to be valuable in research and therapeutic venues.

Transporters Involved in Synaptic Transmission

[0493] Synaptic transmission involves the release of a neurotransmitter into the synaptic cleft, interaction of that transmitter with a postsynaptic receptor, and subsequent removal of the transmitter from the cleft. In most synapses the signal is terminated by a rapid reaccumulation of the neurotransmitter into presynaptic terminals. This process is catalyzed by specific neurotransmitter transporters that are often energized by the electrochemical gradient of sodium across the plasma membrane of the presynaptic cells.

[0494] Aminobutyric acid (GABA) is the major inhibitory neurotransmitter in the central nervous system. The inhibitory action of GABA, mediated through GABA_{A}/GABA_{B} receptors, and is regulated by GABA transporters (GATs), integral membrane proteins located perisynaptically on neurons and glia. So far four different carriers (GAT1-GAT4) have been cloned and their cellular distribution has been partly worked out. Comparative sequence analysis has revealed that GABA transporters are related to several other proteins involved in neurotransmitter uptake including gamma-aminobutyric acid transporters, monoamine transporters, amino acid transporters, certain “orphan” transporters, and the recently discovered bacterial transporters. Each of these proteins has a similar 12 transmembrane helices topology and relies upon the Na+/Cl− gradient for transport function. Transport rates are dependent on substrate concentrations, with half-maximal effective concentrations for transport frequently occurring in the submicromolar to low micromolar range. In addition, transporter function is bidirectional, and non-vesicular efflux of transmitter may contribute to ambient extracellular transmitter levels.

[0495] Recent evidence suggests that GABA transporters, and neurotransmitter transporters in general, are not passive players in regulating neuronal signaling; rather, transporter function can be altered by a variety of initiating factors and signal transduction cascades. In general, this functional regulation occurs in two ways, either by changing the rate of transmitter flux through the transporter or by changing the number of functional transporters on the plasma membrane. A recurring theme in transporter regulation is the rapid redistribution of the transporter protein between intracellular locations and the cell surface. In general, this functional modulation occurs in part through activation of second messengers such as kinases, phosphatases, arachidonic acid, and pH. However, the mechanisms underlying transporter phosphorylation and transporter redistribution have yet to be fully elucidated.

[0496] GABA transporters play a pathophysiological role in a number of human diseases including temporal lobe epilepsy and are the targets of pharmacological interventions. Studies in seizure sensitive animals show some (but not all) of the GAT transporters have altered levels of expression at times prior to and post seizure, suggesting this class of transporter may affect epileptogenesis, and that alterations following seizure may be compensatory responses to modulate seizure activity. For these reasons, siRNAs directed against members of this family of genes (including but not limited to SLCG6A1-12) may prove to be valuable research and therapeutic tools.

Organic Ion Transporters

[0497] The human body is continuously exposed to a great variety of xenobiotics, via food, drugs, occupation, and environment. Excretory organs such as kidney, liver, and intestine defend the body against the potentially harmful effects of these compounds by transforming them into less active metabolites that are subsequently secreted from the system.

[0498] Carrier-mediated transport of xenobiotics and their metabolites exist for the active secretion of organic anions and cations. Both systems are characterized by a high clearance capacity and tremendous diversity of substances accepted, properties that result from the existance of multiple transporters with overlapping substrate specificities. The class of organic anion transporters plays a critical role in the elimination of a large number of drugs (e.g., antibiotics, chemotherapeutics, diuretics, nonsteroidal anti-inflammatory drugs, radiocontrast agents, cytostatics); drug metabolites (especially conjugation products with glutathione, glucuronide, glycine, sulfate, acetate); and toxicants and their metabolites (e.g., mycotoxins, herbicides, plasticizers, glutathione S-conjugates of polyhaloalkanes, polyhaloalkenes, hydroquinones, aminophenols), many of which are specifically harmful to the kidney.

[0499] Over the past couple of years the number of identified anion transporting molecules has grown tremendously. Uptake of organic anions (OA⁻) across the basolateral membrane is mediated by the classic sodium-dependent organic anion transport system, which includes α-ketoglutarate (α-KG²⁻)/OA⁻ exchange via the organic anion transporter (OAT1) and sodium-ketoglutarate cotransport via the Na⁺/dicarboxylate cotransporter (SDCT2). The organic anion transporting polypetide, Oatp1, and the kidney-specific OAT-K1 and OAT-K2 are seen as potential molecules that mediate facilitated OA⁻ efflux but could also be involved in reabsorption via an exchange mechanism. Lastly the PEPT1 and PEPT2 mediate luminal uptake of peptide drugs, whereas CNT1 and CNT2 are involved in reabsorption of nucleosides.

[0500] The organic anion-transporting polypeptide 1 (Oatp1) is a Na⁺- and ATP-independent transporter originally cloned from rat liver. The tissue distribution and transport properties of the Oatp1 gene product are complex. Oatp1 is localized to the basolateral membrane of hepatocytes, and is found on the apical membrane of S3 proximal tubules. Studies with transiently transfected cells (e.g., HeLa cells) have indicated that Oatp1 mediates transport of a variety of molecules including taurocholate, estrone-3-sulfate, aldosterone, cortisol, and others. The observed uptake of taurocholate by Oatp1 expressed in X. laevis oocytes is accompanied by efflux of GSH, suggesting that transport by this molecule may be glutathione dependent.

[0501] Computer modeling suggests that members of the Oatp family are highly conserved, hydrophobic, and have 12 transmembrane domains. Decreases in expression of Oatp family members have been associated with cholestatic liver diseases and human hepatoblastomas, making this family of proteins of key interest to researchers and the medical community. For these reasons, siRNAs directed against OAT family members (including but not limited to SLC21A2, 3, 6, 8, 9, 11, 12, 14, 15, and related transporters) are potentially useful as research and therapeutic tools.

Nucleoside Transporters

[0502] Nucleoside transporters play key roles in physiology and pharmacology. Uptake of exogenous nucleosides is a critical first step of nucleotide synthesis in tissues such as bone marrow and intestinal epithelium and certain parasitic organisms that lack de novo pathways for purine biosynthesis. Nucleoside transporters also control the extracellular concentration of adenosine in the vicinity of its cell surface receptors and regulate processes such as neurotransmission and cardiovascular activity. Adenosine itself is used clinically to treat cardiac arrhythmias, and nucleoside transport inhibitors such as dipyridamole, dilazep, and draflazine function as coronary vasodilators.

[0503] In mammals, plasma membrane transport of nucleosides is brought about by members of the concentrative, Na⁺-dependent (CNT) and equilibrative, Na⁺-independent (ENT) nucleoside transporter families. CNTs are expressed in a tissue-specific fashion; ENTs are present in most, possibly all, cell types and are responsible for the movement of hydrophilic nucleosides and nucleoside analogs down their concentration gradients. In addition, structure/function studies of ENT family members have predicted these molecules to contain eleven transmembrane helical segments with an amino terminus that is intracellular and a carboxyl terminus that is extracellular. The proteins have a large glycosylated loop between TMs 1 and 2 and a large cytoplasmic loop between TMs 6 and 7. Recent investigations have implicated the TM 3-6 region as playing a central role in solute recognition. The medical importance of the ENT family of proteins is broad. In humans adenosine exerts a range of cardioprotective effects and inhibitors of ENTs are seen as being valuable in alleviating a variety of cardio/cardiovascular ailments. In addition, responses to nucleoside analog drugs has been observed to vary considerably amongst, e.g., cancer patients. While some forms of drug resistance have been shown to be tied to the up-regulation of ABC-transporters (e.g., MDR1), resistance may also be the result of reduced drug uptake (i.e., reduced ENT expression). Thus, a clearer understanding of ENT transporters may aid in optimizing drug treatments for patients suffering a wide range of malignancies. For these reasons, siRNAs directed against this class of molecules (including SLC28A1-3, SLC29A1-4, and related molecules) may be useful as therapeutic and research tools.

Sulfate Transporters

[0504] All cells require inorganic sulfate for normal function. Sulfate is the fourth most abundant anion in human plasma and is the major source of sulfur in many organisms. Sulfation of extracellular matrix proteins is critical for maintaining normal cartilage metabolism and sulfate is an important constituent of myelin membranes found in the brain

[0505] Because sulfate is a hydrophilic anion that cannot passively cross the lipid bilayer of cell membranes, all cells require a mechanism for sulfate influx and efflux to ensure an optimal supply. To date, a variety of sulfate transporters have been identified in tissues from many origins. These include the renal sulfate transporters (NaSi-1 and Sat-1), the ubiquitously expressed diastrophic dysplasia sulfate transporter (DTDST), the intestinal sulfate transporter (DRA), and the erythrocyte anion exchanger (AE1). Most, if not all, of these molecules contain the classic 12 transmembrane spanning domain architecture commonly found amongst members of the anion transporter superfamily.

[0506] Recently three different sulfate transporters have been associated with specific human genetic diseases. Family members SLC26A2, SLC26A3, and SLC26A4 have been recognized as the disease genes mutated in diastrophic dysplasia, congenital chloride diarrhea (CLD), and Pendred syndrome (PDS), respectively. DTDST is a particularly complex disorder. The gene encoding this molecule maps to chromosome 5q, and encodes two distinct transcripts due to alternative exon usage. In contrast to other sulfate transporters (e.g., Sat-1) anion movement by the DTDST protein is markedly inhibited by either extracellular chloride or bicarbonate. Impaired function of the DTDST gene product leads to undersulfation of proteoglycans and a complex family of recessively inherited osteochondrodysplasias (achondrogenesis type 1B, atelosteogenesis type II, and diastrophic dysplasia) with clinical features including but not limited to, dwarfism, spinal deformation, and specific joint abnormalities. Interestingly, while epidemiological studies have shown that the disease occurs in most populations, it is particularly prevalent in Finland owing to an apparent founder effect. For these reasons, siRNAs directed against this class of genes (including but not limited to SLC26A1-9, and related molecules) may be potentially helpful in both therapeutic and research venues.

Ion Exchangers

[0507] Intracellular pH regulatory mechanisms are critical for the maintenance of countless cellular processes. For instance, in muscle cells, contractile processes and metabolic reactions are influenced by pH. During periods of increased energy demands and ischemia, muscle cells produce large amounts of lactic acid that, without quick and efficient disposal, would lead to acidification of the sarcoplasm.

[0508] Several different transport mechanisms have evolved to maintain a relatively constant intracellular pH. The relative contribution of each of these processes varies with cell type, the metabolic requirements of the cell, and the local environmental conditions. Intracellular pH regulatory processes that have been characterized functionally include but are not limited to the Na⁺/H⁺ exchange, the Na(HCO₃)ₙ cotransport, and the Na⁺-dependent and -independent Cl⁻/base exchangers. As bicarbonate and CO₂ comprise the major pH buffer of biological fluids, sodium biocarbonate cotransporters (NBCs) are critical. Studies have shown that these molecules exist in numerous tissues including the kidney, brain, liver, cornea, heart, and lung, suggesting that NBCs play an important role in mediating HCO₃⁻ transport in both epithelial as well as nonepithelial cells.

[0509] Recent molecular cloning experiments have identified the existence of four NBC isoforms (NBC1, 2, 3 and 4) and two NBC-related proteins, AE4 and NCBE (Anion Exchanger 4 and Na-dependent Chloride-Bicarbonate Exchanger). The secondary structure analyses and hydropathy profile of this family predict them to be intrinsic membrane proteins with 12 putative transmembrane domains and several family members exhibit N-linked glycosylation sites, protein kinases A and C, casein kinase II, and ATP/GTP-binding consensus phosphorylation sites, as well as potential sites for myristylation and amidation. AE4 is a relatively recent addition to this family of proteins and shows between 30-48% homology with the other family members. When expressed in COS-7 cells and Xenopus oocytes AE4 exhibits sodium-independent and DIDS-insensitive anion exchanger activity. Exchangers have been shown to be responsible for a variety of human diseases. For instance, mutations in three genes of the anion transporter family (SLC) are believed to cause known hereditary diseases, including chondrodysplasia (SLC26A2, DTD), diarrhea (A3, down-regulated in adenoma/chloride-losing diarrhea protein: DRA/CLD), and goiter/deafness syndrome (A4, pendrin). Moreover, mutations in Na+/HCO3 co-transporters have also been associated with various human maladies. For these reasons, siRNAs directed against these sorts of genes (e.g., SLC4A4-10, and related genes) may be useful for therapeutic and research purposes.

Receptors Involved in Synaptic Transmission

[0510] In all vertebrates, fast inhibitory synaptic transmission is the result of the interaction between the neurotransmitters glycine (Gly) and γ-aminobutyric acid (GABA) and their respective receptors. The strychnine-sensitive glycine receptor is especially important in that it acts in the mammalian spinal cord and brain stem and has a well-established role in the regulation of locomotor behavior.

[0511] Glycine receptors display significant sequence homology to several other receptors including the nicotinic acetylcholine receptor, the aminobutyric acid receptor type A (GABA_{A}R), and the serotonin receptor type 3 (5-HT₃R) subunits. As members of the superfamily of ligand-gated ion channels, these polypeptides share common topological features. The glycine receptor is composed of two types of glycosylated integral membrane proteins (α1-α4 and β) arranged in a pentameric suprastructure. The alpha subunit encodes a large extracellular, N-terminal domain that carries the structural determinants essential for agonist and antagonist binding, followed by four transmembrane spanning regions (TM1-TM4), with TM2 playing the critical role of forming the inner wall of the chloride channel.

[0512] The density, location, and subunit composition of glycine neurotransmitter receptors changes over the course of development. It has been observed that the amount of GlyR gene translation (assessed by the injection of developing rat cerebral cortex mRNA into Xenopus oocytes) decreases with age, whereas that of GABARs increases. In addition, the type and location of mRNAs coding for GlyR changes over the course of development. For instance in a study of the expression of alpha 1 and alpha 2 subunits in the rat, it was observed that (in embryonic periods E11-18) the mantle zone was scarce in the alpha 1 mRNA, but the germinal zone (matrix layer) at E11-14 expressed higher levels of the message. At postnatal day 0 (P0), the alpha 1 signals became manifested throughout the gray matter of the spinal cord. By contrast, the spinal tissues at P0 exhibited the highest levels of alpha 2 mRNA, which decreased with the postnatal development.

[0513] In both, man and mouse mutant lines, mutations of GlyR subunit genes result in hereditary motor disorders characterized by exaggerated startle responses and increased muscle tone. Pathological alleles of the Glra1 gene are associated with the murine phenotypes oscillator (spd^{ot}) and spasmodic (spd). Similarly, a mutant allele of Glrb has been found to underly the molecular pathology of the spastic mouse (spa). Resembling the situation in the mouse, a variety of GLRA1 mutant alleles have been shown to be associated with the human neurological disorder hyperekplexia or startle disease. For these reasons, siRNA directed against glycine receptors (GLRA1-3, GLRB, and related molecules), glutamate receptors, GABA receptors, ATP receptors, and related neurotransmitter receptor molecules may be valuable therapeutic and research reagents.

Proteases

Kallikreins

[0514] One important class of proteases are the kallikreins, serine endopeptidases that split peptide substrates preferentially on the C-terminal side of internal arginyl and lysyl residues. Kallikreins are generally divided into two distinct groups, plasma kallikreins and tissue kallikreins. Tissue kallikreins represent a large group of enzymes that have substantial similarities at both the gene and protein level. The genes encoding this group are frequently found on a single chromosome, are organized in clusters, and are expressed in a broad range of tissues (e.g., pancreas, ovaries, breast). In contrast, the plasma form of the enzyme is encoded by a single gene (e.g., KLK3) that has been localized to chromosome 4q34-35 in humans. The gene encoding plasma kallikrein is expressed solely in the liver, contains 15 exons, and encodes a glycoprotein that is translated as a preprotein called prekallikrein.

[0515] Kallikreins are believed to play an important role in a host of physiological events. For instance, the immediate consequence of plasma prekallikrein activation is the cleavage of high molecular weight kininogen (HK) and the subsequent liberation of bradykinin, a nine amino acid vasoactive peptide that is an important mediator of inflammatory responses. Similarly, plasma kallikrein promotes single-chain urokinase activation and subsequent plasminogen activation, events that are critical to blood coaggulation and wound healing.

[0516] Disruptions in the function of kallikreins have been implicated in a variety of pathological processes including imbalances in renal function and inflammatory processes. For these reasons, siRNAs directed against this class of genes (e.g., KLK1-15) may prove valuable in both research and therapeutic settings.

ADAM Proteins

[0517] The process of fertilization takes place in a series of discrete steps whereby the sperm interacts with, i) the cumulus cells and the hyaluronic acid extracellular matrix (ECM) in which they are embedded, ii) the egg's own ECM, called the zona pellucida (ZP), and iii) the egg plasma membrane. During the course of these interactions, the “acrosome reaction,” the exocytosis of the acrosome vesicle on the head of the sperm, is induced, allowing the sperm to penetrate the ZP and gain access to the perivitelline space. This process exposes new portions of the sperm membrane, including the inner acrosomal membrane and the equatorial segment, regions of the sperm head that can participate in initial gamete membrane binding.

[0518] The interactions of the gamete plasma membranes appear to involve multiple ligands and receptors and are frequently compared to leukocyte-endothelial interactions. These interactions lead to a series of signal transduction events in the egg, known as collectively as egg activation and include the initiation of oscillations in intracellular calcium concentration, the exit from meiosis, the entry into the first embryonic mitosis, and the formation of a block to polyspermy via the release of ZP-modifying enzymes from the egg's cortical granules. Ultimately, sperm and egg not only adhere to each other but also go on to undergo membrane fusion, making one cell (the zygote) from two.

[0519] Studies on the process of sperm-egg interactions have identified a number of proteins that are crucial for fertilization. One class of proteins, called the ADAM family (A Disintegrin And Metalloprotease), has been found to be important in spermatogenesis and fertilization, as well as various developmental systems including myogenesis and neurogenesis. Members of the family contain a disintegrin and metalloprotease domain (and therefore have (potentially) both cell adhesion and protease activities), as well as cysteine-rich regions, epidermal growth factor (EGF)-like domains, a transmembrane region, and a cytoplasmic tail. Currently, the ADAM gene family has 29 members and constituents are widely distributed in many tissues including the brain, testis, epididymis, ovary, breast, placenta, liver, heart, lung, bone, and muscle.

[0520] One of the best-studied members of the ADAM family is fertilin, a heterodimeric protein comprised of at least two subunits, fertilin alpha and fertilin beta. The fertilin beta gene (ADAM2) has been disrupted with a targeting gene construct corresponding to the exon encoding the fertilin beta disintegrin domain. Sperm from males homozygous for disruptions in this region exhibit defects in multiple facets of sperm function including reduced levels of sperm transit from the uterus to the oviduct, reduced sperm-ZP binding, and reduced sperm-egg binding, all of which contribute to male infertility.

[0521] Recently, four new ADAM family members (ADAM 24-27) have been isolated. The deduced amino acid sequences show that all four contain the complete domain organization common to ADAM family members and Northern Blot analysis has shown all four to be specific to the testes. siRNAs directed against this class of genes (e.g., ADAM2 and related proteins) may be useful as research tools and therapeutics directed toward fertility and birth control.

Aminopeptidases

[0522] Aminopeptidases are proteases that play critical roles in processes such as protein maturation, protein digestion in its terminal stage, regulation of hormone levels, selective or homeostatic protein turnover, and plasmid stabilization. These enzymes generally have broad substrate specificity, occur in several forms and play a major role in physiological homeostasis. For instance, the effects of bradykinin, angiotensin converting enzyme (ACE), and other vasoactive molecules are muted by one of several peptidases that cleave the molecule at an internal position and eliminate its ability to bind its cognate receptor (e.g., for bradykinin, the B2-receptor).

[0523] Among the enzymes that can cleave bradykinin is the membrane bound aminopeptidase P, also referred to as aminoacylproline aminopeptidase, proline aminopeptidase; X-Pro aminopeptidase (eukaryote) and XPNPEP2. Aminopeptidase P is an aminoacylproline aminopeptidase specific for NH₂-terminal Xaa-proline bonds. The enzyme i) is a mono-zinc-containing molecule that lacks any of the typical metal binding motifs found in other zinc metalloproteases, ii) has an active-site configuration similar to that of other members of the MG peptidase family, and iii) is present in a variety of tissues including but not limited to the lung, kidney, brain, and intestine.

[0524] Aminopeptidases play an important role in a diverse set of human diseases. Low plasma concentrations of aminopeptidase P are a potential predisposing factor for development of angio-oedema in patients treated with ACE inhibitors, and inhibitors of aminopeptidase P may act as cardioprotectors against other forms of illness including, but not limited to myocardial infarction. For these reasons, siRNAs directed against this family of proteins (including but not limited to XPNPEP1 and related proteins) may be useful as research and therapeutic tools.

Serine Proteases

[0525] One important class of proteases are the serine proteases. Serine proteases share a common catalytic triad of three amino acids in their active site (serine (nucleophile), aspartate (electrophile), and histidine (base)) and can hydrolyze either esters or peptide bonds utilizing mechanisms of covalent catalysis and preferential binding of the transition state. Based on the position of their introns serine proteases have been classified into a minimum of four groups including those in which 1) the gene has no introns interrupting the exon coding for the catalytic triad (e.g., the haptoglobin gene,); 2) each gene contains an intron just downstream from the codon for the histidine residue at the active site, a second intron downstream from the exon containing the aspartic acid residue of the active site and a third intron just upstream from the exon containing the serine of the active site (e.g., trypsinogen, chymotrypsinogen, kallikrein and proelastase); 3) the genes contain seven introns interrupting the exons coding the catalytic region (e.g., complement factor B gene); and 4) the genes contain two introns resulting in a large exon that contains both the active site aspartatic acid and serine residues (e.g., factor X, factor IX and protein C genes).

[0526] Cytotoxic lymphocytes (e.g., CD8(+) cytotoxic T cells and natural killer cells) form the major defense of higher organisms against virus-infected and transformed cells. A key function of these cells is to detect and eliminate potentially harmful cells by inducing them to undergo apoptosis. This is achieved through two principal pathways, both of which require direct but transient contact between the killer cell and its target. The first pathway involves ligation of TNF receptor-like molecules such as Fas/CD95 to their cognate ligands, and results in mobilization of conventional, programmed cell-death pathways centered on activation of pro-apoptotic caspases. The second mechanism consists of a pathway whereby the toxic contents of a specialized class of secretory vesicles are introduced into the target cell. Studies over the last two decades have identified the toxic components as Granzymes, a family of serine proteases that are expressed exclusively by cytotoxic T lymphocytes and natural killer (NK) cells. These agents are stored in specialized lytic granules and enter the target cell via endocytosis. Like caspases, cysteine proteases that play an important role in apoptosis, granzymes can cleave proteins after acidic residues, especially aspartic acid, and induce apoptosis in the recipient cell.

[0527] Granzymes have been grouped into three subfamilies according to substrate specificity. Members of the granzyme family that have enzymatic activity similar to the serine protease chymotrypsin are encoded by a gene cluster termed the ‘chymase locus’. Similarly, granzymes with trypsin-like specificities are encoded by the ‘tryptase locus’, and a third subfamily cleaves after unbranched hydrophobic residues, especially methionine, and are encoded by the ‘Met-ase locus’. All granzymes are synthesized as zymogens and, after clipping of the leader peptide, obtain maximal enzymatic activity subsequent to the removal of an amino-terminal dipeptide.

[0528] Granzymes have been found to be important in a number of important biological functions including defense against intracellular pathogens, graft versus host reactions, the susceptibility to transplantable and spontaneous malignancies, lymphoid homeostasis, and the tendency toward auto-immune diseases. For these reasons, siRNAs directed against granszymes (e.g., GZMA, GZMB, GZMH, GZHK, GZMM) and related serine proteases may be useful research and therapeutic reagents.

Kinases

[0529] Protein Kinases (PKs) have been implicated in a number of biological processes. Kinase molecules play a central role in modulating cellular physiology and developmental decisions, and have been implicated in a large list of human maladies including cancer, diabetes, and others.

[0530] During the course of the last three decades, over a hundred distinct protein kinases have been identified, all with presumed specific cellular functions. A few of these enzymes have been isolated to sufficient purity to perform in vitro studies, but most remain intractable due to the low abundance of these molecules in the cell. To counter this technical difficulty, a number of protein kinases have been isolated by molecular cloning strategies that utilize the conserved sequences of the catalytic domain to isolate closely related homologs. Alternatively, some kinases have been purified (and subsequently studied) based on their interactions with other molecules.

[0531] p58 is a member of the p34cdc2-related supergene family and contains a large domain that is highly homologous to the cell division control kinase, cdc2. This new cell division control-related protein kinase was originally identified as a component of semipurified galactosyltransferase; thus, it has been denoted galactosyltransferase-associated protein kinase (GTA-kinase). GTA-kinase has been found to be expressed in both adult and embryonic tissues and is known to phosphorylate a number of substrates, including histone H1, and casein. Interestingly enough, over expression of this molecule in CHO cells has shown that elevated levels of p58 result in a prolonged late telophase and an early G1 phase, thus hinting of an important role for GTA-kinase in cell cycle regulation.

Cyclin Dependent Kinases

[0532] The cyclin-dependent kinases (Cdks) are a family of highly conserved serine/threonine kinases that mediate many of the cell cycle transitions that occur during duplication. Each of these Cdk catalytic subunits associates with a specific subset of regulatory subunits, termed cyclins, to produce a distinct Cdk.cyclin kinase complex that, in general, functions to execute a unique cell cycle event.

[0533] Activation of the Cdk.cyclin kinases during cellular transitions is controlled by a variety of regulatory mechanisms. For the Cdc2.cyclin B complex, inhibition of kinase activity during S phase and G₂ is accomplished by phosphorylation of two Cdc2 residues, Thr¹⁴ and Tyr¹⁵, which are positioned within the ATP-binding cleft. Phosphorylation of Thr¹⁴ and/or Tyr¹⁵ suppresses the catalytic activity of the molecule by disrupting the orientation of the ATP present within this cleft. In contrast, the abrupt dephosphorylation of these residues by the Cdc25 phosphatase results in the rapid activation of Cdc2.cyclin B kinase activity and subsequent downstream mitotic events. While the exact details of this pathway have yet to be elucidated, it has been proposed that Thr¹⁴/Tyr¹⁵ phosphorylation functions to permit a cell to attain a critical concentration of inactive Cdk.cyclin complexes, which, upon activation, induces a rapid and complete cell cycle transition. Furthermore, there is evidence in mammalian cells that Thr¹⁴/Tyr¹⁵ phosphorylation also functions to delay Cdk activation after DNA damage.

[0534] The Schizosaccharomyces pombe wee1 gene product was the first kinase identified that is capable of phosphorylating Tyr¹⁵ in Cdc2. Homologs of the Wee1 kinase have been subsequently identified and biochemically characterized from a wide range of species including human, mouse, frog, Saccharomyces cerevisiae, and Drosophila. In vertebrate systems, where Thr¹⁴ in Cdc2 is also phosphorylated, the Wee1 kinase was capable of phosphorylating Cdc2 on Tyr¹⁵, but not Thr¹⁴, indicating that another kinase was responsible for Thr¹⁴ phosphorylation. This gene, Myt1 kinase, was recently isolated from the membrane fractions of Xenopus egg extracts and has been shown to be capable of phosphorylating Thr¹⁴ and, to a lessor extent, Tyr¹⁵ in Cdc2. A human Myt1 homolog displaying similar properties has been isolated, as well as a non-membrane-associated molecule with Thr¹⁴ kinase activity.

[0535] In the past decade it has been shown that cancer can originate from overexpression of positive regulators, such as cyclins, or from underexpression of negative regulators (e.g., p16 (INK4a), p15 (INK4b), p21 (Cip1)). Inhibitors such as Myt1 are the focus of much cancer research because they are capable of controlling cell cycle proliferation, now considered the Holy Grail for cancer treatment. For these reasons, siRNA directed against kinases and kinase inhibitors including but not limited to ABL1, ABL2, ACK1, ALK, AXL, BLK, BMX, BTK, C20orf64, CSF1R, SCK, DDR1, DDR2, DKFZp761P1010, EGFR, EPHA1, EPHA2, EPHA3, EPHA4, EPHA7, EPHA8, EPHB1, EPHB2, EPHB3, EPHB4. EPHB6, ERBB2, ERBB3, ERBB4, FER, FES, FGFR1, FGFR2, FGFR3, FGFR4, FGR, FLT1, FLT3, FLT4, FRK, FYN, HCK, IGF1R, INSR, ITK, JAK1, JAK2, JAK3, KDR, KIAA1079, KIT, LCK, LTK, LYN, MATK, MERTK, MET, MST1R, MUSK, NTRK1, NTRK2, NTRK3, PDGFRA, PDGFRB, PTK2, PTK2B, PTK6, PTK7, PTK9, PTK9L, RET, ROR1, ROR2, ROS1, RYK, SRC, SYK, TEC, TEK, TIE, TNK1, TXK, TYK2, TYRO3, YES 1, and related proteins, may be useful for research and therapeutic purposes.

G Protein Coupled Receptors

[0536] One important class of genes to which siRNAs can be directed are G-protein coupled receptors (GPCRs). GPCRs constitute a superfamily of seven transmembrane spanning proteins that respond to a diverse array of sensory and chemical stimuli, such as light, odor, taste, pheromones, hormones and neurotransmitters. GPCRs play a central role in cell proliferation, differentiation, and have been implicated in the etiology of disease.

[0537] The mechanism by which G protein-coupled receptors translate extracellular signals into cellular changes was initially envisioned as a simple linear model: activation of the receptor by agonist binding leads to dissociation of the heterotrimeric GTP-binding G protein (Gs, Gi, or Gq) into its alpha and beta/gamma subunits, both of which can activate or inhibit various downstream effector molecules. More specifically, activation of the GPCR induces a conformational change in the Gα subunit, causing GDP to be released and GTP to be bound in its place. The Gα and Gβα subunits then dissociate from the receptor and interact with a variety of effector molecules. For instance in the case of the Gs family, the primary function is to stimulate the intracellular messenger adenylate cyclase (AC), which catalyzes the conversion of cytoplasmic ATP into the secondary messenger cyclic AMP (cAMP). In contrast, the Gi family inhibits this pathway and the Gq family activates phospholipases C (PLC), which cleaves phosphatidylinositol 4,5, bisphosphate (PIP2) to generate inositol-1,4,5-phosphate (IP3) and diacylglycerol (DAG).

[0538] More recently, studies have shown that the functions of GPCRs are not limited to their actions on G-proteins and that considerable cross-talk exists between this diverse group of receptor molecules and a second class of membrane bound proteins, the receptor tyrosine kinases (RTKs). A number of GPCRs such as endothelin-1, thrombin, bombesin, and dopamine receptors can activate MAPKs, a downstream effector of the RTK/Ras pathway. Interestingly, the interaction between these two families is not unidirectional and RTKs can also modulate the activity of signaling pathways traditionally thought to be controlled exclusively by ligands that couple to GPCRs. For instance, EGF, which normally activates the MAPK cascade via the EGF receptor can stimulate adenylate cyclase activity by activating Gαs.

[0539] There are dozens of members of the G Protein-Coupled Receptor family that have emerged as prominent drug targets in the last decade. One non-limiting list of potential GPCR-siRNA targets is as follows:

CMKLR1

[0540] CML1/CMKLR1 (Accession No. Q99788) is a member of the chemokine receptor family of GPCRs that may play a role in a number of diseases including those involved in inflammation and immunological responses (e.g., asthma, arthritis). For this reason, siRNA directed against this protein may prove to be important therapeutic reagents.

[0541] Studies of juvenile-onset neuronal ceroid lipofuscinosis (JNCL, Batten disease), the most common form of childhood encephalopathy that is characterized by progressive neural degeneration, show that it is brought on by mutations in a novel lysosomal membrane protein (CLN3). In addition to being implicated in JNCL, CLN3 (GPCR-like protein, Accession No. A57219) expression studies have shown that the CLN3 mRNA and protein are highly over-expressed in a number of cancers (e.g., glioblastomas, neuroblastomas, as well as cancers of the prostate, ovaries, breast, and colon) suggesting a possible contribution of this gene to tumor growth. For this reason, siRNA directed against this protein may prove to be important therapeutic reagents.

CLACR

[0542] The calcitonin receptor (CTR/CALCR, Accession No. NM_{—}001742) belongs to “family B” of GPCRs which typically recognized regulatory peptides such as parathyroid hormone, secretin, glucagons and vasoactive intestinal polypeptide. Although the CT receptor typically binds to calcitonin (CT), a 32 amino acid peptide hormone produced primarily by the thyroid, association of the receptor with RAMP (Receptor Activity Modulating Protein) enables it to readily bind other members of the calcitonin peptide family including amylin (AMY) and other CT gene-related peptides (e.g., αCGRP and βCGRP). While the primary function of the calcitonin receptor pertains to regulating osteoclast mediated bone resorption and enhanced Ca⁺² excretion by the kidney, recent studies have shown that CT and CTRs may play an important role in a variety of processes as wide ranging as embryonic/fetal development and sperm function/physiology. In addition, studies have shown that patients with particular CTR genotypes may be at higher risk to lose bone mass and that this GPCR may contribute to the formation of calcium oxalate urinary stones. For this reason, siRNA directed against CTR may be useful as therapeutic reagents.

OXTR

[0543] The human oxytocin receptor (OTR, OXTR) is a 389 amino acid polypeptide that exhibits the seven transmembrane domain structure and belongs to the Class-I (rhodopsin-type) family of G-protein coupled receptors. OTR is expressed in a wide variety of tissues throughout development and mediates physiological changes through G(q) proteins and phospholipase C-beta. Studies on the functions of oxytocin and the oxytocin receptor have revealed a broad list of duties. OT and OTR play a role in a host of sexual, maternal and social behaviors that include egg-laying, birth, milk-letdown, feeding, grooming, memory and learning. In addition, it has been hypothesized that abnormalities in the functionality of oxytocin-OTR receptor-ligand system can lead to a host of irregularities including compulsive behavior, eating disorders (such as anorexia), depression, and various forms of neurodegenerative diseases. For these reasons, siRNA directed against this gene (NM_{—}000916) may play an important role in combating OTR-associated illnesses.

EDG GPCRs

[0544] Lysophosphatidic acid and other lipid-based hormones/growth factors induce their effects by activating signaling pathways through the G-protein coupled receptors (GPCRs) and have been observed to play important roles in a number of human diseases including cancer, asthma, and vascular pathologies. For instance, during studies of immunoglobulin A nephropathy (IgAN), researchers have observed an enhanced expression of EDG5 (NP_{—}004221) suggesting a contribution of this gene product in the development of IgAN. For that reason, siRNA directed against Edg5 (NM_{—}004230), Edg4 (NM_{—}004720), Edg7 (Nm_{—}012152) and related genes may play an important role in combating human disease.

Genes Involved in Cholesterol Signaling and Biosynthesis

[0545] Studies on model genetic organisms such as Drosophila and C. elegans have led to the identification of a plethora of genes that are essential for early development. Mutational analysis and ectopic expression studies have allowed many of these genes to be grouped into discreet signal transduction pathways and have shown that these elements play critical roles in pattern formation and cell differentiation. Disruption of one or more of these genes during early stages of development frequently leads to birth defects whereas as alteration of gene function at later stages in life can result in tumorigenesis.

[0546] One critical set of interactions known to exist in both invertebrates and vertebrates is the Sonic Hedgehog-Patched-Gli pathway. Originally documented as a Drosophila segmentation mutant, several labs have recently identified human and mouse orthologs of many of the pathways members and have successfully related disruptions in these genes to known diseases. Pathway activation is initiated with the secretion of Sonic hedgehog. There are three closely related members of the Shh family (Sonic hedgehog, Desert, and Indian) with Shh being the most widely expressed form of the group. The Shh gene product is secreted as a small pro-signal molecule. To successfully initiate its developmental role, Shh is first cleaved, whereupon the N-terminal truncated fragment is covalently modified with cholesterol. The addition of the sterol moiety promotes the interaction between Shh and its cognate membrane bound receptor, Patched (Ptch). There are at least two isoforms of the Patched gene, Ptch1 and Ptch2. Both isoforms contain a sterol-sensing domain (SSD); a roughly 180 amino acid cluster that is found in at least seven different classes of molecules including those involved in cholesterol biosynthesis, vesicular traffic, signal transduction, cholesterol transport, and sterol homeostasis. In the absence of Shh, the Patched protein is a negative regulator of the pathway. In contrast, binding of Shh-cholesterol to the Patched receptor releases the negative inhibition which that molecule enforces on a G-protein coupled receptor known as Smoothened. Subsequent activation of Smoothened (directly or indirectly) leads to the triggering of a trio of transcription factors that belong to the Gli family. All three factors are relatively large, contain a characteristic C2-H2 zinc-finger pentamer, and recognize one of two consensus sequences (SEQ. ID NO. 0463 GACCACCCA or SEQ. ID NO. 0464 GAACCACCCA). In the absence of Shh, Gli proteins are cleaved by the proteosome and the C-terminally truncated fragment translocates to the nucleus and acts as a dominant transcription repressor. In the presence of Shh-cholesterol, Gli repressor formation is inhibited and full-length Gli functions as a transcriptional activator.

[0547] Shh and other members of the Shh-PTCH-Gli pathway are expressed in a broad range of tissues (e.g., the notochord, the floorplate of the neural tube, the brain, and the gut) at early stages in development. Not surprisingly, mutations that lead to altered protein expression or function have been shown to induce developmental abnormalities. Defects in the human Shh gene have been shown to cause holoprosencephaly, a midline defect that manifests itself as cleft lip or palate, CNS septation, and a wide range of other phenotypes. Interestingly, defects in cholesterol biosynthesis generate similar Shh-like disorders (e.g., Smith-Lemli-Opitz syndrome) suggesting that cholesterol modification of the Shh gene product is crucial for pathway function. Both the Patched and Smoothened genes have also been shown to be clinically relevant with Smoothened now being recognized as an oncogene that, like PTCH-1 and PTCH-2, is believed to be the causative agent of several forms of adult tumors. For these reasons, siRNA directed against Smoothened (SMO, NM_{—}005631), Patched (PTCH, nm_{—}000264), and additional genes that participate in cholesterol signaling, biosynthesis, and degradation, have potentially useful research and therapeutic applications.

Targeted Pathways.

[0548] In addition to targeting siRNA against one or more members of a family of proteins, siRNA can be directed against members of a pathway. Thus, for instance, siRNA can be directed against members of a signal transduction pathway (e.g., the insulin pathway, including AKT1-3, CBL, CBLB, EIF4EBP1, FOXO1A, FOXO3A, FRAP1, GSK3A, GSK3B, IGF1, IGF1R, INPP5D, INSR, IRS1, MLLT7, PDPK1, PIK3CA, PIK3CB, PIK3R1, PIK3R2, PPP2R2B, PTEN, RPS6, RPS6KA1, RPX6KA3, SGK, TSC1, TSC2, AND XPO1), an apoptotic pathway (CASP3,6,7,8,9, DSH1/2, P110, P85, PDK1/2, CATENIN, HSP90, CDC37, P23, BAD, BCLXL, BCL2, SMAC, and others), pathways, involved in DNA damage, cell cycle, and other physiological (p53,MDM2, CHK1/2, BRCA1/2, ATM, ATR, P15INK4, P27, P21, SKP2, CDC25C/A, 14-3-3, PLK, RB, CDK4, GLUT4, Inos, Mtor, FKBP, PPAR, RXR, ER). Similarly, genes involved in immune system function including TNFR1, IL-IR, IRAK1/2, TRAF2, TRAF6, TRADD, FADD, IKKε, IKKγ, IKKβ, IKKα, IkBα, IkBβ, p50, p65, Rac, RhoA, Cdc42, ROCK, Pak1/2/3/4/5/6, cIAP, HDAC1/2, CBP, β-TrCP, Rip2/4, and others are also important targets for the siRNAs described in this document and may be useful in treating immune system disorders. Genes involved in apoptosis, such as Dsh1/2,PTEN, P110 (pan), P85, PDK1/2, Akt1, Akt2, Akt (pan), p70^{S6K}, GSK3β, PP2A (cat), β-catenin, HSP90, Cdc37/p50, P23, Bad, BclxL, Bcl2, Smac/Diablo, and Ask1 are potentially useful in the treatment of diseases that involve defects in programmed cell death (e.g., cancer), while siRNA agents directed against p53, MDM2, Chk1/2, BRCA1/2, ATM, ATR, p15^{INK4}, P27, P21, Skp2, Cdc25C/A, 14-3-3σ/ε, PLK, Rb, Cdk4, Glut4, iNOS, mTOR, FKBP, PPARγ, RXRα, ERα and related genes may play a critical role in combating diseases associated with disruptions in DNA repair, and cell cycle abnormalities.

[0549] Tables VI-Table X below provide examples of useful pools for inhibiting different genes in the human insulin pathway and tyrosine kinase pathways, proteins involved in the cell cycle, the production of nuclear receptors, and other genes. These particular pools are particularly useful in humans, but would be useful in any species that generates an appropriately homologous mRNA. Further, within each of the listed pools any one sequence maybe used independently but preferably at least two of the listed sequences, more preferably at least three, and most preferably all of the listed sequences for a given gene is present.

TABLE VI

| | | | | | | |
|---|---|---|---|---|---|---|
| Gene | | | | | | SEQ. |
| Name | Acc # | GI | L.L. | Duplex # | Sequence | ID NO. |

| | | | | | | |
|---|---|---|---|---|---|---|
| AKT1 | NM_005163 | 4885060 | 207 | D-003000-05 | GACAAGGACGGGCACATTA | 465 |
| AKT1 | NM_005163 | 4885060 | 207 | D-003000-06 | GGACAAGGACGGGCACATT | 466 |
| AKT1 | NM_005163 | 4885060 | 207 | D-003000-07 | GCTACTTCCTCCTCAAGAA | 467 |
| AKT1 | NM_005163 | 4885060 | 207 | D-003000-08 | GACCGCCTCTGCTTTGTCA | 468 |
| AKT2 | | | | | | |
| AKT2 | NM_001626 | 6715585 | 208 | D-003001-05 | GTACTTCGATGATGAATTT | 469 |
| AKT2 | NM_001626 | 6715585 | 208 | D-003001-06 | GCAAAGAGGGCATCAGTGA | 470 |
| AKT2 | NM_001626 | 6715585 | 208 | D-003001-07 | GGGCTAAAGTGACCATGAA | 471 |
| AKT2 | NM_001626 | 6715585 | 208 | D-003001-08 | GCAGAATGCCAGCTGATGA | 472 |
| AKT3 | | | | | | |
| AKT3 | NM_005465 | 32307164 | 10000 | D-003002-05 | GGAGTAAACTGGCAAGATG | 473 |
| AKT3 | NM_005465 | 32307164 | 10000 | D-003002-06 | GACATTAAATTTCCTCGAA | 474 |
| AKT3 | NM_005465 | 32307164 | 10000 | D-003002-07 | GACCAAAGCCAAACACATT | 475 |
| AKT3 | NM_005465 | 32307164 | 10000 | D-003002-08 | GAGGAGAGAATGAATTGTA | 476 |
| CBL | | | | | | |
| CBL | NM_005188 | 4885116 | 867 | D-003003-05 | GGAGACACATTTCGGATTA | 477 |
| CBL | NM_005188 | 4885116 | 867 | D-003003-06 | GATCTGACCTGCAATGATT | 478 |
| CBL | NM_005188 | 4885116 | 867 | D-003003-07 | GACAATCCCTCACAATAAA | 479 |
| CBL | NM_005188 | 4885116 | 867 | D-003003-08 | CCAGAAAGCTTTGGTCATT | 480 |
| CBLB | | | | | | |
| CBLB | NM_170662 | 29366807 | 868 | D-003004-05 | GACCATACCTCATAACAAG | 481 |
| CBLB | NM_170662 | 29366807 | 868 | D-003004-06 | TGAAAGACCTCCACCAATC | 482 |
| CBLB | NM_170662 | 29366807 | 868 | D-003004-07 | GATGAAGGCTCCAGGTGTT | 483 |
| CBLB | NM_170662 | 29366807 | 868 | D-003004-08 | TATCAGCATTTACGACTTA | 484 |
| EIF4EBP1 | | | | | | |
| EIF4EBP1 | NM_004095 | 20070179 | 1978 | D-003005-05 | GCAATAGCCCAGAAGATAA | 485 |
| EIF4EBP1 | NM_004095 | 20070179 | 1978 | D-003005-06 | CGCAATAGCCCAGAAGATA | 486 |
| EIF4EBP1 | NM_004095 | 20070179 | 1978 | D-003005-07 | GAGATGGACATTTAAAGCA | 487 |
| EIF4EBP1 | NM_004095 | 20070179 | 1978 | D-003005-08 | CAATAGCCCAGAAGATAAG | 488 |
| FOXO1A | | | | | | |
| FOXO1A | NM_002015 | 9257221 | 2308 | D-003006-05 | CCAGGCATCTCATAACAAA | 489 |
| FOXO1A | NM_002015 | 9257221 | 2308 | D-003006-06 | CCAGATGCCTATACAAACA | 490 |
| FOXO1A | NM_002015 | 9257221 | 2308 | D-003006-07 | GGAGGTATGAGTCAGTATA | 491 |
| FOXO1A | NM_002015 | 9257221 | 2308 | D-003006-08 | GAGGTATGAGTCAGTATAA | 492 |
| FOXO3A | | | | | | |
| FOXO3A | NM_001455 | 4503738 | 2309 | D-003007-01 | CAATAGCAACAAGTATACC | 493 |
| FOXO3A | NM_001455 | 4503738 | 2309 | D-003007-02 | TGAAGTCCAGGACGATGAT | 494 |
| FOXO3A | NM_001455 | 4503738 | 2309 | D-003007-03 | TGTCACACTATGGTAACCA | 495 |
| FOXO3A | NM_001455 | 4503738 | 2309 | D-003007-04 | TGTTCAATGGGAGCTTGGA | 496 |
| FRAP1 | | | | | | |
| FRAP1 | NM_004958 | 19924298 | 2475 | D-003008-05 | GAGAAGAAATGGAAGAAAT | 497 |
| FRAP1 | NM_004958 | 19924298 | 2475 | D-003008-06 | CCAAAGTGCTGCAGTACTA | 498 |
| FRAP1 | NM_004958 | 19924298 | 2475 | D-003008-07 | GAGCATGCCGTCAATAATA | 499 |
| FRAP1 | NM_004958 | 19924298 | 2475 | D-003008-08 | GGTCTGAACTGAATGAAGA | 500 |
| GSK3A | | | | | | |
| GSK3A | NM_019884 | 11995473 | 2931 | D-003009-05 | GGACAAAGGTGTTCAAATC | 501 |
| GSK3A | NM_019884 | 11995473 | 2931 | D-003009-06 | GAACCCAGCTGCCTAACAA | 502 |
| GSK3A | NM_019884 | 11995473 | 2931 | D-003009-07 | GCGCACAGCTTCTTTGATG | 503 |
| GSK3A | NM_019884 | 11995473 | 2931 | D-003009-08 | GCTCTAGCCTGCTGGAGTA | 504 |
| GSK3B | | | | | | |
| GSK3B | NM_002093 | 21361339 | 2932 | D-003010-05 | GAAGAAAGATGAGGTCTAT | 505 |
| GSK3B | NM_002093 | 21361339 | 2932 | D-003010-06 | GGACCCAAATGTCAAACTA | 506 |
| GSK3B | NM_002093 | 21361339 | 2932 | D-003010-07 | GAAATGAACCCAAACTACA | 507 |
| GSK3B | NM_002093 | 21361339 | 2932 | D-003010-08 | GATGAGGTCTATCTTAATC | 508 |
| IGF1 | | | | | | |
| IGF1 | NM_000618 | | | D-003011-05 | GGAAGTACATTTGAAGAAC | 509 |
| IGF1 | NM_000618 | | | D-003011-06 | AGAAGGAAGTACATTTGAA | 510 |
| IGF1 | NM_000618 | | | D-003011-07 | CCTCAAGCCTGCCAAGTCA | 511 |
| IGF1 | NM_000618 | | | D-003011-08 | GGTGGATGCTCTTCAGTTC | 512 |
| IGF1R | | | | | | |
| IGF1R | NM_000875 | 11068002 | 3480 | D-003012-05 | CAACGAAGCTTCTGTGATG | 513 |
| IGF1R | NM_000875 | 11068002 | 3480 | D-003012-06 | GGCCAGAAATGGAGAATAA | 514 |
| IGF1R | NM_000875 | 11068002 | 3480 | D-003012-07 | GAAGCACCCTTTAAGAATG | 515 |
| IGF1R | NM_000875 | 11068002 | 3480 | D-003012-08 | GCAGACACCTACAACATCA | 516 |
| INPP5D | | | | | | |
| INPP5D | NM_005541 | 5031798 | 3635 | D-003013-05 | GGAATTGCGTTTACACTTA | 517 |
| INPP5D | NM_005541 | 5031798 | 3635 | D-003013-06 | GGAAACTGATCATTAAGAA | 518 |
| INPP5D | NM_005541 | 5031798 | 3635 | D-003013-07 | CGACAGGGATGAAGTACAA | 519 |
| INPP5D | NM_005541 | 5031798 | 3635 | D-003013-08 | AAACGCAGCTGCCCATCTA | 520 |
| INSR | | | | | | |
| INSR | NM_000208 | 4557883 | 3643 | D-003014-05 | GGAAGACGTTTGAGGATTA | 521 |
| INSR | NM_000208 | 4557883 | 3643 | D-003014-06 | GAACAAGGCTCCCGAGAGT | 522 |
| INSR | NM_000208 | 4557883 | 3643 | D-003014-07 | GGAGAGACCTTGGAAATTG | 523 |
| INSR | NM_000208 | 4557883 | 3643 | D-003014-08 | GGACGGAACCCACCTATTT | 524 |
| IRS1 | | | | | | |
| IRS1 | NM_005544 | 5031804 | 3667 | D-003015-05 | AAAGAGGTCTGGCAAGTGA | 525 |
| IRS1 | NM_005544 | 5031804 | 3667 | D-003015-06 | GAACCTGATTGGTATCTAC | 526 |
| IRS1 | NM_005544 | 5031804 | 3667 | D-003015-07 | CCACGGCGATCTAGTGCTT | 527 |
| IRS1 | NM_005544 | 5031804 | 3667 | D-003015-08 | GTCAGTCTGTCGTCCAGTA | 528 |
| MLLT7 | | | | | | |
| MLLT7 | NM_005938 | 5174578 | 4303 | D-003016-05 | GGACTGGACTTCAACTTTG | 529 |
| MLLT7 | NM_005938 | 5174578 | 4303 | D-003016-06 | CCACGAAGCAGTTCAAATG | 530 |
| MLLT7 | NM_005938 | 5174578 | 4303 | D-003016-07 | GAGAAGCGACTGACACTTG | 531 |
| MLLT7 | NM_005938 | 5174578 | 4303 | D-003016-08 | GACCAGAGATCGCTAACCA | 532 |
| PDPK1 | | | | | | |
| PDPK1 | NM_002613 | 4505694 | 5170 | D-003017-05 | CAAGAGACCTCGTGGAGAA | 533 |
| PDPK1 | NM_002613 | 4505694 | 5170 | D-003017-06 | GACCAGAGGCCAAGAATTT | 534 |
| PDPK1 | NM_002613 | 4505694 | 5170 | D-003017-07 | GGAAACGAGTATCTTATAT | 535 |
| PDPK1 | NM_002613 | 4505694 | 5170 | D-003017-08 | GAGAAGCGACATATCATAA | 536 |
| PIK3CA | | | | | | |
| PIK3CA | NM_006218 | 5453891 | 5290 | D-003018-05 | GCTATCATCTGAACAATTA | 537 |
| PIK3CA | NM_006218 | 5453891 | 5290 | D-003018-06 | GGATAGAGGCCAAATAATA | 538 |
| PIK3CA | NM_006218 | 5453891 | 5290 | D-003018-07 | GGACAACTGTTTCATATAG | 539 |
| PIK3CA | NM_006218 | 5453891 | 5290 | D-003018-08 | GCCAGTACCTCATGGATTA | 540 |
| PIK3CB | | | | | | |
| PIK3CB | NM_006219 | 5453893 | 5291 | D-003019-05 | CGACAAGACTGCCGAGAGA | 541 |
| PIK3CB | NM_006219 | 5453893 | 5291 | D-003019-06 | TCAAGTGTCTCCTAATATG | 542 |
| PIK3CB | NM_006219 | 5453893 | 5291 | D-003019-07 | GGATTCAGTTGGAGTGATT | 543 |
| PIK3CB | NM_006219 | 5453893 | 5291 | D-003019-08 | TTTCAAGTGTCTCCTAATA | 544 |
| PIK3R1 | | | | | | |
| PIK3R1 | NM_181504 | 32455251 | 5295 | D-003020-05 | GGAAATATGGCTTCTCTGA | 545 |
| PIK3R1 | NM_181504 | 32455251 | 5295 | D-003020-06 | GAAAGACGAGAGACCAATA | 546 |
| PIK3R1 | NM_181504 | 32455251 | 5295 | D-003020-07 | GTAAAGCATTGTGTCATAA | 547 |
| PIK3R1 | NM_181504 | 32455251 | 5295 | D-003020-08 | GGATCAAGTTGTCAAAGAA | 548 |
| PIK3R2 | | | | | | |
| PIK3R2 | NM_005027 | 4826907 | 5296 | D-003021-05 | GGAAAGGCGGGAACAATAA | 549 |
| PIK3R2 | NM_005027 | 4826907 | 5296 | D-003021-06 | GATGAAGCGTACTGCAATT | 550 |
| PIK3R2 | NM_005027 | 4826907 | 5296 | D-003021-07 | GGACAGCGAATCTCACTAC | 551 |
| PIK3R2 | NM_005027 | 4826907 | 5296 | D-003021-08 | GCAAGATCCGAGACCAGTA | 552 |
| PPP2R2B | | | | | | |
| PPP2R2B | NM_004576 | 4758953 | 5521 | D-003022-05 | GAATGCAGCTTACTTTCTT | 553 |
| PPP2R2B | NM_004576 | 4758953 | 5521 | D-003022-06 | GACCGAAGCTGACATTATC | 554 |
| PPP2R2B | NM_004576 | 4758953 | 5521 | D-003022-07 | TCGATTACCTGAAGAGTTT | 555 |
| PPP2R2B | NM_004576 | 4758953 | 5521 | D-003022-08 | CCTGAAGAGTTTAGAAATA | 556 |
| PTEN | | | | | | |
| PTEN | NM_000314 | 4506248 | 5728 | D-003023-05 | GTGAAGATCTTGACCAATG | 557 |
| PTEN | NM_000314 | 4506248 | 5728 | D-003023-06 | GATCAGCATACACAAATTA | 558 |
| PTEN | NM_000314 | 4506248 | 5728 | D-003023-07 | GGCGCTATGTGTATTATTA | 559 |
| PTEN | NM_000314 | 4506248 | 5728 | D-003023-08 | GTATAGAGCGTGCAGATAA | 560 |
| RPS6 | | | | | | |
| RPS6 | NM_001010 | 17158043 | 6194 | D-003024-05 | GCCAGAAACTCATTGAAGT | 561 |
| RPS6 | NM_001010 | 17158043 | 6194 | D-003024-06 | GGATATTCCTGGACTGACT | 562 |
| RPS6 | NM_001010 | 17158043 | 6194 | D-003024-07 | CCAAGGAGAACTGGAGAAA | 563 |
| RPS6 | NM_001010 | 17158043 | 6194 | D-003024-08 | GCGTATGGCCACAGAAGTT | 564 |
| RPS6KA1 | | | | | | |
| RPS6KA1 | NM_002953 | 20149546 | 6195 | D-003025-05 | GATGACACCTTCTACTTTG | 565 |
| RPS6KA1 | NM_002953 | 20149546 | 6195 | D-003025-06 | GAGAATGGGCTCCTCATGA | 566 |
| RPS6KA1 | NM_002953 | 20149546 | 6195 | D-003025-07 | CAAGCGGGATCCTTCAGAA | 567 |
| RPS6KA1 | NM_002953 | 20149546 | 6195 | D-003025-08 | CCACCGGCCTGATGGAAGA | 568 |
| RPS6KA3 | | | | | | |
| RPS6KA3 | NM_004586 | 4759049 | 6197 | D-003026-05 | GAAGGGAAGTTGTATCTTA | 569 |
| RPS6KA3 | NM_004586 | 4759049 | 6197 | D-003026-06 | GAAAGTATGTGTATGTAGT | 570 |
| RPS6KA3 | NM_004586 | 4759049 | 6197 | D-003026-07 | GGACAGCATCCAAACATTA | 571 |
| RPS6KA3 | NM_004586 | 4759049 | 6197 | D-003026-08 | GGAGGTGAATTGCTGGATA | 572 |
| SGK | | | | | | |
| SGK | NM_005627 | 5032090 | 6446 | D-003027-01 | TTAATGGTGGAGAGTTGTT | 573 |
| SGK | NM_005627 | 5032090 | 6446 | D-003027-04 | ATTAACTGGGATGATCTCA | 574 |
| SGK | NM_005627 | 25168262 | 6446 | D-003027-05 | GAAGAAAGCAATCCTGAAA | 575 |
| SGK | NM_005627 | 25168262 | 6446 | D-003027-06 | AAACACAGCTGAAATGTAC | 576 |
| TSC1 | | | | | | |
| TSC1 | NM_000368 | 24475626 | 7248 | D-003028-05 | GAAGATGGCTATTCTGTGT | 577 |
| TSC1 | NM_000368 | 24475626 | 7248 | D-003028-06 | TATGAAGGCTCGAGAGTTA | 578 |
| TSC1 | NM_000368 | 24475626 | 7248 | D-003028-07 | CGACACGGCTGATAACTGA | 579 |
| TSC1 | NM_000368 | 24475626 | 7248 | D-003028-08 | CGGCTGATGTTGTTAAATA | 580 |
| TSC2 | | | | | | |
| TSC2 | NM_000548 | 10938006 | 7249 | D-003029-05 | GCATTAATCTCTTACCATA | 581 |
| TSC2 | NM_000548 | 10938006 | 7249 | D-003029-06 | CCAATGTCCTCTTGTCTTT | 582 |
| TSC2 | NM_000548 | 10938006 | 7249 | D-003029-07 | GGAGACACATCACCTACTT | 583 |
| TSC2 | NM_000548 | 10938006 | 7249 | D-003029-08 | TCACCAGGCTCATCAAGAA | 584 |
| XPO1 | | | | | | |
| XPO1 | NM_003400 | 8051634 | 7514 | D-003030-05 | GAAAGTCTCTGTCAAAATA | 585 |
| XPO1 | NM_003400 | 8051634 | 7514 | D-003030-06 | GCAATAGGCTCCATTAGTG | 586 |
| XPO1 | NM_003400 | 8051634 | 7514 | D-003030-07 | GGAACATGATCAACTTATA | 587 |
| XPO1 | NM_003400 | 8051634 | 7514 | D-003030-08 | GGATACAGATTCCATAAAT | 588 |

[0550] TABLE VII

| Gene | | | | | | SEQ. |
|---|---|---|---|---|---|---|
| Name | Acc # | GI | L.L. | Duplex # | Sequence | ID NO. |
| ABL1 | | | | | | |
| ABL1 | NM_007313 | 6382057 | 25 | D-003100-05 | GGAAATCAGTGACATAGTG | 589 |
| ABL1 | NM_007313 | 6382057 | 25 | D-003100-06 | GGTCCACACTGCAATGTTT | 590 |
| ABL1 | NM_007313 | 6382057 | 25 | D-003100-07 | GAAGGAAATCAGTGACATA | 591 |
| ABL1 | NM_007313 | 6382057 | 25 | D-003100-08 | TCACTGAGTTCATGACCTA | 592 |
| ABL2 | | | | | | |
| ABL2 | NM_007314 | 6382061 | 27 | D-003101-05 | GAAATGGAGCGAACAGATA | 593 |
| ABL2 | NM_007314 | 6382061 | 27 | D-003101-06 | GAGCCAAATTTCCTATTAA | 594 |
| ABL2 | NM_007314 | 6382061 | 27 | D-003101-07 | GTAATAAGCCTACAGTCTA | 595 |
| ABL2 | NM_007314 | 6382061 | 27 | D-003101-08 | GGAGTGAAGTTCGCTCTAA | 596 |
| ACK1 | | | | | | |
| ACK1 | NM_005781 | 8922074 | 10188 | D-003102-05 | AAACGCAAGTCGTGGATGA | 597 |
| ACK1 | NM_005781 | 8922074 | 10188 | D-003102-06 | GCAAGTCGTGGATGAGTAA | 598 |
| ACK1 | NM_005781 | 8922074 | 10188 | D-003102-07 | GAGCACTACCTCAGAATGA | 599 |
| ACK1 | NM_005781 | 8922074 | 10188 | D-003102-08 | TCAGCAGCACCCACTATTA | 600 |
| ALK | | | | | | |
| ALK | NM_004304 | 29029631 | 238 | D-003103-05 | GACAAGATCCTGCAGAATA | 601 |
| ALK | NM_004304 | 29029631 | 238 | D-003103-06 | GGAAGAGTCTGGCAGTTGA | 602 |
| ALK | NM_004304 | 29029631 | 238 | D-003103-07 | GCACGTGGCTCGGGACATT | 603 |
| ALK | NM_004304 | 29029631 | 238 | D-003103-08 | GAACTGCAGTGAAGGAACA | 604 |
| AXL | | | | | | |
| AXL | NM_021913 | 21536465 | 558 | D-003104-05 | GGTCAGAGCTGGAGGATTT | 605 |
| AXL | NM_021913 | 21536465 | 558 | D-003104-06 | GAAAGAAGGAGACCCGTTA | 606 |
| AXL | NM_021913 | 21536465 | 558 | D-003104-07 | CCAAGAAGATCTACAATGG | 607 |
| AXL | NM_021913 | 21536465 | 558 | D-003104-08 | GGAACTGCATGCTGAATGA | 608 |
| BLK | | | | | | |
| BLK | NM_001715 | 4502412 | 640 | D-003105-05 | GAGGATGCCTGCTGGATTT | 609 |
| BLK | NM_001715 | 4502412 | 640 | D-003105-06 | ACATGAAGGTGGCCATTAA | 610 |
| BLK | NM_001715 | 4502412 | 640 | D-003105-07 | GGTCAGCGCCCAAGACAAG | 611 |
| BLK | NM_001715 | 4502412 | 640 | D-003105-08 | GAAACTCGGGTCTGGACAA | 612 |
| BMX | | | | | | |
| BMX | NM_001721 | 21359831 | 660 | D-003106-05 | AAACAAACCTTTCCTACTA | 613 |
| BMX | NM_001721 | 21359831 | 660 | D-003106-06 | GAAGGAGCATTTATGGTTA | 614 |
| BMX | NM_001721 | 21359831 | 660 | D-003106-07 | GAGAAGAGATTACCTTGTT | 615 |
| BMX | NM_001721 | 21359831 | 660 | D-003106-08 | GTAAGGCTGTGAATGATAA | 616 |
| BTK | | | | | | |
| BTK | NM_000061 | 4557376 | 695 | D-003107-05 | GAACAGGAATGGAAGCTTA | 617 |
| BTK | NM_000061 | 4557376 | 695 | D-003107-06 | GCTATGGGCTGCCAAATTT | 618 |
| BTK | NM_000061 | 4557376 | 695 | D-003107-07 | GAAAGCAACTTACCATGGT | 619 |
| BTK | NM_000061 | 4557376 | 695 | D-003107-08 | GGTAAACGATCAAGGAGTT | 620 |
| C20orf64 | | | | | | |
| C20orf64 | NM_033550 | 19923655 | 11285 | D-003108-05 | CAACTTAGCCAAGACAATT | 621 |
| C20orf64 | NM_033550 | 19923655 | 11285 | D-003108-06 | GAAATTGAAGGCTCAGTGA | 622 |
| C20orf64 | NM_033550 | 19923655 | 11285 | D-003108-07 | TGGAACAGCTGAACATTGT | 623 |
| C20orf64 | NM_033550 | 19923655 | 11285 | D-003108-08 | GCTTCCAACTGCTTATATA | 624 |
| CSF1R | | | | | | |
| CSF1R | NM_005211 | 27262658 | 1436 | D-003109-05 | GGAGAGCTCTGACGTTTGA | 625 |
| CSF1R | NM_005211 | 27262658 | 1436 | D-003109-06 | CAACAACGCTACCTTCCAA | 626 |
| CSF1R | NM_005211 | 27262658 | 1436 | D-003109-07 | CCACGCAGCTGCCTTACAA | 627 |
| CSF1R | NM_005211 | 27262658 | 1436 | D-003109-08 | GGAACAACCTGCAGTTTGG | 628 |
| CSK | | | | | | |
| CSK | NM_004383 | 4758077 | 1445 | D-003110-05 | CAGAATGTATTGCCAAGTA | 629 |
| CSK | NM_004383 | 4758077 | 1445 | D-003110-06 | GAACAAAGTCGCCGTCAAG | 630 |
| CSK | NM_004383 | 4758077 | 1445 | D-003110-07 | GCGAGTGCCTTATCCAAGA | 631 |
| CSK | NM_004383 | 4758077 | 1445 | D-003110-08 | GGAGAAGGGCTACAAGATG | 632 |
| DDR1 | | | | | | |
| DDR1 | NM_013994 | 7669484 | 780 | D-003111-05 | GGAGATGGAGTTTGAGTTT | 633 |
| DDR1 | NM_013994 | 7669484 | 780 | D-003111-06 | CAGAGGCCCTGTCATCTTT | 634 |
| DDR1 | NM_013994 | 7669484 | 780 | D-003111-07 | GCTGGTAGCTGTCAAGATC | 635 |
| DDR1 | NM_013994 | 7669484 | 780 | D-003111-08 | TGAAAGAGGTGAAGATCAT | 636 |
| DDR2 | | | | | | |
| DDR2 | NM_006182 | 5453813 | 4921 | D-003112-05 | GGTAAGAACTACACAATCA | 637 |
| DDR2 | NM_006182 | 5453813 | 4921 | D-003112-06 | GAACGAGAGTGCCACCAAT | 638 |
| DDR2 | NM_006182 | 5453813 | 4921 | D-003112-07 | ACACCAATCTGAAGTTTAT | 639 |
| DDR2 | NM_006182 | 5453813 | 4921 | D-003112-08 | CAACAAGAATGCCAGGAAT | 640 |
| DKFZp761 | | | | | | |
| P1010 | | | | | | |
| DKFZp761 | NM_018423 | 8922178 | 55359 | D-003113-05 | CCTAGAAGCTGCCATTAAA | 641 |
| P1010 | | | | | | |
| DKFZp761 | NM_018423 | 8922178 | 55359 | D-003113-06 | GATTAGGCCTGGCTTATGA | 642 |
| P1010 | | | | | | |
| DKFZp761 | NM_018423 | 8922178 | 55359 | D-003113-07 | CCCAGTAGCTGCACACATA | 643 |
| P1010 | | | | | | |
| DKFZp761 | NM_018423 | 8922178 | 55359 | D-003113-08 | GGTGGTACCTGAACTGTAT | 644 |
| P1010 | | | | | | |
| EGFR | | | | | | |
| EGFR | NM_005228 | 4885198 | 1956 | D-003114-05 | GAAGGAAACTGAATTCAAA | 645 |
| EGFR | NM_005228 | 4885198 | 1956 | D-003114-06 | GGAAATATGTACTACGAAA | 646 |
| EGFR | NM_005228 | 4885198 | 1956 | D-003114-07 | CCACAAAGCAGTGAATTTA | 647 |
| EGFR | NM_005228 | 4885198 | 1956 | D-003114-08 | GTAACAAGCTCACGCAGTT | 648 |
| EPHA1 | | | | | | |
| EPHA1 | NM_005232 | 4885208 | 2041 | D-003115-05 | GACCAGAGCTTCACCATTC | 649 |
| EPHA1 | NM_005232 | 4885208 | 2041 | D-003115-06 | GCAAGACTGTGGCCATTAA | 650 |
| EPHA1 | NM_005232 | 4885208 | 2041 | D-003115-07 | GGGCGAACCTGACCTATGA | 651 |
| EPHA1 | NM_005232 | 4885208 | 2041 | D-003115-08 | GATTGTAGCCGTCATCTTT | 652 |
| EPHA2 | | | | | | |
| EPHA2 | NM_004431 | 4758277 | 1969 | D-003116-05 | GGAGGGATCTGGCAACTTG | 653 |
| EPHA2 | NM_004431 | 4758277 | 1969 | D-003116-06 | GCAGCAAGGTGCACGAATT | 654 |
| EPHA2 | NM_004431 | 4758277 | 1969 | D-003116-07 | GGAGAAGGATGGCGAGTTC | 655 |
| EPHA2 | NM_004431 | 4758277 | 1969 | D-003116-08 | GAAGTTCACTACCGAGATC | 656 |
| EPHA3 | | | | | | |
| EPHA3 | NM_005233 | 21361240 | 2042 | D-003117-05 | GATCGGACCTCCAGAAATA | 657 |
| EPHA3 | NM_005233 | 21361240 | 2042 | D-003117-06 | GAACTCAGCTCAGAAGATT | 658 |
| EPHA3 | NM_005233 | 21361240 | 2042 | D-003117-07 | GCAAGAGGCACAAATGTTA | 659 |
| EPHA3 | NM_005233 | 21361240 | 2042 | D-003117-08 | GAGCATCAGTTTACAAAGA | 660 |
| EPHA4 | | | | | | |
| EPHA4 | NM_004438 | 4758279 | 2043 | D-003118-05 | GGTCTGGGATGAAGTATTT | 661 |
| EPHA4 | NM_004438 | 4758279 | 2043 | D-003118-06 | GAATGAAGTTACCTTATTG | 662 |
| EPHA4 | NM_004438 | 4758279 | 2043 | D-003118-07 | GAACTTGGGTGGATAGCAA | 663 |
| EPHA4 | NM_004438 | 4758279 | 2043 | D-003118-08 | GAGATTAAATTCACCTTGA | 664 |
| EPHA7 | | | | | | |
| EPHA7 | NM_004440 | 4758281 | 2045 | D-003119-05 | GAAAAGAGATGTTGCAGTA | 665 |
| EPHA7 | NM_004440 | 4758281 | 2045 | D-003119-06 | CTAGATGCCTCCTGTATTA | 666 |
| EPHA7 | NM_004440 | 4758281 | 2045 | D-003119-07 | AGAAGAAGGTTATCGTTTA | 667 |
| EPHA7 | NM_004440 | 4758281 | 2045 | D-003119-08 | TAGCAAAGCTGACCAAGAA | 668 |
| EPHA8 | | | | | | |
| EPHA8 | NM_020526 | 18201903 | 2046 | D-003120-05 | GAAGATGCACTATCAGAAT | 669 |
| EPHA8 | NM_020526 | 18201903 | 2046 | D-003120-06 | GAGAAGATGCACTATCAGA | 670 |
| EPHA8 | NM_020526 | 18201903 | 2046 | D-003120-07 | AACCTGATCTCCAGTGTGA | 671 |
| EPHA8 | NM_020526 | 18201903 | 2046 | D-003120-08 | TCTCAGACCTGGGCTATGT | 672 |
| EPHB1 | | | | | | |
| EPHB1 | NM_004441 | 21396502 | 2047 | D-003121-05 | GCGATAAGCTCCAGCATTA | 673 |
| EPHB1 | NM_004441 | 21396502 | 2047 | D-003121-06 | GAAACGGGCTTATAGCAAA | 674 |
| EPHB1 | NM_004441 | 21396502 | 2047 | D-003121-07 | GGATGAAGATCTACATTGA | 675 |
| EPHB1 | NM_004441 | 21396502 | 2047 | D-003121-08 | GCACGTCTCTGTCAACATC | 676 |
| EPHB2 | | | | | | |
| EPHB2 | NM_017449 | 17975764 | 2048 | D-003122-05 | ACTATGAGCTGCAGTACTA | 677 |
| EPHB2 | NM_017449 | 17975764 | 2048 | D-003122-06 | GTACAACGCCACAGCCATA | 678 |
| EPHB2 | NM_017449 | 17975764 | 2048 | D-003122-07 | GGAAAGCAATGACTGTTCT | 679 |
| EPHB2 | NM_017449 | 17975764 | 2048 | D-003122-08 | CGGACAAGCTGCAACACTA | 680 |
| EPHB3 | | | | | | |
| EPHB3 | NM_004443 | 17975767 | 2049 | D-003123-05 | GGTGTGATCTCCAATGTGA | 681 |
| EPHB3 | NM_004443 | 17975767 | 2049 | D-003123-06 | GGGATGACCTCCTGTACAA | 682 |
| EPHB3 | NM_004443 | 17975767 | 2049 | D-003123-07 | CAGAAGACCTGCTCCGTAT | 683 |
| EPHB3 | NM_004443 | 17975767 | 2049 | D-003123-08 | GAGATGAAGTACTTTGAGA | 684 |
| EPHB4 | | | | | | |
| EPHB4 | NM_004444 | 17975769 | 2050 | D-003124-05 | GGACAAACACGGACAGTAT | 685 |
| EPHB4 | NM_004444 | 17975769 | 2050 | D-003124-06 | GTACTAAGGTCTACATCGA | 686 |
| EPHB4 | NM_004444 | 17975769 | 2050 | D-003124-07 | GGAGAGAAGCAGAATATTC | 687 |
| EPHB4 | NM_004444 | 17975769 | 2050 | D-003124-08 | GCCAATAGCCACTCTAACA | 688 |
| EPHB6 | | | | | | |
| EPHB6 | NM_004445 | 4758291 | 2051 | D-003125-05 | GGAAGTCGATCCTGCTTAT | 689 |
| EPHB6 | NM_004445 | 4758291 | 2051 | D-003125-06 | GGACCAAGGTGGACACAAT | 690 |
| EPHB6 | NM_004445 | 4758291 | 2051 | D-003125-07 | TGTGGGAAGTGATGAGTTA | 691 |
| EPHB6 | NM_004445 | 4758291 | 2051 | D-003125-08 | CGGGAGACCTTCACCCTTT | 692 |
| ERBB2 | | | | | | |
| ERBB2 | NM_004448 | 4758297 | 2064 | D-003126-05 | GGACGAATTCTGCACAATG | 693 |
| ERBB2 | NM_004448 | 4758297 | 2064 | D-003126-06 | GACGAATTCTGCACAATGG | 694 |
| ERBB2 | NM_004448 | 4758297 | 2064 | D-003126-07 | CTACAACACAGACACGTTT | 695 |
| ERBB2 | NM_004448 | 4758297 | 2064 | D-003126-08 | AGACGAAGCATACGTGATG | 696 |
| ERBB3 | | | | | | |
| ERBB3 | NM_001982 | 4503596 | 2065 | D-003127-05 | AAGAGGATGTCAACGGTTA | 697 |
| ERBB3 | NM_001982 | 4503596 | 2065 | D-003127-06 | GAAGACTGCCAGACATTGA | 698 |
| ERBB3 | NM_001982 | 4503596 | 2065 | D-003127-07 | GACAAACACTGGTGCTGAT | 699 |
| ERBB3 | NM_001982 | 4503596 | 2065 | D-003127-08 | GCAGTGGATTCGAGAAGTG | 700 |
| ERBB4 | | | | | | |
| ERBB4 | NM_005235 | 4885214 | 2066 | D-003128-05 | GAGGAAAGATGCCAATTAA | 701 |
| ERBB4 | NM_005235 | 4885214 | 2066 | D-003128-06 | GCAGGAAACATCTATATTA | 702 |
| ERBB4 | NM_005235 | 4885214 | 2066 | D-003128-07 | GATCACAACTGCTGCTTAA | 703 |
| ERBB4 | NM_005235 | 4885214 | 2066 | D-003128-08 | CCTCAAAGATACCTAGTTA | 704 |
| FER | | | | | | |
| FER | NM_005246 | 4885230 | 2241 | D-003129-05 | GGAGTGACCTGAAGAATTC | 705 |
| FER | NM_005246 | 4885230 | 2241 | D-003129-06 | TAAAGCAGATTCCCATTAA | 706 |
| FER | NM_005246 | 4885230 | 2241 | D-003129-07 | GGAAAGTACTGTCCAAATG | 707 |
| FER | NM_005246 | 4885230 | 2241 | D-003129-08 | GAACAACGGCTGCTAAAGA | 708 |
| FES | | | | | | |
| FES | NM_002005 | 13376997 | 2242 | D-003130-05 | CGAGGATCCTGAAGCAGTA | 709 |
| FES | NM_002005 | 13376997 | 2242 | D-003130-06 | AGGAATACCTGGAGATTAG | 710 |
| FES | NM_002005 | 13376997 | 2242 | D-003130-07 | CAACAGGAGCTCCGGAATG | 711 |
| FES | NM_002005 | 13376997 | 2242 | D-003130-08 | GGTGTTGGGTGAGCAGATT | 712 |
| FGFR1 | | | | | | |
| FGFR1 | NM_000604 | 13186232 | 2260 | D-003131-05 | TAAGAAATGTCTCCTTTGA | 713 |
| FGFR1 | NM_000604 | 13186232 | 2260 | D-003131-06 | GAAGACTGCTGGAGTTAAT | 714 |
| FGFR1 | NM_000604 | 13186232 | 2260 | D-003131-07 | GATGGTCCCTTGTATGTCA | 715 |
| FGFR1 | NM_000604 | 13186232 | 2260 | D-003131-08 | CTTAAGAAATGTCTCCTTT | 716 |
| FGFR2 | | | | | | |
| FGFR2 | NM_000141 | 13186239 | 2263 | D-003132-05 | CCAAATCTCTCAACCAGAA | 717 |
| FGFR2 | NM_000141 | 13186239 | 2263 | D-003132-06 | GAACAGTATTCACCTAGTT | 718 |
| FGFR2 | NM_000141 | 13186239 | 2263 | D-003132-07 | GGCCAACACTGTCAAGTTT | 719 |
| FGFR2 | NM_000141 | 13186239 | 2263 | D-003132-08 | GTGAAGATGTTGAAAGATG | 720 |
| FGFR3 | | | | | | |
| FGFR3 | NM_000142 | 13112046 | 2261 | D-003133-05 | TGTCGGACCTGGTGTCTGA | 721 |
| FGFR3 | NM_000142 | 13112046 | 2261 | D-003133-06 | GCATCAAGCTGCGGCATCA | 722 |
| FGFR3 | NM_000142 | 13112046 | 2261 | D-003133-07 | GGACGGCACACCCTACGTT | 723 |
| FGFR3 | NM_000142 | 13112046 | 2261 | D-003133-08 | TGCACAACCTCGACTACTA | 724 |
| FGFR4 | | | | | | |
| FGFR4 | NM_002011 | 13112051 | 2264 | D-003134-05 | GCACTGGAGTCTCGTGATG | 725 |
| FGFR4 | NM_002011 | 13112051 | 2264 | D-003134-06 | CATAGGGACCTCTCGAATA | 726 |
| FGFR4 | NM_002011 | 13112051 | 2264 | D-003134-07 | ATACGGACATCATCCTGTA | 727 |
| FGFR4 | NM_002011 | 13112051 | 2264 | D-003134-08 | ATAGGGACCTCTCGAATAG | 728 |
| FGR | | | | | | |
| FGR | NM_005248 | 4885234 | 2268 | D-003135-05 | GCGATCATGTGAAGCATTA | 729 |
| FGR | NM_005248 | 4885234 | 2268 | D-003135-06 | TCACTGAGCTCATCACCAA | 730 |
| FGR | NM_005248 | 4885234 | 2268 | D-003135-07 | GAAGAGTGGTACTTTGGAA | 731 |
| FGR | NM_005248 | 4885234 | 2268 | D-003135-08 | CCCAGAAGCTGCCCTCTTT | 732 |
| FLT1 | | | | | | |
| FLT1 | NM_002019 | 4503748 | 2321 | D-003136-05 | GAGCAAACGTGACTTATTT | 733 |
| FLT1 | NM_002019 | 4503748 | 2321 | D-003136-06 | CCAAATGGGTTTCATGTTA | 734 |
| FLT1 | NM_002019 | 4503748 | 2321 | D-003136-07 | CAACAAGGATGCAGCACTA | 735 |
| FLT1 | NM_002019 | 4503748 | 2321 | D-003136-08 | GGACGTAACTGAAGAGGAT | 736 |
| FLT3 | | | | | | |
| FLT3 | NM_004119 | 4758395 | 2322 | D-003137-05 | GAAGGCATCTACACCATTA | 737 |
| FLT3 | NM_004119 | 4758395 | 2322 | D-003137-06 | GAAGGAGTCTGGAATAGAA | 738 |
| FLT3 | NM_004119 | 4758395 | 2322 | D-003137-07 | GAATTTAAGTCGTGTGTTC | 739 |
| FLT3 | NM_004119 | 4758395 | 2322 | D-003137-08 | GGAATTCATTTCACTCTGA | 740 |
| FLT4 | | | | | | |
| FLT4 | NM_002020 | 4503752 | 2324 | D-003138-05 | GCAAGAACGTGCATCTGTT | 741 |
| FLT4 | NM_002020 | 4503752 | 2324 | D-003138-06 | GCGAATACCTGTCCTACGA | 742 |
| FLT4 | NM_002020 | 4503752 | 2324 | D-003138-07 | GAAGACATTTGAGGAATTC | 743 |
| FLT4 | NM_002020 | 4503752 | 2324 | D-003138-08 | GAGCAGCCATTCATCAACA | 744 |
| FRK | | | | | | |
| FRK | NM_002031 | 4503786 | 2444 | D-003139-05 | GAAACAGACTCTTCATATT | 745 |
| FRK | NM_002031 | 4503786 | 2444 | D-003139-06 | GAACAATACCACTCCAGTA | 746 |
| FRK | NM_002031 | 4503786 | 2444 | D-003139-07 | CAAGACCGGTTCCTTTCTA | 747 |
| FRK | NM_002031 | 4503786 | 2444 | D-003139-08 | GCAAGAATATCTCCAAAAT | 748 |
| FYN | | | | | | |
| FYN | NM_002037 | 23510344 | 2534 | D-003140-05 | GGAATGGACTCATATGCAA | 749 |
| FYN | NM_002037 | 23510344 | 2534 | D-003140-06 | GCAGAAGAGTGGTACTTTG | 750 |
| FYN | NM_002037 | 23510344 | 2534 | D-003140-07 | CAAAGGAAG1TTACTGGAT | 751 |
| FYN | NM_002037 | 23510344 | 2534 | D-003140-08 | GAAGAGTGGTACTTTGGAA | 752 |
| HCK | | | | | | |
| HCK | NM_002110 | 4504356 | 3055 | D-003141-05 | GAGATACCGTGAAACATTA | 753 |
| HCK | NM_002110 | 4504356 | 3055 | D-003141-06 | GCAGGGAGATACCGTGAAA | 754 |
| HCK | NM_002110 | 4504356 | 3055 | D-003141-07 | CATCGTGGTTGCCCTGTAT | 755 |
| HCK | NM_002110 | 4504356 | 3055 | D-003141-08 | TGTGTAAGATTGCTGACTT | 756 |
| ITK | | | | | | |
| ITK | NM_005546 | 21614549 | 3702 | D-003144-05 | CAAATAATCTGGAAACCTA | 757 |
| ITK | NM_005546 | 21614549 | 3702 | D-003144-06 | GAAGAAACGAGGAATAATA | 758 |
| ITK | NM_005546 | 21614549 | 3702 | D-003144-07 | GAAACTCTCTCATCCCAAA | 759 |
| ITK | NM_005546 | 21614549 | 3702 | D-003144-08 | GGAATGGGCATGAAGGATA | 760 |
| JAK1 | | | | | | |
| JAK1 | NM_002227 | 4504802 | 3716 | D-003145-05 | CCACATAGCTGATCTGAAA | 761 |
| JAK1 | NM_002227 | 4504802 | 3716 | D-003145-06 | TGAAATCACTCACATTGTA | 762 |
| JAK1 | NM_002227 | 4504802 | 3716 | D-003145-07 | TAAGGAACCTCTATCATGA | 763 |
| JAK1 | NM_002227 | 4504802 | 3716 | D-003145-08 | GCAGGTGGCTGTTAAATCT | 764 |
| JAK2 | | | | | | |
| JAK2 | NM_004972 | 13325062 | 3717 | D-003146-05 | GCAAATAGATCCAGTTCTT | 765 |
| JAK2 | NM_004972 | 13325062 | 3717 | D-003146-06 | GAGCAAAGATCCAAGACTA | 766 |
| JAK2 | NM_004972 | 13325062 | 3717 | D-003146-07 | GCCAGAAACTTGAAACTTA | 767 |
| JAK2 | NM_004972 | 13325062 | 3717 | D-003146-08 | GTACAGATTTCGCAGATTT | 768 |
| JAK3 | | | | | | |
| JAK3 | NM_000215 | 4557680 | 3718 | D-003147-05 | GCGCCTATCTTTCTCCTTT | 769 |
| JAK3 | NM_000215 | 4557680 | 3718 | D-003147-06 | CCAGAAATCGTAGACATTA | 770 |
| JAK3 | NM_000215 | 4557680 | 3718 | D-003147-07 | CCTCATCTCTTCAGACTAT | 771 |
| JAK3 | NM_000215 | 4557680 | 3718 | D-003147-08 | TGTACGAGCTCTTCACCTA | 772 |
| KDR | | | | | | |
| KDR | NM_002253 | 11321596 | 3791 | D-003148-05 | GGAAATCTCTTGCAAGCTA | 773 |
| KDR | NM_002253 | 11321596 | 3791 | D-003148-06 | GATTACAGATCTCCATTTA | 774 |
| KDR | NM_002253 | 11321596 | 3791 | D-003148-07 | GCAGACAGATCTACGTTTG | 775 |
| KDR | NM_002253 | 11321596 | 3791 | D-003148-08 | GCGATGGCCTCTTCTGTAA | 776 |
| KIAA1079 | | | | | | |
| KIAA1079 | NM_014916 | 7662475 | 22853 | D-003149-05 | GAAATTCTCTCAACTGATG | 777 |
| KIAA1079 | NM_014916 | 7662475 | 22853 | D-003149-06 | GCAGAGGTCTTCACACTTT | 778 |
| KIAA1079 | NM_014916 | 7662475 | 22853 | D-003149-07 | TAAATGATCTTCAGACAGA | 779 |
| KIAA1079 | NM_014916 | 7662475 | 22853 | D-003149-08 | GAGCAGCCCTACTCTGATA | 780 |
| KIT | | | | | | |
| KIT | NM_000222 | 4557694 | 3815 | D-003150-05 | AAACACGGCTTAAGCAATT | 781 |
| KIT | NM_000222 | 4557694 | 3815 | D-003150-06 | GAACAGAACCTTCACTGAT | 782 |
| KIT | NM_000222 | 4557694 | 3815 | D-003150-07 | GGGAAGCCCTCATGTCTGA | 783 |
| KIT | NM_000222 | 4557694 | 3815 | D-003150-08 | GCAATTCCATTTATGTGTT | 784 |
| LCK | | | | | | |
| LCK | NM_005356 | 20428651 | 3932 | D-003151-05 | GAACTGCCATTATCCCATA | 785 |
| LCK | NM_005356 | 20428651 | 3932 | D-003151-06 | GAGAGGTGGTGAAACATTA | 786 |
| LCK | NM_005356 | 20428651 | 3932 | D-003151-07 | GGGCCAAGTTTCCCATTAA | 787 |
| LCK | NM_005356 | 20428651 | 3932 | D-003151-08 | GCACGCTGCTCATCCGAAA | 788 |
| LTK | | | | | | |
| LTK | NM_002344 | 4505044 | 4058 | D-003152-05 | TGAATTCACTCCTGCCAAT | 789 |
| LTK | NM_002344 | 4505044 | 4058 | D-003152-06 | GTGGCAACCTCAACACTGA | 790 |
| LTK | NM_002344 | 4505044 | 4058 | D-003152-07 | GGAGCTAGCTGTGGATAAC | 791 |
| LTK | NM_002344 | 4505044 | 4058 | D-003152-08 | GCAAGTTTCGCCATCAGAA | 792 |
| LYN | | | | | | |
| LYN | NM_002350 | 4505054 | 4067 | D-003153-05 | GCAGATGGCTTGTGCAGAA | 793 |
| LYN | NM_002350 | 4505054 | 4067 | D-003153-06 | GGAGAAGGCTTGTATTAGT | 794 |
| LYN | NM_002350 | 4505054 | 4067 | D-003153-07 | GATGAGCTCTATGACATTA | 795 |
| LYN | NM_002350 | 4505054 | 4067 | D-003153-08 | GGTGCTAAGTTCCCTATTA | 796 |
| MATK | | | | | | |
| MATK | NM_002378 | 21450841 | 4145 | D-003154-05 | TGAAGAATATCAAGTGTGA | 797 |
| MATK | NM_002378 | 21450841 | 4145 | D-003154-06 | CCGCTCAGCTCCTGCAGTT | 798 |
| MATK | NM_002378 | 21450841 | 4145 | D-003154-07 | TACTGAACCTGCAGCATTT | 799 |
| MATK | NM_002378 | 21450841 | 4145 | D-003154-08 | TGGGAGGTCTTCTCATATG | 800 |
| MERTK | | | | | | |
| MERTK | NM_006343 | 5453737 | 10461 | D-003155-05 | GAACTTACCTTACATAGCT | 801 |
| MERTK | NM_006343 | 5453737 | 10461 | D-003155-06 | GGACCTGCATACTTACTTA | 802 |
| MERTK | NM_006343 | 5453737 | 10461 | D-003155-07 | TGACAGGAATCTTCTAATT | 803 |
| MERTK | NM_006343 | 5453737 | 10461 | D-003155-08 | GGTAATGGCTCAGTCATGA | 804 |
| MET | | | | | | |
| MET | NM_000245 | 4557746 | 4233 | D-003156-05 | GAAAGAACCTCTCAACATT | 805 |
| MET | NM_000245 | 4557746 | 4233 | D-003156-06 | GGACAAGGCTGACCATATG | 806 |
| MET | NM_000245 | 4557746 | 4233 | D-003156-07 | CCAATGACCTGCTGAAATT | 807 |
| MET | NM_000245 | 4557746 | 4233 | D-003156-08 | GAGCATACATTAAACCAAA | 808 |
| MST1R | | | | | | |
| MST1R | NM_002447 | 4505264 | 4486 | D-003157-05 | GGATGGAGCTGCTGGCTTT | 809 |
| MST1R | NM_002447 | 4505264 | 4486 | D-003157-06 | CTGCAGACCTATAGATTTA | 810 |
| MST1R | NM_002447 | 4505264 | 4486 | D-003157-07 | GCACCTGTCTCACTCTTGA | 811 |
| MST1R | NM_002447 | 4505264 | 4486 | D-003157-08 | GAAAGAGTCCATCCAGCTA | 812 |
| MUSK | | | | | | |
| MUSK | NM_005592 | 5031926 | 4593 | D-003158-05 | GAAGAAGCCTCGGCAGATA | 813 |
| MUSK | NM_005592 | 5031926 | 4593 | D-003158-06 | GTAATAATCTCCATCATGT | 814 |
| MUSK | NM_005592 | 5031926 | 4593 | D-003158-07 | GGAATGAACTGAAAGTAGT | 815 |
| MUSK | NM_005592 | 5031926 | 4593 | D-003158-08 | GAGATTTCCTGGACTAGAA | 816 |
| NTRK1 | | | | | | |
| NTRK1 | NM_002529 | 4585711 | 4914 | D-003159-05 | GGACAACCCTTTCGAGTTC | 817 |
| NTRK1 | NM_002529 | 4585711 | 4914 | D-003159-06 | CCAGTGACCTCAACAGGAA | 818 |
| NTRK1 | NM_002529 | 4585711 | 4914 | D-003159-07 | CCACAATACTTCAGTGATG | 819 |
| NTRK1 | NM_002529 | 4585711 | 4914 | D-003159-08 | GAAGAGTGGTCTCCGTTTC | 820 |
| NTRK2 | | | | | | |
| NTRK2 | NM_006180 | 21361305 | 4915 | D-00316D-05 | GAACAGAAGTAATGAAATC | 821 |
| NTRK2 | NM_006180 | 21361305 | 4915 | D-00316D-06 | GTAATGCTGTTTCTGCTTA | 822 |
| NTRK2 | NM_006180 | 21361305 | 4915 | D-00316D-07 | GCAAGACACTCCAAGTTTG | 823 |
| NTRK2 | NM_006180 | 21361305 | 4915 | D-00316D-08 | GAAAGTCTATCACATTATC | 824 |
| NTRK3 | | | | | | |
| NTRK3 | NM_002530 | 4505474 | 4916 | D-003161-05 | GAGCGAATCTGCTAGTGAA | 825 |
| NTRK3 | NM_002530 | 4505474 | 4916 | D-003161-06 | GAAGTTCACTACAGAGAGT | 826 |
| NTRK3 | NM_002530 | 4505474 | 4916 | D-003161-07 | GGTCGACGGTCCAAATTTG | 827 |
| NTRK3 | NM_002530 | 4505474 | 4916 | D-003161-08 | GAATATCACTTCCATACAC | 828 |
| PDGFRA | | | | | | |
| PDGFRA | NM_006206 | 15451787 | 5156 | D-003162-05 | GAAACTTCCTGGACTATTT | 829 |
| PDGFRA | NM_006206 | 15451787 | 5156 | D-003162-06 | GAGATTTGGTCAACTATTT | 830 |
| PDGFRA | NM_006206 | 15451787 | 5156 | D-003162-07 | GCACGCCGCTTCCTGATAT | 831 |
| PDGFRA | NM_006206 | 15451787 | 5156 | D-003162-08 | CATCAGAGCTGGATCTAGA | 832 |
| PDGFRB | | | | | | |
| PDGFRB | NM_002609 | 15451788 | 5159 | D-003163-05 | GAAAGGAGACGTCAAATAT | 833 |
| PDGFRB | NM_002609 | 15451788 | 5159 | D-003163-06 | GGAATGAGGTGGTCAACTT | 834 |
| PDGFRB | NM_002609 | 15451788 | 5159 | D-003163-07 | CAACGAGTCTCCAGTGCTA | 835 |
| PDGFRB | NM_002609 | 15451788 | 5159 | D-003163-08 | GAGAGGACCTGCCGAGCAA | 836 |
| PTK2 | | | | | | |
| PTK2 | NM_005607 | 27886592 | 5747 | D-003164-05 | GAAGTTGGGTTGTCTAGAA | 837 |
| PTK2 | NM_005607 | 27886592 | 5747 | D-003164-06 | GAAGAACAATGATGTAATC | 838 |
| PTK2 | NM_005607 | 27886592 | 5747 | D-003164-07 | GGAAATTGCTTTGAAGTTG | 839 |
| PTK2 | NM_005607 | 27886592 | 5747 | D-003164-08 | GGTTCAAGCTGGATTATTT | 840 |
| PTK2B | | | | | | |
| PTK2B | NM_004103 | 27886583 | 2185 | D-003165-05 | GAACATGGCTGACCTCATA | 841 |
| PTK2B | NM_004103 | 27886583 | 2185 | D-003165-06 | GGACCACGCTGCTCTATTT | 842 |
| PTK2B | NM_004103 | 27886583 | 2185 | D-003165-07 | GGACGAGGACTATTACAAA | 843 |
| PTK2B | NM_004103 | 27886583 | 2185 | D-003165-08 | TGGCAGAGCTCATCAACAA | 844 |
| PTK6 | | | | | | |
| PTK6 | NM_005975 | 27886594 | 5753 | D-003166-05 | GAGAAAGTCCTGCCCGTTT | 845 |
| PTK6 | NM_005975 | 27886594 | 5753 | D-003166-06 | TGAAGAAGCTGCGGCACAA | 846 |
| PTK6 | NM_005975 | 27886594 | 5753 | D-003166-07 | CCGCGACTCTGATGAGAAA | 847 |
| PTK6 | NM_005975 | 27886594 | 5753 | D-003166-08 | TGCCCGAGCTTGTGAACTA | 848 |
| PTK7 | | | | | | |
| PTK7 | NM_002821 | 27886610 | 5754 | D-003167-05 | GAGAGAAGCCCACTATTAA | 849 |
| PTK7 | NM_002821 | 27886610 | 5754 | D-003167-06 | CGAGAGAAGCCCACTATTA | 850 |
| PTK7 | NM_002821 | 27886610 | 5754 | D-003167-07 | GGAGGGAGTTGGAGATGTT | 851 |
| PTK7 | NM_002821 | 27886610 | 5754 | D-003167-08 | GAAGACATGCCGCTATTTG | 852 |
| PTK9 | | | | | | |
| PTK9 | NM_002822 | 4506274 | 5756 | D-003168-05 | GAAGAACTACGACAGATTA | 853 |
| PTK9 | NM_002822 | 4506274 | 5756 | D-003168-09 | GAAGGAGACTATTTAGAGT | 854 |
| PTK9 | NM_002822 | 4506274 | 5756 | D-003168-10 | GAGCGGATGCTGTATTCTA | 855 |
| PTK9 | NM_002822 | 4506274 | 5756 | D-003168-11 | CTGCAGACTTCCTTTATGA | 856 |
| PTK9L | | | | | | |
| PTK9L | NM_007284 | 31543446 | 11344 | D-003169-05 | AGAGAGAGCTCCAGCAGAT | 857 |
| PTK9L | NM_007284 | 31543446 | 11344 | D-003169-06 | TTAACGAGGTGAAGACAGA | 858 |
| PTK9L | NM_007284 | 31543446 | 11344 | D-003169-07 | ACACAGAGCCCACGGATGT | 859 |
| PTK9L | NM_007284 | 31543446 | 11344 | D-003169-08 | GCTGGGATCAGGACTATGA | 860 |
| RET | | | | | | |
| RET | NM_000323 | 21536316 | 5979 | D-003170-05 | GCAAAGACCTGGAGAAGAT | 861 |
| RET | NM_000323 | 21536316 | 5979 | D-003170-06 | GCACACGGCTGCATGAGAA | 862 |
| RET | NM_000323 | 21536316 | 5979 | D-003170-07 | GAACTGGCCTGGAGAGAGT | 863 |
| RET | NM_000323 | 21536316 | 5979 | D-003170-08 | TTAAATGGATGGCAATTGA | 864 |
| ROR1 | | | | | | |
| ROR1 | NM_005012 | 4826867 | 4919 | D-003171-05 | GCAAGCATCTTTACTAGGA | 865 |
| ROR1 | NM_005012 | 4826867 | 4919 | D-003171-06 | GAGCAAGGCTAAAGAGCTA | 866 |
| ROR1 | NM_005012 | 4826867 | 4919 | D-003171-07 | GAGAGCAACTTCATGTAAA | 867 |
| ROR1 | NM_005012 | 4826867 | 4919 | D-003171-08 | GAGAATGTCCTGTGTCAAA | 868 |
| ROR2 | | | | | | |
| ROR2 | NM_004560 | 19743897 | 4920 | D-003172-05 | GGAACTCGCTGCTGCCTAT | 869 |
| ROR2 | NM_004560 | 19743897 | 4920 | D-003172-06 | GCAGGTGCCTCCTCAGATG | 870 |
| ROR2 | NM_004560 | 19743897 | 4920 | D-003172-07 | GCAATGTGCTAGTGTACGA | 871 |
| ROR2 | NM_004560 | 19743897 | 4920 | D-003172-08 | GAAGACAGAATATGGTTCA | 872 |
| ROS1 | | | | | | |
| ROS1 | NM_002944 | 19924164 | 6098 | D-003173-05 | GAGGAGACCTTCTTACTTA | 873 |
| ROS1 | NM_002944 | 19924164 | 6098 | D-003173-06 | TTACAGAGGTTCAGGATTA | 874 |
| ROS1 | NM_002944 | 19924164 | 6098 | D-003173-07 | GAACAAACCTAAGCATGAA | 875 |
| ROS1 | NM_002944 | 19924164 | 6098 | D-003173-08 | GAAAGAGCACTTCAAATAA | 876 |
| RYK | | | | | | |
| RYK | NM_002958 | 11863158 | 6259 | D-003174-05 | GAAAGATGGTTACCGAATA | 877 |
| RYK | NM_002958 | 11863158 | 6259 | D-003174-06 | CAAAGTAGATTCTGAAGTT | 878 |
| RYK | NM_002958 | 11863158 | 6259 | D-003174-07 | TCACTACGCTCTATCCTTT | 879 |
| RYK | NM_002958 | 11863158 | 6259 | D-003174-08 | GGTGAAGGATATAGCAATA | 880 |
| SRC | | | | | | |
| SRC | NM_005417 | 21361210 | 6714 | D-003175-05 | GAGAACCTGGTGTGCAAAG | 881 |
| SRC | NM_005417 | 21361210 | 6714 | D-003175-09 | GAGAGAACCTGGTGTGCAA | 882 |
| SRC | NM_005417 | 21361210 | 6714 | D-003175-10 | GGAGTTTGCTGGACTTTCT | 883 |
| SRC | NM_005417 | 21361210 | 6714 | D-003175-11 | GAAAGTGAGACCACGAAAG | 884 |
| SYK | | | | | | |
| SYK | NM_003177 | 21361552 | 6850 | D-003176-05 | GGAATAATCTCAAGAATCA | 885 |
| SYK | NM_003177 | 21361552 | 6850 | D-003176-06 | GAACTGGGCTCTGGTAATT | 886 |
| SYK | NM_003177 | 21361552 | 6850 | D-003176-07 | GGAAGAATCTGAGCAAATT | 887 |
| SYK | NM_003177 | 21361552 | 6850 | D-003176-08 | GAACAGACATGTCAAGGAT | 888 |
| TEC | | | | | | |
| TEC | NM_003215 | 4507428 | 7006 | D-003177-05 | GAAATTGTCTAGTAAGTGA | 889 |
| TEC | NM_003215 | 4507428 | 7006 | D-003177-06 | CACCTGAAGTGTTTAATTA | 890 |
| TEC | NM_003215 | 4507428 | 7006 | D-003177-07 | GTACAAAGTCGCAATCAAA | 891 |
| TEC | NM_003215 | 4507428 | 7006 | D-003177-08 | TGGAGGAGATTCTTATTAA | 892 |
| TEK | | | | | | |
| TEK | NM_000459 | 4557868 | 7010 | D-003178-05 | GAAAGAATATGCCTCCAAA | 893 |
| TEK | NM_000459 | 4557868 | 7010 | D-003178-06 | GGAATGACATCAAATTTCA | 894 |
| TEK | NM_000459 | 4557868 | 7010 | D-003178-07 | TGAAGTACCTGATATTCTA | 895 |
| TEK | NM_000459 | 4557868 | 7010 | D-003178-08 | CGAAAGACCTACGTGAATA | 896 |
| TIE | | | | | | |
| TIE | NM_005424 | 4885630 | 7075 | D-003179-05 | GAGAGGAGGTTTATGTGAA | 897 |
| TIE | NM_005424 | 4885630 | 7075 | D-003179-06 | GGGACAGCCTCTACCCTTA | 898 |
| TIE | NM_005424 | 4885630 | 7075 | D-003179-07 | GAAGTTCTGTGCAAATTGG | 899 |
| TIE | NM_005424 | 4885630 | 7075 | D-003179-08 | CAACATGGCCTCAGAACTG | 900 |
| TNK1 | | | | | | |
| TNK1 | NM_003985 | 4507610 | 8711 | D-003180-05 | GTTCTGGGCCTAAGTCTAA | 901 |
| TNK1 | NM_003985 | 4507610 | 8711 | D-003180-06 | GAACTGGGTCTACAAGATC | 902 |
| TNK1 | NM_003985 | 4507610 | 8711 | D-003180-07 | CGAGAGGTATCGGTCATGA | 903 |
| TNK1 | NM_003985 | 4507610 | 8711 | D-003180-08 | GGCGCATCCTGGAGCATTA | 904 |
| TXK | | | | | | |
| TXK | NM_003328 | 4507742 | 7294 | D-003181-05 | GAACATCTATTGAGACAAG | 905 |
| TXK | NM_003328 | 4507742 | 7294 | D-003181-06 | TCAAGGCACTTTATGATTT | 906 |
| TXK | NM_003328 | 4507742 | 7294 | D-003181-07 | GGAGAGGAATGGCTATATT | 907 |
| TXK | NM_003328 | 4507742 | 7294 | D-003181-08 | GGATATATGTGAAGGAATG | 908 |
| TYK2 | | | | | | |
| TYK2 | NM_003331 | 4507748 | 7297 | D-003182-05 | GAGGAGATCCACCACTTTA | 909 |
| TYK2 | NM_003331 | 4507748 | 7297 | D-003182-06 | GCATCCACATTGCACATAA | 910 |
| TYK2 | NM_003331 | 4507748 | 7297 | D-003182-07 | TCAAATACCTAGCCACACT | 911 |
| TYK2 | NM_003331 | 4507748 | 7297 | D-003182-08 | CAATCTTGCTGACGTCTTG | 912 |
| TYRO3 | | | | | | |
| TYRO3 | NM_006293 | 27597077 | 7301 | D-003183-05 | GGTAGAAGGTGTGCCATTT | 913 |
| TYRO3 | NM_006293 | 27597077 | 7301 | D-003183-06 | ACGCTGAGATTTACAACTA | 914 |
| TYRO3 | NM_006293 | 27597077 | 7301 | D-003183-07 | GGATGGCTCCTTTGTGAAA | 915 |
| TYRO3 | NM_006293 | 27597077 | 7301 | D-003183-08 | GAGAGGAACTACGAAGATC | 916 |
| YES1 | | | | | | |
| YES1 | NM_005433 | 21071041 | 7525 | D-003184-05 | GAAGGACCCTGATGAAAGA | 917 |
| YES1 | NM_005433 | 21071041 | 7525 | D-003184-06 | TAAGAAGGGTGAAAGATTT | 918 |
| YES1 | NM_005433 | 21071041 | 7525 | D-003184-07 | TCAAGAAGCTCAGATAATG | 919 |
| YES1 | NM_005433 | 21071041 | 7525 | D-003184-08 | CAGAATCCCTCCATGAATT | 920 |

[0551] TABLE VIII

| | | | | | | |
|---|---|---|---|---|---|---|
| Gene | | | Locus | | | SEQ. ID |
| Name | Acc# | Gl | Link | Duplex # | Full Sequence | NO. |

| | | | | | | |
|---|---|---|---|---|---|---|
| APC2 | | | | | | |
| APC2 | NM_013366 | 7549800 | 29882 | D-003200-05 | GCAAGGACCTCTTCATCAA | 921 |
| APC2 | NM_013366 | 7549800 | 29882 | D-003200-06 | GAGAAGAAGTCCACACTAT | 922 |
| APC2 | NM_013366 | 7549800 | 29882 | D-003200-07 | GGAATGCCATCTCCCAATG | 923 |
| APC2 | NM_013366 | 7549800 | 29882 | D-003200-09 | CAACACGTGTGACATCATC | 924 |
| ATM | | | | | | |
| ATM | NM_000051 | 20336202 | 472 | D-003201-05 | GCAAGCAGCTGAAACAAAT | 925 |
| ATM | NM_000051 | 20336202 | 472 | D-003201-06 | GAATGTTGCTTTCTGAATT | 926 |
| ATM | NM_000051 | 20336202 | 472 | D-003201-07 | GACCTGAAGTCTTATTTAA | 927 |
| ATM | NM_000051 | 20336202 | 472 | D-003201-08 | AGACAGAATTCCCAAATAA | 928 |
| ATR | | | | | | |
| ATR | NM_001184 | 20143978 | 545 | D-003202-05 | GAACAACACTGCTGGTTTG | 929 |
| ATR | NM_001184 | 20143978 | 545 | D-003202-06 | GAAGTCATCTGTTCATTAT | 930 |
| ATR | NM_001184 | 20143978 | 545 | D-003202-07 | GAAATAAGGTAGACTCAAT | 931 |
| ATR | NM_001184 | 20143978 | 545 | D-003202-08 | CAACATAAATCCAAGAAGA | 932 |
| BTAK | | | | | | |
| BTAK | NM_003600 | 3213196 | 6790 | D-003545-04 | CAAAGAATCAGCTAGCAAA | 933 |
| BTAK | NM_003600 | 3213196 | 6790 | D-003545-05 | GAAGAGAGTTATTCATAGA | 934 |
| BTAK | NM_003600 | 3213196 | 6790 | D-003545-07 | CAAATGCCCTGTCTTACTG | 935 |
| BTAK | NM_003600 | 3213196 | 6790 | D-003545-09 | TCTCGTGACTCAGCAAATT | 936 |
| CCNA1 | | | | | | |
| CCNA1 | NM_003914 | 16306528 | 890 | D-003204-05 | GAACCTGGCTAAGTACGTA | 937 |
| CCNA1 | NM_003914 | 16306528 | 890 | D-003204-06 | GCAGATCCATTCTTGAAAT | 938 |
| CCNA1 | NM_003914 | 16306528 | 890 | D-003204-07 | TCACAAGAATCAGGTGTTA | 939 |
| CCNA1 | NM_003914 | 16306528 | 890 | D-003204-08 | CATAAAGCGTACCTTGATA | 940 |
| CCNA2 | | | | | | |
| CCNA2 | NM_001237 | 16950653 | 890 | D-003205-05 | GCTGTGAACTACATTGATA | 941 |
| CCNA2 | NM_001237 | 16950653 | 890 | D-003205-06 | GATGATACCTACACCAAGA | 942 |
| CCNA2 | NM_001237 | 16950653 | 890 | D-003205-07 | GCTGTTAGCCTCAAAGTTT | 943 |
| CCNA2 | NM_001237 | 16950653 | 890 | D-003205-08 | AAGCTGGCCTGAATCATTA | 944 |
| CCNB1 | | | | | | |
| CCNB1 | NM_031966 | 14327895 | 891 | D-003206-05 | CAACATTACCTGTCATATA | 945 |
| CCNB1 | NM_031966 | 14327895 | 891 | D-003206-06 | CCAAATACCTGATGGAACT | 946 |
| CCNB1 | NM_031966 | 14327895 | 891 | D-003206-07 | GAAATGTACCCTCCAGAAA | 947 |
| CCNB1 | NM_031966 | 14327895 | 891 | D-003206-08 | GCACCTGGCTAAGAATGTA | 948 |
| CCNB2 | | | | | | |
| CCNB2 | NM_004701 | 10938017 | 9133 | D-003207-05 | CAACAAATGTCAACAAACA | 949 |
| CCNB2 | NM_004701 | 10938017 | 9133 | D-003207-06 | GCAGCAAACTCCTGAAGAT | 950 |
| CCNB2 | NM_004701 | 10938017 | 9133 | D-003207-07 | CCAGTGATTTGGAGAATAT | 951 |
| CCNB2 | NM_004701 | 10938017 | 9133 | D-003207-08 | GTGACTACGTTAAGGATAT | 952 |
| CCNB3 | | | | | | |
| CCNB3 | NM_033031 | 14719419 | 85417 | D-003208-05 | TGAACAAACTGCTGACTTT | 953 |
| CCNB3 | NM_033031 | 14719419 | 85417 | D-003208-06 | GCTAGCTGCTGCCTCCTTA | 954 |
| CCNB3 | NM_033031 | 14719419 | 85417 | D-003208-07 | CAACTCACCTCGTGTGGAT | 955 |
| CCNB3 | NM_033031 | 14719419 | 85417 | D-003208-08 | GTGGATCTCTACCTAATGA | 956 |
| CCNC | | | | | | |
| CCNC | NM_005190 | 7382485 | 892 | D-003209-05 | GCAGAGCTCCCACTATTTG | 957 |
| CCNC | NM_005190 | 7382485 | 892 | D-003209-06 | GGAGTAGTTTCAAATACAA | 958 |
| CCNC | NM_005190 | 7382485 | 892 | D-003209-07 | GACCTTTGCTCCAGTATGT | 959 |
| CCNC | NM_005190 | 7382485 | 892 | D-003209-08 | GAGATTCTATGCCAGGTAT | 960 |
| CCND1 | | | | | | |
| CCND1 | NM_053056 | 16950654 | 595 | D-003210-05 | TGAACAAGCTCAAGTGGAA | 961 |
| CCND1 | NM_053056 | 16950654 | 595 | D-003210-06 | CCAGAGTGATCAAGTGTGA | 962 |
| CCND1 | NM_053056 | 16950654 | 595 | D-003210-07 | GTTCGTGGCCTCTAAGATG | 963 |
| CCND1 | NM_053056 | 16950654 | 595 | D-003210-08 | CCGAGAAGCTGTGCATCTA | 964 |
| CCND2 | | | | | | |
| CCND2 | NM_001759 | 16950656 | 894 | D-003211-06 | TGAATTACCTGGACCGTTT | 965 |
| CCND2 | NM_001759 | 16950656 | 894 | D-003211-07 | CGGAGAAGCTGTGCATTTA | 966 |
| CCND2 | NM_001759 | 16950656 | 894 | D-003211-08 | CTACAGACGTGCGGGATAT | 967 |
| CCND2 | NM_001759 | 16950656 | 894 | D-003211-09 | CAACACAGACGTGGATTGT | 968 |
| CCND3 | | | | | | |
| CCND3 | NM_001760 | 16950657 | 896 | D-003212-05 | GGACCTGGCTGCTGTGATT | 969 |
| CCND3 | NM_001760 | 16950657 | 896 | D-003212-06 | GATTATACCTTTGCCATGT | 970 |
| CCND3 | NM_001760 | 16950657 | 896 | D-003212-07 | GACCAGCACTCCTACAGAT | 971 |
| CCND3 | NM_001760 | 16950657 | 896 | D-003212-08 | TGCGGAAGATGCTGGCTTA | 972 |
| CCNE1 | | | | | | |
| CCNE1 | NM_001238 | 17318558 | 898 | D-003213-05 | GTACTGAGCTGGGCAAATA | 973 |
| CCNE1 | NM_001238 | 17318558 | 898 | D-003213-06 | GGAAATCTATCCTCCAAAG | 974 |
| CCNE1 | NM_001238 | 17318558 | 898 | D-003213-07 | GGAGGTGTGTGAAGTCTAT | 975 |
| CCNE1 | NM_001238 | 17318558 | 898 | D-003213-08 | CTAAATGACTTACATGAAG | 976 |
| CCNE2 | | | | | | |
| CCNE2 | NM_057749 | 17318564 | 9134 | D-003214-05 | GGATGGAACTCATTATATT | 977 |
| CCNE2 | NM_057749 | 17318564 | 9134 | D-003214-06 | GCAGATATGTTCATGACAA | 978 |
| CCNE2 | NM_057749 | 17318564 | 9134 | D-003214-07 | CATAATATCCAGACACATA | 979 |
| CCNE2 | NM_057749 | 17318564 | 9134 | D-003214-08 | TAAGAAAGCCTCAGGTTTG | 980 |
| CCNF | | | | | | |
| CCNF | NM_001761 | 4502620 | 899 | D-003215-05 | TCACAAAGCATCCATATTG | 981 |
| CCNF | NM_001761 | 4502620 | 899 | D-003215-06 | GAAGTCATGTTTACAGTGT | 982 |
| CCNF | NM_001761 | 4502620 | 899 | D-003215-07 | TAGCCTACCTCTACAATGA | 983 |
| CCNF | NM_001761 | 4502620 | 899 | D-003215-08 | GCACCCGGTTTATCAGTAA | 984 |
| CCNG1 | | | | | | |
| CCNG1 | NM_004060 | 8670528 | 900 | D-003216-05 | GATAATGGCCTCAGAATGA | 985 |
| CCNG1 | NM_004060 | 8670528 | 900 | D-003216-06 | GCACGGCAATTGAAGCATA | 986 |
| CCNG1 | NM_004060 | 8670528 | 900 | D-003216-07 | GGAATAGAATGTCTTCAGA | 987 |
| CCNG1 | NM_004060 | 8670528 | 900 | D-003216-08 | TAACTCACCTTCCAACAAT | 988 |
| CCNG2 | | | | | | |
| CCNG2 | NM_004354 | 4757935 | 901 | D-003217-05 | GGAGAGAGTTGGTTTCTAA | 989 |
| CCNG2 | NM_004354 | 4757935 | 901 | D-003217-06 | GGTGAAACCTAAACATTTG | 990 |
| CCNG2 | NM_004354 | 4757935 | 901 | D-003217-07 | GAAATACTGAGCCTTGATA | 991 |
| CCNG2 | NM_004354 | 4757935 | 901 | D-003217-08 | TGCCAAAGTTGAAGATTTA | 992 |
| CCNH | | | | | | |
| CCNH | NM_001239 | 17738313 | 902 | D-003218-05 | GCTGATGACTTTCTTAATA | 993 |
| CCNH | NM_001239 | 17738313 | 902 | D-003218-06 | CAACTTAATTTCCACCTTA | 994 |
| CCNH | NM_001239 | 17738313 | 902 | D-003218-07 | ATACACACCTTCCCAAATT | 995 |
| CCNH | NM_001239 | 17738313 | 902 | D-003218-08 | GCTATGAAGATGATGATTA | 996 |
| CCNI | | | | | | |
| CCNI | NM_006835 | 17738314 | 10983 | D-003219-05 | GCAAGCAGACCTCTACTAA | 997 |
| CCNI | NM_006835 | 17738314 | 10983 | D-003219-07 | TGAGAGAATTCCAGTACTA | 998 |
| CCNI | NM_006835 | 17738314 | 10983 | D-003219-08 | GGAATCAAACGGCTCTATA | 999 |
| CCNI | NM_006835 | 17738314 | 10983 | D-003219-09 | GAATTGGGATCTTCACACA | 1000 |
| CCNT1 | | | | | | |
| CCNT1 | NM_001240 | 17978465 | 904 | D-003220-05 | TATCAACACTGCTATAGTA | 1001 |
| CCNT1 | NM_001240 | 17978465 | 904 | D-003220-06 | GAACAAACGTCCTGGTGAT | 1002 |
| CCNT1 | NM_001240 | 17978465 | 904 | D-003220-07 | GCACAAGACTCACCCATCT | 1003 |
| CCNT1 | NM_001240 | 17978465 | 904 | D-003220-08 | GCACAGACTTCTTACTTCA | 1004 |
| CCNT2A | | | | | | |
| CCNT2A | NM_001241 | 17978467 | 905 | D-003221-05 | GCACAGACATCCTATTTCA | 1005 |
| CCNT2A | NM_001241 | 17978467 | 905 | D-003221-06 | GCAGGGACCTTCTATATCA | 1006 |
| CCNT2A | NM_001241 | 17978467 | 905 | D-003221-07 | GAACAGCTATATTCACAGA | 1007 |
| CCNT2A | NM_001241 | 17978467 | 905 | D-003221-09 | TTATATAGCTGCCCAGGTA | 1008 |
| CCNT2B | | | | | | |
| CCNT2B | NM_058241 | 17978468 | 905 | D-003222-05 | GCACAGACATCCTATTTCA | 1009 |
| CCNT2B | NM_058241 | 17978468 | 905 | D-003222-06 | GCAGGGACCTTCTATATCA | 1010 |
| CCNT2B | NM_058241 | 17978468 | 905 | D-003222-07 | GAACAGCTATATTCACAGA | 1011 |
| CCNT2B | NM_058241 | 17978468 | 905 | D-003222-08 | GGTGAAATGTACCCAGTTA | 1012 |
| CDC16 | | | | | | |
| CDC16 | NM_003903 | 14110370 | 8881 | D-003223-05 | GTAGATGGCTTGCAAGAGA | 1013 |
| CDC16 | NM_003903 | 14110370 | 8881 | D-003223-06 | TAAAGTAGCTTCACTCTCT | 1014 |
| CDC16 | NM_003903 | 14110370 | 8881 | D-003223-07 | GCTACAAGCTTACTTCTGT | 1015 |
| CDC16 | NM_003903 | 14110370 | 8881 | D-003223-08 | TGGAAGAGCCCATCAATAA | 1016 |
| CDC2 | | | | | | |
| CDC2 | NM_033379 | 27886643 | 983 | D-003552-01 | GTACAGATCTCCAGAAGTA | 1017 |
| CDC2 | NM_033379 | 27886643 | 983 | D-003552-02 | GATCAACTCTTCAGGATTT | 1018 |
| CDC2 | NM_033379 | 27886643 | 983 | D-003552-03 | GGTTATATCTCATCTTTGA | 1019 |
| CDC2 | NM_033379 | 27886643 | 983 | D-003552-04 | GAACTTCGTCATCCAAATA | 1020 |
| CDC20 | | | | | | |
| CDC20 | NM_001255 | 4557436 | 991 | D-003225-05 | GGGAATATATATCCTCTGT | 1021 |
| CDC20 | NM_001255 | 4557436 | 991 | D-003225-06 | GAAACGGCTTCGAAATATG | 1022 |
| CDC20 | NM_001255 | 4557436 | 991 | D-003225-07 | GAAGACCTGCCGTTACATT | 1023 |
| CDC20 | NM_001255 | 4557436 | 991 | D-003225-08 | CACCAGTGATCGACACATT | 1024 |
| CDC25A | | | | | | |
| CDC25A | NM_001789 | 4502704 | 993 | D-003226-05 | GAAATTATGGCATCTGTTT | 1025 |
| CDC25A | NM_001789 | 4502704 | 993 | D-003226-06 | TACAAGGAGTTCTTTATGA | 1026 |
| CDC25A | NM_001789 | 4502704 | 993 | D-003226-07 | CCACGAGGACTTTAAAGAA | 1027 |
| CDC25A | NM_001789 | 4502704 | 993 | D-003226-08 | TGGGAAACATCAGGATTTA | 1028 |
| CDC25B | | | | | | |
| CDC25B | NM_004358 | 11641416 | 994 | D-003227-05 | GCAGATACCCCTATGAATA | 1029 |
| CDC25B | NM_004358 | 11641416 | 994 | D-003227-06 | CTAGGTCGCTTCTCTCTGA | 1030 |
| CDC25B | NM_004358 | 11641416 | 994 | D-003227-07 | GAGAGCTGATTGGAGATTA | 1031 |
| CDC25B | NM_004358 | 11641416 | 994 | D-003227-08 | AAAAGGACCTCGTCATGTA | 1032 |
| CDC25C | | | | | | |
| CDC25C | NM_001790 | 12408659 | 995 | D-003228-05 | GAGCAGAAGTGGCCTATAT | 1033 |
| CDC25C | NM_001790 | 12408659 | 995 | D-003228-06 | CAGAAGAGATTTCAGATGA | 1034 |
| CDC25C | NM_001790 | 12408659 | 995 | D-003228-07 | CCAGGGAGCCTTAAACTTA | 1035 |
| CDC25C | NM_001790 | 12408659 | 995 | D-003228-08 | GAAACTTGGTGGACAGTGA | 1036 |
| CDC27 | | | | | | |
| CDC27 | NM_001256 | 16554576 | 996 | D-003229-06 | CATGCAAGCTGAAAGAATA | 1037 |
| CDC27 | NM_001256 | 16554576 | 996 | D-003229-07 | CAACACAAGTACCTAATCA | 1038 |
| CDC27 | NM_001256 | 16554576 | 996 | D-003229-08 | GGAGATGGATCCTAGTTAC | 1039 |
| CDC27 | NM_001256 | 16554576 | 996 | D-003229-09 | GAAAAGCCATGATGATATT | 1040 |
| CDC34 | | | | | | |
| CDC34 | NM_004359 | 16357476 | 997 | D-003230-05 | GCTCAGACCTCTTCTACGA | 1041 |
| CDC34 | NM_004359 | 16357476 | 997 | D-003230-06 | GGACGAGGGCGATCTATAC | 1042 |
| CDC34 | NM_004359 | 16357476 | 997 | D-003230-07 | GATCGGGAGTACACAGACA | 1043 |
| CDC34 | NM_004359 | 16357476 | 997 | D-003230-08 | TGAACGAGCCCAACACCTT | 1044 |
| CDC37 | | | | | | |
| CDC37 | NM_007065 | 16357478 | 11140 | D-003231-05 | GCGAGGAGACAGCCAATTA | 1045 |
| CDC37 | NM_007065 | 16357478 | 11140 | D-003231-06 | CACAAGACCTTCGTGGAAA | 1046 |
| CDC37 | NM_007065 | 16357478 | 11140 | D-003231-07 | ACAATCGTCATGCAATTTA | 1047 |
| CDC37 | NM_007065 | 16357478 | 11140 | D-003231-08 | GAGGAGAAATGTGCACTCA | 1048 |
| CDC45L | | | | | | |
| CDC45L | NM_003504 | 34335230 | 8318 | D-003232-05 | GCACACGGATCTCCTTTGA | 1049 |
| CDC45L | NM_003504 | 34335230 | 8318 | D-003232-06 | GCAAACACCTGCTCAAGTC | 1050 |
| CDC45L | NM_003504 | 34335230 | 8318 | D-003232-07 | TGAAGAGTCTGCAAATAAA | 1051 |
| CDC45L | NM_003504 | 34335230 | 8318 | D-003232-08 | GGACGTGGATGCTCTGTGT | 1052 |
| CDC6 | | | | | | |
| CDC6 | NM_001254 | 16357469 | 990 | D-003233-05 | GAACACAGCTGTCCCAGAT | 1053 |
| CDC6 | NM_001254 | 16357469 | 990 | D-003233-06 | GAGCAGAGATGTCCACTGA | 1054 |
| CDC6 | NM_001254 | 16357469 | 990 | D-003233-07 | GGAAATATCTTAGCTACTG | 1055 |
| CDC6 | NM_001254 | 16357469 | 990 | D-003233-08 | GGACGAAGATTGGTATTTG | 1056 |
| CDC7 | | | | | | |
| CDC7 | NM_003503 | 11038647 | 8317 | D-003234-05 | GGAATGAGGTACCTGATGA | 1057 |
| CDC7 | NM_003503 | 11038647 | 8317 | D-003234-06 | CAGGAAAGGTGTTCACAAA | 1058 |
| CDC7 | NM_003503 | 11038647 | 8317 | D-003234-07 | CTACACAAATGCACAAATT | 1059 |
| CDC7 | NM_003503 | 11038647 | 8317 | D-003234-08 | GTACGGGAATATATGCTTA | 1060 |
| CDK10 | | | | | | |
| CDK10 | NM_003674 | 32528262 | 8558 | D-003235-05 | GAACTGCTGTTGGGAACCA | 1061 |
| CDK10 | NM_003674 | 32528262 | 8558 | D-003235-06 | GGAAGCAGCCCTACAACAA | 1062 |
| CDK10 | NM_003674 | 32528262 | 8558 | D-003235-07 | GCACGCCCAGTGAGAACAT | 1063 |
| CDK10 | NM_003674 | 32528262 | 8558 | D-003235-08 | GGAAGCAGCCCTACAACAA | 1064 |
| CDK2 | | | | | | |
| CDK2 | NM_001798 | 16936527 | 1017 | D-003236-05 | GAGCTTAACCATCCTAATA | 1065 |
| CDK2 | NM_001798 | 16936527 | 1017 | D-003236-06 | GAGCTTAACCATCCTAATA | 1066 |
| CDK2 | NM_001798 | 16936527 | 1017 | D-003236-07 | GTACCGAGCTCCTGAAATC | 1067 |
| CDK2 | NM_001798 | 16936527 | 1017 | D-003236-08 | GAGAGGTGGTGGCGCTTAA | 1068 |
| CDK3 | | | | | | |
| CDK3 | NM_001258 | 4557438 | 1018 | D-003237-05 | GAGCATTGGTTGCATCTTT | 1069 |
| CDK3 | NM_001258 | 4557438 | 1018 | D-003237-06 | GATCGGAGAGGGCACCTAT | 1070 |
| CDK3 | NM_001258 | 4557438 | 1018 | D-003237-07 | GAAGCTCTATCTGGTGTTT | 1071 |
| CDK3 | NM_001258 | 4557438 | 1018 | D-003237-08 | GCAGAGATGGTGACTCGAA | 1072 |
| CDK4 | | | | | | |
| CDK4 | NM_000075 | 456426 | 1019 | D-003238-05 | GCAGCACTCTTATCTACAT | 1073 |
| CDK4 | NM_000075 | 456426 | 1019 | D-003238-06 | GGAGGAGGCCTTCCCATCA | 1074 |
| CDK4 | NM_000075 | 456426 | 1019 | D-003238-07 | TCGAAAGCCTCTCTTCTGT | 1075 |
| CDK4 | NM_000075 | 456426 | 1019 | D-003238-08 | GTACCGAGCTCCCGAAGTT | 1076 |
| CDK5 | | | | | | |
| CDK5 | NM_004935 | 4826674 | 1020 | D-003239-05 | TGACCAAGCTGCCAGACTA | 1077 |
| CDK5 | NM_004935 | 4826674 | 1020 | D-003239-06 | GAGCTGAAATTGGCTGATT | 1078 |
| CDK5 | NM_004935 | 4826674 | 1020 | D-003239-07 | CAACATCCCTGGTGAACGT | 1079 |
| CDK5 | NM_004935 | 4826674 | 1020 | D-003239-08 | GGATTCCCGTCCGCTGTTA | 1080 |
| CDK6 | | | | | | |
| CDK6 | NM_001259 | 16950658 | 1021 | D-003240-05 | GCAAAGACCTACTTCTGAA | 1081 |
| CDK6 | NM_001259 | 16950658 | 1021 | D-003240-06 | GAAGAAGACTGGCCTAGAG | 1082 |
| CDK6 | NM_001259 | 16950658 | 1021 | D-003240-07 | GGTCTGGACTTTCTTCATT | 1083 |
| CDK6 | NM_001259 | 16950658 | 1021 | D-003240-08 | TAACAGATATCGATGAACT | 1084 |
| CDK7 | | | | | | |
| CDK7 | NM_001799 | 16950659 | 1022 | D-003241-05 | GGACATAGATCAGAAGCTA | 1085 |
| CDK7 | NM_001799 | 16950659 | 1022 | D-003241-06 | CAATAGAGCTTATACACAT | 1086 |
| CDK7 | NM_001799 | 16950659 | 1022 | D-003241-07 | CATACAAGGCTTATTCTTA | 1087 |
| CDK7 | NM_001799 | 16950659 | 1022 | D-003241-08 | GGAGACGACTTACTAGATC | 1088 |
| CDK8 | | | | | | |
| CDK8 | NM_001260 | 4502744 | 1024 | D-003242-05 | CCACAGTACTCACATCAGA | 1089 |
| CDK8 | NM_001260 | 4502744 | 1024 | D-003242-06 | GCAATAACCACACTAATGG | 1090 |
| CDK8 | NM_001260 | 4502744 | 1024 | D-003242-07 | GAAGAAAGTGAGAGTTGTT | 1091 |
| CDK8 | NM_001260 | 4502744 | 1024 | D-003242-08 | GAACATGACCTCTGGCATA | 1092 |
| CDK9 | | | | | | |
| CDK9 | NM_0012611 | 7017983 | 1025 | D-003243-05 | GGCCAAACGTGGACAACTA | 1093 |
| CDK9 | NM_0012611 | 7017983 | 1025 | D-003243-06 | TGACGTCCATGTTCGAGTA | 1094 |
| CDK9 | NM_0012611 | 7017983 | 1025 | D-003243-07 | CCAACCAGACGGAGTTTGA | 1095 |
| CDK9 | NM_0012611 | 7017983 | 1025 | D-003243-08 | GAAGGTGGCTCTGAAGAAG | 1096 |
| CDKN1C | | | | | | |
| CDKN1C | NM_000076 | 4557440 | 1028 | D-003244-05 | GACCAGAACCGCTGGGATT | 1097 |
| CDKN1C | NM_000076 | 4557440 | 1028 | D-003244-06 | GGACCGAAGTGGACAGCGA | 1098 |
| CDKN1C | NM_000076 | 4557440 | 1028 | D-003244-08 | GCAAGAGATCAGCGCCTGA | 1099 |
| CDKN1C | NM_000076 | 4557440 | 1028 | D-003244-09 | CCGCTGGGATTACGACTTC | 1100 |
| CDKN2B | | | | | | |
| CDKN2B | NM_004936 | 17981693 | 1030 | D-003245-05 | GCGAGGAGAACAAGGGCAT | 1101 |
| CDKN2B | NM_004936 | 17981693 | 1030 | D-003245-06 | CCAACGGAGTCAACCGTTT | 1102 |
| CDKN2B | NM_004936 | 17981693 | 1030 | D-003245-07 | CGATCCAGGTCATGATGAT | 1103 |
| CDKN2B | NM_004936 | 17981693 | 1030 | D-003245-08 | CCTGGAAGCCGGCGCGGAT | 1104 |
| CDKN2C | | | | | | |
| CDKN2C | NM_001262 | 17981697 | 1031 | D-003246-05 | GGACACCGCCTGTGATTTG | 1105 |
| CDKN2C | NM_001262 | 17981697 | 1031 | D-003246-06 | GCCAGGAGACTGCTACTTA | 1106 |
| CDKN2C | NM_001262 | 17981697 | 1031 | D-003246-07 | TGAAAGACCGAACTGGTTT | 1107 |
| CDKN2C | NM_001262 | 17981697 | 1031 | D-003246-08 | GAACCTGCCCTTGCACTTG | 1108 |
| CDKN2D | | | | | | |
| CDKN2D | NM_001800 | 17981700 | 1032 | D-003247-05 | TGGCAGTTCAAGAGGGTCA | 1109 |
| CDKN2D | NM_001800 | 17981700 | 1032 | D-003247-06 | CTCAGGACCTCGTGGACAT | 1110 |
| CDKN2D | NM_001800 | 17981700 | 1032 | D-003247-07 | TGAAGGTCCTAGTGGAGCA | 1111 |
| CDKN2D | NM_001800 | 17981700 | 1032 | D-003247-08 | AGACGGCGCTGCAGGTCAT | 1112 |
| CDT1 | | | | | | |
| CDT1 | NM_030928 | 19923847 | 81620 | D-003248-05 | CCAAGGAGGCACAGAAGCA | 1113 |
| CDT1 | NM_030928 | 19923847 | 81620 | D-003248-06 | GCTTCAACGTGGATGAAGT | 1114 |
| CDT1 | NM_030928 | 19923847 | 81620 | D-003248-07 | TCTCCGGGCCAGAAGATAA | 1115 |
| CDT1 | NM_030928 | 19923847 | 81620 | D-003248-08 | GCGCAATGTTGGCCAGATC | 1116 |
| CENPA | | | | | | |
| CENPA | NM_001809 | 4585861 | 1058 | D-003249-05 | GCACACACCTCTTGATAAG | 1117 |
| CENPA | NM_001809 | 4585861 | 1058 | D-003249-06 | GCAAGAGAAATATGTGTTA | 1118 |
| CENPA | NM_001809 | 4585861 | 1058 | D-003249-07 | TTACATGCAGGCCGAGTTA | 1119 |
| CENPA | NM_001809 | 4585861 | 1058 | D-003249-08 | GAGACAAGGTTGGCTAAAG | 1120 |
| CENPB | | | | | | |
| CENPB | NM_001810 | 26105977 | 1059 | D-003250-05 | GGACATAGCCGCCTGCTTT | 1121 |
| CENPB | NM_001810 | 26105977 | 1059 | D-003250-06 | GCACGATCCTGAAGAACAA | 1122 |
| CENPB | NM_001810 | 26105977 | 1059 | D-003250-07 | GGAGGAGGGTGATGTTGAT | 1123 |
| CENPB | NM_001810 | 26105977 | 1059 | D-003250-08 | CCGAATGGCTGCAGAGTCT | 1124 |
| CENPC1 | | | | | | |
| CENPC1 | NM_001812 | 4502778 | 1060 | D-003251-05 | GCGAATAGATTATCAAGGA | 1125 |
| CENPC1 | NM_001812 | 4502778 | 1060 | D-003251-06 | GAACAGAATCCATCACAAA | 1126 |
| CENPC1 | NM_001812 | 4502778 | 1060 | D-003251-07 | CCATAAACCTCACCCAGTA | 1127 |
| CENPC1 | NM_001812 | 4502778 | 1060 | D-003251-08 | CAAGAGAACACGTTTGAAA | 1128 |
| CENPE | | | | | | |
| CENPE | NM_001813 | 4502780 | 1062 | D-003252-05 | GAAGACAGCTCAAATAATA | 1129 |
| CENPE | NM_001813 | 4502780 | 1062 | D-003252-06 | CAACAAAGCTACTAAATCA | 1130 |
| CENPE | NM_001813 | 4502780 | 1062 | D-003252-07 | GGAAAGAAGTGCTACCATA | 1131 |
| CENPE | NM_001813 | 4502780 | 1062 | D-003252-08 | GGAAAGAAATGACACAGTT | 1132 |
| CENPF | | | | | | |
| CENPF | NM_016343 | 14670380 | 1063 | D-003253-05 | GCGAATATCTGAATTAGAA | 1133 |
| CENPF | NM_016343 | 14670380 | 1063 | D-003253-06 | GGAAATTAATGCATCCTTA | 1134 |
| CENPF | NM_016343 | 14670380 | 1063 | D-003253-07 | GAGCGAGGCTGGTGGTTTA | 1135 |
| CENPF | NM_016343 | 14670380 | 1063 | D-003253-08 | CAAGTCATCTTTCATCTAA | 1136 |
| CENPH | | | | | | |
| CENPH | NM_022909 | 21264590 | 64946 | D-003254-05 | GAAAGAAGAGATTGCAATT | 1137 |
| CENPH | NM_022909 | 21264590 | 64946 | D-003254-06 | CAGAACAAATTATGCAAGA | 1138 |
| CENPH | NM_022909 | 21264590 | 64946 | D-003254-07 | CTAGTGTGCTCATGGATAA | 1139 |
| CENPH | NM_022909 | 21264590 | 64946 | D-003254-08 | GAAACACCTATTAGAGCTA | 1140 |
| CHEK1 | | | | | | |
| CHEK1 | NM_001274 | 20127419 | 1111 | D-003255-05 | CAAATTGGATGCAGACAAA | 1141 |
| CHEK1 | NM_001274 | 20127419 | 1111 | D-003255-06 | GCAACAGTATTTCGGTATA | 1142 |
| CHEK1 | NM_001274 | 20127419 | 1111 | D-003255-07 | GGACTTCTCTCCAGTAAAC | 1143 |
| CHEK1 | NM_001274 | 20127419 | 1111 | D-003255-08 | AAAGATAGATGGTACAACA | 1144 |
| CHEK2 | | | | | | |
| CHEK2 | NM_007194 | 22209010 | 11200 | D-003256-02 | CTCTTACATTGCATACATA | 1145 |
| CHEK2 | NM_007194 | 22209010 | 11200 | D-003256-03 | TAAACGCCTGAAAGAAGCT | 1146 |
| CHEK2 | NM_007194 | 22209010 | 11200 | D-003256-04 | GCATAGGACTCAAGTGTCA | 1147 |
| CHEK2 | NM_007194 | 22209010 | 11200 | D-003256-05 | GAAATTGCACTGTCACTAA | 1148 |
| CNK | | | | | | |
| CNK | NM_004073 | 4758015 | 1263 | D-003257-05 | GCGAGAAGATCCTAAATGA | 1149 |
| CNK | NM_004073 | 4758015 | 1263 | D-003257-07 | GCAAGTGGGTTGACTACTC | 1150 |
| CNK | NM_004073 | 4758015 | 1263 | D-003257-08 | GCACATCCGTTGGCCATCA | 1151 |
| CNK | NM_004073 | 4758015 | 1263 | D-003257-09 | GACCTCAAGTTGGGAAATT | 1152 |
| CRI1 | | | | | | |
| CRI1 | NM_014335 | 7656937 | 23741 | D-003258-05 | GTGATGAGATTATTGATAG | 1153 |
| CRI1 | NM_014335 | 7656937 | 23741 | D-003258-06 | GGACGAGGGCGAGGAATTT | 1154 |
| CRI1 | NM_014335 | 7656937 | 23741 | D-003258-07 | GGAAACGGAGCCTTGCTAA | 1155 |
| CRI1 | NM_014335 | 7656937 | 23741 | D-003258-08 | TCAATCGTCTGACCGAAGA | 1156 |
| E2F1 | | | | | | |
| E2F1 | NM_005225 | 12669910 | 1869 | D-003259-05 | GAACAGGGCCACTGACTCT | 1157 |
| E2F1 | NM_005225 | 12669910 | 1869 | D-003259-06 | TGGACCACCTGATGAATAT | 1158 |
| E2F1 | NM_005225 | 12669910 | 1869 | D-003259-07 | CCCAGGAGGTCACTTCTGA | 1159 |
| E2F1 | NM_005225 | 12669910 | 1869 | D-003259-08 | GGCTGGACCTGGAAACTGA | 1160 |
| E2F2 | | | | | | |
| E2F2 | NM_004091 | 34485718 | 1870 | D-003260-05 | GGGAGAAGACTCGGTATGA | 1161 |
| E2F2 | NM_004091 | 34485718 | 1870 | D-003260-06 | GAGGACAACCTGCAGATAT | 1162 |
| E2F2 | NM_004091 | 34485718 | 1870 | D-003260-07 | TGAAGGAGCTGATGAACAC | 1163 |
| E2F2 | NM_004091 | 34485718 | 1870 | D-003260-08 | CCAAGAAGTTCA1TTACCT | 1164 |
| E2F3 | | | | | | |
| E2F3 | NM_001949 | 12669913 | 1871 | D-003261-05 | GAAATTAGATGAACTGATC | 1165 |
| E2F3 | NM_001949 | 12669913 | 1871 | D-003261-06 | TGAAGTGCCTGACTCAATA | 1166 |
| E2F3 | NM_001949 | 12669913 | 1871 | D-003261-07 | GAACAAGGCAGCAGAAGTG | 1167 |
| E2F3 | NM_001949 | 12669913 | 1871 | D-003261-08 | GAAACACACAGTCCAATGA | 1168 |
| E2F4 | | | | | | |
| E2F4 | NM_001950 | 12669914 | 1874 | D-003262-05 | GGAGATTGCTGACAAACTG | 1169 |
| E2F4 | NM_001950 | 12669914 | 1874 | D-003262-06 | GAAGGTATCGGGCTAATCG | 1170 |
| E2F4 | NM_001950 | 12669914 | 1874 | D-003262-07 | GTGCAGAAGTCCAGGGAAT | 1171 |
| E2F4 | NM_001950 | 12669914 | 1874 | D-003262-08 | GGACAGTGGTGAGCTCAGT | 1172 |
| E2F5 | | | | | | |
| E2F5 | NM_001951 | 12669916 | 1875 | D-003263-05 | GCAGATGACTACAACTTTA | 1173 |
| E2F5 | NM_001951 | 12669916 | 1875 | D-003263-06 | GACATCAGCTACAGATATA | 1174 |
| E2F5 | NM_001951 | 12669916 | 1875 | D-003263-07 | CAACATGTCTCTGAAAGAA | 1175 |
| E2F5 | NM_001951 | 12669916 | 1875 | D-003263-08 | GAAGACATCTGTAATTGCT | 1176 |
| E2F6 | | | | | | |
| E2F6 | NM_001952 | 12669917 | 1876 | D-003264-05 | TAAACAAGGTTGCAACGAA | 1177 |
| E2F6 | NM_001952 | 12669917 | 1876 | D-003264-06 | TAGCATATGTGACCTATCA | 1178 |
| E2F6 | NM_001952 | 12669917 | 1876 | D-003264-07 | GAAACCAGATTGGATGTTC | 1179 |
| E2F6 | NM_001952 | 12669917 | 1876 | D-003264-09 | GGAACTTTCTGACTTATCA | 1180 |
| FOS | | | | | | |
| FOS | NM_005252 | 6552332 | 2353 | D-003265-05 | GGGATAGCCTCTCTTACTA | 1181 |
| FOS | NM_005252 | 6552332 | 2353 | D-003265-06 | GAACAGTTATCTCCAGAAG | 1182 |
| FOS | NM_005252 | 6552332 | 2353 | D-003265-07 | GGAGACAGACCAACTAGAA | 1183 |
| FOS | NM_005252 | 6552332 | 2353 | D-003265-08 | AGACCGAGCCCTTTGATGA | 1184 |
| HIPK2 | | | | | | |
| HIPK2 | NM_022740 | 13430859 | 28996 | D-003266-06 | GAGAATCACTCCAATCGAA | 1185 |
| HIPK2 | NM_022740 | 13430859 | 28996 | D-003266-07 | AGACAGGGATTAAGTCAAA | 1186 |
| HIPK2 | NM_022740 | 13430859 | 28996 | D-003266-08 | GGACAAAGACAACTAGGTT | 1187 |
| HIPK2 | NM_022740 | 13430859 | 28996 | D-003266-09 | GCACACACGTCAAATCATG | 1188 |
| HUS1 | | | | | | |
| HUS1 | NM_004507 | 31077213 | 3364 | D-003267-05 | ACAAAGGCCTTATGCAATA | 1189 |
| HUS1 | NM_004507 | 31077213 | 3364 | D-003267-06 | GAAGTGCACATAGATATTA | 1190 |
| HUS1 | NM_004507 | 31077213 | 3364 | D-003267-07 | AAGCTTAACTTCATCCTTT | 1191 |
| HUS1 | NM_004507 | 31077213 | 3364 | D-003267-08 | GAACTTCTTCAACGAATTT | 1192 |
| JUN | | | | | | |
| JUN | NM_002228 | 7710122 | 3725 | D-003268-05 | TGGAAACGACCTTCTATGA | 1193 |
| JUN | NM_002228 | 7710122 | 3725 | D-003268-06 | GAACTGCACAGCCAGAACA | 1194 |
| JUN | NM_002228 | 7710122 | 3725 | D-003268-07 | GAGCTGGAGCGCCTGATAA | 1195 |
| JUN | NM_002228 | 7710122 | 3725 | D-003268-08 | TAACGCAGCAGTTGCAAAC | 1196 |
| JUNB | | | | | | |
| JUNB | NM_002229 | 4504808 | 3726 | D-003269-05 | GCATCAAAGTGGAGCGCAA | 1197 |
| JUNB | NM_002229 | 4504808 | 3726 | D-003269-06 | TGGAAGACCAAGAGCGCAT | 1198 |
| JUNB | NM_002229 | 4504808 | 3726 | D-003269-07 | CATACACAGCTACGGGATA | 1199 |
| JUNB | NM_002229 | 4504808 | 3726 | D-003269-08 | CCATCAACATGGAAGACCA | 1200 |
| LOC51053 | | | | | | |
| LOC51053 | NM_015895 | 20127542 | 51053 | D-003270-05 | GGAGAAAGGCGCTGTATGA | 1201 |
| LOC51053 | NM_015895 | 20127542 | 51053 | D-003270-06 | GAATAGTTCTGTCCCAAGA | 1202 |
| LOC51053 | NM_015895 | 20127542 | 51053 | D-003270-07 | GAACATGTACAGTATATGG | 1203 |
| LOC51053 | NM_015895 | 20127542 | 51053 | D-003270-08 | GCAGAAACAAGAAGAAATC | 1204 |
| MAD2L1 | | | | | | |
| MAD2L1 | NM_002358 | 6466452 | 4085 | D-003271-05 | GAAAGATGGCAGTTTGATA | 1205 |
| MAD2L1 | NM_002358 | 6466452 | 4085 | D-003271-06 | TAAATAATGTGGTGGAACA | 1206 |
| MAD2L1 | NM_002358 | 6466452 | 4085 | D-003271-07 | GAAATCCGTTCAGTGATCA | 1207 |
| MAD2L1 | NM_002358 | 6466452 | 4085 | D-003271-08 | TTACTCGAGTGCAGAAATA | 1208 |
| MAD2L2 | | | | | | |
| MAD2L2 | NM_006341 | 6006019 | 10459 | D-003272-05 | GGAAGAGCGCGCTCATAAA | 1209 |
| MAD2L2 | NM_006341 | 6006019 | 10459 | D-003272-06 | TGGAAGAGCGCGCTCATAA | 1210 |
| MAD2L2 | NM_006341 | 6006019 | 10459 | D-003272-07 | AGCCACTCCTGGAGAAGAA | 1211 |
| MAD2L2 | NM_006341 | 6006019 | 10459 | D-003272-08 | TGGAGAAATTCGTCTTTGA | 1212 |
| MCM2 | | | | | | |
| MCM2 | NM_004526 | 33356546 | 4171 | D-003273-05 | GAAGATCTTTGCCAGCATT | 1213 |
| MCM2 | NM_004526 | 33356546 | 4171 | D-003273-06 | GGATAAGGCTCGTCAGATC | 1214 |
| MCM2 | NM_004526 | 33356546 | 4171 | D-003273-07 | CAGAGCAGGTGACATATCA | 1215 |
| MCM2 | NM_004526 | 33356546 | 4171 | D-003273-08 | GCCGTGGGCTCCTGTATGA | 1216 |
| MCM3 | | | | | | |
| MCM3 | NM_002388 | 33356548 | 4172 | D-003274-05 | GGACATCAATATTCTTCTA | 1217 |
| MCM3 | NM_002388 | 33356548 | 4172 | D-003274-06 | GCCAGGACATCTCCAGTTA | 1218 |
| MCM3 | NM_002388 | 33356548 | 4172 | D-003274-07 | GCAGGTATGACCAGTATAA | 1219 |
| MCM3 | NM_002388 | 33356548 | 4172 | D-003274-08 | GGAAATGCCTCAAGTACAC | 1220 |
| MCM4 | | | | | | |
| MCM4 | XM_030274 | 22047061 | 4173 | D-003275-05 | GGACATATCTATTCTTACT | 1221 |
| MCM4 | XM_030274 | 22047061 | 4173 | D-003275-06 | GATGTTAGTTCACCACTGA | 1222 |
| MCM4 | XM_030274 | 22047061 | 4173 | D-003275-07 | CCAGCTGCCTCATACTTTA | 1223 |
| MCM4 | XM_030274 | 22047061 | 4173 | D-003275-08 | GAAAGTACAAGATCGGTAT | 1224 |
| MCM5 | | | | | | |
| MCM5 | NM_006739 | 23510447 | 4174 | D-003276-05 | GAAGATCCCTGGCATCATC | 1225 |
| MCM5 | NM_006739 | 23510447 | 4174 | D-003276-06 | GAACAGGGTTACCATCATG | 1226 |
| MCM5 | NM_006739 | 23510447 | 4174 | D-003276-07 | GGACAACATTGACTTCATG | 1227 |
| MCM5 | NM_006739 | 23510447 | 4174 | D-003276-08 | CCAAGGAGGTAGCTGATGA | 1228 |
| MCM6 | | | | | | |
| MCM6 | NM_005915 | 33469920 | 4175 | D-003277-05 | GGAAAGAGCTCAGAGATGA | 1229 |
| MCM6 | NM_005915 | 33469920 | 4175 | D-003277-06 | GAGCAGCGATGGAGAAATT | 1230 |
| MCM6 | NM_005915 | 33469920 | 4175 | D-003277-07 | GGAAACACCTGATGTCAAT | 1231 |
| MCM6 | NM_005915 | 33469920 | 4175 | D-003277-08 | CCAAACATCTGCCGAAATC | 1232 |
| MCM7 | | | | | | |
| MCM7 | NM_005916 | 33469967 | 4176 | D-003278-05 | GGAAATATCCCTCGTAGTA | 1233 |
| MCM7 | NM_005916 | 33469967 | 4176 | D-003278-06 | GGAAGAAGCAGTTCAAGTA | 1234 |
| MCM7 | NM_005916 | 33469967 | 4176 | D-003278-07 | CAACAAGCCTCGTGTGATC | 1235 |
| MCM7 | NM_005916 | 33469967 | 4176 | D-003278-08 | GGAGAGAACACAAGGATTG | 1236 |
| MDM2 | | | | | | |
| MDM2 | NM_002392 | 4505136 | 4193 | D-003279-05 | GGAGATATGTTGTGAAAGA | 1237 |
| MDM2 | NM_002392 | 4505136 | 4193 | D-003279-06 | CCACAAATCTGATAGTATT | 1238 |
| MDM2 | NM_002392 | 4505136 | 4193 | D-003279-07 | GATGAGGTATATCAAGTTA | 1239 |
| MDM2 | NM_002392 | 4505136 | 4193 | D-003279-08 | GGAAGAAACCCAAGACAAA | 1240 |
| MK167 | | | | | | |
| MK167 | NM_002417 | 19923216 | 4288 | D-003280-05 | GCACAAAGCTTGGTTATAA | 1241 |
| MK167 | NM_002417 | 19923216 | 4288 | D-003280-06 | CCTAAGACCTGAACTATTT | 1242 |
| MK167 | NM_002417 | 19923216 | 4288 | D-003280-07 | CAAAGAGGAACACAAATTA | 1243 |
| MK167 | NM_002417 | 19923216 | 4288 | D-003280-08 | GTAAATGGGTCTGTTATTG | 1244 |
| MNAT1 | | | | | | |
| MNAT1 | NM_002431 | 4505224 | 4331 | D-003281-05 | GGAAGAAGCTTTAGAAGTG | 1245 |
| MNAT1 | NM_002431 | 4505224 | 4331 | D-003281-06 | TAGATGAGCTGGAGAGTTC | 1246 |
| MNAT1 | NM_002431 | 4505224 | 4331 | D-003281-07 | GGACCTTGCTGGAGGCTAT | 1247 |
| MNAT1 | NM_002431 | 4505224 | 4331 | D-003281 -08 | GCAGATAGAGACATATGGA | 1248 |
| MYC | | | | | | |
| MYC | NM_002467 | 31543215 | 4609 | D-003282-05 | CAGAGAAGCTGGCCTCCTA | 1249 |
| MYC | NM_002467 | 31543215 | 4609 | D-003282-06 | GAAACGACGAGAACAGTTG | 1250 |
| MYC | NM_002467 | 31543215 | 4609 | D-003282-07 | CGACGAGACCTTCATCAAA | 1251 |
| MYC | NM_002467 | 31543215 | 4609 | D-003282-08 | CCACACATCAGCACAACTA | 1252 |
| ORC1L | | | | | | |
| ORC1L | NM_004153 | 31795543 | 4998 | D-003283-05 | GAACAGGAATTCCAAGACA | 1253 |
| ORC1L | NM_004153 | 31795543 | 4998 | D-003283-06 | TAAGAAACGTGCTCGAGTA | 1254 |
| ORC1L | NM_004153 | 31795543 | 4998 | D-003283-07 | GAGATCACCTCACCTTCTA | 1255 |
| ORC1L | NM_004153 | 31795543 | 4998 | D-003283-08 | GCAGAGAGCCCTTCTTGGA | 1256 |
| ORC2L | | | | | | |
| ORC2L | NM_006190 | 32454751 | 4999 | D-003284-05 | GAAGAAACCTCCTATGAGA | 1257 |
| ORC2L | NM_006190 | 32454751 | 4999 | D-003284-06 | GAAGGGAACTGATGGAGTA | 1258 |
| ORC2L | NM_006190 | 32454751 | 4999 | D-003284-07 | GAAGAATGATCCTGAGATT | 1259 |
| ORC2L | NM_006190 | 32454751 | 4999 | D-003284-08 | GAAGAGATGTTCAAGAATC | 1260 |
| ORC3L | | | | | | |
| ORC3L | NM_012381 | 32483366 | 23595 | D-003285-05 | GGACTGCTGTGTAGATATA | 1261 |
| ORC3L | NM_012381 | 32483366 | 23595 | D-003285-06 | GAACTGATGACCATACTTG | 1262 |
| ORC3L | NM_012381 | 32483366 | 23595 | D-003285-07 | AAAGATCTCTCTGCCAATA | 1263 |
| ORC3L | NM_012381 | 32483366 | 23595 | D-003285-08 | CAGCACAGCTAAGAGAATA | 1264 |
| ORC4L | | | | | | |
| ORC4L | NM_002552 | 32454749 | 5000 | D-003286-06 | GAAAGCACATTCCGTTTAT | 1265 |
| ORC4L | NM_002552 | 32454749 | 5000 | D-003286-07 | TGAAAGAACTCATGGAAAT | 1266 |
| ORC4L | NM_002552 | 32454749 | 5000 | D-003286-08 | GCTGAGAAGTGGAATGAAA | 1267 |
| ORC4L | NM_002552 | 32454749 | 5000 | D-003286-09 | CCAGTGATCTTCATATTAG | 1268 |
| ORC5L | | | | | | |
| ORC5L | NM_002553 | 32454752 | 5001 | D-003287-05 | GAAATAACCTGTGAAACAT | 1269 |
| ORC5L | NM_002553 | 32454752 | 5001 | D-003287-06 | CAGATTACCTCTCTAGTGA | 1270 |
| ORC5L | NM_002553 | 32454752 | 5001 | D-003287-07 | GAACTTCCATATTACTCTA | 1271 |
| ORC5L | NM_002553 | 32454752 | 5001 | D-003287-08 | GTATTCAGCTGATTTCTAT | 1272 |
| ORC6L | | | | | | |
| ORC6L | NM_014321 | 32454755 | 23594 | D-003288-05 | GAACATGGCTTCAAAGATA | 1273 |
| ORC6L | NM_014321 | 32454755 | 23594 | D-003288-06 | GGACAGGGCTTATTTAATT | 1274 |
| ORC6L | NM_014321 | 32454755 | 23594 | D-003288-07 | GAAAGAAGATAGTGGTTGA | 1275 |
| ORC6L | NM_014321 | 32454755 | 23594 | D-003288-08 | TATCAGAGCTGTCTTAAAT | 1276 |
| PCNA | | | | | | |
| PCNA | NM_002592 | 33239449 | 5111 | D-003289-05 | GATCGAGGATGAAGAAGGA | 1277 |
| PCNA | NM_002592 | 33239449 | 5111 | D-003289-07 | GCCGAGATCTCAGCCATAT | 1278 |
| PCNA | NM_002592 | 33239449 | 5111 | D-003289-09 | GAGGCCTGCTGGGATATTA | 1279 |
| PCNA | NM_002592 | 33239449 | 5111 | D-003289-10 | GTGGAGAACTTGGAAATGG | 1280 |
| PLK | | | | | | |
| PLK | NM_005030 | 21359872 | 5347 | D-003290-05 | CAACCAAAGTCGAATATGA | 1281 |
| PLK | NM_005030 | 21359872 | 5347 | D-003290-06 | CAAGAAGAATGAATACAGT | 1282 |
| PLK | NM_005030 | 21359872 | 5347 | D-003290-07 | GAAGATGTCCATGGAAATA | 1283 |
| PLK | NM_005030 | 21359872 | 5347 | D-003290-08 | CAACACGCCTCATCCTCTA | 1284 |
| PIN1 | | | | | | |
| PIN1 | NM_006221 | 5453897 | 5300 | D-003291-05 | GGACCAAGGAGGAGGCCCT | 1285 |
| PIN1 | NM_006221 | 5453897 | 5300 | D-003291-06 | CGTCCTGGCGGCAGGAGAA | 1286 |
| PIN1 | NM_006221 | 5453897 | 5300 | D-003291-07 | CGGGAGAGGAGGACTTTGA | 1287 |
| PIN1 | NM_006221 | 5453897 | 5300 | D-003291-08 | AGTCGGGAGAGGAGGACTT | 1288 |
| PIN1L | | | | | | |
| PIN1L | NM_006222 | 5453899 | 5301 | D-003292-06 | CGACCTGGCGGCAGGAAAT | 1289 |
| PIN1L | NM_006222 | 5453899 | 5301 | D-003292-07 | AGGCAGGAGAGAAGGACTT | 1290 |
| PIN1L | NM_006222 | 5453899 | 5301 | D-003292-08 | GCTACATCCAGAAGATCAA | 1291 |
| PIN1L | NM_006222 | 5453899 | 5301 | D-003292-09 | GGACAGTGTTCACGGATTC | 1292 |
| RAD1 | | | | | | |
| RAD1 | NM_002853 | 19718797 | 5810 | D-003293-05 | GAAGATGGACAAATATGTT | 1293 |
| RAD1 | NM_002853 | 19718797 | 5810 | D-003293-06 | GGAAGAGTCTGTTACTTTT | 1294 |
| RAD1 | NM_002853 | 19718797 | 5810 | D-003293-07 | GATAACAGAGGCTTCCTTT | 1295 |
| RAD1 | NM_002853 | 19718797 | 5810 | D-003293-08 | GCATTAGTCCTATCTTGTA | 1296 |
| RAD17 | | | | | | |
| RAD17 | NM_133338 | 19718783 | 5884 | D-003294-05 | GAATCAAGCTTCCATATGT | 1297 |
| RAD17 | NM_133338 | 19718783 | 5884 | D-003294-06 | CAACAAAGCCCGAGGATAT | 1298 |
| RAD17 | NM_133338 | 19718783 | 5884 | D-003294-07 | ACACATGCCTGGAGACTTA | 1299 |
| RAD17 | NM_133338 | 19718783 | 5884 | D-003294-08 | CTACATAGATTTCTTCATG | 1300 |
| RAD9A | | | | | | |
| RAD9A | NM_004584 | 19924112 | 5883 | D-003295-05 | TCAGCAAACTTGAATCTTA | 1301 |
| RAD9A | NM_004584 | 19924112 | 5883 | D-003295-06 | GACATTGACTCTTACATGA | 1302 |
| RAD9A | NM_004584 | 19924112 | 5883 | D-003295-08 | GGAAACCACTATAGGCAAT | 1303 |
| RAD9A | NM_004584 | 19924112 | 5883 | D-003295-09 | CGGACGACTTTGCCAATGA | 1304 |
| RB1 | | | | | | |
| RB1 | NM_000321 | 19924112 | 5925 | D-003296-05 | GAAAGGACATGTGAACTTA | 1305 |
| RB1 | NM_000321 | 19924112 | 5925 | D-003296-06 | GAAGAAGTATGATGTATTG | 1306 |
| RB1 | NM_000321 | 4506434 | 5925 | D-003296-07 | GAAATGACTTCTACTCGAA | 1307 |
| RB1 | NM_000321 | 4506434 | 5925 | D-003296-08 | GGAGGGAACATCTATATTT | 1308 |
| RBBP2 | | | | | | |
| RBBP2 | NM_005056 | 4826967 | 5927 | D-003297-05 | CAAAGAAGCTGAATAAACT | 1309 |
| RBBP2 | NM_005056 | 4826967 | 5927 | D-003297-06 | CAACACATATGGCGGATTT | 1310 |
| RBBP2 | NM_005056 | 4826967 | 5927 | D-003297-07 | GGACAAACCTAGAAAGAAG | 1311 |
| RBBP2 | NM_005056 | 4826967 | 5927 | D-003297-08 | GAAAGGCACTCTCTCTGTT | 1312 |
| RBL1 | | | | | | |
| RBL1 | NM_002895 | 34577078 | 5933 | D-003298-05 | CAAGAGAAGTTGTGGCATA | 1313 |
| RBL1 | NM_002895 | 34577078 | 5933 | D-003298-06 | CAGCAGCACTCCATTTATA | 1314 |
| RBL1 | NM_002895 | 34577078 | 5933 | D-003298-07 | ACAGAAAGGTCTATCATTT | 1315 |
| RBL1 | NM_002895 | 34577078 | 5933 | D-003298-08 | GGACATAAAGTTACAATTC | 1316 |
| RBL2 | | | | | | |
| RBL2 | NM_005611 | 21361291 | 5934 | D-003299-05 | GAGCAGAGCTTAATCGAAT | 1317 |
| RBL2 | NM_005611 | 21361291 | 5934 | D-003299-06 | GAGAATAGCCCTTGTGTGA | 1318 |
| RBL2 | NM_005611 | 21361291 | 5934 | D-003299-07 | GGACTTAGTTTATGGAAAT | 1319 |
| RBL2 | NM_005611 | 21361291 | 5934 | D-003299-08 | GAATTTAGATGAGCGGATA | 1320 |
| RBP1 | | | | | | |
| RBP1 | NM_002899 | 8400726 | 5947 | D-003300-05 | GAGACAAGCTCCAGTGTGT | 1321 |
| RBP1 | NM_002899 | 8400726 | 5947 | D-003300-06 | GCAAGCAAGTATTCAAGAA | 1322 |
| RBP1 | NM_002899 | 8400726 | 5947 | D-003300-07 | GCAGGACGGTGACCATATG | 1323 |
| RBP1 | NM_002899 | 8400726 | 5947 | D-003300-08 | GCAAGTGCATGACAACAGT | 1324 |
| RPA3 | | | | | | |
| RPA3 | NM_002947 | 19923751 | 6119 | D-003322-05 | GGAAGTGGTTGGAAGAGTA | 1325 |
| RPA3 | NM_002947 | 19923751 | 6119 | D-003322-06 | GAAGATAGCCATCCTTTTG | 1326 |
| RPA3 | NM_002947 | 19923751 | 6119 | D-003322-07 | CATGCTAGCTCAATTCATC | 1327 |
| RPA3 | NM_002947 | 19923751 | 6119 | D-003322-08 | GATCTTGGACTTTACAATG | 1328 |
| SKP1A | | | | | | |
| SKP1A | NM_006930 | 25777710 | 6500 | D-003323-05 | GGAGAGATATTTGAAGTTG | 1329 |
| SKP1A | NM_006930 | 25777710 | 6500 | D-003323-06 | GGGAATGGATGATGAAGGA | 1330 |
| SKP1A | NM_006930 | 25777710 | 6500 | D-003323-07 | CAAACAATCTGTGACTATT | 1331 |
| SKP1A | NM_006930 | 25777710 | 6500 | D-003323-08 | TCAATTAAGTTGCAGAGTT | 1332 |
| SKP2 | | | | | | |
| SKP2 | NM_005983 | 16306594 | 6502 | D-003324-05 | CATCTAGACTTAAGTGATA | 1333 |
| SKP2 | NM_005983 | 16306594 | 6502 | D-003324-06 | GAAATCAGATCTCTCTACT | 1334 |
| SKP2 | NM_005983 | 16306594 | 6502 | D-003324-07 | CTAAAGGTCTCTGGTGTTT | 1335 |
| SKP2 | NM_005983 | 16306594 | 6502 | D-003324-08 | GATGGTACCC1TCAACTGT | 1336 |
| SNK | | | | | | |
| SNK | NM_006622 | 5730054 | 10769 | D-003325-05 | GAAGACATCTACAAGCTTA | 1337 |
| SNK | NM_006622 | 5730054 | 10769 | D-003325-06 | GAAATACCTTCATGAACAA | 1338 |
| SNK | NM_006622 | 5730054 | 10769 | D-003325-07 | GAAGGTCAATGGCTCATAT | 1339 |
| SNK | NM_006622 | 5730054 | 10769 | D-003325-08 | CCGGAGATCTCGCGGATTA | 1340 |
| STK12 | | | | | | |
| STK12 | NM_004217 | 4759177 | 9212 | D-003326-07 | CAGAAGAGCTGCACATTTG | 1341 |
| STK12 | NM_004217 | 4759177 | 9212 | D-003326-08 | CCAAACTGCTCAGGCATAA | 1342 |
| STK12 | NM_004217 | 4759177 | 9212 | D-003326-09 | ACGCGGCACTTCACAATTG | 1343 |
| STK12 | NM_004217 | 4759177 | 9212 | D-003326-10 | TGGGACACCCGACATCTTA | 1344 |
| TFDP1 | | | | | | |
| TFDP1 | NM_007111 | 34147667 | 7027 | D-003327-05 | GGAAGCAGCTCTTGCCAAA | 1345 |
| TFDP1 | NM_007111 | 34147667 | 7027 | D-003327-06 | GAGGAGACTTGAAAGAATA | 1346 |
| TFDP1 | NM_007111 | 34147667 | 7027 | D-003327-07 | GAACTTAGAGGTGGAAAGA | 1347 |
| TFDP1 | NM_007111 | 34147667 | 7027 | D-003327-08 | GCGAGAAGGTGCAGAGGAA | 1348 |
| TFDP2 | | | | | | |
| TFDP2 | NM_006286 | 5454111 | 7029 | D-003328-05 | GAAAGTGTGTGAGAAAGTT | 1349 |
| TFDP2 | NM_006286 | 5454111 | 7029 | D-003328-06 | CACAGGACCTTCTTGGTTA | 1350 |
| TFDP2 | NM_006286 | 5454111 | 7029 | D-003328-07 | CGAAATCCCTGGTGCCAAA | 1351 |
| TFDP2 | NM_006286 | 5454111 | 7029 | D-003328-08 | TGAGATCCATGATGACATA | 1352 |
| TP53 | | | | | | |
| TP53 | NM_000546 | 8400737 | 7157 | D-003329-05 | GAGGTTGGCTCTGACTGTA | 1353 |
| TP53 | NM_000546 | 8400737 | 7157 | D-003329-06 | CAGTCTACCTCCCGCCATA | 1354 |
| TP53 | NM_000546 | 8400737 | 7157 | D-003329-07 | GCACAGAGGAAGAGAATCT | 1355 |
| TP53 | NM_000546 | 8400737 | 7157 | D-003329-08 | GAAGAAACCACTGGATGGA | 1356 |
| TP63 | | | | | | |
| TP63 | NM_003722 | 31543817 | 8626 | D-003330-05 | CATCATGTCTGGACTATTT | 1357 |
| TP63 | NM_003722 | 31543817 | 8626 | D-003330-06 | CAAACAAGATTGAGATTAG | 1358 |
| TP63 | NM_003722 | 31543817 | 8626 | D-003330-07 | GCACACAGACAAATGAATT | 1359 |
| TP63 | NM_003722 | 31543817 | 8626 | D-003330-08 | CGACAGTCTTGTACAATTT | 1360 |
| TP73 | | | | | | |
| TP73 | NM_005427 | 4885644 | 7161 | D-003331-05 | GCAAGCAGCCCATCAAGGA | 1361 |
| TP73 | NM_005427 | 4885644 | 7161 | D-003331-06 | GAGACGAGGACACGTACTA | 1362 |
| TP73 | NM_005427 | 4885644 | 7161 | D-003331-07 | CTGCAGAACCTGACCATTG | 1363 |
| TP73 | NM_005427 | 4885644 | 7161 | D-003331-08 | GGCCATGCCTGTTTACAAG | 1364 |
| YWHAZ | | | | | | |
| YWHAZ | NM_003406 | 21735623 | 7534 | D-003332-05 | GCAAGGAGCTGAATTATCC | 1365 |
| YWHAZ | NM_003406 | 21735623 | 7534 | D-003332-06 | TAAGAGATATCTGCAATGA | 1366 |
| YWHAZ | NM_003406 | 21735623 | 7534 | D-003332-07 | GACGGAAGGTGCTGAGAAA | 1367 |
| YWHAZ | NM_003406 | 21735623 | 7534 | D-003332-08 | AGAGCAAAGTCTTCTATTT | 1368 |

[0552] TABLE IX

| | | | | | |
|---|---|---|---|---|---|
| Gene | | | | | SEQ. ID |
| Name | Accession # | GI# | Duplex # | Sequence | NO. |

| | | | | | |
|---|---|---|---|---|---|
| AR | NM_000044 | 21322251 | D-003400-01 | GGAACTCGATCGTATCATT | 1369 |
| AR | NM_000044 | 21322251 | D-003400-02 | CAAGGGAGGTTACACCAAA | 1370 |
| AR | NM_000044 | 21322251 | D-003400-03 | TCAAGGAACTCGATCGTAT | 1371 |
| AR | NM_000044 | 21322251 | D-003400-04 | GAAATGATTGCACTATTGA | 1372 |
| ESR1 | NM_000125 | 4503602 | D-003401-01 | GAATGTGCCTGGCTAGAGA | 1373 |
| ESR1 | NM_000125 | 4503602 | D-003401-02 | CATGAGAGCTGCCAACCTT | 1374 |
| ESR1 | NM_000125 | 4503602 | D-003401-03 | AGAGAAAGATTGGCCAGTA | 1375 |
| ESR1 | NM_000125 | 4503602 | D-003401-04 | CAAGGAGACTCGCTACTGT | 1376 |
| ESR2 | NM_001437 | 10835012 | D-003402-01 | GAACATCTGCTCAACATGA | 1377 |
| ESR2 | NM_001437 | 10835012 | D-003402-02 | GCACGGCTCCATATACATA | 1378 |
| ESR2 | NM_001437 | 10835012 | D-003402-03 | CAAGAAGATTCCCGGCTTT | 1379 |
| ESR2 | NM_001437 | 10835012 | D-003402-04 | GGAAATGCGTAGAAGGAAT | 1380 |
| ESRRA | NM_004451 | 18860919 | D-003403-01 | GGCCTTCGCTGAGGACTTA | 1381 |
| ESRRA | NM_004451 | 18860919 | D-003403-02 | TGAATGCACTGGTGTCTCA | 1382 |
| ESRRA | NM_004451 | 18860919 | D-003403-03 | GCATTGAGCCTCTCTACAT | 1383 |
| ESRRA | NM_004451 | 18860919 | D-003403-04 | CCAGACAGCGGGCAAAGTG | 1384 |
| ESRRB | NM_004452 | 22035686 | D-003404-01 | TACCTGAGCTTACAAATTT | 1385 |
| ESRRB | NM_004452 | 22035686 | D-003404-02 | GCACTTCTATAGCGTCAAA | 1386 |
| ESRRB | NM_004452 | 22035686 | D-003404-03 | CAACTCCGATTCCATGTAC | 1387 |
| ESRRB | NM_004452 | 22035686 | D-003404-04 | GGACTCGCCACCCATGTTT | 1388 |
| ESRRG | NM_001438 | 4503604 | D-003405-01 | AAACAAAGATCGACACATT | 1389 |
| ESRRG | NM_001438 | 4503604 | D-003405-02 | TCAGGAAACTGTATGATGA | 1390 |
| ESRRG | NM_001438 | 4503604 | D-003405-03 | GAAGACCAGTCCAAATTAG | 1391 |
| ESRRG | NM_001438 | 4503604 | D-003405-04 | ATGAAGCGCTGCAGGATTA | 1392 |
| HNF4A | NM_000457 | 21361184 | D-003406-01 | CGACATCACTGGAGCATAT | 1393 |
| HNF4A | NM_000457 | 21361184 | D-003406-02 | GAAGGAAGCCGTCCAGAAT | 1394 |
| HNF4A | NM_000457 | 21361184 | D-003406-03 | CCAAGTACATCCCAGCTTT | 1395 |
| HNF4A | NM_000457 | 21361184 | D-003406-04 | GGACATGGCCGACTACAGT | 1396 |
| HNF4G | NM_004133 | 6631087 | D-003407-01 | GCACTGACATAAACGTTAA | 1397 |
| HNF4G | NM_004133 | 6631087 | D-003407-02 | ACAAAGAGATCCATGATGT | 1398 |
| HNF4G | NM_004133 | 6631087 | D-003407-03 | AGAGATCCATGATGTATAA | 1399 |
| HNF4G | NM_004133 | 6631087 | D-003407-04 | AAATGAACGTGACAGAATA | 1400 |
| H5AJ2425 | NM_017532 | 8923776 | D-003408-01 | GAATGAATCTACACCTTTG | 1401 |
| H5AJ2425 | NM_017532 | 8923776 | D-003408-02 | GGAAATACGTGGAGACACT | 1402 |
| H5AJ2425 | NM_017532 | 8923776 | D-003408-03 | CCAGATAACTACGGCGATA | 1403 |
| H5AJ2425 | NM_017532 | 8923776 | D-003408-04 | TGGCGTACCTTCTCATTGA | 1404 |
| NROB1 | NM_000475 | 5016089 | D-003409-01 | CAGCATGGATGATATGATG | 1405 |
| NROB1 | NM_000475 | 5016089 | D-003409-02 | CTGCTGAGATTCATCAATG | 1406 |
| NROB1 | NM_000475 | 5016089 | D-003409-03 | ACAGATTCATCGAACTTAA | 1407 |
| NROB1 | NM_000475 | 5016089 | D-003409-04 | GAACGTGGCGCTCCTGTAC | 1408 |
| NROB2 | NM_021969 | 13259502 | D-003410-01 | GAATATGCCTGCCTGAAAG | 1409 |
| NROB2 | NM_021969 | 13259502 | D-003410-02 | GGAATATGCCTGCCTGAAA | 1410 |
| NROB2 | NM_021969 | 13259502 | D-003410-03 | CGTAGCCGCTGCCTATGTA | 1411 |
| NROB2 | NM_021969 | 13259502 | D-003410-04 | GCCATTCTCTACGCACTTC | 1412 |
| NR1D1 | NM_021724 | 13430847 | D-003411-01 | CAACACAGGTGGCGTCATC | 1413 |
| NR1D1 | NM_021724 | 13430847 | D-003411-02 | GGCATGGTGTTACTGTGTA | 1414 |
| NR1D1 | NM_021724 | 13430847 | D-003411-03 | CAACATGCATTCCGAGAAG | 1415 |
| NR1D1 | NM_021724 | 13430847 | D-003411-04 | GCGCTTTGCTTCGTTGTTC | 1416 |
| NR1H2 | NM_007121 | 11321629 | D-003412-01 | GAACAGATCCGGAAGAAGA | 1417 |
| NR1H2 | NM_007121 | 11321629 | D-003412-02 | GAAGAACAGATCCGGAAGA | 1418 |
| NR1H2 | NM_007121 | 11321629 | D-003412-03 | CTAAGCAAGTGCCTGGTTT | 1419 |
| NR1H2 | NM_007121 | 11321629 | D-003412-04 | GCTAACAGCGGCTCAAGAA | 1420 |
| NR1H3 | NM_005693 | 5031892 | D-003413-01 | GAACAGATCCGCCTGAAGA | 1421 |
| NR1H3 | NM_005693 | 5031892 | D-003413-02 | GGAGATAGTTGACTTTGCT | 1422 |
| NR1H3 | NM_005693 | 5031892 | D-003413-03 | GAGTTTGCCTTGCTCATTG | 1423 |
| NR1H3 | NM_005693 | 5031892 | D-003413-04 | TGACT1TGCTAAACAGCTA | 1424 |
| NR1H4 | NM_005123 | 4826979 | D-003414-01 | CAAGTGACCTCGACAACAA | 1425 |
| NR1H4 | NM_005123 | 4826979 | D-003414-02 | GAAAGAATTCGAAATAGTG | 1426 |
| NR1H4 | NM_005123 | 4826979 | D-003414-03 | CAACAGACTCTTCTACATT | 1427 |
| NR1H4 | NM_005123 | 4826979 | D-003414-04 | GAACCATACTCGCAATACA | 1428 |
| NR1I2 | NM_003889 | 11863133 | D-003415-01 | GAACCATGCTGACTTTGTA | 1429 |
| NR1I2 | NM_003889 | 11863133 | D-003415-02 | GATGGACGCTCAGATGAAA | 1430 |
| NR1I2 | NM_003889 | 11863133 | D-003415-03 | CAACCTACATGTTCAAAGG | 1431 |
| NR1I2 | NM_003889 | 11863133 | D-003415-04 | CAGGAGCAATTCGCCATTA | 1432 |
| NR1I3 | NM_005122 | 4826660 | D-003416-01 | GGAAATCTGTCACATCGTA | 1433 |
| NR1I3 | NM_005122 | 4826660 | D-003416-02 | TCGCAGACATCAACACTTT | 1434 |
| NR1I3 | NM_005122 | 4826660 | D-003416-03 | CCTCTTCGCTACACAATTG | 1435 |
| NR1I3 | NM_005122 | 4826660 | D-003416-04 | GAACAGTTTGTGCAGTTTA | 1436 |
| NR2C1 | NM_003297 | 4507672 | D-003417-01 | TGACAGCACTTGATCATAA | 1437 |
| NR2C1 | NM_003297 | 4507672 | D-003417-02 | GGAAGGAAGTGTACACCTA | 1438 |
| NR2C1 | NM_003297 | 4507672 | D-003417-03 | GAGCACATCTTCAAACTAC | 1439 |
| NR2C1 | NM_003297 | 4507672 | D-003417-04 | GAAGAAATTGCACATCAAA | 1440 |
| NR2C2 | NM_003298 | 4507674 | D-003418-01 | GAACAACGGTGACACTTCA | 1441 |
| NR2C2 | NM_003298 | 4507674 | D-003418-02 | CTGATGAGCTCCAACATAA | 1442 |
| NR2C2 | NM_003298 | 4507674 | D-003418-03 | CAACCTAAGTGAATCTTTG | 1443 |
| NR2C2 | NM_003298 | 4507674 | D-003418-04 | GAAGACACCTACCGATTGG | 1444 |
| NR2E1 | NM_003269 | 21361108 | D-003419-01 | GATCATATCTGAAATACAG | 1445 |
| NR2E1 | NM_003269 | 21361108 | D-003419-02 | CAAGACTGCTTTCAGATAT | 1446 |
| NR2E1 | NM_003269 | 21361108 | D-003419-03 | GTTAGATGCTACTGAATTT | 1447 |
| NR2E1 | NM_003269 | 21361108 | D-003419-04 | CAATGTATCTCTATGAAGT | 1448 |
| NR2E3 | NM_014249 | 7657394 | D-003420-01 | GAGAAGCTCCTTTGTGATA | 1449 |
| NR2E3 | NM_014249 | 7657394 | D-003420-02 | GAAGCACTATGGCATCTAT | 1450 |
| NR2E3 | NM_014249 | 7657394 | D-003420-03 | GAAGGATCCTGAGCACGTA | 1451 |
| NR2E3 | NM_014249 | 7657394 | D-003420-04 | GAAGCTCCTTTGTGATATG | 1452 |
| NR2F1 | NM_005654 | 20127484 | D-003421-01 | GAAACTCTCATCCGCGATA | 1453 |
| NR2F1 | NM_005654 | 20127484 | D-003421-02 | TCTCATCCGCGATATGTTA | 1454 |
| NR2F1 | NM_005654 | 20127484 | D-003421-03 | CAAGAAGTGCCTCAAAGTG | 1455 |
| NR2F1 | NM_005654 | 20127484 | D-003421-04 | GGAACTTAACTTACACATG | 1456 |
| NR2F2 | NM_021005 | 14149745 | D-003422-01 | GTACCTGTCCGGATATATT | 1457 |
| NR2F2 | NM_021005 | 14149745 | D-003422-02 | CCAACCAGCCGACGAGATT | 1458 |
| NR2F2 | NM_021005 | 14149745 | D-003422-03 | ACTCGTACCTGTCCGGATA | 1459 |
| NR2F2 | NM_021005 | 14149745 | D-003422-04 | GGCCGTATATGGCAATTCA | 1460 |
| NR2F6 | NM_005234 | 20070198 | D-003423-01 | CGACGCCTGTGGCCTCTCA | 1461 |
| NR2F6 | NM_005234 | 20070198 | D-003423-02 | CAGCCGGTGTCCGAACTGA | 1462 |
| NR2F6 | NM_005234 | 20070198 | D-003423-03 | CAACCGTGACTGCCAGATC | 1463 |
| NR2F6 | NM_005234 | 20070198 | D-003423-04 | GTACTGCCGTCTCAAGAAG | 1464 |
| NR3C1 | NM_000176 | 4504132 | D-003424-01 | GAGGACAGATGTACCACTA | 1465 |
| NR3C1 | NM_000176 | 4504132 | D-003424-02 | GATAAGACCATGAGTATTG | 1466 |
| NR3C1 | NM_000176 | 4504132 | D-003424-03 | GAAGACGATTCATTCCTTT | 1467 |
| NR3C1 | NM_000176 | 4504132 | D-003424-04 | GGACAGATGTACCACTATG | 1468 |
| NR3C2 | NM_000901 | 4505198 | D-003425-01 | GCAAACAGATGATCCAAGT | 1469 |
| NR3C2 | NM_000901 | 4505198 | D-003425-02 | CAGCTAAGATTTATCAGAA | 1470 |
| NR3C2 | NM_000901 | 4505198 | D-003425-03 | GCACGAAAGTCAAAGAAGT | 1471 |
| NR3C2 | NM_000901 | 4505198 | D-003425-04 | GGTATCCGGTCTTAGAATA | 1472 |
| NR4A1 | NM_002135 | 21361341 | D-003426-01 | GAAGGAAGTTGTCCGAACA | 1473 |
| NR4A1 | NM_002135 | 21361341 | D-003426-02 | CAGGAGAGTTTGACACCTT | 1474 |
| NR4A1 | NM_002135 | 21361341 | D-003426-03 | CAGTGGCTCTGACTACTAT | 1475 |
| NR4A1 | NM_002135 | 21361341 | D-003426-04 | GAAGGCCGCTGTGCTGTGT | 1476 |
| NR4A2 | NM_006186 | 5453821 | D-003427-01 | GCAATGCGTTCGTGGCTTT | 1477 |
| NR4A2 | NM_006186 | 5453821 | D-003427-02 | CGGCTACACAGGAGAGTTT | 1478 |
| NR4A2 | NM_006186 | 5453821 | D-003427-03 | CCACGTGACTTTCAACAAT | 1479 |
| NR4A2 | NM_006186 | 5453821 | D-003427-04 | GAATACAGCTCCGATTTCT | 1480 |
| NR4A3 | NM_006981 | 11276070 | D-003428-01 | CAAAGAAGATCAGACATTA | 1481 |
| NR4A3 | NM_006981 | 11276070 | D-003428-02 | GATCAGACATTACTTATTG | 1482 |
| NR4A3 | NM_006981 | 11276070 | D-003428-03 | CCAGAGATCTTGATTATTC | 1483 |
| NR4A3 | NM_006981 | 11276070 | D-003428-04 | GAAGTTGTCCGTACAGATA | 1484 |
| NR5A1 | NM_004959 | 20070192 | D-003429-01 | GATTTGAAGTTCCTGAATA | 1485 |
| NR5A1 | NM_004959 | 20070192 | D-003429-02 | GGAGCGAGCTGCTGGTGTT | 1486 |
| NR5A1 | NM_004959 | 20070192 | D-003429-03 | GGAGGTGGCCGACCAGATG | 1487 |
| NR5A1 | NM_004959 | 20070192 | D-003429-04 | CAACGTGCCTGAGCTCATC | 1488 |
| NR5A2 | NM_003822 | 20070161 | D-003430-01 | CCAAACATATGGCCACTTT | 1489 |
| NR5A2 | NM_003822 | 20070161 | D-003430-02 | TCAGAGAACTTAAGGTTGA | 1490 |
| NR5A2 | NM_003822 | 20070161 | D-003430-03 | GGATCCATCTTCCTGGTTA | 1491 |
| NR5A2 | NM_003822 | 20070161 | D-003430-04 | AAGAATACCTCTACTACAA | 1492 |
| NR6A1 | NM_033334 | 15451847 | D-003431-01 | CAACGAACCTGTCTCATTT | 1493 |
| NR6A1 | NM_033334 | 15451847 | D-003431-02 | GAAGAACTACACAGATTTA | 1494 |
| NR6A1 | NM_033334 | 15451847 | D-003431-03 | GAAGATGGATACGCTGTGA | 1495 |
| NR6A1 | NM_033334 | 15451847 | D-003431-04 | AAACGATACTGGTACATTT | 1496 |
| null | D16815 | 2116671 | D-003432-01 | GAAGAATGATCGAATAGAT | 1497 |
| null | D16815 | 2116671 | D-003432-02 | GAACATGGAGCAATATAAT | 1498 |
| null | D16815 | 2116671 | D-003432-03 | GAGGAGCTCTTGGCCTTTA | 1499 |
| null | D16815 | 2116671 | D-003432-04 | TAAACAACATGCACTCTGA | 1500 |
| PGR | NM_000926 | 4505766 | D-003433-01 | GAGATGAGGTCAAGCTACA | 1501 |
| PGR | NM_000926 | 4505766 | D-003433-02 | CAGCGTTTCTATCAACTTA | 1502 |
| PGR | NM_000926 | 4505766 | D-003433-03 | AGATAACTCTCATTCAGTA | 1503 |
| PGR | NM_000926 | 4505766 | D-003433-04 | GTAGTCAAGTGGTCTAAAT | 1504 |
| PPARA | NM_005036 | 7549810 | D-003434-01 | TCACGGAGCTCACGGAATT | 1505 |
| PPARA | NM_005036 | 7549810 | D-003434-02 | GAACATGACATAGAAGATT | 1506 |
| PPARA | NM_005036 | 7549810 | D-003434-03 | GGATAGTTCTGGAAGCTTT | 1507 |
| PPARA | NM_005036 | 7549810 | D-003434-04 | GACTCAAGCTGGTGTATGA | 1508 |
| PPARD | NM_006238 | 5453939 | D-003435-01 | GAGCGCAGCTGCAAGATTC | 1509 |
| PPARD | NM_006238 | 5453939 | D-003435-02 | GCATGAAGCTGGAGTACGA | 1510 |
| PPARD | NM_006238 | 5453939 | D-003435-03 | GGAAGCAGTTGGTGAATGG | 1511 |
| PPARD | NM_006238 | 5453939 | D-003435-04 | GCTGCAAGATTCAGAAGAA | 1512 |
| PPARG | NM_138712 | 20336234 | D-003436-01 | AGACTCAGCTCTACAATAA | 1513 |
| PPARG | NM_138712 | 20336234 | D-003436-02 | GATTGAAGCTTATCTATGA | 1514 |
| PPARG | NM_138712 | 20336234 | D-003436-03 | AAGTAACTCTCCTCAAATA | 1515 |
| PPARG | NM_138712 | 20336234 | D-003436-04 | GCATTTCTACTCCACATTA | 1516 |
| RARA | NM_000964 | 4506418 | D-003437-01 | GACAAGAACTGCATCATCA | 1517 |
| RARA | NM_000964 | 4506418 | D-003437-02 | GCAAATACACTACGAACAA | 1518 |
| RARA | NM_000964 | 4506418 | D-003437-03 | GAACAACAGCTCAGAACAA | 1519 |
| RARA | NM_000964 | 4506418 | D-003437-04 | GAGCAGCAGTTCTGAAGAG | 1520 |
| RARB | NM_000965 | 14916493 | D-003438-01 | GCACACTGCTCAATCAATT | 1521 |
| RARB | NM_000965 | 14916493 | D-003438-02 | GCAGAAGTATTCAGAAGAA | 1522 |
| RARB | NM_000965 | 14916493 | D-003438-03 | GGAATGACAGGAACAAGAA | 1523 |
| RARB | NM_000965 | 14916493 | D-003438-04 | GCACAGTCCTAGCATCTCA | 1524 |
| RARG | NM_000966 | 21359851 | D-003439-01 | GAAATGACCGGAACAAGAA | 1525 |
| RARG | NM_000966 | 21359851 | D-003439-02 | TAGAAGAGCTCATCACCAA | 1526 |
| RARG | NM_000966 | 21359851 | D-003439-03 | CAAGGAAGCTGTGCGAAAT | 1527 |
| RARG | NM_000966 | 21359851 | D-003439-04 | TCAGTGAGCTGGCTACCAA | 1528 |
| RORA | NM_134261 | 19743902 | D-003440-01 | GGAAAGAGTTTATGTTCTA | 1529 |
| RORA | NM_134261 | 19743902 | D-003440-02 | CAAGATCTGTGGAGACAAA | 1530 |
| RORA | NM_134261 | 19743902 | D-003440-03 | GCACCTGACTGAAGATGAA | 1531 |
| RORA | NM_134261 | 19743902 | D-003440-04 | CCGAGAAGATGGAATACTA | 1532 |
| RORB | NM_006914 | 19743906 | D-003441-01 | GCACAGAACATCATTAAGT | 1533 |
| RORB | NM_006914 | 19743906 | D-003441-02 | CCACACCTATGAAGAAATT | 1534 |
| RORB | NM_006914 | 19743906 | D-003441-03 | GATCAAATTCTACTTCTGA | 1535 |
| RORB | NM_006914 | 19743906 | D-003441-04 | TCAAACAGATAAAGCAAGA | 1536 |
| RORC | NM_005060 | 19743908 | D-003442-01 | TAGAACAGCTGCAGTACAA | 1537 |
| RORC | NM_005060 | 19743908 | D-003442-02 | TCACCGAGGCCATTCAGTA | 1538 |
| RORC | NM_005060 | 19743908 | D-003442-03 | GAACAGCTGCAGTACAATC | 1539 |
| RORC | NM_005060 | 19743908 | D-003442-04 | CCTCATGCCACCTTGAATA | 1540 |
| RXRA | NM_002957 | 21536318 | D-003443-01 | TGACGGAGCTTGTGTCCAA | 1541 |
| RXRA | NM_002957 | 21536318 | D-003443-02 | CAACAAGGACTGCCTGATT | 1542 |
| RXRA | NM_002957 | 21536318 | D-003443-03 | GCAAGGACCTGACCTACAC | 1543 |
| RXRA | NM_002957 | 21536318 | D-003443-04 | GCAAGGACCGGAACGAGAA | 1544 |
| RXRB | NM_021976 | 21687229 | D-003444-01 | GCAAAGACCTTACATACTC | 1545 |
| RXRB | NM_021976 | 21687229 | D-003444-02 | GCAATCATTCTGTTTAATC | 1546 |
| RXRB | NM_021976 | 21687229 | D-003444-03 | TCACACCGATCCATTGATG | 1547 |
| RXRB | NM_021976 | 21687229 | D-003444-04 | GCAAACGGCTATGTGCAAT | 1548 |
| RXRG | NM_006917 | 21361386 | D-003445-01 | GGAAGGACCTCATCTACAC | 1549 |
| RXRG | NM_006917 | 21361386 | D-003445-02 | GCGGATCTCTGGTTAAACA | 1550 |
| RXRG | NM_006917 | 21361386 | D-003445-03 | GCGAGCCATTGTACTCTTT | 1551 |
| RXRG | NM_006917 | 21361386 | D-003445-04 | GAGCCATTGTACTCTTTAA | 1552 |
| THRA | NM_003250 | 20127451 | D-003446-01 | GGACAAAGACGAGCAGTGT | 1553 |
| THRA | NM_003250 | 20127451 | D-003446-02 | GGAAACAGAGGCGGAAATT | 1554 |
| THRA | NM_003250 | 20127451 | D-003446-03 | GTAAGCTGATTGAGCAGAA | 1555 |
| THRA | NM_003250 | 20127451 | D-003446-04 | GAACCTCCATCCCACCTAT | 1556 |
| THRB | NM_000461 | 10835122 | D-003447-01 | GAATGTCGCTTTAAGAAAT | 1557 |
| THRB | NM_000461 | 10835122 | D-003447-02 | GAACAGTCGTCGCCACATC | 1558 |
| THRB | NM_000461 | 10835122 | D-003447-03 | GGACAAGCACCAATAGTCA | 1559 |
| THRB | NM_000461 | 10835122 | D-003447-04 | GTGGAAAGGTTGACTTGGA | 1560 |
| VDR | NM_000376 | 4507882 | D-003448-01 | TGAAGAAGCTGAACTTGCA | 1561 |
| VDR | NM_000376 | 4507882 | D-003448-02 | GCAACCAAGACTACAAGTA | 1562 |
| VDR | NM_000376 | 4507882 | D-003448-03 | TCAATGCTATGACCTGTGA | 1563 |
| VDR | NM_000376 | 4507882 | D-003448-04 | CCATTGAGGTCATCATGTT | 1564 |

[0553] TABLE X

| | | |
|---|---|---|
| Gene Symbol | Sense | SEQ. ID NO. |

| | | |
|---|---|---|
| ABCB1 | GACCAUAAAUGUAAGGUUU | 1565 |
| | UAGAAGAUCUGAUGUCAAA | 1566 |
| | GAAAUGUUCACUUCAGUUA | 1567 |
| | GAAGAUCGCUACUGAAGCA | 1568 |
| ABCC1 | GGAAGCAACUGCAGAGACA | 1569 |
| | GAUGACACCUCUCAACAAA | 1570 |
| | UAAAGUUGCUCAUCAAGUU | 1571 |
| | CAACGAGUCUGCCGAAGGA | 1572 |
| ABCG2 | GCAGAUGCCUUCUUCGUUA | 1573 |
| | AGGCAAAUCUUCGUUAUUA | 1574 |
| | GGGAAGAAAUCUGGUCUAA | 1575 |
| | UGACUCAUCCCAACAUUUA | 1576 |
| KCNH2 | CCGACGUGCUGCCUGAGUA | 1577 |
| | GAGAAGAGCAGCGACACUU | 1578 |
| | GAUCAUAGCACCUAAGAUA | 1579 |
| | GCUAUUUACUGCUCUUAUU | 1580 |
| | UCACUGGGCUCCUUUAAUU | 1581 |
| | GUGCGAGCCUUCUGAAUAU | 1582 |
| | GCUAAGCUAUACUACUGUA | 1583 |
| | UGACGGCGCUCUACUUCAC | 1584 |
| KCNH1 | GAGAUGAAUUCCUUUGAAA | 1585 |
| | GAAGAACGCAUGAAACGAA | 1586 |
| | GAUAAAGACACGAUUGAAA | 1587 |
| | GCUGAGAGGUCUAUUUAAA | 1588 |
| CLCA1 | GAACAACAAUGGCUAUGAA | 1589 |
| | GUACAUACCUGGCUGGAUU | 1590 |
| | GAACAGCUCACAAGUAUAU | 1591 |
| | GGAAACGUGUGUCUAUAUU | 1592 |
| SLC6A1 | GGAGGUGGGAGGACAGUUA | 1593 |
| | UCACAGCCCUGGUGGAUGA | 1594 |
| | GAAGCUGGCUCCUAUGUUC | 1595 |
| | GGUCAACACUACCAACAUG | 1596 |
| SLC6A2 | GAACACAAGGUCAACAUUG | 1597 |
| | AGAAGGAGCUGGCCUAGUG | 1598 |
| | CGGAAACUCUUCACAUUUG | 1599 |
| | CAACAAAUUUGACAACAAC | 1600 |
| SLC21A2 | GUACAUCUCCAUCUUAUUU | 1601 |
| | GGAAGUGGCUGAGUUAUUA | 1602 |
| | GAAGGGAGGCUCAAUGUAA | 1603 |
| | GAAGGAAGUGGCUGAGUUA | 1604 |
| SLC21A3 | GUAGAAACAGGAGCUAUUA | 1605 |
| | CAAGAUUACUGUCAAACAA | 1606 |
| | GCACAAGAGUAUUUGGUAA | 1607 |
| | GCAAAUGUCCCUUCUGUAU | 1608 |
| | GCAUGACUCCUAUAUAAUA | 1609 |
| | AAACAGCAAUUUCCCUUAA | 1610 |
| | GAAAAUGCCUCUUCAGGAA | 1611 |
| SLC28A1 | GUUCAUCGCUCUCCUCUUU | 1612 |
| | GGAUCAAGCUGUUUCUGAA | 1613 |
| | GGACUGCAGUUUGUACUUG | 1614 |
| | GAGUGAAACUGACCUAUGG | 1615 |
| SLC29A1 | GAACGCUGCUCCCGUGGAA | 1616 |
| | GAAAGCCACUCUAUCAAAG | 1617 |
| | GAAACCAGGUGCCUUCAGA | 1618 |
| | CCUCACAGCUGUAUUCAUG | 1619 |
| SLC26A1 | CCACGGAGCUGCUGGUCAU | 1620 |
| | GGGUUGACAUCUUAUUUGA | 1621 |
| | GCACGAGGGUCUCUGUGUU | 1622 |
| | GGCCAUCGCCUACUCAUUG | 1623 |
| | CAACACCCAUGGCAAUUAA | 1624 |
| | GAGGAAAGAUCUUGCUGAU | 1625 |
| | GAGCAAGCGUCCUCCAAAU | 1626 |
| | GCAACACCCAUGGCAAUUA | 1627 |
| SLC26A2 | CCAAAGAACUCAAUGAACA | 1628 |
| | ACAAGAACCUUCAGACUAA | 1629 |
| | GAAGGUAGAUAGAAGAAUG | 1630 |
| | GUAUUGAACUGUACUGUAA | 1631 |
| SLC4A4 | GCAAUUCUCUUCAUUUAUC | 1632 |
| | GGAAAGAUGUCCACUGAAA | 1633 |
| | GGACAAAGCCUUCUUCAAU | 1634 |
| | GGAAUGGGAUCCAGCAAUU | 1635 |
| GLRA1 | UGAAAGCCAUUGACAUUUG | 1636 |
| | CAGACACGCUGGAGUUUAA | 1637 |
| | CAAUAGCGCUUUCUGGUUU | 1638 |
| | GCAGGUAGCAGAUGGACUA | 1639 |
| KLK1 | UCAGAGUGCUGUCUUAUGU | 1640 |
| | CAACUUGUUUGACGACGAA | 1641 |
| | UGACAGAGCCUGCUGAUAC | 1642 |
| | AGGCGGCUCUGUACCAUUU | 1643 |
| ADAM2 | GAAACAUGCUGUGAUAUUG | 1644 |
| | GCAGAUGUUUCCUUAUAUA | 1645 |
| | CAACAGAGAUGCCAUGAUA | 1646 |
| | GAAAGGCGCUACAUUGAGA | 1647 |
| XPNPEP1 | GACCUGAGCUUCCCAACAA | 1648 |
| | GCGACUGGCUCAACAAUUA | 1649 |
| | GAGAUUGCGUGGCUAUUUA | 1650 |
| | GACAGCAACUGGACACUUA | 1651 |
| GZMA | GGAAGAGACUCGUGCAAUG | 1652 |
| | GGAACCAUGUGCCAAGUUG | 1653 |
| | GAAGUAACUCCUCAUUCAA | 1654 |
| | GAACUCCUAUAGAUUUCUG | 1655 |
| CMKLR1 | CAUAGAAGCUUUACCAAGA | 1656 |
| | GAAUGGAGGAUGAAGAUUA | 1657 |
| | GGUCAAUGCUCUAAGUGAA | 1658 |
| | GAGAGGACUUCUAUGAAUG | 1659 |
| CLN3 | CAUCAUGCCUUCUGAAUAA | 1660 |
| | CAACAGCUCAUCACGAUUU | 1661 |
| | GCAACAACUUCUCUUAUGU | 1662 |
| | GGUCUUCGCUAGCAUCUCA | 1663 |
| CALCR | GGACCUAGCUGUUGUAAAG | 1664 |
| | GAAAGACCAUGCAUUUAAA | 1665 |
| | GCAGGAAGAUGUAUGCUUU | 1666 |
| | GAAUAAACCAGUAUCGUUA | 1667 |
| OXTR | GGACCCAGAUAUCCAAAUA | 1668 |
| | GCAAUACUAUCCUAACUGA | 1669 |
| | GAAUAUAGAUUAGCGUUUG | 1670 |
| | GAUGAGGCAUGACUACUAA | 1671 |
| EDG4 | GCGAGUCUGUCCACUAUAC | 1672 |
| | GAGAACGGCCACCCACUGA | 1673 |
| | GAACGGCCACCCACUGAUG | 1674 |
| | GGUCAAUGCUGCUGUGUAC | 1675 |
| EDG5 | UCCAGGAACACUAUAAUUA | 1676 |
| | GUGACCAUCUUCUCCAUCA | 1677 |
| | CAUCCUCUGUUGCGCCAUU | 1678 |
| | CCAACAAGGUCCAGGAACA | 1679 |
| EDG7 | ACACUGAUACUGUCGAUGA | 1680 |
| | AAUAGGAGCAACACUGAUA | 1681 |
| | CAGCAGGAGUUACCUUGUU | 1682 |
| | GGACACCCAUGAAGCUAAU | 1683 |
| PTCH | GCACAGAACUCCACUCAAA | 1684 |
| | GGACAGCAGUUCAUUGUUA | 1685 |
| | GAGAAGAGGCUAUGUUUAA | 1686 |
| | GGACAAACUUCGACCCUUU | 1687 |
| SMO | UCGCUACCCUGCUGUUAUU | 1688 |
| | GCUACAAGAACUACCGAUA | 1689 |
| | CAAGAAAGCUUCCUUCAAC | 1690 |
| | GAGAAGAAAUACAGUCAAU | 1691 |
| CASP3 | CAAUAUAUCUGAAGAGCUA | 1692 |
| | GAACUGGACUGUGGCAUUG | 1693 |
| | GUGAGAAGAUGGUAUAUUU | 1694 |
| | GAGGGUACUUUAAGACAUA | 1695 |
| CASP6 | CAUGAGGUGUCAACUGUUA | 1696 |
| | GAAGUGAAAUGCUUUAAUG | 1697 |
| | AAAUAUGGCUCCUCCUUAG | 1698 |
| | GCAAUCACAUUUAUGCAUA | 1699 |
| | CAACAUAACUGAGGUGGAU | 1700 |
| | CAUGGUACAUUCAAGAUUU | 1701 |
| CASP7 | GAACUCUACUUCAGUCAAU | 1704 |
| | GGGCAAAUGCAUCAUAAUA | 1703 |
| | CAACAGAGGGAGUUUAAUA | 1704 |
| | GAACAAAGCCACUGACUGA | 1705 |
| CASP8 | GAAGUGAACUAUGAAGUAA | 1706 |
| | CAACAAGGAUGACAAGAAA | 1707 |
| | GGACAAAGUUUACCAAAUG | 1708 |
| | GAGGGUCGAUCAUCUAUUA | 1709 |
| | GAAUAUAGAGGGCUUAUGA | 1710 |
| | CAACGACUAUGAAGAAUUC | 1711 |
| | GAAGUGAGCAGAUCAGAAU | 1712 |
| | GAGGAAAUCUCCAAAUGCA | 1713 |
| CASP9 | CCAGGCAGCUGAUCAUAGA | 1714 |
| | UCUCAGGUGUUGCCAAAUA | 1715 |
| | GAACAGCUGUAAUCUAUGA | 1716 |
| | CCACUGGUCUGUAGGGAUU | 1717 |
| DVL1 | UCGUAAAGCUGUUGAUAUC | 1718 |
| | GAGGAGAUCUUUGAUGACA | 1719 |
| | GUAAAGCUGUUGAUAUCGA | 1720 |
| | GAUCGUAAAGCUGUUGAUA | 1721 |
| DVL2 | AGACGAAGGUGAUUUACCA | 1722 |
| | UGUGAGAGGUACCUAGUCA | 1723 |
| | GAAGAAAUUUCAGAUGACA | 1724 |
| | UAAUAGGCAUUUCCUCUUU | 1725 |
| PTEN | GUGAAGAUCUUGACCAAUG | 1726 |
| | GAUCAGCAUACACAAAUUA | 1727 |
| | GAAUGAACCUUCUGCAACA | 1728 |
| | GGCGCUAUGUGUAUUAUUA | 1729 |
| PDK1 | GUACAAAGCUGGUAUAUCC | 1730 |
| | GAAAGACUCCCAGUGUAUA | 1731 |
| | GGAAGUCCAUCUCAUCGAA | 1732 |
| | CCAAAGACAUGACGACGUU | 1733 |
| PDK2 | GUAAAGAGGAGACUGAAUG | 1734 |
| | GGUCUGUGAUGGUCCCUAA | 1735 |
| | CAAAGAUGCCUACGACAUG | 1736 |
| | GGGCGAUGCCUGAGGGUUA | 1737 |
| PPP2CA | UCACACAAGUUUAUGGUUU | 1738 |
| | CAACAGCCGUGACCACUUU | 1739 |
| | UAACCAAGCUGCAAUCAUG | 1740 |
| | GAACUUGACGAUACUCUAA | 1741 |
| CTNNA1 | GAAGAGAGGUCGUUCUAAG | 1742 |
| | AAGCAGAUGUGCAUGAUUA | 1743 |
| | UCUAAUAACUGCAGUGUUU | 1744 |
| | GUAAAGGGCCCUCUAAUAA | 1745 |
| CTNNA2 | GAAAGAAUAUGCCCAAGUU | 1746 |
| | GAAGAAGAAUGCCACAAUG | 1747 |
| | GCAGGAAGAUUAUGAUGUG | 1748 |
| | AAAGAAAGCCCAUGUACUA | 1749 |
| HSPCA | GGGAAAGAGCUGCAUAUUA | 1750 |
| | GCUUAGAACUCUUUACUGA | 1751 |
| | UAUAAGAGCUUGACCAAUG | 1752 |
| | GCAGAUAUCUCUAUGAUUG | 1753 |
| DCTN2 | CAACUCAUGUCCAAUACUG | 1754 |
| | GGAAUGAGCCAGAUGUUUA | 1755 |
| | GGAGACAGCUGUACGUUGU | 1756 |
| | UCCAAGAGCUGACAACUGA | 1757 |
| CD2 | GUAAGGAGAAGCAAUAUAA | 1758 |
| | AAGAUGAGCUUUCCAUGUA | 1759 |
| | GGACAUCUAUCUCAUCAUU | 1760 |
| | GACAAGAGCCCACAGAGUA | 1761 |
| BAD | GUACUUCCCUCAGGCCUAU | 1762 |
| | GCUGUGCCUUGACUACGUA | 1763 |
| | GUACUUCCCUCAGGCCUAU | 1764 |
| | GGUCAGGUGCCUCGAGAUC | 1765 |
| SMAC | CAGCGUAACUUCAUUCUUC | 1766 |
| | UAACUUCAUUCUUCAGGUA | 1767 |
| | CAGCUGCUCUUACCCAUUU | 1768 |
| | GAUUGAAGCUAUUACUGAA | 1769 |
| | UAGAAGAGCUCCGUCAGAA | 1770 |
| | CCACAUAUGCGUUGAUUGA | 1771 |
| | GCGCAGGGCUCUCUACCUA | 1772 |
| MAP3K5 | GAACAGCCUUCAAAUCAAA | 1773 |
| | GAUGUUCUCUACUAUGUUA | 1774 |
| | GCAAAUACUGGAAGGAUUA | 1775 |
| | CAGGAAAGCUCGUAAUUUA | 1776 |
| PVR | CCACACGGCUGACCUCAUA | 1777 |
| | CAGCAGAAUUCCUCUUAUA | 1778 |
| | GCAGAAUUCCUCUUAUAAA | 1779 |
| | GAUCGGGAUUUAUUUCUAU | 1780 |
| ERBB2 | UGUGGGAGCUGAUGACUUU | 1781 |
| | UCACAGAGAUCUUGAAAGG | 1782 |
| | UGGAAGAGAUCACAGGUUA | 1783 |
| | GCUCAUCGCUCACAACCAA | 1784 |
| SOS1 | GAGCACCACUUCUAUGAUU | 1785 |
| | CAAAGAAGCUGUUCAAUAU | 1786 |
| | UGAAAGCCCUCCCUUAUUA | 1787 |
| | GAAAUAGCAUGGAGAAGGA | 1788 |
| BRCA1 | CCAUACAGCUUCAUAAAUA | 1789 |
| | GAAGAGAACUUAUCUAGUG | 1790 |
| | GAAGUGGGCUCCAGUAUUA | 1791 |
| | GCAAGAUGCUGAUUCAUUA | 1792 |
| | GAAGUGGGCUCCAGUAUUA | 1793 |
| | GAACGGACACUGAAAUAUU | 1794 |
| | GCAGAUAGUUCUACCAGUA | 1795 |
| CDKN1A | GAACAAGGAGUCAGACAUU | 1796 |
| | AAACUAGGCGGUUGAAUGA | 1797 |
| | GAUGGAACUUCGACUUUGU | 1798 |
| | GUAAACAGAUGGCACUUUG | 1799 |
| CDKN1B | GGAAUGGACAUCCUGUAUA | 1800 |
| | GGAGAAAGAUGUCAAACGU | 1801 |
| | GAAUGGACAUCCUGUAUAA | 1802 |
| | GUAAACAGCUCGAAUUAAG | 1803 |
| SLC2A4 | CAGAUAGGCUCCGAAGAUG | 1804 |
| | AGACUCAGCUCCAGAAUAC | 1805 |
| | GAUCGGUUCUUUCAUCUUC | 1806 |
| | CAGGAUCGGUUCUUUCAUC | 1807 |
| NOS2A | CCAGAUAAGUGACAUAAGU | 1808 |
| | UAAGUGACCUGCUUUGUAA | 1809 |
| | GAAGAGAGAUUCCAUUGAA | 1810 |
| | UGAAAGAGCUCAACAACAA | 1811 |
| FRAP1 | GAGCAUGCCGUCAAUAAUA | 1812 |
| | CAAGAGAACUCAUCAUAAG | 1813 |
| | CCAAAGUGCUGCAGUACUA | 1814 |
| | UAAGAAAGCUAUCCAGAUU | 1815 |
| FKBP1A | GAAACAAGCCCUUUAAGUU | 1816 |
| | GAAUUACUCUCCAAGUUGA | 1817 |
| | CAGCACAAGUGGUAGGUUA | 1818 |
| | GUUGAGGACUGAAUUACUC | 1819 |
| | GAUGGCAGCUGUUUAAAUG | 1820 |
| | GAGUAUCCUUUCAGUGUUA | 1821 |
| TNFRSF1A | CAAAGGAACCUACUUGUAC | 1822 |
| | GGAACCUACUUGUACAAUG | 1823 |
| | GAACCUACUUGUACAAUGA | 1824 |
| | GAGUGUGUCUCCUGUAGUA | 1825 |
| IL1R1 | GGACAAGAAUCAAUGGAUA | 1826 |
| | GAACAAGCCUCCAGGAUUC | 1827 |
| | GGACUUGUGUGCCCUUAUA | 1828 |
| | GAACACAAAGGCACUAUAA | 1829 |
| IRAK1 | CGAAGAAAGUGAUGAAUUU | 1830 |
| | GCUCUUUGCCCAUCUCUUU | 1831 |
| | UGAAAGACCUGGUGGAAGA | 1832 |
| | GCAAUUCAGUUUCUACAUC | 1833 |
| TRAF2 | GAAGACAGAGUUAUUAAAC | 1834 |
| | UCACGAAGACAGAGUUAUU | 1835 |
| | AGACAGAGUUAUUAAACCA | 1836 |
| | CACGAAGACAGAGUUAUUA | 1837 |
| | GCUGAAGCCUGUCUGAUGU | 1838 |
| TRAF6 | CAAAUGAUCUGAGGCAGUU | 1839 |
| | GUUCAUAGUUUGAGCGUUA | 1840 |
| | GGAGAAACCUGUUGUGAUU | 1841 |
| | GGACAAAGUUGCUGAAAUC | 1842 |
| | CAAAUGAUCUGAGGCAGUU | 1843 |
| | GGAGAAACCUGUUGUGAUU | 1844 |
| | GGACAAAGUUGCUGAAAUC | 1845 |
| | GUUCAUAGUUUGAGCGUUA | 1846 |
| TRADD | UGAAGCACCUUGAUCUUUG | 1847 |
| | GGGCAGCGCAUACCUGUUU | 1848 |
| | GAGGAGCGCUGUUUGAGUU | 1849 |
| | GGACGAGGAGCGCUGUUUG | 1850 |
| | GAGGAGCGCUGUUUGAGUU | 1851 |
| | GGAUGUCUCUCUCCUCUUU | 1852 |
| | GCUCACUCCUUUCUACUAA | 1853 |
| | UGAAGCACCUUGAUCUUUG | 1854 |
| FADD | GCACAGAUAUUUCCAUUUC | 1855 |
| | GCAGUCCUCUUAUUCCUAA | 1856 |
| | GAACUCAAGCUGCGUUUAU | 1857 |
| | GGACGAAUUGAGAUAAUAU | 1858 |
| IKBKE | UAAGAACACUGCUCAUGAA | 1859 |
| | GAGGCAUCCUGAAGCAUUA | 1860 |
| | GAAGGCGGCUGCAGAACUG | 1861 |
| | GGAACAAGGAGAUCAUGUA | 1862 |
| IKBKG | CUAUCGAGGUCGUUAAAUU | 1863 |
| | GAAUGCAGCUGGAAGAUCU | 1864 |
| | GCGGCGAGCUGGACUGUUU | 1865 |
| | CCAGACCGAUGUGUAUUUA | 1866 |
| TNFRSF5 | GGUCUCACCUCGCUAUGGU | 1867 |
| | GAAAGCGAAUUCCUAGACA | 1868 |
| | GCACAAACAAGACUGAUGU | 1869 |
| | GAAGGGCACCUCAGAAACA | 1870 |
| | UCUCCCAACUUGUAUUAAA | 1871 |
| RELA | UCAAGUGUCUUCCAUCAUG | 1872 |
| | UCAAGUGCCUUAAUAGUAG | 1873 |
| | GGAGUACCCUGAGGCUAUA | 1874 |
| | GAUGAGAUCUUCCUACUGU | 1875 |
| ARHA | GAGCUGGGCUAAGUAAAUA | 1876 |
| | GACCAAAGAUGGAGUGAGA | 1877 |
| | GGAAGAAACUGGUGAUUGU | 1878 |
| | GGCUGUAACUACUUUAUAA | 1879 |
| CDC42 | GGACAUUUGUUUGCCAUUU | 1880 |
| | GGAGAACCAUAUACUCUUG | 1881 |
| | GAACCAAUGCUUUCUCAUG | 1882 |
| | GAAGACCUGUUAUGUAGAG | 1883 |
| | GAUCAAGAAUUGCAAUAUC | 1884 |
| | GAAAAGGGGUGACCUAGUA | 1885 |
| | UGACAAACCUUAUGGAAAA | 1886 |
| ROCK1 | GGAAUGAGCUUCAGAUGCA | 1887 |
| | GGACACAGCUGUAAGAUUG | 1888 |
| | GACAAGAGAUUACAGAUAA | 1889 |
| | GAAGAAACAUUCCCUAUUC | 1890 |
| PAK1 | GAGGGUGGUUUAUGAUUAA | 1891 |
| | CAACAAAGAACAAUCACUA | 1892 |
| | GAAGAAAUAUACACGGUUU | 1893 |
| | UACAUGAGCUUUACAGAUA | 1894 |
| PAK2 | GGUAGGAGAUGAAUUGUUU | 1895 |
| | AGAAGGAACUGAUCAUUAA | 1896 |
| | CUACAGACCUCCAAUAUCA | 1897 |
| | GAAACUGGCCAAACCGUUA | 1898 |
| PAK3 | GAUUAUCGCUGCAAAGGAA | 1899 |
| | GAGAGUGCCUGCAAGCUUU | 1900 |
| | GACAAGAGGUGGCCAUAAA | 1901 |
| | UUAAAUCGCUGUCUUGAGA | 1902 |
| PAK4 | ACUAAGAGGUGAACAUGUA | 1903 |
| | GAUCAUGAAUGUCCGAAGA | 1904 |
| | GAUGAGACCCUACUACUGA | 1905 |
| | CAGCAAAGGUGCCAAAGAU | 1906 |
| PAK6 | UAAAGGCAGUUGUCCACUA | 1907 |
| | GAAGGGACCUGCUUUCUUG | 1908 |
| | GCAAAGACGUCCCUAAGAG | 1909 |
| | CCAAUGGGCUGGCUGCAAA | 1910 |
| PAK7 | GAGCACGGCUUUAAUAAGU | 1911 |
| | CAAACUCCGUUAUGAUAUA | 1912 |
| | GGAUAAAGUUGUCUGAUUU | 1913 |
| | GGAAAUGCCUCCAUAAAUA | 1914 |
| HDAC1 | GGACAUCGCUGUGAAUUGG | 1915 |
| | AGAAAGAAGUCACCGAAGA | 1916 |
| | GGACAAGGCCACCCAAUGA | 1917 |
| | CCACAGCGAUGACUACAUU | 1918 |
| HDAC2 | GCUGUUAAAUUAUGGCUUA | 1919 |
| | GCAAAGAAAGCUAGAAUUG | 1920 |
| | CAUCAGAGAGUCUUAUAUA | 1921 |
| | CCAAUGAGUUGCCAUAUAA | 1922 |
| CREBBP | GGCCAUAGCUUAAUUAAUC | 1923 |
| | GCACAGCCGUUUACCAUGA | 1924 |
| | GGACAGCCCUUUAGUCAAG | 1925 |
| | GAACUGAUUCCUGAAAUAA | 1926 |
| BTRC | CACAUAAACUCGUAUCUUA | 1927 |
| | GAGAAGGCACUCAAGUUUA | 1928 |
| | AGACAUAGUUUACAGAGAA | 1929 |
| | GCAGAGAGAUUUCAUAACU | 1930 |
| RIPK2 | GAACAUACCUGUAAAUCAU | 1931 |
| | GGACAUCGACCUGUUAUUA | 1932 |
| | UAAAUGAACUCCUACAUAG | 1933 |
| | GGAAUUAUCUCUGAACAUA | 1934 |
| VAV1 | GCAGAAAUACAUCUACUAA | 1935 |
| | GCUAUGAGCUGUUCUUCAA | 1936 |
| | CGACAAAGCUCUACUCAUC | 1937 |
| | GCUCAACCCUGGAGACAUU | 1938 |
| VAV2 | GGACAAGACUCGCAGAUUU | 1939 |
| | GCUGAGCGCUUUGCAAUAA | 1940 |
| | CAAGAAGUCUCACGGGAAA | 1941 |
| | UCACAGAGGCCAAGAAAUU | 1942 |
| GRB2 | UGGAAGCCAUCGCCAAAUA | 432 |
| | CAUCAGUGCAUGACGUUUA | 1943 |
| | UGAAUGAGCUGGUGGAUUA | 1944 |
| | UGCCAAAACUUACCUAUAA | 1945 |
| PLCG1 | GAGCUGCACUCCMUGAGA | 1946 |
| | GAAACCAAGCCAUUAAUGA | 1947 |
| | CCAAGGAGCUACUGACAUU | 1948 |
| | AGAGAAACAUGGCCCAAUA | 1949 |
| ITGB1 | CCACAGACAUUUACAUUAA | 1950 |
| | GAAGGGAGUUUGCUAAAUU | 1951 |
| | GAACAGAUCUGAUGAAUGA | 1952 |
| | CAAGAGAGCUGAAGACUAU | 1953 |
| ITGA4 | GCAUAUAUAUUCAGCAUUG | 1954 |
| | CAACUUGACUGCAGUAUUG | 1955 |
| | GAACUUAACUUUCCAUGUU | 1956 |
| | GACAAGACCUGUAGUAAUU | 1957 |
| STAT1 | AGAAAGAGCUUGACAGUAA | 1958 |
| | GGAAGUAGUUCACAAAAUA | 1959 |
| | UGAAGUAUCUGUAUCCAAA | 1960 |
| | GAGCUUCACUCCCUUAGUU | 1961 |
| KRAS2 | UAAGGACUCUGAAGAUGUA | 1962 |
| | GACAAAGUGUGUAAUUAUG | 1963 |
| | GCUCAGGACUUAGCAAGAA | 1964 |
| | GAAACUGAAUACCUAAGAU | 1965 |
| | GAAACUGAAUACCUAAGAU | 1966 |
| | UAAGGACUCUGAAGAUGUA | 1967 |
| | GACAAAGUGUGUAAUUAUG | 1968 |
| | GCUCAGGACUUAGCAAGAA | 1969 |
| HRAS | CCAUCCAGCUGAUCCAGAA | 1970 |
| | GAACCCUCCUGAUGAGAGU | 1971 |
| | GAGGACAUCCACCAGUACA | 1972 |
| BRAF | GAUUAGAGACCAAGGAUUU | 2410 |
| | CCACUGAUGUGUGUUAAUU | 1973 |
| | CAAUAGAACCUGUCAAUAU | 1974 |
| | GAAGACAGGAAUCGAAUGA | 1975 |
| ELK1 | GAUGUGAGUAGAAGAGUUA | 2411 |
| | GGAAGAAUUUGUACCAUUU | 1976 |
| | GAACGACCUUUCUUUCUUU | 1977 |
| | GGAGUCAUCUCUUCCUAUA | 1978 |
| RALGDS | GGAGAAGCCUCACCUCUUG | 1979 |
| | GCAGAAAGGACUCAAGAUU | 1980 |
| | GAGAACAACUACUCAUUGA | 1981 |
| | GAACUUCUCGUCACUGUAU | 1982 |
| PRKCA | GGAUUGUUCUUUCUUCAUA | 1983 |
| | GAAGGGUUCUCGUAUGUCA | 1984 |
| | GAAGAAGGAUGUGGUGAUU | 1985 |
| | GGACUGGGAUCGAACAACA | 1986 |
| MAP2K4 | GGACAGAAGUGGAAAUAUU | 1987 |
| | UCAAAGAGGUGAACAUUAA | 1988 |
| | GACCAAAUCUCAGUUGUUU | 1989 |
| | GGAGAAUGGUGCUGUUUAA | 1990 |
| MAP2K7 | GAAGAGACCAAAGUAUAAU | 1991 |
| | GAAGACCGGCCACGUCAUU | 1992 |
| | GGAAGAGACCAAAGUAUAA | 1993 |
| | GCAUUGAGAUUGACCAGAA | 1994 |
| | UGAGAGAACGAGAAAGUUG | 1995 |
| | GUGAAACCCUGUCUGCAUU | 1996 |
| | GGAUCUCUCUCAACAACUA | 1997 |
| | ACAACUAGGUGAACACAUA | 1998 |
| MAPK8 | UCACAGUCCUGAAACGAUA | 1999 |
| | GAUUGGAGAUUCUACAUUC | 2000 |
| | GCUCAUGGAUGCAAAUCUU | 2001 |
| | GAAGCUAAGCCGACCAUUU | 2002 |
| MAPK9 | AAAGAGAGCUUAUCGUGAA | 2003 |
| | GAUGAUAGGUUAGAAAUAG | 2004 |
| | ACAAAGAAGUCAUGGAUUG | 2005 |
| | GGAGCUGGAUCAUGAAAGA | 2006 |
| AIF1 | GAAAAGGGAUGAUGGGAUU | 2007 |
| | CCUAGACGAUCCCAAAUAU | 2008 |
| | GAGCCAAACCAGGGAUUUA | 2009 |
| | UGAAACGAAUGCUGGAGAA | 2010 |
| | UCACUCACCCAGAGAAAUA | 2011 |
| | CCAAGAAAGCUAUCUCUGA | 2012 |
| | AGACUCACCUAGAGCUAAA | 2013 |
| BBC3 | CCUGGAGGGUCCUGUACAA | 2014 |
| | GAGCAAAUGAGCCAAACGU | 2015 |
| | GGAGGGUCCUGUACAAUCU | 2016 |
| | GACUUUCUCUGCACCAUGU | 2017 |
| BCL2L1 | CCAGGGAGCUUGAAAGUUU | 2018 |
| | AAAGUGCAGUUCAGUAAUA | 2019 |
| | GAGAAUCACUAACCAGAGA | 2020 |
| | GAGCCCAUCCCUAUUAUAA | 2021 |
| BCL2L11 | GAGACGAGUUUAACGCUUA | 2022 |
| | AAAGCAACCUUCUGAUGUA | 2023 |
| | CCGAGAAGGUAGACAAUUG | 2024 |
| | GCAAAGCAACCUUCUGAUG | 2025 |
| | AGACAGAGCCACAAGGUAA | 2026 |
| | GCAAGGAGGUUAGAGAAAU | 2027 |
| | CAAGGAGGUUAGAGAAAUA | 2028 |
| | UCUUACGACUGUUACGUUA | 2029 |
| BID | GAAGACAUCAUCCGGAAUA | 2030 |
| | CAACAGCGUUCCUAGAGAA | 2031 |
| | GAAAUGGGAUGGACUGAAC | 2032 |
| | ACGAUGAGCUGCAGACUGA | 2033 |
| BIRC2 | GAAAGAAGCCUGCAUAUAA | 2034 |
| | GAAAUUGACUCUACAUUGU | 2035 |
| | ACAAAUAGCACUUAGGUUA | 2036 |
| | GAAUACACCUGUGGUUAAA | 2037 |
| BIRC3 | GGAGAUGCCUGCCAUUAAA | 2038 |
| | UCAAUGAUCUUGUGUUAGA | 2039 |
| | GAAAGAACAUGUAAAGUGU | 2040 |
| | GAAGAAAGAACAUGUAAAG | 2041 |
| BIRC4 | GUAGAUAGAUGGCAAUAUG | 2042 |
| | GAGGAGGGCUAACUGAUUG | 2043 |
| | GAGGAACCCUGCCAUGUAU | 2044 |
| | GCACGGAUCUUUACUUUUG | 2045 |
| BIRC5 | GGCGUAAGAUGAUGGAUUU | 2046 |
| | GCAAAGGAAACCAACAAUA | 2047 |
| | GCACAAAGCCAUUCUAAGU | 2048 |
| | CAAAGGAAACCAACAAUAA | 2049 |
| BRCA1 | CCAUACAGCUUCAUAAAUA | 2050 |
| | GAAGAGAACUUAUCUAGUG | 2051 |
| | GAAGUGGGCUCCAGUAUUA | 2052 |
| | GCAAGAUGCUGAUUCAUUA | 2053 |
| | CCAUACAGCUUCAUAAAUA | 2054 |
| CARD4 | GAAAGUUAAUGUCAAGGAA | 2055 |
| | GAGCAACACUGGCAUAACA | 2056 |
| | UAACAGAGAUUUGCCUAAA | 2057 |
| | GCGAAGAGCUGACCAAAUA | 2058 |
| CASP10 | CAAAGGGUUUCUCUGUUUA | 2059 |
| | GAAAUGACCUCCCUAAGUU | 2060 |
| | GAAGGCAGCUGGUAUAUUC | 2061 |
| | GACAUGAUCUUCCUUCUGA | 2062 |
| | GCACUCUUCUGUUCCCUUA | 2063 |
| CASP2 | GUAUUAAACUCUCCUUUGA | 2064 |
| | GCAAGGAGAUGUCUGAAUA | 2065 |
| | CAACUUCCCUGAUCUUUAA | 2066 |
| | GCUCAAAGAUGUAAUGUAG | 2067 |
| CDKN1A | GAACAAGGAGUCAGACAUU | 2068 |
| | AAACUAGGCGGUUGAAUGA | 2069 |
| | GAUGGAACUUCGACUUUGU | 2070 |
| | GUAAACAGAUGGCACUUUG | 2071 |
| CFLAR | GAUGUGUCCUCAUUAAUUU | 2072 |
| | GAAGAGAGAUACAAGAUGA | 2073 |
| | GAGCAUACCUGAAGAGAGA | 2074 |
| | GCUAUGAAGUCCAGAAAUU | 2075 |
| CLK2 | GUGAAUAUGUGAAAUAGUG | 2076 |
| | AAAGCAUGCUAGAGUAUGA | 2077 |
| | UUAAGAAUGUGGAGAAGUA | 2078 |
| | GAUAACAAGCUGACACAUA | 2079 |
| CLSPN | GGACGUAAUUGAUGAAGUA | 2080 |
| | GCAGAUGGGUUCUUAAAUG | 2081 |
| | CAAAUGAGGUUGAGGAAAU | 2082 |
| | GGAAAUACCUGGAGGAUGA | 2083 |
| CSNK2A1 | GAUCCACGUUUCAAUGAUA | 2084 |
| | GCAUUUAGGUGGAGACUUC | 2085 |
| | GAUGUACGAUUAUAGUUUG | 2086 |
| | UGAAUUAGAUCCACGUUUC | 2087 |
| CTNNB1 | GCACAAGAAUGGAUCACAA | 2088 |
| | GCUGAAACAUGCAGUUGUA | 2089 |
| | GUACGUACCAUGCAGAAUA | 2090 |
| | GAACUUGCAUUGUGAUUGG | 2091 |
| CXCR4 | GAAGCAUGACGGACAAGUA | 2092 |
| | GAACAUUCCAGAGCGUGUA | 2093 |
| | GUUCUUAGUUGCUGUAUGU | 2094 |
| | CAUCAUGGUUGGCCUUAUC | 2095 |
| CXCR6 | GGAACAAACUGGCAAAGCA | 2096 |
| | GAUCAGAGCAGCAGUGAAA | 2097 |
| | GGGCAAAACUGAAUUAUAA | 2098 |
| | GAUCUCAGGUUCUCCUUGA | 2099 |
| DAXX | CUACAGAUCUCCAAUGAAA | 2100 |
| | GCUACAAGCUGGAGAAUGA | 2101 |
| | GGAAACAGCUAUGUGGAAA | 2102 |
| | GGAGUUGGAUCUCUCAGAA | 2103 |
| GAS41 | GUAGUAAGCUAAACUGAAA | 2104 |
| | GACAAUAUGUUCAAGAGAA | 2105 |
| | GACAACAUCUCGUCAGCUA | 2106 |
| | UAUAUGAUGUGUCCAGUAA | 2107 |
| GTSE1 | CAAAGAAGCUCACUUACUG | 2108 |
| | GAACAGCCCUAAAGUGGUU | 2109 |
| | GAACAUGGAUGACCCUAAG | 2110 |
| | GGGCAAAGCUAAAUCAAGU | 2111 |
| HDAC3 | GGAAAGCGAUGUGGAGAUU | 2112 |
| | CCAAGACCGUGGCCUAUUU | 2113 |
| | AAAGCGAUGUGGAGAUUUA | 2114 |
| | GUGAGGAGCUUCCCUAUAG | 2115 |
| HDAC5 | GAAUUCCUCUUGUCGAAGU | 2116 |
| | GUUAUUAGCACCUUUAAGA | 2117 |
| | GGAGGGAGGCCAUGACUUG | 2118 |
| | CAGGAGAGCUCAAGAAUGG | 2119 |
| | GGAUAUGGAUUUCAGUUAA | 2120 |
| | GGAAGUCGGUGCCUUGGUU | 2121 |
| | GGAAGGAGAGGACUGGUUU | 2122 |
| HEC | GCAGAUACUUGCACGGUUU | 2123 |
| | GAGUAGAACUAGAAUGUGA | 2124 |
| | GCGAAUAAAUCAUGAAAGA | 2125 |
| | GAAGAUGGAAUUAUGCAUA | 2126 |
| HIST1H2 | GGCAAUGCGUCUCGCGAUA | 2127 |
| AA | GAUCCGCAAUGAUGAGGAA | 2128 |
| | GCAAUGCGUCUCGCGAUAA | 2129 |
| | GAGGAACUCAAUAAGCUUU | 2130 |
| LMNB1 | AAUAGAAGCUGUGCAAUUA | 2131 |
| | CAACUGACCUCAUCUGGAA | 2132 |
| | GAAGGAAUCUGAUCUUAAU | 2133 |
| | GGGAAGGGUUUCUCUAUUA | 2134 |
| LMNB2 | GGAGGUUCAUUGAGAAUUG | 2134 |
| | GGCAAUAGCUCACCGUUUA | 2135 |
| | CAAAUACGCUUAGCUGUGU | 2136 |
| | GGAGAUCGCCUACAAGUUC | 2137 |
| MYB | GCAGAAACACUCCAAUUUA | 2138 |
| | GUAAAUACGUGAAUGCAUU | 2139 |
| | GCACUGAACUUUUGAGAUA | 2140 |
| | GAAGAACAGUCAUUUGAUG | 2141 |
| MYT1 | GAGGUGAGCUGUUAAAUCA | 2142 |
| | GCAGGGUGAUUUCCUAAUA | 2143 |
| | GGGAGAAGAUAUUUAAUUG | 2144 |
| | CAACUUCUCUCCUGAACUU | 2145 |
| NFKBIB | GGACACGGCACUGCACUUG | 2146 |
| | GCACUUGGCUGUGAUUCAU | 2148 |
| | GAGACGAGGGCGAUGAAUA | 2149 |
| | CAUGAACCCUUCCUGGAUU | 2150 |
| NFKBIA | GAACAUGGACUUGUAUAUU | 2151 |
| | GAUGUGGGGUGAAAAGUUA | 2152 |
| | GGACGAGAAAGAUCAUUGA | 2153 |
| | AGGACGAGCUGCCCUAUGA | 2154 |
| NFKBIE | GAAGGGAAGUUUCAGUAAC | 2155 |
| | GGAAGGGAAGUUUCAGUAA | 2156 |
| | GAAACUGCUGCUGUGUAC | 2157 |
| | GAACCAACCACUCAUGGAA | 2158 |
| NUMA1 | GGGAACAGUUUGAAUAUAA | 2159 |
| | GCAGUAGCCUGAAGCAGAA | 2160 |
| | CGAGAAGGAUGCACAGAUA | 2161 |
| | GCAAGAGGCUGAGAGGAAA | 2162 |
| NUP153 | GAAGACAAAUGAAAGCUAA | 2163 |
| | GAUAAAGACUGCUGUUAGA | 2164 |
| | GAGGAGAGCUCUAAUAUUA | 2165 |
| | GAGGAAGCCUGAUUAAAGA | 2166 |
| OPA1 | GAAAGAGCAUGAUGACAUA | 2167 |
| | GAGGAGAGCUCUAUUAUGU | 2168 |
| | GAAACUGAAUGGAAGAAUA | 2169 |
| | AAAGAAGGCUGUACCGUUA | 2170 |
| PARVA | CUACAUGUCUUUGCUCUUA | 2171 |
| | GCUAAGUCCUGUAAGAAUA | 2172 |
| | CAAAGGCAAUGUACUGUUU | 2173 |
| | GAACAAUGGUGGAUCCAAA | 2174 |
| PIK3CG | AAGUUCAGCUUCUCUAUUA | 2175 |
| | GAAGAAAUCUCUGAUGGAU | 2176 |
| | GAACACCUUUACUCUAUAA | 2177 |
| | GCAUGGAGCUGGAGAACUA | 2178 |
| PRKDC | AUGAAAGCUCUAAAGAUG | 2179 |
| | AAAGGAGGUUCUAAACUA | 2180 |
| | GAAGAAGCUCAUUUGAUU | 2181 |
| | GCAAAGAGGUGGCAGUUAA | 2182 |
| RASA1 | GGAAGAAGAUCCACAUGAA | 2183 |
| | GAACAUACUUUCAGAGCUU | 2184 |
| | GAACAAUCUUUGCUGUAUA | 2185 |
| | UAACAGAACUGCUUCAACA | 2186 |
| SLC9A1 | GAAGAGAUCCACACACAGU | 2187 |
| | UCAAUGAGCUGCUGCACAU | 2188 |
| | GAAGAUAGGUUUCCAUGUG | 2189 |
| | GAAUUACCCUUCCUCAUCU | 2190 |
| TEGT | CUACAGAGCUUCAGUGUGA | 2191 |
| | GAACAUAUUUGAUCGAAAG | 2192 |
| | GAGCAAACCUAGAUAAGGA | 2193 |
| | GCAUUGAUCUCUUCUUAGA | 2194 |
| TERT | GGAAGACAGUGGUGAACUU | 2195 |
| | GCAAAGCAUUGGAAUCAGA | 2196 |
| | GAGCUGACGUGGAAGAUGA | 2197 |
| | GAACGGGCCUGGAACCAUA | 2198 |
| TNFRSF6 | GAUACUAACUGCUCUCAGA | 2199 |
| | GAAAGAAUGGUGUCAAUGA | 2200 |
| | UCAAUAAUGUCCCAUGUAA | 2201 |
| | UCAUGAAUCUCCAACCUUA | 2202 |
| | GAUGUUGACUUGAGUAAAU | 2203 |
| TOP1 | AAAGGAAAUGACUAAUGA | 2204 |
| | AAGAAGGCUGUUCAGAGA | 2205 |
| | GAAGUAGCUACGUUCUUU | 2206 |
| | GACAUAAGUGGAAAGAAG | 2207 |
| TOP2A | GAAAGAGUCCAUCAGAUUU | 2208 |
| | CAAACUACAUUGGCAUUUA | 2209 |
| | AAACAGACAUGGAUGGAUA | 2210 |
| | CGAAAGGAAUGGUUAACUA | 2211 |
| TOP3A | CCAGAAAUCUUCCACAGAA | 2212 |
| | GAAACUAUCUGGAUGUGUA | 2213 |
| | CCACAAAGAUGGUAUCGUA | 2214 |
| | GGAAAUGGCUGUGGUAACA | 2215 |
| TOP3B | GAGACAAGAUGAAGACUGU | 2216 |
| | GCACAUGGGCUGCGUCUUU | 2217 |
| | CCAGUGCGCUUCAAGAUGA | 2218 |
| | GAACAUCUGCUUUGAGGUU | 2219 |
| WEE1 | GGUAUUGCCUUGUGAAUUU | 2220 |
| | GCAGAACAAUUACGAAUAG | 2221 |
| | GUACAUAGCUGUUUGAAAU | 2222 |
| | GCUGUAAACUUGUAGCAUU | 2223 |

[0554] In addition, to identifying functional siRNA against gene families or pathways, it is possible to design duplexes against genes known to be involved in specific diseases. For example when dealing with human disorders associated with allergies, it will be beneficial to develop siRNA against a number of genes including but not limited to:

the interleukin 4 receptor gene
(SEQ. ID NO. 2224: UAGAGGUGCUCAUUCAUUU,
SEQ. ID NO. 2225: GGUAUAAGCCUUUCCAAGA,
SEQ. ID NO. 2412: ACACACAGCUGGAAGAAAU,
SEQ. ID NO. 2226: UAACAGAGCUUCCUUAGGU),
the Beta-arrestin-2
(SEQ. ID NO. 2227: GGAUGAAGGAUGACGACUA,
SEQ. ID NO. 2228: ACACCAACCUCAUUGAAUU,
SEQ. ID NO. 2229: CGAACAAGAUGACCAGGUA,
SEQ. ID NO. 2230: GAUGAAGGAUGACGACUAU,),
the interferon-gamma receptor 1 gene
(SEQ. ID NO. 2231: CAGCAUGGCUCUCCUCUUU,
SEQ. ID NO. 2232: GUAAAGAACUAUGGUGUUA,
SEQ. ID NO. 2233: GAAACUACCUGUUACAUUA,
SEQ. ID NO. 2234: GAAGUGAGAUCCAGUAUAA),
the matrix metalloproteinase MMP-9
(SEQ. ID NO. 2235: GGAACCAGCUGUAUUUGUU,
SEQ. ID NO. 2236: GUUGGAGUGUUUCUAAUAA,
SEQ. ID NO. 2237: GCGCUGGGCUUAGAUCAUU,
SEQ. ID NO. 2238: GGAGCCAGUUUGCCGGAUA),
the Slclla1 (Nrampl) gene
(SEQ. ID NO. 2239: CCAAUGGCCUGCUGAACAA,
SEQ. ID NO. 2240: GGGCCUGGCUUCCUCAUGA,
SEQ. ID NO. 2241: GGGCAGAGCUCCACCAUGA,
SEQ. ID NO. 2242: GCACGGCCAUUGCAUUCAA),
SPINK5
(SEQ. ID NO. 2243: CCAACUGCCUGUUCAAUAA,
SEQ. ID NO. 2244: GGAUACAUGUGAUGAGUUU,
SEQ. ID NO. 2245: GGACGAAUGUGCUGAGUAU,
SEQ. ID NO. 2246: GAGC1JUGUCUUAUUUGCUA,),
the CYP1A2 gene
(SEQ. ID NO. 2247: GAAAUGCUGUGUCUUCGUA,
SEQ. ID NO. 2248: GGACAGCACUUCCCUGAGA,
SEQ. ID NO. 2249: GAAGACACCACCAUUCUGA,
SEQ. ID NO. 2250: GGCCAGAGCUUGACCUUCA),
thymosin-beta4Y
(SEQ. ID NO. 2251: GGACAGGCCUGCGUUGUUU,
SEQ. ID NO. 2252: GGAAAGAGGAAGCUCAUGA,
SEQ. ID NO. 2253: GCAAACACGUUGGAUGAGU,
SEQ. ID NO. 2254: GGACUAUGCUGCCCUUUUG,
activin A receptor IB
(SEQ. ID NO. 2255: ACAAGACGCUCCAGGAUCU,
SEQ. ID NO. 2413: GCAACAGGAUCGACUUGAG,
SEQ. ID NO. 2414: GAAGCUGCGUCCCAACAUC,
SEQ. ID NO. 2256: GCAUAGGCCUGUAAUCGUA,
SEQ. ID NO. 2257: UCAGAGAGUUCGAGACAAA,
SEQ. ID NO. 2258: UGCGAAAGGUUGUAUGUGA,
SEQ. ID NO. 2259: GCAACAGGAUCGACUUGAG,
SEQ. ID NO. 2260: GAAUAGCGUUGUGUGUUAU,
SEQ. ID NO. 2261: UGAAUAGCGUUGUGUGUUA,
SEQ. ID NO. 2262: GGGAUCAGUUUGUUGAAUA,
SEQ. ID NO. 2263: GAGCCUGAAUCAUCGUUUA,),
ADAM33
(SEQ. ID NO. 2264: GGAAGUACCUGGAACUGUA,
SEQ. ID NO. 2265: GGACAGAGGGAACCAUUUA,
SEQ. ID NO. 2266: GGUGAGAGGUAGCUCCUAA,
SEQ. ID NO. 2267: AAAGACAGGUGGCCACUGA),
the TAP 1 gene
(SEQ. ID NO. 2268: GAAAGAUGAUCAGCUAUUU,
SEQ. ID NO. 2269: CAACAGAACCAGACAGGUA,
SEQ. ID NO. 2270: UGAGAAAUGUUCAGAAUGU,
SEQ. ID NO. 2271: UACCUUCACUCGAAACUUA,
COX-2
(SEQ. ID NO. 2272: GAACGAAAGUAAAGAUGUU,
SEQ. ID NO. 2273: GGACUUAUGGGUAAUGUUA,
SEQ. ID NO. 2274: UGAAAGGACUUAUGGGUAA,
SEQ. ID NO. 2275: GAUCAGAGUUCACUUUCUU),
ADPRT
(SEQ. ID NO. 2276: GGAAAGAUGUUAAGCAUUU,
SEQ. ID NO. 2277: CAUGGGAGCUCUUGAAAUA,
SEQ. ID NO. 2278: GAACAAGGAUGAAGUGAAG,
SEQ. ID NO. 2279: UGAAGAAGCUCACAGUAAA,),
HDC
(SEQ. ID NO. 2280: CAGCAGACCUUCAGUGUGA,
SEQ. ID NO. 2281: GGAGAGAGAUGGUGGAUUA,
SEQ. ID NO. 2282: GUACAGAGCUGGAGAUGAA,
SEQ. ID NO. 2283: GAACGUCCCUUCAGUCUGU),
HnmT
(SEQ. ID NO. 2284: CAAAUUCUCUCCAAAGUUC,
SEQ. ID NO. 2285: GGAUAUAUCUGACUGCUUU,
SEQ. ID NO. 2286: GAGCAGAGCUUGGGAAAGA,
SEQ. ID NO. 2287: GAUAUGAGAUGUAGCAAAU),
GATA-3
(SEQ. ID NO. 2288: GAACUGCUUUCUUUCGUUU,
SEQ. ID NO. 2289: GCAGUAUCAUGAAGCCUAA,
SEQ. ID NO. 2290: GAAACUAGGUCUGAUAUUC,
SEQ. ID NO. 2291: GUACAGCUCCGGACUCUUC),
Gab2
(SEQ. ID NO. 2292: GCACAACCAUUCUGAAGUU,
SEQ. ID NO. 2293: GGACUUAGAUGCCCAGAUG,
SEQ. ID NO. 2294: GAAGGUGGAUUCUAGGAAA,
SEQ. ID NO. 2295: GGACUAGCCCUGCUGUUUA),
and
STAT6
(SEQ. ID NO. 2296: GAUAGAAACUCCUGCUAAU,
SEQ. ID NO. 2297: GGACAUUUAUUCCCAGCUA,
SEQ. ID NO. 2298: GGACAGAGCUACAGACCUA,
SEQ. ID NO. 2299: GGAUGGCUCUCCACAGAUA).

[0555] In addition, rationally designed siRNA or siRNA pools can be directed against genes involved in anemia, hemophila or hypercholesterolemia. Such genes would include, but are not be limited to:

APOA5
(SEQ. ID NO. 2300: GAAAGACAGCCUUGAGCAA,
SEQ. ID NO. 2301: GGACAGGGAGGCCACCAAA,
SEQ. ID NO. 2302: GGACGAGGCUUGGGCUUUG,
SEQ. ID NO. 2303: AGCAAGACCUCAACAAUAU),
HMG-CoA reductase
(SEQ. ID NO. 2304: GAAUGAAGCUUUGCCCUUU,
SEQ. ID NO. 2305: GAACACAGUUUAGUGCUUU,
SEQ. ID NO. 2306: UAUCAGAGCUCUUAAUGUU,
SEQ. ID NO. 2307: UGAAGAAUGUCUACAGAUA),
NOS3
(SEQ. ID NO. 2308: UGAAGCACCUGGAGAAUGA,
SEQ. ID NO. 2309: CGGAACAGCACAAGAGUUA,
SEQ. ID NO. 2310: GGAAGAAGACCUUUAAAGA,
SEQ. ID NO. 2415: GCACAAGAGUUAUAAGAUC),
ARH
(SEQ. ID NO. 2416: CGAUACAGCUUGGCACUUU,
SEQ. ID NO. 2311: GAGAAGCGCUGCCCUGUGA,
SEQ. ID NO. 2312: GAAUCAUGCUGUUCUCUUU,
SEQ. ID NO. 2313: GGAGUAACCGGACACCUUA),
CYP7A1
(SEQ. ID NO. 2314: UAAGGUGACUCGAGUGUUU,
SEQ. ID NO. 2315: AAACGACACUUUCAUCAAA,
SEQ. ID NO. 2316: GGACUCAAGUUAAAGUAUU,
SEQ. ID NO. 2317: GUAAUGGACUCAAGUUAAA),
FANCA
(SEQ. ID NO. 2318: GGACAUCACUGCCCACUUC,
SEQ. ID NO. 2319: AGAGGAAGAUGUUCACUUA,
SEQ. ID NO. 2320: GAUCGUGGCUCUUCAGGAA,
SEQ. ID NO. 2321: GGACAGAGGCAGAUAAGAA),
FANCG
(SEQ. ID NO. 2322: GCACUAAGCAGCCUUCAUG,
SEQ. ID NO. 2323: GCAAGCAGGUGCCUACAGA,
SEQ. ID NO. 2324: GGAAUUAGAUGCUCCAUUG,
SEQ. ID NO. 2325: GGACAUCUCUGCCAAAGUC),
ALAS
(SEQ. ID NO. 2326: CAAUAUGCCUGGAAACUAU,
SEQ. ID NO. 2327: GGUUAAGACUCACCAGUUC,
SEQ. ID NO. 2328: CAACAGGACUUUAGGUUCA,
SEQ. ID NO. 2329: GCAUAAGAUUGACAUCAUC),
PIGA
(SEQ. ID NO. 2330: GAAAGAGGGCAUAAGGUUA,
SEQ. ID NO. 2331: GGACUGAUCUUUAAACUAU,
SEQ. ID NO. 2332: UCAAAUGGCUUACUUCAUC,
SEQ. ID NO. 2333: UCUAAGAACUGAUGUCUAA),
and
factor VIII
(SEQ. ID NO. 2334: GCAAAUAGAUCUCCAUUAC,
SEQ. ID NO. 2335: CCAGAUAUGUCGUUCUUUA,
SEQ. ID NO. 2336: GAAAGGCUGUGCUCUCAAA,
SEQ. ID NO. 2337: GGAGAAACCUGCAUGAAAG,
SEQ. ID NO. 2338: CUUGAAGCCUCCUGAAUUA,
SEQ. ID NO. 2339: GAGGAAGCAUCCAAAGAUU,
SEQ. ID NO. 2340: GAUAGGAGAUACAAACUUU).

[0556] Furthermore, rationally designed siRNA or siRNA pools can be directed against genes involved in disorders of the brain and nervous system. Such genes would include, but are not be limited to:

APBB1
(SEQ. ID NO. 2341: CUACGUAGCUCGUGAUAAG,
SEQ. ID NO. 2342: GCAGAGAUGUCCACAGGUU,
SEQ. ID NO. 2343: CAUGAGAUCUGCUCUAAGA,
SEQ. ID NO. 2344: GGGCACCUCUGCUGUAUUG),
BACE1
(SEQ. ID NO. 2345: CCACAGAGCAAGUGAUUUA,
SEQ. ID NO. 2346: GCAGAAAGGAGAUCAUUUA,
SEQ. ID NO. 2347: GUAGCAAGAUCUUUACAUA,
SEQ. ID NO. 2348: UGUCAGAGCUUGAUUAGAA),
PSEN1
(SEQ. ID NO. 2349: GAGCUGACAUUGAAAUAUG,
SEQ. ID NO. 2350: GUACAGCUAUUUCUCAUCA,
SEQ. ID NO. 2351: GAGGUUAGGUGAAGUGGUU,
SEQ. ID NO. 2352: GAAAGGGAGUCACAAGACA,
SEQ. ID NO. 2353: GAACUGGAGUGGAGUAGGA,
SEQ. ID NO. 2354: CAGCAGGCAUAUCUCAUUA,
SEQ. ID NO. 2355: UCAAGUACCUCCCUGAAUG),
PSEN2
(SEQ. ID NO. 2356: GCUGGGAAGUGGCUUAAUA,
SEQ. ID NO. 2357: CAUAUUCCCUGCCCUGAUA,
SEQ. ID NO. 2358: GGGAAGUGCUCAAGACCUA,
SEQ. ID NO. 2359: CAUAGAAAGUGACGUGUUA),
MASS 1
(SEQ. ID NO. 2360: GGAAGGAGCUGUUAUGAGA,
SEQ. ID NO. 2361: GAAAGGAGAAGCUAAAUUA,
SEQ. ID NO. 2362: GGAGGAAGGUCAAGAUUUA,
SEQ. ID NO. 2363: GGAAAUAGCUGAGAUAAUG,),
ARX
(SEQ. ID NO. 2364: CCAGACGCCUGAUAUUGAA,
SEQ. ID NO. 2365: CAGCACCACUCAAGACCAA,
SEQ. ID NO. 2366: CGCCUGAUAUUGAAGUAAA,
SEQ. ID NO. 2367: CAACAUCCACUCUCUCUUG)
and
NNMT
(SEQ. ID NO. 2368: GGGCAGUGCUCCAGUGGUA,
SEQ. ID NO. 2369: GAAAGAGGCUGGCUACACA,
SEQ. ID NO. 2370: GUACAGAAGUGAGACAUAA,
SEQ. ID NO. 2371: GAGGUGAUCUCGCAAAGUU).

[0557] In addition, rationally designed siRNA or siRNA pools can be directed against genes involved in hypertension and related disorders. Such genes would include, but are not be limited to:

angiotensin II type 1 receptor
(SEQ. ID NO. 2372: CAAGAAGCCUGCACCAUGU,
SEQ. ID NO. 2373: GCACUUCACUACCAAAUGA,
SEQ. ID NO. 2374: GCACUGGUCCCAAGUAGUA,
SEQ. ID NO. 2375: CCAAAGGGCAGUAAAGUUU,
SEQ. ID NO. 2376: GCUCAGAGGAGGUGUAUUU,
SEQ. ID NO. 2377: GCACUUCACUACCAAAUGA,
SEQ. ID NO. 2378: AAAGGGCAGUAAAGUUU),
AGTR2
(SEQ. ID NO. 2379: GAACAUCUCUGGCAACAAU,
SEQ. ID NO. 2380: GGUGAUAUAUCUCAAAUUG,
SEQ. ID NO. 2381: GCAAGCAUCUUAUAUAGUU,
SEQ. ID NO. 2382: GAACCAGUCUUUCAACUCA),

and other related targets.

### Example XIII

### Validation of Multigene Knockout Using Rab5 and Eps

[0558] Two or more genes having similar, overlapping functions often leads to genetic redundancy. Mutations that knockout only one of, e.g., a pair of such genes (also referred to as homologs) results in little or no phenotype due to the fact that the remaining intact gene is capable of fulfilling the role of the disrupted counterpart. To fully understand the function of such genes in cellular physiology, it is often necessary to knockout or knockdown both homologs simultaneously. Unfortunately, concomitant knockdown of two or more genes is frequently difficult to achieve in higher organisms (e.g., mice) thus it is necessary to introduce new technologies dissect gene function. One such approach to knocking down multiple genes simultaneously is by using siRNA. For example, FIG. 11 showed that rationally designed siRNA directed against a number of genes involved in the clathrin-mediated endocytosis pathway resulted in significant levels of protein reduction (e.g., >80%). To determine the effects of gene knockdown on clathrin-related endocytosis, internalization assays were performed using epidermal growth factor and transferrin. Specifically, mouse receptor-grade EGF (Collaborative Research Inc.) and iron-saturated human transferrin (Sigma) were iodinated as described previously (Jiang, X., Huang, F., Marusyk, A. & Sorkin, A. (2003) Mol Biol Cell 14, 858-70). HeLa cells grown in 12-well dishes were incubated with ¹²⁵I-EGF (1 μg/ml) or ¹²⁵I-transferrin (1 μg/ml) in binding medium (DMEM, 0.1% bovine serum albumin) at 37° C., and the ratio of internalized and surface radioactivity was determined during 5-min time course to calculate specific internalization rate constant kₑ as described previously (Jiang, X et al.). The measurements of the uptakes of radiolabeled transferrin and EGF were performed using short time-course assays to avoid influence of the recycling on the uptake kinetics, and using low ligand concentration to avoid saturation of the clathrin-dependent pathway (for EGF Lund, K. A., Opresko, L. K., Strarbuck, C., Walsh, B. J. & Wiley, H. S. (1990) J. Biol. Chem. 265, 15713-13723).

[0559] The effects of knocking down Rab5a, 5b, 5c, Eps, or Eps 15R (individually) are shown in FIG. 22 and demonstrate that disruption of single genes has little or no effect on EGF or Tfn internalization. In contrast, simultaneous knock down of Rab5a, 5b, and 5c, or Eps and Eps 15R, leads to a distinct phenotype (note: total concentration of siRNA in these experiments remained constant with that in experiments in which a single siRNA was introduced, see FIG. 23). These experiments demonstrate the effectiveness of using rationally designed siRNA to knockdown multiple genes and validates the utility of these reagents to override genetic redundancy.

### Example XIV

### Validation of Multigene Targeting Using G6PD, GAPDH, PLK, and UQC

[0560] Further demonstration of the ability to knock down expression of multiple genes using rationally designed siRNA was performed using pools of siRNA directed against four separate genes. To achieve this, siRNA were transfected into cells (total siRNA concentration of 100 nM) and assayed twenty-four hours later by B-DNA. Results shown in FIG. 24 show that pools of rationally designed molecules are capable of simultaneously silencing four different genes.

### Example XV

### Validation of Multigene Knockouts as Demonstrated by Gene Expression Profiling, a Prophetic Example

[0561] To further demonstrate the ability to concomitantly knockdown the expression of multiple gene targets, single siRNA or siRNA pools directed against a collection of genes (e.g., 4, 8, 16, or 23 different targets) are simultaneously transfected into cells and cultured for twenty-four hours. Subsequently, mRNA is harvested from treated (and untreated) cells and labeled with one of two fluorescent probes dyes (e.g., a red fluorescent probe for the treated cells, a green fluorescent probe for the control cells.). Equivalent amounts of labeled RNA from each sample is then mixed together and hybridized to sequences that have been linked to a solid support (e.g., a slide, “DNA CHIP”). Following hybridization, the slides are washed and analyzed to assess changes in the levels of target genes induced by siRNA.

### Example XVI

### Identifying Hyperfunctional siRNA

Identification of Hyperfunctional Bcl-2 siRNA

[0562] The ten rationally designed Bcl2 siRNA (identified in FIG. 13, 14) were tested to identify hyperpotent reagents. To accomplish this, each of the ten Bcl-2 siRNA were individually transfected into cells at a 300 pM (0.3 nM) concentrations. Twenty-four hours later, transcript levels were assessed by B-DNA assays and compared with relevant controls. As shown in FIG. 25, while the majority of Bcl-2 siRNA failed to induce functional levels of silencing at this concentration, siRNA 1 and 8 induced >80% silencing, and siRNA 6 exhibited greater than 90% silencing at this subnanomolar concentration.

[0563] By way of prophetic examples, similar assays could be performed with any of the groups of rationally designed genes described in Example VII or Example VIII. Thus for instance, rationally designed siRNA sequences directed against

PDGFA

[0564] (SEQ. ID NO. 2383: GGUAAGAUAUUGUGCUUUA,

[0565] SEQ. ID NO. 2384: CCGCAAAUAUGCAGAAUUA,

[0566] SEQ. ID NO. 2385: GGAUGUACAUGGCGUGUUA,

[0567] SEQ. ID NO. 2386: GGUGAAGUUUGUAUGUUUA), or

PDGFB

[0568] (SEQ. ID NO. 2387: GCUCCGCGCUUUCCGAUUU,

[0569] SEQ. ID NO. 2388: GAGCAGGAAUGGUGAGAUG,

[0570] SEQ. ID NO. 2389: GAACUUGGGAUAAGAGUGU,

[0571] SEQ. ID NO. 2390: CCGAGGAGCUUUAUGAGAU,

[0572] SEQ. ID NO. 2391: UUUAUGAGAUGCUGAGUGA)

[0573] could be introduced into cells at increasingly limiting concentrations to determine whether any of the duplexes are hyperfunctional. Similarly, rationally designed sequences directed against

HIF1 Alpha

[0574] (SEQ. ID NO. 2392: GAAGGAACCUGAUGCUUUA,

[0575] SEQ. ID NO. 2393: GCAUAUAUCUAGAAGGUAU,

[0576] SEQ. ID NO. 2394: GAACAAAUACAUGGGAUUA,

[0577] SEQ. ID NO. 2395: GGACACAGAUUUAGACUUG), or

VEGF

[0578] (SEQ. ID NO. 2396: GAACGUACUUGCAGAUGUG,

[0579] SEQ. ID NO. 2397: GAGAAAGCAUUUGUUUGUA,

[0580] SEQ. ID NO. 2398: GGAGAAAGCAUUUGUUUGU,

[0581] SEQ. ID NO. 2399: CGAGGCAGCUUGAGUUAAA) could be introduced into cells at increasingly limiting concentrations and screened for hyperfunctional duplexes.

### Example XVII

### Gene Silencing: Prophetic Example

[0582] Below is an example of how one might transfect a cell.

[0583] a. Select a cell line. The selection of a cell line is usually determined by the desired application. The most important feature to RNAi is the level of expression of the gene of interest. It is highly recommended to use cell lines for which siRNA transfection conditions have been specified and validated.

[0584] b. Plate the cells. Approximately 24 hours prior to transfection, plate the cells at the appropriate density so that they will be approximately 70-90% confluent, or approximately 1×10⁵ cells/ml at the time of transfection. Cell densities that are too low may lead to toxicity due to excess exposure and uptake of transfection reagent-siRNA complexes. Cell densities that are too high may lead to low transfection efficiencies and little or no silencing. Incubate the cells overnight. Standard incubation conditions for mammalian cells are 37° C. in 5% CO₂. Other cell types, such as insect cells, require different temperatures and CO₂ concentrations that are readily ascertainable by persons skilled in the art. Use conditions appropriate for the cell type of interest.

[0585] c. siRNA re-suspension. Add 20 μl siRNA universal buffer to each siRNA to generate a final concentration of 50 μM.

[0586] d. SiRNA-lipid complex formation. Use RNase-free solutions and tubes. Using the following table, Table XI:

TABLE XI

| | |
|---|---|
| 96-well | 24-well |

Mixture 1 (TransIT-TKO-Plasmid dilution mixture)

| | | | | |
|---|---|---|---|---|
| Opti-MEM | 9.3 | μl | 46.5 | μl |
| TransIT-TKO (1 μg/μl) | 0.5 | μl | 2.5 | μl |
| Mixture 1 Final Volume | 10.0 | μl | 50.0 | μl |

Mixture 2 (siRNA dilution mixture)

| | | | | |
|---|---|---|---|---|
| Opti-MEM | 9.0 | μl | 45.0 | μl |
| siRNA (1 μM) | 1.0 | μl | 5.0 | μl |
| Mixture 2 Final Volume | 10.0 | μl | 50.0 | μl |

Mixture 3 (siRNA-Transfection reagent mixture)

| | | | | |
|---|---|---|---|---|
| Mixture 1 | 10 | μl | 50 | μl |
| Mixture 2 | 10 | μl | 50 | μl |
| Mixture 3 Final Volume | 20 | μl | 100 | μl |

Incubate 20 minutes at room temperature.

Mixture 4 (Media-siRNA/Transfection reagent mixture)

| | | | | |
|---|---|---|---|---|
| Mixture 3 | 20 | μl | 100 | μl |
| Complete media | 80 | μl | 400 | μl |
| Mixture 4 Final Volume | 100 | μl | 500 | μl |

Incubate 48 hours at 37° C.

Transfection. Create a Mixture 1 by combining the specified amounts of OPTI-MEM serum free media and transfection reagent in a sterile polystyrene tube. Create a Mixture 2 by combining specified amounts of each siRNA with OPTI-MEM media in sterile 1 ml tubes. Create a Mixture 3 by combining specified amounts of Mixture 1 and Mixture 2. Mix gently (do not vortex) and incubate at room temperature for 20 minutes. Create a Mixture 4 by combining specified amounts of Mixture 3 to complete media. Add appropriate volume to each cell culture well. Incubate cells with transfection reagent mixture for 24-72 hours at 37° C. This incubation time is flexible. The ratio of silencing will remain consistent at any point in the time period. Assay for gene silencing using an appropriate detection method such as RT-PCR, Western blot analysis, immunohistochemistry, phenotypic analysis, mass spectrometry, fluorescence, radioactive decay, or any other method that is now known or that comes to be known to persons skilled in the art and that from reading this disclosure would useful with the present invention. The optimal window for observing a knockdown phenotype is related to the mRNA turnover of the gene of interest, although 24-72 hours is standard. Final Volume reflects amount needed in each well for the desired cell culture format. When adjusting volumes for a Stock Mix, an additional 10% should be used to accommodate variability in pipetting, etc. Duplicate or triplicate assays should be carried out when possible.

[0587] While the invention has been described in connection with specific embodiments thereof, it will be understood that it is capable of further modifications and this application is intended to cover any variations, uses, or adaptations of the invention following, in general, the principles of the invention and including such departure from the present disclosure as come within known or customary practice within the art to which the invention pertains and as may be applied to the essential features hereinbefore set forth and as follows in the scope of the appended claims.

1. A kit for gene silencing, wherein said kit is comprised of a pool of at least two siRNA duplexes, each of which is comprised of a sequence that is complementary to a portion of the sequence of one or more target messenger RNA, and each of which is selected using selection criteria that are embodied in a formula comprising: selection criteria are embodied in a formula comprising:
(−8)*A1+(−1)*A2+(12)*A3+(7)*A4+(18)*A5+(12)*A6+(19)*A7+(6)*A8+(−4)*A9+(−5)*A10+(−2)*A11+(−5)*A12+(17)*A13+(−3)*A14+(4)*A15+(2)*A16+(8)*A17+(11)*A18+(30)*A19+(−13)*U1+(−10)*U2+(2)*U3+(−2)*U4+(−5)*U5+(5)*U6+(−2)*U7+(−10)*U8+(−5)*U9+(15)*U10+(−1)*U11+(0)*U12+(10)*U13+(−9)*U14+(−13)*U15+(−10)*U16+(3)*U17+(9)*U18+(9)*U19+(7)*C1+(3)*C2+(−21)*C3+(5)*C4+(−9)*C5+(−20)*C6+(−18)*C7+(−5)*C8+(5)*C9+(1)*C10+(2)*C11+(−5)*C12+(−3)*C13+(−6)*C14+(−2)*C15+(−5)*C16+(−3)*C17+(−12)*C18+(−18)*C19+(14)*G1+(8)*G2+(7)*G3+(−10)*G4+(−4)*G5+(2)*G6+(1)*G7+(9)*G8+(5)*G9+(−11)*G10+(1)*G11+(9)*G12+(−24)*G13+(18)*G14+(11)*G15+(13)*G16+(−7)*G17+(−9)*G18+(−22)*G19+6*(number of A+U in position 15-19)−3*(number of G+C in whole siRNA), Formula X
wherein position numbering begins at the 5′-most position of a sense strand, and
A₁=1 if A is the base at position 1 of the sense strand, otherwise its value is 0;
A₂=1 if A is the base at position 2 of the sense strand, otherwise its value is 0;
A₃=1 if A is the base at position 3 of the sense strand, otherwise its value is 0;
A₄=1 if A is the base at position 4 of the sense strand, otherwise its value is 0;
A₅=1 if A is the base at position 5 of the sense strand, otherwise its value is 0;
A₆=1 if A is the base at position 6 of the sense strand, otherwise its value is 0;
A₇=1 if A is the base at position 7 of the sense strand, otherwise its value is 0;
A₁₀=1 if A is the base at position 10 of the sense strand, otherwise its value is 0;
A₁₁=1 if A is the base at position 11 of the sense strand, otherwise its value is 0;
A₁₃=1 if A is the base at position 13 of the sense strand, otherwise its value is 0;
A₁₉=1 if A is the base at position 19 of the sense strand, otherwise if another base is present or the sense strand is only 18 base pairs in length, its value is 0;
C₃=1 if C is the base at position 3 of the sense strand, otherwise its value is 0;
C₄=1 if C is the base at position 4 of the sense strand, otherwise its value is 0;
C₅=1 if C is the base at position 5 of the sense strand, otherwise its value is 0;
C₆=1 if C is the base at position 6 of the sense strand, otherwise its value is 0;
C₇=1 if C is the base at position 7 of the sense strand, otherwise its value is 0;
C₉=1 if C is the base at position 9 of the sense strand, otherwise its value is 0;
C₁₇=1 if C is the base at position 17 of the sense strand, otherwise its value is 0;
C₁₈=1 if C is the base at position 18 of the sense strand, otherwise its value is 0;
C₁₉=1 if C is the base at position 19 of the sense strand, otherwise if another base is present or the sense strand is only 18 base pairs in length, its value is 0;
G₁=1 if G is the base at position 1 on the sense strand, otherwise its value is 0;
G₂=1 if G is the base at position 2 of the sense strand, otherwise its value is 0;
G₈=1 if G is the base at position 8 on the sense strand, otherwise its value is 0;
G₁₀=1 if G is the base at position 10 on the sense strand, otherwise its value is 0;
G₁₃=1 if G is the base at position 13 on the sense strand, otherwise its value is 0;
G₁₉=1 if G is the base at position 19 of the sense strand, otherwise if another base is present or the sense strand is only 18 base pairs in length, its value is 0;
U₁=1 if U is the base at position 1 on the sense strand, otherwise its value is 0;
U₂=1 if U is the base at position 2 on the sense strand, otherwise its value is 0;
U₃=1 if U is the base at position 3 on the sense strand, otherwise its value is 0;
U₄=1 if U is the base at position 4 on the sense strand, otherwise its value is 0;
U₇=1 if U is the base at position 7 on the sense strand, otherwise its value is 0;
U₉=1 if U is the base at position 9 on the sense strand, otherwise its value is 0;
U₁₀=1 if U is the base at position 10 on the sense strand, otherwise its value is 0;
U₁₅=1 if U is the base at position 15 on the sense strand, otherwise its value is 0;
U₁₆=1 if U is the base at position 16 on the sense strand, otherwise its value is 0;
U₁₇=1 if U is the base at position 17 on the sense strand, otherwise its value is 0;
U₁₈=1 if U is the base at position 18 on the sense strand, otherwise its value is 0.

2. A method for selecting an siRNA, said method comprising:
applying selection criteria to a set of potential siRNA that comprise 18-30 base pairs; and
determining the relative functionality of the at least two siRNAs, wherein said section criteria are non-target specific criteria, said set comprises at least two siRNAs and each of said at least two siRNAs contains a sequence that is at least substantially complementary to a target gene, and said selection criteria are embodied in a formula comprising:
(−8)*A1+(−1)*A2+(12)*A3+(7)*A4+(18)*A5+(12)*A6+(19)*A7+(6)*A8+(−4)*A9+(−5)*A10+(−2)*A11+(−5)*A12+(17)*A13+(−3)*A14+(4)*A15+(2)*A16+(8)*A17+(11)*A18+(30)*A19+(−13)*U1+(−10)*U2+(2)*U3+(−2)*U4+(−5)*U5+(5)*U6+(−2)*U7+(−10)*U8+(−5)*U9+(15)*U10+(−1)*U11+(0)*U12+(10)*U13+(−9)*U14+(−13)*U15+(−10)*U16+(3)*U17+(9)*U18+(9)*U19+(7)*C1+(3)*C2+(−21)*C3+(5)*C4+(−9)*C5+(−20)*C6+(−18)*C7+(−5)*C8+(5)*C9+(1)*C10+(2)*C11+(−5)*C12+(−3)*C13+(−6)*C14+(−2)*C15+(−5)*C16+(−3)*C17+(−12)*C18+(−18)*C19+(14)*G1+(8)*G2+(7)*G3+(−10)*G4+(−4)*G5+(2)*G6+(1)*G7+(9)*G8+(5)*G9+(−11)*G10+(1)*G11+(9)*G12+(−24)*G13+(18)*G14+(11)*G15+(13)*G16+(−7)*G17+(−9)*G18+(−22)*G19+6*(number of A+U in position 15-19)−3*(number of G+C in whole siRNA), Formula X
wherein position numbering begins at the 5′-most position of a sense strand, and
A₁=1 if A is the base at position 1 of the sense strand, otherwise its value is 0;
A₂=1 if A is the base at position 2 of the sense strand, otherwise its value is 0;
A₃=1 if A is the base at position 3 of the sense strand, otherwise its value is 0;
A₄=1 if A is the base at position 4 of the sense strand, otherwise its value is 0;
A₅=1 if A is the base at position 5 of the sense strand, otherwise its value is 0;
A₆=1 if A is the base at position 6 of the sense strand, otherwise its value is 0;
A₇=1 if A is the base at position 7 of the sense strand, otherwise its value is 0;
A₁₀=1 if A is the base at position 10 of the sense strand, otherwise its value is 0;
A₁₁=1 if A is the base at position 11 of the sense strand, otherwise its value is 0;
A₁₃=1 if A is the base at position 13 of the sense strand, otherwise its value is 0;
A₁₉=1 if A is the base at position 19 of the sense strand, otherwise if another base is present or the sense strand is only 18 base pairs in length, its value is 0;
C₃=1 if C is the base at position 3 of the sense strand, otherwise its value is 0;
C₄=1 if C is the base at position 4 of the sense strand, otherwise its value is 0;
C₅=1 if C is the base at position 5 of the sense strand, otherwise its value is 0;
C₆=1 if C is the base at position 6 of the sense strand, otherwise its value is 0;
C₇=1 if C is the base at position 7 of the sense strand, otherwise its value is 0;
C₉=1 if C is the base at position 9 of the sense strand, otherwise its value is 0;
C₁₇=1 if C is the base at position 17 of the sense strand, otherwise its value is 0;
C₁₈=1 if C is the base at position 18 of the sense strand, otherwise its value is 0;
C₁₉=1 if C is the base at position 19 of the sense strand, otherwise if another base is present or the sense strand is only 18 base pairs in length, its value is 0;
G₁=1 if G is the base at position 1 on the sense strand, otherwise its value is 0;
G₂=1 if G is the base at position 2 of the sense strand, otherwise its value is 0;
G₈=1 if G is the base at position 8 on the sense strand, otherwise its value is 0;
G₁₀=1 if G is the base at position 10 on the sense strand, otherwise its value is 0;
G₁₃=1 if G is the base at position 13 on the sense strand, otherwise its value is 0;
G₁₉=1 if G is the base at position 19 of the sense strand, otherwise if another base is present or the sense strand is only 18 base pairs in length, its value is 0;
U₁=1 if U is the base at position 1 on the sense strand, otherwise its value is 0;
U₂=1 if U is the base at position 2 on the sense strand, otherwise its value is 0;
U₃=1 if U is the base at position 3 on the sense strand, otherwise its value is 0;
U₄=1 if U is the base at position 4 on the sense strand, otherwise its value is 0;
U₇=1 if U is the base at position 7 on the sense strand, otherwise its value is 0;
U₉=1 if U is the base at position 9 on the sense strand, otherwise its value is 0;
U₁₀=1 if U is the base at position 10 on the sense strand, otherwise its value is 0;
U₁₅=1 if U is the base at position 15 on the sense strand, otherwise its value is 0;
U₁₆=1 if U is the base at position 16 on the sense strand, otherwise its value is 0;
U₁₇=1 if U is the base at position 17 on the sense strand, otherwise its value is 0;
U₁₈=1 if U is the base at position 18 on the sense strand, otherwise its value is 0.

3. A method according to claim 1, further comprising comparing the internal stability profiles of said at least two siRNAs.

4. A method according to claim 2, further comprising comparing the internal stability profiles of said at least two siRNAs.

5. A method according to claim 1, further comprising selecting either for or against sequences that contain motifs that induce cellular stress.

6. A method according to claim 2, further comprising selecting either for or against sequences that contain motifs that induce cellular stress.

7. A method according to claim 1, further comprising selecting either for or against sequences that comprise stability motifs.

8. A method according to claim 2, further comprising selecting either for or against sequences that comprise stability motifs.

9. A method of gene silencing, comprising introducing into a cell at least one siRNA selected according to a method of claim 1.

10. A method of gene silencing, comprising introducing into a cell at least one siRNA selected according to a method of claim 2.

11. A method according to claim 1, wherein said introducing is by allowing passive uptake of the at least one siRNA.

12. A method according to claim 2, wherein said introducing is by allowing passive uptake of the at least one siRNA.

13. A method according claim 9, wherein said introducing in through the use of a vector.

14. A method for developing an siRNA algorithm for selecting siRNA, said method comprising:
(a) selecting a set of siRNA;
(b) measuring gene silencing ability of each siRNA from said set;
(c) determining relative functionality of each siRNA;
(d) determining improved functionality based on the following variables: the presence or absence of a particular nucleotide at a particular position, the total number of As and Us in positions 15-19, the number of times that the same nucleotide repeats within a given sequence, and the total number of Gs and Cs; and
(e) developing an algorithm using the information of step (d).

15. A method of selecting an siRNA with improved functionality, said method comprising using the algorithm of claim 14.

16. A kit, wherein said kit is comprised of at least two siRNAs, wherein said at least two siRNAs comprise a first optimized siRNA and a second optimized siRNA, wherein said first optimized siRNA and said second optimized siRNA are optimized according a formula comprising:
(−8)*A1+(−1)*A2+(12)*A3+(7)*A4+(18)*A5+(12)*A6+(19)*A7+(6)*A8+(−4)*A9+(−5)*A10+(−2)*A11+(−5)*A12+(17)*A13+(−3)*A14+(4)*A15+(2)*A16+(8)*A17+(11)*A18+(30)*A19+(−13)*U1+(−10)*U2+(2)*U3+(−2)*U4+(−5)*U5+(5)*U6+(−2)*U7+(−10)*U8+(−5)*U9+(15)*U10+(−1)*U11+(0)*U12+(10)*U13+(−9)*U14+(−13)*U15+(−10)*U16+(3)*U17+(9)*U18+(9)*U19+(7)*C1+(3)*C2+(−21)*C3+(5)*C4+(−9)*C5+(−20)*C6+(−18)*C7+(−5)*C8+(5)*C9+(1)*C10+(2)*C11+(−5)*C12+(−3)*C13+(−6)*C14+(−2)*C15+(−5)*C16+(−3)*C17+(−12)*C18+(−18)*C19+(14)*G1+(8)*G2+(7)*G3+(−10)*G4+(−4)*G5+(2)*G6+(1)*G7+(9)*G8+(5)*G9+(−11)*G10+(1)*G11+(9)*G12+(−24)*G13+(18)*G14+(11)*G15+(13)*G16+(−7)*G17+(−9)*G18+(−22)*G19+6*(number of A+U in position 15-19)−3*(number of G+C in whole siRNA), Formula X
wherein position numbering begins at the 5′-most position of a sense strand, and
A₁=1 if A is the base at position 1 of the sense strand, otherwise its value is 0;
A₂=1 if A is the base at position 2 of the sense strand, otherwise its value is 0;
A₃=1 if A is the base at position 3 of the sense strand, otherwise its value is 0;
A₄=1 if A is the base at position 4 of the sense strand, otherwise its value is 0;
A₅=1 if A is the base at position 5 of the sense strand, otherwise its value is 0;
A₆=1 if A is the base at position 6 of the sense strand, otherwise its value is 0;
A₇=1 if A is the base at position 7 of the sense strand, otherwise its value is 0;
A₁₀=1 if A is the base at position 10 of the sense strand, otherwise its value is 0;
A₁₁=1 if A is the base at position 11 of the sense strand, otherwise its value is 0;
A₁₃=1 if A is the base at position 13 of the sense strand, otherwise its value is 0;
A₁₉=1 if A is the base at position 19 of the sense strand, otherwise if another base is present or the sense strand is only 18 base pairs in length, its value is 0;
C₃=1 if C is the base at position 3 of the sense strand, otherwise its value is 0;
C₄=1 if C is the base at position 4 of the sense strand, otherwise its value is 0;
C₅=1 if C is the base at position 5 of the sense strand, otherwise its value is 0;
C₆=1 if C is the base at position 6 of the sense strand, otherwise its value is 0;
C₇=1 if C is the base at position 7 of the sense strand, otherwise its value is 0;
C₉=1 if C is the base at position 9 of the sense strand, otherwise its value is 0;
C₁₇=1 if C is the base at position 17 of the sense strand, otherwise its value is 0;
C₁₈=1 if C is the base at position 18 of the sense strand, otherwise its value is 0;
C₁₉=1 if C is the base at position 19 of the sense strand, otherwise if another base is present or the sense strand is only 18 base pairs in length, its value is 0;
G₁=1 if G is the base at position 1 on the sense strand, otherwise its value is 0;
G₂=1 if G is the base at position 2 of the sense strand, otherwise its value is 0;
G₈=1 if G is the base at position 8 on the sense strand, otherwise its value is 0;
G₁₀=1 if G is the base at position 10 on the sense strand, otherwise its value is 0;
G₁₃=1 if G is the base at position 13 on the sense strand, otherwise its value is 0;
G₁₉=1 if G is the base at position 19 of the sense strand, otherwise if another base is present or the sense strand is only 18 base pairs in length, its value is 0;
U₁=1 if U is the base at position 1 on the sense strand, otherwise its value is 0;
U₂=1 if U is the base at position 2 on the sense strand, otherwise its value is 0;
U₃=1 if U is the base at position 3 on the sense strand, otherwise its value is 0;
U₄=1 if U is the base at position 4 on the sense strand, otherwise its value is 0;
U₇=1 if U is the base at position 7 on the sense strand, otherwise its value is 0;
U₉=1 if U is the base at position 9 on the sense strand, otherwise its value is 0;
U₁₀=1 if U is the base at position 10 on the sense strand, otherwise its value is 0;
U₁₅=1 if U is the base at position 15 on the sense strand, otherwise its value is 0;
U₁₆=1 if U is the base at position 16 on the sense strand, otherwise its value is 0;
U₁₇=1 if U is the base at position 17 on the sense strand, otherwise its value is 0;
U₁₈=1 if U is the base at position 18 on the sense strand, otherwise its value is 0.

17. A method for identifying hyperfunctional siRNA, comprising:
applying selection criteria to a set of potential siRNA that comprise 18-30 base pairs, wherein said selection criteria are non-target specific criteria, and said set comprises at least two siRNAs and each of said at least two siRNAs contains a sequence that is at least substantially complementary to a target gene; and
determining the relative functionality of the at least two siRNAs and assigning each of the at least two siRNAs a functionality score; and
selecting siRNAs from the at least two siRNAs that have a functionality score that reflects greater than 80 percent silencing at a concentration in the picomolar range, wherein said greater than 80 percent silencing endures for greater than 120 hours.

18. A method according to claim 1, wherein said siRNA are unimolecular.

19. A method according to claim 2, wherein said siRNA are unimolecular.

20. A method according to claim 14, wherein said siRNA are unimolecular.

21. A method according to claim 16, wherein said siRNA are unimolecular.

22. A method according to claim 17, wherein said siRNA are unimolecular.

23. A method according to claim 1, wherein said siRNA are comprised of two separate polynucleotide strands.

24. A method according to claim 2, wherein said siRNA are comprised of two separate polynucleotide strands.

25. A method according to claim 14, wherein said siRNA are comprised of two separate polynucleotide strands.

26. A method according to claim 16, wherein said siRNA are comprised of two separate polynucleotide strands.

27. A method according to claim 17, wherein said siRNA are comprised of two separate polynucleotide strands.

28. A method according to claim 1, wherein said siRNA are expressed from one or more vectors.

29. A method according to claim 2, wherein said siRNA are expressed from one or more vectors.

30. A method according to claim 14, wherein said siRNA are expressed from one or more vectors.

31. A method according to claim 16, wherein said siRNA are expressed from one or more vectors.

32. A method according to claim 17, wherein said siRNA are expressed from one or more vectors.

33. A method according to claim 1, wherein two or more genes are silenced by a single administration of siRNA.

34. A method according to claim 2, wherein two or more genes are silenced by a single administration of siRNA.

35. A method according to claim 14, wherein two or more genes are silenced by a single administration of siRNA.

36. A method according to claim 16, wherein two or more genes are silenced by a single administration of siRNA.

37. A method according to claim 17, wherein two or more genes are silenced by a single administration of siRNA.

38. A kit according to claim 13, wherein one or more of said siRNA are unimolecular.

39. A kit according to claim 13, wherein one or more of said siRNA are comprised of two separate polynucleotide strands.

40. A kit according to claim 13, wherein one or more of said siRNA are capable of silencing the Bcl2 gene.

41. A method for developing an siRNA algorithm for selecting functional and hyperfunctional siRNAs for a given sequence, comprising:
(a) selecting a set of siRNAs;
(b) measuring the gene silencing ability of each siRNA from said set;
(c) determining the relative functionality of each siRNA;
(d) determining the amount of improved functionality based on the following variables: the total GC content, melting temperature of the siRNA, GC content at positions 15-19, the presence or absence of a particular nucleotide at a particular position, relative thermodynamic stability at particular positions in a duplex, and the number of times that the same nucleotide repeats within a given sequence; and
(e) developing an algorithm using the information of step (d).

The application's sequence listing, which the Patent Office published only in electronic form, follows.

SEQUENCE LISTING (2675299 sequences)

SEQ ID NO: 1 - RNA, 19 nt, Artificial Sequence
  siRNA sense strand
  misc_feature (1)...(2): n is any nucleotide
  misc_feature (4)...(4): n is any nucleotide
  misc_feature (6)...(9): n is any nucleotide
  misc_feature (12)...(12): n is any nucleotide
  misc_feature (15)...(18): n is any nucleotide
nnanannnnucnaannnna

SEQ ID NO: 2 - RNA, 19 nt, Artificial Sequence
  siRNA sense strand
  misc_feature (1)...(2): n is any nucleotide
  misc_feature (4)...(4): n is any nucleotide
  misc_feature (6)...(9): n is any nucleotide
  misc_feature (12)...(12): n is any nucleotide
  misc_feature (15)...(18): n is any nucleotide
nnanannnnugnaannnna

SEQ ID NO: 3 - RNA, 19 nt, Artificial Sequence
  siRNA sense strand
  misc_feature (1)...(2): n is any nucleotide
  misc_feature (4)...(4): n is any nucleotide
  misc_feature (6)...(9): n is any nucleotide
  misc_feature (12)...(12): n is any nucleotide
  misc_feature (15)...(18): n is any nucleotide
nnanannnnuunaannnna

SEQ ID NO: 4 - RNA, 19 nt, Artificial Sequence
  siRNA sense strand
  misc_feature (1)...(2): n is any nucleotide
  misc_feature (4)...(4): n is any nucleotide
  misc_feature (6)...(9): n is any nucleotide
  misc_feature (12)...(12): n is any nucleotide
  misc_feature (15)...(18): n is any nucleotide
nnanannnnucncannnna

SEQ ID NO: 5 - RNA, 19 nt, Artificial Sequence
  siRNA sense strand
  misc_feature (1)...(2): n is any nucleotide
  misc_feature (4)...(4): n is any nucleotide
  misc_feature (6)...(9): n is any nucleotide
  misc_feature (12)...(12): n is any nucleotide
  misc_feature (15)...(18): n is any nucleotide
nnanannnnugncannnna

SEQ ID NO: 6 - RNA, 19 nt, Artificial Sequence
  siRNA sense strand
  misc_feature (1)...(2): n is any nucleotide
  misc_feature (4)...(4): n is any nucleotide
  misc_feature (6)...(9): n is any nucleotide
  misc_feature (12)...(12): n is any nucleotide
  misc_feature (15)...(18): n is any nucleotide
nnanannnnuuncannnna

SEQ ID NO: 7 - RNA, 19 nt, Artificial Sequence
  siRNA sense strand
  misc_feature (1)...(2): n is any nucleotide
  misc_feature (4)...(4): n is any nucleotide
  misc_feature (6)...(9): n is any nucleotide
  misc_feature (12)...(12): n is any nucleotide
  misc_feature (15)...(18): n is any nucleotide
nnanannnnucnuannnna

SEQ ID NO: 8 - RNA, 19 nt, Artificial Sequence
  siRNA sense strand
  misc_feature (1)...(2): n is any nucleotide
  misc_feature (4)...(4): n is any nucleotide
  misc_feature (6)...(9): n is any nucleotide
  misc_feature (12)...(12): n is any nucleotide
  misc_feature (15)...(18): n is any nucleotide
nnanannnnugnuannnna

SEQ ID NO: 9 - RNA, 19 nt, Artificial Sequence
  siRNA sense strand
  misc_feature (1)...(2): n is any nucleotide
  misc_feature (4)...(4): n is any nucleotide
  misc_feature (6)...(9): n is any nucleotide
  misc_feature (12)...(12): n is any nucleotide
  misc_feature (15)...(18): n is any nucleotide
nnanannnnuunuannnna

SEQ ID NO: 10 - RNA, 19 nt, Artificial Sequence
  siRNA sense strand
  misc_feature (1)...(2): n is any nucleotide
  misc_feature (4)...(4): n is any nucleotide
  misc_feature (6)...(9): n is any nucleotide
  misc_feature (12)...(12): n is any nucleotide
  misc_feature (15)...(18): n is any nucleotide
nnancnnnnucnaannnna

SEQ ID NO: 11 - RNA, 19 nt, Artificial Sequence
  siRNA sense strand
  misc_feature (1)...(2): n is any nucleotide
  misc_feature (4)...(4): n is any nucleotide
  misc_feature (6)...(9): n is any nucleotide
  misc_feature (12)...(12): n is any nucleotide
  misc_feature (15)...(18): n is any nucleotide
nnancnnnnugnaannnna

SEQ ID NO: 12 - RNA, 19 nt, Artificial Sequence
  siRNA sense strand
  misc_feature (1)...(2): n is any nucleotide
  misc_feature (4)...(4): n is any nucleotide
  misc_feature (6)...(9): n is any nucleotide
  misc_feature (12)...(12): n is any nucleotide
  misc_feature (15)...(18): n is any nucleotide
nnancnnnnuunaannnna

SEQ ID NO: 13 - RNA, 19 nt, Artificial Sequence
  siRNA sense strand
  misc_feature (1)...(2): n is any nucleotide
  misc_feature (4)...(4): n is any nucleotide
  misc_feature (6)...(9): n is any nucleotide
  misc_feature (12)...(12): n is any nucleotide
  misc_feature (15)...(18): n is any nucleotide
nnancnnnnucncannnna

SEQ ID NO: 14 - RNA, 19 nt, Artificial Sequence
  siRNA sense strand
  misc_feature (1)...(2): n is any nucleotide
  misc_feature (4)...(4): n is any nucleotide
  misc_feature (6)...(9): n is any nucleotide
  misc_feature (12)...(12): n is any nucleotide
  misc_feature (15)...(18): n is any nucleotide
nnancnnnnugncannnna

SEQ ID NO: 15 - RNA, 19 nt, Artificial Sequence
  siRNA sense strand
  misc_feature (1)...(2): n is any nucleotide
  misc_feature (4)...(4): n is any nucleotide
  misc_feature (6)...(9): n is any nucleotide
  misc_feature (12)...(12): n is any nucleotide
  misc_feature (15)...(18): n is any nucleotide
nnancnnnnuuncannnna

SEQ ID NO: 16 - RNA, 18 nt, Artificial Sequence
  siRNA sense strand
  misc_feature (1)...(1): n is any nucleotide
  misc_feature (3)...(3): n is any nucleotide
  misc_feature (5)...(8): n is any nucleotide
  misc_feature (11)...(11): n is any nucleotide
  misc_feature (14)...(18): n is any nucleotide
nancnnnnucnuannnna

SEQ ID NO: 17 - RNA, 19 nt, Artificial Sequence
  siRNA sense strand
  misc_feature (1)...(2): n is any nucleotide
  misc_feature (4)...(4): n is any nucleotide
  misc_feature (6)...(9): n is any nucleotide
  misc_feature (12)...(12): n is any nucleotide
  misc_feature (15)...(18): n is any nucleotide
nnancnnnnugnuannnna

SEQ ID NO: 18 - RNA, 19 nt, Artificial Sequence
  siRNA sense strand
  misc_feature (1)...(2): n is any nucleotide
  misc_feature (4)...(4): n is any nucleotide
  misc_feature (6)...(9): n is any nucleotide
  misc_feature (12)...(12): n is any nucleotide
  misc_feature (15)...(18): n is any nucleotide
nnancnnnnuunuannnna

SEQ ID NO: 19 - RNA, 19 nt, Artificial Sequence
  siRNA sense strand
  misc_feature (1)...(2): n is any nucleotide
  misc_feature (4)...(4): n is any nucleotide
  misc_feature (6)...(9): n is any nucleotide
  misc_feature (12)...(12): n is any nucleotide
  misc_feature (15)...(19): n is any nucleotide
nnangnnnnucnaannnna

SEQ ID NO: 20 - RNA, 19 nt, Artificial Sequence
  siRNA sense strand
  misc_feature (1)...(2): n is any nucleotide
  misc_feature (4)...(4): n is any nucleotide
  misc_feature (6)...(9): n is any nucleotide
  misc_feature (12)...(12): n is any nucleotide
  misc_feature (15)...(18): n is any nucleotide
nnangnnnnugnaannnna

SEQ ID NO: 21 - RNA, 19 nt, Artificial Sequence
  siRNA sense strand
  misc_feature (1)...(2): n is any nucleotide
  misc_feature (4)...(4): n is any nucleotide
  misc_feature (6)...(9): n is any nucleotide
  misc_feature (12)...(12): n is any nucleotide
  misc_feature (15)...(19): n is any nucleotide
nnangnnnnuunaannnna

SEQ ID NO: 22 - RNA, 19 nt, Artificial Sequence
  siRNA sense strand
  misc_feature (1)...(2): n is any nucleotide
  misc_feature (4)...(4): n is any nucleotide
  misc_feature (6)...(9): n is any nucleotide
  misc_feature (12)...(12): n is any nucleotide
  misc_feature (15)...(18): n is any nucleotide
nnangnnnnucncannnna

SEQ ID NO: 23 - RNA, 19 nt, Artificial Sequence
  siRNA sense strand
  misc_feature (1)...(2): n is any nucleotide
  misc_feature (4)...(4): n is any nucleotide
  misc_feature (6)...(9): n is any nucleotide
  misc_feature (12)...(12): n is any nucleotide
  misc_feature (15)...(18): n is any nucleotide
nnangnnnnugncannnna

SEQ ID NO: 24 - RNA, 19 nt, Artificial Sequence
  siRNA sense strand
  misc_feature (1)...(2): n is any nucleotide
  misc_feature (4)...(4): n is any nucleotide
  misc_feature (6)...(9): n is any nucleotide
  misc_feature (12)...(12): n is any nucleotide
  misc_feature (15)...(18): n is any nucleotide
nnangnnnnuuncannnna

SEQ ID NO: 25 - RNA, 19 nt, Artificial Sequence
  siRNA sense strand
  misc_feature (1)...(2): n is any nucleotide
  misc_feature (4)...(4): n is any nucleotide
  misc_feature (6)...(9): n is any nucleotide
  misc_feature (12)...(12): n is any nucleotide
  misc_feature (15)...(18): n is any nucleotide
nnangnnnnucnuannnna

SEQ ID NO: 26 - RNA, 19 nt, Artificial Sequence
  siRNA sense strand
  misc_feature (1)...(2): n is any nucleotide
  misc_feature (4)...(4): n is any nucleotide
  misc_feature (6)...(9): n is any nucleotide
  misc_feature (12)...(12): n is any nucleotide
  misc_feature (15)...(18): n is any nucleotide
nnangnnnnugnuannnna

SEQ ID NO: 27 - RNA, 19 nt, Artificial Sequence
  siRNA sense strand
  misc_feature (1)...(2): n is any nucleotide
  misc_feature (4)...(4): n is any nucleotide
  misc_feature (6)...(10): n is any nucleotide
  misc_feature (12)...(12): n is any nucleotide
  misc_feature (15)...(18): n is any nucleotide
nnangnnnnnunuannnna

SEQ ID NO: 28 - RNA, 22 nt, Artificial Sequence
  siRNA sense strand
  misc_feature (4)...(5): n is any nucleotide
  misc_feature (7)...(7): n is any nucleotide
  misc_feature (9)...(12): n is any nucleotide
  misc_feature (14)...(14): n is any nucleotide
  misc_feature (17)...(20): n is any nucleotide
gucnnanannnnucnaannnna

SEQ ID NO: 29 - RNA, 208 nt, Homo sapiens
  misc_RNA (1)...(208): human cyclophilin mRNA fragment
guuccaaaaacaguggauaauuuuguggccuuagcuacaggagagaaaggauuuggcuacaaaaacagcaaauuccaucguguaaucaaggacuucaugauccagggcggagacuucaccaggggagauggcacaggaggaaagagcaucuacggugagcgcuuccccgaugagaacuucaaacugaagcacuacgggccuggcuggg

SEQ ID NO: 30 - RNA, 200 nt, photinus pyralis
  misc_RNA (1)...(200): firefly luciferase mRNA fragment
ugaacuucccgccgccguuguuguuuuggagcacggaaagacgaugacggaaaaagagaucguggauuacgucgccagucaaguaacaaccgcgaaaaaguugcgcggaggaguuguguuuguggacgaaguaccgaaaggucuuaccggaaaacucgacgcaagaaaaaucagagagauccucauaaaggccaagaagg

SEQ ID NO: 31 - RNA, 108 nt, Homo sapiens
  misc_RNA (1)...(108): human DBL mRNA fragment
acgggcaaggccaagugggaugccuggaaugagcugaaagggacuuccaaggaagaugccaugaaagcuuacaucaacaaaguagaagagcuaaagaaaaaauacggg

SEQ ID NO: 32 - RNA, 19 nt, Homo sapiens
guuccaaaaacaguggaua

SEQ ID NO: 33 - RNA, 19 nt, Homo sapiens
uccaaaaacaguggauaau

SEQ ID NO: 34 - RNA, 19 nt, Homo sapiens
caaaaacaguggauaauuu

SEQ ID NO: 35 - RNA, 19 nt, Homo sapiens
aaaacaguggauaauuuug

SEQ ID NO: 36 - RNA, 19 nt, Homo sapiens
aacaguggauaauuuugug

SEQ ID NO: 37 - RNA, 19 nt, Homo sapiens
caguggauaauuuuguggc

SEQ ID NO: 38 - RNA, 19 nt, Homo sapiens
  misc_RNA (1)...(19): siRNA sense strand
guggauaauuuuguggccu

SEQ ID NO: 39 - RNA, 19 nt, Homo sapiens
ggauaauuuuguggccuua

SEQ ID NO: 40 - RNA, 19 nt, Homo sapiens
auaauuuuguggccuuagc

SEQ ID NO: 41 - RNA, 19 nt, Homo sapiens
aauuuuguggccuuagcua

SEQ ID NO: 42 - RNA, 19 nt, Homo sapiens
uuuuguggccuuagcuaca

SEQ ID NO: 43 - RNA, 19 nt, Homo sapiens
uuguggccuuagcuacagg

SEQ ID NO: 44 - RNA, 19 nt, Homo sapiens
guggccuuagcuacaggag

SEQ ID NO: 45 - RNA, 19 nt, Homo sapiens
ggccuuagcuacaggagag

SEQ ID NO: 46 - RNA, 19 nt, Homo sapiens
ccuuagcuacaggagagaa

SEQ ID NO: 47 - RNA, 19 nt, Homo sapiens
uuagcuacaggagagaaag

SEQ ID NO: 48 - RNA, 19 nt, Homo sapiens
agcuacaggagagaaagga

SEQ ID NO: 49 - RNA, 19 nt, Homo sapiens
cuacaggagagaaaggauu

SEQ ID NO: 50 - RNA, 19 nt, Homo sapiens
acaggagagaaaggauuug

SEQ ID NO: 51 - RNA, 19 nt, Homo sapiens
aggagagaaaggauuuggc

SEQ ID NO: 52 - RNA, 19 nt, Homo sapiens
gagagaaaggauuuggcua

SEQ ID NO: 53 - RNA, 19 nt, Homo sapiens
gagaaaggauuuggcuaca

SEQ ID NO: 54 - RNA, 19 nt, Homo sapiens
gaaaggauuuggcuacaaa

SEQ ID NO: 55 - RNA, 19 nt, Homo sapiens
aaggauuuggcuacaaaaa

SEQ ID NO: 56 - RNA, 19 nt, Homo sapiens
ggauuuggcuacaaaaaca

SEQ ID NO: 57 - RNA, 19 nt, Homo sapiens
auuuggcuacaaaaacagc

SEQ ID NO: 58 - RNA, 19 nt, Homo sapiens
uuggcuacaaaaacagcaa

SEQ ID NO: 59 - RNA, 19 nt, Homo sapiens
ggcuacaaaaacagcaaau

SEQ ID NO: 60 - RNA, 19 nt, Homo sapiens
cuacaaaaacagcaaauuc

SEQ ID NO: 61 - RNA, 19 nt, Homo sapiens
acaaaaacagcaaauucca

SEQ ID NO: 62 - RNA, 19 nt, Homo sapiens
aaaaacagcaaauuccauc

SEQ ID NO: 63 - RNA, 19 nt, Homo sapiens
aaacagcaaauuccaucgu

SEQ ID NO: 64 - RNA, 19 nt, Homo sapiens
acagcaaauuccaucgugu

SEQ ID NO: 65 - RNA, 19 nt, Homo sapiens
agcaaauuccaucguguaa

SEQ ID NO: 66 - RNA, 19 nt, Homo sapiens
caaauuccaucguguaauc

SEQ ID NO: 67 - RNA, 19 nt, Homo sapiens
aauuccaucguguaaucaa

SEQ ID NO: 68 - RNA, 19 nt, Homo sapiens
uuccaucguguaaucaagg

SEQ ID NO: 69 - RNA, 19 nt, Homo sapiens
ccaucguguaaucaaggac

SEQ ID NO: 70 - RNA, 19 nt, Homo sapiens
aucguguaaucaaggacuu

SEQ ID NO: 71 - RNA, 19 nt, Homo sapiens
cguguaaucaaggacuuca

SEQ ID NO: 72 - RNA, 19 nt, Homo sapiens
uguaaucaaggacuucaug

SEQ ID NO: 73 - RNA, 19 nt, Homo sapiens
uaaucaaggacuucaugau

SEQ ID NO: 74 - RNA, 19 nt, Homo sapiens
aucaaggacuucaugaucc

SEQ ID NO: 75 - RNA, 19 nt, Homo sapiens
caaggacuucaugauccag

SEQ ID NO: 76 - RNA, 19 nt, Homo sapiens
aggacuucaugauccaggg

SEQ ID NO: 77 - RNA, 19 nt, Homo sapiens
gacuucaugauccagggcg

SEQ ID NO: 78 - RNA, 19 nt, Homo sapiens
cuucaugauccagggcgga

SEQ ID NO: 79 - RNA, 19 nt, Homo sapiens
ucaugauccagggcggaga

SEQ ID NO: 80 - RNA, 19 nt, Homo sapiens
augauccagggcggagacu

SEQ ID NO: 81 - RNA, 19 nt, Homo sapiens
gauccagggcggagacuuc

SEQ ID NO: 82 - RNA, 19 nt, Homo sapiens
uccagggcggagacuucac

SEQ ID NO: 83 - RNA, 19 nt, Homo sapiens
cagggcggagacuucacca

SEQ ID NO: 84 - RNA, 19 nt, Homo sapiens
gggcggagacuucaccagg

SEQ ID NO: 85 - RNA, 19 nt, Homo sapiens
gcggagacuucaccagggg

SEQ ID NO: 86 - RNA, 19 nt, Homo sapiens
ggagacuucaccaggggag

SEQ ID NO: 87 - RNA, 19 nt, Homo sapiens
agacuucaccaggggagau

SEQ ID NO: 88 - RNA, 19 nt, Homo sapiens
acuucaccaggggagaugg

SEQ ID NO: 89 - RNA, 19 nt, Homo sapiens
uucaccaggggagauggca

SEQ ID NO: 90 - RNA, 19 nt, Homo sapiens
caccaggggagauggcaca

SEQ ID NO: 91 - RNA, 19 nt, Homo sapiens
ccaggggagauggcacagg

SEQ ID NO: 92 - RNA, 19 nt, Homo sapiens
aggggagauggcacaggag

SEQ ID NO: 93 - RNA, 19 nt, Homo sapiens
gggagauggcacaggagga

SEQ ID NO: 94 - RNA, 19 nt, Homo sapiens
gagauggcacaggaggaaa

SEQ ID NO: 95 - RNA, 19 nt, Homo sapiens
gauggcacaggaggaaaga

SEQ ID NO: 96 - RNA, 19 nt, Homo sapiens
gcacaggaggaaagagcau

SEQ ID NO: 97 - RNA, 19 nt, Homo sapiens
acaggaggaaagagcaucu

SEQ ID NO: 98 - RNA, 19 nt, Homo sapiens
aggaggaaagagcaucuac

SEQ ID NO: 99 - RNA, 19 nt, Homo sapiens
gaggaaagagcaucuacgg

SEQ ID NO: 100 - RNA, 19 nt, Homo sapiens
ggaaagagcaucuacggug

SEQ ID NO: 101 - RNA, 19 nt, Homo sapiens
aaagagcaucuacggugag

SEQ ID NO: 102 - RNA, 19 nt, Homo sapiens
agagcaucuacggugagcg

SEQ ID NO: 103 - RNA, 19 nt, Homo sapiens
agcaucuacggugagcgcu

SEQ ID NO: 104 - RNA, 19 nt, Homo sapiens
caucuacggugagcgcuuc

SEQ ID NO: 105 - RNA, 19 nt, Homo sapiens
ucuacggugagcgcuuccc

SEQ ID NO: 106 - RNA, 19 nt, Homo sapiens
uacggugagcgcuuccccg

SEQ ID NO: 107 - RNA, 19 nt, Homo sapiens
cggugagcgcuuccccgau

SEQ ID NO: 108 - RNA, 19 nt, Homo sapiens
gugagcgcuuccccgauga

SEQ ID NO: 109 - RNA, 19 nt, Homo sapiens
gagcgcuuccccgaugaga

SEQ ID NO: 110 - RNA, 19 nt, Homo sapiens
gcgcuuccccgaugagaac

SEQ ID NO: 111 - RNA, 19 nt, Homo sapiens
gcuuccccgaugagaacuu

SEQ ID NO: 112 - RNA, 19 nt, Homo sapiens
uuccccgaugagaacuuca

SEQ ID NO: 113 - RNA, 19 nt, Homo sapiens
ccccgaugagaacuucaaa

SEQ ID NO: 114 - RNA, 19 nt, Homo sapiens
ccgaugagaacuucaaacu

SEQ ID NO: 115 - RNA, 19 nt, Homo sapiens
gaugagaacuucaaacuga

SEQ ID NO: 116 - RNA, 19 nt, Homo sapiens
ugagaacuucaaacugaag

SEQ ID NO: 117 - RNA, 19 nt, Homo sapiens
agaacuucaaacugaagca

SEQ ID NO: 118 - RNA, 19 nt, Homo sapiens
aacuucaaacugaagcacu

SEQ ID NO: 119 - RNA, 19 nt, Homo sapiens
cuucaaacugaagcacuac

SEQ ID NO: 120 - RNA, 19 nt, Homo sapiens
ucaaacugaagcacuacgg

SEQ ID NO: 121 - RNA, 19 nt, Homo sapiens
acgggcaaggccaaguggg

SEQ ID NO: 122 - RNA, 19 nt, Homo sapiens
cgggcaaggccaaguggga

SEQ ID NO: 123 - RNA, 19 nt, Homo sapiens
gggcaaggccaagugggau

SEQ ID NO: 124 - RNA, 19 nt, Homo sapiens
ggcaaggccaagugggaug

SEQ ID NO: 125 - RNA, 19 nt, Homo sapiens
gcaaggccaagugggaugc

SEQ ID NO: 126 - RNA, 19 nt, Homo sapiens
caaggccaagugggaugcc

SEQ ID NO: 127 - RNA, 19 nt, Homo sapiens
aaggccaagugggaugccu

SEQ ID NO: 128 - RNA, 19 nt, Homo sapiens
aggccaagugggaugccug

SEQ ID NO: 129 - RNA, 19 nt, Homo sapiens
ggccaagugggaugccugg

SEQ ID NO: 130 - RNA, 19 nt, Homo sapiens
gccaagugggaugccugga

SEQ ID NO: 131 - RNA, 19 nt, Homo sapiens
ccaagugggaugccuggaa

SEQ ID NO: 132 - RNA, 19 nt, Homo sapiens
caagugggaugccuggaau

SEQ ID NO: 133 - RNA, 19 nt, Homo sapiens
aagugggaugccuggaaug

SEQ ID NO: 134 - RNA, 19 nt, Homo sapiens
agugggaugccuggaauga

SEQ ID NO: 135 - RNA, 19 nt, Homo sapiens
gugggaugccuggaaugag

SEQ ID NO: 136 - RNA, 19 nt, Homo sapiens
ugggaugccuggaaugagc

SEQ ID NO: 137 - RNA, 19 nt, Homo sapiens
gggaugccuggaaugagcu

SEQ ID NO: 138 - RNA, 19 nt, Homo sapiens
ggaugccuggaaugagcug

SEQ ID NO: 139 - RNA, 19 nt, Homo sapiens
gaugccuggaaugagcuga

SEQ ID NO: 140 - RNA, 19 nt, Homo sapiens
augccuggaaugagcugaa

SEQ ID NO: 141 - RNA, 19 nt, Homo sapiens
ugccuggaaugagcugaaa

SEQ ID NO: 142 - RNA, 19 nt, Homo sapiens
gccuggaaugagcugaaag

SEQ ID NO: 143 - RNA, 19 nt, Homo sapiens
ccuggaaugagcugaaagg

SEQ ID NO: 144 - RNA, 19 nt, Homo sapiens
cuggaaugagcugaaaggg

SEQ ID NO: 145 - RNA, 19 nt, Homo sapiens
uggaaugagcugaaaggga

SEQ ID NO: 146 - RNA, 19 nt, Homo sapiens
ggaaugagcugaaagggac

SEQ ID NO: 147 - RNA, 19 nt, Homo sapiens
gaaugagcugaaagggacu

SEQ ID NO: 148 - RNA, 19 nt, Homo sapiens
aaugagcugaaagggacuu

SEQ ID NO: 149 - RNA, 19 nt, Homo sapiens
augagcugaaagggacuuc

SEQ ID NO: 150 - RNA, 19 nt, Homo sapiens
ugagcugaaagggacuucc

SEQ ID NO: 151 - RNA, 19 nt, Homo sapiens
gagcugaaagggacuucca

SEQ ID NO: 152 - RNA, 19 nt, Homo sapiens
agcugaaagggacuuccaa

SEQ ID NO: 153 - RNA, 19 nt, Homo sapiens
gcugaaagggacuuccaag

SEQ ID NO: 154 - RNA, 19 nt, Homo sapiens
cugaaagggacuuccaagg

SEQ ID NO: 155 - RNA, 19 nt, Homo sapiens
ugaaagggacuuccaagga

SEQ ID NO: 156 - RNA, 19 nt, Homo sapiens
gaaagggacuuccaaggaa

SEQ ID NO: 157 - RNA, 19 nt, Homo sapiens
aaagggacuuccaaggaag

SEQ ID NO: 158 - RNA, 19 nt, Homo sapiens
aagggacuuccaaggaaga

SEQ ID NO: 159 - RNA, 19 nt, Homo sapiens
agggacuuccaaggaagau

SEQ ID NO: 160 - RNA, 19 nt, Homo sapiens
gggacuuccaaggaagaug

SEQ ID NO: 161 - RNA, 19 nt, Homo sapiens
ggacuuccaaggaagaugc

SEQ ID NO: 162 - RNA, 19 nt, Homo sapiens
gacuuccaaggaagaugcc

SEQ ID NO: 163 - RNA, 19 nt, Homo sapiens
acuuccaaggaagaugcca

SEQ ID NO: 164 - RNA, 19 nt, Homo sapiens
cuuccaaggaagaugccau

SEQ ID NO: 165 - RNA, 19 nt, Homo sapiens
uuccaaggaagaugccaug

SEQ ID NO: 166 - RNA, 19 nt, Homo sapiens
uccaaggaagaugccauga

SEQ ID NO: 167 - RNA, 19 nt, Homo sapiens
ccaaggaagaugccaugaa

SEQ ID NO: 168 - RNA, 19 nt, Homo sapiens
caaggaagaugccaugaaa

SEQ ID NO: 169 - RNA, 19 nt, Homo sapiens
aaggaagaugccaugaaag

SEQ ID NO: 170 - RNA, 19 nt, Homo sapiens
aggaagaugccaugaaagc

SEQ ID NO: 171 - RNA, 19 nt, Homo sapiens
ggaagaugccaugaaagcu

SEQ ID NO: 172 - RNA, 19 nt, Homo sapiens
gaagaugccaugaaagcuu

SEQ ID NO: 173 - RNA, 19 nt, Homo sapiens
aagaugccaugaaagcuua

SEQ ID NO: 174 - RNA, 19 nt, Homo sapiens
agaugccaugaaagcuuac

SEQ ID NO: 175 - RNA, 19 nt, Homo sapiens
gaugccaugaaagcuuaca

SEQ ID NO: 176 - RNA, 19 nt, Homo sapiens
augccaugaaagcuuacau

SEQ ID NO: 177 - RNA, 19 nt, Homo sapiens
ugccaugaaagcuuacauc

SEQ ID NO: 178 - RNA, 19 nt, Homo sapiens
gccaugaaagcuuacauca

SEQ ID NO: 179 - RNA, 19 nt, Homo sapiens
ccaugaaagcuuacaucaa

SEQ ID NO: 180 - RNA, 19 nt, Homo sapiens
caugaaagcuuacaucaac

SEQ ID NO: 181 - RNA, 19 nt, Homo sapiens
augaaagcuuacaucaaca

SEQ ID NO: 182 - RNA, 19 nt, Homo sapiens
ugaaagcuuacaucaacaa

SEQ ID NO: 183 - RNA, 19 nt, Homo sapiens
gaaagcuuacaucaacaaa

SEQ ID NO: 184 - RNA, 19 nt, Homo sapiens
aaagcuuacaucaacaaag

SEQ ID NO: 185 - RNA, 19 nt, Homo sapiens
aagcuuacaucaacaaagu

SEQ ID NO: 186 - RNA, 19 nt, Homo sapiens
agcuuacaucaacaaagua

SEQ ID NO: 187 - RNA, 19 nt, Homo sapiens
gcuuacaucaacaaaguag

SEQ ID NO: 188 - RNA, 19 nt, Homo sapiens
cuuacaucaacaaaguaga

SEQ ID NO: 189 - RNA, 19 nt, Homo sapiens
uuacaucaacaaaguagaa

SEQ ID NO: 190 - RNA, 19 nt, Homo sapiens
uacaucaacaaaguagaag

SEQ ID NO: 191 - RNA, 19 nt, Homo sapiens
acaucaacaaaguagaaga

SEQ ID NO: 192 - RNA, 19 nt, Homo sapiens
caucaacaaaguagaagag

SEQ ID NO: 193 - RNA, 19 nt, Homo sapiens
aucaacaaaguagaagagc

SEQ ID NO: 194 - RNA, 19 nt, Homo sapiens
ucaacaaaguagaagagcu

SEQ ID NO: 195 - RNA, 19 nt, Homo sapiens
caacaaaguagaagagcua

SEQ ID NO: 196 - RNA, 19 nt, Homo sapiens
aacaaaguagaagagcuaa

SEQ ID NO: 197 - RNA, 19 nt, Homo sapiens
acaaaguagaagagcuaaa

SEQ ID NO: 198 - RNA, 19 nt, Homo sapiens
caaaguagaagagcuaaag

SEQ ID NO: 199 - RNA, 19 nt, Homo sapiens
aaaguagaagagcuaaaga

SEQ ID NO: 200 - RNA, 19 nt, Homo sapiens
aaguagaagagcuaaagaa

SEQ ID NO: 201 - RNA, 19 nt, Homo sapiens
aguagaagagcuaaagaaa

SEQ ID NO: 202 - RNA, 19 nt, Homo sapiens
guagaagagcuaaagaaaa

SEQ ID NO: 203 - RNA, 19 nt, Homo sapiens
uagaagagcuaaagaaaaa

SEQ ID NO: 204 - RNA, 19 nt, Homo sapiens
agaagagcuaaagaaaaaa

SEQ ID NO: 205 - RNA, 19 nt, Homo sapiens
gaagagcuaaagaaaaaau

SEQ ID NO: 206 - RNA, 19 nt, Homo sapiens
aagagcuaaagaaaaaaua

SEQ ID NO: 207 - RNA, 19 nt, Homo sapiens
agagcuaaagaaaaaauac

SEQ ID NO: 208 - RNA, 19 nt, Homo sapiens
gagcuaaagaaaaaauacg

SEQ ID NO: 209 - RNA, 19 nt, Homo sapiens
agcuaaagaaaaaauacgg

SEQ ID NO: 210 - RNA, 19 nt, Homo sapiens
gcuaaagaaaaaauacggg

SEQ ID NO: 211 - RNA, 19 nt, Photinus pyralis
auccucauaaaggccaaga

SEQ ID NO: 212 - RNA, 19 nt, Photinus pyralis
agauccucauaaaggccaa

SEQ ID NO: 213 - RNA, 19 nt, Photinus pyralis
agagauccucauaaaggcc

SEQ ID NO: 214 - RNA, 19 nt, Photinus pyralis
agagagauccucauaaagg

SEQ ID NO: 215 - RNA, 19 nt, Photinus pyralis
ucagagagauccucauaaa

SEQ ID NO: 216 - RNA, 19 nt, Photinus pyralis
aaucagagagauccucaua

SEQ ID NO: 217 - RNA, 19 nt, Photinus pyralis
aaaaucagagagauccuca

SEQ ID NO: 218 - RNA, 19 nt, Photinus pyralis
gaaaaaucagagagauccu

SEQ ID NO: 219 - RNA, 19 nt, Homo sapiens
aagaaaaaucagagagauc

SEQ ID NO: 220 - RNA, 19 nt, Photinus pyralis
gcaagaaaaaucagagaga

SEQ ID NO: 221 - RNA, 19 nt, Photinus pyralis
acgcaagaaaaaucagaga

SEQ ID NO: 222 - RNA, 19 nt, Photinus pyralis
cgacgcaagaaaaaucaga

SEQ ID NO: 223 - RNA, 19 nt, Photinus pyralis
cucgacgcaagaaaaauca

SEQ ID NO: 224 - RNA, 19 nt, Photinus pyralis
aacucgacgcaagaaaaau

SEQ ID NO: 225 - RNA, 19 nt, Photinus pyralis
aaaacucgacgcaagaaaa

SEQ ID NO: 226 - RNA, 19 nt, Photinus pyralis
ggaaaacucgacgcaagaa

SEQ ID NO: 227 - RNA, 19 nt, Photinus pyralis
ccggaaaacucgacgcaag

SEQ ID NO: 228 - RNA, 19 nt, Photinus pyralis
uaccggaaaacucgacgca

SEQ ID NO: 229 - RNA, 19 nt, Photinus pyralis
cuuaccggaaaacucgacg

SEQ ID NO: 230 - RNA, 19 nt, Photinus pyralis
gucuuaccggaaaacucga

SEQ ID NO: 231 - RNA, 19 nt, Photinus pyralis
aggucuuaccggaaaacuc

SEQ ID NO: 232 - RNA, 19 nt, Photinus pyralis
aaaggucuuaccggaaaac

SEQ ID NO: 233 - RNA, 19 nt, Photinus pyralis
cgaaaggucuuaccggaaa

SEQ ID NO: 234 - RNA, 19 nt, Photinus pyralis
accgaaaggucuuaccgga

SEQ ID NO: 235 - RNA, 19 nt, Photinus pyralis
guaccgaaaggucuuaccg

SEQ ID NO: 236 - RNA, 19 nt, Photinus pyralis
aaguaccgaaaggucuuac

SEQ ID NO: 237 - RNA, 19 nt, Photinus pyralis
cgaaguaccgaaaggucuu

SEQ ID NO: 238 - RNA, 19 nt, Photinus pyralis
gacgaaguaccgaaagguc

SEQ ID NO: 239 - RNA, 19 nt, Photinus pyralis
uggacgaaguaccgaaagg

SEQ ID NO: 240 - RNA, 19 nt, Photinus pyralis
uguggacgaaguaccgaaa

SEQ ID NO: 241 - RNA, 19 nt, Photinus pyralis
uuuguggacgaaguaccga

SEQ ID NO: 242 - RNA, 19 nt, Photinus pyralis
uguuuguggacgaaguacc

SEQ ID NO: 243 - RNA, 19 nt, Photinus pyralis
uguguuuguggacgaagua

SEQ ID NO: 244 - RNA, 19 nt, Photinus pyralis
guuguguuuguggacgaag

SEQ ID NO: 245 - RNA, 19 nt, Photinus pyralis
gaguuguguuuguggacga

SEQ ID NO: 246 - RNA, 19 nt, Photinus pyralis
aggaguuguguuuguggac

SEQ ID NO: 247 - RNA, 19 nt, Photinus pyralis
ggaggaguuguguuugugg

SEQ ID NO: 248 - RNA, 19 nt, Photinus pyralis
gcggaggaguuguguuugu

SEQ ID NO: 249 - RNA, 19 nt, Photinus pyralis
gcgcggaggaguuguguuu

SEQ ID NO: 250 - RNA, 19 nt, Photinus pyralis
uugcgcggaggaguugugu

SEQ ID NO: 251 - RNA, 19 nt, Photinus pyralis
aguugcgcggaggaguugu

SEQ ID NO: 252 - RNA, 19 nt, Photinus pyralis
aaaguugcgcggaggaguu

SEQ ID NO: 253 - RNA, 19 nt, Photinus pyralis
aaaaaguugcgcggaggag

SEQ ID NO: 254 - RNA, 19 nt, Photinus pyralis
cgaaaaaguugcgcggagg

SEQ ID NO: 255 - RNA, 19 nt, Photinus pyralis
cgcgaaaaaguugcgcgga

SEQ ID NO: 256 - RNA, 19 nt, Photinus pyralis
accgcgaaaaaguugcgcg

SEQ ID NO: 257 - RNA, 19 nt, Photinus pyralis
caaccgcgaaaaaguugcg

SEQ ID NO: 258 - RNA, 19 nt, Photinus pyralis
aacaaccgcgaaaaaguug

SEQ ID NO: 259 - RNA, 19 nt, Photinus pyralis
guaacaaccgcgaaaaagu

SEQ ID NO: 260 - RNA, 19 nt, Photinus pyralis
aaguaacaaccgcgaaaaa

SEQ ID NO: 261 - RNA, 19 nt, Photinus pyralis
ucaaguaacaaccgcgaaa

SEQ ID NO: 262 - RNA, 19 nt, Photinus pyralis
agucaaguaacaaccgcga

SEQ ID NO: 263 - RNA, 19 nt, Photinus pyralis
ccagucaaguaacaaccgc

SEQ ID NO: 264 - RNA, 19 nt, Photinus pyralis
cgccagucaaguaacaacc

SEQ ID NO: 265 - RNA, 19 nt, Photinus pyralis
gucgccagucaaguaacaa

SEQ ID NO: 266 - RNA, 19 nt, Photinus pyralis
acgucgccagucaaguaac

SEQ ID NO: 267 - RNA, 19 nt, Photinus pyralis
uuacgucgccagucaagua

SEQ ID NO: 268 - RNA, 19 nt, Photinus pyralis
gauuacgucgccagucaag

SEQ ID NO: 269 - RNA, 19 nt, Photinus pyralis
uggauuacgucgccaguca

SEQ ID NO: 270 - RNA, 19 nt, Photinus pyralis
cguggauuacgucgccagu

SEQ ID NO: 271 - RNA, 19 nt, Photinus pyralis
aucguggauuacgucgcca

SEQ ID NO: 272 - RNA, 19 nt, Photinus pyralis
agaucguggauuacgucgc

SEQ ID NO: 273 - RNA, 19 nt, Photinus pyralis
agagaucguggauuacguc

SEQ ID NO: 274 - RNA, 19 nt, Photinus pyralis
aaagagaucguggauuacg

SEQ ID NO: 275 - RNA, 19 nt, Photinus pyralis
aaaaagagaucguggauua

SEQ ID NO: 276 - RNA, 19 nt, Photinus pyralis
ggaaaaagagaucguggau

SEQ ID NO: 277 - RNA, 19 nt, Photinus pyralis
acggaaaaagagaucgugg

SEQ ID NO: 278 - RNA, 19 nt, Photinus pyralis
ugacggaaaaagagaucgu

SEQ ID NO: 279 - RNA, 19 nt, Photinus pyralis
gaugacggaaaaagagauc

SEQ ID NO: 280 - RNA, 19 nt, Photinus pyralis
acgaugacggaaaaagaga

SEQ ID NO: 281 - RNA, 19 nt, Photinus pyralis
agacgaugacggaaaaaga

SEQ ID NO: 282 - RNA, 19 nt, Photinus pyralis
aaagacgaugacggaaaaa

SEQ ID NO: 283 - RNA, 19 nt, Photinus pyralis
ggaaagacgaugacggaaa

SEQ ID NO: 284 - RNA, 19 nt, Photinus pyralis
acggaaagacgaugacgga

SEQ ID NO: 285 - RNA, 19 nt, Photinus pyralis
gcacggaaagacgaugacg

SEQ ID NO: 286 - RNA, 19 nt, Photinus pyralis
gagcacggaaagacgauga

SEQ ID NO: 287 - RNA, 19 nt, Photinus pyralis
uggagcacggaaagacgau

SEQ ID NO: 288 - RNA, 19 nt, Photinus pyralis
uuuggagcacggaaagacg

SEQ ID NO: 289 - RNA, 19 nt, Photinus pyralis
guuuuggagcacggaaaga

SEQ ID NO: 290 - RNA, 19 nt, Photinus pyralis
uuguuuuggagcacggaaa

SEQ ID NO: 291 - RNA, 19 nt, Photinus pyralis
uguuguuuuggagcacgga

SEQ ID NO: 292 - RNA, 19 nt, Photinus pyralis
guuguuguuuuggagcacg

SEQ ID NO: 293 - RNA, 19 nt, Photinus pyralis
ccguuguuguuuuggagca

SEQ ID NO: 294 - RNA, 19 nt, Photinus pyralis
cgccguuguuguuuuggag

SEQ ID NO: 295 - RNA, 19 nt, Photinus pyralis
gccgccguuguuguuuugg

SEQ ID NO: 296 - RNA, 19 nt, Photinus pyralis
ccgccgccguuguuguuuu

SEQ ID NO: 297 - RNA, 19 nt, Photinus pyralis
ucccgccgccguuguuguu

SEQ ID NO: 298 - RNA, 19 nt, Photinus pyralis
cuucccgccgccguuguug

SEQ ID NO: 299 - RNA, 19 nt, Photinus pyralis
aacuucccgccgccguugu

SEQ ID NO: 300 - RNA, 19 nt, Photinus pyralis
ugaacuucccgccgccguu

SEQ ID NO: 301 - RNA, 19 nt, Homo sapiens
gggagauagugaugaagua

SEQ ID NO: 302 - RNA, 19 nt, Homo sapiens
gaaguacauccauuauaag

SEQ ID NO: 303 - RNA, 19 nt, Homo sapiens
guacgacaaccgggagaua

SEQ ID NO: 304 - RNA, 19 nt, Homo sapiens
agauagugaugaaguacau

SEQ ID NO: 305 - RNA, 19 nt, Homo sapiens
ugaagacucugcucaguuu

SEQ ID NO: 306 - RNA, 19 nt, Homo sapiens
gcaugcggccucuguuuga

SEQ ID NO: 307 - RNA, 19 nt, Homo sapiens
ugcggccucuguuugauuu

SEQ ID NO: 308 - RNA, 19 nt, Homo sapiens
gagauagugaugaaguaca

SEQ ID NO: 309 - RNA, 19 nt, Homo sapiens
ggagauagugaugaaguac

SEQ ID NO: 310 - RNA, 19 nt, Homo sapiens
gaagacucugcucaguuug

SEQ ID NO: 311 - RNA, 19 nt, Homo sapiens
ggaaccagcgccagaguga

SEQ ID NO: 312 - RNA, 19 nt, Homo sapiens
gagcgagauugcaggcaua

SEQ ID NO: 313 - RNA, 19 nt, Homo sapiens
guuaguaucugaugacuug

SEQ ID NO: 314 - RNA, 19 nt, Homo sapiens
gaaauggaaccacuaagaa

SEQ ID NO: 315 - RNA, 19 nt, Homo sapiens
ggaaauggaaccacuaaga

SEQ ID NO: 316 - RNA, 19 nt, Homo sapiens
caacuacacuuuccaaugc

SEQ ID NO: 317 - RNA, 19 nt, Homo sapiens
ccaccaagauuucaugaua

SEQ ID NO: 318 - RNA, 19 nt, Homo sapiens
gaucggaacuccaacaaga

SEQ ID NO: 319 - RNA, 19 nt, Homo sapiens
aaacggagcuacagauuau

SEQ ID NO: 320 - RNA, 19 nt, Homo sapiens
ccacacagcauucuuguaa

SEQ ID NO: 321 - RNA, 19 nt, Homo sapiens
gaaguuaccuugagcaauc

SEQ ID NO: 322 - RNA, 19 nt, Homo sapiens
ggacuuggccgauccagaa

SEQ ID NO: 323 - RNA, 19 nt, Homo sapiens
gcacuuggaucgagaugag

SEQ ID NO: 324 - RNA, 19 nt, Homo sapiens
caaagaccaauucgcguua

SEQ ID NO: 325 - RNA, 19 nt, Homo sapiens
ccgaaucaaucgcaucuuc

SEQ ID NO: 326 - RNA, 19 nt, Homo sapiens
gacaugauccugcaguuca

SEQ ID NO: 327 - RNA, 19 nt, Homo sapiens
gagcgaaucgucaccacuu

SEQ ID NO: 328 - RNA, 19 nt, Homo sapiens
ccuccgagcuggcgucuac

SEQ ID NO: 329 - RNA, 19 nt, Homo sapiens
ucacaugguuaaccucuaa

SEQ ID NO: 330 - RNA, 19 nt, Homo sapiens
gaugagggacgccauaauc

SEQ ID NO: 331 - RNA, 19 nt, Homo sapiens
ccucuaacuacaaaucuua

SEQ ID NO: 332 - RNA, 19 nt, Homo sapiens
ggaaggugcuauccaaaau

SEQ ID NO: 333 - RNA, 19 nt, Homo sapiens
gcaagcaaguccuaacauu

SEQ ID NO: 334 - RNA, 19 nt, Homo sapiens
ggaagaggaguagaccuua

SEQ ID NO: 335 - RNA, 19 nt, Homo sapiens
aggaaucaguguuguagua

SEQ ID NO: 336 - RNA, 19 nt, Homo sapiens
gaagaggaguagaccuuac

SEQ ID NO: 337 - RNA, 19 nt, Homo sapiens
gaaagucaagccugguauu

SEQ ID NO: 338 - RNA, 19 nt, Homo sapiens
aaagucaagccugguauua

SEQ ID NO: 339 - RNA, 19 nt, Homo sapiens
gcuaugaacgugaaugauc

SEQ ID NO: 340 - RNA, 19 nt, Homo sapiens
caagccugguauuacguuu

SEQ ID NO: 341 - RNA, 19 nt, Homo sapiens
ggaacaagaucugucaauu

SEQ ID NO: 342 - RNA, 19 nt, Homo sapiens
gcaaugaacgugaacgaaa

SEQ ID NO: 343 - RNA, 19 nt, Homo sapiens
caaugaacgugaacgaaau

SEQ ID NO: 344 - RNA, 19 nt, Homo sapiens
ggacaggagcgguaucaca

SEQ ID NO: 345 - RNA, 19 nt, Homo sapiens
agacagagcuugagaauaa

SEQ ID NO: 346 - RNA, 19 nt, Homo sapiens
gagaagaucuuuaugcaaa

SEQ ID NO: 347 - RNA, 19 nt, Homo sapiens
gaagagaaaucagcagaua

SEQ ID NO: 348 - RNA, 19 nt, Homo sapiens
gcaaguaacucaacuaaca

SEQ ID NO: 349 - RNA, 19 nt, Homo sapiens
gagcuaaucugccacauug

SEQ ID NO: 350 - RNA, 19 nt, Homo sapiens
gcagaugaguuacuagaaa

SEQ ID NO: 351 - RNA, 19 nt, Homo sapiens
caacuuaauuguccagaaa

SEQ ID NO: 352 - RNA, 19 nt, Homo sapiens
caacacaggauucugauaa

SEQ ID NO: 353 - RNA, 19 nt, Homo sapiens
agauugugccuaagucucu

SEQ ID NO: 354 - RNA, 19 nt, Homo sapiens
augaagaucuggaggugaa

SEQ ID NO: 355 - RNA, 19 nt, Homo sapiens
uuugagacuucuugccuaa

SEQ ID NO: 356 - RNA, 19 nt, Homo sapiens
agaucacccuccuuaaaua

SEQ ID NO: 357 - RNA, 19 nt, Homo sapiens
caacggauuuggucguauu

SEQ ID NO: 358 - RNA, 19 nt, Homo sapiens
gaaaucccaucaccaucuu

SEQ ID NO: 359 - RNA, 19 nt, Homo sapiens
gaccucaacuacaugguuu

SEQ ID NO: 360 - RNA, 19 nt, Homo sapiens
ugguuuacauguuccaaua

SEQ ID NO: 361 - RNA, 19 nt, Homo sapiens
gaagaaaucgauguuguuu

SEQ ID NO: 362 - RNA, 19 nt, Homo sapiens
acacaaacuugaacagcua

SEQ ID NO: 363 - RNA, 19 nt, Homo sapiens
ggaagaaaucgauguuguu

SEQ ID NO: 364 - RNA, 19 nt, Homo sapiens
gaaacgacgagaacaguug

SEQ ID NO: 365 - RNA, 19 nt, Homo sapiens
gcacauggauggagguucu

SEQ ID NO: 366 - RNA, 19 nt, Homo sapiens
gcagagagagcagauuuga

SEQ ID NO: 367 - RNA, 19 nt, Homo sapiens
gagguucucuggaucaagu

SEQ ID NO: 368 - RNA, 19 nt, Homo sapiens
gagcagauuugaagcaacu

SEQ ID NO: 369 - RNA, 19 nt, Homo sapiens
caaagacgaugacuucgaa

SEQ ID NO: 370 - RNA, 19 nt, Homo sapiens
gaucagcauuugcauggaa

SEQ ID NO: 371 - RNA, 19 nt, Homo sapiens
uccaggaguuugucaauaa

SEQ ID NO: 372 - RNA, 19 nt, Homo sapiens
ggaagcugauccaccuuga

SEQ ID NO: 373 - RNA, 19 nt, Homo sapiens
gcagaaaucuaaggauaua

SEQ ID NO: 374 - RNA, 19 nt, Homo sapiens
caacaaggaugaagucuau

SEQ ID NO: 375 - RNA, 19 nt, Homo sapiens
cagcagaaaucuaaggaua

SEQ ID NO: 376 - RNA, 19 nt, Homo sapiens
cuagauggcuuucucagua

SEQ ID NO: 377 - RNA, 19 nt, Homo sapiens
agacaaggucccaaagaca

SEQ ID NO: 378 - RNA, 19 nt, Homo sapiens
ggaauggcaagaccagcaa

SEQ ID NO: 379 - RNA, 19 nt, Homo sapiens
agaauuauuccaggguuua

SEQ ID NO: 380 - RNA, 19 nt, Homo sapiens
gcagacaaggucccaaaga

SEQ ID NO: 381 - RNA, 19 nt, Homo sapiens
agaagcagcuucaggauga

SEQ ID NO: 382 - RNA, 19 nt, Homo sapiens
gagcuugacuuccagaaga

SEQ ID NO: 383 - RNA, 19 nt, Homo sapiens
ccaccgaaguucacccuaa

SEQ ID NO: 384 - RNA, 19 nt, Homo sapiens
gagaagagcuccuccauca

SEQ ID NO: 385 - RNA, 19 nt, Homo sapiens
gaaagagcaucuacgguga

SEQ ID NO: 386 - RNA, 19 nt, Homo sapiens
gaaaggauuuggcuacaaa

SEQ ID NO: 387 - RNA, 19 nt, Homo sapiens
acagcaaauuccaucgugu

SEQ ID NO: 388 - RNA, 19 nt, Homo sapiens
ggaaagacuguuccaaaaa

SEQ ID NO: 389 - RNA, 19 nt, Homo sapiens
caacacgccucauccucua

SEQ ID NO: 390 - RNA, 19 nt, Homo sapiens
caugaaagcuuacaucaac

SEQ ID NO: 391 - RNA, 19 nt, Homo sapiens
aagaugccaugaaagcuua

SEQ ID NO: 392 - RNA, 19 nt, Homo sapiens
gcacauaccgccugagucu

SEQ ID NO: 393 - RNA, 19 nt, Homo sapiens
gaucaaaucugaagaagga

SEQ ID NO: 394 - RNA, 19 nt, Homo sapiens
gccaagaaguuuccuaaua

SEQ ID NO: 395 - RNA, 19 nt, Homo sapiens
cagcauaucuugaaccauu

SEQ ID NO: 396 - RNA, 19 nt, Homo sapiens
gaacaaaggaaacggauga

SEQ ID NO: 397 - RNA, 19 nt, Homo sapiens
cggaaacgguccaggcuau

SEQ ID NO: 398 - RNA, 19 nt, Homo sapiens
gcuucgagcagacaugaua

SEQ ID NO: 399 - RNA, 19 nt, Homo sapiens
ccuacacgguccuccuaua

SEQ ID NO: 400 - RNA, 19 nt, Homo sapiens
gccaagaaccucaucaucu

SEQ ID NO: 401 - RNA, 19 nt, Homo sapiens
gauaugggcugaauacaaa

SEQ ID NO: 402 - RNA, 19 nt, Homo sapiens
gcacucugauugacaaaua

SEQ ID NO: 403 - RNA, 19 nt, Homo sapiens
ugaagucucugauuaagua

SEQ ID NO: 404 - RNA, 19 nt, Homo sapiens
ucagagagauccucauaaa

SEQ ID NO: 405 - RNA, 19 nt, Homo sapiens
gcaagaagaucaccauuuc

SEQ ID NO: 406 - RNA, 19 nt, Homo sapiens
gagagaaauuugaggauga

SEQ ID NO: 407 - RNA, 19 nt, Homo sapiens
gaaaggauuuggcuauaag

SEQ ID NO: 408 - RNA, 19 nt, Homo sapiens
gaaagaaggcaugaacauu

SEQ ID NO: 409 - RNA, 19 nt, Homo sapiens
gggagauagugaugaagua

SEQ ID NO: 410 - RNA, 19 nt, Homo sapiens
gaaguacauccauuauaag

SEQ ID NO: 411 - RNA, 19 nt, Homo sapiens
guacgacaaccgggagaua

SEQ ID NO: 412 - RNA, 19 nt, Homo sapiens
agauagugaugaaguacau

SEQ ID NO: 413 - RNA, 19 nt, Homo sapiens
ugaagacucugcucaguuu

SEQ ID NO: 414 - RNA, 19 nt, Homo sapiens
gcaugcggccucuguuuga

SEQ ID NO: 415 - RNA, 19 nt, Homo sapiens
gcacacagcuuacuacauc

SEQ ID NO: 416 - RNA, 19 nt, Homo sapiens
gaaaugcccugguaucuca

SEQ ID NO: 417 - RNA, 19 nt, Homo sapiens
gaaggaacgugaugugauc

SEQ ID NO: 418 - RNA, 19 nt, Homo sapiens
gcacuacuccuguguguga

SEQ ID NO: 419 - RNA, 19 nt, Homo sapiens
gaacccagcuggagaacuu

SEQ ID NO: 420 - RNA, 19 nt, Homo sapiens
gauauacagugugaucuua

SEQ ID NO: 421 - RNA, 19 nt, Homo sapiens
guacuacgauccugauuau

SEQ ID NO: 422 - RNA, 19 nt, Homo sapiens
gugccgaccuuuacaauuu

SEQ ID NO: 423 - RNA, 19 nt, Homo sapiens
gaaggaaacugaauucaaa

SEQ ID NO: 424 - RNA, 19 nt, Homo sapiens
ggaaauauguacuacgaaa

SEQ ID NO: 425 - RNA, 19 nt, Homo sapiens
ccacaaagcagugaauuua

SEQ ID NO: 426 - RNA, 19 nt, Homo sapiens
guaacaagcucacgcaguu

SEQ ID NO: 427 - RNA, 19 nt, Homo sapiens
ggaaaccucucauugcuaa

SEQ ID NO: 428 - RNA, 19 nt, Homo sapiens
gaaagaaccuugccgauca

SEQ ID NO: 429 - RNA, 19 nt, Homo sapiens
ggaaauacaucagagcuua

SEQ ID NO: 430 - RNA, 19 nt, Homo sapiens
gaaaguaugugucuuaagu

SEQ ID NO: 431 - RNA, 19 nt, Homo sapiens
uggcacaggaggaaagagc

SEQ ID NO: 432 - RNA, 19 nt, Homo sapiens
uggaagccaucgccaaaua

SEQ ID NO: 433 - RNA, 19 nt, Homo sapiens
ugaaacggcugccugauuu

SEQ ID NO: 434 - RNA, 19 nt, Homo sapiens
gaaguuaccucuuacauuu

SEQ ID NO: 435 - RNA, 19 nt, Homo sapiens
guacgaaacuguaugauua

SEQ ID NO: 436 - RNA, 19 nt, Homo sapiens
ggacgaggcuaucauuaug

SEQ ID NO: 437 - RNA, 19 nt, Homo sapiens
gaaggaaccugaugcuuua

SEQ ID NO: 438 - RNA, 19 nt, Homo sapiens
gcauauaucuagaagguau

SEQ ID NO: 439 - RNA, 19 nt, Homo sapiens
gaacaaauacaugggauua

SEQ ID NO: 440 - RNA, 19 nt, Homo sapiens
ggacacagauuuagacuug

SEQ ID NO: 441 - RNA, 19 nt, Homo sapiens
gaacguacuugcagaugug

SEQ ID NO: 442 - RNA, 19 nt, Homo sapiens
gagaaagcauuuguuugua

SEQ ID NO: 443 - RNA, 19 nt, Homo sapiens
ggagaaagcauuuguuugu

SEQ ID NO: 444 - RNA, 19 nt, Homo sapiens
cgaggcagcuugaguuaaa

SEQ ID NO: 445 - RNA, 19 nt, Homo sapiens
gguaagauauugugcuuua

SEQ ID NO: 446 - RNA, 19 nt, Homo sapiens
ccgcaaauaugcagaauua

SEQ ID NO: 447 - RNA, 19 nt, Homo sapiens
ggauguacauggcguguua

SEQ ID NO: 448 - RNA, 19 nt, Homo sapiens
ggugaaguuuguauguuua

SEQ ID NO: 449 - RNA, 19 nt, Homo sapiens
ccgaggagcuuuaugagau

SEQ ID NO: 450 - RNA, 19 nt, Homo sapiens
gcuccgcgcuuuccgauuu

SEQ ID NO: 451 - RNA, 19 nt, Homo sapiens
gagcaggaauggugagaug

SEQ ID NO: 452 - RNA, 19 nt, Homo sapiens
gaacuugggauaagagugu

SEQ ID NO: 453 - RNA, 19 nt, Homo sapiens
ccgaggagcuuuaugagau

SEQ ID NO: 454 - RNA, 19 nt, Homo sapiens
uuuaugagaugcugaguga

SEQ ID NO: 455 - RNA, 19 nt, Homo sapiens
gcaaugauguccagaagaa

SEQ ID NO: 456 - RNA, 19 nt, Homo sapiens
gaagaauauucaggacuua

SEQ ID NO: 457 - RNA, 19 nt, Homo sapiens
gaagagagucggcagauga

SEQ ID NO: 458 - RNA, 19 nt, Homo sapiens
ccaagagugugcuaaagaa

SEQ ID NO: 459 - RNA, 19 nt, Homo sapiens
gagacacucugaaaugaua

SEQ ID NO: 460 - RNA, 19 nt, Homo sapiens
gaaaugauguggauaagag

SEQ ID NO: 461 - RNA, 19 nt, Homo sapiens
gaucaaauccucccugaaa

SEQ ID NO: 462 - RNA, 19 nt, Homo sapiens
ugaaugagcugaugauugu

SEQ ID NO: 463 - RNA, 9 nt, Homo sapiens
gaccaccca

SEQ ID NO: 464 - RNA, 10 nt, Homo sapiens
gaaccaccca

SEQ ID NO: 465 - RNA, 19 nt, Homo sapiens
gacaaggacgggcacauua

SEQ ID NO: 466 - RNA, 19 nt, Homo sapiens
ggacaaggacgggcacauu

SEQ ID NO: 467 - RNA, 19 nt, Homo sapiens
gcuacuuccuccucaagaa

SEQ ID NO: 468 - RNA, 19 nt, Homo sapiens
gaccgccucugcuuuguca

SEQ ID NO: 469 - RNA, 19 nt, Homo sapiens
guacuucgaugaugaauuu

SEQ ID NO: 470 - RNA, 19 nt, Homo sapiens
gcaaagagggcaucaguga

SEQ ID NO: 471 - RNA, 19 nt, Homo sapiens
gggcuaaagugaccaugaa

SEQ ID NO: 472 - RNA, 19 nt, Homo sapiens
gcagaaugccagcugauga

SEQ ID NO: 473 - RNA, 19 nt, Homo sapiens
ggaguaaacuggcaagaug

SEQ ID NO: 474 - RNA, 19 nt, Homo sapiens
gacauuaaauuuccucgaa

SEQ ID NO: 475 - RNA, 19 nt, Homo sapiens
gaccaaagccaaacacauu

SEQ ID NO: 476 - RNA, 19 nt, Homo sapiens
gaggagagaaugaauugua

SEQ ID NO: 477 - RNA, 19 nt, Homo sapiens
ggagacacauuucggauua

SEQ ID NO: 478 - RNA, 19 nt, Homo sapiens
gaucugaccugcaaugauu

SEQ ID NO: 479 - RNA, 19 nt, Homo sapiens
gacaaucccucacaauaaa

SEQ ID NO: 480 - RNA, 19 nt, Homo sapiens
ccagaaagcuuuggucauu

SEQ ID NO: 481 - RNA, 19 nt, Homo sapiens
gaccauaccucauaacaag

SEQ ID NO: 482 - RNA, 19 nt, Homo sapiens
ugaaagaccuccaccaauc

SEQ ID NO: 483 - RNA, 19 nt, Homo sapiens
gaugaaggcuccagguguu

SEQ ID NO: 484 - RNA, 19 nt, Homo sapiens
uaucagcauuuacgacuua

SEQ ID NO: 485 - RNA, 19 nt, Homo sapiens
gcaauagcccagaagauaa

SEQ ID NO: 486 - RNA, 19 nt, Homo sapiens
cgcaauagcccagaagaua

SEQ ID NO: 487 - RNA, 19 nt, Homo sapiens
gagauggacauuuaaagca

SEQ ID NO: 488 - RNA, 19 nt, Homo sapiens
caauagcccagaagauaag

SEQ ID NO: 489 - RNA, 19 nt, Homo sapiens
ccaggcaucucauaacaaa

SEQ ID NO: 490 - RNA, 19 nt, Homo sapiens
ccagaugccuauacaaaca

SEQ ID NO: 491 - RNA, 19 nt, Homo sapiens
ggagguaugagucaguaua

SEQ ID NO: 492 - RNA, 19 nt, Homo sapiens
gagguaugagucaguauaa

SEQ ID NO: 493 - RNA, 19 nt, Homo sapiens
caauagcaacaaguauacc

SEQ ID NO: 494 - RNA, 19 nt, Homo sapiens
ugaaguccaggacgaugau

SEQ ID NO: 495 - RNA, 19 nt, Homo sapiens
ugucacacuaugguaacca

SEQ ID NO: 496 - RNA, 19 nt, Homo sapiens
uguucaaugggagcuugga

SEQ ID NO: 497 - RNA, 19 nt, Homo sapiens
gagaagaaauggaagaaau

SEQ ID NO: 498 - RNA, 19 nt, Homo sapiens
ccaaagugcugcaguacua

SEQ ID NO: 499 - RNA, 19 nt, Homo sapiens
gagcaugccgucaauaaua

SEQ ID NO: 500 - RNA, 19 nt, Homo sapiens
ggucugaacugaaugaaga

SEQ ID NO: 501 - RNA, 19 nt, Homo sapiens
ggacaaagguguucaaauc

SEQ ID NO: 502 - RNA, 19 nt, Homo sapiens
gaacccagcugccuaacaa

SEQ ID NO: 503 - RNA, 19 nt, Homo sapiens
gcgcacagcuucuuugaug

SEQ ID NO: 504 - RNA, 19 nt, Homo sapiens
gcucuagccugcuggagua

SEQ ID NO: 505 - RNA, 19 nt, Homo sapiens
gaagaaagaugaggucuau

SEQ ID NO: 506 - RNA, 19 nt, Homo sapiens
ggacccaaaugucaaacua

SEQ ID NO: 507 - RNA, 19 nt, Homo sapiens
gaaaugaacccaaacuaca

SEQ ID NO: 508 - RNA, 19 nt, Homo sapiens
gaugaggucuaucuuaauc

SEQ ID NO: 509 - RNA, 19 nt, Homo sapiens
ggaaguacauuugaagaac

SEQ ID NO: 510 - RNA, 19 nt, Homo sapiens
agaaggaaguacauuugaa

SEQ ID NO: 511 - RNA, 19 nt, Homo sapiens
ccucaagccugccaaguca

SEQ ID NO: 512 - RNA, 19 nt, Homo sapiens
gguggaugcucuucaguuc

SEQ ID NO: 513 - RNA, 19 nt, Homo sapiens
caacgaagcuucugugaug

SEQ ID NO: 514 - RNA, 19 nt, Homo sapiens
ggccagaaauggagaauaa

SEQ ID NO: 515 - RNA, 19 nt, Homo sapiens
gaagcacccuuuaagaaug

SEQ ID NO: 516 - RNA, 19 nt, Homo sapiens
gcagacaccuacaacauca

SEQ ID NO: 517 - RNA, 19 nt, Homo sapiens
ggaauugcguuuacacuua

SEQ ID NO: 518 - RNA, 19 nt, Homo sapiens
ggaaacugaucauuaagaa

SEQ ID NO: 519 - RNA, 19 nt, Homo sapiens
cgacagggaugaaguacaa

SEQ ID NO: 520 - RNA, 19 nt, Homo sapiens
aaacgcagcugcccaucua

SEQ ID NO: 521 - RNA, 19 nt, Homo sapiens
ggaagacguuugaggauua

SEQ ID NO: 522 - RNA, 19 nt, Homo sapiens
gaacaaggcucccgagagu

SEQ ID NO: 523 - RNA, 19 nt, Homo sapiens
ggagagaccuuggaaauug

SEQ ID NO: 524 - RNA, 19 nt, Homo sapiens
ggacggaacccaccuauuu

SEQ ID NO: 525 - RNA, 19 nt, Homo sapiens
aaagaggucuggcaaguga

SEQ ID NO: 526 - RNA, 19 nt, Homo sapiens
gaaccugauugguaucuac

SEQ ID NO: 527 - RNA, 19 nt, Homo sapiens
ccacggcgaucuagugcuu

SEQ ID NO: 528 - RNA, 19 nt, Homo sapiens
gucagucugucguccagua

SEQ ID NO: 529 - RNA, 19 nt, Homo sapiens
ggacuggacuucaacuuug

SEQ ID NO: 530 - RNA, 19 nt, Homo sapiens
ccacgaagcaguucaaaug

SEQ ID NO: 531 - RNA, 19 nt, Homo sapiens
gagaagcgacugacacuug

SEQ ID NO: 532 - RNA, 19 nt, Homo sapiens
gaccagagaucgcuaacca

SEQ ID NO: 533 - RNA, 19 nt, Homo sapiens
caagagaccucguggagaa

SEQ ID NO: 534 - RNA, 19 nt, Homo sapiens
gaccagaggccaagaauuu

SEQ ID NO: 535 - RNA, 19 nt, Homo sapiens
ggaaacgaguaucuuauau

SEQ ID NO: 536 - RNA, 19 nt, Homo sapiens
gagaagcgacauaucauaa

SEQ ID NO: 537 - RNA, 19 nt, Homo sapiens
gcuaucaucugaacaauua

SEQ ID NO: 538 - RNA, 19 nt, Homo sapiens
ggauagaggccaaauaaua

SEQ ID NO: 539 - RNA, 19 nt, Homo sapiens
ggacaacuguuucauauag

SEQ ID NO: 540 - RNA, 19 nt, Homo sapiens
gccaguaccucauggauua

SEQ ID NO: 541 - RNA, 19 nt, Homo sapiens
cgacaagacugccgagaga

SEQ ID NO: 542 - RNA, 19 nt, Homo sapiens
ucaagugucuccuaauaug

SEQ ID NO: 543 - RNA, 19 nt, Homo sapiens
ggauucaguuggagugauu

SEQ ID NO: 544 - RNA, 19 nt, Homo sapiens
uuucaagugucuccuaaua

SEQ ID NO: 545 - RNA, 19 nt, Homo sapiens
ggaaauauggcuucucuga

SEQ ID NO: 546 - RNA, 19 nt, Homo sapiens
gaaagacgagagaccaaua

SEQ ID NO: 547 - RNA, 19 nt, Homo sapiens
guaaagcauugugucauaa

SEQ ID NO: 548 - RNA, 19 nt, Homo sapiens
ggaucaaguugucaaagaa

SEQ ID NO: 549 - RNA, 19 nt, Homo sapiens
ggaaaggcgggaacaauaa

SEQ ID NO: 550 - RNA, 19 nt, Homo sapiens
gaugaagcguacugcaauu

SEQ ID NO: 551 - RNA, 19 nt, Homo sapiens
ggacagcgaaucucacuac

SEQ ID NO: 552 - RNA, 19 nt, Homo sapiens
gcaagauccgagaccagua

SEQ ID NO: 553 - RNA, 19 nt, Homo sapiens
gaaugcagcuuacuuucuu

SEQ ID NO: 554 - RNA, 19 nt, Homo sapiens
gaccgaagcugacauuauc

SEQ ID NO: 555 - RNA, 19 nt, Homo sapiens
ucgauuaccugaagaguuu

SEQ ID NO: 556 - RNA, 19 nt, Homo sapiens
ccugaagaguuuagaaaua

SEQ ID NO: 557 - RNA, 19 nt, Homo sapiens
gugaagaucuugaccaaug

SEQ ID NO: 558 - RNA, 19 nt, Homo sapiens
gaucagcauacacaaauua

SEQ ID NO: 559 - RNA, 19 nt, Homo sapiens
ggcgcuauguguauuauua

SEQ ID NO: 560 - RNA, 19 nt, Homo sapiens
guauagagcgugcagauaa

SEQ ID NO: 561 - RNA, 19 nt, Homo sapiens
gccagaaacucauugaagu

SEQ ID NO: 562 - RNA, 19 nt, Homo sapiens
ggauauuccuggacugacu

SEQ ID NO: 563 - RNA, 19 nt, Homo sapiens
ccaaggagaacuggagaaa

SEQ ID NO: 564 - RNA, 19 nt, Homo sapiens
gcguauggccacagaaguu

SEQ ID NO: 565 - RNA, 19 nt, Homo sapiens
gaugacaccuucuacuuug

SEQ ID NO: 566 - RNA, 19 nt, Homo sapiens
gagaaugggcuccucauga

SEQ ID NO: 567 - RNA, 19 nt, Homo sapiens
caagcgggauccuucagaa

SEQ ID NO: 568 - RNA, 19 nt, Homo sapiens
ccaccggccugauggaaga

SEQ ID NO: 569 - RNA, 19 nt, Homo sapiens
gaagggaaguuguaucuua

SEQ ID NO: 570 - RNA, 19 nt, Homo sapiens
gaaaguauguguauguagu

SEQ ID NO: 571 - RNA, 19 nt, Homo sapiens
ggacagcauccaaacauua

SEQ ID NO: 572 - RNA, 19 nt, Homo sapiens
ggaggugaauugcuggaua

SEQ ID NO: 573 - RNA, 19 nt, Homo sapiens
uuaaugguggagaguuguu

SEQ ID NO: 574 - RNA, 19 nt, Homo sapiens
auuaacugggaugaucuca

SEQ ID NO: 575 - RNA, 19 nt, Homo sapiens
gaagaaagcaauccugaaa

SEQ ID NO: 576 - RNA, 19 nt, Homo sapiens
aaacacagcugaaauguac

SEQ ID NO: 577 - RNA, 19 nt, Homo sapiens
gaagauggcuauucugugu

SEQ ID NO: 578 - RNA, 19 nt, Homo sapiens
uaugaaggcucgagaguua

SEQ ID NO: 579 - RNA, 19 nt, Homo sapiens
cgacacggcugauaacuga

SEQ ID NO: 580 - RNA, 19 nt, Homo sapiens
cggcugauguuguuaaaua

SEQ ID NO: 581 - RNA, 19 nt, Homo sapiens
gcauuaaucucuuaccaua

SEQ ID NO: 582 - RNA, 19 nt, Homo sapiens
ccaauguccucuugucuuu

SEQ ID NO: 583 - RNA, 19 nt, Homo sapiens
ggagacacaucaccuacuu

SEQ ID NO: 584 - RNA, 19 nt, Homo sapiens
ucaccaggcucaucaagaa

SEQ ID NO: 585 - RNA, 19 nt, Homo sapiens
gaaagucucugucaaaaua

SEQ ID NO: 586 - RNA, 19 nt, Homo sapiens
gcaauaggcuccauuagug

SEQ ID NO: 587 - RNA, 19 nt, Homo sapiens
ggaacaugaucaacuuaua

SEQ ID NO: 588 - RNA, 19 nt, Homo sapiens
ggauacagauuccauaaau

SEQ ID NO: 589 - RNA, 19 nt, Homo sapiens
ggaaaucagugacauagug

SEQ ID NO: 590 - RNA, 19 nt, Homo sapiens
gguccacacugcaauguuu

SEQ ID NO: 591 - RNA, 19 nt, Homo sapiens
gaaggaaaucagugacaua

SEQ ID NO: 592 - RNA, 19 nt, Homo sapiens
ucacugaguucaugaccua

SEQ ID NO: 593 - RNA, 19 nt, Homo sapiens
gaaauggagcgaacagaua

SEQ ID NO: 594 - RNA, 19 nt, Homo sapiens
gagccaaauuuccuauuaa

SEQ ID NO: 595 - RNA, 19 nt, Homo sapiens
guaauaagccuacagucua

SEQ ID NO: 596 - RNA, 19 nt, Homo sapiens
ggagugaaguucgcucuaa

SEQ ID NO: 597 - RNA, 19 nt, Homo sapiens
aaacgcaagucguggauga

SEQ ID NO: 598 - RNA, 19 nt, Homo sapiens
gcaagucguggaugaguaa

SEQ ID NO: 599 - RNA, 19 nt, Homo sapiens
gagcacuaccucagaauga

SEQ ID NO: 600 - RNA, 19 nt, Homo sapiens
ucagcagcacccacuauua

SEQ ID NO: 601 - RNA, 19 nt, Homo sapiens
gacaagauccugcagaaua

SEQ ID NO: 602 - RNA, 19 nt, Homo sapiens
ggaagagucuggcaguuga

SEQ ID NO: 603 - RNA, 19 nt, Homo sapiens
gcacguggcucgggacauu

SEQ ID NO: 604 - RNA, 19 nt, Homo sapiens
gaacugcagugaaggaaca

SEQ ID NO: 605 - RNA, 19 nt, Homo sapiens
ggucagagcuggaggauuu

SEQ ID NO: 606 - RNA, 19 nt, Homo sapiens
gaaagaaggagacccguua

SEQ ID NO: 607 - RNA, 19 nt, Homo sapiens
ccaagaagaucuacaaugg

SEQ ID NO: 608 - RNA, 19 nt, Homo sapiens
ggaacugcaugcugaauga

SEQ ID NO: 609 - RNA, 19 nt, Homo sapiens
gaggaugccugcuggauuu

SEQ ID NO: 610 - RNA, 19 nt, Homo sapiens
acaugaagguggccauuaa

SEQ ID NO: 611 - RNA, 19 nt, Homo sapiens
ggucagcgcccaagacaag

SEQ ID NO: 612 - RNA, 19 nt, Homo sapiens
gaaacucgggucuggacaa

SEQ ID NO: 613 - RNA, 19 nt, Homo sapiens
aaacaaaccuuuccuacua

SEQ ID NO: 614 - RNA, 19 nt, Homo sapiens
gaaggagcauuuaugguua

SEQ ID NO: 615 - RNA, 19 nt, Homo sapiens
gagaagagauuaccuuguu

SEQ ID NO: 616 - RNA, 19 nt, Homo sapiens
guaaggcugugaaugauaa

SEQ ID NO: 617 - RNA, 19 nt, Homo sapiens
gaacaggaauggaagcuua

SEQ ID NO: 618 - RNA, 19 nt, Homo sapiens
gcuaugggcugccaaauuu

SEQ ID NO: 619 - RNA, 19 nt, Homo sapiens
gaaagcaacuuaccauggu

SEQ ID NO: 620 - RNA, 19 nt, Homo sapiens
gguaaacgaucaaggaguu

SEQ ID NO: 621 - RNA, 19 nt, Homo sapiens
caacuuagccaagacaauu

SEQ ID NO: 622 - RNA, 19 nt, Homo sapiens
gaaauugaaggcucaguga

SEQ ID NO: 623 - RNA, 19 nt, Homo sapiens
uggaacagcugaacauugu

SEQ ID NO: 624 - RNA, 19 nt, Homo sapiens
gcuuccaacugcuuauaua

SEQ ID NO: 625 - RNA, 19 nt, Homo sapiens
ggagagcucugacguuuga

SEQ ID NO: 626 - RNA, 19 nt, Homo sapiens
caacaacgcuaccuuccaa

SEQ ID NO: 627 - RNA, 19 nt, Homo sapiens
ccacgcagcugccuuacaa

SEQ ID NO: 628 - RNA, 19 nt, Homo sapiens
ggaacaaccugcaguuugg

SEQ ID NO: 629 - RNA, 19 nt, Homo sapiens
cagaauguauugccaagua

SEQ ID NO: 630 - RNA, 19 nt, Homo sapiens
gaacaaagucgccgucaag

SEQ ID NO: 631 - RNA, 19 nt, Homo sapiens
gcgagugccuuauccaaga

SEQ ID NO: 632 - RNA, 19 nt, Homo sapiens
ggagaagggcuacaagaug

SEQ ID NO: 633 - RNA, 19 nt, Homo sapiens
ggagauggaguuugaguuu

SEQ ID NO: 634 - RNA, 19 nt, Homo sapiens
cagaggcccugucaucuuu

SEQ ID NO: 635 - RNA, 19 nt, Homo sapiens
gcugguagcugucaagauc

SEQ ID NO: 636 - RNA, 19 nt, Homo sapiens
ugaaagaggugaagaucau

SEQ ID NO: 637 - RNA, 19 nt, Homo sapiens
gguaagaacuacacaauca

SEQ ID NO: 638 - RNA, 19 nt, Homo sapiens
gaacgagagugccaccaau

SEQ ID NO: 639 - RNA, 19 nt, Homo sapiens
acaccaaucugaaguuuau

SEQ ID NO: 640 - RNA, 19 nt, Homo sapiens
caacaagaaugccaggaau

SEQ ID NO: 641 - RNA, 19 nt, Homo sapiens
ccuagaagcugccauuaaa

SEQ ID NO: 642 - RNA, 19 nt, Homo sapiens
gauuaggccuggcuuauga

SEQ ID NO: 643 - RNA, 19 nt, Homo sapiens
cccaguagcugcacacaua

SEQ ID NO: 644 - RNA, 19 nt, Homo sapiens
ggugguaccugaacuguau

SEQ ID NO: 645 - RNA, 19 nt, Homo sapiens
gaaggaaacugaauucaaa

SEQ ID NO: 646 - RNA, 19 nt, Homo sapiens
ggaaauauguacuacgaaa

SEQ ID NO: 647 - RNA, 19 nt, Homo sapiens
ccacaaagcagugaauuua

SEQ ID NO: 648 - RNA, 19 nt, Homo sapiens
guaacaagcucacgcaguu

SEQ ID NO: 649 - RNA, 19 nt, Homo sapiens
gaccagagcuucaccauuc

SEQ ID NO: 650 - RNA, 19 nt, Homo sapiens
gcaagacuguggccauuaa

SEQ ID NO: 651 - RNA, 19 nt, Homo sapiens
gggcgaaccugaccuauga

SEQ ID NO: 652 - RNA, 19 nt, Homo sapiens
gauuguagccgucaucuuu

SEQ ID NO: 653 - RNA, 19 nt, Homo sapiens
ggagggaucuggcaacuug

SEQ ID NO: 654 - RNA, 19 nt, Homo sapiens
gcagcaaggugcacgaauu

SEQ ID NO: 655 - RNA, 19 nt, Homo sapiens
ggagaaggauggcgaguuc

SEQ ID NO: 656 - RNA, 19 nt, Homo sapiens
gaaguucacuaccgagauc

SEQ ID NO: 657 - RNA, 19 nt, Homo sapiens
gaucggaccuccagaaaua

SEQ ID NO: 658 - RNA, 19 nt, Homo sapiens
gaacucagcucagaagauu

SEQ ID NO: 659 - RNA, 19 nt, Homo sapiens
gcaagaggcacaaauguua

SEQ ID NO: 660 - RNA, 19 nt, Homo sapiens
gagcaucaguuuacaaaga

SEQ ID NO: 661 - RNA, 19 nt, Homo sapiens
ggucugggaugaaguauuu

SEQ ID NO: 662 - RNA, 19 nt, Homo sapiens
gaaugaaguuaccuuauug

SEQ ID NO: 663 - RNA, 19 nt, Homo sapiens
gaacuuggguggauagcaa

SEQ ID NO: 664 - RNA, 19 nt, Homo sapiens
gagauuaaauucaccuuga

SEQ ID NO: 665 - RNA, 19 nt, Homo sapiens
gaaaagagauguugcagua

SEQ ID NO: 666 - RNA, 19 nt, Homo sapiens
cuagaugccuccuguauua

SEQ ID NO: 667 - RNA, 19 nt, Homo sapiens
agaagaagguuaucguuua

SEQ ID NO: 668 - RNA, 19 nt, Homo sapiens
uagcaaagcugaccaagaa

SEQ ID NO: 669 - RNA, 19 nt, Homo sapiens
gaagaugcacuaucagaau

SEQ ID NO: 670 - RNA, 19 nt, Homo sapiens
gagaagaugcacuaucaga

SEQ ID NO: 671 - RNA, 19 nt, Homo sapiens
aaccugaucuccaguguga

SEQ ID NO: 672 - RNA, 19 nt, Homo sapiens
ucucagaccugggcuaugu

SEQ ID NO: 673 - RNA, 19 nt, Homo sapiens
gcgauaagcuccagcauua

SEQ ID NO: 674 - RNA, 19 nt, Homo sapiens
gaaacgggcuuauagcaaa

SEQ ID NO: 675 - RNA, 19 nt, Homo sapiens
ggaugaagaucuacauuga

SEQ ID NO: 676 - RNA, 19 nt, Homo sapiens
gcacgucucugucaacauc

SEQ ID NO: 677 - RNA, 19 nt, Homo sapiens
acuaugagcugcaguacua

SEQ ID NO: 678 - RNA, 19 nt, Homo sapiens
guacaacgccacagccaua

SEQ ID NO: 679 - RNA, 19 nt, Homo sapiens
ggaaagcaaugacuguucu

SEQ ID NO: 680 - RNA, 19 nt, Homo sapiens
cggacaagcugcaacacua

SEQ ID NO: 681 - RNA, 19 nt, Homo sapiens
ggugugaucuccaauguga

SEQ ID NO: 682 - RNA, 19 nt, Homo sapiens
gggaugaccuccuguacaa

SEQ ID NO: 683 - RNA, 19 nt, Homo sapiens
cagaagaccugcuccguau

SEQ ID NO: 684 - RNA, 19 nt, Homo sapiens
gagaugaaguacuuugaga

SEQ ID NO: 685 - RNA, 19 nt, Homo sapiens
ggacaaacacggacaguau

SEQ ID NO: 686 - RNA, 19 nt, Homo sapiens
guacuaaggucuacaucga

SEQ ID NO: 687 - RNA, 19 nt, Homo sapiens
ggagagaagcagaauauuc

SEQ ID NO: 688 - RNA, 19 nt, Homo sapiens
gccaauagccacucuaaca

SEQ ID NO: 689 - RNA, 19 nt, Homo sapiens
ggaagucgauccugcuuau

SEQ ID NO: 690 - RNA, 19 nt, Homo sapiens
ggaccaagguggacacaau

SEQ ID NO: 691 - RNA, 19 nt, Homo sapiens
ugugggaagugaugaguua

SEQ ID NO: 692 - RNA, 19 nt, Homo sapiens
cgggagaccuucacccuuu

SEQ ID NO: 693 - RNA, 19 nt, Homo sapiens
ggacgaauucugcacaaug

SEQ ID NO: 694 - RNA, 19 nt, Homo sapiens
gacgaauucugcacaaugg

SEQ ID NO: 695 - RNA, 19 nt, Homo sapiens
cuacaacacagacacguuu

SEQ ID NO: 696 - RNA, 19 nt, Homo sapiens
agacgaagcauacgugaug

SEQ ID NO: 697 - RNA, 19 nt, Homo sapiens
aagaggaugucaacgguua

SEQ ID NO: 698 - RNA, 19 nt, Homo sapiens
gaagacugccagacauuga

SEQ ID NO: 699 - RNA, 19 nt, Homo sapiens
gacaaacacuggugcugau

SEQ ID NO: 700 - RNA, 19 nt, Homo sapiens
gcaguggauucgagaagug

SEQ ID NO: 701 - RNA, 19 nt, Homo sapiens
gaggaaagaugccaauuaa

SEQ ID NO: 702 - RNA, 19 nt, Homo sapiens
gcaggaaacaucuauauua

SEQ ID NO: 703 - RNA, 19 nt, Homo sapiens
gaucacaacugcugcuuaa

SEQ ID NO: 704 - RNA, 19 nt, Homo sapiens
ccucaaagauaccuaguua

SEQ ID NO: 705 - RNA, 19 nt, Homo sapiens
ggagugaccugaagaauuc

SEQ ID NO: 706 - RNA, 19 nt, Homo sapiens
uaaagcagauucccauuaa

SEQ ID NO: 707 - RNA, 19 nt, Homo sapiens
ggaaaguacuguccaaaug

SEQ ID NO: 708 - RNA, 19 nt, Homo sapiens
gaacaacggcugcuaaaga

SEQ ID NO: 709 - RNA, 19 nt, Homo sapiens
cgaggauccugaagcagua

SEQ ID NO: 710 - RNA, 19 nt, Homo sapiens
aggaauaccuggagauuag

SEQ ID NO: 711 - RNA, 19 nt, Homo sapiens
caacaggagcuccggaaug

SEQ ID NO: 712 - RNA, 19 nt, Homo sapiens
gguguugggugagcagauu

SEQ ID NO: 713 - RNA, 19 nt, Homo sapiens
uaagaaaugucuccuuuga

SEQ ID NO: 714 - RNA, 19 nt, Homo sapiens
gaagacugcuggaguuaau

SEQ ID NO: 715 - RNA, 19 nt, Homo sapiens
gauggucccuuguauguca

SEQ ID NO: 716 - RNA, 19 nt, Homo sapiens
cuuaagaaaugucuccuuu

SEQ ID NO: 717 - RNA, 19 nt, Homo sapiens
ccaaaucucucaaccagaa

SEQ ID NO: 718 - RNA, 19 nt, Homo sapiens
gaacaguauucaccuaguu

SEQ ID NO: 719 - RNA, 19 nt, Homo sapiens
ggccaacacugucaaguuu

SEQ ID NO: 720 - RNA, 19 nt, Homo sapiens
gugaagauguugaaagaug

SEQ ID NO: 721 - RNA, 19 nt, Homo sapiens
ugucggaccuggugucuga

SEQ ID NO: 722 - RNA, 19 nt, Homo sapiens
gcaucaagcugcggcauca

SEQ ID NO: 723 - RNA, 19 nt, Homo sapiens
ggacggcacacccuacguu

SEQ ID NO: 724 - RNA, 19 nt, Homo sapiens
ugcacaaccucgacuacua

SEQ ID NO: 725 - RNA, 19 nt, Homo sapiens
gcacuggagucucgugaug

SEQ ID NO: 726 - RNA, 19 nt, Homo sapiens
cauagggaccucucgaaua

SEQ ID NO: 727 - RNA, 19 nt, Homo sapiens
auacggacaucauccugua

SEQ ID NO: 728 - RNA, 19 nt, Homo sapiens
auagggaccucucgaauag

SEQ ID NO: 729 - RNA, 19 nt, Homo sapiens
gcgaucaugugaagcauua

SEQ ID NO: 730 - RNA, 19 nt, Homo sapiens
ucacugagcucaucaccaa

SEQ ID NO: 731 - RNA, 19 nt, Homo sapiens
gaagagugguacuuuggaa

SEQ ID NO: 732 - RNA, 19 nt, Homo sapiens
cccagaagcugcccucuuu

SEQ ID NO: 733 - RNA, 19 nt, Homo sapiens
gagcaaacgugacuuauuu

SEQ ID NO: 734 - RNA, 19 nt, Homo sapiens
ccaaauggguuucauguua

SEQ ID NO: 735 - RNA, 19 nt, Homo sapiens
caacaaggaugcagcacua

SEQ ID NO: 736 - RNA, 19 nt, Homo sapiens
ggacguaacugaagaggau

SEQ ID NO: 737 - RNA, 19 nt, Homo sapiens
gaaggcaucuacaccauua

SEQ ID NO: 738 - RNA, 19 nt, Homo sapiens
gaaggagucuggaauagaa

SEQ ID NO: 739 - RNA, 19 nt, Homo sapiens
gaauuuaagucguguguuc

SEQ ID NO: 740 - RNA, 19 nt, Homo sapiens
ggaauucauuucacucuga

SEQ ID NO: 741 - RNA, 19 nt, Homo sapiens
gcaagaacgugcaucuguu

SEQ ID NO: 742 - RNA, 19 nt, Homo sapiens
gcgaauaccuguccuacga

SEQ ID NO: 743 - RNA, 19 nt, Homo sapiens
gaagacauuugaggaauuc

SEQ ID NO: 744 - RNA, 19 nt, Homo sapiens
gagcagccauucaucaaca

SEQ ID NO: 745 - RNA, 19 nt, Homo sapiens
gaaacagacucuucauauu

SEQ ID NO: 746 - RNA, 19 nt, Homo sapiens
gaacaauaccacuccagua

SEQ ID NO: 747 - RNA, 19 nt, Homo sapiens
caagaccgguuccuuucua

SEQ ID NO: 748 - RNA, 19 nt, Homo sapiens
gcaagaauaucuccaaaau

SEQ ID NO: 749 - RNA, 19 nt, Homo sapiens
ggaauggacucauaugcaa

SEQ ID NO: 750 - RNA, 19 nt, Homo sapiens
gcagaagagugguacuuug

SEQ ID NO: 751 - RNA, 19 nt, Homo sapiens
caaaggaaguuuacuggau

SEQ ID NO: 752 - RNA, 19 nt, Homo sapiens
gaagagugguacuuuggaa

SEQ ID NO: 753 - RNA, 19 nt, Homo sapiens
gagauaccgugaaacauua

SEQ ID NO: 754 - RNA, 19 nt, Homo sapiens
gcagggagauaccgugaaa

SEQ ID NO: 755 - RNA, 19 nt, Homo sapiens
caucgugguugcccuguau

SEQ ID NO: 756 - RNA, 19 nt, Homo sapiens
uguguaagauugcugacuu

SEQ ID NO: 757 - RNA, 19 nt, Homo sapiens
caaauaaucuggaaaccua

SEQ ID NO: 758 - RNA, 19 nt, Homo sapiens
gaagaaacgaggaauaaua

SEQ ID NO: 759 - RNA, 19 nt, Homo sapiens
gaaacucucucaucccaaa

SEQ ID NO: 760 - RNA, 19 nt, Homo sapiens
ggaaugggcaugaaggaua

SEQ ID NO: 761 - RNA, 19 nt, Homo sapiens
ccacauagcugaucugaaa

SEQ ID NO: 762 - RNA, 19 nt, Homo sapiens
ugaaaucacucacauugua

SEQ ID NO: 763 - RNA, 19 nt, Homo sapiens
uaaggaaccucuaucauga

SEQ ID NO: 764 - RNA, 19 nt, Homo sapiens
gcagguggcuguuaaaucu

SEQ ID NO: 765 - RNA, 19 nt, Homo sapiens
gcaaauagauccaguucuu

SEQ ID NO: 766 - RNA, 19 nt, Homo sapiens
gagcaaagauccaagacua

SEQ ID NO: 767 - RNA, 19 nt, Homo sapiens
gccagaaacuugaaacuua

SEQ ID NO: 768 - RNA, 19 nt, Homo sapiens
guacagauuucgcagauuu

SEQ ID NO: 769 - RNA, 19 nt, Homo sapiens
gcgccuaucuuucuccuuu

SEQ ID NO: 770 - RNA, 19 nt, Homo sapiens
ccagaaaucguagacauua

SEQ ID NO: 771 - RNA, 19 nt, Homo sapiens
ccucaucucuucagacuau

SEQ ID NO: 772 - RNA, 19 nt, Homo sapiens
uguacgagcucuucaccua

SEQ ID NO: 773 - RNA, 19 nt, Homo sapiens
ggaaaucucuugcaagcua

SEQ ID NO: 774 - RNA, 19 nt, Homo sapiens
gauuacagaucuccauuua

SEQ ID NO: 775 - RNA, 19 nt, Homo sapiens
gcagacagaucuacguuug

SEQ ID NO: 776 - RNA, 19 nt, Homo sapiens
gcgauggccucuucuguaa

SEQ ID NO: 777 - RNA, 19 nt, Homo sapiens
gaaauucucucaacugaug

SEQ ID NO: 778 - RNA, 19 nt, Homo sapiens
gcagaggucuucacacuuu

SEQ ID NO: 779 - RNA, 19 nt, Homo sapiens
uaaaugaucuucagacaga

SEQ ID NO: 780 - RNA, 19 nt, Homo sapiens
gagcagcccuacucugaua

SEQ ID NO: 781 - RNA, 19 nt, Homo sapiens
aaacacggcuuaagcaauu

SEQ ID NO: 782 - RNA, 19 nt, Homo sapiens
gaacagaaccuucacugau

SEQ ID NO: 783 - RNA, 19 nt, Homo sapiens
gggaagcccucaugucuga

SEQ ID NO: 784 - RNA, 19 nt, Homo sapiens
gcaauuccauuuauguguu

SEQ ID NO: 785 - RNA, 19 nt, Homo sapiens
gaacugccauuaucccaua

SEQ ID NO: 786 - RNA, 19 nt, Homo sapiens
gagagguggugaaacauua

SEQ ID NO: 787 - RNA, 19 nt, Homo sapiens
gggccaaguuucccauuaa

SEQ ID NO: 788 - RNA, 19 nt, Homo sapiens
gcacgcugcucauccgaaa

SEQ ID NO: 789 - RNA, 19 nt, Homo sapiens
ugaauucacuccugccaau

SEQ ID NO: 790 - RNA, 19 nt, Homo sapiens
guggcaaccucaacacuga

SEQ ID NO: 791 - RNA, 19 nt, Homo sapiens
ggagcuagcuguggauaac

SEQ ID NO: 792 - RNA, 19 nt, Homo sapiens
gcaaguuucgccaucagaa

SEQ ID NO: 793 - RNA, 19 nt, Homo sapiens
gcagauggcuugugcagaa

SEQ ID NO: 794 - RNA, 19 nt, Homo sapiens
ggagaaggcuuguauuagu

SEQ ID NO: 795 - RNA, 19 nt, Homo sapiens
gaugagcucuaugacauua

SEQ ID NO: 796 - RNA, 19 nt, Homo sapiens
ggugcuaaguucccuauua

SEQ ID NO: 797 - RNA, 19 nt, Homo sapiens
ugaagaauaucaaguguga

SEQ ID NO: 798 - RNA, 19 nt, Homo sapiens
ccgcucagcuccugcaguu

SEQ ID NO: 799 - RNA, 19 nt, Homo sapiens
uacugaaccugcagcauuu

SEQ ID NO: 800 - RNA, 19 nt, Homo sapiens
ugggaggucuucucauaug

SEQ ID NO: 801 - RNA, 19 nt, Homo sapiens
gaacuuaccuuacauagcu

SEQ ID NO: 802 - RNA, 19 nt, Homo sapiens
ggaccugcauacuuacuua

SEQ ID NO: 803 - RNA, 19 nt, Homo sapiens
ugacaggaaucuucuaauu

SEQ ID NO: 804 - RNA, 19 nt, Homo sapiens
gguaauggcucagucauga

SEQ ID NO: 805 - RNA, 19 nt, Homo sapiens
gaaagaaccucucaacauu

SEQ ID NO: 806 - RNA, 19 nt, Homo sapiens
ggacaaggcugaccauaug

SEQ ID NO: 807 - RNA, 19 nt, Homo sapiens
ccaaugaccugcugaaauu

SEQ ID NO: 808 - RNA, 19 nt, Homo sapiens
gagcauacauuaaaccaaa

SEQ ID NO: 809 - RNA, 19 nt, Homo sapiens
ggauggagcugcuggcuuu

SEQ ID NO: 810 - RNA, 19 nt, Homo sapiens
cugcagaccuauagauuua

SEQ ID NO: 811 - RNA, 19 nt, Homo sapiens
gcaccugucucacucuuga

SEQ ID NO: 812 - RNA, 19 nt, Homo sapiens
gaaagaguccauccagcua

SEQ ID NO: 813 - RNA, 19 nt, Homo sapiens
gaagaagccucggcagaua

SEQ ID NO: 814 - RNA, 19 nt, Homo sapiens
guaauaaucuccaucaugu

SEQ ID NO: 815 - RNA, 19 nt, Homo sapiens
ggaaugaacugaaaguagu

SEQ ID NO: 816 - RNA, 19 nt, Homo sapiens
gagauuuccuggacuagaa

SEQ ID NO: 817 - RNA, 19 nt, Homo sapiens
ggacaacccuuucgaguuc

SEQ ID NO: 818 - RNA, 19 nt, Homo sapiens
ccagugaccucaacaggaa

SEQ ID NO: 819 - RNA, 19 nt, Homo sapiens
ccacaauacuucagugaug

SEQ ID NO: 820 - RNA, 19 nt, Homo sapiens
gaagaguggucuccguuuc

SEQ ID NO: 821 - RNA, 19 nt, Homo sapiens
gaacagaaguaaugaaauc

SEQ ID NO: 822 - RNA, 19 nt, Homo sapiens
guaaugcuguuucugcuua

SEQ ID NO: 823 - RNA, 19 nt, Homo sapiens
gcaagacacuccaaguuug

SEQ ID NO: 824 - RNA, 19 nt, Homo sapiens
gaaagucuaucacauuauc

SEQ ID NO: 825 - RNA, 19 nt, Homo sapiens
gagcgaaucugcuagugaa

SEQ ID NO: 826 - RNA, 19 nt, Homo sapiens
gaaguucacuacagagagu

SEQ ID NO: 827 - RNA, 19 nt, Homo sapiens
ggucgacgguccaaauuug

SEQ ID NO: 828 - RNA, 19 nt, Homo sapiens
gaauaucacuuccauacac

SEQ ID NO: 829 - RNA, 19 nt, Homo sapiens
gaaacuuccuggacuauuu

SEQ ID NO: 830 - RNA, 19 nt, Homo sapiens
gagauuuggucaacuauuu

SEQ ID NO: 831 - RNA, 19 nt, Homo sapiens
gcacgccgcuuccugauau

SEQ ID NO: 832 - RNA, 19 nt, Homo sapiens
caucagagcuggaucuaga

SEQ ID NO: 833 - RNA, 19 nt, Homo sapiens
gaaaggagacgucaaauau

SEQ ID NO: 834 - RNA, 19 nt, Homo sapiens
ggaaugagguggucaacuu

SEQ ID NO: 835 - RNA, 19 nt, Homo sapiens
caacgagucuccagugcua

SEQ ID NO: 836 - RNA, 19 nt, Homo sapiens
gagaggaccugccgagcaa

SEQ ID NO: 837 - RNA, 19 nt, Homo sapiens
gaaguuggguugucuagaa

SEQ ID NO: 838 - RNA, 19 nt, Homo sapiens
gaagaacaaugauguaauc

SEQ ID NO: 839 - RNA, 19 nt, Homo sapiens
ggaaauugcuuugaaguug

SEQ ID NO: 840 - RNA, 19 nt, Homo sapiens
gguucaagcuggauuauuu

SEQ ID NO: 841 - RNA, 19 nt, Homo sapiens
gaacauggcugaccucaua

SEQ ID NO: 842 - RNA, 19 nt, Homo sapiens
ggaccacgcugcucuauuu

SEQ ID NO: 843 - RNA, 19 nt, Homo sapiens
ggacgaggacuauuacaaa

SEQ ID NO: 844 - RNA, 19 nt, Homo sapiens
uggcagagcucaucaacaa

SEQ ID NO: 845 - RNA, 19 nt, Homo sapiens
gagaaaguccugcccguuu

SEQ ID NO: 846 - RNA, 19 nt, Homo sapiens
ugaagaagcugcggcacaa

SEQ ID NO: 847 - RNA, 19 nt, Homo sapiens
ccgcgacucugaugagaaa

SEQ ID NO: 848 - RNA, 19 nt, Homo sapiens
ugcccgagcuugugaacua

SEQ ID NO: 849 - RNA, 19 nt, Homo sapiens
gagagaagcccacuauuaa

SEQ ID NO: 850 - RNA, 19 nt, Homo sapiens
cgagagaagcccacuauua

SEQ ID NO: 851 - RNA, 19 nt, Homo sapiens
ggagggaguuggagauguu

SEQ ID NO: 852 - RNA, 19 nt, Homo sapiens
gaagacaugccgcuauuug

SEQ ID NO: 853 - RNA, 19 nt, Homo sapiens
gaagaacuacgacagauua

SEQ ID NO: 854 - RNA, 19 nt, Homo sapiens
gaaggagacuauuuagagu

SEQ ID NO: 855 - RNA, 19 nt, Homo sapiens
gagcggaugcuguauucua

SEQ ID NO: 856 - RNA, 19 nt, Homo sapiens
cugcagacuuccuuuauga

SEQ ID NO: 857 - RNA, 19 nt, Homo sapiens
agagagagcuccagcagau

SEQ ID NO: 858 - RNA, 19 nt, Homo sapiens
uuaacgaggugaagacaga

SEQ ID NO: 859 - RNA, 19 nt, Homo sapiens
acacagagcccacggaugu

SEQ ID NO: 860 - RNA, 19 nt, Homo sapiens
gcugggaucaggacuauga

SEQ ID NO: 861 - RNA, 19 nt, Homo sapiens
gcaaagaccuggagaagau

SEQ ID NO: 862 - RNA, 19 nt, Homo sapiens
gcacacggcugcaugagaa

SEQ ID NO: 863 - RNA, 19 nt, Homo sapiens
gaacuggccuggagagagu

SEQ ID NO: 864 - RNA, 19 nt, Homo sapiens
uuaaauggauggcaauuga

SEQ ID NO: 865 - RNA, 19 nt, Homo sapiens
gcaagcaucuuuacuagga

SEQ ID NO: 866 - RNA, 19 nt, Homo sapiens
gagcaaggcuaaagagcua

SEQ ID NO: 867 - RNA, 19 nt, Homo sapiens
gagagcaacuucauguaaa

SEQ ID NO: 868 - RNA, 19 nt, Homo sapiens
gagaauguccugugucaaa

SEQ ID NO: 869 - RNA, 19 nt, Homo sapiens
ggaacucgcugcugccuau

SEQ ID NO: 870 - RNA, 19 nt, Homo sapiens
gcaggugccuccucagaug

SEQ ID NO: 871 - RNA, 19 nt, Homo sapiens
gcaaugugcuaguguacga

SEQ ID NO: 872 - RNA, 19 nt, Homo sapiens
gaagacagaauaugguuca

SEQ ID NO: 873 - RNA, 19 nt, Homo sapiens
gaggagaccuucuuacuua

SEQ ID NO: 874 - RNA, 19 nt, Homo sapiens
uuacagagguucaggauua

SEQ ID NO: 875 - RNA, 19 nt, Homo sapiens
gaacaaaccuaagcaugaa

SEQ ID NO: 876 - RNA, 19 nt, Homo sapiens
gaaagagcacuucaaauaa

SEQ ID NO: 877 - RNA, 19 nt, Homo sapiens
gaaagaugguuaccgaaua

SEQ ID NO: 878 - RNA, 19 nt, Homo sapiens
caaaguagauucugaaguu

SEQ ID NO: 879 - RNA, 19 nt, Homo sapiens
ucacuacgcucuauccuuu

SEQ ID NO: 880 - RNA, 19 nt, Homo sapiens
ggugaaggauauagcaaua

SEQ ID NO: 881 - RNA, 19 nt, Homo sapiens
gagaaccuggugugcaaag

SEQ ID NO: 882 - RNA, 19 nt, Homo sapiens
gagagaaccuggugugcaa

SEQ ID NO: 883 - RNA, 19 nt, Homo sapiens
ggaguuugcuggacuuucu

SEQ ID NO: 884 - RNA, 19 nt, Homo sapiens
gaaagugagaccacgaaag

SEQ ID NO: 885 - RNA, 19 nt, Homo sapiens
ggaauaaucucaagaauca

SEQ ID NO: 886 - RNA, 19 nt, Homo sapiens
gaacugggcucugguaauu

SEQ ID NO: 887 - RNA, 19 nt, Homo sapiens
ggaagaaucugagcaaauu

SEQ ID NO: 888 - RNA, 19 nt, Homo sapiens
gaacagacaugucaaggau

SEQ ID NO: 889 - RNA, 19 nt, Homo sapiens
gaaauugucuaguaaguga

SEQ ID NO: 890 - RNA, 19 nt, Homo sapiens
caccugaaguguuuaauua

SEQ ID NO: 891 - RNA, 19 nt, Homo sapiens
guacaaagucgcaaucaaa

SEQ ID NO: 892 - RNA, 19 nt, Homo sapiens
uggaggagauucuuauuaa

SEQ ID NO: 893 - RNA, 19 nt, Homo sapiens
gaaagaauaugccuccaaa

SEQ ID NO: 894 - RNA, 19 nt, Homo sapiens
ggaaugacaucaaauuuca

SEQ ID NO: 895 - RNA, 19 nt, Homo sapiens
ugaaguaccugauauucua

SEQ ID NO: 896 - RNA, 19 nt, Homo sapiens
cgaaagaccuacgugaaua

SEQ ID NO: 897 - RNA, 19 nt, Homo sapiens
gagaggagguuuaugugaa

SEQ ID NO: 898 - RNA, 19 nt, Homo sapiens
gggacagccucuacccuua

SEQ ID NO: 899 - RNA, 19 nt, Homo sapiens
gaaguucugugcaaauugg

SEQ ID NO: 900 - RNA, 19 nt, Homo sapiens
caacauggccucagaacug

SEQ ID NO: 901 - RNA, 19 nt, Homo sapiens
guucugggccuaagucuaa

SEQ ID NO: 902 - RNA, 19 nt, Homo sapiens
gaacugggucuacaagauc

SEQ ID NO: 903 - RNA, 19 nt, Homo sapiens
cgagagguaucggucauga

SEQ ID NO: 904 - RNA, 19 nt, Homo sapiens
ggcgcauccuggagcauua

SEQ ID NO: 905 - RNA, 19 nt, Homo sapiens
gaacaucuauugagacaag

SEQ ID NO: 906 - RNA, 19 nt, Homo sapiens
ucaaggcacuuuaugauuu

SEQ ID NO: 907 - RNA, 19 nt, Homo sapiens
ggagaggaauggcuauauu

SEQ ID NO: 908 - RNA, 19 nt, Homo sapiens
ggauauaugugaaggaaug

SEQ ID NO: 909 - RNA, 19 nt, Homo sapiens
gaggagauccaccacuuua

SEQ ID NO: 910 - RNA, 19 nt, Homo sapiens
gcauccacauugcacauaa

SEQ ID NO: 911 - RNA, 19 nt, Homo sapiens
ucaaauaccuagccacacu

SEQ ID NO: 912 - RNA, 19 nt, Homo sapiens
caaucuugcugacgucuug

SEQ ID NO: 913 - RNA, 19 nt, Homo sapiens
gguagaaggugugccauuu

SEQ ID NO: 914 - RNA, 19 nt, Homo sapiens
acgcugagauuuacaacua

SEQ ID NO: 915 - RNA, 19 nt, Homo sapiens
ggauggcuccuuugugaaa

SEQ ID NO: 916 - RNA, 19 nt, Homo sapiens
gagaggaacuacgaagauc

SEQ ID NO: 917 - RNA, 19 nt, Homo sapiens
gaaggacccugaugaaaga

SEQ ID NO: 918 - RNA, 19 nt, Homo sapiens
uaagaagggugaaagauuu

SEQ ID NO: 919 - RNA, 19 nt, Homo sapiens
ucaagaagcucagauaaug

SEQ ID NO: 920 - RNA, 19 nt, Homo sapiens
cagaaucccuccaugaauu

SEQ ID NO: 921 - RNA, 19 nt, Homo sapiens
gcaaggaccucuucaucaa

SEQ ID NO: 922 - RNA, 19 nt, Homo sapiens
gagaagaaguccacacuau

SEQ ID NO: 923 - RNA, 19 nt, Homo sapiens
ggaaugccaucucccaaug

SEQ ID NO: 924 - RNA, 19 nt, Homo sapiens
caacacgugugacaucauc

SEQ ID NO: 925 - RNA, 19 nt, Homo sapiens
gcaagcagcugaaacaaau

SEQ ID NO: 926 - RNA, 19 nt, Homo sapiens
gaauguugcuuucugaauu

SEQ ID NO: 927 - RNA, 19 nt, Homo sapiens
gaccugaagucuuauuuaa

SEQ ID NO: 928 - RNA, 19 nt, Homo sapiens
agacagaauucccaaauaa

SEQ ID NO: 929 - RNA, 19 nt, Homo sapiens
gaacaacacugcugguuug

SEQ ID NO: 930 - RNA, 19 nt, Homo sapiens
gaagucaucuguucauuau

SEQ ID NO: 931 - RNA, 19 nt, Homo sapiens
gaaauaagguagacucaau

SEQ ID NO: 932 - RNA, 19 nt, Homo sapiens
caacauaaauccaagaaga

SEQ ID NO: 933 - RNA, 19 nt, Homo sapiens
caaagaaucagcuagcaaa

SEQ ID NO: 934 - RNA, 19 nt, Homo sapiens
gaagagaguuauucauaga

SEQ ID NO: 935 - RNA, 19 nt, Homo sapiens
caaaugcccugucuuacug

SEQ ID NO: 936 - RNA, 19 nt, Homo sapiens
ucucgugacucagcaaauu

SEQ ID NO: 937 - RNA, 19 nt, Homo sapiens
gaaccuggcuaaguacgua

SEQ ID NO: 938 - RNA, 19 nt, Homo sapiens
gcagauccauucuugaaau

SEQ ID NO: 939 - RNA, 19 nt, Homo sapiens
ucacaagaaucagguguua

SEQ ID NO: 940 - RNA, 19 nt, Homo sapiens
cauaaagcguaccuugaua

SEQ ID NO: 941 - RNA, 19 nt, Homo sapiens
gcugugaacuacauugaua

SEQ ID NO: 942 - RNA, 19 nt, Homo sapiens
gaugauaccuacaccaaga

SEQ ID NO: 943 - RNA, 19 nt, Homo sapiens
gcuguuagccucaaaguuu

SEQ ID NO: 944 - RNA, 19 nt, Homo sapiens
aagcuggccugaaucauua

SEQ ID NO: 945 - RNA, 19 nt, Homo sapiens
caacauuaccugucauaua

SEQ ID NO: 946 - RNA, 19 nt, Homo sapiens
ccaaauaccugauggaacu

SEQ ID NO: 947 - RNA, 19 nt, Homo sapiens
gaaauguacccuccagaaa

SEQ ID NO: 948 - RNA, 19 nt, Homo sapiens
gcaccuggcuaagaaugua

SEQ ID NO: 949 - RNA, 19 nt, Homo sapiens
caacaaaugucaacaaaca

SEQ ID NO: 950 - RNA, 19 nt, Homo sapiens
gcagcaaacuccugaagau

SEQ ID NO: 951 - RNA, 19 nt, Homo sapiens
ccagugauuuggagaauau

SEQ ID NO: 952 - RNA, 19 nt, Homo sapiens
gugacuacguuaaggauau

SEQ ID NO: 953 - RNA, 19 nt, Homo sapiens
ugaacaaacugcugacuuu

SEQ ID NO: 954 - RNA, 19 nt, Homo sapiens
gcuagcugcugccuccuua

SEQ ID NO: 955 - RNA, 19 nt, Homo sapiens
caacucaccucguguggau

SEQ ID NO: 956 - RNA, 19 nt, Homo sapiens
guggaucucuaccuaauga

SEQ ID NO: 957 - RNA, 19 nt, Homo sapiens
gcagagcucccacuauuug

SEQ ID NO: 958 - RNA, 19 nt, Homo sapiens
ggaguaguuucaaauacaa

SEQ ID NO: 959 - RNA, 19 nt, Homo sapiens
gaccuuugcuccaguaugu

SEQ ID NO: 960 - RNA, 19 nt, Homo sapiens
gagauucuaugccagguau

SEQ ID NO: 961 - RNA, 19 nt, Homo sapiens
ugaacaagcucaaguggaa

SEQ ID NO: 962 - RNA, 19 nt, Homo sapiens
ccagagugaucaaguguga

SEQ ID NO: 963 - RNA, 19 nt, Homo sapiens
guucguggccucuaagaug

SEQ ID NO: 964 - RNA, 19 nt, Homo sapiens
ccgagaagcugugcaucua

SEQ ID NO: 965 - RNA, 19 nt, Homo sapiens
ugaauuaccuggaccguuu

SEQ ID NO: 966 - RNA, 19 nt, Homo sapiens
cggagaagcugugcauuua

SEQ ID NO: 967 - RNA, 19 nt, Homo sapiens
cuacagacgugcgggauau

SEQ ID NO: 968 - RNA, 19 nt, Homo sapiens
caacacagacguggauugu

SEQ ID NO: 969 - RNA, 19 nt, Homo sapiens
ggaccuggcugcugugauu

SEQ ID NO: 970 - RNA, 19 nt, Homo sapiens
gauuauaccuuugccaugu

SEQ ID NO: 971 - RNA, 19 nt, Homo sapiens
gaccagcacuccuacagau

SEQ ID NO: 972 - RNA, 19 nt, Homo sapiens
ugcggaagaugcuggcuua

SEQ ID NO: 973 - RNA, 19 nt, Homo sapiens
guacugagcugggcaaaua

SEQ ID NO: 974 - RNA, 19 nt, Homo sapiens
ggaaaucuauccuccaaag

SEQ ID NO: 975 - RNA, 19 nt, Homo sapiens
ggaggugugugaagucuau

SEQ ID NO: 976 - RNA, 19 nt, Homo sapiens
cuaaaugacuuacaugaag

SEQ ID NO: 977 - RNA, 19 nt, Homo sapiens
ggauggaacucauuauauu

SEQ ID NO: 978 - RNA, 19 nt, Homo sapiens
gcagauauguucaugacaa

SEQ ID NO: 979 - RNA, 19 nt, Homo sapiens
cauaauauccagacacaua

SEQ ID NO: 980 - RNA, 19 nt, Homo sapiens
uaagaaagccucagguuug

SEQ ID NO: 981 - RNA, 19 nt, Homo sapiens
ucacaaagcauccauauug

SEQ ID NO: 982 - RNA, 19 nt, Homo sapiens
gaagucauguuuacagugu

SEQ ID NO: 983 - RNA, 19 nt, Homo sapiens
uagccuaccucuacaauga

SEQ ID NO: 984 - RNA, 19 nt, Homo sapiens
gcacccgguuuaucaguaa

SEQ ID NO: 985 - RNA, 19 nt, Homo sapiens
gauaauggccucagaauga

SEQ ID NO: 986 - RNA, 19 nt, Homo sapiens
gcacggcaauugaagcaua

SEQ ID NO: 987 - RNA, 19 nt, Homo sapiens
ggaauagaaugucuucaga

SEQ ID NO: 988 - RNA, 19 nt, Homo sapiens
uaacucaccuuccaacaau

SEQ ID NO: 989 - RNA, 19 nt, Homo sapiens
ggagagaguugguuucuaa

SEQ ID NO: 990 - RNA, 19 nt, Homo sapiens
ggugaaaccuaaacauuug

SEQ ID NO: 991 - RNA, 19 nt, Homo sapiens
gaaauacugagccuugaua

SEQ ID NO: 992 - RNA, 19 nt, Homo sapiens
ugccaaaguugaagauuua

SEQ ID NO: 993 - RNA, 19 nt, Homo sapiens
gcugaugacuuucuuaaua

SEQ ID NO: 994 - RNA, 19 nt, Homo sapiens
caacuuaauuuccaccuua

SEQ ID NO: 995 - RNA, 19 nt, Homo sapiens
auacacaccuucccaaauu

SEQ ID NO: 996 - RNA, 19 nt, Homo sapiens
gcuaugaagaugaugauua

SEQ ID NO: 997 - RNA, 19 nt, Homo sapiens
gcaagcagaccucuacuaa

SEQ ID NO: 998 - RNA, 19 nt, Homo sapiens
ugagagaauuccaguacua

SEQ ID NO: 999 - RNA, 19 nt, Homo sapiens
ggaaucaaacggcucuaua

SEQ ID NO: 1000 - RNA, 19 nt, Homo sapiens
gaauugggaucuucacaca

SEQ ID NO: 1001 - RNA, 19 nt, Homo sapiens
uaucaacacugcuauagua

SEQ ID NO: 1002 - RNA, 19 nt, Homo sapiens
gaacaaacguccuggugau

SEQ ID NO: 1003 - RNA, 19 nt, Homo sapiens
gcacaagacucacccaucu

SEQ ID NO: 1004 - RNA, 19 nt, Homo sapiens
gcacagacuucuuacuuca

SEQ ID NO: 1005 - RNA, 19 nt, Homo sapiens
gcacagacauccuauuuca

SEQ ID NO: 1006 - RNA, 19 nt, Homo sapiens
gcagggaccuucuauauca

SEQ ID NO: 1007 - RNA, 19 nt, Homo sapiens
gaacagcuauauucacaga

SEQ ID NO: 1008 - RNA, 19 nt, Homo sapiens
uuauauagcugcccaggua

SEQ ID NO: 1009 - RNA, 19 nt, Homo sapiens
gcacagacauccuauuuca

SEQ ID NO: 1010 - RNA, 19 nt, Homo sapiens
gcagggaccuucuauauca

SEQ ID NO: 1011 - RNA, 19 nt, Homo sapiens
gaacagcuauauucacaga

SEQ ID NO: 1012 - RNA, 19 nt, Homo sapiens
ggugaaauguacccaguua

SEQ ID NO: 1013 - RNA, 19 nt, Homo sapiens
guagauggcuugcaagaga

SEQ ID NO: 1014 - RNA, 19 nt, Homo sapiens
uaaaguagcuucacucucu

SEQ ID NO: 1015 - RNA, 19 nt, Homo sapiens
gcuacaagcuuacuucugu

SEQ ID NO: 1016 - RNA, 19 nt, Homo sapiens
uggaagagcccaucaauaa

SEQ ID NO: 1017 - RNA, 19 nt, Homo sapiens
guacagaucuccagaagua

SEQ ID NO: 1018 - RNA, 19 nt, Homo sapiens
gaucaacucuucaggauuu

SEQ ID NO: 1019 - RNA, 19 nt, Homo sapiens
gguuauaucucaucuuuga

SEQ ID NO: 1020 - RNA, 19 nt, Homo sapiens
gaacuucgucauccaaaua

SEQ ID NO: 1021 - RNA, 19 nt, Homo sapiens
gggaauauauauccucugu

SEQ ID NO: 1022 - RNA, 19 nt, Homo sapiens
gaaacggcuucgaaauaug

SEQ ID NO: 1023 - RNA, 19 nt, Homo sapiens
gaagaccugccguuacauu

SEQ ID NO: 1024 - RNA, 19 nt, Homo sapiens
caccagugaucgacacauu

SEQ ID NO: 1025 - RNA, 19 nt, Homo sapiens
gaaauuauggcaucuguuu

SEQ ID NO: 1026 - RNA, 19 nt, Homo sapiens
uacaaggaguucuuuauga

SEQ ID NO: 1027 - RNA, 19 nt, Homo sapiens
ccacgaggacuuuaaagaa

SEQ ID NO: 1028 - RNA, 19 nt, Homo sapiens
ugggaaacaucaggauuua

SEQ ID NO: 1029 - RNA, 19 nt, Homo sapiens
gcagauaccccuaugaaua

SEQ ID NO: 1030 - RNA, 19 nt, Homo sapiens
cuaggucgcuucucucuga

SEQ ID NO: 1031 - RNA, 19 nt, Homo sapiens
gagagcugauuggagauua

SEQ ID NO: 1032 - RNA, 19 nt, Homo sapiens
aaaaggaccucgucaugua

SEQ ID NO: 1033 - RNA, 19 nt, Homo sapiens
gagcagaaguggccuauau

SEQ ID NO: 1034 - RNA, 19 nt, Homo sapiens
cagaagagauuucagauga

SEQ ID NO: 1035 - RNA, 19 nt, Homo sapiens
ccagggagccuuaaacuua

SEQ ID NO: 1036 - RNA, 19 nt, Homo sapiens
gaaacuugguggacaguga

SEQ ID NO: 1037 - RNA, 19 nt, Homo sapiens
caugcaagcugaaagaaua

SEQ ID NO: 1038 - RNA, 19 nt, Homo sapiens
caacacaaguaccuaauca

SEQ ID NO: 1039 - RNA, 19 nt, Homo sapiens
ggagauggauccuauuuac

SEQ ID NO: 1040 - RNA, 19 nt, Homo sapiens
gaaaagccaugaugauauu

SEQ ID NO: 1041 - RNA, 19 nt, Homo sapiens
gcucagaccucuucuacga

SEQ ID NO: 1042 - RNA, 19 nt, Homo sapiens
ggacgagggcgaucuauac

SEQ ID NO: 1043 - RNA, 19 nt, Homo sapiens
gaucgggaguacacagaca

SEQ ID NO: 1044 - RNA, 19 nt, Homo sapiens
ugaacgagcccaacaccuu

SEQ ID NO: 1045 - RNA, 19 nt, Homo sapiens
gcgaggagacagccaauua

SEQ ID NO: 1046 - RNA, 19 nt, Homo sapiens
cacaagaccuucguggaaa

SEQ ID NO: 1047 - RNA, 19 nt, Homo sapiens
acaaucgucaugcaauuua

SEQ ID NO: 1048 - RNA, 19 nt, Homo sapiens
gaggagaaaugugcacuca

SEQ ID NO: 1049 - RNA, 19 nt, Homo sapiens
gcacacggaucuccuuuga

SEQ ID NO: 1050 - RNA, 19 nt, Homo sapiens
gcaaacaccugcucaaguc

SEQ ID NO: 1051 - RNA, 19 nt, Homo sapiens
ugaagagucugcaaauaaa

SEQ ID NO: 1052 - RNA, 19 nt, Homo sapiens
ggacguggaugcucugugu

SEQ ID NO: 1053 - RNA, 19 nt, Homo sapiens
gaacacagcugucccagau

SEQ ID NO: 1054 - RNA, 19 nt, Homo sapiens
gagcagagauguccacuga

SEQ ID NO: 1055 - RNA, 19 nt, Homo sapiens
ggaaauaucuuagcuacug

SEQ ID NO: 1056 - RNA, 19 nt, Homo sapiens
ggacgaagauugguauuug

SEQ ID NO: 1057 - RNA, 19 nt, Homo sapiens
ggaaugagguaccugauga

SEQ ID NO: 1058 - RNA, 19 nt, Homo sapiens
caggaaagguguucacaaa

SEQ ID NO: 1059 - RNA, 19 nt, Homo sapiens
cuacacaaaugcacaaauu

SEQ ID NO: 1060 - RNA, 19 nt, Homo sapiens
guacgggaauauaugcuua

SEQ ID NO: 1061 - RNA, 19 nt, Homo sapiens
gaacugcuguugggaacca

SEQ ID NO: 1062 - RNA, 19 nt, Homo sapiens
ggaagcagcccuacaacaa

SEQ ID NO: 1063 - RNA, 19 nt, Homo sapiens
gcacgcccagugagaacau

SEQ ID NO: 1064 - RNA, 19 nt, Homo sapiens
ggaagcagcccuacaacaa

SEQ ID NO: 1065 - RNA, 19 nt, Homo sapiens
gagcuuaaccauccuaaua

SEQ ID NO: 1066 - RNA, 19 nt, Homo sapiens
gagcuuaaccauccuaaua

SEQ ID NO: 1067 - RNA, 19 nt, Homo sapiens
guaccgagcuccugaaauc

SEQ ID NO: 1068 - RNA, 19 nt, Homo sapiens
gagaggugguggcgcuuaa

SEQ ID NO: 1069 - RNA, 19 nt, Homo sapiens
gagcauugguugcaucuuu

SEQ ID NO: 1070 - RNA, 19 nt, Homo sapiens
gaucggagagggcaccuau

SEQ ID NO: 1071 - RNA, 19 nt, Homo sapiens
gaagcucuaucugguguuu

SEQ ID NO: 1072 - RNA, 19 nt, Homo sapiens
gcagagauggugacucgaa

SEQ ID NO: 1073 - RNA, 19 nt, Homo sapiens
gcagcacucuuaucuacau

SEQ ID NO: 1074 - RNA, 19 nt, Homo sapiens
ggaggaggccuucccauca

SEQ ID NO: 1075 - RNA, 19 nt, Homo sapiens
ucgaaagccucucuucugu

SEQ ID NO: 1076 - RNA, 19 nt, Homo sapiens
guaccgagcucccgaaguu

SEQ ID NO: 1077 - RNA, 19 nt, Homo sapiens
ugaccaagcugccagacua

SEQ ID NO: 1078 - RNA, 19 nt, Homo sapiens
gagcugaaauuggcugauu

SEQ ID NO: 1079 - RNA, 19 nt, Homo sapiens
caacaucccuggugaacgu

SEQ ID NO: 1080 - RNA, 19 nt, Homo sapiens
ggauucccguccgcuguua

SEQ ID NO: 1081 - RNA, 19 nt, Homo sapiens
gcaaagaccuacuucugaa

SEQ ID NO: 1082 - RNA, 19 nt, Homo sapiens
gaagaagacuggccuagag

SEQ ID NO: 1083 - RNA, 19 nt, Homo sapiens
ggucuggacuuucuucauu

SEQ ID NO: 1084 - RNA, 19 nt, Homo sapiens
uaacagauaucgaugaacu

SEQ ID NO: 1085 - RNA, 19 nt, Homo sapiens
ggacauagaucagaagcua

SEQ ID NO: 1086 - RNA, 19 nt, Homo sapiens
caauagagcuuauacacau

SEQ ID NO: 1087 - RNA, 19 nt, Homo sapiens
cauacaaggcuuauucuua

SEQ ID NO: 1088 - RNA, 19 nt, Homo sapiens
ggagacgacuuacuagauc

SEQ ID NO: 1089 - RNA, 19 nt, Homo sapiens
ccacaguacucacaucaga

SEQ ID NO: 1090 - RNA, 19 nt, Homo sapiens
gcaauaaccacacuaaugg

SEQ ID NO: 1091 - RNA, 19 nt, Homo sapiens
gaagaaagugagaguuguu

SEQ ID NO: 1092 - RNA, 19 nt, Homo sapiens
gaacaugaccucuggcaua

SEQ ID NO: 1093 - RNA, 19 nt, Homo sapiens
ggccaaacguggacaacua

SEQ ID NO: 1094 - RNA, 19 nt, Homo sapiens
ugacguccauguucgagua

SEQ ID NO: 1095 - RNA, 19 nt, Homo sapiens
ccaaccagacggaguuuga

SEQ ID NO: 1096 - RNA, 19 nt, Homo sapiens
gaagguggcucugaagaag

SEQ ID NO: 1097 - RNA, 19 nt, Homo sapiens
gaccagaaccgcugggauu

SEQ ID NO: 1098 - RNA, 19 nt, Homo sapiens
ggaccgaaguggacagcga

SEQ ID NO: 1099 - RNA, 19 nt, Homo sapiens
gcaagagaucagcgccuga

SEQ ID NO: 1100 - RNA, 19 nt, Homo sapiens
ccgcugggauuacgacuuc

SEQ ID NO: 1101 - RNA, 19 nt, Homo sapiens
gcgaggagaacaagggcau

SEQ ID NO: 1102 - RNA, 19 nt, Homo sapiens
ccaacggagucaaccguuu

SEQ ID NO: 1103 - RNA, 19 nt, Homo sapiens
cgauccaggucaugaugau

SEQ ID NO: 1104 - RNA, 19 nt, Homo sapiens
ccuggaagccggcgcggau

SEQ ID NO: 1105 - RNA, 19 nt, Homo sapiens
ggacaccgccugugauuug

SEQ ID NO: 1106 - RNA, 19 nt, Homo sapiens
gccaggagacugcuacuua

SEQ ID NO: 1107 - RNA, 19 nt, Homo sapiens
ugaaagaccgaacugguuu

SEQ ID NO: 1108 - RNA, 19 nt, Homo sapiens
gaaccugcccuugcacuug

SEQ ID NO: 1109 - RNA, 19 nt, Homo sapiens
uggcaguucaagaggguca

SEQ ID NO: 1110 - RNA, 19 nt, Homo sapiens
cucaggaccucguggacau

SEQ ID NO: 1111 - RNA, 19 nt, Homo sapiens
ugaagguccuaguggagca

SEQ ID NO: 1112 - RNA, 19 nt, Homo sapiens
agacggcgcugcaggucau

SEQ ID NO: 1113 - RNA, 19 nt, Homo sapiens
ccaaggaggcacagaagca

SEQ ID NO: 1114 - RNA, 19 nt, Homo sapiens
gcuucaacguggaugaagu

SEQ ID NO: 1115 - RNA, 19 nt, Homo sapiens
ucuccgggccagaagauaa

SEQ ID NO: 1116 - RNA, 19 nt, Homo sapiens
gcgcaauguuggccagauc

SEQ ID NO: 1117 - RNA, 19 nt, Homo sapiens
gcacacaccucuugauaag

SEQ ID NO: 1118 - RNA, 19 nt, Homo sapiens
gcaagagaaauauguguua

SEQ ID NO: 1119 - RNA, 19 nt, Homo sapiens
uuacaugcaggccgaguua

SEQ ID NO: 1120 - RNA, 19 nt, Homo sapiens
gagacaagguuggcuaaag

SEQ ID NO: 1121 - RNA, 19 nt, Homo sapiens
ggacauagccgccugcuuu

SEQ ID NO: 1122 - RNA, 19 nt, Homo sapiens
gcacgauccugaagaacaa

SEQ ID NO: 1123 - RNA, 19 nt, Homo sapiens
ggaggagggugauguugau

SEQ ID NO: 1124 - RNA, 19 nt, Homo sapiens
ccgaauggcugcagagucu

SEQ ID NO: 1125 - RNA, 19 nt, Homo sapiens
gcgaauagauuaucaagga

SEQ ID NO: 1126 - RNA, 19 nt, Homo sapiens
gaacagaauccaucacaaa

SEQ ID NO: 1127 - RNA, 19 nt, Homo sapiens
ccauaaaccucacccagua

SEQ ID NO: 1128 - RNA, 19 nt, Homo sapiens
caagagaacacguuugaaa

SEQ ID NO: 1129 - RNA, 19 nt, Homo sapiens
gaagacagcucaaauaaua

SEQ ID NO: 1130 - RNA, 19 nt, Homo sapiens
caacaaagcuacuaaauca

SEQ ID NO: 1131 - RNA, 19 nt, Homo sapiens
ggaaagaagugcuaccaua

SEQ ID NO: 1132 - RNA, 19 nt, Homo sapiens
ggaaagaaaugacacaguu

SEQ ID NO: 1133 - RNA, 19 nt, Homo sapiens
gcgaauaucugaauuagaa

SEQ ID NO: 1134 - RNA, 19 nt, Homo sapiens
ggaaauuaaugcauccuua

SEQ ID NO: 1135 - RNA, 19 nt, Homo sapiens
gagcgaggcuggugguuua

SEQ ID NO: 1136 - RNA, 19 nt, Homo sapiens
caagucaucuuucaucuaa

SEQ ID NO: 1137 - RNA, 19 nt, Homo sapiens
gaaagaagagauugcaauu

SEQ ID NO: 1138 - RNA, 19 nt, Homo sapiens
cagaacaaauuaugcaaga

SEQ ID NO: 1139 - RNA, 19 nt, Homo sapiens
cuagugugcucauggauaa

SEQ ID NO: 1140 - RNA, 19 nt, Homo sapiens
gaaacaccuauuagagcua

SEQ ID NO: 1141 - RNA, 19 nt, Homo sapiens
caaauuggaugcagacaaa

SEQ ID NO: 1142 - RNA, 19 nt, Homo sapiens
gcaacaguauuucgguaua

SEQ ID NO: 1143 - RNA, 19 nt, Homo sapiens
ggacuucucuccaguaaac

SEQ ID NO: 1144 - RNA, 19 nt, Homo sapiens
aaagauagaugguacaaca

SEQ ID NO: 1145 - RNA, 19 nt, Homo sapiens
cucuuacauugcauacaua

SEQ ID NO: 1146 - RNA, 19 nt, Homo sapiens
uaaacgccugaaagaagcu

SEQ ID NO: 1147 - RNA, 19 nt, Homo sapiens
gcauaggacucaaguguca

SEQ ID NO: 1148 - RNA, 19 nt, Homo sapiens
gaaauugcacugucacuaa

SEQ ID NO: 1149 - RNA, 19 nt, Homo sapiens
gcgagaagauccuaaauga

SEQ ID NO: 1150 - RNA, 19 nt, Homo sapiens
gcaaguggguugacuacuc

SEQ ID NO: 1151 - RNA, 19 nt, Homo sapiens
gcacauccguuggccauca

SEQ ID NO: 1152 - RNA, 19 nt, Homo sapiens
gaccucaaguugggaaauu

SEQ ID NO: 1153 - RNA, 19 nt, Homo sapiens
gugaugagauuauugauag

SEQ ID NO: 1154 - RNA, 19 nt, Homo sapiens
ggacgagggcgaggaauuu

SEQ ID NO: 1155 - RNA, 19 nt, Homo sapiens
ggaaacggagccuugcuaa

SEQ ID NO: 1156 - RNA, 19 nt, Homo sapiens
ucaaucgucugaccgaaga

SEQ ID NO: 1157 - RNA, 19 nt, Homo sapiens
gaacagggccacugacucu

SEQ ID NO: 1158 - RNA, 19 nt, Homo sapiens
uggaccaccugaugaauau

SEQ ID NO: 1159 - RNA, 19 nt, Homo sapiens
cccaggaggucacuucuga

SEQ ID NO: 1160 - RNA, 19 nt, Homo sapiens
ggcuggaccuggaaacuga

SEQ ID NO: 1161 - RNA, 19 nt, Homo sapiens
gggagaagacucgguauga

SEQ ID NO: 1162 - RNA, 19 nt, Homo sapiens
gaggacaaccugcagauau

SEQ ID NO: 1163 - RNA, 19 nt, Homo sapiens
ugaaggagcugaugaacac

SEQ ID NO: 1164 - RNA, 19 nt, Homo sapiens
ccaagaaguucauuuaccu

SEQ ID NO: 1165 - RNA, 19 nt, Homo sapiens
gaaauuagaugaacugauc

SEQ ID NO: 1166 - RNA, 19 nt, Homo sapiens
ugaagugccugacucaaua

SEQ ID NO: 1167 - RNA, 19 nt, Homo sapiens
gaacaaggcagcagaagug

SEQ ID NO: 1168 - RNA, 19 nt, Homo sapiens
gaaacacacaguccaauga

SEQ ID NO: 1169 - RNA, 19 nt, Homo sapiens
ggagauugcugacaaacug

SEQ ID NO: 1170 - RNA, 19 nt, Homo sapiens
gaagguaucgggcuaaucg

SEQ ID NO: 1171 - RNA, 19 nt, Homo sapiens
gugcagaaguccagggaau

SEQ ID NO: 1172 - RNA, 19 nt, Homo sapiens
ggacaguggugagcucagu

SEQ ID NO: 1173 - RNA, 19 nt, Homo sapiens
gcagaugacuacaacuuua

SEQ ID NO: 1174 - RNA, 19 nt, Homo sapiens
gacaucagcuacagauaua

SEQ ID NO: 1175 - RNA, 19 nt, Homo sapiens
caacaugucucugaaagaa

SEQ ID NO: 1176 - RNA, 19 nt, Homo sapiens
gaagacaucuguaauugcu

SEQ ID NO: 1177 - RNA, 19 nt, Homo sapiens
uaaacaagguugcaacgaa

SEQ ID NO: 1178 - RNA, 19 nt, Homo sapiens
uagcauaugugaccuauca

SEQ ID NO: 1179 - RNA, 19 nt, Homo sapiens
gaaaccagauuggauguuc

SEQ ID NO: 1180 - RNA, 19 nt, Homo sapiens
ggaacuuucugacuuauca

SEQ ID NO: 1181 - RNA, 19 nt, Homo sapiens
gggauagccucucuuacua

SEQ ID NO: 1182 - RNA, 19 nt, Homo sapiens
gaacaguuaucuccagaag

SEQ ID NO: 1183 - RNA, 19 nt, Homo sapiens
ggagacagaccaacuagaa

SEQ ID NO: 1184 - RNA, 19 nt, Homo sapiens
agaccgagcccuuugauga

SEQ ID NO: 1185 - RNA, 19 nt, Homo sapiens
gagaaucacuccaaucgaa

SEQ ID NO: 1186 - RNA, 19 nt, Homo sapiens
agacagggauuaagucaaa

SEQ ID NO: 1187 - RNA, 19 nt, Homo sapiens
ggacaaagacaacuagguu

SEQ ID NO: 1188 - RNA, 19 nt, Homo sapiens
gcacacacgucaaaucaug

SEQ ID NO: 1189 - RNA, 19 nt, Homo sapiens
acaaaggccuuaugcaaua

SEQ ID NO: 1190 - RNA, 19 nt, Homo sapiens
gaagugcacauagauauua

SEQ ID NO: 1191 - RNA, 19 nt, Homo sapiens
aagcuuaacuucauccuuu

SEQ ID NO: 1192 - RNA, 19 nt, Homo sapiens
gaacuucuucaacgaauuu

SEQ ID NO: 1193 - RNA, 19 nt, Homo sapiens
uggaaacgaccuucuauga

SEQ ID NO: 1194 - RNA, 19 nt, Homo sapiens
gaacugcacagccagaaca

SEQ ID NO: 1195 - RNA, 19 nt, Homo sapiens
gagcuggagcgccugauaa

SEQ ID NO: 1196 - RNA, 19 nt, Homo sapiens
uaacgcagcaguugcaaac

SEQ ID NO: 1197 - RNA, 19 nt, Homo sapiens
gcaucaaaguggagcgcaa

SEQ ID NO: 1198 - RNA, 19 nt, Homo sapiens
uggaagaccaagagcgcau

SEQ ID NO: 1199 - RNA, 19 nt, Homo sapiens
cauacacagcuacgggaua

SEQ ID NO: 1200 - RNA, 19 nt, Homo sapiens
ccaucaacauggaagacca

SEQ ID NO: 1201 - RNA, 19 nt, Homo sapiens
ggagaaaggcgcuguauga

SEQ ID NO: 1202 - RNA, 19 nt, Homo sapiens
gaauaguucugucccaaga

SEQ ID NO: 1203 - RNA, 19 nt, Homo sapiens
gaacauguacaguauaugg

SEQ ID NO: 1204 - RNA, 19 nt, Homo sapiens
gcagaaacaagaagaaauc

SEQ ID NO: 1205 - RNA, 19 nt, Homo sapiens
gaaagauggcaguuugaua

SEQ ID NO: 1206 - RNA, 19 nt, Homo sapiens
uaaauaaugugguggaaca

SEQ ID NO: 1207 - RNA, 19 nt, Homo sapiens
gaaauccguucagugauca

SEQ ID NO: 1208 - RNA, 19 nt, Homo sapiens
uuacucgagugcagaaaua

SEQ ID NO: 1209 - RNA, 19 nt, Homo sapiens
ggaagagcgcgcucauaaa

SEQ ID NO: 1210 - RNA, 19 nt, Homo sapiens
uggaagagcgcgcucauaa

SEQ ID NO: 1211 - RNA, 19 nt, Homo sapiens
agccacuccuggagaagaa

SEQ ID NO: 1212 - RNA, 19 nt, Homo sapiens
uggagaaauucgucuuuga

SEQ ID NO: 1213 - RNA, 19 nt, Homo sapiens
gaagaucuuugccagcauu

SEQ ID NO: 1214 - RNA, 19 nt, Homo sapiens
ggauaaggcucgucagauc

SEQ ID NO: 1215 - RNA, 19 nt, Homo sapiens
cagagcaggugacauauca

SEQ ID NO: 1216 - RNA, 19 nt, Homo sapiens
gccgugggcuccuguauga

SEQ ID NO: 1217 - RNA, 19 nt, Homo sapiens
ggacaucaauauucuucua

SEQ ID NO: 1218 - RNA, 19 nt, Homo sapiens
gccaggacaucuccaguua

SEQ ID NO: 1219 - RNA, 19 nt, Homo sapiens
gcagguaugaccaguauaa

SEQ ID NO: 1220 - RNA, 19 nt, Homo sapiens
ggaaaugccucaaguacac

SEQ ID NO: 1221 - RNA, 19 nt, Homo sapiens
ggacauaucuauucuuacu

SEQ ID NO: 1222 - RNA, 19 nt, Homo sapiens
gauguuaguucaccacuga

SEQ ID NO: 1223 - RNA, 19 nt, Homo sapiens
ccagcugccucauacuuua

SEQ ID NO: 1224 - RNA, 19 nt, Homo sapiens
gaaaguacaagaucgguau

SEQ ID NO: 1225 - RNA, 19 nt, Homo sapiens
gaagaucccuggcaucauc

SEQ ID NO: 1226 - RNA, 19 nt, Homo sapiens
gaacaggguuaccaucaug

SEQ ID NO: 1227 - RNA, 19 nt, Homo sapiens
ggacaacauugacuucaug

SEQ ID NO: 1228 - RNA, 19 nt, Homo sapiens
ccaaggagguagcugauga

SEQ ID NO: 1229 - RNA, 19 nt, Homo sapiens
ggaaagagcucagagauga

SEQ ID NO: 1230 - RNA, 19 nt, Homo sapiens
gagcagcgauggagaaauu

SEQ ID NO: 1231 - RNA, 19 nt, Homo sapiens
ggaaacaccugaugucaau

SEQ ID NO: 1232 - RNA, 19 nt, Homo sapiens
ccaaacaucugccgaaauc

SEQ ID NO: 1233 - RNA, 19 nt, Homo sapiens
ggaaauaucccucguagua

SEQ ID NO: 1234 - RNA, 19 nt, Homo sapiens
ggaagaagcaguucaagua

SEQ ID NO: 1235 - RNA, 19 nt, Homo sapiens
caacaagccucgugugauc

SEQ ID NO: 1236 - RNA, 19 nt, Homo sapiens
ggagagaacacaaggauug

SEQ ID NO: 1237 - RNA, 19 nt, Homo sapiens
ggagauauguugugaaaga

SEQ ID NO: 1238 - RNA, 19 nt, Homo sapiens
ccacaaaucugauaguauu

SEQ ID NO: 1239 - RNA, 19 nt, Homo sapiens
gaugagguauaucaaguua

SEQ ID NO: 1240 - RNA, 19 nt, Homo sapiens
ggaagaaacccaagacaaa

SEQ ID NO: 1241 - RNA, 19 nt, Homo sapiens
gcacaaagcuugguuauaa

SEQ ID NO: 1242 - RNA, 19 nt, Homo sapiens
ccuaagaccugaacuauuu

SEQ ID NO: 1243 - RNA, 19 nt, Homo sapiens
caaagaggaacacaaauua

SEQ ID NO: 1244 - RNA, 19 nt, Homo sapiens
guaaaugggucuguuauug

SEQ ID NO: 1245 - RNA, 19 nt, Homo sapiens
ggaagaagcuuuagaagug

SEQ ID NO: 1246 - RNA, 19 nt, Homo sapiens
uagaugagcuggagaguuc

SEQ ID NO: 1247 - RNA, 19 nt, Homo sapiens
ggaccuugcuggaggcuau

SEQ ID NO: 1248 - RNA, 19 nt, Homo sapiens
gcagauagagacauaugga

SEQ ID NO: 1249 - RNA, 19 nt, Homo sapiens
cagagaagcuggccuccua

SEQ ID NO: 1250 - RNA, 19 nt, Homo sapiens
gaaacgacgagaacaguug

SEQ ID NO: 1251 - RNA, 19 nt, Homo sapiens
cgacgagaccuucaucaaa

SEQ ID NO: 1252 - RNA, 19 nt, Homo sapiens
ccacacaucagcacaacua

SEQ ID NO: 1253 - RNA, 19 nt, Homo sapiens
gaacaggaauuccaagaca

SEQ ID NO: 1254 - RNA, 19 nt, Homo sapiens
uaagaaacgugcucgagua

SEQ ID NO: 1255 - RNA, 19 nt, Homo sapiens
gagaucaccucaccuucua

SEQ ID NO: 1256 - RNA, 19 nt, Homo sapiens
gcagagagcccuucuugga

SEQ ID NO: 1257 - RNA, 19 nt, Homo sapiens
gaagaaaccuccuaugaga

SEQ ID NO: 1258 - RNA, 19 nt, Homo sapiens
gaagggaacugauggagua

SEQ ID NO: 1259 - RNA, 19 nt, Homo sapiens
gaagaaugauccugagauu

SEQ ID NO: 1260 - RNA, 19 nt, Homo sapiens
gaagagauguucaagaauc

SEQ ID NO: 1261 - RNA, 19 nt, Homo sapiens
ggacugcuguguagauaua

SEQ ID NO: 1262 - RNA, 19 nt, Homo sapiens
gaacugaugaccauacuug

SEQ ID NO: 1263 - RNA, 19 nt, Homo sapiens
aaagaucucucugccaaua

SEQ ID NO: 1264 - RNA, 19 nt, Homo sapiens
cagcacagcuaagagaaua

SEQ ID NO: 1265 - RNA, 19 nt, Homo sapiens
gaaagcacauuccguuuau

SEQ ID NO: 1266 - RNA, 19 nt, Homo sapiens
ugaaagaacucauggaaau

SEQ ID NO: 1267 - RNA, 19 nt, Homo sapiens
gcugagaaguggaaugaaa

SEQ ID NO: 1268 - RNA, 19 nt, Homo sapiens
ccagugaucuucauauuag

SEQ ID NO: 1269 - RNA, 19 nt, Homo sapiens
gaaauaaccugugaaacau

SEQ ID NO: 1270 - RNA, 19 nt, Homo sapiens
cagauuaccucucuaguga

SEQ ID NO: 1271 - RNA, 19 nt, Homo sapiens
gaacuuccauauuacucua

SEQ ID NO: 1272 - RNA, 19 nt, Homo sapiens
guauucagcugauuucuau

SEQ ID NO: 1273 - RNA, 19 nt, Homo sapiens
gaacauggcuucaaagaua

SEQ ID NO: 1274 - RNA, 19 nt, Homo sapiens
ggacagggcuuauuuaauu

SEQ ID NO: 1275 - RNA, 19 nt, Homo sapiens
gaaagaagauagugguuga

SEQ ID NO: 1276 - RNA, 19 nt, Homo sapiens
uaucagagcugucuuaaau

SEQ ID NO: 1277 - RNA, 19 nt, Homo sapiens
gaucgaggaugaagaagga

SEQ ID NO: 1278 - RNA, 19 nt, Homo sapiens
gccgagaucucagccauau

SEQ ID NO: 1279 - RNA, 19 nt, Homo sapiens
gaggccugcugggauauua

SEQ ID NO: 1280 - RNA, 19 nt, Homo sapiens
guggagaacuuggaaaugg

SEQ ID NO: 1281 - RNA, 19 nt, Homo sapiens
caaccaaagucgaauauga

SEQ ID NO: 1282 - RNA, 19 nt, Homo sapiens
caagaagaaugaauacagu

SEQ ID NO: 1283 - RNA, 19 nt, Homo sapiens
gaagauguccauggaaaua

SEQ ID NO: 1284 - RNA, 19 nt, Homo sapiens
caacacgccucauccucua

SEQ ID NO: 1285 - RNA, 19 nt, Homo sapiens
ggaccaaggaggaggcccu

SEQ ID NO: 1286 - RNA, 19 nt, Homo sapiens
cguccuggcggcaggagaa

SEQ ID NO: 1287 - RNA, 19 nt, Homo sapiens
cgggagaggaggacuuuga

SEQ ID NO: 1288 - RNA, 19 nt, Homo sapiens
agucgggagaggaggacuu

SEQ ID NO: 1289 - RNA, 19 nt, Homo sapiens
cgaccuggcggcaggaaau

SEQ ID NO: 1290 - RNA, 19 nt, Homo sapiens
aggcaggagagaaggacuu

SEQ ID NO: 1291 - RNA, 19 nt, Homo sapiens
gcuacauccagaagaucaa

SEQ ID NO: 1292 - RNA, 19 nt, Homo sapiens
ggacaguguucacggauuc

SEQ ID NO: 1293 - RNA, 19 nt, Homo sapiens
gaagauggacaaauauguu

SEQ ID NO: 1294 - RNA, 19 nt, Homo sapiens
ggaagagucuguuacuuuu

SEQ ID NO: 1295 - RNA, 19 nt, Homo sapiens
gauaacagaggcuuccuuu

SEQ ID NO: 1296 - RNA, 19 nt, Homo sapiens
gcauuaguccuaucuugua

SEQ ID NO: 1297 - RNA, 19 nt, Homo sapiens
gaaucaagcuuccauaugu

SEQ ID NO: 1298 - RNA, 19 nt, Homo sapiens
caacaaagcccgaggauau

SEQ ID NO: 1299 - RNA, 19 nt, Homo sapiens
acacaugccuggagacuua

SEQ ID NO: 1300 - RNA, 19 nt, Homo sapiens
cuacauagauuucuucaug

SEQ ID NO: 1301 - RNA, 19 nt, Homo sapiens
ucagcaaacuugaaucuua

SEQ ID NO: 1302 - RNA, 19 nt, Homo sapiens
gacauugacucuuacauga

SEQ ID NO: 1303 - RNA, 19 nt, Homo sapiens
ggaaaccacuauaggcaau

SEQ ID NO: 1304 - RNA, 19 nt, Homo sapiens
cggacgacuuugccaauga

SEQ ID NO: 1305 - RNA, 19 nt, Homo sapiens
gaaaggacaugugaacuua

SEQ ID NO: 1306 - RNA, 19 nt, Homo sapiens
gaagaaguaugauguauug

SEQ ID NO: 1307 - RNA, 19 nt, Homo sapiens
gaaaugacuucuacucgaa

SEQ ID NO: 1308 - RNA, 19 nt, Homo sapiens
ggagggaacaucuauauuu

SEQ ID NO: 1309 - RNA, 19 nt, Homo sapiens
caaagaagcugaauaaacu

SEQ ID NO: 1310 - RNA, 19 nt, Homo sapiens
caacacauauggcggauuu

SEQ ID NO: 1311 - RNA, 19 nt, Homo sapiens
ggacaaaccuagaaagaag

SEQ ID NO: 1312 - RNA, 19 nt, Homo sapiens
gaaaggcacucucucuguu

SEQ ID NO: 1313 - RNA, 19 nt, Homo sapiens
caagagaaguuguggcaua

SEQ ID NO: 1314 - RNA, 19 nt, Homo sapiens
cagcagcacuccauuuaua

SEQ ID NO: 1315 - RNA, 19 nt, Homo sapiens
acagaaaggucuaucauuu

SEQ ID NO: 1316 - RNA, 19 nt, Homo sapiens
ggacauaaaguuacaauuc

SEQ ID NO: 1317 - RNA, 19 nt, Homo sapiens
gagcagagcuuaaucgaau

SEQ ID NO: 1318 - RNA, 19 nt, Homo sapiens
gagaauagcccuuguguga

SEQ ID NO: 1319 - RNA, 19 nt, Homo sapiens
ggacuuaguuuauggaaau

SEQ ID NO: 1320 - RNA, 19 nt, Homo sapiens
gaauuuagaugagcggaua

SEQ ID NO: 1321 - RNA, 19 nt, Homo sapiens
gagacaagcuccagugugu

SEQ ID NO: 1322 - RNA, 19 nt, Homo sapiens
gcaagcaaguauucaagaa

SEQ ID NO: 1323 - RNA, 19 nt, Homo sapiens
gcaggacggugaccauaug

SEQ ID NO: 1324 - RNA, 19 nt, Homo sapiens
gcaagugcaugacaacagu

SEQ ID NO: 1325 - RNA, 19 nt, Homo sapiens
ggaagugguuggaagagua

SEQ ID NO: 1326 - RNA, 19 nt, Homo sapiens
gaagauagccauccuuuug

SEQ ID NO: 1327 - RNA, 19 nt, Homo sapiens
caugcuagcucaauucauc

SEQ ID NO: 1328 - RNA, 19 nt, Homo sapiens
gaucuuggacuuuacaaug

SEQ ID NO: 1329 - RNA, 19 nt, Homo sapiens
ggagagauauuugaaguug

SEQ ID NO: 1330 - RNA, 19 nt, Homo sapiens
gggaauggaugaugaagga

SEQ ID NO: 1331 - RNA, 19 nt, Homo sapiens
caaacaaucugugacuauu

SEQ ID NO: 1332 - RNA, 19 nt, Homo sapiens
ucaauuaaguugcagaguu

SEQ ID NO: 1333 - RNA, 19 nt, Homo sapiens
caucuagacuuaagugaua

SEQ ID NO: 1334 - RNA, 19 nt, Homo sapiens
gaaaucagaucucucuacu

SEQ ID NO: 1335 - RNA, 19 nt, Homo sapiens
cuaaaggucucugguguuu

SEQ ID NO: 1336 - RNA, 19 nt, Homo sapiens
gaugguacccuucaacugu

SEQ ID NO: 1337 - RNA, 19 nt, Homo sapiens
gaagacaucuacaagcuua

SEQ ID NO: 1338 - RNA, 19 nt, Homo sapiens
gaaauaccuucaugaacaa

SEQ ID NO: 1339 - RNA, 19 nt, Homo sapiens
gaaggucaauggcucauau

SEQ ID NO: 1340 - RNA, 19 nt, Homo sapiens
ccggagaucucgcggauua

SEQ ID NO: 1341 - RNA, 19 nt, Homo sapiens
cagaagagcugcacauuug

SEQ ID NO: 1342 - RNA, 19 nt, Homo sapiens
ccaaacugcucaggcauaa

SEQ ID NO: 1343 - RNA, 19 nt, Homo sapiens
acgcggcacuucacaauug

SEQ ID NO: 1344 - RNA, 19 nt, Homo sapiens
ugggacacccgacaucuua

SEQ ID NO: 1345 - RNA, 19 nt, Homo sapiens
ggaagcagcucuugccaaa

SEQ ID NO: 1346 - RNA, 19 nt, Homo sapiens
gaggagacuugaaagaaua

SEQ ID NO: 1347 - RNA, 19 nt, Homo sapiens
gaacuuagagguggaaaga

SEQ ID NO: 1348 - RNA, 19 nt, Homo sapiens
gcgagaaggugcagaggaa

SEQ ID NO: 1349 - RNA, 19 nt, Homo sapiens
gaaagugugugagaaaguu

SEQ ID NO: 1350 - RNA, 19 nt, Homo sapiens
cacaggaccuucuugguua

SEQ ID NO: 1351 - RNA, 19 nt, Homo sapiens
cgaaaucccuggugccaaa

SEQ ID NO: 1352 - RNA, 19 nt, Homo sapiens
ugagauccaugaugacaua

SEQ ID NO: 1353 - RNA, 19 nt, Homo sapiens
gagguuggcucugacugua

SEQ ID NO: 1354 - RNA, 19 nt, Homo sapiens
cagucuaccucccgccaua

SEQ ID NO: 1355 - RNA, 19 nt, Homo sapiens
gcacagaggaagagaaucu

SEQ ID NO: 1356 - RNA, 19 nt, Homo sapiens
gaagaaaccacuggaugga

SEQ ID NO: 1357 - RNA, 19 nt, Homo sapiens
caucaugucuggacuauuu

SEQ ID NO: 1358 - RNA, 19 nt, Homo sapiens
caaacaagauugagauuag

SEQ ID NO: 1359 - RNA, 19 nt, Homo sapiens
gcacacagacaaaugaauu

SEQ ID NO: 1360 - RNA, 19 nt, Homo sapiens
cgacagucuuguacaauuu

SEQ ID NO: 1361 - RNA, 19 nt, Homo sapiens
gcaagcagcccaucaagga

SEQ ID NO: 1362 - RNA, 19 nt, Homo sapiens
gagacgaggacacguacua

SEQ ID NO: 1363 - RNA, 19 nt, Homo sapiens
cugcagaaccugaccauug

SEQ ID NO: 1364 - RNA, 19 nt, Homo sapiens
ggccaugccuguuuacaag

SEQ ID NO: 1365 - RNA, 19 nt, Homo sapiens
gcaaggagcugaauuaucc

SEQ ID NO: 1366 - RNA, 19 nt, Homo sapiens
uaagagauaucugcaauga

SEQ ID NO: 1367 - RNA, 19 nt, Homo sapiens
gacggaaggugcugagaaa

SEQ ID NO: 1368 - RNA, 19 nt, Homo sapiens
agagcaaagucuucuauuu

SEQ ID NO: 1369 - RNA, 19 nt, Homo sapiens
ggaacucgaucguaucauu

SEQ ID NO: 1370 - RNA, 19 nt, Homo sapiens
caagggagguuacaccaaa

SEQ ID NO: 1371 - RNA, 19 nt, Homo sapiens
ucaaggaacucgaucguau

SEQ ID NO: 1372 - RNA, 19 nt, Homo sapiens
gaaaugauugcacuauuga

SEQ ID NO: 1373 - RNA, 19 nt, Homo sapiens
gaaugugccuggcuagaga

SEQ ID NO: 1374 - RNA, 19 nt, Homo sapiens
caugagagcugccaaccuu

SEQ ID NO: 1375 - RNA, 19 nt, Homo sapiens
agagaaagauuggccagua

SEQ ID NO: 1376 - RNA, 19 nt, Homo sapiens
caaggagacucgcuacugu

SEQ ID NO: 1377 - RNA, 19 nt, Homo sapiens
gaacaucugcucaacauga

SEQ ID NO: 1378 - RNA, 19 nt, Homo sapiens
gcacggcuccauauacaua

SEQ ID NO: 1379 - RNA, 19 nt, Homo sapiens
caagaagauucccggcuuu

SEQ ID NO: 1380 - RNA, 19 nt, Homo sapiens
ggaaaugcguagaaggaau

SEQ ID NO: 1381 - RNA, 19 nt, Homo sapiens
ggccuucgcugaggacuua

SEQ ID NO: 1382 - RNA, 19 nt, Homo sapiens
ugaaugcacuggugucuca

SEQ ID NO: 1383 - RNA, 19 nt, Homo sapiens
gcauugagccucucuacau

SEQ ID NO: 1384 - RNA, 19 nt, Homo sapiens
ccagacagcgggcaaagug

SEQ ID NO: 1385 - RNA, 19 nt, Homo sapiens
uaccugagcuuacaaauuu

SEQ ID NO: 1386 - RNA, 19 nt, Homo sapiens
gcacuucuauagcgucaaa

SEQ ID NO: 1387 - RNA, 19 nt, Homo sapiens
caacuccgauuccauguac

SEQ ID NO: 1388 - RNA, 19 nt, Homo sapiens
ggacucgccacccauguuu

SEQ ID NO: 1389 - RNA, 19 nt, Homo sapiens
aaacaaagaucgacacauu

SEQ ID NO: 1390 - RNA, 19 nt, Homo sapiens
ucaggaaacuguaugauga

SEQ ID NO: 1391 - RNA, 19 nt, Homo sapiens
gaagaccaguccaaauuag

SEQ ID NO: 1392 - RNA, 19 nt, Homo sapiens
augaagcgcugcaggauua

SEQ ID NO: 1393 - RNA, 19 nt, Homo sapiens
cgacaucacuggagcauau

SEQ ID NO: 1394 - RNA, 19 nt, Homo sapiens
gaaggaagccguccagaau

SEQ ID NO: 1395 - RNA, 19 nt, Homo sapiens
ccaaguacaucccagcuuu

SEQ ID NO: 1396 - RNA, 19 nt, Homo sapiens
ggacauggccgacuacagu

SEQ ID NO: 1397 - RNA, 19 nt, Homo sapiens
gcacugacauaaacguuaa

SEQ ID NO: 1398 - RNA, 19 nt, Homo sapiens
acaaagagauccaugaugu

SEQ ID NO: 1399 - RNA, 19 nt, Homo sapiens
agagauccaugauguauaa

SEQ ID NO: 1400 - RNA, 19 nt, Homo sapiens
aaaugaacgugacagaaua

SEQ ID NO: 1401 - RNA, 19 nt, Homo sapiens
gaaugaaucuacaccuuug

SEQ ID NO: 1402 - RNA, 19 nt, Homo sapiens
ggaaauacguggagacacu

SEQ ID NO: 1403 - RNA, 19 nt, Homo sapiens
ccagauaacuacggcgaua

SEQ ID NO: 1404 - RNA, 19 nt, Homo sapiens
uggcguaccuucucauuga

SEQ ID NO: 1405 - RNA, 19 nt, Homo sapiens
cagcauggaugauaugaug

SEQ ID NO: 1406 - RNA, 19 nt, Homo sapiens
cugcugagauucaucaaug

SEQ ID NO: 1407 - RNA, 19 nt, Homo sapiens
acagauucaucgaacuuaa

SEQ ID NO: 1408 - RNA, 19 nt, Homo sapiens
gaacguggcgcuccuguac

SEQ ID NO: 1409 - RNA, 19 nt, Homo sapiens
gaauaugccugccugaaag

SEQ ID NO: 1410 - RNA, 19 nt, Homo sapiens
ggaauaugccugccugaaa

SEQ ID NO: 1411 - RNA, 19 nt, Homo sapiens
cguagccgcugccuaugua

SEQ ID NO: 1412 - RNA, 19 nt, Homo sapiens
gccauucucuacgcacuuc

SEQ ID NO: 1413 - RNA, 19 nt, Homo sapiens
caacacagguggcgucauc

SEQ ID NO: 1414 - RNA, 19 nt, Homo sapiens
ggcaugguguuacugugua

SEQ ID NO: 1415 - RNA, 19 nt, Homo sapiens
caacaugcauuccgagaag

SEQ ID NO: 1416 - RNA, 19 nt, Homo sapiens
gcgcuuugcuucguuguuc

SEQ ID NO: 1417 - RNA, 19 nt, Homo sapiens
gaacagauccggaagaaga

SEQ ID NO: 1418 - RNA, 19 nt, Homo sapiens
gaagaacagauccggaaga

SEQ ID NO: 1419 - RNA, 19 nt, Homo sapiens
cuaagcaagugccugguuu

SEQ ID NO: 1420 - RNA, 19 nt, Homo sapiens
gcuaacagcggcucaagaa

SEQ ID NO: 1421 - RNA, 19 nt, Homo sapiens
gaacagauccgccugaaga

SEQ ID NO: 1422 - RNA, 19 nt, Homo sapiens
ggagauaguugacuuugcu

SEQ ID NO: 1423 - RNA, 19 nt, Homo sapiens
gaguuugccuugcucauug

SEQ ID NO: 1424 - RNA, 19 nt, Homo sapiens
ugacuuugcuaaacagcua

SEQ ID NO: 1425 - RNA, 19 nt, Homo sapiens
caagugaccucgacaacaa

SEQ ID NO: 1426 - RNA, 19 nt, Homo sapiens
gaaagaauucgaaauagug

SEQ ID NO: 1427 - RNA, 19 nt, Homo sapiens
caacagacucuucuacauu

SEQ ID NO: 1428 - RNA, 19 nt, Homo sapiens
gaaccauacucgcaauaca

SEQ ID NO: 1429 - RNA, 19 nt, Homo sapiens
gaaccaugcugacuuugua

SEQ ID NO: 1430 - RNA, 19 nt, Homo sapiens
gauggacgcucagaugaaa

SEQ ID NO: 1431 - RNA, 19 nt, Homo sapiens
caaccuacauguucaaagg

SEQ ID NO: 1432 - RNA, 19 nt, Homo sapiens
caggagcaauucgccauua

SEQ ID NO: 1433 - RNA, 19 nt, Homo sapiens
ggaaaucugucacaucgua

SEQ ID NO: 1434 - RNA, 19 nt, Homo sapiens
ucgcagacaucaacacuuu

SEQ ID NO: 1435 - RNA, 19 nt, Homo sapiens
ccucuucgcuacacaauug

SEQ ID NO: 1436 - RNA, 19 nt, Homo sapiens
gaacaguuugugcaguuua

SEQ ID NO: 1437 - RNA, 19 nt, Homo sapiens
ugacagcacuugaucauaa

SEQ ID NO: 1438 - RNA, 19 nt, Homo sapiens
ggaaggaaguguacaccua

SEQ ID NO: 1439 - RNA, 19 nt, Homo sapiens
gagcacaucuucaaacuac

SEQ ID NO: 1440 - RNA, 19 nt, Homo sapiens
gaagaaauugcacaucaaa

SEQ ID NO: 1441 - RNA, 19 nt, Homo sapiens
gaacaacggugacacuuca

SEQ ID NO: 1442 - RNA, 19 nt, Homo sapiens
cugaugagcuccaacauaa

SEQ ID NO: 1443 - RNA, 19 nt, Homo sapiens
caaccuaagugaaucuuug

SEQ ID NO: 1444 - RNA, 19 nt, Homo sapiens
gaagacaccuaccgauugg

SEQ ID NO: 1445 - RNA, 19 nt, Homo sapiens
gaucauaucugaaauacag

SEQ ID NO: 1446 - RNA, 19 nt, Homo sapiens
caagacugcuuucagauau

SEQ ID NO: 1447 - RNA, 19 nt, Homo sapiens
guuagaugcuacugaauuu

SEQ ID NO: 1448 - RNA, 19 nt, Homo sapiens
caauguaucucuaugaagu

SEQ ID NO: 1449 - RNA, 19 nt, Homo sapiens
gagaagcuccuuugugaua

SEQ ID NO: 1450 - RNA, 19 nt, Homo sapiens
gaagcacuauggcaucuau

SEQ ID NO: 1451 - RNA, 19 nt, Homo sapiens
gaaggauccugagcacgua

SEQ ID NO: 1452 - RNA, 19 nt, Homo sapiens
gaagcuccuuugugauaug

SEQ ID NO: 1453 - RNA, 19 nt, Homo sapiens
gaaacucucauccgcgaua

SEQ ID NO: 1454 - RNA, 19 nt, Homo sapiens
ucucauccgcgauauguua

SEQ ID NO: 1455 - RNA, 19 nt, Homo sapiens
caagaagugccucaaagug

SEQ ID NO: 1456 - RNA, 19 nt, Homo sapiens
ggaacuuaacuuacacaug

SEQ ID NO: 1457 - RNA, 19 nt, Homo sapiens
guaccuguccggauauauu

SEQ ID NO: 1458 - RNA, 19 nt, Homo sapiens
ccaaccagccgacgagauu

SEQ ID NO: 1459 - RNA, 19 nt, Homo sapiens
acucguaccuguccggaua

SEQ ID NO: 1460 - RNA, 19 nt, Homo sapiens
ggccguauauggcaauuca

SEQ ID NO: 1461 - RNA, 19 nt, Homo sapiens
cgacgccuguggccucuca

SEQ ID NO: 1462 - RNA, 19 nt, Homo sapiens
cagccgguguccgaacuga

SEQ ID NO: 1463 - RNA, 19 nt, Homo sapiens
caaccgugacugccagauc

SEQ ID NO: 1464 - RNA, 19 nt, Homo sapiens
guacugccgucucaagaag

SEQ ID NO: 1465 - RNA, 19 nt, Homo sapiens
gaggacagauguaccacua

SEQ ID NO: 1466 - RNA, 19 nt, Homo sapiens
gauaagaccaugaguauug

SEQ ID NO: 1467 - RNA, 19 nt, Homo sapiens
gaagacgauucauuccuuu

SEQ ID NO: 1468 - RNA, 19 nt, Homo sapiens
ggacagauguaccacuaug

SEQ ID NO: 1469 - RNA, 19 nt, Homo sapiens
gcaaacagaugauccaagu

SEQ ID NO: 1470 - RNA, 19 nt, Homo sapiens
cagcuaagauuuaucagaa

SEQ ID NO: 1471 - RNA, 19 nt, Homo sapiens
gcacgaaagucaaagaagu

SEQ ID NO: 1472 - RNA, 19 nt, Homo sapiens
gguauccggucuuagaaua

SEQ ID NO: 1473 - RNA, 19 nt, Homo sapiens
gaaggaaguuguccgaaca

SEQ ID NO: 1474 - RNA, 19 nt, Homo sapiens
caggagaguuugacaccuu

SEQ ID NO: 1475 - RNA, 19 nt, Homo sapiens
caguggcucugacuacuau

SEQ ID NO: 1476 - RNA, 19 nt, Homo sapiens
gaaggccgcugugcugugu

SEQ ID NO: 1477 - RNA, 19 nt, Homo sapiens
gcaaugcguucguggcuuu

SEQ ID NO: 1478 - RNA, 19 nt, Homo sapiens
cggcuacacaggagaguuu

SEQ ID NO: 1479 - RNA, 19 nt, Homo sapiens
ccacgugacuuucaacaau

SEQ ID NO: 1480 - RNA, 19 nt, Homo sapiens
gaauacagcuccgauuucu

SEQ ID NO: 1481 - RNA, 19 nt, Homo sapiens
caaagaagaucagacauua

SEQ ID NO: 1482 - RNA, 19 nt, Homo sapiens
gaucagacauuacuuauug

SEQ ID NO: 1483 - RNA, 19 nt, Homo sapiens
ccagagaucuugauuauuc

SEQ ID NO: 1484 - RNA, 19 nt, Homo sapiens
gaaguuguccguacagaua

SEQ ID NO: 1485 - RNA, 19 nt, Homo sapiens
gauuugaaguuccugaaua

SEQ ID NO: 1486 - RNA, 19 nt, Homo sapiens
ggagcgagcugcugguguu

SEQ ID NO: 1487 - RNA, 19 nt, Homo sapiens
ggagguggccgaccagaug

SEQ ID NO: 1488 - RNA, 19 nt, Homo sapiens
caacgugccugagcucauc

SEQ ID NO: 1489 - RNA, 19 nt, Homo sapiens
ccaaacauauggccacuuu

SEQ ID NO: 1490 - RNA, 19 nt, Homo sapiens
ucagagaacuuaagguuga

SEQ ID NO: 1491 - RNA, 19 nt, Homo sapiens
ggauccaucuuccugguua

SEQ ID NO: 1492 - RNA, 19 nt, Homo sapiens
aagaauaccucuacuacaa

SEQ ID NO: 1493 - RNA, 19 nt, Homo sapiens
caacgaaccugucucauuu

SEQ ID NO: 1494 - RNA, 19 nt, Homo sapiens
gaagaacuacacagauuua

SEQ ID NO: 1495 - RNA, 19 nt, Homo sapiens
gaagauggauacgcuguga

SEQ ID NO: 1496 - RNA, 19 nt, Homo sapiens
aaacgauacugguacauuu

SEQ ID NO: 1497 - RNA, 19 nt, Homo sapiens
gaagaaugaucgaauagau

SEQ ID NO: 1498 - RNA, 19 nt, Homo sapiens
gaacauggagcaauauaau

SEQ ID NO: 1499 - RNA, 19 nt, Homo sapiens
gaggagcucuuggccuuua

SEQ ID NO: 1500 - RNA, 19 nt, Homo sapiens
uaaacaacaugcacucuga

SEQ ID NO: 1501 - RNA, 19 nt, Homo sapiens
gagaugaggucaagcuaca

SEQ ID NO: 1502 - RNA, 19 nt, Homo sapiens
cagcguuucuaucaacuua

SEQ ID NO: 1503 - RNA, 19 nt, Homo sapiens
agauaacucucauucagua

SEQ ID NO: 1504 - RNA, 19 nt, Homo sapiens
guagucaaguggucuaaau

SEQ ID NO: 1505 - RNA, 19 nt, Homo sapiens
ucacggagcucacggaauu

SEQ ID NO: 1506 - RNA, 19 nt, Homo sapiens
gaacaugacauagaagauu

SEQ ID NO: 1507 - RNA, 19 nt, Homo sapiens
ggauaguucuggaagcuuu

SEQ ID NO: 1508 - RNA, 19 nt, Homo sapiens
gacucaagcugguguauga

SEQ ID NO: 1509 - RNA, 19 nt, Homo sapiens
gagcgcagcugcaagauuc

SEQ ID NO: 1510 - RNA, 19 nt, Homo sapiens
gcaugaagcuggaguacga

SEQ ID NO: 1511 - RNA, 19 nt, Homo sapiens
ggaagcaguuggugaaugg

SEQ ID NO: 1512 - RNA, 19 nt, Homo sapiens
gcugcaagauucagaagaa

SEQ ID NO: 1513 - RNA, 19 nt, Homo sapiens
agacucagcucuacaauaa

SEQ ID NO: 1514 - RNA, 19 nt, Homo sapiens
gauugaagcuuaucuauga

SEQ ID NO: 1515 - RNA, 19 nt, Homo sapiens
aaguaacucuccucaaaua

SEQ ID NO: 1516 - RNA, 19 nt, Homo sapiens
gcauuucuacuccacauua

SEQ ID NO: 1517 - RNA, 19 nt, Homo sapiens
gacaagaacugcaucauca

SEQ ID NO: 1518 - RNA, 19 nt, Homo sapiens
gcaaauacacuacgaacaa

SEQ ID NO: 1519 - RNA, 19 nt, Homo sapiens
gaacaacagcucagaacaa

SEQ ID NO: 1520 - RNA, 19 nt, Homo sapiens
gagcagcaguucugaagag

SEQ ID NO: 1521 - RNA, 19 nt, Homo sapiens
gcacacugcucaaucaauu

SEQ ID NO: 1522 - RNA, 19 nt, Homo sapiens
gcagaaguauucagaagaa

SEQ ID NO: 1523 - RNA, 19 nt, Homo sapiens
ggaaugacaggaacaagaa

SEQ ID NO: 1524 - RNA, 19 nt, Homo sapiens
gcacaguccuagcaucuca

SEQ ID NO: 1525 - RNA, 19 nt, Homo sapiens
gaaaugaccggaacaagaa

SEQ ID NO: 1526 - RNA, 19 nt, Homo sapiens
uagaagagcucaucaccaa

SEQ ID NO: 1527 - RNA, 19 nt, Homo sapiens
caaggaagcugugcgaaau

SEQ ID NO: 1528 - RNA, 19 nt, Homo sapiens
ucagugagcuggcuaccaa

SEQ ID NO: 1529 - RNA, 19 nt, Homo sapiens
ggaaagaguuuauguucua

SEQ ID NO: 1530 - RNA, 19 nt, Homo sapiens
caagaucuguggagacaaa

SEQ ID NO: 1531 - RNA, 19 nt, Homo sapiens
gcaccugacugaagaugaa

SEQ ID NO: 1532 - RNA, 19 nt, Homo sapiens
ccgagaagauggaauacua

SEQ ID NO: 1533 - RNA, 19 nt, Homo sapiens
gcacagaacaucauuaagu

SEQ ID NO: 1534 - RNA, 19 nt, Homo sapiens
ccacaccuaugaagaaauu

SEQ ID NO: 1535 - RNA, 19 nt, Homo sapiens
gaucaaauucuacuucuga

SEQ ID NO: 1536 - RNA, 19 nt, Homo sapiens
ucaaacagauaaagcaaga

SEQ ID NO: 1537 - RNA, 19 nt, Homo sapiens
uagaacagcugcaguacaa

SEQ ID NO: 1538 - RNA, 19 nt, Homo sapiens
ucaccgaggccauucagua

SEQ ID NO: 1539 - RNA, 19 nt, Homo sapiens
gaacagcugcaguacaauc

SEQ ID NO: 1540 - RNA, 19 nt, Homo sapiens
ccucaugccaccuugaaua

SEQ ID NO: 1541 - RNA, 19 nt, Homo sapiens
ugacggagcuuguguccaa

SEQ ID NO: 1542 - RNA, 19 nt, Homo sapiens
caacaaggacugccugauu

SEQ ID NO: 1543 - RNA, 19 nt, Homo sapiens
gcaaggaccugaccuacac

SEQ ID NO: 1544 - RNA, 19 nt, Homo sapiens
gcaaggaccggaacgagaa

SEQ ID NO: 1545 - RNA, 19 nt, Homo sapiens
gcaaagaccuuacauacuc

SEQ ID NO: 1546 - RNA, 19 nt, Homo sapiens
gcaaucauucuguuuaauc

SEQ ID NO: 1547 - RNA, 19 nt, Homo sapiens
ucacaccgauccauugaug

SEQ ID NO: 1548 - RNA, 19 nt, Homo sapiens
gcaaacggcuaugugcaau

SEQ ID NO: 1549 - RNA, 19 nt, Homo sapiens
ggaaggaccucaucuacac

SEQ ID NO: 1550 - RNA, 19 nt, Homo sapiens
ccggaucucugguuaaaca

SEQ ID NO: 1551 - RNA, 19 nt, Homo sapiens
gcgagccauuguacucuuu

SEQ ID NO: 1552 - RNA, 19 nt, Homo sapiens
gagccauuguacucuuuaa

SEQ ID NO: 1553 - RNA, 19 nt, Homo sapiens
ggacaaagacgagcagugu

SEQ ID NO: 1554 - RNA, 19 nt, Homo sapiens
ggaaacagaggcggaaauu

SEQ ID NO: 1555 - RNA, 19 nt, Homo sapiens
guaagcugauugagcagaa

SEQ ID NO: 1556 - RNA, 19 nt, Homo sapiens
gaaccuccaucccaccuau

SEQ ID NO: 1557 - RNA, 19 nt, Homo sapiens
gaaugucgcuuuaagaaau

SEQ ID NO: 1558 - RNA, 19 nt, Homo sapiens
gaacagucgucgccacauc

SEQ ID NO: 1559 - RNA, 19 nt, Homo sapiens
ggacaagcaccaauaguca

SEQ ID NO: 1560 - RNA, 19 nt, Homo sapiens
guggaaagguugacuugga

SEQ ID NO: 1561 - RNA, 19 nt, Homo sapiens
ugaagaagcugaacuugca

SEQ ID NO: 1562 - RNA, 19 nt, Homo sapiens
gcaaccaagacuacaagua

SEQ ID NO: 1563 - RNA, 19 nt, Homo sapiens
ucaaugcuaugaccuguga

SEQ ID NO: 1564 - RNA, 19 nt, Homo sapiens
ccauugaggucaucauguu

SEQ ID NO: 1565 - RNA, 19 nt, Homo sapiens
gaccauaaauguaagguuu

SEQ ID NO: 1566 - RNA, 19 nt, Homo sapiens
uagaagaucugaugucaaa

SEQ ID NO: 1567 - RNA, 19 nt, Homo sapiens
gaaauguucacuucaguua

SEQ ID NO: 1568 - RNA, 19 nt, Homo sapiens
gaagaucgcuacugaagca

SEQ ID NO: 1569 - RNA, 19 nt, Homo sapiens
ggaagcaacugcagagaca

SEQ ID NO: 1570 - RNA, 19 nt, Homo sapiens
gaugacaccucucaacaaa

SEQ ID NO: 1571 - RNA, 19 nt, Homo sapiens
uaaaguugcucaucaaguu

SEQ ID NO: 1572 - RNA, 19 nt, Homo sapiens
caacgagucugccgaagga

SEQ ID NO: 1573 - RNA, 19 nt, Homo sapiens
gcagaugccuucuucguua

SEQ ID NO: 1574 - RNA, 19 nt, Homo sapiens
aggcaaaucuucguuauua

SEQ ID NO: 1575 - RNA, 19 nt, Homo sapiens
gggaagaaaucuggucuaa

SEQ ID NO: 1576 - RNA, 19 nt, Homo sapiens
ugacucaucccaacauuua

SEQ ID NO: 1577 - RNA, 19 nt, Homo sapiens
ccgacgugcugccugagua

SEQ ID NO: 1578 - RNA, 19 nt, Homo sapiens
gagaagagcagcgacacuu

SEQ ID NO: 1579 - RNA, 19 nt, Homo sapiens
gaucauagcaccuaagaua

SEQ ID NO: 1580 - RNA, 19 nt, Homo sapiens
gcuauuuacugcucuuauu

SEQ ID NO: 1581 - RNA, 19 nt, Homo sapiens
ucacugggcuccuuuaauu

SEQ ID NO: 1582 - RNA, 19 nt, Homo sapiens
gugcgagccuucugaauau

SEQ ID NO: 1583 - RNA, 19 nt, Homo sapiens
gcuaagcuauacuacugua

SEQ ID NO: 1584 - RNA, 19 nt, Homo sapiens
ugacggcgcucuacuucac

SEQ ID NO: 1585 - RNA, 19 nt, Homo sapiens
gagaugaauuccuuugaaa

SEQ ID NO: 1586 - RNA, 19 nt, Homo sapiens
gaagaacgcaugaaacgaa

SEQ ID NO: 1587 - RNA, 19 nt, Homo sapiens
gauaaagacacgauugaaa

SEQ ID NO: 1588 - RNA, 19 nt, Homo sapiens
gcugagaggucuauuuaaa

SEQ ID NO: 1589 - RNA, 19 nt, Homo sapiens
gaacaacaauggcuaugaa

SEQ ID NO: 1590 - RNA, 19 nt, Homo sapiens
guacauaccuggcuggauu

SEQ ID NO: 1591 - RNA, 19 nt, Homo sapiens
gaacagcucacaaguauau

SEQ ID NO: 1592 - RNA, 19 nt, Homo sapiens
ggaaacgugugucuauauu

SEQ ID NO: 1593 - RNA, 19 nt, Homo sapiens
ggaggugggaggacaguua

SEQ ID NO: 1594 - RNA, 19 nt, Homo sapiens
ucacagcccugguggauga

SEQ ID NO: 1595 - RNA, 19 nt, Homo sapiens
gaagcuggcuccuauguuc

SEQ ID NO: 1596 - RNA, 19 nt, Homo sapiens
ggucaacacuaccaacaug

SEQ ID NO: 1597 - RNA, 19 nt, Homo sapiens
gaacacaaggucaacauug

SEQ ID NO: 1598 - RNA, 19 nt, Homo sapiens
agaaggagcuggccuagug

SEQ ID NO: 1599 - RNA, 19 nt, Homo sapiens
cggaaacucuucacauuug

SEQ ID NO: 1600 - RNA, 19 nt, Homo sapiens
caacaaauuugacaacaac

SEQ ID NO: 1601 - RNA, 19 nt, Homo sapiens
guacaucuccaucuuauuu

SEQ ID NO: 1602 - RNA, 19 nt, Homo sapiens
ggaaguggcugaguuauua

SEQ ID NO: 1603 - RNA, 19 nt, Homo sapiens
gaagggaggcucaauguaa

SEQ ID NO: 1604 - RNA, 19 nt, Homo sapiens
gaaggaaguggcugaguua

SEQ ID NO: 1605 - RNA, 19 nt, Homo sapiens
guagaaacaggagcuauua

SEQ ID NO: 1606 - RNA, 19 nt, Homo sapiens
caagauuacugucaaacaa

SEQ ID NO: 1607 - RNA, 19 nt, Homo sapiens
gcacaagaguauuugguaa

SEQ ID NO: 1608 - RNA, 19 nt, Homo sapiens
gcaaaugucccuucuguau

SEQ ID NO: 1609 - RNA, 19 nt, Homo sapiens
gcaugacuccuauauaaua

SEQ ID NO: 1610 - RNA, 19 nt, Homo sapiens
aaacagcaauuucccuuaa

SEQ ID NO: 1611 - RNA, 19 nt, Homo sapiens
gaaaaugccucuucaggaa

SEQ ID NO: 1612 - RNA, 19 nt, Homo sapiens
guucaucgcucuccucuuu

SEQ ID NO: 1613 - RNA, 19 nt, Homo sapiens
ggaucaagcuguuucugaa

SEQ ID NO: 1614 - RNA, 19 nt, Homo sapiens
ggacugcaguuuguacuug

SEQ ID NO: 1615 - RNA, 19 nt, Homo sapiens
gagugaaacugaccuaugg

SEQ ID NO: 1616 - RNA, 19 nt, Homo sapiens
gaacgcugcucccguggaa

SEQ ID NO: 1617 - RNA, 19 nt, Homo sapiens
gaaagccacucuaucaaag

SEQ ID NO: 1618 - RNA, 19 nt, Homo sapiens
gaaaccaggugccuucaga

SEQ ID NO: 1619 - RNA, 19 nt, Homo sapiens
ccucacagcuguauucaug

SEQ ID NO: 1620 - RNA, 19 nt, Homo sapiens
ccacggagcugcuggucau

SEQ ID NO: 1621 - RNA, 19 nt, Homo sapiens
ggguugacaucuuauuuga

SEQ ID NO: 1622 - RNA, 19 nt, Homo sapiens
gcacgagggucucuguguu

SEQ ID NO: 1623 - RNA, 19 nt, Homo sapiens
ggccaucgccuacucauug

SEQ ID NO: 1624 - RNA, 19 nt, Homo sapiens
caacacccauggcaauuaa

SEQ ID NO: 1625 - RNA, 19 nt, Homo sapiens
gaggaaagaucuugcugau

SEQ ID NO: 1626 - RNA, 19 nt, Homo sapiens
gagcaagcguccuccaaau

SEQ ID NO: 1627 - RNA, 19 nt, Homo sapiens
gcaacacccauggcaauua

SEQ ID NO: 1628 - RNA, 19 nt, Homo sapiens
ccaaagaacucaaugaaca

SEQ ID NO: 1629 - RNA, 19 nt, Homo sapiens
acaagaaccuucagacuaa

SEQ ID NO: 1630 - RNA, 19 nt, Homo sapiens
gaagguagauagaagaaug

SEQ ID NO: 1631 - RNA, 19 nt, Homo sapiens
guauugaacuguacuguaa

SEQ ID NO: 1632 - RNA, 19 nt, Homo sapiens
gcaauucucuucauuuauc

SEQ ID NO: 1633 - RNA, 19 nt, Homo sapiens
ggaaagauguccacugaaa

SEQ ID NO: 1634 - RNA, 19 nt, Homo sapiens
ggacaaagccuucuucaau

SEQ ID NO: 1635 - RNA, 19 nt, Homo sapiens
ggaaugggauccagcaauu

SEQ ID NO: 1636 - RNA, 19 nt, Homo sapiens
ugaaagccauugacauuug

SEQ ID NO: 1637 - RNA, 19 nt, Homo sapiens
cagacacgcuggaguuuaa

SEQ ID NO: 1638 - RNA, 19 nt, Homo sapiens
caauagcgcuuucugguuu

SEQ ID NO: 1639 - RNA, 19 nt, Homo sapiens
gcagguagcagauggacua

SEQ ID NO: 1640 - RNA, 19 nt, Homo sapiens
ucagagugcugucuuaugu

SEQ ID NO: 1641 - RNA, 19 nt, Homo sapiens
caacuuguuugacgacgaa

SEQ ID NO: 1642 - RNA, 19 nt, Homo sapiens
ugacagagccugcugauac

SEQ ID NO: 1643 - RNA, 19 nt, Homo sapiens
aggcggcucuguaccauuu

SEQ ID NO: 1644 - RNA, 19 nt, Homo sapiens
gaaacaugcugugauauug

SEQ ID NO: 1645 - RNA, 19 nt, Homo sapiens
gcagauguuuccuuauaua

SEQ ID NO: 1646 - RNA, 19 nt, Homo sapiens
caacagagaugccaugaua

SEQ ID NO: 1647 - RNA, 19 nt, Homo sapiens
gaaaggcgcuacauugaga

SEQ ID NO: 1648 - RNA, 19 nt, Homo sapiens
gaccugagcuucccaacaa

SEQ ID NO: 1649 - RNA, 19 nt, Homo sapiens
gcgacuggcucaacaauua

SEQ ID NO: 1650 - RNA, 19 nt, Homo sapiens
gagauugcguggcuauuua

SEQ ID NO: 1651 - RNA, 19 nt, Homo sapiens
gacagcaacuggacacuua

SEQ ID NO: 1652 - RNA, 19 nt, Homo sapiens
ggaagagacucgugcaaug

SEQ ID NO: 1653 - RNA, 19 nt, Homo sapiens
ggaaccaugugccaaguug

SEQ ID NO: 1654 - RNA, 19 nt, Homo sapiens
gaaguaacuccucauucaa

SEQ ID NO: 1655 - RNA, 19 nt, Homo sapiens
gaacuccuauagauuucug

SEQ ID NO: 1656 - RNA, 19 nt, Homo sapiens
cauagaagcuuuaccaaga

SEQ ID NO: 1657 - RNA, 19 nt, Homo sapiens
gaauggaggaugaagauua

SEQ ID NO: 1658 - RNA, 19 nt, Homo sapiens
ggucaaugcucuaagugaa

SEQ ID NO: 1659 - RNA, 19 nt, Homo sapiens
gagaggacuucuaugaaug

SEQ ID NO: 1660 - RNA, 19 nt, Homo sapiens
caucaugccuucugaauaa

SEQ ID NO: 1661 - RNA, 19 nt, Homo sapiens
caacagcucaucacgauuu

SEQ ID NO: 1662 - RNA, 19 nt, Homo sapiens
gcaacaacuucucuuaugu

SEQ ID NO: 1663 - RNA, 19 nt, Homo sapiens
ggucuucgcuagcaucuca

SEQ ID NO: 1664 - RNA, 19 nt, Homo sapiens
ggaccuagcuguuguaaag

SEQ ID NO: 1665 - RNA, 19 nt, Homo sapiens
gaaagaccaugcauuuaaa

SEQ ID NO: 1666 - RNA, 19 nt, Homo sapiens
gcaggaagauguaugcuuu

SEQ ID NO: 1667 - RNA, 19 nt, Homo sapiens
gaauaaaccaguaucguua

SEQ ID NO: 1668 - RNA, 19 nt, Homo sapiens
ggacccagauauccaaaua

SEQ ID NO: 1669 - RNA, 19 nt, Homo sapiens
gcaauacuauccuaacuga

SEQ ID NO: 1670 - RNA, 19 nt, Homo sapiens
gaauauagauuagcguuug

SEQ ID NO: 1671 - RNA, 19 nt, Homo sapiens
gaugaggcaugacuacuaa

SEQ ID NO: 1672 - RNA, 19 nt, Homo sapiens
gcgagucuguccacuauac

SEQ ID NO: 1673 - RNA, 19 nt, Homo sapiens
gagaacggccacccacuga

SEQ ID NO: 1674 - RNA, 19 nt, Homo sapiens
gaacggccacccacugaug

SEQ ID NO: 1675 - RNA, 19 nt, Homo sapiens
ggucaaugcugcuguguac

SEQ ID NO: 1676 - RNA, 19 nt, Homo sapiens
uccaggaacacuauaauua

SEQ ID NO: 1677 - RNA, 19 nt, Homo sapiens
gugaccaucuucuccauca

SEQ ID NO: 1678 - RNA, 19 nt, Homo sapiens
cauccucuguugcgccauu

SEQ ID NO: 1679 - RNA, 19 nt, Homo sapiens
ccaacaagguccaggaaca

SEQ ID NO: 1680 - RNA, 19 nt, Homo sapiens
acacugauacugucgauga

SEQ ID NO: 1681 - RNA, 19 nt, Homo sapiens
aauaggagcaacacugaua

SEQ ID NO: 1682 - RNA, 19 nt, Homo sapiens
cagcaggaguuaccuuguu

SEQ ID NO: 1683 - RNA, 19 nt, Homo sapiens
ggacacccaugaagcuaau

SEQ ID NO: 1684 - RNA, 19 nt, Homo sapiens
gcacagaacuccacucaaa

SEQ ID NO: 1685 - RNA, 19 nt, Homo sapiens
ggacagcaguucauuguua

SEQ ID NO: 1686 - RNA, 19 nt, Homo sapiens
gagaagaggcuauguuuaa

SEQ ID NO: 1687 - RNA, 19 nt, Homo sapiens
ggacaaacuucgacccuuu

SEQ ID NO: 1688 - RNA, 19 nt, Homo sapiens
ucgcuacccugcuguuauu

SEQ ID NO: 1689 - RNA, 19 nt, Homo sapiens
gcuacaagaacuaccgaua

SEQ ID NO: 1690 - RNA, 19 nt, Homo sapiens
caagaaagcuuccuucaac

SEQ ID NO: 1691 - RNA, 19 nt, Homo sapiens
gagaagaaauacagucaau

SEQ ID NO: 1692 - RNA, 19 nt, Homo sapiens
caauauaucugaagagcua

SEQ ID NO: 1693 - RNA, 19 nt, Homo sapiens
gaacuggacuguggcauug

SEQ ID NO: 1694 - RNA, 19 nt, Homo sapiens
gugagaagaugguauauuu

SEQ ID NO: 1695 - RNA, 19 nt, Homo sapiens
gaggguacuuuaagacaua

SEQ ID NO: 1696 - RNA, 19 nt, Homo sapiens
caugaggugucaacuguua

SEQ ID NO: 1697 - RNA, 19 nt, Homo sapiens
gaagugaaaugcuuuaaug

SEQ ID NO: 1698 - RNA, 19 nt, Homo sapiens
aaauauggcuccuccuuag

SEQ ID NO: 1699 - RNA, 19 nt, Homo sapiens
gcaaucacauuuaugcaua

SEQ ID NO: 1700 - RNA, 19 nt, Homo sapiens
caacauaacugagguggau

SEQ ID NO: 1701 - RNA, 19 nt, Homo sapiens
caugguacauucaagauuu

SEQ ID NO: 1702 - RNA, 19 nt, Homo sapiens
gaacucuacuucagucaau

SEQ ID NO: 1703 - RNA, 19 nt, Homo sapiens
gggcaaaugcaucauaaua

SEQ ID NO: 1704 - RNA, 19 nt, Homo sapiens
caacagagggaguuuaaua

SEQ ID NO: 1705 - RNA, 19 nt, Homo sapiens
gaacaaagccacugacuga

SEQ ID NO: 1706 - RNA, 19 nt, Homo sapiens
gaagugaacuaugaaguaa

SEQ ID NO: 1707 - RNA, 19 nt, Homo sapiens
caacaaggaugacaagaaa

SEQ ID NO: 1708 - RNA, 19 nt, Homo sapiens
ggacaaaguuuaccaaaug

SEQ ID NO: 1709 - RNA, 19 nt, Homo sapiens
gagggucgaucaucuauua

SEQ ID NO: 1710 - RNA, 19 nt, Homo sapiens
gaauauagagggcuuauga

SEQ ID NO: 1711 - RNA, 19 nt, Homo sapiens
caacgacuaugaagaauuc

SEQ ID NO: 1712 - RNA, 19 nt, Homo sapiens
gaagugagcagaucagaau

SEQ ID NO: 1713 - RNA, 19 nt, Homo sapiens
gaggaaaucuccaaaugca

SEQ ID NO: 1714 - RNA, 19 nt, Homo sapiens
ccaggcagcugaucauaga

SEQ ID NO: 1715 - RNA, 19 nt, Homo sapiens
ucucagguguugccaaaua

SEQ ID NO: 1716 - RNA, 19 nt, Homo sapiens
gaacagcuguaaucuauga

SEQ ID NO: 1717 - RNA, 19 nt, Homo sapiens
ccacuggucuguagggauu

SEQ ID NO: 1718 - RNA, 19 nt, Homo sapiens
ucguaaagcuguugauauc

SEQ ID NO: 1719 - RNA, 19 nt, Homo sapiens
gaggagaucuuugaugaca

SEQ ID NO: 1720 - RNA, 19 nt, Homo sapiens
guaaagcuguugauaucga

SEQ ID NO: 1721 - RNA, 19 nt, Homo sapiens
gaucguaaagcuguugaua

SEQ ID NO: 1722 - RNA, 19 nt, Homo sapiens
agacgaaggugauuuacca

SEQ ID NO: 1723 - RNA, 19 nt, Homo sapiens
ugugagagcuaccuaguca

SEQ ID NO: 1724 - RNA, 19 nt, Homo sapiens
gaagaaauuucagaugaca

SEQ ID NO: 1725 - RNA, 19 nt, Homo sapiens
uaauaggcauuuccucuuu

SEQ ID NO: 1726 - RNA, 19 nt, Homo sapiens
gugaagaucuugaccaaug

SEQ ID NO: 1727 - RNA, 19 nt, Homo sapiens
gaucagcauacacaaauua

SEQ ID NO: 1728 - RNA, 19 nt, Homo sapiens
gaaugaaccuucugcaaca

SEQ ID NO: 1729 - RNA, 19 nt, Homo sapiens
ggcgcuauguguauuauua

SEQ ID NO: 1730 - RNA, 19 nt, Homo sapiens
guacaaagcugguauaucc

SEQ ID NO: 1731 - RNA, 19 nt, Homo sapiens
gaaagacucccaguguaua

SEQ ID NO: 1732 - RNA, 19 nt, Homo sapiens
ggaaguccaucucaucgaa

SEQ ID NO: 1733 - RNA, 19 nt, Homo sapiens
ccaaagacaugacgacguu

SEQ ID NO: 1734 - RNA, 19 nt, Homo sapiens
guaaagaggagacugaaug

SEQ ID NO: 1735 - RNA, 19 nt, Homo sapiens
ggucugugauggucccuaa

SEQ ID NO: 1736 - RNA, 19 nt, Homo sapiens
caaagaugccuacgacaug

SEQ ID NO: 1737 - RNA, 19 nt, Homo sapiens
gggcgaugccugaggguua

SEQ ID NO: 1738 - RNA, 19 nt, Homo sapiens
ucacacaaguuuaugguuu

SEQ ID NO: 1739 - RNA, 19 nt, Homo sapiens
caacagccgugaccacuuu

SEQ ID NO: 1740 - RNA, 19 nt, Homo sapiens
uaaccaagcugcaaucaug

SEQ ID NO: 1741 - RNA, 19 nt, Homo sapiens
gaacuugacgauacucuaa

SEQ ID NO: 1742 - RNA, 19 nt, Homo sapiens
gaagagaggucguucuaag

SEQ ID NO: 1743 - RNA, 19 nt, Homo sapiens
aagcagaugugcaugauua

SEQ ID NO: 1744 - RNA, 19 nt, Homo sapiens
ucuaauaacugcaguguuu

SEQ ID NO: 1745 - RNA, 19 nt, Homo sapiens
guaaagggcccucuaauaa

SEQ ID NO: 1746 - RNA, 19 nt, Homo sapiens
gaaagaauaugcccaaguu

SEQ ID NO: 1747 - RNA, 19 nt, Homo sapiens
gaagaagaaugccacaaug

SEQ ID NO: 1748 - RNA, 19 nt, Homo sapiens
gcaggaagauuaugaugug

SEQ ID NO: 1749 - RNA, 19 nt, Homo sapiens
aaagaaagcccauguacua

SEQ ID NO: 1750 - RNA, 19 nt, Homo sapiens
gggaaagagcugcauauua

SEQ ID NO: 1751 - RNA, 19 nt, Homo sapiens
gcuuagaacucuuuacuga

SEQ ID NO: 1752 - RNA, 19 nt, Homo sapiens
uauaagagcuugaccaaug

SEQ ID NO: 1753 - RNA, 19 nt, Homo sapiens
gcagauaucucuaugauug

SEQ ID NO: 1754 - RNA, 19 nt, Homo sapiens
caacucauguccaauacug

SEQ ID NO: 1755 - RNA, 19 nt, Homo sapiens
ggaaugagccagauguuua

SEQ ID NO: 1756 - RNA, 19 nt, Homo sapiens
ggagacagcuguacguugu

SEQ ID NO: 1757 - RNA, 19 nt, Homo sapiens
uccaagagcugacaacuga

SEQ ID NO: 1758 - RNA, 19 nt, Homo sapiens
guaaggagaagcaauauaa

SEQ ID NO: 1759 - RNA, 19 nt, Homo sapiens
aagaugagcuuuccaugua

SEQ ID NO: 1760 - RNA, 19 nt, Homo sapiens
ggacaucuaucucaucauu

SEQ ID NO: 1761 - RNA, 19 nt, Homo sapiens
gacaagagcccacagagua

SEQ ID NO: 1762 - RNA, 19 nt, Homo sapiens
guacuucccucaggccuau

SEQ ID NO: 1763 - RNA, 19 nt, Homo sapiens
gcugugccuugacuacgua

SEQ ID NO: 1764 - RNA, 19 nt, Homo sapiens
guacuucccucaggccuau

SEQ ID NO: 1765 - RNA, 19 nt, Homo sapiens
ggucaggugccucgagauc

SEQ ID NO: 1766 - RNA, 19 nt, Homo sapiens
cagcguaacuucauucuuc

SEQ ID NO: 1767 - RNA, 19 nt, Homo sapiens
uaacuucauucuucaggua

SEQ ID NO: 1768 - RNA, 19 nt, Homo sapiens
cagcugcucuuacccauuu

SEQ ID NO: 1769 - RNA, 19 nt, Homo sapiens
gauugaagcuauuacugaa

SEQ ID NO: 1770 - RNA, 19 nt, Homo sapiens
uagaagagcuccgucagaa

SEQ ID NO: 1771 - RNA, 19 nt, Homo sapiens
ccacauaugcguugauuga

SEQ ID NO: 1772 - RNA, 19 nt, Homo sapiens
gcgcagggcucucuaccua

SEQ ID NO: 1773 - RNA, 19 nt, Homo sapiens
gaacagccuucaaaucaaa

SEQ ID NO: 1774 - RNA, 19 nt, Homo sapiens
gauguucucuacuauguua

SEQ ID NO: 1775 - RNA, 19 nt, Homo sapiens
gcaaauacuggaaggauua

SEQ ID NO: 1776 - RNA, 19 nt, Homo sapiens
caggaaagcucguaauuua

SEQ ID NO: 1777 - RNA, 19 nt, Homo sapiens
ccacacggcugaccucaua

SEQ ID NO: 1778 - RNA, 19 nt, Homo sapiens
cagcagaauuccucuuaua

SEQ ID NO: 1779 - RNA, 19 nt, Homo sapiens
gcagaauuccucuuauaaa

SEQ ID NO: 1780 - RNA, 19 nt, Homo sapiens
gaucgggauuuauuucuau

SEQ ID NO: 1781 - RNA, 19 nt, Homo sapiens
ugugggagcugaugacuuu

SEQ ID NO: 1782 - RNA, 19 nt, Homo sapiens
ucacagagaucuugaaagg

SEQ ID NO: 1783 - RNA, 19 nt, Homo sapiens
uggaagagaucacagguua

SEQ ID NO: 1784 - RNA, 19 nt, Homo sapiens
gcucaucgcucacaaccaa

SEQ ID NO: 1785 - RNA, 19 nt, Homo sapiens
gagcaccacuucuaugauu

SEQ ID NO: 1786 - RNA, 19 nt, Homo sapiens
caaagaagcuguucaauau

SEQ ID NO: 1787 - RNA, 19 nt, Homo sapiens
ugaaagcccucccuuauua

SEQ ID NO: 1788 - RNA, 19 nt, Homo sapiens
gaaauagcauggagaagga

SEQ ID NO: 1789 - RNA, 19 nt, Homo sapiens
ccauacagcuucauaaaua

SEQ ID NO: 1790 - RNA, 19 nt, Homo sapiens
gaagagaacuuaucuagug

SEQ ID NO: 1791 - RNA, 19 nt, Homo sapiens
gaagugggcuccaguauua

SEQ ID NO: 1792 - RNA, 19 nt, Homo sapiens
gcaagaugcugauucauua

SEQ ID NO: 1793 - RNA, 19 nt, Homo sapiens
gaagugggcuccaguauua

SEQ ID NO: 1794 - RNA, 19 nt, Homo sapiens
gaacggacacugaaauauu

SEQ ID NO: 1795 - RNA, 19 nt, Homo sapiens
gcagauaguucuaccagua

SEQ ID NO: 1796 - RNA, 19 nt, Homo sapiens
gaacaaggagucagacauu

SEQ ID NO: 1797 - RNA, 19 nt, Homo sapiens
aaacuaggcgguugaauga

SEQ ID NO: 1798 - RNA, 19 nt, Homo sapiens
gauggaacuucgacuuugu

SEQ ID NO: 1799 - RNA, 19 nt, Homo sapiens
guaaacagauggcacuuug

SEQ ID NO: 1800 - RNA, 19 nt, Homo sapiens
ggaauggacauccuguaua

SEQ ID NO: 1801 - RNA, 19 nt, Homo sapiens
ggagaaagaugucaaacgu

SEQ ID NO: 1802 - RNA, 19 nt, Homo sapiens
gaauggacauccuguauaa

SEQ ID NO: 1803 - RNA, 19 nt, Homo sapiens
guaaacagcucgaauuaag

SEQ ID NO: 1804 - RNA, 19 nt, Homo sapiens
cagauaggcuccgaagaug

SEQ ID NO: 1805 - RNA, 19 nt, Homo sapiens
agacucagcuccagaauac

SEQ ID NO: 1806 - RNA, 19 nt, Homo sapiens
gaucgguucuuucaucuuc

SEQ ID NO: 1807 - RNA, 19 nt, Homo sapiens
caggaucgguucuuucauc

SEQ ID NO: 1808 - RNA, 19 nt, Homo sapiens
ccagauaagugacauaagu

SEQ ID NO: 1809 - RNA, 19 nt, Homo sapiens
uaagugaccugcuuuguaa

SEQ ID NO: 1810 - RNA, 19 nt, Homo sapiens
gaagagagauuccauugaa

SEQ ID NO: 1811 - RNA, 19 nt, Homo sapiens
ugaaagagcucaacaacaa

SEQ ID NO: 1812 - RNA, 19 nt, Homo sapiens
gagcaugccgucaauaaua

SEQ ID NO: 1813 - RNA, 19 nt, Homo sapiens
caagagaacucaucauaag

SEQ ID NO: 1814 - RNA, 19 nt, Homo sapiens
ccaaagugcugcaguacua

SEQ ID NO: 1815 - RNA, 19 nt, Homo sapiens
uaagaaagcuauccagauu

SEQ ID NO: 1816 - RNA, 19 nt, Homo sapiens
gaaacaagcccuuuaaguu

SEQ ID NO: 1817 - RNA, 19 nt, Homo sapiens
gaauuacucuccaaguuga

SEQ ID NO: 1818 - RNA, 19 nt, Homo sapiens
cagcacaagugguagguua

SEQ ID NO: 1819 - RNA, 19 nt, Homo sapiens
guugaggacugaauuacuc

SEQ ID NO: 1820 - RNA, 19 nt, Homo sapiens
gauggcagcuguuuaaaug

SEQ ID NO: 1821 - RNA, 19 nt, Homo sapiens
gaguauccuuucaguguua

SEQ ID NO: 1822 - RNA, 19 nt, Homo sapiens
caaaggaaccuacuuguac

SEQ ID NO: 1823 - RNA, 19 nt, Homo sapiens
ggaaccuacuuguacaaug

SEQ ID NO: 1824 - RNA, 19 nt, Homo sapiens
gaaccuacuuguacaauga

SEQ ID NO: 1825 - RNA, 19 nt, Homo sapiens
gagugugucuccuguagua

SEQ ID NO: 1826 - RNA, 19 nt, Homo sapiens
ggacaagaaucaauggaua

SEQ ID NO: 1827 - RNA, 19 nt, Homo sapiens
gaacaagccuccaggauuc

SEQ ID NO: 1828 - RNA, 19 nt, Homo sapiens
ggacuugugugcccuuaua

SEQ ID NO: 1829 - RNA, 19 nt, Homo sapiens
gaacacaaaggcacuauaa

SEQ ID NO: 1830 - RNA, 19 nt, Homo sapiens
cgaagaaagugaugaauuu

SEQ ID NO: 1831 - RNA, 19 nt, Homo sapiens
gcucuuugcccaucucuuu

SEQ ID NO: 1832 - RNA, 19 nt, Homo sapiens
ugaaagaccugguggaaga

SEQ ID NO: 1833 - RNA, 19 nt, Homo sapiens
gcaauucaguuucuacauc

SEQ ID NO: 1834 - RNA, 19 nt, Homo sapiens
gaagacagaguuauuaaac

SEQ ID NO: 1835 - RNA, 19 nt, Homo sapiens
ucacgaagacagaguuauu

SEQ ID NO: 1836 - RNA, 19 nt, Homo sapiens
agacagaguuauuaaacca

SEQ ID NO: 1837 - RNA, 19 nt, Homo sapiens
cacgaagacagaguuauua

SEQ ID NO: 1838 - RNA, 19 nt, Homo sapiens
gcugaagccugucugaugu

SEQ ID NO: 1839 - RNA, 19 nt, Homo sapiens
caaaugaucugaggcaguu

SEQ ID NO: 1840 - RNA, 19 nt, Homo sapiens
guucauaguuugagcguua

SEQ ID NO: 1841 - RNA, 19 nt, Homo sapiens
ggagaaaccuguugugauu

SEQ ID NO: 1842 - RNA, 19 nt, Homo sapiens
ggacaaaguugcugaaauc

SEQ ID NO: 1843 - RNA, 19 nt, Homo sapiens
caaaugaucugaggcaguu

SEQ ID NO: 1844 - RNA, 19 nt, Homo sapiens
ggagaaaccuguugugauu

SEQ ID NO: 1845 - RNA, 19 nt, Homo sapiens
ggacaaaguugcugaaauc

SEQ ID NO: 1846 - RNA, 19 nt, Homo sapiens
guucauaguuugagcguua

SEQ ID NO: 1847 - RNA, 19 nt, Homo sapiens
ugaagcaccuugaucuuug

SEQ ID NO: 1848 - RNA, 19 nt, Homo sapiens
gggcagcgcauaccuguuu

SEQ ID NO: 1849 - RNA, 19 nt, Homo sapiens
gaggagcgcuguuugaguu

SEQ ID NO: 1850 - RNA, 19 nt, Homo sapiens
ggacgaggagcgcuguuug

SEQ ID NO: 1851 - RNA, 19 nt, Homo sapiens
gaggagcgcuguuugaguu

SEQ ID NO: 1852 - RNA, 19 nt, Homo sapiens
ggaugucucucuccucuuu

SEQ ID NO: 1853 - RNA, 19 nt, Homo sapiens
gcucacuccuuucuacuaa

SEQ ID NO: 1854 - RNA, 19 nt, Homo sapiens
ugaagcaccuugaucuuug

SEQ ID NO: 1855 - RNA, 19 nt, Homo sapiens
gcacagauauuuccauuuc

SEQ ID NO: 1856 - RNA, 19 nt, Homo sapiens
gcaguccucuuauuccuaa

SEQ ID NO: 1857 - RNA, 19 nt, Homo sapiens
gaacucaagcugcguuuau

SEQ ID NO: 1858 - RNA, 19 nt, Homo sapiens
ggacgaauugagauaauau

SEQ ID NO: 1859 - RNA, 19 nt, Homo sapiens
uaagaacacugcucaugaa

SEQ ID NO: 1860 - RNA, 19 nt, Homo sapiens
gaggcauccugaagcauua

SEQ ID NO: 1861 - RNA, 19 nt, Homo sapiens
gaaggcggcugcagaacug

SEQ ID NO: 1862 - RNA, 19 nt, Homo sapiens
ggaacaaggagaucaugua

SEQ ID NO: 1863 - RNA, 19 nt, Homo sapiens
cuaucgaggucguuaaauu

SEQ ID NO: 1864 - RNA, 19 nt, Homo sapiens
gaaugcagcuggaagaucu

SEQ ID NO: 1865 - RNA, 19 nt, Homo sapiens
gcggcgagcuggacuguuu

SEQ ID NO: 1866 - RNA, 19 nt, Homo sapiens
ccagaccgauguguauuua

SEQ ID NO: 1867 - RNA, 19 nt, Homo sapiens
ggucucaccucgcuauggu

SEQ ID NO: 1868 - RNA, 19 nt, Homo sapiens
gaaagcgaauuccuagaca

SEQ ID NO: 1869 - RNA, 19 nt, Homo sapiens
gcacaaacaagacugaugu

SEQ ID NO: 1870 - RNA, 19 nt, Homo sapiens
gaagggcaccucagaaaca

SEQ ID NO: 1871 - RNA, 19 nt, Homo sapiens
ucucccaacuuguauuaaa

SEQ ID NO: 1872 - RNA, 19 nt, Homo sapiens
ucaagugucuuccaucaug

SEQ ID NO: 1873 - RNA, 19 nt, Homo sapiens
ucaagugccuuaauaguag

SEQ ID NO: 1874 - RNA, 19 nt, Homo sapiens
ggaguacccugaggcuaua

SEQ ID NO: 1875 - RNA, 19 nt, Homo sapiens
gaugagaucuuccuacugu

SEQ ID NO: 1876 - RNA, 19 nt, Homo sapiens
gagcugggcuaaguaaaua

SEQ ID NO: 1877 - RNA, 19 nt, Homo sapiens
gaccaaagauggagugaga

SEQ ID NO: 1878 - RNA, 19 nt, Homo sapiens
ggaagaaacuggugauugu

SEQ ID NO: 1879 - RNA, 19 nt, Homo sapiens
ggcuguaacuacuuuauaa

SEQ ID NO: 1880 - RNA, 19 nt, Homo sapiens
ggacauuuguuugccauuu

SEQ ID NO: 1881 - RNA, 19 nt, Homo sapiens
ggagaaccauauacucuug

SEQ ID NO: 1882 - RNA, 19 nt, Homo sapiens
gaaccaaugcuuucucaug

SEQ ID NO: 1883 - RNA, 19 nt, Homo sapiens
gaagaccuguuauguagag

SEQ ID NO: 1884 - RNA, 19 nt, Homo sapiens
gaucaagaauugcaauauc

SEQ ID NO: 1885 - RNA, 19 nt, Homo sapiens
gaaaaggggugaccuagua

SEQ ID NO: 1886 - RNA, 19 nt, Homo sapiens
ugacaaaccuuauggaaaa

SEQ ID NO: 1887 - RNA, 19 nt, Homo sapiens
ggaaugagcuucagaugca

SEQ ID NO: 1888 - RNA, 19 nt, Homo sapiens
ggacacagcuguaagauug

SEQ ID NO: 1889 - RNA, 19 nt, Homo sapiens
gacaagagauuacagauaa

SEQ ID NO: 1890 - RNA, 19 nt, Homo sapiens
gaagaaacauucccuauuc

SEQ ID NO: 1891 - RNA, 19 nt, Homo sapiens
gagggugguuuaugauuaa

SEQ ID NO: 1892 - RNA, 19 nt, Homo sapiens
caacaaagaacaaucacua

SEQ ID NO: 1893 - RNA, 19 nt, Homo sapiens
gaagaaauauacacgguuu

SEQ ID NO: 1894 - RNA, 19 nt, Homo sapiens
uacaugagcuuuacagaua

SEQ ID NO: 1895 - RNA, 19 nt, Homo sapiens
gguaggagaugaauuguuu

SEQ ID NO: 1896 - RNA, 19 nt, Homo sapiens
agaaggaacugaucauuaa

SEQ ID NO: 1897 - RNA, 19 nt, Homo sapiens
cuacagaccuccaauauca

SEQ ID NO: 1898 - RNA, 19 nt, Homo sapiens
gaaacuggccaaaccguua

SEQ ID NO: 1899 - RNA, 19 nt, Homo sapiens
gauuaucgcugcaaaggaa

SEQ ID NO: 1900 - RNA, 19 nt, Homo sapiens
gagagugccugcaagcuuu

SEQ ID NO: 1901 - RNA, 19 nt, Homo sapiens
gacaagagguggccauaaa

SEQ ID NO: 1902 - RNA, 19 nt, Homo sapiens
uuaaaucgcugucuugaga

SEQ ID NO: 1903 - RNA, 19 nt, Homo sapiens
acuaagaggugaacaugua

SEQ ID NO: 1904 - RNA, 19 nt, Homo sapiens
gaucaugaauguccgaaga

SEQ ID NO: 1905 - RNA, 19 nt, Homo sapiens
gaugagacccuacuacuga

SEQ ID NO: 1906 - RNA, 19 nt, Homo sapiens
cagcaaaggugccaaagau

SEQ ID NO: 1907 - RNA, 19 nt, Homo sapiens
uaaaggcaguuguccacua

SEQ ID NO: 1908 - RNA, 19 nt, Homo sapiens
gaagggaccugcuuucuug

SEQ ID NO: 1909 - RNA, 19 nt, Homo sapiens
gcaaagacgucccuaagag

SEQ ID NO: 1910 - RNA, 19 nt, Homo sapiens
ccaaugggcuggcugcaaa

SEQ ID NO: 1911 - RNA, 19 nt, Homo sapiens
gagcacggcuuuaauaagu

SEQ ID NO: 1912 - RNA, 19 nt, Homo sapiens
caaacuccguuaugauaua

SEQ ID NO: 1913 - RNA, 19 nt, Homo sapiens
ggauaaaguugucugauuu

SEQ ID NO: 1914 - RNA, 19 nt, Homo sapiens
ggaaaugccuccauaaaua

SEQ ID NO: 1915 - RNA, 19 nt, Homo sapiens
ggacaucgcugugaauugg

SEQ ID NO: 1916 - RNA, 19 nt, Homo sapiens
agaaagaagucaccgaaga

SEQ ID NO: 1917 - RNA, 19 nt, Homo sapiens
ggacaaggccacccaauga

SEQ ID NO: 1918 - RNA, 19 nt, Homo sapiens
ccacagcgaugacuacauu

SEQ ID NO: 1919 - RNA, 19 nt, Homo sapiens
gcuguuaaauuauggcuua

SEQ ID NO: 1920 - RNA, 19 nt, Homo sapiens
gcaaagaaagcuagaauug

SEQ ID NO: 1921 - RNA, 19 nt, Homo sapiens
caucagagagucuuauaua

SEQ ID NO: 1922 - RNA, 19 nt, Homo sapiens
ccaaugaguugccauauaa

SEQ ID NO: 1923 - RNA, 19 nt, Homo sapiens
ggccauagcuuaauuaauc

SEQ ID NO: 1924 - RNA, 19 nt, Homo sapiens
gcacagccguuuaccauga

SEQ ID NO: 1925 - RNA, 19 nt, Homo sapiens
ggacagcccuuuagucaag

SEQ ID NO: 1926 - RNA, 19 nt, Homo sapiens
gaacugauuccugaaauaa

SEQ ID NO: 1927 - RNA, 19 nt, Homo sapiens
cacauaaacucguaucuua

SEQ ID NO: 1928 - RNA, 19 nt, Homo sapiens
gagaaggcacucaaguuua

SEQ ID NO: 1929 - RNA, 19 nt, Homo sapiens
agacauaguuuacagagaa

SEQ ID NO: 1930 - RNA, 19 nt, Homo sapiens
gcagagagauuucauaacu

SEQ ID NO: 1931 - RNA, 19 nt, Homo sapiens
gaacauaccuguaaaucau

SEQ ID NO: 1932 - RNA, 19 nt, Homo sapiens
ggacaucgaccuguuauua

SEQ ID NO: 1933 - RNA, 19 nt, Homo sapiens
uaaaugaacuccuacauag

SEQ ID NO: 1934 - RNA, 19 nt, Homo sapiens
ggaauuaucucugaacaua

SEQ ID NO: 1935 - RNA, 19 nt, Homo sapiens
gcagaaauacaucuacuaa

SEQ ID NO: 1936 - RNA, 19 nt, Homo sapiens
gcuaugagcuguucuucaa

SEQ ID NO: 1937 - RNA, 19 nt, Homo sapiens
cgacaaagcucuacucauc

SEQ ID NO: 1938 - RNA, 19 nt, Homo sapiens
gcucaacccuggagacauu

SEQ ID NO: 1939 - RNA, 19 nt, Homo sapiens
ggacaagacucgcagauuu

SEQ ID NO: 1940 - RNA, 19 nt, Homo sapiens
gcugagcgcuuugcaauaa

SEQ ID NO: 1941 - RNA, 19 nt, Homo sapiens
caagaagucucacgggaaa

SEQ ID NO: 1942 - RNA, 19 nt, Homo sapiens
ucacagaggccaagaaauu

SEQ ID NO: 1943 - RNA, 19 nt, Homo sapiens
caucagugcaugacguuua

SEQ ID NO: 1944 - RNA, 19 nt, Homo sapiens
ugaaugagcugguggauua

SEQ ID NO: 1945 - RNA, 19 nt, Homo sapiens
ugccaaaacuuaccuauaa

SEQ ID NO: 1946 - RNA, 19 nt, Homo sapiens
gagcugcacuccaaugaga

SEQ ID NO: 1947 - RNA, 19 nt, Homo sapiens
gaaaccaagccauuaauga

SEQ ID NO: 1948 - RNA, 19 nt, Homo sapiens
ccaaggagcuacugacauu

SEQ ID NO: 1949 - RNA, 19 nt, Homo sapiens
agagaaacauggcccaaua

SEQ ID NO: 1950 - RNA, 19 nt, Homo sapiens
ccacagacauuuacauuaa

SEQ ID NO: 1951 - RNA, 19 nt, Homo sapiens
gaagggaguuugcuaaauu

SEQ ID NO: 1952 - RNA, 19 nt, Homo sapiens
gaacagaucugaugaauga

SEQ ID NO: 1953 - RNA, 19 nt, Homo sapiens
caagagagcugaagacuau

SEQ ID NO: 1954 - RNA, 19 nt, Homo sapiens
gcauauauauucagcauug

SEQ ID NO: 1955 - RNA, 19 nt, Homo sapiens
caacuugacugcaguauug

SEQ ID NO: 1956 - RNA, 19 nt, Homo sapiens
gaacuuaacuuuccauguu

SEQ ID NO: 1957 - RNA, 19 nt, Homo sapiens
gacaagaccuguaguaauu

SEQ ID NO: 1958 - RNA, 19 nt, Homo sapiens
agaaagagcuugacaguaa

SEQ ID NO: 1959 - RNA, 19 nt, Homo sapiens
ggaaguaguucacaaaaua

SEQ ID NO: 1960 - RNA, 19 nt, Homo sapiens
ugaaguaucuguauccaaa

SEQ ID NO: 1961 - RNA, 19 nt, Homo sapiens
gagcuucacucccuuaguu

SEQ ID NO: 1962 - RNA, 19 nt, Homo sapiens
uaaggacucugaagaugua

SEQ ID NO: 1963 - RNA, 19 nt, Homo sapiens
gacaaaguguguaauuaug

SEQ ID NO: 1964 - RNA, 19 nt, Homo sapiens
gcucaggacuuagcaagaa

SEQ ID NO: 1965 - RNA, 19 nt, Homo sapiens
gaaacugaauaccuaagau

SEQ ID NO: 1966 - RNA, 19 nt, Homo sapiens
gaaacugaauaccuaagau

SEQ ID NO: 1967 - RNA, 19 nt, Homo sapiens
uaaggacucugaagaugua

SEQ ID NO: 1968 - RNA, 19 nt, Homo sapiens
gacaaaguguguaauuaug

SEQ ID NO: 1969 - RNA, 19 nt, Homo sapiens
gcucaggacuuagcaagaa

SEQ ID NO: 1970 - RNA, 19 nt, Homo sapiens
ccauccagcugauccagaa

SEQ ID NO: 1971 - RNA, 19 nt, Homo sapiens
gaacccuccugaugagagu

SEQ ID NO: 1972 - RNA, 19 nt, Homo sapiens
gaggacauccaccaguaca

SEQ ID NO: 1973 - RNA, 19 nt, Homo sapiens
ccacugauguguguuaauu

SEQ ID NO: 1974 - RNA, 19 nt, Homo sapiens
caauagaaccugucaauau

SEQ ID NO: 1975 - RNA, 19 nt, Homo sapiens
gaagacaggaaucgaauga

SEQ ID NO: 1976 - RNA, 19 nt, Homo sapiens
ggaagaauuuguaccauuu

SEQ ID NO: 1977 - RNA, 19 nt, Homo sapiens
gaacgaccuuucuuucuuu

SEQ ID NO: 1978 - RNA, 19 nt, Homo sapiens
ggagucaucucuuccuaua

SEQ ID NO: 1979 - RNA, 19 nt, Homo sapiens
ggagaagccucaccucuug

SEQ ID NO: 1980 - RNA, 19 nt, Homo sapiens
gcagaaaggacucaagauu

SEQ ID NO: 1981 - RNA, 19 nt, Homo sapiens
gagaacaacuacucauuga

SEQ ID NO: 1982 - RNA, 19 nt, Homo sapiens
gaacuucucgucacuguau

SEQ ID NO: 1983 - RNA, 19 nt, Homo sapiens
ggauuguucuuucuucaua

SEQ ID NO: 1984 - RNA, 19 nt, Homo sapiens
gaaggguucucguauguca

SEQ ID NO: 1985 - RNA, 19 nt, Homo sapiens
gaagaaggauguggugauu

SEQ ID NO: 1986 - RNA, 19 nt, Homo sapiens
ggacugggaucgaacaaca

SEQ ID NO: 1987 - RNA, 19 nt, Homo sapiens
ggacagaaguggaaauauu

SEQ ID NO: 1988 - RNA, 19 nt, Homo sapiens
ucaaagaggugaacauuaa

SEQ ID NO: 1989 - RNA, 19 nt, Homo sapiens
gaccaaaucucaguuguuu

SEQ ID NO: 1990 - RNA, 19 nt, Homo sapiens
ggagaauggugcuguuuaa

SEQ ID NO: 1991 - RNA, 19 nt, Homo sapiens
gaagagaccaaaguauaau

SEQ ID NO: 1992 - RNA, 19 nt, Homo sapiens
gaagaccggccacgucauu

SEQ ID NO: 1993 - RNA, 19 nt, Homo sapiens
ggaagagaccaaaguauaa

SEQ ID NO: 1994 - RNA, 19 nt, Homo sapiens
gcauugagauugaccagaa

SEQ ID NO: 1995 - RNA, 19 nt, Homo sapiens
ugagagaacgagaaaguug

SEQ ID NO: 1996 - RNA, 19 nt, Homo sapiens
gugaaacccugucugcauu

SEQ ID NO: 1997 - RNA, 19 nt, Homo sapiens
ggaucucucucaacaacua

SEQ ID NO: 1998 - RNA, 19 nt, Homo sapiens
acaacuaggugaacacaua

SEQ ID NO: 1999 - RNA, 19 nt, Homo sapiens
ucacaguccugaaacgaua

SEQ ID NO: 2000 - RNA, 19 nt, Homo sapiens
gauuggagauucuacauuc

SEQ ID NO: 2001 - RNA, 19 nt, Homo sapiens
gcucauggaugcaaaucuu

SEQ ID NO: 2002 - RNA, 19 nt, Homo sapiens
gaagcuaagccgaccauuu

SEQ ID NO: 2003 - RNA, 19 nt, Homo sapiens
aaagagagcuuaucgugaa

SEQ ID NO: 2004 - RNA, 19 nt, Homo sapiens
gaugauagguuagaaauag

SEQ ID NO: 2005 - RNA, 19 nt, Homo sapiens
acaaagaagucauggauug

SEQ ID NO: 2006 - RNA, 19 nt, Homo sapiens
ggagcuggaucaugaaaga

SEQ ID NO: 2007 - RNA, 19 nt, Homo sapiens
gaaaagggaugaugggauu

SEQ ID NO: 2008 - RNA, 19 nt, Homo sapiens
ccuagacgaucccaaauau

SEQ ID NO: 2009 - RNA, 19 nt, Homo sapiens
gagccaaaccagggauuua

SEQ ID NO: 2010 - RNA, 19 nt, Homo sapiens
ugaaacgaaugcuggagaa

SEQ ID NO: 2011 - RNA, 19 nt, Homo sapiens
ucacucacccagagaaaua

SEQ ID NO: 2012 - RNA, 19 nt, Homo sapiens
ccaagaaagcuaucucuga

SEQ ID NO: 2013 - RNA, 19 nt, Homo sapiens
agacucaccuagagcuaaa

SEQ ID NO: 2014 - RNA, 19 nt, Homo sapiens
ccuggaggguccuguacaa

SEQ ID NO: 2015 - RNA, 19 nt, Homo sapiens
gagcaaaugagccaaacgu

SEQ ID NO: 2016 - RNA, 19 nt, Homo sapiens
ggaggguccuguacaaucu

SEQ ID NO: 2017 - RNA, 19 nt, Homo sapiens
gacuuucucugcaccaugu

SEQ ID NO: 2018 - RNA, 19 nt, Homo sapiens
ccagggagcuugaaaguuu

SEQ ID NO: 2019 - RNA, 19 nt, Homo sapiens
aaagugcaguucaguaaua

SEQ ID NO: 2020 - RNA, 19 nt, Homo sapiens
gagaaucacuaaccagaga

SEQ ID NO: 2021 - RNA, 19 nt, Homo sapiens
gagcccaucccuauuauaa

SEQ ID NO: 2022 - RNA, 19 nt, Homo sapiens
gagacgaguuuaacgcuua

SEQ ID NO: 2023 - RNA, 19 nt, Homo sapiens
aaagcaaccuucugaugua

SEQ ID NO: 2024 - RNA, 19 nt, Homo sapiens
ccgagaagguagacaauug

SEQ ID NO: 2025 - RNA, 19 nt, Homo sapiens
gcaaagcaaccuucugaug

SEQ ID NO: 2026 - RNA, 19 nt, Homo sapiens
agacagagccacaagguaa

SEQ ID NO: 2027 - RNA, 19 nt, Homo sapiens
gcaaggagguuagagaaau

SEQ ID NO: 2028 - RNA, 19 nt, Homo sapiens
caaggagguuagagaaaua

SEQ ID NO: 2029 - RNA, 19 nt, Homo sapiens
ucuuacgacuguuacguua

SEQ ID NO: 2030 - RNA, 19 nt, Homo sapiens
gaagacaucauccggaaua

SEQ ID NO: 2031 - RNA, 19 nt, Homo sapiens
caacagcguuccuagagaa

SEQ ID NO: 2032 - RNA, 19 nt, Homo sapiens
gaaaugggauggacugaac

SEQ ID NO: 2033 - RNA, 19 nt, Homo sapiens
acgaugagcugcagacuga

SEQ ID NO: 2034 - RNA, 19 nt, Homo sapiens
gaaagaagccugcauauaa

SEQ ID NO: 2035 - RNA, 19 nt, Homo sapiens
gaaauugacucuacauugu

SEQ ID NO: 2036 - RNA, 19 nt, Homo sapiens
acaaauagcacuuagguua

SEQ ID NO: 2037 - RNA, 19 nt, Homo sapiens
gaauacaccugugguuaaa

SEQ ID NO: 2038 - RNA, 19 nt, Homo sapiens
ggagaugccugccauuaaa

SEQ ID NO: 2039 - RNA, 19 nt, Homo sapiens
ucaaugaucuuguguuaga

SEQ ID NO: 2040 - RNA, 19 nt, Homo sapiens
gaaagaacauguaaagugu

SEQ ID NO: 2041 - RNA, 19 nt, Homo sapiens
gaagaaagaacauguaaag

SEQ ID NO: 2042 - RNA, 19 nt, Homo sapiens
guagauagauggcaauaug

SEQ ID NO: 2043 - RNA, 19 nt, Homo sapiens
gaggagggcuaacugauug

SEQ ID NO: 2044 - RNA, 19 nt, Homo sapiens
gaggaacccugccauguau

SEQ ID NO: 2045 - RNA, 19 nt, Homo sapiens
gcacggaucuuuacuuuug

SEQ ID NO: 2046 - RNA, 19 nt, Homo sapiens
ggcguaagaugauggauuu

SEQ ID NO: 2047 - RNA, 19 nt, Homo sapiens
gcaaaggaaaccaacaaua

SEQ ID NO: 2048 - RNA, 19 nt, Homo sapiens
gcacaaagccauucuaagu

SEQ ID NO: 2049 - RNA, 19 nt, Homo sapiens
caaaggaaaccaacaauaa

SEQ ID NO: 2050 - RNA, 19 nt, Homo sapiens
ccauacagcuucauaaaua

SEQ ID NO: 2051 - RNA, 19 nt, Homo sapiens
gaagagaacuuaucuagug

SEQ ID NO: 2052 - RNA, 19 nt, Homo sapiens
gaagugggcuccaguauua

SEQ ID NO: 2053 - RNA, 19 nt, Homo sapiens
gcaagaugcugauucauua

SEQ ID NO: 2054 - RNA, 19 nt, Homo sapiens
ccauacagcuucauaaaua

SEQ ID NO: 2055 - RNA, 19 nt, Homo sapiens
gaaaguuaaugucaaggaa

SEQ ID NO: 2056 - RNA, 19 nt, Homo sapiens
gagcaacacuggcauaaca

SEQ ID NO: 2057 - RNA, 19 nt, Homo sapiens
uaacagagauuugccuaaa

SEQ ID NO: 2058 - RNA, 19 nt, Homo sapiens
gcgaagagcugaccaaaua

SEQ ID NO: 2059 - RNA, 19 nt, Homo sapiens
caaaggguuucucuguuua

SEQ ID NO: 2060 - RNA, 19 nt, Homo sapiens
gaaaugaccucccuaaguu

SEQ ID NO: 2061 - RNA, 19 nt, Homo sapiens
gaaggcagcugguauauuc

SEQ ID NO: 2062 - RNA, 19 nt, Homo sapiens
gacaugaucuuccuucuga

SEQ ID NO: 2063 - RNA, 19 nt, Homo sapiens
gcacucuucuguucccuua

SEQ ID NO: 2064 - RNA, 19 nt, Homo sapiens
guauuaaacucuccuuuga

SEQ ID NO: 2065 - RNA, 19 nt, Homo sapiens
gcaaggagaugucugaaua

SEQ ID NO: 2066 - RNA, 19 nt, Homo sapiens
caacuucccugaucuuuaa

SEQ ID NO: 2067 - RNA, 19 nt, Homo sapiens
gcucaaagauguaauguag

SEQ ID NO: 2068 - RNA, 19 nt, Homo sapiens
gaacaaggagucagacauu

SEQ ID NO: 2069 - RNA, 19 nt, Homo sapiens
aaacuaggcgguugaauga

SEQ ID NO: 2070 - RNA, 19 nt, Homo sapiens
gauggaacuucgacuuugu

SEQ ID NO: 2071 - RNA, 19 nt, Homo sapiens
guaaacagauggcacuuug

SEQ ID NO: 2072 - RNA, 19 nt, Homo sapiens
gauguguccucauuaauuu

SEQ ID NO: 2073 - RNA, 19 nt, Homo sapiens
gaagagagauacaagauga

SEQ ID NO: 2074 - RNA, 19 nt, Homo sapiens
gagcauaccugaagagaga

SEQ ID NO: 2075 - RNA, 19 nt, Homo sapiens
gcuaugaaguccagaaauu

SEQ ID NO: 2076 - RNA, 19 nt, Homo sapiens
gugaauaugugaaauagug

SEQ ID NO: 2077 - RNA, 19 nt, Homo sapiens
aaagcaugcuagaguauga

SEQ ID NO: 2078 - RNA, 19 nt, Homo sapiens
uuaagaauguggagaagua

SEQ ID NO: 2079 - RNA, 19 nt, Homo sapiens
gauaacaagcugacacaua

SEQ ID NO: 2080 - RNA, 19 nt, Homo sapiens
ggacguaauugaugaagua

SEQ ID NO: 2081 - RNA, 19 nt, Homo sapiens
gcagauggguucuuaaaug

SEQ ID NO: 2082 - RNA, 19 nt, Homo sapiens
caaaugagguugaggaaau

SEQ ID NO: 2083 - RNA, 19 nt, Homo sapiens
ggaaauaccuggaggauga

SEQ ID NO: 2084 - RNA, 19 nt, Homo sapiens
gauccacguuucaaugaua

SEQ ID NO: 2085 - RNA, 19 nt, Homo sapiens
gcauuuagguggagacuuc

SEQ ID NO: 2086 - RNA, 19 nt, Homo sapiens
gauguacgauuauaguuug

SEQ ID NO: 2087 - RNA, 19 nt, Homo sapiens
ugaauuagauccacguuuc

SEQ ID NO: 2088 - RNA, 19 nt, Homo sapiens
gcacaagaauggaucacaa

SEQ ID NO: 2089 - RNA, 19 nt, Homo sapiens
gcugaaacaugcaguugua

SEQ ID NO: 2090 - RNA, 19 nt, Homo sapiens
guacguaccaugcagaaua

SEQ ID NO: 2091 - RNA, 19 nt, Homo sapiens
gaacuugcauugugauugg

SEQ ID NO: 2092 - RNA, 19 nt, Homo sapiens
gaagcaugacggacaagua

SEQ ID NO: 2093 - RNA, 19 nt, Homo sapiens
gaacauuccagagcgugua

SEQ ID NO: 2094 - RNA, 19 nt, Homo sapiens
guucuuaguugcuguaugu

SEQ ID NO: 2095 - RNA, 19 nt, Homo sapiens
caucaugguuggccuuauc

SEQ ID NO: 2096 - RNA, 19 nt, Homo sapiens
ggaacaaacuggcaaagca

SEQ ID NO: 2097 - RNA, 19 nt, Homo sapiens
gaucagagcagcagugaaa

SEQ ID NO: 2098 - RNA, 19 nt, Homo sapiens
gggcaaaacugaauuauaa

SEQ ID NO: 2099 - RNA, 19 nt, Homo sapiens
gaucucagguucuccuuga

SEQ ID NO: 2100 - RNA, 19 nt, Homo sapiens
cuacagaucuccaaugaaa

SEQ ID NO: 2101 - RNA, 19 nt, Homo sapiens
gcuacaagcuggagaauga

SEQ ID NO: 2102 - RNA, 19 nt, Homo sapiens
ggaaacagcuauguggaaa

SEQ ID NO: 2103 - RNA, 19 nt, Homo sapiens
ggaguuggaucucucagaa

SEQ ID NO: 2104 - RNA, 19 nt, Homo sapiens
guaguaagcuaaacugaaa

SEQ ID NO: 2105 - RNA, 19 nt, Homo sapiens
gacaauauguucaagagaa

SEQ ID NO: 2106 - RNA, 19 nt, Homo sapiens
gacaacaucucgucagcua

SEQ ID NO: 2107 - RNA, 19 nt, Homo sapiens
uauaugauguguccaguaa

SEQ ID NO: 2108 - RNA, 19 nt, Homo sapiens
caaagaagcucacuuacug

SEQ ID NO: 2109 - RNA, 19 nt, Homo sapiens
gaacagcccuaaagugguu

SEQ ID NO: 2110 - RNA, 19 nt, Homo sapiens
gaacauggaugacccuaag

SEQ ID NO: 2111 - RNA, 19 nt, Homo sapiens
gggcaaagcuaaaucaagu

SEQ ID NO: 2112 - RNA, 19 nt, Homo sapiens
ggaaagcgauguggagauu

SEQ ID NO: 2113 - RNA, 19 nt, Homo sapiens
ccaagaccguggccuauuu

SEQ ID NO: 2114 - RNA, 19 nt, Homo sapiens
aaagcgauguggagauuua

SEQ ID NO: 2115 - RNA, 19 nt, Homo sapiens
gugaggagcuucccuauag

SEQ ID NO: 2116 - RNA, 19 nt, Homo sapiens
gaauuccucuugucgaagu

SEQ ID NO: 2117 - RNA, 19 nt, Homo sapiens
guuauuagcaccuuuaaga

SEQ ID NO: 2118 - RNA, 19 nt, Homo sapiens
ggagggaggccaugacuug

SEQ ID NO: 2119 - RNA, 19 nt, Homo sapiens
caggagagcucaagaaugg

SEQ ID NO: 2120 - RNA, 19 nt, Homo sapiens
ggauauggauuucaguuaa

SEQ ID NO: 2121 - RNA, 19 nt, Homo sapiens
ggaagucggugccuugguu

SEQ ID NO: 2122 - RNA, 19 nt, Homo sapiens
ggaaggagaggacugguuu

SEQ ID NO: 2123 - RNA, 19 nt, Homo sapiens
gcagauacuugcacgguuu

SEQ ID NO: 2124 - RNA, 19 nt, Homo sapiens
gaguagaacuagaauguga

SEQ ID NO: 2125 - RNA, 19 nt, Homo sapiens
gcgaauaaaucaugaaaga

SEQ ID NO: 2126 - RNA, 19 nt, Homo sapiens
gaagauggaauuaugcaua

SEQ ID NO: 2127 - RNA, 19 nt, Homo sapiens
ggcaaugcgucucgcgaua

SEQ ID NO: 2128 - RNA, 19 nt, Homo sapiens
gauccgcaaugaugaggaa

SEQ ID NO: 2129 - RNA, 19 nt, Homo sapiens
gcaaugcgucucgcgauaa

SEQ ID NO: 2130 - RNA, 19 nt, Homo sapiens
gaggaacucaauaagcuuu

SEQ ID NO: 2131 - RNA, 19 nt, Homo sapiens
aauagaagcugugcaauua

SEQ ID NO: 2132 - RNA, 19 nt, Homo sapiens
caacugaccucaucuggaa

SEQ ID NO: 2133 - RNA, 19 nt, Homo sapiens
gaaggaaucugaucuuaau

SEQ ID NO: 2134 - RNA, 19 nt, Homo sapiens
gggaaggguuucucuauua

SEQ ID NO: 2135 - RNA, 19 nt, Homo sapiens
ggagguucauugagaauug

SEQ ID NO: 2136 - RNA, 19 nt, Homo sapiens
ggcaauagcucaccguuua

SEQ ID NO: 2137 - RNA, 19 nt, Homo sapiens
caaauacgcuuagcugugu

SEQ ID NO: 2138 - RNA, 19 nt, Homo sapiens
ggagaucgccuacaaguuc

SEQ ID NO: 2139 - RNA, 19 nt, Homo sapiens
gcagaaacacuccaauuua

SEQ ID NO: 2140 - RNA, 19 nt, Homo sapiens
guaaauacgugaaugcauu

SEQ ID NO: 2141 - RNA, 19 nt, Homo sapiens
gcacugaacuuuugagaua

SEQ ID NO: 2142 - RNA, 19 nt, Homo sapiens
gaagaacagucauuugaug

SEQ ID NO: 2143 - RNA, 19 nt, Homo sapiens
gaggugagcuguuaaauca

SEQ ID NO: 2144 - RNA, 19 nt, Homo sapiens
gcagggugauuuccuaaua

SEQ ID NO: 2145 - RNA, 19 nt, Homo sapiens
gggagaagauauuuaauug

SEQ ID NO: 2146 - RNA, 19 nt, Homo sapiens
caacuucucuccugaacuu

SEQ ID NO: 2147 - RNA, 19 nt, Homo sapiens
ggacacggcacugcacuug

SEQ ID NO: 2148 - RNA, 19 nt, Homo sapiens
gcacuuggcugugauucau

SEQ ID NO: 2149 - RNA, 19 nt, Homo sapiens
gagacgagggcgaugaaua

SEQ ID NO: 2150 - RNA, 19 nt, Homo sapiens
caugaacccuuccuggauu

SEQ ID NO: 2151 - RNA, 19 nt, Homo sapiens
gaacauggacuuguauauu

SEQ ID NO: 2152 - RNA, 19 nt, Homo sapiens
gauguggggugaaaaguua

SEQ ID NO: 2153 - RNA, 19 nt, Homo sapiens
ggacgagaaagaucauuga

SEQ ID NO: 2154 - RNA, 19 nt, Homo sapiens
aggacgagcugcccuauga

SEQ ID NO: 2155 - RNA, 19 nt, Homo sapiens
gaagggaaguuucaguaac

SEQ ID NO: 2156 - RNA, 19 nt, Homo sapiens
ggaagggaaguuucaguaa

SEQ ID NO: 2157 - RNA, 19 nt, Homo sapiens
ggaaacugcugcuguguac

SEQ ID NO: 2158 - RNA, 19 nt, Homo sapiens
gaaccaaccacucauggaa

SEQ ID NO: 2159 - RNA, 19 nt, Homo sapiens
gggaacaguuugaauauaa

SEQ ID NO: 2160 - RNA, 19 nt, Homo sapiens
gcaguagccugaagcagaa

SEQ ID NO: 2161 - RNA, 19 nt, Homo sapiens
cgagaaggaugcacagaua

SEQ ID NO: 2162 - RNA, 19 nt, Homo sapiens
gcaagaggcugagaggaaa

SEQ ID NO: 2163 - RNA, 19 nt, Homo sapiens
gaagacaaaugaaagcuaa

SEQ ID NO: 2164 - RNA, 19 nt, Homo sapiens
gauaaagacugcuguuaga

SEQ ID NO: 2165 - RNA, 19 nt, Homo sapiens
gaggagagcucuaauauua

SEQ ID NO: 2166 - RNA, 19 nt, Homo sapiens
gaggaagccugauuaaaga

SEQ ID NO: 2167 - RNA, 19 nt, Homo sapiens
gaaagagcaugaugacaua

SEQ ID NO: 2168 - RNA, 19 nt, Homo sapiens
gaggagagcucuauuaugu

SEQ ID NO: 2169 - RNA, 19 nt, Homo sapiens
gaaacugaauggaagaaua

SEQ ID NO: 2170 - RNA, 19 nt, Homo sapiens
aaagaaggcuguaccguua

SEQ ID NO: 2171 - RNA, 19 nt, Homo sapiens
cuacaugucuuugcucuua

SEQ ID NO: 2172 - RNA, 19 nt, Homo sapiens
gcuaaguccuguaagaaua

SEQ ID NO: 2173 - RNA, 19 nt, Homo sapiens
caaaggcaauguacuguuu

SEQ ID NO: 2174 - RNA, 19 nt, Homo sapiens
gaacaaugguggauccaaa

SEQ ID NO: 2175 - RNA, 19 nt, Homo sapiens
aaguucagcuucucuauua

SEQ ID NO: 2176 - RNA, 19 nt, Homo sapiens
gaagaaaucucugauggau

SEQ ID NO: 2177 - RNA, 19 nt, Homo sapiens
gaacaccuuuacucuauaa

SEQ ID NO: 2178 - RNA, 19 nt, Homo sapiens
gcauggagcuggagaacua

SEQ ID NO: 2179 - RNA, 19 nt, Homo sapiens
gaugaaagcucuaaagaug

SEQ ID NO: 2180 - RNA, 19 nt, Homo sapiens
gaaaggagguucuaaacua

SEQ ID NO: 2181 - RNA, 19 nt, Homo sapiens
ggaagaagcucauuugauu

SEQ ID NO: 2182 - RNA, 19 nt, Homo sapiens
gcaaagagguggcaguuaa

SEQ ID NO: 2183 - RNA, 19 nt, Homo sapiens
ggaagaagauccacaugaa

SEQ ID NO: 2184 - RNA, 19 nt, Homo sapiens
gaacauacuuucagagcuu

SEQ ID NO: 2185 - RNA, 19 nt, Homo sapiens
gaacaaucuuugcuguaua

SEQ ID NO: 2186 - RNA, 19 nt, Homo sapiens
uaacagaacugcuucaaca

SEQ ID NO: 2187 - RNA, 19 nt, Homo sapiens
gaagagauccacacacagu

SEQ ID NO: 2188 - RNA, 19 nt, Homo sapiens
ucaaugagcugcugcacau

SEQ ID NO: 2189 - RNA, 19 nt, Homo sapiens
gaagauagguuuccaugug

SEQ ID NO: 2190 - RNA, 19 nt, Homo sapiens
gaauuacccuuccucaucu

SEQ ID NO: 2191 - RNA, 19 nt, Homo sapiens
cuacagagcuucaguguga

SEQ ID NO: 2192 - RNA, 19 nt, Homo sapiens
gaacauauuugaucgaaag

SEQ ID NO: 2193 - RNA, 19 nt, Homo sapiens
gagcaaaccuagauaagga

SEQ ID NO: 2194 - RNA, 19 nt, Homo sapiens
gcauugaucucuucuuaga

SEQ ID NO: 2195 - RNA, 19 nt, Homo sapiens
ggaagacaguggugaacuu

SEQ ID NO: 2196 - RNA, 19 nt, Homo sapiens
gcaaagcauuggaaucaga

SEQ ID NO: 2197 - RNA, 19 nt, Homo sapiens
gagcugacguggaagauga

SEQ ID NO: 2198 - RNA, 19 nt, Homo sapiens
gaacgggccuggaaccaua

SEQ ID NO: 2199 - RNA, 19 nt, Homo sapiens
gauacuaacugcucucaga

SEQ ID NO: 2200 - RNA, 19 nt, Homo sapiens
gaaagaauggugucaauga

SEQ ID NO: 2201 - RNA, 19 nt, Homo sapiens
ucaauaaugucccauguaa

SEQ ID NO: 2202 - RNA, 19 nt, Homo sapiens
ucaugaaucuccaaccuua

SEQ ID NO: 2203 - RNA, 19 nt, Homo sapiens
gauguugacuugaguaaau

SEQ ID NO: 2204 - RNA, 19 nt, Homo sapiens
gaaaggaaaugacuaauga

SEQ ID NO: 2205 - RNA, 19 nt, Homo sapiens
gaagaaggcuguucagaga

SEQ ID NO: 2206 - RNA, 19 nt, Homo sapiens
ggaaguagcuacguucuuu

SEQ ID NO: 2207 - RNA, 19 nt, Homo sapiens
ggacauaaguggaaagaag

SEQ ID NO: 2208 - RNA, 19 nt, Homo sapiens
gaaagaguccaucagauuu

SEQ ID NO: 2209 - RNA, 19 nt, Homo sapiens
caaacuacauuggcauuua

SEQ ID NO: 2210 - RNA, 19 nt, Homo sapiens
aaacagacauggauggaua

SEQ ID NO: 2211 - RNA, 19 nt, Homo sapiens
cgaaaggaaugguuaacua

SEQ ID NO: 2212 - RNA, 19 nt, Homo sapiens
ccagaaaucuuccacagaa

SEQ ID NO: 2213 - RNA, 19 nt, Homo sapiens
gaaacuaucuggaugugua

SEQ ID NO: 2214 - RNA, 19 nt, Homo sapiens
ccacaaagaugguaucgua

SEQ ID NO: 2215 - RNA, 19 nt, Homo sapiens
ggaaauggcugugguaaca

SEQ ID NO: 2216 - RNA, 19 nt, Homo sapiens
gagacaagaugaagacugu

SEQ ID NO: 2217 - RNA, 19 nt, Homo sapiens
gcacaugggcugcgucuuu

SEQ ID NO: 2218 - RNA, 19 nt, Homo sapiens
ccagugcgcuucaagauga

SEQ ID NO: 2219 - RNA, 19 nt, Homo sapiens
gaacaucugcuuugagguu

SEQ ID NO: 2220 - RNA, 19 nt, Homo sapiens
gguauugccuugugaauuu

SEQ ID NO: 2221 - RNA, 19 nt, Homo sapiens
gcagaacaauuacgaauag

SEQ ID NO: 2222 - RNA, 19 nt, Homo sapiens
guacauagcuguuugaaau

SEQ ID NO: 2223 - RNA, 19 nt, Homo sapiens
gcuguaaacuuguagcauu

SEQ ID NO: 2224 - RNA, 19 nt, Homo sapiens
uagaggugcucauucauuu

SEQ ID NO: 2225 - RNA, 19 nt, Homo sapiens
gguauaagccuuuccaaga

SEQ ID NO: 2226 - RNA, 19 nt, Homo sapiens
uaacagagcuuccuuaggu

SEQ ID NO: 2227 - RNA, 19 nt, Homo sapiens
ggaugaaggaugacgacua

SEQ ID NO: 2228 - RNA, 19 nt, Homo sapiens
acaccaaccucauugaauu

SEQ ID NO: 2229 - RNA, 19 nt, Homo sapiens
cgaacaagaugaccaggua

SEQ ID NO: 2230 - RNA, 19 nt, Homo sapiens
gaugaaggaugacgacuau

SEQ ID NO: 2231 - RNA, 19 nt, Homo sapiens
cagcauggcucuccucuuu

SEQ ID NO: 2232 - RNA, 19 nt, Homo sapiens
guaaagaacuaugguguua

SEQ ID NO: 2233 - RNA, 19 nt, Homo sapiens
gaaacuaccuguuacauua

SEQ ID NO: 2234 - RNA, 19 nt, Homo sapiens
gaagugagauccaguauaa

SEQ ID NO: 2235 - RNA, 19 nt, Homo sapiens
ggaaccagcuguauuuguu

SEQ ID NO: 2236 - RNA, 19 nt, Homo sapiens
guuggaguguuucuaauaa

SEQ ID NO: 2237 - RNA, 19 nt, Homo sapiens
gcgcugggcuuagaucauu

SEQ ID NO: 2238 - RNA, 19 nt, Homo sapiens
ggagccaguuugccggaua

SEQ ID NO: 2239 - RNA, 19 nt, Homo sapiens
ccaauggccugcugaacaa

SEQ ID NO: 2240 - RNA, 19 nt, Homo sapiens
gggccuggcuuccucauga

SEQ ID NO: 2241 - RNA, 19 nt, Homo sapiens
gggcagagcuccaccauga

SEQ ID NO: 2242 - RNA, 19 nt, Homo sapiens
gcacggccauugcauucaa

SEQ ID NO: 2243 - RNA, 19 nt, Homo sapiens
ccaacugccuguucaauaa

SEQ ID NO: 2244 - RNA, 19 nt, Homo sapiens
ggauacaugugaugaguuu

SEQ ID NO: 2245 - RNA, 19 nt, Homo sapiens
ggacgaaugugcugaguau

SEQ ID NO: 2246 - RNA, 19 nt, Homo sapiens
gagcuugucuuauuugcua

SEQ ID NO: 2247 - RNA, 19 nt, Homo sapiens
gaaaugcugugucuucgua

SEQ ID NO: 2248 - RNA, 19 nt, Homo sapiens
ggacagcacuucccugaga

SEQ ID NO: 2249 - RNA, 19 nt, Homo sapiens
gaagacaccaccauucuga

SEQ ID NO: 2250 - RNA, 19 nt, Homo sapiens
ggccagagcuugaccuuca

SEQ ID NO: 2251 - RNA, 19 nt, Homo sapiens
ggacaggccugcguuguuu

SEQ ID NO: 2252 - RNA, 19 nt, Homo sapiens
ggaaagaggaagcucauga

SEQ ID NO: 2253 - RNA, 19 nt, Homo sapiens
gcaaacacguuggaugagu

SEQ ID NO: 2254 - RNA, 19 nt, Homo sapiens
ggacuaugcugcccuuuug

SEQ ID NO: 2255 - RNA, 19 nt, Homo sapiens
acaagacgcuccaggaucu

SEQ ID NO: 2256 - RNA, 19 nt, Homo sapiens
gcauaggccuguaaucgua

SEQ ID NO: 2257 - RNA, 19 nt, Homo sapiens
ucagagaguucgagacaaa

SEQ ID NO: 2258 - RNA, 19 nt, Homo sapiens
ugcgaaagguuguauguga

SEQ ID NO: 2259 - RNA, 19 nt, Homo sapiens
gcaacaggaucgacuugag

SEQ ID NO: 2260 - RNA, 19 nt, Homo sapiens
gaauagcguuguguguuau

SEQ ID NO: 2261 - RNA, 19 nt, Homo sapiens
ugaauagcguuguguguua

SEQ ID NO: 2262 - RNA, 19 nt, Homo sapiens
gggaucaguuuguugaaua

SEQ ID NO: 2263 - RNA, 19 nt, Homo sapiens
gagccugaaucaucguuua

SEQ ID NO: 2264 - RNA, 19 nt, Homo sapiens
ggaaguaccuggaacugua

SEQ ID NO: 2265 - RNA, 19 nt, Homo sapiens
ggacagagggaaccauuua

SEQ ID NO: 2266 - RNA, 19 nt, Homo sapiens
ggugagagguagcuccuaa

SEQ ID NO: 2267 - RNA, 19 nt, Homo sapiens
aaagacagguggccacuga

SEQ ID NO: 2268 - RNA, 19 nt, Homo sapiens
gaaagaugaucagcuauuu

SEQ ID NO: 2269 - RNA, 19 nt, Homo sapiens
caacagaaccagacaggua

SEQ ID NO: 2270 - RNA, 19 nt, Homo sapiens
ugagaaauguucagaaugu

SEQ ID NO: 2271 - RNA, 19 nt, Homo sapiens
uaccuucacucgaaacuua

SEQ ID NO: 2272 - RNA, 19 nt, Homo sapiens
gaacgaaaguaaagauguu

SEQ ID NO: 2273 - RNA, 19 nt, Homo sapiens
ggacuuauggguaauguua

SEQ ID NO: 2274 - RNA, 19 nt, Homo sapiens
ugaaaggacuuauggguaa

SEQ ID NO: 2275 - RNA, 19 nt, Homo sapiens
gaucagaguucacuuucuu

SEQ ID NO: 2276 - RNA, 19 nt, Homo sapiens
ggaaagauguuaagcauuu

SEQ ID NO: 2277 - RNA, 19 nt, Homo sapiens
caugggagcucuugaaaua

SEQ ID NO: 2278 - RNA, 19 nt, Homo sapiens
gaacaaggaugaagugaag

SEQ ID NO: 2279 - RNA, 19 nt, Homo sapiens
ugaagaagcucacaguaaa

SEQ ID NO: 2280 - RNA, 19 nt, Homo sapiens
cagcagaccuucaguguga

SEQ ID NO: 2281 - RNA, 19 nt, Homo sapiens
ggagagagaugguggauua

SEQ ID NO: 2282 - RNA, 19 nt, Homo sapiens
guacagagcuggagaugaa

SEQ ID NO: 2283 - RNA, 19 nt, Homo sapiens
gaacgucccuucagucugu

SEQ ID NO: 2284 - RNA, 19 nt, Homo sapiens
caaauucucuccaaaguuc

SEQ ID NO: 2285 - RNA, 19 nt, Homo sapiens
ggauauaucugacugcuuu

SEQ ID NO: 2286 - RNA, 19 nt, Homo sapiens
gagcagagcuugggaaaga

SEQ ID NO: 2287 - RNA, 19 nt, Homo sapiens
gauaugagauguagcaaau

SEQ ID NO: 2288 - RNA, 19 nt, Homo sapiens
gaacugcuuucuuucguuu

SEQ ID NO: 2289 - RNA, 19 nt, Homo sapiens
gcaguaucaugaagccuaa

SEQ ID NO: 2290 - RNA, 19 nt, Homo sapiens
gaaacuaggucugauauuc

SEQ ID NO: 2291 - RNA, 19 nt, Homo sapiens
guacagcuccggacucuuc

SEQ ID NO: 2292 - RNA, 19 nt, Homo sapiens
gcacaaccauucugaaguu

SEQ ID NO: 2293 - RNA, 19 nt, Homo sapiens
ggacuuagaugcccagaug

SEQ ID NO: 2294 - RNA, 19 nt, Homo sapiens
gaagguggauucuaggaaa

SEQ ID NO: 2295 - RNA, 19 nt, Homo sapiens
ggacuagcccugcuguuua

SEQ ID NO: 2296 - RNA, 19 nt, Homo sapiens
gauagaaacuccugcuaau

SEQ ID NO: 2297 - RNA, 19 nt, Homo sapiens
ggacauuuauucccagcua

SEQ ID NO: 2298 - RNA, 19 nt, Homo sapiens
ggacagagcuacagaccua

SEQ ID NO: 2299 - RNA, 19 nt, Homo sapiens
ggauggcucuccacagaua

SEQ ID NO: 2300 - RNA, 19 nt, Homo sapiens
gaaagacagccuugagcaa

SEQ ID NO: 2301 - RNA, 19 nt, Homo sapiens
ggacagggaggccaccaaa

SEQ ID NO: 2302 - RNA, 19 nt, Homo sapiens
ggacgaggcuugggcuuug

SEQ ID NO: 2303 - RNA, 19 nt, Homo sapiens
agcaagaccucaacaauau

SEQ ID NO: 2304 - RNA, 19 nt, Homo sapiens
gaaugaagcuuugcccuuu

SEQ ID NO: 2305 - RNA, 19 nt, Homo sapiens
gaacacaguuuagugcuuu

SEQ ID NO: 2306 - RNA, 19 nt, Homo sapiens
uaucagagcucuuaauguu

SEQ ID NO: 2307 - RNA, 19 nt, Homo sapiens
ugaagaaugucuacagaua

SEQ ID NO: 2308 - RNA, 19 nt, Homo sapiens
ugaagcaccuggagaauga

SEQ ID NO: 2309 - RNA, 19 nt, Homo sapiens
cggaacagcacaagaguua

SEQ ID NO: 2310 - RNA, 19 nt, Homo sapiens
ggaagaagaccuuuaaaga

SEQ ID NO: 2311 - RNA, 19 nt, Homo sapiens
gagaagcgcugcccuguga

SEQ ID NO: 2312 - RNA, 19 nt, Homo sapiens
gaaucaugcuguucucuuu

SEQ ID NO: 2313 - RNA, 19 nt, Homo sapiens
ggaguaaccggacaccuua

SEQ ID NO: 2314 - RNA, 19 nt, Homo sapiens
uaaggugacucgaguguuu

SEQ ID NO: 2315 - RNA, 19 nt, Homo sapiens
aaacgacacuuucaucaaa

SEQ ID NO: 2316 - RNA, 19 nt, Homo sapiens
ggacucaaguuaaaguauu

SEQ ID NO: 2317 - RNA, 19 nt, Homo sapiens
guaauggacucaaguuaaa

SEQ ID NO: 2318 - RNA, 19 nt, Homo sapiens
ggacaucacugcccacuuc

SEQ ID NO: 2319 - RNA, 19 nt, Homo sapiens
agaggaagauguucacuua

SEQ ID NO: 2320 - RNA, 19 nt, Homo sapiens
gaucguggcucuucaggaa

SEQ ID NO: 2321 - RNA, 19 nt, Homo sapiens
ggacagaggcagauaagaa

SEQ ID NO: 2322 - RNA, 19 nt, Homo sapiens
gcacuaagcagccuucaug

SEQ ID NO: 2323 - RNA, 19 nt, Homo sapiens
gcaagcaggugccuacaga

SEQ ID NO: 2324 - RNA, 19 nt, Homo sapiens
ggaauuagaugcuccauug

SEQ ID NO: 2325 - RNA, 19 nt, Homo sapiens
ggacaucucugccaaaguc

SEQ ID NO: 2326 - RNA, 19 nt, Homo sapiens
caauaugccuggaaacuau

SEQ ID NO: 2327 - RNA, 19 nt, Homo sapiens
gguuaagacucaccaguuc

SEQ ID NO: 2328 - RNA, 19 nt, Homo sapiens
caacaggacuuuagguuca

SEQ ID NO: 2329 - RNA, 19 nt, Homo sapiens
gcauaagauugacaucauc

SEQ ID NO: 2330 - RNA, 19 nt, Homo sapiens
gaaagagggcauaagguua

SEQ ID NO: 2331 - RNA, 19 nt, Homo sapiens
ggacugaucuuuaaacuau

SEQ ID NO: 2332 - RNA, 19 nt, Homo sapiens
ucaaauggcuuacuucauc

SEQ ID NO: 2333 - RNA, 19 nt, Homo sapiens
ucuaagaacugaugucuaa

SEQ ID NO: 2334 - RNA, 19 nt, Homo sapiens
gcaaauagaucuccauuac

SEQ ID NO: 2335 - RNA, 19 nt, Homo sapiens
ccagauaugucguucuuua

SEQ ID NO: 2336 - RNA, 19 nt, Homo sapiens
gaaaggcugugcucucaaa

SEQ ID NO: 2337 - RNA, 19 nt, Homo sapiens
ggagaaaccugcaugaaag

SEQ ID NO: 2338 - RNA, 19 nt, Homo sapiens
cuugaagccuccugaauua

SEQ ID NO: 2339 - RNA, 19 nt, Homo sapiens
gaggaagcauccaaagauu

SEQ ID NO: 2340 - RNA, 19 nt, Homo sapiens
gauaggagauacaaacuuu

SEQ ID NO: 2341 - RNA, 19 nt, Homo sapiens
cuacguagcucgugauaag

SEQ ID NO: 2342 - RNA, 19 nt, Homo sapiens
gcagagauguccacacguu

SEQ ID NO: 2343 - RNA, 19 nt, Homo sapiens
caugagaucugcucuaaga

SEQ ID NO: 2344 - RNA, 19 nt, Homo sapiens
gggcaccucugcuguauug

SEQ ID NO: 2345 - RNA, 19 nt, Homo sapiens
ccacagagcaagugauuua

SEQ ID NO: 2346 - RNA, 19 nt, Homo sapiens
gcagaaaggagaucauuua

SEQ ID NO: 2347 - RNA, 19 nt, Homo sapiens
guagcaagaucuuuacaua

SEQ ID NO: 2348 - RNA, 19 nt, Homo sapiens
ugucagagcuugauuagaa

SEQ ID NO: 2349 - RNA, 19 nt, Homo sapiens
gagcugacauugaaauaug

SEQ ID NO: 2350 - RNA, 19 nt, Homo sapiens
guacagcuauuucucauca

SEQ ID NO: 2351 - RNA, 19 nt, Homo sapiens
gagguuaggugaagugguu

SEQ ID NO: 2352 - RNA, 19 nt, Homo sapiens
gaaagggagucacaagaca

SEQ ID NO: 2353 - RNA, 19 nt, Homo sapiens
gaacuggaguggaguagga

SEQ ID NO: 2354 - RNA, 19 nt, Homo sapiens
cagcaggcauaucucauua

SEQ ID NO: 2355 - RNA, 19 nt, Homo sapiens
ucaaguaccucccugaaug

SEQ ID NO: 2356 - RNA, 19 nt, Homo sapiens
gcugggaaguggcuuaaua

SEQ ID NO: 2357 - RNA, 19 nt, Homo sapiens
cauauucccugcccugaua

SEQ ID NO: 2358 - RNA, 19 nt, Homo sapiens
gggaagugcucaagaccua

SEQ ID NO: 2359 - RNA, 19 nt, Homo sapiens
cauagaaagugacguguua

SEQ ID NO: 2360 - RNA, 19 nt, Homo sapiens
ggaaggagcuguuaugaga

SEQ ID NO: 2361 - RNA, 19 nt, Homo sapiens
gaaaggagaagcuaaauua

SEQ ID NO: 2362 - RNA, 19 nt, Homo sapiens
ggaggaaggucaagauuua

SEQ ID NO: 2363 - RNA, 19 nt, Homo sapiens
ggaaauagcugagauaaug

SEQ ID NO: 2364 - RNA, 19 nt, Homo sapiens
ccagacgccugauauugaa

SEQ ID NO: 2365 - RNA, 19 nt, Homo sapiens
cagcaccacucaagaccaa

SEQ ID NO: 2366 - RNA, 19 nt, Homo sapiens
cgccugauauugaaguaaa

SEQ ID NO: 2367 - RNA, 19 nt, Homo sapiens
caacauccacucucucuug

SEQ ID NO: 2368 - RNA, 19 nt, Homo sapiens
gggcagugcuccaguggua

SEQ ID NO: 2369 - RNA, 19 nt, Homo sapiens
gaaagaggcuggcuacaca

SEQ ID NO: 2370 - RNA, 19 nt, Homo sapiens
guacagaagugagacauaa

SEQ ID NO: 2371 - RNA, 19 nt, Homo sapiens
gaggugaucucgcaaaguu

SEQ ID NO: 2372 - RNA, 19 nt, Homo sapiens
caagaagccugcaccaugu

SEQ ID NO: 2373 - RNA, 19 nt, Homo sapiens
gcacuucacuaccaaauga

SEQ ID NO: 2374 - RNA, 19 nt, Homo sapiens
gcacuggucccaaguagua

SEQ ID NO: 2375 - RNA, 19 nt, Homo sapiens
ccaaagggcaguaaaguuu

SEQ ID NO: 2376 - RNA, 19 nt, Homo sapiens
gcucagaggagguguauuu

SEQ ID NO: 2377 - RNA, 19 nt, Homo sapiens
gcacuucacuaccaaauga

SEQ ID NO: 2378 - RNA, 17 nt, Homo sapiens
aaagggcaguaaaguuu

SEQ ID NO: 2379 - RNA, 19 nt, Homo sapiens
gaacaucucuggcaacaau

SEQ ID NO: 2380 - RNA, 19 nt, Homo sapiens
ggugauauaucucaaauug

SEQ ID NO: 2381 - RNA, 19 nt, Homo sapiens
gcaagcaucuuauauaguu

SEQ ID NO: 2382 - RNA, 19 nt, Homo sapiens
gaaccagucuuucaacuca

SEQ ID NO: 2383 - RNA, 19 nt, Homo sapiens
gguaagauauugugcuuua

SEQ ID NO: 2384 - RNA, 19 nt, Homo sapiens
ccgcaaauaugcagaauua

SEQ ID NO: 2385 - RNA, 19 nt, Homo sapiens
ggauguacauggcguguua

SEQ ID NO: 2386 - RNA, 19 nt, Homo sapiens
ggugaaguuuguauguuua

SEQ ID NO: 2387 - RNA, 19 nt, Homo sapiens
gcuccgcgcuuuccgauuu

SEQ ID NO: 2388 - RNA, 19 nt, Homo sapiens
gagcaggaauggugagaug

SEQ ID NO: 2389 - RNA, 19 nt, Homo sapiens
gaacuugggauaagagugu

SEQ ID NO: 2390 - RNA, 19 nt, Homo sapiens
ccgaggagcuuuaugagau

SEQ ID NO: 2391 - RNA, 19 nt, Homo sapiens
uuuaugagaugcugaguga

SEQ ID NO: 2392 - RNA, 19 nt, Homo sapiens
gaaggaaccugaugcuuua

SEQ ID NO: 2393 - RNA, 19 nt, Homo sapiens
gcauauaucuagaagguau

SEQ ID NO: 2394 - RNA, 19 nt, Homo sapiens
gaacaaauacaugggauua

SEQ ID NO: 2395 - RNA, 19 nt, Homo sapiens
ggacacagauuuagacuug

SEQ ID NO: 2396 - RNA, 19 nt, Homo sapiens
gaacguacuugcagaugug

SEQ ID NO: 2397 - RNA, 19 nt, Homo sapiens
gagaaagcauuuguuugua

SEQ ID NO: 2398 - RNA, 19 nt, Homo sapiens
ggagaaagcauuuguuugu

SEQ ID NO: 2399 - RNA, 19 nt, Homo sapiens
cgaggcagcuugaguuaaa

SEQ ID NO: 2400 - RNA, 19 nt, Homo sapiens
gaaagaaucuguagagaaa

SEQ ID NO: 2401 - RNA, 19 nt, Homo sapiens
gcaaugagcuguuugaaga

SEQ ID NO: 2402 - RNA, 19 nt, Homo sapiens
ugacaaagguggauaaauu

SEQ ID NO: 2403 - RNA, 19 nt, Homo sapiens
ggaaauggaucucuuugaa

SEQ ID NO: 2404 - RNA, 19 nt, Homo sapiens
ggaaaguaaugguccaaca

SEQ ID NO: 2405 - RNA, 19 nt, Homo sapiens
agacaguuaugcagcuauu

SEQ ID NO: 2406 - RNA, 19 nt, Homo sapiens
ccaauucucggaagcaaga

SEQ ID NO: 2407 - RNA, 19 nt, Homo sapiens
gaaaguaaugguccaacag

SEQ ID NO: 2408 - RNA, 19 nt, Homo sapiens
gcgccagagugaacaagua

SEQ ID NO: 2409 - RNA, 19 nt, Homo sapiens
gaagguggcccagcuaugu

SEQ ID NO: 2410 - RNA, 19 nt, Homo sapiens
gauuagagaccaaggauuu

SEQ ID NO: 2411 - RNA, 19 nt, Homo sapiens
gaugugaguagaagaguua

SEQ ID NO: 2412 - RNA, 19 nt, Homo sapiens
acacacagcuggaagaaau

SEQ ID NO: 2413 - RNA, 19 nt, Homo sapiens
gcaacaggaucgacuugag

SEQ ID NO: 2414 - RNA, 19 nt, Homo sapiens
gaagcugcgucccaacauc

SEQ ID NO: 2415 - RNA, 19 nt, Homo sapiens
gcacaagaguuauaagauc

SEQ ID NO: 2416 - RNA, 19 nt, Homo sapiens
cgauacagcuuggcacuuu

SEQ ID NO: 2417 - RNA, 19 nt, Homo sapiens
  misc_RNA (1)...(19): siRNA sense strand
gaacuucacuugacauuga

SEQ ID NO: 2418 - RNA, 19 nt, Homo sapiens
  misc_RNA (1)...(19): siRNA sense strand
ggacaaauauuggcaaauu

SEQ ID NO: 2419 - RNA, 19 nt, Homo sapiens
  misc_RNA (1)...(19): siRNA sense strand
gacaucagcuauuaaagaa

SEQ ID NO: 2420 - RNA, 19 nt, Homo sapiens
  misc_RNA (1)...(19): siRNA sense strand
acaaggacaucagcuauua

SEQ ID NO: 2421 - RNA, 19 nt, Homo sapiens
  misc_RNA (1)...(19): siRNA sense strand
ggacaucagcuauuaaaga

SEQ ID NO: 2422 - RNA, 19 nt, Homo sapiens
  misc_RNA (1)...(19): siRNA sense strand
gaucuucccaggacaaaua

SEQ ID NO: 2423 - RNA, 19 nt, Homo sapiens
  misc_RNA (1)...(19): siRNA sense strand
gaaaagcgguugagaugaa

SEQ ID NO: 2424 - RNA, 19 nt, Homo sapiens
  misc_RNA (1)...(19): siRNA sense strand
gaaccaaaguauuuaagag

SEQ ID NO: 2425 - RNA, 19 nt, Homo sapiens
  misc_RNA (1)...(19): siRNA sense strand
gaacaaggacaucagcuau

SEQ ID NO: 2426 - RNA, 19 nt, Homo sapiens
  misc_RNA (1)...(19): siRNA sense strand
gcauuuagauacuuuccuu

SEQ ID NO: 2427 - RNA, 19 nt, Homo sapiens
  misc_RNA (1)...(19): siRNA sense strand
caaaugcuaugcagauaca

SEQ ID NO: 2428 - RNA, 19 nt, Homo sapiens
  misc_RNA (1)...(19): siRNA sense strand
guacucggauacugaggua

SEQ ID NO: 2429 - RNA, 19 nt, Homo sapiens
  misc_RNA (1)...(19): siRNA sense strand
gaaauugaaagguuguuug

SEQ ID NO: 2430 - RNA, 19 nt, Homo sapiens
  misc_RNA (1)...(19): siRNA sense strand
gaaccaaucaccgaaauuc

SEQ ID NO: 2431 - RNA, 19 nt, Homo sapiens
  misc_RNA (1)...(19): siRNA sense strand
ggaacaaggacaucagcua

SEQ ID NO: 2432 - RNA, 19 nt, Homo sapiens
  misc_RNA (1)...(19): siRNA sense strand
gaagaaccaaucaccgaaa

SEQ ID NO: 2433 - RNA, 19 nt, Homo sapiens
  misc_RNA (1)...(19): siRNA sense strand
uggcaaauuugacaugauu

SEQ ID NO: 2434 - RNA, 19 nt, Homo sapiens
  misc_RNA (1)...(19): siRNA sense strand
auugaaagguuguuuggua

SEQ ID NO: 2435 - RNA, 19 nt, Homo sapiens
  misc_RNA (1)...(19): siRNA sense strand
caauauacguugucuugag

SEQ ID NO: 2436 - RNA, 19 nt, Homo sapiens
  misc_RNA (1)...(19): siRNA sense strand
ccaaaguauuuaagaguuc

SEQ ID NO: 2437 - RNA, 19 nt, Homo sapiens
  misc_RNA (1)...(19): siRNA sense strand
uugagaagguugaugcuuu

SEQ ID NO: 2438 - RNA, 19 nt, Homo sapiens
  misc_RNA (1)...(19): siRNA sense strand
ggaaccaaaguauuuaaga

SEQ ID NO: 2439 - RNA, 19 nt, Homo sapiens
  misc_RNA (1)...(19): siRNA sense strand
gaacauuucauuguacugu

SEQ ID NO: 2440 - RNA, 19 nt, Homo sapiens
  misc_RNA (1)...(19): siRNA sense strand
cuaugcagauacaauguuu

SEQ ID NO: 2441 - RNA, 19 nt, Homo sapiens
  misc_RNA (1)...(19): siRNA sense strand
uuacagagcagaaucuuuc

SEQ ID NO: 2442 - RNA, 19 nt, Homo sapiens
  misc_RNA (1)...(19): siRNA sense strand
cacuugacauugaagagua

SEQ ID NO: 2443 - RNA, 19 nt, Homo sapiens
  misc_RNA (1)...(19): siRNA sense strand
gaaagguuguuugguaaaa

SEQ ID NO: 2444 - RNA, 19 nt, Homo sapiens
  misc_RNA (1)...(19): siRNA sense strand
uugaaagguuguuugguaa

SEQ ID NO: 2445 - RNA, 19 nt, Homo sapiens
  misc_RNA (1)...(19): siRNA sense strand
uguguguucuuucuuauga

SEQ ID NO: 2446 - RNA, 19 nt, Homo sapiens
  misc_RNA (1)...(19): siRNA sense strand
ggaagaauggcaagacaag

SEQ ID NO: 2447 - RNA, 19 nt, Homo sapiens
  misc_RNA (1)...(19): siRNA sense strand
gaagaacgacauaaaaguu

SEQ ID NO: 2448 - RNA, 19 nt, Homo sapiens
  misc_RNA (1)...(19): siRNA sense strand
gaagguugaugcuuuugaa

SEQ ID NO: 2449 - RNA, 19 nt, Homo sapiens
  misc_RNA (1)...(19): siRNA sense strand
caggacaaauauuggcaaa

SEQ ID NO: 2450 - RNA, 19 nt, Homo sapiens
  misc_RNA (1)...(19): siRNA sense strand
aauauacguugucuugaga

SEQ ID NO: 2451 - RNA, 19 nt, Homo sapiens
  misc_RNA (1)...(19): siRNA sense strand
cgguugagaugaaaugguu

SEQ ID NO: 2452 - RNA, 19 nt, Homo sapiens
  misc_RNA (1)...(19): siRNA sense strand
uaauccaggugaucgcaaa

SEQ ID NO: 2453 - RNA, 19 nt, Homo sapiens
  misc_RNA (1)...(19): siRNA sense strand
ucagugaacuugggauaca

SEQ ID NO: 2454 - RNA, 19 nt, Homo sapiens
  misc_RNA (1)...(19): siRNA sense strand
ugacaugauuugggauaga

SEQ ID NO: 2455 - RNA, 19 nt, Homo sapiens
  misc_RNA (1)...(19): siRNA sense strand
cgcaaaugcuaugcagaua

SEQ ID NO: 2456 - RNA, 19 nt, Homo sapiens
  misc_RNA (1)...(19): siRNA sense strand
caguguaguugguguggaa

SEQ ID NO: 2457 - RNA, 19 nt, Homo sapiens
  misc_RNA (1)...(19): siRNA sense strand
cauaaaaguuggggaauug

SEQ ID NO: 2458 - RNA, 19 nt, Homo sapiens
  misc_RNA (1)...(19): siRNA sense strand
caaggacaucagcuauuaa

SEQ ID NO: 2459 - RNA, 19 nt, Homo sapiens
  misc_RNA (1)...(19): siRNA sense strand
acauccagguccaccauuu

SEQ ID NO: 2460 - RNA, 19 nt, Homo sapiens
  misc_RNA (1)...(19): siRNA sense strand
caggugaucgcaaaugcua

SEQ ID NO: 2461 - RNA, 19 nt, Homo sapiens
  misc_RNA (1)...(19): siRNA sense strand
gcaauauacguugucuuga

SEQ ID NO: 2462 - RNA, 19 nt, Homo sapiens
  misc_RNA (1)...(19): siRNA sense strand
uacuaacucuggaagaaug

SEQ ID NO: 2463 - RNA, 19 nt, Homo sapiens
  misc_RNA (1)...(19): siRNA sense strand
aguacuaacucuggaagaa

SEQ ID NO: 2464 - RNA, 19 nt, Homo sapiens
  misc_RNA (1)...(19): siRNA sense strand
gcaaaugcuaugcagauac

SEQ ID NO: 2465 - RNA, 19 nt, Homo sapiens
  misc_RNA (1)...(19): siRNA sense strand
uaucuccuguguguucuuu

SEQ ID NO: 2466 - RNA, 19 nt, Homo sapiens
  misc_RNA (1)...(19): siRNA sense strand
aagaaccaaucaccgaaau

SEQ ID NO: 2467 - RNA, 19 nt, Homo sapiens
  misc_RNA (1)...(19): siRNA sense strand
ugcaauauacguugucuug

SEQ ID NO: 2468 - RNA, 19 nt, Homo sapiens
  misc_RNA (1)...(19): siRNA sense strand
augcugaaauugaaagguu

SEQ ID NO: 2469 - RNA, 19 nt, Homo sapiens
  misc_RNA (1)...(19): siRNA sense strand
uccuguguguucuuucuua

SEQ ID NO: 2470 - RNA, 19 nt, Homo sapiens
  misc_RNA (1)...(19): siRNA sense strand
gggaacauuucauuguacu

SEQ ID NO: 2471 - RNA, 19 nt, Homo sapiens
  misc_RNA (1)...(19): siRNA sense strand
acauuucauuguacuguug

SEQ ID NO: 2472 - RNA, 19 nt, Homo sapiens
  misc_RNA (1)...(19): siRNA sense strand
aaggacaucagcuauuaaa

SEQ ID NO: 2473 - RNA, 19 nt, Homo sapiens
  misc_RNA (1)...(19): siRNA sense strand
ugagaagguugaugcuuuu

SEQ ID NO: 2474 - RNA, 19 nt, Homo sapiens
  misc_RNA (1)...(19): siRNA sense strand
ggauacugagguacagaaa

SEQ ID NO: 2475 - RNA, 19 nt, Homo sapiens
  misc_RNA (1)...(19): siRNA sense strand
ccacaugcugaaauugaaa

SEQ ID NO: 2476 - RNA, 19 nt, Homo sapiens
  misc_RNA (1)...(19): siRNA sense strand
uucaguaucuccugugugu

SEQ ID NO: 2477 - RNA, 19 nt, Homo sapiens
  misc_RNA (1)...(19): siRNA sense strand
gacaugauuugggauagag

SEQ ID NO: 2478 - RNA, 19 nt, Homo sapiens
  misc_RNA (1)...(19): siRNA sense strand
guggaaaucagugaacuug

SEQ ID NO: 2479 - RNA, 19 nt, Homo sapiens
  misc_RNA (1)...(19): siRNA sense strand
agaguggacugaggguauu

SEQ ID NO: 2480 - RNA, 19 nt, Homo sapiens
  misc_RNA (1)...(19): siRNA sense strand
gcuaugcagauacaauguu

SEQ ID NO: 2481 - RNA, 19 nt, Homo sapiens
  misc_RNA (1)...(19): siRNA sense strand
guacuaacucuggaagaau

SEQ ID NO: 2482 - RNA, 19 nt, Homo sapiens
  misc_RNA (1)...(19): siRNA sense strand
ugaaagguuguuugguaaa

SEQ ID NO: 2483 - RNA, 19 nt, Homo sapiens
  misc_RNA (1)...(19): siRNA sense strand
ccuggaaccaaaguauuua

SEQ ID NO: 2484 - RNA, 19 nt, Homo sapiens
  misc_RNA (1)...(19): siRNA sense strand
caguaucuccuguguguuc

SEQ ID NO: 2485 - RNA, 19 nt, Homo sapiens
  misc_RNA (1)...(19): siRNA sense strand
ggugaucgcaaaugcuaug

SEQ ID NO: 2486 - RNA, 19 nt, Homo sapiens
  misc_RNA (1)...(19): siRNA sense strand
aaucagugaacuugggaua

SEQ ID NO: 2487 - RNA, 19 nt, Homo sapiens
  misc_RNA (1)...(19): siRNA sense strand
gaagaauggcaagacaagu

SEQ ID NO: 2488 - RNA, 19 nt, Homo sapiens
  misc_RNA (1)...(19): siRNA sense strand
gguugaugcuuuugaagaa

SEQ ID NO: 2489 - RNA, 19 nt, Homo sapiens
  misc_RNA (1)...(19): siRNA sense strand
cuuaugauccaacuaaaca

SEQ ID NO: 2490 - RNA, 19 nt, Homo sapiens
  misc_RNA (1)...(19): siRNA sense strand
aagaauggcaagacaagug

SEQ ID NO: 2491 - RNA, 19 nt, Homo sapiens
  misc_RNA (1)...(19): siRNA sense strand
uccacaugcugaaauugaa

SEQ ID NO: 2492 - RNA, 19 nt, Homo sapiens
  misc_RNA (1)...(19): siRNA sense strand
uacguugucuugagaaggu

SEQ ID NO: 2493 - RNA, 19 nt, Homo sapiens
  misc_RNA (1)...(19): siRNA sense strand
gcaagacugcuuuucauca

SEQ ID NO: 2494 - RNA, 19 nt, Homo sapiens
  misc_RNA (1)...(19): siRNA sense strand
ccaaguacuaacucuggaa

SEQ ID NO: 2495 - RNA, 19 nt, Homo sapiens
  misc_RNA (1)...(19): siRNA sense strand
ucgcaaaugcuaugcagau

SEQ ID NO: 2496 - RNA, 19 nt, Homo sapiens
  misc_RNA (1)...(19): siRNA sense strand
cggggaacauuucauugua

SEQ ID NO: 2497 - RNA, 19 nt, Homo sapiens
  misc_RNA (1)...(19): siRNA sense strand
auugaagaguacucggaua

SEQ ID NO: 2498 - RNA, 19 nt, Homo sapiens
  misc_RNA (1)...(19): siRNA sense strand
uguuccacaugcugaaauu

SEQ ID NO: 2499 - RNA, 19 nt, Homo sapiens
  misc_RNA (1)...(19): siRNA sense strand
guugagaugaaaugguuug

SEQ ID NO: 2500 - RNA, 19 nt, Homo sapiens
  misc_RNA (1)...(19): siRNA sense strand
ccuguguguucuuucuuau

SEQ ID NO: 2501 - RNA, 19 nt, Homo sapiens
  misc_RNA (1)...(19): siRNA sense strand
uccuggaaccaaaguauuu

SEQ ID NO: 2502 - RNA, 19 nt, Homo sapiens
  misc_RNA (1)...(19): siRNA sense strand
aagaguggacugaggguau

SEQ ID NO: 2503 - RNA, 19 nt, Homo sapiens
  misc_RNA (1)...(19): siRNA sense strand
ugaaggagcuggccguguu

SEQ ID NO: 2504 - RNA, 19 nt, Homo sapiens
  misc_RNA (1)...(19): siRNA sense strand
ugucaucucuucuacaaug

SEQ ID NO: 2505 - RNA, 19 nt, Homo sapiens
  misc_RNA (1)...(19): siRNA sense strand
caauggcgaugaccacuca

SEQ ID NO: 2506 - RNA, 19 nt, Homo sapiens
  misc_RNA (1)...(19): siRNA sense strand
ggagcagguugcagacaau

SEQ ID NO: 2507 - RNA, 19 nt, Homo sapiens
  misc_RNA (1)...(19): siRNA sense strand
gggcaaggguggcaagcau

SEQ ID NO: 2508 - RNA, 19 nt, Homo sapiens
  misc_RNA (1)...(19): siRNA sense strand
ugacaagcauggccuguac

SEQ ID NO: 2509 - RNA, 19 nt, Homo sapiens
  misc_RNA (1)...(19): siRNA sense strand
cgagggcacuugugagaag

SEQ ID NO: 2510 - RNA, 19 nt, Homo sapiens
  misc_RNA (1)...(19): siRNA sense strand
aaggaggccugguggagaa

SEQ ID NO: 2511 - RNA, 19 nt, Homo sapiens
  misc_RNA (1)...(19): siRNA sense strand
ccaugcgccuuccggauga

SEQ ID NO: 2512 - RNA, 19 nt, Homo sapiens
  misc_RNA (1)...(19): siRNA sense strand
gcaaggguggcaagcauca

SEQ ID NO: 2513 - RNA, 19 nt, Homo sapiens
  misc_RNA (1)...(19): siRNA sense strand
cggagcagguugcagacaa

SEQ ID NO: 2514 - RNA, 19 nt, Homo sapiens
  misc_RNA (1)...(19): siRNA sense strand
agugucaucucuucuacaa

SEQ ID NO: 2515 - RNA, 19 nt, Homo sapiens
  misc_RNA (1)...(19): siRNA sense strand
ucaagucggguaugaagga

SEQ ID NO: 2516 - RNA, 19 nt, Homo sapiens
  misc_RNA (1)...(19): siRNA sense strand
acacccagcggaugcagua

SEQ ID NO: 2517 - RNA, 19 nt, Homo sapiens
  misc_RNA (1)...(19): siRNA sense strand
ggggagugcugguguguga

SEQ ID NO: 2518 - RNA, 19 nt, Homo sapiens
  misc_RNA (1)...(19): siRNA sense strand
ccucaaacagugcaagaug

SEQ ID NO: 2519 - RNA, 19 nt, Homo sapiens
  misc_RNA (1)...(19): siRNA sense strand
ggcgagggcacuugugaga

SEQ ID NO: 2520 - RNA, 19 nt, Homo sapiens
  misc_RNA (1)...(19): siRNA sense strand
gaaggagcuggccguguuc

SEQ ID NO: 2521 - RNA, 19 nt, Homo sapiens
  misc_RNA (1)...(19): siRNA sense strand
cgagugucaucucuucuac

SEQ ID NO: 2522 - RNA, 19 nt, Homo sapiens
  misc_RNA (1)...(19): siRNA sense strand
cucaaacagugcaagaugu

SEQ ID NO: 2523 - RNA, 19 nt, Homo sapiens
  misc_RNA (1)...(19): siRNA sense strand
ccgagugucaucucuucua

SEQ ID NO: 2524 - RNA, 19 nt, Homo sapiens
  misc_RNA (1)...(19): siRNA sense strand
guggacagcaccaugaaca

SEQ ID NO: 2525 - RNA, 19 nt, Homo sapiens
  misc_RNA (1)...(19): siRNA sense strand
agugcaagaugucucugaa

SEQ ID NO: 2526 - RNA, 19 nt, Homo sapiens
  misc_RNA (1)...(19): siRNA sense strand
gugacaagcauggccugua

SEQ ID NO: 2527 - RNA, 19 nt, Homo sapiens
  misc_RNA (1)...(19): siRNA sense strand
gcaaaggauucuacaagag

SEQ ID NO: 2528 - RNA, 19 nt, Homo sapiens
  misc_RNA (1)...(19): siRNA sense strand
gcugcgagcuggucaagga

SEQ ID NO: 2529 - RNA, 19 nt, Homo sapiens
  misc_RNA (1)...(19): siRNA sense strand
gaagaaggaccgcagaaag

SEQ ID NO: 2530 - RNA, 19 nt, Homo sapiens
  misc_RNA (1)...(19): siRNA sense strand
gcuggugcguggacaagua

SEQ ID NO: 2531 - RNA, 19 nt, Homo sapiens
  misc_RNA (1)...(19): siRNA sense strand
caaaggauucuacaagaga

SEQ ID NO: 2532 - RNA, 19 nt, Homo sapiens
  misc_RNA (1)...(19): siRNA sense strand
agaaagcccucuccaugug

SEQ ID NO: 2533 - RNA, 19 nt, Homo sapiens
  misc_RNA (1)...(19): siRNA sense strand
cgcaaaggauucuacaaga

SEQ ID NO: 2534 - RNA, 19 nt, Homo sapiens
  misc_RNA (1)...(19): siRNA sense strand
agaaagcagugcaaaccuu

SEQ ID NO: 2535 - RNA, 19 nt, Homo sapiens
  misc_RNA (1)...(19): siRNA sense strand
aagaaggaccgcagaaaga

SEQ ID NO: 2536 - RNA, 19 nt, Homo sapiens
  misc_RNA (1)...(19): siRNA sense strand
cagcagcaacguugaguga

SEQ ID NO: 2537 - RNA, 19 nt, Homo sapiens
  misc_RNA (1)...(19): siRNA sense strand
cuguguaccugcccaauug

SEQ ID NO: 2538 - RNA, 19 nt, Homo sapiens
  misc_RNA (1)...(19): siRNA sense strand
gcgagcaagucaagaucga

SEQ ID NO: 2539 - RNA, 19 nt, Homo sapiens
  misc_RNA (1)...(19): siRNA sense strand
caagagaaagcagugcaaa

SEQ ID NO: 2540 - RNA, 19 nt, Homo sapiens
  misc_RNA (1)...(19): siRNA sense strand
gcccaauugugaccgcaaa

SEQ ID NO: 2541 - RNA, 19 nt, Homo sapiens
  misc_RNA (1)...(19): siRNA sense strand
cugaagcagugaagaagga

SEQ ID NO: 2542 - RNA, 19 nt, Homo sapiens
  misc_RNA (1)...(19): siRNA sense strand
gcaagucaagaucgagaga

SEQ ID NO: 2543 - RNA, 19 nt, Homo sapiens
  misc_RNA (1)...(19): siRNA sense strand
ugaagaaggaccgcagaaa

SEQ ID NO: 2544 - RNA, 19 nt, Homo sapiens
  misc_RNA (1)...(19): siRNA sense strand
ggacaaguacgggaugaag

SEQ ID NO: 2545 - RNA, 19 nt, Homo sapiens
  misc_RNA (1)...(19): siRNA sense strand
agaaggaccgcagaaagaa

SEQ ID NO: 2546 - RNA, 19 nt, Homo sapiens
  misc_RNA (1)...(19): siRNA sense strand
gaaggaccgcagaaagaag

SEQ ID NO: 2547 - RNA, 19 nt, Homo sapiens
  misc_RNA (1)...(19): siRNA sense strand
aagucaagaucgagagaga

SEQ ID NO: 2548 - RNA, 19 nt, Homo sapiens
  misc_RNA (1)...(19): siRNA sense strand
gcuguguaccugcccaauu

SEQ ID NO: 2549 - RNA, 19 nt, Homo sapiens
  misc_RNA (1)...(19): siRNA sense strand
ccgcaaaggauucuacaag

SEQ ID NO: 2550 - RNA, 19 nt, Homo sapiens
  misc_RNA (1)...(19): siRNA sense strand
gagcccaccaccucugaga

SEQ ID NO: 2551 - RNA, 19 nt, Homo sapiens
  misc_RNA (1)...(19): siRNA sense strand
gcugacccaguccaaguuu

SEQ ID NO: 2552 - RNA, 19 nt, Homo sapiens
  misc_RNA (1)...(19): siRNA sense strand
caauugugaccgcaaagga

SEQ ID NO: 2553 - RNA, 19 nt, Homo sapiens
  misc_RNA (1)...(19): siRNA sense strand
gcccaccaccucugagaug

SEQ ID NO: 2554 - RNA, 19 nt, Homo sapiens
  misc_RNA (1)...(19): siRNA sense strand
ggguuugccucaacgaaaa

SEQ ID NO: 2555 - RNA, 19 nt, Homo sapiens
  misc_RNA (1)...(19): siRNA sense strand
aaagagcuaccgcgagcaa

SEQ ID NO: 2556 - RNA, 19 nt, Homo sapiens
  misc_RNA (1)...(19): siRNA sense strand
guggacaaguacgggauga

SEQ ID NO: 2557 - RNA, 19 nt, Homo sapiens
  misc_RNA (1)...(19): siRNA sense strand
gugaagaaggaccgcagaa

SEQ ID NO: 2558 - RNA, 19 nt, Homo sapiens
  misc_RNA (1)...(19): siRNA sense strand
gcaaguucuuccaauauga

SEQ ID NO: 2559 - RNA, 19 nt, Homo sapiens
  misc_RNA (1)...(19): siRNA sense strand
ggcaaguucuuccaauaug

SEQ ID NO: 2560 - RNA, 19 nt, Homo sapiens
  misc_RNA (1)...(19): siRNA sense strand
gggcaaguucuuccaauau

SEQ ID NO: 2561 - RNA, 19 nt, Homo sapiens
  misc_RNA (1)...(19): siRNA sense strand
ugggcaaguucuuccaaua

SEQ ID NO: 2562 - RNA, 19 nt, Homo sapiens
  misc_RNA (1)...(19): siRNA sense strand
cgaccgugcuuccggacaa

SEQ ID NO: 2563 - RNA, 19 nt, Homo sapiens
  misc_RNA (1)...(19): siRNA sense strand
cgugcugcauugcugcuua

SEQ ID NO: 2564 - RNA, 19 nt, Homo sapiens
  misc_RNA (1)...(19): siRNA sense strand
ucgcagccguggcaucguu

SEQ ID NO: 2565 - RNA, 19 nt, Homo sapiens
  misc_RNA (1)...(19): siRNA sense strand
cuggagacguacugugcua

SEQ ID NO: 2566 - RNA, 19 nt, Homo sapiens
  misc_RNA (1)...(19): siRNA sense strand
gugggcaaguucuuccaau

SEQ ID NO: 2567 - RNA, 19 nt, Homo sapiens
  misc_RNA (1)...(19): siRNA sense strand
gucacgugcucgccaagga

SEQ ID NO: 2568 - RNA, 19 nt, Homo sapiens
  misc_RNA (1)...(19): siRNA sense strand
ggaaauggcucgucaccuu

SEQ ID NO: 2569 - RNA, 19 nt, Homo sapiens
  misc_RNA (1)...(19): siRNA sense strand
ugaagaaacuccacgaaga

SEQ ID NO: 2570 - RNA, 19 nt, Homo sapiens
  misc_RNA (1)...(19): siRNA sense strand
gcagaagaaugguacaaau

SEQ ID NO: 2571 - RNA, 19 nt, Homo sapiens
  misc_RNA (1)...(19): siRNA sense strand
caacgaaacuucucagcau

SEQ ID NO: 2572 - RNA, 19 nt, Homo sapiens
  misc_RNA (1)...(19): siRNA sense strand
ugaaguggaugcccuuaaa

SEQ ID NO: 2573 - RNA, 19 nt, Homo sapiens
  misc_RNA (1)...(19): siRNA sense strand
uaagauggcccuugacauu

SEQ ID NO: 2574 - RNA, 19 nt, Homo sapiens
  misc_RNA (1)...(19): siRNA sense strand
ggacauuccugauuaagac

SEQ ID NO: 2575 - RNA, 19 nt, Homo sapiens
  misc_RNA (1)...(19): siRNA sense strand
caagaccugcucaauguua

SEQ ID NO: 2576 - RNA, 19 nt, Homo sapiens
  misc_RNA (1)...(19): siRNA sense strand
ccaaaucgauguggauguu

SEQ ID NO: 2577 - RNA, 19 nt, Homo sapiens
  misc_RNA (1)...(19): siRNA sense strand
ggaacagcauguccaaauc

SEQ ID NO: 2578 - RNA, 19 nt, Homo sapiens
  misc_RNA (1)...(19): siRNA sense strand
ccagaugcgugaaauggaa

SEQ ID NO: 2579 - RNA, 19 nt, Homo sapiens
  misc_RNA (1)...(19): siRNA sense strand
gagggaaacuaaucuggau

SEQ ID NO: 2580 - RNA, 19 nt, Homo sapiens
  misc_RNA (1)...(19): siRNA sense strand
ucacgaugaccuugaauaa

SEQ ID NO: 2581 - RNA, 19 nt, Homo sapiens
  misc_RNA (1)...(19): siRNA sense strand
caaguuugcugaccucucu

SEQ ID NO: 2582 - RNA, 19 nt, Homo sapiens
  misc_RNA (1)...(19): siRNA sense strand
gacaggauguugacaaugc

SEQ ID NO: 2583 - RNA, 19 nt, Homo sapiens
  misc_RNA (1)...(19): siRNA sense strand
acauugagauugccaccua

SEQ ID NO: 2584 - RNA, 19 nt, Homo sapiens
  misc_RNA (1)...(19): siRNA sense strand
gaaacuccacgaagaggaa

SEQ ID NO: 2585 - RNA, 19 nt, Homo sapiens
  misc_RNA (1)...(19): siRNA sense strand
gaagaaacuccacgaagag

SEQ ID NO: 2586 - RNA, 19 nt, Homo sapiens
  misc_RNA (1)...(19): siRNA sense strand
gaagaaugguacaaaucca

SEQ ID NO: 2587 - RNA, 19 nt, Homo sapiens
  misc_RNA (1)...(19): siRNA sense strand
uuaagacgguugaaacuag

SEQ ID NO: 2588 - RNA, 19 nt, Homo sapiens
  misc_RNA (1)...(19): siRNA sense strand
caaagcaggaguccacuga

SEQ ID NO: 2589 - RNA, 19 nt, Homo sapiens
  misc_RNA (1)...(19): siRNA sense strand
gaacuuugccguugaagcu

SEQ ID NO: 2590 - RNA, 19 nt, Homo sapiens
  misc_RNA (1)...(19): siRNA sense strand
gaaauggaagagaacuuug

SEQ ID NO: 2591 - RNA, 19 nt, Homo sapiens
  misc_RNA (1)...(19): siRNA sense strand
accaagaccugcucaaugu

SEQ ID NO: 2592 - RNA, 19 nt, Homo sapiens
  misc_RNA (1)...(19): siRNA sense strand
uaagacgguugaaacuaga

SEQ ID NO: 2593 - RNA, 19 nt, Homo sapiens
  misc_RNA (1)...(19): siRNA sense strand
ccaacuacaucgacaaggu

SEQ ID NO: 2594 - RNA, 19 nt, Homo sapiens
  misc_RNA (1)...(19): siRNA sense strand
ggacagguuaucaacgaaa

SEQ ID NO: 2595 - RNA, 19 nt, Homo sapiens
  misc_RNA (1)...(19): siRNA sense strand
ugaaauggaagagaacuuu

SEQ ID NO: 2596 - RNA, 19 nt, Homo sapiens
  misc_RNA (1)...(19): siRNA sense strand
gcaggaggcagaagaaugg

SEQ ID NO: 2597 - RNA, 19 nt, Homo sapiens
  misc_RNA (1)...(19): siRNA sense strand
gaaaacacccugcaaucuu

SEQ ID NO: 2598 - RNA, 19 nt, Homo sapiens
  misc_RNA (1)...(19): siRNA sense strand
guacgucagcaauaugaaa

SEQ ID NO: 2599 - RNA, 19 nt, Homo sapiens
  misc_RNA (1)...(19): siRNA sense strand
cagacaggauguugacaau

SEQ ID NO: 2600 - RNA, 19 nt, Homo sapiens
  misc_RNA (1)...(19): siRNA sense strand
agauggcccuugacauuga

SEQ ID NO: 2601 - RNA, 19 nt, Homo sapiens
  misc_RNA (1)...(19): siRNA sense strand
gguugaaacuagagaugga

SEQ ID NO: 2602 - RNA, 19 nt, Homo sapiens
  misc_RNA (1)...(19): siRNA sense strand
aaaacacccugcaaucuuu

SEQ ID NO: 2603 - RNA, 19 nt, Homo sapiens
  misc_RNA (1)...(19): siRNA sense strand
cguugaagcugcuaacuac

SEQ ID NO: 2604 - RNA, 19 nt, Homo sapiens
  misc_RNA (1)...(19): siRNA sense strand
gagauggacagguuaucaa

SEQ ID NO: 2605 - RNA, 19 nt, Homo sapiens
  misc_RNA (1)...(19): siRNA sense strand
gaauaugaaggaggaaaug

SEQ ID NO: 2606 - RNA, 19 nt, Homo sapiens
  misc_RNA (1)...(19): siRNA sense strand
gaacagcauguccaaaucg

SEQ ID NO: 2607 - RNA, 19 nt, Homo sapiens
  misc_RNA (1)...(19): siRNA sense strand
gaaauugcaggaggagaug

SEQ ID NO: 2608 - RNA, 19 nt, Homo sapiens
  misc_RNA (1)...(19): siRNA sense strand
gcugcuaacuaccaagaca

SEQ ID NO: 2609 - RNA, 19 nt, Homo sapiens
  misc_RNA (1)...(19): siRNA sense strand
aagagaacuuugccguuga

SEQ ID NO: 2610 - RNA, 19 nt, Homo sapiens
  misc_RNA (1)...(19): siRNA sense strand
uggcacgucuugaccuuga

SEQ ID NO: 2611 - RNA, 19 nt, Homo sapiens
  misc_RNA (1)...(19): siRNA sense strand
ccagcuaaccaacgacaaa

SEQ ID NO: 2612 - RNA, 19 nt, Homo sapiens
  misc_RNA (1)...(19): siRNA sense strand
uaacuaccaagacacuauu

SEQ ID NO: 2613 - RNA, 19 nt, Homo sapiens
  misc_RNA (1)...(19): siRNA sense strand
agagaacuuugccguugaa

SEQ ID NO: 2614 - RNA, 19 nt, Homo sapiens
  misc_RNA (1)...(19): siRNA sense strand
aacuagagauggacagguu

SEQ ID NO: 2615 - RNA, 19 nt, Homo sapiens
  misc_RNA (1)...(19): siRNA sense strand
aggagaugcuucagagaga

SEQ ID NO: 2616 - RNA, 19 nt, Homo sapiens
  misc_RNA (1)...(19): siRNA sense strand
gaaccugagggaaacuaau

SEQ ID NO: 2617 - RNA, 19 nt, Homo sapiens
  misc_RNA (1)...(19): siRNA sense strand
aagaccugcucaauguuaa

SEQ ID NO: 2618 - RNA, 19 nt, Homo sapiens
  misc_RNA (1)...(19): siRNA sense strand
ugaagcugcuaacuaccaa

SEQ ID NO: 2619 - RNA, 19 nt, Homo sapiens
  misc_RNA (1)...(19): siRNA sense strand
gaacgcaaaguggaaucuu

SEQ ID NO: 2620 - RNA, 19 nt, Homo sapiens
  misc_RNA (1)...(19): siRNA sense strand
cagaagaaugguacaaauc

SEQ ID NO: 2621 - RNA, 19 nt, Homo sapiens
  misc_RNA (1)...(19): siRNA sense strand
aaaucgauguggauguuuc

SEQ ID NO: 2622 - RNA, 19 nt, Homo sapiens
  misc_RNA (1)...(19): siRNA sense strand
gaaguggaugcccuuaaag

SEQ ID NO: 2623 - RNA, 19 nt, Homo sapiens
  misc_RNA (1)...(19): siRNA sense strand
ggcagaagaaugguacaaa

SEQ ID NO: 2624 - RNA, 19 nt, Homo sapiens
  misc_RNA (1)...(19): siRNA sense strand
gcaggaguccacugaguac

SEQ ID NO: 2625 - RNA, 19 nt, Homo sapiens
  misc_RNA (1)...(19): siRNA sense strand
uaccaagaccugcucaaug

SEQ ID NO: 2626 - RNA, 19 nt, Homo sapiens
  misc_RNA (1)...(19): siRNA sense strand
aagcaggaguccacugagu

SEQ ID NO: 2627 - RNA, 19 nt, Homo sapiens
  misc_RNA (1)...(19): siRNA sense strand
gauuaagacgguugaaacu

SEQ ID NO: 2628 - RNA, 19 nt, Homo sapiens
  misc_RNA (1)...(19): siRNA sense strand
ucagacaggauguugacaa

SEQ ID NO: 2629 - RNA, 19 nt, Homo sapiens
  misc_RNA (1)...(19): siRNA sense strand
cuaacuaccaagacacuau

SEQ ID NO: 2630 - RNA, 19 nt, Homo sapiens
  misc_RNA (1)...(19): siRNA sense strand
ugcgugaaauggaagagaa

SEQ ID NO: 2631 - RNA, 19 nt, Homo sapiens
  misc_RNA (1)...(19): siRNA sense strand
aggcucagauucaggaaca

SEQ ID NO: 2632 - RNA, 19 nt, Homo sapiens
  misc_RNA (1)...(19): siRNA sense strand
gugaaguggaugcccuuaa

SEQ ID NO: 2633 - RNA, 19 nt, Homo sapiens
  misc_RNA (1)...(19): siRNA sense strand
cgucagcaauaugaaagug

SEQ ID NO: 2634 - RNA, 19 nt, Homo sapiens
  misc_RNA (1)...(19): siRNA sense strand
gacagguuaucaacgaaac

SEQ ID NO: 2635 - RNA, 19 nt, Homo sapiens
  misc_RNA (1)...(19): siRNA sense strand
guuaagauggcccuugaca

SEQ ID NO: 2636 - RNA, 19 nt, Homo sapiens
  misc_RNA (1)...(19): siRNA sense strand
uccuggagcagcagaauaa

SEQ ID NO: 2637 - RNA, 19 nt, Homo sapiens
  misc_RNA (1)...(19): siRNA sense strand
caaccuggccgaggacauc

SEQ ID NO: 2638 - RNA, 19 nt, Homo sapiens
  misc_RNA (1)...(19): siRNA sense strand
ggaggagaugcuucagaga

SEQ ID NO: 2639 - RNA, 19 nt, Homo sapiens
  misc_RNA (1)...(19): siRNA sense strand
aggaacagcauguccaaau

SEQ ID NO: 2640 - RNA, 19 nt, Homo sapiens
  misc_RNA (1)...(19): siRNA sense strand
gcgaggagagcaggauuuc

SEQ ID NO: 2641 - RNA, 19 nt, Homo sapiens
  misc_RNA (1)...(19): siRNA sense strand
gcaggacucgguggacuuc

SEQ ID NO: 2642 - RNA, 19 nt, Homo sapiens
  misc_RNA (1)...(19): siRNA sense strand
agaaauugcaggaggagau

SEQ ID NO: 2643 - RNA, 19 nt, Homo sapiens
  misc_RNA (1)...(19): siRNA sense strand
caaaucgauguggauguuu

SEQ ID NO: 2644 - RNA, 19 nt, Homo sapiens
  misc_RNA (1)...(19): siRNA sense strand
ccugcucaauguuaagaug

SEQ ID NO: 2645 - RNA, 19 nt, Homo sapiens
  misc_RNA (1)...(19): siRNA sense strand
cugccaaccggaacaauga

SEQ ID NO: 2646 - RNA, 19 nt, Homo sapiens
  misc_RNA (1)...(19): siRNA sense strand
ggauucacucccucugguu

SEQ ID NO: 2647 - RNA, 19 nt, Homo sapiens
  misc_RNA (1)...(19): siRNA sense strand
ggcgaggagagcaggauuu

SEQ ID NO: 2648 - RNA, 19 nt, Homo sapiens
  misc_RNA (1)...(19): siRNA sense strand
caucaacaccgaguucaag

SEQ ID NO: 2649 - RNA, 19 nt, Homo sapiens
  misc_RNA (1)...(19): siRNA sense strand
uggagcagcagaauaagau

SEQ ID NO: 2650 - RNA, 19 nt, Homo sapiens
  misc_RNA (1)...(19): siRNA sense strand
uggaccagcuaaccaacga

SEQ ID NO: 2651 - RNA, 19 nt, Homo sapiens
  misc_RNA (1)...(19): siRNA sense strand
ucaacaccgaguucaagaa

SEQ ID NO: 2652 - RNA, 19 nt, Homo sapiens
  misc_RNA (1)...(19): siRNA sense strand
ccguugaagcugcuaacua

SEQ ID NO: 2653 - RNA, 19 nt, Homo sapiens
  misc_RNA (1)...(19): siRNA sense strand
gcugccaaccggaacaaug

SEQ ID NO: 2654 - RNA, 19 nt, Homo sapiens
  misc_RNA (1)...(19): siRNA sense strand
gaccugcucaauguuaaga

SEQ ID NO: 2655 - RNA, 19 nt, Homo sapiens
  misc_RNA (1)...(19): siRNA sense strand
auggacagguuaucaacga

SEQ ID NO: 2656 - RNA, 19 nt, Homo sapiens
  misc_RNA (1)...(19): siRNA sense strand
ugauuaagacgguugaaac

SEQ ID NO: 2657 - RNA, 19 nt, Homo sapiens
  misc_RNA (1)...(19): siRNA sense strand
ggacagacauuaacaguau

SEQ ID NO: 2658 - RNA, 19 nt, Homo sapiens
  misc_RNA (1)...(19): siRNA sense strand
ggacugaggugucauuuac

SEQ ID NO: 2659 - RNA, 19 nt, Homo sapiens
  misc_RNA (1)...(19): siRNA sense strand
cagauaagcugucauugga

SEQ ID NO: 2660 - RNA, 19 nt, Homo sapiens
  misc_RNA (1)...(19): siRNA sense strand
gaaugaggaucuugcaaau

SEQ ID NO: 2661 - RNA, 19 nt, Homo sapiens
  misc_RNA (1)...(19): siRNA sense strand
uuacaaaccuguugcuaau

SEQ ID NO: 2662 - RNA, 19 nt, Homo sapiens
  misc_RNA (1)...(19): siRNA sense strand
guacagacacuaucaagga

SEQ ID NO: 2663 - RNA, 19 nt, Homo sapiens
  misc_RNA (1)...(19): siRNA sense strand
uagucaagguuccuaaaua

SEQ ID NO: 2664 - RNA, 19 nt, Homo sapiens
  misc_RNA (1)...(19): siRNA sense strand
caagguuccuaaauauuug

SEQ ID NO: 2665 - RNA, 19 nt, Homo sapiens
  misc_RNA (1)...(19): siRNA sense strand
cacaacagcuggacaaagu

SEQ ID NO: 2666 - RNA, 19 nt, Homo sapiens
  misc_RNA (1)...(19): siRNA sense strand
gaaauugguguucagaaug

SEQ ID NO: 2667 - RNA, 19 nt, Homo sapiens
  misc_RNA (1)...(19): siRNA sense strand
gaggugucauuuacuuuga

SEQ ID NO: 2668 - RNA, 19 nt, Homo sapiens
  misc_RNA (1)...(19): siRNA sense strand
augaggaucuugcaaauau

SEQ ID NO: 2669 - RNA, 19 nt, Homo sapiens
  misc_RNA (1)...(19): siRNA sense strand
agaaauugguguucagaau

SEQ ID NO: 2670 - RNA, 19 nt, Homo sapiens
  misc_RNA (1)...(19): siRNA sense strand
guaccugaaggaaaucuua

SEQ ID NO: 2671 - RNA, 19 nt, Homo sapiens
  misc_RNA (1)...(19): siRNA sense strand
gaaggaauagugguacaaa

SEQ ID NO: 2672 - RNA, 19 nt, Homo sapiens
  misc_RNA (1)...(19): siRNA sense strand
acaaaccuguugcuaauca

SEQ ID NO: 2673 - RNA, 19 nt, Homo sapiens
  misc_RNA (1)...(19): siRNA sense strand
agucaagguuccuaaauau

SEQ ID NO: 2674 - RNA, 19 nt, Homo sapiens
  misc_RNA (1)...(19): siRNA sense strand
gaaggacugaggugucauu

SEQ ID NO: 2675 - RNA, 19 nt, Homo sapiens
  misc_RNA (1)...(19): siRNA sense strand
caucagauaagcugucauu

SEQ ID NO: 2676 - RNA, 19 nt, Homo sapiens
  misc_RNA (1)...(19): siRNA sense strand
ugaaugaggaucuugcaaa

SEQ ID NO: 2677 - RNA, 19 nt, Homo sapiens
  misc_RNA (1)...(19): siRNA sense strand
aaauugguguucagaaugu

SEQ ID NO: 2678 - RNA, 19 nt, Homo sapiens
  misc_RNA (1)...(19): siRNA sense strand
gagaacauccauuugucuu

SEQ ID NO: 2679 - RNA, 19 nt, Homo sapiens
  misc_RNA (1)...(19): siRNA sense strand
agucagugcuccuagagaa

SEQ ID NO: 2680 - RNA, 19 nt, Homo sapiens
  misc_RNA (1)...(19): siRNA sense strand
uagagaacauccauuuguc

SEQ ID NO: 2681 - RNA, 19 nt, Homo sapiens
  misc_RNA (1)...(19): siRNA sense strand
cuagagaacauccauuugu

SEQ ID NO: 2682 - RNA, 19 nt, Homo sapiens
  misc_RNA (1)...(19): siRNA sense strand
cagacacuaucaaggagaa

SEQ ID NO: 2683 - RNA, 19 nt, Homo sapiens
  misc_RNA (1)...(19): siRNA sense strand
gaguguggcuagucaaggu

SEQ ID NO: 2684 - RNA, 19 nt, Homo sapiens
  misc_RNA (1)...(19): siRNA sense strand
gaaaacuacaugcgauuaa

SEQ ID NO: 2685 - RNA, 19 nt, Homo sapiens
  misc_RNA (1)...(19): siRNA sense strand
gacagacauuaacaguauu

SEQ ID NO: 2686 - RNA, 19 nt, Homo sapiens
  misc_RNA (1)...(19): siRNA sense strand
ucacagcaaugggcuaaag

SEQ ID NO: 2687 - RNA, 19 nt, Homo sapiens
  misc_RNA (1)...(19): siRNA sense strand
aaagaaagaagacggaaag

SEQ ID NO: 2688 - RNA, 19 nt, Homo sapiens
  misc_RNA (1)...(19): siRNA sense strand
gaggaucuugcaaauauuc

SEQ ID NO: 2689 - RNA, 19 nt, Homo sapiens
  misc_RNA (1)...(19): siRNA sense strand
ggaauagugguacaaagag

SEQ ID NO: 2690 - RNA, 19 nt, Homo sapiens
  misc_RNA (1)...(19): siRNA sense strand
gagcugauaaacaacaugu

SEQ ID NO: 2691 - RNA, 19 nt, Homo sapiens
  misc_RNA (1)...(19): siRNA sense strand
ugaggaucuugcaaauauu

SEQ ID NO: 2692 - RNA, 19 nt, Homo sapiens
  misc_RNA (1)...(19): siRNA sense strand
gaggacagacauuaacagu

SEQ ID NO: 2693 - RNA, 19 nt, Homo sapiens
  misc_RNA (1)...(19): siRNA sense strand
ucagauaagcugucauugg

SEQ ID NO: 2694 - RNA, 19 nt, Homo sapiens
  misc_RNA (1)...(19): siRNA sense strand
ugguguaccugaaggaaau

SEQ ID NO: 2695 - RNA, 19 nt, Homo sapiens
  misc_RNA (1)...(19): siRNA sense strand
ggacuugguggacaucaca

SEQ ID NO: 2696 - RNA, 19 nt, Homo sapiens
  misc_RNA (1)...(19): siRNA sense strand
ccgaccagcugccagugaa

SEQ ID NO: 2697 - RNA, 19 nt, Homo sapiens
  misc_RNA (1)...(19): siRNA sense strand
ggaaggaauagugguacaa

SEQ ID NO: 2698 - RNA, 19 nt, Homo sapiens
  misc_RNA (1)...(19): siRNA sense strand
gaucuugcaaauauucaug

SEQ ID NO: 2699 - RNA, 19 nt, Homo sapiens
  misc_RNA (1)...(19): siRNA sense strand
guaaaagggauccacaaaa

SEQ ID NO: 2700 - RNA, 19 nt, Homo sapiens
  misc_RNA (1)...(19): siRNA sense strand
acaggaguguggcuaguca

SEQ ID NO: 2701 - RNA, 19 nt, Homo sapiens
  misc_RNA (1)...(19): siRNA sense strand
ggugucauuuacuuugaau

SEQ ID NO: 2702 - RNA, 19 nt, Homo sapiens
  misc_RNA (1)...(19): siRNA sense strand
ugaggugucauuuacuuug

SEQ ID NO: 2703 - RNA, 19 nt, Homo sapiens
  misc_RNA (1)...(19): siRNA sense strand
guuggaggacagacauuaa

SEQ ID NO: 2704 - RNA, 19 nt, Homo sapiens
  misc_RNA (1)...(19): siRNA sense strand
acugaggugucauuuacuu

SEQ ID NO: 2705 - RNA, 19 nt, Homo sapiens
  misc_RNA (1)...(19): siRNA sense strand
gcugucauuggaaggaaua

SEQ ID NO: 2706 - RNA, 19 nt, Homo sapiens
  misc_RNA (1)...(19): siRNA sense strand
gcuagucaagguuccuaaa

SEQ ID NO: 2707 - RNA, 19 nt, Homo sapiens
  misc_RNA (1)...(19): siRNA sense strand
guugggaaacugcggauug

SEQ ID NO: 2708 - RNA, 19 nt, Homo sapiens
  misc_RNA (1)...(19): siRNA sense strand
aggaauagugguacaaaga

SEQ ID NO: 2709 - RNA, 19 nt, Homo sapiens
  misc_RNA (1)...(19): siRNA sense strand
uaucacaacagcuggacaa

SEQ ID NO: 2710 - RNA, 19 nt, Homo sapiens
  misc_RNA (1)...(19): siRNA sense strand
cagaguacagacacuauca

SEQ ID NO: 2711 - RNA, 19 nt, Homo sapiens
  misc_RNA (1)...(19): siRNA sense strand
gucaagguuccuaaauauu

SEQ ID NO: 2712 - RNA, 19 nt, Homo sapiens
  misc_RNA (1)...(19): siRNA sense strand
aggaaggacugagguguca

SEQ ID NO: 2713 - RNA, 19 nt, Homo sapiens
  misc_RNA (1)...(19): siRNA sense strand
uuaaggacuugguggacau

SEQ ID NO: 2714 - RNA, 19 nt, Homo sapiens
  misc_RNA (1)...(19): siRNA sense strand
aaaaccagcuucagucagu

SEQ ID NO: 2715 - RNA, 19 nt, Homo sapiens
  misc_RNA (1)...(19): siRNA sense strand
gaguacagacacuaucaag

SEQ ID NO: 2716 - RNA, 19 nt, Homo sapiens
  misc_RNA (1)...(19): siRNA sense strand
aaugaggaucuugcaaaua

SEQ ID NO: 2717 - RNA, 19 nt, Homo sapiens
  misc_RNA (1)...(19): siRNA sense strand
auuacaaaccuguugcuaa

SEQ ID NO: 2718 - RNA, 19 nt, Homo sapiens
  misc_RNA (1)...(19): siRNA sense strand
ccaaaccagugaggcuauc

SEQ ID NO: 2719 - RNA, 19 nt, Homo sapiens
  misc_RNA (1)...(19): siRNA sense strand
ggaaaaccagcuucaguca

SEQ ID NO: 2720 - RNA, 19 nt, Homo sapiens
  misc_RNA (1)...(19): siRNA sense strand
aaagaaauugguguucaga

SEQ ID NO: 2721 - RNA, 19 nt, Homo sapiens
  misc_RNA (1)...(19): siRNA sense strand
uccuagagaacauccauuu

SEQ ID NO: 2722 - RNA, 19 nt, Homo sapiens
  misc_RNA (1)...(19): siRNA sense strand
uaacaaccaauuacaaacc

SEQ ID NO: 2723 - RNA, 19 nt, Homo sapiens
  misc_RNA (1)...(19): siRNA sense strand
gcugaagccagaguacaga

SEQ ID NO: 2724 - RNA, 19 nt, Homo sapiens
  misc_RNA (1)...(19): siRNA sense strand
gagcugaagccagaguaca

SEQ ID NO: 2725 - RNA, 19 nt, Homo sapiens
  misc_RNA (1)...(19): siRNA sense strand
caaaccuguugcuaaucau

SEQ ID NO: 2726 - RNA, 19 nt, Homo sapiens
  misc_RNA (1)...(19): siRNA sense strand
gggcugggauucugucaua

SEQ ID NO: 2727 - RNA, 19 nt, Homo sapiens
  misc_RNA (1)...(19): siRNA sense strand
ucaaggagcugaagcacaa

SEQ ID NO: 2728 - RNA, 19 nt, Homo sapiens
  misc_RNA (1)...(19): siRNA sense strand
ugaccaagcugccagacua

SEQ ID NO: 2729 - RNA, 19 nt, Homo sapiens
  misc_RNA (1)...(19): siRNA sense strand
gagcugaaauuggcugauu

SEQ ID NO: 2730 - RNA, 19 nt, Homo sapiens
  misc_RNA (1)...(19): siRNA sense strand
caacaucccuggugaacgu

SEQ ID NO: 2731 - RNA, 19 nt, Homo sapiens
  misc_RNA (1)...(19): siRNA sense strand
acaagaagcugacuuuggu

SEQ ID NO: 2732 - RNA, 19 nt, Homo sapiens
  misc_RNA (1)...(19): siRNA sense strand
gaaauacgagaaacuggaa

SEQ ID NO: 2733 - RNA, 19 nt, Homo sapiens
  misc_RNA (1)...(19): siRNA sense strand
cccagaaccugcuaauaaa

SEQ ID NO: 2734 - RNA, 19 nt, Homo sapiens
  misc_RNA (1)...(19): siRNA sense strand
gagcaguggcccucuauga

SEQ ID NO: 2735 - RNA, 19 nt, Homo sapiens
  misc_RNA (1)...(19): siRNA sense strand
ugaccucgauccugagauu

SEQ ID NO: 2736 - RNA, 19 nt, Homo sapiens
  misc_RNA (1)...(19): siRNA sense strand
cgggagaucugccuacuca

SEQ ID NO: 2737 - RNA, 19 nt, Homo sapiens
  misc_RNA (1)...(19): siRNA sense strand
gaagaaguauuuugacagu

SEQ ID NO: 2738 - RNA, 19 nt, Homo sapiens
  misc_RNA (1)...(19): siRNA sense strand
uauaagcccuauccgaugu

SEQ ID NO: 2739 - RNA, 19 nt, Homo sapiens
  misc_RNA (1)...(19): siRNA sense strand
gcgacaagaagcugacuuu

SEQ ID NO: 2740 - RNA, 19 nt, Homo sapiens
  misc_RNA (1)...(19): siRNA sense strand
ugaugucgaugaccaguug

SEQ ID NO: 2741 - RNA, 19 nt, Homo sapiens
  misc_RNA (1)...(19): siRNA sense strand
ggauucccguccgcuguua

SEQ ID NO: 2742 - RNA, 19 nt, Homo sapiens
  misc_RNA (1)...(19): siRNA sense strand
gaaggcaccuacggaacug

SEQ ID NO: 2743 - RNA, 19 nt, Homo sapiens
  misc_RNA (1)...(19): siRNA sense strand
ccaagcugccagacuauaa

SEQ ID NO: 2744 - RNA, 19 nt, Homo sapiens
  misc_RNA (1)...(19): siRNA sense strand
gcagaaauacgagaaacug

SEQ ID NO: 2745 - RNA, 19 nt, Homo sapiens
  misc_RNA (1)...(19): siRNA sense strand
gcucgagccuuugggauuc

SEQ ID NO: 2746 - RNA, 19 nt, Homo sapiens
  misc_RNA (1)...(19): siRNA sense strand
ccacguccaucgacaugug

SEQ ID NO: 2747 - RNA, 19 nt, Homo sapiens
  misc_RNA (1)...(19): siRNA sense strand
uugcagagcuggccaaugc

SEQ ID NO: 2748 - RNA, 19 nt, Homo sapiens
  misc_RNA (1)...(19): siRNA sense strand
gacaagaagcugacuuugg

SEQ ID NO: 2749 - RNA, 19 nt, Homo sapiens
  misc_RNA (1)...(19): siRNA sense strand
cagcguaucucagcagaag

SEQ ID NO: 2750 - RNA, 19 nt, Homo sapiens
  misc_RNA (1)...(19): siRNA sense strand
cagcugagguggucacacu

SEQ ID NO: 2751 - RNA, 19 nt, Homo sapiens
  misc_RNA (1)...(19): siRNA sense strand
ggagaucugccuacucaag

SEQ ID NO: 2752 - RNA, 19 nt, Homo sapiens
  misc_RNA (1)...(19): siRNA sense strand
gaggcuggaugacgaugau

SEQ ID NO: 2753 - RNA, 19 nt, Homo sapiens
  misc_RNA (1)...(19): siRNA sense strand
ggaaggcaccuacggaacu

SEQ ID NO: 2754 - RNA, 19 nt, Homo sapiens
  misc_RNA (1)...(19): siRNA sense strand
gagcugaagcacaagaaca

SEQ ID NO: 2755 - RNA, 19 nt, Homo sapiens
  misc_RNA (1)...(19): siRNA sense strand
cuacuucuccgacuucugu

SEQ ID NO: 2756 - RNA, 19 nt, Homo sapiens
  misc_RNA (1)...(19): siRNA sense strand
guaacccuguccagcguau

SEQ ID NO: 2757 - RNA, 19 nt, Homo sapiens
  misc_RNA (1)...(19): siRNA sense strand
ggaauggggagcugaaauu

SEQ ID NO: 2758 - RNA, 19 nt, Homo sapiens
  misc_RNA (1)...(19): siRNA sense strand
ccucgauccugagauugua

SEQ ID NO: 2759 - RNA, 19 nt, Homo sapiens
  misc_RNA (1)...(19): siRNA sense strand
uaaagucauuccucuucca

SEQ ID NO: 2760 - RNA, 19 nt, Homo sapiens
  misc_RNA (1)...(19): siRNA sense strand
gaacgucgugcccaaacuc

SEQ ID NO: 2761 - RNA, 19 nt, Homo sapiens
  misc_RNA (1)...(19): siRNA sense strand
caugagaucguggcucuga

SEQ ID NO: 2762 - RNA, 19 nt, Homo sapiens
  misc_RNA (1)...(19): siRNA sense strand
agaaguauuuugacaguug

SEQ ID NO: 2763 - RNA, 19 nt, Homo sapiens
  misc_RNA (1)...(19): siRNA sense strand
caccggauguccucuuugg

SEQ ID NO: 2764 - RNA, 19 nt, Homo sapiens
  misc_RNA (1)...(19): siRNA sense strand
cagaaccugcuaauaaaca

SEQ ID NO: 2765 - RNA, 19 nt, Homo sapiens
  misc_RNA (1)...(19): siRNA sense strand
ugagaucguggcucugaaa

SEQ ID NO: 2766 - RNA, 19 nt, Homo sapiens
  misc_RNA (1)...(19): siRNA sense strand
uguaaagucauuccucuuc

SEQ ID NO: 2767 - RNA, 19 nt, Homo sapiens
  misc_RNA (1)...(19): siRNA sense strand
ccgggagacucaugagauc

SEQ ID NO: 2768 - RNA, 19 nt, Homo sapiens
  misc_RNA (1)...(19): siRNA sense strand
gaugagggugugccgaguu

SEQ ID NO: 2769 - RNA, 19 nt, Homo sapiens
  misc_RNA (1)...(19): siRNA sense strand
ccccagaaccugcuaauaa

SEQ ID NO: 2770 - RNA, 19 nt, Homo sapiens
  misc_RNA (1)...(19): siRNA sense strand
uaaaagggcugggauucug

SEQ ID NO: 2771 - RNA, 19 nt, Homo sapiens
  misc_RNA (1)...(19): siRNA sense strand
ccacaacaucccuggugaa

SEQ ID NO: 2772 - RNA, 19 nt, Homo sapiens
  misc_RNA (1)...(19): siRNA sense strand
gaacaucgucaggcuucau

SEQ ID NO: 2773 - RNA, 19 nt, Homo sapiens
  misc_RNA (1)...(19): siRNA sense strand
aagaagcugacuuugguuu

SEQ ID NO: 2774 - RNA, 19 nt, Homo sapiens
  misc_RNA (1)...(19): siRNA sense strand
gcaccuacggaacuguguu

SEQ ID NO: 2775 - RNA, 19 nt, Homo sapiens
  misc_RNA (1)...(19): siRNA sense strand
cccaccggauguccucuuu

SEQ ID NO: 2776 - RNA, 19 nt, Homo sapiens
  misc_RNA (1)...(19): siRNA sense strand
cgacaagaagcugacuuug

SEQ ID NO: 2777 - RNA, 19 nt, Homo sapiens
  misc_RNA (1)...(19): siRNA sense strand
gaccaagcugccagacuau

SEQ ID NO: 2778 - RNA, 19 nt, Homo sapiens
  misc_RNA (1)...(19): siRNA sense strand
auccugagauuguaaaguc

SEQ ID NO: 2779 - RNA, 19 nt, Homo sapiens
  misc_RNA (1)...(19): siRNA sense strand
caagaagcugacuuugguu

SEQ ID NO: 2780 - RNA, 19 nt, Homo sapiens
  misc_RNA (1)...(19): siRNA sense strand
cugagauuguaaagucauu

SEQ ID NO: 2781 - RNA, 19 nt, Homo sapiens
  misc_RNA (1)...(19): siRNA sense strand
gaacuuggccuaugaaaua

SEQ ID NO: 2782 - RNA, 19 nt, Homo sapiens
  misc_RNA (1)...(19): siRNA sense strand
uaacauggaugaccaagaa

SEQ ID NO: 2783 - RNA, 19 nt, Homo sapiens
  misc_RNA (1)...(19): siRNA sense strand
caaccgggcuuccuucaaa

SEQ ID NO: 2784 - RNA, 19 nt, Homo sapiens
  misc_RNA (1)...(19): siRNA sense strand
ggagacaaguuuaucaaau

SEQ ID NO: 2785 - RNA, 19 nt, Homo sapiens
  misc_RNA (1)...(19): siRNA sense strand
gagacaaguuuaucaaaug

SEQ ID NO: 2786 - RNA, 19 nt, Homo sapiens
  misc_RNA (1)...(19): siRNA sense strand
gcauaugguucugaagaua

SEQ ID NO: 2787 - RNA, 19 nt, Homo sapiens
  misc_RNA (1)...(19): siRNA sense strand
agaggaagaugacgaguuu

SEQ ID NO: 2788 - RNA, 19 nt, Homo sapiens
  misc_RNA (1)...(19): siRNA sense strand
ggaagcauauauagcaaug

SEQ ID NO: 2789 - RNA, 19 nt, Homo sapiens
  misc_RNA (1)...(19): siRNA sense strand
ugacgaguuugaagaagua

SEQ ID NO: 2790 - RNA, 19 nt, Homo sapiens
  misc_RNA (1)...(19): siRNA sense strand
gaagggaaaucugccaaag

SEQ ID NO: 2791 - RNA, 19 nt, Homo sapiens
  misc_RNA (1)...(19): siRNA sense strand
caauggcgaugacucagaa

SEQ ID NO: 2792 - RNA, 19 nt, Homo sapiens
  misc_RNA (1)...(19): siRNA sense strand
agaagaggaugaagaggaa

SEQ ID NO: 2793 - RNA, 19 nt, Homo sapiens
  misc_RNA (1)...(19): siRNA sense strand
gaagacuuauacacucaga

SEQ ID NO: 2794 - RNA, 19 nt, Homo sapiens
  misc_RNA (1)...(19): siRNA sense strand
gaacuuuccgcuguacuuu

SEQ ID NO: 2795 - RNA, 19 nt, Homo sapiens
  misc_RNA (1)...(19): siRNA sense strand
gaugugaacuuggccuaug

SEQ ID NO: 2796 - RNA, 19 nt, Homo sapiens
  misc_RNA (1)...(19): siRNA sense strand
gacagaggaugugaacuug

SEQ ID NO: 2797 - RNA, 19 nt, Homo sapiens
  misc_RNA (1)...(19): siRNA sense strand
gguagaagaggaugaauca

SEQ ID NO: 2798 - RNA, 19 nt, Homo sapiens
  misc_RNA (1)...(19): siRNA sense strand
uguccugucuguaguagua

SEQ ID NO: 2799 - RNA, 19 nt, Homo sapiens
  misc_RNA (1)...(19): siRNA sense strand
ugaaauacuugagccagaa

SEQ ID NO: 2800 - RNA, 19 nt, Homo sapiens
  misc_RNA (1)...(19): siRNA sense strand
gaagaauugagaccgauga

SEQ ID NO: 2801 - RNA, 19 nt, Homo sapiens
  misc_RNA (1)...(19): siRNA sense strand
ucaaauguccugucuguag

SEQ ID NO: 2802 - RNA, 19 nt, Homo sapiens
  misc_RNA (1)...(19): siRNA sense strand
caaauguccugucuguagu

SEQ ID NO: 2803 - RNA, 19 nt, Homo sapiens
  misc_RNA (1)...(19): siRNA sense strand
ccuauuugguugagagaaa

SEQ ID NO: 2804 - RNA, 19 nt, Homo sapiens
  misc_RNA (1)...(19): siRNA sense strand
aauauaaacuggaccacau

SEQ ID NO: 2805 - RNA, 19 nt, Homo sapiens
  misc_RNA (1)...(19): siRNA sense strand
aaaggaagcauauauagca

SEQ ID NO: 2806 - RNA, 19 nt, Homo sapiens
  misc_RNA (1)...(19): siRNA sense strand
ccagaugacaccagaagaa

SEQ ID NO: 2807 - RNA, 19 nt, Homo sapiens
  misc_RNA (1)...(19): siRNA sense strand
gaagaugacgaguuugaag

SEQ ID NO: 2808 - RNA, 19 nt, Homo sapiens
  misc_RNA (1)...(19): siRNA sense strand
ugaagcgguuagccaagua

SEQ ID NO: 2809 - RNA, 19 nt, Homo sapiens
  misc_RNA (1)...(19): siRNA sense strand
cacaugagaagaagaauug

SEQ ID NO: 2810 - RNA, 19 nt, Homo sapiens
  misc_RNA (1)...(19): siRNA sense strand
gaacuccugugugaaagag

SEQ ID NO: 2811 - RNA, 19 nt, Homo sapiens
  misc_RNA (1)...(19): siRNA sense strand
gcaaugggacaacgcaugu

SEQ ID NO: 2812 - RNA, 19 nt, Homo sapiens
  misc_RNA (1)...(19): siRNA sense strand
gggcauaugguucugaaga

SEQ ID NO: 2813 - RNA, 19 nt, Homo sapiens
  misc_RNA (1)...(19): siRNA sense strand
gcucuuugauccuaugaca

SEQ ID NO: 2814 - RNA, 19 nt, Homo sapiens
  misc_RNA (1)...(19): siRNA sense strand
cuucaaauguccugucugu

SEQ ID NO: 2815 - RNA, 19 nt, Homo sapiens
  misc_RNA (1)...(19): siRNA sense strand
agacagaggaugugaacuu

SEQ ID NO: 2816 - RNA, 19 nt, Homo sapiens
  misc_RNA (1)...(19): siRNA sense strand
ggaagggaaaucugccaaa

SEQ ID NO: 2817 - RNA, 19 nt, Homo sapiens
  misc_RNA (1)...(19): siRNA sense strand
ugagucagaugaugauucu

SEQ ID NO: 2818 - RNA, 19 nt, Homo sapiens
  misc_RNA (1)...(19): siRNA sense strand
cgccauaacuacuacuuca

SEQ ID NO: 2819 - RNA, 19 nt, Homo sapiens
  misc_RNA (1)...(19): siRNA sense strand
gaaaaggaagcauauauag

SEQ ID NO: 2820 - RNA, 19 nt, Homo sapiens
  misc_RNA (1)...(19): siRNA sense strand
uugaagaaguagcagauga

SEQ ID NO: 2821 - RNA, 19 nt, Homo sapiens
  misc_RNA (1)...(19): siRNA sense strand
gccaaagagaggccuauuu

SEQ ID NO: 2822 - RNA, 19 nt, Homo sapiens
  misc_RNA (1)...(19): siRNA sense strand
guaguacuuucacagacuu

SEQ ID NO: 2823 - RNA, 19 nt, Homo sapiens
  misc_RNA (1)...(19): siRNA sense strand
ucaauuaucguacucuugu

SEQ ID NO: 2824 - RNA, 19 nt, Homo sapiens
  misc_RNA (1)...(19): siRNA sense strand
cauaacuacuacuucauca

SEQ ID NO: 2825 - RNA, 19 nt, Homo sapiens
  misc_RNA (1)...(19): siRNA sense strand
agaaaucccagcccugaaa

SEQ ID NO: 2826 - RNA, 19 nt, Homo sapiens
  misc_RNA (1)...(19): siRNA sense strand
gaccacaugagaagaagaa

SEQ ID NO: 2827 - RNA, 19 nt, Homo sapiens
  misc_RNA (1)...(19): siRNA sense strand
uaaacuggaccacaugaga

SEQ ID NO: 2828 - RNA, 19 nt, Homo sapiens
  misc_RNA (1)...(19): siRNA sense strand
gaaaaccacucgccauaac

SEQ ID NO: 2829 - RNA, 19 nt, Homo sapiens
  misc_RNA (1)...(19): siRNA sense strand
guucugaagauaugaaaga

SEQ ID NO: 2830 - RNA, 19 nt, Homo sapiens
  misc_RNA (1)...(19): siRNA sense strand
gggagacaaguuuaucaaa

SEQ ID NO: 2831 - RNA, 19 nt, Homo sapiens
  misc_RNA (1)...(19): siRNA sense strand
ggcauaugguucugaagau

SEQ ID NO: 2832 - RNA, 19 nt, Homo sapiens
  misc_RNA (1)...(19): siRNA sense strand
ggaagcaugggccaccaaa

SEQ ID NO: 2833 - RNA, 19 nt, Homo sapiens
  misc_RNA (1)...(19): siRNA sense strand
ccacucgccauaacuacua

SEQ ID NO: 2834 - RNA, 19 nt, Homo sapiens
  misc_RNA (1)...(19): siRNA sense strand
aaaccacucgccauaacua

SEQ ID NO: 2835 - RNA, 19 nt, Homo sapiens
  misc_RNA (1)...(19): siRNA sense strand
ggaagaugacgaguuugaa

SEQ ID NO: 2836 - RNA, 19 nt, Homo sapiens
  misc_RNA (1)...(19): siRNA sense strand
acccagauguccucacuga

SEQ ID NO: 2837 - RNA, 19 nt, Homo sapiens
  misc_RNA (1)...(19): siRNA sense strand
ggcaagguuuaaugaacaa

SEQ ID NO: 2838 - RNA, 19 nt, Homo sapiens
  misc_RNA (1)...(19): siRNA sense strand
ccacaugagaagaagaauu

SEQ ID NO: 2839 - RNA, 19 nt, Homo sapiens
  misc_RNA (1)...(19): siRNA sense strand
caucaauuaucguacucuu

SEQ ID NO: 2840 - RNA, 19 nt, Homo sapiens
  misc_RNA (1)...(19): siRNA sense strand
ccagugagucagaugauga

SEQ ID NO: 2841 - RNA, 19 nt, Homo sapiens
  misc_RNA (1)...(19): siRNA sense strand
gaaguuccagcagcauuga

SEQ ID NO: 2842 - RNA, 19 nt, Homo sapiens
  misc_RNA (1)...(19): siRNA sense strand
aagagaggccuauuugguu

SEQ ID NO: 2843 - RNA, 19 nt, Homo sapiens
  misc_RNA (1)...(19): siRNA sense strand
aaagagaggccuauuuggu

SEQ ID NO: 2844 - RNA, 19 nt, Homo sapiens
  misc_RNA (1)...(19): siRNA sense strand
uggcaagguuuaaugaaca

SEQ ID NO: 2845 - RNA, 19 nt, Homo sapiens
  misc_RNA (1)...(19): siRNA sense strand
gaggaugaaucagcaaugc

SEQ ID NO: 2846 - RNA, 19 nt, Homo sapiens
  misc_RNA (1)...(19): siRNA sense strand
aaacuggaccacaugagaa

SEQ ID NO: 2847 - RNA, 19 nt, Homo sapiens
  misc_RNA (1)...(19): siRNA sense strand
gagccagaacccacagaaa

SEQ ID NO: 2848 - RNA, 19 nt, Homo sapiens
  misc_RNA (1)...(19): siRNA sense strand
gagcuaguggcccagauga

SEQ ID NO: 2849 - RNA, 19 nt, Homo sapiens
  misc_RNA (1)...(19): siRNA sense strand
caaguuugaucggaagcaa

SEQ ID NO: 2850 - RNA, 19 nt, Homo sapiens
  misc_RNA (1)...(19): siRNA sense strand
gcauaaacgagaagaggau

SEQ ID NO: 2851 - RNA, 19 nt, Homo sapiens
  misc_RNA (1)...(19): siRNA sense strand
gagagaaagcacuguccaa

SEQ ID NO: 2852 - RNA, 19 nt, Homo sapiens
  misc_RNA (1)...(19): siRNA sense strand
agggaaaucugccaaagag

SEQ ID NO: 2853 - RNA, 19 nt, Homo sapiens
  misc_RNA (1)...(19): siRNA sense strand
cagauguccucacugaagu

SEQ ID NO: 2854 - RNA, 19 nt, Homo sapiens
  misc_RNA (1)...(19): siRNA sense strand
ccagauguccucacugaag

SEQ ID NO: 2855 - RNA, 19 nt, Homo sapiens
  misc_RNA (1)...(19): siRNA sense strand
gcccauuuaugcauugcuu

SEQ ID NO: 2856 - RNA, 19 nt, Homo sapiens
  misc_RNA (1)...(19): siRNA sense strand
caaggaccaugcagcaacu

SEQ ID NO: 2857 - RNA, 19 nt, Homo sapiens
  misc_RNA (1)...(19): siRNA sense strand
ggagacagaggaugugaac

SEQ ID NO: 2858 - RNA, 19 nt, Homo sapiens
  misc_RNA (1)...(19): siRNA sense strand
gaagaaaaggaagcauaua

SEQ ID NO: 2859 - RNA, 19 nt, Homo sapiens
  misc_RNA (1)...(19): siRNA sense strand
cagaugacaccagaagaaa

SEQ ID NO: 2860 - RNA, 19 nt, Homo sapiens
  misc_RNA (1)...(19): siRNA sense strand
caauuaucguacucuuguu

SEQ ID NO: 2861 - RNA, 19 nt, Homo sapiens
  misc_RNA (1)...(19): siRNA sense strand
gggaaaaccacucgccaua

SEQ ID NO: 2862 - RNA, 19 nt, Homo sapiens
  misc_RNA (1)...(19): siRNA sense strand
cuuauacacucagaauguu

SEQ ID NO: 2863 - RNA, 19 nt, Homo sapiens
  misc_RNA (1)...(19): siRNA sense strand
ugaacaaauugagcccauu

SEQ ID NO: 2864 - RNA, 19 nt, Homo sapiens
  misc_RNA (1)...(19): siRNA sense strand
ggaacuccugugugaaaga

SEQ ID NO: 2865 - RNA, 19 nt, Homo sapiens
  misc_RNA (1)...(19): siRNA sense strand
gccagaacccacagaaauc

SEQ ID NO: 2866 - RNA, 19 nt, Homo sapiens
  misc_RNA (1)...(19): siRNA sense strand
agacaaguuuaucaaaugc

SEQ ID NO: 2867 - RNA, 19 nt, Homo sapiens
  misc_RNA (1)...(19): siRNA sense strand
cagaaagcgagaccaguga

SEQ ID NO: 2868 - RNA, 19 nt, Homo sapiens
  misc_RNA (1)...(19): siRNA sense strand
uuuaaagggagacaaguuu

SEQ ID NO: 2869 - RNA, 19 nt, Homo sapiens
  misc_RNA (1)...(19): siRNA sense strand
gaagaggaugaaucagcaa

SEQ ID NO: 2870 - RNA, 19 nt, Homo sapiens
  misc_RNA (1)...(19): siRNA sense strand
gaugacgaguuugaagaag

SEQ ID NO: 2871 - RNA, 19 nt, Homo sapiens
  misc_RNA (1)...(19): siRNA sense strand
uaaacgagaagaggaugaa

SEQ ID NO: 2872 - RNA, 19 nt, Homo sapiens
  misc_RNA (1)...(19): siRNA sense strand
ucaucgagccucacuggaa

SEQ ID NO: 2873 - RNA, 19 nt, Homo sapiens
  misc_RNA (1)...(19): siRNA sense strand
ggaaaaccacucgccauaa

SEQ ID NO: 2874 - RNA, 19 nt, Homo sapiens
  misc_RNA (1)...(19): siRNA sense strand
agacuuauacacucagaau

SEQ ID NO: 2875 - RNA, 19 nt, Homo sapiens
  misc_RNA (1)...(19): siRNA sense strand
gagccaacggccagagcua

SEQ ID NO: 2876 - RNA, 19 nt, Homo sapiens
  misc_RNA (1)...(19): siRNA sense strand
gaaagcgagaccagugagu

SEQ ID NO: 2877 - RNA, 19 nt, Homo sapiens
  misc_RNA (1)...(19): siRNA sense strand
gaagcgguuagccaaguau

SEQ ID NO: 2878 - RNA, 19 nt, Homo sapiens
  misc_RNA (1)...(19): siRNA sense strand
ugaaguuccagcagcauug

SEQ ID NO: 2879 - RNA, 19 nt, Homo sapiens
  misc_RNA (1)...(19): siRNA sense strand
gcuaguggcccagaugaca

SEQ ID NO: 2880 - RNA, 19 nt, Homo sapiens
  misc_RNA (1)...(19): siRNA sense strand
aaggaagcauauauagcaa

SEQ ID NO: 2881 - RNA, 19 nt, Homo sapiens
  misc_RNA (1)...(19): siRNA sense strand
gaaagaggcuggcuacaca

SEQ ID NO: 2882 - RNA, 19 nt, Homo sapiens
  misc_RNA (1)...(19): siRNA sense strand
gaggugaucucgcaaaguu

SEQ ID NO: 2883 - RNA, 19 nt, Homo sapiens
  misc_RNA (1)...(19): siRNA sense strand
agaaguggcugaagaaaga

SEQ ID NO: 2884 - RNA, 19 nt, Homo sapiens
  misc_RNA (1)...(19): siRNA sense strand
gaagggagaccugcugauu

SEQ ID NO: 2885 - RNA, 19 nt, Homo sapiens
  misc_RNA (1)...(19): siRNA sense strand
gagcagcuacuacaugauu

SEQ ID NO: 2886 - RNA, 19 nt, Homo sapiens
  misc_RNA (1)...(19): siRNA sense strand
aagagcagcuacuacauga

SEQ ID NO: 2887 - RNA, 19 nt, Homo sapiens
  misc_RNA (1)...(19): siRNA sense strand
aguagaggcugcugugaaa

SEQ ID NO: 2888 - RNA, 19 nt, Homo sapiens
  misc_RNA (1)...(19): siRNA sense strand
gaucauggaugcgcucaag

SEQ ID NO: 2889 - RNA, 19 nt, Homo sapiens
  misc_RNA (1)...(19): siRNA sense strand
agggagaccugcugauuga

SEQ ID NO: 2890 - RNA, 19 nt, Homo sapiens
  misc_RNA (1)...(19): siRNA sense strand
acaccuaucuaagccauuu

SEQ ID NO: 2891 - RNA, 19 nt, Homo sapiens
  misc_RNA (1)...(19): siRNA sense strand
gugcugaagugugauguga

SEQ ID NO: 2892 - RNA, 19 nt, Homo sapiens
  misc_RNA (1)...(19): siRNA sense strand
gcuacacaaucgaaugguu

SEQ ID NO: 2893 - RNA, 19 nt, Homo sapiens
  misc_RNA (1)...(19): siRNA sense strand
gcuccucucugcuugugaa

SEQ ID NO: 2894 - RNA, 19 nt, Homo sapiens
  misc_RNA (1)...(19): siRNA sense strand
caagagcagcuacuacaug

SEQ ID NO: 2895 - RNA, 19 nt, Homo sapiens
  misc_RNA (1)...(19): siRNA sense strand
ugcaggagcuggagaagug

SEQ ID NO: 2896 - RNA, 19 nt, Homo sapiens
  misc_RNA (1)...(19): siRNA sense strand
cagagaaggaggagaaguu

SEQ ID NO: 2897 - RNA, 19 nt, Homo sapiens
  misc_RNA (1)...(19): siRNA sense strand
cuacacaaucgaaugguuu

SEQ ID NO: 2898 - RNA, 19 nt, Homo sapiens
  misc_RNA (1)...(19): siRNA sense strand
ggagaaguggcugaagaaa

SEQ ID NO: 2899 - RNA, 19 nt, Homo sapiens
  misc_RNA (1)...(19): siRNA sense strand
gagaaguggcugaagaaag

SEQ ID NO: 2900 - RNA, 19 nt, Homo sapiens
  misc_RNA (1)...(19): siRNA sense strand
ggugaucucgcaaaguuau

SEQ ID NO: 2901 - RNA, 19 nt, Homo sapiens
  misc_RNA (1)...(19): siRNA sense strand
ucuaggcacucugcagaaa

SEQ ID NO: 2902 - RNA, 19 nt, Homo sapiens
  misc_RNA (1)...(19): siRNA sense strand
gaggcuggcuacacaaucg

SEQ ID NO: 2903 - RNA, 19 nt, Homo sapiens
  misc_RNA (1)...(19): siRNA sense strand
cuggagaaguggcugaaga

SEQ ID NO: 2904 - RNA, 19 nt, Homo sapiens
  misc_RNA (1)...(19): siRNA sense strand
gcugaagugugaugugacu

SEQ ID NO: 2905 - RNA, 19 nt, Homo sapiens
  misc_RNA (1)...(19): siRNA sense strand
cuaugugugugaucuugaa

SEQ ID NO: 2906 - RNA, 19 nt, Homo sapiens
  misc_RNA (1)...(19): siRNA sense strand
gaaccucggcagccuacug

SEQ ID NO: 2907 - RNA, 19 nt, Homo sapiens
  misc_RNA (1)...(19): siRNA sense strand
gagaaggaggagaaguuga

SEQ ID NO: 2908 - RNA, 19 nt, Homo sapiens
  misc_RNA (1)...(19): siRNA sense strand
caagauauucugccuagac

SEQ ID NO: 2909 - RNA, 19 nt, Homo sapiens
  misc_RNA (1)...(19): siRNA sense strand
uaucagcuccucucugcuu

SEQ ID NO: 2910 - RNA, 19 nt, Homo sapiens
  misc_RNA (1)...(19): siRNA sense strand
gagaccugcugauugacau

SEQ ID NO: 2911 - RNA, 19 nt, Homo sapiens
  misc_RNA (1)...(19): siRNA sense strand
ggagaccugcugauugaca

SEQ ID NO: 2912 - RNA, 19 nt, Homo sapiens
  misc_RNA (1)...(19): siRNA sense strand
caaggacaccuaucuaagc

SEQ ID NO: 2913 - RNA, 19 nt, Homo sapiens
  misc_RNA (1)...(19): siRNA sense strand
ccaaggacaccuaucuaag

SEQ ID NO: 2914 - RNA, 19 nt, Homo sapiens
  misc_RNA (1)...(19): siRNA sense strand
gaaggaggagaaguugaga

SEQ ID NO: 2915 - RNA, 19 nt, Homo sapiens
  misc_RNA (1)...(19): siRNA sense strand
agucaaggguccagagaag

SEQ ID NO: 2916 - RNA, 19 nt, Homo sapiens
  misc_RNA (1)...(19): siRNA sense strand
uccaaggacaccuaucuaa

SEQ ID NO: 2917 - RNA, 19 nt, Homo sapiens
  misc_RNA (1)...(19): siRNA sense strand
guccagagaaggaggagaa

SEQ ID NO: 2918 - RNA, 19 nt, Homo sapiens
  misc_RNA (1)...(19): siRNA sense strand
ucaaggguccagagaagga

SEQ ID NO: 2919 - RNA, 19 nt, Homo sapiens
  misc_RNA (1)...(19): siRNA sense strand
caguagaggcugcugugaa

SEQ ID NO: 2920 - RNA, 19 nt, Homo sapiens
  misc_RNA (1)...(19): siRNA sense strand
uagaggcugcugugaaaga

SEQ ID NO: 2921 - RNA, 19 nt, Homo sapiens
  misc_RNA (1)...(19): siRNA sense strand
ugaccuaugugugugaucu

SEQ ID NO: 2922 - RNA, 19 nt, Homo sapiens
  misc_RNA (1)...(19): siRNA sense strand
cgaaugguuugaggugauc

SEQ ID NO: 2923 - RNA, 19 nt, Homo sapiens
  misc_RNA (1)...(19): siRNA sense strand
aaucaggcuucaccuccaa

SEQ ID NO: 2924 - RNA, 19 nt, Homo sapiens
  misc_RNA (1)...(19): siRNA sense strand
ugagacaggcggucaagca

SEQ ID NO: 2925 - RNA, 19 nt, Homo sapiens
  misc_RNA (1)...(19): siRNA sense strand
caacaacgaaggacuuuuc

SEQ ID NO: 2926 - RNA, 19 nt, Homo sapiens
  misc_RNA (1)...(19): siRNA sense strand
ucgaaugguuugaggugau

SEQ ID NO: 2927 - RNA, 19 nt, Homo sapiens
  misc_RNA (1)...(19): siRNA sense strand
gccaacaacgaaggacuuu

SEQ ID NO: 2928 - RNA, 19 nt, Homo sapiens
  misc_RNA (1)...(19): siRNA sense strand
gagucaaggguccagagaa

SEQ ID NO: 2929 - RNA, 19 nt, Homo sapiens
  misc_RNA (1)...(19): siRNA sense strand
ugaagugugaugugacuca

SEQ ID NO: 2930 - RNA, 19 nt, Homo sapiens
  misc_RNA (1)...(19): siRNA sense strand
ggccaacaacgaaggacuu

SEQ ID NO: 2931 - RNA, 19 nt, Homo sapiens
  misc_RNA (1)...(19): siRNA sense strand
uggagaaguggcugaagaa

SEQ ID NO: 2932 - RNA, 19 nt, Homo sapiens
  misc_RNA (1)...(19): siRNA sense strand
aagggagaccugcugauug

SEQ ID NO: 2933 - RNA, 19 nt, Homo sapiens
  misc_RNA (1)...(19): siRNA sense strand
cagcuccucucugcuugug

SEQ ID NO: 2934 - RNA, 19 nt, Homo sapiens
  misc_RNA (1)...(19): siRNA sense strand
caagaaacggcuuuacuua

SEQ ID NO: 2935 - RNA, 19 nt, Homo sapiens
  misc_RNA (1)...(19): siRNA sense strand
gcaagaaacggcuuuacuu

SEQ ID NO: 2936 - RNA, 19 nt, Homo sapiens
  misc_RNA (1)...(19): siRNA sense strand
gaaacggcuuuacuuacaa

SEQ ID NO: 2937 - RNA, 19 nt, Homo sapiens
  misc_RNA (1)...(19): siRNA sense strand
agaaacggcuuuacuuaca

SEQ ID NO: 2938 - RNA, 19 nt, Homo sapiens
  misc_RNA (1)...(19): siRNA sense strand
gaagaugaugcucaaggua

SEQ ID NO: 2939 - RNA, 19 nt, Homo sapiens
  misc_RNA (1)...(19): siRNA sense strand
ucagcaugcucaggaaaua

SEQ ID NO: 2940 - RNA, 19 nt, Homo sapiens
  misc_RNA (1)...(19): siRNA sense strand
ggaccaccauucgcuguug

SEQ ID NO: 2941 - RNA, 19 nt, Homo sapiens
  misc_RNA (1)...(19): siRNA sense strand
aaacggcuuuacuuacaaa

SEQ ID NO: 2942 - RNA, 19 nt, Homo sapiens
  misc_RNA (1)...(19): siRNA sense strand
ucaagguacucuucaugga

SEQ ID NO: 2943 - RNA, 19 nt, Homo sapiens
  misc_RNA (1)...(19): siRNA sense strand
agccucagcuugaagauga

SEQ ID NO: 2944 - RNA, 19 nt, Homo sapiens
  misc_RNA (1)...(19): siRNA sense strand
ugaagaugaugcucaaggu

SEQ ID NO: 2945 - RNA, 19 nt, Homo sapiens
  misc_RNA (1)...(19): siRNA sense strand
gcucaagguacucuucaug

SEQ ID NO: 2946 - RNA, 19 nt, Homo sapiens
  misc_RNA (1)...(19): siRNA sense strand
cagcaugcucaggaaauaa

SEQ ID NO: 2947 - RNA, 19 nt, Homo sapiens
  misc_RNA (1)...(19): siRNA sense strand
aaaacagacucuuuaccuu

SEQ ID NO: 2948 - RNA, 19 nt, Homo sapiens
  misc_RNA (1)...(19): siRNA sense strand
ggcaagaaacggcuuuacu

SEQ ID NO: 2949 - RNA, 19 nt, Homo sapiens
  misc_RNA (1)...(19): siRNA sense strand
aacagacucuuuaccuucu

SEQ ID NO: 2950 - RNA, 19 nt, Homo sapiens
  misc_RNA (1)...(19): siRNA sense strand
aagaaacggcuuuacuuac

SEQ ID NO: 2951 - RNA, 19 nt, Homo sapiens
  misc_RNA (1)...(19): siRNA sense strand
uaccuucugcuguguuuga

SEQ ID NO: 2952 - RNA, 19 nt, Homo sapiens
  misc_RNA (1)...(19): siRNA sense strand
gcaccaggaucuacaguuu

SEQ ID NO: 2953 - RNA, 19 nt, Homo sapiens
  misc_RNA (1)...(19): siRNA sense strand
ggaaggaucucaagcugau

SEQ ID NO: 2954 - RNA, 19 nt, Homo sapiens
  misc_RNA (1)...(19): siRNA sense strand
gaacacggccaaaggauug

SEQ ID NO: 2955 - RNA, 19 nt, Homo sapiens
  misc_RNA (1)...(19): siRNA sense strand
gcaggacccucgcaccaaa

SEQ ID NO: 2956 - RNA, 19 nt, Homo sapiens
  misc_RNA (1)...(19): siRNA sense strand
ggaagcaacagaagaaaga

SEQ ID NO: 2957 - RNA, 19 nt, Homo sapiens
  misc_RNA (1)...(19): siRNA sense strand
aaaaggaggugaagauuga

SEQ ID NO: 2958 - RNA, 19 nt, Homo sapiens
  misc_RNA (1)...(19): siRNA sense strand
ggccacggcuccuuuguca

SEQ ID NO: 2959 - RNA, 19 nt, Homo sapiens
  misc_RNA (1)...(19): siRNA sense strand
ucacaggaguugggaagaa

SEQ ID NO: 2960 - RNA, 19 nt, Homo sapiens
  misc_RNA (1)...(19): siRNA sense strand
cuacuuggccggucagauu

SEQ ID NO: 2961 - RNA, 19 nt, Homo sapiens
  misc_RNA (1)...(19): siRNA sense strand
ugucaacuguggcaugaaa

SEQ ID NO: 2962 - RNA, 19 nt, Homo sapiens
  misc_RNA (1)...(19): siRNA sense strand
gaccuaccauggcaaagug

SEQ ID NO: 2963 - RNA, 19 nt, Homo sapiens
  misc_RNA (1)...(19): siRNA sense strand
gaaaauggaagcaacagaa

SEQ ID NO: 2964 - RNA, 19 nt, Homo sapiens
  misc_RNA (1)...(19): siRNA sense strand
ggcaugcucuugugguguu

SEQ ID NO: 2965 - RNA, 19 nt, Homo sapiens
  misc_RNA (1)...(19): siRNA sense strand
uggaugagaucgugguguu

SEQ ID NO: 2966 - RNA, 19 nt, Homo sapiens
  misc_RNA (1)...(19): siRNA sense strand
ugaacccaguguccucuuu

SEQ ID NO: 2967 - RNA, 19 nt, Homo sapiens
  misc_RNA (1)...(19): siRNA sense strand
gaugagaucgugguguuug

SEQ ID NO: 2968 - RNA, 19 nt, Homo sapiens
  misc_RNA (1)...(19): siRNA sense strand
aggugaagauugacaagaa

SEQ ID NO: 2969 - RNA, 19 nt, Homo sapiens
  misc_RNA (1)...(19): siRNA sense strand
gaacccaguguccucuuug

SEQ ID NO: 2970 - RNA, 19 nt, Homo sapiens
  misc_RNA (1)...(19): siRNA sense strand
caagaccuaccauggcaaa

SEQ ID NO: 2971 - RNA, 19 nt, Homo sapiens
  misc_RNA (1)...(19): siRNA sense strand
ggugaacacggccaaagga

SEQ ID NO: 2972 - RNA, 19 nt, Homo sapiens
  misc_RNA (1)...(19): siRNA sense strand
aauggaagcaacagaagaa

SEQ ID NO: 2973 - RNA, 19 nt, Homo sapiens
  misc_RNA (1)...(19): siRNA sense strand
cugcccagcuucccaacuu

SEQ ID NO: 2974 - RNA, 19 nt, Homo sapiens
  misc_RNA (1)...(19): siRNA sense strand
ggugaagauugacaagaac

SEQ ID NO: 2975 - RNA, 19 nt, Homo sapiens
  misc_RNA (1)...(19): siRNA sense strand
cagagccugugccaucuuc

SEQ ID NO: 2976 - RNA, 19 nt, Homo sapiens
  misc_RNA (1)...(19): siRNA sense strand
ugaacacggccaaaggauu

SEQ ID NO: 2977 - RNA, 19 nt, Homo sapiens
  misc_RNA (1)...(19): siRNA sense strand
ccacaugcgucaggaugag

SEQ ID NO: 2978 - RNA, 19 nt, Homo sapiens
  misc_RNA (1)...(19): siRNA sense strand
cugccucagugcuguguuu

SEQ ID NO: 2979 - RNA, 19 nt, Homo sapiens
  misc_RNA (1)...(19): siRNA sense strand
ccaaagcuggucucuacug

SEQ ID NO: 2980 - RNA, 19 nt, Homo sapiens
  misc_RNA (1)...(19): siRNA sense strand
gaucucaagcugaugaaaa

SEQ ID NO: 2981 - RNA, 19 nt, Homo sapiens
  misc_RNA (1)...(19): siRNA sense strand
cuucaggcaugcucuugug

SEQ ID NO: 2982 - RNA, 19 nt, Homo sapiens
  misc_RNA (1)...(19): siRNA sense strand
gaggugaagauugacaaga

SEQ ID NO: 2983 - RNA, 19 nt, Homo sapiens
  misc_RNA (1)...(19): siRNA sense strand
ccacggcuccuuugucaac

SEQ ID NO: 2984 - RNA, 19 nt, Homo sapiens
  misc_RNA (1)...(19): siRNA sense strand
gccaggaugccaagacugu

SEQ ID NO: 2985 - RNA, 19 nt, Homo sapiens
  misc_RNA (1)...(19): siRNA sense strand
ccugugccaucuucugugu

SEQ ID NO: 2986 - RNA, 19 nt, Homo sapiens
  misc_RNA (1)...(19): siRNA sense strand
gggccaggaugccaagacu

SEQ ID NO: 2987 - RNA, 19 nt, Homo sapiens
  misc_RNA (1)...(19): siRNA sense strand
gagaucgugguguuugaug

SEQ ID NO: 2988 - RNA, 19 nt, Homo sapiens
  misc_RNA (1)...(19): siRNA sense strand
ggaugagaucgugguguuu

SEQ ID NO: 2989 - RNA, 19 nt, Homo sapiens
  misc_RNA (1)...(19): siRNA sense strand
agaucgugguguuugauga

SEQ ID NO: 2990 - RNA, 19 nt, Homo sapiens
  misc_RNA (1)...(19): siRNA sense strand
caacuucaggcaugcucuu

SEQ ID NO: 2991 - RNA, 19 nt, Homo sapiens
  misc_RNA (1)...(19): siRNA sense strand
ccaagcaccaggaucuaca

SEQ ID NO: 2992 - RNA, 19 nt, Homo sapiens
  misc_RNA (1)...(19): siRNA sense strand
aaauggaagcaacagaaga

SEQ ID NO: 2993 - RNA, 19 nt, Homo sapiens
  misc_RNA (1)...(19): siRNA sense strand
uuugucaacuguggcauga

SEQ ID NO: 2994 - RNA, 19 nt, Homo sapiens
  misc_RNA (1)...(19): siRNA sense strand
aacccaguguccucuuuga

SEQ ID NO: 2995 - RNA, 19 nt, Homo sapiens
  misc_RNA (1)...(19): siRNA sense strand
ccaaggccgucaccaagua

SEQ ID NO: 2996 - RNA, 19 nt, Homo sapiens
  misc_RNA (1)...(19): siRNA sense strand
cgaagaaagccgugacuaa

SEQ ID NO: 2997 - RNA, 19 nt, Homo sapiens
  misc_RNA (1)...(19): siRNA sense strand
gaagaaagccgugacuaag

SEQ ID NO: 2998 - RNA, 19 nt, Homo sapiens
  misc_RNA (1)...(19): siRNA sense strand
ugacuaaggcgcagaagaa

SEQ ID NO: 2999 - RNA, 19 nt, Homo sapiens
  misc_RNA (1)...(19): siRNA sense strand
guacaccagcgcuaaguaa

SEQ ID NO: 3000 - RNA, 19 nt, Homo sapiens
  misc_RNA (1)...(19): siRNA sense strand
ccaagaagggcucgaagaa

SEQ ID NO: 3001 - RNA, 19 nt, Homo sapiens
  misc_RNA (1)...(19): siRNA sense strand
aagaagggcucgaagaaag

SEQ ID NO: 3002 - RNA, 19 nt, Homo sapiens
  misc_RNA (1)...(19): siRNA sense strand
caagaagggcucgaagaaa

SEQ ID NO: 3003 - RNA, 19 nt, Homo sapiens
  misc_RNA (1)...(19): siRNA sense strand
aacaagcgcucgaccauca

SEQ ID NO: 3004 - RNA, 19 nt, Homo sapiens
  misc_RNA (1)...(19): siRNA sense strand
gcaccaaggccgucaccaa

SEQ ID NO: 3005 - RNA, 19 nt, Homo sapiens
  misc_RNA (1)...(19): siRNA sense strand
acaccggcaucuccucuaa

SEQ ID NO: 3006 - RNA, 19 nt, Homo sapiens
  misc_RNA (1)...(19): siRNA sense strand
ccaaguacaccagcgcuaa

SEQ ID NO: 3007 - RNA, 19 nt, Homo sapiens
  misc_RNA (1)...(19): siRNA sense strand
gcuacuccguauacgugua

SEQ ID NO: 3008 - RNA, 19 nt, Homo sapiens
  misc_RNA (1)...(19): siRNA sense strand
cuaaggcgcagaagaagga

SEQ ID NO: 3009 - RNA, 19 nt, Homo sapiens
  misc_RNA (1)...(19): siRNA sense strand
cuucccgccugccgcauua

SEQ ID NO: 3010 - RNA, 19 nt, Homo sapiens
  misc_RNA (1)...(19): siRNA sense strand
ccguauacguguacaaggu

SEQ ID NO: 3011 - RNA, 19 nt, Homo sapiens
  misc_RNA (1)...(19): siRNA sense strand
cgucaacgacaucuucgaa

SEQ ID NO: 3012 - RNA, 19 nt, Homo sapiens
  misc_RNA (1)...(19): siRNA sense strand
ccucuaaggccaugggaau

SEQ ID NO: 3013 - RNA, 19 nt, Homo sapiens
  misc_RNA (1)...(19): siRNA sense strand
caugaacuccuucgucaac

SEQ ID NO: 3014 - RNA, 19 nt, Homo sapiens
  misc_RNA (1)...(19): siRNA sense strand
caacuaaagucagcaaaua

SEQ ID NO: 3015 - RNA, 19 nt, Homo sapiens
  misc_RNA (1)...(19): siRNA sense strand
caagaucgccacaugauua

SEQ ID NO: 3016 - RNA, 19 nt, Homo sapiens
  misc_RNA (1)...(19): siRNA sense strand
gaaaccaccuuccacaaau

SEQ ID NO: 3017 - RNA, 19 nt, Homo sapiens
  misc_RNA (1)...(19): siRNA sense strand
uagaaugcgucaacuuaua

SEQ ID NO: 3018 - RNA, 19 nt, Homo sapiens
  misc_RNA (1)...(19): siRNA sense strand
gcaaauacaggaaacaaug

SEQ ID NO: 3019 - RNA, 19 nt, Homo sapiens
  misc_RNA (1)...(19): siRNA sense strand
cagaagauguagagacaaa

SEQ ID NO: 3020 - RNA, 19 nt, Homo sapiens
  misc_RNA (1)...(19): siRNA sense strand
caaagaauuccuagaaaga

SEQ ID NO: 3021 - RNA, 19 nt, Homo sapiens
  misc_RNA (1)...(19): siRNA sense strand
ccaaagaauuccuagaaag

SEQ ID NO: 3022 - RNA, 19 nt, Homo sapiens
  misc_RNA (1)...(19): siRNA sense strand
cagcaucuguccucuagaa

SEQ ID NO: 3023 - RNA, 19 nt, Homo sapiens
  misc_RNA (1)...(19): siRNA sense strand
ggagaggauugucaucugu

SEQ ID NO: 3024 - RNA, 19 nt, Homo sapiens
  misc_RNA (1)...(19): siRNA sense strand
ggaaacaaugaaaggauaa

SEQ ID NO: 3025 - RNA, 19 nt, Homo sapiens
  misc_RNA (1)...(19): siRNA sense strand
ucaaaucacuucuccaaaa

SEQ ID NO: 3026 - RNA, 19 nt, Homo sapiens
  misc_RNA (1)...(19): siRNA sense strand
aggaaacaaugaaaggaua

SEQ ID NO: 3027 - RNA, 19 nt, Homo sapiens
  misc_RNA (1)...(19): siRNA sense strand
ugacuuggucccugaauuu

SEQ ID NO: 3028 - RNA, 19 nt, Homo sapiens
  misc_RNA (1)...(19): siRNA sense strand
agacagaaacacagacuaa

SEQ ID NO: 3029 - RNA, 19 nt, Homo sapiens
  misc_RNA (1)...(19): siRNA sense strand
caaauacaggaaacaauga

SEQ ID NO: 3030 - RNA, 19 nt, Homo sapiens
  misc_RNA (1)...(19): siRNA sense strand
cccaaagaauuccuagaaa

SEQ ID NO: 3031 - RNA, 19 nt, Homo sapiens
  misc_RNA (1)...(19): siRNA sense strand
ucagaaggcccaacuaaag

SEQ ID NO: 3032 - RNA, 19 nt, Homo sapiens
  misc_RNA (1)...(19): siRNA sense strand
gagaagacagaaacacaga

SEQ ID NO: 3033 - RNA, 19 nt, Homo sapiens
  misc_RNA (1)...(19): siRNA sense strand
gaucgccacaugauuagaa

SEQ ID NO: 3034 - RNA, 19 nt, Homo sapiens
  misc_RNA (1)...(19): siRNA sense strand
aaaccaccuuccacaaaug

SEQ ID NO: 3035 - RNA, 19 nt, Homo sapiens
  misc_RNA (1)...(19): siRNA sense strand
ggucaagaucgccacauga

SEQ ID NO: 3036 - RNA, 19 nt, Homo sapiens
  misc_RNA (1)...(19): siRNA sense strand
agacuaacaugcccuucau

SEQ ID NO: 3037 - RNA, 19 nt, Homo sapiens
  misc_RNA (1)...(19): siRNA sense strand
auuagaaugcgucaacuua

SEQ ID NO: 3038 - RNA, 19 nt, Homo sapiens
  misc_RNA (1)...(19): siRNA sense strand
gaacacacggaagugaaga

SEQ ID NO: 3039 - RNA, 19 nt, Homo sapiens
  misc_RNA (1)...(19): siRNA sense strand
ugcgucaacuuauagauau

SEQ ID NO: 3040 - RNA, 19 nt, Homo sapiens
  misc_RNA (1)...(19): siRNA sense strand
caaaucaagcucccaaggu

SEQ ID NO: 3041 - RNA, 19 nt, Homo sapiens
  misc_RNA (1)...(19): siRNA sense strand
gggagaagacagaaacaca

SEQ ID NO: 3042 - RNA, 19 nt, Homo sapiens
  misc_RNA (1)...(19): siRNA sense strand
gaagauguagagacaaacu

SEQ ID NO: 3043 - RNA, 19 nt, Homo sapiens
  misc_RNA (1)...(19): siRNA sense strand
uccagaagauguagagaca

SEQ ID NO: 3044 - RNA, 19 nt, Homo sapiens
  misc_RNA (1)...(19): siRNA sense strand
gcagggagaagacagaaac

SEQ ID NO: 3045 - RNA, 19 nt, Homo sapiens
  misc_RNA (1)...(19): siRNA sense strand
gcccuucaugugauucuua

SEQ ID NO: 3046 - RNA, 19 nt, Homo sapiens
  misc_RNA (1)...(19): siRNA sense strand
gaagacagaaacacagacu

SEQ ID NO: 3047 - RNA, 19 nt, Homo sapiens
  misc_RNA (1)...(19): siRNA sense strand
cagaaggcccaacuaaagu

SEQ ID NO: 3048 - RNA, 19 nt, Homo sapiens
  misc_RNA (1)...(19): siRNA sense strand
cagaaacacagacuaacau

SEQ ID NO: 3049 - RNA, 19 nt, Homo sapiens
  misc_RNA (1)...(19): siRNA sense strand
gaaggcccaacuaaaguca

SEQ ID NO: 3050 - RNA, 19 nt, Homo sapiens
  misc_RNA (1)...(19): siRNA sense strand
ccaacuaaagucagcaaau

SEQ ID NO: 3051 - RNA, 19 nt, Homo sapiens
  misc_RNA (1)...(19): siRNA sense strand
gauuagaaugcgucaacuu

SEQ ID NO: 3052 - RNA, 19 nt, Homo sapiens
  misc_RNA (1)...(19): siRNA sense strand
gcgucaacuuauagauauu

SEQ ID NO: 3053 - RNA, 19 nt, Homo sapiens
  misc_RNA (1)...(19): siRNA sense strand
gaaugcgucaacuuauaga

SEQ ID NO: 3054 - RNA, 19 nt, Homo sapiens
  misc_RNA (1)...(19): siRNA sense strand
uuucagaaggcccaacuaa

SEQ ID NO: 3055 - RNA, 19 nt, Homo sapiens
  misc_RNA (1)...(19): siRNA sense strand
acagaaacacagacuaaca

SEQ ID NO: 3056 - RNA, 19 nt, Homo sapiens
  misc_RNA (1)...(19): siRNA sense strand
cagcaaauacaggaaacaa

SEQ ID NO: 3057 - RNA, 19 nt, Homo sapiens
  misc_RNA (1)...(19): siRNA sense strand
gcaucuguccucuagaaca

SEQ ID NO: 3058 - RNA, 19 nt, Homo sapiens
  misc_RNA (1)...(19): siRNA sense strand
caaaucacuucuccaaaag

SEQ ID NO: 3059 - RNA, 19 nt, Homo sapiens
  misc_RNA (1)...(19): siRNA sense strand
acccaaagaauuccuagaa

SEQ ID NO: 3060 - RNA, 19 nt, Homo sapiens
  misc_RNA (1)...(19): siRNA sense strand
ucaagaucgccacaugauu

SEQ ID NO: 3061 - RNA, 19 nt, Homo sapiens
  misc_RNA (1)...(19): siRNA sense strand
gacacugguccacaaauca

SEQ ID NO: 3062 - RNA, 19 nt, Homo sapiens
  misc_RNA (1)...(19): siRNA sense strand
uggagaggauugucaucug

SEQ ID NO: 3063 - RNA, 19 nt, Homo sapiens
  misc_RNA (1)...(19): siRNA sense strand
guagagacaaacugugagu

SEQ ID NO: 3064 - RNA, 19 nt, Homo sapiens
  misc_RNA (1)...(19): siRNA sense strand
uagaacacacggaagugaa

SEQ ID NO: 3065 - RNA, 19 nt, Homo sapiens
  misc_RNA (1)...(19): siRNA sense strand
caggaaacaaugaaaggau

SEQ ID NO: 3066 - RNA, 19 nt, Homo sapiens
  misc_RNA (1)...(19): siRNA sense strand
uuagaaugcgucaacuuau

SEQ ID NO: 3067 - RNA, 19 nt, Homo sapiens
  misc_RNA (1)...(19): siRNA sense strand
gucaagaucgccacaugau

SEQ ID NO: 3068 - RNA, 19 nt, Homo sapiens
  misc_RNA (1)...(19): siRNA sense strand
caucagcaucuguccucua

SEQ ID NO: 3069 - RNA, 19 nt, Homo sapiens
  misc_RNA (1)...(19): siRNA sense strand
agaaugcgucaacuuauag

SEQ ID NO: 3070 - RNA, 19 nt, Homo sapiens
  misc_RNA (1)...(19): siRNA sense strand
cuagaacacacggaaguga

SEQ ID NO: 3071 - RNA, 19 nt, Homo sapiens
  misc_RNA (1)...(19): siRNA sense strand
augcgucaacuuauagaua

SEQ ID NO: 3072 - RNA, 19 nt, Homo sapiens
  misc_RNA (1)...(19): siRNA sense strand
caucuguccucuagaacac

SEQ ID NO: 3073 - RNA, 19 nt, Homo sapiens
  misc_RNA (1)...(19): siRNA sense strand
acacugguccacaaaucaa

SEQ ID NO: 3074 - RNA, 19 nt, Homo sapiens
  misc_RNA (1)...(19): siRNA sense strand
cagacuaacaugcccuuca

SEQ ID NO: 3075 - RNA, 19 nt, Homo sapiens
  misc_RNA (1)...(19): siRNA sense strand
uauuguugaucagcugaaa

SEQ ID NO: 3076 - RNA, 19 nt, Homo sapiens
  misc_RNA (1)...(19): siRNA sense strand
agaaacacagacuaacaug

SEQ ID NO: 3077 - RNA, 19 nt, Homo sapiens
  misc_RNA (1)...(19): siRNA sense strand
uuaaggagcucuugggaaa

SEQ ID NO: 3078 - RNA, 19 nt, Homo sapiens
  misc_RNA (1)...(19): siRNA sense strand
gcugagaucugcguugaaa

SEQ ID NO: 3079 - RNA, 19 nt, Homo sapiens
  misc_RNA (1)...(19): siRNA sense strand
gagggaggcugguggagaa

SEQ ID NO: 3080 - RNA, 19 nt, Homo sapiens
  misc_RNA (1)...(19): siRNA sense strand
ucaauggccugcagcauga

SEQ ID NO: 3081 - RNA, 19 nt, Homo sapiens
  misc_RNA (1)...(19): siRNA sense strand
guacagcgaugagaacaug

SEQ ID NO: 3082 - RNA, 19 nt, Homo sapiens
  misc_RNA (1)...(19): siRNA sense strand
cgcaagagcucccucaaga

SEQ ID NO: 3083 - RNA, 19 nt, Homo sapiens
  misc_RNA (1)...(19): siRNA sense strand
gggaugagguggcugagau

SEQ ID NO: 3084 - RNA, 19 nt, Homo sapiens
  misc_RNA (1)...(19): siRNA sense strand
gggaugugcuugauuccuu

SEQ ID NO: 3085 - RNA, 19 nt, Homo sapiens
  misc_RNA (1)...(19): siRNA sense strand
ggagacauggagaaguuua

SEQ ID NO: 3086 - RNA, 19 nt, Homo sapiens
  misc_RNA (1)...(19): siRNA sense strand
gacagaccauugagacaga

SEQ ID NO: 3087 - RNA, 19 nt, Homo sapiens
  misc_RNA (1)...(19): siRNA sense strand
gcaagagcucccucaagaa

SEQ ID NO: 3088 - RNA, 19 nt, Homo sapiens
  misc_RNA (1)...(19): siRNA sense strand
ugucaacgcugcugucagu

SEQ ID NO: 3089 - RNA, 19 nt, Homo sapiens
  misc_RNA (1)...(19): siRNA sense strand
ugcaggagcuggcagaguu

SEQ ID NO: 3090 - RNA, 19 nt, Homo sapiens
  misc_RNA (1)...(19): siRNA sense strand
cagaggaggugaacaagac

SEQ ID NO: 3091 - RNA, 19 nt, Homo sapiens
  misc_RNA (1)...(19): siRNA sense strand
aaacucaagugcacaaagg

SEQ ID NO: 3092 - RNA, 19 nt, Homo sapiens
  misc_RNA (1)...(19): siRNA sense strand
gaggugaacaagacucuga

SEQ ID NO: 3093 - RNA, 19 nt, Homo sapiens
  misc_RNA (1)...(19): siRNA sense strand
caagagcucccucaagaag

SEQ ID NO: 3094 - RNA, 19 nt, Homo sapiens
  misc_RNA (1)...(19): siRNA sense strand
guaccaggcauaucacaug

SEQ ID NO: 3095 - RNA, 19 nt, Homo sapiens
  misc_RNA (1)...(19): siRNA sense strand
gcgagcugcuggcuucuuc

SEQ ID NO: 3096 - RNA, 19 nt, Homo sapiens
  misc_RNA (1)...(19): siRNA sense strand
gagcugcauucgcuucauc

SEQ ID NO: 3097 - RNA, 19 nt, Homo sapiens
  misc_RNA (1)...(19): siRNA sense strand
agacagaggaggugaacaa

SEQ ID NO: 3098 - RNA, 19 nt, Homo sapiens
  misc_RNA (1)...(19): siRNA sense strand
ggacaaagccaagguucuc

SEQ ID NO: 3099 - RNA, 19 nt, Homo sapiens
  misc_RNA (1)...(19): siRNA sense strand
agacguaccaggcauauca

SEQ ID NO: 3100 - RNA, 19 nt, Homo sapiens
  misc_RNA (1)...(19): siRNA sense strand
guucugcgcuaccucuuca

SEQ ID NO: 3101 - RNA, 19 nt, Homo sapiens
  misc_RNA (1)...(19): siRNA sense strand
gaagacguaccaggcauau

SEQ ID NO: 3102 - RNA, 19 nt, Homo sapiens
  misc_RNA (1)...(19): siRNA sense strand
ugagaucugcguugaaaug

SEQ ID NO: 3103 - RNA, 19 nt, Homo sapiens
  misc_RNA (1)...(19): siRNA sense strand
cuaccugcaugacgucuug

SEQ ID NO: 3104 - RNA, 19 nt, Homo sapiens
  misc_RNA (1)...(19): siRNA sense strand
ccaaguucauggagcacaa

SEQ ID NO: 3105 - RNA, 19 nt, Homo sapiens
  misc_RNA (1)...(19): siRNA sense strand
gcgaugagaacaugaugga

SEQ ID NO: 3106 - RNA, 19 nt, Homo sapiens
  misc_RNA (1)...(19): siRNA sense strand
guaugagacgcaagucaaa

SEQ ID NO: 3107 - RNA, 19 nt, Homo sapiens
  misc_RNA (1)...(19): siRNA sense strand
ggggagacauggagaaguu

SEQ ID NO: 3108 - RNA, 19 nt, Homo sapiens
  misc_RNA (1)...(19): siRNA sense strand
agacgcaagucaaagagau

SEQ ID NO: 3109 - RNA, 19 nt, Homo sapiens
  misc_RNA (1)...(19): siRNA sense strand
caacgcugcugucaguaac

SEQ ID NO: 3110 - RNA, 19 nt, Homo sapiens
  misc_RNA (1)...(19): siRNA sense strand
ucaacgcugcugucaguaa

SEQ ID NO: 3111 - RNA, 19 nt, Homo sapiens
  misc_RNA (1)...(19): siRNA sense strand
uggcugagaucugcguuga

SEQ ID NO: 3112 - RNA, 19 nt, Homo sapiens
  misc_RNA (1)...(19): siRNA sense strand
guaacuacuaccugcauga

SEQ ID NO: 3113 - RNA, 19 nt, Homo sapiens
  misc_RNA (1)...(19): siRNA sense strand
cagagaaaauuccagaaga

SEQ ID NO: 3114 - RNA, 19 nt, Homo sapiens
  misc_RNA (1)...(19): siRNA sense strand
gcccagagcccagaacauc

SEQ ID NO: 3115 - RNA, 19 nt, Homo sapiens
  misc_RNA (1)...(19): siRNA sense strand
cgcaacgaguaccugcuua

SEQ ID NO: 3116 - RNA, 19 nt, Homo sapiens
  misc_RNA (1)...(19): siRNA sense strand
gcgcaacgaguaccugcuu

SEQ ID NO: 3117 - RNA, 19 nt, Homo sapiens
  misc_RNA (1)...(19): siRNA sense strand
gagcaggaggugucuugga

SEQ ID NO: 3118 - RNA, 19 nt, Homo sapiens
  misc_RNA (1)...(19): siRNA sense strand
gcaacgaguaccugcuuag

SEQ ID NO: 3119 - RNA, 19 nt, Homo sapiens
  misc_RNA (1)...(19): siRNA sense strand
cacccaagccucccaagug

SEQ ID NO: 3120 - RNA, 19 nt, Homo sapiens
  misc_RNA (1)...(19): siRNA sense strand
gagacauggagaaguuuau

SEQ ID NO: 3121 - RNA, 19 nt, Homo sapiens
  misc_RNA (1)...(19): siRNA sense strand
ggugcaugcuaccgucuuc

SEQ ID NO: 3122 - RNA, 19 nt, Homo sapiens
  misc_RNA (1)...(19): siRNA sense strand
cauggacucuguguuuaag

SEQ ID NO: 3123 - RNA, 19 nt, Homo sapiens
  misc_RNA (1)...(19): siRNA sense strand
agaagacguaccaggcaua

SEQ ID NO: 3124 - RNA, 19 nt, Homo sapiens
  misc_RNA (1)...(19): siRNA sense strand
acauggacucuguguuuaa

SEQ ID NO: 3125 - RNA, 19 nt, Homo sapiens
  misc_RNA (1)...(19): siRNA sense strand
gagacgcaagucaaagaga

SEQ ID NO: 3126 - RNA, 19 nt, Homo sapiens
  misc_RNA (1)...(19): siRNA sense strand
uggacucuguguuuaagga

SEQ ID NO: 3127 - RNA, 19 nt, Homo sapiens
  misc_RNA (1)...(19): siRNA sense strand
ggagcuggaagccgagaug

SEQ ID NO: 3128 - RNA, 19 nt, Homo sapiens
  misc_RNA (1)...(19): siRNA sense strand
ggagcuggcagaguucaug

SEQ ID NO: 3129 - RNA, 19 nt, Homo sapiens
  misc_RNA (1)...(19): siRNA sense strand
gaagcggcaggccaaguuc

SEQ ID NO: 3130 - RNA, 19 nt, Homo sapiens
  misc_RNA (1)...(19): siRNA sense strand
agaagcggcaggccaaguu

SEQ ID NO: 3131 - RNA, 19 nt, Homo sapiens
  misc_RNA (1)...(19): siRNA sense strand
ggagcauccucgccaagcu

SEQ ID NO: 3132 - RNA, 19 nt, Homo sapiens
  misc_RNA (1)...(19): siRNA sense strand
ucauggagcacaaacucaa

SEQ ID NO: 3133 - RNA, 19 nt, Homo sapiens
  misc_RNA (1)...(19): siRNA sense strand
agacggccaagaagacgua

SEQ ID NO: 3134 - RNA, 19 nt, Homo sapiens
  misc_RNA (1)...(19): siRNA sense strand
ggcugcaggcugaguauga

SEQ ID NO: 3135 - RNA, 19 nt, Homo sapiens
  misc_RNA (1)...(19): siRNA sense strand
ggagcugcgggacgagauu

SEQ ID NO: 3136 - RNA, 19 nt, Homo sapiens
  misc_RNA (1)...(19): siRNA sense strand
gcacccaagccucccaagu

SEQ ID NO: 3137 - RNA, 19 nt, Homo sapiens
  misc_RNA (1)...(19): siRNA sense strand
gcgccugagucacauugca

SEQ ID NO: 3138 - RNA, 19 nt, Homo sapiens
  misc_RNA (1)...(19): siRNA sense strand
gaguaugagacgcaaguca

SEQ ID NO: 3139 - RNA, 19 nt, Homo sapiens
  misc_RNA (1)...(19): siRNA sense strand
acgcugcugucaguaacua

SEQ ID NO: 3140 - RNA, 19 nt, Homo sapiens
  misc_RNA (1)...(19): siRNA sense strand
gccgggagcaccaaagcuu

SEQ ID NO: 3141 - RNA, 19 nt, Homo sapiens
  misc_RNA (1)...(19): siRNA sense strand
ccaccgagucccucaaguc

SEQ ID NO: 3142 - RNA, 19 nt, Homo sapiens
  misc_RNA (1)...(19): siRNA sense strand
gaccgacagaccauugaga

SEQ ID NO: 3143 - RNA, 19 nt, Homo sapiens
  misc_RNA (1)...(19): siRNA sense strand
caaacucaagugcacaaag

SEQ ID NO: 3144 - RNA, 19 nt, Homo sapiens
  misc_RNA (1)...(19): siRNA sense strand
agguggagcuggaauacuc

SEQ ID NO: 3145 - RNA, 19 nt, Homo sapiens
  misc_RNA (1)...(19): siRNA sense strand
gagagcugcauucgcuuca

SEQ ID NO: 3146 - RNA, 19 nt, Homo sapiens
  misc_RNA (1)...(19): siRNA sense strand
guagacaucuggacucagu

SEQ ID NO: 3147 - RNA, 19 nt, Homo sapiens
  misc_RNA (1)...(19): siRNA sense strand
gcagagaccaacagaggaa

SEQ ID NO: 3148 - RNA, 19 nt, Homo sapiens
  misc_RNA (1)...(19): siRNA sense strand
ugcagcaacuccagacuga

SEQ ID NO: 3149 - RNA, 19 nt, Homo sapiens
  misc_RNA (1)...(19): siRNA sense strand
cacucuacgugcccaauug

SEQ ID NO: 3150 - RNA, 19 nt, Homo sapiens
  misc_RNA (1)...(19): siRNA sense strand
gcccaauugugaccaucga

SEQ ID NO: 3151 - RNA, 19 nt, Homo sapiens
  misc_RNA (1)...(19): siRNA sense strand
ccguagacaucuggacuca

SEQ ID NO: 3152 - RNA, 19 nt, Homo sapiens
  misc_RNA (1)...(19): siRNA sense strand
guaaaggacuugacauauu

SEQ ID NO: 3153 - RNA, 19 nt, Homo sapiens
  misc_RNA (1)...(19): siRNA sense strand
ggagagugaugaacuuuaa

SEQ ID NO: 3154 - RNA, 19 nt, Homo sapiens
  misc_RNA (1)...(19): siRNA sense strand
gaagagcuauccucccuuu

SEQ ID NO: 3155 - RNA, 19 nt, Homo sapiens
  misc_RNA (1)...(19): siRNA sense strand
gaaacacucaccuaauuua

SEQ ID NO: 3156 - RNA, 19 nt, Homo sapiens
  misc_RNA (1)...(19): siRNA sense strand
gaacaacaccaauugcaaa

SEQ ID NO: 3157 - RNA, 19 nt, Homo sapiens
  misc_RNA (1)...(19): siRNA sense strand
gaagaaagcaccugugauc

SEQ ID NO: 3158 - RNA, 19 nt, Homo sapiens
  misc_RNA (1)...(19): siRNA sense strand
ggaagcagauuucuaagag

SEQ ID NO: 3159 - RNA, 19 nt, Homo sapiens
  misc_RNA (1)...(19): siRNA sense strand
caacgggucucuucacuca

SEQ ID NO: 3160 - RNA, 19 nt, Homo sapiens
  misc_RNA (1)...(19): siRNA sense strand
gaaggcagaugaaacucaa

SEQ ID NO: 3161 - RNA, 19 nt, Homo sapiens
  misc_RNA (1)...(19): siRNA sense strand
gaugauaacauucgugaaa

SEQ ID NO: 3162 - RNA, 19 nt, Homo sapiens
  misc_RNA (1)...(19): siRNA sense strand
agaagggacuuuaauagaa

SEQ ID NO: 3163 - RNA, 19 nt, Homo sapiens
  misc_RNA (1)...(19): siRNA sense strand
gaagggacuuuaauagaag

SEQ ID NO: 3164 - RNA, 19 nt, Homo sapiens
  misc_RNA (1)...(19): siRNA sense strand
gcacgaugguguauucaug

SEQ ID NO: 3165 - RNA, 19 nt, Homo sapiens
  misc_RNA (1)...(19): siRNA sense strand
ggucauugcugagguguuu

SEQ ID NO: 3166 - RNA, 19 nt, Homo sapiens
  misc_RNA (1)...(19): siRNA sense strand
gagcugacauggcuacuca

SEQ ID NO: 3167 - RNA, 19 nt, Homo sapiens
  misc_RNA (1)...(19): siRNA sense strand
gugcaucgcuaccaacaaa

SEQ ID NO: 3168 - RNA, 19 nt, Homo sapiens
  misc_RNA (1)...(19): siRNA sense strand
gagcagaggcugaugaaug

SEQ ID NO: 3169 - RNA, 19 nt, Homo sapiens
  misc_RNA (1)...(19): siRNA sense strand
ccaaagaggugaagaaagc

SEQ ID NO: 3170 - RNA, 19 nt, Homo sapiens
  misc_RNA (1)...(19): siRNA sense strand
agacgaaagugucaauuug

SEQ ID NO: 3171 - RNA, 19 nt, Homo sapiens
  misc_RNA (1)...(19): siRNA sense strand
ggaguuuccuuucaacaug

SEQ ID NO: 3172 - RNA, 19 nt, Homo sapiens
  misc_RNA (1)...(19): siRNA sense strand
gagaagggacuuuaauaga

SEQ ID NO: 3173 - RNA, 19 nt, Homo sapiens
  misc_RNA (1)...(19): siRNA sense strand
caagacuggccaucaauua

SEQ ID NO: 3174 - RNA, 19 nt, Homo sapiens
  misc_RNA (1)...(19): siRNA sense strand
gagcagcacuccucaaacu

SEQ ID NO: 3175 - RNA, 19 nt, Homo sapiens
  misc_RNA (1)...(19): siRNA sense strand
ugacauggcuacucaaugg

SEQ ID NO: 3176 - RNA, 19 nt, Homo sapiens
  misc_RNA (1)...(19): siRNA sense strand
cgacuucugcugagauuua

SEQ ID NO: 3177 - RNA, 19 nt, Homo sapiens
  misc_RNA (1)...(19): siRNA sense strand
guacugcaagcaacaaaua

SEQ ID NO: 3178 - RNA, 19 nt, Homo sapiens
  misc_RNA (1)...(19): siRNA sense strand
ccagaugccucccacaaga

SEQ ID NO: 3179 - RNA, 19 nt, Homo sapiens
  misc_RNA (1)...(19): siRNA sense strand
gcucuccgguguucacuuu

SEQ ID NO: 3180 - RNA, 19 nt, Homo sapiens
  misc_RNA (1)...(19): siRNA sense strand
aaauaaggcugccgacuuc

SEQ ID NO: 3181 - RNA, 19 nt, Homo sapiens
  misc_RNA (1)...(19): siRNA sense strand
cauugcagcuccuguguuu

SEQ ID NO: 3182 - RNA, 19 nt, Homo sapiens
  misc_RNA (1)...(19): siRNA sense strand
gagcagagaaguuccagaa

SEQ ID NO: 3183 - RNA, 19 nt, Homo sapiens
  misc_RNA (1)...(19): siRNA sense strand
agaguaaacuggaaucuca

SEQ ID NO: 3184 - RNA, 19 nt, Homo sapiens
  misc_RNA (1)...(19): siRNA sense strand
caagaagaauuagacgaaa

SEQ ID NO: 3185 - RNA, 19 nt, Homo sapiens
  misc_RNA (1)...(19): siRNA sense strand
gaguuucgcuuggaacgua

SEQ ID NO: 3186 - RNA, 19 nt, Homo sapiens
  misc_RNA (1)...(19): siRNA sense strand
gaccaaaccagcaggagua

SEQ ID NO: 3187 - RNA, 19 nt, Homo sapiens
  misc_RNA (1)...(19): siRNA sense strand
ccaauuacuugcagggauu

SEQ ID NO: 3188 - RNA, 19 nt, Homo sapiens
  misc_RNA (1)...(19): siRNA sense strand
acagaaggcucuccaguca

SEQ ID NO: 3189 - RNA, 19 nt, Homo sapiens
  misc_RNA (1)...(19): siRNA sense strand
gaagcagauuucuaagaga

SEQ ID NO: 3190 - RNA, 19 nt, Homo sapiens
  misc_RNA (1)...(19): siRNA sense strand
ccacaagaguaaacuggaa

SEQ ID NO: 3191 - RNA, 19 nt, Homo sapiens
  misc_RNA (1)...(19): siRNA sense strand
gcaagacgacagcauagaa

SEQ ID NO: 3192 - RNA, 19 nt, Homo sapiens
  misc_RNA (1)...(19): siRNA sense strand
ccaccaaccuggcagcuau

SEQ ID NO: 3193 - RNA, 19 nt, Homo sapiens
  misc_RNA (1)...(19): siRNA sense strand
ggacuuuaauagaagauuc

SEQ ID NO: 3194 - RNA, 19 nt, Homo sapiens
  misc_RNA (1)...(19): siRNA sense strand
ggaaaucugcacucacuga

SEQ ID NO: 3195 - RNA, 19 nt, Homo sapiens
  misc_RNA (1)...(19): siRNA sense strand
cagagaaguuccagaagga

SEQ ID NO: 3196 - RNA, 19 nt, Homo sapiens
  misc_RNA (1)...(19): siRNA sense strand
ccacaguauuguucugaaa

SEQ ID NO: 3197 - RNA, 19 nt, Homo sapiens
  misc_RNA (1)...(19): siRNA sense strand
ggaguguaguggagaguga

SEQ ID NO: 3198 - RNA, 19 nt, Homo sapiens
  misc_RNA (1)...(19): siRNA sense strand
guguauugcucccaucuuu

SEQ ID NO: 3199 - RNA, 19 nt, Homo sapiens
  misc_RNA (1)...(19): siRNA sense strand
aaacaaaguuaugcaggaa

SEQ ID NO: 3200 - RNA, 19 nt, Homo sapiens
  misc_RNA (1)...(19): siRNA sense strand
cugcugagauuuauauaga

SEQ ID NO: 3201 - RNA, 19 nt, Homo sapiens
  misc_RNA (1)...(19): siRNA sense strand
ccaagaagaauuagacgaa

SEQ ID NO: 3202 - RNA, 19 nt, Homo sapiens
  misc_RNA (1)...(19): siRNA sense strand
gacaugcucucugcacauu

SEQ ID NO: 3203 - RNA, 19 nt, Homo sapiens
  misc_RNA (1)...(19): siRNA sense strand
augaaacacucaccuaauu

SEQ ID NO: 3204 - RNA, 19 nt, Homo sapiens
  misc_RNA (1)...(19): siRNA sense strand
uaaauaaggcugccgacuu

SEQ ID NO: 3205 - RNA, 19 nt, Homo sapiens
  misc_RNA (1)...(19): siRNA sense strand
ucuaagagagagcuauuua

SEQ ID NO: 3206 - RNA, 19 nt, Homo sapiens
  misc_RNA (1)...(19): siRNA sense strand
uagagaagggacuuuaaua

SEQ ID NO: 3207 - RNA, 19 nt, Homo sapiens
  misc_RNA (1)...(19): siRNA sense strand
gcuccuguguuuacaaaga

SEQ ID NO: 3208 - RNA, 19 nt, Homo sapiens
  misc_RNA (1)...(19): siRNA sense strand
ggagggcuuuccauccaaa

SEQ ID NO: 3209 - RNA, 19 nt, Homo sapiens
  misc_RNA (1)...(19): siRNA sense strand
gaagaucccgagugcaaga

SEQ ID NO: 3210 - RNA, 19 nt, Homo sapiens
  misc_RNA (1)...(19): siRNA sense strand
aaagcacgaugguguauuc

SEQ ID NO: 3211 - RNA, 19 nt, Homo sapiens
  misc_RNA (1)...(19): siRNA sense strand
ccagagagaggaucaguau

SEQ ID NO: 3212 - RNA, 19 nt, Homo sapiens
  misc_RNA (1)...(19): siRNA sense strand
gcaagacuggccaucaauu

SEQ ID NO: 3213 - RNA, 19 nt, Homo sapiens
  misc_RNA (1)...(19): siRNA sense strand
caguaaaggacuugacaua

SEQ ID NO: 3214 - RNA, 19 nt, Homo sapiens
  misc_RNA (1)...(19): siRNA sense strand
acggaucucucaccaguaa

SEQ ID NO: 3215 - RNA, 19 nt, Homo sapiens
  misc_RNA (1)...(19): siRNA sense strand
acaagagacucaagcacuu

SEQ ID NO: 3216 - RNA, 19 nt, Homo sapiens
  misc_RNA (1)...(19): siRNA sense strand
guauagagaagggacuuua

SEQ ID NO: 3217 - RNA, 19 nt, Homo sapiens
  misc_RNA (1)...(19): siRNA sense strand
gcagaugaaacucaagcua

SEQ ID NO: 3218 - RNA, 19 nt, Homo sapiens
  misc_RNA (1)...(19): siRNA sense strand
ggagaaggcagaugaaacu

SEQ ID NO: 3219 - RNA, 19 nt, Homo sapiens
  misc_RNA (1)...(19): siRNA sense strand
acacucaccuaauuuaagu

SEQ ID NO: 3220 - RNA, 19 nt, Homo sapiens
  misc_RNA (1)...(19): siRNA sense strand
caagaugaccuuccagauc

SEQ ID NO: 3221 - RNA, 19 nt, Homo sapiens
  misc_RNA (1)...(19): siRNA sense strand
aaaccgggcagaauucuuu

SEQ ID NO: 3222 - RNA, 19 nt, Homo sapiens
  misc_RNA (1)...(19): siRNA sense strand
ggaacguacuccuguugau

SEQ ID NO: 3223 - RNA, 19 nt, Homo sapiens
  misc_RNA (1)...(19): siRNA sense strand
gcugaugaaugaaauagag

SEQ ID NO: 3224 - RNA, 19 nt, Homo sapiens
  misc_RNA (1)...(19): siRNA sense strand
agcagaggcugaugaauga

SEQ ID NO: 3225 - RNA, 19 nt, Homo sapiens
  misc_RNA (1)...(19): siRNA sense strand
ggaacaacaccaauugcaa

SEQ ID NO: 3226 - RNA, 19 nt, Homo sapiens
  misc_RNA (1)...(19): siRNA sense strand
gaauccagaagccaaauga

SEQ ID NO: 3227 - RNA, 19 nt, Homo sapiens
  misc_RNA (1)...(19): siRNA sense strand
caggaaaucugcacucacu

SEQ ID NO: 3228 - RNA, 19 nt, Homo sapiens
  misc_RNA (1)...(19): siRNA sense strand
gggauaugguagcucauga

SEQ ID NO: 3229 - RNA, 19 nt, Homo sapiens
  misc_RNA (1)...(19): siRNA sense strand
gcagcacuccucaaacuau

SEQ ID NO: 3230 - RNA, 19 nt, Homo sapiens
  misc_RNA (1)...(19): siRNA sense strand
gaguuuccuuucaacauga

SEQ ID NO: 3231 - RNA, 19 nt, Homo sapiens
  misc_RNA (1)...(19): siRNA sense strand
uacaacagcuucauaacca

SEQ ID NO: 3232 - RNA, 19 nt, Homo sapiens
  misc_RNA (1)...(19): siRNA sense strand
aggaagagaugaaucgaau

SEQ ID NO: 3233 - RNA, 19 nt, Homo sapiens
  misc_RNA (1)...(19): siRNA sense strand
gaugaaacacucaccuaau

SEQ ID NO: 3234 - RNA, 19 nt, Homo sapiens
  misc_RNA (1)...(19): siRNA sense strand
ggguaugccugccuucuca

SEQ ID NO: 3235 - RNA, 19 nt, Homo sapiens
  misc_RNA (1)...(19): siRNA sense strand
gaacguacuccuguugaug

SEQ ID NO: 3236 - RNA, 19 nt, Homo sapiens
  misc_RNA (1)...(19): siRNA sense strand
cuccuaagguugaguggua

SEQ ID NO: 3237 - RNA, 19 nt, Homo sapiens
  misc_RNA (1)...(19): siRNA sense strand
acaguuggauugcauagug

SEQ ID NO: 3238 - RNA, 19 nt, Homo sapiens
  misc_RNA (1)...(19): siRNA sense strand
agaaggaacucgaguacag

SEQ ID NO: 3239 - RNA, 19 nt, Homo sapiens
  misc_RNA (1)...(19): siRNA sense strand
ugaaacacucaccuaauuu

SEQ ID NO: 3240 - RNA, 19 nt, Homo sapiens
  misc_RNA (1)...(19): siRNA sense strand
agaugaaacucaagcuaga

SEQ ID NO: 3241 - RNA, 19 nt, Homo sapiens
  misc_RNA (1)...(19): siRNA sense strand
gcaagaaagagacaaagag

SEQ ID NO: 3242 - RNA, 19 nt, Homo sapiens
  misc_RNA (1)...(19): siRNA sense strand
cagcuguucuggccacuug

SEQ ID NO: 3243 - RNA, 19 nt, Homo sapiens
  misc_RNA (1)...(19): siRNA sense strand
caugcucucugcacauuga

SEQ ID NO: 3244 - RNA, 19 nt, Homo sapiens
  misc_RNA (1)...(19): siRNA sense strand
gaaauucaacaugaugaga

SEQ ID NO: 3245 - RNA, 19 nt, Homo sapiens
  misc_RNA (1)...(19): siRNA sense strand
guacuccuguugaugaauc

SEQ ID NO: 3246 - RNA, 19 nt, Homo sapiens
  misc_RNA (1)...(19): siRNA sense strand
caaaccagcaggaguacaa

SEQ ID NO: 3247 - RNA, 19 nt, Homo sapiens
  misc_RNA (1)...(19): siRNA sense strand
gauaacauucgugaaacua

SEQ ID NO: 3248 - RNA, 19 nt, Homo sapiens
  misc_RNA (1)...(19): siRNA sense strand
cagcuccuguguuuacaaa

SEQ ID NO: 3249 - RNA, 19 nt, Homo sapiens
  misc_RNA (1)...(19): siRNA sense strand
gaagccaaaugagguguca

SEQ ID NO: 3250 - RNA, 19 nt, Homo sapiens
  misc_RNA (1)...(19): siRNA sense strand
ccuaacuucugccaggaua

SEQ ID NO: 3251 - RNA, 19 nt, Homo sapiens
  misc_RNA (1)...(19): siRNA sense strand
gaaaugagcacugcaaaau

SEQ ID NO: 3252 - RNA, 19 nt, Homo sapiens
  misc_RNA (1)...(19): siRNA sense strand
ccaaggagcucccugaaau

SEQ ID NO: 3253 - RNA, 19 nt, Homo sapiens
  misc_RNA (1)...(19): siRNA sense strand
gagcaacuaucaccuaaug

SEQ ID NO: 3254 - RNA, 19 nt, Homo sapiens
  misc_RNA (1)...(19): siRNA sense strand
gaacuaugccgaucagauu

SEQ ID NO: 3255 - RNA, 19 nt, Homo sapiens
  misc_RNA (1)...(19): siRNA sense strand
guaagcagcuaucucugua

SEQ ID NO: 3256 - RNA, 19 nt, Homo sapiens
  misc_RNA (1)...(19): siRNA sense strand
gaacauccacuacaaguca

SEQ ID NO: 3257 - RNA, 19 nt, Homo sapiens
  misc_RNA (1)...(19): siRNA sense strand
gaggagaaauucauugagu

SEQ ID NO: 3258 - RNA, 19 nt, Homo sapiens
  misc_RNA (1)...(19): siRNA sense strand
ugaauguggugaagaauga

SEQ ID NO: 3259 - RNA, 19 nt, Homo sapiens
  misc_RNA (1)...(19): siRNA sense strand
ggagaaauucauugaguuu

SEQ ID NO: 3260 - RNA, 19 nt, Homo sapiens
  misc_RNA (1)...(19): siRNA sense strand
agaaagagcugcaaaucca

SEQ ID NO: 3261 - RNA, 19 nt, Homo sapiens
  misc_RNA (1)...(19): siRNA sense strand
ggacgacgcugggaaugga

SEQ ID NO: 3262 - RNA, 19 nt, Homo sapiens
  misc_RNA (1)...(19): siRNA sense strand
ggugaagaaugaccugauu

SEQ ID NO: 3263 - RNA, 19 nt, Homo sapiens
  misc_RNA (1)...(19): siRNA sense strand
gaagaaagagcugcaaauc

SEQ ID NO: 3264 - RNA, 19 nt, Homo sapiens
  misc_RNA (1)...(19): siRNA sense strand
ccaucaagcugaaggauuc

SEQ ID NO: 3265 - RNA, 19 nt, Homo sapiens
  misc_RNA (1)...(19): siRNA sense strand
ccaagaccaugcagauaga

SEQ ID NO: 3266 - RNA, 19 nt, Homo sapiens
  misc_RNA (1)...(19): siRNA sense strand
gcagagcgcagucacauca

SEQ ID NO: 3267 - RNA, 19 nt, Homo sapiens
  misc_RNA (1)...(19): siRNA sense strand
cgaguggucugauguucaa

SEQ ID NO: 3268 - RNA, 19 nt, Homo sapiens
  misc_RNA (1)...(19): siRNA sense strand
gcaagguggugaucaucga

SEQ ID NO: 3269 - RNA, 19 nt, Homo sapiens
  misc_RNA (1)...(19): siRNA sense strand
cagagcacgucuucacuga

SEQ ID NO: 3270 - RNA, 19 nt, Homo sapiens
  misc_RNA (1)...(19): siRNA sense strand
gcaacuaucaccuaaugga

SEQ ID NO: 3271 - RNA, 19 nt, Homo sapiens
  misc_RNA (1)...(19): siRNA sense strand
cagaacggcuggcucuaug

SEQ ID NO: 3272 - RNA, 19 nt, Homo sapiens
  misc_RNA (1)...(19): siRNA sense strand
gaacaaggugcacgucauc

SEQ ID NO: 3273 - RNA, 19 nt, Homo sapiens
  misc_RNA (1)...(19): siRNA sense strand
aagaugcucuggaacaaga

SEQ ID NO: 3274 - RNA, 19 nt, Homo sapiens
  misc_RNA (1)...(19): siRNA sense strand
guuugaagaugcucuggaa

SEQ ID NO: 3275 - RNA, 19 nt, Homo sapiens
  misc_RNA (1)...(19): siRNA sense strand
ccacagaggaggccacaga

SEQ ID NO: 3276 - RNA, 19 nt, Homo sapiens
  misc_RNA (1)...(19): siRNA sense strand
ugaagaugcucuggaacaa

SEQ ID NO: 3277 - RNA, 19 nt, Homo sapiens
  misc_RNA (1)...(19): siRNA sense strand
uacaggacguggacauuga

SEQ ID NO: 3278 - RNA, 19 nt, Homo sapiens
  misc_RNA (1)...(19): siRNA sense strand
gcugugcgguggacugaga

SEQ ID NO: 3279 - RNA, 19 nt, Homo sapiens
  misc_RNA (1)...(19): siRNA sense strand
gauguaagcagcuaucucu

SEQ ID NO: 3280 - RNA, 19 nt, Homo sapiens
  misc_RNA (1)...(19): siRNA sense strand
gagcgggagucggagauga

SEQ ID NO: 3281 - RNA, 19 nt, Homo sapiens
  misc_RNA (1)...(19): siRNA sense strand
gagaagaaagagcugcaaa

SEQ ID NO: 3282 - RNA, 19 nt, Homo sapiens
  misc_RNA (1)...(19): siRNA sense strand
agucggagaugaagaagga

SEQ ID NO: 3283 - RNA, 19 nt, Homo sapiens
  misc_RNA (1)...(19): siRNA sense strand
ccaccucccugaacguguu

SEQ ID NO: 3284 - RNA, 19 nt, Homo sapiens
  misc_RNA (1)...(19): siRNA sense strand
gcacuggcaagcuggguuu

SEQ ID NO: 3285 - RNA, 19 nt, Homo sapiens
  misc_RNA (1)...(19): siRNA sense strand
gcauggcuguuguguacga

SEQ ID NO: 3286 - RNA, 19 nt, Homo sapiens
  misc_RNA (1)...(19): siRNA sense strand
gcuggaagaggaacugaaa

SEQ ID NO: 3287 - RNA, 19 nt, Homo sapiens
  misc_RNA (1)...(19): siRNA sense strand
gggaaucugcuacuggaaa

SEQ ID NO: 3288 - RNA, 19 nt, Homo sapiens
  misc_RNA (1)...(19): siRNA sense strand
cuacaucgacuuccgcauu

SEQ ID NO: 3289 - RNA, 19 nt, Homo sapiens
  misc_RNA (1)...(19): siRNA sense strand
ucauggagcggaaccagua

SEQ ID NO: 3290 - RNA, 19 nt, Homo sapiens
  misc_RNA (1)...(19): siRNA sense strand
gcgaugccgugaaguucuu

SEQ ID NO: 3291 - RNA, 19 nt, Homo sapiens
  misc_RNA (1)...(19): siRNA sense strand
cugcauggcuguuguguac

SEQ ID NO: 3292 - RNA, 19 nt, Homo sapiens
  misc_RNA (1)...(19): siRNA sense strand
aagaagaagucgaccaucu

SEQ ID NO: 3293 - RNA, 19 nt, Homo sapiens
  misc_RNA (1)...(19): siRNA sense strand
ccgacucccuguaccauga

SEQ ID NO: 3294 - RNA, 19 nt, Homo sapiens
  misc_RNA (1)...(19): siRNA sense strand
caagaacuaugccgaucag

SEQ ID NO: 3295 - RNA, 19 nt, Homo sapiens
  misc_RNA (1)...(19): siRNA sense strand
ccuugaauguggugaagaa

SEQ ID NO: 3296 - RNA, 19 nt, Homo sapiens
  misc_RNA (1)...(19): siRNA sense strand
cagagaugauacagaccua

SEQ ID NO: 3297 - RNA, 19 nt, Homo sapiens
  misc_RNA (1)...(19): siRNA sense strand
gcaaagaaguggggaaucu

SEQ ID NO: 3298 - RNA, 19 nt, Homo sapiens
  misc_RNA (1)...(19): siRNA sense strand
cugagcaacuaucaccuaa

SEQ ID NO: 3299 - RNA, 19 nt, Homo sapiens
  misc_RNA (1)...(19): siRNA sense strand
gaacggcuggcucuaugug

SEQ ID NO: 3300 - RNA, 19 nt, Homo sapiens
  misc_RNA (1)...(19): siRNA sense strand
acgaggagguggucaagga

SEQ ID NO: 3301 - RNA, 19 nt, Homo sapiens
  misc_RNA (1)...(19): siRNA sense strand
gaagaggcggaggauguaa

SEQ ID NO: 3302 - RNA, 19 nt, Homo sapiens
  misc_RNA (1)...(19): siRNA sense strand
ggaaucugcuacuggaaaa

SEQ ID NO: 3303 - RNA, 19 nt, Homo sapiens
  misc_RNA (1)...(19): siRNA sense strand
gggagucggagaugaagaa

SEQ ID NO: 3304 - RNA, 19 nt, Homo sapiens
  misc_RNA (1)...(19): siRNA sense strand
ggcgugggcuccaagaaca

SEQ ID NO: 3305 - RNA, 19 nt, Homo sapiens
  misc_RNA (1)...(19): siRNA sense strand
gagaugcgcaacgucagua

SEQ ID NO: 3306 - RNA, 19 nt, Homo sapiens
  misc_RNA (1)...(19): siRNA sense strand
uacaucgacuuccgcauug

SEQ ID NO: 3307 - RNA, 19 nt, Homo sapiens
  misc_RNA (1)...(19): siRNA sense strand
gaggacacgcggaugaaga

SEQ ID NO: 3308 - RNA, 19 nt, Homo sapiens
  misc_RNA (1)...(19): siRNA sense strand
caacaccgacucccuguac

SEQ ID NO: 3309 - RNA, 19 nt, Homo sapiens
  misc_RNA (1)...(19): siRNA sense strand
ccagcaagguggugaucau

SEQ ID NO: 3310 - RNA, 19 nt, Homo sapiens
  misc_RNA (1)...(19): siRNA sense strand
acucacagcuucuggaaac

SEQ ID NO: 3311 - RNA, 19 nt, Homo sapiens
  misc_RNA (1)...(19): siRNA sense strand
gagaaauucauugaguuug

SEQ ID NO: 3312 - RNA, 19 nt, Homo sapiens
  misc_RNA (1)...(19): siRNA sense strand
aggagaaauucauugaguu

SEQ ID NO: 3313 - RNA, 19 nt, Homo sapiens
  misc_RNA (1)...(19): siRNA sense strand
agaagaagaaggccaagga

SEQ ID NO: 3314 - RNA, 19 nt, Homo sapiens
  misc_RNA (1)...(19): siRNA sense strand
aagaagaggcggaggaugu

SEQ ID NO: 3315 - RNA, 19 nt, Homo sapiens
  misc_RNA (1)...(19): siRNA sense strand
gccgugaacccaaagaaga

SEQ ID NO: 3316 - RNA, 19 nt, Homo sapiens
  misc_RNA (1)...(19): siRNA sense strand
gaugcgcaacgucaguaua

SEQ ID NO: 3317 - RNA, 19 nt, Homo sapiens
  misc_RNA (1)...(19): siRNA sense strand
gcaacggaguggucaucuc

SEQ ID NO: 3318 - RNA, 19 nt, Homo sapiens
  misc_RNA (1)...(19): siRNA sense strand
agugggaucugagcaacua

SEQ ID NO: 3319 - RNA, 19 nt, Homo sapiens
  misc_RNA (1)...(19): siRNA sense strand
acaaggagcggcugaugga

SEQ ID NO: 3320 - RNA, 19 nt, Homo sapiens
  misc_RNA (1)...(19): siRNA sense strand
ugaagaaggaguacaaugc

SEQ ID NO: 3321 - RNA, 19 nt, Homo sapiens
  misc_RNA (1)...(19): siRNA sense strand
gccagaagcugcggaacgu

SEQ ID NO: 3322 - RNA, 19 nt, Homo sapiens
  misc_RNA (1)...(19): siRNA sense strand
gccgugaaguucuuugucu

SEQ ID NO: 3323 - RNA, 19 nt, Homo sapiens
  misc_RNA (1)...(19): siRNA sense strand
gggcaucauccacguguau

SEQ ID NO: 3324 - RNA, 19 nt, Homo sapiens
  misc_RNA (1)...(19): siRNA sense strand
gcccaagaccaugcagaua

SEQ ID NO: 3325 - RNA, 19 nt, Homo sapiens
  misc_RNA (1)...(19): siRNA sense strand
gccaaggagcucccugaaa

SEQ ID NO: 3326 - RNA, 19 nt, Homo sapiens
  misc_RNA (1)...(19): siRNA sense strand
gagaaggaccccaccauga

SEQ ID NO: 3327 - RNA, 19 nt, Homo sapiens
  misc_RNA (1)...(19): siRNA sense strand
gcugaaggccaagaacuau

SEQ ID NO: 3328 - RNA, 19 nt, Homo sapiens
  misc_RNA (1)...(19): siRNA sense strand
gcagugacgaguggucuga

SEQ ID NO: 3329 - RNA, 19 nt, Homo sapiens
  misc_RNA (1)...(19): siRNA sense strand
ccacaggcaccaaguccaa

SEQ ID NO: 3330 - RNA, 19 nt, Homo sapiens
  misc_RNA (1)...(19): siRNA sense strand
gacgaguggucugauguuc

SEQ ID NO: 3331 - RNA, 19 nt, Homo sapiens
  misc_RNA (1)...(19): siRNA sense strand
gauggccagugggaucuga

SEQ ID NO: 3332 - RNA, 19 nt, Homo sapiens
  misc_RNA (1)...(19): siRNA sense strand
caaggagcucccugaaaug

SEQ ID NO: 3333 - RNA, 19 nt, Homo sapiens
  misc_RNA (1)...(19): siRNA sense strand
cgacagccgcaacauggaa

SEQ ID NO: 3334 - RNA, 19 nt, Homo sapiens
  misc_RNA (1)...(19): siRNA sense strand
ggacaugagccaggugaag

SEQ ID NO: 3335 - RNA, 19 nt, Homo sapiens
  misc_RNA (1)...(19): siRNA sense strand
gaacgugcuggagaaccua

SEQ ID NO: 3336 - RNA, 19 nt, Homo sapiens
  misc_RNA (1)...(19): siRNA sense strand
ggcaggcggaggagaaauu

SEQ ID NO: 3337 - RNA, 19 nt, Homo sapiens
  misc_RNA (1)...(19): siRNA sense strand
cggugaacauccacuacaa

SEQ ID NO: 3338 - RNA, 19 nt, Homo sapiens
  misc_RNA (1)...(19): siRNA sense strand
guacaaggagcggcugaug

SEQ ID NO: 3339 - RNA, 19 nt, Homo sapiens
  misc_RNA (1)...(19): siRNA sense strand
gaaguccgaggccaucauc

SEQ ID NO: 3340 - RNA, 19 nt, Homo sapiens
  misc_RNA (1)...(19): siRNA sense strand
gcuaagcaggccaaaguca

SEQ ID NO: 3341 - RNA, 19 nt, Homo sapiens
  misc_RNA (1)...(19): siRNA sense strand
cggaggagaaauucauuga

SEQ ID NO: 3342 - RNA, 19 nt, Homo sapiens
  misc_RNA (1)...(19): siRNA sense strand
ucaugccgcugguggugaa

SEQ ID NO: 3343 - RNA, 19 nt, Homo sapiens
  misc_RNA (1)...(19): siRNA sense strand
gcgguggacugagaugauc

SEQ ID NO: 3344 - RNA, 19 nt, Homo sapiens
  misc_RNA (1)...(19): siRNA sense strand
aagcagcuaucucuguaca

SEQ ID NO: 3345 - RNA, 19 nt, Homo sapiens
  misc_RNA (1)...(19): siRNA sense strand
agaagaggcggaggaugua

SEQ ID NO: 3346 - RNA, 19 nt, Homo sapiens
  misc_RNA (1)...(19): siRNA sense strand
caaagaagaggcggaggau

SEQ ID NO: 3347 - RNA, 19 nt, Homo sapiens
  misc_RNA (1)...(19): siRNA sense strand
guacagaaucggacaaaau

SEQ ID NO: 3348 - RNA, 19 nt, Homo sapiens
  misc_RNA (1)...(19): siRNA sense strand
ggagggcuacaucgacuuc

SEQ ID NO: 3349 - RNA, 19 nt, Homo sapiens
  misc_RNA (1)...(19): siRNA sense strand
agaacaaggugcacgucau

SEQ ID NO: 3350 - RNA, 19 nt, Homo sapiens
  misc_RNA (1)...(19): siRNA sense strand
gagccuggugcaugucaaa

SEQ ID NO: 3351 - RNA, 19 nt, Homo sapiens
  misc_RNA (1)...(19): siRNA sense strand
caggaggacacgcggauga

SEQ ID NO: 3352 - RNA, 19 nt, Homo sapiens
  misc_RNA (1)...(19): siRNA sense strand
ccaaggagcucccugaaau

SEQ ID NO: 3353 - RNA, 19 nt, Homo sapiens
  misc_RNA (1)...(19): siRNA sense strand
gagcaacuaucaccuaaug

SEQ ID NO: 3354 - RNA, 19 nt, Homo sapiens
  misc_RNA (1)...(19): siRNA sense strand
gaacuaugccgaucagauu

SEQ ID NO: 3355 - RNA, 19 nt, Homo sapiens
  misc_RNA (1)...(19): siRNA sense strand
guaagcagcuaucucugua

SEQ ID NO: 3356 - RNA, 19 nt, Homo sapiens
  misc_RNA (1)...(19): siRNA sense strand
gaacauccacuacaaguca

SEQ ID NO: 3357 - RNA, 19 nt, Homo sapiens
  misc_RNA (1)...(19): siRNA sense strand
gaggagaaauucauugagu

SEQ ID NO: 3358 - RNA, 19 nt, Homo sapiens
  misc_RNA (1)...(19): siRNA sense strand
ugaauguggugaagaauga

SEQ ID NO: 3359 - RNA, 19 nt, Homo sapiens
  misc_RNA (1)...(19): siRNA sense strand
ggagaaauucauugaguuu

SEQ ID NO: 3360 - RNA, 19 nt, Homo sapiens
  misc_RNA (1)...(19): siRNA sense strand
agaaagagcugcaaaucca

SEQ ID NO: 3361 - RNA, 19 nt, Homo sapiens
  misc_RNA (1)...(19): siRNA sense strand
ggacgacgcugggaaugga

SEQ ID NO: 3362 - RNA, 19 nt, Homo sapiens
  misc_RNA (1)...(19): siRNA sense strand
ggugaagaaugaccugauu

SEQ ID NO: 3363 - RNA, 19 nt, Homo sapiens
  misc_RNA (1)...(19): siRNA sense strand
gaagaaagagcugcaaauc

SEQ ID NO: 3364 - RNA, 19 nt, Homo sapiens
  misc_RNA (1)...(19): siRNA sense strand
ccaucaagcugaaggauuc

SEQ ID NO: 3365 - RNA, 19 nt, Homo sapiens
  misc_RNA (1)...(19): siRNA sense strand
ccaagaccaugcagauaga

SEQ ID NO: 3366 - RNA, 19 nt, Homo sapiens
  misc_RNA (1)...(19): siRNA sense strand
gcagagcgcagucacauca

SEQ ID NO: 3367 - RNA, 19 nt, Homo sapiens
  misc_RNA (1)...(19): siRNA sense strand
cgaguggucugauguucaa

SEQ ID NO: 3368 - RNA, 19 nt, Homo sapiens
  misc_RNA (1)...(19): siRNA sense strand
gcaagguggugaucaucga

SEQ ID NO: 3369 - RNA, 19 nt, Homo sapiens
  misc_RNA (1)...(19): siRNA sense strand
cagagcacgucuucacuga

SEQ ID NO: 3370 - RNA, 19 nt, Homo sapiens
  misc_RNA (1)...(19): siRNA sense strand
gcaacuaucaccuaaugga

SEQ ID NO: 3371 - RNA, 19 nt, Homo sapiens
  misc_RNA (1)...(19): siRNA sense strand
cagaacggcuggcucuaug

SEQ ID NO: 3372 - RNA, 19 nt, Homo sapiens
  misc_RNA (1)...(19): siRNA sense strand
gaacaaggugcacgucauc

SEQ ID NO: 3373 - RNA, 19 nt, Homo sapiens
  misc_RNA (1)...(19): siRNA sense strand
aagaugcucuggaacaaga

SEQ ID NO: 3374 - RNA, 19 nt, Homo sapiens
  misc_RNA (1)...(19): siRNA sense strand
guuugaagaugcucuggaa

SEQ ID NO: 3375 - RNA, 19 nt, Homo sapiens
  misc_RNA (1)...(19): siRNA sense strand
ccacagaggaggccacaga

SEQ ID NO: 3376 - RNA, 19 nt, Homo sapiens
  misc_RNA (1)...(19): siRNA sense strand
ugaagaugcucuggaacaa

SEQ ID NO: 3377 - RNA, 19 nt, Homo sapiens
  misc_RNA (1)...(19): siRNA sense strand
uacaggacguggacauuga

SEQ ID NO: 3378 - RNA, 19 nt, Homo sapiens
  misc_RNA (1)...(19): siRNA sense strand
gcugugcgguggacugaga

SEQ ID NO: 3379 - RNA, 19 nt, Homo sapiens
  misc_RNA (1)...(19): siRNA sense strand
gauguaagcagcuaucucu

SEQ ID NO: 3380 - RNA, 19 nt, Homo sapiens
  misc_RNA (1)...(19): siRNA sense strand
gagcgggagucggagauga

SEQ ID NO: 3381 - RNA, 19 nt, Homo sapiens
  misc_RNA (1)...(19): siRNA sense strand
gagaagaaagagcugcaaa

SEQ ID NO: 3382 - RNA, 19 nt, Homo sapiens
  misc_RNA (1)...(19): siRNA sense strand
agucggagaugaagaagga

SEQ ID NO: 3383 - RNA, 19 nt, Homo sapiens
  misc_RNA (1)...(19): siRNA sense strand
ccaccucccugaacguguu

SEQ ID NO: 3384 - RNA, 19 nt, Homo sapiens
  misc_RNA (1)...(19): siRNA sense strand
gcacuggcaagcuggguuu

SEQ ID NO: 3385 - RNA, 19 nt, Homo sapiens
  misc_RNA (1)...(19): siRNA sense strand
gcauggcuguuguguacga

SEQ ID NO: 3386 - RNA, 19 nt, Homo sapiens
  misc_RNA (1)...(19): siRNA sense strand
gcuggaagaggaacugaaa

SEQ ID NO: 3387 - RNA, 19 nt, Homo sapiens
  misc_RNA (1)...(19): siRNA sense strand
gggaaucugcuacuggaaa

SEQ ID NO: 3388 - RNA, 19 nt, Homo sapiens
  misc_RNA (1)...(19): siRNA sense strand
cuacaucgacuuccgcauu

SEQ ID NO: 3389 - RNA, 19 nt, Homo sapiens
  misc_RNA (1)...(19): siRNA sense strand
ucauggagcggaaccagua

SEQ ID NO: 3390 - RNA, 19 nt, Homo sapiens
  misc_RNA (1)...(19): siRNA sense strand
gcgaugccgugaaguucuu

SEQ ID NO: 3391 - RNA, 19 nt, Homo sapiens
  misc_RNA (1)...(19): siRNA sense strand
cugcauggcuguuguguac

SEQ ID NO: 3392 - RNA, 19 nt, Homo sapiens
  misc_RNA (1)...(19): siRNA sense strand
aagaagaagucgaccaucu

SEQ ID NO: 3393 - RNA, 19 nt, Homo sapiens
  misc_RNA (1)...(19): siRNA sense strand
ccgacucccuguaccauga

SEQ ID NO: 3394 - RNA, 19 nt, Homo sapiens
  misc_RNA (1)...(19): siRNA sense strand
caagaacuaugccgaucag

SEQ ID NO: 3395 - RNA, 19 nt, Homo sapiens
  misc_RNA (1)...(19): siRNA sense strand
ccuugaauguggugaagaa

SEQ ID NO: 3396 - RNA, 19 nt, Homo sapiens
  misc_RNA (1)...(19): siRNA sense strand
cagagaugauacagaccua

SEQ ID NO: 3397 - RNA, 19 nt, Homo sapiens
  misc_RNA (1)...(19): siRNA sense strand
gcaaagaaguggggaaucu

SEQ ID NO: 3398 - RNA, 19 nt, Homo sapiens
  misc_RNA (1)...(19): siRNA sense strand
cugagcaacuaucaccuaa

SEQ ID NO: 3399 - RNA, 19 nt, Homo sapiens
  misc_RNA (1)...(19): siRNA sense strand
gaacggcuggcucuaugug

SEQ ID NO: 3400 - RNA, 19 nt, Homo sapiens
  misc_RNA (1)...(19): siRNA sense strand
acgaggagguggucaagga

SEQ ID NO: 3401 - RNA, 19 nt, Homo sapiens
  misc_RNA (1)...(19): siRNA sense strand
gaagaggcggaggauguaa

SEQ ID NO: 3402 - RNA, 19 nt, Homo sapiens
  misc_RNA (1)...(19): siRNA sense strand
ggaaucugcuacuggaaaa

SEQ ID NO: 3403 - RNA, 19 nt, Homo sapiens
  misc_RNA (1)...(19): siRNA sense strand
gggagucggagaugaagaa

SEQ ID NO: 3404 - RNA, 19 nt, Homo sapiens
  misc_RNA (1)...(19): siRNA sense strand
ggcgugggcuccaagaaca

SEQ ID NO: 3405 - RNA, 19 nt, Homo sapiens
  misc_RNA (1)...(19): siRNA sense strand
gagaugcgcaacgucagua

SEQ ID NO: 3406 - RNA, 19 nt, Homo sapiens
  misc_RNA (1)...(19): siRNA sense strand
uacaucgacuuccgcauug

SEQ ID NO: 3407 - RNA, 19 nt, Homo sapiens
  misc_RNA (1)...(19): siRNA sense strand
gaggacacgcggaugaaga

SEQ ID NO: 3408 - RNA, 19 nt, Homo sapiens
  misc_RNA (1)...(19): siRNA sense strand
caacaccgacucccuguac

SEQ ID NO: 3409 - RNA, 19 nt, Homo sapiens
  misc_RNA (1)...(19): siRNA sense strand
ccagcaagguggugaucau

SEQ ID NO: 3410 - RNA, 19 nt, Homo sapiens
  misc_RNA (1)...(19): siRNA sense strand
acucacagcuucuggaaac

SEQ ID NO: 3411 - RNA, 19 nt, Homo sapiens
  misc_RNA (1)...(19): siRNA sense strand
gagaaauucauugaguuug

SEQ ID NO: 3412 - RNA, 19 nt, Homo sapiens
  misc_RNA (1)...(19): siRNA sense strand
aggagaaauucauugaguu

SEQ ID NO: 3413 - RNA, 19 nt, Homo sapiens
  misc_RNA (1)...(19): siRNA sense strand
agaagaagaaggccaagga

SEQ ID NO: 3414 - RNA, 19 nt, Homo sapiens
  misc_RNA (1)...(19): siRNA sense strand
aagaagaggcggaggaugu

SEQ ID NO: 3415 - RNA, 19 nt, Homo sapiens
  misc_RNA (1)...(19): siRNA sense strand
gccgugaacccaaagaaga

SEQ ID NO: 3416 - RNA, 19 nt, Homo sapiens
  misc_RNA (1)...(19): siRNA sense strand
gaugcgcaacgucaguaua

SEQ ID NO: 3417 - RNA, 19 nt, Homo sapiens
  misc_RNA (1)...(19): siRNA sense strand
gcaacggaguggucaucuc

SEQ ID NO: 3418 - RNA, 19 nt, Homo sapiens
  misc_RNA (1)...(19): siRNA sense strand
agugggaucugagcaacua

SEQ ID NO: 3419 - RNA, 19 nt, Homo sapiens
  misc_RNA (1)...(19): siRNA sense strand
acaaggagcggcugaugga

SEQ ID NO: 3420 - RNA, 19 nt, Homo sapiens
  misc_RNA (1)...(19): siRNA sense strand
ugaagaaggaguacaaugc

SEQ ID NO: 3421 - RNA, 19 nt, Homo sapiens
  misc_RNA (1)...(19): siRNA sense strand
gccagaagcugcggaacgu

SEQ ID NO: 3422 - RNA, 19 nt, Homo sapiens
  misc_RNA (1)...(19): siRNA sense strand
gccgugaaguucuuugucu

SEQ ID NO: 3423 - RNA, 19 nt, Homo sapiens
  misc_RNA (1)...(19): siRNA sense strand
gggcaucauccacguguau

SEQ ID NO: 3424 - RNA, 19 nt, Homo sapiens
  misc_RNA (1)...(19): siRNA sense strand
gcccaagaccaugcagaua

SEQ ID NO: 3425 - RNA, 19 nt, Homo sapiens
  misc_RNA (1)...(19): siRNA sense strand
gccaaggagcucccugaaa

SEQ ID NO: 3426 - RNA, 19 nt, Homo sapiens
  misc_RNA (1)...(19): siRNA sense strand
gagaaggaccccaccauga

SEQ ID NO: 3427 - RNA, 19 nt, Homo sapiens
  misc_RNA (1)...(19): siRNA sense strand
gcugaaggccaagaacuau

SEQ ID NO: 3428 - RNA, 19 nt, Homo sapiens
  misc_RNA (1)...(19): siRNA sense strand
gcagugacgaguggucuga

SEQ ID NO: 3429 - RNA, 19 nt, Homo sapiens
  misc_RNA (1)...(19): siRNA sense strand
ccacaggcaccaaguccaa

SEQ ID NO: 3430 - RNA, 19 nt, Homo sapiens
  misc_RNA (1)...(19): siRNA sense strand
gacgaguggucugauguuc

SEQ ID NO: 3431 - RNA, 19 nt, Homo sapiens
  misc_RNA (1)...(19): siRNA sense strand
gauggccagugggaucuga

SEQ ID NO: 3432 - RNA, 19 nt, Homo sapiens
  misc_RNA (1)...(19): siRNA sense strand
caaggagcucccugaaaug

SEQ ID NO: 3433 - RNA, 19 nt, Homo sapiens
  misc_RNA (1)...(19): siRNA sense strand
cgacagccgcaacauggaa

SEQ ID NO: 3434 - RNA, 19 nt, Homo sapiens
  misc_RNA (1)...(19): siRNA sense strand
ggacaugagccaggugaag

SEQ ID NO: 3435 - RNA, 19 nt, Homo sapiens
  misc_RNA (1)...(19): siRNA sense strand
gaacgugcuggagaaccua

SEQ ID NO: 3436 - RNA, 19 nt, Homo sapiens
  misc_RNA (1)...(19): siRNA sense strand
ggcaggcggaggagaaauu

SEQ ID NO: 3437 - RNA, 19 nt, Homo sapiens
  misc_RNA (1)...(19): siRNA sense strand
cggugaacauccacuacaa

SEQ ID NO: 3438 - RNA, 19 nt, Homo sapiens
  misc_RNA (1)...(19): siRNA sense strand
guacaaggagcggcugaug

SEQ ID NO: 3439 - RNA, 19 nt, Homo sapiens
  misc_RNA (1)...(19): siRNA sense strand
gaaguccgaggccaucauc

SEQ ID NO: 3440 - RNA, 19 nt, Homo sapiens
  misc_RNA (1)...(19): siRNA sense strand
gcuaagcaggccaaaguca

SEQ ID NO: 3441 - RNA, 19 nt, Homo sapiens
  misc_RNA (1)...(19): siRNA sense strand
cggaggagaaauucauuga

SEQ ID NO: 3442 - RNA, 19 nt, Homo sapiens
  misc_RNA (1)...(19): siRNA sense strand
ucaugccgcugguggugaa

SEQ ID NO: 3443 - RNA, 19 nt, Homo sapiens
  misc_RNA (1)...(19): siRNA sense strand
gcgguggacugagaugauc

SEQ ID NO: 3444 - RNA, 19 nt, Homo sapiens
  misc_RNA (1)...(19): siRNA sense strand
aagcagcuaucucuguaca

SEQ ID NO: 3445 - RNA, 19 nt, Homo sapiens
  misc_RNA (1)...(19): siRNA sense strand
agaagaggcggaggaugua

SEQ ID NO: 3446 - RNA, 19 nt, Homo sapiens
  misc_RNA (1)...(19): siRNA sense strand
caaagaagaggcggaggau

SEQ ID NO: 3447 - RNA, 19 nt, Homo sapiens
  misc_RNA (1)...(19): siRNA sense strand
guacagaaucggacaaaau

SEQ ID NO: 3448 - RNA, 19 nt, Homo sapiens
  misc_RNA (1)...(19): siRNA sense strand
ggagggcuacaucgacuuc

SEQ ID NO: 3449 - RNA, 19 nt, Homo sapiens
  misc_RNA (1)...(19): siRNA sense strand
agaacaaggugcacgucau

SEQ ID NO: 3450 - RNA, 19 nt, Homo sapiens
  misc_RNA (1)...(19): siRNA sense strand
gagccuggugcaugucaaa

SEQ ID NO: 3451 - RNA, 19 nt, Homo sapiens
  misc_RNA (1)...(19): siRNA sense strand
caggaggacacgcggauga

SEQ ID NO: 3452 - RNA, 19 nt, Homo sapiens
  misc_RNA (1)...(19): siRNA sense strand
gaagaagcgcuuugaggaa

SEQ ID NO: 3453 - RNA, 19 nt, Homo sapiens
  misc_RNA (1)...(19): siRNA sense strand
gcaauaaguccauggagau

SEQ ID NO: 3454 - RNA, 19 nt, Homo sapiens
  misc_RNA (1)...(19): siRNA sense strand
ugaagaauguggacaaggu

SEQ ID NO: 3455 - RNA, 19 nt, Homo sapiens
  misc_RNA (1)...(19): siRNA sense strand
ggcgguaccugcagaugaa

SEQ ID NO: 3456 - RNA, 19 nt, Homo sapiens
  misc_RNA (1)...(19): siRNA sense strand
ccauggagaucgagguguu

SEQ ID NO: 3457 - RNA, 19 nt, Homo sapiens
  misc_RNA (1)...(19): siRNA sense strand
ccagugccuucuucaccua

SEQ ID NO: 3458 - RNA, 19 nt, Homo sapiens
  misc_RNA (1)...(19): siRNA sense strand
gcgcggagaucaccuacac

SEQ ID NO: 3459 - RNA, 19 nt, Homo sapiens
  misc_RNA (1)...(19): siRNA sense strand
gcaugaccuucacgagcaa

SEQ ID NO: 3460 - RNA, 19 nt, Homo sapiens
  misc_RNA (1)...(19): siRNA sense strand
gggcgguaccugcagauga

SEQ ID NO: 3461 - RNA, 19 nt, Homo sapiens
  misc_RNA (1)...(19): siRNA sense strand
ucggugagguggcgcaugu

SEQ ID NO: 3462 - RNA, 19 nt, Homo sapiens
  misc_RNA (1)...(19): siRNA sense strand
cccugucgcugaagaaugu

SEQ ID NO: 3463 - RNA, 19 nt, Homo sapiens
  misc_RNA (1)...(19): siRNA sense strand
gcugaagaauguggacaag

SEQ ID NO: 3464 - RNA, 19 nt, Homo sapiens
  misc_RNA (1)...(19): siRNA sense strand
agaccgaggacgagaagaa

SEQ ID NO: 3465 - RNA, 19 nt, Homo sapiens
  misc_RNA (1)...(19): siRNA sense strand
gaggcaggcgccaucauca

SEQ ID NO: 3466 - RNA, 19 nt, Homo sapiens
  misc_RNA (1)...(19): siRNA sense strand
acccagagccgaacacugu

SEQ ID NO: 3467 - RNA, 19 nt, Homo sapiens
  misc_RNA (1)...(19): siRNA sense strand
ggugccuccuguuguguau

SEQ ID NO: 3468 - RNA, 19 nt, Homo sapiens
  misc_RNA (1)...(19): siRNA sense strand
ggacgagaagaagcgcuuu

SEQ ID NO: 3469 - RNA, 19 nt, Homo sapiens
  misc_RNA (1)...(19): siRNA sense strand
gguaugaagcccagaagcu

SEQ ID NO: 3470 - RNA, 19 nt, Homo sapiens
  misc_RNA (1)...(19): siRNA sense strand
auaaguccauggagaucga

SEQ ID NO: 3471 - RNA, 19 nt, Homo sapiens
  misc_RNA (1)...(19): siRNA sense strand
acggaggugugaccaugaa

SEQ ID NO: 3472 - RNA, 19 nt, Homo sapiens
  misc_RNA (1)...(19): siRNA sense strand
gcgcaccgacuuccugucu

SEQ ID NO: 3473 - RNA, 19 nt, Homo sapiens
  misc_RNA (1)...(19): siRNA sense strand
gacgagaagaagcgcuuug

SEQ ID NO: 3474 - RNA, 19 nt, Homo sapiens
  misc_RNA (1)...(19): siRNA sense strand
ugaagaauguggacaaggu

SEQ ID NO: 3475 - RNA, 19 nt, Homo sapiens
  misc_RNA (1)...(19): siRNA sense strand
gcgcggagaucaccuacac

SEQ ID NO: 3476 - RNA, 19 nt, Homo sapiens
  misc_RNA (1)...(19): siRNA sense strand
ucggugagguggcgcaugu

SEQ ID NO: 3477 - RNA, 19 nt, Homo sapiens
  misc_RNA (1)...(19): siRNA sense strand
cccugucgcugaagaaugu

SEQ ID NO: 3478 - RNA, 19 nt, Homo sapiens
  misc_RNA (1)...(19): siRNA sense strand
gcugaagaauguggacaag

SEQ ID NO: 3479 - RNA, 19 nt, Homo sapiens
  misc_RNA (1)...(19): siRNA sense strand
gaggcaggcgccaucauca

SEQ ID NO: 3480 - RNA, 19 nt, Homo sapiens
  misc_RNA (1)...(19): siRNA sense strand
acccagagccgaacacugu

SEQ ID NO: 3481 - RNA, 19 nt, Homo sapiens
  misc_RNA (1)...(19): siRNA sense strand
ggugccuccuguuguguau

SEQ ID NO: 3482 - RNA, 19 nt, Homo sapiens
  misc_RNA (1)...(19): siRNA sense strand
gguaugaagcccagaagcu

SEQ ID NO: 3483 - RNA, 19 nt, Homo sapiens
  misc_RNA (1)...(19): siRNA sense strand
acggaggugugaccaugaa

SEQ ID NO: 3484 - RNA, 19 nt, Homo sapiens
  misc_RNA (1)...(19): siRNA sense strand
gcgcaccgacuuccugucu

SEQ ID NO: 3485 - RNA, 19 nt, Homo sapiens
  misc_RNA (1)...(19): siRNA sense strand
ugaagaauguggacaaggu

SEQ ID NO: 3486 - RNA, 19 nt, Homo sapiens
  misc_RNA (1)...(19): siRNA sense strand
gcgcggagaucaccuacac

SEQ ID NO: 3487 - RNA, 19 nt, Homo sapiens
  misc_RNA (1)...(19): siRNA sense strand
gcaugaccuucacgagcaa

SEQ ID NO: 3488 - RNA, 19 nt, Homo sapiens
  misc_RNA (1)...(19): siRNA sense strand
ucggugagguggcgcaugu

SEQ ID NO: 3489 - RNA, 19 nt, Homo sapiens
  misc_RNA (1)...(19): siRNA sense strand
cccugucgcugaagaaugu

SEQ ID NO: 3490 - RNA, 19 nt, Homo sapiens
  misc_RNA (1)...(19): siRNA sense strand
gcugaagaauguggacaag

SEQ ID NO: 3491 - RNA, 19 nt, Homo sapiens
  misc_RNA (1)...(19): siRNA sense strand
gaggcaggcgccaucauca

SEQ ID NO: 3492 - RNA, 19 nt, Homo sapiens
  misc_RNA (1)...(19): siRNA sense strand
acccagagccgaacacugu

SEQ ID NO: 3493 - RNA, 19 nt, Homo sapiens
  misc_RNA (1)...(19): siRNA sense strand
ggugccuccuguuguguau

SEQ ID NO: 3494 - RNA, 19 nt, Homo sapiens
  misc_RNA (1)...(19): siRNA sense strand
gguaugaagcccagaagcu

SEQ ID NO: 3495 - RNA, 19 nt, Homo sapiens
  misc_RNA (1)...(19): siRNA sense strand
acggaggugugaccaugaa

SEQ ID NO: 3496 - RNA, 19 nt, Homo sapiens
  misc_RNA (1)...(19): siRNA sense strand
gcgcaccgacuuccugucu

SEQ ID NO: 3497 - RNA, 19 nt, Homo sapiens
  misc_RNA (1)...(19): siRNA sense strand
gaagaagcgcuuugaggaa

SEQ ID NO: 3498 - RNA, 19 nt, Homo sapiens
  misc_RNA (1)...(19): siRNA sense strand
gcaauaaguccauggagau

SEQ ID NO: 3499 - RNA, 19 nt, Homo sapiens
  misc_RNA (1)...(19): siRNA sense strand
ugaagaauguggacaaggu

SEQ ID NO: 3500 - RNA, 19 nt, Homo sapiens
  misc_RNA (1)...(19): siRNA sense strand
ggcgguaccugcagaugaa

SEQ ID NO: 3501 - RNA, 19 nt, Homo sapiens
  misc_RNA (1)...(19): siRNA sense strand
ccauggagaucgagguguu

SEQ ID NO: 3502 - RNA, 19 nt, Homo sapiens
  misc_RNA (1)...(19): siRNA sense strand
ccagugccuucuucaccua

SEQ ID NO: 3503 - RNA, 19 nt, Homo sapiens
  misc_RNA (1)...(19): siRNA sense strand
gcgcggagaucaccuacac

SEQ ID NO: 3504 - RNA, 19 nt, Homo sapiens
  misc_RNA (1)...(19): siRNA sense strand
gcaugaccuucacgagcaa

SEQ ID NO: 3505 - RNA, 19 nt, Homo sapiens
  misc_RNA (1)...(19): siRNA sense strand
gggcgguaccugcagauga

SEQ ID NO: 3506 - RNA, 19 nt, Homo sapiens
  misc_RNA (1)...(19): siRNA sense strand
ucggugagguggcgcaugu

SEQ ID NO: 3507 - RNA, 19 nt, Homo sapiens
  misc_RNA (1)...(19): siRNA sense strand
cccugucgcugaagaaugu

SEQ ID NO: 3508 - RNA, 19 nt, Homo sapiens
  misc_RNA (1)...(19): siRNA sense strand
gcugaagaauguggacaag

SEQ ID NO: 3509 - RNA, 19 nt, Homo sapiens
  misc_RNA (1)...(19): siRNA sense strand
agaccgaggacgagaagaa

SEQ ID NO: 3510 - RNA, 19 nt, Homo sapiens
  misc_RNA (1)...(19): siRNA sense strand
gaggcaggcgccaucauca

SEQ ID NO: 3511 - RNA, 19 nt, Homo sapiens
  misc_RNA (1)...(19): siRNA sense strand
acccagagccgaacacugu

SEQ ID NO: 3512 - RNA, 19 nt, Homo sapiens
  misc_RNA (1)...(19): siRNA sense strand
ggugccuccuguuguguau

SEQ ID NO: 3513 - RNA, 19 nt, Homo sapiens
  misc_RNA (1)...(19): siRNA sense strand
ggacgagaagaagcgcuuu

SEQ ID NO: 3514 - RNA, 19 nt, Homo sapiens
  misc_RNA (1)...(19): siRNA sense strand
gguaugaagcccagaagcu

SEQ ID NO: 3515 - RNA, 19 nt, Homo sapiens
  misc_RNA (1)...(19): siRNA sense strand
auaaguccauggagaucga

SEQ ID NO: 3516 - RNA, 19 nt, Homo sapiens
  misc_RNA (1)...(19): siRNA sense strand
acggaggugugaccaugaa

SEQ ID NO: 3517 - RNA, 19 nt, Homo sapiens
  misc_RNA (1)...(19): siRNA sense strand
gcgcaccgacuuccugucu

SEQ ID NO: 3518 - RNA, 19 nt, Homo sapiens
  misc_RNA (1)...(19): siRNA sense strand
gacgagaagaagcgcuuug

SEQ ID NO: 3519 - RNA, 19 nt, Homo sapiens
  misc_RNA (1)...(19): siRNA sense strand
gaagaagcgcuuugaggaa

SEQ ID NO: 3520 - RNA, 19 nt, Homo sapiens
  misc_RNA (1)...(19): siRNA sense strand
gcaauaaguccauggagau

SEQ ID NO: 3521 - RNA, 19 nt, Homo sapiens
  misc_RNA (1)...(19): siRNA sense strand
ugaagaauguggacaaggu

SEQ ID NO: 3522 - RNA, 19 nt, Homo sapiens
  misc_RNA (1)...(19): siRNA sense strand
ggcgguaccugcagaugaa

SEQ ID NO: 3523 - RNA, 19 nt, Homo sapiens
  misc_RNA (1)...(19): siRNA sense strand
ccauggagaucgagguguu

SEQ ID NO: 3524 - RNA, 19 nt, Homo sapiens
  misc_RNA (1)...(19): siRNA sense strand
ccagugccuucuucaccua

SEQ ID NO: 3525 - RNA, 19 nt, Homo sapiens
  misc_RNA (1)...(19): siRNA sense strand
gcgcggagaucaccuacac

SEQ ID NO: 3526 - RNA, 19 nt, Homo sapiens
  misc_RNA (1)...(19): siRNA sense strand
gcaugaccuucacgagcaa

SEQ ID NO: 3527 - RNA, 19 nt, Homo sapiens
  misc_RNA (1)...(19): siRNA sense strand
gggcgguaccugcagauga

SEQ ID NO: 3528 - RNA, 19 nt, Homo sapiens
  misc_RNA (1)...(19): siRNA sense strand
ucggugagguggcgcaugu

SEQ ID NO: 3529 - RNA, 19 nt, Homo sapiens
  misc_RNA (1)...(19): siRNA sense strand
cccugucgcugaagaaugu

SEQ ID NO: 3530 - RNA, 19 nt, Homo sapiens
  misc_RNA (1)...(19): siRNA sense strand
gcugaagaauguggacaag

SEQ ID NO: 3531 - RNA, 19 nt, Homo sapiens
  misc_RNA (1)...(19): siRNA sense strand
agaccgaggacgagaagaa

SEQ ID NO: 3532 - RNA, 19 nt, Homo sapiens
  misc_RNA (1)...(19): siRNA sense strand
gaggcaggcgccaucauca

SEQ ID NO: 3533 - RNA, 19 nt, Homo sapiens
  misc_RNA (1)...(19): siRNA sense strand
acccagagccgaacacugu

SEQ ID NO: 3534 - RNA, 19 nt, Homo sapiens
  misc_RNA (1)...(19): siRNA sense strand
ggugccuccuguuguguau

SEQ ID NO: 3535 - RNA, 19 nt, Homo sapiens
  misc_RNA (1)...(19): siRNA sense strand
ggacgagaagaagcgcuuu

SEQ ID NO: 3536 - RNA, 19 nt, Homo sapiens
  misc_RNA (1)...(19): siRNA sense strand
gguaugaagcccagaagcu

SEQ ID NO: 3537 - RNA, 19 nt, Homo sapiens
  misc_RNA (1)...(19): siRNA sense strand
auaaguccauggagaucga

SEQ ID NO: 3538 - RNA, 19 nt, Homo sapiens
  misc_RNA (1)...(19): siRNA sense strand
acggaggugugaccaugaa

SEQ ID NO: 3539 - RNA, 19 nt, Homo sapiens
  misc_RNA (1)...(19): siRNA sense strand
gcgcaccgacuuccugucu

SEQ ID NO: 3540 - RNA, 19 nt, Homo sapiens
  misc_RNA (1)...(19): siRNA sense strand
gacgagaagaagcgcuuug

SEQ ID NO: 3541 - RNA, 19 nt, Homo sapiens
  misc_RNA (1)...(19): siRNA sense strand
gaagaagcgcuuugaggaa

SEQ ID NO: 3542 - RNA, 19 nt, Homo sapiens
  misc_RNA (1)...(19): siRNA sense strand
gcaauaaguccauggagau

SEQ ID NO: 3543 - RNA, 19 nt, Homo sapiens
  misc_RNA (1)...(19): siRNA sense strand
ugaagaauguggacaaggu

SEQ ID NO: 3544 - RNA, 19 nt, Homo sapiens
  misc_RNA (1)...(19): siRNA sense strand
ggcgguaccugcagaugaa

SEQ ID NO: 3545 - RNA, 19 nt, Homo sapiens
  misc_RNA (1)...(19): siRNA sense strand
ccauggagaucgagguguu

SEQ ID NO: 3546 - RNA, 19 nt, Homo sapiens
  misc_RNA (1)...(19): siRNA sense strand
ccagugccuucuucaccua

SEQ ID NO: 3547 - RNA, 19 nt, Homo sapiens
  misc_RNA (1)...(19): siRNA sense strand
gcgcggagaucaccuacac

SEQ ID NO: 3548 - RNA, 19 nt, Homo sapiens
  misc_RNA (1)...(19): siRNA sense strand
gcaugaccuucacgagcaa

SEQ ID NO: 3549 - RNA, 19 nt, Homo sapiens
  misc_RNA (1)...(19): siRNA sense strand
gggcgguaccugcagauga

SEQ ID NO: 3550 - RNA, 19 nt, Homo sapiens
  misc_RNA (1)...(19): siRNA sense strand
ucggugagguggcgcaugu

SEQ ID NO: 3551 - RNA, 19 nt, Homo sapiens
  misc_RNA (1)...(19): siRNA sense strand
cccugucgcugaagaaugu

SEQ ID NO: 3552 - RNA, 19 nt, Homo sapiens
  misc_RNA (1)...(19): siRNA sense strand
gcugaagaauguggacaag

SEQ ID NO: 3553 - RNA, 19 nt, Homo sapiens
  misc_RNA (1)...(19): siRNA sense strand
agaccgaggacgagaagaa

SEQ ID NO: 3554 - RNA, 19 nt, Homo sapiens
  misc_RNA (1)...(19): siRNA sense strand
gaggcaggcgccaucauca

SEQ ID NO: 3555 - RNA, 19 nt, Homo sapiens
  misc_RNA (1)...(19): siRNA sense strand
acccagagccgaacacugu

SEQ ID NO: 3556 - RNA, 19 nt, Homo sapiens
  misc_RNA (1)...(19): siRNA sense strand
ggugccuccuguuguguau

SEQ ID NO: 3557 - RNA, 19 nt, Homo sapiens
  misc_RNA (1)...(19): siRNA sense strand
ggacgagaagaagcgcuuu

SEQ ID NO: 3558 - RNA, 19 nt, Homo sapiens
  misc_RNA (1)...(19): siRNA sense strand
gguaugaagcccagaagcu

SEQ ID NO: 3559 - RNA, 19 nt, Homo sapiens
  misc_RNA (1)...(19): siRNA sense strand
auaaguccauggagaucga

SEQ ID NO: 3560 - RNA, 19 nt, Homo sapiens
  misc_RNA (1)...(19): siRNA sense strand
acggaggugugaccaugaa

SEQ ID NO: 3561 - RNA, 19 nt, Homo sapiens
  misc_RNA (1)...(19): siRNA sense strand
gcgcaccgacuuccugucu

SEQ ID NO: 3562 - RNA, 19 nt, Homo sapiens
  misc_RNA (1)...(19): siRNA sense strand
gacgagaagaagcgcuuug

SEQ ID NO: 3563 - RNA, 19 nt, Homo sapiens
  misc_RNA (1)...(19): siRNA sense strand
ggcaaggacuuaauuuaua

SEQ ID NO: 3564 - RNA, 19 nt, Homo sapiens
  misc_RNA (1)...(19): siRNA sense strand
gaacaacacuuuccuaagc

SEQ ID NO: 3565 - RNA, 19 nt, Homo sapiens
  misc_RNA (1)...(19): siRNA sense strand
caaauacuguggcagcaua

SEQ ID NO: 3566 - RNA, 19 nt, Homo sapiens
  misc_RNA (1)...(19): siRNA sense strand
agucuacacuguucaaaua

SEQ ID NO: 3567 - RNA, 19 nt, Homo sapiens
  misc_RNA (1)...(19): siRNA sense strand
gcaaggacuuaauuuauac

SEQ ID NO: 3568 - RNA, 19 nt, Homo sapiens
  misc_RNA (1)...(19): siRNA sense strand
cauuggagcugugguauuu

SEQ ID NO: 3569 - RNA, 19 nt, Homo sapiens
  misc_RNA (1)...(19): siRNA sense strand
caccuuaccuggagacaaa

SEQ ID NO: 3570 - RNA, 19 nt, Homo sapiens
  misc_RNA (1)...(19): siRNA sense strand
ucaaucaagucuacacugu

SEQ ID NO: 3571 - RNA, 19 nt, Homo sapiens
  misc_RNA (1)...(19): siRNA sense strand
gaaugugaccguagaagau

SEQ ID NO: 3572 - RNA, 19 nt, Homo sapiens
  misc_RNA (1)...(19): siRNA sense strand
ggacagccaacaauucaga

SEQ ID NO: 3573 - RNA, 19 nt, Homo sapiens
  misc_RNA (1)...(19): siRNA sense strand
gggagccucuguaugagaa

SEQ ID NO: 3574 - RNA, 19 nt, Homo sapiens
  misc_RNA (1)...(19): siRNA sense strand
acaguuaaccggaagagua

SEQ ID NO: 3575 - RNA, 19 nt, Homo sapiens
  misc_RNA (1)...(19): siRNA sense strand
ucagaaggaacaacacuuu

SEQ ID NO: 3576 - RNA, 19 nt, Homo sapiens
  misc_RNA (1)...(19): siRNA sense strand
aaucaagucuacacuguuc

SEQ ID NO: 3577 - RNA, 19 nt, Homo sapiens
  misc_RNA (1)...(19): siRNA sense strand
uguggcagcauauaauuua

SEQ ID NO: 3578 - RNA, 19 nt, Homo sapiens
  misc_RNA (1)...(19): siRNA sense strand
ggcuauaucucuacacaag

SEQ ID NO: 3579 - RNA, 19 nt, Homo sapiens
  misc_RNA (1)...(19): siRNA sense strand
ucaaauaagcacuaaguca

SEQ ID NO: 3580 - RNA, 19 nt, Homo sapiens
  misc_RNA (1)...(19): siRNA sense strand
cauccuggcuauaucucua

SEQ ID NO: 3581 - RNA, 19 nt, Homo sapiens
  misc_RNA (1)...(19): siRNA sense strand
gcacuaagucaggagauug

SEQ ID NO: 3582 - RNA, 19 nt, Homo sapiens
  misc_RNA (1)...(19): siRNA sense strand
ccgacgagauugugaagga

SEQ ID NO: 3583 - RNA, 19 nt, Homo sapiens
  misc_RNA (1)...(19): siRNA sense strand
ccaaacccgucaaucaagu

SEQ ID NO: 3584 - RNA, 19 nt, Homo sapiens
  misc_RNA (1)...(19): siRNA sense strand
gcuucaggcacuacaaaua

SEQ ID NO: 3585 - RNA, 19 nt, Homo sapiens
  misc_RNA (1)...(19): siRNA sense strand
agccaacaauucagaguuu

SEQ ID NO: 3586 - RNA, 19 nt, Homo sapiens
  misc_RNA (1)...(19): siRNA sense strand
cuauaucucuacacaagug

SEQ ID NO: 3587 - RNA, 19 nt, Homo sapiens
  misc_RNA (1)...(19): siRNA sense strand
uuggaaaucuucaaguuca

SEQ ID NO: 3588 - RNA, 19 nt, Homo sapiens
  misc_RNA (1)...(19): siRNA sense strand
caucauccuugucaucauc

SEQ ID NO: 3589 - RNA, 19 nt, Homo sapiens
  misc_RNA (1)...(19): siRNA sense strand
uggcaaggacuuaauuuau

SEQ ID NO: 3590 - RNA, 19 nt, Homo sapiens
  misc_RNA (1)...(19): siRNA sense strand
guacagacagcccgguaga

SEQ ID NO: 3591 - RNA, 19 nt, Homo sapiens
  misc_RNA (1)...(19): siRNA sense strand
guucaaauaagcacuaagu

SEQ ID NO: 3592 - RNA, 19 nt, Homo sapiens
  misc_RNA (1)...(19): siRNA sense strand
ugauguggauaaaggagaa

SEQ ID NO: 3593 - RNA, 19 nt, Homo sapiens
  misc_RNA (1)...(19): siRNA sense strand
ugauugauguggauaaagg

SEQ ID NO: 3594 - RNA, 19 nt, Homo sapiens
  misc_RNA (1)...(19): siRNA sense strand
gaaaacagccaaaacaaac

SEQ ID NO: 3595 - RNA, 19 nt, Homo sapiens
  misc_RNA (1)...(19): siRNA sense strand
uaagucaggagauuggaaa

SEQ ID NO: 3596 - RNA, 19 nt, Homo sapiens
  misc_RNA (1)...(19): siRNA sense strand
guggcagcauauaauuuaa

SEQ ID NO: 3597 - RNA, 19 nt, Homo sapiens
  misc_RNA (1)...(19): siRNA sense strand
uggcacgggucuucuccua

SEQ ID NO: 3598 - RNA, 19 nt, Homo sapiens
  misc_RNA (1)...(19): siRNA sense strand
ugaccucaccgacgagauu

SEQ ID NO: 3599 - RNA, 19 nt, Homo sapiens
  misc_RNA (1)...(19): siRNA sense strand
caucauuggagcuguggua

SEQ ID NO: 3600 - RNA, 19 nt, Homo sapiens
  misc_RNA (1)...(19): siRNA sense strand
gaaaggggaauucagagaa

SEQ ID NO: 3601 - RNA, 19 nt, Homo sapiens
  misc_RNA (1)...(19): siRNA sense strand
ggagaaaggggaauucaga

SEQ ID NO: 3602 - RNA, 19 nt, Homo sapiens
  misc_RNA (1)...(19): siRNA sense strand
uugaacaggugggaacaaa

SEQ ID NO: 3603 - RNA, 19 nt, Homo sapiens
  misc_RNA (1)...(19): siRNA sense strand
guacuuggcacgggucuuc

SEQ ID NO: 3604 - RNA, 19 nt, Homo sapiens
  misc_RNA (1)...(19): siRNA sense strand
ccccagaguucacaccuua

SEQ ID NO: 3605 - RNA, 19 nt, Homo sapiens
  misc_RNA (1)...(19): siRNA sense strand
ugaaugugaccguagaaga

SEQ ID NO: 3606 - RNA, 19 nt, Homo sapiens
  misc_RNA (1)...(19): siRNA sense strand
ggaaagaaaacagccaaaa

SEQ ID NO: 3607 - RNA, 19 nt, Homo sapiens
  misc_RNA (1)...(19): siRNA sense strand
gugauucccucccgaacag

SEQ ID NO: 3608 - RNA, 19 nt, Homo sapiens
  misc_RNA (1)...(19): siRNA sense strand
gcgcuucaggcacuacaaa

SEQ ID NO: 3609 - RNA, 19 nt, Homo sapiens
  misc_RNA (1)...(19): siRNA sense strand
gcaaaugcuuuuacacaac

SEQ ID NO: 3610 - RNA, 19 nt, Homo sapiens
  misc_RNA (1)...(19): siRNA sense strand
ggcagcauauaauuuaacu

SEQ ID NO: 3611 - RNA, 19 nt, Homo sapiens
  misc_RNA (1)...(19): siRNA sense strand
ccaaaacaaacacuaauga

SEQ ID NO: 3612 - RNA, 19 nt, Homo sapiens
  misc_RNA (1)...(19): siRNA sense strand
ggaacaaaagugaauguga

SEQ ID NO: 3613 - RNA, 19 nt, Homo sapiens
  misc_RNA (1)...(19): siRNA sense strand
caaaugcuuuuacacaaca

SEQ ID NO: 3614 - RNA, 19 nt, Homo sapiens
  misc_RNA (1)...(19): siRNA sense strand
auacuguggcagcauauaa

SEQ ID NO: 3615 - RNA, 19 nt, Homo sapiens
  misc_RNA (1)...(19): siRNA sense strand
ggucaucauccuugucauc

SEQ ID NO: 3616 - RNA, 19 nt, Homo sapiens
  misc_RNA (1)...(19): siRNA sense strand
gggaauucagagaaauauu

SEQ ID NO: 3617 - RNA, 19 nt, Homo sapiens
  misc_RNA (1)...(19): siRNA sense strand
aaaggggaauucagagaaa

SEQ ID NO: 3618 - RNA, 19 nt, Homo sapiens
  misc_RNA (1)...(19): siRNA sense strand
caaucaagucuacacuguu

SEQ ID NO: 3619 - RNA, 19 nt, Homo sapiens
  misc_RNA (1)...(19): siRNA sense strand
agacagcccgguagagugu

SEQ ID NO: 3620 - RNA, 19 nt, Homo sapiens
  misc_RNA (1)...(19): siRNA sense strand
gaacaggugggaacaaaag

SEQ ID NO: 3621 - RNA, 19 nt, Homo sapiens
  misc_RNA (1)...(19): siRNA sense strand
gaacccaaacccgucaauc

SEQ ID NO: 3622 - RNA, 19 nt, Homo sapiens
  misc_RNA (1)...(19): siRNA sense strand
uuggcaaggacuuaauuua

SEQ ID NO: 3623 - RNA, 19 nt, Homo sapiens
  misc_RNA (1)...(19): siRNA sense strand
gaaagaaaacagccaaaac

SEQ ID NO: 3624 - RNA, 19 nt, Homo sapiens
  misc_RNA (1)...(19): siRNA sense strand
ccucggacagccaacaauu

SEQ ID NO: 3625 - RNA, 19 nt, Homo sapiens
  misc_RNA (1)...(19): siRNA sense strand
cgacgagauugugaaggau

SEQ ID NO: 3626 - RNA, 19 nt, Homo sapiens
  misc_RNA (1)...(19): siRNA sense strand
gaacaguuaaccggaagag

SEQ ID NO: 3627 - RNA, 19 nt, Homo sapiens
  misc_RNA (1)...(19): siRNA sense strand
cuaagccuccgggauguuu

SEQ ID NO: 3628 - RNA, 19 nt, Homo sapiens
  misc_RNA (1)...(19): siRNA sense strand
aagugaaugugaccguaga

SEQ ID NO: 3629 - RNA, 19 nt, Homo sapiens
  misc_RNA (1)...(19): siRNA sense strand
gucaucauccuggcuauau

SEQ ID NO: 3630 - RNA, 19 nt, Homo sapiens
  misc_RNA (1)...(19): siRNA sense strand
cagccaacaauucagaguu

SEQ ID NO: 3631 - RNA, 19 nt, Homo sapiens
  misc_RNA (1)...(19): siRNA sense strand
aaagaaaacagccaaaaca

SEQ ID NO: 3632 - RNA, 19 nt, Homo sapiens
  misc_RNA (1)...(19): siRNA sense strand
cagaaggaacaacacuuuc

SEQ ID NO: 3633 - RNA, 19 nt, Homo sapiens
  misc_RNA (1)...(19): siRNA sense strand
gagauugugaaggauguga

SEQ ID NO: 3634 - RNA, 19 nt, Homo sapiens
  misc_RNA (1)...(19): siRNA sense strand
aacccaaacccgucaauca

SEQ ID NO: 3635 - RNA, 19 nt, Homo sapiens
  misc_RNA (1)...(19): siRNA sense strand
cuacacuguucaaauaagc

SEQ ID NO: 3636 - RNA, 19 nt, Homo sapiens
  misc_RNA (1)...(19): siRNA sense strand
ucggacagccaacaauuca

SEQ ID NO: 3637 - RNA, 19 nt, Homo sapiens
  misc_RNA (1)...(19): siRNA sense strand
gaacuuaucuuccuucuuc

SEQ ID NO: 3638 - RNA, 19 nt, Homo sapiens
  misc_RNA (1)...(19): siRNA sense strand
gagaacaucuuuaccuuua

SEQ ID NO: 3639 - RNA, 19 nt, Homo sapiens
  misc_RNA (1)...(19): siRNA sense strand
gaagaaggcugugagcuua

SEQ ID NO: 3640 - RNA, 19 nt, Homo sapiens
  misc_RNA (1)...(19): siRNA sense strand
ggacagagcuacacaucuu

SEQ ID NO: 3641 - RNA, 19 nt, Homo sapiens
  misc_RNA (1)...(19): siRNA sense strand
ggaauugugucaaacuaua

SEQ ID NO: 3642 - RNA, 19 nt, Homo sapiens
  misc_RNA (1)...(19): siRNA sense strand
uaaaugagcugauggaugu

SEQ ID NO: 3643 - RNA, 19 nt, Homo sapiens
  misc_RNA (1)...(19): siRNA sense strand
gaacaucuccgacuucuug

SEQ ID NO: 3644 - RNA, 19 nt, Homo sapiens
  misc_RNA (1)...(19): siRNA sense strand
gcacggaaauucuacaaga

SEQ ID NO: 3645 - RNA, 19 nt, Homo sapiens
  misc_RNA (1)...(19): siRNA sense strand
gaacagagguauggaggaa

SEQ ID NO: 3646 - RNA, 19 nt, Homo sapiens
  misc_RNA (1)...(19): siRNA sense strand
ggaaggauccuaucuauuc

SEQ ID NO: 3647 - RNA, 19 nt, Homo sapiens
  misc_RNA (1)...(19): siRNA sense strand
guugcaaacuggaguauua

SEQ ID NO: 3648 - RNA, 19 nt, Homo sapiens
  misc_RNA (1)...(19): siRNA sense strand
gcacacagaugaacaugau

SEQ ID NO: 3649 - RNA, 19 nt, Homo sapiens
  misc_RNA (1)...(19): siRNA sense strand
gaagaaacacugacacuau

SEQ ID NO: 3650 - RNA, 19 nt, Homo sapiens
  misc_RNA (1)...(19): siRNA sense strand
ggaagaggaauacgaauaa

SEQ ID NO: 3651 - RNA, 19 nt, Homo sapiens
  misc_RNA (1)...(19): siRNA sense strand
guaguggugucaucuauuu

SEQ ID NO: 3652 - RNA, 19 nt, Homo sapiens
  misc_RNA (1)...(19): siRNA sense strand
gaacaucuuuaccuuuaug

SEQ ID NO: 3653 - RNA, 19 nt, Homo sapiens
  misc_RNA (1)...(19): siRNA sense strand
gagaaggaguugcgacuga

SEQ ID NO: 3654 - RNA, 19 nt, Homo sapiens
  misc_RNA (1)...(19): siRNA sense strand
ggagagaauugcaggaaga

SEQ ID NO: 3655 - RNA, 19 nt, Homo sapiens
  misc_RNA (1)...(19): siRNA sense strand
gaagaaagagcccuggaaa

SEQ ID NO: 3656 - RNA, 19 nt, Homo sapiens
  misc_RNA (1)...(19): siRNA sense strand
gaacucguguggccuuuau

SEQ ID NO: 3657 - RNA, 19 nt, Homo sapiens
  misc_RNA (1)...(19): siRNA sense strand
gcaaggguauaucgagauu

SEQ ID NO: 3658 - RNA, 19 nt, Homo sapiens
  misc_RNA (1)...(19): siRNA sense strand
ggaagaauccuacauuaca

SEQ ID NO: 3659 - RNA, 19 nt, Homo sapiens
  misc_RNA (1)...(19): siRNA sense strand
gguauucccugacauguau

SEQ ID NO: 3660 - RNA, 19 nt, Homo sapiens
  misc_RNA (1)...(19): siRNA sense strand
gauccuaucuauucuuaug

SEQ ID NO: 3661 - RNA, 19 nt, Homo sapiens
  misc_RNA (1)...(19): siRNA sense strand
ggaauacgaauaagggaua

SEQ ID NO: 3662 - RNA, 19 nt, Homo sapiens
  misc_RNA (1)...(19): siRNA sense strand
ucugggacaucaugaauua

SEQ ID NO: 3663 - RNA, 19 nt, Homo sapiens
  misc_RNA (1)...(19): siRNA sense strand
ccaagcaccuccaguuuau

SEQ ID NO: 3664 - RNA, 19 nt, Homo sapiens
  misc_RNA (1)...(19): siRNA sense strand
gcagacguccuccugaaua

SEQ ID NO: 3665 - RNA, 19 nt, Homo sapiens
  misc_RNA (1)...(19): siRNA sense strand
caacugguaugaagacaau

SEQ ID NO: 3666 - RNA, 19 nt, Homo sapiens
  misc_RNA (1)...(19): siRNA sense strand
ggacgauucuuucaugauc

SEQ ID NO: 3667 - RNA, 19 nt, Homo sapiens
  misc_RNA (1)...(19): siRNA sense strand
gggaucugcuccugaagua

SEQ ID NO: 3668 - RNA, 19 nt, Homo sapiens
  misc_RNA (1)...(19): siRNA sense strand
gaaacugaagacaacauua

SEQ ID NO: 3669 - RNA, 19 nt, Homo sapiens
  misc_RNA (1)...(19): siRNA sense strand
gcacgaaggauacugaaga

SEQ ID NO: 3670 - RNA, 19 nt, Homo sapiens
  misc_RNA (1)...(19): siRNA sense strand
gaccagguguuuguaaauu

SEQ ID NO: 3671 - RNA, 19 nt, Homo sapiens
  misc_RNA (1)...(19): siRNA sense strand
gaacuaaccaagauuuauc

SEQ ID NO: 3672 - RNA, 19 nt, Homo sapiens
  misc_RNA (1)...(19): siRNA sense strand
ugaccuaacuccagaacaa

SEQ ID NO: 3673 - RNA, 19 nt, Homo sapiens
  misc_RNA (1)...(19): siRNA sense strand
gaagaacuggaacacguua

SEQ ID NO: 3674 - RNA, 19 nt, Homo sapiens
  misc_RNA (1)...(19): siRNA sense strand
gaaggauacugaagaaugc

SEQ ID NO: 3675 - RNA, 19 nt, Homo sapiens
  misc_RNA (1)...(19): siRNA sense strand
gggauugacuccacaagga

SEQ ID NO: 3676 - RNA, 19 nt, Homo sapiens
  misc_RNA (1)...(19): siRNA sense strand
ggucaaagccugggaagaa

SEQ ID NO: 3677 - RNA, 19 nt, Homo sapiens
  misc_RNA (1)...(19): siRNA sense strand
cguguggccuuuaucuuua

SEQ ID NO: 3678 - RNA, 19 nt, Homo sapiens
  misc_RNA (1)...(19): siRNA sense strand
ugauguggcugaagaaaga

SEQ ID NO: 3679 - RNA, 19 nt, Homo sapiens
  misc_RNA (1)...(19): siRNA sense strand
ggagugcauuggucaagaa

SEQ ID NO: 3680 - RNA, 19 nt, Homo sapiens
  misc_RNA (1)...(19): siRNA sense strand
aagaaacacugacacuauu

SEQ ID NO: 3681 - RNA, 19 nt, Homo sapiens
  misc_RNA (1)...(19): siRNA sense strand
gcucugaugcuuucuauug

SEQ ID NO: 3682 - RNA, 19 nt, Homo sapiens
  misc_RNA (1)...(19): siRNA sense strand
ggcacaggcuuguacuuaa

SEQ ID NO: 3683 - RNA, 19 nt, Homo sapiens
  misc_RNA (1)...(19): siRNA sense strand
ggacauauuuaacaucacu

SEQ ID NO: 3684 - RNA, 19 nt, Homo sapiens
  misc_RNA (1)...(19): siRNA sense strand
gauagaagacacucuguau

SEQ ID NO: 3685 - RNA, 19 nt, Homo sapiens
  misc_RNA (1)...(19): siRNA sense strand
caagaacuccucaugaaug

SEQ ID NO: 3686 - RNA, 19 nt, Homo sapiens
  misc_RNA (1)...(19): siRNA sense strand
gacaacagcacacagauga

SEQ ID NO: 3687 - RNA, 19 nt, Homo sapiens
  misc_RNA (1)...(19): siRNA sense strand
gaauaagggauaucuugaa

SEQ ID NO: 3688 - RNA, 19 nt, Homo sapiens
  misc_RNA (1)...(19): siRNA sense strand
ggagggacauauuuaacau

SEQ ID NO: 3689 - RNA, 19 nt, Homo sapiens
  misc_RNA (1)...(19): siRNA sense strand
caucucaaguccaaauuug

SEQ ID NO: 3690 - RNA, 19 nt, Homo sapiens
  misc_RNA (1)...(19): siRNA sense strand
gagcugaucccguggaaga

SEQ ID NO: 3691 - RNA, 19 nt, Homo sapiens
  misc_RNA (1)...(19): siRNA sense strand
cuacacaucuugucccaau

SEQ ID NO: 3692 - RNA, 19 nt, Homo sapiens
  misc_RNA (1)...(19): siRNA sense strand
cuaaggagcccauuguuga

SEQ ID NO: 3693 - RNA, 19 nt, Homo sapiens
  misc_RNA (1)...(19): siRNA sense strand
ucacccagcuguuccagaa

SEQ ID NO: 3694 - RNA, 19 nt, Homo sapiens
  misc_RNA (1)...(19): siRNA sense strand
gaagaauccuacauuacag

SEQ ID NO: 3695 - RNA, 19 nt, Homo sapiens
  misc_RNA (1)...(19): siRNA sense strand
gcaggaagaggaauacgaa

SEQ ID NO: 3696 - RNA, 19 nt, Homo sapiens
  misc_RNA (1)...(19): siRNA sense strand
caaauaagaacuucaagca

SEQ ID NO: 3697 - RNA, 19 nt, Homo sapiens
  misc_RNA (1)...(19): siRNA sense strand
ugaagaggcucaggaccua

SEQ ID NO: 3698 - RNA, 19 nt, Homo sapiens
  misc_RNA (1)...(19): siRNA sense strand
aaagacagguauugggauu

SEQ ID NO: 3699 - RNA, 19 nt, Homo sapiens
  misc_RNA (1)...(19): siRNA sense strand
ggauauaugggcagcagua

SEQ ID NO: 3700 - RNA, 19 nt, Homo sapiens
  misc_RNA (1)...(19): siRNA sense strand
ggaagcugcucauugucuu

SEQ ID NO: 3701 - RNA, 19 nt, Homo sapiens
  misc_RNA (1)...(19): siRNA sense strand
aaacguauccugcucuuau

SEQ ID NO: 3702 - RNA, 19 nt, Homo sapiens
  misc_RNA (1)...(19): siRNA sense strand
cagacguccuccugaauaa

SEQ ID NO: 3703 - RNA, 19 nt, Homo sapiens
  misc_RNA (1)...(19): siRNA sense strand
ucugauaugucaccaagaa

SEQ ID NO: 3704 - RNA, 19 nt, Homo sapiens
  misc_RNA (1)...(19): siRNA sense strand
gaccuuggccggaucauga

SEQ ID NO: 3705 - RNA, 19 nt, Homo sapiens
  misc_RNA (1)...(19): siRNA sense strand
gucaagagauuccaacaca

SEQ ID NO: 3706 - RNA, 19 nt, Homo sapiens
  misc_RNA (1)...(19): siRNA sense strand
uggauaaguuugaaagcua

SEQ ID NO: 3707 - RNA, 19 nt, Homo sapiens
  misc_RNA (1)...(19): siRNA sense strand
gguaugaagacaauaacua

SEQ ID NO: 3708 - RNA, 19 nt, Homo sapiens
  misc_RNA (1)...(19): siRNA sense strand
ggacucacccggagagaau

SEQ ID NO: 3709 - RNA, 19 nt, Homo sapiens
  misc_RNA (1)...(19): siRNA sense strand
gcagagccuuggcaugugu

SEQ ID NO: 3710 - RNA, 19 nt, Homo sapiens
  misc_RNA (1)...(19): siRNA sense strand
gaaggauccuaucuauucu

SEQ ID NO: 3711 - RNA, 19 nt, Homo sapiens
  misc_RNA (1)...(19): siRNA sense strand
cuugaaagaugaagaaaca

SEQ ID NO: 3712 - RNA, 19 nt, Homo sapiens
  misc_RNA (1)...(19): siRNA sense strand
ggagugguauucccugaca

SEQ ID NO: 3713 - RNA, 19 nt, Homo sapiens
  misc_RNA (1)...(19): siRNA sense strand
cagcauccuuccuguuuga

SEQ ID NO: 3714 - RNA, 19 nt, Homo sapiens
  misc_RNA (1)...(19): siRNA sense strand
acagagguauggaggaauu

SEQ ID NO: 3715 - RNA, 19 nt, Homo sapiens
  misc_RNA (1)...(19): siRNA sense strand
agagaaggcuggacagaca

SEQ ID NO: 3716 - RNA, 19 nt, Homo sapiens
  misc_RNA (1)...(19): siRNA sense strand
ggauguaaaugagcugaug

SEQ ID NO: 3717 - RNA, 19 nt, Homo sapiens
  misc_RNA (1)...(19): siRNA sense strand
gcacaggcuuguacuuaac

SEQ ID NO: 3718 - RNA, 19 nt, Homo sapiens
  misc_RNA (1)...(19): siRNA sense strand
gaacuggacccugcggaaa

SEQ ID NO: 3719 - RNA, 19 nt, Homo sapiens
  misc_RNA (1)...(19): siRNA sense strand
gcauggaucuacucugucu

SEQ ID NO: 3720 - RNA, 19 nt, Homo sapiens
  misc_RNA (1)...(19): siRNA sense strand
gaaccgcuguuucccuauc

SEQ ID NO: 3721 - RNA, 19 nt, Homo sapiens
  misc_RNA (1)...(19): siRNA sense strand
cugaugcuuucuauuguua

SEQ ID NO: 3722 - RNA, 19 nt, Homo sapiens
  misc_RNA (1)...(19): siRNA sense strand
gcaaacuggaguauuaaga

SEQ ID NO: 3723 - RNA, 19 nt, Homo sapiens
  misc_RNA (1)...(19): siRNA sense strand
ccagcuuuguccuuuauuu

SEQ ID NO: 3724 - RNA, 19 nt, Homo sapiens
  misc_RNA (1)...(19): siRNA sense strand
gggagaagcucaccaugcu

SEQ ID NO: 3725 - RNA, 19 nt, Homo sapiens
  misc_RNA (1)...(19): siRNA sense strand
cugacacuauuucucauua

SEQ ID NO: 3726 - RNA, 19 nt, Homo sapiens
  misc_RNA (1)...(19): siRNA sense strand
gcacugcuccugcuguaug

SEQ ID NO: 3727 - RNA, 19 nt, Homo sapiens
  misc_RNA (1)...(19): siRNA sense strand
aaggguggcuuccggagua

SEQ ID NO: 3728 - RNA, 19 nt, Homo sapiens
  misc_RNA (1)...(19): siRNA sense strand
gggaucuucugcaauguga

SEQ ID NO: 3729 - RNA, 19 nt, Homo sapiens
  misc_RNA (1)...(19): siRNA sense strand
acacaggccuccaccacaa

SEQ ID NO: 3730 - RNA, 19 nt, Homo sapiens
  misc_RNA (1)...(19): siRNA sense strand
guaccugguucgcuuugaa

SEQ ID NO: 3731 - RNA, 19 nt, Homo sapiens
  misc_RNA (1)...(19): siRNA sense strand
caucaugcauggaagaauc

SEQ ID NO: 3732 - RNA, 19 nt, Homo sapiens
  misc_RNA (1)...(19): siRNA sense strand
cgaaggauacugaagaaug

SEQ ID NO: 3733 - RNA, 19 nt, Homo sapiens
  misc_RNA (1)...(19): siRNA sense strand
cagaagaacaacauccuuu

SEQ ID NO: 3734 - RNA, 19 nt, Homo sapiens
  misc_RNA (1)...(19): siRNA sense strand
guccagagaccuuuacaaa

SEQ ID NO: 3735 - RNA, 19 nt, Homo sapiens
  misc_RNA (1)...(19): siRNA sense strand
caccaagaauucaagaguu

SEQ ID NO: 3736 - RNA, 19 nt, Homo sapiens
  misc_RNA (1)...(19): siRNA sense strand
ggauagaagacacucugua

SEQ ID NO: 3737 - RNA, 19 nt, Homo sapiens
  misc_RNA (1)...(19): siRNA sense strand
gaacauuccuuugguauca

SEQ ID NO: 3738 - RNA, 19 nt, Homo sapiens
  misc_RNA (1)...(19): siRNA sense strand
ccacggagaucauugcuuu

SEQ ID NO: 3739 - RNA, 19 nt, Homo sapiens
  misc_RNA (1)...(19): siRNA sense strand
gauggucaguuuaaagaua

SEQ ID NO: 3740 - RNA, 19 nt, Homo sapiens
  misc_RNA (1)...(19): siRNA sense strand
aaacucaacugccaaguga

SEQ ID NO: 3741 - RNA, 19 nt, Homo sapiens
  misc_RNA (1)...(19): siRNA sense strand
guaaaugaccucccuguug

SEQ ID NO: 3742 - RNA, 19 nt, Homo sapiens
  misc_RNA (1)...(19): siRNA sense strand
gcagaagaauuuaagaaac

SEQ ID NO: 3743 - RNA, 19 nt, Homo sapiens
  misc_RNA (1)...(19): siRNA sense strand
gaugagacuuugagacuag

SEQ ID NO: 3744 - RNA, 19 nt, Homo sapiens
  misc_RNA (1)...(19): siRNA sense strand
gcagaucacuguaaaugac

SEQ ID NO: 3745 - RNA, 19 nt, Homo sapiens
  misc_RNA (1)...(19): siRNA sense strand
ggaugagacuuugagacua

SEQ ID NO: 3746 - RNA, 19 nt, Homo sapiens
  misc_RNA (1)...(19): siRNA sense strand
ugauagggcagaagaauuu

SEQ ID NO: 3747 - RNA, 19 nt, Homo sapiens
  misc_RNA (1)...(19): siRNA sense strand
ggagaucauugcuuucagu

SEQ ID NO: 3748 - RNA, 19 nt, Homo sapiens
  misc_RNA (1)...(19): siRNA sense strand
cagccugucugacuacaaa

SEQ ID NO: 3749 - RNA, 19 nt, Homo sapiens
  misc_RNA (1)...(19): siRNA sense strand
gcaccauugcucaggauua

SEQ ID NO: 3750 - RNA, 19 nt, Homo sapiens
  misc_RNA (1)...(19): siRNA sense strand
caugaacauuccuuuggua

SEQ ID NO: 3751 - RNA, 19 nt, Homo sapiens
  misc_RNA (1)...(19): siRNA sense strand
caucuagcaugggucaaua

SEQ ID NO: 3752 - RNA, 19 nt, Homo sapiens
  misc_RNA (1)...(19): siRNA sense strand
ggcagaagaauuuaagaaa

SEQ ID NO: 3753 - RNA, 19 nt, Homo sapiens
  misc_RNA (1)...(19): siRNA sense strand
guucaggccuuccaguuca

SEQ ID NO: 3754 - RNA, 19 nt, Homo sapiens
  misc_RNA (1)...(19): siRNA sense strand
gaugauaaggguauucuuc

SEQ ID NO: 3755 - RNA, 19 nt, Homo sapiens
  misc_RNA (1)...(19): siRNA sense strand
caauacaccuaagaaacaa

SEQ ID NO: 3756 - RNA, 19 nt, Homo sapiens
  misc_RNA (1)...(19): siRNA sense strand
gaaacucaacugccaagug

SEQ ID NO: 3757 - RNA, 19 nt, Homo sapiens
  misc_RNA (1)...(19): siRNA sense strand
ccucuugacuucaccuuug

SEQ ID NO: 3758 - RNA, 19 nt, Homo sapiens
  misc_RNA (1)...(19): siRNA sense strand
ucaauacaccuaagaaaca

SEQ ID NO: 3759 - RNA, 19 nt, Homo sapiens
  misc_RNA (1)...(19): siRNA sense strand
gggcagaagaauuuaagaa

SEQ ID NO: 3760 - RNA, 19 nt, Homo sapiens
  misc_RNA (1)...(19): siRNA sense strand
uaugccagauggucaguuu

SEQ ID NO: 3761 - RNA, 19 nt, Homo sapiens
  misc_RNA (1)...(19): siRNA sense strand
ggucaauacaccuaagaaa

SEQ ID NO: 3762 - RNA, 19 nt, Homo sapiens
  misc_RNA (1)...(19): siRNA sense strand
ucacuucugucaucuagca

SEQ ID NO: 3763 - RNA, 19 nt, Homo sapiens
  misc_RNA (1)...(19): siRNA sense strand
caccauugcucaggauuau

SEQ ID NO: 3764 - RNA, 19 nt, Homo sapiens
  misc_RNA (1)...(19): siRNA sense strand
cagauggucaguuuaaaga

SEQ ID NO: 3765 - RNA, 19 nt, Homo sapiens
  misc_RNA (1)...(19): siRNA sense strand
gauuggugcuucuguggau

SEQ ID NO: 3766 - RNA, 19 nt, Homo sapiens
  misc_RNA (1)...(19): siRNA sense strand
gugcuucuguggauucuca

SEQ ID NO: 3767 - RNA, 19 nt, Homo sapiens
  misc_RNA (1)...(19): siRNA sense strand
gauucucacuucugucauc

SEQ ID NO: 3768 - RNA, 19 nt, Homo sapiens
  misc_RNA (1)...(19): siRNA sense strand
gauagggcagaagaauuua

SEQ ID NO: 3769 - RNA, 19 nt, Homo sapiens
  misc_RNA (1)...(19): siRNA sense strand
ggucuuaaaggcugaugaa

SEQ ID NO: 3770 - RNA, 19 nt, Homo sapiens
  misc_RNA (1)...(19): siRNA sense strand
caaagccacagcuguuaug

SEQ ID NO: 3771 - RNA, 19 nt, Homo sapiens
  misc_RNA (1)...(19): siRNA sense strand
gccagauggucaguuuaaa

SEQ ID NO: 3772 - RNA, 19 nt, Homo sapiens
  misc_RNA (1)...(19): siRNA sense strand
gcuggaaaccuggcaguga

SEQ ID NO: 3773 - RNA, 19 nt, Homo sapiens
  misc_RNA (1)...(19): siRNA sense strand
gcucuguggaugagacuuu

SEQ ID NO: 3774 - RNA, 19 nt, Homo sapiens
  misc_RNA (1)...(19): siRNA sense strand
ccaugaacauuccuuuggu

SEQ ID NO: 3775 - RNA, 19 nt, Homo sapiens
  misc_RNA (1)...(19): siRNA sense strand
gugauagggcagaagaauu

SEQ ID NO: 3776 - RNA, 19 nt, Homo sapiens
  misc_RNA (1)...(19): siRNA sense strand
cggcagaucacuguaaaug

SEQ ID NO: 3777 - RNA, 19 nt, Homo sapiens
  misc_RNA (1)...(19): siRNA sense strand
gcaugggucaauacaccua

SEQ ID NO: 3778 - RNA, 19 nt, Homo sapiens
  misc_RNA (1)...(19): siRNA sense strand
gacccgaagcgcaccauug

SEQ ID NO: 3779 - RNA, 19 nt, Homo sapiens
  misc_RNA (1)...(19): siRNA sense strand
cuucaaagccacagcuguu

SEQ ID NO: 3780 - RNA, 19 nt, Homo sapiens
  misc_RNA (1)...(19): siRNA sense strand
ggcagaucacuguaaauga

SEQ ID NO: 3781 - RNA, 19 nt, Homo sapiens
  misc_RNA (1)...(19): siRNA sense strand
ucucacuucugucaucuag

SEQ ID NO: 3782 - RNA, 19 nt, Homo sapiens
  misc_RNA (1)...(19): siRNA sense strand
cuggaaaccuggcagugau

SEQ ID NO: 3783 - RNA, 19 nt, Homo sapiens
  misc_RNA (1)...(19): siRNA sense strand
ugccagauggucaguuuaa

SEQ ID NO: 3784 - RNA, 19 nt, Homo sapiens
  misc_RNA (1)...(19): siRNA sense strand
ucaaagccacagcuguuau

SEQ ID NO: 3785 - RNA, 19 nt, Homo sapiens
  misc_RNA (1)...(19): siRNA sense strand
ccagauggucaguuuaaag

SEQ ID NO: 3786 - RNA, 19 nt, Homo sapiens
  misc_RNA (1)...(19): siRNA sense strand
gcgcaccauugcucaggau

SEQ ID NO: 3787 - RNA, 19 nt, Homo sapiens
  misc_RNA (1)...(19): siRNA sense strand
ucagugauagggcagaaga

SEQ ID NO: 3788 - RNA, 19 nt, Homo sapiens
  misc_RNA (1)...(19): siRNA sense strand
gguauucuucggcagauca

SEQ ID NO: 3789 - RNA, 19 nt, Homo sapiens
  misc_RNA (1)...(19): siRNA sense strand
acucaacugccaagugauu

SEQ ID NO: 3790 - RNA, 19 nt, Homo sapiens
  misc_RNA (1)...(19): siRNA sense strand
ccaaaagagcaaagaauau

SEQ ID NO: 3791 - RNA, 19 nt, Homo sapiens
  misc_RNA (1)...(19): siRNA sense strand
ugacaaacauggggaagug

SEQ ID NO: 3792 - RNA, 19 nt, Homo sapiens
  misc_RNA (1)...(19): siRNA sense strand
uguggauucucacuucugu

SEQ ID NO: 3793 - RNA, 19 nt, Homo sapiens
  misc_RNA (1)...(19): siRNA sense strand
aggaaaauauguuguguuc

SEQ ID NO: 3794 - RNA, 19 nt, Homo sapiens
  misc_RNA (1)...(19): siRNA sense strand
gucaauacaccuaagaaac

SEQ ID NO: 3795 - RNA, 19 nt, Homo sapiens
  misc_RNA (1)...(19): siRNA sense strand
uggaaaccuggcagugaua

SEQ ID NO: 3796 - RNA, 19 nt, Homo sapiens
  misc_RNA (1)...(19): siRNA sense strand
gacccaugaacauuccuuu

SEQ ID NO: 3797 - RNA, 19 nt, Homo sapiens
  misc_RNA (1)...(19): siRNA sense strand
gaacauuccuuugguauca

SEQ ID NO: 3798 - RNA, 19 nt, Homo sapiens
  misc_RNA (1)...(19): siRNA sense strand
ccacggagaucauugcuuu

SEQ ID NO: 3799 - RNA, 19 nt, Homo sapiens
  misc_RNA (1)...(19): siRNA sense strand
gauggucaguuuaaagaua

SEQ ID NO: 3800 - RNA, 19 nt, Homo sapiens
  misc_RNA (1)...(19): siRNA sense strand
aaacucaacugccaaguga

SEQ ID NO: 3801 - RNA, 19 nt, Homo sapiens
  misc_RNA (1)...(19): siRNA sense strand
guaaaugaccucccuguug

SEQ ID NO: 3802 - RNA, 19 nt, Homo sapiens
  misc_RNA (1)...(19): siRNA sense strand
gcagaagaauuuaagaaac

SEQ ID NO: 3803 - RNA, 19 nt, Homo sapiens
  misc_RNA (1)...(19): siRNA sense strand
gaugagacuuugagacuag

SEQ ID NO: 3804 - RNA, 19 nt, Homo sapiens
  misc_RNA (1)...(19): siRNA sense strand
gcagaucacuguaaaugac

SEQ ID NO: 3805 - RNA, 19 nt, Homo sapiens
  misc_RNA (1)...(19): siRNA sense strand
ggaugagacuuugagacua

SEQ ID NO: 3806 - RNA, 19 nt, Homo sapiens
  misc_RNA (1)...(19): siRNA sense strand
ugauagggcagaagaauuu

SEQ ID NO: 3807 - RNA, 19 nt, Homo sapiens
  misc_RNA (1)...(19): siRNA sense strand
ggagaucauugcuuucagu

SEQ ID NO: 3808 - RNA, 19 nt, Homo sapiens
  misc_RNA (1)...(19): siRNA sense strand
cagccugucugacuacaaa

SEQ ID NO: 3809 - RNA, 19 nt, Homo sapiens
  misc_RNA (1)...(19): siRNA sense strand
gcaccauugcucaggauua

SEQ ID NO: 3810 - RNA, 19 nt, Homo sapiens
  misc_RNA (1)...(19): siRNA sense strand
caugaacauuccuuuggua

SEQ ID NO: 3811 - RNA, 19 nt, Homo sapiens
  misc_RNA (1)...(19): siRNA sense strand
caucuagcaugggucaaua

SEQ ID NO: 3812 - RNA, 19 nt, Homo sapiens
  misc_RNA (1)...(19): siRNA sense strand
ggcagaagaauuuaagaaa

SEQ ID NO: 3813 - RNA, 19 nt, Homo sapiens
  misc_RNA (1)...(19): siRNA sense strand
guucaggccuuccaguuca

SEQ ID NO: 3814 - RNA, 19 nt, Homo sapiens
  misc_RNA (1)...(19): siRNA sense strand
gaugauaaggguauucuuc

SEQ ID NO: 3815 - RNA, 19 nt, Homo sapiens
  misc_RNA (1)...(19): siRNA sense strand
caauacaccuaagaaacaa

SEQ ID NO: 3816 - RNA, 19 nt, Homo sapiens
  misc_RNA (1)...(19): siRNA sense strand
gaaacucaacugccaagug

SEQ ID NO: 3817 - RNA, 19 nt, Homo sapiens
  misc_RNA (1)...(19): siRNA sense strand
ccucuugacuucaccuuug

SEQ ID NO: 3818 - RNA, 19 nt, Homo sapiens
  misc_RNA (1)...(19): siRNA sense strand
ucaauacaccuaagaaaca

SEQ ID NO: 3819 - RNA, 19 nt, Homo sapiens
  misc_RNA (1)...(19): siRNA sense strand
gggcagaagaauuuaagaa

SEQ ID NO: 3820 - RNA, 19 nt, Homo sapiens
  misc_RNA (1)...(19): siRNA sense strand
uaugccagauggucaguuu

SEQ ID NO: 3821 - RNA, 19 nt, Homo sapiens
  misc_RNA (1)...(19): siRNA sense strand
ggucaauacaccuaagaaa

SEQ ID NO: 3822 - RNA, 19 nt, Homo sapiens
  misc_RNA (1)...(19): siRNA sense strand
ucacuucugucaucuagca

SEQ ID NO: 3823 - RNA, 19 nt, Homo sapiens
  misc_RNA (1)...(19): siRNA sense strand
caccauugcucaggauuau

SEQ ID NO: 3824 - RNA, 19 nt, Homo sapiens
  misc_RNA (1)...(19): siRNA sense strand
cagauggucaguuuaaaga

SEQ ID NO: 3825 - RNA, 19 nt, Homo sapiens
  misc_RNA (1)...(19): siRNA sense strand
gauuggugcuucuguggau

SEQ ID NO: 3826 - RNA, 19 nt, Homo sapiens
  misc_RNA (1)...(19): siRNA sense strand
gugcuucuguggauucuca

SEQ ID NO: 3827 - RNA, 19 nt, Homo sapiens
  misc_RNA (1)...(19): siRNA sense strand
gauucucacuucugucauc

SEQ ID NO: 3828 - RNA, 19 nt, Homo sapiens
  misc_RNA (1)...(19): siRNA sense strand
gauagggcagaagaauuua

SEQ ID NO: 3829 - RNA, 19 nt, Homo sapiens
  misc_RNA (1)...(19): siRNA sense strand
ggucuuaaaggcugaugaa

SEQ ID NO: 3830 - RNA, 19 nt, Homo sapiens
  misc_RNA (1)...(19): siRNA sense strand
caaagccacagcuguuaug

SEQ ID NO: 3831 - RNA, 19 nt, Homo sapiens
  misc_RNA (1)...(19): siRNA sense strand
gccagauggucaguuuaaa

SEQ ID NO: 3832 - RNA, 19 nt, Homo sapiens
  misc_RNA (1)...(19): siRNA sense strand
gcuggaaaccuggcaguga

SEQ ID NO: 3833 - RNA, 19 nt, Homo sapiens
  misc_RNA (1)...(19): siRNA sense strand
gcucuguggaugagacuuu

SEQ ID NO: 3834 - RNA, 19 nt, Homo sapiens
  misc_RNA (1)...(19): siRNA sense strand
ccaugaacauuccuuuggu

SEQ ID NO: 3835 - RNA, 19 nt, Homo sapiens
  misc_RNA (1)...(19): siRNA sense strand
gugauagggcagaagaauu

SEQ ID NO: 3836 - RNA, 19 nt, Homo sapiens
  misc_RNA (1)...(19): siRNA sense strand
cggcagaucacuguaaaug

SEQ ID NO: 3837 - RNA, 19 nt, Homo sapiens
  misc_RNA (1)...(19): siRNA sense strand
gcaugggucaauacaccua

SEQ ID NO: 3838 - RNA, 19 nt, Homo sapiens
  misc_RNA (1)...(19): siRNA sense strand
gacccgaagcgcaccauug

SEQ ID NO: 3839 - RNA, 19 nt, Homo sapiens
  misc_RNA (1)...(19): siRNA sense strand
cuucaaagccacagcuguu

SEQ ID NO: 3840 - RNA, 19 nt, Homo sapiens
  misc_RNA (1)...(19): siRNA sense strand
ggcagaucacuguaaauga

SEQ ID NO: 3841 - RNA, 19 nt, Homo sapiens
  misc_RNA (1)...(19): siRNA sense strand
ucucacuucugucaucuag

SEQ ID NO: 3842 - RNA, 19 nt, Homo sapiens
  misc_RNA (1)...(19): siRNA sense strand
cuggaaaccuggcagugau

SEQ ID NO: 3843 - RNA, 19 nt, Homo sapiens
  misc_RNA (1)...(19): siRNA sense strand
ugccagauggucaguuuaa

SEQ ID NO: 3844 - RNA, 19 nt, Homo sapiens
  misc_RNA (1)...(19): siRNA sense strand
ucaaagccacagcuguuau

SEQ ID NO: 3845 - RNA, 19 nt, Homo sapiens
  misc_RNA (1)...(19): siRNA sense strand
ccagauggucaguuuaaag

SEQ ID NO: 3846 - RNA, 19 nt, Homo sapiens
  misc_RNA (1)...(19): siRNA sense strand
gcgcaccauugcucaggau

SEQ ID NO: 3847 - RNA, 19 nt, Homo sapiens
  misc_RNA (1)...(19): siRNA sense strand
ucagugauagggcagaaga

SEQ ID NO: 3848 - RNA, 19 nt, Homo sapiens
  misc_RNA (1)...(19): siRNA sense strand
gguauucuucggcagauca

SEQ ID NO: 3849 - RNA, 19 nt, Homo sapiens
  misc_RNA (1)...(19): siRNA sense strand
acucaacugccaagugauu

SEQ ID NO: 3850 - RNA, 19 nt, Homo sapiens
  misc_RNA (1)...(19): siRNA sense strand
ccaaaagagcaaagaauau

SEQ ID NO: 3851 - RNA, 19 nt, Homo sapiens
  misc_RNA (1)...(19): siRNA sense strand
ugacaaacauggggaagug

SEQ ID NO: 3852 - RNA, 19 nt, Homo sapiens
  misc_RNA (1)...(19): siRNA sense strand
uguggauucucacuucugu

SEQ ID NO: 3853 - RNA, 19 nt, Homo sapiens
  misc_RNA (1)...(19): siRNA sense strand
aggaaaauauguuguguuc

SEQ ID NO: 3854 - RNA, 19 nt, Homo sapiens
  misc_RNA (1)...(19): siRNA sense strand
gucaauacaccuaagaaac

SEQ ID NO: 3855 - RNA, 19 nt, Homo sapiens
  misc_RNA (1)...(19): siRNA sense strand
uggaaaccuggcagugaua

SEQ ID NO: 3856 - RNA, 19 nt, Homo sapiens
  misc_RNA (1)...(19): siRNA sense strand
gacccaugaacauuccuuu

SEQ ID NO: 3857 - RNA, 19 nt, Homo sapiens
  misc_RNA (1)...(19): siRNA sense strand
gaacauuccuuugguauca

SEQ ID NO: 3858 - RNA, 19 nt, Homo sapiens
  misc_RNA (1)...(19): siRNA sense strand
ccacggagaucauugcuuu

SEQ ID NO: 3859 - RNA, 19 nt, Homo sapiens
  misc_RNA (1)...(19): siRNA sense strand
gauggucaguuuaaagaua

SEQ ID NO: 3860 - RNA, 19 nt, Homo sapiens
  misc_RNA (1)...(19): siRNA sense strand
aaacucaacugccaaguga

SEQ ID NO: 3861 - RNA, 19 nt, Homo sapiens
  misc_RNA (1)...(19): siRNA sense strand
guaaaugaccucccuguug

SEQ ID NO: 3862 - RNA, 19 nt, Homo sapiens
  misc_RNA (1)...(19): siRNA sense strand
gcagaagaauuuaagaaac

SEQ ID NO: 3863 - RNA, 19 nt, Homo sapiens
  misc_RNA (1)...(19): siRNA sense strand
gaugagacuuugagacuag

SEQ ID NO: 3864 - RNA, 19 nt, Homo sapiens
  misc_RNA (1)...(19): siRNA sense strand
gcagaucacuguaaaugac

SEQ ID NO: 3865 - RNA, 19 nt, Homo sapiens
  misc_RNA (1)...(19): siRNA sense strand
ggaugagacuuugagacua

SEQ ID NO: 3866 - RNA, 19 nt, Homo sapiens
  misc_RNA (1)...(19): siRNA sense strand
ugauagggcagaagaauuu

SEQ ID NO: 3867 - RNA, 19 nt, Homo sapiens
  misc_RNA (1)...(19): siRNA sense strand
ggagaucauugcuuucagu

SEQ ID NO: 3868 - RNA, 19 nt, Homo sapiens
  misc_RNA (1)...(19): siRNA sense strand
cagccugucugacuacaaa

SEQ ID NO: 3869 - RNA, 19 nt, Homo sapiens
  misc_RNA (1)...(19): siRNA sense strand
gcaccauugcucaggauua

SEQ ID NO: 3870 - RNA, 19 nt, Homo sapiens
  misc_RNA (1)...(19): siRNA sense strand
caugaacauuccuuuggua

SEQ ID NO: 3871 - RNA, 19 nt, Homo sapiens
  misc_RNA (1)...(19): siRNA sense strand
caucuagcaugggucaaua

SEQ ID NO: 3872 - RNA, 19 nt, Homo sapiens
  misc_RNA (1)...(19): siRNA sense strand
ggcagaagaauuuaagaaa

SEQ ID NO: 3873 - RNA, 19 nt, Homo sapiens
  misc_RNA (1)...(19): siRNA sense strand
guucaggccuuccaguuca

SEQ ID NO: 3874 - RNA, 19 nt, Homo sapiens
  misc_RNA (1)...(19): siRNA sense strand
gaugauaaggguauucuuc

SEQ ID NO: 3875 - RNA, 19 nt, Homo sapiens
  misc_RNA (1)...(19): siRNA sense strand
caauacaccuaagaaacaa

SEQ ID NO: 3876 - RNA, 19 nt, Homo sapiens
  misc_RNA (1)...(19): siRNA sense strand
gaaacucaacugccaagug

SEQ ID NO: 3877 - RNA, 19 nt, Homo sapiens
  misc_RNA (1)...(19): siRNA sense strand
ccucuugacuucaccuuug

SEQ ID NO: 3878 - RNA, 19 nt, Homo sapiens
  misc_RNA (1)...(19): siRNA sense strand
ucaauacaccuaagaaaca

SEQ ID NO: 3879 - RNA, 19 nt, Homo sapiens
  misc_RNA (1)...(19): siRNA sense strand
gggcagaagaauuuaagaa

SEQ ID NO: 3880 - RNA, 19 nt, Homo sapiens
  misc_RNA (1)...(19): siRNA sense strand
uaugccagauggucaguuu

SEQ ID NO: 3881 - RNA, 19 nt, Homo sapiens
  misc_RNA (1)...(19): siRNA sense strand
ggucaauacaccuaagaaa

SEQ ID NO: 3882 - RNA, 19 nt, Homo sapiens
  misc_RNA (1)...(19): siRNA sense strand
ucacuucugucaucuagca

SEQ ID NO: 3883 - RNA, 19 nt, Homo sapiens
  misc_RNA (1)...(19): siRNA sense strand
caccauugcucaggauuau

SEQ ID NO: 3884 - RNA, 19 nt, Homo sapiens
  misc_RNA (1)...(19): siRNA sense strand
cagauggucaguuuaaaga

SEQ ID NO: 3885 - RNA, 19 nt, Homo sapiens
  misc_RNA (1)...(19): siRNA sense strand
gauuggugcuucuguggau

SEQ ID NO: 3886 - RNA, 19 nt, Homo sapiens
  misc_RNA (1)...(19): siRNA sense strand
gugcuucuguggauucuca

SEQ ID NO: 3887 - RNA, 19 nt, Homo sapiens
  misc_RNA (1)...(19): siRNA sense strand
gauucucacuucugucauc

SEQ ID NO: 3888 - RNA, 19 nt, Homo sapiens
  misc_RNA (1)...(19): siRNA sense strand
gauagggcagaagaauuua

SEQ ID NO: 3889 - RNA, 19 nt, Homo sapiens
  misc_RNA (1)...(19): siRNA sense strand
ggucuuaaaggcugaugaa

SEQ ID NO: 3890 - RNA, 19 nt, Homo sapiens
  misc_RNA (1)...(19): siRNA sense strand
caaagccacagcuguuaug

SEQ ID NO: 3891 - RNA, 19 nt, Homo sapiens
  misc_RNA (1)...(19): siRNA sense strand
gccagauggucaguuuaaa

SEQ ID NO: 3892 - RNA, 19 nt, Homo sapiens
  misc_RNA (1)...(19): siRNA sense strand
gcuggaaaccuggcaguga

SEQ ID NO: 3893 - RNA, 19 nt, Homo sapiens
  misc_RNA (1)...(19): siRNA sense strand
gcucuguggaugagacuuu

SEQ ID NO: 3894 - RNA, 19 nt, Homo sapiens
  misc_RNA (1)...(19): siRNA sense strand
ccaugaacauuccuuuggu

SEQ ID NO: 3895 - RNA, 19 nt, Homo sapiens
  misc_RNA (1)...(19): siRNA sense strand
gugauagggcagaagaauu

SEQ ID NO: 3896 - RNA, 19 nt, Homo sapiens
  misc_RNA (1)...(19): siRNA sense strand
cggcagaucacuguaaaug

SEQ ID NO: 3897 - RNA, 19 nt, Homo sapiens
  misc_RNA (1)...(19): siRNA sense strand
gcaugggucaauacaccua

SEQ ID NO: 3898 - RNA, 19 nt, Homo sapiens
  misc_RNA (1)...(19): siRNA sense strand
gacccgaagcgcaccauug

SEQ ID NO: 3899 - RNA, 19 nt, Homo sapiens
  misc_RNA (1)...(19): siRNA sense strand
cuucaaagccacagcuguu

SEQ ID NO: 3900 - RNA, 19 nt, Homo sapiens
  misc_RNA (1)...(19): siRNA sense strand
ggcagaucacuguaaauga

SEQ ID NO: 3901 - RNA, 19 nt, Homo sapiens
  misc_RNA (1)...(19): siRNA sense strand
ucucacuucugucaucuag

SEQ ID NO: 3902 - RNA, 19 nt, Homo sapiens
  misc_RNA (1)...(19): siRNA sense strand
cuggaaaccuggcagugau

SEQ ID NO: 3903 - RNA, 19 nt, Homo sapiens
  misc_RNA (1)...(19): siRNA sense strand
ugccagauggucaguuuaa

SEQ ID NO: 3904 - RNA, 19 nt, Homo sapiens
  misc_RNA (1)...(19): siRNA sense strand
ucaaagccacagcuguuau

SEQ ID NO: 3905 - RNA, 19 nt, Homo sapiens
  misc_RNA (1)...(19): siRNA sense strand
ccagauggucaguuuaaag

SEQ ID NO: 3906 - RNA, 19 nt, Homo sapiens
  misc_RNA (1)...(19): siRNA sense strand
gcgcaccauugcucaggau

SEQ ID NO: 3907 - RNA, 19 nt, Homo sapiens
  misc_RNA (1)...(19): siRNA sense strand
ucagugauagggcagaaga

SEQ ID NO: 3908 - RNA, 19 nt, Homo sapiens
  misc_RNA (1)...(19): siRNA sense strand
gguauucuucggcagauca

SEQ ID NO: 3909 - RNA, 19 nt, Homo sapiens
  misc_RNA (1)...(19): siRNA sense strand
acucaacugccaagugauu

SEQ ID NO: 3910 - RNA, 19 nt, Homo sapiens
  misc_RNA (1)...(19): siRNA sense strand
ccaaaagagcaaagaauau

SEQ ID NO: 3911 - RNA, 19 nt, Homo sapiens
  misc_RNA (1)...(19): siRNA sense strand
ugacaaacauggggaagug

SEQ ID NO: 3912 - RNA, 19 nt, Homo sapiens
  misc_RNA (1)...(19): siRNA sense strand
uguggauucucacuucugu

SEQ ID NO: 3913 - RNA, 19 nt, Homo sapiens
  misc_RNA (1)...(19): siRNA sense strand
aggaaaauauguuguguuc

SEQ ID NO: 3914 - RNA, 19 nt, Homo sapiens
  misc_RNA (1)...(19): siRNA sense strand
gucaauacaccuaagaaac

SEQ ID NO: 3915 - RNA, 19 nt, Homo sapiens
  misc_RNA (1)...(19): siRNA sense strand
uggaaaccuggcagugaua

SEQ ID NO: 3916 - RNA, 19 nt, Homo sapiens
  misc_RNA (1)...(19): siRNA sense strand
gacccaugaacauuccuuu

SEQ ID NO: 3917 - RNA, 19 nt, Homo sapiens
  misc_RNA (1)...(19): siRNA sense strand
uaaaugaacccaagaagaa

SEQ ID NO: 3918 - RNA, 19 nt, Homo sapiens
  misc_RNA (1)...(19): siRNA sense strand
ggacuugacuccuguugug

SEQ ID NO: 3919 - RNA, 19 nt, Homo sapiens
  misc_RNA (1)...(19): siRNA sense strand
gaagaaauaugcaaaagag

SEQ ID NO: 3920 - RNA, 19 nt, Homo sapiens
  misc_RNA (1)...(19): siRNA sense strand
guaaaugaacccaagaaga

SEQ ID NO: 3921 - RNA, 19 nt, Homo sapiens
  misc_RNA (1)...(19): siRNA sense strand
cuauaacccugaagcugua

SEQ ID NO: 3922 - RNA, 19 nt, Homo sapiens
  misc_RNA (1)...(19): siRNA sense strand
acaccuuccuugcugauuu

SEQ ID NO: 3923 - RNA, 19 nt, Homo sapiens
  misc_RNA (1)...(19): siRNA sense strand
gcaggcgcaugcagaacuu

SEQ ID NO: 3924 - RNA, 19 nt, Homo sapiens
  misc_RNA (1)...(19): siRNA sense strand
cgucagcagugaacaugaa

SEQ ID NO: 3925 - RNA, 19 nt, Homo sapiens
  misc_RNA (1)...(19): siRNA sense strand
cccugaagcuguaaaugaa

SEQ ID NO: 3926 - RNA, 19 nt, Homo sapiens
  misc_RNA (1)...(19): siRNA sense strand
ccaagaagaagaaauaugc

SEQ ID NO: 3927 - RNA, 19 nt, Homo sapiens
  misc_RNA (1)...(19): siRNA sense strand
caccaaacccugcagucua

SEQ ID NO: 3928 - RNA, 19 nt, Homo sapiens
  misc_RNA (1)...(19): siRNA sense strand
ggagcaggcgcaugcagaa

SEQ ID NO: 3929 - RNA, 19 nt, Homo sapiens
  misc_RNA (1)...(19): siRNA sense strand
caaacccugcagucuauaa

SEQ ID NO: 3930 - RNA, 19 nt, Homo sapiens
  misc_RNA (1)...(19): siRNA sense strand
caugaacccugcaccaaac

SEQ ID NO: 3931 - RNA, 19 nt, Homo sapiens
  misc_RNA (1)...(19): siRNA sense strand
accaaacccugcagucuau

SEQ ID NO: 3932 - RNA, 19 nt, Homo sapiens
  misc_RNA (1)...(19): siRNA sense strand
aacccaagaagaagaaaua

SEQ ID NO: 3933 - RNA, 19 nt, Homo sapiens
  misc_RNA (1)...(19): siRNA sense strand
gcaguggucccagucaaga

SEQ ID NO: 3934 - RNA, 19 nt, Homo sapiens
  misc_RNA (1)...(19): siRNA sense strand
gaacccaagaagaagaaau

SEQ ID NO: 3935 - RNA, 19 nt, Homo sapiens
  misc_RNA (1)...(19): siRNA sense strand
caccuuccuugcugauuug

SEQ ID NO: 3936 - RNA, 19 nt, Homo sapiens
  misc_RNA (1)...(19): siRNA sense strand
gcaccaaacccugcagucu

SEQ ID NO: 3937 - RNA, 19 nt, Homo sapiens
  misc_RNA (1)...(19): siRNA sense strand
ggcaagaagcccacaccuu

SEQ ID NO: 3938 - RNA, 19 nt, Homo sapiens
  misc_RNA (1)...(19): siRNA sense strand
acaugaacccugcaccaaa

SEQ ID NO: 3939 - RNA, 19 nt, Homo sapiens
  misc_RNA (1)...(19): siRNA sense strand
augcagaacuuugccuuca

SEQ ID NO: 3940 - RNA, 19 nt, Homo sapiens
  misc_RNA (1)...(19): siRNA sense strand
acccugaagcuguaaauga

SEQ ID NO: 3941 - RNA, 19 nt, Homo sapiens
  misc_RNA (1)...(19): siRNA sense strand
guugugccgucagcaguga

SEQ ID NO: 3942 - RNA, 19 nt, Homo sapiens
  misc_RNA (1)...(19): siRNA sense strand
caagaagaagaaauaugca

SEQ ID NO: 3943 - RNA, 19 nt, Homo sapiens
  misc_RNA (1)...(19): siRNA sense strand
gaagagaguuuuccugaua

SEQ ID NO: 3944 - RNA, 19 nt, Homo sapiens
  misc_RNA (1)...(19): siRNA sense strand
gagaaacccugauuugugu

SEQ ID NO: 3945 - RNA, 19 nt, Homo sapiens
  misc_RNA (1)...(19): siRNA sense strand
caaaggagacaaacuaauu

SEQ ID NO: 3946 - RNA, 19 nt, Homo sapiens
  misc_RNA (1)...(19): siRNA sense strand
uaaaugaacccaagaagaa

SEQ ID NO: 3947 - RNA, 19 nt, Homo sapiens
  misc_RNA (1)...(19): siRNA sense strand
gagacaaacuaauugagaa

SEQ ID NO: 3948 - RNA, 19 nt, Homo sapiens
  misc_RNA (1)...(19): siRNA sense strand
ggacuugacuccuguugug

SEQ ID NO: 3949 - RNA, 19 nt, Homo sapiens
  misc_RNA (1)...(19): siRNA sense strand
ggagaaacccugauuugug

SEQ ID NO: 3950 - RNA, 19 nt, Homo sapiens
  misc_RNA (1)...(19): siRNA sense strand
ggagggaaaucuggacauu

SEQ ID NO: 3951 - RNA, 19 nt, Homo sapiens
  misc_RNA (1)...(19): siRNA sense strand
ggagacaaacuaauugaga

SEQ ID NO: 3952 - RNA, 19 nt, Homo sapiens
  misc_RNA (1)...(19): siRNA sense strand
gaagaaauaugcaaaagag

SEQ ID NO: 3953 - RNA, 19 nt, Homo sapiens
  misc_RNA (1)...(19): siRNA sense strand
guaaaugaacccaagaaga

SEQ ID NO: 3954 - RNA, 19 nt, Homo sapiens
  misc_RNA (1)...(19): siRNA sense strand
aagcggauuucuacccuua

SEQ ID NO: 3955 - RNA, 19 nt, Homo sapiens
  misc_RNA (1)...(19): siRNA sense strand
ggaaaucuggacauucaaa

SEQ ID NO: 3956 - RNA, 19 nt, Homo sapiens
  misc_RNA (1)...(19): siRNA sense strand
cuauaacccugaagcugua

SEQ ID NO: 3957 - RNA, 19 nt, Homo sapiens
  misc_RNA (1)...(19): siRNA sense strand
gaccaaagaggaagaggaa

SEQ ID NO: 3958 - RNA, 19 nt, Homo sapiens
  misc_RNA (1)...(19): siRNA sense strand
ccacaagcaucugaagaga

SEQ ID NO: 3959 - RNA, 19 nt, Homo sapiens
  misc_RNA (1)...(19): siRNA sense strand
gagaaacugauuauugaug

SEQ ID NO: 3960 - RNA, 19 nt, Homo sapiens
  misc_RNA (1)...(19): siRNA sense strand
ccugauagaucucaacagu

SEQ ID NO: 3961 - RNA, 19 nt, Homo sapiens
  misc_RNA (1)...(19): siRNA sense strand
gcucuagccucccgcuguu

SEQ ID NO: 3962 - RNA, 19 nt, Homo sapiens
  misc_RNA (1)...(19): siRNA sense strand
acaccuuccuugcugauuu

SEQ ID NO: 3963 - RNA, 19 nt, Homo sapiens
  misc_RNA (1)...(19): siRNA sense strand
acaagcaucugaagagagu

SEQ ID NO: 3964 - RNA, 19 nt, Homo sapiens
  misc_RNA (1)...(19): siRNA sense strand
agggaaaucuggacauuca

SEQ ID NO: 3965 - RNA, 19 nt, Homo sapiens
  misc_RNA (1)...(19): siRNA sense strand
ccaaagaggaagaggaaga

SEQ ID NO: 3966 - RNA, 19 nt, Homo sapiens
  misc_RNA (1)...(19): siRNA sense strand
cgucagcagugaacaugaa

SEQ ID NO: 3967 - RNA, 19 nt, Homo sapiens
  misc_RNA (1)...(19): siRNA sense strand
gcaggcgcaugcagaacuu

SEQ ID NO: 3968 - RNA, 19 nt, Homo sapiens
  misc_RNA (1)...(19): siRNA sense strand
uuucuacccuuaccauuga

SEQ ID NO: 3969 - RNA, 19 nt, Homo sapiens
  misc_RNA (1)...(19): siRNA sense strand
caaacuaauugagaaacug

SEQ ID NO: 3970 - RNA, 19 nt, Homo sapiens
  misc_RNA (1)...(19): siRNA sense strand
ccaagaagaagaaauaugc

SEQ ID NO: 3971 - RNA, 19 nt, Homo sapiens
  misc_RNA (1)...(19): siRNA sense strand
cccugaagcuguaaaugaa

SEQ ID NO: 3972 - RNA, 19 nt, Homo sapiens
  misc_RNA (1)...(19): siRNA sense strand
gaaacccugauuuguguga

SEQ ID NO: 3973 - RNA, 19 nt, Homo sapiens
  misc_RNA (1)...(19): siRNA sense strand
gaaacugauuauugaugag

SEQ ID NO: 3974 - RNA, 19 nt, Homo sapiens
  misc_RNA (1)...(19): siRNA sense strand
guucaacacugcccacaac

SEQ ID NO: 3975 - RNA, 19 nt, Homo sapiens
  misc_RNA (1)...(19): siRNA sense strand
caaagaggaagaggaagaa

SEQ ID NO: 3976 - RNA, 19 nt, Homo sapiens
  misc_RNA (1)...(19): siRNA sense strand
agucaaaggagacaaacua

SEQ ID NO: 3977 - RNA, 19 nt, Homo sapiens
  misc_RNA (1)...(19): siRNA sense strand
caccaaacccugcagucua

SEQ ID NO: 3978 - RNA, 19 nt, Homo sapiens
  misc_RNA (1)...(19): siRNA sense strand
gaucaucaacccagaggau

SEQ ID NO: 3979 - RNA, 19 nt, Homo sapiens
  misc_RNA (1)...(19): siRNA sense strand
caacacugcccacaacaag

SEQ ID NO: 3980 - RNA, 19 nt, Homo sapiens
  misc_RNA (1)...(19): siRNA sense strand
aaaggagacaaacuaauug

SEQ ID NO: 3981 - RNA, 19 nt, Homo sapiens
  misc_RNA (1)...(19): siRNA sense strand
caaacccugcagucuauaa

SEQ ID NO: 3982 - RNA, 19 nt, Homo sapiens
  misc_RNA (1)...(19): siRNA sense strand
ggagcaggcgcaugcagaa

SEQ ID NO: 3983 - RNA, 19 nt, Homo sapiens
  misc_RNA (1)...(19): siRNA sense strand
ugugugacuuuaccauuga

SEQ ID NO: 3984 - RNA, 19 nt, Homo sapiens
  misc_RNA (1)...(19): siRNA sense strand
gggagaaacccugauuugu

SEQ ID NO: 3985 - RNA, 19 nt, Homo sapiens
  misc_RNA (1)...(19): siRNA sense strand
accaaacccugcagucuau

SEQ ID NO: 3986 - RNA, 19 nt, Homo sapiens
  misc_RNA (1)...(19): siRNA sense strand
caugaacccugcaccaaac

SEQ ID NO: 3987 - RNA, 19 nt, Homo sapiens
  misc_RNA (1)...(19): siRNA sense strand
gacauucaaagaccaaaga

SEQ ID NO: 3988 - RNA, 19 nt, Homo sapiens
  misc_RNA (1)...(19): siRNA sense strand
aacccaagaagaagaaaua

SEQ ID NO: 3989 - RNA, 19 nt, Homo sapiens
  misc_RNA (1)...(19): siRNA sense strand
gcaguggucccagucaaga

SEQ ID NO: 3990 - RNA, 19 nt, Homo sapiens
  misc_RNA (1)...(19): siRNA sense strand
ccauugaccaccagucuug

SEQ ID NO: 3991 - RNA, 19 nt, Homo sapiens
  misc_RNA (1)...(19): siRNA sense strand
ccugauuugugugacuuua

SEQ ID NO: 3992 - RNA, 19 nt, Homo sapiens
  misc_RNA (1)...(19): siRNA sense strand
guuggucgauucaggaaca

SEQ ID NO: 3993 - RNA, 19 nt, Homo sapiens
  misc_RNA (1)...(19): siRNA sense strand
gcccacaacaagcggauuu

SEQ ID NO: 3994 - RNA, 19 nt, Homo sapiens
  misc_RNA (1)...(19): siRNA sense strand
ucaggaacauggugcaaac

SEQ ID NO: 3995 - RNA, 19 nt, Homo sapiens
  misc_RNA (1)...(19): siRNA sense strand
gaaaucuggacauucaaag

SEQ ID NO: 3996 - RNA, 19 nt, Homo sapiens
  misc_RNA (1)...(19): siRNA sense strand
gaacccaagaagaagaaau

SEQ ID NO: 3997 - RNA, 19 nt, Homo sapiens
  misc_RNA (1)...(19): siRNA sense strand
caccuuccuugcugauuug

SEQ ID NO: 3998 - RNA, 19 nt, Homo sapiens
  misc_RNA (1)...(19): siRNA sense strand
gauuauugaugagaagaag

SEQ ID NO: 3999 - RNA, 19 nt, Homo sapiens
  misc_RNA (1)...(19): siRNA sense strand
gucaaaggagacaaacuaa

SEQ ID NO: 4000 - RNA, 19 nt, Homo sapiens
  misc_RNA (1)...(19): siRNA sense strand
gguccaugcugcacuuguc

SEQ ID NO: 4001 - RNA, 19 nt, Homo sapiens
  misc_RNA (1)...(19): siRNA sense strand
gcaccaaacccugcagucu

SEQ ID NO: 4002 - RNA, 19 nt, Homo sapiens
  misc_RNA (1)...(19): siRNA sense strand
cacaacaagcggauuucua

SEQ ID NO: 4003 - RNA, 19 nt, Homo sapiens
  misc_RNA (1)...(19): siRNA sense strand
caaagaccaaagaggaaga

SEQ ID NO: 4004 - RNA, 19 nt, Homo sapiens
  misc_RNA (1)...(19): siRNA sense strand
cagugaggaugaugagauc

SEQ ID NO: 4005 - RNA, 19 nt, Homo sapiens
  misc_RNA (1)...(19): siRNA sense strand
acaacaagcggauuucuac

SEQ ID NO: 4006 - RNA, 19 nt, Homo sapiens
  misc_RNA (1)...(19): siRNA sense strand
ggcaagaagcccacaccuu

SEQ ID NO: 4007 - RNA, 19 nt, Homo sapiens
  misc_RNA (1)...(19): siRNA sense strand
gauguggaucccucaguug

SEQ ID NO: 4008 - RNA, 19 nt, Homo sapiens
  misc_RNA (1)...(19): siRNA sense strand
gacauucagugaggaugau

SEQ ID NO: 4009 - RNA, 19 nt, Homo sapiens
  misc_RNA (1)...(19): siRNA sense strand
ugacauucagugaggauga

SEQ ID NO: 4010 - RNA, 19 nt, Homo sapiens
  misc_RNA (1)...(19): siRNA sense strand
acaugaacccugcaccaaa

SEQ ID NO: 4011 - RNA, 19 nt, Homo sapiens
  misc_RNA (1)...(19): siRNA sense strand
ugggagaaacccugauuug

SEQ ID NO: 4012 - RNA, 19 nt, Homo sapiens
  misc_RNA (1)...(19): siRNA sense strand
ucaaaggagacaaacuaau

SEQ ID NO: 4013 - RNA, 19 nt, Homo sapiens
  misc_RNA (1)...(19): siRNA sense strand
uugugugacuuuaccauug

SEQ ID NO: 4014 - RNA, 19 nt, Homo sapiens
  misc_RNA (1)...(19): siRNA sense strand
ucagugaggaugaugagau

SEQ ID NO: 4015 - RNA, 19 nt, Homo sapiens
  misc_RNA (1)...(19): siRNA sense strand
augcagaacuuugccuuca

SEQ ID NO: 4016 - RNA, 19 nt, Homo sapiens
  misc_RNA (1)...(19): siRNA sense strand
caacccagaggauguggau

SEQ ID NO: 4017 - RNA, 19 nt, Homo sapiens
  misc_RNA (1)...(19): siRNA sense strand
acccugaagcuguaaauga

SEQ ID NO: 4018 - RNA, 19 nt, Homo sapiens
  misc_RNA (1)...(19): siRNA sense strand
aagcaucugaagagaguuu

SEQ ID NO: 4019 - RNA, 19 nt, Homo sapiens
  misc_RNA (1)...(19): siRNA sense strand
guugugccgucagcaguga

SEQ ID NO: 4020 - RNA, 19 nt, Homo sapiens
  misc_RNA (1)...(19): siRNA sense strand
ggacauucaaagaccaaag

SEQ ID NO: 4021 - RNA, 19 nt, Homo sapiens
  misc_RNA (1)...(19): siRNA sense strand
aaggagacaaacuaauuga

SEQ ID NO: 4022 - RNA, 19 nt, Homo sapiens
  misc_RNA (1)...(19): siRNA sense strand
caagaagaagaaauaugca

SEQ ID NO: 4023 - RNA, 19 nt, Homo sapiens
  misc_RNA (1)...(19): siRNA sense strand
gagggaaaucuggacauuc

SEQ ID NO: 4024 - RNA, 19 nt, Homo sapiens
  misc_RNA (1)...(19): siRNA sense strand
ucaacacugcccacaacaa

SEQ ID NO: 4025 - RNA, 19 nt, Homo sapiens
  misc_RNA (1)...(19): siRNA sense strand
ggauuucuacccuuaccau

SEQ ID NO: 4026 - RNA, 19 nt, Homo sapiens
  misc_RNA (1)...(19): siRNA sense strand
uaaaugaacccaagaagaa

SEQ ID NO: 4027 - RNA, 19 nt, Homo sapiens
  misc_RNA (1)...(19): siRNA sense strand
ggacuugacuccuguugug

SEQ ID NO: 4028 - RNA, 19 nt, Homo sapiens
  misc_RNA (1)...(19): siRNA sense strand
ggagggaaaucuggacauu

SEQ ID NO: 4029 - RNA, 19 nt, Homo sapiens
  misc_RNA (1)...(19): siRNA sense strand
gaagaaauaugcaaaagag

SEQ ID NO: 4030 - RNA, 19 nt, Homo sapiens
  misc_RNA (1)...(19): siRNA sense strand
guaaaugaacccaagaaga

SEQ ID NO: 4031 - RNA, 19 nt, Homo sapiens
  misc_RNA (1)...(19): siRNA sense strand
aagcggauuucuacccuua

SEQ ID NO: 4032 - RNA, 19 nt, Homo sapiens
  misc_RNA (1)...(19): siRNA sense strand
ggaaaucuggacauucaaa

SEQ ID NO: 4033 - RNA, 19 nt, Homo sapiens
  misc_RNA (1)...(19): siRNA sense strand
cuauaacccugaagcugua

SEQ ID NO: 4034 - RNA, 19 nt, Homo sapiens
  misc_RNA (1)...(19): siRNA sense strand
gaccaaagaggaagaggaa

SEQ ID NO: 4035 - RNA, 19 nt, Homo sapiens
  misc_RNA (1)...(19): siRNA sense strand
acaccuuccuugcugauuu

SEQ ID NO: 4036 - RNA, 19 nt, Homo sapiens
  misc_RNA (1)...(19): siRNA sense strand
agggaaaucuggacauuca

SEQ ID NO: 4037 - RNA, 19 nt, Homo sapiens
  misc_RNA (1)...(19): siRNA sense strand
ccaaagaggaagaggaaga

SEQ ID NO: 4038 - RNA, 19 nt, Homo sapiens
  misc_RNA (1)...(19): siRNA sense strand
cgucagcagugaacaugaa

SEQ ID NO: 4039 - RNA, 19 nt, Homo sapiens
  misc_RNA (1)...(19): siRNA sense strand
gcaggcgcaugcagaacuu

SEQ ID NO: 4040 - RNA, 19 nt, Homo sapiens
  misc_RNA (1)...(19): siRNA sense strand
uuucuacccuuaccauuga

SEQ ID NO: 4041 - RNA, 19 nt, Homo sapiens
  misc_RNA (1)...(19): siRNA sense strand
cccugaagcuguaaaugaa

SEQ ID NO: 4042 - RNA, 19 nt, Homo sapiens
  misc_RNA (1)...(19): siRNA sense strand
ccaagaagaagaaauaugc

SEQ ID NO: 4043 - RNA, 19 nt, Homo sapiens
  misc_RNA (1)...(19): siRNA sense strand
caaagaggaagaggaagaa

SEQ ID NO: 4044 - RNA, 19 nt, Homo sapiens
  misc_RNA (1)...(19): siRNA sense strand
guucaacacugcccacaac

SEQ ID NO: 4045 - RNA, 19 nt, Homo sapiens
  misc_RNA (1)...(19): siRNA sense strand
gaucaucaacccagaggau

SEQ ID NO: 4046 - RNA, 19 nt, Homo sapiens
  misc_RNA (1)...(19): siRNA sense strand
caccaaacccugcagucua

SEQ ID NO: 4047 - RNA, 19 nt, Homo sapiens
  misc_RNA (1)...(19): siRNA sense strand
ggagcaggcgcaugcagaa

SEQ ID NO: 4048 - RNA, 19 nt, Homo sapiens
  misc_RNA (1)...(19): siRNA sense strand
caacacugcccacaacaag

SEQ ID NO: 4049 - RNA, 19 nt, Homo sapiens
  misc_RNA (1)...(19): siRNA sense strand
caaacccugcagucuauaa

SEQ ID NO: 4050 - RNA, 19 nt, Homo sapiens
  misc_RNA (1)...(19): siRNA sense strand
caugaacccugcaccaaac

SEQ ID NO: 4051 - RNA, 19 nt, Homo sapiens
  misc_RNA (1)...(19): siRNA sense strand
accaaacccugcagucuau

SEQ ID NO: 4052 - RNA, 19 nt, Homo sapiens
  misc_RNA (1)...(19): siRNA sense strand
gacauucaaagaccaaaga

SEQ ID NO: 4053 - RNA, 19 nt, Homo sapiens
  misc_RNA (1)...(19): siRNA sense strand
aacccaagaagaagaaaua

SEQ ID NO: 4054 - RNA, 19 nt, Homo sapiens
  misc_RNA (1)...(19): siRNA sense strand
gcaguggucccagucaaga

SEQ ID NO: 4055 - RNA, 19 nt, Homo sapiens
  misc_RNA (1)...(19): siRNA sense strand
guuggucgauucaggaaca

SEQ ID NO: 4056 - RNA, 19 nt, Homo sapiens
  misc_RNA (1)...(19): siRNA sense strand
gaaaucuggacauucaaag

SEQ ID NO: 4057 - RNA, 19 nt, Homo sapiens
  misc_RNA (1)...(19): siRNA sense strand
gcccacaacaagcggauuu

SEQ ID NO: 4058 - RNA, 19 nt, Homo sapiens
  misc_RNA (1)...(19): siRNA sense strand
ucaggaacauggugcaaac

SEQ ID NO: 4059 - RNA, 19 nt, Homo sapiens
  misc_RNA (1)...(19): siRNA sense strand
gaacccaagaagaagaaau

SEQ ID NO: 4060 - RNA, 19 nt, Homo sapiens
  misc_RNA (1)...(19): siRNA sense strand
caccuuccuugcugauuug

SEQ ID NO: 4061 - RNA, 19 nt, Homo sapiens
  misc_RNA (1)...(19): siRNA sense strand
cacaacaagcggauuucua

SEQ ID NO: 4062 - RNA, 19 nt, Homo sapiens
  misc_RNA (1)...(19): siRNA sense strand
gcaccaaacccugcagucu

SEQ ID NO: 4063 - RNA, 19 nt, Homo sapiens
  misc_RNA (1)...(19): siRNA sense strand
caaagaccaaagaggaaga

SEQ ID NO: 4064 - RNA, 19 nt, Homo sapiens
  misc_RNA (1)...(19): siRNA sense strand
cagugaggaugaugagauc

SEQ ID NO: 4065 - RNA, 19 nt, Homo sapiens
  misc_RNA (1)...(19): siRNA sense strand
acaacaagcggauuucuac

SEQ ID NO: 4066 - RNA, 19 nt, Homo sapiens
  misc_RNA (1)...(19): siRNA sense strand
ggcaagaagcccacaccuu

SEQ ID NO: 4067 - RNA, 19 nt, Homo sapiens
  misc_RNA (1)...(19): siRNA sense strand
gauguggaucccucaguug

SEQ ID NO: 4068 - RNA, 19 nt, Homo sapiens
  misc_RNA (1)...(19): siRNA sense strand
gacauucagugaggaugau

SEQ ID NO: 4069 - RNA, 19 nt, Homo sapiens
  misc_RNA (1)...(19): siRNA sense strand
ugacauucagugaggauga

SEQ ID NO: 4070 - RNA, 19 nt, Homo sapiens
  misc_RNA (1)...(19): siRNA sense strand
acaugaacccugcaccaaa

SEQ ID NO: 4071 - RNA, 19 nt, Homo sapiens
  misc_RNA (1)...(19): siRNA sense strand
ucagugaggaugaugagau

SEQ ID NO: 4072 - RNA, 19 nt, Homo sapiens
  misc_RNA (1)...(19): siRNA sense strand
augcagaacuuugccuuca

SEQ ID NO: 4073 - RNA, 19 nt, Homo sapiens
  misc_RNA (1)...(19): siRNA sense strand
caacccagaggauguggau

SEQ ID NO: 4074 - RNA, 19 nt, Homo sapiens
  misc_RNA (1)...(19): siRNA sense strand
acccugaagcuguaaauga

SEQ ID NO: 4075 - RNA, 19 nt, Homo sapiens
  misc_RNA (1)...(19): siRNA sense strand
guugugccgucagcaguga

SEQ ID NO: 4076 - RNA, 19 nt, Homo sapiens
  misc_RNA (1)...(19): siRNA sense strand
ggacauucaaagaccaaag

SEQ ID NO: 4077 - RNA, 19 nt, Homo sapiens
  misc_RNA (1)...(19): siRNA sense strand
caagaagaagaaauaugca

SEQ ID NO: 4078 - RNA, 19 nt, Homo sapiens
  misc_RNA (1)...(19): siRNA sense strand
gagggaaaucuggacauuc

SEQ ID NO: 4079 - RNA, 19 nt, Homo sapiens
  misc_RNA (1)...(19): siRNA sense strand
ucaacacugcccacaacaa

SEQ ID NO: 4080 - RNA, 19 nt, Homo sapiens
  misc_RNA (1)...(19): siRNA sense strand
ggauuucuacccuuaccau

SEQ ID NO: 4081 - RNA, 19 nt, Homo sapiens
  misc_RNA (1)...(19): siRNA sense strand
gaaaauagcugaagaacug

SEQ ID NO: 4082 - RNA, 19 nt, Homo sapiens
  misc_RNA (1)...(19): siRNA sense strand
caaaguuucuucucaguuu

SEQ ID NO: 4083 - RNA, 19 nt, Homo sapiens
  misc_RNA (1)...(19): siRNA sense strand
uaaagaagcugucaagaag

SEQ ID NO: 4084 - RNA, 19 nt, Homo sapiens
  misc_RNA (1)...(19): siRNA sense strand
ggaagacaaguuugauuua

SEQ ID NO: 4085 - RNA, 19 nt, Homo sapiens
  misc_RNA (1)...(19): siRNA sense strand
gaagugacauguacauucu

SEQ ID NO: 4086 - RNA, 19 nt, Homo sapiens
  misc_RNA (1)...(19): siRNA sense strand
ugacugagcuggaagacaa

SEQ ID NO: 4087 - RNA, 19 nt, Homo sapiens
  misc_RNA (1)...(19): siRNA sense strand
gaugaagccucagguguaa

SEQ ID NO: 4088 - RNA, 19 nt, Homo sapiens
  misc_RNA (1)...(19): siRNA sense strand
gaaggcagcugagcaaaca

SEQ ID NO: 4089 - RNA, 19 nt, Homo sapiens
  misc_RNA (1)...(19): siRNA sense strand
gcagggaagaugaaaguua

SEQ ID NO: 4090 - RNA, 19 nt, Homo sapiens
  misc_RNA (1)...(19): siRNA sense strand
gaagagacaccaugccauu

SEQ ID NO: 4091 - RNA, 19 nt, Homo sapiens
  misc_RNA (1)...(19): siRNA sense strand
uagaauggcuacagaaaga

SEQ ID NO: 4092 - RNA, 19 nt, Homo sapiens
  misc_RNA (1)...(19): siRNA sense strand
ggagacagguugcuucagu

SEQ ID NO: 4093 - RNA, 19 nt, Homo sapiens
  misc_RNA (1)...(19): siRNA sense strand
ggacaucugccucaagaaa

SEQ ID NO: 4094 - RNA, 19 nt, Homo sapiens
  misc_RNA (1)...(19): siRNA sense strand
ggaugaagccucaggugua

SEQ ID NO: 4095 - RNA, 19 nt, Homo sapiens
  misc_RNA (1)...(19): siRNA sense strand
gcacauccuuaucaauaug

SEQ ID NO: 4096 - RNA, 19 nt, Homo sapiens
  misc_RNA (1)...(19): siRNA sense strand
cccauuaccugcuauauau

SEQ ID NO: 4097 - RNA, 19 nt, Homo sapiens
  misc_RNA (1)...(19): siRNA sense strand
gaagacaaguuugauuuac

SEQ ID NO: 4098 - RNA, 19 nt, Homo sapiens
  misc_RNA (1)...(19): siRNA sense strand
gaagaaggcagcugagcaa

SEQ ID NO: 4099 - RNA, 19 nt, Homo sapiens
  misc_RNA (1)...(19): siRNA sense strand
caagcucucucuaaggaaa

SEQ ID NO: 4100 - RNA, 19 nt, Homo sapiens
  misc_RNA (1)...(19): siRNA sense strand
gaacagaaacaagagaaga

SEQ ID NO: 4101 - RNA, 19 nt, Homo sapiens
  misc_RNA (1)...(19): siRNA sense strand
ccacagaacagaaacaaga

SEQ ID NO: 4102 - RNA, 19 nt, Homo sapiens
  misc_RNA (1)...(19): siRNA sense strand
ccacagcugucaucacguu

SEQ ID NO: 4103 - RNA, 19 nt, Homo sapiens
  misc_RNA (1)...(19): siRNA sense strand
ggaauuugcaguugacuug

SEQ ID NO: 4104 - RNA, 19 nt, Homo sapiens
  misc_RNA (1)...(19): siRNA sense strand
gaaaagcucuugaauuguc

SEQ ID NO: 4105 - RNA, 19 nt, Homo sapiens
  misc_RNA (1)...(19): siRNA sense strand
gaagagagagcgagcaaca

SEQ ID NO: 4106 - RNA, 19 nt, Homo sapiens
  misc_RNA (1)...(19): siRNA sense strand
uaaagugacugagcuggaa

SEQ ID NO: 4107 - RNA, 19 nt, Homo sapiens
  misc_RNA (1)...(19): siRNA sense strand
gcugagagauuggagaaug

SEQ ID NO: 4108 - RNA, 19 nt, Homo sapiens
  misc_RNA (1)...(19): siRNA sense strand
ucagaaaccucucccucaa

SEQ ID NO: 4109 - RNA, 19 nt, Homo sapiens
  misc_RNA (1)...(19): siRNA sense strand
cuaaagaagcugucaagaa

SEQ ID NO: 4110 - RNA, 19 nt, Homo sapiens
  misc_RNA (1)...(19): siRNA sense strand
gcugucaucacguuauuua

SEQ ID NO: 4111 - RNA, 19 nt, Homo sapiens
  misc_RNA (1)...(19): siRNA sense strand
gcucaagucugaaguugca

SEQ ID NO: 4112 - RNA, 19 nt, Homo sapiens
  misc_RNA (1)...(19): siRNA sense strand
cugaagaacugccuaagga

SEQ ID NO: 4113 - RNA, 19 nt, Homo sapiens
  misc_RNA (1)...(19): siRNA sense strand
cgacagcuuugugaaguuu

SEQ ID NO: 4114 - RNA, 19 nt, Homo sapiens
  misc_RNA (1)...(19): siRNA sense strand
gcucuugaauugucaggaa

SEQ ID NO: 4115 - RNA, 19 nt, Homo sapiens
  misc_RNA (1)...(19): siRNA sense strand
gacauagaauggcuacaga

SEQ ID NO: 4116 - RNA, 19 nt, Homo sapiens
  misc_RNA (1)...(19): siRNA sense strand
gaagaagcaccuuaacaca

SEQ ID NO: 4117 - RNA, 19 nt, Homo sapiens
  misc_RNA (1)...(19): siRNA sense strand
ccgaggagaugcucagcua

SEQ ID NO: 4118 - RNA, 19 nt, Homo sapiens
  misc_RNA (1)...(19): siRNA sense strand
cauuaaggaucgaaguaaa

SEQ ID NO: 4119 - RNA, 19 nt, Homo sapiens
  misc_RNA (1)...(19): siRNA sense strand
ggaaacagcaaauccaaag

SEQ ID NO: 4120 - RNA, 19 nt, Homo sapiens
  misc_RNA (1)...(19): siRNA sense strand
aagaagcugucaagaagaa

SEQ ID NO: 4121 - RNA, 19 nt, Homo sapiens
  misc_RNA (1)...(19): siRNA sense strand
caaacccaaugcucagaaa

SEQ ID NO: 4122 - RNA, 19 nt, Homo sapiens
  misc_RNA (1)...(19): siRNA sense strand
gacagaggcuucagguaca

SEQ ID NO: 4123 - RNA, 19 nt, Homo sapiens
  misc_RNA (1)...(19): siRNA sense strand
acgaaaagcucuugaauug

SEQ ID NO: 4124 - RNA, 19 nt, Homo sapiens
  misc_RNA (1)...(19): siRNA sense strand
gaagaaacgacucaaaauu

SEQ ID NO: 4125 - RNA, 19 nt, Homo sapiens
  misc_RNA (1)...(19): siRNA sense strand
gaugaaaguuacggauaug

SEQ ID NO: 4126 - RNA, 19 nt, Homo sapiens
  misc_RNA (1)...(19): siRNA sense strand
gaucaucuccugaaacucu

SEQ ID NO: 4127 - RNA, 19 nt, Homo sapiens
  misc_RNA (1)...(19): siRNA sense strand
gcagaugcagugcuucaaa

SEQ ID NO: 4128 - RNA, 19 nt, Homo sapiens
  misc_RNA (1)...(19): siRNA sense strand
caaaccacaugaugcugaa

SEQ ID NO: 4129 - RNA, 19 nt, Homo sapiens
  misc_RNA (1)...(19): siRNA sense strand
ugacacccauuaccugcua

SEQ ID NO: 4130 - RNA, 19 nt, Homo sapiens
  misc_RNA (1)...(19): siRNA sense strand
uaaugaaccuagugcugaa

SEQ ID NO: 4131 - RNA, 19 nt, Homo sapiens
  misc_RNA (1)...(19): siRNA sense strand
gaccucagcucaaguuucg

SEQ ID NO: 4132 - RNA, 19 nt, Homo sapiens
  misc_RNA (1)...(19): siRNA sense strand
gcaacaagcgacccaagga

SEQ ID NO: 4133 - RNA, 19 nt, Homo sapiens
  misc_RNA (1)...(19): siRNA sense strand
agaagcaccuuaacacaca

SEQ ID NO: 4134 - RNA, 19 nt, Homo sapiens
  misc_RNA (1)...(19): siRNA sense strand
gagacaccaugccauuuca

SEQ ID NO: 4135 - RNA, 19 nt, Homo sapiens
  misc_RNA (1)...(19): siRNA sense strand
gggugucgcagcaacauua

SEQ ID NO: 4136 - RNA, 19 nt, Homo sapiens
  misc_RNA (1)...(19): siRNA sense strand
ggcagcagaucaacgaaau

SEQ ID NO: 4137 - RNA, 19 nt, Homo sapiens
  misc_RNA (1)...(19): siRNA sense strand
gauauguacugccaaacca

SEQ ID NO: 4138 - RNA, 19 nt, Homo sapiens
  misc_RNA (1)...(19): siRNA sense strand
cagcucaaguuucgagaga

SEQ ID NO: 4139 - RNA, 19 nt, Homo sapiens
  misc_RNA (1)...(19): siRNA sense strand
gcaaauccaaaguuucuuc

SEQ ID NO: 4140 - RNA, 19 nt, Homo sapiens
  misc_RNA (1)...(19): siRNA sense strand
gaacaucauggaguccuuu

SEQ ID NO: 4141 - RNA, 19 nt, Homo sapiens
  misc_RNA (1)...(19): siRNA sense strand
gucaucacguuauuuaaug

SEQ ID NO: 4142 - RNA, 19 nt, Homo sapiens
  misc_RNA (1)...(19): siRNA sense strand
gguaccacaugccugauug

SEQ ID NO: 4143 - RNA, 19 nt, Homo sapiens
  misc_RNA (1)...(19): siRNA sense strand
gaaaguuacggauauguac

SEQ ID NO: 4144 - RNA, 19 nt, Homo sapiens
  misc_RNA (1)...(19): siRNA sense strand
agaugaaaguuacggauau

SEQ ID NO: 4145 - RNA, 19 nt, Homo sapiens
  misc_RNA (1)...(19): siRNA sense strand
auacagaccuauagaagag

SEQ ID NO: 4146 - RNA, 19 nt, Homo sapiens
  misc_RNA (1)...(19): siRNA sense strand
ccucagguguaaacaagaa

SEQ ID NO: 4147 - RNA, 19 nt, Homo sapiens
  misc_RNA (1)...(19): siRNA sense strand
aaacagcaaauccaaaguu

SEQ ID NO: 4148 - RNA, 19 nt, Homo sapiens
  misc_RNA (1)...(19): siRNA sense strand
gcccagugcugagagauug

SEQ ID NO: 4149 - RNA, 19 nt, Homo sapiens
  misc_RNA (1)...(19): siRNA sense strand
aaaugaggcuggagaugug

SEQ ID NO: 4150 - RNA, 19 nt, Homo sapiens
  misc_RNA (1)...(19): siRNA sense strand
ugaccugccugaugcaaau

SEQ ID NO: 4151 - RNA, 19 nt, Homo sapiens
  misc_RNA (1)...(19): siRNA sense strand
uugcacauccuuaucaaua

SEQ ID NO: 4152 - RNA, 19 nt, Homo sapiens
  misc_RNA (1)...(19): siRNA sense strand
acacaccauuucuuccuaa

SEQ ID NO: 4153 - RNA, 19 nt, Homo sapiens
  misc_RNA (1)...(19): siRNA sense strand
ggaugaguccuaccuugaa

SEQ ID NO: 4154 - RNA, 19 nt, Homo sapiens
  misc_RNA (1)...(19): siRNA sense strand
aacagcaaauccaaaguuu

SEQ ID NO: 4155 - RNA, 19 nt, Homo sapiens
  misc_RNA (1)...(19): siRNA sense strand
gcgagccucuucccugaug

SEQ ID NO: 4156 - RNA, 19 nt, Homo sapiens
  misc_RNA (1)...(19): siRNA sense strand
ugaaaguuacggauaugua

SEQ ID NO: 4157 - RNA, 19 nt, Homo sapiens
  misc_RNA (1)...(19): siRNA sense strand
caacguggacucaaacaag

SEQ ID NO: 4158 - RNA, 19 nt, Homo sapiens
  misc_RNA (1)...(19): siRNA sense strand
gcagaguaaugcaguacca

SEQ ID NO: 4159 - RNA, 19 nt, Homo sapiens
  misc_RNA (1)...(19): siRNA sense strand
acaucugccucaagaaauu

SEQ ID NO: 4160 - RNA, 19 nt, Homo sapiens
  misc_RNA (1)...(19): siRNA sense strand
uggaagacaaguuugauuu

SEQ ID NO: 4161 - RNA, 19 nt, Homo sapiens
  misc_RNA (1)...(19): siRNA sense strand
gagaagaaacgacucaaaa

SEQ ID NO: 4162 - RNA, 19 nt, Homo sapiens
  misc_RNA (1)...(19): siRNA sense strand
cagggaagaugaaaguuac

SEQ ID NO: 4163 - RNA, 19 nt, Homo sapiens
  misc_RNA (1)...(19): siRNA sense strand
ggacucaaacaagcaauau

SEQ ID NO: 4164 - RNA, 19 nt, Homo sapiens
  misc_RNA (1)...(19): siRNA sense strand
ugaugccaaugauguaauu

SEQ ID NO: 4165 - RNA, 19 nt, Homo sapiens
  misc_RNA (1)...(19): siRNA sense strand
cagcugucaucacguuauu

SEQ ID NO: 4166 - RNA, 19 nt, Homo sapiens
  misc_RNA (1)...(19): siRNA sense strand
gacuuuggguuguauguag

SEQ ID NO: 4167 - RNA, 19 nt, Homo sapiens
  misc_RNA (1)...(19): siRNA sense strand
cauagaauggcuacagaaa

SEQ ID NO: 4168 - RNA, 19 nt, Homo sapiens
  misc_RNA (1)...(19): siRNA sense strand
cgaagugacauguacauuc

SEQ ID NO: 4169 - RNA, 19 nt, Homo sapiens
  misc_RNA (1)...(19): siRNA sense strand
gacaccaugccauuucaua

SEQ ID NO: 4170 - RNA, 19 nt, Homo sapiens
  misc_RNA (1)...(19): siRNA sense strand
gcucaaguuucgagagaag

SEQ ID NO: 4171 - RNA, 19 nt, Homo sapiens
  misc_RNA (1)...(19): siRNA sense strand
aauccaaaguuucuucuca

SEQ ID NO: 4172 - RNA, 19 nt, Homo sapiens
  misc_RNA (1)...(19): siRNA sense strand
acaacuggccacagagaua

SEQ ID NO: 4173 - RNA, 19 nt, Homo sapiens
  misc_RNA (1)...(19): siRNA sense strand
caucauggaguccuuugaa

SEQ ID NO: 4174 - RNA, 19 nt, Homo sapiens
  misc_RNA (1)...(19): siRNA sense strand
guacaacuggccacagaga

SEQ ID NO: 4175 - RNA, 19 nt, Homo sapiens
  misc_RNA (1)...(19): siRNA sense strand
cagcaaauccaaaguuucu

SEQ ID NO: 4176 - RNA, 19 nt, Homo sapiens
  misc_RNA (1)...(19): siRNA sense strand
caagagaagaaacgacuca

SEQ ID NO: 4177 - RNA, 19 nt, Homo sapiens
  misc_RNA (1)...(19): siRNA sense strand
gucaggaauuugcaguuga

SEQ ID NO: 4178 - RNA, 19 nt, Homo sapiens
  misc_RNA (1)...(19): siRNA sense strand
gaaacaagagaagaaacga

SEQ ID NO: 4179 - RNA, 19 nt, Homo sapiens
  misc_RNA (1)...(19): siRNA sense strand
cauuuaggaugaucagcaa

SEQ ID NO: 4180 - RNA, 19 nt, Homo sapiens
  misc_RNA (1)...(19): siRNA sense strand
caacgaaaugcaccuuuua

SEQ ID NO: 4181 - RNA, 19 nt, Homo sapiens
  misc_RNA (1)...(19): siRNA sense strand
gaauagaggguaugcauuu

SEQ ID NO: 4182 - RNA, 19 nt, Homo sapiens
  misc_RNA (1)...(19): siRNA sense strand
aaaggaagcugcacaggaa

SEQ ID NO: 4183 - RNA, 19 nt, Homo sapiens
  misc_RNA (1)...(19): siRNA sense strand
gaugauggcuaugcaguaa

SEQ ID NO: 4184 - RNA, 19 nt, Homo sapiens
  misc_RNA (1)...(19): siRNA sense strand
ggaagaaauugaaauaguc

SEQ ID NO: 4185 - RNA, 19 nt, Homo sapiens
  misc_RNA (1)...(19): siRNA sense strand
ugaaaugaauggcaaagaa

SEQ ID NO: 4186 - RNA, 19 nt, Homo sapiens
  misc_RNA (1)...(19): siRNA sense strand
guaaugcgguacaguuaaa

SEQ ID NO: 4187 - RNA, 19 nt, Homo sapiens
  misc_RNA (1)...(19): siRNA sense strand
gcagaaagacuugaugaaa

SEQ ID NO: 4188 - RNA, 19 nt, Homo sapiens
  misc_RNA (1)...(19): siRNA sense strand
gcacugcguaugaagauua

SEQ ID NO: 4189 - RNA, 19 nt, Homo sapiens
  misc_RNA (1)...(19): siRNA sense strand
cagaaagacuugaugaaau

SEQ ID NO: 4190 - RNA, 19 nt, Homo sapiens
  misc_RNA (1)...(19): siRNA sense strand
ggaauuuaaugaagaagga

SEQ ID NO: 4191 - RNA, 19 nt, Homo sapiens
  misc_RNA (1)...(19): siRNA sense strand
gggaagaaauugaaauagu

SEQ ID NO: 4192 - RNA, 19 nt, Homo sapiens
  misc_RNA (1)...(19): siRNA sense strand
gaaaugaauggcaaagaaa

SEQ ID NO: 4193 - RNA, 19 nt, Homo sapiens
  misc_RNA (1)...(19): siRNA sense strand
cuaaucaggugaaugguaa

SEQ ID NO: 4194 - RNA, 19 nt, Homo sapiens
  misc_RNA (1)...(19): siRNA sense strand
gagcagcuguuaaggcuau

SEQ ID NO: 4195 - RNA, 19 nt, Homo sapiens
  misc_RNA (1)...(19): siRNA sense strand
ggaagaaccagauccagaa

SEQ ID NO: 4196 - RNA, 19 nt, Homo sapiens
  misc_RNA (1)...(19): siRNA sense strand
agacaggauugguagcuua

SEQ ID NO: 4197 - RNA, 19 nt, Homo sapiens
  misc_RNA (1)...(19): siRNA sense strand
agaaggagcucugucugua

SEQ ID NO: 4198 - RNA, 19 nt, Homo sapiens
  misc_RNA (1)...(19): siRNA sense strand
gugagaaacuuggcuacua

SEQ ID NO: 4199 - RNA, 19 nt, Homo sapiens
  misc_RNA (1)...(19): siRNA sense strand
gagaaggccggacccauuu

SEQ ID NO: 4200 - RNA, 19 nt, Homo sapiens
  misc_RNA (1)...(19): siRNA sense strand
ugacuauucugguaacuau

SEQ ID NO: 4201 - RNA, 19 nt, Homo sapiens
  misc_RNA (1)...(19): siRNA sense strand
gaugaaagagcaauugaug

SEQ ID NO: 4202 - RNA, 19 nt, Homo sapiens
  misc_RNA (1)...(19): siRNA sense strand
gaagaauucaguaaaguca

SEQ ID NO: 4203 - RNA, 19 nt, Homo sapiens
  misc_RNA (1)...(19): siRNA sense strand
gcuaugaagauuacuauga

SEQ ID NO: 4204 - RNA, 19 nt, Homo sapiens
  misc_RNA (1)...(19): siRNA sense strand
gaguaaagaaguugaaaga

SEQ ID NO: 4205 - RNA, 19 nt, Homo sapiens
  misc_RNA (1)...(19): siRNA sense strand
cuacagcaguucaaggaaa

SEQ ID NO: 4206 - RNA, 19 nt, Homo sapiens
  misc_RNA (1)...(19): siRNA sense strand
gguggugacuauucuggua

SEQ ID NO: 4207 - RNA, 19 nt, Homo sapiens
  misc_RNA (1)...(19): siRNA sense strand
gaggaagaaccaauggaua

SEQ ID NO: 4208 - RNA, 19 nt, Homo sapiens
  misc_RNA (1)...(19): siRNA sense strand
gcauuucuguggcaaacaa

SEQ ID NO: 4209 - RNA, 19 nt, Homo sapiens
  misc_RNA (1)...(19): siRNA sense strand
ggaucuacgucuuaugaug

SEQ ID NO: 4210 - RNA, 19 nt, Homo sapiens
  misc_RNA (1)...(19): siRNA sense strand
ugagagaacugguuauacu

SEQ ID NO: 4211 - RNA, 19 nt, Homo sapiens
  misc_RNA (1)...(19): siRNA sense strand
uagcuuaugucgaucuuga

SEQ ID NO: 4212 - RNA, 19 nt, Homo sapiens
  misc_RNA (1)...(19): siRNA sense strand
gaagguggcagaaagacuu

SEQ ID NO: 4213 - RNA, 19 nt, Homo sapiens
  misc_RNA (1)...(19): siRNA sense strand
gaaauucgcccugguaaac

SEQ ID NO: 4214 - RNA, 19 nt, Homo sapiens
  misc_RNA (1)...(19): siRNA sense strand
gcaagguggugacuauucu

SEQ ID NO: 4215 - RNA, 19 nt, Homo sapiens
  misc_RNA (1)...(19): siRNA sense strand
cuacuacggugacagaaga

SEQ ID NO: 4216 - RNA, 19 nt, Homo sapiens
  misc_RNA (1)...(19): siRNA sense strand
gaagucauggcuaagguaa

SEQ ID NO: 4217 - RNA, 19 nt, Homo sapiens
  misc_RNA (1)...(19): siRNA sense strand
cgaagaauaagacuaaaga

SEQ ID NO: 4218 - RNA, 19 nt, Homo sapiens
  misc_RNA (1)...(19): siRNA sense strand
ggugacagaagaaauauug

SEQ ID NO: 4219 - RNA, 19 nt, Homo sapiens
  misc_RNA (1)...(19): siRNA sense strand
ucagcaagguggugacuau

SEQ ID NO: 4220 - RNA, 19 nt, Homo sapiens
  misc_RNA (1)...(19): siRNA sense strand
ucagggaauuuaaugaaga

SEQ ID NO: 4221 - RNA, 19 nt, Homo sapiens
  misc_RNA (1)...(19): siRNA sense strand
ccacaaagggaccugauga

SEQ ID NO: 4222 - RNA, 19 nt, Homo sapiens
  misc_RNA (1)...(19): siRNA sense strand
cagaagcacugcguaugaa

SEQ ID NO: 4223 - RNA, 19 nt, Homo sapiens
  misc_RNA (1)...(19): siRNA sense strand
gaaagaguaaagaaguuga

SEQ ID NO: 4224 - RNA, 19 nt, Homo sapiens
  misc_RNA (1)...(19): siRNA sense strand
aauagaggguaugcauuua

SEQ ID NO: 4225 - RNA, 19 nt, Homo sapiens
  misc_RNA (1)...(19): siRNA sense strand
gaacacuacaagacacuga

SEQ ID NO: 4226 - RNA, 19 nt, Homo sapiens
  misc_RNA (1)...(19): siRNA sense strand
gaauggcaaagaaauagaa

SEQ ID NO: 4227 - RNA, 19 nt, Homo sapiens
  misc_RNA (1)...(19): siRNA sense strand
agacaggccuccagaagca

SEQ ID NO: 4228 - RNA, 19 nt, Homo sapiens
  misc_RNA (1)...(19): siRNA sense strand
gcuaaucaggugaauggua

SEQ ID NO: 4229 - RNA, 19 nt, Homo sapiens
  misc_RNA (1)...(19): siRNA sense strand
gcuaugaagaucccuacua

SEQ ID NO: 4230 - RNA, 19 nt, Homo sapiens
  misc_RNA (1)...(19): siRNA sense strand
ccagaagcacugcguauga

SEQ ID NO: 4231 - RNA, 19 nt, Homo sapiens
  misc_RNA (1)...(19): siRNA sense strand
ccacaggacagaggaagua

SEQ ID NO: 4232 - RNA, 19 nt, Homo sapiens
  misc_RNA (1)...(19): siRNA sense strand
gggcugacccuguggaaga

SEQ ID NO: 4233 - RNA, 19 nt, Homo sapiens
  misc_RNA (1)...(19): siRNA sense strand
cagggaauuuaaugaagaa

SEQ ID NO: 4234 - RNA, 19 nt, Homo sapiens
  misc_RNA (1)...(19): siRNA sense strand
gguaaugcgguacaguuaa

SEQ ID NO: 4235 - RNA, 19 nt, Homo sapiens
  misc_RNA (1)...(19): siRNA sense strand
gaugauuacuaugguuaug

SEQ ID NO: 4236 - RNA, 19 nt, Homo sapiens
  misc_RNA (1)...(19): siRNA sense strand
ggcuauggaugaaaugaau

SEQ ID NO: 4237 - RNA, 19 nt, Homo sapiens
  misc_RNA (1)...(19): siRNA sense strand
ucgaaagaguaaagaaguu

SEQ ID NO: 4238 - RNA, 19 nt, Homo sapiens
  misc_RNA (1)...(19): siRNA sense strand
ugagaaggccggacccauu

SEQ ID NO: 4239 - RNA, 19 nt, Homo sapiens
  misc_RNA (1)...(19): siRNA sense strand
gaauuggaacggagguauu

SEQ ID NO: 4240 - RNA, 19 nt, Homo sapiens
  misc_RNA (1)...(19): siRNA sense strand
gguaugcauuuaucaccuu

SEQ ID NO: 4241 - RNA, 19 nt, Homo sapiens
  misc_RNA (1)...(19): siRNA sense strand
agguagagcuggcuauuca

SEQ ID NO: 4242 - RNA, 19 nt, Homo sapiens
  misc_RNA (1)...(19): siRNA sense strand
gaagcacugcguaugaaga

SEQ ID NO: 4243 - RNA, 19 nt, Homo sapiens
  misc_RNA (1)...(19): siRNA sense strand
uuaaggcuauggaugaaau

SEQ ID NO: 4244 - RNA, 19 nt, Homo sapiens
  misc_RNA (1)...(19): siRNA sense strand
ugagaaacuuggcuacuac

SEQ ID NO: 4245 - RNA, 19 nt, Homo sapiens
  misc_RNA (1)...(19): siRNA sense strand
gcugaugaguggaaaagua

SEQ ID NO: 4246 - RNA, 19 nt, Homo sapiens
  misc_RNA (1)...(19): siRNA sense strand
cacagaagguggcagaaag

SEQ ID NO: 4247 - RNA, 19 nt, Homo sapiens
  misc_RNA (1)...(19): siRNA sense strand
gacagaagaaauauuggaa

SEQ ID NO: 4248 - RNA, 19 nt, Homo sapiens
  misc_RNA (1)...(19): siRNA sense strand
gaagaaccaauggauacuu

SEQ ID NO: 4249 - RNA, 19 nt, Homo sapiens
  misc_RNA (1)...(19): siRNA sense strand
ggaagaauucaguaaaguc

SEQ ID NO: 4250 - RNA, 19 nt, Homo sapiens
  misc_RNA (1)...(19): siRNA sense strand
ccacuguccggucagaaua

SEQ ID NO: 4251 - RNA, 19 nt, Homo sapiens
  misc_RNA (1)...(19): siRNA sense strand
uaccaagggauuuauauga

SEQ ID NO: 4252 - RNA, 19 nt, Homo sapiens
  misc_RNA (1)...(19): siRNA sense strand
ugauggcuaugcaguaaga

SEQ ID NO: 4253 - RNA, 19 nt, Homo sapiens
  misc_RNA (1)...(19): siRNA sense strand
gguggacguuauucucuau

SEQ ID NO: 4254 - RNA, 19 nt, Homo sapiens
  misc_RNA (1)...(19): siRNA sense strand
caggauugguagcuuaugu

SEQ ID NO: 4255 - RNA, 19 nt, Homo sapiens
  misc_RNA (1)...(19): siRNA sense strand
cuaugaagaucccuacuac

SEQ ID NO: 4256 - RNA, 19 nt, Homo sapiens
  misc_RNA (1)...(19): siRNA sense strand
caugccaccuccaauuaga

SEQ ID NO: 4257 - RNA, 19 nt, Homo sapiens
  misc_RNA (1)...(19): siRNA sense strand
ugugacagcuaugaaauuc

SEQ ID NO: 4258 - RNA, 19 nt, Homo sapiens
  misc_RNA (1)...(19): siRNA sense strand
gaagaggaagaaccaaugg

SEQ ID NO: 4259 - RNA, 19 nt, Homo sapiens
  misc_RNA (1)...(19): siRNA sense strand
uuaugucgaucuugaugaa

SEQ ID NO: 4260 - RNA, 19 nt, Homo sapiens
  misc_RNA (1)...(19): siRNA sense strand
caauguaggaggcaagaga

SEQ ID NO: 4261 - RNA, 19 nt, Homo sapiens
  misc_RNA (1)...(19): siRNA sense strand
cgacuaucguggaggcuau

SEQ ID NO: 4262 - RNA, 19 nt, Homo sapiens
  misc_RNA (1)...(19): siRNA sense strand
cugcguaugaagauuauua

SEQ ID NO: 4263 - RNA, 19 nt, Homo sapiens
  misc_RNA (1)...(19): siRNA sense strand
ggacguuauucucuaucau

SEQ ID NO: 4264 - RNA, 19 nt, Homo sapiens
  misc_RNA (1)...(19): siRNA sense strand
uuuaucaccuucuguggaa

SEQ ID NO: 4265 - RNA, 19 nt, Homo sapiens
  misc_RNA (1)...(19): siRNA sense strand
ggauuuauaugaggaugag

SEQ ID NO: 4266 - RNA, 19 nt, Homo sapiens
  misc_RNA (1)...(19): siRNA sense strand
uaacucacacagaacacua

SEQ ID NO: 4267 - RNA, 19 nt, Homo sapiens
  misc_RNA (1)...(19): siRNA sense strand
gaugcucucagggaauuua

SEQ ID NO: 4268 - RNA, 19 nt, Homo sapiens
  misc_RNA (1)...(19): siRNA sense strand
guggaguuaugaagaccua

SEQ ID NO: 4269 - RNA, 19 nt, Homo sapiens
  misc_RNA (1)...(19): siRNA sense strand
gaaaggcagauggguacaa

SEQ ID NO: 4270 - RNA, 19 nt, Homo sapiens
  misc_RNA (1)...(19): siRNA sense strand
cagcagagaggccgugguu

SEQ ID NO: 4271 - RNA, 19 nt, Homo sapiens
  misc_RNA (1)...(19): siRNA sense strand
cuacggcuaugaagauuac

SEQ ID NO: 4272 - RNA, 19 nt, Homo sapiens
  misc_RNA (1)...(19): siRNA sense strand
gaaguugaaagauuaugca

SEQ ID NO: 4273 - RNA, 19 nt, Homo sapiens
  misc_RNA (1)...(19): siRNA sense strand
guaaagucacagaggguuu

SEQ ID NO: 4274 - RNA, 19 nt, Homo sapiens
  misc_RNA (1)...(19): siRNA sense strand
aagaaccaauggauacuuc

SEQ ID NO: 4275 - RNA, 19 nt, Homo sapiens
  misc_RNA (1)...(19): siRNA sense strand
uagaggguaugcauuuauc

SEQ ID NO: 4276 - RNA, 19 nt, Homo sapiens
  misc_RNA (1)...(19): siRNA sense strand
gugcaagaguccacaaagg

SEQ ID NO: 4277 - RNA, 19 nt, Homo sapiens
  misc_RNA (1)...(19): siRNA sense strand
gguucugcuuccuugaaua

SEQ ID NO: 4278 - RNA, 19 nt, Homo sapiens
  misc_RNA (1)...(19): siRNA sense strand
agagcuggcuauucacaga

SEQ ID NO: 4279 - RNA, 19 nt, Homo sapiens
  misc_RNA (1)...(19): siRNA sense strand
cgcaugccaccuccaauua

SEQ ID NO: 4280 - RNA, 19 nt, Homo sapiens
  misc_RNA (1)...(19): siRNA sense strand
caagccaccagacaagaaa

SEQ ID NO: 4281 - RNA, 19 nt, Homo sapiens
  misc_RNA (1)...(19): siRNA sense strand
acaacaagcuggacaaaga

SEQ ID NO: 4282 - RNA, 19 nt, Homo sapiens
  misc_RNA (1)...(19): siRNA sense strand
aggaagagaucaucaaauu

SEQ ID NO: 4283 - RNA, 19 nt, Homo sapiens
  misc_RNA (1)...(19): siRNA sense strand
gaagagaucaucaaauugg

SEQ ID NO: 4284 - RNA, 19 nt, Homo sapiens
  misc_RNA (1)...(19): siRNA sense strand
gacaaccucuccuacauug

SEQ ID NO: 4285 - RNA, 19 nt, Homo sapiens
  misc_RNA (1)...(19): siRNA sense strand
caacaucacccuugaagau

SEQ ID NO: 4286 - RNA, 19 nt, Homo sapiens
  misc_RNA (1)...(19): siRNA sense strand
ccaacaacaucacccuuga

SEQ ID NO: 4287 - RNA, 19 nt, Homo sapiens
  misc_RNA (1)...(19): siRNA sense strand
ucacuauggugguugacua

SEQ ID NO: 4288 - RNA, 19 nt, Homo sapiens
  misc_RNA (1)...(19): siRNA sense strand
ggaagagaucaucaaauug

SEQ ID NO: 4289 - RNA, 19 nt, Homo sapiens
  misc_RNA (1)...(19): siRNA sense strand
ugcaagaccugaccaacaa

SEQ ID NO: 4290 - RNA, 19 nt, Homo sapiens
  misc_RNA (1)...(19): siRNA sense strand
caagaaguacaaagacauu

SEQ ID NO: 4291 - RNA, 19 nt, Homo sapiens
  misc_RNA (1)...(19): siRNA sense strand
acaccaagcuaacccguau

SEQ ID NO: 4292 - RNA, 19 nt, Homo sapiens
  misc_RNA (1)...(19): siRNA sense strand
gaaaaucucugaggaggau

SEQ ID NO: 4293 - RNA, 19 nt, Homo sapiens
  misc_RNA (1)...(19): siRNA sense strand
guccugaccuacucacuau

SEQ ID NO: 4294 - RNA, 19 nt, Homo sapiens
  misc_RNA (1)...(19): siRNA sense strand
gccaagaaguacaaagaca

SEQ ID NO: 4295 - RNA, 19 nt, Homo sapiens
  misc_RNA (1)...(19): siRNA sense strand
aggaugagcuggacaccaa

SEQ ID NO: 4296 - RNA, 19 nt, Homo sapiens
  misc_RNA (1)...(19): siRNA sense strand
gaaguacaaagacauuauc

SEQ ID NO: 4297 - RNA, 19 nt, Homo sapiens
  misc_RNA (1)...(19): siRNA sense strand
caagucggccugcaaggaa

SEQ ID NO: 4298 - RNA, 19 nt, Homo sapiens
  misc_RNA (1)...(19): siRNA sense strand
cuacauugagcacaucuuu

SEQ ID NO: 4299 - RNA, 19 nt, Homo sapiens
  misc_RNA (1)...(19): siRNA sense strand
caucacccuugaagaucua

SEQ ID NO: 4300 - RNA, 19 nt, Homo sapiens
  misc_RNA (1)...(19): siRNA sense strand
acaaagacaaccucuccua

SEQ ID NO: 4301 - RNA, 19 nt, Homo sapiens
  misc_RNA (1)...(19): siRNA sense strand
acauugagcacaucuuuga

SEQ ID NO: 4302 - RNA, 19 nt, Homo sapiens
  misc_RNA (1)...(19): siRNA sense strand
gaagacauccccagcgaaa

SEQ ID NO: 4303 - RNA, 19 nt, Homo sapiens
  misc_RNA (1)...(19): siRNA sense strand
caacaacaucacccuugaa

SEQ ID NO: 4304 - RNA, 19 nt, Homo sapiens
  misc_RNA (1)...(19): siRNA sense strand
guacgggacccuccugcaa

SEQ ID NO: 4305 - RNA, 19 nt, Homo sapiens
  misc_RNA (1)...(19): siRNA sense strand
aagacaaccucuccuacau

SEQ ID NO: 4306 - RNA, 19 nt, Homo sapiens
  misc_RNA (1)...(19): siRNA sense strand
ugaggaagagaucaucaaa

SEQ ID NO: 4307 - RNA, 19 nt, Homo sapiens
  misc_RNA (1)...(19): siRNA sense strand
uauggugguugacuacaga

SEQ ID NO: 4308 - RNA, 19 nt, Homo sapiens
  misc_RNA (1)...(19): siRNA sense strand
gaggaagagaucaucaaau

SEQ ID NO: 4309 - RNA, 19 nt, Homo sapiens
  misc_RNA (1)...(19): siRNA sense strand
cagaacccgugugcugaaa

SEQ ID NO: 4310 - RNA, 19 nt, Homo sapiens
  misc_RNA (1)...(19): siRNA sense strand
gaccugaccaacaacauca

SEQ ID NO: 4311 - RNA, 19 nt, Homo sapiens
  misc_RNA (1)...(19): siRNA sense strand
gugccaagaaguacaaaga

SEQ ID NO: 4312 - RNA, 19 nt, Homo sapiens
  misc_RNA (1)...(19): siRNA sense strand
agacaaccucuccuacauu

SEQ ID NO: 4313 - RNA, 19 nt, Homo sapiens
  misc_RNA (1)...(19): siRNA sense strand
aaagacaaccucuccuaca

SEQ ID NO: 4314 - RNA, 19 nt, Homo sapiens
  misc_RNA (1)...(19): siRNA sense strand
gaacccgugugcugaaaau

SEQ ID NO: 4315 - RNA, 19 nt, Homo sapiens
  misc_RNA (1)...(19): siRNA sense strand
ccacaacaagcuggacaaa

SEQ ID NO: 4316 - RNA, 19 nt, Homo sapiens
  misc_RNA (1)...(19): siRNA sense strand
caaccucuccuacauugag

SEQ ID NO: 4317 - RNA, 19 nt, Homo sapiens
  misc_RNA (1)...(19): siRNA sense strand
ccaagaaguacaaagacau

SEQ ID NO: 4318 - RNA, 19 nt, Homo sapiens
  misc_RNA (1)...(19): siRNA sense strand
gaucuagaacagcucaagu

SEQ ID NO: 4319 - RNA, 19 nt, Homo sapiens
  misc_RNA (1)...(19): siRNA sense strand
ccuugaagaucuagaacag

SEQ ID NO: 4320 - RNA, 19 nt, Homo sapiens
  misc_RNA (1)...(19): siRNA sense strand
cguccugaccuacucacua

SEQ ID NO: 4321 - RNA, 19 nt, Homo sapiens
  misc_RNA (1)...(19): siRNA sense strand
acgggacccuccugcaaga

SEQ ID NO: 4322 - RNA, 19 nt, Homo sapiens
  misc_RNA (1)...(19): siRNA sense strand
ccagugccaagaaguacaa

SEQ ID NO: 4323 - RNA, 19 nt, Homo sapiens
  misc_RNA (1)...(19): siRNA sense strand
ucaagucggccugcaagga

SEQ ID NO: 4324 - RNA, 19 nt, Homo sapiens
  misc_RNA (1)...(19): siRNA sense strand
ucaauggguuccagugauu

SEQ ID NO: 4325 - RNA, 19 nt, Homo sapiens
  misc_RNA (1)...(19): siRNA sense strand
ggacgaggacgacgacaga

SEQ ID NO: 4326 - RNA, 19 nt, Homo sapiens
  misc_RNA (1)...(19): siRNA sense strand
gaucaauggguuccaguga

SEQ ID NO: 4327 - RNA, 19 nt, Homo sapiens
  misc_RNA (1)...(19): siRNA sense strand
ccgaaaggauggauaaggu

SEQ ID NO: 4328 - RNA, 19 nt, Homo sapiens
  misc_RNA (1)...(19): siRNA sense strand
gauccugccuuaagucaac

SEQ ID NO: 4329 - RNA, 19 nt, Homo sapiens
  misc_RNA (1)...(19): siRNA sense strand
gggaugcccuggaggaagu

SEQ ID NO: 4330 - RNA, 19 nt, Homo sapiens
  misc_RNA (1)...(19): siRNA sense strand
ccgauaacgugguguugug

SEQ ID NO: 4331 - RNA, 19 nt, Homo sapiens
  misc_RNA (1)...(19): siRNA sense strand
ggaaagucgcuacauggau

SEQ ID NO: 4332 - RNA, 19 nt, Homo sapiens
  misc_RNA (1)...(19): siRNA sense strand
ggacgacgacagagaugug

SEQ ID NO: 4333 - RNA, 19 nt, Homo sapiens
  misc_RNA (1)...(19): siRNA sense strand
gggaaagucgcuacaugga

SEQ ID NO: 4334 - RNA, 19 nt, Homo sapiens
  misc_RNA (1)...(19): siRNA sense strand
gagcagaagaccgaaagga

SEQ ID NO: 4335 - RNA, 19 nt, Homo sapiens
  misc_RNA (1)...(19): siRNA sense strand
ccgggaaagucgcuacaug

SEQ ID NO: 4336 - RNA, 19 nt, Homo sapiens
  misc_RNA (1)...(19): siRNA sense strand
agaccgaaaggauggauaa

SEQ ID NO: 4337 - RNA, 19 nt, Homo sapiens
  misc_RNA (1)...(19): siRNA sense strand
cggccaagcugcucaacgu

SEQ ID NO: 4338 - RNA, 19 nt, Homo sapiens
  misc_RNA (1)...(19): siRNA sense strand
ggagagcagaagaccgaaa

SEQ ID NO: 4339 - RNA, 19 nt, Homo sapiens
  misc_RNA (1)...(19): siRNA sense strand
caauggguuccagugauua

SEQ ID NO: 4340 - RNA, 19 nt, Homo sapiens
  misc_RNA (1)...(19): siRNA sense strand
cgagaacgacaucaacauc

SEQ ID NO: 4341 - RNA, 19 nt, Homo sapiens
  misc_RNA (1)...(19): siRNA sense strand
gagagcagaagaccgaaag

SEQ ID NO: 4342 - RNA, 19 nt, Homo sapiens
  misc_RNA (1)...(19): siRNA sense strand
gagauguggcucugcagau

SEQ ID NO: 4343 - RNA, 19 nt, Homo sapiens
  misc_RNA (1)...(19): siRNA sense strand
gcgagaacgacaucaacau

SEQ ID NO: 4344 - RNA, 19 nt, Homo sapiens
  misc_RNA (1)...(19): siRNA sense strand
gucgcuacauggaucaaug

SEQ ID NO: 4345 - RNA, 19 nt, Homo sapiens
  misc_RNA (1)...(19): siRNA sense strand
cgaggacgacgacagagau

SEQ ID NO: 4346 - RNA, 19 nt, Homo sapiens
  misc_RNA (1)...(19): siRNA sense strand
ggguuccagugauuaaucu

SEQ ID NO: 4347 - RNA, 19 nt, Homo sapiens
  misc_RNA (1)...(19): siRNA sense strand
agauguggcucugcagauc

SEQ ID NO: 4348 - RNA, 19 nt, Homo sapiens
  misc_RNA (1)...(19): siRNA sense strand
caagaaaucuccaccagaa

SEQ ID NO: 4349 - RNA, 19 nt, Homo sapiens
  misc_RNA (1)...(19): siRNA sense strand
gagggaagaugucucagua

SEQ ID NO: 4350 - RNA, 19 nt, Homo sapiens
  misc_RNA (1)...(19): siRNA sense strand
aaacugggcuacucacaaa

SEQ ID NO: 4351 - RNA, 19 nt, Homo sapiens
  misc_RNA (1)...(19): siRNA sense strand
gaaagucccugaagaucca

SEQ ID NO: 4352 - RNA, 19 nt, Homo sapiens
  misc_RNA (1)...(19): siRNA sense strand
caagcggguugcucacuua

SEQ ID NO: 4353 - RNA, 19 nt, Homo sapiens
  misc_RNA (1)...(19): siRNA sense strand
gaagaaacugggaaugauu

SEQ ID NO: 4354 - RNA, 19 nt, Homo sapiens
  misc_RNA (1)...(19): siRNA sense strand
cgaagaaacugggaaugau

SEQ ID NO: 4355 - RNA, 19 nt, Homo sapiens
  misc_RNA (1)...(19): siRNA sense strand
gcgaagaaacugggaauga

SEQ ID NO: 4356 - RNA, 19 nt, Homo sapiens
  misc_RNA (1)...(19): siRNA sense strand
ggacaaacugggcuacuca

SEQ ID NO: 4357 - RNA, 19 nt, Homo sapiens
  misc_RNA (1)...(19): siRNA sense strand
ccaagcggguugcucacuu

SEQ ID NO: 4358 - RNA, 19 nt, Homo sapiens
  misc_RNA (1)...(19): siRNA sense strand
ggccugccaucccaacuug

SEQ ID NO: 4359 - RNA, 19 nt, Homo sapiens
  misc_RNA (1)...(19): siRNA sense strand
accaagagguuccgcuuug

SEQ ID NO: 4360 - RNA, 19 nt, Homo sapiens
  misc_RNA (1)...(19): siRNA sense strand
acccagugcuuucugcuuu

SEQ ID NO: 4361 - RNA, 19 nt, Homo sapiens
  misc_RNA (1)...(19): siRNA sense strand
caaacugggcuacucacaa

SEQ ID NO: 4362 - RNA, 19 nt, Homo sapiens
  misc_RNA (1)...(19): siRNA sense strand
guaccuggauagccugaag

SEQ ID NO: 4363 - RNA, 19 nt, Homo sapiens
  misc_RNA (1)...(19): siRNA sense strand
agaaaaggauaucaucuug

SEQ ID NO: 4364 - RNA, 19 nt, Homo sapiens
  misc_RNA (1)...(19): siRNA sense strand
ggacaggaaucaccccaau

SEQ ID NO: 4365 - RNA, 19 nt, Homo sapiens
  misc_RNA (1)...(19): siRNA sense strand
acauucagcccaacaagaa

SEQ ID NO: 4366 - RNA, 19 nt, Homo sapiens
  misc_RNA (1)...(19): siRNA sense strand
ggaucaaggcuauguggau

SEQ ID NO: 4367 - RNA, 19 nt, Homo sapiens
  misc_RNA (1)...(19): siRNA sense strand
gauccaacccagugcuuuc

SEQ ID NO: 4368 - RNA, 19 nt, Homo sapiens
  misc_RNA (1)...(19): siRNA sense strand
cuauguggaucuugucauc

SEQ ID NO: 4369 - RNA, 19 nt, Homo sapiens
  misc_RNA (1)...(19): siRNA sense strand
ggagggaagaugucucagu

SEQ ID NO: 4370 - RNA, 19 nt, Homo sapiens
  misc_RNA (1)...(19): siRNA sense strand
ucaaggcuauguggaucuu

SEQ ID NO: 4371 - RNA, 19 nt, Homo sapiens
  misc_RNA (1)...(19): siRNA sense strand
gcgggaggacuuagaggaa

SEQ ID NO: 4372 - RNA, 19 nt, Homo sapiens
  misc_RNA (1)...(19): siRNA sense strand
aagaaacugggaaugauug

SEQ ID NO: 4373 - RNA, 19 nt, Homo sapiens
  misc_RNA (1)...(19): siRNA sense strand
caucuugcgggaggacuua

SEQ ID NO: 4374 - RNA, 19 nt, Homo sapiens
  misc_RNA (1)...(19): siRNA sense strand
ccugaaagucccugaagau

SEQ ID NO: 4375 - RNA, 19 nt, Homo sapiens
  misc_RNA (1)...(19): siRNA sense strand
gcggguugcucacuuacac

SEQ ID NO: 4376 - RNA, 19 nt, Homo sapiens
  misc_RNA (1)...(19): siRNA sense strand
gaugcgauucaccuacuga

SEQ ID NO: 4377 - RNA, 19 nt, Homo sapiens
  misc_RNA (1)...(19): siRNA sense strand
gggaggacuuagaggaacu

SEQ ID NO: 4378 - RNA, 19 nt, Homo sapiens
  misc_RNA (1)...(19): siRNA sense strand
cagcaagggcuuugugacu

SEQ ID NO: 4379 - RNA, 19 nt, Homo sapiens
  misc_RNA (1)...(19): siRNA sense strand
gccugaagguugggcaugu

SEQ ID NO: 4380 - RNA, 19 nt, Homo sapiens
  misc_RNA (1)...(19): siRNA sense strand
gccacaacaccaagagguu

SEQ ID NO: 4381 - RNA, 19 nt, Homo sapiens
  misc_RNA (1)...(19): siRNA sense strand
caccaagagguuccgcuuu

SEQ ID NO: 4382 - RNA, 19 nt, Homo sapiens
  misc_RNA (1)...(19): siRNA sense strand
cuaccucuccacccgaauu

SEQ ID NO: 4383 - RNA, 19 nt, Homo sapiens
  misc_RNA (1)...(19): siRNA sense strand
ggagucugcuacaccauuu

SEQ ID NO: 4384 - RNA, 19 nt, Homo sapiens
  misc_RNA (1)...(19): siRNA sense strand
cuucagaccuccagaguga

SEQ ID NO: 4385 - RNA, 19 nt, Homo sapiens
  misc_RNA (1)...(19): siRNA sense strand
gauuugggcuuccgcuuug

SEQ ID NO: 4386 - RNA, 19 nt, Homo sapiens
  misc_RNA (1)...(19): siRNA sense strand
ccaagaaccuggucagcau

SEQ ID NO: 4387 - RNA, 19 nt, Homo sapiens
  misc_RNA (1)...(19): siRNA sense strand
gcaauugucauuagcaaca

SEQ ID NO: 4388 - RNA, 19 nt, Homo sapiens
  misc_RNA (1)...(19): siRNA sense strand
gagugaagaugggugacua

SEQ ID NO: 4389 - RNA, 19 nt, Homo sapiens
  misc_RNA (1)...(19): siRNA sense strand
gcaggcuacuccauguuug

SEQ ID NO: 4390 - RNA, 19 nt, Homo sapiens
  misc_RNA (1)...(19): siRNA sense strand
caucauggcaauugucauu

SEQ ID NO: 4391 - RNA, 19 nt, Homo sapiens
  misc_RNA (1)...(19): siRNA sense strand
gcuuugauguggcaugguu

SEQ ID NO: 4392 - RNA, 19 nt, Homo sapiens
  misc_RNA (1)...(19): siRNA sense strand
gugaggcuguggccaucua

SEQ ID NO: 4393 - RNA, 19 nt, Homo sapiens
  misc_RNA (1)...(19): siRNA sense strand
agacuucgcccuucaugug

SEQ ID NO: 4394 - RNA, 19 nt, Homo sapiens
  misc_RNA (1)...(19): siRNA sense strand
ggucaucgucgcaauucuu

SEQ ID NO: 4395 - RNA, 19 nt, Homo sapiens
  misc_RNA (1)...(19): siRNA sense strand
ucauggcaauugucauuag

SEQ ID NO: 4396 - RNA, 19 nt, Homo sapiens
  misc_RNA (1)...(19): siRNA sense strand
gggagucugcuacaccauu

SEQ ID NO: 4397 - RNA, 19 nt, Homo sapiens
  misc_RNA (1)...(19): siRNA sense strand
gcauuggccuagcuaucuc

SEQ ID NO: 4398 - RNA, 19 nt, Homo sapiens
  misc_RNA (1)...(19): siRNA sense strand
gcaucaucauggcaauugu

SEQ ID NO: 4399 - RNA, 19 nt, Homo sapiens
  misc_RNA (1)...(19): siRNA sense strand
ucagcaucaucuucuguga

SEQ ID NO: 4400 - RNA, 19 nt, Homo sapiens
  misc_RNA (1)...(19): siRNA sense strand
gaaccuggucagcaucauc

SEQ ID NO: 4401 - RNA, 19 nt, Homo sapiens
  misc_RNA (1)...(19): siRNA sense strand
ugauuugggcuuccgcuuu

SEQ ID NO: 4402 - RNA, 19 nt, Homo sapiens
  misc_RNA (1)...(19): siRNA sense strand
ggagacuucgcccuucaug

SEQ ID NO: 4403 - RNA, 19 nt, Homo sapiens
  misc_RNA (1)...(19): siRNA sense strand
uggcaauugucauuagcaa

SEQ ID NO: 4404 - RNA, 19 nt, Homo sapiens
  misc_RNA (1)...(19): siRNA sense strand
caucuacggcaucaucaug

SEQ ID NO: 4405 - RNA, 19 nt, Homo sapiens
  misc_RNA (1)...(19): siRNA sense strand
ggcaucaucauggcaauug

SEQ ID NO: 4406 - RNA, 19 nt, Homo sapiens
  misc_RNA (1)...(19): siRNA sense strand
uaccggcuccuccaucauu

SEQ ID NO: 4407 - RNA, 19 nt, Homo sapiens
  misc_RNA (1)...(19): siRNA sense strand
ggcauuggccuagcuaucu

SEQ ID NO: 4408 - RNA, 19 nt, Homo sapiens
  misc_RNA (1)...(19): siRNA sense strand
gggcuuccgcuuugaugug

SEQ ID NO: 4409 - RNA, 19 nt, Homo sapiens
  misc_RNA (1)...(19): siRNA sense strand
ggucagcaucaucuucugu

SEQ ID NO: 4410 - RNA, 19 nt, Homo sapiens
  misc_RNA (1)...(19): siRNA sense strand
guacagaccuugaagauug

SEQ ID NO: 4411 - RNA, 19 nt, Homo sapiens
  misc_RNA (1)...(19): siRNA sense strand
ccacaaacauguaaggauu

SEQ ID NO: 4412 - RNA, 19 nt, Homo sapiens
  misc_RNA (1)...(19): siRNA sense strand
cuaaagagccaguugauuu

SEQ ID NO: 4413 - RNA, 19 nt, Homo sapiens
  misc_RNA (1)...(19): siRNA sense strand
gaaaggcuuguaauccaaa

SEQ ID NO: 4414 - RNA, 19 nt, Homo sapiens
  misc_RNA (1)...(19): siRNA sense strand
ugaaaggcuuguaauccaa

SEQ ID NO: 4415 - RNA, 19 nt, Homo sapiens
  misc_RNA (1)...(19): siRNA sense strand
caugauggcuccgcuacuu

SEQ ID NO: 4416 - RNA, 19 nt, Homo sapiens
  misc_RNA (1)...(19): siRNA sense strand
ugaaggguccgaagugauu

SEQ ID NO: 4417 - RNA, 19 nt, Homo sapiens
  misc_RNA (1)...(19): siRNA sense strand
gaccaccacaggaauguuu

SEQ ID NO: 4418 - RNA, 19 nt, Homo sapiens
  misc_RNA (1)...(19): siRNA sense strand
acaaacauguaaggauuga

SEQ ID NO: 4419 - RNA, 19 nt, Homo sapiens
  misc_RNA (1)...(19): siRNA sense strand
ggcuuguaauccaaaguua

SEQ ID NO: 4420 - RNA, 19 nt, Homo sapiens
  misc_RNA (1)...(19): siRNA sense strand
cccaggaauucauuauuug

SEQ ID NO: 4421 - RNA, 19 nt, Homo sapiens
  misc_RNA (1)...(19): siRNA sense strand
uggcuccgcuacuuacuug

SEQ ID NO: 4422 - RNA, 19 nt, Homo sapiens
  misc_RNA (1)...(19): siRNA sense strand
uacagaccuugaagauuga

SEQ ID NO: 4423 - RNA, 19 nt, Homo sapiens
  misc_RNA (1)...(19): siRNA sense strand
gauuuuagcuacaucaagu

SEQ ID NO: 4424 - RNA, 19 nt, Homo sapiens
  misc_RNA (1)...(19): siRNA sense strand
uugaaaggcuuguaaucca

SEQ ID NO: 4425 - RNA, 19 nt, Homo sapiens
  misc_RNA (1)...(19): siRNA sense strand
gaaggguccgaagugauuu

SEQ ID NO: 4426 - RNA, 19 nt, Homo sapiens
  misc_RNA (1)...(19): siRNA sense strand
ccccaggaauucauuauuu

SEQ ID NO: 4427 - RNA, 19 nt, Homo sapiens
  misc_RNA (1)...(19): siRNA sense strand
uaaagagccaguugauuuu

SEQ ID NO: 4428 - RNA, 19 nt, Homo sapiens
  misc_RNA (1)...(19): siRNA sense strand
ucugaaggguccgaaguga

SEQ ID NO: 4429 - RNA, 19 nt, Homo sapiens
  misc_RNA (1)...(19): siRNA sense strand
ggauugaaaggcuuguaau

SEQ ID NO: 4430 - RNA, 19 nt, Homo sapiens
  misc_RNA (1)...(19): siRNA sense strand
aagauuugguacacacaga

SEQ ID NO: 4431 - RNA, 19 nt, Homo sapiens
  misc_RNA (1)...(19): siRNA sense strand
gaagugauuuuagcuacau

SEQ ID NO: 4432 - RNA, 19 nt, Homo sapiens
  misc_RNA (1)...(19): siRNA sense strand
ccaggaauucauuauuugu

SEQ ID NO: 4433 - RNA, 19 nt, Homo sapiens
  misc_RNA (1)...(19): siRNA sense strand
cacaaacauguaaggauug

SEQ ID NO: 4434 - RNA, 19 nt, Homo sapiens
  misc_RNA (1)...(19): siRNA sense strand
aggggcagcuucaaaauga

SEQ ID NO: 4435 - RNA, 19 nt, Homo sapiens
  misc_RNA (1)...(19): siRNA sense strand
cgucuaaagagccaguuga

SEQ ID NO: 4436 - RNA, 19 nt, Homo sapiens
  misc_RNA (1)...(19): siRNA sense strand
gcucugaaggguccgaagu

SEQ ID NO: 4437 - RNA, 19 nt, Homo sapiens
  misc_RNA (1)...(19): siRNA sense strand
gaacuaaauuggaauguga

SEQ ID NO: 4438 - RNA, 19 nt, Homo sapiens
  misc_RNA (1)...(19): siRNA sense strand
ggaauugacuuaaaucgaa

SEQ ID NO: 4439 - RNA, 19 nt, Homo sapiens
  misc_RNA (1)...(19): siRNA sense strand
gcacagagcuucauaaccu

SEQ ID NO: 4440 - RNA, 19 nt, Homo sapiens
  misc_RNA (1)...(19): siRNA sense strand
gcaggagccuacaaauuug

SEQ ID NO: 4441 - RNA, 19 nt, Homo sapiens
  misc_RNA (1)...(19): siRNA sense strand
caccuacucuuuccucuaa

SEQ ID NO: 4442 - RNA, 19 nt, Homo sapiens
  misc_RNA (1)...(19): siRNA sense strand
agaaucaucucuaagcaaa

SEQ ID NO: 4443 - RNA, 19 nt, Homo sapiens
  misc_RNA (1)...(19): siRNA sense strand
gaaugugaaucugcaugua

SEQ ID NO: 4444 - RNA, 19 nt, Homo sapiens
  misc_RNA (1)...(19): siRNA sense strand
gagcaggagccuacaaauu

SEQ ID NO: 4445 - RNA, 19 nt, Homo sapiens
  misc_RNA (1)...(19): siRNA sense strand
gccauucgcugaacugaga

SEQ ID NO: 4446 - RNA, 19 nt, Homo sapiens
  misc_RNA (1)...(19): siRNA sense strand
gaguaucuauggugacuug

SEQ ID NO: 4447 - RNA, 19 nt, Homo sapiens
  misc_RNA (1)...(19): siRNA sense strand
cuacagcuguggagcagua

SEQ ID NO: 4448 - RNA, 19 nt, Homo sapiens
  misc_RNA (1)...(19): siRNA sense strand
aaacagauauccagcuucu

SEQ ID NO: 4449 - RNA, 19 nt, Homo sapiens
  misc_RNA (1)...(19): siRNA sense strand
caauaugcuugccaucuug

SEQ ID NO: 4450 - RNA, 19 nt, Homo sapiens
  misc_RNA (1)...(19): siRNA sense strand
gcacaggaauuuucuugaa

SEQ ID NO: 4451 - RNA, 19 nt, Homo sapiens
  misc_RNA (1)...(19): siRNA sense strand
gaagauggagaaagugaug

SEQ ID NO: 4452 - RNA, 19 nt, Homo sapiens
  misc_RNA (1)...(19): siRNA sense strand
uauggugacuuggaguuua

SEQ ID NO: 4453 - RNA, 19 nt, Homo sapiens
  misc_RNA (1)...(19): siRNA sense strand
cuaaacagauauccagcuu

SEQ ID NO: 4454 - RNA, 19 nt, Homo sapiens
  misc_RNA (1)...(19): siRNA sense strand
cugagaagcugaguaucua

SEQ ID NO: 4455 - RNA, 19 nt, Homo sapiens
  misc_RNA (1)...(19): siRNA sense strand
gaagcagggccucuaccua

SEQ ID NO: 4456 - RNA, 19 nt, Homo sapiens
  misc_RNA (1)...(19): siRNA sense strand
agcaggagccuacaaauuu

SEQ ID NO: 4457 - RNA, 19 nt, Homo sapiens
  misc_RNA (1)...(19): siRNA sense strand
gcacaccuacccuaaggaa

SEQ ID NO: 4458 - RNA, 19 nt, Homo sapiens
  misc_RNA (1)...(19): siRNA sense strand
gagacaagaacaacuuaug

SEQ ID NO: 4459 - RNA, 19 nt, Homo sapiens
  misc_RNA (1)...(19): siRNA sense strand
gaacaaaagcuaaacagau

SEQ ID NO: 4460 - RNA, 19 nt, Homo sapiens
  misc_RNA (1)...(19): siRNA sense strand
guuuguggaugauggaauu

SEQ ID NO: 4461 - RNA, 19 nt, Homo sapiens
  misc_RNA (1)...(19): siRNA sense strand
gaugauggaauugacuuaa

SEQ ID NO: 4462 - RNA, 19 nt, Homo sapiens
  misc_RNA (1)...(19): siRNA sense strand
caaaugagaaauucacaag

SEQ ID NO: 4463 - RNA, 19 nt, Homo sapiens
  misc_RNA (1)...(19): siRNA sense strand
gcaaaugagaaauucacaa

SEQ ID NO: 4464 - RNA, 19 nt, Homo sapiens
  misc_RNA (1)...(19): siRNA sense strand
ccaaucugaugagcaauau

SEQ ID NO: 4465 - RNA, 19 nt, Homo sapiens
  misc_RNA (1)...(19): siRNA sense strand
agaagcauauucccaaucu

SEQ ID NO: 4466 - RNA, 19 nt, Homo sapiens
  misc_RNA (1)...(19): siRNA sense strand
aaacugaagaucaugaaga

SEQ ID NO: 4467 - RNA, 19 nt, Homo sapiens
  misc_RNA (1)...(19): siRNA sense strand
ccaguacgcaccacauuug

SEQ ID NO: 4468 - RNA, 19 nt, Homo sapiens
  misc_RNA (1)...(19): siRNA sense strand
ggaugauggaauugacuua

SEQ ID NO: 4469 - RNA, 19 nt, Homo sapiens
  misc_RNA (1)...(19): siRNA sense strand
cuacaaauuugagagaauc

SEQ ID NO: 4470 - RNA, 19 nt, Homo sapiens
  misc_RNA (1)...(19): siRNA sense strand
cgaacuaaauuggaaugug

SEQ ID NO: 4471 - RNA, 19 nt, Homo sapiens
  misc_RNA (1)...(19): siRNA sense strand
guauugcuuuggauuuguu

SEQ ID NO: 4472 - RNA, 19 nt, Homo sapiens
  misc_RNA (1)...(19): siRNA sense strand
cacaagcgcacaggaauuu

SEQ ID NO: 4473 - RNA, 19 nt, Homo sapiens
  misc_RNA (1)...(19): siRNA sense strand
gaacugagacaagaacaac

SEQ ID NO: 4474 - RNA, 19 nt, Homo sapiens
  misc_RNA (1)...(19): siRNA sense strand
cuaaggaagaggaguugua

SEQ ID NO: 4475 - RNA, 19 nt, Homo sapiens
  misc_RNA (1)...(19): siRNA sense strand
aacugaagaucaugaagaa

SEQ ID NO: 4476 - RNA, 19 nt, Homo sapiens
  misc_RNA (1)...(19): siRNA sense strand
acuuggaguuuaugaauga

SEQ ID NO: 4477 - RNA, 19 nt, Homo sapiens
  misc_RNA (1)...(19): siRNA sense strand
gcaccuacucuuuccucua

SEQ ID NO: 4478 - RNA, 19 nt, Homo sapiens
  misc_RNA (1)...(19): siRNA sense strand
ggaaugugaaucugcaugu

SEQ ID NO: 4479 - RNA, 19 nt, Homo sapiens
  misc_RNA (1)...(19): siRNA sense strand
caucuugguugccagaauc

SEQ ID NO: 4480 - RNA, 19 nt, Homo sapiens
  misc_RNA (1)...(19): siRNA sense strand
gacuuggaguuuaugaaug

SEQ ID NO: 4481 - RNA, 19 nt, Homo sapiens
  misc_RNA (1)...(19): siRNA sense strand
gugaugguauugcuuugga

SEQ ID NO: 4482 - RNA, 19 nt, Homo sapiens
  misc_RNA (1)...(19): siRNA sense strand
uaacucuggugaggucauu

SEQ ID NO: 4483 - RNA, 19 nt, Homo sapiens
  misc_RNA (1)...(19): siRNA sense strand
ucgcugaacugagacaaga

SEQ ID NO: 4484 - RNA, 19 nt, Homo sapiens
  misc_RNA (1)...(19): siRNA sense strand
acagauauccagcuucuuc

SEQ ID NO: 4485 - RNA, 19 nt, Homo sapiens
  misc_RNA (1)...(19): siRNA sense strand
aagcauauucccaaucuga

SEQ ID NO: 4486 - RNA, 19 nt, Homo sapiens
  misc_RNA (1)...(19): siRNA sense strand
gaagcugaguaucuauggu

SEQ ID NO: 4487 - RNA, 19 nt, Homo sapiens
  misc_RNA (1)...(19): siRNA sense strand
gagaagcugaguaucuaug

SEQ ID NO: 4488 - RNA, 19 nt, Homo sapiens
  misc_RNA (1)...(19): siRNA sense strand
acaccuacccuaaggaaga

SEQ ID NO: 4489 - RNA, 19 nt, Homo sapiens
  misc_RNA (1)...(19): siRNA sense strand
gaagaagcagggccucuac

SEQ ID NO: 4490 - RNA, 19 nt, Homo sapiens
  misc_RNA (1)...(19): siRNA sense strand
ugacuuggaguuuaugaau

SEQ ID NO: 4491 - RNA, 19 nt, Homo sapiens
  misc_RNA (1)...(19): siRNA sense strand
uuaugucccugaugccaaa

SEQ ID NO: 4492 - RNA, 19 nt, Homo sapiens
  misc_RNA (1)...(19): siRNA sense strand
ugaagaucaugaagaagca

SEQ ID NO: 4493 - RNA, 19 nt, Homo sapiens
  misc_RNA (1)...(19): siRNA sense strand
gacucggucuugggugaua

SEQ ID NO: 4494 - RNA, 19 nt, Homo sapiens
  misc_RNA (1)...(19): siRNA sense strand
ucacaagcgcacaggaauu

SEQ ID NO: 4495 - RNA, 19 nt, Homo sapiens
  misc_RNA (1)...(19): siRNA sense strand
caaaauguccuaucugcaa

SEQ ID NO: 4496 - RNA, 19 nt, Homo sapiens
  misc_RNA (1)...(19): siRNA sense strand
ccuacaaauuugagagaau

SEQ ID NO: 4497 - RNA, 19 nt, Homo sapiens
  misc_RNA (1)...(19): siRNA sense strand
agacaagaacaacuuaugu

SEQ ID NO: 4498 - RNA, 19 nt, Homo sapiens
  misc_RNA (1)...(19): siRNA sense strand
gcauauucccaaucugaug

SEQ ID NO: 4499 - RNA, 19 nt, Homo sapiens
  misc_RNA (1)...(19): siRNA sense strand
cauauucccaaucugauga

SEQ ID NO: 4500 - RNA, 19 nt, Homo sapiens
  misc_RNA (1)...(19): siRNA sense strand
cagggccucuaccuacaaa

SEQ ID NO: 4501 - RNA, 19 nt, Homo sapiens
  misc_RNA (1)...(19): siRNA sense strand
agcaguauguucccucuga

SEQ ID NO: 4502 - RNA, 19 nt, Homo sapiens
  misc_RNA (1)...(19): siRNA sense strand
gaugguauugcuuuggauu

SEQ ID NO: 4503 - RNA, 19 nt, Homo sapiens
  misc_RNA (1)...(19): siRNA sense strand
gccagaaucagcugccauu

SEQ ID NO: 4504 - RNA, 19 nt, Homo sapiens
  misc_RNA (1)...(19): siRNA sense strand
gguauugcuuuggauuugu

SEQ ID NO: 4505 - RNA, 19 nt, Homo sapiens
  misc_RNA (1)...(19): siRNA sense strand
ccucugagaagcugaguau

SEQ ID NO: 4506 - RNA, 19 nt, Homo sapiens
  misc_RNA (1)...(19): siRNA sense strand
uucauaaccucuucaugga

SEQ ID NO: 4507 - RNA, 19 nt, Homo sapiens
  misc_RNA (1)...(19): siRNA sense strand
ugaagaagcagggccucua

SEQ ID NO: 4508 - RNA, 19 nt, Homo sapiens
  misc_RNA (1)...(19): siRNA sense strand
cuucuucucuugugguugu

SEQ ID NO: 4509 - RNA, 19 nt, Homo sapiens
  misc_RNA (1)...(19): siRNA sense strand
uauccagcuucuucucuug

SEQ ID NO: 4510 - RNA, 19 nt, Homo sapiens
  misc_RNA (1)...(19): siRNA sense strand
acagaagcauauucccaau

SEQ ID NO: 4511 - RNA, 19 nt, Homo sapiens
  misc_RNA (1)...(19): siRNA sense strand
gcagggccucuaccuacaa

SEQ ID NO: 4512 - RNA, 19 nt, Homo sapiens
  misc_RNA (1)...(19): siRNA sense strand
gaagcauauucccaaucug

SEQ ID NO: 4513 - RNA, 19 nt, Homo sapiens
  misc_RNA (1)...(19): siRNA sense strand
cccaaucugaugagcaaua

SEQ ID NO: 4514 - RNA, 19 nt, Homo sapiens
  misc_RNA (1)...(19): siRNA sense strand
uguccuaucugcaaaugag

SEQ ID NO: 4515 - RNA, 19 nt, Homo sapiens
  misc_RNA (1)...(19): siRNA sense strand
ggagcaggagccuacaaau

SEQ ID NO: 4516 - RNA, 19 nt, Homo sapiens
  misc_RNA (1)...(19): siRNA sense strand
guuguacgcaugucagaga

SEQ ID NO: 4517 - RNA, 19 nt, Homo sapiens
  misc_RNA (1)...(19): siRNA sense strand
ugguauugcuuuggauuug

SEQ ID NO: 4518 - RNA, 19 nt, Homo sapiens
  misc_RNA (1)...(19): siRNA sense strand
ugaggucauucuggaguga

SEQ ID NO: 4519 - RNA, 19 nt, Homo sapiens
  misc_RNA (1)...(19): siRNA sense strand
aaagugaaucuugcucauu

SEQ ID NO: 4520 - RNA, 19 nt, Homo sapiens
  misc_RNA (1)...(19): siRNA sense strand
uuugucaguuuguggauga

SEQ ID NO: 4521 - RNA, 19 nt, Homo sapiens
  misc_RNA (1)...(19): siRNA sense strand
caaauuugagagaaucauc

SEQ ID NO: 4522 - RNA, 19 nt, Homo sapiens
  misc_RNA (1)...(19): siRNA sense strand
gccuacaaauuugagagaa

SEQ ID NO: 4523 - RNA, 19 nt, Homo sapiens
  misc_RNA (1)...(19): siRNA sense strand
ucaagccgaugacggaaaa

SEQ ID NO: 4524 - RNA, 19 nt, Homo sapiens
  misc_RNA (1)...(19): siRNA sense strand
gauggaauugacuuaaauc

SEQ ID NO: 4525 - RNA, 19 nt, Homo sapiens
  misc_RNA (1)...(19): siRNA sense strand
gcauguacagaagcauauu

SEQ ID NO: 4526 - RNA, 19 nt, Homo sapiens
  misc_RNA (1)...(19): siRNA sense strand
gauauccagcuucuucucu

SEQ ID NO: 4527 - RNA, 19 nt, Homo sapiens
  misc_RNA (1)...(19): siRNA sense strand
uaagcaaaauguccuaucu

SEQ ID NO: 4528 - RNA, 19 nt, Homo sapiens
  misc_RNA (1)...(19): siRNA sense strand
ccaucuugguugccagaau

SEQ ID NO: 4529 - RNA, 19 nt, Homo sapiens
  misc_RNA (1)...(19): siRNA sense strand
cugagacaagaacaacuua

SEQ ID NO: 4530 - RNA, 19 nt, Homo sapiens
  misc_RNA (1)...(19): siRNA sense strand
gcaggcuguuuucaauuug

SEQ ID NO: 4531 - RNA, 19 nt, Homo sapiens
  misc_RNA (1)...(19): siRNA sense strand
uggaguuuaugaaugaaca

SEQ ID NO: 4532 - RNA, 19 nt, Homo sapiens
  misc_RNA (1)...(19): siRNA sense strand
uaaggaagaggaguuguac

SEQ ID NO: 4533 - RNA, 19 nt, Homo sapiens
  misc_RNA (1)...(19): siRNA sense strand
cugcauguacagaagcaua

SEQ ID NO: 4534 - RNA, 19 nt, Homo sapiens
  misc_RNA (1)...(19): siRNA sense strand
aaaauguccuaucugcaaa

SEQ ID NO: 4535 - RNA, 19 nt, Homo sapiens
  misc_RNA (1)...(19): siRNA sense strand
ggaaauaagacucaaguua

SEQ ID NO: 4536 - RNA, 19 nt, Homo sapiens
  misc_RNA (1)...(19): siRNA sense strand
ugaagaagaugaagaugaa

SEQ ID NO: 4537 - RNA, 19 nt, Homo sapiens
  misc_RNA (1)...(19): siRNA sense strand
gauaagauacacagaagua

SEQ ID NO: 4538 - RNA, 19 nt, Homo sapiens
  misc_RNA (1)...(19): siRNA sense strand
gaagaagacuaugaugaug

SEQ ID NO: 4539 - RNA, 19 nt, Homo sapiens
  misc_RNA (1)...(19): siRNA sense strand
caaacaccgugccuaaauu

SEQ ID NO: 4540 - RNA, 19 nt, Homo sapiens
  misc_RNA (1)...(19): siRNA sense strand
aguacaagcuccuguuaua

SEQ ID NO: 4541 - RNA, 19 nt, Homo sapiens
  misc_RNA (1)...(19): siRNA sense strand
ggaaggacaggaacucuuu

SEQ ID NO: 4542 - RNA, 19 nt, Homo sapiens
  misc_RNA (1)...(19): siRNA sense strand
gaaauuucaucucaaggau

SEQ ID NO: 4543 - RNA, 19 nt, Homo sapiens
  misc_RNA (1)...(19): siRNA sense strand
ggaggaagacaaagagaaa

SEQ ID NO: 4544 - RNA, 19 nt, Homo sapiens
  misc_RNA (1)...(19): siRNA sense strand
ggagggauuucaccacaga

SEQ ID NO: 4545 - RNA, 19 nt, Homo sapiens
  misc_RNA (1)...(19): siRNA sense strand
uggaguggaugaacaagua

SEQ ID NO: 4546 - RNA, 19 nt, Homo sapiens
  misc_RNA (1)...(19): siRNA sense strand
agaugaagaugaagaagaa

SEQ ID NO: 4547 - RNA, 19 nt, Homo sapiens
  misc_RNA (1)...(19): siRNA sense strand
ccauuggucuuacaaguug

SEQ ID NO: 4548 - RNA, 19 nt, Homo sapiens
  misc_RNA (1)...(19): siRNA sense strand
agagaaagauggagcugaa

SEQ ID NO: 4549 - RNA, 19 nt, Homo sapiens
  misc_RNA (1)...(19): siRNA sense strand
aaacaccgugccuaaauua

SEQ ID NO: 4550 - RNA, 19 nt, Homo sapiens
  misc_RNA (1)...(19): siRNA sense strand
ggauacaucaucugaagaa

SEQ ID NO: 4551 - RNA, 19 nt, Homo sapiens
  misc_RNA (1)...(19): siRNA sense strand
ggaaauuucaucucaagga

SEQ ID NO: 4552 - RNA, 19 nt, Homo sapiens
  misc_RNA (1)...(19): siRNA sense strand
ggaacucuuugacacagaa

SEQ ID NO: 4553 - RNA, 19 nt, Homo sapiens
  misc_RNA (1)...(19): siRNA sense strand
ggacaggaacucuuugaca

SEQ ID NO: 4554 - RNA, 19 nt, Homo sapiens
  misc_RNA (1)...(19): siRNA sense strand
guagauggauuucauucag

SEQ ID NO: 4555 - RNA, 19 nt, Homo sapiens
  misc_RNA (1)...(19): siRNA sense strand
ucucaaggauggcauuaug

SEQ ID NO: 4556 - RNA, 19 nt, Homo sapiens
  misc_RNA (1)...(19): siRNA sense strand
ugcuacagcugcuaccuua

SEQ ID NO: 4557 - RNA, 19 nt, Homo sapiens
  misc_RNA (1)...(19): siRNA sense strand
gauggcauuaugaaucuua

SEQ ID NO: 4558 - RNA, 19 nt, Homo sapiens
  misc_RNA (1)...(19): siRNA sense strand
ccaauggugcccaauauau

SEQ ID NO: 4559 - RNA, 19 nt, Homo sapiens
  misc_RNA (1)...(19): siRNA sense strand
caacagguuauaccacaaa

SEQ ID NO: 4560 - RNA, 19 nt, Homo sapiens
  misc_RNA (1)...(19): siRNA sense strand
gaagacaaagagaaagaug

SEQ ID NO: 4561 - RNA, 19 nt, Homo sapiens
  misc_RNA (1)...(19): siRNA sense strand
gaagaagaagacuaugaug

SEQ ID NO: 4562 - RNA, 19 nt, Homo sapiens
  misc_RNA (1)...(19): siRNA sense strand
ggcaguagauggauuucau

SEQ ID NO: 4563 - RNA, 19 nt, Homo sapiens
  misc_RNA (1)...(19): siRNA sense strand
gaagaagagccccucaaua

SEQ ID NO: 4564 - RNA, 19 nt, Homo sapiens
  misc_RNA (1)...(19): siRNA sense strand
gaaagauggagcugaagau

SEQ ID NO: 4565 - RNA, 19 nt, Homo sapiens
  misc_RNA (1)...(19): siRNA sense strand
gaagaugaugugagugaug

SEQ ID NO: 4566 - RNA, 19 nt, Homo sapiens
  misc_RNA (1)...(19): siRNA sense strand
caaguuauuguuccagauu

SEQ ID NO: 4567 - RNA, 19 nt, Homo sapiens
  misc_RNA (1)...(19): siRNA sense strand
cuaaguugauacagcauau

SEQ ID NO: 4568 - RNA, 19 nt, Homo sapiens
  misc_RNA (1)...(19): siRNA sense strand
acaccgugccuaaauuaua

SEQ ID NO: 4569 - RNA, 19 nt, Homo sapiens
  misc_RNA (1)...(19): siRNA sense strand
gugaagaugaugugaguga

SEQ ID NO: 4570 - RNA, 19 nt, Homo sapiens
  misc_RNA (1)...(19): siRNA sense strand
aagaugaugugagugauga

SEQ ID NO: 4571 - RNA, 19 nt, Homo sapiens
  misc_RNA (1)...(19): siRNA sense strand
ccacagcaccacaaguuau

SEQ ID NO: 4572 - RNA, 19 nt, Homo sapiens
  misc_RNA (1)...(19): siRNA sense strand
auacaaacaccgugccuaa

SEQ ID NO: 4573 - RNA, 19 nt, Homo sapiens
  misc_RNA (1)...(19): siRNA sense strand
agaagaagacuaugaugau

SEQ ID NO: 4574 - RNA, 19 nt, Homo sapiens
  misc_RNA (1)...(19): siRNA sense strand
gugccuaaauuauacagau

SEQ ID NO: 4575 - RNA, 19 nt, Homo sapiens
  misc_RNA (1)...(19): siRNA sense strand
agaagacuaugaugaugau

SEQ ID NO: 4576 - RNA, 19 nt, Homo sapiens
  misc_RNA (1)...(19): siRNA sense strand
uagauggauuucauucaga

SEQ ID NO: 4577 - RNA, 19 nt, Homo sapiens
  misc_RNA (1)...(19): siRNA sense strand
acaaacaccgugccuaaau

SEQ ID NO: 4578 - RNA, 19 nt, Homo sapiens
  misc_RNA (1)...(19): siRNA sense strand
aagaagaagacuaugauga

SEQ ID NO: 4579 - RNA, 19 nt, Homo sapiens
  misc_RNA (1)...(19): siRNA sense strand
gcacagauaacugcaacug

SEQ ID NO: 4580 - RNA, 19 nt, Homo sapiens
  misc_RNA (1)...(19): siRNA sense strand
gccaauggugcccaauaua

SEQ ID NO: 4581 - RNA, 19 nt, Homo sapiens
  misc_RNA (1)...(19): siRNA sense strand
ggucagagcagccaauggu

SEQ ID NO: 4582 - RNA, 19 nt, Homo sapiens
  misc_RNA (1)...(19): siRNA sense strand
gcaguagauggauuucauu

SEQ ID NO: 4583 - RNA, 19 nt, Homo sapiens
  misc_RNA (1)...(19): siRNA sense strand
guuguaugccaauaugaua

SEQ ID NO: 4584 - RNA, 19 nt, Homo sapiens
  misc_RNA (1)...(19): siRNA sense strand
guuguuguaugccaauaug

SEQ ID NO: 4585 - RNA, 19 nt, Homo sapiens
  misc_RNA (1)...(19): siRNA sense strand
ucaaacacaagcuccauug

SEQ ID NO: 4586 - RNA, 19 nt, Homo sapiens
  misc_RNA (1)...(19): siRNA sense strand
augaaugcaucaaacauga

SEQ ID NO: 4587 - RNA, 19 nt, Homo sapiens
  misc_RNA (1)...(19): siRNA sense strand
ugaagaagaagacuaugau

SEQ ID NO: 4588 - RNA, 19 nt, Homo sapiens
  misc_RNA (1)...(19): siRNA sense strand
ucaaggauggcauuaugaa

SEQ ID NO: 4589 - RNA, 19 nt, Homo sapiens
  misc_RNA (1)...(19): siRNA sense strand
gaagagccccucaauagug

SEQ ID NO: 4590 - RNA, 19 nt, Homo sapiens
  misc_RNA (1)...(19): siRNA sense strand
ggaugaacaaguacugaug

SEQ ID NO: 4591 - RNA, 19 nt, Homo sapiens
  misc_RNA (1)...(19): siRNA sense strand
guucuacaacaacagguua

SEQ ID NO: 4592 - RNA, 19 nt, Homo sapiens
  misc_RNA (1)...(19): siRNA sense strand
gaacucggcaaauacaaac

SEQ ID NO: 4593 - RNA, 19 nt, Homo sapiens
  misc_RNA (1)...(19): siRNA sense strand
agauggauuucauucagaa

SEQ ID NO: 4594 - RNA, 19 nt, Homo sapiens
  misc_RNA (1)...(19): siRNA sense strand
cgaacucggcaaauacaaa

SEQ ID NO: 4595 - RNA, 19 nt, Homo sapiens
  misc_RNA (1)...(19): siRNA sense strand
cagaaaauguuguuguaug

SEQ ID NO: 4596 - RNA, 19 nt, Homo sapiens
  misc_RNA (1)...(19): siRNA sense strand
uagugaagaugaugugagu

SEQ ID NO: 4597 - RNA, 19 nt, Homo sapiens
  misc_RNA (1)...(19): siRNA sense strand
caccgugccuaaauuauac

SEQ ID NO: 4598 - RNA, 19 nt, Homo sapiens
  misc_RNA (1)...(19): siRNA sense strand
gcagucagugguucuacaa

SEQ ID NO: 4599 - RNA, 19 nt, Homo sapiens
  misc_RNA (1)...(19): siRNA sense strand
caugagugcugcugcuaca

SEQ ID NO: 4600 - RNA, 19 nt, Homo sapiens
  misc_RNA (1)...(19): siRNA sense strand
gccacagcaccacaaguua

SEQ ID NO: 4601 - RNA, 19 nt, Homo sapiens
  misc_RNA (1)...(19): siRNA sense strand
cacagaaaauguuguugua

SEQ ID NO: 4602 - RNA, 19 nt, Homo sapiens
  misc_RNA (1)...(19): siRNA sense strand
ugaugugagugaugaggaa

SEQ ID NO: 4603 - RNA, 19 nt, Homo sapiens
  misc_RNA (1)...(19): siRNA sense strand
ccagggcaguagauggauu

SEQ ID NO: 4604 - RNA, 19 nt, Homo sapiens
  misc_RNA (1)...(19): siRNA sense strand
gucagugguucuacaacaa

SEQ ID NO: 4605 - RNA, 19 nt, Homo sapiens
  misc_RNA (1)...(19): siRNA sense strand
gcagacaguaccucagcaa

SEQ ID NO: 4606 - RNA, 19 nt, Homo sapiens
  misc_RNA (1)...(19): siRNA sense strand
caaguacugauggaacuaa

SEQ ID NO: 4607 - RNA, 19 nt, Homo sapiens
  misc_RNA (1)...(19): siRNA sense strand
gaaggacaggaacucuuug

SEQ ID NO: 4608 - RNA, 19 nt, Homo sapiens
  misc_RNA (1)...(19): siRNA sense strand
gcagccugguggaguacaa

SEQ ID NO: 4609 - RNA, 19 nt, Homo sapiens
  misc_RNA (1)...(19): siRNA sense strand
aaugcagccugguggagua

SEQ ID NO: 4610 - RNA, 19 nt, Homo sapiens
  misc_RNA (1)...(19): siRNA sense strand
cagccaauggugcccaaua

SEQ ID NO: 4611 - RNA, 19 nt, Homo sapiens
  misc_RNA (1)...(19): siRNA sense strand
gccaauaugauaagauaca

SEQ ID NO: 4612 - RNA, 19 nt, Homo sapiens
  misc_RNA (1)...(19): siRNA sense strand
agacaaagagaaagaugga

SEQ ID NO: 4613 - RNA, 19 nt, Homo sapiens
  misc_RNA (1)...(19): siRNA sense strand
ggcccagccugcucaaaca

SEQ ID NO: 4614 - RNA, 19 nt, Homo sapiens
  misc_RNA (1)...(19): siRNA sense strand
gcaagccacagcaccacaa

SEQ ID NO: 4615 - RNA, 19 nt, Homo sapiens
  misc_RNA (1)...(19): siRNA sense strand
ggucuuacaaguugaugga

SEQ ID NO: 4616 - RNA, 19 nt, Homo sapiens
  misc_RNA (1)...(19): siRNA sense strand
guucagcagauauuaacaa

SEQ ID NO: 4617 - RNA, 19 nt, Homo sapiens
  misc_RNA (1)...(19): siRNA sense strand
ggaagacaaagagaaagau

SEQ ID NO: 4618 - RNA, 19 nt, Homo sapiens
  misc_RNA (1)...(19): siRNA sense strand
aagaagacuaugaugauga

SEQ ID NO: 4619 - RNA, 19 nt, Homo sapiens
  misc_RNA (1)...(19): siRNA sense strand
cugaagaagaugaagauga

SEQ ID NO: 4620 - RNA, 19 nt, Homo sapiens
  misc_RNA (1)...(19): siRNA sense strand
gaguacaagcuccuguuau

SEQ ID NO: 4621 - RNA, 19 nt, Homo sapiens
  misc_RNA (1)...(19): siRNA sense strand
gcagcagcaucaccaccau

SEQ ID NO: 4622 - RNA, 19 nt, Homo sapiens
  misc_RNA (1)...(19): siRNA sense strand
caaagccauuggagaugca

SEQ ID NO: 4623 - RNA, 19 nt, Homo sapiens
  misc_RNA (1)...(19): siRNA sense strand
caauggugcccaauauauc

SEQ ID NO: 4624 - RNA, 19 nt, Homo sapiens
  misc_RNA (1)...(19): siRNA sense strand
gaaugcaucaaacaugagu

SEQ ID NO: 4625 - RNA, 19 nt, Homo sapiens
  misc_RNA (1)...(19): siRNA sense strand
guugauacagcauaugaau

SEQ ID NO: 4626 - RNA, 19 nt, Homo sapiens
  misc_RNA (1)...(19): siRNA sense strand
guuccagauucuaaguuga

SEQ ID NO: 4627 - RNA, 19 nt, Homo sapiens
  misc_RNA (1)...(19): siRNA sense strand
ugacuccuguucagcagau

SEQ ID NO: 4628 - RNA, 19 nt, Homo sapiens
  misc_RNA (1)...(19): siRNA sense strand
ccucaauagugaagaugau

SEQ ID NO: 4629 - RNA, 19 nt, Homo sapiens
  misc_RNA (1)...(19): siRNA sense strand
agacuaugaugaugaugag

SEQ ID NO: 4630 - RNA, 19 nt, Homo sapiens
  misc_RNA (1)...(19): siRNA sense strand
cauccagccucagcaaauc

SEQ ID NO: 4631 - RNA, 19 nt, Homo sapiens
  misc_RNA (1)...(19): siRNA sense strand
agccaauggugcccaauau

SEQ ID NO: 4632 - RNA, 19 nt, Homo sapiens
  misc_RNA (1)...(19): siRNA sense strand
agaagaugaagaugaagaa

SEQ ID NO: 4633 - RNA, 19 nt, Homo sapiens
  misc_RNA (1)...(19): siRNA sense strand
agaaagauggagcugaaga

SEQ ID NO: 4634 - RNA, 19 nt, Homo sapiens
  misc_RNA (1)...(19): siRNA sense strand
agaugaagaagaagacuau

SEQ ID NO: 4635 - RNA, 19 nt, Homo sapiens
  misc_RNA (1)...(19): siRNA sense strand
ggaagagcguugagguuua

SEQ ID NO: 4636 - RNA, 19 nt, Homo sapiens
  misc_RNA (1)...(19): siRNA sense strand
uaaaugggcuccuguaugu

SEQ ID NO: 4637 - RNA, 19 nt, Homo sapiens
  misc_RNA (1)...(19): siRNA sense strand
gggaaagcauucaagguua

SEQ ID NO: 4638 - RNA, 19 nt, Homo sapiens
  misc_RNA (1)...(19): siRNA sense strand
guaaagacuuccucauuga

SEQ ID NO: 4639 - RNA, 19 nt, Homo sapiens
  misc_RNA (1)...(19): siRNA sense strand
ugaguaagcugauugacua

SEQ ID NO: 4640 - RNA, 19 nt, Homo sapiens
  misc_RNA (1)...(19): siRNA sense strand
ggcagaagaugucgagaua

SEQ ID NO: 4641 - RNA, 19 nt, Homo sapiens
  misc_RNA (1)...(19): siRNA sense strand
gaagaagaagcuuugauaa

SEQ ID NO: 4642 - RNA, 19 nt, Homo sapiens
  misc_RNA (1)...(19): siRNA sense strand
gcgcagcggugcucaauga

SEQ ID NO: 4643 - RNA, 19 nt, Homo sapiens
  misc_RNA (1)...(19): siRNA sense strand
ugaaugaacugcggaguaa

SEQ ID NO: 4644 - RNA, 19 nt, Homo sapiens
  misc_RNA (1)...(19): siRNA sense strand
ggaaagcauucaagguuau

SEQ ID NO: 4645 - RNA, 19 nt, Homo sapiens
  misc_RNA (1)...(19): siRNA sense strand
cagaagaugucgagauaga

SEQ ID NO: 4646 - RNA, 19 nt, Homo sapiens
  misc_RNA (1)...(19): siRNA sense strand
ugaagaagaagcuuugaua

SEQ ID NO: 4647 - RNA, 19 nt, Homo sapiens
  misc_RNA (1)...(19): siRNA sense strand
ccaaacgguugaagaagaa

SEQ ID NO: 4648 - RNA, 19 nt, Homo sapiens
  misc_RNA (1)...(19): siRNA sense strand
ggacgcugcuuccaacgaa

SEQ ID NO: 4649 - RNA, 19 nt, Homo sapiens
  misc_RNA (1)...(19): siRNA sense strand
uguaaagacuuccucauug

SEQ ID NO: 4650 - RNA, 19 nt, Homo sapiens
  misc_RNA (1)...(19): siRNA sense strand
cagagacuauugauuaaga

SEQ ID NO: 4651 - RNA, 19 nt, Homo sapiens
  misc_RNA (1)...(19): siRNA sense strand
ggacaguggauguguauga

SEQ ID NO: 4652 - RNA, 19 nt, Homo sapiens
  misc_RNA (1)...(19): siRNA sense strand
uggcaaagcugauggaaca

SEQ ID NO: 4653 - RNA, 19 nt, Homo sapiens
  misc_RNA (1)...(19): siRNA sense strand
ugacaugucugagaguaaa

SEQ ID NO: 4654 - RNA, 19 nt, Homo sapiens
  misc_RNA (1)...(19): siRNA sense strand
gcgacaagcugaccguuuc

SEQ ID NO: 4655 - RNA, 19 nt, Homo sapiens
  misc_RNA (1)...(19): siRNA sense strand
gaugcuaggagaagaauuu

SEQ ID NO: 4656 - RNA, 19 nt, Homo sapiens
  misc_RNA (1)...(19): siRNA sense strand
gaacaaauaccuggaagca

SEQ ID NO: 4657 - RNA, 19 nt, Homo sapiens
  misc_RNA (1)...(19): siRNA sense strand
gauggaacauguccgacuu

SEQ ID NO: 4658 - RNA, 19 nt, Homo sapiens
  misc_RNA (1)...(19): siRNA sense strand
cgaggugacugaagagaau

SEQ ID NO: 4659 - RNA, 19 nt, Homo sapiens
  misc_RNA (1)...(19): siRNA sense strand
caacaccuguaaagacuuc

SEQ ID NO: 4660 - RNA, 19 nt, Homo sapiens
  misc_RNA (1)...(19): siRNA sense strand
gaagagaagguguuugaag

SEQ ID NO: 4661 - RNA, 19 nt, Homo sapiens
  misc_RNA (1)...(19): siRNA sense strand
cagaagagaagguguuuga

SEQ ID NO: 4662 - RNA, 19 nt, Homo sapiens
  misc_RNA (1)...(19): siRNA sense strand
gaccaggugugcagcuuga

SEQ ID NO: 4663 - RNA, 19 nt, Homo sapiens
  misc_RNA (1)...(19): siRNA sense strand
gaagagcguugagguuuac

SEQ ID NO: 4664 - RNA, 19 nt, Homo sapiens
  misc_RNA (1)...(19): siRNA sense strand
caaagcugauggaacaugu

SEQ ID NO: 4665 - RNA, 19 nt, Homo sapiens
  misc_RNA (1)...(19): siRNA sense strand
gaugauggauccugcaacu

SEQ ID NO: 4666 - RNA, 19 nt, Homo sapiens
  misc_RNA (1)...(19): siRNA sense strand
guaaaugggcuccuguaug

SEQ ID NO: 4667 - RNA, 19 nt, Homo sapiens
  misc_RNA (1)...(19): siRNA sense strand
ggaagcaaguggcagacau

SEQ ID NO: 4668 - RNA, 19 nt, Homo sapiens
  misc_RNA (1)...(19): siRNA sense strand
ggauauacguggcggacau

SEQ ID NO: 4669 - RNA, 19 nt, Homo sapiens
  misc_RNA (1)...(19): siRNA sense strand
ggugacaugucugagagua

SEQ ID NO: 4670 - RNA, 19 nt, Homo sapiens
  misc_RNA (1)...(19): siRNA sense strand
caucuauacugcugaaauc

SEQ ID NO: 4671 - RNA, 19 nt, Homo sapiens
  misc_RNA (1)...(19): siRNA sense strand
gaauaacaacaccuguaaa

SEQ ID NO: 4672 - RNA, 19 nt, Homo sapiens
  misc_RNA (1)...(19): siRNA sense strand
agaauaacaacaccuguaa

SEQ ID NO: 4673 - RNA, 19 nt, Homo sapiens
  misc_RNA (1)...(19): siRNA sense strand
ggacguccauugccagcau

SEQ ID NO: 4674 - RNA, 19 nt, Homo sapiens
  misc_RNA (1)...(19): siRNA sense strand
gagcaggugugguguucau

SEQ ID NO: 4675 - RNA, 19 nt, Homo sapiens
  misc_RNA (1)...(19): siRNA sense strand
cugauugacuacaucuaua

SEQ ID NO: 4676 - RNA, 19 nt, Homo sapiens
  misc_RNA (1)...(19): siRNA sense strand
uggcuucgguggaguacua

SEQ ID NO: 4677 - RNA, 19 nt, Homo sapiens
  misc_RNA (1)...(19): siRNA sense strand
gaagaugucgagauagaag

SEQ ID NO: 4678 - RNA, 19 nt, Homo sapiens
  misc_RNA (1)...(19): siRNA sense strand
uaacaacaccuguaaagac

SEQ ID NO: 4679 - RNA, 19 nt, Homo sapiens
  misc_RNA (1)...(19): siRNA sense strand
uguccgacuuccucucuua

SEQ ID NO: 4680 - RNA, 19 nt, Homo sapiens
  misc_RNA (1)...(19): siRNA sense strand
aaaucgaggugacugaaga

SEQ ID NO: 4681 - RNA, 19 nt, Homo sapiens
  misc_RNA (1)...(19): siRNA sense strand
gcacauggcaaagcugaug

SEQ ID NO: 4682 - RNA, 19 nt, Homo sapiens
  misc_RNA (1)...(19): siRNA sense strand
guacuacaauccugucacu

SEQ ID NO: 4683 - RNA, 19 nt, Homo sapiens
  misc_RNA (1)...(19): siRNA sense strand
gggaagcuauaugcuguug

SEQ ID NO: 4684 - RNA, 19 nt, Homo sapiens
  misc_RNA (1)...(19): siRNA sense strand
cagcggugcucaaugacuu

SEQ ID NO: 4685 - RNA, 19 nt, Homo sapiens
  misc_RNA (1)...(19): siRNA sense strand
ugucaacccugcccacaug

SEQ ID NO: 4686 - RNA, 19 nt, Homo sapiens
  misc_RNA (1)...(19): siRNA sense strand
cuacaucuauacugcugaa

SEQ ID NO: 4687 - RNA, 19 nt, Homo sapiens
  misc_RNA (1)...(19): siRNA sense strand
gcaaguggcagacaugaac

SEQ ID NO: 4688 - RNA, 19 nt, Homo sapiens
  misc_RNA (1)...(19): siRNA sense strand
guaagcugauugacuacau

SEQ ID NO: 4689 - RNA, 19 nt, Homo sapiens
  misc_RNA (1)...(19): siRNA sense strand
uccaaacgguugaagaaga

SEQ ID NO: 4690 - RNA, 19 nt, Homo sapiens
  misc_RNA (1)...(19): siRNA sense strand
gcuguugugugacgugaug

SEQ ID NO: 4691 - RNA, 19 nt, Homo sapiens
  misc_RNA (1)...(19): siRNA sense strand
guuugaagcugugaucuca

SEQ ID NO: 4692 - RNA, 19 nt, Homo sapiens
  misc_RNA (1)...(19): siRNA sense strand
gaagcaaguggcagacaug

SEQ ID NO: 4693 - RNA, 19 nt, Homo sapiens
  misc_RNA (1)...(19): siRNA sense strand
gcugauugacuacaucuau

SEQ ID NO: 4694 - RNA, 19 nt, Homo sapiens
  misc_RNA (1)...(19): siRNA sense strand
gcggagcuaugcagguguu

SEQ ID NO: 4695 - RNA, 19 nt, Homo sapiens
  misc_RNA (1)...(19): siRNA sense strand
ugauggauccugcaacuug

SEQ ID NO: 4696 - RNA, 19 nt, Homo sapiens
  misc_RNA (1)...(19): siRNA sense strand
gcagugggaggcuuugaug

SEQ ID NO: 4697 - RNA, 19 nt, Homo sapiens
  misc_RNA (1)...(19): siRNA sense strand
uuacgauccuggaacaaau

SEQ ID NO: 4698 - RNA, 19 nt, Homo sapiens
  misc_RNA (1)...(19): siRNA sense strand
gaggaagagcguugagguu

SEQ ID NO: 4699 - RNA, 19 nt, Homo sapiens
  misc_RNA (1)...(19): siRNA sense strand
guuuagagcacauggcaaa

SEQ ID NO: 4700 - RNA, 19 nt, Homo sapiens
  misc_RNA (1)...(19): siRNA sense strand
gcaggggucugugcaguaa

SEQ ID NO: 4701 - RNA, 19 nt, Homo sapiens
  misc_RNA (1)...(19): siRNA sense strand
gaggaccggugggaucaga

SEQ ID NO: 4702 - RNA, 19 nt, Homo sapiens
  misc_RNA (1)...(19): siRNA sense strand
gcaaagcugauggaacaug

SEQ ID NO: 4703 - RNA, 19 nt, Homo sapiens
  misc_RNA (1)...(19): siRNA sense strand
aagaauaacaacaccugua

SEQ ID NO: 4704 - RNA, 19 nt, Homo sapiens
  misc_RNA (1)...(19): siRNA sense strand
gguuuacgauccuggaaca

SEQ ID NO: 4705 - RNA, 19 nt, Homo sapiens
  misc_RNA (1)...(19): siRNA sense strand
cagagcaggugugguguuc

SEQ ID NO: 4706 - RNA, 19 nt, Homo sapiens
  misc_RNA (1)...(19): siRNA sense strand
ggaccggugggaucagauu

SEQ ID NO: 4707 - RNA, 19 nt, Homo sapiens
  misc_RNA (1)...(19): siRNA sense strand
caacccagcgaccaaugaa

SEQ ID NO: 4708 - RNA, 19 nt, Homo sapiens
  misc_RNA (1)...(19): siRNA sense strand
ccaggugugcagcuugaua

SEQ ID NO: 4709 - RNA, 19 nt, Homo sapiens
  misc_RNA (1)...(19): siRNA sense strand
ccaaggcaauccgcagugu

SEQ ID NO: 4710 - RNA, 19 nt, Homo sapiens
  misc_RNA (1)...(19): siRNA sense strand
gaaaucgaggugacugaag

SEQ ID NO: 4711 - RNA, 19 nt, Homo sapiens
  misc_RNA (1)...(19): siRNA sense strand
gaaagcauucaagguuaug

SEQ ID NO: 4712 - RNA, 19 nt, Homo sapiens
  misc_RNA (1)...(19): siRNA sense strand
ugugugacgugaugauugu

SEQ ID NO: 4713 - RNA, 19 nt, Homo sapiens
  misc_RNA (1)...(19): siRNA sense strand
cgacuuccucucuuaccua

SEQ ID NO: 4714 - RNA, 19 nt, Homo sapiens
  misc_RNA (1)...(19): siRNA sense strand
ggaucaauuaugagaaaga

SEQ ID NO: 4715 - RNA, 19 nt, Homo sapiens
  misc_RNA (1)...(19): siRNA sense strand
ucaguugcaucccaccaau

SEQ ID NO: 4716 - RNA, 19 nt, Homo sapiens
  misc_RNA (1)...(19): siRNA sense strand
agaggacgaucacugucaa

SEQ ID NO: 4717 - RNA, 19 nt, Homo sapiens
  misc_RNA (1)...(19): siRNA sense strand
cuacuucugugcgauguuc

SEQ ID NO: 4718 - RNA, 19 nt, Homo sapiens
  misc_RNA (1)...(19): siRNA sense strand
gcagagcaggugugguguu

SEQ ID NO: 4719 - RNA, 19 nt, Homo sapiens
  misc_RNA (1)...(19): siRNA sense strand
uugaagcugugaucucaug

SEQ ID NO: 4720 - RNA, 19 nt, Homo sapiens
  misc_RNA (1)...(19): siRNA sense strand
gaugggcagacgcugagua

SEQ ID NO: 4721 - RNA, 19 nt, Homo sapiens
  misc_RNA (1)...(19): siRNA sense strand
caacgagugguucuuugug

SEQ ID NO: 4722 - RNA, 19 nt, Homo sapiens
  misc_RNA (1)...(19): siRNA sense strand
caagcugaccguuucuuca

SEQ ID NO: 4723 - RNA, 19 nt, Homo sapiens
  misc_RNA (1)...(19): siRNA sense strand
uaagcugauugacuacauc

SEQ ID NO: 4724 - RNA, 19 nt, Homo sapiens
  misc_RNA (1)...(19): siRNA sense strand
aggaagagcguugagguuu

SEQ ID NO: 4725 - RNA, 19 nt, Homo sapiens
  misc_RNA (1)...(19): siRNA sense strand
gcaguguggagugcuauga

SEQ ID NO: 4726 - RNA, 19 nt, Homo sapiens
  misc_RNA (1)...(19): siRNA sense strand
cuguaaagacuuccucauu

SEQ ID NO: 4727 - RNA, 19 nt, Homo sapiens
  misc_RNA (1)...(19): siRNA sense strand
aacaacaccuguaaagacu

SEQ ID NO: 4728 - RNA, 19 nt, Homo sapiens
  misc_RNA (1)...(19): siRNA sense strand
aauaacaacaccuguaaag

SEQ ID NO: 4729 - RNA, 19 nt, Homo sapiens
  misc_RNA (1)...(19): siRNA sense strand
gguugaagaagaagcuuug

SEQ ID NO: 4730 - RNA, 19 nt, Homo sapiens
  misc_RNA (1)...(19): siRNA sense strand
ucauggauguucggcagaa

SEQ ID NO: 4731 - RNA, 19 nt, Homo sapiens
  misc_RNA (1)...(19): siRNA sense strand
acuacaauccugucacuga

SEQ ID NO: 4732 - RNA, 19 nt, Homo sapiens
  misc_RNA (1)...(19): siRNA sense strand
ucaagguuaugaaugaacu

SEQ ID NO: 4733 - RNA, 19 nt, Homo sapiens
  misc_RNA (1)...(19): siRNA sense strand
gaagcugugaucucaugga

SEQ ID NO: 4734 - RNA, 19 nt, Homo sapiens
  misc_RNA (1)...(19): siRNA sense strand
caccugcacugaccuucug

SEQ ID NO: 4735 - RNA, 19 nt, Homo sapiens
  misc_RNA (1)...(19): siRNA sense strand
ucagaaagauggaaaguua

SEQ ID NO: 4736 - RNA, 19 nt, Homo sapiens
  misc_RNA (1)...(19): siRNA sense strand
gagcaaaccuucagaaaga

SEQ ID NO: 4737 - RNA, 19 nt, Homo sapiens
  misc_RNA (1)...(19): siRNA sense strand
caaaggagcuacaacuaua

SEQ ID NO: 4738 - RNA, 19 nt, Homo sapiens
  misc_RNA (1)...(19): siRNA sense strand
gauauuggcugaccuagaa

SEQ ID NO: 4739 - RNA, 19 nt, Homo sapiens
  misc_RNA (1)...(19): siRNA sense strand
gcaaugaaauaccaucuau

SEQ ID NO: 4740 - RNA, 19 nt, Homo sapiens
  misc_RNA (1)...(19): siRNA sense strand
agacauaccucaacacuau

SEQ ID NO: 4741 - RNA, 19 nt, Homo sapiens
  misc_RNA (1)...(19): siRNA sense strand
ggacacagauggcuuccuu

SEQ ID NO: 4742 - RNA, 19 nt, Homo sapiens
  misc_RNA (1)...(19): siRNA sense strand
gaacaaaucuguggaucca

SEQ ID NO: 4743 - RNA, 19 nt, Homo sapiens
  misc_RNA (1)...(19): siRNA sense strand
gcacauaggcuuguucuga

SEQ ID NO: 4744 - RNA, 19 nt, Homo sapiens
  misc_RNA (1)...(19): siRNA sense strand
agaaagauaugaucccaaa

SEQ ID NO: 4745 - RNA, 19 nt, Homo sapiens
  misc_RNA (1)...(19): siRNA sense strand
ggacagacauaccucaaca

SEQ ID NO: 4746 - RNA, 19 nt, Homo sapiens
  misc_RNA (1)...(19): siRNA sense strand
ggacggcaguggcagcuuu

SEQ ID NO: 4747 - RNA, 19 nt, Homo sapiens
  misc_RNA (1)...(19): siRNA sense strand
agaaugaucuggaauguca

SEQ ID NO: 4748 - RNA, 19 nt, Homo sapiens
  misc_RNA (1)...(19): siRNA sense strand
gauguuauccugauuguug

SEQ ID NO: 4749 - RNA, 19 nt, Homo sapiens
  misc_RNA (1)...(19): siRNA sense strand
gcauccaucuaacuguuua

SEQ ID NO: 4750 - RNA, 19 nt, Homo sapiens
  misc_RNA (1)...(19): siRNA sense strand
acaaauaaguggaacaugu

SEQ ID NO: 4751 - RNA, 19 nt, Homo sapiens
  misc_RNA (1)...(19): siRNA sense strand
ggagcuaucugaauacagu

SEQ ID NO: 4752 - RNA, 19 nt, Homo sapiens
  misc_RNA (1)...(19): siRNA sense strand
gagcaugcuucuugccuuu

SEQ ID NO: 4753 - RNA, 19 nt, Homo sapiens
  misc_RNA (1)...(19): siRNA sense strand
gaaaccaucuuccaugcau

SEQ ID NO: 4754 - RNA, 19 nt, Homo sapiens
  misc_RNA (1)...(19): siRNA sense strand
gaaguuaucagaaaucaag

SEQ ID NO: 4755 - RNA, 19 nt, Homo sapiens
  misc_RNA (1)...(19): siRNA sense strand
ggacauuuguagccaguau

SEQ ID NO: 4756 - RNA, 19 nt, Homo sapiens
  misc_RNA (1)...(19): siRNA sense strand
gaaauaugaucugagaaca

SEQ ID NO: 4757 - RNA, 19 nt, Homo sapiens
  misc_RNA (1)...(19): siRNA sense strand
agagaaauaugaucugaga

SEQ ID NO: 4758 - RNA, 19 nt, Homo sapiens
  misc_RNA (1)...(19): siRNA sense strand
gauggaaaguuauuugaag

SEQ ID NO: 4759 - RNA, 19 nt, Homo sapiens
  misc_RNA (1)...(19): siRNA sense strand
acagauggcuuccuugaau

SEQ ID NO: 4760 - RNA, 19 nt, Homo sapiens
  misc_RNA (1)...(19): siRNA sense strand
ggcuggagcuaucugaaua

SEQ ID NO: 4761 - RNA, 19 nt, Homo sapiens
  misc_RNA (1)...(19): siRNA sense strand
cgagauggcuuaaagacau

SEQ ID NO: 4762 - RNA, 19 nt, Homo sapiens
  misc_RNA (1)...(19): siRNA sense strand
cagcaacuuugugauguua

SEQ ID NO: 4763 - RNA, 19 nt, Homo sapiens
  misc_RNA (1)...(19): siRNA sense strand
cgaaagauaccugcacaua

SEQ ID NO: 4764 - RNA, 19 nt, Homo sapiens
  misc_RNA (1)...(19): siRNA sense strand
gaaagauaccugcacauag

SEQ ID NO: 4765 - RNA, 19 nt, Homo sapiens
  misc_RNA (1)...(19): siRNA sense strand
ggaccaugguggcuccuuu

SEQ ID NO: 4766 - RNA, 19 nt, Homo sapiens
  misc_RNA (1)...(19): siRNA sense strand
aaagauaccugcacauagg

SEQ ID NO: 4767 - RNA, 19 nt, Homo sapiens
  misc_RNA (1)...(19): siRNA sense strand
gagcacaguugguguagca

SEQ ID NO: 4768 - RNA, 19 nt, Homo sapiens
  misc_RNA (1)...(19): siRNA sense strand
gaaaagacuucgaugugaa

SEQ ID NO: 4769 - RNA, 19 nt, Homo sapiens
  misc_RNA (1)...(19): siRNA sense strand
caauguuccugaugaagaa

SEQ ID NO: 4770 - RNA, 19 nt, Homo sapiens
  misc_RNA (1)...(19): siRNA sense strand
gaagcggugugagcacuuu

SEQ ID NO: 4771 - RNA, 19 nt, Homo sapiens
  misc_RNA (1)...(19): siRNA sense strand
cagauggcuuccuugaaua

SEQ ID NO: 4772 - RNA, 19 nt, Homo sapiens
  misc_RNA (1)...(19): siRNA sense strand
gaccugagcaugcuucuug

SEQ ID NO: 4773 - RNA, 19 nt, Homo sapiens
  misc_RNA (1)...(19): siRNA sense strand
ugaugugggucaaguauga

SEQ ID NO: 4774 - RNA, 19 nt, Homo sapiens
  misc_RNA (1)...(19): siRNA sense strand
caguagcucugaagaauuc

SEQ ID NO: 4775 - RNA, 19 nt, Homo sapiens
  misc_RNA (1)...(19): siRNA sense strand
caaguuguauucaguugga

SEQ ID NO: 4776 - RNA, 19 nt, Homo sapiens
  misc_RNA (1)...(19): siRNA sense strand
gcagcaacuuugugauguu

SEQ ID NO: 4777 - RNA, 19 nt, Homo sapiens
  misc_RNA (1)...(19): siRNA sense strand
gaucugagaacaaaucugu

SEQ ID NO: 4778 - RNA, 19 nt, Homo sapiens
  misc_RNA (1)...(19): siRNA sense strand
ggaauccuaugacccacaa

SEQ ID NO: 4779 - RNA, 19 nt, Homo sapiens
  misc_RNA (1)...(19): siRNA sense strand
guacuugaaggcccuauuu

SEQ ID NO: 4780 - RNA, 19 nt, Homo sapiens
  misc_RNA (1)...(19): siRNA sense strand
ggcaacaggugaaggaugu

SEQ ID NO: 4781 - RNA, 19 nt, Homo sapiens
  misc_RNA (1)...(19): siRNA sense strand
uaaagacauugaacacugu

SEQ ID NO: 4782 - RNA, 19 nt, Homo sapiens
  misc_RNA (1)...(19): siRNA sense strand
gagauggcuuaaagacauu

SEQ ID NO: 4783 - RNA, 19 nt, Homo sapiens
  misc_RNA (1)...(19): siRNA sense strand
guucccggcuacuggauua

SEQ ID NO: 4784 - RNA, 19 nt, Homo sapiens
  misc_RNA (1)...(19): siRNA sense strand
gcccacagcuacacaaugg

SEQ ID NO: 4785 - RNA, 19 nt, Homo sapiens
  misc_RNA (1)...(19): siRNA sense strand
uaagaaugaucuggaaugu

SEQ ID NO: 4786 - RNA, 19 nt, Homo sapiens
  misc_RNA (1)...(19): siRNA sense strand
ccuagaaaaucaugcauua

SEQ ID NO: 4787 - RNA, 19 nt, Homo sapiens
  misc_RNA (1)...(19): siRNA sense strand
uaccaucuauugccagaaa

SEQ ID NO: 4788 - RNA, 19 nt, Homo sapiens
  misc_RNA (1)...(19): siRNA sense strand
caaugacaccucaaaguga

SEQ ID NO: 4789 - RNA, 19 nt, Homo sapiens
  misc_RNA (1)...(19): siRNA sense strand
ucaacacuauggaauccua

SEQ ID NO: 4790 - RNA, 19 nt, Homo sapiens
  misc_RNA (1)...(19): siRNA sense strand
caugauggcuggagcuauc

SEQ ID NO: 4791 - RNA, 19 nt, Homo sapiens
  misc_RNA (1)...(19): siRNA sense strand
gagcuacaacuauagagaa

SEQ ID NO: 4792 - RNA, 19 nt, Homo sapiens
  misc_RNA (1)...(19): siRNA sense strand
gcaaugaccugagcaugcu

SEQ ID NO: 4793 - RNA, 19 nt, Homo sapiens
  misc_RNA (1)...(19): siRNA sense strand
cgacuccgcuggaaacucu

SEQ ID NO: 4794 - RNA, 19 nt, Homo sapiens
  misc_RNA (1)...(19): siRNA sense strand
ccaccaaugucaacacaca

SEQ ID NO: 4795 - RNA, 19 nt, Homo sapiens
  misc_RNA (1)...(19): siRNA sense strand
aggaauggauaacaacaaa

SEQ ID NO: 4796 - RNA, 19 nt, Homo sapiens
  misc_RNA (1)...(19): siRNA sense strand
gcaacuuugugauguuauc

SEQ ID NO: 4797 - RNA, 19 nt, Homo sapiens
  misc_RNA (1)...(19): siRNA sense strand
ccuaugacccacaaacuaa

SEQ ID NO: 4798 - RNA, 19 nt, Homo sapiens
  misc_RNA (1)...(19): siRNA sense strand
caacaaaggagcuacaacu

SEQ ID NO: 4799 - RNA, 19 nt, Homo sapiens
  misc_RNA (1)...(19): siRNA sense strand
gcaugcuucuugccuuuau

SEQ ID NO: 4800 - RNA, 19 nt, Homo sapiens
  misc_RNA (1)...(19): siRNA sense strand
caagagagaagcgguguga

SEQ ID NO: 4801 - RNA, 19 nt, Homo sapiens
  misc_RNA (1)...(19): siRNA sense strand
caaauaaguggaacaugug

SEQ ID NO: 4802 - RNA, 19 nt, Homo sapiens
  misc_RNA (1)...(19): siRNA sense strand
agaauucuaucaagcuguu

SEQ ID NO: 4803 - RNA, 19 nt, Homo sapiens
  misc_RNA (1)...(19): siRNA sense strand
cagauuauaugcuguuggu

SEQ ID NO: 4804 - RNA, 19 nt, Homo sapiens
  misc_RNA (1)...(19): siRNA sense strand
ucuccuuggugacagauua

SEQ ID NO: 4805 - RNA, 19 nt, Homo sapiens
  misc_RNA (1)...(19): siRNA sense strand
caugguggcuccuuugagu

SEQ ID NO: 4806 - RNA, 19 nt, Homo sapiens
  misc_RNA (1)...(19): siRNA sense strand
uaggaggaauggauaacaa

SEQ ID NO: 4807 - RNA, 19 nt, Homo sapiens
  misc_RNA (1)...(19): siRNA sense strand
cugaggagcuccauaaacu

SEQ ID NO: 4808 - RNA, 19 nt, Homo sapiens
  misc_RNA (1)...(19): siRNA sense strand
gcaaaguccgagaacuaaa

SEQ ID NO: 4809 - RNA, 19 nt, Homo sapiens
  misc_RNA (1)...(19): siRNA sense strand
ggccagugaugaugucaau

SEQ ID NO: 4810 - RNA, 19 nt, Homo sapiens
  misc_RNA (1)...(19): siRNA sense strand
ucaaugacaccucaaagug

SEQ ID NO: 4811 - RNA, 19 nt, Homo sapiens
  misc_RNA (1)...(19): siRNA sense strand
ggacuccaguagcucugaa

SEQ ID NO: 4812 - RNA, 19 nt, Homo sapiens
  misc_RNA (1)...(19): siRNA sense strand
gcaguaggaggucaugaug

SEQ ID NO: 4813 - RNA, 19 nt, Homo sapiens
  misc_RNA (1)...(19): siRNA sense strand
guaauuggaggucgagaug

SEQ ID NO: 4814 - RNA, 19 nt, Homo sapiens
  misc_RNA (1)...(19): siRNA sense strand
gaacuaaacccagaaaauc

SEQ ID NO: 4815 - RNA, 19 nt, Homo sapiens
  misc_RNA (1)...(19): siRNA sense strand
uauacaggcugcuuggaau

SEQ ID NO: 4816 - RNA, 19 nt, Homo sapiens
  misc_RNA (1)...(19): siRNA sense strand
ugaagcagcagcaacuuug

SEQ ID NO: 4817 - RNA, 19 nt, Homo sapiens
  misc_RNA (1)...(19): siRNA sense strand
acaaaggagcuacaacuau

SEQ ID NO: 4818 - RNA, 19 nt, Homo sapiens
  misc_RNA (1)...(19): siRNA sense strand
uagaagcaaugaaauacca

SEQ ID NO: 4819 - RNA, 19 nt, Homo sapiens
  misc_RNA (1)...(19): siRNA sense strand
gaugaugugggucaaguau

SEQ ID NO: 4820 - RNA, 19 nt, Homo sapiens
  misc_RNA (1)...(19): siRNA sense strand
gauaugaucccaaaacaga

SEQ ID NO: 4821 - RNA, 19 nt, Homo sapiens
  misc_RNA (1)...(19): siRNA sense strand
gauucuagaagcaaugaaa

SEQ ID NO: 4822 - RNA, 19 nt, Homo sapiens
  misc_RNA (1)...(19): siRNA sense strand
gucaaaagcugauucuaga

SEQ ID NO: 4823 - RNA, 19 nt, Homo sapiens
  misc_RNA (1)...(19): siRNA sense strand
uaaaagaggacaccauuga

SEQ ID NO: 4824 - RNA, 19 nt, Homo sapiens
  misc_RNA (1)...(19): siRNA sense strand
ggcaaguuguauucaguug

SEQ ID NO: 4825 - RNA, 19 nt, Homo sapiens
  misc_RNA (1)...(19): siRNA sense strand
ccacagagucaacaaugga

SEQ ID NO: 4826 - RNA, 19 nt, Homo sapiens
  misc_RNA (1)...(19): siRNA sense strand
ggagcuacaacuauagaga

SEQ ID NO: 4827 - RNA, 19 nt, Homo sapiens
  misc_RNA (1)...(19): siRNA sense strand
gaauggauaacaacaaagg

SEQ ID NO: 4828 - RNA, 19 nt, Homo sapiens
  misc_RNA (1)...(19): siRNA sense strand
ccaggacucucuucuacgu

SEQ ID NO: 4829 - RNA, 19 nt, Homo sapiens
  misc_RNA (1)...(19): siRNA sense strand
ggacaccauugagaaccuu

SEQ ID NO: 4830 - RNA, 19 nt, Homo sapiens
  misc_RNA (1)...(19): siRNA sense strand
aaagaggacaccauugaga

SEQ ID NO: 4831 - RNA, 19 nt, Homo sapiens
  misc_RNA (1)...(19): siRNA sense strand
gaaguuccuguuugaguuc

SEQ ID NO: 4832 - RNA, 19 nt, Homo sapiens
  misc_RNA (1)...(19): siRNA sense strand
gauaacaacaaaggagcua

SEQ ID NO: 4833 - RNA, 19 nt, Homo sapiens
  misc_RNA (1)...(19): siRNA sense strand
gcuguaggaggaauggaua

SEQ ID NO: 4834 - RNA, 19 nt, Homo sapiens
  misc_RNA (1)...(19): siRNA sense strand
aaucuacagucggaacuuu

SEQ ID NO: 4835 - RNA, 19 nt, Homo sapiens
  misc_RNA (1)...(19): siRNA sense strand
ggacagcgauaaagaagga

SEQ ID NO: 4836 - RNA, 19 nt, Homo sapiens
  misc_RNA (1)...(19): siRNA sense strand
uaaaggagcuucgcaaauc

SEQ ID NO: 4837 - RNA, 19 nt, Homo sapiens
  misc_RNA (1)...(19): siRNA sense strand
agaaagggacguucaagua

SEQ ID NO: 4838 - RNA, 19 nt, Homo sapiens
  misc_RNA (1)...(19): siRNA sense strand
cgacaaaugugaagaacag

SEQ ID NO: 4839 - RNA, 19 nt, Homo sapiens
  misc_RNA (1)...(19): siRNA sense strand
ucaccauucugucuucuaa

SEQ ID NO: 4840 - RNA, 19 nt, Homo sapiens
  misc_RNA (1)...(19): siRNA sense strand
caaaggacagcgauaaaga

SEQ ID NO: 4841 - RNA, 19 nt, Homo sapiens
  misc_RNA (1)...(19): siRNA sense strand
uagggcaggugucaucuuu

SEQ ID NO: 4842 - RNA, 19 nt, Homo sapiens
  misc_RNA (1)...(19): siRNA sense strand
gaaagggacguucaaguac

SEQ ID NO: 4843 - RNA, 19 nt, Homo sapiens
  misc_RNA (1)...(19): siRNA sense strand
gaagaacagcuugaagaga

SEQ ID NO: 4844 - RNA, 19 nt, Homo sapiens
  misc_RNA (1)...(19): siRNA sense strand
cuacauggcggcagucauu

SEQ ID NO: 4845 - RNA, 19 nt, Homo sapiens
  misc_RNA (1)...(19): siRNA sense strand
caaauuccaccucugaaga

SEQ ID NO: 4846 - RNA, 19 nt, Homo sapiens
  misc_RNA (1)...(19): siRNA sense strand
guaaaggagcuucgcaaau

SEQ ID NO: 4847 - RNA, 19 nt, Homo sapiens
  misc_RNA (1)...(19): siRNA sense strand
gugaagaacagcuugaaga

SEQ ID NO: 4848 - RNA, 19 nt, Homo sapiens
  misc_RNA (1)...(19): siRNA sense strand
gguaaaggagcuucgcaaa

SEQ ID NO: 4849 - RNA, 19 nt, Homo sapiens
  misc_RNA (1)...(19): siRNA sense strand
gcugaugcguuaucugaag

SEQ ID NO: 4850 - RNA, 19 nt, Homo sapiens
  misc_RNA (1)...(19): siRNA sense strand
gaaauccaaggcugccaaa

SEQ ID NO: 4851 - RNA, 19 nt, Homo sapiens
  misc_RNA (1)...(19): siRNA sense strand
caaccacagccgaaauuga

SEQ ID NO: 4852 - RNA, 19 nt, Homo sapiens
  misc_RNA (1)...(19): siRNA sense strand
cagagugacaucagccaua

SEQ ID NO: 4853 - RNA, 19 nt, Homo sapiens
  misc_RNA (1)...(19): siRNA sense strand
uggcggcagucauugagua

SEQ ID NO: 4854 - RNA, 19 nt, Homo sapiens
  misc_RNA (1)...(19): siRNA sense strand
gaagaaagggacguucaag

SEQ ID NO: 4855 - RNA, 19 nt, Homo sapiens
  misc_RNA (1)...(19): siRNA sense strand
ggacucgcagccaaauuug

SEQ ID NO: 4856 - RNA, 19 nt, Homo sapiens
  misc_RNA (1)...(19): siRNA sense strand
agagugacaucagccauau

SEQ ID NO: 4857 - RNA, 19 nt, Homo sapiens
  misc_RNA (1)...(19): siRNA sense strand
aaaggacagcgauaaagaa

SEQ ID NO: 4858 - RNA, 19 nt, Homo sapiens
  misc_RNA (1)...(19): siRNA sense strand
guaccuggcagcggaaauu

SEQ ID NO: 4859 - RNA, 19 nt, Homo sapiens
  misc_RNA (1)...(19): siRNA sense strand
gauucaccauucugucuuc

SEQ ID NO: 4860 - RNA, 19 nt, Homo sapiens
  misc_RNA (1)...(19): siRNA sense strand
gcgagagcaucggcaucua

SEQ ID NO: 4861 - RNA, 19 nt, Homo sapiens
  misc_RNA (1)...(19): siRNA sense strand
caucucagcccacuuugau

SEQ ID NO: 4862 - RNA, 19 nt, Homo sapiens
  misc_RNA (1)...(19): siRNA sense strand
ugaccucaaagaagauaua

SEQ ID NO: 4863 - RNA, 19 nt, Homo sapiens
  misc_RNA (1)...(19): siRNA sense strand
ccucaaagaagauauaggu

SEQ ID NO: 4864 - RNA, 19 nt, Homo sapiens
  misc_RNA (1)...(19): siRNA sense strand
uggacucgcagccaaauuu

SEQ ID NO: 4865 - RNA, 19 nt, Homo sapiens
  misc_RNA (1)...(19): siRNA sense strand
caaaugugaagaacagcuu

SEQ ID NO: 4866 - RNA, 19 nt, Homo sapiens
  misc_RNA (1)...(19): siRNA sense strand
gcggaggacaagaagcuaa

SEQ ID NO: 4867 - RNA, 19 nt, Homo sapiens
  misc_RNA (1)...(19): siRNA sense strand
gaugcguuaucugaagaaa

SEQ ID NO: 4868 - RNA, 19 nt, Homo sapiens
  misc_RNA (1)...(19): siRNA sense strand
ucucagcccacuuugauga

SEQ ID NO: 4869 - RNA, 19 nt, Homo sapiens
  misc_RNA (1)...(19): siRNA sense strand
gaggcguccugcccagaau

SEQ ID NO: 4870 - RNA, 19 nt, Homo sapiens
  misc_RNA (1)...(19): siRNA sense strand
gggcaggugucaucuuucc

SEQ ID NO: 4871 - RNA, 19 nt, Homo sapiens
  misc_RNA (1)...(19): siRNA sense strand
ccaaaggacagcgauaaag

SEQ ID NO: 4872 - RNA, 19 nt, Homo sapiens
  misc_RNA (1)...(19): siRNA sense strand
aaaccaaaggacagcgaua

SEQ ID NO: 4873 - RNA, 19 nt, Homo sapiens
  misc_RNA (1)...(19): siRNA sense strand
aaacugcuuucccaaacag

SEQ ID NO: 4874 - RNA, 19 nt, Homo sapiens
  misc_RNA (1)...(19): siRNA sense strand
cuucaaauuccaccucuga

SEQ ID NO: 4875 - RNA, 19 nt, Homo sapiens
  misc_RNA (1)...(19): siRNA sense strand
ugcguuaucugaagaaagg

SEQ ID NO: 4876 - RNA, 19 nt, Homo sapiens
  misc_RNA (1)...(19): siRNA sense strand
caagcucgacgccaaguag

SEQ ID NO: 4877 - RNA, 19 nt, Homo sapiens
  misc_RNA (1)...(19): siRNA sense strand
ggaggcugaugcguuaucu

SEQ ID NO: 4878 - RNA, 19 nt, Homo sapiens
  misc_RNA (1)...(19): siRNA sense strand
ccaaaccacggacguccaa

SEQ ID NO: 4879 - RNA, 19 nt, Homo sapiens
  misc_RNA (1)...(19): siRNA sense strand
caaauuugucauccacugu

SEQ ID NO: 4880 - RNA, 19 nt, Homo sapiens
  misc_RNA (1)...(19): siRNA sense strand
aaccaaaggacagcgauaa

SEQ ID NO: 4881 - RNA, 19 nt, Homo sapiens
  misc_RNA (1)...(19): siRNA sense strand
cguccucgcugaagaacgu

SEQ ID NO: 4882 - RNA, 19 nt, Homo sapiens
  misc_RNA (1)...(19): siRNA sense strand
uggggaggcugaugcguua

SEQ ID NO: 4883 - RNA, 19 nt, Homo sapiens
  misc_RNA (1)...(19): siRNA sense strand
ugaagaacagcuugaagag

SEQ ID NO: 4884 - RNA, 19 nt, Homo sapiens
  misc_RNA (1)...(19): siRNA sense strand
ccauauuggcuccaugaga

SEQ ID NO: 4885 - RNA, 19 nt, Homo sapiens
  misc_RNA (1)...(19): siRNA sense strand
ggauucaccauucugucuu

SEQ ID NO: 4886 - RNA, 19 nt, Homo sapiens
  misc_RNA (1)...(19): siRNA sense strand
agugacaucagccauauug

SEQ ID NO: 4887 - RNA, 19 nt, Homo sapiens
  misc_RNA (1)...(19): siRNA sense strand
aggcugaugcguuaucuga

SEQ ID NO: 4888 - RNA, 19 nt, Homo sapiens
  misc_RNA (1)...(19): siRNA sense strand
ccuggcagcggaaauucua

SEQ ID NO: 4889 - RNA, 19 nt, Homo sapiens
  misc_RNA (1)...(19): siRNA sense strand
gcgcguccucgcugaagaa

SEQ ID NO: 4890 - RNA, 19 nt, Homo sapiens
  misc_RNA (1)...(19): siRNA sense strand
gagaguggagggcauuguc

SEQ ID NO: 4891 - RNA, 19 nt, Homo sapiens
  misc_RNA (1)...(19): siRNA sense strand
aaaggcaagucggaaacga

SEQ ID NO: 4892 - RNA, 19 nt, Homo sapiens
  misc_RNA (1)...(19): siRNA sense strand
gcaaugccgcgagggacaa

SEQ ID NO: 4893 - RNA, 19 nt, Homo sapiens
  misc_RNA (1)...(19): siRNA sense strand
ccaaugacgaggagcucaa

SEQ ID NO: 4894 - RNA, 19 nt, Homo sapiens
  misc_RNA (1)...(19): siRNA sense strand
gaggacaagaagcuaaagu

SEQ ID NO: 4895 - RNA, 19 nt, Homo sapiens
  misc_RNA (1)...(19): siRNA sense strand
ggaagaagaaaauguccaa

SEQ ID NO: 4896 - RNA, 19 nt, Homo sapiens
  misc_RNA (1)...(19): siRNA sense strand
ucaaauuccaccucugaag

SEQ ID NO: 4897 - RNA, 19 nt, Homo sapiens
  misc_RNA (1)...(19): siRNA sense strand
cugaugcguuaucugaaga

SEQ ID NO: 4898 - RNA, 19 nt, Homo sapiens
  misc_RNA (1)...(19): siRNA sense strand
ccgcgagggacaacaagaa

SEQ ID NO: 4899 - RNA, 19 nt, Homo sapiens
  misc_RNA (1)...(19): siRNA sense strand
cggaggacaagaagcuaaa

SEQ ID NO: 4900 - RNA, 19 nt, Homo sapiens
  misc_RNA (1)...(19): siRNA sense strand
gaacaaggauggucugcuu

SEQ ID NO: 4901 - RNA, 19 nt, Homo sapiens
  misc_RNA (1)...(19): siRNA sense strand
gaaauaagcucuccuucag

SEQ ID NO: 4902 - RNA, 19 nt, Homo sapiens
  misc_RNA (1)...(19): siRNA sense strand
ggacuaccuucuauuguaa

SEQ ID NO: 4903 - RNA, 19 nt, Homo sapiens
  misc_RNA (1)...(19): siRNA sense strand
ggaauucagugccgauauu

SEQ ID NO: 4904 - RNA, 19 nt, Homo sapiens
  misc_RNA (1)...(19): siRNA sense strand
ggaaacagaguagagauua

SEQ ID NO: 4905 - RNA, 19 nt, Homo sapiens
  misc_RNA (1)...(19): siRNA sense strand
caacugugaugauccacua

SEQ ID NO: 4906 - RNA, 19 nt, Homo sapiens
  misc_RNA (1)...(19): siRNA sense strand
cuacggauguuccuauaaa

SEQ ID NO: 4907 - RNA, 19 nt, Homo sapiens
  misc_RNA (1)...(19): siRNA sense strand
gaauacagccggcuucuuc

SEQ ID NO: 4908 - RNA, 19 nt, Homo sapiens
  misc_RNA (1)...(19): siRNA sense strand
ccaaggaccucauuucagu

SEQ ID NO: 4909 - RNA, 19 nt, Homo sapiens
  misc_RNA (1)...(19): siRNA sense strand
ccauuuaccugguggauug

SEQ ID NO: 4910 - RNA, 19 nt, Homo sapiens
  misc_RNA (1)...(19): siRNA sense strand
gaugugaucucccugaagu

SEQ ID NO: 4911 - RNA, 19 nt, Homo sapiens
  misc_RNA (1)...(19): siRNA sense strand
cagaaaggcuuccuaggau

SEQ ID NO: 4912 - RNA, 19 nt, Homo sapiens
  misc_RNA (1)...(19): siRNA sense strand
gaaagcaucagaucuauac

SEQ ID NO: 4913 - RNA, 19 nt, Homo sapiens
  misc_RNA (1)...(19): siRNA sense strand
uaaaucccauuaaggcuuu

SEQ ID NO: 4914 - RNA, 19 nt, Homo sapiens
  misc_RNA (1)...(19): siRNA sense strand
gacauugacuaugagcuua

SEQ ID NO: 4915 - RNA, 19 nt, Homo sapiens
  misc_RNA (1)...(19): siRNA sense strand
aggcucaucuuuauugaua

SEQ ID NO: 4916 - RNA, 19 nt, Homo sapiens
  misc_RNA (1)...(19): siRNA sense strand
gacagcaucuggaccuuug

SEQ ID NO: 4917 - RNA, 19 nt, Homo sapiens
  misc_RNA (1)...(19): siRNA sense strand
gacaaaugauacuggcuuu

SEQ ID NO: 4918 - RNA, 19 nt, Homo sapiens
  misc_RNA (1)...(19): siRNA sense strand
gacgaaagcaucagaucua

SEQ ID NO: 4919 - RNA, 19 nt, Homo sapiens
  misc_RNA (1)...(19): siRNA sense strand
ggaaacaguacaaacaaga

SEQ ID NO: 4920 - RNA, 19 nt, Homo sapiens
  misc_RNA (1)...(19): siRNA sense strand
uggacuaccuucuauugua

SEQ ID NO: 4921 - RNA, 19 nt, Homo sapiens
  misc_RNA (1)...(19): siRNA sense strand
ccuuagacauugacuauga

SEQ ID NO: 4922 - RNA, 19 nt, Homo sapiens
  misc_RNA (1)...(19): siRNA sense strand
gaaacaguacaaacaagaa

SEQ ID NO: 4923 - RNA, 19 nt, Homo sapiens
  misc_RNA (1)...(19): siRNA sense strand
acacuugaauggacagaaa

SEQ ID NO: 4924 - RNA, 19 nt, Homo sapiens
  misc_RNA (1)...(19): siRNA sense strand
gaugaauggacaaaugaua

SEQ ID NO: 4925 - RNA, 19 nt, Homo sapiens
  misc_RNA (1)...(19): siRNA sense strand
gacaagaucuggacaucag

SEQ ID NO: 4926 - RNA, 19 nt, Homo sapiens
  misc_RNA (1)...(19): siRNA sense strand
gaaacagaguagagauuac

SEQ ID NO: 4927 - RNA, 19 nt, Homo sapiens
  misc_RNA (1)...(19): siRNA sense strand
ggaacgccgucucauuuua

SEQ ID NO: 4928 - RNA, 19 nt, Homo sapiens
  misc_RNA (1)...(19): siRNA sense strand
ggcagcaacuugaaugaug

SEQ ID NO: 4929 - RNA, 19 nt, Homo sapiens
  misc_RNA (1)...(19): siRNA sense strand
uaauugaccuggcuaagag

SEQ ID NO: 4930 - RNA, 19 nt, Homo sapiens
  misc_RNA (1)...(19): siRNA sense strand
uaacagcgacaaacuacaa

SEQ ID NO: 4931 - RNA, 19 nt, Homo sapiens
  misc_RNA (1)...(19): siRNA sense strand
cgacagaucaaacucagaa

SEQ ID NO: 4932 - RNA, 19 nt, Homo sapiens
  misc_RNA (1)...(19): siRNA sense strand
aaagaccacuugccuguca

SEQ ID NO: 4933 - RNA, 19 nt, Homo sapiens
  misc_RNA (1)...(19): siRNA sense strand
aaacuacugugaacaugga

SEQ ID NO: 4934 - RNA, 19 nt, Homo sapiens
  misc_RNA (1)...(19): siRNA sense strand
gcucacuucuguacagguu

SEQ ID NO: 4935 - RNA, 19 nt, Homo sapiens
  misc_RNA (1)...(19): siRNA sense strand
cgaaauaagcucuccuuca

SEQ ID NO: 4936 - RNA, 19 nt, Homo sapiens
  misc_RNA (1)...(19): siRNA sense strand
uaacugcagugacacaagu

SEQ ID NO: 4937 - RNA, 19 nt, Homo sapiens
  misc_RNA (1)...(19): siRNA sense strand
cuuguggcauuuaggauua

SEQ ID NO: 4938 - RNA, 19 nt, Homo sapiens
  misc_RNA (1)...(19): siRNA sense strand
gaucuauacuggcaauguc

SEQ ID NO: 4939 - RNA, 19 nt, Homo sapiens
  misc_RNA (1)...(19): siRNA sense strand
cuacaauggaguaaacaua

SEQ ID NO: 4940 - RNA, 19 nt, Homo sapiens
  misc_RNA (1)...(19): siRNA sense strand
cgacaaacuacaacuguga

SEQ ID NO: 4941 - RNA, 19 nt, Homo sapiens
  misc_RNA (1)...(19): siRNA sense strand
gauuaacagcgacaaacua

SEQ ID NO: 4942 - RNA, 19 nt, Homo sapiens
  misc_RNA (1)...(19): siRNA sense strand
cugacugggugacgaguua

SEQ ID NO: 4943 - RNA, 19 nt, Homo sapiens
  misc_RNA (1)...(19): siRNA sense strand
ggaacgucauccagacaga

SEQ ID NO: 4944 - RNA, 19 nt, Homo sapiens
  misc_RNA (1)...(19): siRNA sense strand
ucagugaguuuccaguuuc

SEQ ID NO: 4945 - RNA, 19 nt, Homo sapiens
  misc_RNA (1)...(19): siRNA sense strand
gcaugagagucgaggucua

SEQ ID NO: 4946 - RNA, 19 nt, Homo sapiens
  misc_RNA (1)...(19): siRNA sense strand
gaagauacggaagcucuga

SEQ ID NO: 4947 - RNA, 19 nt, Homo sapiens
  misc_RNA (1)...(19): siRNA sense strand
ccaaauugaugggcucuca

SEQ ID NO: 4948 - RNA, 19 nt, Homo sapiens
  misc_RNA (1)...(19): siRNA sense strand
gggcgagacggaugccuua

SEQ ID NO: 4949 - RNA, 19 nt, Homo sapiens
  misc_RNA (1)...(19): siRNA sense strand
cagguguacugcaauauca

SEQ ID NO: 4950 - RNA, 19 nt, Homo sapiens
  misc_RNA (1)...(19): siRNA sense strand
cuccuucucuucugaauga

SEQ ID NO: 4951 - RNA, 19 nt, Homo sapiens
  misc_RNA (1)...(19): siRNA sense strand
gaauucagugccgauauuu

SEQ ID NO: 4952 - RNA, 19 nt, Homo sapiens
  misc_RNA (1)...(19): siRNA sense strand
aaggaugaauggacaaaug

SEQ ID NO: 4953 - RNA, 19 nt, Homo sapiens
  misc_RNA (1)...(19): siRNA sense strand
caauaucacugaggacaag

SEQ ID NO: 4954 - RNA, 19 nt, Homo sapiens
  misc_RNA (1)...(19): siRNA sense strand
acagaaaggcuuccuagga

SEQ ID NO: 4955 - RNA, 19 nt, Homo sapiens
  misc_RNA (1)...(19): siRNA sense strand
ggcacucgguccucauuga

SEQ ID NO: 4956 - RNA, 19 nt, Homo sapiens
  misc_RNA (1)...(19): siRNA sense strand
gggaaacagaguagagauu

SEQ ID NO: 4957 - RNA, 19 nt, Homo sapiens
  misc_RNA (1)...(19): siRNA sense strand
gacaaccaauggcacuaug

SEQ ID NO: 4958 - RNA, 19 nt, Homo sapiens
  misc_RNA (1)...(19): siRNA sense strand
ccaaacuacugugaacaug

SEQ ID NO: 4959 - RNA, 19 nt, Homo sapiens
  misc_RNA (1)...(19): siRNA sense strand
cgaaagcaucagaucuaua

SEQ ID NO: 4960 - RNA, 19 nt, Homo sapiens
  misc_RNA (1)...(19): siRNA sense strand
gagaccacaucaccuugga

SEQ ID NO: 4961 - RNA, 19 nt, Homo sapiens
  misc_RNA (1)...(19): siRNA sense strand
ucucaccgauucccaaugu

SEQ ID NO: 4962 - RNA, 19 nt, Homo sapiens
  misc_RNA (1)...(19): siRNA sense strand
gauacuggcuuucuuuccu

SEQ ID NO: 4963 - RNA, 19 nt, Homo sapiens
  misc_RNA (1)...(19): siRNA sense strand
ggaccugggaaacagagua

SEQ ID NO: 4964 - RNA, 19 nt, Homo sapiens
  misc_RNA (1)...(19): siRNA sense strand
gaucaccuuugccaucgau

SEQ ID NO: 4965 - RNA, 19 nt, Homo sapiens
  misc_RNA (1)...(19): siRNA sense strand
uauuguaacugcagugaca

SEQ ID NO: 4966 - RNA, 19 nt, Homo sapiens
  misc_RNA (1)...(19): siRNA sense strand
ucgaaaaccuuuacuacaa

SEQ ID NO: 4967 - RNA, 19 nt, Homo sapiens
  misc_RNA (1)...(19): siRNA sense strand
gacggaugccuuagacauu

SEQ ID NO: 4968 - RNA, 19 nt, Homo sapiens
  misc_RNA (1)...(19): siRNA sense strand
gaacgucauccagacagaa

SEQ ID NO: 4969 - RNA, 19 nt, Homo sapiens
  misc_RNA (1)...(19): siRNA sense strand
cuggaacgccgucucauuu

SEQ ID NO: 4970 - RNA, 19 nt, Homo sapiens
  misc_RNA (1)...(19): siRNA sense strand
gaaaaccuuuacuacaaug

SEQ ID NO: 4971 - RNA, 19 nt, Homo sapiens
  misc_RNA (1)...(19): siRNA sense strand
cuucagagaucaccuuugc

SEQ ID NO: 4972 - RNA, 19 nt, Homo sapiens
  misc_RNA (1)...(19): siRNA sense strand
gugccgauauuuccuucuu

SEQ ID NO: 4973 - RNA, 19 nt, Homo sapiens
  misc_RNA (1)...(19): siRNA sense strand
gcaauaucacugaggacaa

SEQ ID NO: 4974 - RNA, 19 nt, Homo sapiens
  misc_RNA (1)...(19): siRNA sense strand
ucaccgauucccaauguuu

SEQ ID NO: 4975 - RNA, 19 nt, Homo sapiens
  misc_RNA (1)...(19): siRNA sense strand
ucagugagagcccgauuug

SEQ ID NO: 4976 - RNA, 19 nt, Homo sapiens
  misc_RNA (1)...(19): siRNA sense strand
gaaugguccuguggagcuu

SEQ ID NO: 4977 - RNA, 19 nt, Homo sapiens
  misc_RNA (1)...(19): siRNA sense strand
ggacaagaucuggacauca

SEQ ID NO: 4978 - RNA, 19 nt, Homo sapiens
  misc_RNA (1)...(19): siRNA sense strand
gcccaaggaccucauuuca

SEQ ID NO: 4979 - RNA, 19 nt, Homo sapiens
  misc_RNA (1)...(19): siRNA sense strand
caccgauucccaauguuua

SEQ ID NO: 4980 - RNA, 19 nt, Homo sapiens
  misc_RNA (1)...(19): siRNA sense strand
caaacuacaacugugauga

SEQ ID NO: 4981 - RNA, 19 nt, Homo sapiens
  misc_RNA (1)...(19): siRNA sense strand
gaacuucacgguggacaag

SEQ ID NO: 4982 - RNA, 19 nt, Homo sapiens
  misc_RNA (1)...(19): siRNA sense strand
agugagagcccgauuuguu

SEQ ID NO: 4983 - RNA, 19 nt, Homo sapiens
  misc_RNA (1)...(19): siRNA sense strand
ucagaucuauacuggcaau

SEQ ID NO: 4984 - RNA, 19 nt, Homo sapiens
  misc_RNA (1)...(19): siRNA sense strand
gucuacggauguuccuaua

SEQ ID NO: 4985 - RNA, 19 nt, Homo sapiens
  misc_RNA (1)...(19): siRNA sense strand
caaaugauacuggcuuucu

SEQ ID NO: 4986 - RNA, 19 nt, Homo sapiens
  misc_RNA (1)...(19): siRNA sense strand
gcaauugcgacgcugacaa

SEQ ID NO: 4987 - RNA, 19 nt, Homo sapiens
  misc_RNA (1)...(19): siRNA sense strand
cuacaacugugaugaucca

SEQ ID NO: 4988 - RNA, 19 nt, Homo sapiens
  misc_RNA (1)...(19): siRNA sense strand
cagguucaaucagaaguug

SEQ ID NO: 4989 - RNA, 19 nt, Homo sapiens
  misc_RNA (1)...(19): siRNA sense strand
ucacuucuguacagguuca

SEQ ID NO: 4990 - RNA, 19 nt, Homo sapiens
  misc_RNA (1)...(19): siRNA sense strand
acacaggacgcaacuggaa

SEQ ID NO: 4991 - RNA, 19 nt, Homo sapiens
  misc_RNA (1)...(19): siRNA sense strand
cagcccagcucaacucaac

SEQ ID NO: 4992 - RNA, 19 nt, Homo sapiens
  misc_RNA (1)...(19): siRNA sense strand
ucacugauaccgacagauc

SEQ ID NO: 4993 - RNA, 19 nt, Homo sapiens
  misc_RNA (1)...(19): siRNA sense strand
aaaugauacuggcuuucuu

SEQ ID NO: 4994 - RNA, 19 nt, Homo sapiens
  misc_RNA (1)...(19): siRNA sense strand
gacagaacgcguagcugaa

SEQ ID NO: 4995 - RNA, 19 nt, Homo sapiens
  misc_RNA (1)...(19): siRNA sense strand
cgagacggaugccuuagac

SEQ ID NO: 4996 - RNA, 19 nt, Homo sapiens
  misc_RNA (1)...(19): siRNA sense strand
cauuaaagacuucauucga

SEQ ID NO: 4997 - RNA, 19 nt, Homo sapiens
  misc_RNA (1)...(19): siRNA sense strand
caacacgccggauggaaca

SEQ ID NO: 4998 - RNA, 19 nt, Homo sapiens
  misc_RNA (1)...(19): siRNA sense strand
cuccagguguacugcaaua

SEQ ID NO: 4999 - RNA, 19 nt, Homo sapiens
  misc_RNA (1)...(19): siRNA sense strand
agagcugccuggacauuca

SEQ ID NO: 5000 - RNA, 19 nt, Homo sapiens
  misc_RNA (1)...(19): siRNA sense strand
gaacaaggauggucugcuu

SEQ ID NO: 5001 - RNA, 19 nt, Homo sapiens
  misc_RNA (1)...(19): siRNA sense strand
gaaauaagcucuccuucag

SEQ ID NO: 5002 - RNA, 19 nt, Homo sapiens
  misc_RNA (1)...(19): siRNA sense strand
ggacuaccuucuauuguaa

SEQ ID NO: 5003 - RNA, 19 nt, Homo sapiens
  misc_RNA (1)...(19): siRNA sense strand
ggaauucagugccgauauu

SEQ ID NO: 5004 - RNA, 19 nt, Homo sapiens
  misc_RNA (1)...(19): siRNA sense strand
ggaaacagaguagagauua

SEQ ID NO: 5005 - RNA, 19 nt, Homo sapiens
  misc_RNA (1)...(19): siRNA sense strand
caacugugaugauccacua

SEQ ID NO: 5006 - RNA, 19 nt, Homo sapiens
  misc_RNA (1)...(19): siRNA sense strand
cuacggauguuccuauaaa

SEQ ID NO: 5007 - RNA, 19 nt, Homo sapiens
  misc_RNA (1)...(19): siRNA sense strand
gaauacagccggcuucuuc

SEQ ID NO: 5008 - RNA, 19 nt, Homo sapiens
  misc_RNA (1)...(19): siRNA sense strand
ccaaggaccucauuucagu

SEQ ID NO: 5009 - RNA, 19 nt, Homo sapiens
  misc_RNA (1)...(19): siRNA sense strand
ccauuuaccugguggauug

SEQ ID NO: 5010 - RNA, 19 nt, Homo sapiens
  misc_RNA (1)...(19): siRNA sense strand
gaugugaucucccugaagu

SEQ ID NO: 5011 - RNA, 19 nt, Homo sapiens
  misc_RNA (1)...(19): siRNA sense strand
cagaaaggcuuccuaggau

SEQ ID NO: 5012 - RNA, 19 nt, Homo sapiens
  misc_RNA (1)...(19): siRNA sense strand
gaaagcaucagaucuauac

SEQ ID NO: 5013 - RNA, 19 nt, Homo sapiens
  misc_RNA (1)...(19): siRNA sense strand
uaaaucccauuaaggcuuu

SEQ ID NO: 5014 - RNA, 19 nt, Homo sapiens
  misc_RNA (1)...(19): siRNA sense strand
gacauugacuaugagcuua

SEQ ID NO: 5015 - RNA, 19 nt, Homo sapiens
  misc_RNA (1)...(19): siRNA sense strand
aggcucaucuuuauugaua

SEQ ID NO: 5016 - RNA, 19 nt, Homo sapiens
  misc_RNA (1)...(19): siRNA sense strand
gacagcaucuggaccuuug

SEQ ID NO: 5017 - RNA, 19 nt, Homo sapiens
  misc_RNA (1)...(19): siRNA sense strand
gacaaaugauacuggcuuu

SEQ ID NO: 5018 - RNA, 19 nt, Homo sapiens
  misc_RNA (1)...(19): siRNA sense strand
gacgaaagcaucagaucua

SEQ ID NO: 5019 - RNA, 19 nt, Homo sapiens
  misc_RNA (1)...(19): siRNA sense strand
ggaaacaguacaaacaaga

SEQ ID NO: 5020 - RNA, 19 nt, Homo sapiens
  misc_RNA (1)...(19): siRNA sense strand
uggacuaccuucuauugua

SEQ ID NO: 5021 - RNA, 19 nt, Homo sapiens
  misc_RNA (1)...(19): siRNA sense strand
ccuuagacauugacuauga

SEQ ID NO: 5022 - RNA, 19 nt, Homo sapiens
  misc_RNA (1)...(19): siRNA sense strand
gaaacaguacaaacaagaa

SEQ ID NO: 5023 - RNA, 19 nt, Homo sapiens
  misc_RNA (1)...(19): siRNA sense strand
acacuugaauggacagaaa

SEQ ID NO: 5024 - RNA, 19 nt, Homo sapiens
  misc_RNA (1)...(19): siRNA sense strand
gaugaauggacaaaugaua

SEQ ID NO: 5025 - RNA, 19 nt, Homo sapiens
  misc_RNA (1)...(19): siRNA sense strand
gacaagaucuggacaucag

SEQ ID NO: 5026 - RNA, 19 nt, Homo sapiens
  misc_RNA (1)...(19): siRNA sense strand
gaaacagaguagagauuac

SEQ ID NO: 5027 - RNA, 19 nt, Homo sapiens
  misc_RNA (1)...(19): siRNA sense strand
ggaacgccgucucauuuua

SEQ ID NO: 5028 - RNA, 19 nt, Homo sapiens
  misc_RNA (1)...(19): siRNA sense strand
ggcagcaacuugaaugaug

SEQ ID NO: 5029 - RNA, 19 nt, Homo sapiens
  misc_RNA (1)...(19): siRNA sense strand
uaauugaccuggcuaagag

SEQ ID NO: 5030 - RNA, 19 nt, Homo sapiens
  misc_RNA (1)...(19): siRNA sense strand
uaacagcgacaaacuacaa

SEQ ID NO: 5031 - RNA, 19 nt, Homo sapiens
  misc_RNA (1)...(19): siRNA sense strand
cgacagaucaaacucagaa

SEQ ID NO: 5032 - RNA, 19 nt, Homo sapiens
  misc_RNA (1)...(19): siRNA sense strand
aaagaccacuugccuguca

SEQ ID NO: 5033 - RNA, 19 nt, Homo sapiens
  misc_RNA (1)...(19): siRNA sense strand
aaacuacugugaacaugga

SEQ ID NO: 5034 - RNA, 19 nt, Homo sapiens
  misc_RNA (1)...(19): siRNA sense strand
gcucacuucuguacagguu

SEQ ID NO: 5035 - RNA, 19 nt, Homo sapiens
  misc_RNA (1)...(19): siRNA sense strand
cgaaauaagcucuccuuca

SEQ ID NO: 5036 - RNA, 19 nt, Homo sapiens
  misc_RNA (1)...(19): siRNA sense strand
uaacugcagugacacaagu

SEQ ID NO: 5037 - RNA, 19 nt, Homo sapiens
  misc_RNA (1)...(19): siRNA sense strand
cuuguggcauuuaggauua

SEQ ID NO: 5038 - RNA, 19 nt, Homo sapiens
  misc_RNA (1)...(19): siRNA sense strand
gaucuauacuggcaauguc

SEQ ID NO: 5039 - RNA, 19 nt, Homo sapiens
  misc_RNA (1)...(19): siRNA sense strand
cuacaauggaguaaacaua

SEQ ID NO: 5040 - RNA, 19 nt, Homo sapiens
  misc_RNA (1)...(19): siRNA sense strand
cgacaaacuacaacuguga

SEQ ID NO: 5041 - RNA, 19 nt, Homo sapiens
  misc_RNA (1)...(19): siRNA sense strand
gauuaacagcgacaaacua

SEQ ID NO: 5042 - RNA, 19 nt, Homo sapiens
  misc_RNA (1)...(19): siRNA sense strand
cugacugggugacgaguua

SEQ ID NO: 5043 - RNA, 19 nt, Homo sapiens
  misc_RNA (1)...(19): siRNA sense strand
ggaacgucauccagacaga

SEQ ID NO: 5044 - RNA, 19 nt, Homo sapiens
  misc_RNA (1)...(19): siRNA sense strand
ucagugaguuuccaguuuc

SEQ ID NO: 5045 - RNA, 19 nt, Homo sapiens
  misc_RNA (1)...(19): siRNA sense strand
gcaugagagucgaggucua

SEQ ID NO: 5046 - RNA, 19 nt, Homo sapiens
  misc_RNA (1)...(19): siRNA sense strand
gaagauacggaagcucuga

SEQ ID NO: 5047 - RNA, 19 nt, Homo sapiens
  misc_RNA (1)...(19): siRNA sense strand
ccaaauugaugggcucuca

SEQ ID NO: 5048 - RNA, 19 nt, Homo sapiens
  misc_RNA (1)...(19): siRNA sense strand
gggcgagacggaugccuua

SEQ ID NO: 5049 - RNA, 19 nt, Homo sapiens
  misc_RNA (1)...(19): siRNA sense strand
cagguguacugcaauauca

SEQ ID NO: 5050 - RNA, 19 nt, Homo sapiens
  misc_RNA (1)...(19): siRNA sense strand
cuccuucucuucugaauga

SEQ ID NO: 5051 - RNA, 19 nt, Homo sapiens
  misc_RNA (1)...(19): siRNA sense strand
gaauucagugccgauauuu

SEQ ID NO: 5052 - RNA, 19 nt, Homo sapiens
  misc_RNA (1)...(19): siRNA sense strand
aaggaugaauggacaaaug

SEQ ID NO: 5053 - RNA, 19 nt, Homo sapiens
  misc_RNA (1)...(19): siRNA sense strand
caauaucacugaggacaag

SEQ ID NO: 5054 - RNA, 19 nt, Homo sapiens
  misc_RNA (1)...(19): siRNA sense strand
acagaaaggcuuccuagga

SEQ ID NO: 5055 - RNA, 19 nt, Homo sapiens
  misc_RNA (1)...(19): siRNA sense strand
ggcacucgguccucauuga

SEQ ID NO: 5056 - RNA, 19 nt, Homo sapiens
  misc_RNA (1)...(19): siRNA sense strand
gcugcagcauaaagaaauu

SEQ ID NO: 5057 - RNA, 19 nt, Homo sapiens
  misc_RNA (1)...(19): siRNA sense strand
gggaaacagaguagagauu

SEQ ID NO: 5058 - RNA, 19 nt, Homo sapiens
  misc_RNA (1)...(19): siRNA sense strand
gacaaccaauggcacuaug

SEQ ID NO: 5059 - RNA, 19 nt, Homo sapiens
  misc_RNA (1)...(19): siRNA sense strand
ccaaacuacugugaacaug

SEQ ID NO: 5060 - RNA, 19 nt, Homo sapiens
  misc_RNA (1)...(19): siRNA sense strand
cgaaagcaucagaucuaua

SEQ ID NO: 5061 - RNA, 19 nt, Homo sapiens
  misc_RNA (1)...(19): siRNA sense strand
gagaccacaucaccuugga

SEQ ID NO: 5062 - RNA, 19 nt, Homo sapiens
  misc_RNA (1)...(19): siRNA sense strand
ucucaccgauucccaaugu

SEQ ID NO: 5063 - RNA, 19 nt, Homo sapiens
  misc_RNA (1)...(19): siRNA sense strand
gauacuggcuuucuuuccu

SEQ ID NO: 5064 - RNA, 19 nt, Homo sapiens
  misc_RNA (1)...(19): siRNA sense strand
ggaccugggaaacagagua

SEQ ID NO: 5065 - RNA, 19 nt, Homo sapiens
  misc_RNA (1)...(19): siRNA sense strand
gaucaccuuugccaucgau

SEQ ID NO: 5066 - RNA, 19 nt, Homo sapiens
  misc_RNA (1)...(19): siRNA sense strand
uauuguaacugcagugaca

SEQ ID NO: 5067 - RNA, 19 nt, Homo sapiens
  misc_RNA (1)...(19): siRNA sense strand
ucgaaaaccuuuacuacaa

SEQ ID NO: 5068 - RNA, 19 nt, Homo sapiens
  misc_RNA (1)...(19): siRNA sense strand
gacggaugccuuagacauu

SEQ ID NO: 5069 - RNA, 19 nt, Homo sapiens
  misc_RNA (1)...(19): siRNA sense strand
gaacgucauccagacagaa

SEQ ID NO: 5070 - RNA, 19 nt, Homo sapiens
  misc_RNA (1)...(19): siRNA sense strand
cuggaacgccgucucauuu

SEQ ID NO: 5071 - RNA, 19 nt, Homo sapiens
  misc_RNA (1)...(19): siRNA sense strand
gaaaaccuuuacuacaaug

SEQ ID NO: 5072 - RNA, 19 nt, Homo sapiens
  misc_RNA (1)...(19): siRNA sense strand
cuucagagaucaccuuugc

SEQ ID NO: 5073 - RNA, 19 nt, Homo sapiens
  misc_RNA (1)...(19): siRNA sense strand
gugccgauauuuccuucuu

SEQ ID NO: 5074 - RNA, 19 nt, Homo sapiens
  misc_RNA (1)...(19): siRNA sense strand
gcaauaucacugaggacaa

SEQ ID NO: 5075 - RNA, 19 nt, Homo sapiens
  misc_RNA (1)...(19): siRNA sense strand
ucaccgauucccaauguuu

SEQ ID NO: 5076 - RNA, 19 nt, Homo sapiens
  misc_RNA (1)...(19): siRNA sense strand
ucagugagagcccgauuug

SEQ ID NO: 5077 - RNA, 19 nt, Homo sapiens
  misc_RNA (1)...(19): siRNA sense strand
gaaugguccuguggagcuu

SEQ ID NO: 5078 - RNA, 19 nt, Homo sapiens
  misc_RNA (1)...(19): siRNA sense strand
ggacaagaucuggacauca

SEQ ID NO: 5079 - RNA, 19 nt, Homo sapiens
  misc_RNA (1)...(19): siRNA sense strand
gcccaaggaccucauuuca

SEQ ID NO: 5080 - RNA, 19 nt, Homo sapiens
  misc_RNA (1)...(19): siRNA sense strand
caccgauucccaauguuua

SEQ ID NO: 5081 - RNA, 19 nt, Homo sapiens
  misc_RNA (1)...(19): siRNA sense strand
caaacuacaacugugauga

SEQ ID NO: 5082 - RNA, 19 nt, Homo sapiens
  misc_RNA (1)...(19): siRNA sense strand
gaacuucacgguggacaag

SEQ ID NO: 5083 - RNA, 19 nt, Homo sapiens
  misc_RNA (1)...(19): siRNA sense strand
agugagagcccgauuuguu

SEQ ID NO: 5084 - RNA, 19 nt, Homo sapiens
  misc_RNA (1)...(19): siRNA sense strand
ucagaucuauacuggcaau

SEQ ID NO: 5085 - RNA, 19 nt, Homo sapiens
  misc_RNA (1)...(19): siRNA sense strand
gucuacggauguuccuaua

SEQ ID NO: 5086 - RNA, 19 nt, Homo sapiens
  misc_RNA (1)...(19): siRNA sense strand
caaaugauacuggcuuucu

SEQ ID NO: 5087 - RNA, 19 nt, Homo sapiens
  misc_RNA (1)...(19): siRNA sense strand
gcaauugcgacgcugacaa

SEQ ID NO: 5088 - RNA, 19 nt, Homo sapiens
  misc_RNA (1)...(19): siRNA sense strand
cuacaacugugaugaucca

SEQ ID NO: 5089 - RNA, 19 nt, Homo sapiens
  misc_RNA (1)...(19): siRNA sense strand
cagguucaaucagaaguug

SEQ ID NO: 5090 - RNA, 19 nt, Homo sapiens
  misc_RNA (1)...(19): siRNA sense strand
ucacuucuguacagguuca

SEQ ID NO: 5091 - RNA, 19 nt, Homo sapiens
  misc_RNA (1)...(19): siRNA sense strand
acacaggacgcaacuggaa

SEQ ID NO: 5092 - RNA, 19 nt, Homo sapiens
  misc_RNA (1)...(19): siRNA sense strand
ucacugauaccgacagauc

SEQ ID NO: 5093 - RNA, 19 nt, Homo sapiens
  misc_RNA (1)...(19): siRNA sense strand
aaaugauacuggcuuucuu

SEQ ID NO: 5094 - RNA, 19 nt, Homo sapiens
  misc_RNA (1)...(19): siRNA sense strand
cagcccagcucaacucaac

SEQ ID NO: 5095 - RNA, 19 nt, Homo sapiens
  misc_RNA (1)...(19): siRNA sense strand
gacagaacgcguagcugaa

SEQ ID NO: 5096 - RNA, 19 nt, Homo sapiens
  misc_RNA (1)...(19): siRNA sense strand
cgagacggaugccuuagac

SEQ ID NO: 5097 - RNA, 19 nt, Homo sapiens
  misc_RNA (1)...(19): siRNA sense strand
cauuaaagacuucauucga

SEQ ID NO: 5098 - RNA, 19 nt, Homo sapiens
  misc_RNA (1)...(19): siRNA sense strand
caacacgccggauggaaca

SEQ ID NO: 5099 - RNA, 19 nt, Homo sapiens
  misc_RNA (1)...(19): siRNA sense strand
cuccagguguacugcaaua

SEQ ID NO: 5100 - RNA, 19 nt, Homo sapiens
  misc_RNA (1)...(19): siRNA sense strand
uaaagaggguauagagaaa

SEQ ID NO: 5101 - RNA, 19 nt, Homo sapiens
  misc_RNA (1)...(19): siRNA sense strand
aaacaaggaugaagaugug

SEQ ID NO: 5102 - RNA, 19 nt, Homo sapiens
  misc_RNA (1)...(19): siRNA sense strand
gaaacaaggaugaagaugu

SEQ ID NO: 5103 - RNA, 19 nt, Homo sapiens
  misc_RNA (1)...(19): siRNA sense strand
gaaaggaaguguuguuacc

SEQ ID NO: 5104 - RNA, 19 nt, Homo sapiens
  misc_RNA (1)...(19): siRNA sense strand
gggaaaggaaguguuguua

SEQ ID NO: 5105 - RNA, 19 nt, Homo sapiens
  misc_RNA (1)...(19): siRNA sense strand
ggaagaaggaggaaacaag

SEQ ID NO: 5106 - RNA, 19 nt, Homo sapiens
  misc_RNA (1)...(19): siRNA sense strand
uuaaagaggguauagagaa

SEQ ID NO: 5107 - RNA, 19 nt, Homo sapiens
  misc_RNA (1)...(19): siRNA sense strand
gaggaaacaaggaugaaga

SEQ ID NO: 5108 - RNA, 19 nt, Homo sapiens
  misc_RNA (1)...(19): siRNA sense strand
gaaggaacuggaagaagga

SEQ ID NO: 5109 - RNA, 19 nt, Homo sapiens
  misc_RNA (1)...(19): siRNA sense strand
uaccagguguccucagaaa

SEQ ID NO: 5110 - RNA, 19 nt, Homo sapiens
  misc_RNA (1)...(19): siRNA sense strand
ccagguguccucagaaaug

SEQ ID NO: 5111 - RNA, 19 nt, Homo sapiens
  misc_RNA (1)...(19): siRNA sense strand
caacguacgcugcuucaag

SEQ ID NO: 5112 - RNA, 19 nt, Homo sapiens
  misc_RNA (1)...(19): siRNA sense strand
cauggugucucucguucuu

SEQ ID NO: 5113 - RNA, 19 nt, Homo sapiens
  misc_RNA (1)...(19): siRNA sense strand
uugcccagcugacaacgua

SEQ ID NO: 5114 - RNA, 19 nt, Homo sapiens
  misc_RNA (1)...(19): siRNA sense strand
ggaaaggaaguguuguuac

SEQ ID NO: 5115 - RNA, 19 nt, Homo sapiens
  misc_RNA (1)...(19): siRNA sense strand
cagguguccucagaaauga

SEQ ID NO: 5116 - RNA, 19 nt, Homo sapiens
  misc_RNA (1)...(19): siRNA sense strand
uguccaggcuccuccucua

SEQ ID NO: 5117 - RNA, 19 nt, Homo sapiens
  misc_RNA (1)...(19): siRNA sense strand
ggaaacaaggaugaagaug

SEQ ID NO: 5118 - RNA, 19 nt, Homo sapiens
  misc_RNA (1)...(19): siRNA sense strand
guuaaagaggguauagaga

SEQ ID NO: 5119 - RNA, 19 nt, Homo sapiens
  misc_RNA (1)...(19): siRNA sense strand
gaacuggaagaaggaggaa

SEQ ID NO: 5120 - RNA, 19 nt, Homo sapiens
  misc_RNA (1)...(19): siRNA sense strand
ggaguuaaagaggguauag

SEQ ID NO: 5121 - RNA, 19 nt, Homo sapiens
  misc_RNA (1)...(19): siRNA sense strand
ccugguggcuguggaagga

SEQ ID NO: 5122 - RNA, 19 nt, Homo sapiens
  misc_RNA (1)...(19): siRNA sense strand
ucuaccagguguccucaga

SEQ ID NO: 5123 - RNA, 19 nt, Homo sapiens
  misc_RNA (1)...(19): siRNA sense strand
caaggaugaagauguguca

SEQ ID NO: 5124 - RNA, 19 nt, Homo sapiens
  misc_RNA (1)...(19): siRNA sense strand
aacguacgcugcuucaagu

SEQ ID NO: 5125 - RNA, 19 nt, Homo sapiens
  misc_RNA (1)...(19): siRNA sense strand
ggaggaaacaaggaugaag

SEQ ID NO: 5126 - RNA, 19 nt, Homo sapiens
  misc_RNA (1)...(19): siRNA sense strand
gagaugcgacacccacuua

SEQ ID NO: 5127 - RNA, 19 nt, Homo sapiens
  misc_RNA (1)...(19): siRNA sense strand
cagaggacaugcagagaug

SEQ ID NO: 5128 - RNA, 19 nt, Homo sapiens
  misc_RNA (1)...(19): siRNA sense strand
uccaaggucugcucggaua

SEQ ID NO: 5129 - RNA, 19 nt, Homo sapiens
  misc_RNA (1)...(19): siRNA sense strand
gaugcgacacccacuuaaa

SEQ ID NO: 5130 - RNA, 19 nt, Homo sapiens
  misc_RNA (1)...(19): siRNA sense strand
acucgaaguugcaaagaug

SEQ ID NO: 5131 - RNA, 19 nt, Homo sapiens
  misc_RNA (1)...(19): siRNA sense strand
ggcgcuggcugucauugug

SEQ ID NO: 5132 - RNA, 19 nt, Homo sapiens
  misc_RNA (1)...(19): siRNA sense strand
caaggucugcucggauauu

SEQ ID NO: 5133 - RNA, 19 nt, Homo sapiens
  misc_RNA (1)...(19): siRNA sense strand
ggucugcucggauauugga

SEQ ID NO: 5134 - RNA, 19 nt, Homo sapiens
  misc_RNA (1)...(19): siRNA sense strand
gauauuggacagaggacau

SEQ ID NO: 5135 - RNA, 19 nt, Homo sapiens
  misc_RNA (1)...(19): siRNA sense strand
aaggucugcucggauauug

SEQ ID NO: 5136 - RNA, 19 nt, Homo sapiens
  misc_RNA (1)...(19): siRNA sense strand
gggaccugcugccacagau

SEQ ID NO: 5137 - RNA, 19 nt, Homo sapiens
  misc_RNA (1)...(19): siRNA sense strand
caaagaugcaaaugagacu

SEQ ID NO: 5138 - RNA, 19 nt, Homo sapiens
  misc_RNA (1)...(19): siRNA sense strand
caaggaccaucaaacauuu

SEQ ID NO: 5139 - RNA, 19 nt, Homo sapiens
  misc_RNA (1)...(19): siRNA sense strand
gaauuugcuuugucuguuu

SEQ ID NO: 5140 - RNA, 19 nt, Homo sapiens
  misc_RNA (1)...(19): siRNA sense strand
caaaucaugugaccucuau

SEQ ID NO: 5141 - RNA, 19 nt, Homo sapiens
  misc_RNA (1)...(19): siRNA sense strand
gauauaaacagcagagauu

SEQ ID NO: 5142 - RNA, 19 nt, Homo sapiens
  misc_RNA (1)...(19): siRNA sense strand
ggaggaggaugaugaagau

SEQ ID NO: 5143 - RNA, 19 nt, Homo sapiens
  misc_RNA (1)...(19): siRNA sense strand
ucagauaugucuucuacaa

SEQ ID NO: 5144 - RNA, 19 nt, Homo sapiens
  misc_RNA (1)...(19): siRNA sense strand
acauagagaugcugaaguu

SEQ ID NO: 5145 - RNA, 19 nt, Homo sapiens
  misc_RNA (1)...(19): siRNA sense strand
gaagcaucauuuggaauuu

SEQ ID NO: 5146 - RNA, 19 nt, Homo sapiens
  misc_RNA (1)...(19): siRNA sense strand
ggucuuugcugauguggaa

SEQ ID NO: 5147 - RNA, 19 nt, Homo sapiens
  misc_RNA (1)...(19): siRNA sense strand
gcaauaccauacaugaauc

SEQ ID NO: 5148 - RNA, 19 nt, Homo sapiens
  misc_RNA (1)...(19): siRNA sense strand
caaguuguuucucccaauu

SEQ ID NO: 5149 - RNA, 19 nt, Homo sapiens
  misc_RNA (1)...(19): siRNA sense strand
gaccuuugaucccaagaaa

SEQ ID NO: 5150 - RNA, 19 nt, Homo sapiens
  misc_RNA (1)...(19): siRNA sense strand
gcuaugaacacuagagauu

SEQ ID NO: 5151 - RNA, 19 nt, Homo sapiens
  misc_RNA (1)...(19): siRNA sense strand
ccaaggaccaucaaacauu

SEQ ID NO: 5152 - RNA, 19 nt, Homo sapiens
  misc_RNA (1)...(19): siRNA sense strand
ucauaagccuggcgaaaug

SEQ ID NO: 5153 - RNA, 19 nt, Homo sapiens
  misc_RNA (1)...(19): siRNA sense strand
ggaggguccuucaguguuc

SEQ ID NO: 5154 - RNA, 19 nt, Homo sapiens
  misc_RNA (1)...(19): siRNA sense strand
aaaguggaaucaccaaaga

SEQ ID NO: 5155 - RNA, 19 nt, Homo sapiens
  misc_RNA (1)...(19): siRNA sense strand
caucaaaccauguucagaa

SEQ ID NO: 5156 - RNA, 19 nt, Homo sapiens
  misc_RNA (1)...(19): siRNA sense strand
ugaaucacaugaagcauca

SEQ ID NO: 5157 - RNA, 19 nt, Homo sapiens
  misc_RNA (1)...(19): siRNA sense strand
ggaggaggcagaaaugaga

SEQ ID NO: 5158 - RNA, 19 nt, Homo sapiens
  misc_RNA (1)...(19): siRNA sense strand
cagccaggaucaaguggua

SEQ ID NO: 5159 - RNA, 19 nt, Homo sapiens
  misc_RNA (1)...(19): siRNA sense strand
cagcuacagugucacauug

SEQ ID NO: 5160 - RNA, 19 nt, Homo sapiens
  misc_RNA (1)...(19): siRNA sense strand
gaaaguggaaucaccaaag

SEQ ID NO: 5161 - RNA, 19 nt, Homo sapiens
  misc_RNA (1)...(19): siRNA sense strand
gcacaaauacacccucaca

SEQ ID NO: 5162 - RNA, 19 nt, Homo sapiens
  misc_RNA (1)...(19): siRNA sense strand
gcuguggucccuucagaua

SEQ ID NO: 5163 - RNA, 19 nt, Homo sapiens
  misc_RNA (1)...(19): siRNA sense strand
ugguauggcuuccguuauu

SEQ ID NO: 5164 - RNA, 19 nt, Homo sapiens
  misc_RNA (1)...(19): siRNA sense strand
gggacucagugucuaguug

SEQ ID NO: 5165 - RNA, 19 nt, Homo sapiens
  misc_RNA (1)...(19): siRNA sense strand
ugaagcaucauuuggaauu

SEQ ID NO: 5166 - RNA, 19 nt, Homo sapiens
  misc_RNA (1)...(19): siRNA sense strand
cgacuuuccacuucagaua

SEQ ID NO: 5167 - RNA, 19 nt, Homo sapiens
  misc_RNA (1)...(19): siRNA sense strand
gagagaauccaaacaaagg

SEQ ID NO: 5168 - RNA, 19 nt, Homo sapiens
  misc_RNA (1)...(19): siRNA sense strand
gaagacggcuaugaacacu

SEQ ID NO: 5169 - RNA, 19 nt, Homo sapiens
  misc_RNA (1)...(19): siRNA sense strand
cagaucagguccucuuaca

SEQ ID NO: 5170 - RNA, 19 nt, Homo sapiens
  misc_RNA (1)...(19): siRNA sense strand
gguggagcauguacauaga

SEQ ID NO: 5171 - RNA, 19 nt, Homo sapiens
  misc_RNA (1)...(19): siRNA sense strand
gaaaggccacuuccgucaa

SEQ ID NO: 5172 - RNA, 19 nt, Homo sapiens
  misc_RNA (1)...(19): siRNA sense strand
gaucagguccucuuacaac

SEQ ID NO: 5173 - RNA, 19 nt, Homo sapiens
  misc_RNA (1)...(19): siRNA sense strand
aaaggcacauuucaaucuu

SEQ ID NO: 5174 - RNA, 19 nt, Homo sapiens
  misc_RNA (1)...(19): siRNA sense strand
aaaaugagcucaccacaag

SEQ ID NO: 5175 - RNA, 19 nt, Homo sapiens
  misc_RNA (1)...(19): siRNA sense strand
gagcauguacauagagaug

SEQ ID NO: 5176 - RNA, 19 nt, Homo sapiens
  misc_RNA (1)...(19): siRNA sense strand
gguauggcuuccguuauug

SEQ ID NO: 5177 - RNA, 19 nt, Homo sapiens
  misc_RNA (1)...(19): siRNA sense strand
uuuagaacgugccaugaaa

SEQ ID NO: 5178 - RNA, 19 nt, Homo sapiens
  misc_RNA (1)...(19): siRNA sense strand
gaggggcgaucgacagaua

SEQ ID NO: 5179 - RNA, 19 nt, Homo sapiens
  misc_RNA (1)...(19): siRNA sense strand
gcaaaucaugugaccucua

SEQ ID NO: 5180 - RNA, 19 nt, Homo sapiens
  misc_RNA (1)...(19): siRNA sense strand
gaagaaagaaaggccacuu

SEQ ID NO: 5181 - RNA, 19 nt, Homo sapiens
  misc_RNA (1)...(19): siRNA sense strand
gggaggaggaugaugaaga

SEQ ID NO: 5182 - RNA, 19 nt, Homo sapiens
  misc_RNA (1)...(19): siRNA sense strand
uuacagaucgucggucuuu

SEQ ID NO: 5183 - RNA, 19 nt, Homo sapiens
  misc_RNA (1)...(19): siRNA sense strand
aaagggaggaggaugauga

SEQ ID NO: 5184 - RNA, 19 nt, Homo sapiens
  misc_RNA (1)...(19): siRNA sense strand
caacucaucaaaccauguu

SEQ ID NO: 5185 - RNA, 19 nt, Homo sapiens
  misc_RNA (1)...(19): siRNA sense strand
gcucaaagucaagaagaaa

SEQ ID NO: 5186 - RNA, 19 nt, Homo sapiens
  misc_RNA (1)...(19): siRNA sense strand
aaacagaucagguccucuu

SEQ ID NO: 5187 - RNA, 19 nt, Homo sapiens
  misc_RNA (1)...(19): siRNA sense strand
cuucagauaugucuucuac

SEQ ID NO: 5188 - RNA, 19 nt, Homo sapiens
  misc_RNA (1)...(19): siRNA sense strand
aaaggccacuuccgucaau

SEQ ID NO: 5189 - RNA, 19 nt, Homo sapiens
  misc_RNA (1)...(19): siRNA sense strand
agacggcuaugaacacuag

SEQ ID NO: 5190 - RNA, 19 nt, Homo sapiens
  misc_RNA (1)...(19): siRNA sense strand
ucugugaauugucauuuga

SEQ ID NO: 5191 - RNA, 19 nt, Homo sapiens
  misc_RNA (1)...(19): siRNA sense strand
agacucacaccaccuuuaa

SEQ ID NO: 5192 - RNA, 19 nt, Homo sapiens
  misc_RNA (1)...(19): siRNA sense strand
cguguuacuuagcaacuuu

SEQ ID NO: 5193 - RNA, 19 nt, Homo sapiens
  misc_RNA (1)...(19): siRNA sense strand
agaguucuccugauucaaa

SEQ ID NO: 5194 - RNA, 19 nt, Homo sapiens
  misc_RNA (1)...(19): siRNA sense strand
aaggcacauuucaaucuua

SEQ ID NO: 5195 - RNA, 19 nt, Homo sapiens
  misc_RNA (1)...(19): siRNA sense strand
ccucagucuucuccuguaa

SEQ ID NO: 5196 - RNA, 19 nt, Homo sapiens
  misc_RNA (1)...(19): siRNA sense strand
caagugccggcuacaguuu

SEQ ID NO: 5197 - RNA, 19 nt, Homo sapiens
  misc_RNA (1)...(19): siRNA sense strand
aaacugcaauaccauacau

SEQ ID NO: 5198 - RNA, 19 nt, Homo sapiens
  misc_RNA (1)...(19): siRNA sense strand
agaauuugcuuugucuguu

SEQ ID NO: 5199 - RNA, 19 nt, Homo sapiens
  misc_RNA (1)...(19): siRNA sense strand
aaacagcagagauuccaaa

SEQ ID NO: 5200 - RNA, 19 nt, Homo sapiens
  misc_RNA (1)...(19): siRNA sense strand
gcccucugcugucuguaaa

SEQ ID NO: 5201 - RNA, 19 nt, Homo sapiens
  misc_RNA (1)...(19): siRNA sense strand
ccagagagagcaaaugagu

SEQ ID NO: 5202 - RNA, 19 nt, Homo sapiens
  misc_RNA (1)...(19): siRNA sense strand
aaucccaucguguuacuua

SEQ ID NO: 5203 - RNA, 19 nt, Homo sapiens
  misc_RNA (1)...(19): siRNA sense strand
gagaugggcagccggaaca

SEQ ID NO: 5204 - RNA, 19 nt, Homo sapiens
  misc_RNA (1)...(19): siRNA sense strand
uugagagaauccaaacaaa

SEQ ID NO: 5205 - RNA, 19 nt, Homo sapiens
  misc_RNA (1)...(19): siRNA sense strand
ggcucaaagucaagaagaa

SEQ ID NO: 5206 - RNA, 19 nt, Homo sapiens
  misc_RNA (1)...(19): siRNA sense strand
cuacagugucacauugaua

SEQ ID NO: 5207 - RNA, 19 nt, Homo sapiens
  misc_RNA (1)...(19): siRNA sense strand
gcuacagugucacauugau

SEQ ID NO: 5208 - RNA, 19 nt, Homo sapiens
  misc_RNA (1)...(19): siRNA sense strand
gaagacucacaccaccuuu

SEQ ID NO: 5209 - RNA, 19 nt, Homo sapiens
  misc_RNA (1)...(19): siRNA sense strand
ucaagucuagcaagucaaa

SEQ ID NO: 5210 - RNA, 19 nt, Homo sapiens
  misc_RNA (1)...(19): siRNA sense strand
ggccugaugcuaauggaaa

SEQ ID NO: 5211 - RNA, 19 nt, Homo sapiens
  misc_RNA (1)...(19): siRNA sense strand
uagcuguggucccuucaga

SEQ ID NO: 5212 - RNA, 19 nt, Homo sapiens
  misc_RNA (1)...(19): siRNA sense strand
uggaaucaccaaagaagaa

SEQ ID NO: 5213 - RNA, 19 nt, Homo sapiens
  misc_RNA (1)...(19): siRNA sense strand
ccaagugccggcuacaguu

SEQ ID NO: 5214 - RNA, 19 nt, Homo sapiens
  misc_RNA (1)...(19): siRNA sense strand
uuucaagucuagcaaguca

SEQ ID NO: 5215 - RNA, 19 nt, Homo sapiens
  misc_RNA (1)...(19): siRNA sense strand
ucuuacagauccagagaga

SEQ ID NO: 5216 - RNA, 19 nt, Homo sapiens
  misc_RNA (1)...(19): siRNA sense strand
acuuuccacuucagauaua

SEQ ID NO: 5217 - RNA, 19 nt, Homo sapiens
  misc_RNA (1)...(19): siRNA sense strand
aagcaucauuuggaauuug

SEQ ID NO: 5218 - RNA, 19 nt, Homo sapiens
  misc_RNA (1)...(19): siRNA sense strand
uguggucccuucagauaug

SEQ ID NO: 5219 - RNA, 19 nt, Homo sapiens
  misc_RNA (1)...(19): siRNA sense strand
cagcagagauuccaaaagg

SEQ ID NO: 5220 - RNA, 19 nt, Homo sapiens
  misc_RNA (1)...(19): siRNA sense strand
ucaaagucaagaagaaaga

SEQ ID NO: 5221 - RNA, 19 nt, Homo sapiens
  misc_RNA (1)...(19): siRNA sense strand
ggaaucaccaaagaagaau

SEQ ID NO: 5222 - RNA, 19 nt, Homo sapiens
  misc_RNA (1)...(19): siRNA sense strand
ggaggaaauagagcacaaa

SEQ ID NO: 5223 - RNA, 19 nt, Homo sapiens
  misc_RNA (1)...(19): siRNA sense strand
agaagaauuugagagaauc

SEQ ID NO: 5224 - RNA, 19 nt, Homo sapiens
  misc_RNA (1)...(19): siRNA sense strand
ugugccagguuugccauua

SEQ ID NO: 5225 - RNA, 19 nt, Homo sapiens
  misc_RNA (1)...(19): siRNA sense strand
caucauaagccuggcgaaa

SEQ ID NO: 5226 - RNA, 19 nt, Homo sapiens
  misc_RNA (1)...(19): siRNA sense strand
ucacaccaccuuuaaaugc

SEQ ID NO: 5227 - RNA, 19 nt, Homo sapiens
  misc_RNA (1)...(19): siRNA sense strand
ggguggagcauguacauag

SEQ ID NO: 5228 - RNA, 19 nt, Homo sapiens
  misc_RNA (1)...(19): siRNA sense strand
cagguccucuuacaacaca

SEQ ID NO: 5229 - RNA, 19 nt, Homo sapiens
  misc_RNA (1)...(19): siRNA sense strand
guuuaugaaucacaugaag

SEQ ID NO: 5230 - RNA, 19 nt, Homo sapiens
  misc_RNA (1)...(19): siRNA sense strand
acaauaagcacaaauacac

SEQ ID NO: 5231 - RNA, 19 nt, Homo sapiens
  misc_RNA (1)...(19): siRNA sense strand
caaagucaagaagaaagaa

SEQ ID NO: 5232 - RNA, 19 nt, Homo sapiens
  misc_RNA (1)...(19): siRNA sense strand
guacauagagaugcugaag

SEQ ID NO: 5233 - RNA, 19 nt, Homo sapiens
  misc_RNA (1)...(19): siRNA sense strand
gcacauuucaaucuuacag

SEQ ID NO: 5234 - RNA, 19 nt, Homo sapiens
  misc_RNA (1)...(19): siRNA sense strand
gaucugcaacucaucaaac

SEQ ID NO: 5235 - RNA, 19 nt, Homo sapiens
  misc_RNA (1)...(19): siRNA sense strand
gacguugaaggaggaaaua

SEQ ID NO: 5236 - RNA, 19 nt, Homo sapiens
  misc_RNA (1)...(19): siRNA sense strand
gaaucaccaaagaagaauu

SEQ ID NO: 5237 - RNA, 19 nt, Homo sapiens
  misc_RNA (1)...(19): siRNA sense strand
gagucuggccuggcaauga

SEQ ID NO: 5238 - RNA, 19 nt, Homo sapiens
  misc_RNA (1)...(19): siRNA sense strand
gcauaucaguuauacagaa

SEQ ID NO: 5239 - RNA, 19 nt, Homo sapiens
  misc_RNA (1)...(19): siRNA sense strand
gaaauacuacuuugggaaa

SEQ ID NO: 5240 - RNA, 19 nt, Homo sapiens
  misc_RNA (1)...(19): siRNA sense strand
gcgauaauguguggacuuu

SEQ ID NO: 5241 - RNA, 19 nt, Homo sapiens
  misc_RNA (1)...(19): siRNA sense strand
aauacuggcuccaauacua

SEQ ID NO: 5242 - RNA, 19 nt, Homo sapiens
  misc_RNA (1)...(19): siRNA sense strand
gauaauguguggacuuuug

SEQ ID NO: 5243 - RNA, 19 nt, Homo sapiens
  misc_RNA (1)...(19): siRNA sense strand
cuaaauacguacagauucu

SEQ ID NO: 5244 - RNA, 19 nt, Homo sapiens
  misc_RNA (1)...(19): siRNA sense strand
cauacagucucaacagauc

SEQ ID NO: 5245 - RNA, 19 nt, Homo sapiens
  misc_RNA (1)...(19): siRNA sense strand
ugauaaggcuauaaaugca

SEQ ID NO: 5246 - RNA, 19 nt, Homo sapiens
  misc_RNA (1)...(19): siRNA sense strand
ggaacagagucaauuucag

SEQ ID NO: 5247 - RNA, 19 nt, Homo sapiens
  misc_RNA (1)...(19): siRNA sense strand
gcucagagggucaggaaca

SEQ ID NO: 5248 - RNA, 19 nt, Homo sapiens
  misc_RNA (1)...(19): siRNA sense strand
ucaggaacagagucaauuu

SEQ ID NO: 5249 - RNA, 19 nt, Homo sapiens
  misc_RNA (1)...(19): siRNA sense strand
gcuccaauacuacagaaug

SEQ ID NO: 5250 - RNA, 19 nt, Homo sapiens
  misc_RNA (1)...(19): siRNA sense strand
cuccaauacuacagaauga

SEQ ID NO: 5251 - RNA, 19 nt, Homo sapiens
  misc_RNA (1)...(19): siRNA sense strand
ucaguuugauaaggcuaua

SEQ ID NO: 5252 - RNA, 19 nt, Homo sapiens
  misc_RNA (1)...(19): siRNA sense strand
guucuacuucaguuugaua

SEQ ID NO: 5253 - RNA, 19 nt, Homo sapiens
  misc_RNA (1)...(19): siRNA sense strand
ggucaggaacagagucaau

SEQ ID NO: 5254 - RNA, 19 nt, Homo sapiens
  misc_RNA (1)...(19): siRNA sense strand
gcucauacagucucaacag

SEQ ID NO: 5255 - RNA, 19 nt, Homo sapiens
  misc_RNA (1)...(19): siRNA sense strand
cuacuucaguuugauaagg

SEQ ID NO: 5256 - RNA, 19 nt, Homo sapiens
  misc_RNA (1)...(19): siRNA sense strand
uucaggggcucucuaaaua

SEQ ID NO: 5257 - RNA, 19 nt, Homo sapiens
  misc_RNA (1)...(19): siRNA sense strand
uguagccugugaugguaaa

SEQ ID NO: 5258 - RNA, 19 nt, Homo sapiens
  misc_RNA (1)...(19): siRNA sense strand
cucauacagucucaacaga

SEQ ID NO: 5259 - RNA, 19 nt, Homo sapiens
  misc_RNA (1)...(19): siRNA sense strand
gucaggaacagagucaauu

SEQ ID NO: 5260 - RNA, 19 nt, Homo sapiens
  misc_RNA (1)...(19): siRNA sense strand
ucuaaauacguacagauuc

SEQ ID NO: 5261 - RNA, 19 nt, Homo sapiens
  misc_RNA (1)...(19): siRNA sense strand
caggaacagagucaauuuc

SEQ ID NO: 5262 - RNA, 19 nt, Homo sapiens
  misc_RNA (1)...(19): siRNA sense strand
gaaguuagcacucuacgua

SEQ ID NO: 5263 - RNA, 19 nt, Homo sapiens
  misc_RNA (1)...(19): siRNA sense strand
caacaaggacauccaaaua

SEQ ID NO: 5264 - RNA, 19 nt, Homo sapiens
  misc_RNA (1)...(19): siRNA sense strand
gagaaugacuccuccaaga

SEQ ID NO: 5265 - RNA, 19 nt, Homo sapiens
  misc_RNA (1)...(19): siRNA sense strand
ucacaugaauggcucuuua

SEQ ID NO: 5266 - RNA, 19 nt, Homo sapiens
  misc_RNA (1)...(19): siRNA sense strand
gcaaaagccuuccaugauu

SEQ ID NO: 5267 - RNA, 19 nt, Homo sapiens
  misc_RNA (1)...(19): siRNA sense strand
ggagauauggacaguauuu

SEQ ID NO: 5268 - RNA, 19 nt, Homo sapiens
  misc_RNA (1)...(19): siRNA sense strand
ggaccuaacagaccuaauu

SEQ ID NO: 5269 - RNA, 19 nt, Homo sapiens
  misc_RNA (1)...(19): siRNA sense strand
ggaaccaccaggauucuua

SEQ ID NO: 5270 - RNA, 19 nt, Homo sapiens
  misc_RNA (1)...(19): siRNA sense strand
caacaaaugccaauucaau

SEQ ID NO: 5271 - RNA, 19 nt, Homo sapiens
  misc_RNA (1)...(19): siRNA sense strand
gcucagaaaucagcucaaa

SEQ ID NO: 5272 - RNA, 19 nt, Homo sapiens
  misc_RNA (1)...(19): siRNA sense strand
caagaauucucccaauaau

SEQ ID NO: 5273 - RNA, 19 nt, Homo sapiens
  misc_RNA (1)...(19): siRNA sense strand
gacaguauuuccaagaauu

SEQ ID NO: 5274 - RNA, 19 nt, Homo sapiens
  misc_RNA (1)...(19): siRNA sense strand
ccaccaggauucuuacauu

SEQ ID NO: 5275 - RNA, 19 nt, Homo sapiens
  misc_RNA (1)...(19): siRNA sense strand
ccaagaauucucccaauaa

SEQ ID NO: 5276 - RNA, 19 nt, Homo sapiens
  misc_RNA (1)...(19): siRNA sense strand
caaaagccuuccaugauua

SEQ ID NO: 5277 - RNA, 19 nt, Homo sapiens
  misc_RNA (1)...(19): siRNA sense strand
ggaauggagucacaucaca

SEQ ID NO: 5278 - RNA, 19 nt, Homo sapiens
  misc_RNA (1)...(19): siRNA sense strand
cagcaucuccugggaauua

SEQ ID NO: 5279 - RNA, 19 nt, Homo sapiens
  misc_RNA (1)...(19): siRNA sense strand
caggagauauggacaguau

SEQ ID NO: 5280 - RNA, 19 nt, Homo sapiens
  misc_RNA (1)...(19): siRNA sense strand
ggagucacaucacaugaau

SEQ ID NO: 5281 - RNA, 19 nt, Homo sapiens
  misc_RNA (1)...(19): siRNA sense strand
ggacaguauuuccaagaau

SEQ ID NO: 5282 - RNA, 19 nt, Homo sapiens
  misc_RNA (1)...(19): siRNA sense strand
acaaggacauccaaauaug

SEQ ID NO: 5283 - RNA, 19 nt, Homo sapiens
  misc_RNA (1)...(19): siRNA sense strand
uguaggagcucagaaauca

SEQ ID NO: 5284 - RNA, 19 nt, Homo sapiens
  misc_RNA (1)...(19): siRNA sense strand
ggauccaacucgacaacaa

SEQ ID NO: 5285 - RNA, 19 nt, Homo sapiens
  misc_RNA (1)...(19): siRNA sense strand
ggugauaacauguauacuu

SEQ ID NO: 5286 - RNA, 19 nt, Homo sapiens
  misc_RNA (1)...(19): siRNA sense strand
caacucuggugauaacaug

SEQ ID NO: 5287 - RNA, 19 nt, Homo sapiens
  misc_RNA (1)...(19): siRNA sense strand
agagagacgugaaacaugu

SEQ ID NO: 5288 - RNA, 19 nt, Homo sapiens
  misc_RNA (1)...(19): siRNA sense strand
uccaagaauucucccaaua

SEQ ID NO: 5289 - RNA, 19 nt, Homo sapiens
  misc_RNA (1)...(19): siRNA sense strand
gaauaucugcuccauguag

SEQ ID NO: 5290 - RNA, 19 nt, Homo sapiens
  misc_RNA (1)...(19): siRNA sense strand
gggagaaguuagcacucua

SEQ ID NO: 5291 - RNA, 19 nt, Homo sapiens
  misc_RNA (1)...(19): siRNA sense strand
gaccuaacagaccuaauuu

SEQ ID NO: 5292 - RNA, 19 nt, Homo sapiens
  misc_RNA (1)...(19): siRNA sense strand
aauaugagccugaguaauc

SEQ ID NO: 5293 - RNA, 19 nt, Homo sapiens
  misc_RNA (1)...(19): siRNA sense strand
gaacuauggaggugcaaug

SEQ ID NO: 5294 - RNA, 19 nt, Homo sapiens
  misc_RNA (1)...(19): siRNA sense strand
agaaaucagcucaaacauu

SEQ ID NO: 5295 - RNA, 19 nt, Homo sapiens
  misc_RNA (1)...(19): siRNA sense strand
cuauggaggugcaaugaga

SEQ ID NO: 5296 - RNA, 19 nt, Homo sapiens
  misc_RNA (1)...(19): siRNA sense strand
ucagaaaucagcucaaaca

SEQ ID NO: 5297 - RNA, 19 nt, Homo sapiens
  misc_RNA (1)...(19): siRNA sense strand
augaauaucugcuccaugu

SEQ ID NO: 5298 - RNA, 19 nt, Homo sapiens
  misc_RNA (1)...(19): siRNA sense strand
ccaggauucuuacauucuu

SEQ ID NO: 5299 - RNA, 19 nt, Homo sapiens
  misc_RNA (1)...(19): siRNA sense strand
cccaggaagucagccauua

SEQ ID NO: 5300 - RNA, 19 nt, Homo sapiens
  misc_RNA (1)...(19): siRNA sense strand
aauaauaugagccugagua

SEQ ID NO: 5301 - RNA, 19 nt, Homo sapiens
  misc_RNA (1)...(19): siRNA sense strand
aguuagcacucuacguaua

SEQ ID NO: 5302 - RNA, 19 nt, Homo sapiens
  misc_RNA (1)...(19): siRNA sense strand
gccaguagguccuguacca

SEQ ID NO: 5303 - RNA, 19 nt, Homo sapiens
  misc_RNA (1)...(19): siRNA sense strand
ucuuuaggcucaggagaua

SEQ ID NO: 5304 - RNA, 19 nt, Homo sapiens
  misc_RNA (1)...(19): siRNA sense strand
cauugaggauaccuaauca

SEQ ID NO: 5305 - RNA, 19 nt, Homo sapiens
  misc_RNA (1)...(19): siRNA sense strand
ucagagauaagaugggaaa

SEQ ID NO: 5306 - RNA, 19 nt, Homo sapiens
  misc_RNA (1)...(19): siRNA sense strand
ccaauucaauaccauacuc

SEQ ID NO: 5307 - RNA, 19 nt, Homo sapiens
  misc_RNA (1)...(19): siRNA sense strand
caccaggauucuuacauuc

SEQ ID NO: 5308 - RNA, 19 nt, Homo sapiens
  misc_RNA (1)...(19): siRNA sense strand
cccaacaaaugccaauuca

SEQ ID NO: 5309 - RNA, 19 nt, Homo sapiens
  misc_RNA (1)...(19): siRNA sense strand
ccaguccagugcuaggaaa

SEQ ID NO: 5310 - RNA, 19 nt, Homo sapiens
  misc_RNA (1)...(19): siRNA sense strand
ucccauggguggauuagga

SEQ ID NO: 5311 - RNA, 19 nt, Homo sapiens
  misc_RNA (1)...(19): siRNA sense strand
aaauaugggugggccaaug

SEQ ID NO: 5312 - RNA, 19 nt, Homo sapiens
  misc_RNA (1)...(19): siRNA sense strand
ccauguaggagcucagaaa

SEQ ID NO: 5313 - RNA, 19 nt, Homo sapiens
  misc_RNA (1)...(19): siRNA sense strand
gggccaaugcagagaauga

SEQ ID NO: 5314 - RNA, 19 nt, Homo sapiens
  misc_RNA (1)...(19): siRNA sense strand
gcacucuacguauaugaau

SEQ ID NO: 5315 - RNA, 19 nt, Homo sapiens
  misc_RNA (1)...(19): siRNA sense strand
gaggaauggugcccuuagg

SEQ ID NO: 5316 - RNA, 19 nt, Homo sapiens
  misc_RNA (1)...(19): siRNA sense strand
cacucuacguauaugaaua

SEQ ID NO: 5317 - RNA, 19 nt, Homo sapiens
  misc_RNA (1)...(19): siRNA sense strand
uggaaugccuggaaugaac

SEQ ID NO: 5318 - RNA, 19 nt, Homo sapiens
  misc_RNA (1)...(19): siRNA sense strand
uaacagaccuaauuuucca

SEQ ID NO: 5319 - RNA, 19 nt, Homo sapiens
  misc_RNA (1)...(19): siRNA sense strand
aacaaggacauccaaauau

SEQ ID NO: 5320 - RNA, 19 nt, Homo sapiens
  misc_RNA (1)...(19): siRNA sense strand
ccagagagacgugaaacau

SEQ ID NO: 5321 - RNA, 19 nt, Homo sapiens
  misc_RNA (1)...(19): siRNA sense strand
ggcaaaggcaagaguaaca

SEQ ID NO: 5322 - RNA, 19 nt, Homo sapiens
  misc_RNA (1)...(19): siRNA sense strand
uaggaggaauggagucaca

SEQ ID NO: 5323 - RNA, 19 nt, Homo sapiens
  misc_RNA (1)...(19): siRNA sense strand
cgacaacaaggacauccaa

SEQ ID NO: 5324 - RNA, 19 nt, Homo sapiens
  misc_RNA (1)...(19): siRNA sense strand
ccauugaggauaccuaauc

SEQ ID NO: 5325 - RNA, 19 nt, Homo sapiens
  misc_RNA (1)...(19): siRNA sense strand
cagagagacgugaaacaug

SEQ ID NO: 5326 - RNA, 19 nt, Homo sapiens
  misc_RNA (1)...(19): siRNA sense strand
ggccaaacccaacaaaugc

SEQ ID NO: 5327 - RNA, 19 nt, Homo sapiens
  misc_RNA (1)...(19): siRNA sense strand
uggccaaacccaacaaaug

SEQ ID NO: 5328 - RNA, 19 nt, Homo sapiens
  misc_RNA (1)...(19): siRNA sense strand
gaauucucccaauaauaug

SEQ ID NO: 5329 - RNA, 19 nt, Homo sapiens
  misc_RNA (1)...(19): siRNA sense strand
guuagcacucuacguauau

SEQ ID NO: 5330 - RNA, 19 nt, Homo sapiens
  misc_RNA (1)...(19): siRNA sense strand
gaggaauggagucacauca

SEQ ID NO: 5331 - RNA, 19 nt, Homo sapiens
  misc_RNA (1)...(19): siRNA sense strand
acaaaugccaauucaauac

SEQ ID NO: 5332 - RNA, 19 nt, Homo sapiens
  misc_RNA (1)...(19): siRNA sense strand
caaggacauccaaauaugg

SEQ ID NO: 5333 - RNA, 19 nt, Homo sapiens
  misc_RNA (1)...(19): siRNA sense strand
aagggaugauggcgaaaug

SEQ ID NO: 5334 - RNA, 19 nt, Homo sapiens
  misc_RNA (1)...(19): siRNA sense strand
gaauggagucacaucacau

SEQ ID NO: 5335 - RNA, 19 nt, Homo sapiens
  misc_RNA (1)...(19): siRNA sense strand
caggauucuuacauucuug

SEQ ID NO: 5336 - RNA, 19 nt, Homo sapiens
  misc_RNA (1)...(19): siRNA sense strand
gcccuggaaugccuggaau

SEQ ID NO: 5337 - RNA, 19 nt, Homo sapiens
  misc_RNA (1)...(19): siRNA sense strand
ggaaugccuggaaugaaca

SEQ ID NO: 5338 - RNA, 19 nt, Homo sapiens
  misc_RNA (1)...(19): siRNA sense strand
gacaacaaggacauccaaa

SEQ ID NO: 5339 - RNA, 19 nt, Homo sapiens
  misc_RNA (1)...(19): siRNA sense strand
ggaggaauggagucacauc

SEQ ID NO: 5340 - RNA, 19 nt, Homo sapiens
  misc_RNA (1)...(19): siRNA sense strand
acaacaaggacauccaaau

SEQ ID NO: 5341 - RNA, 19 nt, Homo sapiens
  misc_RNA (1)...(19): siRNA sense strand
ggaggugucccaggaaguc

SEQ ID NO: 5342 - RNA, 19 nt, Homo sapiens
  misc_RNA (1)...(19): siRNA sense strand
uaaauccuuuucagaguga

SEQ ID NO: 5343 - RNA, 19 nt, Homo sapiens
  misc_RNA (1)...(19): siRNA sense strand
auaauaugagccugaguaa

SEQ ID NO: 5344 - RNA, 19 nt, Homo sapiens
  misc_RNA (1)...(19): siRNA sense strand
gaaccaccaggauucuuac

SEQ ID NO: 5345 - RNA, 19 nt, Homo sapiens
  misc_RNA (1)...(19): siRNA sense strand
caggguucuuucagccuuu

SEQ ID NO: 5346 - RNA, 19 nt, Homo sapiens
  misc_RNA (1)...(19): siRNA sense strand
ggagaaguuagcacucuac

SEQ ID NO: 5347 - RNA, 19 nt, Homo sapiens
  misc_RNA (1)...(19): siRNA sense strand
cugugcagcuccagagaga

SEQ ID NO: 5348 - RNA, 19 nt, Homo sapiens
  misc_RNA (1)...(19): siRNA sense strand
gauccaacucgacaacaag

SEQ ID NO: 5349 - RNA, 19 nt, Homo sapiens
  misc_RNA (1)...(19): siRNA sense strand
cagagaaugacuccuccaa

SEQ ID NO: 5350 - RNA, 19 nt, Homo sapiens
  misc_RNA (1)...(19): siRNA sense strand
auaugagccugaguaauca

SEQ ID NO: 5351 - RNA, 19 nt, Homo sapiens
  misc_RNA (1)...(19): siRNA sense strand
ccagugcuaggaaacauuc

SEQ ID NO: 5352 - RNA, 19 nt, Homo sapiens
  misc_RNA (1)...(19): siRNA sense strand
gagauauggacaguauuuc

SEQ ID NO: 5353 - RNA, 19 nt, Homo sapiens
  misc_RNA (1)...(19): siRNA sense strand
cauucuuggugguguguau

SEQ ID NO: 5354 - RNA, 19 nt, Homo sapiens
  misc_RNA (1)...(19): siRNA sense strand
ccuuaggaccacagaacua

SEQ ID NO: 5355 - RNA, 19 nt, Homo sapiens
  misc_RNA (1)...(19): siRNA sense strand
caagggaugauggcgaaau

SEQ ID NO: 5356 - RNA, 19 nt, Homo sapiens
  misc_RNA (1)...(19): siRNA sense strand
gcaaaggcaagaguaacag

SEQ ID NO: 5357 - RNA, 19 nt, Homo sapiens
  misc_RNA (1)...(19): siRNA sense strand
ccaccaggaacacccauca

SEQ ID NO: 5358 - RNA, 19 nt, Homo sapiens
  misc_RNA (1)...(19): siRNA sense strand
gcacagauacccagaacuu

SEQ ID NO: 5359 - RNA, 19 nt, Homo sapiens
  misc_RNA (1)...(19): siRNA sense strand
gaaagggcaugcuaaagac

SEQ ID NO: 5360 - RNA, 19 nt, Homo sapiens
  misc_RNA (1)...(19): siRNA sense strand
gcugguguguggauaagua

SEQ ID NO: 5361 - RNA, 19 nt, Homo sapiens
  misc_RNA (1)...(19): siRNA sense strand
caagaaagggcaugcuaaa

SEQ ID NO: 5362 - RNA, 19 nt, Homo sapiens
  misc_RNA (1)...(19): siRNA sense strand
agaaagggcaugcuaaaga

SEQ ID NO: 5363 - RNA, 19 nt, Homo sapiens
  misc_RNA (1)...(19): siRNA sense strand
gaaauggaagacacacuga

SEQ ID NO: 5364 - RNA, 19 nt, Homo sapiens
  misc_RNA (1)...(19): siRNA sense strand
gcuacaaaguugacuacga

SEQ ID NO: 5365 - RNA, 19 nt, Homo sapiens
  misc_RNA (1)...(19): siRNA sense strand
gagcacagauacccagaac

SEQ ID NO: 5366 - RNA, 19 nt, Homo sapiens
  misc_RNA (1)...(19): siRNA sense strand
caccugaaguuccucaaug

SEQ ID NO: 5367 - RNA, 19 nt, Homo sapiens
  misc_RNA (1)...(19): siRNA sense strand
ucaagaaagggcaugcuaa

SEQ ID NO: 5368 - RNA, 19 nt, Homo sapiens
  misc_RNA (1)...(19): siRNA sense strand
ccaagcgggagacagaaua

SEQ ID NO: 5369 - RNA, 19 nt, Homo sapiens
  misc_RNA (1)...(19): siRNA sense strand
agccagcgcuacaaaguug

SEQ ID NO: 5370 - RNA, 19 nt, Homo sapiens
  misc_RNA (1)...(19): siRNA sense strand
gacaagaagggauuuuaua

SEQ ID NO: 5371 - RNA, 19 nt, Homo sapiens
  misc_RNA (1)...(19): siRNA sense strand
gcuacagcaugcagagcaa

SEQ ID NO: 5372 - RNA, 19 nt, Homo sapiens
  misc_RNA (1)...(19): siRNA sense strand
aggaggacgugcacugcua

SEQ ID NO: 5373 - RNA, 19 nt, Homo sapiens
  misc_RNA (1)...(19): siRNA sense strand
gccgccagcuccaggaaau

SEQ ID NO: 5374 - RNA, 19 nt, Homo sapiens
  misc_RNA (1)...(19): siRNA sense strand
ugaaucaccugaaguuccu

SEQ ID NO: 5375 - RNA, 19 nt, Homo sapiens
  misc_RNA (1)...(19): siRNA sense strand
ggugucugaucccaaguuc

SEQ ID NO: 5376 - RNA, 19 nt, Homo sapiens
  misc_RNA (1)...(19): siRNA sense strand
agacagccagcgcuacaaa

SEQ ID NO: 5377 - RNA, 19 nt, Homo sapiens
  misc_RNA (1)...(19): siRNA sense strand
uggaagacacacugaauca

SEQ ID NO: 5378 - RNA, 19 nt, Homo sapiens
  misc_RNA (1)...(19): siRNA sense strand
caagcgggagacagaauau

SEQ ID NO: 5379 - RNA, 19 nt, Homo sapiens
  misc_RNA (1)...(19): siRNA sense strand
gcagugucgcccuuccaaa

SEQ ID NO: 5380 - RNA, 19 nt, Homo sapiens
  misc_RNA (1)...(19): siRNA sense strand
uauggucccugccguagag

SEQ ID NO: 5381 - RNA, 19 nt, Homo sapiens
  misc_RNA (1)...(19): siRNA sense strand
cuagugagucggaggaaga

SEQ ID NO: 5382 - RNA, 19 nt, Homo sapiens
  misc_RNA (1)...(19): siRNA sense strand
guguacacauucccaacug

SEQ ID NO: 5383 - RNA, 19 nt, Homo sapiens
  misc_RNA (1)...(19): siRNA sense strand
aaagacagccagcgcuaca

SEQ ID NO: 5384 - RNA, 19 nt, Homo sapiens
  misc_RNA (1)...(19): siRNA sense strand
ggucccugccguagagaaa

SEQ ID NO: 5385 - RNA, 19 nt, Homo sapiens
  misc_RNA (1)...(19): siRNA sense strand
gagucucagagcacagaua

SEQ ID NO: 5386 - RNA, 19 nt, Homo sapiens
  misc_RNA (1)...(19): siRNA sense strand
cagccagcgcuacaaaguu

SEQ ID NO: 5387 - RNA, 19 nt, Homo sapiens
  misc_RNA (1)...(19): siRNA sense strand
cacugaaucaccugaaguu

SEQ ID NO: 5388 - RNA, 19 nt, Homo sapiens
  misc_RNA (1)...(19): siRNA sense strand
uaaggaggcuggagaugua

SEQ ID NO: 5389 - RNA, 19 nt, Homo sapiens
  misc_RNA (1)...(19): siRNA sense strand
ggaaguacauuugaagaac

SEQ ID NO: 5390 - RNA, 19 nt, Homo sapiens
  misc_RNA (1)...(19): siRNA sense strand
gaaacaagaacuacaggau

SEQ ID NO: 5391 - RNA, 19 nt, Homo sapiens
  misc_RNA (1)...(19): siRNA sense strand
agaaggaaguacauuugaa

SEQ ID NO: 5392 - RNA, 19 nt, Homo sapiens
  misc_RNA (1)...(19): siRNA sense strand
gguggaugcucuucaguuc

SEQ ID NO: 5393 - RNA, 19 nt, Homo sapiens
  misc_RNA (1)...(19): siRNA sense strand
ccucaagccugccaaguca

SEQ ID NO: 5394 - RNA, 19 nt, Homo sapiens
  misc_RNA (1)...(19): siRNA sense strand
gaaggaaguacauuugaag

SEQ ID NO: 5395 - RNA, 19 nt, Homo sapiens
  misc_RNA (1)...(19): siRNA sense strand
caacaagcccacaggguau

SEQ ID NO: 5396 - RNA, 19 nt, Homo sapiens
  misc_RNA (1)...(19): siRNA sense strand
ccagaaggaaguacauuug

SEQ ID NO: 5397 - RNA, 19 nt, Homo sapiens
  misc_RNA (1)...(19): siRNA sense strand
aacaagaacuacaggaugu

SEQ ID NO: 5398 - RNA, 19 nt, Homo sapiens
  misc_RNA (1)...(19): siRNA sense strand
caacccaauuauuuaagug

SEQ ID NO: 5399 - RNA, 19 nt, Homo sapiens
  misc_RNA (1)...(19): siRNA sense strand
gacaggggcuuuuauuuca

SEQ ID NO: 5400 - RNA, 19 nt, Homo sapiens
  misc_RNA (1)...(19): siRNA sense strand
cuuccaacccaauuauuua

SEQ ID NO: 5401 - RNA, 19 nt, Homo sapiens
  misc_RNA (1)...(19): siRNA sense strand
ccaacccaauuauuuaagu

SEQ ID NO: 5402 - RNA, 19 nt, Homo sapiens
  misc_RNA (1)...(19): siRNA sense strand
uuccggagcugugaucuaa

SEQ ID NO: 5403 - RNA, 19 nt, Homo sapiens
  misc_RNA (1)...(19): siRNA sense strand
guagagggagugcaggaaa

SEQ ID NO: 5404 - RNA, 19 nt, Homo sapiens
  misc_RNA (1)...(19): siRNA sense strand
cagaaggaaguacauuuga

SEQ ID NO: 5405 - RNA, 19 nt, Homo sapiens
  misc_RNA (1)...(19): siRNA sense strand
gugcaggaaacaagaacua

SEQ ID NO: 5406 - RNA, 19 nt, Homo sapiens
  misc_RNA (1)...(19): siRNA sense strand
gcaggaaacaagaacuaca

SEQ ID NO: 5407 - RNA, 19 nt, Homo sapiens
  misc_RNA (1)...(19): siRNA sense strand
ggagugcaggaaacaagaa

SEQ ID NO: 5408 - RNA, 19 nt, Homo sapiens
  misc_RNA (1)...(19): siRNA sense strand
ggaggcuggagauguauug

SEQ ID NO: 5409 - RNA, 19 nt, Homo sapiens
  misc_RNA (1)...(19): siRNA sense strand
gcagucuuccaacccaauu

SEQ ID NO: 5410 - RNA, 19 nt, Homo sapiens
  misc_RNA (1)...(19): siRNA sense strand
gugaagaugcacaccaugu

SEQ ID NO: 5411 - RNA, 19 nt, Homo sapiens
  misc_RNA (1)...(19): siRNA sense strand
ggagacaggggcuuuuauu

SEQ ID NO: 5412 - RNA, 19 nt, Homo sapiens
  misc_RNA (1)...(19): siRNA sense strand
ccaagacccagaaggaagu

SEQ ID NO: 5413 - RNA, 19 nt, Homo sapiens
  misc_RNA (1)...(19): siRNA sense strand
gagacaggggcuuuuauuu

SEQ ID NO: 5414 - RNA, 19 nt, Homo sapiens
  misc_RNA (1)...(19): siRNA sense strand
cccagaaggaaguacauuu

SEQ ID NO: 5415 - RNA, 19 nt, Homo sapiens
  misc_RNA (1)...(19): siRNA sense strand
cuaaggaggcuggagaugu

SEQ ID NO: 5416 - RNA, 19 nt, Homo sapiens
  misc_RNA (1)...(19): siRNA sense strand
gcugguggaugcucuucag

SEQ ID NO: 5417 - RNA, 19 nt, Homo sapiens
  misc_RNA (1)...(19): siRNA sense strand
gggagugcaggaaacaaga

SEQ ID NO: 5418 - RNA, 19 nt, Homo sapiens
  misc_RNA (1)...(19): siRNA sense strand
gcccaagacccagaaggaa

SEQ ID NO: 5419 - RNA, 19 nt, Homo sapiens
  misc_RNA (1)...(19): siRNA sense strand
ucuuccaacccaauuauuu

SEQ ID NO: 5420 - RNA, 19 nt, Homo sapiens
  misc_RNA (1)...(19): siRNA sense strand
ccggagcugugaucuaagg

SEQ ID NO: 5421 - RNA, 19 nt, Homo sapiens
  misc_RNA (1)...(19): siRNA sense strand
gugauuucuugaaggugaa

SEQ ID NO: 5422 - RNA, 19 nt, Homo sapiens
  misc_RNA (1)...(19): siRNA sense strand
ccucgcaucucuucuaccu

SEQ ID NO: 5423 - RNA, 19 nt, Homo sapiens
  misc_RNA (1)...(19): siRNA sense strand
aggaaguacauuugaagaa

SEQ ID NO: 5424 - RNA, 19 nt, Homo sapiens
  misc_RNA (1)...(19): siRNA sense strand
caagacccagaaggaagua

SEQ ID NO: 5425 - RNA, 19 nt, Homo sapiens
  misc_RNA (1)...(19): siRNA sense strand
acaccgacaugcccaagac

SEQ ID NO: 5426 - RNA, 19 nt, Homo sapiens
  misc_RNA (1)...(19): siRNA sense strand
ccuccucgcaucucuucua

SEQ ID NO: 5427 - RNA, 19 nt, Homo sapiens
  misc_RNA (1)...(19): siRNA sense strand
gacaagaaauggaagcuua

SEQ ID NO: 5428 - RNA, 19 nt, Homo sapiens
  misc_RNA (1)...(19): siRNA sense strand
gcacaaauuugguaaguca

SEQ ID NO: 5429 - RNA, 19 nt, Homo sapiens
  misc_RNA (1)...(19): siRNA sense strand
uaacagcuuuggaagauaa

SEQ ID NO: 5430 - RNA, 19 nt, Homo sapiens
  misc_RNA (1)...(19): siRNA sense strand
gaagauaaaccauuagaug

SEQ ID NO: 5431 - RNA, 19 nt, Homo sapiens
  misc_RNA (1)...(19): siRNA sense strand
gaacacagcaagccauaaa

SEQ ID NO: 5432 - RNA, 19 nt, Homo sapiens
  misc_RNA (1)...(19): siRNA sense strand
gaaagcaaauaaagaacug

SEQ ID NO: 5433 - RNA, 19 nt, Homo sapiens
  misc_RNA (1)...(19): siRNA sense strand
auaaagaacuggaagagaa

SEQ ID NO: 5434 - RNA, 19 nt, Homo sapiens
  misc_RNA (1)...(19): siRNA sense strand
gaugagggcuauggcauuu

SEQ ID NO: 5435 - RNA, 19 nt, Homo sapiens
  misc_RNA (1)...(19): siRNA sense strand
gaggaaagcaaauaaagaa

SEQ ID NO: 5436 - RNA, 19 nt, Homo sapiens
  misc_RNA (1)...(19): siRNA sense strand
gcaagaagauccuguuuug

SEQ ID NO: 5437 - RNA, 19 nt, Homo sapiens
  misc_RNA (1)...(19): siRNA sense strand
gaagucagauagguauuau

SEQ ID NO: 5438 - RNA, 19 nt, Homo sapiens
  misc_RNA (1)...(19): siRNA sense strand
gaaggcaaagauagauuua

SEQ ID NO: 5439 - RNA, 19 nt, Homo sapiens
  misc_RNA (1)...(19): siRNA sense strand
gcacuaaaccucaagaagu

SEQ ID NO: 5440 - RNA, 19 nt, Homo sapiens
  misc_RNA (1)...(19): siRNA sense strand
guaacggucuaagauauaa

SEQ ID NO: 5441 - RNA, 19 nt, Homo sapiens
  misc_RNA (1)...(19): siRNA sense strand
ggacacaacuaacuuccau

SEQ ID NO: 5442 - RNA, 19 nt, Homo sapiens
  misc_RNA (1)...(19): siRNA sense strand
gccaaucguuuaaauguga

SEQ ID NO: 5443 - RNA, 19 nt, Homo sapiens
  misc_RNA (1)...(19): siRNA sense strand
guaaagaaagugcgucaaa

SEQ ID NO: 5444 - RNA, 19 nt, Homo sapiens
  misc_RNA (1)...(19): siRNA sense strand
caacaagucaggacauuau

SEQ ID NO: 5445 - RNA, 19 nt, Homo sapiens
  misc_RNA (1)...(19): siRNA sense strand
acaacaagcuccacacaug

SEQ ID NO: 5446 - RNA, 19 nt, Homo sapiens
  misc_RNA (1)...(19): siRNA sense strand
gaaagagcgagaugcagua

SEQ ID NO: 5447 - RNA, 19 nt, Homo sapiens
  misc_RNA (1)...(19): siRNA sense strand
caagucaggacauuauuaa

SEQ ID NO: 5448 - RNA, 19 nt, Homo sapiens
  misc_RNA (1)...(19): siRNA sense strand
uaacucagguucucucaag

SEQ ID NO: 5449 - RNA, 19 nt, Homo sapiens
  misc_RNA (1)...(19): siRNA sense strand
gaacagaaugcugcaagaa

SEQ ID NO: 5450 - RNA, 19 nt, Homo sapiens
  misc_RNA (1)...(19): siRNA sense strand
uuacgaagcucuguccauu

SEQ ID NO: 5451 - RNA, 19 nt, Homo sapiens
  misc_RNA (1)...(19): siRNA sense strand
gaaauuacaagaguccauu

SEQ ID NO: 5452 - RNA, 19 nt, Homo sapiens
  misc_RNA (1)...(19): siRNA sense strand
aagaguccauugaauauga

SEQ ID NO: 5453 - RNA, 19 nt, Homo sapiens
  misc_RNA (1)...(19): siRNA sense strand
acagaaugcugcaagaaga

SEQ ID NO: 5454 - RNA, 19 nt, Homo sapiens
  misc_RNA (1)...(19): siRNA sense strand
gaagcucuguccauuccaa

SEQ ID NO: 5455 - RNA, 19 nt, Homo sapiens
  misc_RNA (1)...(19): siRNA sense strand
acacuuauauguagcuguu

SEQ ID NO: 5456 - RNA, 19 nt, Homo sapiens
  misc_RNA (1)...(19): siRNA sense strand
gcaacaagucaggacauua

SEQ ID NO: 5457 - RNA, 19 nt, Homo sapiens
  misc_RNA (1)...(19): siRNA sense strand
uggcauuucugcugcauuu

SEQ ID NO: 5458 - RNA, 19 nt, Homo sapiens
  misc_RNA (1)...(19): siRNA sense strand
cauugaauaugaagacuug

SEQ ID NO: 5459 - RNA, 19 nt, Homo sapiens
  misc_RNA (1)...(19): siRNA sense strand
uacaagaguccauugaaua

SEQ ID NO: 5460 - RNA, 19 nt, Homo sapiens
  misc_RNA (1)...(19): siRNA sense strand
ggaccuauccagcaguaaa

SEQ ID NO: 5461 - RNA, 19 nt, Homo sapiens
  misc_RNA (1)...(19): siRNA sense strand
gaaaagguagugaaaauga

SEQ ID NO: 5462 - RNA, 19 nt, Homo sapiens
  misc_RNA (1)...(19): siRNA sense strand
gaacuucuacgacauuucu

SEQ ID NO: 5463 - RNA, 19 nt, Homo sapiens
  misc_RNA (1)...(19): siRNA sense strand
gaagaaguuuugcugauug

SEQ ID NO: 5464 - RNA, 19 nt, Homo sapiens
  misc_RNA (1)...(19): siRNA sense strand
gaaaauuaguccagaagga

SEQ ID NO: 5465 - RNA, 19 nt, Homo sapiens
  misc_RNA (1)...(19): siRNA sense strand
gcaccugaaggcaaagaua

SEQ ID NO: 5466 - RNA, 19 nt, Homo sapiens
  misc_RNA (1)...(19): siRNA sense strand
auauguagcuguuggagaa

SEQ ID NO: 5467 - RNA, 19 nt, Homo sapiens
  misc_RNA (1)...(19): siRNA sense strand
uuacaagaguccauugaau

SEQ ID NO: 5468 - RNA, 19 nt, Homo sapiens
  misc_RNA (1)...(19): siRNA sense strand
uaagcaggauguuggcauu

SEQ ID NO: 5469 - RNA, 19 nt, Homo sapiens
  misc_RNA (1)...(19): siRNA sense strand
caagaggaaagcaaauaaa

SEQ ID NO: 5470 - RNA, 19 nt, Homo sapiens
  misc_RNA (1)...(19): siRNA sense strand
ugaaagcacagcagugaaa

SEQ ID NO: 5471 - RNA, 19 nt, Homo sapiens
  misc_RNA (1)...(19): siRNA sense strand
caagaagucagauagguau

SEQ ID NO: 5472 - RNA, 19 nt, Homo sapiens
  misc_RNA (1)...(19): siRNA sense strand
gcuauggcauuuccucugu

SEQ ID NO: 5473 - RNA, 19 nt, Homo sapiens
  misc_RNA (1)...(19): siRNA sense strand
ucaagaggaaagcaaauaa

SEQ ID NO: 5474 - RNA, 19 nt, Homo sapiens
  misc_RNA (1)...(19): siRNA sense strand
cagguucucucaaguagug

SEQ ID NO: 5475 - RNA, 19 nt, Homo sapiens
  misc_RNA (1)...(19): siRNA sense strand
ccagcaacauggauggaaa

SEQ ID NO: 5476 - RNA, 19 nt, Homo sapiens
  misc_RNA (1)...(19): siRNA sense strand
gcuguaacggucuaagaua

SEQ ID NO: 5477 - RNA, 19 nt, Homo sapiens
  misc_RNA (1)...(19): siRNA sense strand
caagaaauggaagcuuaua

SEQ ID NO: 5478 - RNA, 19 nt, Homo sapiens
  misc_RNA (1)...(19): siRNA sense strand
ucaagagauuuaaccauca

SEQ ID NO: 5479 - RNA, 19 nt, Homo sapiens
  misc_RNA (1)...(19): siRNA sense strand
ccucauggcagaaagaauu

SEQ ID NO: 5480 - RNA, 19 nt, Homo sapiens
  misc_RNA (1)...(19): siRNA sense strand
cagauggugccaaaugaua

SEQ ID NO: 5481 - RNA, 19 nt, Homo sapiens
  misc_RNA (1)...(19): siRNA sense strand
gcuuauacacccaaguuaa

SEQ ID NO: 5482 - RNA, 19 nt, Homo sapiens
  misc_RNA (1)...(19): siRNA sense strand
ucaagaagucagauaggua

SEQ ID NO: 5483 - RNA, 19 nt, Homo sapiens
  misc_RNA (1)...(19): siRNA sense strand
caaauaaagaacuggaaga

SEQ ID NO: 5484 - RNA, 19 nt, Homo sapiens
  misc_RNA (1)...(19): siRNA sense strand
aaccucaucugaagaaguu

SEQ ID NO: 5485 - RNA, 19 nt, Homo sapiens
  misc_RNA (1)...(19): siRNA sense strand
acacaacuaacuuccauuu

SEQ ID NO: 5486 - RNA, 19 nt, Homo sapiens
  misc_RNA (1)...(19): siRNA sense strand
caaguuaacucagguucuc

SEQ ID NO: 5487 - RNA, 19 nt, Homo sapiens
  misc_RNA (1)...(19): siRNA sense strand
acaagucaggacauuauua

SEQ ID NO: 5488 - RNA, 19 nt, Homo sapiens
  misc_RNA (1)...(19): siRNA sense strand
gccaucaucaagagauuua

SEQ ID NO: 5489 - RNA, 19 nt, Homo sapiens
  misc_RNA (1)...(19): siRNA sense strand
ucacagggaucggcugaau

SEQ ID NO: 5490 - RNA, 19 nt, Homo sapiens
  misc_RNA (1)...(19): siRNA sense strand
caacaugacagagaaggaa

SEQ ID NO: 5491 - RNA, 19 nt, Homo sapiens
  misc_RNA (1)...(19): siRNA sense strand
gaagagaagaacagaaugc

SEQ ID NO: 5492 - RNA, 19 nt, Homo sapiens
  misc_RNA (1)...(19): siRNA sense strand
ccagacagccuacaacaag

SEQ ID NO: 5493 - RNA, 19 nt, Homo sapiens
  misc_RNA (1)...(19): siRNA sense strand
gacaguauuuaagcacaaa

SEQ ID NO: 5494 - RNA, 19 nt, Homo sapiens
  misc_RNA (1)...(19): siRNA sense strand
gaauacagggucaaaggau

SEQ ID NO: 5495 - RNA, 19 nt, Homo sapiens
  misc_RNA (1)...(19): siRNA sense strand
uaaagaccuuguugugagu

SEQ ID NO: 5496 - RNA, 19 nt, Homo sapiens
  misc_RNA (1)...(19): siRNA sense strand
ugaaggcaaagauagauuu

SEQ ID NO: 5497 - RNA, 19 nt, Homo sapiens
  misc_RNA (1)...(19): siRNA sense strand
cacuaaaccucaagaaguc

SEQ ID NO: 5498 - RNA, 19 nt, Homo sapiens
  misc_RNA (1)...(19): siRNA sense strand
acaagaguccauugaauau

SEQ ID NO: 5499 - RNA, 19 nt, Homo sapiens
  misc_RNA (1)...(19): siRNA sense strand
gggccaaucguuuaaaugu

SEQ ID NO: 5500 - RNA, 19 nt, Homo sapiens
  misc_RNA (1)...(19): siRNA sense strand
uauaaagaccuuguuguga

SEQ ID NO: 5501 - RNA, 19 nt, Homo sapiens
  misc_RNA (1)...(19): siRNA sense strand
gaaagugcgucaaaagaag

SEQ ID NO: 5502 - RNA, 19 nt, Homo sapiens
  misc_RNA (1)...(19): siRNA sense strand
ccuggcagcuggacucaga

SEQ ID NO: 5503 - RNA, 19 nt, Homo sapiens
  misc_RNA (1)...(19): siRNA sense strand
aggcaaagauagauuuaca

SEQ ID NO: 5504 - RNA, 19 nt, Homo sapiens
  misc_RNA (1)...(19): siRNA sense strand
acagauaguucuuccacau

SEQ ID NO: 5505 - RNA, 19 nt, Homo sapiens
  misc_RNA (1)...(19): siRNA sense strand
ggaaagcaaauaaagaacu

SEQ ID NO: 5506 - RNA, 19 nt, Homo sapiens
  misc_RNA (1)...(19): siRNA sense strand
gguccugcuuuccuguuaa

SEQ ID NO: 5507 - RNA, 19 nt, Homo sapiens
  misc_RNA (1)...(19): siRNA sense strand
gccaaaugauauucaaucu

SEQ ID NO: 5508 - RNA, 19 nt, Homo sapiens
  misc_RNA (1)...(19): siRNA sense strand
ggaucucuuugcagaaugu

SEQ ID NO: 5509 - RNA, 19 nt, Homo sapiens
  misc_RNA (1)...(19): siRNA sense strand
guaugcagauauuaaaugc

SEQ ID NO: 5510 - RNA, 19 nt, Homo sapiens
  misc_RNA (1)...(19): siRNA sense strand
agaagucagauagguauua

SEQ ID NO: 5511 - RNA, 19 nt, Homo sapiens
  misc_RNA (1)...(19): siRNA sense strand
uuuaacagcuuuggaagau

SEQ ID NO: 5512 - RNA, 19 nt, Homo sapiens
  misc_RNA (1)...(19): siRNA sense strand
gaaggaaaagcuaaaauuc

SEQ ID NO: 5513 - RNA, 19 nt, Homo sapiens
  misc_RNA (1)...(19): siRNA sense strand
uaaagaaagugcgucaaaa

SEQ ID NO: 5514 - RNA, 19 nt, Homo sapiens
  misc_RNA (1)...(19): siRNA sense strand
gcaggauguuggcauuucu

SEQ ID NO: 5515 - RNA, 19 nt, Homo sapiens
  misc_RNA (1)...(19): siRNA sense strand
uaagucacauagaagagau

SEQ ID NO: 5516 - RNA, 19 nt, Homo sapiens
  misc_RNA (1)...(19): siRNA sense strand
uuugguaagucacauagaa

SEQ ID NO: 5517 - RNA, 19 nt, Homo sapiens
  misc_RNA (1)...(19): siRNA sense strand
caucugcuuccaauucuaa

SEQ ID NO: 5518 - RNA, 19 nt, Homo sapiens
  misc_RNA (1)...(19): siRNA sense strand
cuacuagauuuaacagcuu

SEQ ID NO: 5519 - RNA, 19 nt, Homo sapiens
  misc_RNA (1)...(19): siRNA sense strand
gaacuggaagagaagaaca

SEQ ID NO: 5520 - RNA, 19 nt, Homo sapiens
  misc_RNA (1)...(19): siRNA sense strand
gauggugccaaaugauauu

SEQ ID NO: 5521 - RNA, 19 nt, Homo sapiens
  misc_RNA (1)...(19): siRNA sense strand
guaaugcugccaucaucaa

SEQ ID NO: 5522 - RNA, 19 nt, Homo sapiens
  misc_RNA (1)...(19): siRNA sense strand
agaacagaaugcugcaaga

SEQ ID NO: 5523 - RNA, 19 nt, Homo sapiens
  misc_RNA (1)...(19): siRNA sense strand
ggaagagaagaacagaaug

SEQ ID NO: 5524 - RNA, 19 nt, Homo sapiens
  misc_RNA (1)...(19): siRNA sense strand
ccaauccagucacuacagu

SEQ ID NO: 5525 - RNA, 19 nt, Homo sapiens
  misc_RNA (1)...(19): siRNA sense strand
guaagucacauagaagaga

SEQ ID NO: 5526 - RNA, 19 nt, Homo sapiens
  misc_RNA (1)...(19): siRNA sense strand
gcacuuaugcagggaggaa

SEQ ID NO: 5527 - RNA, 19 nt, Homo sapiens
  misc_RNA (1)...(19): siRNA sense strand
gcaagacaauugaagaaua

SEQ ID NO: 5528 - RNA, 19 nt, Homo sapiens
  misc_RNA (1)...(19): siRNA sense strand
uaaagaagauccucuguga

SEQ ID NO: 5529 - RNA, 19 nt, Homo sapiens
  misc_RNA (1)...(19): siRNA sense strand
ggagaaggccgauaacuuu

SEQ ID NO: 5530 - RNA, 19 nt, Homo sapiens
  misc_RNA (1)...(19): siRNA sense strand
gaaggacguugccaagauu

SEQ ID NO: 5531 - RNA, 19 nt, Homo sapiens
  misc_RNA (1)...(19): siRNA sense strand
gaaaguagaccuugguguu

SEQ ID NO: 5532 - RNA, 19 nt, Homo sapiens
  misc_RNA (1)...(19): siRNA sense strand
ggaagcaguucucagcaaa

SEQ ID NO: 5533 - RNA, 19 nt, Homo sapiens
  misc_RNA (1)...(19): siRNA sense strand
gcuguauccugcaucauua

SEQ ID NO: 5534 - RNA, 19 nt, Homo sapiens
  misc_RNA (1)...(19): siRNA sense strand
gugaagaucgugacaguua

SEQ ID NO: 5535 - RNA, 19 nt, Homo sapiens
  misc_RNA (1)...(19): siRNA sense strand
ugagaagcaucuuugauuu

SEQ ID NO: 5536 - RNA, 19 nt, Homo sapiens
  misc_RNA (1)...(19): siRNA sense strand
gauggaagcauuucaagaa

SEQ ID NO: 5537 - RNA, 19 nt, Homo sapiens
  misc_RNA (1)...(19): siRNA sense strand
cagaagcaauaacugauaa

SEQ ID NO: 5538 - RNA, 19 nt, Homo sapiens
  misc_RNA (1)...(19): siRNA sense strand
gaaagcagcaguuugacuu

SEQ ID NO: 5539 - RNA, 19 nt, Homo sapiens
  misc_RNA (1)...(19): siRNA sense strand
caaaucagcaagacaauug

SEQ ID NO: 5540 - RNA, 19 nt, Homo sapiens
  misc_RNA (1)...(19): siRNA sense strand
ggaauuucuucaccaggua

SEQ ID NO: 5541 - RNA, 19 nt, Homo sapiens
  misc_RNA (1)...(19): siRNA sense strand
gaaggccgauaacuuugaa

SEQ ID NO: 5542 - RNA, 19 nt, Homo sapiens
  misc_RNA (1)...(19): siRNA sense strand
gccaacaucuucagcauuc

SEQ ID NO: 5543 - RNA, 19 nt, Homo sapiens
  misc_RNA (1)...(19): siRNA sense strand
cgaaucgucuuccgacuga

SEQ ID NO: 5544 - RNA, 19 nt, Homo sapiens
  misc_RNA (1)...(19): siRNA sense strand
cagcaaaugacaaaguuua

SEQ ID NO: 5545 - RNA, 19 nt, Homo sapiens
  misc_RNA (1)...(19): siRNA sense strand
gaagauccucugugaagaa

SEQ ID NO: 5546 - RNA, 19 nt, Homo sapiens
  misc_RNA (1)...(19): siRNA sense strand
aagcauggguucuuuguga

SEQ ID NO: 5547 - RNA, 19 nt, Homo sapiens
  misc_RNA (1)...(19): siRNA sense strand
gauguuugaucgcuccuuu

SEQ ID NO: 5548 - RNA, 19 nt, Homo sapiens
  misc_RNA (1)...(19): siRNA sense strand
ggaagcgggugaagguguu

SEQ ID NO: 5549 - RNA, 19 nt, Homo sapiens
  misc_RNA (1)...(19): siRNA sense strand
gggcaagcauggguucuuu

SEQ ID NO: 5550 - RNA, 19 nt, Homo sapiens
  misc_RNA (1)...(19): siRNA sense strand
gcccugaccugaaaguaga

SEQ ID NO: 5551 - RNA, 19 nt, Homo sapiens
  misc_RNA (1)...(19): siRNA sense strand
gaccguauguaaagaagau

SEQ ID NO: 5552 - RNA, 19 nt, Homo sapiens
  misc_RNA (1)...(19): siRNA sense strand
guacaucgauagcuaugag

SEQ ID NO: 5553 - RNA, 19 nt, Homo sapiens
  misc_RNA (1)...(19): siRNA sense strand
ggaggacauucucaaagau

SEQ ID NO: 5554 - RNA, 19 nt, Homo sapiens
  misc_RNA (1)...(19): siRNA sense strand
gggaagcaguucucagcaa

SEQ ID NO: 5555 - RNA, 19 nt, Homo sapiens
  misc_RNA (1)...(19): siRNA sense strand
ccagaagcaauaacugaua

SEQ ID NO: 5556 - RNA, 19 nt, Homo sapiens
  misc_RNA (1)...(19): siRNA sense strand
uggaggacauucucaaaga

SEQ ID NO: 5557 - RNA, 19 nt, Homo sapiens
  misc_RNA (1)...(19): siRNA sense strand
uggauucgguagaagcuua

SEQ ID NO: 5558 - RNA, 19 nt, Homo sapiens
  misc_RNA (1)...(19): siRNA sense strand
ugaagaucgugacaguuaa

SEQ ID NO: 5559 - RNA, 19 nt, Homo sapiens
  misc_RNA (1)...(19): siRNA sense strand
agaaggacguugccaagau

SEQ ID NO: 5560 - RNA, 19 nt, Homo sapiens
  misc_RNA (1)...(19): siRNA sense strand
ugaagaauaugcaguuugc

SEQ ID NO: 5561 - RNA, 19 nt, Homo sapiens
  misc_RNA (1)...(19): siRNA sense strand
agaagcaucuuugauuuca

SEQ ID NO: 5562 - RNA, 19 nt, Homo sapiens
  misc_RNA (1)...(19): siRNA sense strand
gccgauaacuuugaauaca

SEQ ID NO: 5563 - RNA, 19 nt, Homo sapiens
  misc_RNA (1)...(19): siRNA sense strand
gagaagcaucuuugauuuc

SEQ ID NO: 5564 - RNA, 19 nt, Homo sapiens
  misc_RNA (1)...(19): siRNA sense strand
uggaggcccugauguuuga

SEQ ID NO: 5565 - RNA, 19 nt, Homo sapiens
  misc_RNA (1)...(19): siRNA sense strand
ccacauccgugagaaagau

SEQ ID NO: 5566 - RNA, 19 nt, Homo sapiens
  misc_RNA (1)...(19): siRNA sense strand
uauccugcaucauuagaaa

SEQ ID NO: 5567 - RNA, 19 nt, Homo sapiens
  misc_RNA (1)...(19): siRNA sense strand
gcagcaguuugacuuggaa

SEQ ID NO: 5568 - RNA, 19 nt, Homo sapiens
  misc_RNA (1)...(19): siRNA sense strand
gagaacuucauccagagua

SEQ ID NO: 5569 - RNA, 19 nt, Homo sapiens
  misc_RNA (1)...(19): siRNA sense strand
ggacuuggaggcccugaug

SEQ ID NO: 5570 - RNA, 19 nt, Homo sapiens
  misc_RNA (1)...(19): siRNA sense strand
caaacaaaaugaugaagga

SEQ ID NO: 5571 - RNA, 19 nt, Homo sapiens
  misc_RNA (1)...(19): siRNA sense strand
gagaaggccgauaacuuug

SEQ ID NO: 5572 - RNA, 19 nt, Homo sapiens
  misc_RNA (1)...(19): siRNA sense strand
caguggaaauuguggauuc

SEQ ID NO: 5573 - RNA, 19 nt, Homo sapiens
  misc_RNA (1)...(19): siRNA sense strand
cugagaagcaucuuugauu

SEQ ID NO: 5574 - RNA, 19 nt, Homo sapiens
  misc_RNA (1)...(19): siRNA sense strand
cagcaagacaauugaagaa

SEQ ID NO: 5575 - RNA, 19 nt, Homo sapiens
  misc_RNA (1)...(19): siRNA sense strand
caacuacgcggagaacuuc

SEQ ID NO: 5576 - RNA, 19 nt, Homo sapiens
  misc_RNA (1)...(19): siRNA sense strand
ggcuagugcuacaaagauu

SEQ ID NO: 5577 - RNA, 19 nt, Homo sapiens
  misc_RNA (1)...(19): siRNA sense strand
ugucauugcugccaacauc

SEQ ID NO: 5578 - RNA, 19 nt, Homo sapiens
  misc_RNA (1)...(19): siRNA sense strand
gcaagcauggguucuuugu

SEQ ID NO: 5579 - RNA, 19 nt, Homo sapiens
  misc_RNA (1)...(19): siRNA sense strand
gggccaaaccgacugaaga

SEQ ID NO: 5580 - RNA, 19 nt, Homo sapiens
  misc_RNA (1)...(19): siRNA sense strand
ugggaaagcagcaguuuga

SEQ ID NO: 5581 - RNA, 19 nt, Homo sapiens
  misc_RNA (1)...(19): siRNA sense strand
gcaaaaguauggccggaau

SEQ ID NO: 5582 - RNA, 19 nt, Homo sapiens
  misc_RNA (1)...(19): siRNA sense strand
ggcuguacaucgauagcua

SEQ ID NO: 5583 - RNA, 19 nt, Homo sapiens
  misc_RNA (1)...(19): siRNA sense strand
cgggaucggucgcuugguu

SEQ ID NO: 5584 - RNA, 19 nt, Homo sapiens
  misc_RNA (1)...(19): siRNA sense strand
ggauggaagcauuucaaga

SEQ ID NO: 5585 - RNA, 19 nt, Homo sapiens
  misc_RNA (1)...(19): siRNA sense strand
gcaaaugacaaaguuuaca

SEQ ID NO: 5586 - RNA, 19 nt, Homo sapiens
  misc_RNA (1)...(19): siRNA sense strand
gcgagcaaacugucccuuu

SEQ ID NO: 5587 - RNA, 19 nt, Homo sapiens
  misc_RNA (1)...(19): siRNA sense strand
guugugggaccguauguaa

SEQ ID NO: 5588 - RNA, 19 nt, Homo sapiens
  misc_RNA (1)...(19): siRNA sense strand
gauccucugugaagaacuc

SEQ ID NO: 5589 - RNA, 19 nt, Homo sapiens
  misc_RNA (1)...(19): siRNA sense strand
gagaaggacguugccaaga

SEQ ID NO: 5590 - RNA, 19 nt, Homo sapiens
  misc_RNA (1)...(19): siRNA sense strand
guucucagcaaaugacaaa

SEQ ID NO: 5591 - RNA, 19 nt, Homo sapiens
  misc_RNA (1)...(19): siRNA sense strand
gaccgguucugaccacauc

SEQ ID NO: 5592 - RNA, 19 nt, Homo sapiens
  misc_RNA (1)...(19): siRNA sense strand
aagaagauccucugugaag

SEQ ID NO: 5593 - RNA, 19 nt, Homo sapiens
  misc_RNA (1)...(19): siRNA sense strand
aagcaguucucagcaaaug

SEQ ID NO: 5594 - RNA, 19 nt, Homo sapiens
  misc_RNA (1)...(19): siRNA sense strand
aagauugcuuuguaugaga

SEQ ID NO: 5595 - RNA, 19 nt, Homo sapiens
  misc_RNA (1)...(19): siRNA sense strand
gaagaucgugacaguuaag

SEQ ID NO: 5596 - RNA, 19 nt, Homo sapiens
  misc_RNA (1)...(19): siRNA sense strand
cccaguggauggaagcauu

SEQ ID NO: 5597 - RNA, 19 nt, Homo sapiens
  misc_RNA (1)...(19): siRNA sense strand
ccaaaucagcaagacaauu

SEQ ID NO: 5598 - RNA, 19 nt, Homo sapiens
  misc_RNA (1)...(19): siRNA sense strand
gcacugcacccacugucau

SEQ ID NO: 5599 - RNA, 19 nt, Homo sapiens
  misc_RNA (1)...(19): siRNA sense strand
ucacagaugguucucgaau

SEQ ID NO: 5600 - RNA, 19 nt, Homo sapiens
  misc_RNA (1)...(19): siRNA sense strand
ccaacuacgcggagaacuu

SEQ ID NO: 5601 - RNA, 19 nt, Homo sapiens
  misc_RNA (1)...(19): siRNA sense strand
agaagauccucugugaaga

SEQ ID NO: 5602 - RNA, 19 nt, Homo sapiens
  misc_RNA (1)...(19): siRNA sense strand
ccauucggcuguacaucga

SEQ ID NO: 5603 - RNA, 19 nt, Homo sapiens
  misc_RNA (1)...(19): siRNA sense strand
gaagcaguucucagcaaau

SEQ ID NO: 5604 - RNA, 19 nt, Homo sapiens
  misc_RNA (1)...(19): siRNA sense strand
ggaaagcagcaguuugacu

SEQ ID NO: 5605 - RNA, 19 nt, Homo sapiens
  misc_RNA (1)...(19): siRNA sense strand
acagaugguucucgaaucg

SEQ ID NO: 5606 - RNA, 19 nt, Homo sapiens
  misc_RNA (1)...(19): siRNA sense strand
aagcaucuuugauuucagu

SEQ ID NO: 5607 - RNA, 19 nt, Homo sapiens
  misc_RNA (1)...(19): siRNA sense strand
agaacuucauccagaguau

SEQ ID NO: 5608 - RNA, 19 nt, Homo sapiens
  misc_RNA (1)...(19): siRNA sense strand
uggagaaggccgauaacuu

SEQ ID NO: 5609 - RNA, 19 nt, Homo sapiens
  misc_RNA (1)...(19): siRNA sense strand
gaggacauucucaaagauc

SEQ ID NO: 5610 - RNA, 19 nt, Homo sapiens
  misc_RNA (1)...(19): siRNA sense strand
cucagcaaaugacaaaguu

SEQ ID NO: 5611 - RNA, 19 nt, Homo sapiens
  misc_RNA (1)...(19): siRNA sense strand
ucagcaagacaauugaaga

SEQ ID NO: 5612 - RNA, 19 nt, Homo sapiens
  misc_RNA (1)...(19): siRNA sense strand
ccgauaacuuugaauacag

SEQ ID NO: 5613 - RNA, 19 nt, Homo sapiens
  misc_RNA (1)...(19): siRNA sense strand
ucuucagcauuccguauuu

SEQ ID NO: 5614 - RNA, 19 nt, Homo sapiens
  misc_RNA (1)...(19): siRNA sense strand
ggccaaaccgacugaagau

SEQ ID NO: 5615 - RNA, 19 nt, Homo sapiens
  misc_RNA (1)...(19): siRNA sense strand
caguuugacuuggaaaaua

SEQ ID NO: 5616 - RNA, 19 nt, Homo sapiens
  misc_RNA (1)...(19): siRNA sense strand
cacccacugucaucaccua

SEQ ID NO: 5617 - RNA, 19 nt, Homo sapiens
  misc_RNA (1)...(19): siRNA sense strand
gaagucaggagagcaugau

SEQ ID NO: 5618 - RNA, 19 nt, Homo sapiens
  misc_RNA (1)...(19): siRNA sense strand
agaagcuuaugcuacaaug

SEQ ID NO: 5619 - RNA, 19 nt, Homo sapiens
  misc_RNA (1)...(19): siRNA sense strand
gcugagaagcaucuuugau

SEQ ID NO: 5620 - RNA, 19 nt, Homo sapiens
  misc_RNA (1)...(19): siRNA sense strand
cacagaugguucucgaauc

SEQ ID NO: 5621 - RNA, 19 nt, Homo sapiens
  misc_RNA (1)...(19): siRNA sense strand
gaauuucuucaccagguau

SEQ ID NO: 5622 - RNA, 19 nt, Homo sapiens
  misc_RNA (1)...(19): siRNA sense strand
gaacuucauccagaguauc

SEQ ID NO: 5623 - RNA, 19 nt, Homo sapiens
  misc_RNA (1)...(19): siRNA sense strand
gcuagugcuacaaagauug

SEQ ID NO: 5624 - RNA, 19 nt, Homo sapiens
  misc_RNA (1)...(19): siRNA sense strand
agaaggccgauaacuuuga

SEQ ID NO: 5625 - RNA, 19 nt, Homo sapiens
  misc_RNA (1)...(19): siRNA sense strand
aguuugcccugaccugaaa

SEQ ID NO: 5626 - RNA, 19 nt, Homo sapiens
  misc_RNA (1)...(19): siRNA sense strand
ccaguggauggaagcauuu

SEQ ID NO: 5627 - RNA, 19 nt, Homo sapiens
  misc_RNA (1)...(19): siRNA sense strand
gaagacagauuacauagua

SEQ ID NO: 5628 - RNA, 19 nt, Homo sapiens
  misc_RNA (1)...(19): siRNA sense strand
gaagaaggauguauucaua

SEQ ID NO: 5629 - RNA, 19 nt, Homo sapiens
  misc_RNA (1)...(19): siRNA sense strand
gaagauaccuguccaagaa

SEQ ID NO: 5630 - RNA, 19 nt, Homo sapiens
  misc_RNA (1)...(19): siRNA sense strand
ugaagaaacucaagcauua

SEQ ID NO: 5631 - RNA, 19 nt, Homo sapiens
  misc_RNA (1)...(19): siRNA sense strand
gcagauauguugcuggaua

SEQ ID NO: 5632 - RNA, 19 nt, Homo sapiens
  misc_RNA (1)...(19): siRNA sense strand
ccaaagaggaguugaauua

SEQ ID NO: 5633 - RNA, 19 nt, Homo sapiens
  misc_RNA (1)...(19): siRNA sense strand
gcacauagauggcaagauc

SEQ ID NO: 5634 - RNA, 19 nt, Homo sapiens
  misc_RNA (1)...(19): siRNA sense strand
gaaaugggaugcuuuaaag

SEQ ID NO: 5635 - RNA, 19 nt, Homo sapiens
  misc_RNA (1)...(19): siRNA sense strand
gaacggaucugcagcuguu

SEQ ID NO: 5636 - RNA, 19 nt, Homo sapiens
  misc_RNA (1)...(19): siRNA sense strand
caaagaagcuuauccaaag

SEQ ID NO: 5637 - RNA, 19 nt, Homo sapiens
  misc_RNA (1)...(19): siRNA sense strand
gaaauuugcuucucuucaa

SEQ ID NO: 5638 - RNA, 19 nt, Homo sapiens
  misc_RNA (1)...(19): siRNA sense strand
gaacaaaucagagaacuuu

SEQ ID NO: 5639 - RNA, 19 nt, Homo sapiens
  misc_RNA (1)...(19): siRNA sense strand
gacguuaccuugaaucaua

SEQ ID NO: 5640 - RNA, 19 nt, Homo sapiens
  misc_RNA (1)...(19): siRNA sense strand
caaauaaccucccuaaucu

SEQ ID NO: 5641 - RNA, 19 nt, Homo sapiens
  misc_RNA (1)...(19): siRNA sense strand
ggaggguucuugaguauuu

SEQ ID NO: 5642 - RNA, 19 nt, Homo sapiens
  misc_RNA (1)...(19): siRNA sense strand
caagaaagauguggauauu

SEQ ID NO: 5643 - RNA, 19 nt, Homo sapiens
  misc_RNA (1)...(19): siRNA sense strand
gaucaggcauugacaugua

SEQ ID NO: 5644 - RNA, 19 nt, Homo sapiens
  misc_RNA (1)...(19): siRNA sense strand
ccaaaugacuuacucgaaa

SEQ ID NO: 5645 - RNA, 19 nt, Homo sapiens
  misc_RNA (1)...(19): siRNA sense strand
aaagagugcugacaguuua

SEQ ID NO: 5646 - RNA, 19 nt, Homo sapiens
  misc_RNA (1)...(19): siRNA sense strand
gagcagagauaucaccaaa

SEQ ID NO: 5647 - RNA, 19 nt, Homo sapiens
  misc_RNA (1)...(19): siRNA sense strand
guagaaggauucaaaguau

SEQ ID NO: 5648 - RNA, 19 nt, Homo sapiens
  misc_RNA (1)...(19): siRNA sense strand
gaaugagaauggagaguuu

SEQ ID NO: 5649 - RNA, 19 nt, Homo sapiens
  misc_RNA (1)...(19): siRNA sense strand
gggaguaucuaucaaugua

SEQ ID NO: 5650 - RNA, 19 nt, Homo sapiens
  misc_RNA (1)...(19): siRNA sense strand
gagaacaggucaaagaaau

SEQ ID NO: 5651 - RNA, 19 nt, Homo sapiens
  misc_RNA (1)...(19): siRNA sense strand
ggaauaugcuguuguaugg

SEQ ID NO: 5652 - RNA, 19 nt, Homo sapiens
  misc_RNA (1)...(19): siRNA sense strand
ggauauuggucucuuaauu

SEQ ID NO: 5653 - RNA, 19 nt, Homo sapiens
  misc_RNA (1)...(19): siRNA sense strand
gagaagaacuccugacucu

SEQ ID NO: 5654 - RNA, 19 nt, Homo sapiens
  misc_RNA (1)...(19): siRNA sense strand
agacaaagcugcaagugaa

SEQ ID NO: 5655 - RNA, 19 nt, Homo sapiens
  misc_RNA (1)...(19): siRNA sense strand
guacauaaauccuggugaa

SEQ ID NO: 5656 - RNA, 19 nt, Homo sapiens
  misc_RNA (1)...(19): siRNA sense strand
gcaaagcuauuuacaaguc

SEQ ID NO: 5657 - RNA, 19 nt, Homo sapiens
  misc_RNA (1)...(19): siRNA sense strand
cagcauauuucuuccauaa

SEQ ID NO: 5658 - RNA, 19 nt, Homo sapiens
  misc_RNA (1)...(19): siRNA sense strand
ggauagacauugaacagaa

SEQ ID NO: 5659 - RNA, 19 nt, Homo sapiens
  misc_RNA (1)...(19): siRNA sense strand
gaagugcccugucuaguca

SEQ ID NO: 5660 - RNA, 19 nt, Homo sapiens
  misc_RNA (1)...(19): siRNA sense strand
gaaaggcaauauaguuguu

SEQ ID NO: 5661 - RNA, 19 nt, Homo sapiens
  misc_RNA (1)...(19): siRNA sense strand
gaugauguauaccacaaua

SEQ ID NO: 5662 - RNA, 19 nt, Homo sapiens
  misc_RNA (1)...(19): siRNA sense strand
gaaaugagggaccaucuuu

SEQ ID NO: 5663 - RNA, 19 nt, Homo sapiens
  misc_RNA (1)...(19): siRNA sense strand
gaagauggaauuggaguua

SEQ ID NO: 5664 - RNA, 19 nt, Homo sapiens
  misc_RNA (1)...(19): siRNA sense strand
gaacaucugucaguggauu

SEQ ID NO: 5665 - RNA, 19 nt, Homo sapiens
  misc_RNA (1)...(19): siRNA sense strand
agagacagcuggugaauug

SEQ ID NO: 5666 - RNA, 19 nt, Homo sapiens
  misc_RNA (1)...(19): siRNA sense strand
caaaguaucuauugguuca

SEQ ID NO: 5667 - RNA, 19 nt, Homo sapiens
  misc_RNA (1)...(19): siRNA sense strand
ggaagacuguuaaccaaga

SEQ ID NO: 5668 - RNA, 19 nt, Homo sapiens
  misc_RNA (1)...(19): siRNA sense strand
agaaaucucucuaaaccua

SEQ ID NO: 5669 - RNA, 19 nt, Homo sapiens
  misc_RNA (1)...(19): siRNA sense strand
ggucaaagcagaucauaaa

SEQ ID NO: 5670 - RNA, 19 nt, Homo sapiens
  misc_RNA (1)...(19): siRNA sense strand
guucaucacuuucuacuga

SEQ ID NO: 5671 - RNA, 19 nt, Homo sapiens
  misc_RNA (1)...(19): siRNA sense strand
caaauggaauggcugguuu

SEQ ID NO: 5672 - RNA, 19 nt, Homo sapiens
  misc_RNA (1)...(19): siRNA sense strand
guaauaagcccaucugguu

SEQ ID NO: 5673 - RNA, 19 nt, Homo sapiens
  misc_RNA (1)...(19): siRNA sense strand
caagagagaaagcaaauuu

SEQ ID NO: 5674 - RNA, 19 nt, Homo sapiens
  misc_RNA (1)...(19): siRNA sense strand
ggaaaugggaugcuuuaaa

SEQ ID NO: 5675 - RNA, 19 nt, Homo sapiens
  misc_RNA (1)...(19): siRNA sense strand
ucaccgcucugacaaauuu

SEQ ID NO: 5676 - RNA, 19 nt, Homo sapiens
  misc_RNA (1)...(19): siRNA sense strand
gaggagacguuuacagaga

SEQ ID NO: 5677 - RNA, 19 nt, Homo sapiens
  misc_RNA (1)...(19): siRNA sense strand
ugucagaguugauacauaa

SEQ ID NO: 5678 - RNA, 19 nt, Homo sapiens
  misc_RNA (1)...(19): siRNA sense strand
ggaacuggcauauuuguuu

SEQ ID NO: 5679 - RNA, 19 nt, Homo sapiens
  misc_RNA (1)...(19): siRNA sense strand
gaaccagugauuagacuua

SEQ ID NO: 5680 - RNA, 19 nt, Homo sapiens
  misc_RNA (1)...(19): siRNA sense strand
gcagucaacaggauuauuu

SEQ ID NO: 5681 - RNA, 19 nt, Homo sapiens
  misc_RNA (1)...(19): siRNA sense strand
aaauauggcuguugcacua

SEQ ID NO: 5682 - RNA, 19 nt, Homo sapiens
  misc_RNA (1)...(19): siRNA sense strand
ccagcugccuugucuguua

SEQ ID NO: 5683 - RNA, 19 nt, Homo sapiens
  misc_RNA (1)...(19): siRNA sense strand
gaacuaugaaggaagauuu

SEQ ID NO: 5684 - RNA, 19 nt, Homo sapiens
  misc_RNA (1)...(19): siRNA sense strand
gagcggugcuguugcauug

SEQ ID NO: 5685 - RNA, 19 nt, Homo sapiens
  misc_RNA (1)...(19): siRNA sense strand
ugaaagcccuaauaaauag

SEQ ID NO: 5686 - RNA, 19 nt, Homo sapiens
  misc_RNA (1)...(19): siRNA sense strand
gagaagagcacgaguuuca

SEQ ID NO: 5687 - RNA, 19 nt, Homo sapiens
  misc_RNA (1)...(19): siRNA sense strand
guaauggacuuucuaugau

SEQ ID NO: 5688 - RNA, 19 nt, Homo sapiens
  misc_RNA (1)...(19): siRNA sense strand
caacaaagaguacaugaau

SEQ ID NO: 5689 - RNA, 19 nt, Homo sapiens
  misc_RNA (1)...(19): siRNA sense strand
caugaacaauucuccauuu

SEQ ID NO: 5690 - RNA, 19 nt, Homo sapiens
  misc_RNA (1)...(19): siRNA sense strand
ucgaggaacucaagaauug

SEQ ID NO: 5691 - RNA, 19 nt, Homo sapiens
  misc_RNA (1)...(19): siRNA sense strand
gugaaagacucauagaaga

SEQ ID NO: 5692 - RNA, 19 nt, Homo sapiens
  misc_RNA (1)...(19): siRNA sense strand
ucagaagguuucaguguuu

SEQ ID NO: 5693 - RNA, 19 nt, Homo sapiens
  misc_RNA (1)...(19): siRNA sense strand
gccaaugacucagaagaua

SEQ ID NO: 5694 - RNA, 19 nt, Homo sapiens
  misc_RNA (1)...(19): siRNA sense strand
gaacaauucuccauuugac

SEQ ID NO: 5695 - RNA, 19 nt, Homo sapiens
  misc_RNA (1)...(19): siRNA sense strand
ccaacuagcccaauuagaa

SEQ ID NO: 5696 - RNA, 19 nt, Homo sapiens
  misc_RNA (1)...(19): siRNA sense strand
gacggaaccugcaucauau

SEQ ID NO: 5697 - RNA, 19 nt, Homo sapiens
  misc_RNA (1)...(19): siRNA sense strand
gaauuucugucuugugaug

SEQ ID NO: 5698 - RNA, 19 nt, Homo sapiens
  misc_RNA (1)...(19): siRNA sense strand
gcaagugaaucuauaagag

SEQ ID NO: 5699 - RNA, 19 nt, Homo sapiens
  misc_RNA (1)...(19): siRNA sense strand
gguagaaggauucaaagua

SEQ ID NO: 5700 - RNA, 19 nt, Homo sapiens
  misc_RNA (1)...(19): siRNA sense strand
ggauaauggucuacucuau

SEQ ID NO: 5701 - RNA, 19 nt, Homo sapiens
  misc_RNA (1)...(19): siRNA sense strand
gaguugcccucgggaauua

SEQ ID NO: 5702 - RNA, 19 nt, Homo sapiens
  misc_RNA (1)...(19): siRNA sense strand
uaaccaagauguucauauc

SEQ ID NO: 5703 - RNA, 19 nt, Homo sapiens
  misc_RNA (1)...(19): siRNA sense strand
gaacagacuccuccagaug

SEQ ID NO: 5704 - RNA, 19 nt, Homo sapiens
  misc_RNA (1)...(19): siRNA sense strand
uaaaauagcugcagauauc

SEQ ID NO: 5705 - RNA, 19 nt, Homo sapiens
  misc_RNA (1)...(19): siRNA sense strand
gaauggagaguuuaaguug

SEQ ID NO: 5706 - RNA, 19 nt, Homo sapiens
  misc_RNA (1)...(19): siRNA sense strand
caaugccacucuuaucuuu

SEQ ID NO: 5707 - RNA, 19 nt, Homo sapiens
  misc_RNA (1)...(19): siRNA sense strand
cauaaauccuggugaaaga

SEQ ID NO: 5708 - RNA, 19 nt, Homo sapiens
  misc_RNA (1)...(19): siRNA sense strand
gaauuggaguuaccuaauc

SEQ ID NO: 5709 - RNA, 19 nt, Homo sapiens
  misc_RNA (1)...(19): siRNA sense strand
gcaccaagcagcagacauu

SEQ ID NO: 5710 - RNA, 19 nt, Homo sapiens
  misc_RNA (1)...(19): siRNA sense strand
ucaaaucccuucuacuuca

SEQ ID NO: 5711 - RNA, 19 nt, Homo sapiens
  misc_RNA (1)...(19): siRNA sense strand
ucaguaacaugaacaauuc

SEQ ID NO: 5712 - RNA, 19 nt, Homo sapiens
  misc_RNA (1)...(19): siRNA sense strand
ggauuugguucaagaauuc

SEQ ID NO: 5713 - RNA, 19 nt, Homo sapiens
  misc_RNA (1)...(19): siRNA sense strand
caaaugcggugucaucaca

SEQ ID NO: 5714 - RNA, 19 nt, Homo sapiens
  misc_RNA (1)...(19): siRNA sense strand
ucccuaaucuucuggaaua

SEQ ID NO: 5715 - RNA, 19 nt, Homo sapiens
  misc_RNA (1)...(19): siRNA sense strand
gacagcuggugaauuguua

SEQ ID NO: 5716 - RNA, 19 nt, Homo sapiens
  misc_RNA (1)...(19): siRNA sense strand
caaacugaaucgcuucuga

SEQ ID NO: 5717 - RNA, 19 nt, Homo sapiens
  misc_RNA (1)...(19): siRNA sense strand
auaaauugcuugcuuguga

SEQ ID NO: 5718 - RNA, 19 nt, Homo sapiens
  misc_RNA (1)...(19): siRNA sense strand
caugaaagcuguuuuacua

SEQ ID NO: 5719 - RNA, 19 nt, Homo sapiens
  misc_RNA (1)...(19): siRNA sense strand
gaaagugauacuacuauga

SEQ ID NO: 5720 - RNA, 19 nt, Homo sapiens
  misc_RNA (1)...(19): siRNA sense strand
acagaaagaugccucaguu

SEQ ID NO: 5721 - RNA, 19 nt, Homo sapiens
  misc_RNA (1)...(19): siRNA sense strand
ucccaaaucuguaaucauu

SEQ ID NO: 5722 - RNA, 19 nt, Homo sapiens
  misc_RNA (1)...(19): siRNA sense strand
gauauuggucucuuaauug

SEQ ID NO: 5723 - RNA, 19 nt, Homo sapiens
  misc_RNA (1)...(19): siRNA sense strand
ggaugucucugcaguugaa

SEQ ID NO: 5724 - RNA, 19 nt, Homo sapiens
  misc_RNA (1)...(19): siRNA sense strand
gaaaagaacauucccauga

SEQ ID NO: 5725 - RNA, 19 nt, Homo sapiens
  misc_RNA (1)...(19): siRNA sense strand
uaagguagcagauauguug

SEQ ID NO: 5726 - RNA, 19 nt, Homo sapiens
  misc_RNA (1)...(19): siRNA sense strand
gcuauaauccaagauguua

SEQ ID NO: 5727 - RNA, 19 nt, Homo sapiens
  misc_RNA (1)...(19): siRNA sense strand
acacaucacuugaauccua

SEQ ID NO: 5728 - RNA, 19 nt, Homo sapiens
  misc_RNA (1)...(19): siRNA sense strand
ccacagagcuuuuggcuaa

SEQ ID NO: 5729 - RNA, 19 nt, Homo sapiens
  misc_RNA (1)...(19): siRNA sense strand
gaaucacccucuccacauu

SEQ ID NO: 5730 - RNA, 19 nt, Homo sapiens
  misc_RNA (1)...(19): siRNA sense strand
ccacauuucugaccgugua

SEQ ID NO: 5731 - RNA, 19 nt, Homo sapiens
  misc_RNA (1)...(19): siRNA sense strand
cgaaacacaucacuugaau

SEQ ID NO: 5732 - RNA, 19 nt, Homo sapiens
  misc_RNA (1)...(19): siRNA sense strand
ucaauagccuacugucuga

SEQ ID NO: 5733 - RNA, 19 nt, Homo sapiens
  misc_RNA (1)...(19): siRNA sense strand
gcaguucgcuucucuuuug

SEQ ID NO: 5734 - RNA, 19 nt, Homo sapiens
  misc_RNA (1)...(19): siRNA sense strand
cauaucaucuuucccuaau

SEQ ID NO: 5735 - RNA, 19 nt, Homo sapiens
  misc_RNA (1)...(19): siRNA sense strand
gagcagugguuuccauaag

SEQ ID NO: 5736 - RNA, 19 nt, Homo sapiens
  misc_RNA (1)...(19): siRNA sense strand
gcagugguuuccauaagug

SEQ ID NO: 5737 - RNA, 19 nt, Homo sapiens
  misc_RNA (1)...(19): siRNA sense strand
cugaggaacuuauuagaau

SEQ ID NO: 5738 - RNA, 19 nt, Homo sapiens
  misc_RNA (1)...(19): siRNA sense strand
agaggaggaucucauaaau

SEQ ID NO: 5739 - RNA, 19 nt, Homo sapiens
  misc_RNA (1)...(19): siRNA sense strand
gcauaucaucuuucccuaa

SEQ ID NO: 5740 - RNA, 19 nt, Homo sapiens
  misc_RNA (1)...(19): siRNA sense strand
ucacuccucuuuacaugug

SEQ ID NO: 5741 - RNA, 19 nt, Homo sapiens
  misc_RNA (1)...(19): siRNA sense strand
aggaggaucucauaaaucu

SEQ ID NO: 5742 - RNA, 19 nt, Homo sapiens
  misc_RNA (1)...(19): siRNA sense strand
ucucauaaaucugggugua

SEQ ID NO: 5743 - RNA, 19 nt, Homo sapiens
  misc_RNA (1)...(19): siRNA sense strand
ucauaaaucuggguguaau

SEQ ID NO: 5744 - RNA, 19 nt, Homo sapiens
  misc_RNA (1)...(19): siRNA sense strand
cuaaugagacuggaaauca

SEQ ID NO: 5745 - RNA, 19 nt, Homo sapiens
  misc_RNA (1)...(19): siRNA sense strand
uaauaggcacagaacguua

SEQ ID NO: 5746 - RNA, 19 nt, Homo sapiens
  misc_RNA (1)...(19): siRNA sense strand
ugaggaacuuauuagaaug

SEQ ID NO: 5747 - RNA, 19 nt, Homo sapiens
  misc_RNA (1)...(19): siRNA sense strand
guaauaggcacagaacguu

SEQ ID NO: 5748 - RNA, 19 nt, Homo sapiens
  misc_RNA (1)...(19): siRNA sense strand
ggagcagugguuuccauaa

SEQ ID NO: 5749 - RNA, 19 nt, Homo sapiens
  misc_RNA (1)...(19): siRNA sense strand
cauaaaucuggguguaaua

SEQ ID NO: 5750 - RNA, 19 nt, Homo sapiens
  misc_RNA (1)...(19): siRNA sense strand
gaggaggaucucauaaauc

SEQ ID NO: 5751 - RNA, 19 nt, Homo sapiens
  misc_RNA (1)...(19): siRNA sense strand
caaacuggcugcaaaagag

SEQ ID NO: 5752 - RNA, 19 nt, Homo sapiens
  misc_RNA (1)...(19): siRNA sense strand
caucagaggcaauuauguc

SEQ ID NO: 5753 - RNA, 19 nt, Homo sapiens
  misc_RNA (1)...(19): siRNA sense strand
uaagugaccaacccacaga

SEQ ID NO: 5754 - RNA, 19 nt, Homo sapiens
  misc_RNA (1)...(19): siRNA sense strand
ccgaaacacaucacuugaa

SEQ ID NO: 5755 - RNA, 19 nt, Homo sapiens
  misc_RNA (1)...(19): siRNA sense strand
ucgcuucucuuuugcauuu

SEQ ID NO: 5756 - RNA, 19 nt, Homo sapiens
  misc_RNA (1)...(19): siRNA sense strand
ugucacuccucuuuacaug

SEQ ID NO: 5757 - RNA, 19 nt, Homo sapiens
  misc_RNA (1)...(19): siRNA sense strand
uuacugucacuccucuuua

SEQ ID NO: 5758 - RNA, 19 nt, Homo sapiens
  misc_RNA (1)...(19): siRNA sense strand
gaaacacaucacuugaauc

SEQ ID NO: 5759 - RNA, 19 nt, Homo sapiens
  misc_RNA (1)...(19): siRNA sense strand
aaacacaucacuugaaucc

SEQ ID NO: 5760 - RNA, 19 nt, Homo sapiens
  misc_RNA (1)...(19): siRNA sense strand
gcacugccuccgaaacaca

SEQ ID NO: 5761 - RNA, 19 nt, Homo sapiens
  misc_RNA (1)...(19): siRNA sense strand
auccugaucucacuucaug

SEQ ID NO: 5762 - RNA, 19 nt, Homo sapiens
  misc_RNA (1)...(19): siRNA sense strand
ucugaggaacuuauuagaa

SEQ ID NO: 5763 - RNA, 19 nt, Homo sapiens
  misc_RNA (1)...(19): siRNA sense strand
ccacagaccagugcaaacu

SEQ ID NO: 5764 - RNA, 19 nt, Homo sapiens
  misc_RNA (1)...(19): siRNA sense strand
ugaggcaguucgcuucucu

SEQ ID NO: 5765 - RNA, 19 nt, Homo sapiens
  misc_RNA (1)...(19): siRNA sense strand
guuaccgucuacuauguuc

SEQ ID NO: 5766 - RNA, 19 nt, Homo sapiens
  misc_RNA (1)...(19): siRNA sense strand
guaauccugaucucacuuc

SEQ ID NO: 5767 - RNA, 19 nt, Homo sapiens
  misc_RNA (1)...(19): siRNA sense strand
aggcaauuauguccacaga

SEQ ID NO: 5768 - RNA, 19 nt, Homo sapiens
  misc_RNA (1)...(19): siRNA sense strand
gcuccuuuguccaucugaa

SEQ ID NO: 5769 - RNA, 19 nt, Homo sapiens
  misc_RNA (1)...(19): siRNA sense strand
ugucaucagucagcacuuc

SEQ ID NO: 5770 - RNA, 19 nt, Homo sapiens
  misc_RNA (1)...(19): siRNA sense strand
ugaaucacccucuccacau

SEQ ID NO: 5771 - RNA, 19 nt, Homo sapiens
  misc_RNA (1)...(19): siRNA sense strand
gcaaacuggcugcaaaaga

SEQ ID NO: 5772 - RNA, 19 nt, Homo sapiens
  misc_RNA (1)...(19): siRNA sense strand
gcacuucaucagaggcaau

SEQ ID NO: 5773 - RNA, 19 nt, Homo sapiens
  misc_RNA (1)...(19): siRNA sense strand
aauccuaccucugcuccuu

SEQ ID NO: 5774 - RNA, 19 nt, Homo sapiens
  misc_RNA (1)...(19): siRNA sense strand
cagagcuuuuggcuaauua

SEQ ID NO: 5775 - RNA, 19 nt, Homo sapiens
  misc_RNA (1)...(19): siRNA sense strand
gaggaacuuauuagaaugc

SEQ ID NO: 5776 - RNA, 19 nt, Homo sapiens
  misc_RNA (1)...(19): siRNA sense strand
gaaaguaccucgucucaaa

SEQ ID NO: 5777 - RNA, 19 nt, Homo sapiens
  misc_RNA (1)...(19): siRNA sense strand
ggcaauugcuuguguugua

SEQ ID NO: 5778 - RNA, 19 nt, Homo sapiens
  misc_RNA (1)...(19): siRNA sense strand
gcaauugcuuguguuguaa

SEQ ID NO: 5779 - RNA, 19 nt, Homo sapiens
  misc_RNA (1)...(19): siRNA sense strand
uuacaaagccgcugugauu

SEQ ID NO: 5780 - RNA, 19 nt, Homo sapiens
  misc_RNA (1)...(19): siRNA sense strand
aaaccuggcugcuaucaga

SEQ ID NO: 5781 - RNA, 19 nt, Homo sapiens
  misc_RNA (1)...(19): siRNA sense strand
caaagccgcugugauugga

SEQ ID NO: 5782 - RNA, 19 nt, Homo sapiens
  misc_RNA (1)...(19): siRNA sense strand
ggauucugguguuugguuu

SEQ ID NO: 5783 - RNA, 19 nt, Homo sapiens
  misc_RNA (1)...(19): siRNA sense strand
gaacguguacuccuuggau

SEQ ID NO: 5784 - RNA, 19 nt, Homo sapiens
  misc_RNA (1)...(19): siRNA sense strand
gguguuugguuugcucuuu

SEQ ID NO: 5785 - RNA, 19 nt, Homo sapiens
  misc_RNA (1)...(19): siRNA sense strand
ggaugggauucugguguuu

SEQ ID NO: 5786 - RNA, 19 nt, Homo sapiens
  misc_RNA (1)...(19): siRNA sense strand
gcaugcugcuguggcaauu

SEQ ID NO: 5787 - RNA, 19 nt, Homo sapiens
  misc_RNA (1)...(19): siRNA sense strand
uggaugggauucugguguu

SEQ ID NO: 5788 - RNA, 19 nt, Homo sapiens
  misc_RNA (1)...(19): siRNA sense strand
guguuugguuugcucuuug

SEQ ID NO: 5789 - RNA, 19 nt, Homo sapiens
  misc_RNA (1)...(19): siRNA sense strand
uugguuugcucuuuguuug

SEQ ID NO: 5790 - RNA, 19 nt, Homo sapiens
  misc_RNA (1)...(19): siRNA sense strand
gggauucugguguuugguu

SEQ ID NO: 5791 - RNA, 19 nt, Homo sapiens
  misc_RNA (1)...(19): siRNA sense strand
aagaaaguaccucgucuca

SEQ ID NO: 5792 - RNA, 19 nt, Homo sapiens
  misc_RNA (1)...(19): siRNA sense strand
ucagagaagaaggguguuu

SEQ ID NO: 5793 - RNA, 19 nt, Homo sapiens
  misc_RNA (1)...(19): siRNA sense strand
cagagaagaaggguguuug

SEQ ID NO: 5794 - RNA, 19 nt, Homo sapiens
  misc_RNA (1)...(19): siRNA sense strand
gaugggauucugguguuug

SEQ ID NO: 5795 - RNA, 19 nt, Homo sapiens
  misc_RNA (1)...(19): siRNA sense strand
gguuugcucuuuguuugca

SEQ ID NO: 5796 - RNA, 19 nt, Homo sapiens
  misc_RNA (1)...(19): siRNA sense strand
gaaccucucugggaacugu

SEQ ID NO: 5797 - RNA, 19 nt, Homo sapiens
  misc_RNA (1)...(19): siRNA sense strand
gccuguggcuggaggguaa

SEQ ID NO: 5798 - RNA, 19 nt, Homo sapiens
  misc_RNA (1)...(19): siRNA sense strand
gacuguggcugcccucuca

SEQ ID NO: 5799 - RNA, 19 nt, Homo sapiens
  misc_RNA (1)...(19): siRNA sense strand
ucaaggcgcugcgggacuu

SEQ ID NO: 5800 - RNA, 19 nt, Homo sapiens
  misc_RNA (1)...(19): siRNA sense strand
caucaaggcaaacguguuc

SEQ ID NO: 5801 - RNA, 19 nt, Homo sapiens
  misc_RNA (1)...(19): siRNA sense strand
gcguacaccuacaacaaca

SEQ ID NO: 5802 - RNA, 19 nt, Homo sapiens
  misc_RNA (1)...(19): siRNA sense strand
cggaugagcucagcgucuu

SEQ ID NO: 5803 - RNA, 19 nt, Homo sapiens
  misc_RNA (1)...(19): siRNA sense strand
caacguggcggucaugaac

SEQ ID NO: 5804 - RNA, 19 nt, Homo sapiens
  misc_RNA (1)...(19): siRNA sense strand
ggacuucgcccugcagaac

SEQ ID NO: 5805 - RNA, 19 nt, Homo sapiens
  misc_RNA (1)...(19): siRNA sense strand
ggaacugucuccggaaccu

SEQ ID NO: 5806 - RNA, 19 nt, Homo sapiens
  misc_RNA (1)...(19): siRNA sense strand
ccgcguacaccuacaacaa

SEQ ID NO: 5807 - RNA, 19 nt, Homo sapiens
  misc_RNA (1)...(19): siRNA sense strand
guacaccuacaacaacauc

SEQ ID NO: 5808 - RNA, 19 nt, Homo sapiens
  misc_RNA (1)...(19): siRNA sense strand
ggcuggacgucucgcacaa

SEQ ID NO: 5809 - RNA, 19 nt, Homo sapiens
  misc_RNA (1)...(19): siRNA sense strand
acaacucacugcggaccuu

SEQ ID NO: 5810 - RNA, 19 nt, Homo sapiens
  misc_RNA (1)...(19): siRNA sense strand
ggauauaucugacugcuuu

SEQ ID NO: 5811 - RNA, 19 nt, Homo sapiens
  misc_RNA (1)...(19): siRNA sense strand
gagcagagcuugggaaaga

SEQ ID NO: 5812 - RNA, 19 nt, Homo sapiens
  misc_RNA (1)...(19): siRNA sense strand
caaauucucuccaaaguuc

SEQ ID NO: 5813 - RNA, 19 nt, Homo sapiens
  misc_RNA (1)...(19): siRNA sense strand
gccaagugcugaacaaauu

SEQ ID NO: 5814 - RNA, 19 nt, Homo sapiens
  misc_RNA (1)...(19): siRNA sense strand
gaugaccucugccaguaua

SEQ ID NO: 5815 - RNA, 19 nt, Homo sapiens
  misc_RNA (1)...(19): siRNA sense strand
gcuaagaugcucauuauug

SEQ ID NO: 5816 - RNA, 19 nt, Homo sapiens
  misc_RNA (1)...(19): siRNA sense strand
acugaaaccugcaacuuua

SEQ ID NO: 5817 - RNA, 19 nt, Homo sapiens
  misc_RNA (1)...(19): siRNA sense strand
cugaacaaauugccaaaua

SEQ ID NO: 5818 - RNA, 19 nt, Homo sapiens
  misc_RNA (1)...(19): siRNA sense strand
gacaucaucugaauaccaa

SEQ ID NO: 5819 - RNA, 19 nt, Homo sapiens
  misc_RNA (1)...(19): siRNA sense strand
gaacaaauugccaaauaca

SEQ ID NO: 5820 - RNA, 19 nt, Homo sapiens
  misc_RNA (1)...(19): siRNA sense strand
cuaagaugcucauuauugu

SEQ ID NO: 5821 - RNA, 19 nt, Homo sapiens
  misc_RNA (1)...(19): siRNA sense strand
gagccugaauuuagugcua

SEQ ID NO: 5822 - RNA, 19 nt, Homo sapiens
  misc_RNA (1)...(19): siRNA sense strand
aaaaggagcuucaaaagug

SEQ ID NO: 5823 - RNA, 19 nt, Homo sapiens
  misc_RNA (1)...(19): siRNA sense strand
cagaugaccucacucagau

SEQ ID NO: 5824 - RNA, 19 nt, Homo sapiens
  misc_RNA (1)...(19): siRNA sense strand
gccaguauaucacaucaga

SEQ ID NO: 5825 - RNA, 19 nt, Homo sapiens
  misc_RNA (1)...(19): siRNA sense strand
ccaaaguucaggcucaaua

SEQ ID NO: 5826 - RNA, 19 nt, Homo sapiens
  misc_RNA (1)...(19): siRNA sense strand
ggagacaucaucugaauac

SEQ ID NO: 5827 - RNA, 19 nt, Homo sapiens
  misc_RNA (1)...(19): siRNA sense strand
ucauagugauugaggcaua

SEQ ID NO: 5828 - RNA, 19 nt, Homo sapiens
  misc_RNA (1)...(19): siRNA sense strand
aaaguagaauguuggagaa

SEQ ID NO: 5829 - RNA, 19 nt, Homo sapiens
  misc_RNA (1)...(19): siRNA sense strand
cagcuacccugaaauucuu

SEQ ID NO: 5830 - RNA, 19 nt, Homo sapiens
  misc_RNA (1)...(19): siRNA sense strand
caaccuagggcuuaaguau

SEQ ID NO: 5831 - RNA, 19 nt, Homo sapiens
  misc_RNA (1)...(19): siRNA sense strand
ucacucagaugcuggacaa

SEQ ID NO: 5832 - RNA, 19 nt, Homo sapiens
  misc_RNA (1)...(19): siRNA sense strand
gacugaaaccugcaacuuu

SEQ ID NO: 5833 - RNA, 19 nt, Homo sapiens
  misc_RNA (1)...(19): siRNA sense strand
caucccagcuacccugaaa

SEQ ID NO: 5834 - RNA, 19 nt, Homo sapiens
  misc_RNA (1)...(19): siRNA sense strand
uacaagagccugaauuuag

SEQ ID NO: 5835 - RNA, 19 nt, Homo sapiens
  misc_RNA (1)...(19): siRNA sense strand
cuacaagagccugaauuua

SEQ ID NO: 5836 - RNA, 19 nt, Homo sapiens
  misc_RNA (1)...(19): siRNA sense strand
acaagagccugaauuuagu

SEQ ID NO: 5837 - RNA, 19 nt, Homo sapiens
  misc_RNA (1)...(19): siRNA sense strand
cgggaaauauguugaaucu

SEQ ID NO: 5838 - RNA, 19 nt, Homo sapiens
  misc_RNA (1)...(19): siRNA sense strand
gagaccugcuuugggauuu

SEQ ID NO: 5839 - RNA, 19 nt, Homo sapiens
  misc_RNA (1)...(19): siRNA sense strand
ugaacaaauugccaaauac

SEQ ID NO: 5840 - RNA, 19 nt, Homo sapiens
  misc_RNA (1)...(19): siRNA sense strand
gcucauuauuguuguguca

SEQ ID NO: 5841 - RNA, 19 nt, Homo sapiens
  misc_RNA (1)...(19): siRNA sense strand
aaggagacaucaucugaau

SEQ ID NO: 5842 - RNA, 19 nt, Homo sapiens
  misc_RNA (1)...(19): siRNA sense strand
augcuaagaugcucauuau

SEQ ID NO: 5843 - RNA, 19 nt, Homo sapiens
  misc_RNA (1)...(19): siRNA sense strand
gaauaccaaaguagaaugu

SEQ ID NO: 5844 - RNA, 19 nt, Homo sapiens
  misc_RNA (1)...(19): siRNA sense strand
cauagugauugaggcauaa

SEQ ID NO: 5845 - RNA, 19 nt, Homo sapiens
  misc_RNA (1)...(19): siRNA sense strand
ugggaaagaucuacaagag

SEQ ID NO: 5846 - RNA, 19 nt, Homo sapiens
  misc_RNA (1)...(19): siRNA sense strand
acccugaaauucuuccaua

SEQ ID NO: 5847 - RNA, 19 nt, Homo sapiens
  misc_RNA (1)...(19): siRNA sense strand
accuagggcuuaaguauga

SEQ ID NO: 5848 - RNA, 19 nt, Homo sapiens
  misc_RNA (1)...(19): siRNA sense strand
ucagaugaccucacucaga

SEQ ID NO: 5849 - RNA, 19 nt, Homo sapiens
  misc_RNA (1)...(19): siRNA sense strand
gaaaccugcaacuuuaaug

SEQ ID NO: 5850 - RNA, 19 nt, Homo sapiens
  misc_RNA (1)...(19): siRNA sense strand
gcucaauacccaggaguuu

SEQ ID NO: 5851 - RNA, 19 nt, Homo sapiens
  misc_RNA (1)...(19): siRNA sense strand
aggaugaccucugccagua

SEQ ID NO: 5852 - RNA, 19 nt, Homo sapiens
  misc_RNA (1)...(19): siRNA sense strand
gaaaauggagaccugcuuu

SEQ ID NO: 5853 - RNA, 19 nt, Homo sapiens
  misc_RNA (1)...(19): siRNA sense strand
ggagaccugcuuugggauu

SEQ ID NO: 5854 - RNA, 19 nt, Homo sapiens
  misc_RNA (1)...(19): siRNA sense strand
auaccaaaguagaauguug

SEQ ID NO: 5855 - RNA, 19 nt, Homo sapiens
  misc_RNA (1)...(19): siRNA sense strand
ucuacaagagccugaauuu

SEQ ID NO: 5856 - RNA, 19 nt, Homo sapiens
  misc_RNA (1)...(19): siRNA sense strand
gaaccucgagaacguaaag

SEQ ID NO: 5857 - RNA, 19 nt, Homo sapiens
  misc_RNA (1)...(19): siRNA sense strand
auaucugacugcuuuauug

SEQ ID NO: 5858 - RNA, 19 nt, Homo sapiens
  misc_RNA (1)...(19): siRNA sense strand
auucuuccauagucucuua

SEQ ID NO: 5859 - RNA, 19 nt, Homo sapiens
  misc_RNA (1)...(19): siRNA sense strand
ucaucugaauaccaaagua

SEQ ID NO: 5860 - RNA, 19 nt, Homo sapiens
  misc_RNA (1)...(19): siRNA sense strand
guaaaguuugcuuggcaua

SEQ ID NO: 5861 - RNA, 19 nt, Homo sapiens
  misc_RNA (1)...(19): siRNA sense strand
caaauugccaaauacaaag

SEQ ID NO: 5862 - RNA, 19 nt, Homo sapiens
  misc_RNA (1)...(19): siRNA sense strand
uaugagugcuaugaccuuu

SEQ ID NO: 5863 - RNA, 19 nt, Homo sapiens
  misc_RNA (1)...(19): siRNA sense strand
ggcauaauaggaaggauug

SEQ ID NO: 5864 - RNA, 19 nt, Homo sapiens
  misc_RNA (1)...(19): siRNA sense strand
auaaggagacaucaucuga

SEQ ID NO: 5865 - RNA, 19 nt, Homo sapiens
  misc_RNA (1)...(19): siRNA sense strand
ccucgagaacguaaaguuu

SEQ ID NO: 5866 - RNA, 19 nt, Homo sapiens
  misc_RNA (1)...(19): siRNA sense strand
ugaguuucauagugauuga

SEQ ID NO: 5867 - RNA, 19 nt, Homo sapiens
  misc_RNA (1)...(19): siRNA sense strand
ucugacugcuuuauugaug

SEQ ID NO: 5868 - RNA, 19 nt, Homo sapiens
  misc_RNA (1)...(19): siRNA sense strand
uaaaguuugcuuggcauaa

SEQ ID NO: 5869 - RNA, 19 nt, Homo sapiens
  misc_RNA (1)...(19): siRNA sense strand
ccaggaguuuguaucaaca

SEQ ID NO: 5870 - RNA, 19 nt, Homo sapiens
  misc_RNA (1)...(19): siRNA sense strand
aggaauucauggacaagaa

SEQ ID NO: 5871 - RNA, 19 nt, Homo sapiens
  misc_RNA (1)...(19): siRNA sense strand
gaggugcaggugaaauuga

SEQ ID NO: 5872 - RNA, 19 nt, Homo sapiens
  misc_RNA (1)...(19): siRNA sense strand
ugaaauucuuccauagucu

SEQ ID NO: 5873 - RNA, 19 nt, Homo sapiens
  misc_RNA (1)...(19): siRNA sense strand
cugaaauucuuccauaguc

SEQ ID NO: 5874 - RNA, 19 nt, Homo sapiens
  misc_RNA (1)...(19): siRNA sense strand
ucaaauucucuccaaaguu

SEQ ID NO: 5875 - RNA, 19 nt, Homo sapiens
  misc_RNA (1)...(19): siRNA sense strand
gaaggauuggagacacaaa

SEQ ID NO: 5876 - RNA, 19 nt, Homo sapiens
  misc_RNA (1)...(19): siRNA sense strand
ggaggugcaggugaaauug

SEQ ID NO: 5877 - RNA, 19 nt, Homo sapiens
  misc_RNA (1)...(19): siRNA sense strand
gcuuaaguaugagugcuau

SEQ ID NO: 5878 - RNA, 19 nt, Homo sapiens
  misc_RNA (1)...(19): siRNA sense strand
aagaugcucauuauuguug

SEQ ID NO: 5879 - RNA, 19 nt, Homo sapiens
  misc_RNA (1)...(19): siRNA sense strand
uaaggagacaucaucugaa

SEQ ID NO: 5880 - RNA, 19 nt, Homo sapiens
  misc_RNA (1)...(19): siRNA sense strand
aaaguuugcuuggcauaag

SEQ ID NO: 5881 - RNA, 19 nt, Homo sapiens
  misc_RNA (1)...(19): siRNA sense strand
ccacgggaaauauguugaa

SEQ ID NO: 5882 - RNA, 19 nt, Homo sapiens
  misc_RNA (1)...(19): siRNA sense strand
cauagucucuuagguacca

SEQ ID NO: 5883 - RNA, 19 nt, Homo sapiens
  misc_RNA (1)...(19): siRNA sense strand
ugagccaagugcugaacaa

SEQ ID NO: 5884 - RNA, 19 nt, Homo sapiens
  misc_RNA (1)...(19): siRNA sense strand
ucaauacccaggaguuugu

SEQ ID NO: 5885 - RNA, 19 nt, Homo sapiens
  misc_RNA (1)...(19): siRNA sense strand
agugggacuuuauucauau

SEQ ID NO: 5886 - RNA, 19 nt, Homo sapiens
  misc_RNA (1)...(19): siRNA sense strand
aggcggaggugcaggugaa

SEQ ID NO: 5887 - RNA, 19 nt, Homo sapiens
  misc_RNA (1)...(19): siRNA sense strand
uaucugacugcuuuauuga

SEQ ID NO: 5888 - RNA, 19 nt, Homo sapiens
  misc_RNA (1)...(19): siRNA sense strand
gauauaucugacugcuuua

SEQ ID NO: 5889 - RNA, 19 nt, Homo sapiens
  misc_RNA (1)...(19): siRNA sense strand
uuaaguaugagugcuauga

SEQ ID NO: 5890 - RNA, 19 nt, Homo sapiens
  misc_RNA (1)...(19): siRNA sense strand
gggacuuuauucauaugau

SEQ ID NO: 5891 - RNA, 19 nt, Homo sapiens
  misc_RNA (1)...(19): siRNA sense strand
guaaaagacaucccagcua

SEQ ID NO: 5892 - RNA, 19 nt, Homo sapiens
  misc_RNA (1)...(19): siRNA sense strand
ccacagcaccaccugaucu

SEQ ID NO: 5893 - RNA, 19 nt, Homo sapiens
  misc_RNA (1)...(19): siRNA sense strand
ugacugaaaccugcaacuu

SEQ ID NO: 5894 - RNA, 19 nt, Homo sapiens
  misc_RNA (1)...(19): siRNA sense strand
ggaauucauggacaagaag

SEQ ID NO: 5895 - RNA, 19 nt, Homo sapiens
  misc_RNA (1)...(19): siRNA sense strand
gagccaagugcugaacaaa

SEQ ID NO: 5896 - RNA, 19 nt, Homo sapiens
  misc_RNA (1)...(19): siRNA sense strand
cggaggugcaggugaaauu

SEQ ID NO: 5897 - RNA, 19 nt, Homo sapiens
  misc_RNA (1)...(19): siRNA sense strand
gaccacgggaaauauguug

SEQ ID NO: 5898 - RNA, 19 nt, Homo sapiens
  misc_RNA (1)...(19): siRNA sense strand
ccagcuacccugaaauucu

SEQ ID NO: 5899 - RNA, 19 nt, Homo sapiens
  misc_RNA (1)...(19): siRNA sense strand
ggcauaaggagacaucauc

SEQ ID NO: 5900 - RNA, 19 nt, Homo sapiens
  misc_RNA (1)...(19): siRNA sense strand
ccaagugcugaacaaauug

SEQ ID NO: 5901 - RNA, 19 nt, Homo sapiens
  misc_RNA (1)...(19): siRNA sense strand
cagagcagagcuugggaaa

SEQ ID NO: 5902 - RNA, 19 nt, Homo sapiens
  misc_RNA (1)...(19): siRNA sense strand
ccaccauggauauaucuga

SEQ ID NO: 5903 - RNA, 19 nt, Homo sapiens
  misc_RNA (1)...(19): siRNA sense strand
uuccauagucucuuaggua

SEQ ID NO: 5904 - RNA, 19 nt, Homo sapiens
  misc_RNA (1)...(19): siRNA sense strand
ccacggaacaccagugcau

SEQ ID NO: 5905 - RNA, 19 nt, Homo sapiens
  misc_RNA (1)...(19): siRNA sense strand
ggaugaccucugccaguau

SEQ ID NO: 5906 - RNA, 19 nt, Homo sapiens
  misc_RNA (1)...(19): siRNA sense strand
gcagagcuugggaaagauc

SEQ ID NO: 5907 - RNA, 19 nt, Homo sapiens
  misc_RNA (1)...(19): siRNA sense strand
caucuuccaugaggagcuu

SEQ ID NO: 5908 - RNA, 19 nt, Homo sapiens
  misc_RNA (1)...(19): siRNA sense strand
uggacaaccuagggcuuaa

SEQ ID NO: 5909 - RNA, 19 nt, Homo sapiens
  misc_RNA (1)...(19): siRNA sense strand
gaccucugccaguauauca

SEQ ID NO: 5910 - RNA, 19 nt, Homo sapiens
  misc_RNA (1)...(19): siRNA sense strand
gagaauaugugcggcauua

SEQ ID NO: 5911 - RNA, 19 nt, Homo sapiens
  misc_RNA (1)...(19): siRNA sense strand
ggaagcagcuggucaugaa

SEQ ID NO: 5912 - RNA, 19 nt, Homo sapiens
  misc_RNA (1)...(19): siRNA sense strand
gcaaaguucugaaacaguu

SEQ ID NO: 5913 - RNA, 19 nt, Homo sapiens
  misc_RNA (1)...(19): siRNA sense strand
cagcgaagauaucaaauuu

SEQ ID NO: 5914 - RNA, 19 nt, Homo sapiens
  misc_RNA (1)...(19): siRNA sense strand
gaaguacgaugaugaagau

SEQ ID NO: 5915 - RNA, 19 nt, Homo sapiens
  misc_RNA (1)...(19): siRNA sense strand
ggaaggcagugacuuaaau

SEQ ID NO: 5916 - RNA, 19 nt, Homo sapiens
  misc_RNA (1)...(19): siRNA sense strand
caauauggcuccuggcauu

SEQ ID NO: 5917 - RNA, 19 nt, Homo sapiens
  misc_RNA (1)...(19): siRNA sense strand
gcagugacuuaaauuacua

SEQ ID NO: 5918 - RNA, 19 nt, Homo sapiens
  misc_RNA (1)...(19): siRNA sense strand
gagaaacucgccaagaaua

SEQ ID NO: 5919 - RNA, 19 nt, Homo sapiens
  misc_RNA (1)...(19): siRNA sense strand
ggaacagucucuucaagug

SEQ ID NO: 5920 - RNA, 19 nt, Homo sapiens
  misc_RNA (1)...(19): siRNA sense strand
gaacuuaaaucuggaaggu

SEQ ID NO: 5921 - RNA, 19 nt, Homo sapiens
  misc_RNA (1)...(19): siRNA sense strand
gcugugagguuaaaugaga

SEQ ID NO: 5922 - RNA, 19 nt, Homo sapiens
  misc_RNA (1)...(19): siRNA sense strand
caagaauuauugccaaguu

SEQ ID NO: 5923 - RNA, 19 nt, Homo sapiens
  misc_RNA (1)...(19): siRNA sense strand
gaccuuaguucauuugaug

SEQ ID NO: 5924 - RNA, 19 nt, Homo sapiens
  misc_RNA (1)...(19): siRNA sense strand
gcgaagauaucaaauuucu

SEQ ID NO: 5925 - RNA, 19 nt, Homo sapiens
  misc_RNA (1)...(19): siRNA sense strand
gauggaaggcagugacuua

SEQ ID NO: 5926 - RNA, 19 nt, Homo sapiens
  misc_RNA (1)...(19): siRNA sense strand
uaacuaugguggaugauau

SEQ ID NO: 5927 - RNA, 19 nt, Homo sapiens
  misc_RNA (1)...(19): siRNA sense strand
aagagaaacucgccaagaa

SEQ ID NO: 5928 - RNA, 19 nt, Homo sapiens
  misc_RNA (1)...(19): siRNA sense strand
gaugauuucugcugaagau

SEQ ID NO: 5929 - RNA, 19 nt, Homo sapiens
  misc_RNA (1)...(19): siRNA sense strand
gaauaugcccuggcuauga

SEQ ID NO: 5930 - RNA, 19 nt, Homo sapiens
  misc_RNA (1)...(19): siRNA sense strand
gaaggcagccagugugcua

SEQ ID NO: 5931 - RNA, 19 nt, Homo sapiens
  misc_RNA (1)...(19): siRNA sense strand
gcuuucagcuccaguauca

SEQ ID NO: 5932 - RNA, 19 nt, Homo sapiens
  misc_RNA (1)...(19): siRNA sense strand
ucacagaaacugcguggua

SEQ ID NO: 5933 - RNA, 19 nt, Homo sapiens
  misc_RNA (1)...(19): siRNA sense strand
gaacagucucuucaaguga

SEQ ID NO: 5934 - RNA, 19 nt, Homo sapiens
  misc_RNA (1)...(19): siRNA sense strand
agagaaugcugugagguua

SEQ ID NO: 5935 - RNA, 19 nt, Homo sapiens
  misc_RNA (1)...(19): siRNA sense strand
ucagagguuugaaaugaaa

SEQ ID NO: 5936 - RNA, 19 nt, Homo sapiens
  misc_RNA (1)...(19): siRNA sense strand
gaugauaugcugcaggaaa

SEQ ID NO: 5937 - RNA, 19 nt, Homo sapiens
  misc_RNA (1)...(19): siRNA sense strand
aagagaugcuucaaacuga

SEQ ID NO: 5938 - RNA, 19 nt, Homo sapiens
  misc_RNA (1)...(19): siRNA sense strand
guacgaugaugaagauauc

SEQ ID NO: 5939 - RNA, 19 nt, Homo sapiens
  misc_RNA (1)...(19): siRNA sense strand
gcagaaguacgaugaugaa

SEQ ID NO: 5940 - RNA, 19 nt, Homo sapiens
  misc_RNA (1)...(19): siRNA sense strand
gagaaaguaacaagaauca

SEQ ID NO: 5941 - RNA, 19 nt, Homo sapiens
  misc_RNA (1)...(19): siRNA sense strand
cauauggcagcaagaauua

SEQ ID NO: 5942 - RNA, 19 nt, Homo sapiens
  misc_RNA (1)...(19): siRNA sense strand
caggaucccuucacuguuc

SEQ ID NO: 5943 - RNA, 19 nt, Homo sapiens
  misc_RNA (1)...(19): siRNA sense strand
gagguuaaaugagaagaau

SEQ ID NO: 5944 - RNA, 19 nt, Homo sapiens
  misc_RNA (1)...(19): siRNA sense strand
gcugaagauugugaguuua

SEQ ID NO: 5945 - RNA, 19 nt, Homo sapiens
  misc_RNA (1)...(19): siRNA sense strand
caagugauaguucgcagua

SEQ ID NO: 5946 - RNA, 19 nt, Homo sapiens
  misc_RNA (1)...(19): siRNA sense strand
gauugugaguuuauucaga

SEQ ID NO: 5947 - RNA, 19 nt, Homo sapiens
  misc_RNA (1)...(19): siRNA sense strand
gaaggcagugacuuaaauu

SEQ ID NO: 5948 - RNA, 19 nt, Homo sapiens
  misc_RNA (1)...(19): siRNA sense strand
ucacgauguuggagaauau

SEQ ID NO: 5949 - RNA, 19 nt, Homo sapiens
  misc_RNA (1)...(19): siRNA sense strand
gagagaaugcugugagguu

SEQ ID NO: 5950 - RNA, 19 nt, Homo sapiens
  misc_RNA (1)...(19): siRNA sense strand
uaaugggaguauugaguaa

SEQ ID NO: 5951 - RNA, 19 nt, Homo sapiens
  misc_RNA (1)...(19): siRNA sense strand
ugccaaggcugcagaaguu

SEQ ID NO: 5952 - RNA, 19 nt, Homo sapiens
  misc_RNA (1)...(19): siRNA sense strand
caagagaugcuucaaacug

SEQ ID NO: 5953 - RNA, 19 nt, Homo sapiens
  misc_RNA (1)...(19): siRNA sense strand
aaacgaagcccugaagaga

SEQ ID NO: 5954 - RNA, 19 nt, Homo sapiens
  misc_RNA (1)...(19): siRNA sense strand
cagcagguccgcuauaaug

SEQ ID NO: 5955 - RNA, 19 nt, Homo sapiens
  misc_RNA (1)...(19): siRNA sense strand
ggaguccugugcacaaauc

SEQ ID NO: 5956 - RNA, 19 nt, Homo sapiens
  misc_RNA (1)...(19): siRNA sense strand
gaaaaucaucagcguguua

SEQ ID NO: 5957 - RNA, 19 nt, Homo sapiens
  misc_RNA (1)...(19): siRNA sense strand
ugacucauaucugcaaaga

SEQ ID NO: 5958 - RNA, 19 nt, Homo sapiens
  misc_RNA (1)...(19): siRNA sense strand
gaaacucgccaagaauaug

SEQ ID NO: 5959 - RNA, 19 nt, Homo sapiens
  misc_RNA (1)...(19): siRNA sense strand
gaaacgaagcccugaagag

SEQ ID NO: 5960 - RNA, 19 nt, Homo sapiens
  misc_RNA (1)...(19): siRNA sense strand
uaugcaagauguagcaaga

SEQ ID NO: 5961 - RNA, 19 nt, Homo sapiens
  misc_RNA (1)...(19): siRNA sense strand
caaagagaaaguaacaaga

SEQ ID NO: 5962 - RNA, 19 nt, Homo sapiens
  misc_RNA (1)...(19): siRNA sense strand
gaagauugugaguuuauuc

SEQ ID NO: 5963 - RNA, 19 nt, Homo sapiens
  misc_RNA (1)...(19): siRNA sense strand
gcacaacugggaauaccuu

SEQ ID NO: 5964 - RNA, 19 nt, Homo sapiens
  misc_RNA (1)...(19): siRNA sense strand
gaauaugugcggcauuauc

SEQ ID NO: 5965 - RNA, 19 nt, Homo sapiens
  misc_RNA (1)...(19): siRNA sense strand
ccaggaccuuaguucauuu

SEQ ID NO: 5966 - RNA, 19 nt, Homo sapiens
  misc_RNA (1)...(19): siRNA sense strand
uaacaaguguggcuuucag

SEQ ID NO: 5967 - RNA, 19 nt, Homo sapiens
  misc_RNA (1)...(19): siRNA sense strand
ugagaagaauuaugaacuc

SEQ ID NO: 5968 - RNA, 19 nt, Homo sapiens
  misc_RNA (1)...(19): siRNA sense strand
ggaccuuaguucauuugau

SEQ ID NO: 5969 - RNA, 19 nt, Homo sapiens
  misc_RNA (1)...(19): siRNA sense strand
agaaguucgugcaaacaaa

SEQ ID NO: 5970 - RNA, 19 nt, Homo sapiens
  misc_RNA (1)...(19): siRNA sense strand
acucauaucugcaaagaac

SEQ ID NO: 5971 - RNA, 19 nt, Homo sapiens
  misc_RNA (1)...(19): siRNA sense strand
gauuucugcugaagauugu

SEQ ID NO: 5972 - RNA, 19 nt, Homo sapiens
  misc_RNA (1)...(19): siRNA sense strand
gagaagaauuaugaacucu

SEQ ID NO: 5973 - RNA, 19 nt, Homo sapiens
  misc_RNA (1)...(19): siRNA sense strand
gagaaugcugugagguuaa

SEQ ID NO: 5974 - RNA, 19 nt, Homo sapiens
  misc_RNA (1)...(19): siRNA sense strand
cagcuccaguaucaaauga

SEQ ID NO: 5975 - RNA, 19 nt, Homo sapiens
  misc_RNA (1)...(19): siRNA sense strand
ucauauggcagcaagaauu

SEQ ID NO: 5976 - RNA, 19 nt, Homo sapiens
  misc_RNA (1)...(19): siRNA sense strand
caucagcguguuagcauuu

SEQ ID NO: 5977 - RNA, 19 nt, Homo sapiens
  misc_RNA (1)...(19): siRNA sense strand
ucaggagucugucaaagag

SEQ ID NO: 5978 - RNA, 19 nt, Homo sapiens
  misc_RNA (1)...(19): siRNA sense strand
aaucauucuugcagcauuu

SEQ ID NO: 5979 - RNA, 19 nt, Homo sapiens
  misc_RNA (1)...(19): siRNA sense strand
ugcugaagauugugaguuu

SEQ ID NO: 5980 - RNA, 19 nt, Homo sapiens
  misc_RNA (1)...(19): siRNA sense strand
agaaugcugugagguuaaa

SEQ ID NO: 5981 - RNA, 19 nt, Homo sapiens
  misc_RNA (1)...(19): siRNA sense strand
ucagcugaguucacagaaa

SEQ ID NO: 5982 - RNA, 19 nt, Homo sapiens
  misc_RNA (1)...(19): siRNA sense strand
acagaccguucaguauaua

SEQ ID NO: 5983 - RNA, 19 nt, Homo sapiens
  misc_RNA (1)...(19): siRNA sense strand
ggcagugacuuaaauuacu

SEQ ID NO: 5984 - RNA, 19 nt, Homo sapiens
  misc_RNA (1)...(19): siRNA sense strand
cagcagaaguacgaugaug

SEQ ID NO: 5985 - RNA, 19 nt, Homo sapiens
  misc_RNA (1)...(19): siRNA sense strand
guagcgguguugcuguuga

SEQ ID NO: 5986 - RNA, 19 nt, Homo sapiens
  misc_RNA (1)...(19): siRNA sense strand
cagcugaguucacagaaac

SEQ ID NO: 5987 - RNA, 19 nt, Homo sapiens
  misc_RNA (1)...(19): siRNA sense strand
aacagaccguucaguauau

SEQ ID NO: 5988 - RNA, 19 nt, Homo sapiens
  misc_RNA (1)...(19): siRNA sense strand
gugcacaaaucugagaaau

SEQ ID NO: 5989 - RNA, 19 nt, Homo sapiens
  misc_RNA (1)...(19): siRNA sense strand
ggaagcagaugggguaaau

SEQ ID NO: 5990 - RNA, 19 nt, Homo sapiens
  misc_RNA (1)...(19): siRNA sense strand
ggucaaugaguaccgcuuu

SEQ ID NO: 5991 - RNA, 19 nt, Homo sapiens
  misc_RNA (1)...(19): siRNA sense strand
ccuacuuucugccaauauu

SEQ ID NO: 5992 - RNA, 19 nt, Homo sapiens
  misc_RNA (1)...(19): siRNA sense strand
gcccuacuuucugccaaua

SEQ ID NO: 5993 - RNA, 19 nt, Homo sapiens
  misc_RNA (1)...(19): siRNA sense strand
uccaggaccuuaguucauu

SEQ ID NO: 5994 - RNA, 19 nt, Homo sapiens
  misc_RNA (1)...(19): siRNA sense strand
ucaaagagaaaguaacaag

SEQ ID NO: 5995 - RNA, 19 nt, Homo sapiens
  misc_RNA (1)...(19): siRNA sense strand
gaaguucgugcaaacaaag

SEQ ID NO: 5996 - RNA, 19 nt, Homo sapiens
  misc_RNA (1)...(19): siRNA sense strand
gccaggaucccuucacugu

SEQ ID NO: 5997 - RNA, 19 nt, Homo sapiens
  misc_RNA (1)...(19): siRNA sense strand
gugaguuuauucagagguu

SEQ ID NO: 5998 - RNA, 19 nt, Homo sapiens
  misc_RNA (1)...(19): siRNA sense strand
gaacuuggaacagcagaag

SEQ ID NO: 5999 - RNA, 19 nt, Homo sapiens
  misc_RNA (1)...(19): siRNA sense strand
aauaugcccuggcuaugau

SEQ ID NO: 6000 - RNA, 19 nt, Homo sapiens
  misc_RNA (1)...(19): siRNA sense strand
caggaacagucucuucaag

SEQ ID NO: 6001 - RNA, 19 nt, Homo sapiens
  misc_RNA (1)...(19): siRNA sense strand
ccagugugcuaaaacauuu

SEQ ID NO: 6002 - RNA, 19 nt, Homo sapiens
  misc_RNA (1)...(19): siRNA sense strand
ucccuucacuguucauaug

SEQ ID NO: 6003 - RNA, 19 nt, Homo sapiens
  misc_RNA (1)...(19): siRNA sense strand
ucagcgaagauaucaaauu

SEQ ID NO: 6004 - RNA, 19 nt, Homo sapiens
  misc_RNA (1)...(19): siRNA sense strand
gaguaacaaguguggcuuu

SEQ ID NO: 6005 - RNA, 19 nt, Homo sapiens
  misc_RNA (1)...(19): siRNA sense strand
auaaugggaguauugagua

SEQ ID NO: 6006 - RNA, 19 nt, Homo sapiens
  misc_RNA (1)...(19): siRNA sense strand
aaacaggaacagucucuuc

SEQ ID NO: 6007 - RNA, 19 nt, Homo sapiens
  misc_RNA (1)...(19): siRNA sense strand
uaauaucauuccaguucug

SEQ ID NO: 6008 - RNA, 19 nt, Homo sapiens
  misc_RNA (1)...(19): siRNA sense strand
uacuaacuaugguggauga

SEQ ID NO: 6009 - RNA, 19 nt, Homo sapiens
  misc_RNA (1)...(19): siRNA sense strand
agaaguacgaugaugaaga

SEQ ID NO: 6010 - RNA, 19 nt, Homo sapiens
  misc_RNA (1)...(19): siRNA sense strand
gcaaagagaguuagaauaa

SEQ ID NO: 6011 - RNA, 19 nt, Homo sapiens
  misc_RNA (1)...(19): siRNA sense strand
gaacaagugugcagcuuaa

SEQ ID NO: 6012 - RNA, 19 nt, Homo sapiens
  misc_RNA (1)...(19): siRNA sense strand
gaagaagacuuguugugaa

SEQ ID NO: 6013 - RNA, 19 nt, Homo sapiens
  misc_RNA (1)...(19): siRNA sense strand
gaagguauuugaagcagua

SEQ ID NO: 6014 - RNA, 19 nt, Homo sapiens
  misc_RNA (1)...(19): siRNA sense strand
ggaaugcuaugacuuuaaa

SEQ ID NO: 6015 - RNA, 19 nt, Homo sapiens
  misc_RNA (1)...(19): siRNA sense strand
gaagacuuguugugaauuu

SEQ ID NO: 6016 - RNA, 19 nt, Homo sapiens
  misc_RNA (1)...(19): siRNA sense strand
ggaaauuucugcucauaga

SEQ ID NO: 6017 - RNA, 19 nt, Homo sapiens
  misc_RNA (1)...(19): siRNA sense strand
gauggaacauguacgguua

SEQ ID NO: 6018 - RNA, 19 nt, Homo sapiens
  misc_RNA (1)...(19): siRNA sense strand
guacugaccuucugaacaa

SEQ ID NO: 6019 - RNA, 19 nt, Homo sapiens
  misc_RNA (1)...(19): siRNA sense strand
ggagacagguugcagauau

SEQ ID NO: 6020 - RNA, 19 nt, Homo sapiens
  misc_RNA (1)...(19): siRNA sense strand
gaacaaggccaacaccuau

SEQ ID NO: 6021 - RNA, 19 nt, Homo sapiens
  misc_RNA (1)...(19): siRNA sense strand
ccaugaaccuucccaaauu

SEQ ID NO: 6022 - RNA, 19 nt, Homo sapiens
  misc_RNA (1)...(19): siRNA sense strand
cuacauggcuggacuuguu

SEQ ID NO: 6023 - RNA, 19 nt, Homo sapiens
  misc_RNA (1)...(19): siRNA sense strand
guagaaugcuauaaugcua

SEQ ID NO: 6024 - RNA, 19 nt, Homo sapiens
  misc_RNA (1)...(19): siRNA sense strand
cagaagacauggaaauuuc

SEQ ID NO: 6025 - RNA, 19 nt, Homo sapiens
  misc_RNA (1)...(19): siRNA sense strand
caacagagcagcguauauu

SEQ ID NO: 6026 - RNA, 19 nt, Homo sapiens
  misc_RNA (1)...(19): siRNA sense strand
acaaaugaguggaccuaua

SEQ ID NO: 6027 - RNA, 19 nt, Homo sapiens
  misc_RNA (1)...(19): siRNA sense strand
cagaagaaaugcaggaguu

SEQ ID NO: 6028 - RNA, 19 nt, Homo sapiens
  misc_RNA (1)...(19): siRNA sense strand
cagcguauauuaaugaaga

SEQ ID NO: 6029 - RNA, 19 nt, Homo sapiens
  misc_RNA (1)...(19): siRNA sense strand
uguaggagguuaugaugua

SEQ ID NO: 6030 - RNA, 19 nt, Homo sapiens
  misc_RNA (1)...(19): siRNA sense strand
uuugggagcugcuguguua

SEQ ID NO: 6031 - RNA, 19 nt, Homo sapiens
  misc_RNA (1)...(19): siRNA sense strand
gcagaagacauggaaauuu

SEQ ID NO: 6032 - RNA, 19 nt, Homo sapiens
  misc_RNA (1)...(19): siRNA sense strand
gcaaagauuaccucauuga

SEQ ID NO: 6033 - RNA, 19 nt, Homo sapiens
  misc_RNA (1)...(19): siRNA sense strand
gaacauguacgguuaccuu

SEQ ID NO: 6034 - RNA, 19 nt, Homo sapiens
  misc_RNA (1)...(19): siRNA sense strand
gcaggaguuugugcaguua

SEQ ID NO: 6035 - RNA, 19 nt, Homo sapiens
  misc_RNA (1)...(19): siRNA sense strand
gcuaugacuuuaaagaaga

SEQ ID NO: 6036 - RNA, 19 nt, Homo sapiens
  misc_RNA (1)...(19): siRNA sense strand
gcacaaagcagggucauca

SEQ ID NO: 6037 - RNA, 19 nt, Homo sapiens
  misc_RNA (1)...(19): siRNA sense strand
ggaccuauauagcagaaau

SEQ ID NO: 6038 - RNA, 19 nt, Homo sapiens
  misc_RNA (1)...(19): siRNA sense strand
uugcaaagauuaccucauu

SEQ ID NO: 6039 - RNA, 19 nt, Homo sapiens
  misc_RNA (1)...(19): siRNA sense strand
caaaugaguggaccuauau

SEQ ID NO: 6040 - RNA, 19 nt, Homo sapiens
  misc_RNA (1)...(19): siRNA sense strand
gagcagcguauauuaauga

SEQ ID NO: 6041 - RNA, 19 nt, Homo sapiens
  misc_RNA (1)...(19): siRNA sense strand
gauaugaacaugugcagaa

SEQ ID NO: 6042 - RNA, 19 nt, Homo sapiens
  misc_RNA (1)...(19): siRNA sense strand
uauaugaucccaccacuaa

SEQ ID NO: 6043 - RNA, 19 nt, Homo sapiens
  misc_RNA (1)...(19): siRNA sense strand
ucaaagucaugaacgaauu

SEQ ID NO: 6044 - RNA, 19 nt, Homo sapiens
  misc_RNA (1)...(19): siRNA sense strand
uaacuuggcgucaguagaa

SEQ ID NO: 6045 - RNA, 19 nt, Homo sapiens
  misc_RNA (1)...(19): siRNA sense strand
gaacaugugcagaagaaau

SEQ ID NO: 6046 - RNA, 19 nt, Homo sapiens
  misc_RNA (1)...(19): siRNA sense strand
gcuauaaugcuacaacaaa

SEQ ID NO: 6047 - RNA, 19 nt, Homo sapiens
  misc_RNA (1)...(19): siRNA sense strand
gugacaaacuuaccauuuc

SEQ ID NO: 6048 - RNA, 19 nt, Homo sapiens
  misc_RNA (1)...(19): siRNA sense strand
gugaauccuuggcauauga

SEQ ID NO: 6049 - RNA, 19 nt, Homo sapiens
  misc_RNA (1)...(19): siRNA sense strand
gagcugcuguguuaaaugg

SEQ ID NO: 6050 - RNA, 19 nt, Homo sapiens
  misc_RNA (1)...(19): siRNA sense strand
ucagaagccucucgauuca

SEQ ID NO: 6051 - RNA, 19 nt, Homo sapiens
  misc_RNA (1)...(19): siRNA sense strand
gaagagaagguauuugaag

SEQ ID NO: 6052 - RNA, 19 nt, Homo sapiens
  misc_RNA (1)...(19): siRNA sense strand
cagaagagaagguauuuga

SEQ ID NO: 6053 - RNA, 19 nt, Homo sapiens
  misc_RNA (1)...(19): siRNA sense strand
caaagucaugaacgaauua

SEQ ID NO: 6054 - RNA, 19 nt, Homo sapiens
  misc_RNA (1)...(19): siRNA sense strand
uggcgucaguagaauauua

SEQ ID NO: 6055 - RNA, 19 nt, Homo sapiens
  misc_RNA (1)...(19): siRNA sense strand
cagcuggucucuuacaguu

SEQ ID NO: 6056 - RNA, 19 nt, Homo sapiens
  misc_RNA (1)...(19): siRNA sense strand
caacaccuaugcagagcaa

SEQ ID NO: 6057 - RNA, 19 nt, Homo sapiens
  misc_RNA (1)...(19): siRNA sense strand
gaccagcguugcuaacaug

SEQ ID NO: 6058 - RNA, 19 nt, Homo sapiens
  misc_RNA (1)...(19): siRNA sense strand
gcagugcuugcaaagauua

SEQ ID NO: 6059 - RNA, 19 nt, Homo sapiens
  misc_RNA (1)...(19): siRNA sense strand
agaagccucucgauucaaa

SEQ ID NO: 6060 - RNA, 19 nt, Homo sapiens
  misc_RNA (1)...(19): siRNA sense strand
gagcaaagagaguuagaau

SEQ ID NO: 6061 - RNA, 19 nt, Homo sapiens
  misc_RNA (1)...(19): siRNA sense strand
ugucaucuguggaagcaua

SEQ ID NO: 6062 - RNA, 19 nt, Homo sapiens
  misc_RNA (1)...(19): siRNA sense strand
caugaaccuucccaaauug

SEQ ID NO: 6063 - RNA, 19 nt, Homo sapiens
  misc_RNA (1)...(19): siRNA sense strand
aaauucagguuacagaaga

SEQ ID NO: 6064 - RNA, 19 nt, Homo sapiens
  misc_RNA (1)...(19): siRNA sense strand
guggaagcauacaacauaa

SEQ ID NO: 6065 - RNA, 19 nt, Homo sapiens
  misc_RNA (1)...(19): siRNA sense strand
gcagcuuaaucucaaguga

SEQ ID NO: 6066 - RNA, 19 nt, Homo sapiens
  misc_RNA (1)...(19): siRNA sense strand
gaugaugguuccuguaacu

SEQ ID NO: 6067 - RNA, 19 nt, Homo sapiens
  misc_RNA (1)...(19): siRNA sense strand
ucagaggguugaagaggaa

SEQ ID NO: 6068 - RNA, 19 nt, Homo sapiens
  misc_RNA (1)...(19): siRNA sense strand
gggaugaugguuccuguaa

SEQ ID NO: 6069 - RNA, 19 nt, Homo sapiens
  misc_RNA (1)...(19): siRNA sense strand
gagacagguugcagauaug

SEQ ID NO: 6070 - RNA, 19 nt, Homo sapiens
  misc_RNA (1)...(19): siRNA sense strand
acaguagaaugcuauaaug

SEQ ID NO: 6071 - RNA, 19 nt, Homo sapiens
  misc_RNA (1)...(19): siRNA sense strand
gcauacaacauaaagucua

SEQ ID NO: 6072 - RNA, 19 nt, Homo sapiens
  misc_RNA (1)...(19): siRNA sense strand
ugaagaagacuuguuguga

SEQ ID NO: 6073 - RNA, 19 nt, Homo sapiens
  misc_RNA (1)...(19): siRNA sense strand
gaagaaaugcaggaguuug

SEQ ID NO: 6074 - RNA, 19 nt, Homo sapiens
  misc_RNA (1)...(19): siRNA sense strand
guggaaugcuaugacuuua

SEQ ID NO: 6075 - RNA, 19 nt, Homo sapiens
  misc_RNA (1)...(19): siRNA sense strand
gaugugaggcaagaguuua

SEQ ID NO: 6076 - RNA, 19 nt, Homo sapiens
  misc_RNA (1)...(19): siRNA sense strand
gaaauucagguuacagaag

SEQ ID NO: 6077 - RNA, 19 nt, Homo sapiens
  misc_RNA (1)...(19): siRNA sense strand
uguggaagcauacaacaua

SEQ ID NO: 6078 - RNA, 19 nt, Homo sapiens
  misc_RNA (1)...(19): siRNA sense strand
gaggaagcauuggucaaga

SEQ ID NO: 6079 - RNA, 19 nt, Homo sapiens
  misc_RNA (1)...(19): siRNA sense strand
aagaagacuuguugugaau

SEQ ID NO: 6080 - RNA, 19 nt, Homo sapiens
  misc_RNA (1)...(19): siRNA sense strand
caacaaaugaguggaccua

SEQ ID NO: 6081 - RNA, 19 nt, Homo sapiens
  misc_RNA (1)...(19): siRNA sense strand
caacauaaagucuaaugag

SEQ ID NO: 6082 - RNA, 19 nt, Homo sapiens
  misc_RNA (1)...(19): siRNA sense strand
ggaccagcguugcuaacau

SEQ ID NO: 6083 - RNA, 19 nt, Homo sapiens
  misc_RNA (1)...(19): siRNA sense strand
gcaccaaguagcagaguug

SEQ ID NO: 6084 - RNA, 19 nt, Homo sapiens
  misc_RNA (1)...(19): siRNA sense strand
aagcauuggucaagaauag

SEQ ID NO: 6085 - RNA, 19 nt, Homo sapiens
  misc_RNA (1)...(19): siRNA sense strand
cgaacaagugugcagcuua

SEQ ID NO: 6086 - RNA, 19 nt, Homo sapiens
  misc_RNA (1)...(19): siRNA sense strand
caaagcagggucaucagaa

SEQ ID NO: 6087 - RNA, 19 nt, Homo sapiens
  misc_RNA (1)...(19): siRNA sense strand
uguuuacacugcagaaauu

SEQ ID NO: 6088 - RNA, 19 nt, Homo sapiens
  misc_RNA (1)...(19): siRNA sense strand
gagcagguguugguguguu

SEQ ID NO: 6089 - RNA, 19 nt, Homo sapiens
  misc_RNA (1)...(19): siRNA sense strand
caucagaagccucucgauu

SEQ ID NO: 6090 - RNA, 19 nt, Homo sapiens
  misc_RNA (1)...(19): siRNA sense strand
cagcguugcuaacaugaga

SEQ ID NO: 6091 - RNA, 19 nt, Homo sapiens
  misc_RNA (1)...(19): siRNA sense strand
gaagcauuggucaagaaua

SEQ ID NO: 6092 - RNA, 19 nt, Homo sapiens
  misc_RNA (1)...(19): siRNA sense strand
ugacaaacuuaccauuucu

SEQ ID NO: 6093 - RNA, 19 nt, Homo sapiens
  misc_RNA (1)...(19): siRNA sense strand
ggaagcauacaacauaaag

SEQ ID NO: 6094 - RNA, 19 nt, Homo sapiens
  misc_RNA (1)...(19): siRNA sense strand
gggcaggcauggucuacau

SEQ ID NO: 6095 - RNA, 19 nt, Homo sapiens
  misc_RNA (1)...(19): siRNA sense strand
caaaggcuauccggagugu

SEQ ID NO: 6096 - RNA, 19 nt, Homo sapiens
  misc_RNA (1)...(19): siRNA sense strand
agaagaaaauguacaggua

SEQ ID NO: 6097 - RNA, 19 nt, Homo sapiens
  misc_RNA (1)...(19): siRNA sense strand
acagagcagcguauauuaa

SEQ ID NO: 6098 - RNA, 19 nt, Homo sapiens
  misc_RNA (1)...(19): siRNA sense strand
ggugaaccaugacaaggau

SEQ ID NO: 6099 - RNA, 19 nt, Homo sapiens
  misc_RNA (1)...(19): siRNA sense strand
ugaacaaggccaacaccua

SEQ ID NO: 6100 - RNA, 19 nt, Homo sapiens
  misc_RNA (1)...(19): siRNA sense strand
ccugucaacugcuuaggaa

SEQ ID NO: 6101 - RNA, 19 nt, Homo sapiens
  misc_RNA (1)...(19): siRNA sense strand
acaguugugucaucgugua

SEQ ID NO: 6102 - RNA, 19 nt, Homo sapiens
  misc_RNA (1)...(19): siRNA sense strand
auuaagaguucgcacugua

SEQ ID NO: 6103 - RNA, 19 nt, Homo sapiens
  misc_RNA (1)...(19): siRNA sense strand
gaaccuucccaaauugaug

SEQ ID NO: 6104 - RNA, 19 nt, Homo sapiens
  misc_RNA (1)...(19): siRNA sense strand
caaagauuaccucauugaa

SEQ ID NO: 6105 - RNA, 19 nt, Homo sapiens
  misc_RNA (1)...(19): siRNA sense strand
ucacgucagugucuuagca

SEQ ID NO: 6106 - RNA, 19 nt, Homo sapiens
  misc_RNA (1)...(19): siRNA sense strand
aauggucuguuauauguug

SEQ ID NO: 6107 - RNA, 19 nt, Homo sapiens
  misc_RNA (1)...(19): siRNA sense strand
gcacaguagaaugcuauaa

SEQ ID NO: 6108 - RNA, 19 nt, Homo sapiens
  misc_RNA (1)...(19): siRNA sense strand
acaaggaugugaggcaaga

SEQ ID NO: 6109 - RNA, 19 nt, Homo sapiens
  misc_RNA (1)...(19): siRNA sense strand
cagagcagcguauauuaau

SEQ ID NO: 6110 - RNA, 19 nt, Homo sapiens
  misc_RNA (1)...(19): siRNA sense strand
ucagauggcuggcggcuau

SEQ ID NO: 6111 - RNA, 19 nt, Homo sapiens
  misc_RNA (1)...(19): siRNA sense strand
gaguucccgucgaaaguua

SEQ ID NO: 6112 - RNA, 19 nt, Homo sapiens
  misc_RNA (1)...(19): siRNA sense strand
gcaaugcggccaccaguca

SEQ ID NO: 6113 - RNA, 19 nt, Homo sapiens
  misc_RNA (1)...(19): siRNA sense strand
ccacugguguuaaugaucu

SEQ ID NO: 6114 - RNA, 19 nt, Homo sapiens
  misc_RNA (1)...(19): siRNA sense strand
ugacaaucguccucuucaa

SEQ ID NO: 6115 - RNA, 19 nt, Homo sapiens
  misc_RNA (1)...(19): siRNA sense strand
gaucgccuauggagugagu

SEQ ID NO: 6116 - RNA, 19 nt, Homo sapiens
  misc_RNA (1)...(19): siRNA sense strand
gcggcugccucguucuuug

SEQ ID NO: 6117 - RNA, 19 nt, Homo sapiens
  misc_RNA (1)...(19): siRNA sense strand
ugagugccuucuucagcua

SEQ ID NO: 6118 - RNA, 19 nt, Homo sapiens
  misc_RNA (1)...(19): siRNA sense strand
cuacaucaccgccuucauc

SEQ ID NO: 6119 - RNA, 19 nt, Homo sapiens
  misc_RNA (1)...(19): siRNA sense strand
ggagugagugccuucuuca

SEQ ID NO: 6120 - RNA, 19 nt, Homo sapiens
  misc_RNA (1)...(19): siRNA sense strand
gauguucgucgcugucuuc

SEQ ID NO: 6121 - RNA, 19 nt, Homo sapiens
  misc_RNA (1)...(19): siRNA sense strand
gccuauggcugggugaugu

SEQ ID NO: 6122 - RNA, 19 nt, Homo sapiens
  misc_RNA (1)...(19): siRNA sense strand
ccucguucuuugcguguuu

SEQ ID NO: 6123 - RNA, 19 nt, Homo sapiens
  misc_RNA (1)...(19): siRNA sense strand
uggagugagugccuucuuc

SEQ ID NO: 6124 - RNA, 19 nt, Homo sapiens
  misc_RNA (1)...(19): siRNA sense strand
ggccacugguguuaaugau

SEQ ID NO: 6125 - RNA, 19 nt, Homo sapiens
  misc_RNA (1)...(19): siRNA sense strand
gcgccaccguucucuacau

SEQ ID NO: 6126 - RNA, 19 nt, Homo sapiens
  misc_RNA (1)...(19): siRNA sense strand
gacaaucguccucuucaac

SEQ ID NO: 6127 - RNA, 19 nt, Homo sapiens
  misc_RNA (1)...(19): siRNA sense strand
ccuggccacugguguuaau

SEQ ID NO: 6128 - RNA, 19 nt, Homo sapiens
  misc_RNA (1)...(19): siRNA sense strand
cuucaaccucuaccuguuu

SEQ ID NO: 6129 - RNA, 19 nt, Homo sapiens
  misc_RNA (1)...(19): siRNA sense strand
ccaccuguauccggccuau

SEQ ID NO: 6130 - RNA, 19 nt, Homo sapiens
  misc_RNA (1)...(19): siRNA sense strand
ggugacaaucguccucuuc

SEQ ID NO: 6131 - RNA, 19 nt, Homo sapiens
  misc_RNA (1)...(19): siRNA sense strand
cgaguucccgucgaaaguu

SEQ ID NO: 6132 - RNA, 19 nt, Homo sapiens
  misc_RNA (1)...(19): siRNA sense strand
ucuucaaccucuaccuguu

SEQ ID NO: 6133 - RNA, 19 nt, Homo sapiens
  misc_RNA (1)...(19): siRNA sense strand
ggaaagauaugaucccaaa

SEQ ID NO: 6134 - RNA, 19 nt, Homo sapiens
  misc_RNA (1)...(19): siRNA sense strand
ggacaggcauaccuuaaua

SEQ ID NO: 6135 - RNA, 19 nt, Homo sapiens
  misc_RNA (1)...(19): siRNA sense strand
uaaaguggcucacaauuau

SEQ ID NO: 6136 - RNA, 19 nt, Homo sapiens
  misc_RNA (1)...(19): siRNA sense strand
gagauggacugaagacuuu

SEQ ID NO: 6137 - RNA, 19 nt, Homo sapiens
  misc_RNA (1)...(19): siRNA sense strand
guaaagaguuugaugugaa

SEQ ID NO: 6138 - RNA, 19 nt, Homo sapiens
  misc_RNA (1)...(19): siRNA sense strand
gaacagagacggaaagauc

SEQ ID NO: 6139 - RNA, 19 nt, Homo sapiens
  misc_RNA (1)...(19): siRNA sense strand
ggacugaagacuuugaaua

SEQ ID NO: 6140 - RNA, 19 nt, Homo sapiens
  misc_RNA (1)...(19): siRNA sense strand
guacagauuugcauaaagu

SEQ ID NO: 6141 - RNA, 19 nt, Homo sapiens
  misc_RNA (1)...(19): siRNA sense strand
gcaaagcucuuggcuagug

SEQ ID NO: 6142 - RNA, 19 nt, Homo sapiens
  misc_RNA (1)...(19): siRNA sense strand
ugaaugcacuucuuacuug

SEQ ID NO: 6143 - RNA, 19 nt, Homo sapiens
  misc_RNA (1)...(19): siRNA sense strand
ggaaagaucuaaguaaacu

SEQ ID NO: 6144 - RNA, 19 nt, Homo sapiens
  misc_RNA (1)...(19): siRNA sense strand
ggaauggacugcuguaugc

SEQ ID NO: 6145 - RNA, 19 nt, Homo sapiens
  misc_RNA (1)...(19): siRNA sense strand
caacaagcauugaaaagua

SEQ ID NO: 6146 - RNA, 19 nt, Homo sapiens
  misc_RNA (1)...(19): siRNA sense strand
gaaguaccauuuauuacca

SEQ ID NO: 6147 - RNA, 19 nt, Homo sapiens
  misc_RNA (1)...(19): siRNA sense strand
gauggaaguucuugucuca

SEQ ID NO: 6148 - RNA, 19 nt, Homo sapiens
  misc_RNA (1)...(19): siRNA sense strand
ggagcuaucugaacacagu

SEQ ID NO: 6149 - RNA, 19 nt, Homo sapiens
  misc_RNA (1)...(19): siRNA sense strand
uaugaucuccguacaaaua

SEQ ID NO: 6150 - RNA, 19 nt, Homo sapiens
  misc_RNA (1)...(19): siRNA sense strand
ggacuccaguagcaaauau

SEQ ID NO: 6151 - RNA, 19 nt, Homo sapiens
  misc_RNA (1)...(19): siRNA sense strand
ggcaagacaagaagaaaua

SEQ ID NO: 6152 - RNA, 19 nt, Homo sapiens
  misc_RNA (1)...(19): siRNA sense strand
caucaagcaucaucuccua

SEQ ID NO: 6153 - RNA, 19 nt, Homo sapiens
  misc_RNA (1)...(19): siRNA sense strand
caauaguagucagacauua

SEQ ID NO: 6154 - RNA, 19 nt, Homo sapiens
  misc_RNA (1)...(19): siRNA sense strand
cauaaacaguugugugaug

SEQ ID NO: 6155 - RNA, 19 nt, Homo sapiens
  misc_RNA (1)...(19): siRNA sense strand
guagaagcaugcuguaagu

SEQ ID NO: 6156 - RNA, 19 nt, Homo sapiens
  misc_RNA (1)...(19): siRNA sense strand
gacauaaacaguuguguga

SEQ ID NO: 6157 - RNA, 19 nt, Homo sapiens
  misc_RNA (1)...(19): siRNA sense strand
gcccaagguuguacagauu

SEQ ID NO: 6158 - RNA, 19 nt, Homo sapiens
  misc_RNA (1)...(19): siRNA sense strand
auaaaguggcucacaauua

SEQ ID NO: 6159 - RNA, 19 nt, Homo sapiens
  misc_RNA (1)...(19): siRNA sense strand
aaacaguugugugauguaa

SEQ ID NO: 6160 - RNA, 19 nt, Homo sapiens
  misc_RNA (1)...(19): siRNA sense strand
cagacuguguggaaagaua

SEQ ID NO: 6161 - RNA, 19 nt, Homo sapiens
  misc_RNA (1)...(19): siRNA sense strand
gcauauacuucucuugucu

SEQ ID NO: 6162 - RNA, 19 nt, Homo sapiens
  misc_RNA (1)...(19): siRNA sense strand
acaguugugugauguaauu

SEQ ID NO: 6163 - RNA, 19 nt, Homo sapiens
  misc_RNA (1)...(19): siRNA sense strand
ggagugugaugccaccuau

SEQ ID NO: 6164 - RNA, 19 nt, Homo sapiens
  misc_RNA (1)...(19): siRNA sense strand
acggaaagaucuaaguaaa

SEQ ID NO: 6165 - RNA, 19 nt, Homo sapiens
  misc_RNA (1)...(19): siRNA sense strand
caagcaucaucuccuaauu

SEQ ID NO: 6166 - RNA, 19 nt, Homo sapiens
  misc_RNA (1)...(19): siRNA sense strand
ggaaguucuugucucaaau

SEQ ID NO: 6167 - RNA, 19 nt, Homo sapiens
  misc_RNA (1)...(19): siRNA sense strand
gaagguguagaaccaaauu

SEQ ID NO: 6168 - RNA, 19 nt, Homo sapiens
  misc_RNA (1)...(19): siRNA sense strand
gaagcaugcuguaaguuuu

SEQ ID NO: 6169 - RNA, 19 nt, Homo sapiens
  misc_RNA (1)...(19): siRNA sense strand
uggaaguucuugucucaaa

SEQ ID NO: 6170 - RNA, 19 nt, Homo sapiens
  misc_RNA (1)...(19): siRNA sense strand
uaauauugagugccuguua

SEQ ID NO: 6171 - RNA, 19 nt, Homo sapiens
  misc_RNA (1)...(19): siRNA sense strand
ggacugcuguaugcuauag

SEQ ID NO: 6172 - RNA, 19 nt, Homo sapiens
  misc_RNA (1)...(19): siRNA sense strand
gauauagaaugucggaaac

SEQ ID NO: 6173 - RNA, 19 nt, Homo sapiens
  misc_RNA (1)...(19): siRNA sense strand
cuaaugaggagacaauauu

SEQ ID NO: 6174 - RNA, 19 nt, Homo sapiens
  misc_RNA (1)...(19): siRNA sense strand
gcaagacaagaagaaauaa

SEQ ID NO: 6175 - RNA, 19 nt, Homo sapiens
  misc_RNA (1)...(19): siRNA sense strand
guucuugucucaaaucagu

SEQ ID NO: 6176 - RNA, 19 nt, Homo sapiens
  misc_RNA (1)...(19): siRNA sense strand
caugauggcuggagcuauc

SEQ ID NO: 6177 - RNA, 19 nt, Homo sapiens
  misc_RNA (1)...(19): siRNA sense strand
ugaauacuguagagugcua

SEQ ID NO: 6178 - RNA, 19 nt, Homo sapiens
  misc_RNA (1)...(19): siRNA sense strand
agagagacgacccauguua

SEQ ID NO: 6179 - RNA, 19 nt, Homo sapiens
  misc_RNA (1)...(19): siRNA sense strand
gaggagacaauauugaaug

SEQ ID NO: 6180 - RNA, 19 nt, Homo sapiens
  misc_RNA (1)...(19): siRNA sense strand
gaaaccaggaauuuguauu

SEQ ID NO: 6181 - RNA, 19 nt, Homo sapiens
  misc_RNA (1)...(19): siRNA sense strand
ccuagacgaucacuugguu

SEQ ID NO: 6182 - RNA, 19 nt, Homo sapiens
  misc_RNA (1)...(19): siRNA sense strand
aaggagagguggcguagga

SEQ ID NO: 6183 - RNA, 19 nt, Homo sapiens
  misc_RNA (1)...(19): siRNA sense strand
ccagagagacgacccaugu

SEQ ID NO: 6184 - RNA, 19 nt, Homo sapiens
  misc_RNA (1)...(19): siRNA sense strand
ucauggaaguaaucagaaa

SEQ ID NO: 6185 - RNA, 19 nt, Homo sapiens
  misc_RNA (1)...(19): siRNA sense strand
cguaaagaguuugauguga

SEQ ID NO: 6186 - RNA, 19 nt, Homo sapiens
  misc_RNA (1)...(19): siRNA sense strand
ugaagacuuugaauacugu

SEQ ID NO: 6187 - RNA, 19 nt, Homo sapiens
  misc_RNA (1)...(19): siRNA sense strand
aaucagaaaccaggaauuu

SEQ ID NO: 6188 - RNA, 19 nt, Homo sapiens
  misc_RNA (1)...(19): siRNA sense strand
gagcauuucauggaaguaa

SEQ ID NO: 6189 - RNA, 19 nt, Homo sapiens
  misc_RNA (1)...(19): siRNA sense strand
caaauucguugugguccuu

SEQ ID NO: 6190 - RNA, 19 nt, Homo sapiens
  misc_RNA (1)...(19): siRNA sense strand
ggaggugguuuggucauca

SEQ ID NO: 6191 - RNA, 19 nt, Homo sapiens
  misc_RNA (1)...(19): siRNA sense strand
uacaguagguguggcagua

SEQ ID NO: 6192 - RNA, 19 nt, Homo sapiens
  misc_RNA (1)...(19): siRNA sense strand
aguaugaucuccguacaaa

SEQ ID NO: 6193 - RNA, 19 nt, Homo sapiens
  misc_RNA (1)...(19): siRNA sense strand
gggcauauacuucucuugu

SEQ ID NO: 6194 - RNA, 19 nt, Homo sapiens
  misc_RNA (1)...(19): siRNA sense strand
ggagcaacaagcauugaaa

SEQ ID NO: 6195 - RNA, 19 nt, Homo sapiens
  misc_RNA (1)...(19): siRNA sense strand
uggcagacauggaaaauaa

SEQ ID NO: 6196 - RNA, 19 nt, Homo sapiens
  misc_RNA (1)...(19): siRNA sense strand
uauauuaggcuaccucuuc

SEQ ID NO: 6197 - RNA, 19 nt, Homo sapiens
  misc_RNA (1)...(19): siRNA sense strand
gacggaaagaucuaaguaa

SEQ ID NO: 6198 - RNA, 19 nt, Homo sapiens
  misc_RNA (1)...(19): siRNA sense strand
gcucacaauuauacuaugg

SEQ ID NO: 6199 - RNA, 19 nt, Homo sapiens
  misc_RNA (1)...(19): siRNA sense strand
gauuggugcucuccucugu

SEQ ID NO: 6200 - RNA, 19 nt, Homo sapiens
  misc_RNA (1)...(19): siRNA sense strand
ccucugaagucccugcauu

SEQ ID NO: 6201 - RNA, 19 nt, Homo sapiens
  misc_RNA (1)...(19): siRNA sense strand
ggauagaccagaaguggau

SEQ ID NO: 6202 - RNA, 19 nt, Homo sapiens
  misc_RNA (1)...(19): siRNA sense strand
gauggacaggcauaccuua

SEQ ID NO: 6203 - RNA, 19 nt, Homo sapiens
  misc_RNA (1)...(19): siRNA sense strand
ucucaaaucaguagaaugu

SEQ ID NO: 6204 - RNA, 19 nt, Homo sapiens
  misc_RNA (1)...(19): siRNA sense strand
ucagaaaccaggaauuugu

SEQ ID NO: 6205 - RNA, 19 nt, Homo sapiens
  misc_RNA (1)...(19): siRNA sense strand
gcugccauguuuacuaaug

SEQ ID NO: 6206 - RNA, 19 nt, Homo sapiens
  misc_RNA (1)...(19): siRNA sense strand
ugaagucccugcauuugag

SEQ ID NO: 6207 - RNA, 19 nt, Homo sapiens
  misc_RNA (1)...(19): siRNA sense strand
gaugucugguucucguaaa

SEQ ID NO: 6208 - RNA, 19 nt, Homo sapiens
  misc_RNA (1)...(19): siRNA sense strand
guaugugguuggaggaaga

SEQ ID NO: 6209 - RNA, 19 nt, Homo sapiens
  misc_RNA (1)...(19): siRNA sense strand
cagaaaccaggaauuugua

SEQ ID NO: 6210 - RNA, 19 nt, Homo sapiens
  misc_RNA (1)...(19): siRNA sense strand
gcauaaaguggcucacaau

SEQ ID NO: 6211 - RNA, 19 nt, Homo sapiens
  misc_RNA (1)...(19): siRNA sense strand
ccaagguuguacagauuug

SEQ ID NO: 6212 - RNA, 19 nt, Homo sapiens
  misc_RNA (1)...(19): siRNA sense strand
agaagcaugcuguaaguuu

SEQ ID NO: 6213 - RNA, 19 nt, Homo sapiens
  misc_RNA (1)...(19): siRNA sense strand
gaugauggcacuagugaag

SEQ ID NO: 6214 - RNA, 19 nt, Homo sapiens
  misc_RNA (1)...(19): siRNA sense strand
caucaucuccuaauucuac

SEQ ID NO: 6215 - RNA, 19 nt, Homo sapiens
  misc_RNA (1)...(19): siRNA sense strand
ugaacacaguggaaagaug

SEQ ID NO: 6216 - RNA, 19 nt, Homo sapiens
  misc_RNA (1)...(19): siRNA sense strand
aggaagagauggacugaag

SEQ ID NO: 6217 - RNA, 19 nt, Homo sapiens
  misc_RNA (1)...(19): siRNA sense strand
gucggaaacucauuaugga

SEQ ID NO: 6218 - RNA, 19 nt, Homo sapiens
  misc_RNA (1)...(19): siRNA sense strand
ugcaggacuuccaauagua

SEQ ID NO: 6219 - RNA, 19 nt, Homo sapiens
  misc_RNA (1)...(19): siRNA sense strand
ugauggcacuagugaagaa

SEQ ID NO: 6220 - RNA, 19 nt, Homo sapiens
  misc_RNA (1)...(19): siRNA sense strand
gagcaaacggugggagaaa

SEQ ID NO: 6221 - RNA, 19 nt, Homo sapiens
  misc_RNA (1)...(19): siRNA sense strand
ccaauaguagucagacauu

SEQ ID NO: 6222 - RNA, 19 nt, Homo sapiens
  misc_RNA (1)...(19): siRNA sense strand
ggacugcaguagcauccau

SEQ ID NO: 6223 - RNA, 19 nt, Homo sapiens
  misc_RNA (1)...(19): siRNA sense strand
uuacuuggguccgucauga

SEQ ID NO: 6224 - RNA, 19 nt, Homo sapiens
  misc_RNA (1)...(19): siRNA sense strand
caaagcucuuggcuaguga

SEQ ID NO: 6225 - RNA, 19 nt, Homo sapiens
  misc_RNA (1)...(19): siRNA sense strand
gaauuccagcucacagauu

SEQ ID NO: 6226 - RNA, 19 nt, Homo sapiens
  misc_RNA (1)...(19): siRNA sense strand
caacuggauuuucagaauu

SEQ ID NO: 6227 - RNA, 19 nt, Homo sapiens
  misc_RNA (1)...(19): siRNA sense strand
gauaugaucccaaaacaga

SEQ ID NO: 6228 - RNA, 19 nt, Homo sapiens
  misc_RNA (1)...(19): siRNA sense strand
gaaguucuugucucaaauc

SEQ ID NO: 6229 - RNA, 19 nt, Homo sapiens
  misc_RNA (1)...(19): siRNA sense strand
ugauauagaaugucggaaa

SEQ ID NO: 6230 - RNA, 19 nt, Homo sapiens
  misc_RNA (1)...(19): siRNA sense strand
uugcugccauguuuacuaa

SEQ ID NO: 6231 - RNA, 19 nt, Homo sapiens
  misc_RNA (1)...(19): siRNA sense strand
acuggaaggucccauguau

SEQ ID NO: 6232 - RNA, 19 nt, Homo sapiens
  misc_RNA (1)...(19): siRNA sense strand
ggagugacgaccuggaaug

SEQ ID NO: 6233 - RNA, 19 nt, Homo sapiens
  misc_RNA (1)...(19): siRNA sense strand
gaaccuaguuauucaagua

SEQ ID NO: 6234 - RNA, 19 nt, Homo sapiens
  misc_RNA (1)...(19): siRNA sense strand
caacagagaucuacacaga

SEQ ID NO: 6235 - RNA, 19 nt, Homo sapiens
  misc_RNA (1)...(19): siRNA sense strand
ggugaaggcugucauuaaa

SEQ ID NO: 6236 - RNA, 19 nt, Homo sapiens
  misc_RNA (1)...(19): siRNA sense strand
aaaaggagcuugauaugua

SEQ ID NO: 6237 - RNA, 19 nt, Homo sapiens
  misc_RNA (1)...(19): siRNA sense strand
gaucauauuugcauucuac

SEQ ID NO: 6238 - RNA, 19 nt, Homo sapiens
  misc_RNA (1)...(19): siRNA sense strand
gggaauggcuuugacagaa

SEQ ID NO: 6239 - RNA, 19 nt, Homo sapiens
  misc_RNA (1)...(19): siRNA sense strand
ugacagaagugcugaaaca

SEQ ID NO: 6240 - RNA, 19 nt, Homo sapiens
  misc_RNA (1)...(19): siRNA sense strand
gcagaugcaucgcuaguca

SEQ ID NO: 6241 - RNA, 19 nt, Homo sapiens
  misc_RNA (1)...(19): siRNA sense strand
gacuagauguggcucauuu

SEQ ID NO: 6242 - RNA, 19 nt, Homo sapiens
  misc_RNA (1)...(19): siRNA sense strand
gacagaaccuaguuauuca

SEQ ID NO: 6243 - RNA, 19 nt, Homo sapiens
  misc_RNA (1)...(19): siRNA sense strand
cagaagugcugaaacauca

SEQ ID NO: 6244 - RNA, 19 nt, Homo sapiens
  misc_RNA (1)...(19): siRNA sense strand
gaacagcaaaggaaauuca

SEQ ID NO: 6245 - RNA, 19 nt, Homo sapiens
  misc_RNA (1)...(19): siRNA sense strand
ugaaggcugucauuaaaga

SEQ ID NO: 6246 - RNA, 19 nt, Homo sapiens
  misc_RNA (1)...(19): siRNA sense strand
caacagcauuucaaacaca

SEQ ID NO: 6247 - RNA, 19 nt, Homo sapiens
  misc_RNA (1)...(19): siRNA sense strand
caguaaaccagaagaaaua

SEQ ID NO: 6248 - RNA, 19 nt, Homo sapiens
  misc_RNA (1)...(19): siRNA sense strand
ggaccaaaucguaguaauu

SEQ ID NO: 6249 - RNA, 19 nt, Homo sapiens
  misc_RNA (1)...(19): siRNA sense strand
guacacaucgccaguaaug

SEQ ID NO: 6250 - RNA, 19 nt, Homo sapiens
  misc_RNA (1)...(19): siRNA sense strand
ugacagaaccuaguuauuc

SEQ ID NO: 6251 - RNA, 19 nt, Homo sapiens
  misc_RNA (1)...(19): siRNA sense strand
caucauccuuagcauuuaa

SEQ ID NO: 6252 - RNA, 19 nt, Homo sapiens
  misc_RNA (1)...(19): siRNA sense strand
ggauacaacggaucauauu

SEQ ID NO: 6253 - RNA, 19 nt, Homo sapiens
  misc_RNA (1)...(19): siRNA sense strand
cagaagaaauagaugaauc

SEQ ID NO: 6254 - RNA, 19 nt, Homo sapiens
  misc_RNA (1)...(19): siRNA sense strand
gcugaaacaucauccuuag

SEQ ID NO: 6255 - RNA, 19 nt, Homo sapiens
  misc_RNA (1)...(19): siRNA sense strand
gacaacagcauuucaaaca

SEQ ID NO: 6256 - RNA, 19 nt, Homo sapiens
  misc_RNA (1)...(19): siRNA sense strand
gauacaacggaucauauuu

SEQ ID NO: 6257 - RNA, 19 nt, Homo sapiens
  misc_RNA (1)...(19): siRNA sense strand
gacgagcaacugaagaaua

SEQ ID NO: 6258 - RNA, 19 nt, Homo sapiens
  misc_RNA (1)...(19): siRNA sense strand
caacgaagcagcuaauguc

SEQ ID NO: 6259 - RNA, 19 nt, Homo sapiens
  misc_RNA (1)...(19): siRNA sense strand
ggaauggcuuugacagaag

SEQ ID NO: 6260 - RNA, 19 nt, Homo sapiens
  misc_RNA (1)...(19): siRNA sense strand
gacaaacaguucagcaagu

SEQ ID NO: 6261 - RNA, 19 nt, Homo sapiens
  misc_RNA (1)...(19): siRNA sense strand
ggccaugguuugacaccua

SEQ ID NO: 6262 - RNA, 19 nt, Homo sapiens
  misc_RNA (1)...(19): siRNA sense strand
gcacuuccuucaccucauc

SEQ ID NO: 6263 - RNA, 19 nt, Homo sapiens
  misc_RNA (1)...(19): siRNA sense strand
gaaguacacaucgccagua

SEQ ID NO: 6264 - RNA, 19 nt, Homo sapiens
  misc_RNA (1)...(19): siRNA sense strand
gcaacuggacacuguacua

SEQ ID NO: 6265 - RNA, 19 nt, Homo sapiens
  misc_RNA (1)...(19): siRNA sense strand
caacuggacacuguacuaa

SEQ ID NO: 6266 - RNA, 19 nt, Homo sapiens
  misc_RNA (1)...(19): siRNA sense strand
cguuacauaucaagacuuu

SEQ ID NO: 6267 - RNA, 19 nt, Homo sapiens
  misc_RNA (1)...(19): siRNA sense strand
gcacaauuacugucucaau

SEQ ID NO: 6268 - RNA, 19 nt, Homo sapiens
  misc_RNA (1)...(19): siRNA sense strand
gcucccaucucaggaauau

SEQ ID NO: 6269 - RNA, 19 nt, Homo sapiens
  misc_RNA (1)...(19): siRNA sense strand
cacaauuacugucucaaug

SEQ ID NO: 6270 - RNA, 19 nt, Homo sapiens
  misc_RNA (1)...(19): siRNA sense strand
acaaacaguucagcaaguu

SEQ ID NO: 6271 - RNA, 19 nt, Homo sapiens
  misc_RNA (1)...(19): siRNA sense strand
acaggcagcuccucucuca

SEQ ID NO: 6272 - RNA, 19 nt, Homo sapiens
  misc_RNA (1)...(19): siRNA sense strand
cagccuagcauaucucaaa

SEQ ID NO: 6273 - RNA, 19 nt, Homo sapiens
  misc_RNA (1)...(19): siRNA sense strand
gcuccucucucacccaaug

SEQ ID NO: 6274 - RNA, 19 nt, Homo sapiens
  misc_RNA (1)...(19): siRNA sense strand
acagagaucuacacagagu

SEQ ID NO: 6275 - RNA, 19 nt, Homo sapiens
  misc_RNA (1)...(19): siRNA sense strand
gugaauccuuugggaagua

SEQ ID NO: 6276 - RNA, 19 nt, Homo sapiens
  misc_RNA (1)...(19): siRNA sense strand
caacggaucauauuugcau

SEQ ID NO: 6277 - RNA, 19 nt, Homo sapiens
  misc_RNA (1)...(19): siRNA sense strand
aaaggagcuugauauguau

SEQ ID NO: 6278 - RNA, 19 nt, Homo sapiens
  misc_RNA (1)...(19): siRNA sense strand
gaaacaucauccuuagcau

SEQ ID NO: 6279 - RNA, 19 nt, Homo sapiens
  misc_RNA (1)...(19): siRNA sense strand
gaauggcuuugacagaagu

SEQ ID NO: 6280 - RNA, 19 nt, Homo sapiens
  misc_RNA (1)...(19): siRNA sense strand
ugauauguauguugaaugg

SEQ ID NO: 6281 - RNA, 19 nt, Homo sapiens
  misc_RNA (1)...(19): siRNA sense strand
agauguggcucauuugugu

SEQ ID NO: 6282 - RNA, 19 nt, Homo sapiens
  misc_RNA (1)...(19): siRNA sense strand
ggagguacuucaugaaacg

SEQ ID NO: 6283 - RNA, 19 nt, Homo sapiens
  misc_RNA (1)...(19): siRNA sense strand
caaguucucucaaaaggaa

SEQ ID NO: 6284 - RNA, 19 nt, Homo sapiens
  misc_RNA (1)...(19): siRNA sense strand
cuucggagguacuucauga

SEQ ID NO: 6285 - RNA, 19 nt, Homo sapiens
  misc_RNA (1)...(19): siRNA sense strand
ccuaguuauucaaguagua

SEQ ID NO: 6286 - RNA, 19 nt, Homo sapiens
  misc_RNA (1)...(19): siRNA sense strand
gcuacaaugggacuucuaa

SEQ ID NO: 6287 - RNA, 19 nt, Homo sapiens
  misc_RNA (1)...(19): siRNA sense strand
ccaguaaaccagaagaaau

SEQ ID NO: 6288 - RNA, 19 nt, Homo sapiens
  misc_RNA (1)...(19): siRNA sense strand
gcacagcgaggcaccagau

SEQ ID NO: 6289 - RNA, 19 nt, Homo sapiens
  misc_RNA (1)...(19): siRNA sense strand
aaacaucauccuuagcauu

SEQ ID NO: 6290 - RNA, 19 nt, Homo sapiens
  misc_RNA (1)...(19): siRNA sense strand
acaauuacugucucaauga

SEQ ID NO: 6291 - RNA, 19 nt, Homo sapiens
  misc_RNA (1)...(19): siRNA sense strand
uaauuugugccaccaguaa

SEQ ID NO: 6292 - RNA, 19 nt, Homo sapiens
  misc_RNA (1)...(19): siRNA sense strand
aaguacacaucgccaguaa

SEQ ID NO: 6293 - RNA, 19 nt, Homo sapiens
  misc_RNA (1)...(19): siRNA sense strand
cagcuaauguccucugaac

SEQ ID NO: 6294 - RNA, 19 nt, Homo sapiens
  misc_RNA (1)...(19): siRNA sense strand
caagauucagccuagcaua

SEQ ID NO: 6295 - RNA, 19 nt, Homo sapiens
  misc_RNA (1)...(19): siRNA sense strand
ugaugcaacuggacacugu

SEQ ID NO: 6296 - RNA, 19 nt, Homo sapiens
  misc_RNA (1)...(19): siRNA sense strand
ggaacauaguccagucagu

SEQ ID NO: 6297 - RNA, 19 nt, Homo sapiens
  misc_RNA (1)...(19): siRNA sense strand
gcaaagcuggagucaguuc

SEQ ID NO: 6298 - RNA, 19 nt, Homo sapiens
  misc_RNA (1)...(19): siRNA sense strand
ugaaacaucauccuuagca

SEQ ID NO: 6299 - RNA, 19 nt, Homo sapiens
  misc_RNA (1)...(19): siRNA sense strand
gcaccucaucgaccuggua

SEQ ID NO: 6300 - RNA, 19 nt, Homo sapiens
  misc_RNA (1)...(19): siRNA sense strand
aacaucauccuuagcauuu

SEQ ID NO: 6301 - RNA, 19 nt, Homo sapiens
  misc_RNA (1)...(19): siRNA sense strand
gagcuugauauguauguug

SEQ ID NO: 6302 - RNA, 19 nt, Homo sapiens
  misc_RNA (1)...(19): siRNA sense strand
guugaggcccguuacauau

SEQ ID NO: 6303 - RNA, 19 nt, Homo sapiens
  misc_RNA (1)...(19): siRNA sense strand
acagaccuuucagccauua

SEQ ID NO: 6304 - RNA, 19 nt, Homo sapiens
  misc_RNA (1)...(19): siRNA sense strand
cagcacaauuacugucuca

SEQ ID NO: 6305 - RNA, 19 nt, Homo sapiens
  misc_RNA (1)...(19): siRNA sense strand
cgccagcccucggugauuu

SEQ ID NO: 6306 - RNA, 19 nt, Homo sapiens
  misc_RNA (1)...(19): siRNA sense strand
gcuaauguccucugaacag

SEQ ID NO: 6307 - RNA, 19 nt, Homo sapiens
  misc_RNA (1)...(19): siRNA sense strand
ugaggcccguuacauauca

SEQ ID NO: 6308 - RNA, 19 nt, Homo sapiens
  misc_RNA (1)...(19): siRNA sense strand
uguuaucacugccagcaaa

SEQ ID NO: 6309 - RNA, 19 nt, Homo sapiens
  misc_RNA (1)...(19): siRNA sense strand
auacaacggaucauauuug

SEQ ID NO: 6310 - RNA, 19 nt, Homo sapiens
  misc_RNA (1)...(19): siRNA sense strand
aagauccagugaauccuuu

SEQ ID NO: 6311 - RNA, 19 nt, Homo sapiens
  misc_RNA (1)...(19): siRNA sense strand
augcagggcucccaucuca

SEQ ID NO: 6312 - RNA, 19 nt, Homo sapiens
  misc_RNA (1)...(19): siRNA sense strand
uaguacaacugcucucaca

SEQ ID NO: 6313 - RNA, 19 nt, Homo sapiens
  misc_RNA (1)...(19): siRNA sense strand
gcgaggcaccagauaauag

SEQ ID NO: 6314 - RNA, 19 nt, Homo sapiens
  misc_RNA (1)...(19): siRNA sense strand
ucaaguaguaccuguggaa

SEQ ID NO: 6315 - RNA, 19 nt, Homo sapiens
  misc_RNA (1)...(19): siRNA sense strand
guaauuugugccaccagua

SEQ ID NO: 6316 - RNA, 19 nt, Homo sapiens
  misc_RNA (1)...(19): siRNA sense strand
gguaaccaaugagauuauc

SEQ ID NO: 6317 - RNA, 19 nt, Homo sapiens
  misc_RNA (1)...(19): siRNA sense strand
acgagcaacugaagaauac

SEQ ID NO: 6318 - RNA, 19 nt, Homo sapiens
  misc_RNA (1)...(19): siRNA sense strand
agaugucucugcgaguaua

SEQ ID NO: 6319 - RNA, 19 nt, Homo sapiens
  misc_RNA (1)...(19): siRNA sense strand
ccagggccaugguuugaca

SEQ ID NO: 6320 - RNA, 19 nt, Homo sapiens
  misc_RNA (1)...(19): siRNA sense strand
caggauacaacggaucaua

SEQ ID NO: 6321 - RNA, 19 nt, Homo sapiens
  misc_RNA (1)...(19): siRNA sense strand
ggaucauauuugcauucua

SEQ ID NO: 6322 - RNA, 19 nt, Homo sapiens
  misc_RNA (1)...(19): siRNA sense strand
caacugaagaauacugaca

SEQ ID NO: 6323 - RNA, 19 nt, Homo sapiens
  misc_RNA (1)...(19): siRNA sense strand
caucgccaguaaugaguga

SEQ ID NO: 6324 - RNA, 19 nt, Homo sapiens
  misc_RNA (1)...(19): siRNA sense strand
caagauccagugaauccuu

SEQ ID NO: 6325 - RNA, 19 nt, Homo sapiens
  misc_RNA (1)...(19): siRNA sense strand
acaucauccuuagcauuua

SEQ ID NO: 6326 - RNA, 19 nt, Homo sapiens
  misc_RNA (1)...(19): siRNA sense strand
caccucauccgucuccuuu

SEQ ID NO: 6327 - RNA, 19 nt, Homo sapiens
  misc_RNA (1)...(19): siRNA sense strand
ccucugaacagcaaaggaa

SEQ ID NO: 6328 - RNA, 19 nt, Homo sapiens
  misc_RNA (1)...(19): siRNA sense strand
gccaugguuugacaccuau

SEQ ID NO: 6329 - RNA, 19 nt, Homo sapiens
  misc_RNA (1)...(19): siRNA sense strand
ggagcuugauauguauguu

SEQ ID NO: 6330 - RNA, 19 nt, Homo sapiens
  misc_RNA (1)...(19): siRNA sense strand
gauucagccuagcauaucu

SEQ ID NO: 6331 - RNA, 19 nt, Homo sapiens
  misc_RNA (1)...(19): siRNA sense strand
ucucuccucucaagugaau

SEQ ID NO: 6332 - RNA, 19 nt, Homo sapiens
  misc_RNA (1)...(19): siRNA sense strand
gcacaggcagcuccucucu

SEQ ID NO: 6333 - RNA, 19 nt, Homo sapiens
  misc_RNA (1)...(19): siRNA sense strand
ggaaagccaacacuacuga

SEQ ID NO: 6334 - RNA, 19 nt, Homo sapiens
  misc_RNA (1)...(19): siRNA sense strand
gaccguaugucuccaguca

SEQ ID NO: 6335 - RNA, 19 nt, Homo sapiens
  misc_RNA (1)...(19): siRNA sense strand
uggagacccuugagaaaga

SEQ ID NO: 6336 - RNA, 19 nt, Homo sapiens
  misc_RNA (1)...(19): siRNA sense strand
ggaaaaggauauaauggau

SEQ ID NO: 6337 - RNA, 19 nt, Homo sapiens
  misc_RNA (1)...(19): siRNA sense strand
gcauucaggauaucaauca

SEQ ID NO: 6338 - RNA, 19 nt, Homo sapiens
  misc_RNA (1)...(19): siRNA sense strand
gguuaacuaugcuguuuua

SEQ ID NO: 6339 - RNA, 19 nt, Homo sapiens
  misc_RNA (1)...(19): siRNA sense strand
uccagucacuauugccuua

SEQ ID NO: 6340 - RNA, 19 nt, Homo sapiens
  misc_RNA (1)...(19): siRNA sense strand
agccaacacuacugacuuu

SEQ ID NO: 6341 - RNA, 19 nt, Homo sapiens
  misc_RNA (1)...(19): siRNA sense strand
gaaggaaaaggauauaaug

SEQ ID NO: 6342 - RNA, 19 nt, Homo sapiens
  misc_RNA (1)...(19): siRNA sense strand
uggguuaacuaugcuguuu

SEQ ID NO: 6343 - RNA, 19 nt, Homo sapiens
  misc_RNA (1)...(19): siRNA sense strand
ucauagcagucccgaggaa

SEQ ID NO: 6344 - RNA, 19 nt, Homo sapiens
  misc_RNA (1)...(19): siRNA sense strand
gaggaaggaccguaugucu

SEQ ID NO: 6345 - RNA, 19 nt, Homo sapiens
  misc_RNA (1)...(19): siRNA sense strand
gggccugaauggacucaau

SEQ ID NO: 6346 - RNA, 19 nt, Homo sapiens
  misc_RNA (1)...(19): siRNA sense strand
gacuuuggguuaacuaugc

SEQ ID NO: 6347 - RNA, 19 nt, Homo sapiens
  misc_RNA (1)...(19): siRNA sense strand
ggauauaauggauuuguac

SEQ ID NO: 6348 - RNA, 19 nt, Homo sapiens
  misc_RNA (1)...(19): siRNA sense strand
uaauggauuuguacaacca

SEQ ID NO: 6349 - RNA, 19 nt, Homo sapiens
  misc_RNA (1)...(19): siRNA sense strand
cucaaucucugccugaugu

SEQ ID NO: 6350 - RNA, 19 nt, Homo sapiens
  misc_RNA (1)...(19): siRNA sense strand
gagcauucaggauaucaau

SEQ ID NO: 6351 - RNA, 19 nt, Homo sapiens
  misc_RNA (1)...(19): siRNA sense strand
ggaccagacgcucauagca

SEQ ID NO: 6352 - RNA, 19 nt, Homo sapiens
  misc_RNA (1)...(19): siRNA sense strand
ccugaugugugcuaaaguc

SEQ ID NO: 6353 - RNA, 19 nt, Homo sapiens
  misc_RNA (1)...(19): siRNA sense strand
guaugucuccagucacuau

SEQ ID NO: 6354 - RNA, 19 nt, Homo sapiens
  misc_RNA (1)...(19): siRNA sense strand
ucucauccuuacccaagaa

SEQ ID NO: 6355 - RNA, 19 nt, Homo sapiens
  misc_RNA (1)...(19): siRNA sense strand
ccacacugcagcugaagga

SEQ ID NO: 6356 - RNA, 19 nt, Homo sapiens
  misc_RNA (1)...(19): siRNA sense strand
ccugugaaguccuuucucu

SEQ ID NO: 6357 - RNA, 19 nt, Homo sapiens
  misc_RNA (1)...(19): siRNA sense strand
caucggguguggguucuuc

SEQ ID NO: 6358 - RNA, 19 nt, Homo sapiens
  misc_RNA (1)...(19): siRNA sense strand
gcuguccucucauccuuac

SEQ ID NO: 6359 - RNA, 19 nt, Homo sapiens
  misc_RNA (1)...(19): siRNA sense strand
gcaggaacuccaccuucga

SEQ ID NO: 6360 - RNA, 19 nt, Homo sapiens
  misc_RNA (1)...(19): siRNA sense strand
acacugcagcugaaggaaa

SEQ ID NO: 6361 - RNA, 19 nt, Homo sapiens
  misc_RNA (1)...(19): siRNA sense strand
acuacugacuuuggguuaa

SEQ ID NO: 6362 - RNA, 19 nt, Homo sapiens
  misc_RNA (1)...(19): siRNA sense strand
gggaaagccaacacuacug

SEQ ID NO: 6363 - RNA, 19 nt, Homo sapiens
  misc_RNA (1)...(19): siRNA sense strand
ccaucuaccugggccugaa

SEQ ID NO: 6364 - RNA, 19 nt, Homo sapiens
  misc_RNA (1)...(19): siRNA sense strand
uguggagacccuugagaaa

SEQ ID NO: 6365 - RNA, 19 nt, Homo sapiens
  misc_RNA (1)...(19): siRNA sense strand
acuauugccuuaaucucau

SEQ ID NO: 6366 - RNA, 19 nt, Homo sapiens
  misc_RNA (1)...(19): siRNA sense strand
cacuauugccuuaaucuca

SEQ ID NO: 6367 - RNA, 19 nt, Homo sapiens
  misc_RNA (1)...(19): siRNA sense strand
ggagcauucaggauaucaa

SEQ ID NO: 6368 - RNA, 19 nt, Homo sapiens
  misc_RNA (1)...(19): siRNA sense strand
gcuaagaucucaagucaaa

SEQ ID NO: 6369 - RNA, 19 nt, Homo sapiens
  misc_RNA (1)...(19): siRNA sense strand
gcauauaaguguccgauuu

SEQ ID NO: 6370 - RNA, 19 nt, Homo sapiens
  misc_RNA (1)...(19): siRNA sense strand
ggacaaccaucuaagaaga

SEQ ID NO: 6371 - RNA, 19 nt, Homo sapiens
  misc_RNA (1)...(19): siRNA sense strand
guacaugauuccaacauaa

SEQ ID NO: 6372 - RNA, 19 nt, Homo sapiens
  misc_RNA (1)...(19): siRNA sense strand
ggacaaaucccauugguau

SEQ ID NO: 6373 - RNA, 19 nt, Homo sapiens
  misc_RNA (1)...(19): siRNA sense strand
gaagauaccagaucaugaa

SEQ ID NO: 6374 - RNA, 19 nt, Homo sapiens
  misc_RNA (1)...(19): siRNA sense strand
gagaaugggagacauauaa

SEQ ID NO: 6375 - RNA, 19 nt, Homo sapiens
  misc_RNA (1)...(19): siRNA sense strand
cgaagaaacuaacaaggaa

SEQ ID NO: 6376 - RNA, 19 nt, Homo sapiens
  misc_RNA (1)...(19): siRNA sense strand
ggacuuaauucagaacaaa

SEQ ID NO: 6377 - RNA, 19 nt, Homo sapiens
  misc_RNA (1)...(19): siRNA sense strand
ggacuaagacugaauaugg

SEQ ID NO: 6378 - RNA, 19 nt, Homo sapiens
  misc_RNA (1)...(19): siRNA sense strand
gcggagagguucacaacaa

SEQ ID NO: 6379 - RNA, 19 nt, Homo sapiens
  misc_RNA (1)...(19): siRNA sense strand
caagacaugugggcauaua

SEQ ID NO: 6380 - RNA, 19 nt, Homo sapiens
  misc_RNA (1)...(19): siRNA sense strand
ggagacaucuuuaugaacu

SEQ ID NO: 6381 - RNA, 19 nt, Homo sapiens
  misc_RNA (1)...(19): siRNA sense strand
gcaacaagacucccaagaa

SEQ ID NO: 6382 - RNA, 19 nt, Homo sapiens
  misc_RNA (1)...(19): siRNA sense strand
cagcuaagaucucaaguca

SEQ ID NO: 6383 - RNA, 19 nt, Homo sapiens
  misc_RNA (1)...(19): siRNA sense strand
caacaagacucccaagaac

SEQ ID NO: 6384 - RNA, 19 nt, Homo sapiens
  misc_RNA (1)...(19): siRNA sense strand
caacggaccuggauauagg

SEQ ID NO: 6385 - RNA, 19 nt, Homo sapiens
  misc_RNA (1)...(19): siRNA sense strand
gauaccagaucaugaagga

SEQ ID NO: 6386 - RNA, 19 nt, Homo sapiens
  misc_RNA (1)...(19): siRNA sense strand
gaacucaacaggacaaauc

SEQ ID NO: 6387 - RNA, 19 nt, Homo sapiens
  misc_RNA (1)...(19): siRNA sense strand
ggaaucaacagcagcauug

SEQ ID NO: 6388 - RNA, 19 nt, Homo sapiens
  misc_RNA (1)...(19): siRNA sense strand
gaucucaagucaaaugcaa

SEQ ID NO: 6389 - RNA, 19 nt, Homo sapiens
  misc_RNA (1)...(19): siRNA sense strand
gaagaguguugccccauua

SEQ ID NO: 6390 - RNA, 19 nt, Homo sapiens
  misc_RNA (1)...(19): siRNA sense strand
ggaaccaugucuucuuuag

SEQ ID NO: 6391 - RNA, 19 nt, Homo sapiens
  misc_RNA (1)...(19): siRNA sense strand
gcauugcucuuaagguuca

SEQ ID NO: 6392 - RNA, 19 nt, Homo sapiens
  misc_RNA (1)...(19): siRNA sense strand
gcacaguagcaaacucaua

SEQ ID NO: 6393 - RNA, 19 nt, Homo sapiens
  misc_RNA (1)...(19): siRNA sense strand
gugauuaaguuagauggua

SEQ ID NO: 6394 - RNA, 19 nt, Homo sapiens
  misc_RNA (1)...(19): siRNA sense strand
gagcggaaggacauacuua

SEQ ID NO: 6395 - RNA, 19 nt, Homo sapiens
  misc_RNA (1)...(19): siRNA sense strand
ggacguguauuugguggaa

SEQ ID NO: 6396 - RNA, 19 nt, Homo sapiens
  misc_RNA (1)...(19): siRNA sense strand
gaggucaucugaacacauc

SEQ ID NO: 6397 - RNA, 19 nt, Homo sapiens
  misc_RNA (1)...(19): siRNA sense strand
gcuaaaugcuauggugauu

SEQ ID NO: 6398 - RNA, 19 nt, Homo sapiens
  misc_RNA (1)...(19): siRNA sense strand
gcaaguggauggaaaugcu

SEQ ID NO: 6399 - RNA, 19 nt, Homo sapiens
  misc_RNA (1)...(19): siRNA sense strand
cagaagcgccucaugaaga

SEQ ID NO: 6400 - RNA, 19 nt, Homo sapiens
  misc_RNA (1)...(19): siRNA sense strand
uagcagaaguacaugauuc

SEQ ID NO: 6401 - RNA, 19 nt, Homo sapiens
  misc_RNA (1)...(19): siRNA sense strand
ggaagauaccagaucauga

SEQ ID NO: 6402 - RNA, 19 nt, Homo sapiens
  misc_RNA (1)...(19): siRNA sense strand
gacuaagacugaauaugga

SEQ ID NO: 6403 - RNA, 19 nt, Homo sapiens
  misc_RNA (1)...(19): siRNA sense strand
ccggaaccaugucuucuuu

SEQ ID NO: 6404 - RNA, 19 nt, Homo sapiens
  misc_RNA (1)...(19): siRNA sense strand
acaguuacauggacuuaga

SEQ ID NO: 6405 - RNA, 19 nt, Homo sapiens
  misc_RNA (1)...(19): siRNA sense strand
ggacaguuacauggacuua

SEQ ID NO: 6406 - RNA, 19 nt, Homo sapiens
  misc_RNA (1)...(19): siRNA sense strand
aaaauaugcucccaaguuu

SEQ ID NO: 6407 - RNA, 19 nt, Homo sapiens
  misc_RNA (1)...(19): siRNA sense strand
ggagaaugggagacauaua

SEQ ID NO: 6408 - RNA, 19 nt, Homo sapiens
  misc_RNA (1)...(19): siRNA sense strand
cggaaccaauucuucgaua

SEQ ID NO: 6409 - RNA, 19 nt, Homo sapiens
  misc_RNA (1)...(19): siRNA sense strand
ccacaucaccgccuuguuc

SEQ ID NO: 6410 - RNA, 19 nt, Homo sapiens
  misc_RNA (1)...(19): siRNA sense strand
ggcaagaggucaucugaac

SEQ ID NO: 6411 - RNA, 19 nt, Homo sapiens
  misc_RNA (1)...(19): siRNA sense strand
gagguucacaacaaagaua

SEQ ID NO: 6412 - RNA, 19 nt, Homo sapiens
  misc_RNA (1)...(19): siRNA sense strand
aauggaauguucacccuaa

SEQ ID NO: 6413 - RNA, 19 nt, Homo sapiens
  misc_RNA (1)...(19): siRNA sense strand
ucaagcauccagugcguua

SEQ ID NO: 6414 - RNA, 19 nt, Homo sapiens
  misc_RNA (1)...(19): siRNA sense strand
gacaaaagguucccacaga

SEQ ID NO: 6415 - RNA, 19 nt, Homo sapiens
  misc_RNA (1)...(19): siRNA sense strand
caacaggacaaaucccauu

SEQ ID NO: 6416 - RNA, 19 nt, Homo sapiens
  misc_RNA (1)...(19): siRNA sense strand
ggacaaggaaggucuaugc

SEQ ID NO: 6417 - RNA, 19 nt, Homo sapiens
  misc_RNA (1)...(19): siRNA sense strand
gaauauggaugaaaaguac

SEQ ID NO: 6418 - RNA, 19 nt, Homo sapiens
  misc_RNA (1)...(19): siRNA sense strand
cagcagaagcgccucauga

SEQ ID NO: 6419 - RNA, 19 nt, Homo sapiens
  misc_RNA (1)...(19): siRNA sense strand
caaaucccauugguaugaa

SEQ ID NO: 6420 - RNA, 19 nt, Homo sapiens
  misc_RNA (1)...(19): siRNA sense strand
agggaucucuguggacuua

SEQ ID NO: 6421 - RNA, 19 nt, Homo sapiens
  misc_RNA (1)...(19): siRNA sense strand
ggaaccaauucuucgauac

SEQ ID NO: 6422 - RNA, 19 nt, Homo sapiens
  misc_RNA (1)...(19): siRNA sense strand
caagucaaaugcaagacau

SEQ ID NO: 6423 - RNA, 19 nt, Homo sapiens
  misc_RNA (1)...(19): siRNA sense strand
uaagaucucaagucaaaug

SEQ ID NO: 6424 - RNA, 19 nt, Homo sapiens
  misc_RNA (1)...(19): siRNA sense strand
caaaauaugcucccaaguu

SEQ ID NO: 6425 - RNA, 19 nt, Homo sapiens
  misc_RNA (1)...(19): siRNA sense strand
gguagagaaugcagauagu

SEQ ID NO: 6426 - RNA, 19 nt, Homo sapiens
  misc_RNA (1)...(19): siRNA sense strand
cggagagguucacaacaaa

SEQ ID NO: 6427 - RNA, 19 nt, Homo sapiens
  misc_RNA (1)...(19): siRNA sense strand
gaacauucaggaaaucaag

SEQ ID NO: 6428 - RNA, 19 nt, Homo sapiens
  misc_RNA (1)...(19): siRNA sense strand
ggccugaggagaugucuuu

SEQ ID NO: 6429 - RNA, 19 nt, Homo sapiens
  misc_RNA (1)...(19): siRNA sense strand
ggacgacucuccggaacca

SEQ ID NO: 6430 - RNA, 19 nt, Homo sapiens
  misc_RNA (1)...(19): siRNA sense strand
cacuaccaauggacaguua

SEQ ID NO: 6431 - RNA, 19 nt, Homo sapiens
  misc_RNA (1)...(19): siRNA sense strand
uagagaaugcagauaguuu

SEQ ID NO: 6432 - RNA, 19 nt, Homo sapiens
  misc_RNA (1)...(19): siRNA sense strand
gagagguucacaacaaaga

SEQ ID NO: 6433 - RNA, 19 nt, Homo sapiens
  misc_RNA (1)...(19): siRNA sense strand
gcagagggaacuauucuac

SEQ ID NO: 6434 - RNA, 19 nt, Homo sapiens
  misc_RNA (1)...(19): siRNA sense strand
agagggaacuauucuacau

SEQ ID NO: 6435 - RNA, 19 nt, Homo sapiens
  misc_RNA (1)...(19): siRNA sense strand
ggaucucuguggacuuaau

SEQ ID NO: 6436 - RNA, 19 nt, Homo sapiens
  misc_RNA (1)...(19): siRNA sense strand
cauauaaguguccgauuug

SEQ ID NO: 6437 - RNA, 19 nt, Homo sapiens
  misc_RNA (1)...(19): siRNA sense strand
agggagacaucuuuaugaa

SEQ ID NO: 6438 - RNA, 19 nt, Homo sapiens
  misc_RNA (1)...(19): siRNA sense strand
ggagacauauaagcacagu

SEQ ID NO: 6439 - RNA, 19 nt, Homo sapiens
  misc_RNA (1)...(19): siRNA sense strand
acaaaucccauugguauga

SEQ ID NO: 6440 - RNA, 19 nt, Homo sapiens
  misc_RNA (1)...(19): siRNA sense strand
ccaagaccauguggcauca

SEQ ID NO: 6441 - RNA, 19 nt, Homo sapiens
  misc_RNA (1)...(19): siRNA sense strand
aguacaugauuccaacaua

SEQ ID NO: 6442 - RNA, 19 nt, Homo sapiens
  misc_RNA (1)...(19): siRNA sense strand
aauaugcucccaaguuuga

SEQ ID NO: 6443 - RNA, 19 nt, Homo sapiens
  misc_RNA (1)...(19): siRNA sense strand
cagggagacaucuuuauga

SEQ ID NO: 6444 - RNA, 19 nt, Homo sapiens
  misc_RNA (1)...(19): siRNA sense strand
aaagggagccacaggucua

SEQ ID NO: 6445 - RNA, 19 nt, Homo sapiens
  misc_RNA (1)...(19): siRNA sense strand
gaaacuaacaaggaagcaa

SEQ ID NO: 6446 - RNA, 19 nt, Homo sapiens
  misc_RNA (1)...(19): siRNA sense strand
ccaagcagagggaacuauu

SEQ ID NO: 6447 - RNA, 19 nt, Homo sapiens
  misc_RNA (1)...(19): siRNA sense strand
gaugaaaaguacacagguu

SEQ ID NO: 6448 - RNA, 19 nt, Homo sapiens
  misc_RNA (1)...(19): siRNA sense strand
gguauggacuaagacugaa

SEQ ID NO: 6449 - RNA, 19 nt, Homo sapiens
  misc_RNA (1)...(19): siRNA sense strand
acaagacucccaagaacuu

SEQ ID NO: 6450 - RNA, 19 nt, Homo sapiens
  misc_RNA (1)...(19): siRNA sense strand
ggaaaugcugggagaaugg

SEQ ID NO: 6451 - RNA, 19 nt, Homo sapiens
  misc_RNA (1)...(19): siRNA sense strand
ccaacaggagcauguggua

SEQ ID NO: 6452 - RNA, 19 nt, Homo sapiens
  misc_RNA (1)...(19): siRNA sense strand
gaaaaguacacagguuuaa

SEQ ID NO: 6453 - RNA, 19 nt, Homo sapiens
  misc_RNA (1)...(19): siRNA sense strand
ugcaagacaugugggcaua

SEQ ID NO: 6454 - RNA, 19 nt, Homo sapiens
  misc_RNA (1)...(19): siRNA sense strand
acaaccaucuaagaagaaa

SEQ ID NO: 6455 - RNA, 19 nt, Homo sapiens
  misc_RNA (1)...(19): siRNA sense strand
agacauauaagcacaguag

SEQ ID NO: 6456 - RNA, 19 nt, Homo sapiens
  misc_RNA (1)...(19): siRNA sense strand
cuuagggccucuacgaaga

SEQ ID NO: 6457 - RNA, 19 nt, Homo sapiens
  misc_RNA (1)...(19): siRNA sense strand
gcacgucugcggaaccaau

SEQ ID NO: 6458 - RNA, 19 nt, Homo sapiens
  misc_RNA (1)...(19): siRNA sense strand
gcagaagcgccucaugaag

SEQ ID NO: 6459 - RNA, 19 nt, Homo sapiens
  misc_RNA (1)...(19): siRNA sense strand
ggccugagcccguuggaau

SEQ ID NO: 6460 - RNA, 19 nt, Homo sapiens
  misc_RNA (1)...(19): siRNA sense strand
acagcagcauugaucguuu

SEQ ID NO: 6461 - RNA, 19 nt, Homo sapiens
  misc_RNA (1)...(19): siRNA sense strand
gcaagaggucaucugaaca

SEQ ID NO: 6462 - RNA, 19 nt, Homo sapiens
  misc_RNA (1)...(19): siRNA sense strand
gacaaccaucuaagaagaa

SEQ ID NO: 6463 - RNA, 19 nt, Homo sapiens
  misc_RNA (1)...(19): siRNA sense strand
gaguuggccugaggagaug

SEQ ID NO: 6464 - RNA, 19 nt, Homo sapiens
  misc_RNA (1)...(19): siRNA sense strand
cauauaagcacaguagcaa

SEQ ID NO: 6465 - RNA, 19 nt, Homo sapiens
  misc_RNA (1)...(19): siRNA sense strand
ucagggagacaucuuuaug

SEQ ID NO: 6466 - RNA, 19 nt, Homo sapiens
  misc_RNA (1)...(19): siRNA sense strand
uaagacugaauauggauga

SEQ ID NO: 6467 - RNA, 19 nt, Homo sapiens
  misc_RNA (1)...(19): siRNA sense strand
uggaaaugcugggagaaug

SEQ ID NO: 6468 - RNA, 19 nt, Homo sapiens
  misc_RNA (1)...(19): siRNA sense strand
gagcagaaguguuuaacua

SEQ ID NO: 6469 - RNA, 19 nt, Homo sapiens
  misc_RNA (1)...(19): siRNA sense strand
gcagaaguguuuaacuaua

SEQ ID NO: 6470 - RNA, 19 nt, Homo sapiens
  misc_RNA (1)...(19): siRNA sense strand
gagcaacaaugccaauuau

SEQ ID NO: 6471 - RNA, 19 nt, Homo sapiens
  misc_RNA (1)...(19): siRNA sense strand
ugaauaaagugauggauga

SEQ ID NO: 6472 - RNA, 19 nt, Homo sapiens
  misc_RNA (1)...(19): siRNA sense strand
gaacaucagcugccaagaa

SEQ ID NO: 6473 - RNA, 19 nt, Homo sapiens
  misc_RNA (1)...(19): siRNA sense strand
gguacugugucuacaaaua

SEQ ID NO: 6474 - RNA, 19 nt, Homo sapiens
  misc_RNA (1)...(19): siRNA sense strand
ggagagaccagaccaagaa

SEQ ID NO: 6475 - RNA, 19 nt, Homo sapiens
  misc_RNA (1)...(19): siRNA sense strand
ggcagaagcucccagagaa

SEQ ID NO: 6476 - RNA, 19 nt, Homo sapiens
  misc_RNA (1)...(19): siRNA sense strand
guacaugaauaaagugaug

SEQ ID NO: 6477 - RNA, 19 nt, Homo sapiens
  misc_RNA (1)...(19): siRNA sense strand
aaacugauccacacauuaa

SEQ ID NO: 6478 - RNA, 19 nt, Homo sapiens
  misc_RNA (1)...(19): siRNA sense strand
gcaacaaugccaauuauuc

SEQ ID NO: 6479 - RNA, 19 nt, Homo sapiens
  misc_RNA (1)...(19): siRNA sense strand
ugaauaaccugagugagaa

SEQ ID NO: 6480 - RNA, 19 nt, Homo sapiens
  misc_RNA (1)...(19): siRNA sense strand
gcuaagagccggauucaca

SEQ ID NO: 6481 - RNA, 19 nt, Homo sapiens
  misc_RNA (1)...(19): siRNA sense strand
ucauuuaguucccucuaua

SEQ ID NO: 6482 - RNA, 19 nt, Homo sapiens
  misc_RNA (1)...(19): siRNA sense strand
caacaaugccaauuauuca

SEQ ID NO: 6483 - RNA, 19 nt, Homo sapiens
  misc_RNA (1)...(19): siRNA sense strand
ggacagggcccaggaugaa

SEQ ID NO: 6484 - RNA, 19 nt, Homo sapiens
  misc_RNA (1)...(19): siRNA sense strand
ucucagagcagaaguguuu

SEQ ID NO: 6485 - RNA, 19 nt, Homo sapiens
  misc_RNA (1)...(19): siRNA sense strand
uuaaugcccuuacucuauu

SEQ ID NO: 6486 - RNA, 19 nt, Homo sapiens
  misc_RNA (1)...(19): siRNA sense strand
uuaguucccucuauaauuc

SEQ ID NO: 6487 - RNA, 19 nt, Homo sapiens
  misc_RNA (1)...(19): siRNA sense strand
ggaaucagaaauccuuauu

SEQ ID NO: 6488 - RNA, 19 nt, Homo sapiens
  misc_RNA (1)...(19): siRNA sense strand
gaaaagcaaaguugaagua

SEQ ID NO: 6489 - RNA, 19 nt, Homo sapiens
  misc_RNA (1)...(19): siRNA sense strand
caagugccagcaucauuua

SEQ ID NO: 6490 - RNA, 19 nt, Homo sapiens
  misc_RNA (1)...(19): siRNA sense strand
ccagauauguugaagaaac

SEQ ID NO: 6491 - RNA, 19 nt, Homo sapiens
  misc_RNA (1)...(19): siRNA sense strand
cagaaguguuuaacuauag

SEQ ID NO: 6492 - RNA, 19 nt, Homo sapiens
  misc_RNA (1)...(19): siRNA sense strand
aacaucagcugccaagaaa

SEQ ID NO: 6493 - RNA, 19 nt, Homo sapiens
  misc_RNA (1)...(19): siRNA sense strand
aaaucaccaugaccucuua

SEQ ID NO: 6494 - RNA, 19 nt, Homo sapiens
  misc_RNA (1)...(19): siRNA sense strand
guaaccaggucccggaaug

SEQ ID NO: 6495 - RNA, 19 nt, Homo sapiens
  misc_RNA (1)...(19): siRNA sense strand
uggcagaggucccugauuc

SEQ ID NO: 6496 - RNA, 19 nt, Homo sapiens
  misc_RNA (1)...(19): siRNA sense strand
cagaaauccuuauuaaugc

SEQ ID NO: 6497 - RNA, 19 nt, Homo sapiens
  misc_RNA (1)...(19): siRNA sense strand
ccaagugccagcaucauuu

SEQ ID NO: 6498 - RNA, 19 nt, Homo sapiens
  misc_RNA (1)...(19): siRNA sense strand
gcaauggcuucugcaauag

SEQ ID NO: 6499 - RNA, 19 nt, Homo sapiens
  misc_RNA (1)...(19): siRNA sense strand
ggcuagagcugggcuaaga

SEQ ID NO: 6500 - RNA, 19 nt, Homo sapiens
  misc_RNA (1)...(19): siRNA sense strand
ugagcaacaaugccaauua

SEQ ID NO: 6501 - RNA, 19 nt, Homo sapiens
  misc_RNA (1)...(19): siRNA sense strand
gaagacccguugccaugca

SEQ ID NO: 6502 - RNA, 19 nt, Homo sapiens
  misc_RNA (1)...(19): siRNA sense strand
uugcaaacaugaucaacaa

SEQ ID NO: 6503 - RNA, 19 nt, Homo sapiens
  misc_RNA (1)...(19): siRNA sense strand
aaagcaaaguugaaguaga

SEQ ID NO: 6504 - RNA, 19 nt, Homo sapiens
  misc_RNA (1)...(19): siRNA sense strand
caagagacaauccgcaaau

SEQ ID NO: 6505 - RNA, 19 nt, Homo sapiens
  misc_RNA (1)...(19): siRNA sense strand
gagaauggccaagcccaaa

SEQ ID NO: 6506 - RNA, 19 nt, Homo sapiens
  misc_RNA (1)...(19): siRNA sense strand
caccaugaccucuuaguga

SEQ ID NO: 6507 - RNA, 19 nt, Homo sapiens
  misc_RNA (1)...(19): siRNA sense strand
uggaguguguguuaagaaa

SEQ ID NO: 6508 - RNA, 19 nt, Homo sapiens
  misc_RNA (1)...(19): siRNA sense strand
cuauaauucuuacguggaa

SEQ ID NO: 6509 - RNA, 19 nt, Homo sapiens
  misc_RNA (1)...(19): siRNA sense strand
uaaccugagugagaauuau

SEQ ID NO: 6510 - RNA, 19 nt, Homo sapiens
  misc_RNA (1)...(19): siRNA sense strand
gaccagaccaagaagagaa

SEQ ID NO: 6511 - RNA, 19 nt, Homo sapiens
  misc_RNA (1)...(19): siRNA sense strand
caucuggaguguguguuaa

SEQ ID NO: 6512 - RNA, 19 nt, Homo sapiens
  misc_RNA (1)...(19): siRNA sense strand
guccuugccuugcuucaga

SEQ ID NO: 6513 - RNA, 19 nt, Homo sapiens
  misc_RNA (1)...(19): siRNA sense strand
gugccagcaucauuuaguu

SEQ ID NO: 6514 - RNA, 19 nt, Homo sapiens
  misc_RNA (1)...(19): siRNA sense strand
gauccacacauuaaggaaa

SEQ ID NO: 6515 - RNA, 19 nt, Homo sapiens
  misc_RNA (1)...(19): siRNA sense strand
caaaacugauccacacauu

SEQ ID NO: 6516 - RNA, 19 nt, Homo sapiens
  misc_RNA (1)...(19): siRNA sense strand
aagcaaaguugaaguagac

SEQ ID NO: 6517 - RNA, 19 nt, Homo sapiens
  misc_RNA (1)...(19): siRNA sense strand
caaaguugaaguagacgaa

SEQ ID NO: 6518 - RNA, 19 nt, Homo sapiens
  misc_RNA (1)...(19): siRNA sense strand
agaaaucugaugauccuuu

SEQ ID NO: 6519 - RNA, 19 nt, Homo sapiens
  misc_RNA (1)...(19): siRNA sense strand
aauuagagccuuagcaaau

SEQ ID NO: 6520 - RNA, 19 nt, Homo sapiens
  misc_RNA (1)...(19): siRNA sense strand
auccagauauguugaagaa

SEQ ID NO: 6521 - RNA, 19 nt, Homo sapiens
  misc_RNA (1)...(19): siRNA sense strand
uaaugcccuuacucuauuu

SEQ ID NO: 6522 - RNA, 19 nt, Homo sapiens
  misc_RNA (1)...(19): siRNA sense strand
aagagacaauccgcaaauu

SEQ ID NO: 6523 - RNA, 19 nt, Homo sapiens
  misc_RNA (1)...(19): siRNA sense strand
gcaaacaugaucaacaaaa

SEQ ID NO: 6524 - RNA, 19 nt, Homo sapiens
  misc_RNA (1)...(19): siRNA sense strand
acacagagucagauucaga

SEQ ID NO: 6525 - RNA, 19 nt, Homo sapiens
  misc_RNA (1)...(19): siRNA sense strand
caaaucaccaugaccucuu

SEQ ID NO: 6526 - RNA, 19 nt, Homo sapiens
  misc_RNA (1)...(19): siRNA sense strand
ugaaauugaugagauucug

SEQ ID NO: 6527 - RNA, 19 nt, Homo sapiens
  misc_RNA (1)...(19): siRNA sense strand
gggcuuccguccuggagau

SEQ ID NO: 6528 - RNA, 19 nt, Homo sapiens
  misc_RNA (1)...(19): siRNA sense strand
caagggcaagggcaagaaa

SEQ ID NO: 6529 - RNA, 19 nt, Homo sapiens
  misc_RNA (1)...(19): siRNA sense strand
accaugaccucuuagugaa

SEQ ID NO: 6530 - RNA, 19 nt, Homo sapiens
  misc_RNA (1)...(19): siRNA sense strand
ccucugcucuggacacagu

SEQ ID NO: 6531 - RNA, 19 nt, Homo sapiens
  misc_RNA (1)...(19): siRNA sense strand
acagguagcuuugcucacu

SEQ ID NO: 6532 - RNA, 19 nt, Homo sapiens
  misc_RNA (1)...(19): siRNA sense strand
ccuuaauggccaugaauaa

SEQ ID NO: 6533 - RNA, 19 nt, Homo sapiens
  misc_RNA (1)...(19): siRNA sense strand
gacuggagcgguacccaaa

SEQ ID NO: 6534 - RNA, 19 nt, Homo sapiens
  misc_RNA (1)...(19): siRNA sense strand
augaauaaccugagugaga

SEQ ID NO: 6535 - RNA, 19 nt, Homo sapiens
  misc_RNA (1)...(19): siRNA sense strand
ccaugaauaaccugaguga

SEQ ID NO: 6536 - RNA, 19 nt, Homo sapiens
  misc_RNA (1)...(19): siRNA sense strand
ggccaugaauaaccugagu

SEQ ID NO: 6537 - RNA, 19 nt, Homo sapiens
  misc_RNA (1)...(19): siRNA sense strand
guacugugucuacaaauac

SEQ ID NO: 6538 - RNA, 19 nt, Homo sapiens
  misc_RNA (1)...(19): siRNA sense strand
gcaagaaaagcaaaguuga

SEQ ID NO: 6539 - RNA, 19 nt, Homo sapiens
  misc_RNA (1)...(19): siRNA sense strand
gcugcagagucuccuggaa

SEQ ID NO: 6540 - RNA, 19 nt, Homo sapiens
  misc_RNA (1)...(19): siRNA sense strand
uuagagccuuagcaaauca

SEQ ID NO: 6541 - RNA, 19 nt, Homo sapiens
  misc_RNA (1)...(19): siRNA sense strand
ucagagcagaaguguuuaa

SEQ ID NO: 6542 - RNA, 19 nt, Homo sapiens
  misc_RNA (1)...(19): siRNA sense strand
gggagagaccagaccaaga

SEQ ID NO: 6543 - RNA, 19 nt, Homo sapiens
  misc_RNA (1)...(19): siRNA sense strand
cagauauguugaagaaacu

SEQ ID NO: 6544 - RNA, 19 nt, Homo sapiens
  misc_RNA (1)...(19): siRNA sense strand
gaaaauccagauauguuga

SEQ ID NO: 6545 - RNA, 19 nt, Homo sapiens
  misc_RNA (1)...(19): siRNA sense strand
gcaagggcaagggcaagaa

SEQ ID NO: 6546 - RNA, 19 nt, Homo sapiens
  misc_RNA (1)...(19): siRNA sense strand
gccaauuauucaugcaauc

SEQ ID NO: 6547 - RNA, 19 nt, Homo sapiens
  misc_RNA (1)...(19): siRNA sense strand
uaaggccgaaucaguaguu

SEQ ID NO: 6548 - RNA, 19 nt, Homo sapiens
  misc_RNA (1)...(19): siRNA sense strand
ucgggaugcuggcugugua

SEQ ID NO: 6549 - RNA, 19 nt, Homo sapiens
  misc_RNA (1)...(19): siRNA sense strand
gcccuuacucuauuugaga

SEQ ID NO: 6550 - RNA, 19 nt, Homo sapiens
  misc_RNA (1)...(19): siRNA sense strand
cauuuaguucccucuauaa

SEQ ID NO: 6551 - RNA, 19 nt, Homo sapiens
  misc_RNA (1)...(19): siRNA sense strand
cugguacugugucuacaaa

SEQ ID NO: 6552 - RNA, 19 nt, Homo sapiens
  misc_RNA (1)...(19): siRNA sense strand
ggucccugauucugaggaa

SEQ ID NO: 6553 - RNA, 19 nt, Homo sapiens
  misc_RNA (1)...(19): siRNA sense strand
gagaccagaccaagaagag

SEQ ID NO: 6554 - RNA, 19 nt, Homo sapiens
  misc_RNA (1)...(19): siRNA sense strand
gccuuaauggccaugaaua

SEQ ID NO: 6555 - RNA, 19 nt, Homo sapiens
  misc_RNA (1)...(19): siRNA sense strand
ccaauuauucaugcaauca

SEQ ID NO: 6556 - RNA, 19 nt, Homo sapiens
  misc_RNA (1)...(19): siRNA sense strand
gcagaagcucccagagaag

SEQ ID NO: 6557 - RNA, 19 nt, Homo sapiens
  misc_RNA (1)...(19): siRNA sense strand
ucaagagacaauccgcaaa

SEQ ID NO: 6558 - RNA, 19 nt, Homo sapiens
  misc_RNA (1)...(19): siRNA sense strand
caugaccucuuagugaaag

SEQ ID NO: 6559 - RNA, 19 nt, Homo sapiens
  misc_RNA (1)...(19): siRNA sense strand
auuaaugcccuuacucuau

SEQ ID NO: 6560 - RNA, 19 nt, Homo sapiens
  misc_RNA (1)...(19): siRNA sense strand
cucagcaguucaaguaguu

SEQ ID NO: 6561 - RNA, 19 nt, Homo sapiens
  misc_RNA (1)...(19): siRNA sense strand
gaauaaagugauggaugau

SEQ ID NO: 6562 - RNA, 19 nt, Homo sapiens
  misc_RNA (1)...(19): siRNA sense strand
gaauaaccugagugagaau

SEQ ID NO: 6563 - RNA, 19 nt, Homo sapiens
  misc_RNA (1)...(19): siRNA sense strand
uggcagaagcucccagaga

SEQ ID NO: 6564 - RNA, 19 nt, Homo sapiens
  misc_RNA (1)...(19): siRNA sense strand
acaucuggaguguguguua

SEQ ID NO: 6565 - RNA, 19 nt, Homo sapiens
  misc_RNA (1)...(19): siRNA sense strand
ccucuuagugaaagugaaa

SEQ ID NO: 6566 - RNA, 19 nt, Homo sapiens
  misc_RNA (1)...(19): siRNA sense strand
aaauuagagccuuagcaaa

SEQ ID NO: 6567 - RNA, 19 nt, Homo sapiens
  misc_RNA (1)...(19): siRNA sense strand
gaguguguguuaagaaaau

SEQ ID NO: 6568 - RNA, 19 nt, Homo sapiens
  misc_RNA (1)...(19): siRNA sense strand
gagcagaaguguuuaacua

SEQ ID NO: 6569 - RNA, 19 nt, Homo sapiens
  misc_RNA (1)...(19): siRNA sense strand
gcagaaguguuuaacuaua

SEQ ID NO: 6570 - RNA, 19 nt, Homo sapiens
  misc_RNA (1)...(19): siRNA sense strand
gagcaacaaugccaauuau

SEQ ID NO: 6571 - RNA, 19 nt, Homo sapiens
  misc_RNA (1)...(19): siRNA sense strand
ugaauaaagugauggauga

SEQ ID NO: 6572 - RNA, 19 nt, Homo sapiens
  misc_RNA (1)...(19): siRNA sense strand
gaacaucagcugccaagaa

SEQ ID NO: 6573 - RNA, 19 nt, Homo sapiens
  misc_RNA (1)...(19): siRNA sense strand
gguacugugucuacaaaua

SEQ ID NO: 6574 - RNA, 19 nt, Homo sapiens
  misc_RNA (1)...(19): siRNA sense strand
ggagagaccagaccaagaa

SEQ ID NO: 6575 - RNA, 19 nt, Homo sapiens
  misc_RNA (1)...(19): siRNA sense strand
ggcagaagcucccagagaa

SEQ ID NO: 6576 - RNA, 19 nt, Homo sapiens
  misc_RNA (1)...(19): siRNA sense strand
guacaugaauaaagugaug

SEQ ID NO: 6577 - RNA, 19 nt, Homo sapiens
  misc_RNA (1)...(19): siRNA sense strand
aaacugauccacacauuaa

SEQ ID NO: 6578 - RNA, 19 nt, Homo sapiens
  misc_RNA (1)...(19): siRNA sense strand
gcaacaaugccaauuauuc

SEQ ID NO: 6579 - RNA, 19 nt, Homo sapiens
  misc_RNA (1)...(19): siRNA sense strand
ugaauaaccugagugagaa

SEQ ID NO: 6580 - RNA, 19 nt, Homo sapiens
  misc_RNA (1)...(19): siRNA sense strand
gcuaagagccggauucaca

SEQ ID NO: 6581 - RNA, 19 nt, Homo sapiens
  misc_RNA (1)...(19): siRNA sense strand
ucauuuaguucccucuaua

SEQ ID NO: 6582 - RNA, 19 nt, Homo sapiens
  misc_RNA (1)...(19): siRNA sense strand
caacaaugccaauuauuca

SEQ ID NO: 6583 - RNA, 19 nt, Homo sapiens
  misc_RNA (1)...(19): siRNA sense strand
ggacagggcccaggaugaa

SEQ ID NO: 6584 - RNA, 19 nt, Homo sapiens
  misc_RNA (1)...(19): siRNA sense strand
ucucagagcagaaguguuu

SEQ ID NO: 6585 - RNA, 19 nt, Homo sapiens
  misc_RNA (1)...(19): siRNA sense strand
uuaaugcccuuacucuauu

SEQ ID NO: 6586 - RNA, 19 nt, Homo sapiens
  misc_RNA (1)...(19): siRNA sense strand
uuaguucccucuauaauuc

SEQ ID NO: 6587 - RNA, 19 nt, Homo sapiens
  misc_RNA (1)...(19): siRNA sense strand
ggaaucagaaauccuuauu

SEQ ID NO: 6588 - RNA, 19 nt, Homo sapiens
  misc_RNA (1)...(19): siRNA sense strand
gaaaagcaaaguugaagua

SEQ ID NO: 6589 - RNA, 19 nt, Homo sapiens
  misc_RNA (1)...(19): siRNA sense strand
caagugccagcaucauuua

SEQ ID NO: 6590 - RNA, 19 nt, Homo sapiens
  misc_RNA (1)...(19): siRNA sense strand
ccagauauguugaagaaac

SEQ ID NO: 6591 - RNA, 19 nt, Homo sapiens
  misc_RNA (1)...(19): siRNA sense strand
cagaaguguuuaacuauag

SEQ ID NO: 6592 - RNA, 19 nt, Homo sapiens
  misc_RNA (1)...(19): siRNA sense strand
aacaucagcugccaagaaa

SEQ ID NO: 6593 - RNA, 19 nt, Homo sapiens
  misc_RNA (1)...(19): siRNA sense strand
aaaucaccaugaccucuua

SEQ ID NO: 6594 - RNA, 19 nt, Homo sapiens
  misc_RNA (1)...(19): siRNA sense strand
guaaccaggucccggaaug

SEQ ID NO: 6595 - RNA, 19 nt, Homo sapiens
  misc_RNA (1)...(19): siRNA sense strand
uggcagaggucccugauuc

SEQ ID NO: 6596 - RNA, 19 nt, Homo sapiens
  misc_RNA (1)...(19): siRNA sense strand
cagaaauccuuauuaaugc

SEQ ID NO: 6597 - RNA, 19 nt, Homo sapiens
  misc_RNA (1)...(19): siRNA sense strand
ccaagugccagcaucauuu

SEQ ID NO: 6598 - RNA, 19 nt, Homo sapiens
  misc_RNA (1)...(19): siRNA sense strand
gcaauggcuucugcaauag

SEQ ID NO: 6599 - RNA, 19 nt, Homo sapiens
  misc_RNA (1)...(19): siRNA sense strand
ggcuagagcugggcuaaga

SEQ ID NO: 6600 - RNA, 19 nt, Homo sapiens
  misc_RNA (1)...(19): siRNA sense strand
ugagcaacaaugccaauua

SEQ ID NO: 6601 - RNA, 19 nt, Homo sapiens
  misc_RNA (1)...(19): siRNA sense strand
gaagacccguugccaugca

SEQ ID NO: 6602 - RNA, 19 nt, Homo sapiens
  misc_RNA (1)...(19): siRNA sense strand
uugcaaacaugaucaacaa

SEQ ID NO: 6603 - RNA, 19 nt, Homo sapiens
  misc_RNA (1)...(19): siRNA sense strand
aaagcaaaguugaaguaga

SEQ ID NO: 6604 - RNA, 19 nt, Homo sapiens
  misc_RNA (1)...(19): siRNA sense strand
caagagacaauccgcaaau

SEQ ID NO: 6605 - RNA, 19 nt, Homo sapiens
  misc_RNA (1)...(19): siRNA sense strand
gagaauggccaagcccaaa

SEQ ID NO: 6606 - RNA, 19 nt, Homo sapiens
  misc_RNA (1)...(19): siRNA sense strand
caccaugaccucuuaguga

SEQ ID NO: 6607 - RNA, 19 nt, Homo sapiens
  misc_RNA (1)...(19): siRNA sense strand
uggaguguguguuaagaaa

SEQ ID NO: 6608 - RNA, 19 nt, Homo sapiens
  misc_RNA (1)...(19): siRNA sense strand
cuauaauucuuacguggaa

SEQ ID NO: 6609 - RNA, 19 nt, Homo sapiens
  misc_RNA (1)...(19): siRNA sense strand
uaaccugagugagaauuau

SEQ ID NO: 6610 - RNA, 19 nt, Homo sapiens
  misc_RNA (1)...(19): siRNA sense strand
gaccagaccaagaagagaa

SEQ ID NO: 6611 - RNA, 19 nt, Homo sapiens
  misc_RNA (1)...(19): siRNA sense strand
caucuggaguguguguuaa

SEQ ID NO: 6612 - RNA, 19 nt, Homo sapiens
  misc_RNA (1)...(19): siRNA sense strand
guccuugccuugcuucaga

SEQ ID NO: 6613 - RNA, 19 nt, Homo sapiens
  misc_RNA (1)...(19): siRNA sense strand
gugccagcaucauuuaguu

SEQ ID NO: 6614 - RNA, 19 nt, Homo sapiens
  misc_RNA (1)...(19): siRNA sense strand
gauccacacauuaaggaaa

SEQ ID NO: 6615 - RNA, 19 nt, Homo sapiens
  misc_RNA (1)...(19): siRNA sense strand
caaaacugauccacacauu

SEQ ID NO: 6616 - RNA, 19 nt, Homo sapiens
  misc_RNA (1)...(19): siRNA sense strand
aagcaaaguugaaguagac

SEQ ID NO: 6617 - RNA, 19 nt, Homo sapiens
  misc_RNA (1)...(19): siRNA sense strand
caaaguugaaguagacgaa

SEQ ID NO: 6618 - RNA, 19 nt, Homo sapiens
  misc_RNA (1)...(19): siRNA sense strand
agaaaucugaugauccuuu

SEQ ID NO: 6619 - RNA, 19 nt, Homo sapiens
  misc_RNA (1)...(19): siRNA sense strand
aauuagagccuuagcaaau

SEQ ID NO: 6620 - RNA, 19 nt, Homo sapiens
  misc_RNA (1)...(19): siRNA sense strand
auccagauauguugaagaa

SEQ ID NO: 6621 - RNA, 19 nt, Homo sapiens
  misc_RNA (1)...(19): siRNA sense strand
uaaugcccuuacucuauuu

SEQ ID NO: 6622 - RNA, 19 nt, Homo sapiens
  misc_RNA (1)...(19): siRNA sense strand
aagagacaauccgcaaauu

SEQ ID NO: 6623 - RNA, 19 nt, Homo sapiens
  misc_RNA (1)...(19): siRNA sense strand
gcaaacaugaucaacaaaa

SEQ ID NO: 6624 - RNA, 19 nt, Homo sapiens
  misc_RNA (1)...(19): siRNA sense strand
acacagagucagauucaga

SEQ ID NO: 6625 - RNA, 19 nt, Homo sapiens
  misc_RNA (1)...(19): siRNA sense strand
caaaucaccaugaccucuu

SEQ ID NO: 6626 - RNA, 19 nt, Homo sapiens
  misc_RNA (1)...(19): siRNA sense strand
ugaaauugaugagauucug

SEQ ID NO: 6627 - RNA, 19 nt, Homo sapiens
  misc_RNA (1)...(19): siRNA sense strand
gggcuuccguccuggagau

SEQ ID NO: 6628 - RNA, 19 nt, Homo sapiens
  misc_RNA (1)...(19): siRNA sense strand
caagggcaagggcaagaaa

SEQ ID NO: 6629 - RNA, 19 nt, Homo sapiens
  misc_RNA (1)...(19): siRNA sense strand
accaugaccucuuagugaa

SEQ ID NO: 6630 - RNA, 19 nt, Homo sapiens
  misc_RNA (1)...(19): siRNA sense strand
ccucugcucuggacacagu

SEQ ID NO: 6631 - RNA, 19 nt, Homo sapiens
  misc_RNA (1)...(19): siRNA sense strand
acagguagcuuugcucacu

SEQ ID NO: 6632 - RNA, 19 nt, Homo sapiens
  misc_RNA (1)...(19): siRNA sense strand
ccuuaauggccaugaauaa

SEQ ID NO: 6633 - RNA, 19 nt, Homo sapiens
  misc_RNA (1)...(19): siRNA sense strand
gacuggagcgguacccaaa

SEQ ID NO: 6634 - RNA, 19 nt, Homo sapiens
  misc_RNA (1)...(19): siRNA sense strand
augaauaaccugagugaga

SEQ ID NO: 6635 - RNA, 19 nt, Homo sapiens
  misc_RNA (1)...(19): siRNA sense strand
ccaugaauaaccugaguga

SEQ ID NO: 6636 - RNA, 19 nt, Homo sapiens
  misc_RNA (1)...(19): siRNA sense strand
ggccaugaauaaccugagu

SEQ ID NO: 6637 - RNA, 19 nt, Homo sapiens
  misc_RNA (1)...(19): siRNA sense strand
guacugugucuacaaauac

SEQ ID NO: 6638 - RNA, 19 nt, Homo sapiens
  misc_RNA (1)...(19): siRNA sense strand
gcaagaaaagcaaaguuga

SEQ ID NO: 6639 - RNA, 19 nt, Homo sapiens
  misc_RNA (1)...(19): siRNA sense strand
gcugcagagucuccuggaa

SEQ ID NO: 6640 - RNA, 19 nt, Homo sapiens
  misc_RNA (1)...(19): siRNA sense strand
uuagagccuuagcaaauca

SEQ ID NO: 6641 - RNA, 19 nt, Homo sapiens
  misc_RNA (1)...(19): siRNA sense strand
ucagagcagaaguguuuaa

SEQ ID NO: 6642 - RNA, 19 nt, Homo sapiens
  misc_RNA (1)...(19): siRNA sense strand
gggagagaccagaccaaga

SEQ ID NO: 6643 - RNA, 19 nt, Homo sapiens
  misc_RNA (1)...(19): siRNA sense strand
cagauauguugaagaaacu

SEQ ID NO: 6644 - RNA, 19 nt, Homo sapiens
  misc_RNA (1)...(19): siRNA sense strand
gaaaauccagauauguuga

SEQ ID NO: 6645 - RNA, 19 nt, Homo sapiens
  misc_RNA (1)...(19): siRNA sense strand
gcaagggcaagggcaagaa

SEQ ID NO: 6646 - RNA, 19 nt, Homo sapiens
  misc_RNA (1)...(19): siRNA sense strand
gccaauuauucaugcaauc

SEQ ID NO: 6647 - RNA, 19 nt, Homo sapiens
  misc_RNA (1)...(19): siRNA sense strand
uaaggccgaaucaguaguu

SEQ ID NO: 6648 - RNA, 19 nt, Homo sapiens
  misc_RNA (1)...(19): siRNA sense strand
ucgggaugcuggcugugua

SEQ ID NO: 6649 - RNA, 19 nt, Homo sapiens
  misc_RNA (1)...(19): siRNA sense strand
gcccuuacucuauuugaga

SEQ ID NO: 6650 - RNA, 19 nt, Homo sapiens
  misc_RNA (1)...(19): siRNA sense strand
cauuuaguucccucuauaa

SEQ ID NO: 6651 - RNA, 19 nt, Homo sapiens
  misc_RNA (1)...(19): siRNA sense strand
cugguacugugucuacaaa

SEQ ID NO: 6652 - RNA, 19 nt, Homo sapiens
  misc_RNA (1)...(19): siRNA sense strand
ggucccugauucugaggaa

SEQ ID NO: 6653 - RNA, 19 nt, Homo sapiens
  misc_RNA (1)...(19): siRNA sense strand
gagaccagaccaagaagag

SEQ ID NO: 6654 - RNA, 19 nt, Homo sapiens
  misc_RNA (1)...(19): siRNA sense strand
gccuuaauggccaugaaua

SEQ ID NO: 6655 - RNA, 19 nt, Homo sapiens
  misc_RNA (1)...(19): siRNA sense strand
ccaauuauucaugcaauca

SEQ ID NO: 6656 - RNA, 19 nt, Homo sapiens
  misc_RNA (1)...(19): siRNA sense strand
gcagaagcucccagagaag

SEQ ID NO: 6657 - RNA, 19 nt, Homo sapiens
  misc_RNA (1)...(19): siRNA sense strand
ucaagagacaauccgcaaa

SEQ ID NO: 6658 - RNA, 19 nt, Homo sapiens
  misc_RNA (1)...(19): siRNA sense strand
caugaccucuuagugaaag

SEQ ID NO: 6659 - RNA, 19 nt, Homo sapiens
  misc_RNA (1)...(19): siRNA sense strand
auuaaugcccuuacucuau

SEQ ID NO: 6660 - RNA, 19 nt, Homo sapiens
  misc_RNA (1)...(19): siRNA sense strand
cucagcaguucaaguaguu

SEQ ID NO: 6661 - RNA, 19 nt, Homo sapiens
  misc_RNA (1)...(19): siRNA sense strand
gaauaaagugauggaugau

SEQ ID NO: 6662 - RNA, 19 nt, Homo sapiens
  misc_RNA (1)...(19): siRNA sense strand
gaauaaccugagugagaau

SEQ ID NO: 6663 - RNA, 19 nt, Homo sapiens
  misc_RNA (1)...(19): siRNA sense strand
uggcagaagcucccagaga

SEQ ID NO: 6664 - RNA, 19 nt, Homo sapiens
  misc_RNA (1)...(19): siRNA sense strand
acaucuggaguguguguua

SEQ ID NO: 6665 - RNA, 19 nt, Homo sapiens
  misc_RNA (1)...(19): siRNA sense strand
ccucuuagugaaagugaaa

SEQ ID NO: 6666 - RNA, 19 nt, Homo sapiens
  misc_RNA (1)...(19): siRNA sense strand
aaauuagagccuuagcaaa

SEQ ID NO: 6667 - RNA, 19 nt, Homo sapiens
  misc_RNA (1)...(19): siRNA sense strand
gaguguguguuaagaaaau

SEQ ID NO: 6668 - RNA, 19 nt, Homo sapiens
  misc_RNA (1)...(19): siRNA sense strand
gcaccgccaucuucauuga

SEQ ID NO: 6669 - RNA, 19 nt, Homo sapiens
  misc_RNA (1)...(19): siRNA sense strand
gcuccaaagugaaggauau

SEQ ID NO: 6670 - RNA, 19 nt, Homo sapiens
  misc_RNA (1)...(19): siRNA sense strand
ugagggcucuggcaagaaa

SEQ ID NO: 6671 - RNA, 19 nt, Homo sapiens
  misc_RNA (1)...(19): siRNA sense strand
acaucaaucuccugaacua

SEQ ID NO: 6672 - RNA, 19 nt, Homo sapiens
  misc_RNA (1)...(19): siRNA sense strand
guagcaucguggccacuua

SEQ ID NO: 6673 - RNA, 19 nt, Homo sapiens
  misc_RNA (1)...(19): siRNA sense strand
ucauuggccugaucucuga

SEQ ID NO: 6674 - RNA, 19 nt, Homo sapiens
  misc_RNA (1)...(19): siRNA sense strand
gcucagcaucuucuacuuu

SEQ ID NO: 6675 - RNA, 19 nt, Homo sapiens
  misc_RNA (1)...(19): siRNA sense strand
gagagacccuccuguccau

SEQ ID NO: 6676 - RNA, 19 nt, Homo sapiens
  misc_RNA (1)...(19): siRNA sense strand
caucguggccacuuauauu

SEQ ID NO: 6677 - RNA, 19 nt, Homo sapiens
  misc_RNA (1)...(19): siRNA sense strand
gcaguggucugggcuacau

SEQ ID NO: 6678 - RNA, 19 nt, Homo sapiens
  misc_RNA (1)...(19): siRNA sense strand
ucacugcuguggccuuugu

SEQ ID NO: 6679 - RNA, 19 nt, Homo sapiens
  misc_RNA (1)...(19): siRNA sense strand
gggcaccgccaucuucauu

SEQ ID NO: 6680 - RNA, 19 nt, Homo sapiens
  misc_RNA (1)...(19): siRNA sense strand
ucucauugccgaccucuuu

SEQ ID NO: 6681 - RNA, 19 nt, Homo sapiens
  misc_RNA (1)...(19): siRNA sense strand
cuacaucaaucuccugaac

SEQ ID NO: 6682 - RNA, 19 nt, Homo sapiens
  misc_RNA (1)...(19): siRNA sense strand
gcggugcugugcuacauca

SEQ ID NO: 6683 - RNA, 19 nt, Homo sapiens
  misc_RNA (1)...(19): siRNA sense strand
aaucggaaguaucucaugu

SEQ ID NO: 6684 - RNA, 19 nt, Homo sapiens
  misc_RNA (1)...(19): siRNA sense strand
guucaucuccaguuacaug

SEQ ID NO: 6685 - RNA, 19 nt, Homo sapiens
  misc_RNA (1)...(19): siRNA sense strand
gagacccuccuguccauga

SEQ ID NO: 6686 - RNA, 19 nt, Homo sapiens
  misc_RNA (1)...(19): siRNA sense strand
gguacaaucggaaguaucu

SEQ ID NO: 6687 - RNA, 19 nt, Homo sapiens
  misc_RNA (1)...(19): siRNA sense strand
gcucaugcucugcgcguuu

SEQ ID NO: 6688 - RNA, 19 nt, Homo sapiens
  misc_RNA (1)...(19): siRNA sense strand
ggagcgccacucagauuug

SEQ ID NO: 6689 - RNA, 19 nt, Homo sapiens
  misc_RNA (1)...(19): siRNA sense strand
cuacauugcaggcuccaaa

SEQ ID NO: 6690 - RNA, 19 nt, Homo sapiens
  misc_RNA (1)...(19): siRNA sense strand
caucuucuacuuugccauu

SEQ ID NO: 6691 - RNA, 19 nt, Homo sapiens
  misc_RNA (1)...(19): siRNA sense strand
ucaaucuccugaacuacau

SEQ ID NO: 6692 - RNA, 19 nt, Homo sapiens
  misc_RNA (1)...(19): siRNA sense strand
gugcugugcuacaucaauc

SEQ ID NO: 6693 - RNA, 19 nt, Homo sapiens
  misc_RNA (1)...(19): siRNA sense strand
ccguguucaucuccaguua

SEQ ID NO: 6694 - RNA, 19 nt, Homo sapiens
  misc_RNA (1)...(19): siRNA sense strand
uggccgacauucugcugua

SEQ ID NO: 6695 - RNA, 19 nt, Homo sapiens
  misc_RNA (1)...(19): siRNA sense strand
ucugagggcucuggcaaga

SEQ ID NO: 6696 - RNA, 19 nt, Homo sapiens
  misc_RNA (1)...(19): siRNA sense strand
cucagcaucuucuacuuug

SEQ ID NO: 6697 - RNA, 19 nt, Homo sapiens
  misc_RNA (1)...(19): siRNA sense strand
cagguacaaucggaaguau

SEQ ID NO: 6698 - RNA, 19 nt, Homo sapiens
  misc_RNA (1)...(19): siRNA sense strand
gcaucguggccacuuauau

SEQ ID NO: 6699 - RNA, 19 nt, Homo sapiens
  misc_RNA (1)...(19): siRNA sense strand
uggcaagaaauccuaguuu

SEQ ID NO: 6700 - RNA, 19 nt, Homo sapiens
  misc_RNA (1)...(19): siRNA sense strand
guguucaucuccaguuaca

SEQ ID NO: 6701 - RNA, 19 nt, Homo sapiens
  misc_RNA (1)...(19): siRNA sense strand
guuccgggcucugcaguuc

SEQ ID NO: 6702 - RNA, 19 nt, Homo sapiens
  misc_RNA (1)...(19): siRNA sense strand
cgacaucgagcaguucuuc

SEQ ID NO: 6703 - RNA, 19 nt, Homo sapiens
  misc_RNA (1)...(19): siRNA sense strand
gcucuggcaagaaauccua

SEQ ID NO: 6704 - RNA, 19 nt, Homo sapiens
  misc_RNA (1)...(19): siRNA sense strand
gacuggcacugggcucuga

SEQ ID NO: 6705 - RNA, 19 nt, Homo sapiens
  misc_RNA (1)...(19): siRNA sense strand
uaguggcggugcugugcua

SEQ ID NO: 6706 - RNA, 19 nt, Homo sapiens
  misc_RNA (1)...(19): siRNA sense strand
caucguggccgacauucug

SEQ ID NO: 6707 - RNA, 19 nt, Homo sapiens
  misc_RNA (1)...(19): siRNA sense strand
ucucaucuuuggacucauc

SEQ ID NO: 6708 - RNA, 19 nt, Homo sapiens
  misc_RNA (1)...(19): siRNA sense strand
gagcgccacucagauuugc

SEQ ID NO: 6709 - RNA, 19 nt, Homo sapiens
  misc_RNA (1)...(19): siRNA sense strand
gcucugcacccuuccucuu

SEQ ID NO: 6710 - RNA, 19 nt, Homo sapiens
  misc_RNA (1)...(19): siRNA sense strand
cuaguuucguccugucuuc

SEQ ID NO: 6711 - RNA, 19 nt, Homo sapiens
  misc_RNA (1)...(19): siRNA sense strand
auugcaggcuccaaaguga

SEQ ID NO: 6712 - RNA, 19 nt, Homo sapiens
  misc_RNA (1)...(19): siRNA sense strand
guccacagacgaccggauu

SEQ ID NO: 6713 - RNA, 19 nt, Homo sapiens
  misc_RNA (1)...(19): siRNA sense strand
ccguucggcucucauagug

SEQ ID NO: 6714 - RNA, 19 nt, Homo sapiens
  misc_RNA (1)...(19): siRNA sense strand
acagguacaaucggaagua

SEQ ID NO: 6715 - RNA, 19 nt, Homo sapiens
  misc_RNA (1)...(19): siRNA sense strand
cuucacugcuguggccuuu

SEQ ID NO: 6716 - RNA, 19 nt, Homo sapiens
  misc_RNA (1)...(19): siRNA sense strand
ucgagcaguucuucaacau

SEQ ID NO: 6717 - RNA, 19 nt, Homo sapiens
  misc_RNA (1)...(19): siRNA sense strand
ccacagacgaccggauugu

SEQ ID NO: 6718 - RNA, 19 nt, Homo sapiens
  misc_RNA (1)...(19): siRNA sense strand
caguagcucugggcucauc

SEQ ID NO: 6719 - RNA, 19 nt, Homo sapiens
  misc_RNA (1)...(19): siRNA sense strand
ucugugggcuccggcauuc

SEQ ID NO: 6720 - RNA, 19 nt, Homo sapiens
  misc_RNA (1)...(19): siRNA sense strand
gagaaaggauuugguuaua

SEQ ID NO: 6721 - RNA, 19 nt, Homo sapiens
  misc_RNA (1)...(19): siRNA sense strand
gaaaggauuugguuauaag

SEQ ID NO: 6722 - RNA, 19 nt, Homo sapiens
  misc_RNA (1)...(19): siRNA sense strand
gaaagaaggcaugaauauu

SEQ ID NO: 6723 - RNA, 19 nt, Homo sapiens
  misc_RNA (1)...(19): siRNA sense strand
ggaaaaccgugugcuauua

SEQ ID NO: 6724 - RNA, 19 nt, Homo sapiens
  misc_RNA (1)...(19): siRNA sense strand
gggagaaauuugaagauga

SEQ ID NO: 6725 - RNA, 19 nt, Homo sapiens
  misc_RNA (1)...(19): siRNA sense strand
aaagaaggcaugaauauug

SEQ ID NO: 6726 - RNA, 19 nt, Homo sapiens
  misc_RNA (1)...(19): siRNA sense strand
gaagugacugcucaucuaa

SEQ ID NO: 6727 - RNA, 19 nt, Homo sapiens
  misc_RNA (1)...(19): siRNA sense strand
ggagaaauuugaagaugag

SEQ ID NO: 6728 - RNA, 19 nt, Homo sapiens
  misc_RNA (1)...(19): siRNA sense strand
agaagugacugcucaucua

SEQ ID NO: 6729 - RNA, 19 nt, Homo sapiens
  misc_RNA (1)...(19): siRNA sense strand
gagagaaaggauuugguua

SEQ ID NO: 6730 - RNA, 19 nt, Homo sapiens
  misc_RNA (1)...(19): siRNA sense strand
ugaaagaaggcaugaauau

SEQ ID NO: 6731 - RNA, 19 nt, Homo sapiens
  misc_RNA (1)...(19): siRNA sense strand
gcaagcauguggucuuugg

SEQ ID NO: 6732 - RNA, 19 nt, Homo sapiens
  misc_RNA (1)...(19): siRNA sense strand
ggagagaaaggauuugguu

SEQ ID NO: 6733 - RNA, 19 nt, Homo sapiens
  misc_RNA (1)...(19): siRNA sense strand
uagcuggauugcagaguua

SEQ ID NO: 6734 - RNA, 19 nt, Homo sapiens
  misc_RNA (1)...(19): siRNA sense strand
cacaaaugguucccaguuu

SEQ ID NO: 6735 - RNA, 19 nt, Homo sapiens
  misc_RNA (1)...(19): siRNA sense strand
guggacaacucgaauaagu

SEQ ID NO: 6736 - RNA, 19 nt, Homo sapiens
  misc_RNA (1)...(19): siRNA sense strand
gaucauuccuucuguagcu

SEQ ID NO: 6737 - RNA, 19 nt, Homo sapiens
  misc_RNA (1)...(19): siRNA sense strand
caucuaauccauaaagcua

SEQ ID NO: 6738 - RNA, 19 nt, Homo sapiens
  misc_RNA (1)...(19): siRNA sense strand
gauugcagaguuaaguuua

SEQ ID NO: 6739 - RNA, 19 nt, Homo sapiens
  misc_RNA (1)...(19): siRNA sense strand
uuauaaggguuccugcuuu

SEQ ID NO: 6740 - RNA, 19 nt, Homo sapiens
  misc_RNA (1)...(19): siRNA sense strand
ucugagcacuggagagaaa

SEQ ID NO: 6741 - RNA, 19 nt, Homo sapiens
  misc_RNA (1)...(19): siRNA sense strand
gcaguaucccaguaucuuu

SEQ ID NO: 6742 - RNA, 19 nt, Homo sapiens
  misc_RNA (1)...(19): siRNA sense strand
cugcucaucuaauccauaa

SEQ ID NO: 6743 - RNA, 19 nt, Homo sapiens
  misc_RNA (1)...(19): siRNA sense strand
gcagacaaggucccaaaga

SEQ ID NO: 6744 - RNA, 19 nt, Homo sapiens
  misc_RNA (1)...(19): siRNA sense strand
gaucaccauugcugacugu

SEQ ID NO: 6745 - RNA, 19 nt, Homo sapiens
  misc_RNA (1)...(19): siRNA sense strand
ccgcaucuccuuugaggua

SEQ ID NO: 6746 - RNA, 19 nt, Homo sapiens
  misc_RNA (1)...(19): siRNA sense strand
aagaaggcaugaauauugu

SEQ ID NO: 6747 - RNA, 19 nt, Homo sapiens
  misc_RNA (1)...(19): siRNA sense strand
gugaaagaaggcaugaaua

SEQ ID NO: 6748 - RNA, 19 nt, Homo sapiens
  misc_RNA (1)...(19): siRNA sense strand
ggacccaacacaaaugguu

SEQ ID NO: 6749 - RNA, 19 nt, Homo sapiens
  misc_RNA (1)...(19): siRNA sense strand
ggauugcagaguuaaguuu

SEQ ID NO: 6750 - RNA, 19 nt, Homo sapiens
  misc_RNA (1)...(19): siRNA sense strand
gcacuggagagaaaggauu

SEQ ID NO: 6751 - RNA, 19 nt, Homo sapiens
  misc_RNA (1)...(19): siRNA sense strand
uauaaggguuccugcuuuc

SEQ ID NO: 6752 - RNA, 19 nt, Homo sapiens
  misc_RNA (1)...(19): siRNA sense strand
ggcaagaccagcaagaaga

SEQ ID NO: 6753 - RNA, 19 nt, Homo sapiens
  misc_RNA (1)...(19): siRNA sense strand
gaaauuugaagaugagaac

SEQ ID NO: 6754 - RNA, 19 nt, Homo sapiens
  misc_RNA (1)...(19): siRNA sense strand
gcaagaccagcaagaagau

SEQ ID NO: 6755 - RNA, 19 nt, Homo sapiens
  misc_RNA (1)...(19): siRNA sense strand
gaacuucauccuaaagcau

SEQ ID NO: 6756 - RNA, 19 nt, Homo sapiens
  misc_RNA (1)...(19): siRNA sense strand
agagaaaggauuugguuau

SEQ ID NO: 6757 - RNA, 19 nt, Homo sapiens
  misc_RNA (1)...(19): siRNA sense strand
uggcaagcauguggucuuu

SEQ ID NO: 6758 - RNA, 19 nt, Homo sapiens
  misc_RNA (1)...(19): siRNA sense strand
acacaaaugguucccaguu

SEQ ID NO: 6759 - RNA, 19 nt, Homo sapiens
  misc_RNA (1)...(19): siRNA sense strand
cuagcuggauugcagaguu

SEQ ID NO: 6760 - RNA, 19 nt, Homo sapiens
  misc_RNA (1)...(19): siRNA sense strand
cagacaaggucccaaagac

SEQ ID NO: 6761 - RNA, 19 nt, Homo sapiens
  misc_RNA (1)...(19): siRNA sense strand
gcucaucuaauccauaaag

SEQ ID NO: 6762 - RNA, 19 nt, Homo sapiens
  misc_RNA (1)...(19): siRNA sense strand
caucugcacugccaagacu

SEQ ID NO: 6763 - RNA, 19 nt, Homo sapiens
  misc_RNA (1)...(19): siRNA sense strand
ggaauggcaagaccagcaa

SEQ ID NO: 6764 - RNA, 19 nt, Homo sapiens
  misc_RNA (1)...(19): siRNA sense strand
caaagacagcagaaaauuu

SEQ ID NO: 6765 - RNA, 19 nt, Homo sapiens
  misc_RNA (1)...(19): siRNA sense strand
acaaaugguucccaguuuu

SEQ ID NO: 6766 - RNA, 19 nt, Homo sapiens
  misc_RNA (1)...(19): siRNA sense strand
ugggagaaauuugaagaug

SEQ ID NO: 6767 - RNA, 19 nt, Homo sapiens
  misc_RNA (1)...(19): siRNA sense strand
gcaaaugcuggacccaaca

SEQ ID NO: 6768 - RNA, 19 nt, Homo sapiens
  misc_RNA (1)...(19): siRNA sense strand
cccuuuggguuccauguuu

SEQ ID NO: 6769 - RNA, 19 nt, Homo sapiens
  misc_RNA (1)...(19): siRNA sense strand
ggagcuguuugcagacaag

SEQ ID NO: 6770 - RNA, 19 nt, Homo sapiens
  misc_RNA (1)...(19): siRNA sense strand
ccacugggagaaauuugaa

SEQ ID NO: 6771 - RNA, 19 nt, Homo sapiens
  misc_RNA (1)...(19): siRNA sense strand
guuauaaggguuccugcuu

SEQ ID NO: 6772 - RNA, 19 nt, Homo sapiens
  misc_RNA (1)...(19): siRNA sense strand
ugacuucacacgccauaau

SEQ ID NO: 6773 - RNA, 19 nt, Homo sapiens
  misc_RNA (1)...(19): siRNA sense strand
gcagaguuaaguuuaugau

SEQ ID NO: 6774 - RNA, 19 nt, Homo sapiens
  misc_RNA (1)...(19): siRNA sense strand
guccugaaaucuuguccau

SEQ ID NO: 6775 - RNA, 19 nt, Homo sapiens
  misc_RNA (1)...(19): siRNA sense strand
aagcuauguuaacagauug

SEQ ID NO: 6776 - RNA, 19 nt, Homo sapiens
  misc_RNA (1)...(19): siRNA sense strand
ucccaugccuagcuggauu

SEQ ID NO: 6777 - RNA, 19 nt, Homo sapiens
  misc_RNA (1)...(19): siRNA sense strand
agugacugcucaucuaauc

SEQ ID NO: 6778 - RNA, 19 nt, Homo sapiens
  misc_RNA (1)...(19): siRNA sense strand
gguuccugcuuucacagaa

SEQ ID NO: 6779 - RNA, 19 nt, Homo sapiens
  misc_RNA (1)...(19): siRNA sense strand
agacaaggucccaaagaca

SEQ ID NO: 6780 - RNA, 19 nt, Homo sapiens
  misc_RNA (1)...(19): siRNA sense strand
caagucaccacugggagaa

SEQ ID NO: 6781 - RNA, 19 nt, Homo sapiens
  misc_RNA (1)...(19): siRNA sense strand
caguaucuuugugcucuug

SEQ ID NO: 6782 - RNA, 19 nt, Homo sapiens
  misc_RNA (1)...(19): siRNA sense strand
gugguuggauggcaagcau

SEQ ID NO: 6783 - RNA, 19 nt, Homo sapiens
  misc_RNA (1)...(19): siRNA sense strand
guuccugcuuucacagaau

SEQ ID NO: 6784 - RNA, 19 nt, Homo sapiens
  misc_RNA (1)...(19): siRNA sense strand
uugcagaguuaaguuuaug

SEQ ID NO: 6785 - RNA, 19 nt, Homo sapiens
  misc_RNA (1)...(19): siRNA sense strand
caguaucccaguaucuuug

SEQ ID NO: 6786 - RNA, 19 nt, Homo sapiens
  misc_RNA (1)...(19): siRNA sense strand
cccauuugcuugcaguauc

SEQ ID NO: 6787 - RNA, 19 nt, Homo sapiens
  misc_RNA (1)...(19): siRNA sense strand
uaaggggccuggaaaccaa

SEQ ID NO: 6788 - RNA, 19 nt, Homo sapiens
  misc_RNA (1)...(19): siRNA sense strand
ccaaagacagcagaaaauu

SEQ ID NO: 6789 - RNA, 19 nt, Homo sapiens
  misc_RNA (1)...(19): siRNA sense strand
gcuggacccaacacaaaug

SEQ ID NO: 6790 - RNA, 19 nt, Homo sapiens
  misc_RNA (1)...(19): siRNA sense strand
uuccaggguuuauguguca

SEQ ID NO: 6791 - RNA, 19 nt, Homo sapiens
  misc_RNA (1)...(19): siRNA sense strand
cagcaagaagaucaccauu

SEQ ID NO: 6792 - RNA, 19 nt, Homo sapiens
  misc_RNA (1)...(19): siRNA sense strand
ucaccacugggagaaauuu

SEQ ID NO: 6793 - RNA, 19 nt, Homo sapiens
  misc_RNA (1)...(19): siRNA sense strand
gacuucacacgccauaaug

SEQ ID NO: 6794 - RNA, 19 nt, Homo sapiens
  misc_RNA (1)...(19): siRNA sense strand
caacuaagcaguacauuua

SEQ ID NO: 6795 - RNA, 19 nt, Homo sapiens
  misc_RNA (1)...(19): siRNA sense strand
gccaagaacugcuguguaa

SEQ ID NO: 6796 - RNA, 19 nt, Homo sapiens
  misc_RNA (1)...(19): siRNA sense strand
gaaggaaggugccucacaa

SEQ ID NO: 6797 - RNA, 19 nt, Homo sapiens
  misc_RNA (1)...(19): siRNA sense strand
gaaggugccucacaauguu

SEQ ID NO: 6798 - RNA, 19 nt, Homo sapiens
  misc_RNA (1)...(19): siRNA sense strand
gaacugcuguguaaguaug

SEQ ID NO: 6799 - RNA, 19 nt, Homo sapiens
  misc_RNA (1)...(19): siRNA sense strand
gaauuugguucucagcuuu

SEQ ID NO: 6800 - RNA, 19 nt, Homo sapiens
  misc_RNA (1)...(19): siRNA sense strand
gagaugagauccaguacau

SEQ ID NO: 6801 - RNA, 19 nt, Homo sapiens
  misc_RNA (1)...(19): siRNA sense strand
aaucagaucuggaaacuuc

SEQ ID NO: 6802 - RNA, 19 nt, Homo sapiens
  misc_RNA (1)...(19): siRNA sense strand
guaaguaugucccaugcaa

SEQ ID NO: 6803 - RNA, 19 nt, Homo sapiens
  misc_RNA (1)...(19): siRNA sense strand
acaagaaagucacggagua

SEQ ID NO: 6804 - RNA, 19 nt, Homo sapiens
  misc_RNA (1)...(19): siRNA sense strand
uaacugggccucuugaauu

SEQ ID NO: 6805 - RNA, 19 nt, Homo sapiens
  misc_RNA (1)...(19): siRNA sense strand
gaacacuggacaauaguuu

SEQ ID NO: 6806 - RNA, 19 nt, Homo sapiens
  misc_RNA (1)...(19): siRNA sense strand
gaacgcaggaugcccaauu

SEQ ID NO: 6807 - RNA, 19 nt, Homo sapiens
  misc_RNA (1)...(19): siRNA sense strand
caacaagggcaacaagaaa

SEQ ID NO: 6808 - RNA, 19 nt, Homo sapiens
  misc_RNA (1)...(19): siRNA sense strand
gaccuacgccuaccuguuu

SEQ ID NO: 6809 - RNA, 19 nt, Homo sapiens
  misc_RNA (1)...(19): siRNA sense strand
gcaacuaagcaguacauuu

SEQ ID NO: 6810 - RNA, 19 nt, Homo sapiens
  misc_RNA (1)...(19): siRNA sense strand
agagaacacuggacaauag

SEQ ID NO: 6811 - RNA, 19 nt, Homo sapiens
  misc_RNA (1)...(19): siRNA sense strand
ggaaggugccucacaaugu

SEQ ID NO: 6812 - RNA, 19 nt, Homo sapiens
  misc_RNA (1)...(19): siRNA sense strand
ucuacaagcuggucaguga

SEQ ID NO: 6813 - RNA, 19 nt, Homo sapiens
  misc_RNA (1)...(19): siRNA sense strand
gagagaacacuggacaaua

SEQ ID NO: 6814 - RNA, 19 nt, Homo sapiens
  misc_RNA (1)...(19): siRNA sense strand
cuugagcucuuccugaaua

SEQ ID NO: 6815 - RNA, 19 nt, Homo sapiens
  misc_RNA (1)...(19): siRNA sense strand
gggaggacauagccaauuc

SEQ ID NO: 6816 - RNA, 19 nt, Homo sapiens
  misc_RNA (1)...(19): siRNA sense strand
gcacucacgcucauuucua

SEQ ID NO: 6817 - RNA, 19 nt, Homo sapiens
  misc_RNA (1)...(19): siRNA sense strand
gcaguggucucgcccuugu

SEQ ID NO: 6818 - RNA, 19 nt, Homo sapiens
  misc_RNA (1)...(19): siRNA sense strand
cauuaaagaccuucaugua

SEQ ID NO: 6819 - RNA, 19 nt, Homo sapiens
  misc_RNA (1)...(19): siRNA sense strand
ccucaacuuugccaccuua

SEQ ID NO: 6820 - RNA, 19 nt, Homo sapiens
  misc_RNA (1)...(19): siRNA sense strand
cccaaggccucauuaaaga

SEQ ID NO: 6821 - RNA, 19 nt, Homo sapiens
  misc_RNA (1)...(19): siRNA sense strand
ucagauaaacugccaagaa

SEQ ID NO: 6822 - RNA, 19 nt, Homo sapiens
  misc_RNA (1)...(19): siRNA sense strand
gaaauuguggaacccauga

SEQ ID NO: 6823 - RNA, 19 nt, Homo sapiens
  misc_RNA (1)...(19): siRNA sense strand
cucaguggcuucuaaguuu

SEQ ID NO: 6824 - RNA, 19 nt, Homo sapiens
  misc_RNA (1)...(19): siRNA sense strand
ccucuugaauuuacauuug

SEQ ID NO: 6825 - RNA, 19 nt, Homo sapiens
  misc_RNA (1)...(19): siRNA sense strand
cagauaaacugccaagaac

SEQ ID NO: 6826 - RNA, 19 nt, Homo sapiens
  misc_RNA (1)...(19): siRNA sense strand
cgacaugccugccaucaac

SEQ ID NO: 6827 - RNA, 19 nt, Homo sapiens
  misc_RNA (1)...(19): siRNA sense strand
gacugugucucgaauaaau

SEQ ID NO: 6828 - RNA, 19 nt, Homo sapiens
  misc_RNA (1)...(19): siRNA sense strand
gagcugagaucacgcuacu

SEQ ID NO: 6829 - RNA, 19 nt, Homo sapiens
  misc_RNA (1)...(19): siRNA sense strand
gcaguacauuuagcuguga

SEQ ID NO: 6830 - RNA, 19 nt, Homo sapiens
  misc_RNA (1)...(19): siRNA sense strand
gaaggagaagccacagaaa

SEQ ID NO: 6831 - RNA, 19 nt, Homo sapiens
  misc_RNA (1)...(19): siRNA sense strand
gcagacggguggagagaag

SEQ ID NO: 6832 - RNA, 19 nt, Homo sapiens
  misc_RNA (1)...(19): siRNA sense strand
uaugucccaugcaauauuu

SEQ ID NO: 6833 - RNA, 19 nt, Homo sapiens
  misc_RNA (1)...(19): siRNA sense strand
caacauggacggccacauc

SEQ ID NO: 6834 - RNA, 19 nt, Homo sapiens
  misc_RNA (1)...(19): siRNA sense strand
cgacaucgacuauauagca

SEQ ID NO: 6835 - RNA, 19 nt, Homo sapiens
  misc_RNA (1)...(19): siRNA sense strand
aagaacugcuguguaagua

SEQ ID NO: 6836 - RNA, 19 nt, Homo sapiens
  misc_RNA (1)...(19): siRNA sense strand
ggaggugaaguauaaauuc

SEQ ID NO: 6837 - RNA, 19 nt, Homo sapiens
  misc_RNA (1)...(19): siRNA sense strand
caagaaagucacggaguaa

SEQ ID NO: 6838 - RNA, 19 nt, Homo sapiens
  misc_RNA (1)...(19): siRNA sense strand
ggacaggugccagguagaa

SEQ ID NO: 6839 - RNA, 19 nt, Homo sapiens
  misc_RNA (1)...(19): siRNA sense strand
uuguggaggugaaguauaa

SEQ ID NO: 6840 - RNA, 19 nt, Homo sapiens
  misc_RNA (1)...(19): siRNA sense strand
gccuauaccuuguccaauc

SEQ ID NO: 6841 - RNA, 19 nt, Homo sapiens
  misc_RNA (1)...(19): siRNA sense strand
agucuaggaugaaagcuuu

SEQ ID NO: 6842 - RNA, 19 nt, Homo sapiens
  misc_RNA (1)...(19): siRNA sense strand
cuacagggcuuuacaaacc

SEQ ID NO: 6843 - RNA, 19 nt, Homo sapiens
  misc_RNA (1)...(19): siRNA sense strand
agacugugguggacuuuga

SEQ ID NO: 6844 - RNA, 19 nt, Homo sapiens
  misc_RNA (1)...(19): siRNA sense strand
gagugucagugccuacuug

SEQ ID NO: 6845 - RNA, 19 nt, Homo sapiens
  misc_RNA (1)...(19): siRNA sense strand
gauaaacugccaagaacug

SEQ ID NO: 6846 - RNA, 19 nt, Homo sapiens
  misc_RNA (1)...(19): siRNA sense strand
caacuuugccaccuuacaa

SEQ ID NO: 6847 - RNA, 19 nt, Homo sapiens
  misc_RNA (1)...(19): siRNA sense strand
ugagaccgauguccucuuc

SEQ ID NO: 6848 - RNA, 19 nt, Homo sapiens
  misc_RNA (1)...(19): siRNA sense strand
ugaauuugguucucagcuu

SEQ ID NO: 6849 - RNA, 19 nt, Homo sapiens
  misc_RNA (1)...(19): siRNA sense strand
gcccaaggccucauuaaag

SEQ ID NO: 6850 - RNA, 19 nt, Homo sapiens
  misc_RNA (1)...(19): siRNA sense strand
caagaacugcuguguaagu

SEQ ID NO: 6851 - RNA, 19 nt, Homo sapiens
  misc_RNA (1)...(19): siRNA sense strand
gguaagacguggguugagu

SEQ ID NO: 6852 - RNA, 19 nt, Homo sapiens
  misc_RNA (1)...(19): siRNA sense strand
gcgccaagacgaccuuuga

SEQ ID NO: 6853 - RNA, 19 nt, Homo sapiens
  misc_RNA (1)...(19): siRNA sense strand
ccgccgacaucgacuauau

SEQ ID NO: 6854 - RNA, 19 nt, Homo sapiens
  misc_RNA (1)...(19): siRNA sense strand
cgagguggguggaucacuu

SEQ ID NO: 6855 - RNA, 19 nt, Homo sapiens
  misc_RNA (1)...(19): siRNA sense strand
gaaaccccgucucuacuaa

SEQ ID NO: 6856 - RNA, 19 nt, Homo sapiens
  misc_RNA (1)...(19): siRNA sense strand
ugagcacccugccuacuug

SEQ ID NO: 6857 - RNA, 19 nt, Homo sapiens
  misc_RNA (1)...(19): siRNA sense strand
auacugaauucuagaagga

SEQ ID NO: 6858 - RNA, 19 nt, Homo sapiens
  misc_RNA (1)...(19): siRNA sense strand
ccaagacgaccuuugaugu

SEQ ID NO: 6859 - RNA, 19 nt, Homo sapiens
  misc_RNA (1)...(19): siRNA sense strand
gaugcccaauuccauuuga

SEQ ID NO: 6860 - RNA, 19 nt, Homo sapiens
  misc_RNA (1)...(19): siRNA sense strand
aaacugggagguacaagaa

SEQ ID NO: 6861 - RNA, 19 nt, Homo sapiens
  misc_RNA (1)...(19): siRNA sense strand
uggcagggcuggagacauc

SEQ ID NO: 6862 - RNA, 19 nt, Homo sapiens
  misc_RNA (1)...(19): siRNA sense strand
guccugggcuccugacuca

SEQ ID NO: 6863 - RNA, 19 nt, Homo sapiens
  misc_RNA (1)...(19): siRNA sense strand
ucucaugggccucaacuuu

SEQ ID NO: 6864 - RNA, 19 nt, Homo sapiens
  misc_RNA (1)...(19): siRNA sense strand
ugaaggagaagccacagaa

SEQ ID NO: 6865 - RNA, 19 nt, Homo sapiens
  misc_RNA (1)...(19): siRNA sense strand
gcaugguggugcacacugu

SEQ ID NO: 6866 - RNA, 19 nt, Homo sapiens
  misc_RNA (1)...(19): siRNA sense strand
cuggagaguucuugagcua

SEQ ID NO: 6867 - RNA, 19 nt, Homo sapiens
  misc_RNA (1)...(19): siRNA sense strand
cagagccaaugccaaguga

SEQ ID NO: 6868 - RNA, 19 nt, Homo sapiens
  misc_RNA (1)...(19): siRNA sense strand
gaaagucacggaguaagca

SEQ ID NO: 6869 - RNA, 19 nt, Homo sapiens
  misc_RNA (1)...(19): siRNA sense strand
ucaacaagggcaacaagaa

SEQ ID NO: 6870 - RNA, 19 nt, Homo sapiens
  misc_RNA (1)...(19): siRNA sense strand
ggacaagcccaaacaaagc

SEQ ID NO: 6871 - RNA, 19 nt, Homo sapiens
  misc_RNA (1)...(19): siRNA sense strand
augcagaccucgcaccauu

SEQ ID NO: 6872 - RNA, 19 nt, Homo sapiens
  misc_RNA (1)...(19): siRNA sense strand
agaauaagaagaagacugu

SEQ ID NO: 6873 - RNA, 19 nt, Homo sapiens
  misc_RNA (1)...(19): siRNA sense strand
ccgggucccuccagaaaga

SEQ ID NO: 6874 - RNA, 19 nt, Homo sapiens
  misc_RNA (1)...(19): siRNA sense strand
ggagaucaccaagaagaug

SEQ ID NO: 6875 - RNA, 19 nt, Homo sapiens
  misc_RNA (1)...(19): siRNA sense strand
ugucauugauggagacuuc

SEQ ID NO: 6876 - RNA, 19 nt, Homo sapiens
  misc_RNA (1)...(19): siRNA sense strand
aaucaacccugcccggaau

SEQ ID NO: 6877 - RNA, 19 nt, Homo sapiens
  misc_RNA (1)...(19): siRNA sense strand
gcugggagguggagauugc

SEQ ID NO: 6878 - RNA, 19 nt, Homo sapiens
  misc_RNA (1)...(19): siRNA sense strand
aaguaugucccaugcaaua

SEQ ID NO: 6879 - RNA, 19 nt, Homo sapiens
  misc_RNA (1)...(19): siRNA sense strand
gagaagcaggcagcaguuu

SEQ ID NO: 6880 - RNA, 19 nt, Homo sapiens
  misc_RNA (1)...(19): siRNA sense strand
aacugggccucuugaauuu

SEQ ID NO: 6881 - RNA, 19 nt, Homo sapiens
  misc_RNA (1)...(19): siRNA sense strand
gguggugggugccuguaau

SEQ ID NO: 6882 - RNA, 19 nt, Homo sapiens
  misc_RNA (1)...(19): siRNA sense strand
cauguguguuugaggauga

SEQ ID NO: 6883 - RNA, 19 nt, Homo sapiens
  misc_RNA (1)...(19): siRNA sense strand
ucaaucagaucuggaaacu

SEQ ID NO: 6884 - RNA, 19 nt, Homo sapiens
  misc_RNA (1)...(19): siRNA sense strand
ugucagugccuacuugauu

SEQ ID NO: 6885 - RNA, 19 nt, Homo sapiens
  misc_RNA (1)...(19): siRNA sense strand
ggacugggagugaggaagu

SEQ ID NO: 6886 - RNA, 19 nt, Homo sapiens
  misc_RNA (1)...(19): siRNA sense strand
gccagcggcuucccuucaa

SEQ ID NO: 6887 - RNA, 19 nt, Homo sapiens
  misc_RNA (1)...(19): siRNA sense strand
guaacugggccucuugaau

SEQ ID NO: 6888 - RNA, 19 nt, Homo sapiens
  misc_RNA (1)...(19): siRNA sense strand
guaugucccaugcaauauu

SEQ ID NO: 6889 - RNA, 19 nt, Homo sapiens
  misc_RNA (1)...(19): siRNA sense strand
gcugaggccuggcaagacu

SEQ ID NO: 6890 - RNA, 19 nt, Homo sapiens
  misc_RNA (1)...(19): siRNA sense strand
agaagacugugguggacuu

SEQ ID NO: 6891 - RNA, 19 nt, Homo sapiens
  misc_RNA (1)...(19): siRNA sense strand
ccagggaggacuucuacaa

SEQ ID NO: 6892 - RNA, 19 nt, Homo sapiens
  misc_RNA (1)...(19): siRNA sense strand
gcgagugccgcgaagguaa

SEQ ID NO: 6893 - RNA, 19 nt, Homo sapiens
  misc_RNA (1)...(19): siRNA sense strand
ggucccagaucccaagagu

SEQ ID NO: 6894 - RNA, 19 nt, Homo sapiens
  misc_RNA (1)...(19): siRNA sense strand
ccacaucuuuccucaagua

SEQ ID NO: 6895 - RNA, 19 nt, Homo sapiens
  misc_RNA (1)...(19): siRNA sense strand
ucucuuagcuacuguauga

SEQ ID NO: 6896 - RNA, 19 nt, Homo sapiens
  misc_RNA (1)...(19): siRNA sense strand
ccucaaguauccucuauuu

SEQ ID NO: 6897 - RNA, 19 nt, Homo sapiens
  misc_RNA (1)...(19): siRNA sense strand
ccacaggucaauaaauuua

SEQ ID NO: 6898 - RNA, 19 nt, Homo sapiens
  misc_RNA (1)...(19): siRNA sense strand
ucacugaaauguuuggauu

SEQ ID NO: 6899 - RNA, 19 nt, Homo sapiens
  misc_RNA (1)...(19): siRNA sense strand
caagaaauccucccacuuc

SEQ ID NO: 6900 - RNA, 19 nt, Homo sapiens
  misc_RNA (1)...(19): siRNA sense strand
ggcaacaagucuuaacaaa

SEQ ID NO: 6901 - RNA, 19 nt, Homo sapiens
  misc_RNA (1)...(19): siRNA sense strand
gcgagugagucuauggaua

SEQ ID NO: 6902 - RNA, 19 nt, Homo sapiens
  misc_RNA (1)...(19): siRNA sense strand
ccaggcaaauucacuguuu

SEQ ID NO: 6903 - RNA, 19 nt, Homo sapiens
  misc_RNA (1)...(19): siRNA sense strand
caacaagucuuaacaaacc

SEQ ID NO: 6904 - RNA, 19 nt, Homo sapiens
  misc_RNA (1)...(19): siRNA sense strand
gugagucuauggauaauga

SEQ ID NO: 6905 - RNA, 19 nt, Homo sapiens
  misc_RNA (1)...(19): siRNA sense strand
aaaccaacaucuuugagaa

SEQ ID NO: 6906 - RNA, 19 nt, Homo sapiens
  misc_RNA (1)...(19): siRNA sense strand
uuagaggcauuguuaguuu

SEQ ID NO: 6907 - RNA, 19 nt, Homo sapiens
  misc_RNA (1)...(19): siRNA sense strand
ggaucaaucuucacuaaac

SEQ ID NO: 6908 - RNA, 19 nt, Homo sapiens
  misc_RNA (1)...(19): siRNA sense strand
ggagaaauggauaaacuga

SEQ ID NO: 6909 - RNA, 19 nt, Homo sapiens
  misc_RNA (1)...(19): siRNA sense strand
gagcauucgcuguacuuua

SEQ ID NO: 6910 - RNA, 19 nt, Homo sapiens
  misc_RNA (1)...(19): siRNA sense strand
agauaaaccuggagauaau

SEQ ID NO: 6911 - RNA, 19 nt, Homo sapiens
  misc_RNA (1)...(19): siRNA sense strand
ugagaagauucacaacaaa

SEQ ID NO: 6912 - RNA, 19 nt, Homo sapiens
  misc_RNA (1)...(19): siRNA sense strand
uagaggcauuguuaguuua

SEQ ID NO: 6913 - RNA, 19 nt, Homo sapiens
  misc_RNA (1)...(19): siRNA sense strand
cgagugagucuauggauaa

SEQ ID NO: 6914 - RNA, 19 nt, Homo sapiens
  misc_RNA (1)...(19): siRNA sense strand
aaagauaaaccuggagaua

SEQ ID NO: 6915 - RNA, 19 nt, Homo sapiens
  misc_RNA (1)...(19): siRNA sense strand
agcauucgcuguacuuuaa

SEQ ID NO: 6916 - RNA, 19 nt, Homo sapiens
  misc_RNA (1)...(19): siRNA sense strand
gaagggcgagugagucuau

SEQ ID NO: 6917 - RNA, 19 nt, Homo sapiens
  misc_RNA (1)...(19): siRNA sense strand
gacaggaucucucucuuuu

SEQ ID NO: 6918 - RNA, 19 nt, Homo sapiens
  misc_RNA (1)...(19): siRNA sense strand
gauaaaccuggagauaaua

SEQ ID NO: 6919 - RNA, 19 nt, Homo sapiens
  misc_RNA (1)...(19): siRNA sense strand
cuagcuguaugauuuguuu

SEQ ID NO: 6920 - RNA, 19 nt, Homo sapiens
  misc_RNA (1)...(19): siRNA sense strand
uugagaagauucacaacaa

SEQ ID NO: 6921 - RNA, 19 nt, Homo sapiens
  misc_RNA (1)...(19): siRNA sense strand
uuccacaggucaauaaauu

SEQ ID NO: 6922 - RNA, 19 nt, Homo sapiens
  misc_RNA (1)...(19): siRNA sense strand
guucugagcauucgcugua

SEQ ID NO: 6923 - RNA, 19 nt, Homo sapiens
  misc_RNA (1)...(19): siRNA sense strand
gaugaagacuagaaguuuu

SEQ ID NO: 6924 - RNA, 19 nt, Homo sapiens
  misc_RNA (1)...(19): siRNA sense strand
ggagagaggcaacaagucu

SEQ ID NO: 6925 - RNA, 19 nt, Homo sapiens
  misc_RNA (1)...(19): siRNA sense strand
uuagucaacuguagguuau

SEQ ID NO: 6926 - RNA, 19 nt, Homo sapiens
  misc_RNA (1)...(19): siRNA sense strand
acaaugcaaucuccacuca

SEQ ID NO: 6927 - RNA, 19 nt, Homo sapiens
  misc_RNA (1)...(19): siRNA sense strand
ugaaauguuuggauucucu

SEQ ID NO: 6928 - RNA, 19 nt, Homo sapiens
  misc_RNA (1)...(19): siRNA sense strand
uggguaaacuuuccaguag

SEQ ID NO: 6929 - RNA, 19 nt, Homo sapiens
  misc_RNA (1)...(19): siRNA sense strand
gaucaaucuucacuaaacu

SEQ ID NO: 6930 - RNA, 19 nt, Homo sapiens
  misc_RNA (1)...(19): siRNA sense strand
aagauaaaccuggagauaa

SEQ ID NO: 6931 - RNA, 19 nt, Homo sapiens
  misc_RNA (1)...(19): siRNA sense strand
cuacagucgucacucuauu

SEQ ID NO: 6932 - RNA, 19 nt, Homo sapiens
  misc_RNA (1)...(19): siRNA sense strand
acccuaaucuuucacuuga

SEQ ID NO: 6933 - RNA, 19 nt, Homo sapiens
  misc_RNA (1)...(19): siRNA sense strand
agagaggcaacaagucuua

SEQ ID NO: 6934 - RNA, 19 nt, Homo sapiens
  misc_RNA (1)...(19): siRNA sense strand
ccagguuucugucauucuu

SEQ ID NO: 6935 - RNA, 19 nt, Homo sapiens
  misc_RNA (1)...(19): siRNA sense strand
gcaacaagucuuaacaaac

SEQ ID NO: 6936 - RNA, 19 nt, Homo sapiens
  misc_RNA (1)...(19): siRNA sense strand
gaaaaguccgauuauauug

SEQ ID NO: 6937 - RNA, 19 nt, Homo sapiens
  misc_RNA (1)...(19): siRNA sense strand
ggggaucaaucuucacuaa

SEQ ID NO: 6938 - RNA, 19 nt, Homo sapiens
  misc_RNA (1)...(19): siRNA sense strand
agacaggaucucucucuuu

SEQ ID NO: 6939 - RNA, 19 nt, Homo sapiens
  misc_RNA (1)...(19): siRNA sense strand
ugaugaagacuagaaguuu

SEQ ID NO: 6940 - RNA, 19 nt, Homo sapiens
  misc_RNA (1)...(19): siRNA sense strand
uggcauggcugaugaagac

SEQ ID NO: 6941 - RNA, 19 nt, Homo sapiens
  misc_RNA (1)...(19): siRNA sense strand
agucgucacucuauuguca

SEQ ID NO: 6942 - RNA, 19 nt, Homo sapiens
  misc_RNA (1)...(19): siRNA sense strand
agucaacuguagguuauuu

SEQ ID NO: 6943 - RNA, 19 nt, Homo sapiens
  misc_RNA (1)...(19): siRNA sense strand
ggaauuugucagcguucua

SEQ ID NO: 6944 - RNA, 19 nt, Homo sapiens
  misc_RNA (1)...(19): siRNA sense strand
guccauuucccacaucuuu

SEQ ID NO: 6945 - RNA, 19 nt, Homo sapiens
  misc_RNA (1)...(19): siRNA sense strand
agggagagcugagccaguu

SEQ ID NO: 6946 - RNA, 19 nt, Homo sapiens
  misc_RNA (1)...(19): siRNA sense strand
gcaaauucacuguuucacu

SEQ ID NO: 6947 - RNA, 19 nt, Homo sapiens
  misc_RNA (1)...(19): siRNA sense strand
ugggagaaauggauaaacu

SEQ ID NO: 6948 - RNA, 19 nt, Homo sapiens
  misc_RNA (1)...(19): siRNA sense strand
aaaguccgauuauauuggu

SEQ ID NO: 6949 - RNA, 19 nt, Homo sapiens
  misc_RNA (1)...(19): siRNA sense strand
gcugucauggguaaacuuu

SEQ ID NO: 6950 - RNA, 19 nt, Homo sapiens
  misc_RNA (1)...(19): siRNA sense strand
aaccuugucucuuguaucu

SEQ ID NO: 6951 - RNA, 19 nt, Homo sapiens
  misc_RNA (1)...(19): siRNA sense strand
ccgauuauauugguguguu

SEQ ID NO: 6952 - RNA, 19 nt, Homo sapiens
  misc_RNA (1)...(19): siRNA sense strand
uaaacuugaagcagucgua

SEQ ID NO: 6953 - RNA, 19 nt, Homo sapiens
  misc_RNA (1)...(19): siRNA sense strand
accuggagauaauaacaua

SEQ ID NO: 6954 - RNA, 19 nt, Homo sapiens
  misc_RNA (1)...(19): siRNA sense strand
ccuguggacaacuuauuua

SEQ ID NO: 6955 - RNA, 19 nt, Homo sapiens
  misc_RNA (1)...(19): siRNA sense strand
gaaaaggaacagugugguu

SEQ ID NO: 6956 - RNA, 19 nt, Homo sapiens
  misc_RNA (1)...(19): siRNA sense strand
gagugagucuauggauaau

SEQ ID NO: 6957 - RNA, 19 nt, Homo sapiens
  misc_RNA (1)...(19): siRNA sense strand
aauauuuccugacuugagu

SEQ ID NO: 6958 - RNA, 19 nt, Homo sapiens
  misc_RNA (1)...(19): siRNA sense strand
gggaucaaucuucacuaaa

SEQ ID NO: 6959 - RNA, 19 nt, Homo sapiens
  misc_RNA (1)...(19): siRNA sense strand
gcuacagucgucacucuau

SEQ ID NO: 6960 - RNA, 19 nt, Homo sapiens
  misc_RNA (1)...(19): siRNA sense strand
ucccacaucuuuccucaag

SEQ ID NO: 6961 - RNA, 19 nt, Homo sapiens
  misc_RNA (1)...(19): siRNA sense strand
ggguaaacuuuccaguagu

SEQ ID NO: 6962 - RNA, 19 nt, Homo sapiens
  misc_RNA (1)...(19): siRNA sense strand
gcauggcugaugaagacua

SEQ ID NO: 6963 - RNA, 19 nt, Homo sapiens
  misc_RNA (1)...(19): siRNA sense strand
caucuuuccucaaguaucc

SEQ ID NO: 6964 - RNA, 19 nt, Homo sapiens
  misc_RNA (1)...(19): siRNA sense strand
cagaguccauuucccacau

SEQ ID NO: 6965 - RNA, 19 nt, Homo sapiens
  misc_RNA (1)...(19): siRNA sense strand
ggaugaagggcgagugagu

SEQ ID NO: 6966 - RNA, 19 nt, Homo sapiens
  misc_RNA (1)...(19): siRNA sense strand
gagagaggcaacaagucuu

SEQ ID NO: 6967 - RNA, 19 nt, Homo sapiens
  misc_RNA (1)...(19): siRNA sense strand
aaaggaacagugugguuug

SEQ ID NO: 6968 - RNA, 19 nt, Homo sapiens
  misc_RNA (1)...(19): siRNA sense strand
gagaggcaacaagucuuaa

SEQ ID NO: 6969 - RNA, 19 nt, Homo sapiens
  misc_RNA (1)...(19): siRNA sense strand
uuuagucaacuguagguua

SEQ ID NO: 6970 - RNA, 19 nt, Homo sapiens
  misc_RNA (1)...(19): siRNA sense strand
agaaaagcaugaugggaaa

SEQ ID NO: 6971 - RNA, 19 nt, Homo sapiens
  misc_RNA (1)...(19): siRNA sense strand
cguccuaauugagaagauu

SEQ ID NO: 6972 - RNA, 19 nt, Homo sapiens
  misc_RNA (1)...(19): siRNA sense strand
uaacccuaaucuuucacuu

SEQ ID NO: 6973 - RNA, 19 nt, Homo sapiens
  misc_RNA (1)...(19): siRNA sense strand
ucaagaaauccucccacuu

SEQ ID NO: 6974 - RNA, 19 nt, Homo sapiens
  misc_RNA (1)...(19): siRNA sense strand
caguugggguuuugcaaua

SEQ ID NO: 6975 - RNA, 19 nt, Homo sapiens
  misc_RNA (1)...(19): siRNA sense strand
ggagagcugagccaguugu

SEQ ID NO: 6976 - RNA, 19 nt, Homo sapiens
  misc_RNA (1)...(19): siRNA sense strand
gagaagauucacaacaaaa

SEQ ID NO: 6977 - RNA, 19 nt, Homo sapiens
  misc_RNA (1)...(19): siRNA sense strand
gaggcaacaagucuuaaca

SEQ ID NO: 6978 - RNA, 19 nt, Homo sapiens
  misc_RNA (1)...(19): siRNA sense strand
ugaauucccuuuuagucaa

SEQ ID NO: 6979 - RNA, 19 nt, Homo sapiens
  misc_RNA (1)...(19): siRNA sense strand
ucgcuguacuuuaagauac

SEQ ID NO: 6980 - RNA, 19 nt, Homo sapiens
  misc_RNA (1)...(19): siRNA sense strand
ucaaucuucacuaaacuug

SEQ ID NO: 6981 - RNA, 19 nt, Homo sapiens
  misc_RNA (1)...(19): siRNA sense strand
gaaauguuuggauucucuu

SEQ ID NO: 6982 - RNA, 19 nt, Homo sapiens
  misc_RNA (1)...(19): siRNA sense strand
gggcaaauggaugggaauu

SEQ ID NO: 6983 - RNA, 19 nt, Homo sapiens
  misc_RNA (1)...(19): siRNA sense strand
gaccuugccgugugugugu

SEQ ID NO: 6984 - RNA, 19 nt, Homo sapiens
  misc_RNA (1)...(19): siRNA sense strand
caggcaaauucacuguuuc

SEQ ID NO: 6985 - RNA, 19 nt, Homo sapiens
  misc_RNA (1)...(19): siRNA sense strand
uggauucucuuagcuacug

SEQ ID NO: 6986 - RNA, 19 nt, Homo sapiens
  misc_RNA (1)...(19): siRNA sense strand
ccaucauccuuuguucuga

SEQ ID NO: 6987 - RNA, 19 nt, Homo sapiens
  misc_RNA (1)...(19): siRNA sense strand
gggagaaauggauaaacug

SEQ ID NO: 6988 - RNA, 19 nt, Homo sapiens
  misc_RNA (1)...(19): siRNA sense strand
aaaguuccacaggucaaua

SEQ ID NO: 6989 - RNA, 19 nt, Homo sapiens
  misc_RNA (1)...(19): siRNA sense strand
cgauuauauugguguguuc

SEQ ID NO: 6990 - RNA, 19 nt, Homo sapiens
  misc_RNA (1)...(19): siRNA sense strand
gaauuugucagcguucuac

SEQ ID NO: 6991 - RNA, 19 nt, Homo sapiens
  misc_RNA (1)...(19): siRNA sense strand
gagucuauggauaaugaaa

SEQ ID NO: 6992 - RNA, 19 nt, Homo sapiens
  misc_RNA (1)...(19): siRNA sense strand
gucaacuguagguuauuua

SEQ ID NO: 6993 - RNA, 19 nt, Homo sapiens
  misc_RNA (1)...(19): siRNA sense strand
cauuguuaguuuagugugu

SEQ ID NO: 6994 - RNA, 19 nt, Homo sapiens
  misc_RNA (1)...(19): siRNA sense strand
gaacgaagaagaagauuua

SEQ ID NO: 6995 - RNA, 19 nt, Homo sapiens
  misc_RNA (1)...(19): siRNA sense strand
gaacaagggaaccaucuua

SEQ ID NO: 6996 - RNA, 19 nt, Homo sapiens
  misc_RNA (1)...(19): siRNA sense strand
gcagauggaugauguaauc

SEQ ID NO: 6997 - RNA, 19 nt, Homo sapiens
  misc_RNA (1)...(19): siRNA sense strand
caagagcacuggccaaaga

SEQ ID NO: 6998 - RNA, 19 nt, Homo sapiens
  misc_RNA (1)...(19): siRNA sense strand
gaccuaaccuguacaacaa

SEQ ID NO: 6999 - RNA, 19 nt, Homo sapiens
  misc_RNA (1)...(19): siRNA sense strand
gaggaaaucuugggcuuga

SEQ ID NO: 7000 - RNA, 19 nt, Homo sapiens
  misc_RNA (1)...(19): siRNA sense strand
agacggagcacacuuguua

SEQ ID NO: 7001 - RNA, 19 nt, Homo sapiens
  misc_RNA (1)...(19): siRNA sense strand
gcucauggacuuucccuua

SEQ ID NO: 7002 - RNA, 19 nt, Homo sapiens
  misc_RNA (1)...(19): siRNA sense strand
guaccuuucuaccacuuua

SEQ ID NO: 7003 - RNA, 19 nt, Homo sapiens
  misc_RNA (1)...(19): siRNA sense strand
agaacuagguacuuugauu

SEQ ID NO: 7004 - RNA, 19 nt, Homo sapiens
  misc_RNA (1)...(19): siRNA sense strand
gaacuagguacuuugauuc

SEQ ID NO: 7005 - RNA, 19 nt, Homo sapiens
  misc_RNA (1)...(19): siRNA sense strand
aaauaaacaugccaaccaa

SEQ ID NO: 7006 - RNA, 19 nt, Homo sapiens
  misc_RNA (1)...(19): siRNA sense strand
cgaagaagaagauuuaaca

SEQ ID NO: 7007 - RNA, 19 nt, Homo sapiens
  misc_RNA (1)...(19): siRNA sense strand
aagcauccguggacuauau

SEQ ID NO: 7008 - RNA, 19 nt, Homo sapiens
  misc_RNA (1)...(19): siRNA sense strand
guaugcagauggaugaugu

SEQ ID NO: 7009 - RNA, 19 nt, Homo sapiens
  misc_RNA (1)...(19): siRNA sense strand
ugacaucauuagccuagaa

SEQ ID NO: 7010 - RNA, 19 nt, Homo sapiens
  misc_RNA (1)...(19): siRNA sense strand
ggcagcagguaaagcagua

SEQ ID NO: 7011 - RNA, 19 nt, Homo sapiens
  misc_RNA (1)...(19): siRNA sense strand
uggcuaugcuuacgcuuaa

SEQ ID NO: 7012 - RNA, 19 nt, Homo sapiens
  misc_RNA (1)...(19): siRNA sense strand
caaccugauugaacgaaga

SEQ ID NO: 7013 - RNA, 19 nt, Homo sapiens
  misc_RNA (1)...(19): siRNA sense strand
caaauaaacaugccaacca

SEQ ID NO: 7014 - RNA, 19 nt, Homo sapiens
  misc_RNA (1)...(19): siRNA sense strand
gauggaugauguaaucgau

SEQ ID NO: 7015 - RNA, 19 nt, Homo sapiens
  misc_RNA (1)...(19): siRNA sense strand
gauggauccugcuuugcaa

SEQ ID NO: 7016 - RNA, 19 nt, Homo sapiens
  misc_RNA (1)...(19): siRNA sense strand
cuaccacuuuagcaaauaa

SEQ ID NO: 7017 - RNA, 19 nt, Homo sapiens
  misc_RNA (1)...(19): siRNA sense strand
gaauacaggaacuugaaau

SEQ ID NO: 7018 - RNA, 19 nt, Homo sapiens
  misc_RNA (1)...(19): siRNA sense strand
uggaugauguaaucgauga

SEQ ID NO: 7019 - RNA, 19 nt, Homo sapiens
  misc_RNA (1)...(19): siRNA sense strand
ggaaaucuugggcuugaug

SEQ ID NO: 7020 - RNA, 19 nt, Homo sapiens
  misc_RNA (1)...(19): siRNA sense strand
ugaaucggaucaucaagca

SEQ ID NO: 7021 - RNA, 19 nt, Homo sapiens
  misc_RNA (1)...(19): siRNA sense strand
ucauggacuuucccuuauu

SEQ ID NO: 7022 - RNA, 19 nt, Homo sapiens
  misc_RNA (1)...(19): siRNA sense strand
cagaauacaggaacuugaa

SEQ ID NO: 7023 - RNA, 19 nt, Homo sapiens
  misc_RNA (1)...(19): siRNA sense strand
cagccaaccuucccaacau

SEQ ID NO: 7024 - RNA, 19 nt, Homo sapiens
  misc_RNA (1)...(19): siRNA sense strand
guccugagcuugccauguc

SEQ ID NO: 7025 - RNA, 19 nt, Homo sapiens
  misc_RNA (1)...(19): siRNA sense strand
gaagagacggagcacacuu

SEQ ID NO: 7026 - RNA, 19 nt, Homo sapiens
  misc_RNA (1)...(19): siRNA sense strand
ggacuauauccgaaaguug

SEQ ID NO: 7027 - RNA, 19 nt, Homo sapiens
  misc_RNA (1)...(19): siRNA sense strand
uacaggaacuugaaaugca

SEQ ID NO: 7028 - RNA, 19 nt, Homo sapiens
  misc_RNA (1)...(19): siRNA sense strand
agccuagaaucaaguuaua

SEQ ID NO: 7029 - RNA, 19 nt, Homo sapiens
  misc_RNA (1)...(19): siRNA sense strand
guacaacaacucucgaucu

SEQ ID NO: 7030 - RNA, 19 nt, Homo sapiens
  misc_RNA (1)...(19): siRNA sense strand
gcauuuguugcucagaaua

SEQ ID NO: 7031 - RNA, 19 nt, Homo sapiens
  misc_RNA (1)...(19): siRNA sense strand
gucaaaugauccagacaug

SEQ ID NO: 7032 - RNA, 19 nt, Homo sapiens
  misc_RNA (1)...(19): siRNA sense strand
ucgggaaacuugauugauc

SEQ ID NO: 7033 - RNA, 19 nt, Homo sapiens
  misc_RNA (1)...(19): siRNA sense strand
gauccugcuuugcaaaugg

SEQ ID NO: 7034 - RNA, 19 nt, Homo sapiens
  misc_RNA (1)...(19): siRNA sense strand
cauggacuuucccuuauuc

SEQ ID NO: 7035 - RNA, 19 nt, Homo sapiens
  misc_RNA (1)...(19): siRNA sense strand
gcccaggcaugaacacaca

SEQ ID NO: 7036 - RNA, 19 nt, Homo sapiens
  misc_RNA (1)...(19): siRNA sense strand
ggacuuucccuuauuccau

SEQ ID NO: 7037 - RNA, 19 nt, Homo sapiens
  misc_RNA (1)...(19): siRNA sense strand
caagggaaccaucuuaaaa

SEQ ID NO: 7038 - RNA, 19 nt, Homo sapiens
  misc_RNA (1)...(19): siRNA sense strand
gugcagacccaccucgaaa

SEQ ID NO: 7039 - RNA, 19 nt, Homo sapiens
  misc_RNA (1)...(19): siRNA sense strand
ccaccaggccucaccauca

SEQ ID NO: 7040 - RNA, 19 nt, Homo sapiens
  misc_RNA (1)...(19): siRNA sense strand
ggaaacuugauugaucuuu

SEQ ID NO: 7041 - RNA, 19 nt, Homo sapiens
  misc_RNA (1)...(19): siRNA sense strand
cuugauggauccugcuuug

SEQ ID NO: 7042 - RNA, 19 nt, Homo sapiens
  misc_RNA (1)...(19): siRNA sense strand
acaagggaaccaucuuaaa

SEQ ID NO: 7043 - RNA, 19 nt, Homo sapiens
  misc_RNA (1)...(19): siRNA sense strand
ugaccgcauuaaagaacua

SEQ ID NO: 7044 - RNA, 19 nt, Homo sapiens
  misc_RNA (1)...(19): siRNA sense strand
ccaaccaaguccugagcuu

SEQ ID NO: 7045 - RNA, 19 nt, Homo sapiens
  misc_RNA (1)...(19): siRNA sense strand
ggaacaagggaaccaucuu

SEQ ID NO: 7046 - RNA, 19 nt, Homo sapiens
  misc_RNA (1)...(19): siRNA sense strand
cggcauuuguugcucagaa

SEQ ID NO: 7047 - RNA, 19 nt, Homo sapiens
  misc_RNA (1)...(19): siRNA sense strand
gagaacagcaacgcgcaaa

SEQ ID NO: 7048 - RNA, 19 nt, Homo sapiens
  misc_RNA (1)...(19): siRNA sense strand
caucauuagccuagaauca

SEQ ID NO: 7049 - RNA, 19 nt, Homo sapiens
  misc_RNA (1)...(19): siRNA sense strand
gcaguaugagcauggaaga

SEQ ID NO: 7050 - RNA, 19 nt, Homo sapiens
  misc_RNA (1)...(19): siRNA sense strand
ucacugauccacuccuuuc

SEQ ID NO: 7051 - RNA, 19 nt, Homo sapiens
  misc_RNA (1)...(19): siRNA sense strand
caacaacaaccucggaacu

SEQ ID NO: 7052 - RNA, 19 nt, Homo sapiens
  misc_RNA (1)...(19): siRNA sense strand
ucacgagcguccuguaugc

SEQ ID NO: 7053 - RNA, 19 nt, Homo sapiens
  misc_RNA (1)...(19): siRNA sense strand
gcagaccuaaccuguacaa

SEQ ID NO: 7054 - RNA, 19 nt, Homo sapiens
  misc_RNA (1)...(19): siRNA sense strand
ugaacgaagaagaagauuu

SEQ ID NO: 7055 - RNA, 19 nt, Homo sapiens
  misc_RNA (1)...(19): siRNA sense strand
ggauccugcuuugcaaaug

SEQ ID NO: 7056 - RNA, 19 nt, Homo sapiens
  misc_RNA (1)...(19): siRNA sense strand
ggcucgagcucauggacuu

SEQ ID NO: 7057 - RNA, 19 nt, Homo sapiens
  misc_RNA (1)...(19): siRNA sense strand
agccaaccuucccaacaua

SEQ ID NO: 7058 - RNA, 19 nt, Homo sapiens
  misc_RNA (1)...(19): siRNA sense strand
ggaaccaucuuaaaagcau

SEQ ID NO: 7059 - RNA, 19 nt, Homo sapiens
  misc_RNA (1)...(19): siRNA sense strand
gcccaacggcagcagguaa

SEQ ID NO: 7060 - RNA, 19 nt, Homo sapiens
  misc_RNA (1)...(19): siRNA sense strand
ggagcaguaugagcaugga

SEQ ID NO: 7061 - RNA, 19 nt, Homo sapiens
  misc_RNA (1)...(19): siRNA sense strand
gcaccaucaccuucaacaa

SEQ ID NO: 7062 - RNA, 19 nt, Homo sapiens
  misc_RNA (1)...(19): siRNA sense strand
uacaacaacucucgaucuc

SEQ ID NO: 7063 - RNA, 19 nt, Homo sapiens
  misc_RNA (1)...(19): siRNA sense strand
agaccuaaccuguacaaca

SEQ ID NO: 7064 - RNA, 19 nt, Homo sapiens
  misc_RNA (1)...(19): siRNA sense strand
ggcauuuguugcucagaau

SEQ ID NO: 7065 - RNA, 19 nt, Homo sapiens
  misc_RNA (1)...(19): siRNA sense strand
gaaaguugcaacgagaaca

SEQ ID NO: 7066 - RNA, 19 nt, Homo sapiens
  misc_RNA (1)...(19): siRNA sense strand
ucuaccacuuuagcaaaua

SEQ ID NO: 7067 - RNA, 19 nt, Homo sapiens
  misc_RNA (1)...(19): siRNA sense strand
cgggaaacuugauugaucu

SEQ ID NO: 7068 - RNA, 19 nt, Homo sapiens
  misc_RNA (1)...(19): siRNA sense strand
uggacuauauccgaaaguu

SEQ ID NO: 7069 - RNA, 19 nt, Homo sapiens
  misc_RNA (1)...(19): siRNA sense strand
ucauuagccuagaaucaag

SEQ ID NO: 7070 - RNA, 19 nt, Homo sapiens
  misc_RNA (1)...(19): siRNA sense strand
ucgaaaaccccaccaagua

SEQ ID NO: 7071 - RNA, 19 nt, Homo sapiens
  misc_RNA (1)...(19): siRNA sense strand
cuugauugaucuuuaugga

SEQ ID NO: 7072 - RNA, 19 nt, Homo sapiens
  misc_RNA (1)...(19): siRNA sense strand
cucauggacuuucccuuau

SEQ ID NO: 7073 - RNA, 19 nt, Homo sapiens
  misc_RNA (1)...(19): siRNA sense strand
ucagaauacaggaacuuga

SEQ ID NO: 7074 - RNA, 19 nt, Homo sapiens
  misc_RNA (1)...(19): siRNA sense strand
gccaaccuucccaacauaa

SEQ ID NO: 7075 - RNA, 19 nt, Homo sapiens
  misc_RNA (1)...(19): siRNA sense strand
uagccuagaaucaaguuau

SEQ ID NO: 7076 - RNA, 19 nt, Homo sapiens
  misc_RNA (1)...(19): siRNA sense strand
gcacgccaaccggcauuug

SEQ ID NO: 7077 - RNA, 19 nt, Homo sapiens
  misc_RNA (1)...(19): siRNA sense strand
aacaagggaaccaucuuaa

SEQ ID NO: 7078 - RNA, 19 nt, Homo sapiens
  misc_RNA (1)...(19): siRNA sense strand
ccaaccuucccaacauaaa

SEQ ID NO: 7079 - RNA, 19 nt, Homo sapiens
  misc_RNA (1)...(19): siRNA sense strand
caaguaccacauacagcaa

SEQ ID NO: 7080 - RNA, 19 nt, Homo sapiens
  misc_RNA (1)...(19): siRNA sense strand
ccaaccaagccuauagugu

SEQ ID NO: 7081 - RNA, 19 nt, Homo sapiens
  misc_RNA (1)...(19): siRNA sense strand
caugcagaccuaaccugua

SEQ ID NO: 7082 - RNA, 19 nt, Homo sapiens
  misc_RNA (1)...(19): siRNA sense strand
gagcuugccauguccaaac

SEQ ID NO: 7083 - RNA, 19 nt, Homo sapiens
  misc_RNA (1)...(19): siRNA sense strand
ggccaaagagaggcagaaa

SEQ ID NO: 7084 - RNA, 19 nt, Homo sapiens
  misc_RNA (1)...(19): siRNA sense strand
augcagaccuaaccuguac

SEQ ID NO: 7085 - RNA, 19 nt, Homo sapiens
  misc_RNA (1)...(19): siRNA sense strand
gagcacgccaaccggcauu

SEQ ID NO: 7086 - RNA, 19 nt, Homo sapiens
  misc_RNA (1)...(19): siRNA sense strand
uaaacaugccaaccaaguc

SEQ ID NO: 7087 - RNA, 19 nt, Homo sapiens
  misc_RNA (1)...(19): siRNA sense strand
ccaucaccuucaacaacaa

SEQ ID NO: 7088 - RNA, 19 nt, Homo sapiens
  misc_RNA (1)...(19): siRNA sense strand
gcuuaacuccaacugugaa

SEQ ID NO: 7089 - RNA, 19 nt, Homo sapiens
  misc_RNA (1)...(19): siRNA sense strand
agaauacaggaacuugaaa

SEQ ID NO: 7090 - RNA, 19 nt, Homo sapiens
  misc_RNA (1)...(19): siRNA sense strand
gcucagaauacaggaacuu

SEQ ID NO: 7091 - RNA, 19 nt, Homo sapiens
  misc_RNA (1)...(19): siRNA sense strand
gauugaacgaagaagaaga

SEQ ID NO: 7092 - RNA, 19 nt, Homo sapiens
  misc_RNA (1)...(19): siRNA sense strand
gcaagagcacuggccaaag

SEQ ID NO: 7093 - RNA, 19 nt, Homo sapiens
  misc_RNA (1)...(19): siRNA sense strand
caccaggccucaccaucag

SEQ ID NO: 7094 - RNA, 19 nt, Homo sapiens
  misc_RNA (1)...(19): siRNA sense strand
gaacgaagaagaagauuua

SEQ ID NO: 7095 - RNA, 19 nt, Homo sapiens
  misc_RNA (1)...(19): siRNA sense strand
gaacaagggaaccaucuua

SEQ ID NO: 7096 - RNA, 19 nt, Homo sapiens
  misc_RNA (1)...(19): siRNA sense strand
gcagauggaugauguaauc

SEQ ID NO: 7097 - RNA, 19 nt, Homo sapiens
  misc_RNA (1)...(19): siRNA sense strand
caagagcacuggccaaaga

SEQ ID NO: 7098 - RNA, 19 nt, Homo sapiens
  misc_RNA (1)...(19): siRNA sense strand
gaccuaaccuguacaacaa

SEQ ID NO: 7099 - RNA, 19 nt, Homo sapiens
  misc_RNA (1)...(19): siRNA sense strand
gaggaaaucuugggcuuga

SEQ ID NO: 7100 - RNA, 19 nt, Homo sapiens
  misc_RNA (1)...(19): siRNA sense strand
agacggagcacacuuguua

SEQ ID NO: 7101 - RNA, 19 nt, Homo sapiens
  misc_RNA (1)...(19): siRNA sense strand
gcucauggacuuucccuua

SEQ ID NO: 7102 - RNA, 19 nt, Homo sapiens
  misc_RNA (1)...(19): siRNA sense strand
guaccuuucuaccacuuua

SEQ ID NO: 7103 - RNA, 19 nt, Homo sapiens
  misc_RNA (1)...(19): siRNA sense strand
agaacuagguacuuugauu

SEQ ID NO: 7104 - RNA, 19 nt, Homo sapiens
  misc_RNA (1)...(19): siRNA sense strand
gaacuagguacuuugauuc

SEQ ID NO: 7105 - RNA, 19 nt, Homo sapiens
  misc_RNA (1)...(19): siRNA sense strand
aaauaaacaugccaaccaa

SEQ ID NO: 7106 - RNA, 19 nt, Homo sapiens
  misc_RNA (1)...(19): siRNA sense strand
cgaagaagaagauuuaaca

SEQ ID NO: 7107 - RNA, 19 nt, Homo sapiens
  misc_RNA (1)...(19): siRNA sense strand
aagcauccguggacuauau

SEQ ID NO: 7108 - RNA, 19 nt, Homo sapiens
  misc_RNA (1)...(19): siRNA sense strand
guaugcagauggaugaugu

SEQ ID NO: 7109 - RNA, 19 nt, Homo sapiens
  misc_RNA (1)...(19): siRNA sense strand
ugacaucauuagccuagaa

SEQ ID NO: 7110 - RNA, 19 nt, Homo sapiens
  misc_RNA (1)...(19): siRNA sense strand
ggcagcagguaaagcagua

SEQ ID NO: 7111 - RNA, 19 nt, Homo sapiens
  misc_RNA (1)...(19): siRNA sense strand
uggcuaugcuuacgcuuaa

SEQ ID NO: 7112 - RNA, 19 nt, Homo sapiens
  misc_RNA (1)...(19): siRNA sense strand
caaccugauugaacgaaga

SEQ ID NO: 7113 - RNA, 19 nt, Homo sapiens
  misc_RNA (1)...(19): siRNA sense strand
caaauaaacaugccaacca

SEQ ID NO: 7114 - RNA, 19 nt, Homo sapiens
  misc_RNA (1)...(19): siRNA sense strand
gauggaugauguaaucgau

SEQ ID NO: 7115 - RNA, 19 nt, Homo sapiens
  misc_RNA (1)...(19): siRNA sense strand
gauggauccugcuuugcaa

SEQ ID NO: 7116 - RNA, 19 nt, Homo sapiens
  misc_RNA (1)...(19): siRNA sense strand
cuaccacuuuagcaaauaa

SEQ ID NO: 7117 - RNA, 19 nt, Homo sapiens
  misc_RNA (1)...(19): siRNA sense strand
gaauacaggaacuugaaau

SEQ ID NO: 7118 - RNA, 19 nt, Homo sapiens
  misc_RNA (1)...(19): siRNA sense strand
uggaugauguaaucgauga

SEQ ID NO: 7119 - RNA, 19 nt, Homo sapiens
  misc_RNA (1)...(19): siRNA sense strand
ggaaaucuugggcuugaug

SEQ ID NO: 7120 - RNA, 19 nt, Homo sapiens
  misc_RNA (1)...(19): siRNA sense strand
ugaaucggaucaucaagca

SEQ ID NO: 7121 - RNA, 19 nt, Homo sapiens
  misc_RNA (1)...(19): siRNA sense strand
ucauggacuuucccuuauu

SEQ ID NO: 7122 - RNA, 19 nt, Homo sapiens
  misc_RNA (1)...(19): siRNA sense strand
cagaauacaggaacuugaa

SEQ ID NO: 7123 - RNA, 19 nt, Homo sapiens
  misc_RNA (1)...(19): siRNA sense strand
cagccaaccuucccaacau

SEQ ID NO: 7124 - RNA, 19 nt, Homo sapiens
  misc_RNA (1)...(19): siRNA sense strand
guccugagcuugccauguc

SEQ ID NO: 7125 - RNA, 19 nt, Homo sapiens
  misc_RNA (1)...(19): siRNA sense strand
gaagagacggagcacacuu

SEQ ID NO: 7126 - RNA, 19 nt, Homo sapiens
  misc_RNA (1)...(19): siRNA sense strand
ggacuauauccgaaaguug

SEQ ID NO: 7127 - RNA, 19 nt, Homo sapiens
  misc_RNA (1)...(19): siRNA sense strand
uacaggaacuugaaaugca

SEQ ID NO: 7128 - RNA, 19 nt, Homo sapiens
  misc_RNA (1)...(19): siRNA sense strand
agccuagaaucaaguuaua

SEQ ID NO: 7129 - RNA, 19 nt, Homo sapiens
  misc_RNA (1)...(19): siRNA sense strand
guacaacaacucucgaucu

SEQ ID NO: 7130 - RNA, 19 nt, Homo sapiens
  misc_RNA (1)...(19): siRNA sense strand
gcauuuguugcucagaaua

SEQ ID NO: 7131 - RNA, 19 nt, Homo sapiens
  misc_RNA (1)...(19): siRNA sense strand
gucaaaugauccagacaug

SEQ ID NO: 7132 - RNA, 19 nt, Homo sapiens
  misc_RNA (1)...(19): siRNA sense strand
ucgggaaacuugauugauc

SEQ ID NO: 7133 - RNA, 19 nt, Homo sapiens
  misc_RNA (1)...(19): siRNA sense strand
gauccugcuuugcaaaugg

SEQ ID NO: 7134 - RNA, 19 nt, Homo sapiens
  misc_RNA (1)...(19): siRNA sense strand
cauggacuuucccuuauuc

SEQ ID NO: 7135 - RNA, 19 nt, Homo sapiens
  misc_RNA (1)...(19): siRNA sense strand
gcccaggcaugaacacaca

SEQ ID NO: 7136 - RNA, 19 nt, Homo sapiens
  misc_RNA (1)...(19): siRNA sense strand
ggacuuucccuuauuccau

SEQ ID NO: 7137 - RNA, 19 nt, Homo sapiens
  misc_RNA (1)...(19): siRNA sense strand
caagggaaccaucuuaaaa

SEQ ID NO: 7138 - RNA, 19 nt, Homo sapiens
  misc_RNA (1)...(19): siRNA sense strand
gugcagacccaccucgaaa

SEQ ID NO: 7139 - RNA, 19 nt, Homo sapiens
  misc_RNA (1)...(19): siRNA sense strand
ccaccaggccucaccauca

SEQ ID NO: 7140 - RNA, 19 nt, Homo sapiens
  misc_RNA (1)...(19): siRNA sense strand
ggaaacuugauugaucuuu

SEQ ID NO: 7141 - RNA, 19 nt, Homo sapiens
  misc_RNA (1)...(19): siRNA sense strand
cuugauggauccugcuuug

SEQ ID NO: 7142 - RNA, 19 nt, Homo sapiens
  misc_RNA (1)...(19): siRNA sense strand
acaagggaaccaucuuaaa

SEQ ID NO: 7143 - RNA, 19 nt, Homo sapiens
  misc_RNA (1)...(19): siRNA sense strand
ugaccgcauuaaagaacua

SEQ ID NO: 7144 - RNA, 19 nt, Homo sapiens
  misc_RNA (1)...(19): siRNA sense strand
ccaaccaaguccugagcuu

SEQ ID NO: 7145 - RNA, 19 nt, Homo sapiens
  misc_RNA (1)...(19): siRNA sense strand
ggaacaagggaaccaucuu

SEQ ID NO: 7146 - RNA, 19 nt, Homo sapiens
  misc_RNA (1)...(19): siRNA sense strand
cggcauuuguugcucagaa

SEQ ID NO: 7147 - RNA, 19 nt, Homo sapiens
  misc_RNA (1)...(19): siRNA sense strand
gagaacagcaacgcgcaaa

SEQ ID NO: 7148 - RNA, 19 nt, Homo sapiens
  misc_RNA (1)...(19): siRNA sense strand
caucauuagccuagaauca

SEQ ID NO: 7149 - RNA, 19 nt, Homo sapiens
  misc_RNA (1)...(19): siRNA sense strand
gcaguaugagcauggaaga

SEQ ID NO: 7150 - RNA, 19 nt, Homo sapiens
  misc_RNA (1)...(19): siRNA sense strand
ucacugauccacuccuuuc

SEQ ID NO: 7151 - RNA, 19 nt, Homo sapiens
  misc_RNA (1)...(19): siRNA sense strand
caacaacaaccucggaacu

SEQ ID NO: 7152 - RNA, 19 nt, Homo sapiens
  misc_RNA (1)...(19): siRNA sense strand
ucacgagcguccuguaugc

SEQ ID NO: 7153 - RNA, 19 nt, Homo sapiens
  misc_RNA (1)...(19): siRNA sense strand
gcagaccuaaccuguacaa

SEQ ID NO: 7154 - RNA, 19 nt, Homo sapiens
  misc_RNA (1)...(19): siRNA sense strand
ugaacgaagaagaagauuu

SEQ ID NO: 7155 - RNA, 19 nt, Homo sapiens
  misc_RNA (1)...(19): siRNA sense strand
ggauccugcuuugcaaaug

SEQ ID NO: 7156 - RNA, 19 nt, Homo sapiens
  misc_RNA (1)...(19): siRNA sense strand
ggcucgagcucauggacuu

SEQ ID NO: 7157 - RNA, 19 nt, Homo sapiens
  misc_RNA (1)...(19): siRNA sense strand
agccaaccuucccaacaua

SEQ ID NO: 7158 - RNA, 19 nt, Homo sapiens
  misc_RNA (1)...(19): siRNA sense strand
ggaaccaucuuaaaagcau

SEQ ID NO: 7159 - RNA, 19 nt, Homo sapiens
  misc_RNA (1)...(19): siRNA sense strand
gcccaacggcagcagguaa

SEQ ID NO: 7160 - RNA, 19 nt, Homo sapiens
  misc_RNA (1)...(19): siRNA sense strand
ggagcaguaugagcaugga

SEQ ID NO: 7161 - RNA, 19 nt, Homo sapiens
  misc_RNA (1)...(19): siRNA sense strand
gcaccaucaccuucaacaa

SEQ ID NO: 7162 - RNA, 19 nt, Homo sapiens
  misc_RNA (1)...(19): siRNA sense strand
uacaacaacucucgaucuc

SEQ ID NO: 7163 - RNA, 19 nt, Homo sapiens
  misc_RNA (1)...(19): siRNA sense strand
agaccuaaccuguacaaca

SEQ ID NO: 7164 - RNA, 19 nt, Homo sapiens
  misc_RNA (1)...(19): siRNA sense strand
ggcauuuguugcucagaau

SEQ ID NO: 7165 - RNA, 19 nt, Homo sapiens
  misc_RNA (1)...(19): siRNA sense strand
gaaaguugcaacgagaaca

SEQ ID NO: 7166 - RNA, 19 nt, Homo sapiens
  misc_RNA (1)...(19): siRNA sense strand
ucuaccacuuuagcaaaua

SEQ ID NO: 7167 - RNA, 19 nt, Homo sapiens
  misc_RNA (1)...(19): siRNA sense strand
cgggaaacuugauugaucu

SEQ ID NO: 7168 - RNA, 19 nt, Homo sapiens
  misc_RNA (1)...(19): siRNA sense strand
uggacuauauccgaaaguu

SEQ ID NO: 7169 - RNA, 19 nt, Homo sapiens
  misc_RNA (1)...(19): siRNA sense strand
ucauuagccuagaaucaag

SEQ ID NO: 7170 - RNA, 19 nt, Homo sapiens
  misc_RNA (1)...(19): siRNA sense strand
ucgaaaaccccaccaagua

SEQ ID NO: 7171 - RNA, 19 nt, Homo sapiens
  misc_RNA (1)...(19): siRNA sense strand
cuugauugaucuuuaugga

SEQ ID NO: 7172 - RNA, 19 nt, Homo sapiens
  misc_RNA (1)...(19): siRNA sense strand
cucauggacuuucccuuau

SEQ ID NO: 7173 - RNA, 19 nt, Homo sapiens
  misc_RNA (1)...(19): siRNA sense strand
ucagaauacaggaacuuga

SEQ ID NO: 7174 - RNA, 19 nt, Homo sapiens
  misc_RNA (1)...(19): siRNA sense strand
gccaaccuucccaacauaa

SEQ ID NO: 7175 - RNA, 19 nt, Homo sapiens
  misc_RNA (1)...(19): siRNA sense strand
uagccuagaaucaaguuau

SEQ ID NO: 7176 - RNA, 19 nt, Homo sapiens
  misc_RNA (1)...(19): siRNA sense strand
gcacgccaaccggcauuug

SEQ ID NO: 7177 - RNA, 19 nt, Homo sapiens
  misc_RNA (1)...(19): siRNA sense strand
aacaagggaaccaucuuaa

SEQ ID NO: 7178 - RNA, 19 nt, Homo sapiens
  misc_RNA (1)...(19): siRNA sense strand
ccaaccuucccaacauaaa

SEQ ID NO: 7179 - RNA, 19 nt, Homo sapiens
  misc_RNA (1)...(19): siRNA sense strand
caaguaccacauacagcaa

SEQ ID NO: 7180 - RNA, 19 nt, Homo sapiens
  misc_RNA (1)...(19): siRNA sense strand
ccaaccaagccuauagugu

SEQ ID NO: 7181 - RNA, 19 nt, Homo sapiens
  misc_RNA (1)...(19): siRNA sense strand
caugcagaccuaaccugua

SEQ ID NO: 7182 - RNA, 19 nt, Homo sapiens
  misc_RNA (1)...(19): siRNA sense strand
gagcuugccauguccaaac

SEQ ID NO: 7183 - RNA, 19 nt, Homo sapiens
  misc_RNA (1)...(19): siRNA sense strand
ggccaaagagaggcagaaa

SEQ ID NO: 7184 - RNA, 19 nt, Homo sapiens
  misc_RNA (1)...(19): siRNA sense strand
augcagaccuaaccuguac

SEQ ID NO: 7185 - RNA, 19 nt, Homo sapiens
  misc_RNA (1)...(19): siRNA sense strand
gagcacgccaaccggcauu

SEQ ID NO: 7186 - RNA, 19 nt, Homo sapiens
  misc_RNA (1)...(19): siRNA sense strand
uaaacaugccaaccaaguc

SEQ ID NO: 7187 - RNA, 19 nt, Homo sapiens
  misc_RNA (1)...(19): siRNA sense strand
ccaucaccuucaacaacaa

SEQ ID NO: 7188 - RNA, 19 nt, Homo sapiens
  misc_RNA (1)...(19): siRNA sense strand
gcuuaacuccaacugugaa

SEQ ID NO: 7189 - RNA, 19 nt, Homo sapiens
  misc_RNA (1)...(19): siRNA sense strand
agaauacaggaacuugaaa

SEQ ID NO: 7190 - RNA, 19 nt, Homo sapiens
  misc_RNA (1)...(19): siRNA sense strand
gcucagaauacaggaacuu

SEQ ID NO: 7191 - RNA, 19 nt, Homo sapiens
  misc_RNA (1)...(19): siRNA sense strand
gauugaacgaagaagaaga

SEQ ID NO: 7192 - RNA, 19 nt, Homo sapiens
  misc_RNA (1)...(19): siRNA sense strand
gcaagagcacuggccaaag

SEQ ID NO: 7193 - RNA, 19 nt, Homo sapiens
  misc_RNA (1)...(19): siRNA sense strand
caccaggccucaccaucag

SEQ ID NO: 7194 - RNA, 19 nt, Homo sapiens
  misc_RNA (1)...(19): siRNA sense strand
gaacgaagaagaagauuua

SEQ ID NO: 7195 - RNA, 19 nt, Homo sapiens
  misc_RNA (1)...(19): siRNA sense strand
gaacaagggaaccaucuua

SEQ ID NO: 7196 - RNA, 19 nt, Homo sapiens
  misc_RNA (1)...(19): siRNA sense strand
gcagauggaugauguaauc

SEQ ID NO: 7197 - RNA, 19 nt, Homo sapiens
  misc_RNA (1)...(19): siRNA sense strand
caagagcacuggccaaaga

SEQ ID NO: 7198 - RNA, 19 nt, Homo sapiens
  misc_RNA (1)...(19): siRNA sense strand
gaccuaaccuguacaacaa

SEQ ID NO: 7199 - RNA, 19 nt, Homo sapiens
  misc_RNA (1)...(19): siRNA sense strand
gaggaaaucuugggcuuga

SEQ ID NO: 7200 - RNA, 19 nt, Homo sapiens
  misc_RNA (1)...(19): siRNA sense strand
agacggagcacacuuguua

SEQ ID NO: 7201 - RNA, 19 nt, Homo sapiens
  misc_RNA (1)...(19): siRNA sense strand
gcucauggacuuucccuua

SEQ ID NO: 7202 - RNA, 19 nt, Homo sapiens
  misc_RNA (1)...(19): siRNA sense strand
guaccuuucuaccacuuua

SEQ ID NO: 7203 - RNA, 19 nt, Homo sapiens
  misc_RNA (1)...(19): siRNA sense strand
agaacuagguacuuugauu

SEQ ID NO: 7204 - RNA, 19 nt, Homo sapiens
  misc_RNA (1)...(19): siRNA sense strand
gaacuagguacuuugauuc

SEQ ID NO: 7205 - RNA, 19 nt, Homo sapiens
  misc_RNA (1)...(19): siRNA sense strand
aaauaaacaugccaaccaa

SEQ ID NO: 7206 - RNA, 19 nt, Homo sapiens
  misc_RNA (1)...(19): siRNA sense strand
cgaagaagaagauuuaaca

SEQ ID NO: 7207 - RNA, 19 nt, Homo sapiens
  misc_RNA (1)...(19): siRNA sense strand
aagcauccguggacuauau

SEQ ID NO: 7208 - RNA, 19 nt, Homo sapiens
  misc_RNA (1)...(19): siRNA sense strand
guaugcagauggaugaugu

SEQ ID NO: 7209 - RNA, 19 nt, Homo sapiens
  misc_RNA (1)...(19): siRNA sense strand
ugacaucauuagccuagaa

SEQ ID NO: 7210 - RNA, 19 nt, Homo sapiens
  misc_RNA (1)...(19): siRNA sense strand
ggcagcagguaaagcagua

SEQ ID NO: 7211 - RNA, 19 nt, Homo sapiens
  misc_RNA (1)...(19): siRNA sense strand
uggcuaugcuuacgcuuaa

SEQ ID NO: 7212 - RNA, 19 nt, Homo sapiens
  misc_RNA (1)...(19): siRNA sense strand
caaccugauugaacgaaga

SEQ ID NO: 7213 - RNA, 19 nt, Homo sapiens
  misc_RNA (1)...(19): siRNA sense strand
caaauaaacaugccaacca

SEQ ID NO: 7214 - RNA, 19 nt, Homo sapiens
  misc_RNA (1)...(19): siRNA sense strand
gauggaugauguaaucgau

SEQ ID NO: 7215 - RNA, 19 nt, Homo sapiens
  misc_RNA (1)...(19): siRNA sense strand
gauggauccugcuuugcaa

SEQ ID NO: 7216 - RNA, 19 nt, Homo sapiens
  misc_RNA (1)...(19): siRNA sense strand
cuaccacuuuagcaaauaa

SEQ ID NO: 7217 - RNA, 19 nt, Homo sapiens
  misc_RNA (1)...(19): siRNA sense strand
gaauacaggaacuugaaau

SEQ ID NO: 7218 - RNA, 19 nt, Homo sapiens
  misc_RNA (1)...(19): siRNA sense strand
uggaugauguaaucgauga

SEQ ID NO: 7219 - RNA, 19 nt, Homo sapiens
  misc_RNA (1)...(19): siRNA sense strand
ggaaaucuugggcuugaug

SEQ ID NO: 7220 - RNA, 19 nt, Homo sapiens
  misc_RNA (1)...(19): siRNA sense strand
ugaaucggaucaucaagca

SEQ ID NO: 7221 - RNA, 19 nt, Homo sapiens
  misc_RNA (1)...(19): siRNA sense strand
ucauggacuuucccuuauu

SEQ ID NO: 7222 - RNA, 19 nt, Homo sapiens
  misc_RNA (1)...(19): siRNA sense strand
cagaauacaggaacuugaa

SEQ ID NO: 7223 - RNA, 19 nt, Homo sapiens
  misc_RNA (1)...(19): siRNA sense strand
cagccaaccuucccaacau

SEQ ID NO: 7224 - RNA, 19 nt, Homo sapiens
  misc_RNA (1)...(19): siRNA sense strand
guccugagcuugccauguc

SEQ ID NO: 7225 - RNA, 19 nt, Homo sapiens
  misc_RNA (1)...(19): siRNA sense strand
gaagagacggagcacacuu

SEQ ID NO: 7226 - RNA, 19 nt, Homo sapiens
  misc_RNA (1)...(19): siRNA sense strand
ggacuauauccgaaaguug

SEQ ID NO: 7227 - RNA, 19 nt, Homo sapiens
  misc_RNA (1)...(19): siRNA sense strand
uacaggaacuugaaaugca

SEQ ID NO: 7228 - RNA, 19 nt, Homo sapiens
  misc_RNA (1)...(19): siRNA sense strand
agccuagaaucaaguuaua

SEQ ID NO: 7229 - RNA, 19 nt, Homo sapiens
  misc_RNA (1)...(19): siRNA sense strand
guacaacaacucucgaucu

SEQ ID NO: 7230 - RNA, 19 nt, Homo sapiens
  misc_RNA (1)...(19): siRNA sense strand
gcauuuguugcucagaaua

SEQ ID NO: 7231 - RNA, 19 nt, Homo sapiens
  misc_RNA (1)...(19): siRNA sense strand
gucaaaugauccagacaug

SEQ ID NO: 7232 - RNA, 19 nt, Homo sapiens
  misc_RNA (1)...(19): siRNA sense strand
ucgggaaacuugauugauc

SEQ ID NO: 7233 - RNA, 19 nt, Homo sapiens
  misc_RNA (1)...(19): siRNA sense strand
gauccugcuuugcaaaugg

SEQ ID NO: 7234 - RNA, 19 nt, Homo sapiens
  misc_RNA (1)...(19): siRNA sense strand
cauggacuuucccuuauuc

SEQ ID NO: 7235 - RNA, 19 nt, Homo sapiens
  misc_RNA (1)...(19): siRNA sense strand
gcccaggcaugaacacaca

SEQ ID NO: 7236 - RNA, 19 nt, Homo sapiens
  misc_RNA (1)...(19): siRNA sense strand
ggacuuucccuuauuccau

SEQ ID NO: 7237 - RNA, 19 nt, Homo sapiens
  misc_RNA (1)...(19): siRNA sense strand
caagggaaccaucuuaaaa

SEQ ID NO: 7238 - RNA, 19 nt, Homo sapiens
  misc_RNA (1)...(19): siRNA sense strand
gugcagacccaccucgaaa

SEQ ID NO: 7239 - RNA, 19 nt, Homo sapiens
  misc_RNA (1)...(19): siRNA sense strand
ccaccaggccucaccauca

SEQ ID NO: 7240 - RNA, 19 nt, Homo sapiens
  misc_RNA (1)...(19): siRNA sense strand
ggaaacuugauugaucuuu

SEQ ID NO: 7241 - RNA, 19 nt, Homo sapiens
  misc_RNA (1)...(19): siRNA sense strand
cuugauggauccugcuuug

SEQ ID NO: 7242 - RNA, 19 nt, Homo sapiens
  misc_RNA (1)...(19): siRNA sense strand
acaagggaaccaucuuaaa

SEQ ID NO: 7243 - RNA, 19 nt, Homo sapiens
  misc_RNA (1)...(19): siRNA sense strand
ugaccgcauuaaagaacua

SEQ ID NO: 7244 - RNA, 19 nt, Homo sapiens
  misc_RNA (1)...(19): siRNA sense strand
ccaaccaaguccugagcuu

SEQ ID NO: 7245 - RNA, 19 nt, Homo sapiens
  misc_RNA (1)...(19): siRNA sense strand
ggaacaagggaaccaucuu

SEQ ID NO: 7246 - RNA, 19 nt, Homo sapiens
  misc_RNA (1)...(19): siRNA sense strand
cggcauuuguugcucagaa

SEQ ID NO: 7247 - RNA, 19 nt, Homo sapiens
  misc_RNA (1)...(19): siRNA sense strand
gagaacagcaacgcgcaaa

SEQ ID NO: 7248 - RNA, 19 nt, Homo sapiens
  misc_RNA (1)...(19): siRNA sense strand
caucauuagccuagaauca

SEQ ID NO: 7249 - RNA, 19 nt, Homo sapiens
  misc_RNA (1)...(19): siRNA sense strand
gcaguaugagcauggaaga

SEQ ID NO: 7250 - RNA, 19 nt, Homo sapiens
  misc_RNA (1)...(19): siRNA sense strand
ucacugauccacuccuuuc

SEQ ID NO: 7251 - RNA, 19 nt, Homo sapiens
  misc_RNA (1)...(19): siRNA sense strand
caacaacaaccucggaacu

SEQ ID NO: 7252 - RNA, 19 nt, Homo sapiens
  misc_RNA (1)...(19): siRNA sense strand
ucacgagcguccuguaugc

SEQ ID NO: 7253 - RNA, 19 nt, Homo sapiens
  misc_RNA (1)...(19): siRNA sense strand
gcagaccuaaccuguacaa

SEQ ID NO: 7254 - RNA, 19 nt, Homo sapiens
  misc_RNA (1)...(19): siRNA sense strand
ugaacgaagaagaagauuu

SEQ ID NO: 7255 - RNA, 19 nt, Homo sapiens
  misc_RNA (1)...(19): siRNA sense strand
ggauccugcuuugcaaaug

SEQ ID NO: 7256 - RNA, 19 nt, Homo sapiens
  misc_RNA (1)...(19): siRNA sense strand
ggcucgagcucauggacuu

SEQ ID NO: 7257 - RNA, 19 nt, Homo sapiens
  misc_RNA (1)...(19): siRNA sense strand
agccaaccuucccaacaua

SEQ ID NO: 7258 - RNA, 19 nt, Homo sapiens
  misc_RNA (1)...(19): siRNA sense strand
ggaaccaucuuaaaagcau

SEQ ID NO: 7259 - RNA, 19 nt, Homo sapiens
  misc_RNA (1)...(19): siRNA sense strand
gcccaacggcagcagguaa

SEQ ID NO: 7260 - RNA, 19 nt, Homo sapiens
  misc_RNA (1)...(19): siRNA sense strand
ggagcaguaugagcaugga

SEQ ID NO: 7261 - RNA, 19 nt, Homo sapiens
  misc_RNA (1)...(19): siRNA sense strand
gcaccaucaccuucaacaa

SEQ ID NO: 7262 - RNA, 19 nt, Homo sapiens
  misc_RNA (1)...(19): siRNA sense strand
uacaacaacucucgaucuc

SEQ ID NO: 7263 - RNA, 19 nt, Homo sapiens
  misc_RNA (1)...(19): siRNA sense strand
agaccuaaccuguacaaca

SEQ ID NO: 7264 - RNA, 19 nt, Homo sapiens
  misc_RNA (1)...(19): siRNA sense strand
ggcauuuguugcucagaau

SEQ ID NO: 7265 - RNA, 19 nt, Homo sapiens
  misc_RNA (1)...(19): siRNA sense strand
gaaaguugcaacgagaaca

SEQ ID NO: 7266 - RNA, 19 nt, Homo sapiens
  misc_RNA (1)...(19): siRNA sense strand
ucuaccacuuuagcaaaua

SEQ ID NO: 7267 - RNA, 19 nt, Homo sapiens
  misc_RNA (1)...(19): siRNA sense strand
cgggaaacuugauugaucu

SEQ ID NO: 7268 - RNA, 19 nt, Homo sapiens
  misc_RNA (1)...(19): siRNA sense strand
uggacuauauccgaaaguu

SEQ ID NO: 7269 - RNA, 19 nt, Homo sapiens
  misc_RNA (1)...(19): siRNA sense strand
ucauuagccuagaaucaag

SEQ ID NO: 7270 - RNA, 19 nt, Homo sapiens
  misc_RNA (1)...(19): siRNA sense strand
ucgaaaaccccaccaagua

SEQ ID NO: 7271 - RNA, 19 nt, Homo sapiens
  misc_RNA (1)...(19): siRNA sense strand
cuugauugaucuuuaugga

SEQ ID NO: 7272 - RNA, 19 nt, Homo sapiens
  misc_RNA (1)...(19): siRNA sense strand
cucauggacuuucccuuau

SEQ ID NO: 7273 - RNA, 19 nt, Homo sapiens
  misc_RNA (1)...(19): siRNA sense strand
ucagaauacaggaacuuga

SEQ ID NO: 7274 - RNA, 19 nt, Homo sapiens
  misc_RNA (1)...(19): siRNA sense strand
gccaaccuucccaacauaa

SEQ ID NO: 7275 - RNA, 19 nt, Homo sapiens
  misc_RNA (1)...(19): siRNA sense strand
uagccuagaaucaaguuau

SEQ ID NO: 7276 - RNA, 19 nt, Homo sapiens
  misc_RNA (1)...(19): siRNA sense strand
gcacgccaaccggcauuug

SEQ ID NO: 7277 - RNA, 19 nt, Homo sapiens
  misc_RNA (1)...(19): siRNA sense strand
aacaagggaaccaucuuaa

SEQ ID NO: 7278 - RNA, 19 nt, Homo sapiens
  misc_RNA (1)...(19): siRNA sense strand
ccaaccuucccaacauaaa

SEQ ID NO: 7279 - RNA, 19 nt, Homo sapiens
  misc_RNA (1)...(19): siRNA sense strand
caaguaccacauacagcaa

SEQ ID NO: 7280 - RNA, 19 nt, Homo sapiens
  misc_RNA (1)...(19): siRNA sense strand
ccaaccaagccuauagugu

SEQ ID NO: 7281 - RNA, 19 nt, Homo sapiens
  misc_RNA (1)...(19): siRNA sense strand
caugcagaccuaaccugua

SEQ ID NO: 7282 - RNA, 19 nt, Homo sapiens
  misc_RNA (1)...(19): siRNA sense strand
gagcuugccauguccaaac

SEQ ID NO: 7283 - RNA, 19 nt, Homo sapiens
  misc_RNA (1)...(19): siRNA sense strand
ggccaaagagaggcagaaa

SEQ ID NO: 7284 - RNA, 19 nt, Homo sapiens
  misc_RNA (1)...(19): siRNA sense strand
augcagaccuaaccuguac

SEQ ID NO: 7285 - RNA, 19 nt, Homo sapiens
  misc_RNA (1)...(19): siRNA sense strand
gagcacgccaaccggcauu

SEQ ID NO: 7286 - RNA, 19 nt, Homo sapiens
  misc_RNA (1)...(19): siRNA sense strand
uaaacaugccaaccaaguc

SEQ ID NO: 7287 - RNA, 19 nt, Homo sapiens
  misc_RNA (1)...(19): siRNA sense strand
ccaucaccuucaacaacaa

SEQ ID NO: 7288 - RNA, 19 nt, Homo sapiens
  misc_RNA (1)...(19): siRNA sense strand
gcuuaacuccaacugugaa

SEQ ID NO: 7289 - RNA, 19 nt, Homo sapiens
  misc_RNA (1)...(19): siRNA sense strand
agaauacaggaacuugaaa

SEQ ID NO: 7290 - RNA, 19 nt, Homo sapiens
  misc_RNA (1)...(19): siRNA sense strand
gcucagaauacaggaacuu

SEQ ID NO: 7291 - RNA, 19 nt, Homo sapiens
  misc_RNA (1)...(19): siRNA sense strand
gauugaacgaagaagaaga

SEQ ID NO: 7292 - RNA, 19 nt, Homo sapiens
  misc_RNA (1)...(19): siRNA sense strand
gcaagagcacuggccaaag

SEQ ID NO: 7293 - RNA, 19 nt, Homo sapiens
  misc_RNA (1)...(19): siRNA sense strand
caccaggccucaccaucag

SEQ ID NO: 7294 - RNA, 19 nt, Homo sapiens
  misc_RNA (1)...(19): siRNA sense strand
gaacgaagaagaagauuua

SEQ ID NO: 7295 - RNA, 19 nt, Homo sapiens
  misc_RNA (1)...(19): siRNA sense strand
gaacaagggaaccaucuua

SEQ ID NO: 7296 - RNA, 19 nt, Homo sapiens
  misc_RNA (1)...(19): siRNA sense strand
gcagauggaugauguaauc

SEQ ID NO: 7297 - RNA, 19 nt, Homo sapiens
  misc_RNA (1)...(19): siRNA sense strand
caagagcacuggccaaaga

SEQ ID NO: 7298 - RNA, 19 nt, Homo sapiens
  misc_RNA (1)...(19): siRNA sense strand
gaccuaaccuguacaacaa

SEQ ID NO: 7299 - RNA, 19 nt, Homo sapiens
  misc_RNA (1)...(19): siRNA sense strand
gaggaaaucuugggcuuga

SEQ ID NO: 7300 - RNA, 19 nt, Homo sapiens
  misc_RNA (1)...(19): siRNA sense strand
agacggagcacacuuguua

SEQ ID NO: 7301 - RNA, 19 nt, Homo sapiens
  misc_RNA (1)...(19): siRNA sense strand
gcucauggacuuucccuua

SEQ ID NO: 7302 - RNA, 19 nt, Homo sapiens
  misc_RNA (1)...(19): siRNA sense strand
guaccuuucuaccacuuua

SEQ ID NO: 7303 - RNA, 19 nt, Homo sapiens
  misc_RNA (1)...(19): siRNA sense strand
agaacuagguacuuugauu

SEQ ID NO: 7304 - RNA, 19 nt, Homo sapiens
  misc_RNA (1)...(19): siRNA sense strand
gaacuagguacuuugauuc

SEQ ID NO: 7305 - RNA, 19 nt, Homo sapiens
  misc_RNA (1)...(19): siRNA sense strand
aaauaaacaugccaaccaa

SEQ ID NO: 7306 - RNA, 19 nt, Homo sapiens
  misc_RNA (1)...(19): siRNA sense strand
cgaagaagaagauuuaaca

SEQ ID NO: 7307 - RNA, 19 nt, Homo sapiens
  misc_RNA (1)...(19): siRNA sense strand
aagcauccguggacuauau

SEQ ID NO: 7308 - RNA, 19 nt, Homo sapiens
  misc_RNA (1)...(19): siRNA sense strand
guaugcagauggaugaugu

SEQ ID NO: 7309 - RNA, 19 nt, Homo sapiens
  misc_RNA (1)...(19): siRNA sense strand
ugacaucauuagccuagaa

SEQ ID NO: 7310 - RNA, 19 nt, Homo sapiens
  misc_RNA (1)...(19): siRNA sense strand
ggcagcagguaaagcagua

SEQ ID NO: 7311 - RNA, 19 nt, Homo sapiens
  misc_RNA (1)...(19): siRNA sense strand
uggcuaugcuuacgcuuaa

SEQ ID NO: 7312 - RNA, 19 nt, Homo sapiens
  misc_RNA (1)...(19): siRNA sense strand
caaccugauugaacgaaga

SEQ ID NO: 7313 - RNA, 19 nt, Homo sapiens
  misc_RNA (1)...(19): siRNA sense strand
caaauaaacaugccaacca

SEQ ID NO: 7314 - RNA, 19 nt, Homo sapiens
  misc_RNA (1)...(19): siRNA sense strand
gauggaugauguaaucgau

SEQ ID NO: 7315 - RNA, 19 nt, Homo sapiens
  misc_RNA (1)...(19): siRNA sense strand
gauggauccugcuuugcaa

SEQ ID NO: 7316 - RNA, 19 nt, Homo sapiens
  misc_RNA (1)...(19): siRNA sense strand
cuaccacuuuagcaaauaa

SEQ ID NO: 7317 - RNA, 19 nt, Homo sapiens
  misc_RNA (1)...(19): siRNA sense strand
gaauacaggaacuugaaau

SEQ ID NO: 7318 - RNA, 19 nt, Homo sapiens
  misc_RNA (1)...(19): siRNA sense strand
uggaugauguaaucgauga

SEQ ID NO: 7319 - RNA, 19 nt, Homo sapiens
  misc_RNA (1)...(19): siRNA sense strand
ggaaaucuugggcuugaug

SEQ ID NO: 7320 - RNA, 19 nt, Homo sapiens
  misc_RNA (1)...(19): siRNA sense strand
ugaaucggaucaucaagca

SEQ ID NO: 7321 - RNA, 19 nt, Homo sapiens
  misc_RNA (1)...(19): siRNA sense strand
ucauggacuuucccuuauu

SEQ ID NO: 7322 - RNA, 19 nt, Homo sapiens
  misc_RNA (1)...(19): siRNA sense strand
cagaauacaggaacuugaa

SEQ ID NO: 7323 - RNA, 19 nt, Homo sapiens
  misc_RNA (1)...(19): siRNA sense strand
cagccaaccuucccaacau

SEQ ID NO: 7324 - RNA, 19 nt, Homo sapiens
  misc_RNA (1)...(19): siRNA sense strand
guccugagcuugccauguc

SEQ ID NO: 7325 - RNA, 19 nt, Homo sapiens
  misc_RNA (1)...(19): siRNA sense strand
gaagagacggagcacacuu

SEQ ID NO: 7326 - RNA, 19 nt, Homo sapiens
  misc_RNA (1)...(19): siRNA sense strand
ggacuauauccgaaaguug

SEQ ID NO: 7327 - RNA, 19 nt, Homo sapiens
  misc_RNA (1)...(19): siRNA sense strand
uacaggaacuugaaaugca

SEQ ID NO: 7328 - RNA, 19 nt, Homo sapiens
  misc_RNA (1)...(19): siRNA sense strand
agccuagaaucaaguuaua

SEQ ID NO: 7329 - RNA, 19 nt, Homo sapiens
  misc_RNA (1)...(19): siRNA sense strand
guacaacaacucucgaucu

SEQ ID NO: 7330 - RNA, 19 nt, Homo sapiens
  misc_RNA (1)...(19): siRNA sense strand
gcauuuguugcucagaaua

SEQ ID NO: 7331 - RNA, 19 nt, Homo sapiens
  misc_RNA (1)...(19): siRNA sense strand
gucaaaugauccagacaug

SEQ ID NO: 7332 - RNA, 19 nt, Homo sapiens
  misc_RNA (1)...(19): siRNA sense strand
ucgggaaacuugauugauc

SEQ ID NO: 7333 - RNA, 19 nt, Homo sapiens
  misc_RNA (1)...(19): siRNA sense strand
gauccugcuuugcaaaugg

SEQ ID NO: 7334 - RNA, 19 nt, Homo sapiens
  misc_RNA (1)...(19): siRNA sense strand
cauggacuuucccuuauuc

SEQ ID NO: 7335 - RNA, 19 nt, Homo sapiens
  misc_RNA (1)...(19): siRNA sense strand
gcccaggcaugaacacaca

SEQ ID NO: 7336 - RNA, 19 nt, Homo sapiens
  misc_RNA (1)...(19): siRNA sense strand
ggacuuucccuuauuccau

SEQ ID NO: 7337 - RNA, 19 nt, Homo sapiens
  misc_RNA (1)...(19): siRNA sense strand
caagggaaccaucuuaaaa

SEQ ID NO: 7338 - RNA, 19 nt, Homo sapiens
  misc_RNA (1)...(19): siRNA sense strand
gugcagacccaccucgaaa

SEQ ID NO: 7339 - RNA, 19 nt, Homo sapiens
  misc_RNA (1)...(19): siRNA sense strand
ccaccaggccucaccauca

SEQ ID NO: 7340 - RNA, 19 nt, Homo sapiens
  misc_RNA (1)...(19): siRNA sense strand
ggaaacuugauugaucuuu

SEQ ID NO: 7341 - RNA, 19 nt, Homo sapiens
  misc_RNA (1)...(19): siRNA sense strand
cuugauggauccugcuuug

SEQ ID NO: 7342 - RNA, 19 nt, Homo sapiens
  misc_RNA (1)...(19): siRNA sense strand
acaagggaaccaucuuaaa

SEQ ID NO: 7343 - RNA, 19 nt, Homo sapiens
  misc_RNA (1)...(19): siRNA sense strand
ugaccgcauuaaagaacua

SEQ ID NO: 7344 - RNA, 19 nt, Homo sapiens
  misc_RNA (1)...(19): siRNA sense strand
ccaaccaaguccugagcuu

SEQ ID NO: 7345 - RNA, 19 nt, Homo sapiens
  misc_RNA (1)...(19): siRNA sense strand
ggaacaagggaaccaucuu

SEQ ID NO: 7346 - RNA, 19 nt, Homo sapiens
  misc_RNA (1)...(19): siRNA sense strand
cggcauuuguugcucagaa

SEQ ID NO: 7347 - RNA, 19 nt, Homo sapiens
  misc_RNA (1)...(19): siRNA sense strand
gagaacagcaacgcgcaaa

SEQ ID NO: 7348 - RNA, 19 nt, Homo sapiens
  misc_RNA (1)...(19): siRNA sense strand
caucauuagccuagaauca

SEQ ID NO: 7349 - RNA, 19 nt, Homo sapiens
  misc_RNA (1)...(19): siRNA sense strand
gcaguaugagcauggaaga

SEQ ID NO: 7350 - RNA, 19 nt, Homo sapiens
  misc_RNA (1)...(19): siRNA sense strand
ucacugauccacuccuuuc

SEQ ID NO: 7351 - RNA, 19 nt, Homo sapiens
  misc_RNA (1)...(19): siRNA sense strand
caacaacaaccucggaacu

SEQ ID NO: 7352 - RNA, 19 nt, Homo sapiens
  misc_RNA (1)...(19): siRNA sense strand
ucacgagcguccuguaugc

SEQ ID NO: 7353 - RNA, 19 nt, Homo sapiens
  misc_RNA (1)...(19): siRNA sense strand
gcagaccuaaccuguacaa

SEQ ID NO: 7354 - RNA, 19 nt, Homo sapiens
  misc_RNA (1)...(19): siRNA sense strand
ugaacgaagaagaagauuu

SEQ ID NO: 7355 - RNA, 19 nt, Homo sapiens
  misc_RNA (1)...(19): siRNA sense strand
ggauccugcuuugcaaaug

SEQ ID NO: 7356 - RNA, 19 nt, Homo sapiens
  misc_RNA (1)...(19): siRNA sense strand
ggcucgagcucauggacuu

SEQ ID NO: 7357 - RNA, 19 nt, Homo sapiens
  misc_RNA (1)...(19): siRNA sense strand
agccaaccuucccaacaua

SEQ ID NO: 7358 - RNA, 19 nt, Homo sapiens
  misc_RNA (1)...(19): siRNA sense strand
ggaaccaucuuaaaagcau

SEQ ID NO: 7359 - RNA, 19 nt, Homo sapiens
  misc_RNA (1)...(19): siRNA sense strand
gcccaacggcagcagguaa

SEQ ID NO: 7360 - RNA, 19 nt, Homo sapiens
  misc_RNA (1)...(19): siRNA sense strand
ggagcaguaugagcaugga

SEQ ID NO: 7361 - RNA, 19 nt, Homo sapiens
  misc_RNA (1)...(19): siRNA sense strand
gcaccaucaccuucaacaa

SEQ ID NO: 7362 - RNA, 19 nt, Homo sapiens
  misc_RNA (1)...(19): siRNA sense strand
uacaacaacucucgaucuc

SEQ ID NO: 7363 - RNA, 19 nt, Homo sapiens
  misc_RNA (1)...(19): siRNA sense strand
agaccuaaccuguacaaca

SEQ ID NO: 7364 - RNA, 19 nt, Homo sapiens
  misc_RNA (1)...(19): siRNA sense strand
ggcauuuguugcucagaau

SEQ ID NO: 7365 - RNA, 19 nt, Homo sapiens
  misc_RNA (1)...(19): siRNA sense strand
gaaaguugcaacgagaaca

SEQ ID NO: 7366 - RNA, 19 nt, Homo sapiens
  misc_RNA (1)...(19): siRNA sense strand
ucuaccacuuuagcaaaua

SEQ ID NO: 7367 - RNA, 19 nt, Homo sapiens
  misc_RNA (1)...(19): siRNA sense strand
cgggaaacuugauugaucu

SEQ ID NO: 7368 - RNA, 19 nt, Homo sapiens
  misc_RNA (1)...(19): siRNA sense strand
uggacuauauccgaaaguu

SEQ ID NO: 7369 - RNA, 19 nt, Homo sapiens
  misc_RNA (1)...(19): siRNA sense strand
ucauuagccuagaaucaag

SEQ ID NO: 7370 - RNA, 19 nt, Homo sapiens
  misc_RNA (1)...(19): siRNA sense strand
ucgaaaaccccaccaagua

SEQ ID NO: 7371 - RNA, 19 nt, Homo sapiens
  misc_RNA (1)...(19): siRNA sense strand
cuugauugaucuuuaugga

SEQ ID NO: 7372 - RNA, 19 nt, Homo sapiens
  misc_RNA (1)...(19): siRNA sense strand
cucauggacuuucccuuau

SEQ ID NO: 7373 - RNA, 19 nt, Homo sapiens
  misc_RNA (1)...(19): siRNA sense strand
ucagaauacaggaacuuga

SEQ ID NO: 7374 - RNA, 19 nt, Homo sapiens
  misc_RNA (1)...(19): siRNA sense strand
gccaaccuucccaacauaa

SEQ ID NO: 7375 - RNA, 19 nt, Homo sapiens
  misc_RNA (1)...(19): siRNA sense strand
uagccuagaaucaaguuau

SEQ ID NO: 7376 - RNA, 19 nt, Homo sapiens
  misc_RNA (1)...(19): siRNA sense strand
gcacgccaaccggcauuug

SEQ ID NO: 7377 - RNA, 19 nt, Homo sapiens
  misc_RNA (1)...(19): siRNA sense strand
aacaagggaaccaucuuaa

SEQ ID NO: 7378 - RNA, 19 nt, Homo sapiens
  misc_RNA (1)...(19): siRNA sense strand
ccaaccuucccaacauaaa

SEQ ID NO: 7379 - RNA, 19 nt, Homo sapiens
  misc_RNA (1)...(19): siRNA sense strand
caaguaccacauacagcaa

SEQ ID NO: 7380 - RNA, 19 nt, Homo sapiens
  misc_RNA (1)...(19): siRNA sense strand
ccaaccaagccuauagugu

SEQ ID NO: 7381 - RNA, 19 nt, Homo sapiens
  misc_RNA (1)...(19): siRNA sense strand
caugcagaccuaaccugua

SEQ ID NO: 7382 - RNA, 19 nt, Homo sapiens
  misc_RNA (1)...(19): siRNA sense strand
gagcuugccauguccaaac

SEQ ID NO: 7383 - RNA, 19 nt, Homo sapiens
  misc_RNA (1)...(19): siRNA sense strand
ggccaaagagaggcagaaa

SEQ ID NO: 7384 - RNA, 19 nt, Homo sapiens
  misc_RNA (1)...(19): siRNA sense strand
augcagaccuaaccuguac

SEQ ID NO: 7385 - RNA, 19 nt, Homo sapiens
  misc_RNA (1)...(19): siRNA sense strand
gagcacgccaaccggcauu

SEQ ID NO: 7386 - RNA, 19 nt, Homo sapiens
  misc_RNA (1)...(19): siRNA sense strand
uaaacaugccaaccaaguc

SEQ ID NO: 7387 - RNA, 19 nt, Homo sapiens
  misc_RNA (1)...(19): siRNA sense strand
ccaucaccuucaacaacaa

SEQ ID NO: 7388 - RNA, 19 nt, Homo sapiens
  misc_RNA (1)...(19): siRNA sense strand
gcuuaacuccaacugugaa

SEQ ID NO: 7389 - RNA, 19 nt, Homo sapiens
  misc_RNA (1)...(19): siRNA sense strand
agaauacaggaacuugaaa

SEQ ID NO: 7390 - RNA, 19 nt, Homo sapiens
  misc_RNA (1)...(19): siRNA sense strand
gcucagaauacaggaacuu

SEQ ID NO: 7391 - RNA, 19 nt, Homo sapiens
  misc_RNA (1)...(19): siRNA sense strand
gauugaacgaagaagaaga

SEQ ID NO: 7392 - RNA, 19 nt, Homo sapiens
  misc_RNA (1)...(19): siRNA sense strand
gcaagagcacuggccaaag

SEQ ID NO: 7393 - RNA, 19 nt, Homo sapiens
  misc_RNA (1)...(19): siRNA sense strand
caccaggccucaccaucag

SEQ ID NO: 7394 - RNA, 19 nt, Homo sapiens
  misc_RNA (1)...(19): siRNA sense strand
gaacgaagaagaagauuua

SEQ ID NO: 7395 - RNA, 19 nt, Homo sapiens
  misc_RNA (1)...(19): siRNA sense strand
gaacaagggaaccaucuua

SEQ ID NO: 7396 - RNA, 19 nt, Homo sapiens
  misc_RNA (1)...(19): siRNA sense strand
gcagauggaugauguaauc

SEQ ID NO: 7397 - RNA, 19 nt, Homo sapiens
  misc_RNA (1)...(19): siRNA sense strand
caagagcacuggccaaaga

SEQ ID NO: 7398 - RNA, 19 nt, Homo sapiens
  misc_RNA (1)...(19): siRNA sense strand
gaccuaaccuguacaacaa

SEQ ID NO: 7399 - RNA, 19 nt, Homo sapiens
  misc_RNA (1)...(19): siRNA sense strand
gaggaaaucuugggcuuga

SEQ ID NO: 7400 - RNA, 19 nt, Homo sapiens
  misc_RNA (1)...(19): siRNA sense strand
agacggagcacacuuguua

SEQ ID NO: 7401 - RNA, 19 nt, Homo sapiens
  misc_RNA (1)...(19): siRNA sense strand
gcucauggacuuucccuua

SEQ ID NO: 7402 - RNA, 19 nt, Homo sapiens
  misc_RNA (1)...(19): siRNA sense strand
guaccuuucuaccacuuua

SEQ ID NO: 7403 - RNA, 19 nt, Homo sapiens
  misc_RNA (1)...(19): siRNA sense strand
agaacuagguacuuugauu

SEQ ID NO: 7404 - RNA, 19 nt, Homo sapiens
  misc_RNA (1)...(19): siRNA sense strand
gaacuagguacuuugauuc

SEQ ID NO: 7405 - RNA, 19 nt, Homo sapiens
  misc_RNA (1)...(19): siRNA sense strand
aaauaaacaugccaaccaa

SEQ ID NO: 7406 - RNA, 19 nt, Homo sapiens
  misc_RNA (1)...(19): siRNA sense strand
cgaagaagaagauuuaaca

SEQ ID NO: 7407 - RNA, 19 nt, Homo sapiens
  misc_RNA (1)...(19): siRNA sense strand
aagcauccguggacuauau

SEQ ID NO: 7408 - RNA, 19 nt, Homo sapiens
  misc_RNA (1)...(19): siRNA sense strand
guaugcagauggaugaugu

SEQ ID NO: 7409 - RNA, 19 nt, Homo sapiens
  misc_RNA (1)...(19): siRNA sense strand
ugacaucauuagccuagaa

SEQ ID NO: 7410 - RNA, 19 nt, Homo sapiens
  misc_RNA (1)...(19): siRNA sense strand
ggcagcagguaaagcagua

SEQ ID NO: 7411 - RNA, 19 nt, Homo sapiens
  misc_RNA (1)...(19): siRNA sense strand
uggcuaugcuuacgcuuaa

SEQ ID NO: 7412 - RNA, 19 nt, Homo sapiens
  misc_RNA (1)...(19): siRNA sense strand
caaccugauugaacgaaga

SEQ ID NO: 7413 - RNA, 19 nt, Homo sapiens
  misc_RNA (1)...(19): siRNA sense strand
caaauaaacaugccaacca

SEQ ID NO: 7414 - RNA, 19 nt, Homo sapiens
  misc_RNA (1)...(19): siRNA sense strand
gauggaugauguaaucgau

SEQ ID NO: 7415 - RNA, 19 nt, Homo sapiens
  misc_RNA (1)...(19): siRNA sense strand
gauggauccugcuuugcaa

SEQ ID NO: 7416 - RNA, 19 nt, Homo sapiens
  misc_RNA (1)...(19): siRNA sense strand
cuaccacuuuagcaaauaa

SEQ ID NO: 7417 - RNA, 19 nt, Homo sapiens
  misc_RNA (1)...(19): siRNA sense strand
gaauacaggaacuugaaau

SEQ ID NO: 7418 - RNA, 19 nt, Homo sapiens
  misc_RNA (1)...(19): siRNA sense strand
uggaugauguaaucgauga

SEQ ID NO: 7419 - RNA, 19 nt, Homo sapiens
  misc_RNA (1)...(19): siRNA sense strand
ggaaaucuugggcuugaug

SEQ ID NO: 7420 - RNA, 19 nt, Homo sapiens
  misc_RNA (1)...(19): siRNA sense strand
ugaaucggaucaucaagca

SEQ ID NO: 7421 - RNA, 19 nt, Homo sapiens
  misc_RNA (1)...(19): siRNA sense strand
ucauggacuuucccuuauu

SEQ ID NO: 7422 - RNA, 19 nt, Homo sapiens
  misc_RNA (1)...(19): siRNA sense strand
cagaauacaggaacuugaa

SEQ ID NO: 7423 - RNA, 19 nt, Homo sapiens
  misc_RNA (1)...(19): siRNA sense strand
cagccaaccuucccaacau

SEQ ID NO: 7424 - RNA, 19 nt, Homo sapiens
  misc_RNA (1)...(19): siRNA sense strand
guccugagcuugccauguc

SEQ ID NO: 7425 - RNA, 19 nt, Homo sapiens
  misc_RNA (1)...(19): siRNA sense strand
gaagagacggagcacacuu

SEQ ID NO: 7426 - RNA, 19 nt, Homo sapiens
  misc_RNA (1)...(19): siRNA sense strand
ggacuauauccgaaaguug

SEQ ID NO: 7427 - RNA, 19 nt, Homo sapiens
  misc_RNA (1)...(19): siRNA sense strand
uacaggaacuugaaaugca

SEQ ID NO: 7428 - RNA, 19 nt, Homo sapiens
  misc_RNA (1)...(19): siRNA sense strand
agccuagaaucaaguuaua

SEQ ID NO: 7429 - RNA, 19 nt, Homo sapiens
  misc_RNA (1)...(19): siRNA sense strand
guacaacaacucucgaucu

SEQ ID NO: 7430 - RNA, 19 nt, Homo sapiens
  misc_RNA (1)...(19): siRNA sense strand
gcauuuguugcucagaaua

SEQ ID NO: 7431 - RNA, 19 nt, Homo sapiens
  misc_RNA (1)...(19): siRNA sense strand
gucaaaugauccagacaug

SEQ ID NO: 7432 - RNA, 19 nt, Homo sapiens
  misc_RNA (1)...(19): siRNA sense strand
ucgggaaacuugauugauc

SEQ ID NO: 7433 - RNA, 19 nt, Homo sapiens
  misc_RNA (1)...(19): siRNA sense strand
gauccugcuuugcaaaugg

SEQ ID NO: 7434 - RNA, 19 nt, Homo sapiens
  misc_RNA (1)...(19): siRNA sense strand
cauggacuuucccuuauuc

SEQ ID NO: 7435 - RNA, 19 nt, Homo sapiens
  misc_RNA (1)...(19): siRNA sense strand
gcccaggcaugaacacaca

SEQ ID NO: 7436 - RNA, 19 nt, Homo sapiens
  misc_RNA (1)...(19): siRNA sense strand
ggacuuucccuuauuccau

SEQ ID NO: 7437 - RNA, 19 nt, Homo sapiens
  misc_RNA (1)...(19): siRNA sense strand
caagggaaccaucuuaaaa

SEQ ID NO: 7438 - RNA, 19 nt, Homo sapiens
  misc_RNA (1)...(19): siRNA sense strand
gugcagacccaccucgaaa

SEQ ID NO: 7439 - RNA, 19 nt, Homo sapiens
  misc_RNA (1)...(19): siRNA sense strand
ccaccaggccucaccauca

SEQ ID NO: 7440 - RNA, 19 nt, Homo sapiens
  misc_RNA (1)...(19): siRNA sense strand
ggaaacuugauugaucuuu

SEQ ID NO: 7441 - RNA, 19 nt, Homo sapiens
  misc_RNA (1)...(19): siRNA sense strand
cuugauggauccugcuuug

SEQ ID NO: 7442 - RNA, 19 nt, Homo sapiens
  misc_RNA (1)...(19): siRNA sense strand
acaagggaaccaucuuaaa

SEQ ID NO: 7443 - RNA, 19 nt, Homo sapiens
  misc_RNA (1)...(19): siRNA sense strand
ugaccgcauuaaagaacua

SEQ ID NO: 7444 - RNA, 19 nt, Homo sapiens
  misc_RNA (1)...(19): siRNA sense strand
ccaaccaaguccugagcuu

SEQ ID NO: 7445 - RNA, 19 nt, Homo sapiens
  misc_RNA (1)...(19): siRNA sense strand
ggaacaagggaaccaucuu

SEQ ID NO: 7446 - RNA, 19 nt, Homo sapiens
  misc_RNA (1)...(19): siRNA sense strand
cggcauuuguugcucagaa

SEQ ID NO: 7447 - RNA, 19 nt, Homo sapiens
  misc_RNA (1)...(19): siRNA sense strand
gagaacagcaacgcgcaaa

SEQ ID NO: 7448 - RNA, 19 nt, Homo sapiens
  misc_RNA (1)...(19): siRNA sense strand
caucauuagccuagaauca

SEQ ID NO: 7449 - RNA, 19 nt, Homo sapiens
  misc_RNA (1)...(19): siRNA sense strand
gcaguaugagcauggaaga

SEQ ID NO: 7450 - RNA, 19 nt, Homo sapiens
  misc_RNA (1)...(19): siRNA sense strand
ucacugauccacuccuuuc

SEQ ID NO: 7451 - RNA, 19 nt, Homo sapiens
  misc_RNA (1)...(19): siRNA sense strand
caacaacaaccucggaacu

SEQ ID NO: 7452 - RNA, 19 nt, Homo sapiens
  misc_RNA (1)...(19): siRNA sense strand
ucacgagcguccuguaugc

SEQ ID NO: 7453 - RNA, 19 nt, Homo sapiens
  misc_RNA (1)...(19): siRNA sense strand
gcagaccuaaccuguacaa

SEQ ID NO: 7454 - RNA, 19 nt, Homo sapiens
  misc_RNA (1)...(19): siRNA sense strand
ugaacgaagaagaagauuu

SEQ ID NO: 7455 - RNA, 19 nt, Homo sapiens
  misc_RNA (1)...(19): siRNA sense strand
ggauccugcuuugcaaaug

SEQ ID NO: 7456 - RNA, 19 nt, Homo sapiens
  misc_RNA (1)...(19): siRNA sense strand
ggcucgagcucauggacuu

SEQ ID NO: 7457 - RNA, 19 nt, Homo sapiens
  misc_RNA (1)...(19): siRNA sense strand
agccaaccuucccaacaua

SEQ ID NO: 7458 - RNA, 19 nt, Homo sapiens
  misc_RNA (1)...(19): siRNA sense strand
ggaaccaucuuaaaagcau

SEQ ID NO: 7459 - RNA, 19 nt, Homo sapiens
  misc_RNA (1)...(19): siRNA sense strand
gcccaacggcagcagguaa

SEQ ID NO: 7460 - RNA, 19 nt, Homo sapiens
  misc_RNA (1)...(19): siRNA sense strand
ggagcaguaugagcaugga

SEQ ID NO: 7461 - RNA, 19 nt, Homo sapiens
  misc_RNA (1)...(19): siRNA sense strand
gcaccaucaccuucaacaa

SEQ ID NO: 7462 - RNA, 19 nt, Homo sapiens
  misc_RNA (1)...(19): siRNA sense strand
uacaacaacucucgaucuc

SEQ ID NO: 7463 - RNA, 19 nt, Homo sapiens
  misc_RNA (1)...(19): siRNA sense strand
agaccuaaccuguacaaca

SEQ ID NO: 7464 - RNA, 19 nt, Homo sapiens
  misc_RNA (1)...(19): siRNA sense strand
ggcauuuguugcucagaau

SEQ ID NO: 7465 - RNA, 19 nt, Homo sapiens
  misc_RNA (1)...(19): siRNA sense strand
gaaaguugcaacgagaaca

SEQ ID NO: 7466 - RNA, 19 nt, Homo sapiens
  misc_RNA (1)...(19): siRNA sense strand
ucuaccacuuuagcaaaua

SEQ ID NO: 7467 - RNA, 19 nt, Homo sapiens
  misc_RNA (1)...(19): siRNA sense strand
cgggaaacuugauugaucu

SEQ ID NO: 7468 - RNA, 19 nt, Homo sapiens
  misc_RNA (1)...(19): siRNA sense strand
uggacuauauccgaaaguu

SEQ ID NO: 7469 - RNA, 19 nt, Homo sapiens
  misc_RNA (1)...(19): siRNA sense strand
ucauuagccuagaaucaag

SEQ ID NO: 7470 - RNA, 19 nt, Homo sapiens
  misc_RNA (1)...(19): siRNA sense strand
ucgaaaaccccaccaagua

SEQ ID NO: 7471 - RNA, 19 nt, Homo sapiens
  misc_RNA (1)...(19): siRNA sense strand
cuugauugaucuuuaugga

SEQ ID NO: 7472 - RNA, 19 nt, Homo sapiens
  misc_RNA (1)...(19): siRNA sense strand
cucauggacuuucccuuau

SEQ ID NO: 7473 - RNA, 19 nt, Homo sapiens
  misc_RNA (1)...(19): siRNA sense strand
ucagaauacaggaacuuga

SEQ ID NO: 7474 - RNA, 19 nt, Homo sapiens
  misc_RNA (1)...(19): siRNA sense strand
gccaaccuucccaacauaa

SEQ ID NO: 7475 - RNA, 19 nt, Homo sapiens
  misc_RNA (1)...(19): siRNA sense strand
uagccuagaaucaaguuau

SEQ ID NO: 7476 - RNA, 19 nt, Homo sapiens
  misc_RNA (1)...(19): siRNA sense strand
gcacgccaaccggcauuug

SEQ ID NO: 7477 - RNA, 19 nt, Homo sapiens
  misc_RNA (1)...(19): siRNA sense strand
aacaagggaaccaucuuaa

SEQ ID NO: 7478 - RNA, 19 nt, Homo sapiens
  misc_RNA (1)...(19): siRNA sense strand
ccaaccuucccaacauaaa

SEQ ID NO: 7479 - RNA, 19 nt, Homo sapiens
  misc_RNA (1)...(19): siRNA sense strand
caaguaccacauacagcaa

SEQ ID NO: 7480 - RNA, 19 nt, Homo sapiens
  misc_RNA (1)...(19): siRNA sense strand
ccaaccaagccuauagugu

SEQ ID NO: 7481 - RNA, 19 nt, Homo sapiens
  misc_RNA (1)...(19): siRNA sense strand
caugcagaccuaaccugua

SEQ ID NO: 7482 - RNA, 19 nt, Homo sapiens
  misc_RNA (1)...(19): siRNA sense strand
gagcuugccauguccaaac

SEQ ID NO: 7483 - RNA, 19 nt, Homo sapiens
  misc_RNA (1)...(19): siRNA sense strand
ggccaaagagaggcagaaa

SEQ ID NO: 7484 - RNA, 19 nt, Homo sapiens
  misc_RNA (1)...(19): siRNA sense strand
augcagaccuaaccuguac

SEQ ID NO: 7485 - RNA, 19 nt, Homo sapiens
  misc_RNA (1)...(19): siRNA sense strand
gagcacgccaaccggcauu

SEQ ID NO: 7486 - RNA, 19 nt, Homo sapiens
  misc_RNA (1)...(19): siRNA sense strand
uaaacaugccaaccaaguc

SEQ ID NO: 7487 - RNA, 19 nt, Homo sapiens
  misc_RNA (1)...(19): siRNA sense strand
ccaucaccuucaacaacaa

SEQ ID NO: 7488 - RNA, 19 nt, Homo sapiens
  misc_RNA (1)...(19): siRNA sense strand
gcuuaacuccaacugugaa

SEQ ID NO: 7489 - RNA, 19 nt, Homo sapiens
  misc_RNA (1)...(19): siRNA sense strand
agaauacaggaacuugaaa

SEQ ID NO: 7490 - RNA, 19 nt, Homo sapiens
  misc_RNA (1)...(19): siRNA sense strand
gcucagaauacaggaacuu

SEQ ID NO: 7491 - RNA, 19 nt, Homo sapiens
  misc_RNA (1)...(19): siRNA sense strand
gauugaacgaagaagaaga

SEQ ID NO: 7492 - RNA, 19 nt, Homo sapiens
  misc_RNA (1)...(19): siRNA sense strand
gcaagagcacuggccaaag

SEQ ID NO: 7493 - RNA, 19 nt, Homo sapiens
  misc_RNA (1)...(19): siRNA sense strand
caccaggccucaccaucag

SEQ ID NO: 7494 - RNA, 19 nt, Homo sapiens
  misc_RNA (1)...(19): siRNA sense strand
gaacgaagaagaagauuua

SEQ ID NO: 7495 - RNA, 19 nt, Homo sapiens
  misc_RNA (1)...(19): siRNA sense strand
gaacaagggaaccaucuua

SEQ ID NO: 7496 - RNA, 19 nt, Homo sapiens
  misc_RNA (1)...(19): siRNA sense strand
gcagauggaugauguaauc

SEQ ID NO: 7497 - RNA, 19 nt, Homo sapiens
  misc_RNA (1)...(19): siRNA sense strand
caagagcacuggccaaaga

SEQ ID NO: 7498 - RNA, 19 nt, Homo sapiens
  misc_RNA (1)...(19): siRNA sense strand
gaccuaaccuguacaacaa

SEQ ID NO: 7499 - RNA, 19 nt, Homo sapiens
  misc_RNA (1)...(19): siRNA sense strand
gaggaaaucuugggcuuga

SEQ ID NO: 7500 - RNA, 19 nt, Homo sapiens
  misc_RNA (1)...(19): siRNA sense strand
agacggagcacacuuguua

SEQ ID NO: 7501 - RNA, 19 nt, Homo sapiens
  misc_RNA (1)...(19): siRNA sense strand
gcucauggacuuucccuua

SEQ ID NO: 7502 - RNA, 19 nt, Homo sapiens
  misc_RNA (1)...(19): siRNA sense strand
guaccuuucuaccacuuua

SEQ ID NO: 7503 - RNA, 19 nt, Homo sapiens
  misc_RNA (1)...(19): siRNA sense strand
agaacuagguacuuugauu

SEQ ID NO: 7504 - RNA, 19 nt, Homo sapiens
  misc_RNA (1)...(19): siRNA sense strand
gaacuagguacuuugauuc

SEQ ID NO: 7505 - RNA, 19 nt, Homo sapiens
  misc_RNA (1)...(19): siRNA sense strand
aaauaaacaugccaaccaa

SEQ ID NO: 7506 - RNA, 19 nt, Homo sapiens
  misc_RNA (1)...(19): siRNA sense strand
cgaagaagaagauuuaaca

SEQ ID NO: 7507 - RNA, 19 nt, Homo sapiens
  misc_RNA (1)...(19): siRNA sense strand
aagcauccguggacuauau

SEQ ID NO: 7508 - RNA, 19 nt, Homo sapiens
  misc_RNA (1)...(19): siRNA sense strand
guaugcagauggaugaugu

SEQ ID NO: 7509 - RNA, 19 nt, Homo sapiens
  misc_RNA (1)...(19): siRNA sense strand
ugacaucauuagccuagaa

SEQ ID NO: 7510 - RNA, 19 nt, Homo sapiens
  misc_RNA (1)...(19): siRNA sense strand
ggcagcagguaaagcagua

SEQ ID NO: 7511 - RNA, 19 nt, Homo sapiens
  misc_RNA (1)...(19): siRNA sense strand
uggcuaugcuuacgcuuaa

SEQ ID NO: 7512 - RNA, 19 nt, Homo sapiens
  misc_RNA (1)...(19): siRNA sense strand
caaccugauugaacgaaga

SEQ ID NO: 7513 - RNA, 19 nt, Homo sapiens
  misc_RNA (1)...(19): siRNA sense strand
caaauaaacaugccaacca

SEQ ID NO: 7514 - RNA, 19 nt, Homo sapiens
  misc_RNA (1)...(19): siRNA sense strand
gauggaugauguaaucgau

SEQ ID NO: 7515 - RNA, 19 nt, Homo sapiens
  misc_RNA (1)...(19): siRNA sense strand
gauggauccugcuuugcaa

SEQ ID NO: 7516 - RNA, 19 nt, Homo sapiens
  misc_RNA (1)...(19): siRNA sense strand
cuaccacuuuagcaaauaa

SEQ ID NO: 7517 - RNA, 19 nt, Homo sapiens
  misc_RNA (1)...(19): siRNA sense strand
gaauacaggaacuugaaau

SEQ ID NO: 7518 - RNA, 19 nt, Homo sapiens
  misc_RNA (1)...(19): siRNA sense strand
uggaugauguaaucgauga

SEQ ID NO: 7519 - RNA, 19 nt, Homo sapiens
  misc_RNA (1)...(19): siRNA sense strand
ggaaaucuugggcuugaug

SEQ ID NO: 7520 - RNA, 19 nt, Homo sapiens
  misc_RNA (1)...(19): siRNA sense strand
ugaaucggaucaucaagca

SEQ ID NO: 7521 - RNA, 19 nt, Homo sapiens
  misc_RNA (1)...(19): siRNA sense strand
ucauggacuuucccuuauu

SEQ ID NO: 7522 - RNA, 19 nt, Homo sapiens
  misc_RNA (1)...(19): siRNA sense strand
cagaauacaggaacuugaa

SEQ ID NO: 7523 - RNA, 19 nt, Homo sapiens
  misc_RNA (1)...(19): siRNA sense strand
cagccaaccuucccaacau

SEQ ID NO: 7524 - RNA, 19 nt, Homo sapiens
  misc_RNA (1)...(19): siRNA sense strand
guccugagcuugccauguc

SEQ ID NO: 7525 - RNA, 19 nt, Homo sapiens
  misc_RNA (1)...(19): siRNA sense strand
gaagagacggagcacacuu

SEQ ID NO: 7526 - RNA, 19 nt, Homo sapiens
  misc_RNA (1)...(19): siRNA sense strand
ggacuauauccgaaaguug

SEQ ID NO: 7527 - RNA, 19 nt, Homo sapiens
  misc_RNA (1)...(19): siRNA sense strand
uacaggaacuugaaaugca

SEQ ID NO: 7528 - RNA, 19 nt, Homo sapiens
  misc_RNA (1)...(19): siRNA sense strand
agccuagaaucaaguuaua

SEQ ID NO: 7529 - RNA, 19 nt, Homo sapiens
  misc_RNA (1)...(19): siRNA sense strand
guacaacaacucucgaucu

SEQ ID NO: 7530 - RNA, 19 nt, Homo sapiens
  misc_RNA (1)...(19): siRNA sense strand
gcauuuguugcucagaaua

SEQ ID NO: 7531 - RNA, 19 nt, Homo sapiens
  misc_RNA (1)...(19): siRNA sense strand
gucaaaugauccagacaug

SEQ ID NO: 7532 - RNA, 19 nt, Homo sapiens
  misc_RNA (1)...(19): siRNA sense strand
ucgggaaacuugauugauc

SEQ ID NO: 7533 - RNA, 19 nt, Homo sapiens
  misc_RNA (1)...(19): siRNA sense strand
gauccugcuuugcaaaugg

SEQ ID NO: 7534 - RNA, 19 nt, Homo sapiens
  misc_RNA (1)...(19): siRNA sense strand
cauggacuuucccuuauuc

SEQ ID NO: 7535 - RNA, 19 nt, Homo sapiens
  misc_RNA (1)...(19): siRNA sense strand
gcccaggcaugaacacaca

SEQ ID NO: 7536 - RNA, 19 nt, Homo sapiens
  misc_RNA (1)...(19): siRNA sense strand
ggacuuucccuuauuccau

SEQ ID NO: 7537 - RNA, 19 nt, Homo sapiens
  misc_RNA (1)...(19): siRNA sense strand
caagggaaccaucuuaaaa

SEQ ID NO: 7538 - RNA, 19 nt, Homo sapiens
  misc_RNA (1)...(19): siRNA sense strand
gugcagacccaccucgaaa

SEQ ID NO: 7539 - RNA, 19 nt, Homo sapiens
  misc_RNA (1)...(19): siRNA sense strand
ccaccaggccucaccauca

SEQ ID NO: 7540 - RNA, 19 nt, Homo sapiens
  misc_RNA (1)...(19): siRNA sense strand
ggaaacuugauugaucuuu

SEQ ID NO: 7541 - RNA, 19 nt, Homo sapiens
  misc_RNA (1)...(19): siRNA sense strand
cuugauggauccugcuuug

SEQ ID NO: 7542 - RNA, 19 nt, Homo sapiens
  misc_RNA (1)...(19): siRNA sense strand
acaagggaaccaucuuaaa

SEQ ID NO: 7543 - RNA, 19 nt, Homo sapiens
  misc_RNA (1)...(19): siRNA sense strand
ugaccgcauuaaagaacua

SEQ ID NO: 7544 - RNA, 19 nt, Homo sapiens
  misc_RNA (1)...(19): siRNA sense strand
ccaaccaaguccugagcuu

SEQ ID NO: 7545 - RNA, 19 nt, Homo sapiens
  misc_RNA (1)...(19): siRNA sense strand
ggaacaagggaaccaucuu

SEQ ID NO: 7546 - RNA, 19 nt, Homo sapiens
  misc_RNA (1)...(19): siRNA sense strand
cggcauuuguugcucagaa

SEQ ID NO: 7547 - RNA, 19 nt, Homo sapiens
  misc_RNA (1)...(19): siRNA sense strand
gagaacagcaacgcgcaaa

SEQ ID NO: 7548 - RNA, 19 nt, Homo sapiens
  misc_RNA (1)...(19): siRNA sense strand
caucauuagccuagaauca

SEQ ID NO: 7549 - RNA, 19 nt, Homo sapiens
  misc_RNA (1)...(19): siRNA sense strand
gcaguaugagcauggaaga

SEQ ID NO: 7550 - RNA, 19 nt, Homo sapiens
  misc_RNA (1)...(19): siRNA sense strand
ucacugauccacuccuuuc

SEQ ID NO: 7551 - RNA, 19 nt, Homo sapiens
  misc_RNA (1)...(19): siRNA sense strand
caacaacaaccucggaacu

SEQ ID NO: 7552 - RNA, 19 nt, Homo sapiens
  misc_RNA (1)...(19): siRNA sense strand
ucacgagcguccuguaugc

SEQ ID NO: 7553 - RNA, 19 nt, Homo sapiens
  misc_RNA (1)...(19): siRNA sense strand
gcagaccuaaccuguacaa

SEQ ID NO: 7554 - RNA, 19 nt, Homo sapiens
  misc_RNA (1)...(19): siRNA sense strand
ugaacgaagaagaagauuu

SEQ ID NO: 7555 - RNA, 19 nt, Homo sapiens
  misc_RNA (1)...(19): siRNA sense strand
ggauccugcuuugcaaaug

SEQ ID NO: 7556 - RNA, 19 nt, Homo sapiens
  misc_RNA (1)...(19): siRNA sense strand
ggcucgagcucauggacuu

SEQ ID NO: 7557 - RNA, 19 nt, Homo sapiens
  misc_RNA (1)...(19): siRNA sense strand
agccaaccuucccaacaua

SEQ ID NO: 7558 - RNA, 19 nt, Homo sapiens
  misc_RNA (1)...(19): siRNA sense strand
ggaaccaucuuaaaagcau

SEQ ID NO: 7559 - RNA, 19 nt, Homo sapiens
  misc_RNA (1)...(19): siRNA sense strand
gcccaacggcagcagguaa

SEQ ID NO: 7560 - RNA, 19 nt, Homo sapiens
  misc_RNA (1)...(19): siRNA sense strand
ggagcaguaugagcaugga

SEQ ID NO: 7561 - RNA, 19 nt, Homo sapiens
  misc_RNA (1)...(19): siRNA sense strand
gcaccaucaccuucaacaa

SEQ ID NO: 7562 - RNA, 19 nt, Homo sapiens
  misc_RNA (1)...(19): siRNA sense strand
uacaacaacucucgaucuc

SEQ ID NO: 7563 - RNA, 19 nt, Homo sapiens
  misc_RNA (1)...(19): siRNA sense strand
agaccuaaccuguacaaca

SEQ ID NO: 7564 - RNA, 19 nt, Homo sapiens
  misc_RNA (1)...(19): siRNA sense strand
ggcauuuguugcucagaau

SEQ ID NO: 7565 - RNA, 19 nt, Homo sapiens
  misc_RNA (1)...(19): siRNA sense strand
gaaaguugcaacgagaaca

SEQ ID NO: 7566 - RNA, 19 nt, Homo sapiens
  misc_RNA (1)...(19): siRNA sense strand
ucuaccacuuuagcaaaua

SEQ ID NO: 7567 - RNA, 19 nt, Homo sapiens
  misc_RNA (1)...(19): siRNA sense strand
cgggaaacuugauugaucu

SEQ ID NO: 7568 - RNA, 19 nt, Homo sapiens
  misc_RNA (1)...(19): siRNA sense strand
uggacuauauccgaaaguu

SEQ ID NO: 7569 - RNA, 19 nt, Homo sapiens
  misc_RNA (1)...(19): siRNA sense strand
ucauuagccuagaaucaag

SEQ ID NO: 7570 - RNA, 19 nt, Homo sapiens
  misc_RNA (1)...(19): siRNA sense strand
ucgaaaaccccaccaagua

SEQ ID NO: 7571 - RNA, 19 nt, Homo sapiens
  misc_RNA (1)...(19): siRNA sense strand
cuugauugaucuuuaugga

SEQ ID NO: 7572 - RNA, 19 nt, Homo sapiens
  misc_RNA (1)...(19): siRNA sense strand
cucauggacuuucccuuau

SEQ ID NO: 7573 - RNA, 19 nt, Homo sapiens
  misc_RNA (1)...(19): siRNA sense strand
ucagaauacaggaacuuga

SEQ ID NO: 7574 - RNA, 19 nt, Homo sapiens
  misc_RNA (1)...(19): siRNA sense strand
gccaaccuucccaacauaa

SEQ ID NO: 7575 - RNA, 19 nt, Homo sapiens
  misc_RNA (1)...(19): siRNA sense strand
uagccuagaaucaaguuau

SEQ ID NO: 7576 - RNA, 19 nt, Homo sapiens
  misc_RNA (1)...(19): siRNA sense strand
gcacgccaaccggcauuug

SEQ ID NO: 7577 - RNA, 19 nt, Homo sapiens
  misc_RNA (1)...(19): siRNA sense strand
aacaagggaaccaucuuaa

SEQ ID NO: 7578 - RNA, 19 nt, Homo sapiens
  misc_RNA (1)...(19): siRNA sense strand
ccaaccuucccaacauaaa

SEQ ID NO: 7579 - RNA, 19 nt, Homo sapiens
  misc_RNA (1)...(19): siRNA sense strand
caaguaccacauacagcaa

SEQ ID NO: 7580 - RNA, 19 nt, Homo sapiens
  misc_RNA (1)...(19): siRNA sense strand
ccaaccaagccuauagugu

SEQ ID NO: 7581 - RNA, 19 nt, Homo sapiens
  misc_RNA (1)...(19): siRNA sense strand
caugcagaccuaaccugua

SEQ ID NO: 7582 - RNA, 19 nt, Homo sapiens
  misc_RNA (1)...(19): siRNA sense strand
gagcuugccauguccaaac

SEQ ID NO: 7583 - RNA, 19 nt, Homo sapiens
  misc_RNA (1)...(19): siRNA sense strand
ggccaaagagaggcagaaa

SEQ ID NO: 7584 - RNA, 19 nt, Homo sapiens
  misc_RNA (1)...(19): siRNA sense strand
augcagaccuaaccuguac

SEQ ID NO: 7585 - RNA, 19 nt, Homo sapiens
  misc_RNA (1)...(19): siRNA sense strand
gagcacgccaaccggcauu

SEQ ID NO: 7586 - RNA, 19 nt, Homo sapiens
  misc_RNA (1)...(19): siRNA sense strand
uaaacaugccaaccaaguc

SEQ ID NO: 7587 - RNA, 19 nt, Homo sapiens
  misc_RNA (1)...(19): siRNA sense strand
ccaucaccuucaacaacaa

SEQ ID NO: 7588 - RNA, 19 nt, Homo sapiens
  misc_RNA (1)...(19): siRNA sense strand
gcuuaacuccaacugugaa

SEQ ID NO: 7589 - RNA, 19 nt, Homo sapiens
  misc_RNA (1)...(19): siRNA sense strand
agaauacaggaacuugaaa

SEQ ID NO: 7590 - RNA, 19 nt, Homo sapiens
  misc_RNA (1)...(19): siRNA sense strand
gcucagaauacaggaacuu

SEQ ID NO: 7591 - RNA, 19 nt, Homo sapiens
  misc_RNA (1)...(19): siRNA sense strand
gauugaacgaagaagaaga

SEQ ID NO: 7592 - RNA, 19 nt, Homo sapiens
  misc_RNA (1)...(19): siRNA sense strand
gcaagagcacuggccaaag

SEQ ID NO: 7593 - RNA, 19 nt, Homo sapiens
  misc_RNA (1)...(19): siRNA sense strand
caccaggccucaccaucag

SEQ ID NO: 7594 - RNA, 19 nt, Homo sapiens
  misc_RNA (1)...(19): siRNA sense strand
ugagagagcuguacaauuu

SEQ ID NO: 7595 - RNA, 19 nt, Homo sapiens
  misc_RNA (1)...(19): siRNA sense strand
gaagaugacuugaacguuu

SEQ ID NO: 7596 - RNA, 19 nt, Homo sapiens
  misc_RNA (1)...(19): siRNA sense strand
gaagaucuuuggcucauaa

SEQ ID NO: 7597 - RNA, 19 nt, Homo sapiens
  misc_RNA (1)...(19): siRNA sense strand
caacaaaucuccagucagu

SEQ ID NO: 7598 - RNA, 19 nt, Homo sapiens
  misc_RNA (1)...(19): siRNA sense strand
gaacaagacucuacagaac

SEQ ID NO: 7599 - RNA, 19 nt, Homo sapiens
  misc_RNA (1)...(19): siRNA sense strand
caaauucgauucaugaaga

SEQ ID NO: 7600 - RNA, 19 nt, Homo sapiens
  misc_RNA (1)...(19): siRNA sense strand
gaacauaaucuucagagaa

SEQ ID NO: 7601 - RNA, 19 nt, Homo sapiens
  misc_RNA (1)...(19): siRNA sense strand
gaaccaaugucagaugaaa

SEQ ID NO: 7602 - RNA, 19 nt, Homo sapiens
  misc_RNA (1)...(19): siRNA sense strand
gaacguuucugucgugguu

SEQ ID NO: 7603 - RNA, 19 nt, Homo sapiens
  misc_RNA (1)...(19): siRNA sense strand
ggauuggacucuaaauauu

SEQ ID NO: 7604 - RNA, 19 nt, Homo sapiens
  misc_RNA (1)...(19): siRNA sense strand
gccaacaaguggaaaguua

SEQ ID NO: 7605 - RNA, 19 nt, Homo sapiens
  misc_RNA (1)...(19): siRNA sense strand
ggacaaauucgauucauga

SEQ ID NO: 7606 - RNA, 19 nt, Homo sapiens
  misc_RNA (1)...(19): siRNA sense strand
ccacauuccuguagcagua

SEQ ID NO: 7607 - RNA, 19 nt, Homo sapiens
  misc_RNA (1)...(19): siRNA sense strand
gaacauacccaaagacaca

SEQ ID NO: 7608 - RNA, 19 nt, Homo sapiens
  misc_RNA (1)...(19): siRNA sense strand
gaauugggcugggaagaaa

SEQ ID NO: 7609 - RNA, 19 nt, Homo sapiens
  misc_RNA (1)...(19): siRNA sense strand
agaagacacucaagaauug

SEQ ID NO: 7610 - RNA, 19 nt, Homo sapiens
  misc_RNA (1)...(19): siRNA sense strand
gaagaaagaucaguagaac

SEQ ID NO: 7611 - RNA, 19 nt, Homo sapiens
  misc_RNA (1)...(19): siRNA sense strand
cuagcaagauucaaagaua

SEQ ID NO: 7612 - RNA, 19 nt, Homo sapiens
  misc_RNA (1)...(19): siRNA sense strand
gagaacagccugcaauaug

SEQ ID NO: 7613 - RNA, 19 nt, Homo sapiens
  misc_RNA (1)...(19): siRNA sense strand
gaacuaaacuaugaugaac

SEQ ID NO: 7614 - RNA, 19 nt, Homo sapiens
  misc_RNA (1)...(19): siRNA sense strand
gagagaagaugacuugaac

SEQ ID NO: 7615 - RNA, 19 nt, Homo sapiens
  misc_RNA (1)...(19): siRNA sense strand
gcaggagacugaacagcaa

SEQ ID NO: 7616 - RNA, 19 nt, Homo sapiens
  misc_RNA (1)...(19): siRNA sense strand
ggccgucucugccuaagua

SEQ ID NO: 7617 - RNA, 19 nt, Homo sapiens
  misc_RNA (1)...(19): siRNA sense strand
gaaguaggaaaguuuguuu

SEQ ID NO: 7618 - RNA, 19 nt, Homo sapiens
  misc_RNA (1)...(19): siRNA sense strand
guuccaagcuccaaacguu

SEQ ID NO: 7619 - RNA, 19 nt, Homo sapiens
  misc_RNA (1)...(19): siRNA sense strand
gauaucgcauucagaguga

SEQ ID NO: 7620 - RNA, 19 nt, Homo sapiens
  misc_RNA (1)...(19): siRNA sense strand
agaacagccugcaauauga

SEQ ID NO: 7621 - RNA, 19 nt, Homo sapiens
  misc_RNA (1)...(19): siRNA sense strand
gaagagugccacccauuug

SEQ ID NO: 7622 - RNA, 19 nt, Homo sapiens
  misc_RNA (1)...(19): siRNA sense strand
caacaaguggaaaguuaua

SEQ ID NO: 7623 - RNA, 19 nt, Homo sapiens
  misc_RNA (1)...(19): siRNA sense strand
gcaaccaccauuagaauug

SEQ ID NO: 7624 - RNA, 19 nt, Homo sapiens
  misc_RNA (1)...(19): siRNA sense strand
gaacagagugauauugcaa

SEQ ID NO: 7625 - RNA, 19 nt, Homo sapiens
  misc_RNA (1)...(19): siRNA sense strand
gggaaccaaugucagauga

SEQ ID NO: 7626 - RNA, 19 nt, Homo sapiens
  misc_RNA (1)...(19): siRNA sense strand
cagaugaaauugauguaug

SEQ ID NO: 7627 - RNA, 19 nt, Homo sapiens
  misc_RNA (1)...(19): siRNA sense strand
caagccaacugaagaaaca

SEQ ID NO: 7628 - RNA, 19 nt, Homo sapiens
  misc_RNA (1)...(19): siRNA sense strand
gcaaucuguuccagucauu

SEQ ID NO: 7629 - RNA, 19 nt, Homo sapiens
  misc_RNA (1)...(19): siRNA sense strand
gagcucaagccgaagauuu

SEQ ID NO: 7630 - RNA, 19 nt, Homo sapiens
  misc_RNA (1)...(19): siRNA sense strand
ucaggaaccuuggguaaug

SEQ ID NO: 7631 - RNA, 19 nt, Homo sapiens
  misc_RNA (1)...(19): siRNA sense strand
gaugaucaggugaauguaa

SEQ ID NO: 7632 - RNA, 19 nt, Homo sapiens
  misc_RNA (1)...(19): siRNA sense strand
cauuagaauugacuuguga

SEQ ID NO: 7633 - RNA, 19 nt, Homo sapiens
  misc_RNA (1)...(19): siRNA sense strand
caaccaccauuagaauuga

SEQ ID NO: 7634 - RNA, 19 nt, Homo sapiens
  misc_RNA (1)...(19): siRNA sense strand
ccaaggagucucggaauaa

SEQ ID NO: 7635 - RNA, 19 nt, Homo sapiens
  misc_RNA (1)...(19): siRNA sense strand
agaaagaucaguagaacaa

SEQ ID NO: 7636 - RNA, 19 nt, Homo sapiens
  misc_RNA (1)...(19): siRNA sense strand
aaacagggagucaaagauu

SEQ ID NO: 7637 - RNA, 19 nt, Homo sapiens
  misc_RNA (1)...(19): siRNA sense strand
gaacuugauguagaaauga

SEQ ID NO: 7638 - RNA, 19 nt, Homo sapiens
  misc_RNA (1)...(19): siRNA sense strand
cuuaggaggugcucgaauu

SEQ ID NO: 7639 - RNA, 19 nt, Homo sapiens
  misc_RNA (1)...(19): siRNA sense strand
caagguguuuggcccauga

SEQ ID NO: 7640 - RNA, 19 nt, Homo sapiens
  misc_RNA (1)...(19): siRNA sense strand
caauaugaccuauggauca

SEQ ID NO: 7641 - RNA, 19 nt, Homo sapiens
  misc_RNA (1)...(19): siRNA sense strand
aaagaucaguagaacaaga

SEQ ID NO: 7642 - RNA, 19 nt, Homo sapiens
  misc_RNA (1)...(19): siRNA sense strand
cgaguuauccaauguaaau

SEQ ID NO: 7643 - RNA, 19 nt, Homo sapiens
  misc_RNA (1)...(19): siRNA sense strand
ugaacuugauguagaaaug

SEQ ID NO: 7644 - RNA, 19 nt, Homo sapiens
  misc_RNA (1)...(19): siRNA sense strand
gcauauuuaucaagaugug

SEQ ID NO: 7645 - RNA, 19 nt, Homo sapiens
  misc_RNA (1)...(19): siRNA sense strand
uaauuugcauccagucuau

SEQ ID NO: 7646 - RNA, 19 nt, Homo sapiens
  misc_RNA (1)...(19): siRNA sense strand
ggaugcugaugguauuuga

SEQ ID NO: 7647 - RNA, 19 nt, Homo sapiens
  misc_RNA (1)...(19): siRNA sense strand
cuacuauucugggagauaa

SEQ ID NO: 7648 - RNA, 19 nt, Homo sapiens
  misc_RNA (1)...(19): siRNA sense strand
caacugaagaaacauauca

SEQ ID NO: 7649 - RNA, 19 nt, Homo sapiens
  misc_RNA (1)...(19): siRNA sense strand
uggcuaauguugacaauag

SEQ ID NO: 7650 - RNA, 19 nt, Homo sapiens
  misc_RNA (1)...(19): siRNA sense strand
ugagagagaagaugacuug

SEQ ID NO: 7651 - RNA, 19 nt, Homo sapiens
  misc_RNA (1)...(19): siRNA sense strand
gauugguggucuacuauuc

SEQ ID NO: 7652 - RNA, 19 nt, Homo sapiens
  misc_RNA (1)...(19): siRNA sense strand
caagaagacacucaagaau

SEQ ID NO: 7653 - RNA, 19 nt, Homo sapiens
  misc_RNA (1)...(19): siRNA sense strand
gauaauggacaaauucgau

SEQ ID NO: 7654 - RNA, 19 nt, Homo sapiens
  misc_RNA (1)...(19): siRNA sense strand
gcuuagugcugaccagguu

SEQ ID NO: 7655 - RNA, 19 nt, Homo sapiens
  misc_RNA (1)...(19): siRNA sense strand
ugaugaacuugauguagaa

SEQ ID NO: 7656 - RNA, 19 nt, Homo sapiens
  misc_RNA (1)...(19): siRNA sense strand
cucgagaacuaaacuauga

SEQ ID NO: 7657 - RNA, 19 nt, Homo sapiens
  misc_RNA (1)...(19): siRNA sense strand
gauuggacucuaaauauug

SEQ ID NO: 7658 - RNA, 19 nt, Homo sapiens
  misc_RNA (1)...(19): siRNA sense strand
cuaaggagcaggcuuugaa

SEQ ID NO: 7659 - RNA, 19 nt, Homo sapiens
  misc_RNA (1)...(19): siRNA sense strand
aagaagacacucaagaauu

SEQ ID NO: 7660 - RNA, 19 nt, Homo sapiens
  misc_RNA (1)...(19): siRNA sense strand
ggauaccuaaggaucuuua

SEQ ID NO: 7661 - RNA, 19 nt, Homo sapiens
  misc_RNA (1)...(19): siRNA sense strand
uccaaggagucucggaaua

SEQ ID NO: 7662 - RNA, 19 nt, Homo sapiens
  misc_RNA (1)...(19): siRNA sense strand
acaagaagacacucaagaa

SEQ ID NO: 7663 - RNA, 19 nt, Homo sapiens
  misc_RNA (1)...(19): siRNA sense strand
ggugggaacugaccuuguc

SEQ ID NO: 7664 - RNA, 19 nt, Homo sapiens
  misc_RNA (1)...(19): siRNA sense strand
gcccaugacugagagagaa

SEQ ID NO: 7665 - RNA, 19 nt, Homo sapiens
  misc_RNA (1)...(19): siRNA sense strand
cagagaacagccugcaaua

SEQ ID NO: 7666 - RNA, 19 nt, Homo sapiens
  misc_RNA (1)...(19): siRNA sense strand
ggagauaaagaagaauuug

SEQ ID NO: 7667 - RNA, 19 nt, Homo sapiens
  misc_RNA (1)...(19): siRNA sense strand
gcagaacagagugauauug

SEQ ID NO: 7668 - RNA, 19 nt, Homo sapiens
  misc_RNA (1)...(19): siRNA sense strand
cgugguuucuccuaacuuu

SEQ ID NO: 7669 - RNA, 19 nt, Homo sapiens
  misc_RNA (1)...(19): siRNA sense strand
cgugauugguggucuacua

SEQ ID NO: 7670 - RNA, 19 nt, Homo sapiens
  misc_RNA (1)...(19): siRNA sense strand
ucugggagauaaagaagaa

SEQ ID NO: 7671 - RNA, 19 nt, Homo sapiens
  misc_RNA (1)...(19): siRNA sense strand
ugacaauaguggaaaugga

SEQ ID NO: 7672 - RNA, 19 nt, Homo sapiens
  misc_RNA (1)...(19): siRNA sense strand
gaaagaacuucagaaaauc

SEQ ID NO: 7673 - RNA, 19 nt, Homo sapiens
  misc_RNA (1)...(19): siRNA sense strand
ugaagaaacauaucaccuu

SEQ ID NO: 7674 - RNA, 19 nt, Homo sapiens
  misc_RNA (1)...(19): siRNA sense strand
gaauugacuugugaucagu

SEQ ID NO: 7675 - RNA, 19 nt, Homo sapiens
  misc_RNA (1)...(19): siRNA sense strand
ggaaguaggaaaguuuguu

SEQ ID NO: 7676 - RNA, 19 nt, Homo sapiens
  misc_RNA (1)...(19): siRNA sense strand
gacacaagccaacugaaga

SEQ ID NO: 7677 - RNA, 19 nt, Homo sapiens
  misc_RNA (1)...(19): siRNA sense strand
ugaagagugccacccauuu

SEQ ID NO: 7678 - RNA, 19 nt, Homo sapiens
  misc_RNA (1)...(19): siRNA sense strand
caaaacuucucaacgauau

SEQ ID NO: 7679 - RNA, 19 nt, Homo sapiens
  misc_RNA (1)...(19): siRNA sense strand
gagcuaugcuuuuggaaga

SEQ ID NO: 7680 - RNA, 19 nt, Homo sapiens
  misc_RNA (1)...(19): siRNA sense strand
aaagacuaguuguggauug

SEQ ID NO: 7681 - RNA, 19 nt, Homo sapiens
  misc_RNA (1)...(19): siRNA sense strand
aacagggagucaaagauuu

SEQ ID NO: 7682 - RNA, 19 nt, Homo sapiens
  misc_RNA (1)...(19): siRNA sense strand
ugacugagagagaagauga

SEQ ID NO: 7683 - RNA, 19 nt, Homo sapiens
  misc_RNA (1)...(19): siRNA sense strand
gcccuugacauauguauug

SEQ ID NO: 7684 - RNA, 19 nt, Homo sapiens
  misc_RNA (1)...(19): siRNA sense strand
ucuacgagauccaguacuu

SEQ ID NO: 7685 - RNA, 19 nt, Homo sapiens
  misc_RNA (1)...(19): siRNA sense strand
guuguggauuggacucuaa

SEQ ID NO: 7686 - RNA, 19 nt, Homo sapiens
  misc_RNA (1)...(19): siRNA sense strand
guuugugucuggcuaaugu

SEQ ID NO: 7687 - RNA, 19 nt, Homo sapiens
  misc_RNA (1)...(19): siRNA sense strand
agaagaaagaucaguagaa

SEQ ID NO: 7688 - RNA, 19 nt, Homo sapiens
  misc_RNA (1)...(19): siRNA sense strand
agacuugccugucgaagag

SEQ ID NO: 7689 - RNA, 19 nt, Homo sapiens
  misc_RNA (1)...(19): siRNA sense strand
ucucaacgauaucgcauuc

SEQ ID NO: 7690 - RNA, 19 nt, Homo sapiens
  misc_RNA (1)...(19): siRNA sense strand
cuacgugcaaccaccauua

SEQ ID NO: 7691 - RNA, 19 nt, Homo sapiens
  misc_RNA (1)...(19): siRNA sense strand
gggagauaaagaagaauuu

SEQ ID NO: 7692 - RNA, 19 nt, Homo sapiens
  misc_RNA (1)...(19): siRNA sense strand
gaugggaugcugaugguau

SEQ ID NO: 7693 - RNA, 19 nt, Homo sapiens
  misc_RNA (1)...(19): siRNA sense strand
acaagacucuacagaacug

SEQ ID NO: 7694 - RNA, 19 nt, Homo sapiens
  misc_RNA (1)...(19): siRNA sense strand
ugagagagcuguacaauuu

SEQ ID NO: 7695 - RNA, 19 nt, Homo sapiens
  misc_RNA (1)...(19): siRNA sense strand
gaagaugacuugaacguuu

SEQ ID NO: 7696 - RNA, 19 nt, Homo sapiens
  misc_RNA (1)...(19): siRNA sense strand
gaagaucuuuggcucauaa

SEQ ID NO: 7697 - RNA, 19 nt, Homo sapiens
  misc_RNA (1)...(19): siRNA sense strand
caacaaaucuccagucagu

SEQ ID NO: 7698 - RNA, 19 nt, Homo sapiens
  misc_RNA (1)...(19): siRNA sense strand
gaacaagacucuacagaac

SEQ ID NO: 7699 - RNA, 19 nt, Homo sapiens
  misc_RNA (1)...(19): siRNA sense strand
caaauucgauucaugaaga

SEQ ID NO: 7700 - RNA, 19 nt, Homo sapiens
  misc_RNA (1)...(19): siRNA sense strand
gaacauaaucuucagagaa

SEQ ID NO: 7701 - RNA, 19 nt, Homo sapiens
  misc_RNA (1)...(19): siRNA sense strand
gaaccaaugucagaugaaa

SEQ ID NO: 7702 - RNA, 19 nt, Homo sapiens
  misc_RNA (1)...(19): siRNA sense strand
gaacguuucugucgugguu

SEQ ID NO: 7703 - RNA, 19 nt, Homo sapiens
  misc_RNA (1)...(19): siRNA sense strand
ggauuggacucuaaauauu

SEQ ID NO: 7704 - RNA, 19 nt, Homo sapiens
  misc_RNA (1)...(19): siRNA sense strand
gccaacaaguggaaaguua

SEQ ID NO: 7705 - RNA, 19 nt, Homo sapiens
  misc_RNA (1)...(19): siRNA sense strand
ggacaaauucgauucauga

SEQ ID NO: 7706 - RNA, 19 nt, Homo sapiens
  misc_RNA (1)...(19): siRNA sense strand
ccacauuccuguagcagua

SEQ ID NO: 7707 - RNA, 19 nt, Homo sapiens
  misc_RNA (1)...(19): siRNA sense strand
gaacauacccaaagacaca

SEQ ID NO: 7708 - RNA, 19 nt, Homo sapiens
  misc_RNA (1)...(19): siRNA sense strand
gaauugggcugggaagaaa

SEQ ID NO: 7709 - RNA, 19 nt, Homo sapiens
  misc_RNA (1)...(19): siRNA sense strand
agaagacacucaagaauug

SEQ ID NO: 7710 - RNA, 19 nt, Homo sapiens
  misc_RNA (1)...(19): siRNA sense strand
gaagaaagaucaguagaac

SEQ ID NO: 7711 - RNA, 19 nt, Homo sapiens
  misc_RNA (1)...(19): siRNA sense strand
cuagcaagauucaaagaua

SEQ ID NO: 7712 - RNA, 19 nt, Homo sapiens
  misc_RNA (1)...(19): siRNA sense strand
gagaacagccugcaauaug

SEQ ID NO: 7713 - RNA, 19 nt, Homo sapiens
  misc_RNA (1)...(19): siRNA sense strand
gaacuaaacuaugaugaac

SEQ ID NO: 7714 - RNA, 19 nt, Homo sapiens
  misc_RNA (1)...(19): siRNA sense strand
gagagaagaugacuugaac

SEQ ID NO: 7715 - RNA, 19 nt, Homo sapiens
  misc_RNA (1)...(19): siRNA sense strand
gcaggagacugaacagcaa

SEQ ID NO: 7716 - RNA, 19 nt, Homo sapiens
  misc_RNA (1)...(19): siRNA sense strand
ggccgucucugccuaagua

SEQ ID NO: 7717 - RNA, 19 nt, Homo sapiens
  misc_RNA (1)...(19): siRNA sense strand
gaaguaggaaaguuuguuu

SEQ ID NO: 7718 - RNA, 19 nt, Homo sapiens
  misc_RNA (1)...(19): siRNA sense strand
guuccaagcuccaaacguu

SEQ ID NO: 7719 - RNA, 19 nt, Homo sapiens
  misc_RNA (1)...(19): siRNA sense strand
gauaucgcauucagaguga

SEQ ID NO: 7720 - RNA, 19 nt, Homo sapiens
  misc_RNA (1)...(19): siRNA sense strand
agaacagccugcaauauga

SEQ ID NO: 7721 - RNA, 19 nt, Homo sapiens
  misc_RNA (1)...(19): siRNA sense strand
gaagagugccacccauuug

SEQ ID NO: 7722 - RNA, 19 nt, Homo sapiens
  misc_RNA (1)...(19): siRNA sense strand
caacaaguggaaaguuaua

SEQ ID NO: 7723 - RNA, 19 nt, Homo sapiens
  misc_RNA (1)...(19): siRNA sense strand
gcaaccaccauuagaauug

SEQ ID NO: 7724 - RNA, 19 nt, Homo sapiens
  misc_RNA (1)...(19): siRNA sense strand
gaacagagugauauugcaa

SEQ ID NO: 7725 - RNA, 19 nt, Homo sapiens
  misc_RNA (1)...(19): siRNA sense strand
gggaaccaaugucagauga

SEQ ID NO: 7726 - RNA, 19 nt, Homo sapiens
  misc_RNA (1)...(19): siRNA sense strand
cagaugaaauugauguaug

SEQ ID NO: 7727 - RNA, 19 nt, Homo sapiens
  misc_RNA (1)...(19): siRNA sense strand
caagccaacugaagaaaca

SEQ ID NO: 7728 - RNA, 19 nt, Homo sapiens
  misc_RNA (1)...(19): siRNA sense strand
gcaaucuguuccagucauu

SEQ ID NO: 7729 - RNA, 19 nt, Homo sapiens
  misc_RNA (1)...(19): siRNA sense strand
gagcucaagccgaagauuu

SEQ ID NO: 7730 - RNA, 19 nt, Homo sapiens
  misc_RNA (1)...(19): siRNA sense strand
ucaggaaccuuggguaaug

SEQ ID NO: 7731 - RNA, 19 nt, Homo sapiens
  misc_RNA (1)...(19): siRNA sense strand
gaugaucaggugaauguaa

SEQ ID NO: 7732 - RNA, 19 nt, Homo sapiens
  misc_RNA (1)...(19): siRNA sense strand
cauuagaauugacuuguga

SEQ ID NO: 7733 - RNA, 19 nt, Homo sapiens
  misc_RNA (1)...(19): siRNA sense strand
caaccaccauuagaauuga

SEQ ID NO: 7734 - RNA, 19 nt, Homo sapiens
  misc_RNA (1)...(19): siRNA sense strand
ccaaggagucucggaauaa

SEQ ID NO: 7735 - RNA, 19 nt, Homo sapiens
  misc_RNA (1)...(19): siRNA sense strand
agaaagaucaguagaacaa

SEQ ID NO: 7736 - RNA, 19 nt, Homo sapiens
  misc_RNA (1)...(19): siRNA sense strand
aaacagggagucaaagauu

SEQ ID NO: 7737 - RNA, 19 nt, Homo sapiens
  misc_RNA (1)...(19): siRNA sense strand
gaacuugauguagaaauga

SEQ ID NO: 7738 - RNA, 19 nt, Homo sapiens
  misc_RNA (1)...(19): siRNA sense strand
cuuaggaggugcucgaauu

SEQ ID NO: 7739 - RNA, 19 nt, Homo sapiens
  misc_RNA (1)...(19): siRNA sense strand
caagguguuuggcccauga

SEQ ID NO: 7740 - RNA, 19 nt, Homo sapiens
  misc_RNA (1)...(19): siRNA sense strand
caauaugaccuauggauca

SEQ ID NO: 7741 - RNA, 19 nt, Homo sapiens
  misc_RNA (1)...(19): siRNA sense strand
aaagaucaguagaacaaga

SEQ ID NO: 7742 - RNA, 19 nt, Homo sapiens
  misc_RNA (1)...(19): siRNA sense strand
cgaguuauccaauguaaau

SEQ ID NO: 7743 - RNA, 19 nt, Homo sapiens
  misc_RNA (1)...(19): siRNA sense strand
ugaacuugauguagaaaug

SEQ ID NO: 7744 - RNA, 19 nt, Homo sapiens
  misc_RNA (1)...(19): siRNA sense strand
gcauauuuaucaagaugug

SEQ ID NO: 7745 - RNA, 19 nt, Homo sapiens
  misc_RNA (1)...(19): siRNA sense strand
uaauuugcauccagucuau

SEQ ID NO: 7746 - RNA, 19 nt, Homo sapiens
  misc_RNA (1)...(19): siRNA sense strand
ggaugcugaugguauuuga

SEQ ID NO: 7747 - RNA, 19 nt, Homo sapiens
  misc_RNA (1)...(19): siRNA sense strand
cuacuauucugggagauaa

SEQ ID NO: 7748 - RNA, 19 nt, Homo sapiens
  misc_RNA (1)...(19): siRNA sense strand
caacugaagaaacauauca

SEQ ID NO: 7749 - RNA, 19 nt, Homo sapiens
  misc_RNA (1)...(19): siRNA sense strand
uggcuaauguugacaauag

SEQ ID NO: 7750 - RNA, 19 nt, Homo sapiens
  misc_RNA (1)...(19): siRNA sense strand
ugagagagaagaugacuug

SEQ ID NO: 7751 - RNA, 19 nt, Homo sapiens
  misc_RNA (1)...(19): siRNA sense strand
gauugguggucuacuauuc

SEQ ID NO: 7752 - RNA, 19 nt, Homo sapiens
  misc_RNA (1)...(19): siRNA sense strand
caagaagacacucaagaau

SEQ ID NO: 7753 - RNA, 19 nt, Homo sapiens
  misc_RNA (1)...(19): siRNA sense strand
gauaauggacaaauucgau

SEQ ID NO: 7754 - RNA, 19 nt, Homo sapiens
  misc_RNA (1)...(19): siRNA sense strand
gcuuagugcugaccagguu

SEQ ID NO: 7755 - RNA, 19 nt, Homo sapiens
  misc_RNA (1)...(19): siRNA sense strand
ugaugaacuugauguagaa

SEQ ID NO: 7756 - RNA, 19 nt, Homo sapiens
  misc_RNA (1)...(19): siRNA sense strand
cucgagaacuaaacuauga

SEQ ID NO: 7757 - RNA, 19 nt, Homo sapiens
  misc_RNA (1)...(19): siRNA sense strand
gauuggacucuaaauauug

SEQ ID NO: 7758 - RNA, 19 nt, Homo sapiens
  misc_RNA (1)...(19): siRNA sense strand
cuaaggagcaggcuuugaa

SEQ ID NO: 7759 - RNA, 19 nt, Homo sapiens
  misc_RNA (1)...(19): siRNA sense strand
aagaagacacucaagaauu

SEQ ID NO: 7760 - RNA, 19 nt, Homo sapiens
  misc_RNA (1)...(19): siRNA sense strand
ggauaccuaaggaucuuua

SEQ ID NO: 7761 - RNA, 19 nt, Homo sapiens
  misc_RNA (1)...(19): siRNA sense strand
uccaaggagucucggaaua

SEQ ID NO: 7762 - RNA, 19 nt, Homo sapiens
  misc_RNA (1)...(19): siRNA sense strand
acaagaagacacucaagaa

SEQ ID NO: 7763 - RNA, 19 nt, Homo sapiens
  misc_RNA (1)...(19): siRNA sense strand
ggugggaacugaccuuguc

SEQ ID NO: 7764 - RNA, 19 nt, Homo sapiens
  misc_RNA (1)...(19): siRNA sense strand
gcccaugacugagagagaa

SEQ ID NO: 7765 - RNA, 19 nt, Homo sapiens
  misc_RNA (1)...(19): siRNA sense strand
cagagaacagccugcaaua

SEQ ID NO: 7766 - RNA, 19 nt, Homo sapiens
  misc_RNA (1)...(19): siRNA sense strand
ggagauaaagaagaauuug

SEQ ID NO: 7767 - RNA, 19 nt, Homo sapiens
  misc_RNA (1)...(19): siRNA sense strand
gcagaacagagugauauug

SEQ ID NO: 7768 - RNA, 19 nt, Homo sapiens
  misc_RNA (1)...(19): siRNA sense strand
cgugguuucuccuaacuuu

SEQ ID NO: 7769 - RNA, 19 nt, Homo sapiens
  misc_RNA (1)...(19): siRNA sense strand
cgugauugguggucuacua

SEQ ID NO: 7770 - RNA, 19 nt, Homo sapiens
  misc_RNA (1)...(19): siRNA sense strand
ucugggagauaaagaagaa

SEQ ID NO: 7771 - RNA, 19 nt, Homo sapiens
  misc_RNA (1)...(19): siRNA sense strand
ugacaauaguggaaaugga

SEQ ID NO: 7772 - RNA, 19 nt, Homo sapiens
  misc_RNA (1)...(19): siRNA sense strand
gaaagaacuucagaaaauc

SEQ ID NO: 7773 - RNA, 19 nt, Homo sapiens
  misc_RNA (1)...(19): siRNA sense strand
ugaagaaacauaucaccuu

SEQ ID NO: 7774 - RNA, 19 nt, Homo sapiens
  misc_RNA (1)...(19): siRNA sense strand
gaauugacuugugaucagu

SEQ ID NO: 7775 - RNA, 19 nt, Homo sapiens
  misc_RNA (1)...(19): siRNA sense strand
ggaaguaggaaaguuuguu

SEQ ID NO: 7776 - RNA, 19 nt, Homo sapiens
  misc_RNA (1)...(19): siRNA sense strand
gacacaagccaacugaaga

SEQ ID NO: 7777 - RNA, 19 nt, Homo sapiens
  misc_RNA (1)...(19): siRNA sense strand
ugaagagugccacccauuu

SEQ ID NO: 7778 - RNA, 19 nt, Homo sapiens
  misc_RNA (1)...(19): siRNA sense strand
caaaacuucucaacgauau

SEQ ID NO: 7779 - RNA, 19 nt, Homo sapiens
  misc_RNA (1)...(19): siRNA sense strand
gagcuaugcuuuuggaaga

SEQ ID NO: 7780 - RNA, 19 nt, Homo sapiens
  misc_RNA (1)...(19): siRNA sense strand
aaagacuaguuguggauug

SEQ ID NO: 7781 - RNA, 19 nt, Homo sapiens
  misc_RNA (1)...(19): siRNA sense strand
aacagggagucaaagauuu

SEQ ID NO: 7782 - RNA, 19 nt, Homo sapiens
  misc_RNA (1)...(19): siRNA sense strand
ugacugagagagaagauga

SEQ ID NO: 7783 - RNA, 19 nt, Homo sapiens
  misc_RNA (1)...(19): siRNA sense strand
gcccuugacauauguauug

SEQ ID NO: 7784 - RNA, 19 nt, Homo sapiens
  misc_RNA (1)...(19): siRNA sense strand
ucuacgagauccaguacuu

SEQ ID NO: 7785 - RNA, 19 nt, Homo sapiens
  misc_RNA (1)...(19): siRNA sense strand
guuguggauuggacucuaa

SEQ ID NO: 7786 - RNA, 19 nt, Homo sapiens
  misc_RNA (1)...(19): siRNA sense strand
guuugugucuggcuaaugu

SEQ ID NO: 7787 - RNA, 19 nt, Homo sapiens
  misc_RNA (1)...(19): siRNA sense strand
agaagaaagaucaguagaa

SEQ ID NO: 7788 - RNA, 19 nt, Homo sapiens
  misc_RNA (1)...(19): siRNA sense strand
agacuugccugucgaagag

SEQ ID NO: 7789 - RNA, 19 nt, Homo sapiens
  misc_RNA (1)...(19): siRNA sense strand
ucucaacgauaucgcauuc

SEQ ID NO: 7790 - RNA, 19 nt, Homo sapiens
  misc_RNA (1)...(19): siRNA sense strand
cuacgugcaaccaccauua

SEQ ID NO: 7791 - RNA, 19 nt, Homo sapiens
  misc_RNA (1)...(19): siRNA sense strand
gggagauaaagaagaauuu

SEQ ID NO: 7792 - RNA, 19 nt, Homo sapiens
  misc_RNA (1)...(19): siRNA sense strand
gaugggaugcugaugguau

SEQ ID NO: 7793 - RNA, 19 nt, Homo sapiens
  misc_RNA (1)...(19): siRNA sense strand
acaagacucuacagaacug

SEQ ID NO: 7794 - RNA, 19 nt, Homo sapiens
  misc_RNA (1)...(19): siRNA sense strand
uaaagagguuccgggauua

SEQ ID NO: 7795 - RNA, 19 nt, Homo sapiens
  misc_RNA (1)...(19): siRNA sense strand
gaagaggucaaauacauga

SEQ ID NO: 7796 - RNA, 19 nt, Homo sapiens
  misc_RNA (1)...(19): siRNA sense strand
auaaagagguuccgggauu

SEQ ID NO: 7797 - RNA, 19 nt, Homo sapiens
  misc_RNA (1)...(19): siRNA sense strand
gagcaaacaugcacaucuc

SEQ ID NO: 7798 - RNA, 19 nt, Homo sapiens
  misc_RNA (1)...(19): siRNA sense strand
aagaagaggauaucacaua

SEQ ID NO: 7799 - RNA, 19 nt, Homo sapiens
  misc_RNA (1)...(19): siRNA sense strand
ggaagaagaggauaucaca

SEQ ID NO: 7800 - RNA, 19 nt, Homo sapiens
  misc_RNA (1)...(19): siRNA sense strand
uggaagaggucaaauacau

SEQ ID NO: 7801 - RNA, 19 nt, Homo sapiens
  misc_RNA (1)...(19): siRNA sense strand
ccagaacggagauguguuu

SEQ ID NO: 7802 - RNA, 19 nt, Homo sapiens
  misc_RNA (1)...(19): siRNA sense strand
ccaagcauguugccacugu

SEQ ID NO: 7803 - RNA, 19 nt, Homo sapiens
  misc_RNA (1)...(19): siRNA sense strand
ggauuacuguucggaagaa

SEQ ID NO: 7804 - RNA, 19 nt, Homo sapiens
  misc_RNA (1)...(19): siRNA sense strand
ggaagaggucaaauacaug

SEQ ID NO: 7805 - RNA, 19 nt, Homo sapiens
  misc_RNA (1)...(19): siRNA sense strand
agaagaggauaucacauag

SEQ ID NO: 7806 - RNA, 19 nt, Homo sapiens
  misc_RNA (1)...(19): siRNA sense strand
caaacaugcacaucucuga

SEQ ID NO: 7807 - RNA, 19 nt, Homo sapiens
  misc_RNA (1)...(19): siRNA sense strand
cagcucaaauguaagacuu

SEQ ID NO: 7808 - RNA, 19 nt, Homo sapiens
  misc_RNA (1)...(19): siRNA sense strand
agugccagcucaaauguaa

SEQ ID NO: 7809 - RNA, 19 nt, Homo sapiens
  misc_RNA (1)...(19): siRNA sense strand
gagauguguuuggcgauga

SEQ ID NO: 7810 - RNA, 19 nt, Homo sapiens
  misc_RNA (1)...(19): siRNA sense strand
ugaaagccaacaagaauuc

SEQ ID NO: 7811 - RNA, 19 nt, Homo sapiens
  misc_RNA (1)...(19): siRNA sense strand
ucagaaugcuggaugaaaa

SEQ ID NO: 7812 - RNA, 19 nt, Homo sapiens
  misc_RNA (1)...(19): siRNA sense strand
gaagaggaagcccagaaag

SEQ ID NO: 7813 - RNA, 19 nt, Homo sapiens
  misc_RNA (1)...(19): siRNA sense strand
gaucaaaccaguggaagag

SEQ ID NO: 7814 - RNA, 19 nt, Homo sapiens
  misc_RNA (1)...(19): siRNA sense strand
ugaagaggaagcccagaaa

SEQ ID NO: 7815 - RNA, 19 nt, Homo sapiens
  misc_RNA (1)...(19): siRNA sense strand
ggaucaaaccaguggaaga

SEQ ID NO: 7816 - RNA, 19 nt, Homo sapiens
  misc_RNA (1)...(19): siRNA sense strand
caguggaagaggucaaaua

SEQ ID NO: 7817 - RNA, 19 nt, Homo sapiens
  misc_RNA (1)...(19): siRNA sense strand
ucugaaagccaacaagaau

SEQ ID NO: 7818 - RNA, 19 nt, Homo sapiens
  misc_RNA (1)...(19): siRNA sense strand
ggcgaugaguauaggauca

SEQ ID NO: 7819 - RNA, 19 nt, Homo sapiens
  misc_RNA (1)...(19): siRNA sense strand
gggcagaagaagagcagaa

SEQ ID NO: 7820 - RNA, 19 nt, Homo sapiens
  misc_RNA (1)...(19): siRNA sense strand
gaagaagaggauaucacau

SEQ ID NO: 7821 - RNA, 19 nt, Homo sapiens
  misc_RNA (1)...(19): siRNA sense strand
aaacaugcacaucucugaa

SEQ ID NO: 7822 - RNA, 19 nt, Homo sapiens
  misc_RNA (1)...(19): siRNA sense strand
gaggucaaauacaugaaaa

SEQ ID NO: 7823 - RNA, 19 nt, Homo sapiens
  misc_RNA (1)...(19): siRNA sense strand
gaagaagagcagaaaauag

SEQ ID NO: 7824 - RNA, 19 nt, Homo sapiens
  misc_RNA (1)...(19): siRNA sense strand
gcagccaggaaccaagaaa

SEQ ID NO: 7825 - RNA, 19 nt, Homo sapiens
  misc_RNA (1)...(19): siRNA sense strand
gggauuacuguucggaaga

SEQ ID NO: 7826 - RNA, 19 nt, Homo sapiens
  misc_RNA (1)...(19): siRNA sense strand
cgaugaguauaggaucaaa

SEQ ID NO: 7827 - RNA, 19 nt, Homo sapiens
  misc_RNA (1)...(19): siRNA sense strand
caagcauguugccacuguu

SEQ ID NO: 7828 - RNA, 19 nt, Homo sapiens
  misc_RNA (1)...(19): siRNA sense strand
ggcagaagaagagcagaaa

SEQ ID NO: 7829 - RNA, 19 nt, Homo sapiens
  misc_RNA (1)...(19): siRNA sense strand
gcauguugccacuguucaa

SEQ ID NO: 7830 - RNA, 19 nt, Homo sapiens
  misc_RNA (1)...(19): siRNA sense strand
guucaucaacccagagcaa

SEQ ID NO: 7831 - RNA, 19 nt, Homo sapiens
  misc_RNA (1)...(19): siRNA sense strand
agaggucaaauacaugaaa

SEQ ID NO: 7832 - RNA, 19 nt, Homo sapiens
  misc_RNA (1)...(19): siRNA sense strand
gagguuccgggauuaguuc

SEQ ID NO: 7833 - RNA, 19 nt, Homo sapiens
  misc_RNA (1)...(19): siRNA sense strand
agaagaagagcagaaaaua

SEQ ID NO: 7834 - RNA, 19 nt, Homo sapiens
  misc_RNA (1)...(19): siRNA sense strand
aaagugccagcucaaaugu

SEQ ID NO: 7835 - RNA, 19 nt, Homo sapiens
  misc_RNA (1)...(19): siRNA sense strand
ggaagcccagaaagggaaa

SEQ ID NO: 7836 - RNA, 19 nt, Homo sapiens
  misc_RNA (1)...(19): siRNA sense strand
caucaacccagagcaaaca

SEQ ID NO: 7837 - RNA, 19 nt, Homo sapiens
  misc_RNA (1)...(19): siRNA sense strand
guuccgggauuaguucauc

SEQ ID NO: 7838 - RNA, 19 nt, Homo sapiens
  misc_RNA (1)...(19): siRNA sense strand
guucggaagaagaggauau

SEQ ID NO: 7839 - RNA, 19 nt, Homo sapiens
  misc_RNA (1)...(19): siRNA sense strand
cugaaagccaacaagaauu

SEQ ID NO: 7840 - RNA, 19 nt, Homo sapiens
  misc_RNA (1)...(19): siRNA sense strand
gaagauagcugaguuggaa

SEQ ID NO: 7841 - RNA, 19 nt, Homo sapiens
  misc_RNA (1)...(19): siRNA sense strand
gaagagugcacaaauguua

SEQ ID NO: 7842 - RNA, 19 nt, Homo sapiens
  misc_RNA (1)...(19): siRNA sense strand
gacacaagcuggagagaua

SEQ ID NO: 7843 - RNA, 19 nt, Homo sapiens
  misc_RNA (1)...(19): siRNA sense strand
ggagaaggaucgucuggua

SEQ ID NO: 7844 - RNA, 19 nt, Homo sapiens
  misc_RNA (1)...(19): siRNA sense strand
gaaacucacuugacuaauc

SEQ ID NO: 7845 - RNA, 19 nt, Homo sapiens
  misc_RNA (1)...(19): siRNA sense strand
ggaaggauguggaaguaaa

SEQ ID NO: 7846 - RNA, 19 nt, Homo sapiens
  misc_RNA (1)...(19): siRNA sense strand
gcccagagcugaagaagga

SEQ ID NO: 7847 - RNA, 19 nt, Homo sapiens
  misc_RNA (1)...(19): siRNA sense strand
gaacuagaauccaugaaag

SEQ ID NO: 7848 - RNA, 19 nt, Homo sapiens
  misc_RNA (1)...(19): siRNA sense strand
agagagagaucaccaggua

SEQ ID NO: 7849 - RNA, 19 nt, Homo sapiens
  misc_RNA (1)...(19): siRNA sense strand
gaagaagacccaagaggaa

SEQ ID NO: 7850 - RNA, 19 nt, Homo sapiens
  misc_RNA (1)...(19): siRNA sense strand
ggaaguggcugcccugaag

SEQ ID NO: 7851 - RNA, 19 nt, Homo sapiens
  misc_RNA (1)...(19): siRNA sense strand
ggauauggcugaagagaag

SEQ ID NO: 7852 - RNA, 19 nt, Homo sapiens
  misc_RNA (1)...(19): siRNA sense strand
agaaguugaucgacucuua

SEQ ID NO: 7853 - RNA, 19 nt, Homo sapiens
  misc_RNA (1)...(19): siRNA sense strand
uagcaaaucugaagcacaa

SEQ ID NO: 7854 - RNA, 19 nt, Homo sapiens
  misc_RNA (1)...(19): siRNA sense strand
ugaaagaccagaauaagaa

SEQ ID NO: 7855 - RNA, 19 nt, Homo sapiens
  misc_RNA (1)...(19): siRNA sense strand
ggaacuagaauccaugaaa

SEQ ID NO: 7856 - RNA, 19 nt, Homo sapiens
  misc_RNA (1)...(19): siRNA sense strand
agaaagagcggacaauuga

SEQ ID NO: 7857 - RNA, 19 nt, Homo sapiens
  misc_RNA (1)...(19): siRNA sense strand
gaaggaaguauuaagagaa

SEQ ID NO: 7858 - RNA, 19 nt, Homo sapiens
  misc_RNA (1)...(19): siRNA sense strand
aaagaagagugcacaaaug

SEQ ID NO: 7859 - RNA, 19 nt, Homo sapiens
  misc_RNA (1)...(19): siRNA sense strand
agagaugagugaccgaaua

SEQ ID NO: 7860 - RNA, 19 nt, Homo sapiens
  misc_RNA (1)...(19): siRNA sense strand
gagaaagagcggacaauug

SEQ ID NO: 7861 - RNA, 19 nt, Homo sapiens
  misc_RNA (1)...(19): siRNA sense strand
gcggaaggauguggaagua

SEQ ID NO: 7862 - RNA, 19 nt, Homo sapiens
  misc_RNA (1)...(19): siRNA sense strand
gcggacaauugaacgcuua

SEQ ID NO: 7863 - RNA, 19 nt, Homo sapiens
  misc_RNA (1)...(19): siRNA sense strand
aggaaaccauguugaauaa

SEQ ID NO: 7864 - RNA, 19 nt, Homo sapiens
  misc_RNA (1)...(19): siRNA sense strand
agacacagcugaaggaagu

SEQ ID NO: 7865 - RNA, 19 nt, Homo sapiens
  misc_RNA (1)...(19): siRNA sense strand
ggaagugcccgcucuguug

SEQ ID NO: 7866 - RNA, 19 nt, Homo sapiens
  misc_RNA (1)...(19): siRNA sense strand
gaaggaggagugucugaaa

SEQ ID NO: 7867 - RNA, 19 nt, Homo sapiens
  misc_RNA (1)...(19): siRNA sense strand
gaaaauggaaucacaauug

SEQ ID NO: 7868 - RNA, 19 nt, Homo sapiens
  misc_RNA (1)...(19): siRNA sense strand
ugaaggaaguauuaagaga

SEQ ID NO: 7869 - RNA, 19 nt, Homo sapiens
  misc_RNA (1)...(19): siRNA sense strand
gagaagaaugacaaagaua

SEQ ID NO: 7870 - RNA, 19 nt, Homo sapiens
  misc_RNA (1)...(19): siRNA sense strand
ugaaggagcggaagguuaa

SEQ ID NO: 7871 - RNA, 19 nt, Homo sapiens
  misc_RNA (1)...(19): siRNA sense strand
gagagcaaauugaguucuu

SEQ ID NO: 7872 - RNA, 19 nt, Homo sapiens
  misc_RNA (1)...(19): siRNA sense strand
gaucgacucuuagaaaucu

SEQ ID NO: 7873 - RNA, 19 nt, Homo sapiens
  misc_RNA (1)...(19): siRNA sense strand
gaaggaacaguacagaguu

SEQ ID NO: 7874 - RNA, 19 nt, Homo sapiens
  misc_RNA (1)...(19): siRNA sense strand
uagaauccaugaaagcaaa

SEQ ID NO: 7875 - RNA, 19 nt, Homo sapiens
  misc_RNA (1)...(19): siRNA sense strand
cuuaaagacuugaaggaaa

SEQ ID NO: 7876 - RNA, 19 nt, Homo sapiens
  misc_RNA (1)...(19): siRNA sense strand
gagcuuucguccucuaaga

SEQ ID NO: 7877 - RNA, 19 nt, Homo sapiens
  misc_RNA (1)...(19): siRNA sense strand
gaagguagcaaaucugaag

SEQ ID NO: 7878 - RNA, 19 nt, Homo sapiens
  misc_RNA (1)...(19): siRNA sense strand
ugaaggagguggaaaauga

SEQ ID NO: 7879 - RNA, 19 nt, Homo sapiens
  misc_RNA (1)...(19): siRNA sense strand
ggaaggaacaguacagagu

SEQ ID NO: 7880 - RNA, 19 nt, Homo sapiens
  misc_RNA (1)...(19): siRNA sense strand
ugagaagaaugacaaagau

SEQ ID NO: 7881 - RNA, 19 nt, Homo sapiens
  misc_RNA (1)...(19): siRNA sense strand
gguggaugcucuccgauug

SEQ ID NO: 7882 - RNA, 19 nt, Homo sapiens
  misc_RNA (1)...(19): siRNA sense strand
guaaaggagagcaaauuga

SEQ ID NO: 7883 - RNA, 19 nt, Homo sapiens
  misc_RNA (1)...(19): siRNA sense strand
gaagguaaagcaggaacua

SEQ ID NO: 7884 - RNA, 19 nt, Homo sapiens
  misc_RNA (1)...(19): siRNA sense strand
ugaaagaacgggucaaauc

SEQ ID NO: 7885 - RNA, 19 nt, Homo sapiens
  misc_RNA (1)...(19): siRNA sense strand
gaagagaaggaaaccaugu

SEQ ID NO: 7886 - RNA, 19 nt, Homo sapiens
  misc_RNA (1)...(19): siRNA sense strand
caagugaaagaccagaaua

SEQ ID NO: 7887 - RNA, 19 nt, Homo sapiens
  misc_RNA (1)...(19): siRNA sense strand
gagagaagcaagaggaaau

SEQ ID NO: 7888 - RNA, 19 nt, Homo sapiens
  misc_RNA (1)...(19): siRNA sense strand
aaggaaaccauguugaaua

SEQ ID NO: 7889 - RNA, 19 nt, Homo sapiens
  misc_RNA (1)...(19): siRNA sense strand
gaaggaaaccauguugaau

SEQ ID NO: 7890 - RNA, 19 nt, Homo sapiens
  misc_RNA (1)...(19): siRNA sense strand
cuacgaggaugaccacuuc

SEQ ID NO: 7891 - RNA, 19 nt, Homo sapiens
  misc_RNA (1)...(19): siRNA sense strand
aaaggaaacucacuugacu

SEQ ID NO: 7892 - RNA, 19 nt, Homo sapiens
  misc_RNA (1)...(19): siRNA sense strand
gacacugccuugacaacuu

SEQ ID NO: 7893 - RNA, 19 nt, Homo sapiens
  misc_RNA (1)...(19): siRNA sense strand
acacugccuugacaacuuu

SEQ ID NO: 7894 - RNA, 19 nt, Homo sapiens
  misc_RNA (1)...(19): siRNA sense strand
auaagaagauagcugaguu

SEQ ID NO: 7895 - RNA, 19 nt, Homo sapiens
  misc_RNA (1)...(19): siRNA sense strand
gcagaugagcagcuugaaa

SEQ ID NO: 7896 - RNA, 19 nt, Homo sapiens
  misc_RNA (1)...(19): siRNA sense strand
gcuaauggccgacaacuac

SEQ ID NO: 7897 - RNA, 19 nt, Homo sapiens
  misc_RNA (1)...(19): siRNA sense strand
ugaauagcaucaagaccuu

SEQ ID NO: 7898 - RNA, 19 nt, Homo sapiens
  misc_RNA (1)...(19): siRNA sense strand
gaagcaagaggaaauugau

SEQ ID NO: 7899 - RNA, 19 nt, Homo sapiens
  misc_RNA (1)...(19): siRNA sense strand
guaucuaagugaccaugaa

SEQ ID NO: 7900 - RNA, 19 nt, Homo sapiens
  misc_RNA (1)...(19): siRNA sense strand
gaaggaacgagcccugaga

SEQ ID NO: 7901 - RNA, 19 nt, Homo sapiens
  misc_RNA (1)...(19): siRNA sense strand
gaguauggcauccacugua

SEQ ID NO: 7902 - RNA, 19 nt, Homo sapiens
  misc_RNA (1)...(19): siRNA sense strand
gaauaagaagguagcaaau

SEQ ID NO: 7903 - RNA, 19 nt, Homo sapiens
  misc_RNA (1)...(19): siRNA sense strand
caauugaacgcuuaaagga

SEQ ID NO: 7904 - RNA, 19 nt, Homo sapiens
  misc_RNA (1)...(19): siRNA sense strand
gcugaaggaaguauuaaga

SEQ ID NO: 7905 - RNA, 19 nt, Homo sapiens
  misc_RNA (1)...(19): siRNA sense strand
gaaguaaaggagagcaaau

SEQ ID NO: 7906 - RNA, 19 nt, Homo sapiens
  misc_RNA (1)...(19): siRNA sense strand
agagagaaggaaacacuua

SEQ ID NO: 7907 - RNA, 19 nt, Homo sapiens
  misc_RNA (1)...(19): siRNA sense strand
aaauguggguucagaaaca

SEQ ID NO: 7908 - RNA, 19 nt, Homo sapiens
  misc_RNA (1)...(19): siRNA sense strand
gugaaggagcggaagguua

SEQ ID NO: 7909 - RNA, 19 nt, Homo sapiens
  misc_RNA (1)...(19): siRNA sense strand
agagauacaugaccucaag

SEQ ID NO: 7910 - RNA, 19 nt, Homo sapiens
  misc_RNA (1)...(19): siRNA sense strand
ggcgagagauaacacaauc

SEQ ID NO: 7911 - RNA, 19 nt, Homo sapiens
  misc_RNA (1)...(19): siRNA sense strand
aaacucacuugacuaaucu

SEQ ID NO: 7912 - RNA, 19 nt, Homo sapiens
  misc_RNA (1)...(19): siRNA sense strand
gugaaagaccagaauaaga

SEQ ID NO: 7913 - RNA, 19 nt, Homo sapiens
  misc_RNA (1)...(19): siRNA sense strand
gaagaaugacaaagauaag

SEQ ID NO: 7914 - RNA, 19 nt, Homo sapiens
  misc_RNA (1)...(19): siRNA sense strand
guugaucgacucuuagaaa

SEQ ID NO: 7915 - RNA, 19 nt, Homo sapiens
  misc_RNA (1)...(19): siRNA sense strand
gagcagagggacagagaug

SEQ ID NO: 7916 - RNA, 19 nt, Homo sapiens
  misc_RNA (1)...(19): siRNA sense strand
gaaagagcggacaauugaa

SEQ ID NO: 7917 - RNA, 19 nt, Homo sapiens
  misc_RNA (1)...(19): siRNA sense strand
ggaggcccuugcagagaaa

SEQ ID NO: 7918 - RNA, 19 nt, Homo sapiens
  misc_RNA (1)...(19): siRNA sense strand
gagaaggaaaccauguuga

SEQ ID NO: 7919 - RNA, 19 nt, Homo sapiens
  misc_RNA (1)...(19): siRNA sense strand
gcagugggguugcuaguga

SEQ ID NO: 7920 - RNA, 19 nt, Homo sapiens
  misc_RNA (1)...(19): siRNA sense strand
gguaaagcaggaacuagaa

SEQ ID NO: 7921 - RNA, 19 nt, Homo sapiens
  misc_RNA (1)...(19): siRNA sense strand
gcacaaggaacagguggaa

SEQ ID NO: 7922 - RNA, 19 nt, Homo sapiens
  misc_RNA (1)...(19): siRNA sense strand
auaagaagguagcaaaucu

SEQ ID NO: 7923 - RNA, 19 nt, Homo sapiens
  misc_RNA (1)...(19): siRNA sense strand
agaauaagaagguagcaaa

SEQ ID NO: 7924 - RNA, 19 nt, Homo sapiens
  misc_RNA (1)...(19): siRNA sense strand
gagcggaagguuaauguuc

SEQ ID NO: 7925 - RNA, 19 nt, Homo sapiens
  misc_RNA (1)...(19): siRNA sense strand
ggaaguaaaggagagcaaa

SEQ ID NO: 7926 - RNA, 19 nt, Homo sapiens
  misc_RNA (1)...(19): siRNA sense strand
ucauggaucugcagacaca

SEQ ID NO: 7927 - RNA, 19 nt, Homo sapiens
  misc_RNA (1)...(19): siRNA sense strand
gaaaauguggguucagaaa

SEQ ID NO: 7928 - RNA, 19 nt, Homo sapiens
  misc_RNA (1)...(19): siRNA sense strand
gcagagagaaggaaacacu

SEQ ID NO: 7929 - RNA, 19 nt, Homo sapiens
  misc_RNA (1)...(19): siRNA sense strand
gagaugagcgagagaagca

SEQ ID NO: 7930 - RNA, 19 nt, Homo sapiens
  misc_RNA (1)...(19): siRNA sense strand
gaaagaacgggucaaaucc

SEQ ID NO: 7931 - RNA, 19 nt, Homo sapiens
  misc_RNA (1)...(19): siRNA sense strand
gagauaacacaaucaugga

SEQ ID NO: 7932 - RNA, 19 nt, Homo sapiens
  misc_RNA (1)...(19): siRNA sense strand
gaggaugaccacuucaaau

SEQ ID NO: 7933 - RNA, 19 nt, Homo sapiens
  misc_RNA (1)...(19): siRNA sense strand
uagaggaaguucuggagau

SEQ ID NO: 7934 - RNA, 19 nt, Homo sapiens
  misc_RNA (1)...(19): siRNA sense strand
gcaagugaaagaccagaau

SEQ ID NO: 7935 - RNA, 19 nt, Homo sapiens
  misc_RNA (1)...(19): siRNA sense strand
cacuagagauugcuuugga

SEQ ID NO: 7936 - RNA, 19 nt, Homo sapiens
  misc_RNA (1)...(19): siRNA sense strand
ggagggaguucgggaagca

SEQ ID NO: 7937 - RNA, 19 nt, Homo sapiens
  misc_RNA (1)...(19): siRNA sense strand
ucuuagaaaucuugaagga

SEQ ID NO: 7938 - RNA, 19 nt, Homo sapiens
  misc_RNA (1)...(19): siRNA sense strand
cuaagaagaagacccaaga

SEQ ID NO: 7939 - RNA, 19 nt, Homo sapiens
  misc_RNA (1)...(19): siRNA sense strand
caaaaucgaaugaagcuaa

SEQ ID NO: 7940 - RNA, 19 nt, Homo sapiens
  misc_RNA (1)...(19): siRNA sense strand
gaagauagcugaguuggaa

SEQ ID NO: 7941 - RNA, 19 nt, Homo sapiens
  misc_RNA (1)...(19): siRNA sense strand
gaagagugcacaaauguua

SEQ ID NO: 7942 - RNA, 19 nt, Homo sapiens
  misc_RNA (1)...(19): siRNA sense strand
gacacaagcuggagagaua

SEQ ID NO: 7943 - RNA, 19 nt, Homo sapiens
  misc_RNA (1)...(19): siRNA sense strand
ggagaaggaucgucuggua

SEQ ID NO: 7944 - RNA, 19 nt, Homo sapiens
  misc_RNA (1)...(19): siRNA sense strand
gaaacucacuugacuaauc

SEQ ID NO: 7945 - RNA, 19 nt, Homo sapiens
  misc_RNA (1)...(19): siRNA sense strand
ggaaggauguggaaguaaa

SEQ ID NO: 7946 - RNA, 19 nt, Homo sapiens
  misc_RNA (1)...(19): siRNA sense strand
gcccagagcugaagaagga

SEQ ID NO: 7947 - RNA, 19 nt, Homo sapiens
  misc_RNA (1)...(19): siRNA sense strand
gaacuagaauccaugaaag

SEQ ID NO: 7948 - RNA, 19 nt, Homo sapiens
  misc_RNA (1)...(19): siRNA sense strand
agagagagaucaccaggua

SEQ ID NO: 7949 - RNA, 19 nt, Homo sapiens
  misc_RNA (1)...(19): siRNA sense strand
gaagaagacccaagaggaa

SEQ ID NO: 7950 - RNA, 19 nt, Homo sapiens
  misc_RNA (1)...(19): siRNA sense strand
ggaaguggcugcccugaag

SEQ ID NO: 7951 - RNA, 19 nt, Homo sapiens
  misc_RNA (1)...(19): siRNA sense strand
ggauauggcugaagagaag

SEQ ID NO: 7952 - RNA, 19 nt, Homo sapiens
  misc_RNA (1)...(19): siRNA sense strand
agaaguugaucgacucuua

SEQ ID NO: 7953 - RNA, 19 nt, Homo sapiens
  misc_RNA (1)...(19): siRNA sense strand
uagcaaaucugaagcacaa

SEQ ID NO: 7954 - RNA, 19 nt, Homo sapiens
  misc_RNA (1)...(19): siRNA sense strand
ugaaagaccagaauaagaa

SEQ ID NO: 7955 - RNA, 19 nt, Homo sapiens
  misc_RNA (1)...(19): siRNA sense strand
ggaacuagaauccaugaaa

SEQ ID NO: 7956 - RNA, 19 nt, Homo sapiens
  misc_RNA (1)...(19): siRNA sense strand
agaaagagcggacaauuga

SEQ ID NO: 7957 - RNA, 19 nt, Homo sapiens
  misc_RNA (1)...(19): siRNA sense strand
gaaggaaguauuaagagaa

SEQ ID NO: 7958 - RNA, 19 nt, Homo sapiens
  misc_RNA (1)...(19): siRNA sense strand
aaagaagagugcacaaaug

SEQ ID NO: 7959 - RNA, 19 nt, Homo sapiens
  misc_RNA (1)...(19): siRNA sense strand
agagaugagugaccgaaua

SEQ ID NO: 7960 - RNA, 19 nt, Homo sapiens
  misc_RNA (1)...(19): siRNA sense strand
gagaaagagcggacaauug

SEQ ID NO: 7961 - RNA, 19 nt, Homo sapiens
  misc_RNA (1)...(19): siRNA sense strand
gcggaaggauguggaagua

SEQ ID NO: 7962 - RNA, 19 nt, Homo sapiens
  misc_RNA (1)...(19): siRNA sense strand
gcggacaauugaacgcuua

SEQ ID NO: 7963 - RNA, 19 nt, Homo sapiens
  misc_RNA (1)...(19): siRNA sense strand
aggaaaccauguugaauaa

SEQ ID NO: 7964 - RNA, 19 nt, Homo sapiens
  misc_RNA (1)...(19): siRNA sense strand
agacacagcugaaggaagu

SEQ ID NO: 7965 - RNA, 19 nt, Homo sapiens
  misc_RNA (1)...(19): siRNA sense strand
ggaagugcccgcucuguug

SEQ ID NO: 7966 - RNA, 19 nt, Homo sapiens
  misc_RNA (1)...(19): siRNA sense strand
gaaggaggagugucugaaa

SEQ ID NO: 7967 - RNA, 19 nt, Homo sapiens
  misc_RNA (1)...(19): siRNA sense strand
gaaaauggaaucacaauug

SEQ ID NO: 7968 - RNA, 19 nt, Homo sapiens
  misc_RNA (1)...(19): siRNA sense strand
ugaaggaaguauuaagaga

SEQ ID NO: 7969 - RNA, 19 nt, Homo sapiens
  misc_RNA (1)...(19): siRNA sense strand
gagaagaaugacaaagaua

SEQ ID NO: 7970 - RNA, 19 nt, Homo sapiens
  misc_RNA (1)...(19): siRNA sense strand
ugaaggagcggaagguuaa

SEQ ID NO: 7971 - RNA, 19 nt, Homo sapiens
  misc_RNA (1)...(19): siRNA sense strand
gagagcaaauugaguucuu

SEQ ID NO: 7972 - RNA, 19 nt, Homo sapiens
  misc_RNA (1)...(19): siRNA sense strand
gaucgacucuuagaaaucu

SEQ ID NO: 7973 - RNA, 19 nt, Homo sapiens
  misc_RNA (1)...(19): siRNA sense strand
gaaggaacaguacagaguu

SEQ ID NO: 7974 - RNA, 19 nt, Homo sapiens
  misc_RNA (1)...(19): siRNA sense strand
uagaauccaugaaagcaaa

SEQ ID NO: 7975 - RNA, 19 nt, Homo sapiens
  misc_RNA (1)...(19): siRNA sense strand
cuuaaagacuugaaggaaa

SEQ ID NO: 7976 - RNA, 19 nt, Homo sapiens
  misc_RNA (1)...(19): siRNA sense strand
gagcuuucguccucuaaga

SEQ ID NO: 7977 - RNA, 19 nt, Homo sapiens
  misc_RNA (1)...(19): siRNA sense strand
gaagguagcaaaucugaag

SEQ ID NO: 7978 - RNA, 19 nt, Homo sapiens
  misc_RNA (1)...(19): siRNA sense strand
ugaaggagguggaaaauga

SEQ ID NO: 7979 - RNA, 19 nt, Homo sapiens
  misc_RNA (1)...(19): siRNA sense strand
ggaaggaacaguacagagu

SEQ ID NO: 7980 - RNA, 19 nt, Homo sapiens
  misc_RNA (1)...(19): siRNA sense strand
ugagaagaaugacaaagau

SEQ ID NO: 7981 - RNA, 19 nt, Homo sapiens
  misc_RNA (1)...(19): siRNA sense strand
gguggaugcucuccgauug

SEQ ID NO: 7982 - RNA, 19 nt, Homo sapiens
  misc_RNA (1)...(19): siRNA sense strand
guaaaggagagcaaauuga

SEQ ID NO: 7983 - RNA, 19 nt, Homo sapiens
  misc_RNA (1)...(19): siRNA sense strand
gaagguaaagcaggaacua

SEQ ID NO: 7984 - RNA, 19 nt, Homo sapiens
  misc_RNA (1)...(19): siRNA sense strand
ugaaagaacgggucaaauc

SEQ ID NO: 7985 - RNA, 19 nt, Homo sapiens
  misc_RNA (1)...(19): siRNA sense strand
gaagagaaggaaaccaugu

SEQ ID NO: 7986 - RNA, 19 nt, Homo sapiens
  misc_RNA (1)...(19): siRNA sense strand
caagugaaagaccagaaua

SEQ ID NO: 7987 - RNA, 19 nt, Homo sapiens
  misc_RNA (1)...(19): siRNA sense strand
gagagaagcaagaggaaau

SEQ ID NO: 7988 - RNA, 19 nt, Homo sapiens
  misc_RNA (1)...(19): siRNA sense strand
aaggaaaccauguugaaua

SEQ ID NO: 7989 - RNA, 19 nt, Homo sapiens
  misc_RNA (1)...(19): siRNA sense strand
gaaggaaaccauguugaau

SEQ ID NO: 7990 - RNA, 19 nt, Homo sapiens
  misc_RNA (1)...(19): siRNA sense strand
cuacgaggaugaccacuuc

SEQ ID NO: 7991 - RNA, 19 nt, Homo sapiens
  misc_RNA (1)...(19): siRNA sense strand
aaaggaaacucacuugacu

SEQ ID NO: 7992 - RNA, 19 nt, Homo sapiens
  misc_RNA (1)...(19): siRNA sense strand
gacacugccuugacaacuu

SEQ ID NO: 7993 - RNA, 19 nt, Homo sapiens
  misc_RNA (1)...(19): siRNA sense strand
acacugccuugacaacuuu

SEQ ID NO: 7994 - RNA, 19 nt, Homo sapiens
  misc_RNA (1)...(19): siRNA sense strand
auaagaagauagcugaguu

SEQ ID NO: 7995 - RNA, 19 nt, Homo sapiens
  misc_RNA (1)...(19): siRNA sense strand
gcagaugagcagcuugaaa

SEQ ID NO: 7996 - RNA, 19 nt, Homo sapiens
  misc_RNA (1)...(19): siRNA sense strand
gcuaauggccgacaacuac

SEQ ID NO: 7997 - RNA, 19 nt, Homo sapiens
  misc_RNA (1)...(19): siRNA sense strand
ugaauagcaucaagaccuu

SEQ ID NO: 7998 - RNA, 19 nt, Homo sapiens
  misc_RNA (1)...(19): siRNA sense strand
gaagcaagaggaaauugau

SEQ ID NO: 7999 - RNA, 19 nt, Homo sapiens
  misc_RNA (1)...(19): siRNA sense strand
guaucuaagugaccaugaa

SEQ ID NO: 8000 - RNA, 19 nt, Homo sapiens
  misc_RNA (1)...(19): siRNA sense strand
gaaggaacgagcccugaga

SEQ ID NO: 8001 - RNA, 19 nt, Homo sapiens
  misc_RNA (1)...(19): siRNA sense strand
gaguauggcauccacugua

SEQ ID NO: 8002 - RNA, 19 nt, Homo sapiens
  misc_RNA (1)...(19): siRNA sense strand
gaauaagaagguagcaaau

SEQ ID NO: 8003 - RNA, 19 nt, Homo sapiens
  misc_RNA (1)...(19): siRNA sense strand
caauugaacgcuuaaagga

SEQ ID NO: 8004 - RNA, 19 nt, Homo sapiens
  misc_RNA (1)...(19): siRNA sense strand
gcugaaggaaguauuaaga

SEQ ID NO: 8005 - RNA, 19 nt, Homo sapiens
  misc_RNA (1)...(19): siRNA sense strand
gaaguaaaggagagcaaau

SEQ ID NO: 8006 - RNA, 19 nt, Homo sapiens
  misc_RNA (1)...(19): siRNA sense strand
agagagaaggaaacacuua

SEQ ID NO: 8007 - RNA, 19 nt, Homo sapiens
  misc_RNA (1)...(19): siRNA sense strand
aaauguggguucagaaaca

SEQ ID NO: 8008 - RNA, 19 nt, Homo sapiens
  misc_RNA (1)...(19): siRNA sense strand
gugaaggagcggaagguua

SEQ ID NO: 8009 - RNA, 19 nt, Homo sapiens
  misc_RNA (1)...(19): siRNA sense strand
agagauacaugaccucaag

SEQ ID NO: 8010 - RNA, 19 nt, Homo sapiens
  misc_RNA (1)...(19): siRNA sense strand
ggcgagagauaacacaauc

SEQ ID NO: 8011 - RNA, 19 nt, Homo sapiens
  misc_RNA (1)...(19): siRNA sense strand
aaacucacuugacuaaucu

SEQ ID NO: 8012 - RNA, 19 nt, Homo sapiens
  misc_RNA (1)...(19): siRNA sense strand
gugaaagaccagaauaaga

SEQ ID NO: 8013 - RNA, 19 nt, Homo sapiens
  misc_RNA (1)...(19): siRNA sense strand
gaagaaugacaaagauaag

SEQ ID NO: 8014 - RNA, 19 nt, Homo sapiens
  misc_RNA (1)...(19): siRNA sense strand
guugaucgacucuuagaaa

SEQ ID NO: 8015 - RNA, 19 nt, Homo sapiens
  misc_RNA (1)...(19): siRNA sense strand
gagcagagggacagagaug

SEQ ID NO: 8016 - RNA, 19 nt, Homo sapiens
  misc_RNA (1)...(19): siRNA sense strand
gaaagagcggacaauugaa

SEQ ID NO: 8017 - RNA, 19 nt, Homo sapiens
  misc_RNA (1)...(19): siRNA sense strand
ggaggcccuugcagagaaa

SEQ ID NO: 8018 - RNA, 19 nt, Homo sapiens
  misc_RNA (1)...(19): siRNA sense strand
gagaaggaaaccauguuga

SEQ ID NO: 8019 - RNA, 19 nt, Homo sapiens
  misc_RNA (1)...(19): siRNA sense strand
gcagugggguugcuaguga

SEQ ID NO: 8020 - RNA, 19 nt, Homo sapiens
  misc_RNA (1)...(19): siRNA sense strand
gguaaagcaggaacuagaa

SEQ ID NO: 8021 - RNA, 19 nt, Homo sapiens
  misc_RNA (1)...(19): siRNA sense strand
gcacaaggaacagguggaa

SEQ ID NO: 8022 - RNA, 19 nt, Homo sapiens
  misc_RNA (1)...(19): siRNA sense strand
auaagaagguagcaaaucu

SEQ ID NO: 8023 - RNA, 19 nt, Homo sapiens
  misc_RNA (1)...(19): siRNA sense strand
agaauaagaagguagcaaa

SEQ ID NO: 8024 - RNA, 19 nt, Homo sapiens
  misc_RNA (1)...(19): siRNA sense strand
gagcggaagguuaauguuc

SEQ ID NO: 8025 - RNA, 19 nt, Homo sapiens
  misc_RNA (1)...(19): siRNA sense strand
ggaaguaaaggagagcaaa

SEQ ID NO: 8026 - RNA, 19 nt, Homo sapiens
  misc_RNA (1)...(19): siRNA sense strand
ucauggaucugcagacaca

SEQ ID NO: 8027 - RNA, 19 nt, Homo sapiens
  misc_RNA (1)...(19): siRNA sense strand
gaaaauguggguucagaaa

SEQ ID NO: 8028 - RNA, 19 nt, Homo sapiens
  misc_RNA (1)...(19): siRNA sense strand
gcagagagaaggaaacacu

SEQ ID NO: 8029 - RNA, 19 nt, Homo sapiens
  misc_RNA (1)...(19): siRNA sense strand
gagaugagcgagagaagca

SEQ ID NO: 8030 - RNA, 19 nt, Homo sapiens
  misc_RNA (1)...(19): siRNA sense strand
gaaagaacgggucaaaucc

SEQ ID NO: 8031 - RNA, 19 nt, Homo sapiens
  misc_RNA (1)...(19): siRNA sense strand
gagauaacacaaucaugga

SEQ ID NO: 8032 - RNA, 19 nt, Homo sapiens
  misc_RNA (1)...(19): siRNA sense strand
gaggaugaccacuucaaau

SEQ ID NO: 8033 - RNA, 19 nt, Homo sapiens
  misc_RNA (1)...(19): siRNA sense strand
uagaggaaguucuggagau

SEQ ID NO: 8034 - RNA, 19 nt, Homo sapiens
  misc_RNA (1)...(19): siRNA sense strand
gcaagugaaagaccagaau

SEQ ID NO: 8035 - RNA, 19 nt, Homo sapiens
  misc_RNA (1)...(19): siRNA sense strand
cacuagagauugcuuugga

SEQ ID NO: 8036 - RNA, 19 nt, Homo sapiens
  misc_RNA (1)...(19): siRNA sense strand
ggagggaguucgggaagca

SEQ ID NO: 8037 - RNA, 19 nt, Homo sapiens
  misc_RNA (1)...(19): siRNA sense strand
ucuuagaaaucuugaagga

SEQ ID NO: 8038 - RNA, 19 nt, Homo sapiens
  misc_RNA (1)...(19): siRNA sense strand
cuaagaagaagacccaaga

SEQ ID NO: 8039 - RNA, 19 nt, Homo sapiens
  misc_RNA (1)...(19): siRNA sense strand
caaaaucgaaugaagcuaa

SEQ ID NO: 8040 - RNA, 19 nt, Homo sapiens
  misc_RNA (1)...(19): siRNA sense strand
gaagauagcugaguuggaa

SEQ ID NO: 8041 - RNA, 19 nt, Homo sapiens
  misc_RNA (1)...(19): siRNA sense strand
gaagagugcacaaauguua

SEQ ID NO: 8042 - RNA, 19 nt, Homo sapiens
  misc_RNA (1)...(19): siRNA sense strand
gacacaagcuggagagaua

SEQ ID NO: 8043 - RNA, 19 nt, Homo sapiens
  misc_RNA (1)...(19): siRNA sense strand
ggagaaggaucgucuggua

SEQ ID NO: 8044 - RNA, 19 nt, Homo sapiens
  misc_RNA (1)...(19): siRNA sense strand
gaaacucacuugacuaauc

SEQ ID NO: 8045 - RNA, 19 nt, Homo sapiens
  misc_RNA (1)...(19): siRNA sense strand
ggaaggauguggaaguaaa

SEQ ID NO: 8046 - RNA, 19 nt, Homo sapiens
  misc_RNA (1)...(19): siRNA sense strand
gcccagagcugaagaagga

SEQ ID NO: 8047 - RNA, 19 nt, Homo sapiens
  misc_RNA (1)...(19): siRNA sense strand
gaacuagaauccaugaaag

SEQ ID NO: 8048 - RNA, 19 nt, Homo sapiens
  misc_RNA (1)...(19): siRNA sense strand
agagagagaucaccaggua

SEQ ID NO: 8049 - RNA, 19 nt, Homo sapiens
  misc_RNA (1)...(19): siRNA sense strand
gaagaagacccaagaggaa

SEQ ID NO: 8050 - RNA, 19 nt, Homo sapiens
  misc_RNA (1)...(19): siRNA sense strand
ggaaguggcugcccugaag

SEQ ID NO: 8051 - RNA, 19 nt, Homo sapiens
  misc_RNA (1)...(19): siRNA sense strand
ggauauggcugaagagaag

SEQ ID NO: 8052 - RNA, 19 nt, Homo sapiens
  misc_RNA (1)...(19): siRNA sense strand
agaaguugaucgacucuua

SEQ ID NO: 8053 - RNA, 19 nt, Homo sapiens
  misc_RNA (1)...(19): siRNA sense strand
uagcaaaucugaagcacaa

SEQ ID NO: 8054 - RNA, 19 nt, Homo sapiens
  misc_RNA (1)...(19): siRNA sense strand
ugaaagaccagaauaagaa

SEQ ID NO: 8055 - RNA, 19 nt, Homo sapiens
  misc_RNA (1)...(19): siRNA sense strand
ggaacuagaauccaugaaa

SEQ ID NO: 8056 - RNA, 19 nt, Homo sapiens
  misc_RNA (1)...(19): siRNA sense strand
agaaagagcggacaauuga

SEQ ID NO: 8057 - RNA, 19 nt, Homo sapiens
  misc_RNA (1)...(19): siRNA sense strand
gaaggaaguauuaagagaa

SEQ ID NO: 8058 - RNA, 19 nt, Homo sapiens
  misc_RNA (1)...(19): siRNA sense strand
aaagaagagugcacaaaug

SEQ ID NO: 8059 - RNA, 19 nt, Homo sapiens
  misc_RNA (1)...(19): siRNA sense strand
agagaugagugaccgaaua

SEQ ID NO: 8060 - RNA, 19 nt, Homo sapiens
  misc_RNA (1)...(19): siRNA sense strand
gagaaagagcggacaauug

SEQ ID NO: 8061 - RNA, 19 nt, Homo sapiens
  misc_RNA (1)...(19): siRNA sense strand
gcggaaggauguggaagua

SEQ ID NO: 8062 - RNA, 19 nt, Homo sapiens
  misc_RNA (1)...(19): siRNA sense strand
gcggacaauugaacgcuua

SEQ ID NO: 8063 - RNA, 19 nt, Homo sapiens
  misc_RNA (1)...(19): siRNA sense strand
aggaaaccauguugaauaa

SEQ ID NO: 8064 - RNA, 19 nt, Homo sapiens
  misc_RNA (1)...(19): siRNA sense strand
agacacagcugaaggaagu

SEQ ID NO: 8065 - RNA, 19 nt, Homo sapiens
  misc_RNA (1)...(19): siRNA sense strand
ggaagugcccgcucuguug

SEQ ID NO: 8066 - RNA, 19 nt, Homo sapiens
  misc_RNA (1)...(19): siRNA sense strand
gaaggaggagugucugaaa

SEQ ID NO: 8067 - RNA, 19 nt, Homo sapiens
  misc_RNA (1)...(19): siRNA sense strand
gaaaauggaaucacaauug

SEQ ID NO: 8068 - RNA, 19 nt, Homo sapiens
  misc_RNA (1)...(19): siRNA sense strand
ugaaggaaguauuaagaga

SEQ ID NO: 8069 - RNA, 19 nt, Homo sapiens
  misc_RNA (1)...(19): siRNA sense strand
gagaagaaugacaaagaua

SEQ ID NO: 8070 - RNA, 19 nt, Homo sapiens
  misc_RNA (1)...(19): siRNA sense strand
ugaaggagcggaagguuaa

SEQ ID NO: 8071 - RNA, 19 nt, Homo sapiens
  misc_RNA (1)...(19): siRNA sense strand
gagagcaaauugaguucuu

SEQ ID NO: 8072 - RNA, 19 nt, Homo sapiens
  misc_RNA (1)...(19): siRNA sense strand
gaucgacucuuagaaaucu

SEQ ID NO: 8073 - RNA, 19 nt, Homo sapiens
  misc_RNA (1)...(19): siRNA sense strand
gaaggaacaguacagaguu

SEQ ID NO: 8074 - RNA, 19 nt, Homo sapiens
  misc_RNA (1)...(19): siRNA sense strand
uagaauccaugaaagcaaa

SEQ ID NO: 8075 - RNA, 19 nt, Homo sapiens
  misc_RNA (1)...(19): siRNA sense strand
cuuaaagacuugaaggaaa

SEQ ID NO: 8076 - RNA, 19 nt, Homo sapiens
  misc_RNA (1)...(19): siRNA sense strand
gagcuuucguccucuaaga

SEQ ID NO: 8077 - RNA, 19 nt, Homo sapiens
  misc_RNA (1)...(19): siRNA sense strand
gaagguagcaaaucugaag

SEQ ID NO: 8078 - RNA, 19 nt, Homo sapiens
  misc_RNA (1)...(19): siRNA sense strand
ugaaggagguggaaaauga

SEQ ID NO: 8079 - RNA, 19 nt, Homo sapiens
  misc_RNA (1)...(19): siRNA sense strand
ggaaggaacaguacagagu

SEQ ID NO: 8080 - RNA, 19 nt, Homo sapiens
  misc_RNA (1)...(19): siRNA sense strand
ugagaagaaugacaaagau

SEQ ID NO: 8081 - RNA, 19 nt, Homo sapiens
  misc_RNA (1)...(19): siRNA sense strand
gguggaugcucuccgauug

SEQ ID NO: 8082 - RNA, 19 nt, Homo sapiens
  misc_RNA (1)...(19): siRNA sense strand
guaaaggagagcaaauuga

SEQ ID NO: 8083 - RNA, 19 nt, Homo sapiens
  misc_RNA (1)...(19): siRNA sense strand
gaagguaaagcaggaacua

SEQ ID NO: 8084 - RNA, 19 nt, Homo sapiens
  misc_RNA (1)...(19): siRNA sense strand
ugaaagaacgggucaaauc

SEQ ID NO: 8085 - RNA, 19 nt, Homo sapiens
  misc_RNA (1)...(19): siRNA sense strand
gaagagaaggaaaccaugu

SEQ ID NO: 8086 - RNA, 19 nt, Homo sapiens
  misc_RNA (1)...(19): siRNA sense strand
caagugaaagaccagaaua

SEQ ID NO: 8087 - RNA, 19 nt, Homo sapiens
  misc_RNA (1)...(19): siRNA sense strand
gagagaagcaagaggaaau

SEQ ID NO: 8088 - RNA, 19 nt, Homo sapiens
  misc_RNA (1)...(19): siRNA sense strand
aaggaaaccauguugaaua

SEQ ID NO: 8089 - RNA, 19 nt, Homo sapiens
  misc_RNA (1)...(19): siRNA sense strand
gaaggaaaccauguugaau

SEQ ID NO: 8090 - RNA, 19 nt, Homo sapiens
  misc_RNA (1)...(19): siRNA sense strand
cuacgaggaugaccacuuc

SEQ ID NO: 8091 - RNA, 19 nt, Homo sapiens
  misc_RNA (1)...(19): siRNA sense strand
aaaggaaacucacuugacu

SEQ ID NO: 8092 - RNA, 19 nt, Homo sapiens
  misc_RNA (1)...(19): siRNA sense strand
gacacugccuugacaacuu

SEQ ID NO: 8093 - RNA, 19 nt, Homo sapiens
  misc_RNA (1)...(19): siRNA sense strand
acacugccuugacaacuuu

SEQ ID NO: 8094 - RNA, 19 nt, Homo sapiens
  misc_RNA (1)...(19): siRNA sense strand
auaagaagauagcugaguu

SEQ ID NO: 8095 - RNA, 19 nt, Homo sapiens
  misc_RNA (1)...(19): siRNA sense strand
gcagaugagcagcuugaaa

SEQ ID NO: 8096 - RNA, 19 nt, Homo sapiens
  misc_RNA (1)...(19): siRNA sense strand
gcuaauggccgacaacuac

SEQ ID NO: 8097 - RNA, 19 nt, Homo sapiens
  misc_RNA (1)...(19): siRNA sense strand
ugaauagcaucaagaccuu

SEQ ID NO: 8098 - RNA, 19 nt, Homo sapiens
  misc_RNA (1)...(19): siRNA sense strand
gaagcaagaggaaauugau

SEQ ID NO: 8099 - RNA, 19 nt, Homo sapiens
  misc_RNA (1)...(19): siRNA sense strand
guaucuaagugaccaugaa

SEQ ID NO: 8100 - RNA, 19 nt, Homo sapiens
  misc_RNA (1)...(19): siRNA sense strand
gaaggaacgagcccugaga

SEQ ID NO: 8101 - RNA, 19 nt, Homo sapiens
  misc_RNA (1)...(19): siRNA sense strand
gaguauggcauccacugua

SEQ ID NO: 8102 - RNA, 19 nt, Homo sapiens
  misc_RNA (1)...(19): siRNA sense strand
gaauaagaagguagcaaau

SEQ ID NO: 8103 - RNA, 19 nt, Homo sapiens
  misc_RNA (1)...(19): siRNA sense strand
caauugaacgcuuaaagga

SEQ ID NO: 8104 - RNA, 19 nt, Homo sapiens
  misc_RNA (1)...(19): siRNA sense strand
gcugaaggaaguauuaaga

SEQ ID NO: 8105 - RNA, 19 nt, Homo sapiens
  misc_RNA (1)...(19): siRNA sense strand
gaaguaaaggagagcaaau

SEQ ID NO: 8106 - RNA, 19 nt, Homo sapiens
  misc_RNA (1)...(19): siRNA sense strand
agagagaaggaaacacuua

SEQ ID NO: 8107 - RNA, 19 nt, Homo sapiens
  misc_RNA (1)...(19): siRNA sense strand
aaauguggguucagaaaca

SEQ ID NO: 8108 - RNA, 19 nt, Homo sapiens
  misc_RNA (1)...(19): siRNA sense strand
gugaaggagcggaagguua

SEQ ID NO: 8109 - RNA, 19 nt, Homo sapiens
  misc_RNA (1)...(19): siRNA sense strand
agagauacaugaccucaag

SEQ ID NO: 8110 - RNA, 19 nt, Homo sapiens
  misc_RNA (1)...(19): siRNA sense strand
ggcgagagauaacacaauc

SEQ ID NO: 8111 - RNA, 19 nt, Homo sapiens
  misc_RNA (1)...(19): siRNA sense strand
aaacucacuugacuaaucu

SEQ ID NO: 8112 - RNA, 19 nt, Homo sapiens
  misc_RNA (1)...(19): siRNA sense strand
gugaaagaccagaauaaga

SEQ ID NO: 8113 - RNA, 19 nt, Homo sapiens
  misc_RNA (1)...(19): siRNA sense strand
gaagaaugacaaagauaag

SEQ ID NO: 8114 - RNA, 19 nt, Homo sapiens
  misc_RNA (1)...(19): siRNA sense strand
guugaucgacucuuagaaa

SEQ ID NO: 8115 - RNA, 19 nt, Homo sapiens
  misc_RNA (1)...(19): siRNA sense strand
gagcagagggacagagaug

SEQ ID NO: 8116 - RNA, 19 nt, Homo sapiens
  misc_RNA (1)...(19): siRNA sense strand
gaaagagcggacaauugaa

SEQ ID NO: 8117 - RNA, 19 nt, Homo sapiens
  misc_RNA (1)...(19): siRNA sense strand
ggaggcccuugcagagaaa

SEQ ID NO: 8118 - RNA, 19 nt, Homo sapiens
  misc_RNA (1)...(19): siRNA sense strand
gagaaggaaaccauguuga

SEQ ID NO: 8119 - RNA, 19 nt, Homo sapiens
  misc_RNA (1)...(19): siRNA sense strand
gcagugggguugcuaguga

SEQ ID NO: 8120 - RNA, 19 nt, Homo sapiens
  misc_RNA (1)...(19): siRNA sense strand
gguaaagcaggaacuagaa

SEQ ID NO: 8121 - RNA, 19 nt, Homo sapiens
  misc_RNA (1)...(19): siRNA sense strand
gcacaaggaacagguggaa

SEQ ID NO: 8122 - RNA, 19 nt, Homo sapiens
  misc_RNA (1)...(19): siRNA sense strand
auaagaagguagcaaaucu

SEQ ID NO: 8123 - RNA, 19 nt, Homo sapiens
  misc_RNA (1)...(19): siRNA sense strand
agaauaagaagguagcaaa

SEQ ID NO: 8124 - RNA, 19 nt, Homo sapiens
  misc_RNA (1)...(19): siRNA sense strand
gagcggaagguuaauguuc

SEQ ID NO: 8125 - RNA, 19 nt, Homo sapiens
  misc_RNA (1)...(19): siRNA sense strand
ggaaguaaaggagagcaaa

SEQ ID NO: 8126 - RNA, 19 nt, Homo sapiens
  misc_RNA (1)...(19): siRNA sense strand
ucauggaucugcagacaca

SEQ ID NO: 8127 - RNA, 19 nt, Homo sapiens
  misc_RNA (1)...(19): siRNA sense strand
gaaaauguggguucagaaa

SEQ ID NO: 8128 - RNA, 19 nt, Homo sapiens
  misc_RNA (1)...(19): siRNA sense strand
gcagagagaaggaaacacu

SEQ ID NO: 8129 - RNA, 19 nt, Homo sapiens
  misc_RNA (1)...(19): siRNA sense strand
gagaugagcgagagaagca

SEQ ID NO: 8130 - RNA, 19 nt, Homo sapiens
  misc_RNA (1)...(19): siRNA sense strand
gaaagaacgggucaaaucc

SEQ ID NO: 8131 - RNA, 19 nt, Homo sapiens
  misc_RNA (1)...(19): siRNA sense strand
gagauaacacaaucaugga

SEQ ID NO: 8132 - RNA, 19 nt, Homo sapiens
  misc_RNA (1)...(19): siRNA sense strand
gaggaugaccacuucaaau

SEQ ID NO: 8133 - RNA, 19 nt, Homo sapiens
  misc_RNA (1)...(19): siRNA sense strand
uagaggaaguucuggagau

SEQ ID NO: 8134 - RNA, 19 nt, Homo sapiens
  misc_RNA (1)...(19): siRNA sense strand
gcaagugaaagaccagaau

SEQ ID NO: 8135 - RNA, 19 nt, Homo sapiens
  misc_RNA (1)...(19): siRNA sense strand
cacuagagauugcuuugga

SEQ ID NO: 8136 - RNA, 19 nt, Homo sapiens
  misc_RNA (1)...(19): siRNA sense strand
ggagggaguucgggaagca

SEQ ID NO: 8137 - RNA, 19 nt, Homo sapiens
  misc_RNA (1)...(19): siRNA sense strand
ucuuagaaaucuugaagga

SEQ ID NO: 8138 - RNA, 19 nt, Homo sapiens
  misc_RNA (1)...(19): siRNA sense strand
cuaagaagaagacccaaga

SEQ ID NO: 8139 - RNA, 19 nt, Homo sapiens
  misc_RNA (1)...(19): siRNA sense strand
caaaaucgaaugaagcuaa

SEQ ID NO: 8140 - RNA, 19 nt, Homo sapiens
  misc_RNA (1)...(19): siRNA sense strand
gaagauagcugaguuggaa

SEQ ID NO: 8141 - RNA, 19 nt, Homo sapiens
  misc_RNA (1)...(19): siRNA sense strand
gaagagugcacaaauguua

SEQ ID NO: 8142 - RNA, 19 nt, Homo sapiens
  misc_RNA (1)...(19): siRNA sense strand
gacacaagcuggagagaua

SEQ ID NO: 8143 - RNA, 19 nt, Homo sapiens
  misc_RNA (1)...(19): siRNA sense strand
ggagaaggaucgucuggua

SEQ ID NO: 8144 - RNA, 19 nt, Homo sapiens
  misc_RNA (1)...(19): siRNA sense strand
gaaacucacuugacuaauc

SEQ ID NO: 8145 - RNA, 19 nt, Homo sapiens
  misc_RNA (1)...(19): siRNA sense strand
ggaaggauguggaaguaaa

SEQ ID NO: 8146 - RNA, 19 nt, Homo sapiens
  misc_RNA (1)...(19): siRNA sense strand
gcccagagcugaagaagga

SEQ ID NO: 8147 - RNA, 19 nt, Homo sapiens
  misc_RNA (1)...(19): siRNA sense strand
gaacuagaauccaugaaag

SEQ ID NO: 8148 - RNA, 19 nt, Homo sapiens
  misc_RNA (1)...(19): siRNA sense strand
agagagagaucaccaggua

SEQ ID NO: 8149 - RNA, 19 nt, Homo sapiens
  misc_RNA (1)...(19): siRNA sense strand
gaagaagacccaagaggaa

SEQ ID NO: 8150 - RNA, 19 nt, Homo sapiens
  misc_RNA (1)...(19): siRNA sense strand
agaaugagcugcagaagau

SEQ ID NO: 8151 - RNA, 19 nt, Homo sapiens
  misc_RNA (1)...(19): siRNA sense strand
ggaaguggcugcccugaag

SEQ ID NO: 8152 - RNA, 19 nt, Homo sapiens
  misc_RNA (1)...(19): siRNA sense strand
ggauauggcugaagagaag

SEQ ID NO: 8153 - RNA, 19 nt, Homo sapiens
  misc_RNA (1)...(19): siRNA sense strand
agaaguugaucgacucuua

SEQ ID NO: 8154 - RNA, 19 nt, Homo sapiens
  misc_RNA (1)...(19): siRNA sense strand
gcagauagcagaccauugu

SEQ ID NO: 8155 - RNA, 19 nt, Homo sapiens
  misc_RNA (1)...(19): siRNA sense strand
uagcaaaucugaagcacaa

SEQ ID NO: 8156 - RNA, 19 nt, Homo sapiens
  misc_RNA (1)...(19): siRNA sense strand
ugaaagaccagaauaagaa

SEQ ID NO: 8157 - RNA, 19 nt, Homo sapiens
  misc_RNA (1)...(19): siRNA sense strand
ggaacuagaauccaugaaa

SEQ ID NO: 8158 - RNA, 19 nt, Homo sapiens
  misc_RNA (1)...(19): siRNA sense strand
agaaagagcggacaauuga

SEQ ID NO: 8159 - RNA, 19 nt, Homo sapiens
  misc_RNA (1)...(19): siRNA sense strand
gaaggaaguauuaagagaa

SEQ ID NO: 8160 - RNA, 19 nt, Homo sapiens
  misc_RNA (1)...(19): siRNA sense strand
aaagaagagugcacaaaug

SEQ ID NO: 8161 - RNA, 19 nt, Homo sapiens
  misc_RNA (1)...(19): siRNA sense strand
agagaugagugaccgaaua

SEQ ID NO: 8162 - RNA, 19 nt, Homo sapiens
  misc_RNA (1)...(19): siRNA sense strand
gagaaagagcggacaauug

SEQ ID NO: 8163 - RNA, 19 nt, Homo sapiens
  misc_RNA (1)...(19): siRNA sense strand
gcggaaggauguggaagua

SEQ ID NO: 8164 - RNA, 19 nt, Homo sapiens
  misc_RNA (1)...(19): siRNA sense strand
gcggacaauugaacgcuua

SEQ ID NO: 8165 - RNA, 19 nt, Homo sapiens
  misc_RNA (1)...(19): siRNA sense strand
aggaaaccauguugaauaa

SEQ ID NO: 8166 - RNA, 19 nt, Homo sapiens
  misc_RNA (1)...(19): siRNA sense strand
agacacagcugaaggaagu

SEQ ID NO: 8167 - RNA, 19 nt, Homo sapiens
  misc_RNA (1)...(19): siRNA sense strand
ggaagugcccgcucuguug

SEQ ID NO: 8168 - RNA, 19 nt, Homo sapiens
  misc_RNA (1)...(19): siRNA sense strand
gaaggaggagugucugaaa

SEQ ID NO: 8169 - RNA, 19 nt, Homo sapiens
  misc_RNA (1)...(19): siRNA sense strand
gaaaauggaaucacaauug

SEQ ID NO: 8170 - RNA, 19 nt, Homo sapiens
  misc_RNA (1)...(19): siRNA sense strand
ugaaggaaguauuaagaga

SEQ ID NO: 8171 - RNA, 19 nt, Homo sapiens
  misc_RNA (1)...(19): siRNA sense strand
ugacaacccucugccauga

SEQ ID NO: 8172 - RNA, 19 nt, Homo sapiens
  misc_RNA (1)...(19): siRNA sense strand
gagaagaaugacaaagaua

SEQ ID NO: 8173 - RNA, 19 nt, Homo sapiens
  misc_RNA (1)...(19): siRNA sense strand
ugaaggagcggaagguuaa

SEQ ID NO: 8174 - RNA, 19 nt, Homo sapiens
  misc_RNA (1)...(19): siRNA sense strand
gagagcaaauugaguucuu

SEQ ID NO: 8175 - RNA, 19 nt, Homo sapiens
  misc_RNA (1)...(19): siRNA sense strand
gaucgacucuuagaaaucu

SEQ ID NO: 8176 - RNA, 19 nt, Homo sapiens
  misc_RNA (1)...(19): siRNA sense strand
gaaggaacaguacagaguu

SEQ ID NO: 8177 - RNA, 19 nt, Homo sapiens
  misc_RNA (1)...(19): siRNA sense strand
uagaauccaugaaagcaaa

SEQ ID NO: 8178 - RNA, 19 nt, Homo sapiens
  misc_RNA (1)...(19): siRNA sense strand
cuuaaagacuugaaggaaa

SEQ ID NO: 8179 - RNA, 19 nt, Homo sapiens
  misc_RNA (1)...(19): siRNA sense strand
gagcuuucguccucuaaga

SEQ ID NO: 8180 - RNA, 19 nt, Homo sapiens
  misc_RNA (1)...(19): siRNA sense strand
gaagguagcaaaucugaag

SEQ ID NO: 8181 - RNA, 19 nt, Homo sapiens
  misc_RNA (1)...(19): siRNA sense strand
ugaaggagguggaaaauga

SEQ ID NO: 8182 - RNA, 19 nt, Homo sapiens
  misc_RNA (1)...(19): siRNA sense strand
ggaaggaacaguacagagu

SEQ ID NO: 8183 - RNA, 19 nt, Homo sapiens
  misc_RNA (1)...(19): siRNA sense strand
ugagaagaaugacaaagau

SEQ ID NO: 8184 - RNA, 19 nt, Homo sapiens
  misc_RNA (1)...(19): siRNA sense strand
gguggaugcucuccgauug

SEQ ID NO: 8185 - RNA, 19 nt, Homo sapiens
  misc_RNA (1)...(19): siRNA sense strand
guaaaggagagcaaauuga

SEQ ID NO: 8186 - RNA, 19 nt, Homo sapiens
  misc_RNA (1)...(19): siRNA sense strand
gaagguaaagcaggaacua

SEQ ID NO: 8187 - RNA, 19 nt, Homo sapiens
  misc_RNA (1)...(19): siRNA sense strand
ugaaagaacgggucaaauc

SEQ ID NO: 8188 - RNA, 19 nt, Homo sapiens
  misc_RNA (1)...(19): siRNA sense strand
gaagagaaggaaaccaugu

SEQ ID NO: 8189 - RNA, 19 nt, Homo sapiens
  misc_RNA (1)...(19): siRNA sense strand
caagugaaagaccagaaua

SEQ ID NO: 8190 - RNA, 19 nt, Homo sapiens
  misc_RNA (1)...(19): siRNA sense strand
gagagaagcaagaggaaau

SEQ ID NO: 8191 - RNA, 19 nt, Homo sapiens
  misc_RNA (1)...(19): siRNA sense strand
aaggaaaccauguugaaua

SEQ ID NO: 8192 - RNA, 19 nt, Homo sapiens
  misc_RNA (1)...(19): siRNA sense strand
gaaggaaaccauguugaau

SEQ ID NO: 8193 - RNA, 19 nt, Homo sapiens
  misc_RNA (1)...(19): siRNA sense strand
gagaaugagcugcagaaga

SEQ ID NO: 8194 - RNA, 19 nt, Homo sapiens
  misc_RNA (1)...(19): siRNA sense strand
cuacgaggaugaccacuuc

SEQ ID NO: 8195 - RNA, 19 nt, Homo sapiens
  misc_RNA (1)...(19): siRNA sense strand
aaaggaaacucacuugacu

SEQ ID NO: 8196 - RNA, 19 nt, Homo sapiens
  misc_RNA (1)...(19): siRNA sense strand
gacacugccuugacaacuu

SEQ ID NO: 8197 - RNA, 19 nt, Homo sapiens
  misc_RNA (1)...(19): siRNA sense strand
acacugccuugacaacuuu

SEQ ID NO: 8198 - RNA, 19 nt, Homo sapiens
  misc_RNA (1)...(19): siRNA sense strand
ccuauaacuuggacgauga

SEQ ID NO: 8199 - RNA, 19 nt, Homo sapiens
  misc_RNA (1)...(19): siRNA sense strand
auaagaagauagcugaguu

SEQ ID NO: 8200 - RNA, 19 nt, Homo sapiens
  misc_RNA (1)...(19): siRNA sense strand
gcagaugagcagcuugaaa

SEQ ID NO: 8201 - RNA, 19 nt, Homo sapiens
  misc_RNA (1)...(19): siRNA sense strand
gcuaauggccgacaacuac

SEQ ID NO: 8202 - RNA, 19 nt, Homo sapiens
  misc_RNA (1)...(19): siRNA sense strand
ugaauagcaucaagaccuu

SEQ ID NO: 8203 - RNA, 19 nt, Homo sapiens
  misc_RNA (1)...(19): siRNA sense strand
guaucuaagugaccaugaa

SEQ ID NO: 8204 - RNA, 19 nt, Homo sapiens
  misc_RNA (1)...(19): siRNA sense strand
gaagcaagaggaaauugau

SEQ ID NO: 8205 - RNA, 19 nt, Homo sapiens
  misc_RNA (1)...(19): siRNA sense strand
gaaggaacgagcccugaga

SEQ ID NO: 8206 - RNA, 19 nt, Homo sapiens
  misc_RNA (1)...(19): siRNA sense strand
gaguauggcauccacugua

SEQ ID NO: 8207 - RNA, 19 nt, Homo sapiens
  misc_RNA (1)...(19): siRNA sense strand
gaacuugaccaaaauagaa

SEQ ID NO: 8208 - RNA, 19 nt, Homo sapiens
  misc_RNA (1)...(19): siRNA sense strand
gaauaagaagguagcaaau

SEQ ID NO: 8209 - RNA, 19 nt, Homo sapiens
  misc_RNA (1)...(19): siRNA sense strand
caauugaacgcuuaaagga

SEQ ID NO: 8210 - RNA, 19 nt, Homo sapiens
  misc_RNA (1)...(19): siRNA sense strand
gcugaaggaaguauuaaga

SEQ ID NO: 8211 - RNA, 19 nt, Homo sapiens
  misc_RNA (1)...(19): siRNA sense strand
gaaguaaaggagagcaaau

SEQ ID NO: 8212 - RNA, 19 nt, Homo sapiens
  misc_RNA (1)...(19): siRNA sense strand
agagagaaggaaacacuua

SEQ ID NO: 8213 - RNA, 19 nt, Homo sapiens
  misc_RNA (1)...(19): siRNA sense strand
gugaaggagcggaagguua

SEQ ID NO: 8214 - RNA, 19 nt, Homo sapiens
  misc_RNA (1)...(19): siRNA sense strand
agagauacaugaccucaag

SEQ ID NO: 8215 - RNA, 19 nt, Homo sapiens
  misc_RNA (1)...(19): siRNA sense strand
aaauguggguucagaaaca

SEQ ID NO: 8216 - RNA, 19 nt, Homo sapiens
  misc_RNA (1)...(19): siRNA sense strand
ggcgagagauaacacaauc

SEQ ID NO: 8217 - RNA, 19 nt, Homo sapiens
  misc_RNA (1)...(19): siRNA sense strand
aaacucacuugacuaaucu

SEQ ID NO: 8218 - RNA, 19 nt, Homo sapiens
  misc_RNA (1)...(19): siRNA sense strand
gugaaagaccagaauaaga

SEQ ID NO: 8219 - RNA, 19 nt, Homo sapiens
  misc_RNA (1)...(19): siRNA sense strand
gaagaaugacaaagauaag

SEQ ID NO: 8220 - RNA, 19 nt, Homo sapiens
  misc_RNA (1)...(19): siRNA sense strand
guugaucgacucuuagaaa

SEQ ID NO: 8221 - RNA, 19 nt, Homo sapiens
  misc_RNA (1)...(19): siRNA sense strand
gagcagagggacagagaug

SEQ ID NO: 8222 - RNA, 19 nt, Homo sapiens
  misc_RNA (1)...(19): siRNA sense strand
gaaagagcggacaauugaa

SEQ ID NO: 8223 - RNA, 19 nt, Homo sapiens
  misc_RNA (1)...(19): siRNA sense strand
ggaggcccuugcagagaaa

SEQ ID NO: 8224 - RNA, 19 nt, Homo sapiens
  misc_RNA (1)...(19): siRNA sense strand
gagaaggaaaccauguuga

SEQ ID NO: 8225 - RNA, 19 nt, Homo sapiens
  misc_RNA (1)...(19): siRNA sense strand
ucauggaucugcagacaca

SEQ ID NO: 8226 - RNA, 19 nt, Homo sapiens
  misc_RNA (1)...(19): siRNA sense strand
gguaaagcaggaacuagaa

SEQ ID NO: 8227 - RNA, 19 nt, Homo sapiens
  misc_RNA (1)...(19): siRNA sense strand
gcagugggguugcuaguga

SEQ ID NO: 8228 - RNA, 19 nt, Homo sapiens
  misc_RNA (1)...(19): siRNA sense strand
gcacaaggaacagguggaa

SEQ ID NO: 8229 - RNA, 19 nt, Homo sapiens
  misc_RNA (1)...(19): siRNA sense strand
auaagaagguagcaaaucu

SEQ ID NO: 8230 - RNA, 19 nt, Homo sapiens
  misc_RNA (1)...(19): siRNA sense strand
agaauaagaagguagcaaa

SEQ ID NO: 8231 - RNA, 19 nt, Homo sapiens
  misc_RNA (1)...(19): siRNA sense strand
gagcggaagguuaauguuc

SEQ ID NO: 8232 - RNA, 19 nt, Homo sapiens
  misc_RNA (1)...(19): siRNA sense strand
ggaaguaaaggagagcaaa

SEQ ID NO: 8233 - RNA, 19 nt, Homo sapiens
  misc_RNA (1)...(19): siRNA sense strand
gaaagaacgggucaaaucc

SEQ ID NO: 8234 - RNA, 19 nt, Homo sapiens
  misc_RNA (1)...(19): siRNA sense strand
gcagagagaaggaaacacu

SEQ ID NO: 8235 - RNA, 19 nt, Homo sapiens
  misc_RNA (1)...(19): siRNA sense strand
gaaaauguggguucagaaa

SEQ ID NO: 8236 - RNA, 19 nt, Homo sapiens
  misc_RNA (1)...(19): siRNA sense strand
gagaugagcgagagaagca

SEQ ID NO: 8237 - RNA, 19 nt, Homo sapiens
  misc_RNA (1)...(19): siRNA sense strand
ggagggaguucgggaagca

SEQ ID NO: 8238 - RNA, 19 nt, Homo sapiens
  misc_RNA (1)...(19): siRNA sense strand
gaggaugaccacuucaaau

SEQ ID NO: 8239 - RNA, 19 nt, Homo sapiens
  misc_RNA (1)...(19): siRNA sense strand
uagaggaaguucuggagau

SEQ ID NO: 8240 - RNA, 19 nt, Homo sapiens
  misc_RNA (1)...(19): siRNA sense strand
gaagauagcugaguuggaa

SEQ ID NO: 8241 - RNA, 19 nt, Homo sapiens
  misc_RNA (1)...(19): siRNA sense strand
gaagagugcacaaauguua

SEQ ID NO: 8242 - RNA, 19 nt, Homo sapiens
  misc_RNA (1)...(19): siRNA sense strand
gacacaagcuggagagaua

SEQ ID NO: 8243 - RNA, 19 nt, Homo sapiens
  misc_RNA (1)...(19): siRNA sense strand
ggagaaggaucgucuggua

SEQ ID NO: 8244 - RNA, 19 nt, Homo sapiens
  misc_RNA (1)...(19): siRNA sense strand
gaaacucacuugacuaauc

SEQ ID NO: 8245 - RNA, 19 nt, Homo sapiens
  misc_RNA (1)...(19): siRNA sense strand
ggaaggauguggaaguaaa

SEQ ID NO: 8246 - RNA, 19 nt, Homo sapiens
  misc_RNA (1)...(19): siRNA sense strand
gcccagagcugaagaagga

SEQ ID NO: 8247 - RNA, 19 nt, Homo sapiens
  misc_RNA (1)...(19): siRNA sense strand
gaacuagaauccaugaaag

SEQ ID NO: 8248 - RNA, 19 nt, Homo sapiens
  misc_RNA (1)...(19): siRNA sense strand
agagagagaucaccaggua

SEQ ID NO: 8249 - RNA, 19 nt, Homo sapiens
  misc_RNA (1)...(19): siRNA sense strand
gaagaagacccaagaggaa

SEQ ID NO: 8250 - RNA, 19 nt, Homo sapiens
  misc_RNA (1)...(19): siRNA sense strand
agaaugagcugcagaagau

SEQ ID NO: 8251 - RNA, 19 nt, Homo sapiens
  misc_RNA (1)...(19): siRNA sense strand
ggaaguggcugcccugaag

SEQ ID NO: 8252 - RNA, 19 nt, Homo sapiens
  misc_RNA (1)...(19): siRNA sense strand
ggauauggcugaagagaag

SEQ ID NO: 8253 - RNA, 19 nt, Homo sapiens
  misc_RNA (1)...(19): siRNA sense strand
agaaguugaucgacucuua

SEQ ID NO: 8254 - RNA, 19 nt, Homo sapiens
  misc_RNA (1)...(19): siRNA sense strand
gcagauagcagaccauugu

SEQ ID NO: 8255 - RNA, 19 nt, Homo sapiens
  misc_RNA (1)...(19): siRNA sense strand
uagcaaaucugaagcacaa

SEQ ID NO: 8256 - RNA, 19 nt, Homo sapiens
  misc_RNA (1)...(19): siRNA sense strand
ugaaagaccagaauaagaa

SEQ ID NO: 8257 - RNA, 19 nt, Homo sapiens
  misc_RNA (1)...(19): siRNA sense strand
ggaacuagaauccaugaaa

SEQ ID NO: 8258 - RNA, 19 nt, Homo sapiens
  misc_RNA (1)...(19): siRNA sense strand
agaaagagcggacaauuga

SEQ ID NO: 8259 - RNA, 19 nt, Homo sapiens
  misc_RNA (1)...(19): siRNA sense strand
gaaggaaguauuaagagaa

SEQ ID NO: 8260 - RNA, 19 nt, Homo sapiens
  misc_RNA (1)...(19): siRNA sense strand
aaagaagagugcacaaaug

SEQ ID NO: 8261 - RNA, 19 nt, Homo sapiens
  misc_RNA (1)...(19): siRNA sense strand
agagaugagugaccgaaua

SEQ ID NO: 8262 - RNA, 19 nt, Homo sapiens
  misc_RNA (1)...(19): siRNA sense strand
gagaaagagcggacaauug

SEQ ID NO: 8263 - RNA, 19 nt, Homo sapiens
  misc_RNA (1)...(19): siRNA sense strand
gcggaaggauguggaagua

SEQ ID NO: 8264 - RNA, 19 nt, Homo sapiens
  misc_RNA (1)...(19): siRNA sense strand
gcggacaauugaacgcuua

SEQ ID NO: 8265 - RNA, 19 nt, Homo sapiens
  misc_RNA (1)...(19): siRNA sense strand
aggaaaccauguugaauaa

SEQ ID NO: 8266 - RNA, 19 nt, Homo sapiens
  misc_RNA (1)...(19): siRNA sense strand
agacacagcugaaggaagu

SEQ ID NO: 8267 - RNA, 19 nt, Homo sapiens
  misc_RNA (1)...(19): siRNA sense strand
ggaagugcccgcucuguug

SEQ ID NO: 8268 - RNA, 19 nt, Homo sapiens
  misc_RNA (1)...(19): siRNA sense strand
gaaggaggagugucugaaa

SEQ ID NO: 8269 - RNA, 19 nt, Homo sapiens
  misc_RNA (1)...(19): siRNA sense strand
gaaaauggaaucacaauug

SEQ ID NO: 8270 - RNA, 19 nt, Homo sapiens
  misc_RNA (1)...(19): siRNA sense strand
ugaaggaaguauuaagaga

SEQ ID NO: 8271 - RNA, 19 nt, Homo sapiens
  misc_RNA (1)...(19): siRNA sense strand
ugacaacccucugccauga

SEQ ID NO: 8272 - RNA, 19 nt, Homo sapiens
  misc_RNA (1)...(19): siRNA sense strand
gagaagaaugacaaagaua

SEQ ID NO: 8273 - RNA, 19 nt, Homo sapiens
  misc_RNA (1)...(19): siRNA sense strand
ugaaggagcggaagguuaa

SEQ ID NO: 8274 - RNA, 19 nt, Homo sapiens
  misc_RNA (1)...(19): siRNA sense strand
gagagcaaauugaguucuu

SEQ ID NO: 8275 - RNA, 19 nt, Homo sapiens
  misc_RNA (1)...(19): siRNA sense strand
gaucgacucuuagaaaucu

SEQ ID NO: 8276 - RNA, 19 nt, Homo sapiens
  misc_RNA (1)...(19): siRNA sense strand
gaaggaacaguacagaguu

SEQ ID NO: 8277 - RNA, 19 nt, Homo sapiens
  misc_RNA (1)...(19): siRNA sense strand
uagaauccaugaaagcaaa

SEQ ID NO: 8278 - RNA, 19 nt, Homo sapiens
  misc_RNA (1)...(19): siRNA sense strand
cuuaaagacuugaaggaaa

SEQ ID NO: 8279 - RNA, 19 nt, Homo sapiens
  misc_RNA (1)...(19): siRNA sense strand
gagcuuucguccucuaaga

SEQ ID NO: 8280 - RNA, 19 nt, Homo sapiens
  misc_RNA (1)...(19): siRNA sense strand
gaagguagcaaaucugaag

SEQ ID NO: 8281 - RNA, 19 nt, Homo sapiens
  misc_RNA (1)...(19): siRNA sense strand
ugaaggagguggaaaauga

SEQ ID NO: 8282 - RNA, 19 nt, Homo sapiens
  misc_RNA (1)...(19): siRNA sense strand
ggaaggaacaguacagagu

SEQ ID NO: 8283 - RNA, 19 nt, Homo sapiens
  misc_RNA (1)...(19): siRNA sense strand
ugagaagaaugacaaagau

SEQ ID NO: 8284 - RNA, 19 nt, Homo sapiens
  misc_RNA (1)...(19): siRNA sense strand
gguggaugcucuccgauug

SEQ ID NO: 8285 - RNA, 19 nt, Homo sapiens
  misc_RNA (1)...(19): siRNA sense strand
guaaaggagagcaaauuga

SEQ ID NO: 8286 - RNA, 19 nt, Homo sapiens
  misc_RNA (1)...(19): siRNA sense strand
gaagguaaagcaggaacua

SEQ ID NO: 8287 - RNA, 19 nt, Homo sapiens
  misc_RNA (1)...(19): siRNA sense strand
ugaaagaacgggucaaauc

SEQ ID NO: 8288 - RNA, 19 nt, Homo sapiens
  misc_RNA (1)...(19): siRNA sense strand
gaagagaaggaaaccaugu

SEQ ID NO: 8289 - RNA, 19 nt, Homo sapiens
  misc_RNA (1)...(19): siRNA sense strand
caagugaaagaccagaaua

SEQ ID NO: 8290 - RNA, 19 nt, Homo sapiens
  misc_RNA (1)...(19): siRNA sense strand
gagagaagcaagaggaaau

SEQ ID NO: 8291 - RNA, 19 nt, Homo sapiens
  misc_RNA (1)...(19): siRNA sense strand
aaggaaaccauguugaaua

SEQ ID NO: 8292 - RNA, 19 nt, Homo sapiens
  misc_RNA (1)...(19): siRNA sense strand
gaaggaaaccauguugaau

SEQ ID NO: 8293 - RNA, 19 nt, Homo sapiens
  misc_RNA (1)...(19): siRNA sense strand
gagaaugagcugcagaaga

SEQ ID NO: 8294 - RNA, 19 nt, Homo sapiens
  misc_RNA (1)...(19): siRNA sense strand
cuacgaggaugaccacuuc

SEQ ID NO: 8295 - RNA, 19 nt, Homo sapiens
  misc_RNA (1)...(19): siRNA sense strand
aaaggaaacucacuugacu

SEQ ID NO: 8296 - RNA, 19 nt, Homo sapiens
  misc_RNA (1)...(19): siRNA sense strand
gacacugccuugacaacuu

SEQ ID NO: 8297 - RNA, 19 nt, Homo sapiens
  misc_RNA (1)...(19): siRNA sense strand
acacugccuugacaacuuu

SEQ ID NO: 8298 - RNA, 19 nt, Homo sapiens
  misc_RNA (1)...(19): siRNA sense strand
ccuauaacuuggacgauga

SEQ ID NO: 8299 - RNA, 19 nt, Homo sapiens
  misc_RNA (1)...(19): siRNA sense strand
auaagaagauagcugaguu

SEQ ID NO: 8300 - RNA, 19 nt, Homo sapiens
  misc_RNA (1)...(19): siRNA sense strand
gcagaugagcagcuugaaa

SEQ ID NO: 8301 - RNA, 19 nt, Homo sapiens
  misc_RNA (1)...(19): siRNA sense strand
gcuaauggccgacaacuac

SEQ ID NO: 8302 - RNA, 19 nt, Homo sapiens
  misc_RNA (1)...(19): siRNA sense strand
ugaauagcaucaagaccuu

SEQ ID NO: 8303 - RNA, 19 nt, Homo sapiens
  misc_RNA (1)...(19): siRNA sense strand
guaucuaagugaccaugaa

SEQ ID NO: 8304 - RNA, 19 nt, Homo sapiens
  misc_RNA (1)...(19): siRNA sense strand
gaagcaagaggaaauugau

SEQ ID NO: 8305 - RNA, 19 nt, Homo sapiens
  misc_RNA (1)...(19): siRNA sense strand
gaaggaacgagcccugaga

SEQ ID NO: 8306 - RNA, 19 nt, Homo sapiens
  misc_RNA (1)...(19): siRNA sense strand
gaguauggcauccacugua

SEQ ID NO: 8307 - RNA, 19 nt, Homo sapiens
  misc_RNA (1)...(19): siRNA sense strand
gaacuugaccaaaauagaa

SEQ ID NO: 8308 - RNA, 19 nt, Homo sapiens
  misc_RNA (1)...(19): siRNA sense strand
gaauaagaagguagcaaau

SEQ ID NO: 8309 - RNA, 19 nt, Homo sapiens
  misc_RNA (1)...(19): siRNA sense strand
caauugaacgcuuaaagga

SEQ ID NO: 8310 - RNA, 19 nt, Homo sapiens
  misc_RNA (1)...(19): siRNA sense strand
gcugaaggaaguauuaaga

SEQ ID NO: 8311 - RNA, 19 nt, Homo sapiens
  misc_RNA (1)...(19): siRNA sense strand
gaaguaaaggagagcaaau

SEQ ID NO: 8312 - RNA, 19 nt, Homo sapiens
  misc_RNA (1)...(19): siRNA sense strand
agagagaaggaaacacuua

SEQ ID NO: 8313 - RNA, 19 nt, Homo sapiens
  misc_RNA (1)...(19): siRNA sense strand
gugaaggagcggaagguua

SEQ ID NO: 8314 - RNA, 19 nt, Homo sapiens
  misc_RNA (1)...(19): siRNA sense strand
agagauacaugaccucaag

SEQ ID NO: 8315 - RNA, 19 nt, Homo sapiens
  misc_RNA (1)...(19): siRNA sense strand
aaauguggguucagaaaca

SEQ ID NO: 8316 - RNA, 19 nt, Homo sapiens
  misc_RNA (1)...(19): siRNA sense strand
ggcgagagauaacacaauc

SEQ ID NO: 8317 - RNA, 19 nt, Homo sapiens
  misc_RNA (1)...(19): siRNA sense strand
aaacucacuugacuaaucu

SEQ ID NO: 8318 - RNA, 19 nt, Homo sapiens
  misc_RNA (1)...(19): siRNA sense strand
gugaaagaccagaauaaga

SEQ ID NO: 8319 - RNA, 19 nt, Homo sapiens
  misc_RNA (1)...(19): siRNA sense strand
gaagaaugacaaagauaag

SEQ ID NO: 8320 - RNA, 19 nt, Homo sapiens
  misc_RNA (1)...(19): siRNA sense strand
guugaucgacucuuagaaa

SEQ ID NO: 8321 - RNA, 19 nt, Homo sapiens
  misc_RNA (1)...(19): siRNA sense strand
gagcagagggacagagaug

SEQ ID NO: 8322 - RNA, 19 nt, Homo sapiens
  misc_RNA (1)...(19): siRNA sense strand
gaaagagcggacaauugaa

SEQ ID NO: 8323 - RNA, 19 nt, Homo sapiens
  misc_RNA (1)...(19): siRNA sense strand
ggaggcccuugcagagaaa

SEQ ID NO: 8324 - RNA, 19 nt, Homo sapiens
  misc_RNA (1)...(19): siRNA sense strand
gagaaggaaaccauguuga

SEQ ID NO: 8325 - RNA, 19 nt, Homo sapiens
  misc_RNA (1)...(19): siRNA sense strand
ucauggaucugcagacaca

SEQ ID NO: 8326 - RNA, 19 nt, Homo sapiens
  misc_RNA (1)...(19): siRNA sense strand
gguaaagcaggaacuagaa

SEQ ID NO: 8327 - RNA, 19 nt, Homo sapiens
  misc_RNA (1)...(19): siRNA sense strand
gcagugggguugcuaguga

SEQ ID NO: 8328 - RNA, 19 nt, Homo sapiens
  misc_RNA (1)...(19): siRNA sense strand
gcacaaggaacagguggaa

SEQ ID NO: 8329 - RNA, 19 nt, Homo sapiens
  misc_RNA (1)...(19): siRNA sense strand
auaagaagguagcaaaucu

SEQ ID NO: 8330 - RNA, 19 nt, Homo sapiens
  misc_RNA (1)...(19): siRNA sense strand
agaauaagaagguagcaaa

SEQ ID NO: 8331 - RNA, 19 nt, Homo sapiens
  misc_RNA (1)...(19): siRNA sense strand
gagcggaagguuaauguuc

SEQ ID NO: 8332 - RNA, 19 nt, Homo sapiens
  misc_RNA (1)...(19): siRNA sense strand
ggaaguaaaggagagcaaa

SEQ ID NO: 8333 - RNA, 19 nt, Homo sapiens
  misc_RNA (1)...(19): siRNA sense strand
gaaagaacgggucaaaucc

SEQ ID NO: 8334 - RNA, 19 nt, Homo sapiens
  misc_RNA (1)...(19): siRNA sense strand
gcagagagaaggaaacacu

SEQ ID NO: 8335 - RNA, 19 nt, Homo sapiens
  misc_RNA (1)...(19): siRNA sense strand
gaaaauguggguucagaaa

SEQ ID NO: 8336 - RNA, 19 nt, Homo sapiens
  misc_RNA (1)...(19): siRNA sense strand
gagaugagcgagagaagca

SEQ ID NO: 8337 - RNA, 19 nt, Homo sapiens
  misc_RNA (1)...(19): siRNA sense strand
ggagggaguucgggaagca

SEQ ID NO: 8338 - RNA, 19 nt, Homo sapiens
  misc_RNA (1)...(19): siRNA sense strand
gaggaugaccacuucaaau

SEQ ID NO: 8339 - RNA, 19 nt, Homo sapiens
  misc_RNA (1)...(19): siRNA sense strand
uagaggaaguucuggagau

SEQ ID NO: 8340 - RNA, 19 nt, Homo sapiens
  misc_RNA (1)...(19): siRNA sense strand
gcacugacuuugacuauuc

SEQ ID NO: 8341 - RNA, 19 nt, Homo sapiens
  misc_RNA (1)...(19): siRNA sense strand
gaaguggccugguccaaau

SEQ ID NO: 8342 - RNA, 19 nt, Homo sapiens
  misc_RNA (1)...(19): siRNA sense strand
gggcgagggucucaaguuu

SEQ ID NO: 8343 - RNA, 19 nt, Homo sapiens
  misc_RNA (1)...(19): siRNA sense strand
ugacuacuccacugaauua

SEQ ID NO: 8344 - RNA, 19 nt, Homo sapiens
  misc_RNA (1)...(19): siRNA sense strand
gaaacagggcgaggacuua

SEQ ID NO: 8345 - RNA, 19 nt, Homo sapiens
  misc_RNA (1)...(19): siRNA sense strand
ggagaacccucgugacuac

SEQ ID NO: 8346 - RNA, 19 nt, Homo sapiens
  misc_RNA (1)...(19): siRNA sense strand
caaaguggcucugcucugu

SEQ ID NO: 8347 - RNA, 19 nt, Homo sapiens
  misc_RNA (1)...(19): siRNA sense strand
gcucagugcugucgucaug

SEQ ID NO: 8348 - RNA, 19 nt, Homo sapiens
  misc_RNA (1)...(19): siRNA sense strand
gaugaaguacccuauguuu

SEQ ID NO: 8349 - RNA, 19 nt, Homo sapiens
  misc_RNA (1)...(19): siRNA sense strand
gagaccagcucuaccuuca

SEQ ID NO: 8350 - RNA, 19 nt, Homo sapiens
  misc_RNA (1)...(19): siRNA sense strand
gaagggacaggcaacauga

SEQ ID NO: 8351 - RNA, 19 nt, Homo sapiens
  misc_RNA (1)...(19): siRNA sense strand
ggacaggcaacaugauuga

SEQ ID NO: 8352 - RNA, 19 nt, Homo sapiens
  misc_RNA (1)...(19): siRNA sense strand
gcgagggucucaaguuugu

SEQ ID NO: 8353 - RNA, 19 nt, Homo sapiens
  misc_RNA (1)...(19): siRNA sense strand
gggaugaaguacccuaugu

SEQ ID NO: 8354 - RNA, 19 nt, Homo sapiens
  misc_RNA (1)...(19): siRNA sense strand
gcgaggacuuagcggauaa

SEQ ID NO: 8355 - RNA, 19 nt, Homo sapiens
  misc_RNA (1)...(19): siRNA sense strand
gugcuagguuuccugagua

SEQ ID NO: 8356 - RNA, 19 nt, Homo sapiens
  misc_RNA (1)...(19): siRNA sense strand
ggaaguggccugguccaaa

SEQ ID NO: 8357 - RNA, 19 nt, Homo sapiens
  misc_RNA (1)...(19): siRNA sense strand
gauugauggugaugucauu

SEQ ID NO: 8358 - RNA, 19 nt, Homo sapiens
  misc_RNA (1)...(19): siRNA sense strand
ggacuuagcggauaaugac

SEQ ID NO: 8359 - RNA, 19 nt, Homo sapiens
  misc_RNA (1)...(19): siRNA sense strand
acuauuccgucuccaauuu

SEQ ID NO: 8360 - RNA, 19 nt, Homo sapiens
  misc_RNA (1)...(19): siRNA sense strand
ccacggaggcucuuacaug

SEQ ID NO: 8361 - RNA, 19 nt, Homo sapiens
  misc_RNA (1)...(19): siRNA sense strand
gaccagcucuaccuucaca

SEQ ID NO: 8362 - RNA, 19 nt, Homo sapiens
  misc_RNA (1)...(19): siRNA sense strand
ggaagggacaggcaacaug

SEQ ID NO: 8363 - RNA, 19 nt, Homo sapiens
  misc_RNA (1)...(19): siRNA sense strand
cuacuccacugaauuaagu

SEQ ID NO: 8364 - RNA, 19 nt, Homo sapiens
  misc_RNA (1)...(19): siRNA sense strand
ccagagagccaucauccaa

SEQ ID NO: 8365 - RNA, 19 nt, Homo sapiens
  misc_RNA (1)...(19): siRNA sense strand
cggaggcucuuacauggaa

SEQ ID NO: 8366 - RNA, 19 nt, Homo sapiens
  misc_RNA (1)...(19): siRNA sense strand
ucaaguucauguauacaga

SEQ ID NO: 8367 - RNA, 19 nt, Homo sapiens
  misc_RNA (1)...(19): siRNA sense strand
caaagugggcuguaaugug

SEQ ID NO: 8368 - RNA, 19 nt, Homo sapiens
  misc_RNA (1)...(19): siRNA sense strand
uggauaucgucgcuacuua

SEQ ID NO: 8369 - RNA, 19 nt, Homo sapiens
  misc_RNA (1)...(19): siRNA sense strand
gagagaccaucaaguucau

SEQ ID NO: 8370 - RNA, 19 nt, Homo sapiens
  misc_RNA (1)...(19): siRNA sense strand
cagacaaagugggcuguaa

SEQ ID NO: 8371 - RNA, 19 nt, Homo sapiens
  misc_RNA (1)...(19): siRNA sense strand
uaucgucgcuacuuacauc

SEQ ID NO: 8372 - RNA, 19 nt, Homo sapiens
  misc_RNA (1)...(19): siRNA sense strand
ggcgaggacuuagcggaua

SEQ ID NO: 8373 - RNA, 19 nt, Homo sapiens
  misc_RNA (1)...(19): siRNA sense strand
ugguagggcugcagacauu

SEQ ID NO: 8374 - RNA, 19 nt, Homo sapiens
  misc_RNA (1)...(19): siRNA sense strand
gcaacuaugggcuccuuga

SEQ ID NO: 8375 - RNA, 19 nt, Homo sapiens
  misc_RNA (1)...(19): siRNA sense strand
caaggguccgagaucauua

SEQ ID NO: 8376 - RNA, 19 nt, Homo sapiens
  misc_RNA (1)...(19): siRNA sense strand
ggaccaacuuugccaagac

SEQ ID NO: 8377 - RNA, 19 nt, Homo sapiens
  misc_RNA (1)...(19): siRNA sense strand
gcuaaggggugcccgagua

SEQ ID NO: 8378 - RNA, 19 nt, Homo sapiens
  misc_RNA (1)...(19): siRNA sense strand
gaacuaccaaccagugaag

SEQ ID NO: 8379 - RNA, 19 nt, Homo sapiens
  misc_RNA (1)...(19): siRNA sense strand
ucacugcauugcccgacua

SEQ ID NO: 8380 - RNA, 19 nt, Homo sapiens
  misc_RNA (1)...(19): siRNA sense strand
ccaaguucauucacaccaa

SEQ ID NO: 8381 - RNA, 19 nt, Homo sapiens
  misc_RNA (1)...(19): siRNA sense strand
gaccaucaaguucauguau

SEQ ID NO: 8382 - RNA, 19 nt, Homo sapiens
  misc_RNA (1)...(19): siRNA sense strand
cgagagaccaucaaguuca

SEQ ID NO: 8383 - RNA, 19 nt, Homo sapiens
  misc_RNA (1)...(19): siRNA sense strand
cuaaacccgucauggucua

SEQ ID NO: 8384 - RNA, 19 nt, Homo sapiens
  misc_RNA (1)...(19): siRNA sense strand
ccaucaaguucauguauac

SEQ ID NO: 8385 - RNA, 19 nt, Homo sapiens
  misc_RNA (1)...(19): siRNA sense strand
ggguuggagugcuagguuu

SEQ ID NO: 8386 - RNA, 19 nt, Homo sapiens
  misc_RNA (1)...(19): siRNA sense strand
gccgcaggguucaacagua

SEQ ID NO: 8387 - RNA, 19 nt, Homo sapiens
  misc_RNA (1)...(19): siRNA sense strand
uauacaaccugcaugacau

SEQ ID NO: 8388 - RNA, 19 nt, Homo sapiens
  misc_RNA (1)...(19): siRNA sense strand
gacaaagugggcuguaaug

SEQ ID NO: 8389 - RNA, 19 nt, Homo sapiens
  misc_RNA (1)...(19): siRNA sense strand
ggaugaaguacccuauguu

SEQ ID NO: 8390 - RNA, 19 nt, Homo sapiens
  misc_RNA (1)...(19): siRNA sense strand
ccaaggguccgagaucauu

SEQ ID NO: 8391 - RNA, 19 nt, Homo sapiens
  misc_RNA (1)...(19): siRNA sense strand
ccggaacgccacacacuuu

SEQ ID NO: 8392 - RNA, 19 nt, Homo sapiens
  misc_RNA (1)...(19): siRNA sense strand
acccacagcucccacauca

SEQ ID NO: 8393 - RNA, 19 nt, Homo sapiens
  misc_RNA (1)...(19): siRNA sense strand
caccaaggccaaccgcuuu

SEQ ID NO: 8394 - RNA, 19 nt, Homo sapiens
  misc_RNA (1)...(19): siRNA sense strand
gacaccaaguucauucaca

SEQ ID NO: 8395 - RNA, 19 nt, Homo sapiens
  misc_RNA (1)...(19): siRNA sense strand
ggugaugucauuccugaug

SEQ ID NO: 8396 - RNA, 19 nt, Homo sapiens
  misc_RNA (1)...(19): siRNA sense strand
gggcaacuaugggcuccuu

SEQ ID NO: 8397 - RNA, 19 nt, Homo sapiens
  misc_RNA (1)...(19): siRNA sense strand
cugguucacugccaacuug

SEQ ID NO: 8398 - RNA, 19 nt, Homo sapiens
  misc_RNA (1)...(19): siRNA sense strand
accaucaaguucauguaua

SEQ ID NO: 8399 - RNA, 19 nt, Homo sapiens
  misc_RNA (1)...(19): siRNA sense strand
agagagccaucauccaaag

SEQ ID NO: 8400 - RNA, 19 nt, Homo sapiens
  misc_RNA (1)...(19): siRNA sense strand
cccaacaccaucacuauga

SEQ ID NO: 8401 - RNA, 19 nt, Homo sapiens
  misc_RNA (1)...(19): siRNA sense strand
ggcacugacuuugacuauu

SEQ ID NO: 8402 - RNA, 19 nt, Homo sapiens
  misc_RNA (1)...(19): siRNA sense strand
cuacuucuacgccuucuau

SEQ ID NO: 8403 - RNA, 19 nt, Homo sapiens
  misc_RNA (1)...(19): siRNA sense strand
aaacacugguggcacucuu

SEQ ID NO: 8404 - RNA, 19 nt, Homo sapiens
  misc_RNA (1)...(19): siRNA sense strand
gcgagagaccaucaaguuc

SEQ ID NO: 8405 - RNA, 19 nt, Homo sapiens
  misc_RNA (1)...(19): siRNA sense strand
agucaucacccucaacuau

SEQ ID NO: 8406 - RNA, 19 nt, Homo sapiens
  misc_RNA (1)...(19): siRNA sense strand
cuacuaccguaaggacaaa

SEQ ID NO: 8407 - RNA, 19 nt, Homo sapiens
  misc_RNA (1)...(19): siRNA sense strand
gaccaacuuugccaagacu

SEQ ID NO: 8408 - RNA, 19 nt, Homo sapiens
  misc_RNA (1)...(19): siRNA sense strand
gugcugucgucaugaccua

SEQ ID NO: 8409 - RNA, 19 nt, Homo sapiens
  misc_RNA (1)...(19): siRNA sense strand
ggugacagccgaucugcau

SEQ ID NO: 8410 - RNA, 19 nt, Homo sapiens
  misc_RNA (1)...(19): siRNA sense strand
ggacaaucuguauggcuau

SEQ ID NO: 8411 - RNA, 19 nt, Homo sapiens
  misc_RNA (1)...(19): siRNA sense strand
gcagacaaagugggcugua

SEQ ID NO: 8412 - RNA, 19 nt, Homo sapiens
  misc_RNA (1)...(19): siRNA sense strand
cagagagccaucauccaaa

SEQ ID NO: 8413 - RNA, 19 nt, Homo sapiens
  misc_RNA (1)...(19): siRNA sense strand
ccgcaggguucaacaguac

SEQ ID NO: 8414 - RNA, 19 nt, Homo sapiens
  misc_RNA (1)...(19): siRNA sense strand
cuccaagaaugauguuaug

SEQ ID NO: 8415 - RNA, 19 nt, Homo sapiens
  misc_RNA (1)...(19): siRNA sense strand
gggacaggcaacaugauug

SEQ ID NO: 8416 - RNA, 19 nt, Homo sapiens
  misc_RNA (1)...(19): siRNA sense strand
aaagugccgccuccggaua

SEQ ID NO: 8417 - RNA, 19 nt, Homo sapiens
  misc_RNA (1)...(19): siRNA sense strand
gaaaccaaggguccgagau

SEQ ID NO: 8418 - RNA, 19 nt, Homo sapiens
  misc_RNA (1)...(19): siRNA sense strand
ugguggcacucuucacuga

SEQ ID NO: 8419 - RNA, 19 nt, Homo sapiens
  misc_RNA (1)...(19): siRNA sense strand
gauaucgucgcuacuuaca

SEQ ID NO: 8420 - RNA, 19 nt, Homo sapiens
  misc_RNA (1)...(19): siRNA sense strand
ugggugagcgagaauauug

SEQ ID NO: 8421 - RNA, 19 nt, Homo sapiens
  misc_RNA (1)...(19): siRNA sense strand
ugacggggaugaagaugaa

SEQ ID NO: 8422 - RNA, 19 nt, Homo sapiens
  misc_RNA (1)...(19): siRNA sense strand
ccacccaccacgaguguga

SEQ ID NO: 8423 - RNA, 19 nt, Homo sapiens
  misc_RNA (1)...(19): siRNA sense strand
caaccgcuuugaggaagug

SEQ ID NO: 8424 - RNA, 19 nt, Homo sapiens
  misc_RNA (1)...(19): siRNA sense strand
gcgucagccuccucacguu

SEQ ID NO: 8425 - RNA, 19 nt, Homo sapiens
  misc_RNA (1)...(19): siRNA sense strand
ggccaaccgcuuugaggaa

SEQ ID NO: 8426 - RNA, 19 nt, Homo sapiens
  misc_RNA (1)...(19): siRNA sense strand
ugcgagagaccaucaaguu

SEQ ID NO: 8427 - RNA, 19 nt, Homo sapiens
  misc_RNA (1)...(19): siRNA sense strand
uccaggagcccaacgaaga

SEQ ID NO: 8428 - RNA, 19 nt, Homo sapiens
  misc_RNA (1)...(19): siRNA sense strand
agacaaagugggcuguaau

SEQ ID NO: 8429 - RNA, 19 nt, Homo sapiens
  misc_RNA (1)...(19): siRNA sense strand
ggauaucgucgcuacuuac

SEQ ID NO: 8430 - RNA, 19 nt, Homo sapiens
  misc_RNA (1)...(19): siRNA sense strand
ccgggacaguggugcuaaa

SEQ ID NO: 8431 - RNA, 19 nt, Homo sapiens
  misc_RNA (1)...(19): siRNA sense strand
agacauugcaccccuauaa

SEQ ID NO: 8432 - RNA, 19 nt, Homo sapiens
  misc_RNA (1)...(19): siRNA sense strand
gcucgccuaccuacuucua

SEQ ID NO: 8433 - RNA, 19 nt, Homo sapiens
  misc_RNA (1)...(19): siRNA sense strand
gagaccaucaaguucaugu

SEQ ID NO: 8434 - RNA, 19 nt, Homo sapiens
  misc_RNA (1)...(19): siRNA sense strand
gacaaucuguauggcuauc

SEQ ID NO: 8435 - RNA, 19 nt, Homo sapiens
  misc_RNA (1)...(19): siRNA sense strand
gcuaccacguggccuuugg

SEQ ID NO: 8436 - RNA, 19 nt, Homo sapiens
  misc_RNA (1)...(19): siRNA sense strand
gauaugguggacugucuuc

SEQ ID NO: 8437 - RNA, 19 nt, Homo sapiens
  misc_RNA (1)...(19): siRNA sense strand
gcugggcugugaacuacca

SEQ ID NO: 8438 - RNA, 19 nt, Homo sapiens
  misc_RNA (1)...(19): siRNA sense strand
gugcuaaacccgucauggu

SEQ ID NO: 8439 - RNA, 19 nt, Homo sapiens
  misc_RNA (1)...(19): siRNA sense strand
gugacuacuccacugaauu

SEQ ID NO: 8440 - RNA, 19 nt, Homo sapiens
  misc_RNA (1)...(19): siRNA sense strand
gaaguaaacuggaagauau

SEQ ID NO: 8441 - RNA, 19 nt, Homo sapiens
  misc_RNA (1)...(19): siRNA sense strand
auaaggagcuuguuucaua

SEQ ID NO: 8442 - RNA, 19 nt, Homo sapiens
  misc_RNA (1)...(19): siRNA sense strand
gcaacuacauugaauauca

SEQ ID NO: 8443 - RNA, 19 nt, Homo sapiens
  misc_RNA (1)...(19): siRNA sense strand
uaacuccgguugauaaauu

SEQ ID NO: 8444 - RNA, 19 nt, Homo sapiens
  misc_RNA (1)...(19): siRNA sense strand
gcaacuccuuuacaucaua

SEQ ID NO: 8445 - RNA, 19 nt, Homo sapiens
  misc_RNA (1)...(19): siRNA sense strand
gaaacaaggcaaacacauu

SEQ ID NO: 8446 - RNA, 19 nt, Homo sapiens
  misc_RNA (1)...(19): siRNA sense strand
aaacuacucuggauaaauc

SEQ ID NO: 8447 - RNA, 19 nt, Homo sapiens
  misc_RNA (1)...(19): siRNA sense strand
gaauacaggaucacaguuu

SEQ ID NO: 8448 - RNA, 19 nt, Homo sapiens
  misc_RNA (1)...(19): siRNA sense strand
uauaaucucuccucugcua

SEQ ID NO: 8449 - RNA, 19 nt, Homo sapiens
  misc_RNA (1)...(19): siRNA sense strand
gaaucuuguugacuacaua

SEQ ID NO: 8450 - RNA, 19 nt, Homo sapiens
  misc_RNA (1)...(19): siRNA sense strand
gacaauaccgcuaagcuaa

SEQ ID NO: 8451 - RNA, 19 nt, Homo sapiens
  misc_RNA (1)...(19): siRNA sense strand
ggaagaugauauguuugua

SEQ ID NO: 8452 - RNA, 19 nt, Homo sapiens
  misc_RNA (1)...(19): siRNA sense strand
aaacaaggcaaacacauuu

SEQ ID NO: 8453 - RNA, 19 nt, Homo sapiens
  misc_RNA (1)...(19): siRNA sense strand
ggaggcaacuacauugaau

SEQ ID NO: 8454 - RNA, 19 nt, Homo sapiens
  misc_RNA (1)...(19): siRNA sense strand
gaugaaggagccauaagua

SEQ ID NO: 8455 - RNA, 19 nt, Homo sapiens
  misc_RNA (1)...(19): siRNA sense strand
gacaagaaacuucgagaaa

SEQ ID NO: 8456 - RNA, 19 nt, Homo sapiens
  misc_RNA (1)...(19): siRNA sense strand
gaugaggucaaacgacuua

SEQ ID NO: 8457 - RNA, 19 nt, Homo sapiens
  misc_RNA (1)...(19): siRNA sense strand
gaacauauaaaggcaagaa

SEQ ID NO: 8458 - RNA, 19 nt, Homo sapiens
  misc_RNA (1)...(19): siRNA sense strand
uaaguaugcuuucugacaa

SEQ ID NO: 8459 - RNA, 19 nt, Homo sapiens
  misc_RNA (1)...(19): siRNA sense strand
uaaacaggguuaauuugga

SEQ ID NO: 8460 - RNA, 19 nt, Homo sapiens
  misc_RNA (1)...(19): siRNA sense strand
caucagcuguuaguucuuu

SEQ ID NO: 8461 - RNA, 19 nt, Homo sapiens
  misc_RNA (1)...(19): siRNA sense strand
aaacaggguuaauuuggaa

SEQ ID NO: 8462 - RNA, 19 nt, Homo sapiens
  misc_RNA (1)...(19): siRNA sense strand
cagaaucaguucagcaaga

SEQ ID NO: 8463 - RNA, 19 nt, Homo sapiens
  misc_RNA (1)...(19): siRNA sense strand
cgaaacugaugacuauaga

SEQ ID NO: 8464 - RNA, 19 nt, Homo sapiens
  misc_RNA (1)...(19): siRNA sense strand
ugacagauuuggccaagau

SEQ ID NO: 8465 - RNA, 19 nt, Homo sapiens
  misc_RNA (1)...(19): siRNA sense strand
gagguuguuucuuaucuau

SEQ ID NO: 8466 - RNA, 19 nt, Homo sapiens
  misc_RNA (1)...(19): siRNA sense strand
gccaggaucuucgaaauca

SEQ ID NO: 8467 - RNA, 19 nt, Homo sapiens
  misc_RNA (1)...(19): siRNA sense strand
gcaaacacauuuuauaugg

SEQ ID NO: 8468 - RNA, 19 nt, Homo sapiens
  misc_RNA (1)...(19): siRNA sense strand
uuauggagaugaagucaaa

SEQ ID NO: 8469 - RNA, 19 nt, Homo sapiens
  misc_RNA (1)...(19): siRNA sense strand
gaagaugaaggagccauaa

SEQ ID NO: 8470 - RNA, 19 nt, Homo sapiens
  misc_RNA (1)...(19): siRNA sense strand
ggaaauggaaacuguuaug

SEQ ID NO: 8471 - RNA, 19 nt, Homo sapiens
  misc_RNA (1)...(19): siRNA sense strand
aaacauagauuuggcaacu

SEQ ID NO: 8472 - RNA, 19 nt, Homo sapiens
  misc_RNA (1)...(19): siRNA sense strand
gccauuaacaggccagaua

SEQ ID NO: 8473 - RNA, 19 nt, Homo sapiens
  misc_RNA (1)...(19): siRNA sense strand
caucauacuuggacauauc

SEQ ID NO: 8474 - RNA, 19 nt, Homo sapiens
  misc_RNA (1)...(19): siRNA sense strand
ugacagaaacauagauuug

SEQ ID NO: 8475 - RNA, 19 nt, Homo sapiens
  misc_RNA (1)...(19): siRNA sense strand
gaaacuagacaagaaacuu

SEQ ID NO: 8476 - RNA, 19 nt, Homo sapiens
  misc_RNA (1)...(19): siRNA sense strand
acacggaaauggaaacugu

SEQ ID NO: 8477 - RNA, 19 nt, Homo sapiens
  misc_RNA (1)...(19): siRNA sense strand
uaaggagcuuguuucauau

SEQ ID NO: 8478 - RNA, 19 nt, Homo sapiens
  misc_RNA (1)...(19): siRNA sense strand
cagugaaacuagacaagaa

SEQ ID NO: 8479 - RNA, 19 nt, Homo sapiens
  misc_RNA (1)...(19): siRNA sense strand
gagauccuauuccagaugu

SEQ ID NO: 8480 - RNA, 19 nt, Homo sapiens
  misc_RNA (1)...(19): siRNA sense strand
ugccagaacuccuugagaa

SEQ ID NO: 8481 - RNA, 19 nt, Homo sapiens
  misc_RNA (1)...(19): siRNA sense strand
ggaagaugaaggagccaua

SEQ ID NO: 8482 - RNA, 19 nt, Homo sapiens
  misc_RNA (1)...(19): siRNA sense strand
aaacuguuauggacacuau

SEQ ID NO: 8483 - RNA, 19 nt, Homo sapiens
  misc_RNA (1)...(19): siRNA sense strand
acaggaagaugaggucaaa

SEQ ID NO: 8484 - RNA, 19 nt, Homo sapiens
  misc_RNA (1)...(19): siRNA sense strand
gcucaguucccagaaauaa

SEQ ID NO: 8485 - RNA, 19 nt, Homo sapiens
  misc_RNA (1)...(19): siRNA sense strand
gcaaaacuacucuggauaa

SEQ ID NO: 8486 - RNA, 19 nt, Homo sapiens
  misc_RNA (1)...(19): siRNA sense strand
gcaagaaaauuggauguau

SEQ ID NO: 8487 - RNA, 19 nt, Homo sapiens
  misc_RNA (1)...(19): siRNA sense strand
ggaggaggcaacuacauug

SEQ ID NO: 8488 - RNA, 19 nt, Homo sapiens
  misc_RNA (1)...(19): siRNA sense strand
uaacacaaguagccaaggu

SEQ ID NO: 8489 - RNA, 19 nt, Homo sapiens
  misc_RNA (1)...(19): siRNA sense strand
gcaggaacuccagaagaua

SEQ ID NO: 8490 - RNA, 19 nt, Homo sapiens
  misc_RNA (1)...(19): siRNA sense strand
ggacauaucaagcauuggu

SEQ ID NO: 8491 - RNA, 19 nt, Homo sapiens
  misc_RNA (1)...(19): siRNA sense strand
gcagaaaugguagcaguga

SEQ ID NO: 8492 - RNA, 19 nt, Homo sapiens
  misc_RNA (1)...(19): siRNA sense strand
ucuaagagaugcaagaaac

SEQ ID NO: 8493 - RNA, 19 nt, Homo sapiens
  misc_RNA (1)...(19): siRNA sense strand
gaauaucagaaucuuguug

SEQ ID NO: 8494 - RNA, 19 nt, Homo sapiens
  misc_RNA (1)...(19): siRNA sense strand
agaaguaaacuggaagaua

SEQ ID NO: 8495 - RNA, 19 nt, Homo sapiens
  misc_RNA (1)...(19): siRNA sense strand
cagauuuggccaagauaua

SEQ ID NO: 8496 - RNA, 19 nt, Homo sapiens
  misc_RNA (1)...(19): siRNA sense strand
gggaggaggcaacuacauu

SEQ ID NO: 8497 - RNA, 19 nt, Homo sapiens
  misc_RNA (1)...(19): siRNA sense strand
aggcugauuuggagcaaua

SEQ ID NO: 8498 - RNA, 19 nt, Homo sapiens
  misc_RNA (1)...(19): siRNA sense strand
caagaaacuucgagaaaau

SEQ ID NO: 8499 - RNA, 19 nt, Homo sapiens
  misc_RNA (1)...(19): siRNA sense strand
uggaagauauugcaaaugc

SEQ ID NO: 8500 - RNA, 19 nt, Homo sapiens
  misc_RNA (1)...(19): siRNA sense strand
gcacuaccacuaaaccaau

SEQ ID NO: 8501 - RNA, 19 nt, Homo sapiens
  misc_RNA (1)...(19): siRNA sense strand
caggaacuccagaagauaa

SEQ ID NO: 8502 - RNA, 19 nt, Homo sapiens
  misc_RNA (1)...(19): siRNA sense strand
gcaguauacuuuguaaugc

SEQ ID NO: 8503 - RNA, 19 nt, Homo sapiens
  misc_RNA (1)...(19): siRNA sense strand
ugacaauaccgcuaagcua

SEQ ID NO: 8504 - RNA, 19 nt, Homo sapiens
  misc_RNA (1)...(19): siRNA sense strand
gcagugaaacuagacaaga

SEQ ID NO: 8505 - RNA, 19 nt, Homo sapiens
  misc_RNA (1)...(19): siRNA sense strand
uuucauaucgugccauuaa

SEQ ID NO: 8506 - RNA, 19 nt, Homo sapiens
  misc_RNA (1)...(19): siRNA sense strand
gaucuucgaaaucaacuau

SEQ ID NO: 8507 - RNA, 19 nt, Homo sapiens
  misc_RNA (1)...(19): siRNA sense strand
uaacaggccagauaucaca

SEQ ID NO: 8508 - RNA, 19 nt, Homo sapiens
  misc_RNA (1)...(19): siRNA sense strand
gagcaaaacuacucuggau

SEQ ID NO: 8509 - RNA, 19 nt, Homo sapiens
  misc_RNA (1)...(19): siRNA sense strand
cccagaaguugcagaauca

SEQ ID NO: 8510 - RNA, 19 nt, Homo sapiens
  misc_RNA (1)...(19): siRNA sense strand
ucacagacacggaaaugga

SEQ ID NO: 8511 - RNA, 19 nt, Homo sapiens
  misc_RNA (1)...(19): siRNA sense strand
cagcucaguucccagaaau

SEQ ID NO: 8512 - RNA, 19 nt, Homo sapiens
  misc_RNA (1)...(19): siRNA sense strand
agaaucaguucagcaagaa

SEQ ID NO: 8513 - RNA, 19 nt, Homo sapiens
  misc_RNA (1)...(19): siRNA sense strand
gaaguccauucccagaagu

SEQ ID NO: 8514 - RNA, 19 nt, Homo sapiens
  misc_RNA (1)...(19): siRNA sense strand
gaacagcagcagaaauggu

SEQ ID NO: 8515 - RNA, 19 nt, Homo sapiens
  misc_RNA (1)...(19): siRNA sense strand
gggaaucacucugcaucug

SEQ ID NO: 8516 - RNA, 19 nt, Homo sapiens
  misc_RNA (1)...(19): siRNA sense strand
ugagguuguuucuuaucua

SEQ ID NO: 8517 - RNA, 19 nt, Homo sapiens
  misc_RNA (1)...(19): siRNA sense strand
caauaccgcuaagcuaaca

SEQ ID NO: 8518 - RNA, 19 nt, Homo sapiens
  misc_RNA (1)...(19): siRNA sense strand
ugaaggagcuaagagacau

SEQ ID NO: 8519 - RNA, 19 nt, Homo sapiens
  misc_RNA (1)...(19): siRNA sense strand
ucugcuauuucaagaagua

SEQ ID NO: 8520 - RNA, 19 nt, Homo sapiens
  misc_RNA (1)...(19): siRNA sense strand
caacuacauugaauaucag

SEQ ID NO: 8521 - RNA, 19 nt, Homo sapiens
  misc_RNA (1)...(19): siRNA sense strand
gaggaggcaacuacauuga

SEQ ID NO: 8522 - RNA, 19 nt, Homo sapiens
  misc_RNA (1)...(19): siRNA sense strand
uggcagcacuaccacuaaa

SEQ ID NO: 8523 - RNA, 19 nt, Homo sapiens
  misc_RNA (1)...(19): siRNA sense strand
ucaaacaguggaaggcuuu

SEQ ID NO: 8524 - RNA, 19 nt, Homo sapiens
  misc_RNA (1)...(19): siRNA sense strand
cuggauaaaucucuucuag

SEQ ID NO: 8525 - RNA, 19 nt, Homo sapiens
  misc_RNA (1)...(19): siRNA sense strand
auaaucagauguucaagag

SEQ ID NO: 8526 - RNA, 19 nt, Homo sapiens
  misc_RNA (1)...(19): siRNA sense strand
gaaauggaaacuguuaugg

SEQ ID NO: 8527 - RNA, 19 nt, Homo sapiens
  misc_RNA (1)...(19): siRNA sense strand
cagauguuccugcaguaua

SEQ ID NO: 8528 - RNA, 19 nt, Homo sapiens
  misc_RNA (1)...(19): siRNA sense strand
gaggcaacuacauugaaua

SEQ ID NO: 8529 - RNA, 19 nt, Homo sapiens
  misc_RNA (1)...(19): siRNA sense strand
uaucacgagucaugaauac

SEQ ID NO: 8530 - RNA, 19 nt, Homo sapiens
  misc_RNA (1)...(19): siRNA sense strand
guuauggacacuauaguug

SEQ ID NO: 8531 - RNA, 19 nt, Homo sapiens
  misc_RNA (1)...(19): siRNA sense strand
ggaaacaaggcaaacacau

SEQ ID NO: 8532 - RNA, 19 nt, Homo sapiens
  misc_RNA (1)...(19): siRNA sense strand
aucagaaucuuguugacua

SEQ ID NO: 8533 - RNA, 19 nt, Homo sapiens
  misc_RNA (1)...(19): siRNA sense strand
aauacaggaucacaguuug

SEQ ID NO: 8534 - RNA, 19 nt, Homo sapiens
  misc_RNA (1)...(19): siRNA sense strand
ugcaggaacuccagaagau

SEQ ID NO: 8535 - RNA, 19 nt, Homo sapiens
  misc_RNA (1)...(19): siRNA sense strand
ccagaggcccuuauuaguc

SEQ ID NO: 8536 - RNA, 19 nt, Homo sapiens
  misc_RNA (1)...(19): siRNA sense strand
cagaaaugguagcagugaa

SEQ ID NO: 8537 - RNA, 19 nt, Homo sapiens
  misc_RNA (1)...(19): siRNA sense strand
gugccaggaucuucgaaau

SEQ ID NO: 8538 - RNA, 19 nt, Homo sapiens
  misc_RNA (1)...(19): siRNA sense strand
gaaguugcagaaucaguuc

SEQ ID NO: 8539 - RNA, 19 nt, Homo sapiens
  misc_RNA (1)...(19): siRNA sense strand
caaaauaaggagcuuguuu

SEQ ID NO: 8540 - RNA, 19 nt, Homo sapiens
  misc_RNA (1)...(19): siRNA sense strand
gaaguaaacuggaagauau

SEQ ID NO: 8541 - RNA, 19 nt, Homo sapiens
  misc_RNA (1)...(19): siRNA sense strand
auaaggagcuuguuucaua

SEQ ID NO: 8542 - RNA, 19 nt, Homo sapiens
  misc_RNA (1)...(19): siRNA sense strand
gcaacuacauugaauauca

SEQ ID NO: 8543 - RNA, 19 nt, Homo sapiens
  misc_RNA (1)...(19): siRNA sense strand
uaacuccgguugauaaauu

SEQ ID NO: 8544 - RNA, 19 nt, Homo sapiens
  misc_RNA (1)...(19): siRNA sense strand
gcaacuccuuuacaucaua

SEQ ID NO: 8545 - RNA, 19 nt, Homo sapiens
  misc_RNA (1)...(19): siRNA sense strand
gaaacaaggcaaacacauu

SEQ ID NO: 8546 - RNA, 19 nt, Homo sapiens
  misc_RNA (1)...(19): siRNA sense strand
aaacuacucuggauaaauc

SEQ ID NO: 8547 - RNA, 19 nt, Homo sapiens
  misc_RNA (1)...(19): siRNA sense strand
gaauacaggaucacaguuu

SEQ ID NO: 8548 - RNA, 19 nt, Homo sapiens
  misc_RNA (1)...(19): siRNA sense strand
gaaucuuguugacuacaua

SEQ ID NO: 8549 - RNA, 19 nt, Homo sapiens
  misc_RNA (1)...(19): siRNA sense strand
gacaauaccgcuaagcuaa

SEQ ID NO: 8550 - RNA, 19 nt, Homo sapiens
  misc_RNA (1)...(19): siRNA sense strand
ggaagaugauauguuugua

SEQ ID NO: 8551 - RNA, 19 nt, Homo sapiens
  misc_RNA (1)...(19): siRNA sense strand
aaacaaggcaaacacauuu

SEQ ID NO: 8552 - RNA, 19 nt, Homo sapiens
  misc_RNA (1)...(19): siRNA sense strand
ggaggcaacuacauugaau

SEQ ID NO: 8553 - RNA, 19 nt, Homo sapiens
  misc_RNA (1)...(19): siRNA sense strand
gaugaaggagccauaagua

SEQ ID NO: 8554 - RNA, 19 nt, Homo sapiens
  misc_RNA (1)...(19): siRNA sense strand
gacaagaaacuucgagaaa

SEQ ID NO: 8555 - RNA, 19 nt, Homo sapiens
  misc_RNA (1)...(19): siRNA sense strand
gaugaggucaaacgacuua

SEQ ID NO: 8556 - RNA, 19 nt, Homo sapiens
  misc_RNA (1)...(19): siRNA sense strand
gaacauauaaaggcaagaa

SEQ ID NO: 8557 - RNA, 19 nt, Homo sapiens
  misc_RNA (1)...(19): siRNA sense strand
uaaguaugcuuucugacaa

SEQ ID NO: 8558 - RNA, 19 nt, Homo sapiens
  misc_RNA (1)...(19): siRNA sense strand
uaaacaggguuaauuugga

SEQ ID NO: 8559 - RNA, 19 nt, Homo sapiens
  misc_RNA (1)...(19): siRNA sense strand
caucagcuguuaguucuuu

SEQ ID NO: 8560 - RNA, 19 nt, Homo sapiens
  misc_RNA (1)...(19): siRNA sense strand
aaacaggguuaauuuggaa

SEQ ID NO: 8561 - RNA, 19 nt, Homo sapiens
  misc_RNA (1)...(19): siRNA sense strand
cagaaucaguucagcaaga

SEQ ID NO: 8562 - RNA, 19 nt, Homo sapiens
  misc_RNA (1)...(19): siRNA sense strand
cgaaacugaugacuauaga

SEQ ID NO: 8563 - RNA, 19 nt, Homo sapiens
  misc_RNA (1)...(19): siRNA sense strand
gagguuguuucuuaucuau

SEQ ID NO: 8564 - RNA, 19 nt, Homo sapiens
  misc_RNA (1)...(19): siRNA sense strand
gccaggaucuucgaaauca

SEQ ID NO: 8565 - RNA, 19 nt, Homo sapiens
  misc_RNA (1)...(19): siRNA sense strand
gcaaacacauuuuauaugg

SEQ ID NO: 8566 - RNA, 19 nt, Homo sapiens
  misc_RNA (1)...(19): siRNA sense strand
uuauggagaugaagucaaa

SEQ ID NO: 8567 - RNA, 19 nt, Homo sapiens
  misc_RNA (1)...(19): siRNA sense strand
gaagaugaaggagccauaa

SEQ ID NO: 8568 - RNA, 19 nt, Homo sapiens
  misc_RNA (1)...(19): siRNA sense strand
ggaaauggaaacuguuaug

SEQ ID NO: 8569 - RNA, 19 nt, Homo sapiens
  misc_RNA (1)...(19): siRNA sense strand
aaacauagauuuggcaacu

SEQ ID NO: 8570 - RNA, 19 nt, Homo sapiens
  misc_RNA (1)...(19): siRNA sense strand
gccauuaacaggccagaua

SEQ ID NO: 8571 - RNA, 19 nt, Homo sapiens
  misc_RNA (1)...(19): siRNA sense strand
caucauacuuggacauauc

SEQ ID NO: 8572 - RNA, 19 nt, Homo sapiens
  misc_RNA (1)...(19): siRNA sense strand
ugacagaaacauagauuug

SEQ ID NO: 8573 - RNA, 19 nt, Homo sapiens
  misc_RNA (1)...(19): siRNA sense strand
gaaacuagacaagaaacuu

SEQ ID NO: 8574 - RNA, 19 nt, Homo sapiens
  misc_RNA (1)...(19): siRNA sense strand
acacggaaauggaaacugu

SEQ ID NO: 8575 - RNA, 19 nt, Homo sapiens
  misc_RNA (1)...(19): siRNA sense strand
uaaggagcuuguuucauau

SEQ ID NO: 8576 - RNA, 19 nt, Homo sapiens
  misc_RNA (1)...(19): siRNA sense strand
cagugaaacuagacaagaa

SEQ ID NO: 8577 - RNA, 19 nt, Homo sapiens
  misc_RNA (1)...(19): siRNA sense strand
aaacuguuauggacacuau

SEQ ID NO: 8578 - RNA, 19 nt, Homo sapiens
  misc_RNA (1)...(19): siRNA sense strand
ugccagaacuccuugagaa

SEQ ID NO: 8579 - RNA, 19 nt, Homo sapiens
  misc_RNA (1)...(19): siRNA sense strand
gagauccuauuccagaugu

SEQ ID NO: 8580 - RNA, 19 nt, Homo sapiens
  misc_RNA (1)...(19): siRNA sense strand
ggaagaugaaggagccaua

SEQ ID NO: 8581 - RNA, 19 nt, Homo sapiens
  misc_RNA (1)...(19): siRNA sense strand
acaggaagaugaggucaaa

SEQ ID NO: 8582 - RNA, 19 nt, Homo sapiens
  misc_RNA (1)...(19): siRNA sense strand
gcucaguucccagaaauaa

SEQ ID NO: 8583 - RNA, 19 nt, Homo sapiens
  misc_RNA (1)...(19): siRNA sense strand
gcaaaacuacucuggauaa

SEQ ID NO: 8584 - RNA, 19 nt, Homo sapiens
  misc_RNA (1)...(19): siRNA sense strand
gcaagaaaauuggauguau

SEQ ID NO: 8585 - RNA, 19 nt, Homo sapiens
  misc_RNA (1)...(19): siRNA sense strand
ggaggaggcaacuacauug

SEQ ID NO: 8586 - RNA, 19 nt, Homo sapiens
  misc_RNA (1)...(19): siRNA sense strand
uaacacaaguagccaaggu

SEQ ID NO: 8587 - RNA, 19 nt, Homo sapiens
  misc_RNA (1)...(19): siRNA sense strand
gcaggaacuccagaagaua

SEQ ID NO: 8588 - RNA, 19 nt, Homo sapiens
  misc_RNA (1)...(19): siRNA sense strand
ggacauaucaagcauuggu

SEQ ID NO: 8589 - RNA, 19 nt, Homo sapiens
  misc_RNA (1)...(19): siRNA sense strand
gcagaaaugguagcaguga

SEQ ID NO: 8590 - RNA, 19 nt, Homo sapiens
  misc_RNA (1)...(19): siRNA sense strand
ucuaagagaugcaagaaac

SEQ ID NO: 8591 - RNA, 19 nt, Homo sapiens
  misc_RNA (1)...(19): siRNA sense strand
gaauaucagaaucuuguug

SEQ ID NO: 8592 - RNA, 19 nt, Homo sapiens
  misc_RNA (1)...(19): siRNA sense strand
agaaguaaacuggaagaua

SEQ ID NO: 8593 - RNA, 19 nt, Homo sapiens
  misc_RNA (1)...(19): siRNA sense strand
gggaggaggcaacuacauu

SEQ ID NO: 8594 - RNA, 19 nt, Homo sapiens
  misc_RNA (1)...(19): siRNA sense strand
aggcugauuuggagcaaua

SEQ ID NO: 8595 - RNA, 19 nt, Homo sapiens
  misc_RNA (1)...(19): siRNA sense strand
caagaaacuucgagaaaau

SEQ ID NO: 8596 - RNA, 19 nt, Homo sapiens
  misc_RNA (1)...(19): siRNA sense strand
uggaagauauugcaaaugc

SEQ ID NO: 8597 - RNA, 19 nt, Homo sapiens
  misc_RNA (1)...(19): siRNA sense strand
gcacuaccacuaaaccaau

SEQ ID NO: 8598 - RNA, 19 nt, Homo sapiens
  misc_RNA (1)...(19): siRNA sense strand
caggaacuccagaagauaa

SEQ ID NO: 8599 - RNA, 19 nt, Homo sapiens
  misc_RNA (1)...(19): siRNA sense strand
gaucuucgaaaucaacuau

SEQ ID NO: 8600 - RNA, 19 nt, Homo sapiens
  misc_RNA (1)...(19): siRNA sense strand
ugacaauaccgcuaagcua

SEQ ID NO: 8601 - RNA, 19 nt, Homo sapiens
  misc_RNA (1)...(19): siRNA sense strand
gcagugaaacuagacaaga

SEQ ID NO: 8602 - RNA, 19 nt, Homo sapiens
  misc_RNA (1)...(19): siRNA sense strand
gcaguauacuuuguaaugc

SEQ ID NO: 8603 - RNA, 19 nt, Homo sapiens
  misc_RNA (1)...(19): siRNA sense strand
uuucauaucgugccauuaa

SEQ ID NO: 8604 - RNA, 19 nt, Homo sapiens
  misc_RNA (1)...(19): siRNA sense strand
uaacaggccagauaucaca

SEQ ID NO: 8605 - RNA, 19 nt, Homo sapiens
  misc_RNA (1)...(19): siRNA sense strand
gagcaaaacuacucuggau

SEQ ID NO: 8606 - RNA, 19 nt, Homo sapiens
  misc_RNA (1)...(19): siRNA sense strand
cccagaaguugcagaauca

SEQ ID NO: 8607 - RNA, 19 nt, Homo sapiens
  misc_RNA (1)...(19): siRNA sense strand
ucacagacacggaaaugga

SEQ ID NO: 8608 - RNA, 19 nt, Homo sapiens
  misc_RNA (1)...(19): siRNA sense strand
cagcucaguucccagaaau

SEQ ID NO: 8609 - RNA, 19 nt, Homo sapiens
  misc_RNA (1)...(19): siRNA sense strand
agaaucaguucagcaagaa

SEQ ID NO: 8610 - RNA, 19 nt, Homo sapiens
  misc_RNA (1)...(19): siRNA sense strand
gaaguccauucccagaagu

SEQ ID NO: 8611 - RNA, 19 nt, Homo sapiens
  misc_RNA (1)...(19): siRNA sense strand
gaacagcagcagaaauggu

SEQ ID NO: 8612 - RNA, 19 nt, Homo sapiens
  misc_RNA (1)...(19): siRNA sense strand
ugagguuguuucuuaucua

SEQ ID NO: 8613 - RNA, 19 nt, Homo sapiens
  misc_RNA (1)...(19): siRNA sense strand
caauaccgcuaagcuaaca

SEQ ID NO: 8614 - RNA, 19 nt, Homo sapiens
  misc_RNA (1)...(19): siRNA sense strand
gggaaucacucugcaucug

SEQ ID NO: 8615 - RNA, 19 nt, Homo sapiens
  misc_RNA (1)...(19): siRNA sense strand
gaaauggaaacuguuaugg

SEQ ID NO: 8616 - RNA, 19 nt, Homo sapiens
  misc_RNA (1)...(19): siRNA sense strand
caacuacauugaauaucag

SEQ ID NO: 8617 - RNA, 19 nt, Homo sapiens
  misc_RNA (1)...(19): siRNA sense strand
gaggaggcaacuacauuga

SEQ ID NO: 8618 - RNA, 19 nt, Homo sapiens
  misc_RNA (1)...(19): siRNA sense strand
uggcagcacuaccacuaaa

SEQ ID NO: 8619 - RNA, 19 nt, Homo sapiens
  misc_RNA (1)...(19): siRNA sense strand
ucaaacaguggaaggcuuu

SEQ ID NO: 8620 - RNA, 19 nt, Homo sapiens
  misc_RNA (1)...(19): siRNA sense strand
cuggauaaaucucuucuag

SEQ ID NO: 8621 - RNA, 19 nt, Homo sapiens
  misc_RNA (1)...(19): siRNA sense strand
ucugcuauuucaagaagua

SEQ ID NO: 8622 - RNA, 19 nt, Homo sapiens
  misc_RNA (1)...(19): siRNA sense strand
auaaucagauguucaagag

SEQ ID NO: 8623 - RNA, 19 nt, Homo sapiens
  misc_RNA (1)...(19): siRNA sense strand
cagauguuccugcaguaua

SEQ ID NO: 8624 - RNA, 19 nt, Homo sapiens
  misc_RNA (1)...(19): siRNA sense strand
gaggcaacuacauugaaua

SEQ ID NO: 8625 - RNA, 19 nt, Homo sapiens
  misc_RNA (1)...(19): siRNA sense strand
uaucacgagucaugaauac

SEQ ID NO: 8626 - RNA, 19 nt, Homo sapiens
  misc_RNA (1)...(19): siRNA sense strand
guuauggacacuauaguug

SEQ ID NO: 8627 - RNA, 19 nt, Homo sapiens
  misc_RNA (1)...(19): siRNA sense strand
ggaaacaaggcaaacacau

SEQ ID NO: 8628 - RNA, 19 nt, Homo sapiens
  misc_RNA (1)...(19): siRNA sense strand
aucagaaucuuguugacua

SEQ ID NO: 8629 - RNA, 19 nt, Homo sapiens
  misc_RNA (1)...(19): siRNA sense strand
aauacaggaucacaguuug

SEQ ID NO: 8630 - RNA, 19 nt, Homo sapiens
  misc_RNA (1)...(19): siRNA sense strand
ugcaggaacuccagaagau

SEQ ID NO: 8631 - RNA, 19 nt, Homo sapiens
  misc_RNA (1)...(19): siRNA sense strand
ccagaggcccuuauuaguc

SEQ ID NO: 8632 - RNA, 19 nt, Homo sapiens
  misc_RNA (1)...(19): siRNA sense strand
cagaaaugguagcagugaa

SEQ ID NO: 8633 - RNA, 19 nt, Homo sapiens
  misc_RNA (1)...(19): siRNA sense strand
caaaauaaggagcuuguuu

SEQ ID NO: 8634 - RNA, 19 nt, Homo sapiens
  misc_RNA (1)...(19): siRNA sense strand
gugccaggaucuucgaaau

SEQ ID NO: 8635 - RNA, 19 nt, Homo sapiens
  misc_RNA (1)...(19): siRNA sense strand
gaaguugcagaaucaguuc

SEQ ID NO: 8636 - RNA, 19 nt, Homo sapiens
  misc_RNA (1)...(19): siRNA sense strand
agaaaugguagcagugaaa

SEQ ID NO: 8637 - RNA, 19 nt, Homo sapiens
  misc_RNA (1)...(19): siRNA sense strand
cagcaaaaucuaccuguua

SEQ ID NO: 8638 - RNA, 19 nt, Homo sapiens
  misc_RNA (1)...(19): siRNA sense strand
ggugcuagaccaaagagaa

SEQ ID NO: 8639 - RNA, 19 nt, Homo sapiens
  misc_RNA (1)...(19): siRNA sense strand
acaagaaacuucgagaaaa

SEQ ID NO: 8640 - RNA, 19 nt, Homo sapiens
  misc_RNA (1)...(19): siRNA sense strand
gaaguaaacuggaagauau

SEQ ID NO: 8641 - RNA, 19 nt, Homo sapiens
  misc_RNA (1)...(19): siRNA sense strand
auaaggagcuuguuucaua

SEQ ID NO: 8642 - RNA, 19 nt, Homo sapiens
  misc_RNA (1)...(19): siRNA sense strand
gcaacuacauugaauauca

SEQ ID NO: 8643 - RNA, 19 nt, Homo sapiens
  misc_RNA (1)...(19): siRNA sense strand
uaacuccgguugauaaauu

SEQ ID NO: 8644 - RNA, 19 nt, Homo sapiens
  misc_RNA (1)...(19): siRNA sense strand
gcaacuccuuuacaucaua

SEQ ID NO: 8645 - RNA, 19 nt, Homo sapiens
  misc_RNA (1)...(19): siRNA sense strand
gaaacaaggcaaacacauu

SEQ ID NO: 8646 - RNA, 19 nt, Homo sapiens
  misc_RNA (1)...(19): siRNA sense strand
aaacuacucuggauaaauc

SEQ ID NO: 8647 - RNA, 19 nt, Homo sapiens
  misc_RNA (1)...(19): siRNA sense strand
gaauacaggaucacaguuu

SEQ ID NO: 8648 - RNA, 19 nt, Homo sapiens
  misc_RNA (1)...(19): siRNA sense strand
uauaaucucuccucugcua

SEQ ID NO: 8649 - RNA, 19 nt, Homo sapiens
  misc_RNA (1)...(19): siRNA sense strand
gaaucuuguugacuacaua

SEQ ID NO: 8650 - RNA, 19 nt, Homo sapiens
  misc_RNA (1)...(19): siRNA sense strand
gacaauaccgcuaagcuaa

SEQ ID NO: 8651 - RNA, 19 nt, Homo sapiens
  misc_RNA (1)...(19): siRNA sense strand
ggaagaugauauguuugua

SEQ ID NO: 8652 - RNA, 19 nt, Homo sapiens
  misc_RNA (1)...(19): siRNA sense strand
aaacaaggcaaacacauuu

SEQ ID NO: 8653 - RNA, 19 nt, Homo sapiens
  misc_RNA (1)...(19): siRNA sense strand
ggaggcaacuacauugaau

SEQ ID NO: 8654 - RNA, 19 nt, Homo sapiens
  misc_RNA (1)...(19): siRNA sense strand
gaugaaggagccauaagua

SEQ ID NO: 8655 - RNA, 19 nt, Homo sapiens
  misc_RNA (1)...(19): siRNA sense strand
gacaagaaacuucgagaaa

SEQ ID NO: 8656 - RNA, 19 nt, Homo sapiens
  misc_RNA (1)...(19): siRNA sense strand
gaugaggucaaacgacuua

SEQ ID NO: 8657 - RNA, 19 nt, Homo sapiens
  misc_RNA (1)...(19): siRNA sense strand
gaacauauaaaggcaagaa

SEQ ID NO: 8658 - RNA, 19 nt, Homo sapiens
  misc_RNA (1)...(19): siRNA sense strand
uaaguaugcuuucugacaa

SEQ ID NO: 8659 - RNA, 19 nt, Homo sapiens
  misc_RNA (1)...(19): siRNA sense strand
uaaacaggguuaauuugga

SEQ ID NO: 8660 - RNA, 19 nt, Homo sapiens
  misc_RNA (1)...(19): siRNA sense strand
caucagcuguuaguucuuu

SEQ ID NO: 8661 - RNA, 19 nt, Homo sapiens
  misc_RNA (1)...(19): siRNA sense strand
aaacaggguuaauuuggaa

SEQ ID NO: 8662 - RNA, 19 nt, Homo sapiens
  misc_RNA (1)...(19): siRNA sense strand
cagaaucaguucagcaaga

SEQ ID NO: 8663 - RNA, 19 nt, Homo sapiens
  misc_RNA (1)...(19): siRNA sense strand
cgaaacugaugacuauaga

SEQ ID NO: 8664 - RNA, 19 nt, Homo sapiens
  misc_RNA (1)...(19): siRNA sense strand
ugacagauuuggccaagau

SEQ ID NO: 8665 - RNA, 19 nt, Homo sapiens
  misc_RNA (1)...(19): siRNA sense strand
gagguuguuucuuaucuau

SEQ ID NO: 8666 - RNA, 19 nt, Homo sapiens
  misc_RNA (1)...(19): siRNA sense strand
gccaggaucuucgaaauca

SEQ ID NO: 8667 - RNA, 19 nt, Homo sapiens
  misc_RNA (1)...(19): siRNA sense strand
gcaaacacauuuuauaugg

SEQ ID NO: 8668 - RNA, 19 nt, Homo sapiens
  misc_RNA (1)...(19): siRNA sense strand
uuauggagaugaagucaaa

SEQ ID NO: 8669 - RNA, 19 nt, Homo sapiens
  misc_RNA (1)...(19): siRNA sense strand
gaagaugaaggagccauaa

SEQ ID NO: 8670 - RNA, 19 nt, Homo sapiens
  misc_RNA (1)...(19): siRNA sense strand
ggaaauggaaacuguuaug

SEQ ID NO: 8671 - RNA, 19 nt, Homo sapiens
  misc_RNA (1)...(19): siRNA sense strand
aaacauagauuuggcaacu

SEQ ID NO: 8672 - RNA, 19 nt, Homo sapiens
  misc_RNA (1)...(19): siRNA sense strand
gccauuaacaggccagaua

SEQ ID NO: 8673 - RNA, 19 nt, Homo sapiens
  misc_RNA (1)...(19): siRNA sense strand
caucauacuuggacauauc

SEQ ID NO: 8674 - RNA, 19 nt, Homo sapiens
  misc_RNA (1)...(19): siRNA sense strand
ugacagaaacauagauuug

SEQ ID NO: 8675 - RNA, 19 nt, Homo sapiens
  misc_RNA (1)...(19): siRNA sense strand
gaaacuagacaagaaacuu

SEQ ID NO: 8676 - RNA, 19 nt, Homo sapiens
  misc_RNA (1)...(19): siRNA sense strand
acacggaaauggaaacugu

SEQ ID NO: 8677 - RNA, 19 nt, Homo sapiens
  misc_RNA (1)...(19): siRNA sense strand
uaaggagcuuguuucauau

SEQ ID NO: 8678 - RNA, 19 nt, Homo sapiens
  misc_RNA (1)...(19): siRNA sense strand
cagugaaacuagacaagaa

SEQ ID NO: 8679 - RNA, 19 nt, Homo sapiens
  misc_RNA (1)...(19): siRNA sense strand
gagauccuauuccagaugu

SEQ ID NO: 8680 - RNA, 19 nt, Homo sapiens
  misc_RNA (1)...(19): siRNA sense strand
ugccagaacuccuugagaa

SEQ ID NO: 8681 - RNA, 19 nt, Homo sapiens
  misc_RNA (1)...(19): siRNA sense strand
ggaagaugaaggagccaua

SEQ ID NO: 8682 - RNA, 19 nt, Homo sapiens
  misc_RNA (1)...(19): siRNA sense strand
aaacuguuauggacacuau

SEQ ID NO: 8683 - RNA, 19 nt, Homo sapiens
  misc_RNA (1)...(19): siRNA sense strand
acaggaagaugaggucaaa

SEQ ID NO: 8684 - RNA, 19 nt, Homo sapiens
  misc_RNA (1)...(19): siRNA sense strand
gcucaguucccagaaauaa

SEQ ID NO: 8685 - RNA, 19 nt, Homo sapiens
  misc_RNA (1)...(19): siRNA sense strand
gcaaaacuacucuggauaa

SEQ ID NO: 8686 - RNA, 19 nt, Homo sapiens
  misc_RNA (1)...(19): siRNA sense strand
gcaagaaaauuggauguau

SEQ ID NO: 8687 - RNA, 19 nt, Homo sapiens
  misc_RNA (1)...(19): siRNA sense strand
ggaggaggcaacuacauug

SEQ ID NO: 8688 - RNA, 19 nt, Homo sapiens
  misc_RNA (1)...(19): siRNA sense strand
uaacacaaguagccaaggu

SEQ ID NO: 8689 - RNA, 19 nt, Homo sapiens
  misc_RNA (1)...(19): siRNA sense strand
gcaggaacuccagaagaua

SEQ ID NO: 8690 - RNA, 19 nt, Homo sapiens
  misc_RNA (1)...(19): siRNA sense strand
ggacauaucaagcauuggu

SEQ ID NO: 8691 - RNA, 19 nt, Homo sapiens
  misc_RNA (1)...(19): siRNA sense strand
gcagaaaugguagcaguga

SEQ ID NO: 8692 - RNA, 19 nt, Homo sapiens
  misc_RNA (1)...(19): siRNA sense strand
ucuaagagaugcaagaaac

SEQ ID NO: 8693 - RNA, 19 nt, Homo sapiens
  misc_RNA (1)...(19): siRNA sense strand
gaauaucagaaucuuguug

SEQ ID NO: 8694 - RNA, 19 nt, Homo sapiens
  misc_RNA (1)...(19): siRNA sense strand
agaaguaaacuggaagaua

SEQ ID NO: 8695 - RNA, 19 nt, Homo sapiens
  misc_RNA (1)...(19): siRNA sense strand
cagauuuggccaagauaua

SEQ ID NO: 8696 - RNA, 19 nt, Homo sapiens
  misc_RNA (1)...(19): siRNA sense strand
gggaggaggcaacuacauu

SEQ ID NO: 8697 - RNA, 19 nt, Homo sapiens
  misc_RNA (1)...(19): siRNA sense strand
aggcugauuuggagcaaua

SEQ ID NO: 8698 - RNA, 19 nt, Homo sapiens
  misc_RNA (1)...(19): siRNA sense strand
caagaaacuucgagaaaau

SEQ ID NO: 8699 - RNA, 19 nt, Homo sapiens
  misc_RNA (1)...(19): siRNA sense strand
uggaagauauugcaaaugc

SEQ ID NO: 8700 - RNA, 19 nt, Homo sapiens
  misc_RNA (1)...(19): siRNA sense strand
gcacuaccacuaaaccaau

SEQ ID NO: 8701 - RNA, 19 nt, Homo sapiens
  misc_RNA (1)...(19): siRNA sense strand
caggaacuccagaagauaa

SEQ ID NO: 8702 - RNA, 19 nt, Homo sapiens
  misc_RNA (1)...(19): siRNA sense strand
gcaguauacuuuguaaugc

SEQ ID NO: 8703 - RNA, 19 nt, Homo sapiens
  misc_RNA (1)...(19): siRNA sense strand
ugacaauaccgcuaagcua

SEQ ID NO: 8704 - RNA, 19 nt, Homo sapiens
  misc_RNA (1)...(19): siRNA sense strand
gcagugaaacuagacaaga

SEQ ID NO: 8705 - RNA, 19 nt, Homo sapiens
  misc_RNA (1)...(19): siRNA sense strand
uuucauaucgugccauuaa

SEQ ID NO: 8706 - RNA, 19 nt, Homo sapiens
  misc_RNA (1)...(19): siRNA sense strand
gaucuucgaaaucaacuau

SEQ ID NO: 8707 - RNA, 19 nt, Homo sapiens
  misc_RNA (1)...(19): siRNA sense strand
uaacaggccagauaucaca

SEQ ID NO: 8708 - RNA, 19 nt, Homo sapiens
  misc_RNA (1)...(19): siRNA sense strand
gagcaaaacuacucuggau

SEQ ID NO: 8709 - RNA, 19 nt, Homo sapiens
  misc_RNA (1)...(19): siRNA sense strand
cccagaaguugcagaauca

SEQ ID NO: 8710 - RNA, 19 nt, Homo sapiens
  misc_RNA (1)...(19): siRNA sense strand
ucacagacacggaaaugga

SEQ ID NO: 8711 - RNA, 19 nt, Homo sapiens
  misc_RNA (1)...(19): siRNA sense strand
cagcucaguucccagaaau

SEQ ID NO: 8712 - RNA, 19 nt, Homo sapiens
  misc_RNA (1)...(19): siRNA sense strand
agaaucaguucagcaagaa

SEQ ID NO: 8713 - RNA, 19 nt, Homo sapiens
  misc_RNA (1)...(19): siRNA sense strand
gaaguccauucccagaagu

SEQ ID NO: 8714 - RNA, 19 nt, Homo sapiens
  misc_RNA (1)...(19): siRNA sense strand
gaacagcagcagaaauggu

SEQ ID NO: 8715 - RNA, 19 nt, Homo sapiens
  misc_RNA (1)...(19): siRNA sense strand
gggaaucacucugcaucug

SEQ ID NO: 8716 - RNA, 19 nt, Homo sapiens
  misc_RNA (1)...(19): siRNA sense strand
ugagguuguuucuuaucua

SEQ ID NO: 8717 - RNA, 19 nt, Homo sapiens
  misc_RNA (1)...(19): siRNA sense strand
caauaccgcuaagcuaaca

SEQ ID NO: 8718 - RNA, 19 nt, Homo sapiens
  misc_RNA (1)...(19): siRNA sense strand
ugaaggagcuaagagacau

SEQ ID NO: 8719 - RNA, 19 nt, Homo sapiens
  misc_RNA (1)...(19): siRNA sense strand
ucugcuauuucaagaagua

SEQ ID NO: 8720 - RNA, 19 nt, Homo sapiens
  misc_RNA (1)...(19): siRNA sense strand
caacuacauugaauaucag

SEQ ID NO: 8721 - RNA, 19 nt, Homo sapiens
  misc_RNA (1)...(19): siRNA sense strand
gaggaggcaacuacauuga

SEQ ID NO: 8722 - RNA, 19 nt, Homo sapiens
  misc_RNA (1)...(19): siRNA sense strand
uggcagcacuaccacuaaa

SEQ ID NO: 8723 - RNA, 19 nt, Homo sapiens
  misc_RNA (1)...(19): siRNA sense strand
ucaaacaguggaaggcuuu

SEQ ID NO: 8724 - RNA, 19 nt, Homo sapiens
  misc_RNA (1)...(19): siRNA sense strand
cuggauaaaucucuucuag

SEQ ID NO: 8725 - RNA, 19 nt, Homo sapiens
  misc_RNA (1)...(19): siRNA sense strand
auaaucagauguucaagag

SEQ ID NO: 8726 - RNA, 19 nt, Homo sapiens
  misc_RNA (1)...(19): siRNA sense strand
gaaauggaaacuguuaugg

SEQ ID NO: 8727 - RNA, 19 nt, Homo sapiens
  misc_RNA (1)...(19): siRNA sense strand
cagauguuccugcaguaua

SEQ ID NO: 8728 - RNA, 19 nt, Homo sapiens
  misc_RNA (1)...(19): siRNA sense strand
gaggcaacuacauugaaua

SEQ ID NO: 8729 - RNA, 19 nt, Homo sapiens
  misc_RNA (1)...(19): siRNA sense strand
uaucacgagucaugaauac

SEQ ID NO: 8730 - RNA, 19 nt, Homo sapiens
  misc_RNA (1)...(19): siRNA sense strand
guuauggacacuauaguug

SEQ ID NO: 8731 - RNA, 19 nt, Homo sapiens
  misc_RNA (1)...(19): siRNA sense strand
ggaaacaaggcaaacacau

SEQ ID NO: 8732 - RNA, 19 nt, Homo sapiens
  misc_RNA (1)...(19): siRNA sense strand
aucagaaucuuguugacua

SEQ ID NO: 8733 - RNA, 19 nt, Homo sapiens
  misc_RNA (1)...(19): siRNA sense strand
aauacaggaucacaguuug

SEQ ID NO: 8734 - RNA, 19 nt, Homo sapiens
  misc_RNA (1)...(19): siRNA sense strand
ugcaggaacuccagaagau

SEQ ID NO: 8735 - RNA, 19 nt, Homo sapiens
  misc_RNA (1)...(19): siRNA sense strand
ccagaggcccuuauuaguc

SEQ ID NO: 8736 - RNA, 19 nt, Homo sapiens
  misc_RNA (1)...(19): siRNA sense strand
cagaaaugguagcagugaa

SEQ ID NO: 8737 - RNA, 19 nt, Homo sapiens
  misc_RNA (1)...(19): siRNA sense strand
gugccaggaucuucgaaau

SEQ ID NO: 8738 - RNA, 19 nt, Homo sapiens
  misc_RNA (1)...(19): siRNA sense strand
gaaguugcagaaucaguuc

SEQ ID NO: 8739 - RNA, 19 nt, Homo sapiens
  misc_RNA (1)...(19): siRNA sense strand
caaaauaaggagcuuguuu

SEQ ID NO: 8740 - RNA, 19 nt, Homo sapiens
  misc_RNA (1)...(19): siRNA sense strand
gaacacaccucuuucucua

SEQ ID NO: 8741 - RNA, 19 nt, Homo sapiens
  misc_RNA (1)...(19): siRNA sense strand
gguggagacuuaauauuua

SEQ ID NO: 8742 - RNA, 19 nt, Homo sapiens
  misc_RNA (1)...(19): siRNA sense strand
gagcaggaguucuauguug

SEQ ID NO: 8743 - RNA, 19 nt, Homo sapiens
  misc_RNA (1)...(19): siRNA sense strand
gcaccaaccucaccuguca

SEQ ID NO: 8744 - RNA, 19 nt, Homo sapiens
  misc_RNA (1)...(19): siRNA sense strand
gaaugaaacuccaucucaa

SEQ ID NO: 8745 - RNA, 19 nt, Homo sapiens
  misc_RNA (1)...(19): siRNA sense strand
gaagguaaaucccagagau

SEQ ID NO: 8746 - RNA, 19 nt, Homo sapiens
  misc_RNA (1)...(19): siRNA sense strand
gaaaugagccguagaccau

SEQ ID NO: 8747 - RNA, 19 nt, Homo sapiens
  misc_RNA (1)...(19): siRNA sense strand
gaucaucacuuagucaaga

SEQ ID NO: 8748 - RNA, 19 nt, Homo sapiens
  misc_RNA (1)...(19): siRNA sense strand
gcucacaccuguaaucuca

SEQ ID NO: 8749 - RNA, 19 nt, Homo sapiens
  misc_RNA (1)...(19): siRNA sense strand
caacucugcugcuguagaa

SEQ ID NO: 8750 - RNA, 19 nt, Homo sapiens
  misc_RNA (1)...(19): siRNA sense strand
gaaagggugucaugcauac

SEQ ID NO: 8751 - RNA, 19 nt, Homo sapiens
  misc_RNA (1)...(19): siRNA sense strand
gagaaucaaagucgaauuu

SEQ ID NO: 8752 - RNA, 19 nt, Homo sapiens
  misc_RNA (1)...(19): siRNA sense strand
gcauacgugugauggauaa

SEQ ID NO: 8753 - RNA, 19 nt, Homo sapiens
  misc_RNA (1)...(19): siRNA sense strand
gaggaaagcaugaaagaga

SEQ ID NO: 8754 - RNA, 19 nt, Homo sapiens
  misc_RNA (1)...(19): siRNA sense strand
gcaagagaaugguuacaca

SEQ ID NO: 8755 - RNA, 19 nt, Homo sapiens
  misc_RNA (1)...(19): siRNA sense strand
gaacagcucaucccucuca

SEQ ID NO: 8756 - RNA, 19 nt, Homo sapiens
  misc_RNA (1)...(19): siRNA sense strand
gcccaguucuucugcauuu

SEQ ID NO: 8757 - RNA, 19 nt, Homo sapiens
  misc_RNA (1)...(19): siRNA sense strand
ggauaaaagugaccauuaa

SEQ ID NO: 8758 - RNA, 19 nt, Homo sapiens
  misc_RNA (1)...(19): siRNA sense strand
gaacuugacuguggcuauc

SEQ ID NO: 8759 - RNA, 19 nt, Homo sapiens
  misc_RNA (1)...(19): siRNA sense strand
gaggagacccaguuauuga

SEQ ID NO: 8760 - RNA, 19 nt, Homo sapiens
  misc_RNA (1)...(19): siRNA sense strand
uggaggagcuaaugagauu

SEQ ID NO: 8761 - RNA, 19 nt, Homo sapiens
  misc_RNA (1)...(19): siRNA sense strand
ggguggagacuuaauauuu

SEQ ID NO: 8762 - RNA, 19 nt, Homo sapiens
  misc_RNA (1)...(19): siRNA sense strand
gcaaugggccagauuuaau

SEQ ID NO: 8763 - RNA, 19 nt, Homo sapiens
  misc_RNA (1)...(19): siRNA sense strand
gcaguguucucaguugaaa

SEQ ID NO: 8764 - RNA, 19 nt, Homo sapiens
  misc_RNA (1)...(19): siRNA sense strand
ugacagagcaagauucuau

SEQ ID NO: 8765 - RNA, 19 nt, Homo sapiens
  misc_RNA (1)...(19): siRNA sense strand
gcaauuggcucagcaaagc

SEQ ID NO: 8766 - RNA, 19 nt, Homo sapiens
  misc_RNA (1)...(19): siRNA sense strand
uggauggguuggcuaaaua

SEQ ID NO: 8767 - RNA, 19 nt, Homo sapiens
  misc_RNA (1)...(19): siRNA sense strand
gaauuucacaagcaucuuu

SEQ ID NO: 8768 - RNA, 19 nt, Homo sapiens
  misc_RNA (1)...(19): siRNA sense strand
accguuaucuugucaauuu

SEQ ID NO: 8769 - RNA, 19 nt, Homo sapiens
  misc_RNA (1)...(19): siRNA sense strand
ccaggaaagcagauuauaa

SEQ ID NO: 8770 - RNA, 19 nt, Homo sapiens
  misc_RNA (1)...(19): siRNA sense strand
ggacagggacagcaagaga

SEQ ID NO: 8771 - RNA, 19 nt, Homo sapiens
  misc_RNA (1)...(19): siRNA sense strand
gcucaguaaguguuaaaua

SEQ ID NO: 8772 - RNA, 19 nt, Homo sapiens
  misc_RNA (1)...(19): siRNA sense strand
ggaaguguaaccucuggua

SEQ ID NO: 8773 - RNA, 19 nt, Homo sapiens
  misc_RNA (1)...(19): siRNA sense strand
agagauaacuccaauccau

SEQ ID NO: 8774 - RNA, 19 nt, Homo sapiens
  misc_RNA (1)...(19): siRNA sense strand
aaagggcuauagucuguaa

SEQ ID NO: 8775 - RNA, 19 nt, Homo sapiens
  misc_RNA (1)...(19): siRNA sense strand
ccuguaaucucagcacuuu

SEQ ID NO: 8776 - RNA, 19 nt, Homo sapiens
  misc_RNA (1)...(19): siRNA sense strand
gugaggcacuugcuuugaa

SEQ ID NO: 8777 - RNA, 19 nt, Homo sapiens
  misc_RNA (1)...(19): siRNA sense strand
ggaagcaugagauggaauu

SEQ ID NO: 8778 - RNA, 19 nt, Homo sapiens
  misc_RNA (1)...(19): siRNA sense strand
gcgagaaacugcagagacu

SEQ ID NO: 8779 - RNA, 19 nt, Homo sapiens
  misc_RNA (1)...(19): siRNA sense strand
caggaaagcagauuauaau

SEQ ID NO: 8780 - RNA, 19 nt, Homo sapiens
  misc_RNA (1)...(19): siRNA sense strand
auaauacugugacacgaua

SEQ ID NO: 8781 - RNA, 19 nt, Homo sapiens
  misc_RNA (1)...(19): siRNA sense strand
ugaagcacuugccuuggua

SEQ ID NO: 8782 - RNA, 19 nt, Homo sapiens
  misc_RNA (1)...(19): siRNA sense strand
gaaguguaaccucugguaa

SEQ ID NO: 8783 - RNA, 19 nt, Homo sapiens
  misc_RNA (1)...(19): siRNA sense strand
gcacgagaaucgcuugaac

SEQ ID NO: 8784 - RNA, 19 nt, Homo sapiens
  misc_RNA (1)...(19): siRNA sense strand
ggagagaggaagcaugaga

SEQ ID NO: 8785 - RNA, 19 nt, Homo sapiens
  misc_RNA (1)...(19): siRNA sense strand
gugaauacuuggagaucaa

SEQ ID NO: 8786 - RNA, 19 nt, Homo sapiens
  misc_RNA (1)...(19): siRNA sense strand
uacgugugauggauaaaua

SEQ ID NO: 8787 - RNA, 19 nt, Homo sapiens
  misc_RNA (1)...(19): siRNA sense strand
gucaguaguagcucaauua

SEQ ID NO: 8788 - RNA, 19 nt, Homo sapiens
  misc_RNA (1)...(19): siRNA sense strand
aaauucugcucuagguaua

SEQ ID NO: 8789 - RNA, 19 nt, Homo sapiens
  misc_RNA (1)...(19): siRNA sense strand
gaucagaggccagcaaaca

SEQ ID NO: 8790 - RNA, 19 nt, Homo sapiens
  misc_RNA (1)...(19): siRNA sense strand
caaccugacccucucauug

SEQ ID NO: 8791 - RNA, 19 nt, Homo sapiens
  misc_RNA (1)...(19): siRNA sense strand
guaauccuccuccuucuga

SEQ ID NO: 8792 - RNA, 19 nt, Homo sapiens
  misc_RNA (1)...(19): siRNA sense strand
ggaagaggcacgugaagca

SEQ ID NO: 8793 - RNA, 19 nt, Homo sapiens
  misc_RNA (1)...(19): siRNA sense strand
gcucagcaaagcacauuaa

SEQ ID NO: 8794 - RNA, 19 nt, Homo sapiens
  misc_RNA (1)...(19): siRNA sense strand
caaagaacagcuagcauca

SEQ ID NO: 8795 - RNA, 19 nt, Homo sapiens
  misc_RNA (1)...(19): siRNA sense strand
gcaagagaaauaauacugu

SEQ ID NO: 8796 - RNA, 19 nt, Homo sapiens
  misc_RNA (1)...(19): siRNA sense strand
cuggaaaccugcagaugaa

SEQ ID NO: 8797 - RNA, 19 nt, Homo sapiens
  misc_RNA (1)...(19): siRNA sense strand
cauggacagugaauacuug

SEQ ID NO: 8798 - RNA, 19 nt, Homo sapiens
  misc_RNA (1)...(19): siRNA sense strand
uaaaagggcuauagucugu

SEQ ID NO: 8799 - RNA, 19 nt, Homo sapiens
  misc_RNA (1)...(19): siRNA sense strand
ggacuguguuccaauaaaa

SEQ ID NO: 8800 - RNA, 19 nt, Homo sapiens
  misc_RNA (1)...(19): siRNA sense strand
acucaacucugcugcugua

SEQ ID NO: 8801 - RNA, 19 nt, Homo sapiens
  misc_RNA (1)...(19): siRNA sense strand
gagaaauaauacugugaca

SEQ ID NO: 8802 - RNA, 19 nt, Homo sapiens
  misc_RNA (1)...(19): siRNA sense strand
gaggaagcaugagauggaa

SEQ ID NO: 8803 - RNA, 19 nt, Homo sapiens
  misc_RNA (1)...(19): siRNA sense strand
ggaauuacgcgucuaacca

SEQ ID NO: 8804 - RNA, 19 nt, Homo sapiens
  misc_RNA (1)...(19): siRNA sense strand
gcagugagccaagauagug

SEQ ID NO: 8805 - RNA, 19 nt, Homo sapiens
  misc_RNA (1)...(19): siRNA sense strand
gggcaguguucucaguuga

SEQ ID NO: 8806 - RNA, 19 nt, Homo sapiens
  misc_RNA (1)...(19): siRNA sense strand
gcagcgggcaucagggaua

SEQ ID NO: 8807 - RNA, 19 nt, Homo sapiens
  misc_RNA (1)...(19): siRNA sense strand
gugaggagacccaguuauu

SEQ ID NO: 8808 - RNA, 19 nt, Homo sapiens
  misc_RNA (1)...(19): siRNA sense strand
guuaggaguuccagaccaa

SEQ ID NO: 8809 - RNA, 19 nt, Homo sapiens
  misc_RNA (1)...(19): siRNA sense strand
gagccaggaaagcagauua

SEQ ID NO: 8810 - RNA, 19 nt, Homo sapiens
  misc_RNA (1)...(19): siRNA sense strand
gcaggagaauugcuugaac

SEQ ID NO: 8811 - RNA, 19 nt, Homo sapiens
  misc_RNA (1)...(19): siRNA sense strand
cuaaccagcuccacguguu

SEQ ID NO: 8812 - RNA, 19 nt, Homo sapiens
  misc_RNA (1)...(19): siRNA sense strand
ggaccaacaucuccccuuu

SEQ ID NO: 8813 - RNA, 19 nt, Homo sapiens
  misc_RNA (1)...(19): siRNA sense strand
ccacugcucuguucugacu

SEQ ID NO: 8814 - RNA, 19 nt, Homo sapiens
  misc_RNA (1)...(19): siRNA sense strand
guaccaaauuuaagaacca

SEQ ID NO: 8815 - RNA, 19 nt, Homo sapiens
  misc_RNA (1)...(19): siRNA sense strand
gacagcaagagaaugguua

SEQ ID NO: 8816 - RNA, 19 nt, Homo sapiens
  misc_RNA (1)...(19): siRNA sense strand
ugaaagggugucaugcaua

SEQ ID NO: 8817 - RNA, 19 nt, Homo sapiens
  misc_RNA (1)...(19): siRNA sense strand
uaaauucugcucuagguau

SEQ ID NO: 8818 - RNA, 19 nt, Homo sapiens
  misc_RNA (1)...(19): siRNA sense strand
gaagcaugagauggaauua

SEQ ID NO: 8819 - RNA, 19 nt, Homo sapiens
  misc_RNA (1)...(19): siRNA sense strand
gagauuaguaaacaccaaa

SEQ ID NO: 8820 - RNA, 19 nt, Homo sapiens
  misc_RNA (1)...(19): siRNA sense strand
ugugauggauaaauaccua

SEQ ID NO: 8821 - RNA, 19 nt, Homo sapiens
  misc_RNA (1)...(19): siRNA sense strand
agacgagccugguuaacau

SEQ ID NO: 8822 - RNA, 19 nt, Homo sapiens
  misc_RNA (1)...(19): siRNA sense strand
gagacgagccugguuaaca

SEQ ID NO: 8823 - RNA, 19 nt, Homo sapiens
  misc_RNA (1)...(19): siRNA sense strand
uaaagagggacagacauuu

SEQ ID NO: 8824 - RNA, 19 nt, Homo sapiens
  misc_RNA (1)...(19): siRNA sense strand
gaaaccccgucucuacuaa

SEQ ID NO: 8825 - RNA, 19 nt, Homo sapiens
  misc_RNA (1)...(19): siRNA sense strand
gaacaacccaaaacgaaaa

SEQ ID NO: 8826 - RNA, 19 nt, Homo sapiens
  misc_RNA (1)...(19): siRNA sense strand
gauggaauuacgcgucuaa

SEQ ID NO: 8827 - RNA, 19 nt, Homo sapiens
  misc_RNA (1)...(19): siRNA sense strand
caagcaaugggccagauuu

SEQ ID NO: 8828 - RNA, 19 nt, Homo sapiens
  misc_RNA (1)...(19): siRNA sense strand
gcaacccucagcuuccaua

SEQ ID NO: 8829 - RNA, 19 nt, Homo sapiens
  misc_RNA (1)...(19): siRNA sense strand
ggacagcaagagaaugguu

SEQ ID NO: 8830 - RNA, 19 nt, Homo sapiens
  misc_RNA (1)...(19): siRNA sense strand
ggugugugcucagcuguga

SEQ ID NO: 8831 - RNA, 19 nt, Homo sapiens
  misc_RNA (1)...(19): siRNA sense strand
ggccagaguuaggguaaga

SEQ ID NO: 8832 - RNA, 19 nt, Homo sapiens
  misc_RNA (1)...(19): siRNA sense strand
gugaagcacuugccuuggu

SEQ ID NO: 8833 - RNA, 19 nt, Homo sapiens
  misc_RNA (1)...(19): siRNA sense strand
gcugugaggccuagaacuu

SEQ ID NO: 8834 - RNA, 19 nt, Homo sapiens
  misc_RNA (1)...(19): siRNA sense strand
gcucuacuuuccccauuua

SEQ ID NO: 8835 - RNA, 19 nt, Homo sapiens
  misc_RNA (1)...(19): siRNA sense strand
uaagccaucucugucaaga

SEQ ID NO: 8836 - RNA, 19 nt, Homo sapiens
  misc_RNA (1)...(19): siRNA sense strand
gcaggagaauggcgugaac

SEQ ID NO: 8837 - RNA, 19 nt, Homo sapiens
  misc_RNA (1)...(19): siRNA sense strand
aaugacagguucaauaaac

SEQ ID NO: 8838 - RNA, 19 nt, Homo sapiens
  misc_RNA (1)...(19): siRNA sense strand
acacaccucuuucucuaca

SEQ ID NO: 8839 - RNA, 19 nt, Homo sapiens
  misc_RNA (1)...(19): siRNA sense strand
aagcagggacucagaggua

SEQ ID NO: 8840 - RNA, 19 nt, Homo sapiens
  misc_RNA (1)...(19): siRNA sense strand
gcacaugacugcuguaaag

SEQ ID NO: 8841 - RNA, 19 nt, Homo sapiens
  misc_RNA (1)...(19): siRNA sense strand
acaaacagcuggaagaaga

SEQ ID NO: 8842 - RNA, 19 nt, Homo sapiens
  misc_RNA (1)...(19): siRNA sense strand
gcaacuggaucaagagcua

SEQ ID NO: 8843 - RNA, 19 nt, Homo sapiens
  misc_RNA (1)...(19): siRNA sense strand
gggaacagcaugaggaaua

SEQ ID NO: 8844 - RNA, 19 nt, Homo sapiens
  misc_RNA (1)...(19): siRNA sense strand
caagagagaugagcaacug

SEQ ID NO: 8845 - RNA, 19 nt, Homo sapiens
  misc_RNA (1)...(19): siRNA sense strand
ggaacagcaugaggaauau

SEQ ID NO: 8846 - RNA, 19 nt, Homo sapiens
  misc_RNA (1)...(19): siRNA sense strand
caguggaggucccaucaaa

SEQ ID NO: 8847 - RNA, 19 nt, Homo sapiens
  misc_RNA (1)...(19): siRNA sense strand
ugaagcagcuagagaagca

SEQ ID NO: 8848 - RNA, 19 nt, Homo sapiens
  misc_RNA (1)...(19): siRNA sense strand
gcaagaaugugagcaacag

SEQ ID NO: 8849 - RNA, 19 nt, Homo sapiens
  misc_RNA (1)...(19): siRNA sense strand
acaaagggaucagcagcua

SEQ ID NO: 8850 - RNA, 19 nt, Homo sapiens
  misc_RNA (1)...(19): siRNA sense strand
ugaagcaccuggagaagca

SEQ ID NO: 8851 - RNA, 19 nt, Homo sapiens
  misc_RNA (1)...(19): siRNA sense strand
cagcaggacggacaacuaa

SEQ ID NO: 8852 - RNA, 19 nt, Homo sapiens
  misc_RNA (1)...(19): siRNA sense strand
ccacaaagggagaaguauu

SEQ ID NO: 8853 - RNA, 19 nt, Homo sapiens
  misc_RNA (1)...(19): siRNA sense strand
gcaugaggaauaucagaaa

SEQ ID NO: 8854 - RNA, 19 nt, Homo sapiens
  misc_RNA (1)...(19): siRNA sense strand
gcagcaggacggacaacua

SEQ ID NO: 8855 - RNA, 19 nt, Homo sapiens
  misc_RNA (1)...(19): siRNA sense strand
uaaacaaacagcuggaaga

SEQ ID NO: 8856 - RNA, 19 nt, Homo sapiens
  misc_RNA (1)...(19): siRNA sense strand
gggaucagcagcuaaacaa

SEQ ID NO: 8857 - RNA, 19 nt, Homo sapiens
  misc_RNA (1)...(19): siRNA sense strand
gagaugagcaacugggaau

SEQ ID NO: 8858 - RNA, 19 nt, Homo sapiens
  misc_RNA (1)...(19): siRNA sense strand
aaccagcccugcccacaaa

SEQ ID NO: 8859 - RNA, 19 nt, Homo sapiens
  misc_RNA (1)...(19): siRNA sense strand
gagcaacugggaaugaaga

SEQ ID NO: 8860 - RNA, 19 nt, Homo sapiens
  misc_RNA (1)...(19): siRNA sense strand
gaugagcaacugggaauga

SEQ ID NO: 8861 - RNA, 19 nt, Homo sapiens
  misc_RNA (1)...(19): siRNA sense strand
gggacugccugagcaagaa

SEQ ID NO: 8862 - RNA, 19 nt, Homo sapiens
  misc_RNA (1)...(19): siRNA sense strand
cacaaagggagaaguauug

SEQ ID NO: 8863 - RNA, 19 nt, Homo sapiens
  misc_RNA (1)...(19): siRNA sense strand
aaacaaacagcuggaagaa

SEQ ID NO: 8864 - RNA, 19 nt, Homo sapiens
  misc_RNA (1)...(19): siRNA sense strand
gaucaagagcuagucaaga

SEQ ID NO: 8865 - RNA, 19 nt, Homo sapiens
  misc_RNA (1)...(19): siRNA sense strand
aaagggaucagcagcuaaa

SEQ ID NO: 8866 - RNA, 19 nt, Homo sapiens
  misc_RNA (1)...(19): siRNA sense strand
caacugggaaugaagaaag

SEQ ID NO: 8867 - RNA, 19 nt, Homo sapiens
  misc_RNA (1)...(19): siRNA sense strand
gcccacaaagggagaagua

SEQ ID NO: 8868 - RNA, 19 nt, Homo sapiens
  misc_RNA (1)...(19): siRNA sense strand
ggaggucccaucaaagcaa

SEQ ID NO: 8869 - RNA, 19 nt, Homo sapiens
  misc_RNA (1)...(19): siRNA sense strand
gaucagcagcuaaacaaac

SEQ ID NO: 8870 - RNA, 19 nt, Homo sapiens
  misc_RNA (1)...(19): siRNA sense strand
ugaggaauaucagaaagca

SEQ ID NO: 8871 - RNA, 19 nt, Homo sapiens
  misc_RNA (1)...(19): siRNA sense strand
caaagggaucagcagcuaa

SEQ ID NO: 8872 - RNA, 19 nt, Homo sapiens
  misc_RNA (1)...(19): siRNA sense strand
gagcuagucaagagagaug

SEQ ID NO: 8873 - RNA, 19 nt, Homo sapiens
  misc_RNA (1)...(19): siRNA sense strand
caaaugaaacagccaacuc

SEQ ID NO: 8874 - RNA, 19 nt, Homo sapiens
  misc_RNA (1)...(19): siRNA sense strand
gaauaucagaaagcagaaa

SEQ ID NO: 8875 - RNA, 19 nt, Homo sapiens
  misc_RNA (1)...(19): siRNA sense strand
aaagggagaaguauugcuu

SEQ ID NO: 8876 - RNA, 19 nt, Homo sapiens
  misc_RNA (1)...(19): siRNA sense strand
caugaggaauaucagaaag

SEQ ID NO: 8877 - RNA, 19 nt, Homo sapiens
  misc_RNA (1)...(19): siRNA sense strand
caaccagcccugcccacaa

SEQ ID NO: 8878 - RNA, 19 nt, Homo sapiens
  misc_RNA (1)...(19): siRNA sense strand
aaguauugcuuccuguaga

SEQ ID NO: 8879 - RNA, 19 nt, Homo sapiens
  misc_RNA (1)...(19): siRNA sense strand
ugaagaaagagcaacuguu

SEQ ID NO: 8880 - RNA, 19 nt, Homo sapiens
  misc_RNA (1)...(19): siRNA sense strand
agggacagcugaagcaucu

SEQ ID NO: 8881 - RNA, 19 nt, Homo sapiens
  misc_RNA (1)...(19): siRNA sense strand
ggaauaucagaaagcagaa

SEQ ID NO: 8882 - RNA, 19 nt, Homo sapiens
  misc_RNA (1)...(19): siRNA sense strand
ggccacccaaacauaaaua

SEQ ID NO: 8883 - RNA, 19 nt, Homo sapiens
  misc_RNA (1)...(19): siRNA sense strand
gcaguggccacccaaacau

SEQ ID NO: 8884 - RNA, 19 nt, Homo sapiens
  misc_RNA (1)...(19): siRNA sense strand
caucaaagcaagaggaaaa

SEQ ID NO: 8885 - RNA, 19 nt, Homo sapiens
  misc_RNA (1)...(19): siRNA sense strand
gaaugaagaaagagcaacu

SEQ ID NO: 8886 - RNA, 19 nt, Homo sapiens
  misc_RNA (1)...(19): siRNA sense strand
gcucuuagaccagcaacug

SEQ ID NO: 8887 - RNA, 19 nt, Homo sapiens
  misc_RNA (1)...(19): siRNA sense strand
acccagagcagcagcuuaa

SEQ ID NO: 8888 - RNA, 19 nt, Homo sapiens
  misc_RNA (1)...(19): siRNA sense strand
gcaacugggaaugaagaaa

SEQ ID NO: 8889 - RNA, 19 nt, Homo sapiens
  misc_RNA (1)...(19): siRNA sense strand
cagagcagcagcuuaagca

SEQ ID NO: 8890 - RNA, 19 nt, Homo sapiens
  misc_RNA (1)...(19): siRNA sense strand
gcaggacggacaacuaaaa

SEQ ID NO: 8891 - RNA, 19 nt, Homo sapiens
  misc_RNA (1)...(19): siRNA sense strand
ggaucagcagcuaaacaaa

SEQ ID NO: 8892 - RNA, 19 nt, Homo sapiens
  misc_RNA (1)...(19): siRNA sense strand
ggaucaagagcuagucaag

SEQ ID NO: 8893 - RNA, 19 nt, Homo sapiens
  misc_RNA (1)...(19): siRNA sense strand
aucaagagcuagucaagag

SEQ ID NO: 8894 - RNA, 19 nt, Homo sapiens
  misc_RNA (1)...(19): siRNA sense strand
gcagcugaaguaccuggaa

SEQ ID NO: 8895 - RNA, 19 nt, Homo sapiens
  misc_RNA (1)...(19): siRNA sense strand
gcagguaggacagccaaag

SEQ ID NO: 8896 - RNA, 19 nt, Homo sapiens
  misc_RNA (1)...(19): siRNA sense strand
caauacccaucaggagcaa

SEQ ID NO: 8897 - RNA, 19 nt, Homo sapiens
  misc_RNA (1)...(19): siRNA sense strand
gugagcaacagcagaagga

SEQ ID NO: 8898 - RNA, 19 nt, Homo sapiens
  misc_RNA (1)...(19): siRNA sense strand
caguggccacccaaacaua

SEQ ID NO: 8899 - RNA, 19 nt, Homo sapiens
  misc_RNA (1)...(19): siRNA sense strand
gcuaaacaaacagcuggaa

SEQ ID NO: 8900 - RNA, 19 nt, Homo sapiens
  misc_RNA (1)...(19): siRNA sense strand
gaacagcaugaggaauauc

SEQ ID NO: 8901 - RNA, 19 nt, Homo sapiens
  misc_RNA (1)...(19): siRNA sense strand
cagcaugaggaauaucaga

SEQ ID NO: 8902 - RNA, 19 nt, Homo sapiens
  misc_RNA (1)...(19): siRNA sense strand
gccacccaaacauaaauaa

SEQ ID NO: 8903 - RNA, 19 nt, Homo sapiens
  misc_RNA (1)...(19): siRNA sense strand
gcaaaugaaacagccaacu

SEQ ID NO: 8904 - RNA, 19 nt, Homo sapiens
  misc_RNA (1)...(19): siRNA sense strand
aaugugagcaacagcagaa

SEQ ID NO: 8905 - RNA, 19 nt, Homo sapiens
  misc_RNA (1)...(19): siRNA sense strand
gggaaugaagaaagagcaa

SEQ ID NO: 8906 - RNA, 19 nt, Homo sapiens
  misc_RNA (1)...(19): siRNA sense strand
ugccugagcaagaauguga

SEQ ID NO: 8907 - RNA, 19 nt, Homo sapiens
  misc_RNA (1)...(19): siRNA sense strand
gagcuccucaagacuguuc

SEQ ID NO: 8908 - RNA, 19 nt, Homo sapiens
  misc_RNA (1)...(19): siRNA sense strand
ccaucaggagcaaaugaaa

SEQ ID NO: 8909 - RNA, 19 nt, Homo sapiens
  misc_RNA (1)...(19): siRNA sense strand
uagagcaccagcagcagaa

SEQ ID NO: 8910 - RNA, 19 nt, Homo sapiens
  misc_RNA (1)...(19): siRNA sense strand
ccaaacaccugcaacuuaa

SEQ ID NO: 8911 - RNA, 19 nt, Homo sapiens
  misc_RNA (1)...(19): siRNA sense strand
ggaagaaucugugaagcua

SEQ ID NO: 8912 - RNA, 19 nt, Homo sapiens
  misc_RNA (1)...(19): siRNA sense strand
caauaaaccugaugguaaa

SEQ ID NO: 8913 - RNA, 19 nt, Homo sapiens
  misc_RNA (1)...(19): siRNA sense strand
gaaccagcaugaagaacua

SEQ ID NO: 8914 - RNA, 19 nt, Homo sapiens
  misc_RNA (1)...(19): siRNA sense strand
ggagugaaaucuuccuuau

SEQ ID NO: 8915 - RNA, 19 nt, Homo sapiens
  misc_RNA (1)...(19): siRNA sense strand
cuaucaaggugaagaauua

SEQ ID NO: 8916 - RNA, 19 nt, Homo sapiens
  misc_RNA (1)...(19): siRNA sense strand
ggaaucuacugaacaauca

SEQ ID NO: 8917 - RNA, 19 nt, Homo sapiens
  misc_RNA (1)...(19): siRNA sense strand
cagcagaagcuaacaauuu

SEQ ID NO: 8918 - RNA, 19 nt, Homo sapiens
  misc_RNA (1)...(19): siRNA sense strand
ucaauaaaccugaugguaa

SEQ ID NO: 8919 - RNA, 19 nt, Homo sapiens
  misc_RNA (1)...(19): siRNA sense strand
gcaguguuauugauggaua

SEQ ID NO: 8920 - RNA, 19 nt, Homo sapiens
  misc_RNA (1)...(19): siRNA sense strand
gauauggagugaaaucuuc

SEQ ID NO: 8921 - RNA, 19 nt, Homo sapiens
  misc_RNA (1)...(19): siRNA sense strand
agcagaagcuaacaauuua

SEQ ID NO: 8922 - RNA, 19 nt, Homo sapiens
  misc_RNA (1)...(19): siRNA sense strand
ccacaggaauucagauaug

SEQ ID NO: 8923 - RNA, 19 nt, Homo sapiens
  misc_RNA (1)...(19): siRNA sense strand
aaacauuccugaagccauu

SEQ ID NO: 8924 - RNA, 19 nt, Homo sapiens
  misc_RNA (1)...(19): siRNA sense strand
caaaugacuugcagaccaa

SEQ ID NO: 8925 - RNA, 19 nt, Homo sapiens
  misc_RNA (1)...(19): siRNA sense strand
gcacaaugaucagcucaau

SEQ ID NO: 8926 - RNA, 19 nt, Homo sapiens
  misc_RNA (1)...(19): siRNA sense strand
gcaguuggagagugaaaua

SEQ ID NO: 8927 - RNA, 19 nt, Homo sapiens
  misc_RNA (1)...(19): siRNA sense strand
caaggagguuguugcugua

SEQ ID NO: 8928 - RNA, 19 nt, Homo sapiens
  misc_RNA (1)...(19): siRNA sense strand
gcuagccuaugcaauauga

SEQ ID NO: 8929 - RNA, 19 nt, Homo sapiens
  misc_RNA (1)...(19): siRNA sense strand
cuucaaggcuuauauaaag

SEQ ID NO: 8930 - RNA, 19 nt, Homo sapiens
  misc_RNA (1)...(19): siRNA sense strand
agugaaaucuuccuuauca

SEQ ID NO: 8931 - RNA, 19 nt, Homo sapiens
  misc_RNA (1)...(19): siRNA sense strand
gaauucagauauggaguga

SEQ ID NO: 8932 - RNA, 19 nt, Homo sapiens
  misc_RNA (1)...(19): siRNA sense strand
guacuucaaggcuuauaua

SEQ ID NO: 8933 - RNA, 19 nt, Homo sapiens
  misc_RNA (1)...(19): siRNA sense strand
gaucagcucaauacaggua

SEQ ID NO: 8934 - RNA, 19 nt, Homo sapiens
  misc_RNA (1)...(19): siRNA sense strand
gagccuagauauuaaagag

SEQ ID NO: 8935 - RNA, 19 nt, Homo sapiens
  misc_RNA (1)...(19): siRNA sense strand
cccgagagccuagauauua

SEQ ID NO: 8936 - RNA, 19 nt, Homo sapiens
  misc_RNA (1)...(19): siRNA sense strand
gcugggagcuguaauagac

SEQ ID NO: 8937 - RNA, 19 nt, Homo sapiens
  misc_RNA (1)...(19): siRNA sense strand
guagucaucuuuaucacau

SEQ ID NO: 8938 - RNA, 19 nt, Homo sapiens
  misc_RNA (1)...(19): siRNA sense strand
ccgagagccuagauauuaa

SEQ ID NO: 8939 - RNA, 19 nt, Homo sapiens
  misc_RNA (1)...(19): siRNA sense strand
aaagaucuaucaaggugaa

SEQ ID NO: 8940 - RNA, 19 nt, Homo sapiens
  misc_RNA (1)...(19): siRNA sense strand
uggaguacuucaaggcuua

SEQ ID NO: 8941 - RNA, 19 nt, Homo sapiens
  misc_RNA (1)...(19): siRNA sense strand
ugacuggauucauugguuu

SEQ ID NO: 8942 - RNA, 19 nt, Homo sapiens
  misc_RNA (1)...(19): siRNA sense strand
caagcacaaugauagcaaa

SEQ ID NO: 8943 - RNA, 19 nt, Homo sapiens
  misc_RNA (1)...(19): siRNA sense strand
caacugccaaggacacaua

SEQ ID NO: 8944 - RNA, 19 nt, Homo sapiens
  misc_RNA (1)...(19): siRNA sense strand
caaggacacauacaacaaa

SEQ ID NO: 8945 - RNA, 19 nt, Homo sapiens
  misc_RNA (1)...(19): siRNA sense strand
gaguuucccauacgaauuu

SEQ ID NO: 8946 - RNA, 19 nt, Homo sapiens
  misc_RNA (1)...(19): siRNA sense strand
ugagauacauguacaacca

SEQ ID NO: 8947 - RNA, 19 nt, Homo sapiens
  misc_RNA (1)...(19): siRNA sense strand
gaccacaggaauucagaua

SEQ ID NO: 8948 - RNA, 19 nt, Homo sapiens
  misc_RNA (1)...(19): siRNA sense strand
ugaccauuccuuugaguua

SEQ ID NO: 8949 - RNA, 19 nt, Homo sapiens
  misc_RNA (1)...(19): siRNA sense strand
uaaugggacugacccuuau

SEQ ID NO: 8950 - RNA, 19 nt, Homo sapiens
  misc_RNA (1)...(19): siRNA sense strand
aagaaucugugaagcuauu

SEQ ID NO: 8951 - RNA, 19 nt, Homo sapiens
  misc_RNA (1)...(19): siRNA sense strand
ggugaagaauuaccacauc

SEQ ID NO: 8952 - RNA, 19 nt, Homo sapiens
  misc_RNA (1)...(19): siRNA sense strand
gaagauggguggggaagaa

SEQ ID NO: 8953 - RNA, 19 nt, Homo sapiens
  misc_RNA (1)...(19): siRNA sense strand
acacauccauuccuguuuc

SEQ ID NO: 8954 - RNA, 19 nt, Homo sapiens
  misc_RNA (1)...(19): siRNA sense strand
gaaaagacauaugaaugga

SEQ ID NO: 8955 - RNA, 19 nt, Homo sapiens
  misc_RNA (1)...(19): siRNA sense strand
caaagucggaaucuacuga

SEQ ID NO: 8956 - RNA, 19 nt, Homo sapiens
  misc_RNA (1)...(19): siRNA sense strand
caauauaucaagcacaaug

SEQ ID NO: 8957 - RNA, 19 nt, Homo sapiens
  misc_RNA (1)...(19): siRNA sense strand
aaagagaucaaugggaaua

SEQ ID NO: 8958 - RNA, 19 nt, Homo sapiens
  misc_RNA (1)...(19): siRNA sense strand
ggagguuguugcuguaucu

SEQ ID NO: 8959 - RNA, 19 nt, Homo sapiens
  misc_RNA (1)...(19): siRNA sense strand
cugauuccuuggcuacuua

SEQ ID NO: 8960 - RNA, 19 nt, Homo sapiens
  misc_RNA (1)...(19): siRNA sense strand
guacaaccaggaaucaguu

SEQ ID NO: 8961 - RNA, 19 nt, Homo sapiens
  misc_RNA (1)...(19): siRNA sense strand
gaagaggaggagccaguga

SEQ ID NO: 8962 - RNA, 19 nt, Homo sapiens
  misc_RNA (1)...(19): siRNA sense strand
gugacuggauucauugguu

SEQ ID NO: 8963 - RNA, 19 nt, Homo sapiens
  misc_RNA (1)...(19): siRNA sense strand
agagaucaaugggaauaaa

SEQ ID NO: 8964 - RNA, 19 nt, Homo sapiens
  misc_RNA (1)...(19): siRNA sense strand
gagacuggaguuucccaua

SEQ ID NO: 8965 - RNA, 19 nt, Homo sapiens
  misc_RNA (1)...(19): siRNA sense strand
agucugauauuucuuguuc

SEQ ID NO: 8966 - RNA, 19 nt, Homo sapiens
  misc_RNA (1)...(19): siRNA sense strand
gcccuuagcacaaugauca

SEQ ID NO: 8967 - RNA, 19 nt, Homo sapiens
  misc_RNA (1)...(19): siRNA sense strand
gagauucagccacaguauu

SEQ ID NO: 8968 - RNA, 19 nt, Homo sapiens
  misc_RNA (1)...(19): siRNA sense strand
gagagauucagccacagua

SEQ ID NO: 8969 - RNA, 19 nt, Homo sapiens
  misc_RNA (1)...(19): siRNA sense strand
auaaugggacugacccuua

SEQ ID NO: 8970 - RNA, 19 nt, Homo sapiens
  misc_RNA (1)...(19): siRNA sense strand
agaauuaccacaucccaaa

SEQ ID NO: 8971 - RNA, 19 nt, Homo sapiens
  misc_RNA (1)...(19): siRNA sense strand
gaugaaacugcauuaaauc

SEQ ID NO: 8972 - RNA, 19 nt, Homo sapiens
  misc_RNA (1)...(19): siRNA sense strand
cugauggacuucauguuga

SEQ ID NO: 8973 - RNA, 19 nt, Homo sapiens
  misc_RNA (1)...(19): siRNA sense strand
uccaauauaucaagcacaa

SEQ ID NO: 8974 - RNA, 19 nt, Homo sapiens
  misc_RNA (1)...(19): siRNA sense strand
accaaacaccugcaacuua

SEQ ID NO: 8975 - RNA, 19 nt, Homo sapiens
  misc_RNA (1)...(19): siRNA sense strand
gccuagauauuaaagagau

SEQ ID NO: 8976 - RNA, 19 nt, Homo sapiens
  misc_RNA (1)...(19): siRNA sense strand
ggaguuucccauacgaauu

SEQ ID NO: 8977 - RNA, 19 nt, Homo sapiens
  misc_RNA (1)...(19): siRNA sense strand
agauucagccacaguauuu

SEQ ID NO: 8978 - RNA, 19 nt, Homo sapiens
  misc_RNA (1)...(19): siRNA sense strand
uagcuagccuaugcaauau

SEQ ID NO: 8979 - RNA, 19 nt, Homo sapiens
  misc_RNA (1)...(19): siRNA sense strand
gcagggacagaaacaguug

SEQ ID NO: 8980 - RNA, 19 nt, Homo sapiens
  misc_RNA (1)...(19): siRNA sense strand
gggcauauauccgguacuc

SEQ ID NO: 8981 - RNA, 19 nt, Homo sapiens
  misc_RNA (1)...(19): siRNA sense strand
ccaaggacacauacaacaa

SEQ ID NO: 8982 - RNA, 19 nt, Homo sapiens
  misc_RNA (1)...(19): siRNA sense strand
gguuguugcuguaucuguu

SEQ ID NO: 8983 - RNA, 19 nt, Homo sapiens
  misc_RNA (1)...(19): siRNA sense strand
ucaucaagcuuucccuaca

SEQ ID NO: 8984 - RNA, 19 nt, Homo sapiens
  misc_RNA (1)...(19): siRNA sense strand
aagaugaccauuccuuuga

SEQ ID NO: 8985 - RNA, 19 nt, Homo sapiens
  misc_RNA (1)...(19): siRNA sense strand
gguuggagacuacaaugaa

SEQ ID NO: 8986 - RNA, 19 nt, Homo sapiens
  misc_RNA (1)...(19): siRNA sense strand
gucggaaucuacugaacaa

SEQ ID NO: 8987 - RNA, 19 nt, Homo sapiens
  misc_RNA (1)...(19): siRNA sense strand
ucaaagaugaccauuccuu

SEQ ID NO: 8988 - RNA, 19 nt, Homo sapiens
  misc_RNA (1)...(19): siRNA sense strand
cgaugguggugccaaauuc

SEQ ID NO: 8989 - RNA, 19 nt, Homo sapiens
  misc_RNA (1)...(19): siRNA sense strand
acaaugaucagcucaauac

SEQ ID NO: 8990 - RNA, 19 nt, Homo sapiens
  misc_RNA (1)...(19): siRNA sense strand
cagggaaccuuugauaguc

SEQ ID NO: 8991 - RNA, 19 nt, Homo sapiens
  misc_RNA (1)...(19): siRNA sense strand
cgagagaccacaggaauuc

SEQ ID NO: 8992 - RNA, 19 nt, Homo sapiens
  misc_RNA (1)...(19): siRNA sense strand
gaccauuccuuugaguuag

SEQ ID NO: 8993 - RNA, 19 nt, Homo sapiens
  misc_RNA (1)...(19): siRNA sense strand
agacaucuguaucaucaag

SEQ ID NO: 8994 - RNA, 19 nt, Homo sapiens
  misc_RNA (1)...(19): siRNA sense strand
gccacaguauuugcccuua

SEQ ID NO: 8995 - RNA, 19 nt, Homo sapiens
  misc_RNA (1)...(19): siRNA sense strand
gcuaccucauccuggcuua

SEQ ID NO: 8996 - RNA, 19 nt, Homo sapiens
  misc_RNA (1)...(19): siRNA sense strand
uagccuaugcaauaugaua

SEQ ID NO: 8997 - RNA, 19 nt, Homo sapiens
  misc_RNA (1)...(19): siRNA sense strand
ggagagugaaauagaugaa

SEQ ID NO: 8998 - RNA, 19 nt, Homo sapiens
  misc_RNA (1)...(19): siRNA sense strand
guuggagagugaaauagau

SEQ ID NO: 8999 - RNA, 19 nt, Homo sapiens
  misc_RNA (1)...(19): siRNA sense strand
uaaggaagaaucugugaag

SEQ ID NO: 9000 - RNA, 19 nt, Homo sapiens
  misc_RNA (1)...(19): siRNA sense strand
ccugauggacuucauguug

SEQ ID NO: 9001 - RNA, 19 nt, Homo sapiens
  misc_RNA (1)...(19): siRNA sense strand
gaugaccauuccuuugagu

SEQ ID NO: 9002 - RNA, 19 nt, Homo sapiens
  misc_RNA (1)...(19): siRNA sense strand
acaccaaagucggaaucua

SEQ ID NO: 9003 - RNA, 19 nt, Homo sapiens
  misc_RNA (1)...(19): siRNA sense strand
gaccaaacaccugcaacuu

SEQ ID NO: 9004 - RNA, 19 nt, Homo sapiens
  misc_RNA (1)...(19): siRNA sense strand
ggaaaagacauaugaaugg

SEQ ID NO: 9005 - RNA, 19 nt, Homo sapiens
  misc_RNA (1)...(19): siRNA sense strand
ucagggaaccuuugauagu

SEQ ID NO: 9006 - RNA, 19 nt, Homo sapiens
  misc_RNA (1)...(19): siRNA sense strand
gaucuaucaaggugaagaa

SEQ ID NO: 9007 - RNA, 19 nt, Homo sapiens
  misc_RNA (1)...(19): siRNA sense strand
ccgguacucuggagaauac

SEQ ID NO: 9008 - RNA, 19 nt, Homo sapiens
  misc_RNA (1)...(19): siRNA sense strand
gaagaaucugugaagcuau

SEQ ID NO: 9009 - RNA, 19 nt, Homo sapiens
  misc_RNA (1)...(19): siRNA sense strand
gaauuaccacaucccaaau

SEQ ID NO: 9010 - RNA, 19 nt, Homo sapiens
  misc_RNA (1)...(19): siRNA sense strand
ccaaacaccugcaacuuaa

SEQ ID NO: 9011 - RNA, 19 nt, Homo sapiens
  misc_RNA (1)...(19): siRNA sense strand
ggaagaaucugugaagcua

SEQ ID NO: 9012 - RNA, 19 nt, Homo sapiens
  misc_RNA (1)...(19): siRNA sense strand
caauaaaccugaugguaaa

SEQ ID NO: 9013 - RNA, 19 nt, Homo sapiens
  misc_RNA (1)...(19): siRNA sense strand
gaaccagcaugaagaacua

SEQ ID NO: 9014 - RNA, 19 nt, Homo sapiens
  misc_RNA (1)...(19): siRNA sense strand
ggagugaaaucuuccuuau

SEQ ID NO: 9015 - RNA, 19 nt, Homo sapiens
  misc_RNA (1)...(19): siRNA sense strand
cuaucaaggugaagaauua

SEQ ID NO: 9016 - RNA, 19 nt, Homo sapiens
  misc_RNA (1)...(19): siRNA sense strand
cagcagaagcuaacaauuu

SEQ ID NO: 9017 - RNA, 19 nt, Homo sapiens
  misc_RNA (1)...(19): siRNA sense strand
ucaauaaaccugaugguaa

SEQ ID NO: 9018 - RNA, 19 nt, Homo sapiens
  misc_RNA (1)...(19): siRNA sense strand
gcaguguuauugauggaua

SEQ ID NO: 9019 - RNA, 19 nt, Homo sapiens
  misc_RNA (1)...(19): siRNA sense strand
gauauggagugaaaucuuc

SEQ ID NO: 9020 - RNA, 19 nt, Homo sapiens
  misc_RNA (1)...(19): siRNA sense strand
agcagaagcuaacaauuua

SEQ ID NO: 9021 - RNA, 19 nt, Homo sapiens
  misc_RNA (1)...(19): siRNA sense strand
ccacaggaauucagauaug

SEQ ID NO: 9022 - RNA, 19 nt, Homo sapiens
  misc_RNA (1)...(19): siRNA sense strand
aaacauuccugaagccauu

SEQ ID NO: 9023 - RNA, 19 nt, Homo sapiens
  misc_RNA (1)...(19): siRNA sense strand
caaaugacuugcagaccaa

SEQ ID NO: 9024 - RNA, 19 nt, Homo sapiens
  misc_RNA (1)...(19): siRNA sense strand
gcacaaugaucagcucaau

SEQ ID NO: 9025 - RNA, 19 nt, Homo sapiens
  misc_RNA (1)...(19): siRNA sense strand
gcaguuggagagugaaaua

SEQ ID NO: 9026 - RNA, 19 nt, Homo sapiens
  misc_RNA (1)...(19): siRNA sense strand
caaggagguuguugcugua

SEQ ID NO: 9027 - RNA, 19 nt, Homo sapiens
  misc_RNA (1)...(19): siRNA sense strand
gcuagccuaugcaauauga

SEQ ID NO: 9028 - RNA, 19 nt, Homo sapiens
  misc_RNA (1)...(19): siRNA sense strand
cuucaaggcuuauauaaag

SEQ ID NO: 9029 - RNA, 19 nt, Homo sapiens
  misc_RNA (1)...(19): siRNA sense strand
agugaaaucuuccuuauca

SEQ ID NO: 9030 - RNA, 19 nt, Homo sapiens
  misc_RNA (1)...(19): siRNA sense strand
gaauucagauauggaguga

SEQ ID NO: 9031 - RNA, 19 nt, Homo sapiens
  misc_RNA (1)...(19): siRNA sense strand
guacuucaaggcuuauaua

SEQ ID NO: 9032 - RNA, 19 nt, Homo sapiens
  misc_RNA (1)...(19): siRNA sense strand
gaucagcucaauacaggua

SEQ ID NO: 9033 - RNA, 19 nt, Homo sapiens
  misc_RNA (1)...(19): siRNA sense strand
gagccuagauauuaaagag

SEQ ID NO: 9034 - RNA, 19 nt, Homo sapiens
  misc_RNA (1)...(19): siRNA sense strand
cccgagagccuagauauua

SEQ ID NO: 9035 - RNA, 19 nt, Homo sapiens
  misc_RNA (1)...(19): siRNA sense strand
gcugggagcuguaauagac

SEQ ID NO: 9036 - RNA, 19 nt, Homo sapiens
  misc_RNA (1)...(19): siRNA sense strand
guagucaucuuuaucacau

SEQ ID NO: 9037 - RNA, 19 nt, Homo sapiens
  misc_RNA (1)...(19): siRNA sense strand
ccgagagccuagauauuaa

SEQ ID NO: 9038 - RNA, 19 nt, Homo sapiens
  misc_RNA (1)...(19): siRNA sense strand
aaagaucuaucaaggugaa

SEQ ID NO: 9039 - RNA, 19 nt, Homo sapiens
  misc_RNA (1)...(19): siRNA sense strand
uggaguacuucaaggcuua

SEQ ID NO: 9040 - RNA, 19 nt, Homo sapiens
  misc_RNA (1)...(19): siRNA sense strand
ugacuggauucauugguuu

SEQ ID NO: 9041 - RNA, 19 nt, Homo sapiens
  misc_RNA (1)...(19): siRNA sense strand
caagcacaaugauagcaaa

SEQ ID NO: 9042 - RNA, 19 nt, Homo sapiens
  misc_RNA (1)...(19): siRNA sense strand
caacugccaaggacacaua

SEQ ID NO: 9043 - RNA, 19 nt, Homo sapiens
  misc_RNA (1)...(19): siRNA sense strand
caaggacacauacaacaaa

SEQ ID NO: 9044 - RNA, 19 nt, Homo sapiens
  misc_RNA (1)...(19): siRNA sense strand
gaguuucccauacgaauuu

SEQ ID NO: 9045 - RNA, 19 nt, Homo sapiens
  misc_RNA (1)...(19): siRNA sense strand
ugagauacauguacaacca

SEQ ID NO: 9046 - RNA, 19 nt, Homo sapiens
  misc_RNA (1)...(19): siRNA sense strand
gaccacaggaauucagaua

SEQ ID NO: 9047 - RNA, 19 nt, Homo sapiens
  misc_RNA (1)...(19): siRNA sense strand
ugaccauuccuuugaguua

SEQ ID NO: 9048 - RNA, 19 nt, Homo sapiens
  misc_RNA (1)...(19): siRNA sense strand
uaaugggacugacccuuau

SEQ ID NO: 9049 - RNA, 19 nt, Homo sapiens
  misc_RNA (1)...(19): siRNA sense strand
aagaaucugugaagcuauu

SEQ ID NO: 9050 - RNA, 19 nt, Homo sapiens
  misc_RNA (1)...(19): siRNA sense strand
ggugaagaauuaccacauc

SEQ ID NO: 9051 - RNA, 19 nt, Homo sapiens
  misc_RNA (1)...(19): siRNA sense strand
gaagauggguggggaagaa

SEQ ID NO: 9052 - RNA, 19 nt, Homo sapiens
  misc_RNA (1)...(19): siRNA sense strand
acacauccauuccuguuuc

SEQ ID NO: 9053 - RNA, 19 nt, Homo sapiens
  misc_RNA (1)...(19): siRNA sense strand
gaaaagacauaugaaugga

SEQ ID NO: 9054 - RNA, 19 nt, Homo sapiens
  misc_RNA (1)...(19): siRNA sense strand
caaagucggaaucuacuga

SEQ ID NO: 9055 - RNA, 19 nt, Homo sapiens
  misc_RNA (1)...(19): siRNA sense strand
caauauaucaagcacaaug

SEQ ID NO: 9056 - RNA, 19 nt, Homo sapiens
  misc_RNA (1)...(19): siRNA sense strand
aaagagaucaaugggaaua

SEQ ID NO: 9057 - RNA, 19 nt, Homo sapiens
  misc_RNA (1)...(19): siRNA sense strand
ggagguuguugcuguaucu

SEQ ID NO: 9058 - RNA, 19 nt, Homo sapiens
  misc_RNA (1)...(19): siRNA sense strand
cugauuccuuggcuacuua

SEQ ID NO: 9059 - RNA, 19 nt, Homo sapiens
  misc_RNA (1)...(19): siRNA sense strand
guacaaccaggaaucaguu

SEQ ID NO: 9060 - RNA, 19 nt, Homo sapiens
  misc_RNA (1)...(19): siRNA sense strand
gugacuggauucauugguu

SEQ ID NO: 9061 - RNA, 19 nt, Homo sapiens
  misc_RNA (1)...(19): siRNA sense strand
gaagaggaggagccaguga

SEQ ID NO: 9062 - RNA, 19 nt, Homo sapiens
  misc_RNA (1)...(19): siRNA sense strand
agagaucaaugggaauaaa

SEQ ID NO: 9063 - RNA, 19 nt, Homo sapiens
  misc_RNA (1)...(19): siRNA sense strand
gagacuggaguuucccaua

SEQ ID NO: 9064 - RNA, 19 nt, Homo sapiens
  misc_RNA (1)...(19): siRNA sense strand
agucugauauuucuuguuc

SEQ ID NO: 9065 - RNA, 19 nt, Homo sapiens
  misc_RNA (1)...(19): siRNA sense strand
gcccuuagcacaaugauca

SEQ ID NO: 9066 - RNA, 19 nt, Homo sapiens
  misc_RNA (1)...(19): siRNA sense strand
gagauucagccacaguauu

SEQ ID NO: 9067 - RNA, 19 nt, Homo sapiens
  misc_RNA (1)...(19): siRNA sense strand
gaugaaacugcauuaaauc

SEQ ID NO: 9068 - RNA, 19 nt, Homo sapiens
  misc_RNA (1)...(19): siRNA sense strand
auaaugggacugacccuua

SEQ ID NO: 9069 - RNA, 19 nt, Homo sapiens
  misc_RNA (1)...(19): siRNA sense strand
agaauuaccacaucccaaa

SEQ ID NO: 9070 - RNA, 19 nt, Homo sapiens
  misc_RNA (1)...(19): siRNA sense strand
gagagauucagccacagua

SEQ ID NO: 9071 - RNA, 19 nt, Homo sapiens
  misc_RNA (1)...(19): siRNA sense strand
cugauggacuucauguuga

SEQ ID NO: 9072 - RNA, 19 nt, Homo sapiens
  misc_RNA (1)...(19): siRNA sense strand
uccaauauaucaagcacaa

SEQ ID NO: 9073 - RNA, 19 nt, Homo sapiens
  misc_RNA (1)...(19): siRNA sense strand
accaaacaccugcaacuua

SEQ ID NO: 9074 - RNA, 19 nt, Homo sapiens
  misc_RNA (1)...(19): siRNA sense strand
gccuagauauuaaagagau

SEQ ID NO: 9075 - RNA, 19 nt, Homo sapiens
  misc_RNA (1)...(19): siRNA sense strand
ggaguuucccauacgaauu

SEQ ID NO: 9076 - RNA, 19 nt, Homo sapiens
  misc_RNA (1)...(19): siRNA sense strand
agauucagccacaguauuu

SEQ ID NO: 9077 - RNA, 19 nt, Homo sapiens
  misc_RNA (1)...(19): siRNA sense strand
uagcuagccuaugcaauau

SEQ ID NO: 9078 - RNA, 19 nt, Homo sapiens
  misc_RNA (1)...(19): siRNA sense strand
gcagggacagaaacaguug

SEQ ID NO: 9079 - RNA, 19 nt, Homo sapiens
  misc_RNA (1)...(19): siRNA sense strand
gggcauauauccgguacuc

SEQ ID NO: 9080 - RNA, 19 nt, Homo sapiens
  misc_RNA (1)...(19): siRNA sense strand
ccaaggacacauacaacaa

SEQ ID NO: 9081 - RNA, 19 nt, Homo sapiens
  misc_RNA (1)...(19): siRNA sense strand
aagaugaccauuccuuuga

SEQ ID NO: 9082 - RNA, 19 nt, Homo sapiens
  misc_RNA (1)...(19): siRNA sense strand
ucaucaagcuuucccuaca

SEQ ID NO: 9083 - RNA, 19 nt, Homo sapiens
  misc_RNA (1)...(19): siRNA sense strand
gguuguugcuguaucuguu

SEQ ID NO: 9084 - RNA, 19 nt, Homo sapiens
  misc_RNA (1)...(19): siRNA sense strand
gguuggagacuacaaugaa

SEQ ID NO: 9085 - RNA, 19 nt, Homo sapiens
  misc_RNA (1)...(19): siRNA sense strand
ucaaagaugaccauuccuu

SEQ ID NO: 9086 - RNA, 19 nt, Homo sapiens
  misc_RNA (1)...(19): siRNA sense strand
cgaugguggugccaaauuc

SEQ ID NO: 9087 - RNA, 19 nt, Homo sapiens
  misc_RNA (1)...(19): siRNA sense strand
acaaugaucagcucaauac

SEQ ID NO: 9088 - RNA, 19 nt, Homo sapiens
  misc_RNA (1)...(19): siRNA sense strand
cagggaaccuuugauaguc

SEQ ID NO: 9089 - RNA, 19 nt, Homo sapiens
  misc_RNA (1)...(19): siRNA sense strand
cgagagaccacaggaauuc

SEQ ID NO: 9090 - RNA, 19 nt, Homo sapiens
  misc_RNA (1)...(19): siRNA sense strand
gccacaguauuugcccuua

SEQ ID NO: 9091 - RNA, 19 nt, Homo sapiens
  misc_RNA (1)...(19): siRNA sense strand
agacaucuguaucaucaag

SEQ ID NO: 9092 - RNA, 19 nt, Homo sapiens
  misc_RNA (1)...(19): siRNA sense strand
gaccauuccuuugaguuag

SEQ ID NO: 9093 - RNA, 19 nt, Homo sapiens
  misc_RNA (1)...(19): siRNA sense strand
gcuaccucauccuggcuua

SEQ ID NO: 9094 - RNA, 19 nt, Homo sapiens
  misc_RNA (1)...(19): siRNA sense strand
uagccuaugcaauaugaua

SEQ ID NO: 9095 - RNA, 19 nt, Homo sapiens
  misc_RNA (1)...(19): siRNA sense strand
ggagagugaaauagaugaa

SEQ ID NO: 9096 - RNA, 19 nt, Homo sapiens
  misc_RNA (1)...(19): siRNA sense strand
guuggagagugaaauagau

SEQ ID NO: 9097 - RNA, 19 nt, Homo sapiens
  misc_RNA (1)...(19): siRNA sense strand
uaaggaagaaucugugaag

SEQ ID NO: 9098 - RNA, 19 nt, Homo sapiens
  misc_RNA (1)...(19): siRNA sense strand
ggaaaagacauaugaaugg

SEQ ID NO: 9099 - RNA, 19 nt, Homo sapiens
  misc_RNA (1)...(19): siRNA sense strand
acaccaaagucggaaucua

SEQ ID NO: 9100 - RNA, 19 nt, Homo sapiens
  misc_RNA (1)...(19): siRNA sense strand
gaugaccauuccuuugagu

SEQ ID NO: 9101 - RNA, 19 nt, Homo sapiens
  misc_RNA (1)...(19): siRNA sense strand
ccugauggacuucauguug

SEQ ID NO: 9102 - RNA, 19 nt, Homo sapiens
  misc_RNA (1)...(19): siRNA sense strand
gaccaaacaccugcaacuu

SEQ ID NO: 9103 - RNA, 19 nt, Homo sapiens
  misc_RNA (1)...(19): siRNA sense strand
ucagggaaccuuugauagu

SEQ ID NO: 9104 - RNA, 19 nt, Homo sapiens
  misc_RNA (1)...(19): siRNA sense strand
guuagaugaaacugcauua

SEQ ID NO: 9105 - RNA, 19 nt, Homo sapiens
  misc_RNA (1)...(19): siRNA sense strand
ccgguacucuggagaauac

SEQ ID NO: 9106 - RNA, 19 nt, Homo sapiens
  misc_RNA (1)...(19): siRNA sense strand
gaagaaucugugaagcuau

SEQ ID NO: 9107 - RNA, 19 nt, Homo sapiens
  misc_RNA (1)...(19): siRNA sense strand
gaauuaccacaucccaaau

SEQ ID NO: 9108 - RNA, 19 nt, Homo sapiens
  misc_RNA (1)...(19): siRNA sense strand
gaucuaucaaggugaagaa

SEQ ID NO: 9109 - RNA, 19 nt, Homo sapiens
  misc_RNA (1)...(19): siRNA sense strand
ggaaccagcaugaagaacu

SEQ ID NO: 9110 - RNA, 19 nt, Homo sapiens
  misc_RNA (1)...(19): siRNA sense strand
gagcgaaacuccaucuuaa

SEQ ID NO: 9111 - RNA, 19 nt, Homo sapiens
  misc_RNA (1)...(19): siRNA sense strand
gcaggagaaucgcuuaaau

SEQ ID NO: 9112 - RNA, 19 nt, Homo sapiens
  misc_RNA (1)...(19): siRNA sense strand
gcuaaugugagacgaauuu

SEQ ID NO: 9113 - RNA, 19 nt, Homo sapiens
  misc_RNA (1)...(19): siRNA sense strand
ccugacaccuuuacaccua

SEQ ID NO: 9114 - RNA, 19 nt, Homo sapiens
  misc_RNA (1)...(19): siRNA sense strand
guaccaugucuuaaacuua

SEQ ID NO: 9115 - RNA, 19 nt, Homo sapiens
  misc_RNA (1)...(19): siRNA sense strand
gcucuuucguguguaguaa

SEQ ID NO: 9116 - RNA, 19 nt, Homo sapiens
  misc_RNA (1)...(19): siRNA sense strand
agagcgaaacuccaucuua

SEQ ID NO: 9117 - RNA, 19 nt, Homo sapiens
  misc_RNA (1)...(19): siRNA sense strand
cgaucugccugacaccuuu

SEQ ID NO: 9118 - RNA, 19 nt, Homo sapiens
  misc_RNA (1)...(19): siRNA sense strand
gcccgaauccucacugcua

SEQ ID NO: 9119 - RNA, 19 nt, Homo sapiens
  misc_RNA (1)...(19): siRNA sense strand
uaaauucccaguaccaugu

SEQ ID NO: 9120 - RNA, 19 nt, Homo sapiens
  misc_RNA (1)...(19): siRNA sense strand
uaugaugguuucuuuccuu

SEQ ID NO: 9121 - RNA, 19 nt, Homo sapiens
  misc_RNA (1)...(19): siRNA sense strand
ccaguaccaugucuuaaac

SEQ ID NO: 9122 - RNA, 19 nt, Homo sapiens
  misc_RNA (1)...(19): siRNA sense strand
cgacagagcgaaacuccau

SEQ ID NO: 9123 - RNA, 19 nt, Homo sapiens
  misc_RNA (1)...(19): siRNA sense strand
gauguuugcuuuuccauuc

SEQ ID NO: 9124 - RNA, 19 nt, Homo sapiens
  misc_RNA (1)...(19): siRNA sense strand
cugaguuacuucauuuaga

SEQ ID NO: 9125 - RNA, 19 nt, Homo sapiens
  misc_RNA (1)...(19): siRNA sense strand
gaauaugaugguuucuuuc

SEQ ID NO: 9126 - RNA, 19 nt, Homo sapiens
  misc_RNA (1)...(19): siRNA sense strand
gcgaaacuccaucuuaaaa

SEQ ID NO: 9127 - RNA, 19 nt, Homo sapiens
  misc_RNA (1)...(19): siRNA sense strand
gaucugccugacaccuuua

SEQ ID NO: 9128 - RNA, 19 nt, Homo sapiens
  misc_RNA (1)...(19): siRNA sense strand
cccgaauccucacugcuaa

SEQ ID NO: 9129 - RNA, 19 nt, Homo sapiens
  misc_RNA (1)...(19): siRNA sense strand
uuccugaguuacuucauuu

SEQ ID NO: 9130 - RNA, 19 nt, Homo sapiens
  misc_RNA (1)...(19): siRNA sense strand
aaggugaccagccuacuuu

SEQ ID NO: 9131 - RNA, 19 nt, Homo sapiens
  misc_RNA (1)...(19): siRNA sense strand
caggagaaucgcuuaaauc

SEQ ID NO: 9132 - RNA, 19 nt, Homo sapiens
  misc_RNA (1)...(19): siRNA sense strand
uaaggugaccagccuacuu

SEQ ID NO: 9133 - RNA, 19 nt, Homo sapiens
  misc_RNA (1)...(19): siRNA sense strand
aauccucacugcuaaugug

SEQ ID NO: 9134 - RNA, 19 nt, Homo sapiens
  misc_RNA (1)...(19): siRNA sense strand
cccaguaccaugucuuaaa

SEQ ID NO: 9135 - RNA, 19 nt, Homo sapiens
  misc_RNA (1)...(19): siRNA sense strand
gaggcaggagaaucgcuua

SEQ ID NO: 9136 - RNA, 19 nt, Homo sapiens
  misc_RNA (1)...(19): siRNA sense strand
guaaggaaaauaacgauug

SEQ ID NO: 9137 - RNA, 19 nt, Homo sapiens
  misc_RNA (1)...(19): siRNA sense strand
ggcaggagaaucgcuuaaa

SEQ ID NO: 9138 - RNA, 19 nt, Homo sapiens
  misc_RNA (1)...(19): siRNA sense strand
aguaccaugucuuaaacuu

SEQ ID NO: 9139 - RNA, 19 nt, Homo sapiens
  misc_RNA (1)...(19): siRNA sense strand
gaugguuucuuuccuuccu

SEQ ID NO: 9140 - RNA, 19 nt, Homo sapiens
  misc_RNA (1)...(19): siRNA sense strand
cgaauccucacugcuaaug

SEQ ID NO: 9141 - RNA, 19 nt, Homo sapiens
  misc_RNA (1)...(19): siRNA sense strand
gaacagagcaggacauuug

SEQ ID NO: 9142 - RNA, 19 nt, Homo sapiens
  misc_RNA (1)...(19): siRNA sense strand
gcaacuggcuccucaauga

SEQ ID NO: 9143 - RNA, 19 nt, Homo sapiens
  misc_RNA (1)...(19): siRNA sense strand
ccaaugagauuuccgcaua

SEQ ID NO: 9144 - RNA, 19 nt, Homo sapiens
  misc_RNA (1)...(19): siRNA sense strand
cgucaaaucucucauauug

SEQ ID NO: 9145 - RNA, 19 nt, Homo sapiens
  misc_RNA (1)...(19): siRNA sense strand
guacggaugugcauauaaa

SEQ ID NO: 9146 - RNA, 19 nt, Homo sapiens
  misc_RNA (1)...(19): siRNA sense strand
ucacauuacucuggaauua

SEQ ID NO: 9147 - RNA, 19 nt, Homo sapiens
  misc_RNA (1)...(19): siRNA sense strand
aaucugaggugguuuauuu

SEQ ID NO: 9148 - RNA, 19 nt, Homo sapiens
  misc_RNA (1)...(19): siRNA sense strand
gaagaaagagccacaguga

SEQ ID NO: 9149 - RNA, 19 nt, Homo sapiens
  misc_RNA (1)...(19): siRNA sense strand
gcagagcaauggaauucua

SEQ ID NO: 9150 - RNA, 19 nt, Homo sapiens
  misc_RNA (1)...(19): siRNA sense strand
ggagggagaugcagagaga

SEQ ID NO: 9151 - RNA, 19 nt, Homo sapiens
  misc_RNA (1)...(19): siRNA sense strand
caacauggaaaucacauua

SEQ ID NO: 9152 - RNA, 19 nt, Homo sapiens
  misc_RNA (1)...(19): siRNA sense strand
gcauugauucucaguauua

SEQ ID NO: 9153 - RNA, 19 nt, Homo sapiens
  misc_RNA (1)...(19): siRNA sense strand
gaggaauaccuuucaguua

SEQ ID NO: 9154 - RNA, 19 nt, Homo sapiens
  misc_RNA (1)...(19): siRNA sense strand
ggagagcccuugguuaaug

SEQ ID NO: 9155 - RNA, 19 nt, Homo sapiens
  misc_RNA (1)...(19): siRNA sense strand
caaacacacucaucauuuc

SEQ ID NO: 9156 - RNA, 19 nt, Homo sapiens
  misc_RNA (1)...(19): siRNA sense strand
gaaauccaccugacuguga

SEQ ID NO: 9157 - RNA, 19 nt, Homo sapiens
  misc_RNA (1)...(19): siRNA sense strand
gcaauggaauucuacuuca

SEQ ID NO: 9158 - RNA, 19 nt, Homo sapiens
  misc_RNA (1)...(19): siRNA sense strand
aauggaaguuugcagauua

SEQ ID NO: 9159 - RNA, 19 nt, Homo sapiens
  misc_RNA (1)...(19): siRNA sense strand
gaaguuugcagauuaggua

SEQ ID NO: 9160 - RNA, 19 nt, Homo sapiens
  misc_RNA (1)...(19): siRNA sense strand
ccacuugugucaaauaaau

SEQ ID NO: 9161 - RNA, 19 nt, Homo sapiens
  misc_RNA (1)...(19): siRNA sense strand
gaauucagcuuccuucaac

SEQ ID NO: 9162 - RNA, 19 nt, Homo sapiens
  misc_RNA (1)...(19): siRNA sense strand
ccaaugaaacacacacuua

SEQ ID NO: 9163 - RNA, 19 nt, Homo sapiens
  misc_RNA (1)...(19): siRNA sense strand
caaagggagauuccaguua

SEQ ID NO: 9164 - RNA, 19 nt, Homo sapiens
  misc_RNA (1)...(19): siRNA sense strand
gcaguggugauauuuauuu

SEQ ID NO: 9165 - RNA, 19 nt, Homo sapiens
  misc_RNA (1)...(19): siRNA sense strand
agagagaaauguuaaagga

SEQ ID NO: 9166 - RNA, 19 nt, Homo sapiens
  misc_RNA (1)...(19): siRNA sense strand
ggaacugcauugauucuca

SEQ ID NO: 9167 - RNA, 19 nt, Homo sapiens
  misc_RNA (1)...(19): siRNA sense strand
ccaguuacuuggaucuuaa

SEQ ID NO: 9168 - RNA, 19 nt, Homo sapiens
  misc_RNA (1)...(19): siRNA sense strand
gaguggauguuaccgaauu

SEQ ID NO: 9169 - RNA, 19 nt, Homo sapiens
  misc_RNA (1)...(19): siRNA sense strand
aaagugcucugcuguauag

SEQ ID NO: 9170 - RNA, 19 nt, Homo sapiens
  misc_RNA (1)...(19): siRNA sense strand
ggaauaccuuucaguuauc

SEQ ID NO: 9171 - RNA, 19 nt, Homo sapiens
  misc_RNA (1)...(19): siRNA sense strand
uaugugagcucuuucuaug

SEQ ID NO: 9172 - RNA, 19 nt, Homo sapiens
  misc_RNA (1)...(19): siRNA sense strand
gaagcaguaucgccgagaa

SEQ ID NO: 9173 - RNA, 19 nt, Homo sapiens
  misc_RNA (1)...(19): siRNA sense strand
agaagaagcuguggucaug

SEQ ID NO: 9174 - RNA, 19 nt, Homo sapiens
  misc_RNA (1)...(19): siRNA sense strand
aggaauaccuuucaguuau

SEQ ID NO: 9175 - RNA, 19 nt, Homo sapiens
  misc_RNA (1)...(19): siRNA sense strand
ggaaauguguccuucucau

SEQ ID NO: 9176 - RNA, 19 nt, Homo sapiens
  misc_RNA (1)...(19): siRNA sense strand
gguacaagcuagauagaca

SEQ ID NO: 9177 - RNA, 19 nt, Homo sapiens
  misc_RNA (1)...(19): siRNA sense strand
gaauucuacuucacagaga

SEQ ID NO: 9178 - RNA, 19 nt, Homo sapiens
  misc_RNA (1)...(19): siRNA sense strand
ggaaugaauggacuaguga

SEQ ID NO: 9179 - RNA, 19 nt, Homo sapiens
  misc_RNA (1)...(19): siRNA sense strand
cagagaggcuuucuaggau

SEQ ID NO: 9180 - RNA, 19 nt, Homo sapiens
  misc_RNA (1)...(19): siRNA sense strand
uaaaggagcgucucuucaa

SEQ ID NO: 9181 - RNA, 19 nt, Homo sapiens
  misc_RNA (1)...(19): siRNA sense strand
ccagcuaccuccugauguu

SEQ ID NO: 9182 - RNA, 19 nt, Homo sapiens
  misc_RNA (1)...(19): siRNA sense strand
uagcaguggugauauuuau

SEQ ID NO: 9183 - RNA, 19 nt, Homo sapiens
  misc_RNA (1)...(19): siRNA sense strand
acacugagcuuccgaacca

SEQ ID NO: 9184 - RNA, 19 nt, Homo sapiens
  misc_RNA (1)...(19): siRNA sense strand
gacaaacacacucaucauu

SEQ ID NO: 9185 - RNA, 19 nt, Homo sapiens
  misc_RNA (1)...(19): siRNA sense strand
gaaaaugagucaaaagucu

SEQ ID NO: 9186 - RNA, 19 nt, Homo sapiens
  misc_RNA (1)...(19): siRNA sense strand
gaagauuaacagagaagaa

SEQ ID NO: 9187 - RNA, 19 nt, Homo sapiens
  misc_RNA (1)...(19): siRNA sense strand
caagcuagauagacaucaa

SEQ ID NO: 9188 - RNA, 19 nt, Homo sapiens
  misc_RNA (1)...(19): siRNA sense strand
caauggaaguuugcagauu

SEQ ID NO: 9189 - RNA, 19 nt, Homo sapiens
  misc_RNA (1)...(19): siRNA sense strand
ucacagauuucaucaggau

SEQ ID NO: 9190 - RNA, 19 nt, Homo sapiens
  misc_RNA (1)...(19): siRNA sense strand
acaaacacacucaucauuu

SEQ ID NO: 9191 - RNA, 19 nt, Homo sapiens
  misc_RNA (1)...(19): siRNA sense strand
ggaugcggaucgaagugua

SEQ ID NO: 9192 - RNA, 19 nt, Homo sapiens
  misc_RNA (1)...(19): siRNA sense strand
gggcagagagaaauguuaa

SEQ ID NO: 9193 - RNA, 19 nt, Homo sapiens
  misc_RNA (1)...(19): siRNA sense strand
ccgcggagaucagucauuu

SEQ ID NO: 9194 - RNA, 19 nt, Homo sapiens
  misc_RNA (1)...(19): siRNA sense strand
uaagcugccuuccacuauu

SEQ ID NO: 9195 - RNA, 19 nt, Homo sapiens
  misc_RNA (1)...(19): siRNA sense strand
acaaagugcucugcuguau

SEQ ID NO: 9196 - RNA, 19 nt, Homo sapiens
  misc_RNA (1)...(19): siRNA sense strand
caacagccagcucuucauu

SEQ ID NO: 9197 - RNA, 19 nt, Homo sapiens
  misc_RNA (1)...(19): siRNA sense strand
gaaauguguccuucucaug

SEQ ID NO: 9198 - RNA, 19 nt, Homo sapiens
  misc_RNA (1)...(19): siRNA sense strand
gcaaagggagauuccaguu

SEQ ID NO: 9199 - RNA, 19 nt, Homo sapiens
  misc_RNA (1)...(19): siRNA sense strand
gcucugcuguauagacuug

SEQ ID NO: 9200 - RNA, 19 nt, Homo sapiens
  misc_RNA (1)...(19): siRNA sense strand
ugauagcaguggugauauu

SEQ ID NO: 9201 - RNA, 19 nt, Homo sapiens
  misc_RNA (1)...(19): siRNA sense strand
ccagagaaaugaucacacu

SEQ ID NO: 9202 - RNA, 19 nt, Homo sapiens
  misc_RNA (1)...(19): siRNA sense strand
gaggggaacugcauugauu

SEQ ID NO: 9203 - RNA, 19 nt, Homo sapiens
  misc_RNA (1)...(19): siRNA sense strand
caaagugcucugcuguaua

SEQ ID NO: 9204 - RNA, 19 nt, Homo sapiens
  misc_RNA (1)...(19): siRNA sense strand
cagagaaaguuacgcaaag

SEQ ID NO: 9205 - RNA, 19 nt, Homo sapiens
  misc_RNA (1)...(19): siRNA sense strand
gaagaaccaaugaaacaca

SEQ ID NO: 9206 - RNA, 19 nt, Homo sapiens
  misc_RNA (1)...(19): siRNA sense strand
caacuucaccguggacaaa

SEQ ID NO: 9207 - RNA, 19 nt, Homo sapiens
  misc_RNA (1)...(19): siRNA sense strand
gagacguuauuucuuugaa

SEQ ID NO: 9208 - RNA, 19 nt, Homo sapiens
  misc_RNA (1)...(19): siRNA sense strand
cacacgaacuccgagcuua

SEQ ID NO: 9209 - RNA, 19 nt, Homo sapiens
  misc_RNA (1)...(19): siRNA sense strand
cagcaccuauggacacuug

SEQ ID NO: 9210 - RNA, 19 nt, Homo sapiens
  misc_RNA (1)...(19): siRNA sense strand
uauaauggaguggauguua

SEQ ID NO: 9211 - RNA, 19 nt, Homo sapiens
  misc_RNA (1)...(19): siRNA sense strand
aaagggagauuccaguuac

SEQ ID NO: 9212 - RNA, 19 nt, Homo sapiens
  misc_RNA (1)...(19): siRNA sense strand
gcaaagaaaaugagucaaa

SEQ ID NO: 9213 - RNA, 19 nt, Homo sapiens
  misc_RNA (1)...(19): siRNA sense strand
gagaaggacaacauggaaa

SEQ ID NO: 9214 - RNA, 19 nt, Homo sapiens
  misc_RNA (1)...(19): siRNA sense strand
caaauugaccuuggagaga

SEQ ID NO: 9215 - RNA, 19 nt, Homo sapiens
  misc_RNA (1)...(19): siRNA sense strand
ccagcucucucguuucuuc

SEQ ID NO: 9216 - RNA, 19 nt, Homo sapiens
  misc_RNA (1)...(19): siRNA sense strand
caaugagauuuccgcauau

SEQ ID NO: 9217 - RNA, 19 nt, Homo sapiens
  misc_RNA (1)...(19): siRNA sense strand
gcagucacccacucccuuu

SEQ ID NO: 9218 - RNA, 19 nt, Homo sapiens
  misc_RNA (1)...(19): siRNA sense strand
cggaaugaauggacuagug

SEQ ID NO: 9219 - RNA, 19 nt, Homo sapiens
  misc_RNA (1)...(19): siRNA sense strand
ggacaaacacacucaucau

SEQ ID NO: 9220 - RNA, 19 nt, Homo sapiens
  misc_RNA (1)...(19): siRNA sense strand
gagaaaguuacgcaaagaa

SEQ ID NO: 9221 - RNA, 19 nt, Homo sapiens
  misc_RNA (1)...(19): siRNA sense strand
gauagcaguggugauauuu

SEQ ID NO: 9222 - RNA, 19 nt, Homo sapiens
  misc_RNA (1)...(19): siRNA sense strand
cagcuuccuucaacacuga

SEQ ID NO: 9223 - RNA, 19 nt, Homo sapiens
  misc_RNA (1)...(19): siRNA sense strand
ugaauggacuagugacaca

SEQ ID NO: 9224 - RNA, 19 nt, Homo sapiens
  misc_RNA (1)...(19): siRNA sense strand
ggacagucaccaaggaaug

SEQ ID NO: 9225 - RNA, 19 nt, Homo sapiens
  misc_RNA (1)...(19): siRNA sense strand
gacaaagugcucugcugua

SEQ ID NO: 9226 - RNA, 19 nt, Homo sapiens
  misc_RNA (1)...(19): siRNA sense strand
aagugaagauuaacagaga

SEQ ID NO: 9227 - RNA, 19 nt, Homo sapiens
  misc_RNA (1)...(19): siRNA sense strand
acagagaggcuuucuagga

SEQ ID NO: 9228 - RNA, 19 nt, Homo sapiens
  misc_RNA (1)...(19): siRNA sense strand
uugaucagcuuccucagaa

SEQ ID NO: 9229 - RNA, 19 nt, Homo sapiens
  misc_RNA (1)...(19): siRNA sense strand
uuaaagccaugcagagcaa

SEQ ID NO: 9230 - RNA, 19 nt, Homo sapiens
  misc_RNA (1)...(19): siRNA sense strand
ccacagaagugaccuuuuc

SEQ ID NO: 9231 - RNA, 19 nt, Homo sapiens
  misc_RNA (1)...(19): siRNA sense strand
gcuaagcugccuuccacua

SEQ ID NO: 9232 - RNA, 19 nt, Homo sapiens
  misc_RNA (1)...(19): siRNA sense strand
gauggcaagcucaaacuga

SEQ ID NO: 9233 - RNA, 19 nt, Homo sapiens
  misc_RNA (1)...(19): siRNA sense strand
agagaaaguuacgcaaaga

SEQ ID NO: 9234 - RNA, 19 nt, Homo sapiens
  misc_RNA (1)...(19): siRNA sense strand
gcacaaagaaacaagucau

SEQ ID NO: 9235 - RNA, 19 nt, Homo sapiens
  misc_RNA (1)...(19): siRNA sense strand
gaucagucauuuuggaauu

SEQ ID NO: 9236 - RNA, 19 nt, Homo sapiens
  misc_RNA (1)...(19): siRNA sense strand
acaauaguccuuucccaaa

SEQ ID NO: 9237 - RNA, 19 nt, Homo sapiens
  misc_RNA (1)...(19): siRNA sense strand
cugcauugauucucaguau

SEQ ID NO: 9238 - RNA, 19 nt, Homo sapiens
  misc_RNA (1)...(19): siRNA sense strand
gccgucaaaucucucauau

SEQ ID NO: 9239 - RNA, 19 nt, Homo sapiens
  misc_RNA (1)...(19): siRNA sense strand
ccugaugcauuuaccuuug

SEQ ID NO: 9240 - RNA, 19 nt, Homo sapiens
  misc_RNA (1)...(19): siRNA sense strand
gagacuucauaccuucauu

SEQ ID NO: 9241 - RNA, 19 nt, Homo sapiens
  misc_RNA (1)...(19): siRNA sense strand
gaagaaaguucaacaagga

SEQ ID NO: 9242 - RNA, 19 nt, Homo sapiens
  misc_RNA (1)...(19): siRNA sense strand
ccaccaaccugauccguaa

SEQ ID NO: 9243 - RNA, 19 nt, Homo sapiens
  misc_RNA (1)...(19): siRNA sense strand
caauauuccugcuuugauu

SEQ ID NO: 9244 - RNA, 19 nt, Homo sapiens
  misc_RNA (1)...(19): siRNA sense strand
acaaggaccugcauaaaca

SEQ ID NO: 9245 - RNA, 19 nt, Homo sapiens
  misc_RNA (1)...(19): siRNA sense strand
caacaaggaccugcauaaa

SEQ ID NO: 9246 - RNA, 19 nt, Homo sapiens
  misc_RNA (1)...(19): siRNA sense strand
ggaaugcuaugcguucaau

SEQ ID NO: 9247 - RNA, 19 nt, Homo sapiens
  misc_RNA (1)...(19): siRNA sense strand
gcauaaacaggcaauauuc

SEQ ID NO: 9248 - RNA, 19 nt, Homo sapiens
  misc_RNA (1)...(19): siRNA sense strand
gagccgagguggacaaggu

SEQ ID NO: 9249 - RNA, 19 nt, Homo sapiens
  misc_RNA (1)...(19): siRNA sense strand
ggaaggcacagucugauuc

SEQ ID NO: 9250 - RNA, 19 nt, Homo sapiens
  misc_RNA (1)...(19): siRNA sense strand
ccagaaggacuuuauggaa

SEQ ID NO: 9251 - RNA, 19 nt, Homo sapiens
  misc_RNA (1)...(19): siRNA sense strand
gaacaucuccccuccaaga

SEQ ID NO: 9252 - RNA, 19 nt, Homo sapiens
  misc_RNA (1)...(19): siRNA sense strand
ucaacaaggaccugcauaa

SEQ ID NO: 9253 - RNA, 19 nt, Homo sapiens
  misc_RNA (1)...(19): siRNA sense strand
gaaggaggaagaaaguuca

SEQ ID NO: 9254 - RNA, 19 nt, Homo sapiens
  misc_RNA (1)...(19): siRNA sense strand
ggaccacuccagagaauuc

SEQ ID NO: 9255 - RNA, 19 nt, Homo sapiens
  misc_RNA (1)...(19): siRNA sense strand
gcaauauuccugcuuugau

SEQ ID NO: 9256 - RNA, 19 nt, Homo sapiens
  misc_RNA (1)...(19): siRNA sense strand
gcacagaaggaggaagaaa

SEQ ID NO: 9257 - RNA, 19 nt, Homo sapiens
  misc_RNA (1)...(19): siRNA sense strand
gcucugacagcauuacuga

SEQ ID NO: 9258 - RNA, 19 nt, Homo sapiens
  misc_RNA (1)...(19): siRNA sense strand
caggaccacuccagagaau

SEQ ID NO: 9259 - RNA, 19 nt, Homo sapiens
  misc_RNA (1)...(19): siRNA sense strand
gcaggaccacuccagagaa

SEQ ID NO: 9260 - RNA, 19 nt, Homo sapiens
  misc_RNA (1)...(19): siRNA sense strand
gaggaagaaaguucaacaa

SEQ ID NO: 9261 - RNA, 19 nt, Homo sapiens
  misc_RNA (1)...(19): siRNA sense strand
ggaggaagaaaguucaaca

SEQ ID NO: 9262 - RNA, 19 nt, Homo sapiens
  misc_RNA (1)...(19): siRNA sense strand
gggaggaauacgugcauuu

SEQ ID NO: 9263 - RNA, 19 nt, Homo sapiens
  misc_RNA (1)...(19): siRNA sense strand
uggacgggcucaucuacaa

SEQ ID NO: 9264 - RNA, 19 nt, Homo sapiens
  misc_RNA (1)...(19): siRNA sense strand
ucuaccacgugacagauuu

SEQ ID NO: 9265 - RNA, 19 nt, Homo sapiens
  misc_RNA (1)...(19): siRNA sense strand
guccgaugcuuccugaaug

SEQ ID NO: 9266 - RNA, 19 nt, Homo sapiens
  misc_RNA (1)...(19): siRNA sense strand
caguggcucugacagcauu

SEQ ID NO: 9267 - RNA, 19 nt, Homo sapiens
  misc_RNA (1)...(19): siRNA sense strand
caucuacaccugccaagug

SEQ ID NO: 9268 - RNA, 19 nt, Homo sapiens
  misc_RNA (1)...(19): siRNA sense strand
gaacggcaggaaugcuaug

SEQ ID NO: 9269 - RNA, 19 nt, Homo sapiens
  misc_RNA (1)...(19): siRNA sense strand
ucuacaaccgggaggaaua

SEQ ID NO: 9270 - RNA, 19 nt, Homo sapiens
  misc_RNA (1)...(19): siRNA sense strand
gcccauaggcgaguacuuc

SEQ ID NO: 9271 - RNA, 19 nt, Homo sapiens
  misc_RNA (1)...(19): siRNA sense strand
gaaggcacagucugauucu

SEQ ID NO: 9272 - RNA, 19 nt, Homo sapiens
  misc_RNA (1)...(19): siRNA sense strand
ccacgugacagauuucuac

SEQ ID NO: 9273 - RNA, 19 nt, Homo sapiens
  misc_RNA (1)...(19): siRNA sense strand
ggcaauauuccugcuuuga

SEQ ID NO: 9274 - RNA, 19 nt, Homo sapiens
  misc_RNA (1)...(19): siRNA sense strand
ucaauagccagaaggacuu

SEQ ID NO: 9275 - RNA, 19 nt, Homo sapiens
  misc_RNA (1)...(19): siRNA sense strand
ugcauaaacaggcaauauu

SEQ ID NO: 9276 - RNA, 19 nt, Homo sapiens
  misc_RNA (1)...(19): siRNA sense strand
gaauggacaggaggaaaca

SEQ ID NO: 9277 - RNA, 19 nt, Homo sapiens
  misc_RNA (1)...(19): siRNA sense strand
gccagaaggacuuuaugga

SEQ ID NO: 9278 - RNA, 19 nt, Homo sapiens
  misc_RNA (1)...(19): siRNA sense strand
ggaacggcaggaaugcuau

SEQ ID NO: 9279 - RNA, 19 nt, Homo sapiens
  misc_RNA (1)...(19): siRNA sense strand
cauaggcgaguacuucaau

SEQ ID NO: 9280 - RNA, 19 nt, Homo sapiens
  misc_RNA (1)...(19): siRNA sense strand
agaaggaggaagaaaguuc

SEQ ID NO: 9281 - RNA, 19 nt, Homo sapiens
  misc_RNA (1)...(19): siRNA sense strand
acagauuucuacccagaca

SEQ ID NO: 9282 - RNA, 19 nt, Homo sapiens
  misc_RNA (1)...(19): siRNA sense strand
gagcugauggagccacuca

SEQ ID NO: 9283 - RNA, 19 nt, Homo sapiens
  misc_RNA (1)...(19): siRNA sense strand
auaggcgaguacuucaaua

SEQ ID NO: 9284 - RNA, 19 nt, Homo sapiens
  misc_RNA (1)...(19): siRNA sense strand
aggaauacgugcauuuuga

SEQ ID NO: 9285 - RNA, 19 nt, Homo sapiens
  misc_RNA (1)...(19): siRNA sense strand
ucugacagcauuacugaug

SEQ ID NO: 9286 - RNA, 19 nt, Homo sapiens
  misc_RNA (1)...(19): siRNA sense strand
ggaggaauacgugcauuuu

SEQ ID NO: 9287 - RNA, 19 nt, Homo sapiens
  misc_RNA (1)...(19): siRNA sense strand
ggacaucuucacgcacaga

SEQ ID NO: 9288 - RNA, 19 nt, Homo sapiens
  misc_RNA (1)...(19): siRNA sense strand
ugacagcauuacugauggu

SEQ ID NO: 9289 - RNA, 19 nt, Homo sapiens
  misc_RNA (1)...(19): siRNA sense strand
acagaaggaggaagaaagu

SEQ ID NO: 9290 - RNA, 19 nt, Homo sapiens
  misc_RNA (1)...(19): siRNA sense strand
ggaguuccuagcagugaug

SEQ ID NO: 9291 - RNA, 19 nt, Homo sapiens
  misc_RNA (1)...(19): siRNA sense strand
gggaguuccuagcagugau

SEQ ID NO: 9292 - RNA, 19 nt, Homo sapiens
  misc_RNA (1)...(19): siRNA sense strand
caggaaugcuaugcguuca

SEQ ID NO: 9293 - RNA, 19 nt, Homo sapiens
  misc_RNA (1)...(19): siRNA sense strand
gugaacaucuccccuccaa

SEQ ID NO: 9294 - RNA, 19 nt, Homo sapiens
  misc_RNA (1)...(19): siRNA sense strand
accacgaccugcuugucua

SEQ ID NO: 9295 - RNA, 19 nt, Homo sapiens
  misc_RNA (1)...(19): siRNA sense strand
caaccugauccguaaugga

SEQ ID NO: 9296 - RNA, 19 nt, Homo sapiens
  misc_RNA (1)...(19): siRNA sense strand
gaacaagccucuuugauua

SEQ ID NO: 9297 - RNA, 19 nt, Homo sapiens
  misc_RNA (1)...(19): siRNA sense strand
gaaugcagguuuagaugua

SEQ ID NO: 9298 - RNA, 19 nt, Homo sapiens
  misc_RNA (1)...(19): siRNA sense strand
ggaagaauuuaaccacuuu

SEQ ID NO: 9299 - RNA, 19 nt, Homo sapiens
  misc_RNA (1)...(19): siRNA sense strand
gaauaaagacugcagguuu

SEQ ID NO: 9300 - RNA, 19 nt, Homo sapiens
  misc_RNA (1)...(19): siRNA sense strand
gagcugagaucaugccauu

SEQ ID NO: 9301 - RNA, 19 nt, Homo sapiens
  misc_RNA (1)...(19): siRNA sense strand
gaauuuacaucugccauuu

SEQ ID NO: 9302 - RNA, 19 nt, Homo sapiens
  misc_RNA (1)...(19): siRNA sense strand
gaucugcucuuuaauuuca

SEQ ID NO: 9303 - RNA, 19 nt, Homo sapiens
  misc_RNA (1)...(19): siRNA sense strand
cgaaacaggugaaauuaau

SEQ ID NO: 9304 - RNA, 19 nt, Homo sapiens
  misc_RNA (1)...(19): siRNA sense strand
uaacuuagcaggugaugua

SEQ ID NO: 9305 - RNA, 19 nt, Homo sapiens
  misc_RNA (1)...(19): siRNA sense strand
gaacuugagugaagguuuc

SEQ ID NO: 9306 - RNA, 19 nt, Homo sapiens
  misc_RNA (1)...(19): siRNA sense strand
caaggaacauugcaaguau

SEQ ID NO: 9307 - RNA, 19 nt, Homo sapiens
  misc_RNA (1)...(19): siRNA sense strand
gggaugaacuccugguauu

SEQ ID NO: 9308 - RNA, 19 nt, Homo sapiens
  misc_RNA (1)...(19): siRNA sense strand
gaugauaaauuggagcuuu

SEQ ID NO: 9309 - RNA, 19 nt, Homo sapiens
  misc_RNA (1)...(19): siRNA sense strand
caccaagccuggccacuua

SEQ ID NO: 9310 - RNA, 19 nt, Homo sapiens
  misc_RNA (1)...(19): siRNA sense strand
gcacaacuuugaugaagau

SEQ ID NO: 9311 - RNA, 19 nt, Homo sapiens
  misc_RNA (1)...(19): siRNA sense strand
ggaguuccguguugaggua

SEQ ID NO: 9312 - RNA, 19 nt, Homo sapiens
  misc_RNA (1)...(19): siRNA sense strand
gaauugaccuguuuaccau

SEQ ID NO: 9313 - RNA, 19 nt, Homo sapiens
  misc_RNA (1)...(19): siRNA sense strand
gcugauuccuggauuaauu

SEQ ID NO: 9314 - RNA, 19 nt, Homo sapiens
  misc_RNA (1)...(19): siRNA sense strand
caacuuugaugaagaugaa

SEQ ID NO: 9315 - RNA, 19 nt, Homo sapiens
  misc_RNA (1)...(19): siRNA sense strand
ggaaucugacuucuacuua

SEQ ID NO: 9316 - RNA, 19 nt, Homo sapiens
  misc_RNA (1)...(19): siRNA sense strand
acacucagcuaauuacaaa

SEQ ID NO: 9317 - RNA, 19 nt, Homo sapiens
  misc_RNA (1)...(19): siRNA sense strand
ucagagcucuucauuauag

SEQ ID NO: 9318 - RNA, 19 nt, Homo sapiens
  misc_RNA (1)...(19): siRNA sense strand
uuucagagcucuucauuau

SEQ ID NO: 9319 - RNA, 19 nt, Homo sapiens
  misc_RNA (1)...(19): siRNA sense strand
gaacacaggagguagaguu

SEQ ID NO: 9320 - RNA, 19 nt, Homo sapiens
  misc_RNA (1)...(19): siRNA sense strand
ccacuacacucagcuaauu

SEQ ID NO: 9321 - RNA, 19 nt, Homo sapiens
  misc_RNA (1)...(19): siRNA sense strand
agacacagcuccucucuuc

SEQ ID NO: 9322 - RNA, 19 nt, Homo sapiens
  misc_RNA (1)...(19): siRNA sense strand
gggaagauccagagucuaa

SEQ ID NO: 9323 - RNA, 19 nt, Homo sapiens
  misc_RNA (1)...(19): siRNA sense strand
ggauucaggaggacaauua

SEQ ID NO: 9324 - RNA, 19 nt, Homo sapiens
  misc_RNA (1)...(19): siRNA sense strand
gaaguggaguggagcuuau

SEQ ID NO: 9325 - RNA, 19 nt, Homo sapiens
  misc_RNA (1)...(19): siRNA sense strand
ggacuuauuauuccucuuu

SEQ ID NO: 9326 - RNA, 19 nt, Homo sapiens
  misc_RNA (1)...(19): siRNA sense strand
ccugaacacuuuccaauug

SEQ ID NO: 9327 - RNA, 19 nt, Homo sapiens
  misc_RNA (1)...(19): siRNA sense strand
aaacgaaacaggugaaauu

SEQ ID NO: 9328 - RNA, 19 nt, Homo sapiens
  misc_RNA (1)...(19): siRNA sense strand
uaggauccauugauagaua

SEQ ID NO: 9329 - RNA, 19 nt, Homo sapiens
  misc_RNA (1)...(19): siRNA sense strand
ggaagaaucucuggaucug

SEQ ID NO: 9330 - RNA, 19 nt, Homo sapiens
  misc_RNA (1)...(19): siRNA sense strand
ggacccaggagacaaguua

SEQ ID NO: 9331 - RNA, 19 nt, Homo sapiens
  misc_RNA (1)...(19): siRNA sense strand
guacauaccacuacacuca

SEQ ID NO: 9332 - RNA, 19 nt, Homo sapiens
  misc_RNA (1)...(19): siRNA sense strand
ccaaguagcugggauuaca

SEQ ID NO: 9333 - RNA, 19 nt, Homo sapiens
  misc_RNA (1)...(19): siRNA sense strand
uauaaugggccaaauagua

SEQ ID NO: 9334 - RNA, 19 nt, Homo sapiens
  misc_RNA (1)...(19): siRNA sense strand
ggcaguggauggugacuuu

SEQ ID NO: 9335 - RNA, 19 nt, Homo sapiens
  misc_RNA (1)...(19): siRNA sense strand
gcaagagucugucucaaaa

SEQ ID NO: 9336 - RNA, 19 nt, Homo sapiens
  misc_RNA (1)...(19): siRNA sense strand
uagaugaauugaccuguuu

SEQ ID NO: 9337 - RNA, 19 nt, Homo sapiens
  misc_RNA (1)...(19): siRNA sense strand
guauugaaaucuccagcua

SEQ ID NO: 9338 - RNA, 19 nt, Homo sapiens
  misc_RNA (1)...(19): siRNA sense strand
ugaacaagccucuuugauu

SEQ ID NO: 9339 - RNA, 19 nt, Homo sapiens
  misc_RNA (1)...(19): siRNA sense strand
gugaugagcauuuacuuaa

SEQ ID NO: 9340 - RNA, 19 nt, Homo sapiens
  misc_RNA (1)...(19): siRNA sense strand
ccagacagcuccugaaggu

SEQ ID NO: 9341 - RNA, 19 nt, Homo sapiens
  misc_RNA (1)...(19): siRNA sense strand
ccaaaguacuuauguuucu

SEQ ID NO: 9342 - RNA, 19 nt, Homo sapiens
  misc_RNA (1)...(19): siRNA sense strand
gggugaggcugaagucaaa

SEQ ID NO: 9343 - RNA, 19 nt, Homo sapiens
  misc_RNA (1)...(19): siRNA sense strand
aauaaagacugcagguuug

SEQ ID NO: 9344 - RNA, 19 nt, Homo sapiens
  misc_RNA (1)...(19): siRNA sense strand
guuguuaggugcauauaug

SEQ ID NO: 9345 - RNA, 19 nt, Homo sapiens
  misc_RNA (1)...(19): siRNA sense strand
guaucucucucuuuaauuc

SEQ ID NO: 9346 - RNA, 19 nt, Homo sapiens
  misc_RNA (1)...(19): siRNA sense strand
caagagguauagggaguaa

SEQ ID NO: 9347 - RNA, 19 nt, Homo sapiens
  misc_RNA (1)...(19): siRNA sense strand
ggucagaguguauguugua

SEQ ID NO: 9348 - RNA, 19 nt, Homo sapiens
  misc_RNA (1)...(19): siRNA sense strand
uggaucugcucuuuaauuu

SEQ ID NO: 9349 - RNA, 19 nt, Homo sapiens
  misc_RNA (1)...(19): siRNA sense strand
ucagcaaacucucuauaau

SEQ ID NO: 9350 - RNA, 19 nt, Homo sapiens
  misc_RNA (1)...(19): siRNA sense strand
ggauggagguggagaagag

SEQ ID NO: 9351 - RNA, 19 nt, Homo sapiens
  misc_RNA (1)...(19): siRNA sense strand
gaacuccuggccucaagua

SEQ ID NO: 9352 - RNA, 19 nt, Homo sapiens
  misc_RNA (1)...(19): siRNA sense strand
gagacaggauuucaucauc

SEQ ID NO: 9353 - RNA, 19 nt, Homo sapiens
  misc_RNA (1)...(19): siRNA sense strand
ccaaggaacauugcaagua

SEQ ID NO: 9354 - RNA, 19 nt, Homo sapiens
  misc_RNA (1)...(19): siRNA sense strand
ugccucagcuucccaagua

SEQ ID NO: 9355 - RNA, 19 nt, Homo sapiens
  misc_RNA (1)...(19): siRNA sense strand
acucaacucugccaucgua

SEQ ID NO: 9356 - RNA, 19 nt, Homo sapiens
  misc_RNA (1)...(19): siRNA sense strand
ggaguggacugggaguuug

SEQ ID NO: 9357 - RNA, 19 nt, Homo sapiens
  misc_RNA (1)...(19): siRNA sense strand
gaugagaaggcaaugguuu

SEQ ID NO: 9358 - RNA, 19 nt, Homo sapiens
  misc_RNA (1)...(19): siRNA sense strand
gggcagcuuugaaaucaga

SEQ ID NO: 9359 - RNA, 19 nt, Homo sapiens
  misc_RNA (1)...(19): siRNA sense strand
caggcuggaugauaaauug

SEQ ID NO: 9360 - RNA, 19 nt, Homo sapiens
  misc_RNA (1)...(19): siRNA sense strand
guagcuaggaccauaagua

SEQ ID NO: 9361 - RNA, 19 nt, Homo sapiens
  misc_RNA (1)...(19): siRNA sense strand
ggcaagguguggagucuga

SEQ ID NO: 9362 - RNA, 19 nt, Homo sapiens
  misc_RNA (1)...(19): siRNA sense strand
gcuacccgcuucucuguau

SEQ ID NO: 9363 - RNA, 19 nt, Homo sapiens
  misc_RNA (1)...(19): siRNA sense strand
caauguauuugaccacaau

SEQ ID NO: 9364 - RNA, 19 nt, Homo sapiens
  misc_RNA (1)...(19): siRNA sense strand
gaauuuaaccacuuugaag

SEQ ID NO: 9365 - RNA, 19 nt, Homo sapiens
  misc_RNA (1)...(19): siRNA sense strand
gggucaaccucauuucuau

SEQ ID NO: 9366 - RNA, 19 nt, Homo sapiens
  misc_RNA (1)...(19): siRNA sense strand
gaaacucugucucucaaaa

SEQ ID NO: 9367 - RNA, 19 nt, Homo sapiens
  misc_RNA (1)...(19): siRNA sense strand
caccaaggcuggagugcaa

SEQ ID NO: 9368 - RNA, 19 nt, Homo sapiens
  misc_RNA (1)...(19): siRNA sense strand
cuguuugucucuaguaaua

SEQ ID NO: 9369 - RNA, 19 nt, Homo sapiens
  misc_RNA (1)...(19): siRNA sense strand
gaaaacagccauagauaau

SEQ ID NO: 9370 - RNA, 19 nt, Homo sapiens
  misc_RNA (1)...(19): siRNA sense strand
gcugugagcccaacuuguu

SEQ ID NO: 9371 - RNA, 19 nt, Homo sapiens
  misc_RNA (1)...(19): siRNA sense strand
ggguaaggcugggcaggua

SEQ ID NO: 9372 - RNA, 19 nt, Homo sapiens
  misc_RNA (1)...(19): siRNA sense strand
gugaaacucugucucucaa

SEQ ID NO: 9373 - RNA, 19 nt, Homo sapiens
  misc_RNA (1)...(19): siRNA sense strand
gaagauccagagucuaaug

SEQ ID NO: 9374 - RNA, 19 nt, Homo sapiens
  misc_RNA (1)...(19): siRNA sense strand
gaaucugacuucuacuuac

SEQ ID NO: 9375 - RNA, 19 nt, Homo sapiens
  misc_RNA (1)...(19): siRNA sense strand
gggcuuagaaugcagguuu

SEQ ID NO: 9376 - RNA, 19 nt, Homo sapiens
  misc_RNA (1)...(19): siRNA sense strand
ucacaucucacucuucuug

SEQ ID NO: 9377 - RNA, 19 nt, Homo sapiens
  misc_RNA (1)...(19): siRNA sense strand
gcaaguucaagguacauuu

SEQ ID NO: 9378 - RNA, 19 nt, Homo sapiens
  misc_RNA (1)...(19): siRNA sense strand
agguggagcucuacaguuu

SEQ ID NO: 9379 - RNA, 19 nt, Homo sapiens
  misc_RNA (1)...(19): siRNA sense strand
gacaggauuucaucaucuu

SEQ ID NO: 9380 - RNA, 19 nt, Homo sapiens
  misc_RNA (1)...(19): siRNA sense strand
gcccagaguugcaguucuu

SEQ ID NO: 9381 - RNA, 19 nt, Homo sapiens
  misc_RNA (1)...(19): siRNA sense strand
uuguguaucucucucuuua

SEQ ID NO: 9382 - RNA, 19 nt, Homo sapiens
  misc_RNA (1)...(19): siRNA sense strand
caggaggacaauuaucuua

SEQ ID NO: 9383 - RNA, 19 nt, Homo sapiens
  misc_RNA (1)...(19): siRNA sense strand
ugaugaagaugaaauggau

SEQ ID NO: 9384 - RNA, 19 nt, Homo sapiens
  misc_RNA (1)...(19): siRNA sense strand
gggauuauuaacuccauua

SEQ ID NO: 9385 - RNA, 19 nt, Homo sapiens
  misc_RNA (1)...(19): siRNA sense strand
gaagaagcucccacuagga

SEQ ID NO: 9386 - RNA, 19 nt, Homo sapiens
  misc_RNA (1)...(19): siRNA sense strand
gagcugggcuuagaaugca

SEQ ID NO: 9387 - RNA, 19 nt, Homo sapiens
  misc_RNA (1)...(19): siRNA sense strand
uggcagagcugggcuuaga

SEQ ID NO: 9388 - RNA, 19 nt, Homo sapiens
  misc_RNA (1)...(19): siRNA sense strand
ccaaagugcugggauuaca

SEQ ID NO: 9389 - RNA, 19 nt, Homo sapiens
  misc_RNA (1)...(19): siRNA sense strand
ggauuacagccacccguua

SEQ ID NO: 9390 - RNA, 19 nt, Homo sapiens
  misc_RNA (1)...(19): siRNA sense strand
gcucuagggauuacaauau

SEQ ID NO: 9391 - RNA, 19 nt, Homo sapiens
  misc_RNA (1)...(19): siRNA sense strand
cagcaaacucucuauaaug

SEQ ID NO: 9392 - RNA, 19 nt, Homo sapiens
  misc_RNA (1)...(19): siRNA sense strand
cagaguguauguuguaaag

SEQ ID NO: 9393 - RNA, 19 nt, Homo sapiens
  misc_RNA (1)...(19): siRNA sense strand
auacuuaucgcacaucuuu

SEQ ID NO: 9394 - RNA, 19 nt, Homo sapiens
  misc_RNA (1)...(19): siRNA sense strand
caaccuccaccuucuguuu

SEQ ID NO: 9395 - RNA, 19 nt, Homo sapiens
  misc_RNA (1)...(19): siRNA sense strand
gcuccaaaguacuuauguu

SEQ ID NO: 9396 - RNA, 19 nt, Homo sapiens
  misc_RNA (1)...(19): siRNA sense strand
gaagagaacugugaacuaa

SEQ ID NO: 9397 - RNA, 19 nt, Homo sapiens
  misc_RNA (1)...(19): siRNA sense strand
caagagagcuaguuguuaa

SEQ ID NO: 9398 - RNA, 19 nt, Homo sapiens
  misc_RNA (1)...(19): siRNA sense strand
guaaagagguauuggcaua

SEQ ID NO: 9399 - RNA, 19 nt, Homo sapiens
  misc_RNA (1)...(19): siRNA sense strand
ggaaugcacuguauuaaug

SEQ ID NO: 9400 - RNA, 19 nt, Homo sapiens
  misc_RNA (1)...(19): siRNA sense strand
ggacaaagucuaaauguuu

SEQ ID NO: 9401 - RNA, 19 nt, Homo sapiens
  misc_RNA (1)...(19): siRNA sense strand
gcacauucaugaagauaua

SEQ ID NO: 9402 - RNA, 19 nt, Homo sapiens
  misc_RNA (1)...(19): siRNA sense strand
uaacaaacauuggcagaua

SEQ ID NO: 9403 - RNA, 19 nt, Homo sapiens
  misc_RNA (1)...(19): siRNA sense strand
gaucaaagccuucccacua

SEQ ID NO: 9404 - RNA, 19 nt, Homo sapiens
  misc_RNA (1)...(19): siRNA sense strand
gaauaugucucccagaaug

SEQ ID NO: 9405 - RNA, 19 nt, Homo sapiens
  misc_RNA (1)...(19): siRNA sense strand
gaucauagaggguagguua

SEQ ID NO: 9406 - RNA, 19 nt, Homo sapiens
  misc_RNA (1)...(19): siRNA sense strand
gaggugaaguguagucuuu

SEQ ID NO: 9407 - RNA, 19 nt, Homo sapiens
  misc_RNA (1)...(19): siRNA sense strand
gaacauaugguuggauuaa

SEQ ID NO: 9408 - RNA, 19 nt, Homo sapiens
  misc_RNA (1)...(19): siRNA sense strand
gcauuacccucauaucaaa

SEQ ID NO: 9409 - RNA, 19 nt, Homo sapiens
  misc_RNA (1)...(19): siRNA sense strand
uaaagacacuuaucacuca

SEQ ID NO: 9410 - RNA, 19 nt, Homo sapiens
  misc_RNA (1)...(19): siRNA sense strand
gaacuaagucagaaauuga

SEQ ID NO: 9411 - RNA, 19 nt, Homo sapiens
  misc_RNA (1)...(19): siRNA sense strand
gggaaugaaugaauuguug

SEQ ID NO: 9412 - RNA, 19 nt, Homo sapiens
  misc_RNA (1)...(19): siRNA sense strand
gaagagcgaaauaggaaua

SEQ ID NO: 9413 - RNA, 19 nt, Homo sapiens
  misc_RNA (1)...(19): siRNA sense strand
acauacagcuucacucuuu

SEQ ID NO: 9414 - RNA, 19 nt, Homo sapiens
  misc_RNA (1)...(19): siRNA sense strand
cuaaauaaauggagagaug

SEQ ID NO: 9415 - RNA, 19 nt, Homo sapiens
  misc_RNA (1)...(19): siRNA sense strand
cagaugaaaugaauacuug

SEQ ID NO: 9416 - RNA, 19 nt, Homo sapiens
  misc_RNA (1)...(19): siRNA sense strand
gauaaagggcgucuauaaa

SEQ ID NO: 9417 - RNA, 19 nt, Homo sapiens
  misc_RNA (1)...(19): siRNA sense strand
ccugauaccucauguuaaa

SEQ ID NO: 9418 - RNA, 19 nt, Homo sapiens
  misc_RNA (1)...(19): siRNA sense strand
ggaguuaagcuaauauuga

SEQ ID NO: 9419 - RNA, 19 nt, Homo sapiens
  misc_RNA (1)...(19): siRNA sense strand
caacuuuccuaucacagua

SEQ ID NO: 9420 - RNA, 19 nt, Homo sapiens
  misc_RNA (1)...(19): siRNA sense strand
gcaauaaggcagaaaauua

SEQ ID NO: 9421 - RNA, 19 nt, Homo sapiens
  misc_RNA (1)...(19): siRNA sense strand
gauaauacaaagccacaua

SEQ ID NO: 9422 - RNA, 19 nt, Homo sapiens
  misc_RNA (1)...(19): siRNA sense strand
gcaaacauuuccagacauc

SEQ ID NO: 9423 - RNA, 19 nt, Homo sapiens
  misc_RNA (1)...(19): siRNA sense strand
aagaaagacugaagacuga

SEQ ID NO: 9424 - RNA, 19 nt, Homo sapiens
  misc_RNA (1)...(19): siRNA sense strand
cagcaagacucacaggaaa

SEQ ID NO: 9425 - RNA, 19 nt, Homo sapiens
  misc_RNA (1)...(19): siRNA sense strand
gaggguagguuauauaggu

SEQ ID NO: 9426 - RNA, 19 nt, Homo sapiens
  misc_RNA (1)...(19): siRNA sense strand
gaagggccaacacaaauuu

SEQ ID NO: 9427 - RNA, 19 nt, Homo sapiens
  misc_RNA (1)...(19): siRNA sense strand
gcagaagggccaacacaaa

SEQ ID NO: 9428 - RNA, 19 nt, Homo sapiens
  misc_RNA (1)...(19): siRNA sense strand
guauagcccuugaagcauu

SEQ ID NO: 9429 - RNA, 19 nt, Homo sapiens
  misc_RNA (1)...(19): siRNA sense strand
ucacucauguucauaaguu

SEQ ID NO: 9430 - RNA, 19 nt, Homo sapiens
  misc_RNA (1)...(19): siRNA sense strand
gcgcaaacauuuccagaca

SEQ ID NO: 9431 - RNA, 19 nt, Homo sapiens
  misc_RNA (1)...(19): siRNA sense strand
cagaagggcccauaggaua

SEQ ID NO: 9432 - RNA, 19 nt, Homo sapiens
  misc_RNA (1)...(19): siRNA sense strand
ucaagagagucuaagguuu

SEQ ID NO: 9433 - RNA, 19 nt, Homo sapiens
  misc_RNA (1)...(19): siRNA sense strand
uaacucagauugcccacuu

SEQ ID NO: 9434 - RNA, 19 nt, Homo sapiens
  misc_RNA (1)...(19): siRNA sense strand
uuaaaggcauccagauaaa

SEQ ID NO: 9435 - RNA, 19 nt, Homo sapiens
  misc_RNA (1)...(19): siRNA sense strand
gacaauaucuucucuugcu

SEQ ID NO: 9436 - RNA, 19 nt, Homo sapiens
  misc_RNA (1)...(19): siRNA sense strand
gaagacagcaguguuuguu

SEQ ID NO: 9437 - RNA, 19 nt, Homo sapiens
  misc_RNA (1)...(19): siRNA sense strand
gggacaaagucuaaauguu

SEQ ID NO: 9438 - RNA, 19 nt, Homo sapiens
  misc_RNA (1)...(19): siRNA sense strand
aaucucaacuuuccuauca

SEQ ID NO: 9439 - RNA, 19 nt, Homo sapiens
  misc_RNA (1)...(19): siRNA sense strand
gacccugucuguagaauuc

SEQ ID NO: 9440 - RNA, 19 nt, Homo sapiens
  misc_RNA (1)...(19): siRNA sense strand
gagauuguauccagugcaa

SEQ ID NO: 9441 - RNA, 19 nt, Homo sapiens
  misc_RNA (1)...(19): siRNA sense strand
ggagugacauuagguuugu

SEQ ID NO: 9442 - RNA, 19 nt, Homo sapiens
  misc_RNA (1)...(19): siRNA sense strand
ugacaacacucaaucuuac

SEQ ID NO: 9443 - RNA, 19 nt, Homo sapiens
  misc_RNA (1)...(19): siRNA sense strand
caacacaaucccuaucaaa

SEQ ID NO: 9444 - RNA, 19 nt, Homo sapiens
  misc_RNA (1)...(19): siRNA sense strand
ugauaaagggcgucuauaa

SEQ ID NO: 9445 - RNA, 19 nt, Homo sapiens
  misc_RNA (1)...(19): siRNA sense strand
ugaacuaagucagaaauug

SEQ ID NO: 9446 - RNA, 19 nt, Homo sapiens
  misc_RNA (1)...(19): siRNA sense strand
gaaaaucaguucauggaau

SEQ ID NO: 9447 - RNA, 19 nt, Homo sapiens
  misc_RNA (1)...(19): siRNA sense strand
ucucauccauucauucaaa

SEQ ID NO: 9448 - RNA, 19 nt, Homo sapiens
  misc_RNA (1)...(19): siRNA sense strand
cauggaaugcacuguauua

SEQ ID NO: 9449 - RNA, 19 nt, Homo sapiens
  misc_RNA (1)...(19): siRNA sense strand
gaacuggcauuacccucau

SEQ ID NO: 9450 - RNA, 19 nt, Homo sapiens
  misc_RNA (1)...(19): siRNA sense strand
gugacaauaucuucucuug

SEQ ID NO: 9451 - RNA, 19 nt, Homo sapiens
  misc_RNA (1)...(19): siRNA sense strand
gaugcuaccuaguggaguu

SEQ ID NO: 9452 - RNA, 19 nt, Homo sapiens
  misc_RNA (1)...(19): siRNA sense strand
cgauaauacuguuaagaug

SEQ ID NO: 9453 - RNA, 19 nt, Homo sapiens
  misc_RNA (1)...(19): siRNA sense strand
ggcuagcacuaauaaauga

SEQ ID NO: 9454 - RNA, 19 nt, Homo sapiens
  misc_RNA (1)...(19): siRNA sense strand
uagagaaucugucacaucu

SEQ ID NO: 9455 - RNA, 19 nt, Homo sapiens
  misc_RNA (1)...(19): siRNA sense strand
gcgagcacauucaugaaga

SEQ ID NO: 9456 - RNA, 19 nt, Homo sapiens
  misc_RNA (1)...(19): siRNA sense strand
ccacaugaaccuuguuuau

SEQ ID NO: 9457 - RNA, 19 nt, Homo sapiens
  misc_RNA (1)...(19): siRNA sense strand
uuggaaagcucgauaauac

SEQ ID NO: 9458 - RNA, 19 nt, Homo sapiens
  misc_RNA (1)...(19): siRNA sense strand
caucaguacucuaaagaca

SEQ ID NO: 9459 - RNA, 19 nt, Homo sapiens
  misc_RNA (1)...(19): siRNA sense strand
cagaagagcgaaauaggaa

SEQ ID NO: 9460 - RNA, 19 nt, Homo sapiens
  misc_RNA (1)...(19): siRNA sense strand
ggugaaguguagucuuuau

SEQ ID NO: 9461 - RNA, 19 nt, Homo sapiens
  misc_RNA (1)...(19): siRNA sense strand
aagagguauuggcauauua

SEQ ID NO: 9462 - RNA, 19 nt, Homo sapiens
  misc_RNA (1)...(19): siRNA sense strand
aaagagguauuggcauauu

SEQ ID NO: 9463 - RNA, 19 nt, Homo sapiens
  misc_RNA (1)...(19): siRNA sense strand
ccaagagagcuaguuguua

SEQ ID NO: 9464 - RNA, 19 nt, Homo sapiens
  misc_RNA (1)...(19): siRNA sense strand
cccaguagaucuauagguu

SEQ ID NO: 9465 - RNA, 19 nt, Homo sapiens
  misc_RNA (1)...(19): siRNA sense strand
ggaauaaauuuaggaagac

SEQ ID NO: 9466 - RNA, 19 nt, Homo sapiens
  misc_RNA (1)...(19): siRNA sense strand
uaacaugacccugucugua

SEQ ID NO: 9467 - RNA, 19 nt, Homo sapiens
  misc_RNA (1)...(19): siRNA sense strand
cagaagaauuguauguauc

SEQ ID NO: 9468 - RNA, 19 nt, Homo sapiens
  misc_RNA (1)...(19): siRNA sense strand
ggacauacagcuucacucu

SEQ ID NO: 9469 - RNA, 19 nt, Homo sapiens
  misc_RNA (1)...(19): siRNA sense strand
cacaugaaccuuguuuaua

SEQ ID NO: 9470 - RNA, 19 nt, Homo sapiens
  misc_RNA (1)...(19): siRNA sense strand
ggaaagcucgauaauacug

SEQ ID NO: 9471 - RNA, 19 nt, Homo sapiens
  misc_RNA (1)...(19): siRNA sense strand
aaacauuccucagagaaau

SEQ ID NO: 9472 - RNA, 19 nt, Homo sapiens
  misc_RNA (1)...(19): siRNA sense strand
acugaagacugaaugcuuu

SEQ ID NO: 9473 - RNA, 19 nt, Homo sapiens
  misc_RNA (1)...(19): siRNA sense strand
gagaggaugcuaccuagug

SEQ ID NO: 9474 - RNA, 19 nt, Homo sapiens
  misc_RNA (1)...(19): siRNA sense strand
aaagagaggaugcuaccua

SEQ ID NO: 9475 - RNA, 19 nt, Homo sapiens
  misc_RNA (1)...(19): siRNA sense strand
aaagauaacacucgcauca

SEQ ID NO: 9476 - RNA, 19 nt, Homo sapiens
  misc_RNA (1)...(19): siRNA sense strand
uauaccagcucaccuuugu

SEQ ID NO: 9477 - RNA, 19 nt, Homo sapiens
  misc_RNA (1)...(19): siRNA sense strand
gaauucacaagcagauaaa

SEQ ID NO: 9478 - RNA, 19 nt, Homo sapiens
  misc_RNA (1)...(19): siRNA sense strand
gagaccuucuucacucuga

SEQ ID NO: 9479 - RNA, 19 nt, Homo sapiens
  misc_RNA (1)...(19): siRNA sense strand
gggaugcaaugauauaaac

SEQ ID NO: 9480 - RNA, 19 nt, Homo sapiens
  misc_RNA (1)...(19): siRNA sense strand
uaaugacccuuaggaaguu

SEQ ID NO: 9481 - RNA, 19 nt, Homo sapiens
  misc_RNA (1)...(19): siRNA sense strand
ggcuauauaacucuacuua

SEQ ID NO: 9482 - RNA, 19 nt, Homo sapiens
  misc_RNA (1)...(19): siRNA sense strand
uagcaugucuucccucagu

SEQ ID NO: 9483 - RNA, 19 nt, Homo sapiens
  misc_RNA (1)...(19): siRNA sense strand
uaaauuagucagucucaga

SEQ ID NO: 9484 - RNA, 19 nt, Homo sapiens
  misc_RNA (1)...(19): siRNA sense strand
gcauauaccagcucaccuu

SEQ ID NO: 9485 - RNA, 19 nt, Homo sapiens
  misc_RNA (1)...(19): siRNA sense strand
ccaaagcccagauaucuuc

SEQ ID NO: 9486 - RNA, 19 nt, Homo sapiens
  misc_RNA (1)...(19): siRNA sense strand
ugaccuaagugacaauauc

SEQ ID NO: 9487 - RNA, 19 nt, Homo sapiens
  misc_RNA (1)...(19): siRNA sense strand
cauagaggguagguuauau

SEQ ID NO: 9488 - RNA, 19 nt, Homo sapiens
  misc_RNA (1)...(19): siRNA sense strand
ggagagaugcgaguuggaa

SEQ ID NO: 9489 - RNA, 19 nt, Homo sapiens
  misc_RNA (1)...(19): siRNA sense strand
agacagcaguguuuguuca

SEQ ID NO: 9490 - RNA, 19 nt, Homo sapiens
  misc_RNA (1)...(19): siRNA sense strand
gggaggggaugcaaugaua

SEQ ID NO: 9491 - RNA, 19 nt, Homo sapiens
  misc_RNA (1)...(19): siRNA sense strand
ugaagagaacugugaacua

SEQ ID NO: 9492 - RNA, 19 nt, Homo sapiens
  misc_RNA (1)...(19): siRNA sense strand
ugacccaaauuaacuggaa

SEQ ID NO: 9493 - RNA, 19 nt, Homo sapiens
  misc_RNA (1)...(19): siRNA sense strand
aacaaacauuggcagauaa

SEQ ID NO: 9494 - RNA, 19 nt, Homo sapiens
  misc_RNA (1)...(19): siRNA sense strand
caguagaucuauagguuca

SEQ ID NO: 9495 - RNA, 19 nt, Homo sapiens
  misc_RNA (1)...(19): siRNA sense strand
gagcgaaauaggaauaaau

SEQ ID NO: 9496 - RNA, 19 nt, Homo sapiens
  misc_RNA (1)...(19): siRNA sense strand
gaagacaccugcucaguau

SEQ ID NO: 9497 - RNA, 19 nt, Homo sapiens
  misc_RNA (1)...(19): siRNA sense strand
gaagugaaaucuaugaugu

SEQ ID NO: 9498 - RNA, 19 nt, Homo sapiens
  misc_RNA (1)...(19): siRNA sense strand
ggacacauauggugacuuc

SEQ ID NO: 9499 - RNA, 19 nt, Homo sapiens
  misc_RNA (1)...(19): siRNA sense strand
gagagaggauguugccuuu

SEQ ID NO: 9500 - RNA, 19 nt, Homo sapiens
  misc_RNA (1)...(19): siRNA sense strand
aaacugaucuggagaagga

SEQ ID NO: 9501 - RNA, 19 nt, Homo sapiens
  misc_RNA (1)...(19): siRNA sense strand
gaagaugacauuagcauug

SEQ ID NO: 9502 - RNA, 19 nt, Homo sapiens
  misc_RNA (1)...(19): siRNA sense strand
gcaugucccuguacuacua

SEQ ID NO: 9503 - RNA, 19 nt, Homo sapiens
  misc_RNA (1)...(19): siRNA sense strand
uaacagagucuacaaagaa

SEQ ID NO: 9504 - RNA, 19 nt, Homo sapiens
  misc_RNA (1)...(19): siRNA sense strand
gcagugaaguggacauguu

SEQ ID NO: 9505 - RNA, 19 nt, Homo sapiens
  misc_RNA (1)...(19): siRNA sense strand
ggucugaauucaagagaaa

SEQ ID NO: 9506 - RNA, 19 nt, Homo sapiens
  misc_RNA (1)...(19): siRNA sense strand
gaaaggaccaucaggacaa

SEQ ID NO: 9507 - RNA, 19 nt, Homo sapiens
  misc_RNA (1)...(19): siRNA sense strand
gcucucagcucucgacuca

SEQ ID NO: 9508 - RNA, 19 nt, Homo sapiens
  misc_RNA (1)...(19): siRNA sense strand
gauaagguccugaucagaa

SEQ ID NO: 9509 - RNA, 19 nt, Homo sapiens
  misc_RNA (1)...(19): siRNA sense strand
cuacagcccuuaugacaug

SEQ ID NO: 9510 - RNA, 19 nt, Homo sapiens
  misc_RNA (1)...(19): siRNA sense strand
caagaaagagguuaaagga

SEQ ID NO: 9511 - RNA, 19 nt, Homo sapiens
  misc_RNA (1)...(19): siRNA sense strand
uaagaacgacuaccagaaa

SEQ ID NO: 9512 - RNA, 19 nt, Homo sapiens
  misc_RNA (1)...(19): siRNA sense strand
ugucuagucucuccuguaa

SEQ ID NO: 9513 - RNA, 19 nt, Homo sapiens
  misc_RNA (1)...(19): siRNA sense strand
gcucugucguugauuauga

SEQ ID NO: 9514 - RNA, 19 nt, Homo sapiens
  misc_RNA (1)...(19): siRNA sense strand
guaugaugcuucugagcua

SEQ ID NO: 9515 - RNA, 19 nt, Homo sapiens
  misc_RNA (1)...(19): siRNA sense strand
gagauaagguccugaucag

SEQ ID NO: 9516 - RNA, 19 nt, Homo sapiens
  misc_RNA (1)...(19): siRNA sense strand
caacugaucucgaaauccu

SEQ ID NO: 9517 - RNA, 19 nt, Homo sapiens
  misc_RNA (1)...(19): siRNA sense strand
gggaugcuuugaacauuga

SEQ ID NO: 9518 - RNA, 19 nt, Homo sapiens
  misc_RNA (1)...(19): siRNA sense strand
gagaaggaccacaaaggaa

SEQ ID NO: 9519 - RNA, 19 nt, Homo sapiens
  misc_RNA (1)...(19): siRNA sense strand
uggaaagcaucaagaaaga

SEQ ID NO: 9520 - RNA, 19 nt, Homo sapiens
  misc_RNA (1)...(19): siRNA sense strand
gaaauuaacagagucuaca

SEQ ID NO: 9521 - RNA, 19 nt, Homo sapiens
  misc_RNA (1)...(19): siRNA sense strand
ugaagacaccugcucagua

SEQ ID NO: 9522 - RNA, 19 nt, Homo sapiens
  misc_RNA (1)...(19): siRNA sense strand
guggguaaguucaccauug

SEQ ID NO: 9523 - RNA, 19 nt, Homo sapiens
  misc_RNA (1)...(19): siRNA sense strand
guggacauguugaaaauua

SEQ ID NO: 9524 - RNA, 19 nt, Homo sapiens
  misc_RNA (1)...(19): siRNA sense strand
gagaggauguugccuuugc

SEQ ID NO: 9525 - RNA, 19 nt, Homo sapiens
  misc_RNA (1)...(19): siRNA sense strand
ggagggugcucacucuaca

SEQ ID NO: 9526 - RNA, 19 nt, Homo sapiens
  misc_RNA (1)...(19): siRNA sense strand
guacuacuauauccagcaa

SEQ ID NO: 9527 - RNA, 19 nt, Homo sapiens
  misc_RNA (1)...(19): siRNA sense strand
gaacaagccccuguauuuu

SEQ ID NO: 9528 - RNA, 19 nt, Homo sapiens
  misc_RNA (1)...(19): siRNA sense strand
ggauggcucugucguugau

SEQ ID NO: 9529 - RNA, 19 nt, Homo sapiens
  misc_RNA (1)...(19): siRNA sense strand
ggaagugaaaucuaugaug

SEQ ID NO: 9530 - RNA, 19 nt, Homo sapiens
  misc_RNA (1)...(19): siRNA sense strand
gcauaugggucagucaaag

SEQ ID NO: 9531 - RNA, 19 nt, Homo sapiens
  misc_RNA (1)...(19): siRNA sense strand
gaacugauugaccaagaug

SEQ ID NO: 9532 - RNA, 19 nt, Homo sapiens
  misc_RNA (1)...(19): siRNA sense strand
caggagcuccaggaaauua

SEQ ID NO: 9533 - RNA, 19 nt, Homo sapiens
  misc_RNA (1)...(19): siRNA sense strand
uuaacagagucuacaaaga

SEQ ID NO: 9534 - RNA, 19 nt, Homo sapiens
  misc_RNA (1)...(19): siRNA sense strand
guucaccauugucaacauu

SEQ ID NO: 9535 - RNA, 19 nt, Homo sapiens
  misc_RNA (1)...(19): siRNA sense strand
ucuaugaugugaaacacuu

SEQ ID NO: 9536 - RNA, 19 nt, Homo sapiens
  misc_RNA (1)...(19): siRNA sense strand
aaugucaacugaucucgaa

SEQ ID NO: 9537 - RNA, 19 nt, Homo sapiens
  misc_RNA (1)...(19): siRNA sense strand
aaaaccagcuuguggcuaa

SEQ ID NO: 9538 - RNA, 19 nt, Homo sapiens
  misc_RNA (1)...(19): siRNA sense strand
ccacaaaggaacuuacauc

SEQ ID NO: 9539 - RNA, 19 nt, Homo sapiens
  misc_RNA (1)...(19): siRNA sense strand
cugcccagcuuccuucaaa

SEQ ID NO: 9540 - RNA, 19 nt, Homo sapiens
  misc_RNA (1)...(19): siRNA sense strand
ggacaaaagguguggguaa

SEQ ID NO: 9541 - RNA, 19 nt, Homo sapiens
  misc_RNA (1)...(19): siRNA sense strand
ccuguaagccaaagaaaug

SEQ ID NO: 9542 - RNA, 19 nt, Homo sapiens
  misc_RNA (1)...(19): siRNA sense strand
aacagagucuacaaagaaa

SEQ ID NO: 9543 - RNA, 19 nt, Homo sapiens
  misc_RNA (1)...(19): siRNA sense strand
aaaggaccaucaggacaaa

SEQ ID NO: 9544 - RNA, 19 nt, Homo sapiens
  misc_RNA (1)...(19): siRNA sense strand
agugaaaucuaugauguga

SEQ ID NO: 9545 - RNA, 19 nt, Homo sapiens
  misc_RNA (1)...(19): siRNA sense strand
cagcuaacaggucuagaaa

SEQ ID NO: 9546 - RNA, 19 nt, Homo sapiens
  misc_RNA (1)...(19): siRNA sense strand
cagaaaguauuugauaggu

SEQ ID NO: 9547 - RNA, 19 nt, Homo sapiens
  misc_RNA (1)...(19): siRNA sense strand
ucagcaugaugaccgagua

SEQ ID NO: 9548 - RNA, 19 nt, Homo sapiens
  misc_RNA (1)...(19): siRNA sense strand
ggacauuauuucggacaca

SEQ ID NO: 9549 - RNA, 19 nt, Homo sapiens
  misc_RNA (1)...(19): siRNA sense strand
accaggagcuccaggaaau

SEQ ID NO: 9550 - RNA, 19 nt, Homo sapiens
  misc_RNA (1)...(19): siRNA sense strand
ccagcuaacaggucuagaa

SEQ ID NO: 9551 - RNA, 19 nt, Homo sapiens
  misc_RNA (1)...(19): siRNA sense strand
gaacgacuaccagaaagca

SEQ ID NO: 9552 - RNA, 19 nt, Homo sapiens
  misc_RNA (1)...(19): siRNA sense strand
cgagauaagguccugauca

SEQ ID NO: 9553 - RNA, 19 nt, Homo sapiens
  misc_RNA (1)...(19): siRNA sense strand
caaaagguguggguaaguu

SEQ ID NO: 9554 - RNA, 19 nt, Homo sapiens
  misc_RNA (1)...(19): siRNA sense strand
ugacugaagcccaacauag

SEQ ID NO: 9555 - RNA, 19 nt, Homo sapiens
  misc_RNA (1)...(19): siRNA sense strand
guaccugugugguggagau

SEQ ID NO: 9556 - RNA, 19 nt, Homo sapiens
  misc_RNA (1)...(19): siRNA sense strand
gaaguggacauguugaaaa

SEQ ID NO: 9557 - RNA, 19 nt, Homo sapiens
  misc_RNA (1)...(19): siRNA sense strand
gcaucaagaaagagguuaa

SEQ ID NO: 9558 - RNA, 19 nt, Homo sapiens
  misc_RNA (1)...(19): siRNA sense strand
agacaccugcucaguauga

SEQ ID NO: 9559 - RNA, 19 nt, Homo sapiens
  misc_RNA (1)...(19): siRNA sense strand
agaacaagccccuguauuu

SEQ ID NO: 9560 - RNA, 19 nt, Homo sapiens
  misc_RNA (1)...(19): siRNA sense strand
gaucuggagaaggacauua

SEQ ID NO: 9561 - RNA, 19 nt, Homo sapiens
  misc_RNA (1)...(19): siRNA sense strand
gcaggaaugcucggagaga

SEQ ID NO: 9562 - RNA, 19 nt, Homo sapiens
  misc_RNA (1)...(19): siRNA sense strand
gaauucaagagaaaguaug

SEQ ID NO: 9563 - RNA, 19 nt, Homo sapiens
  misc_RNA (1)...(19): siRNA sense strand
gguuaaaggagaccuggaa

SEQ ID NO: 9564 - RNA, 19 nt, Homo sapiens
  misc_RNA (1)...(19): siRNA sense strand
ggagaaggacauuauuucg

SEQ ID NO: 9565 - RNA, 19 nt, Homo sapiens
  misc_RNA (1)...(19): siRNA sense strand
gguaaguucaccauuguca

SEQ ID NO: 9566 - RNA, 19 nt, Homo sapiens
  misc_RNA (1)...(19): siRNA sense strand
cuccagaaaguauuugaua

SEQ ID NO: 9567 - RNA, 19 nt, Homo sapiens
  misc_RNA (1)...(19): siRNA sense strand
ccuggcaaauguuagaaga

SEQ ID NO: 9568 - RNA, 19 nt, Homo sapiens
  misc_RNA (1)...(19): siRNA sense strand
ggaaauuaacagagucuac

SEQ ID NO: 9569 - RNA, 19 nt, Homo sapiens
  misc_RNA (1)...(19): siRNA sense strand
agagaaggaccacaaagga

SEQ ID NO: 9570 - RNA, 19 nt, Homo sapiens
  misc_RNA (1)...(19): siRNA sense strand
cuuaugacauguuggaaag

SEQ ID NO: 9571 - RNA, 19 nt, Homo sapiens
  misc_RNA (1)...(19): siRNA sense strand
auaagguccugaucagaau

SEQ ID NO: 9572 - RNA, 19 nt, Homo sapiens
  misc_RNA (1)...(19): siRNA sense strand
cugauuggcuguacuacuc

SEQ ID NO: 9573 - RNA, 19 nt, Homo sapiens
  misc_RNA (1)...(19): siRNA sense strand
uagcagagaaggaccacaa

SEQ ID NO: 9574 - RNA, 19 nt, Homo sapiens
  misc_RNA (1)...(19): siRNA sense strand
ccuguguacugugucauaa

SEQ ID NO: 9575 - RNA, 19 nt, Homo sapiens
  misc_RNA (1)...(19): siRNA sense strand
gcuaacaggucuagaaaac

SEQ ID NO: 9576 - RNA, 19 nt, Homo sapiens
  misc_RNA (1)...(19): siRNA sense strand
acuacuauauccagcaaga

SEQ ID NO: 9577 - RNA, 19 nt, Homo sapiens
  misc_RNA (1)...(19): siRNA sense strand
uggguaaguucaccauugu

SEQ ID NO: 9578 - RNA, 19 nt, Homo sapiens
  misc_RNA (1)...(19): siRNA sense strand
ugaacugauugaccaagau

SEQ ID NO: 9579 - RNA, 19 nt, Homo sapiens
  misc_RNA (1)...(19): siRNA sense strand
gcagagaaggaccacaaag

SEQ ID NO: 9580 - RNA, 19 nt, Homo sapiens
  misc_RNA (1)...(19): siRNA sense strand
ggccgucccugugaagaug

SEQ ID NO: 9581 - RNA, 19 nt, Homo sapiens
  misc_RNA (1)...(19): siRNA sense strand
cuaagaacgacuaccagaa

SEQ ID NO: 9582 - RNA, 19 nt, Homo sapiens
  misc_RNA (1)...(19): siRNA sense strand
caagagcuacagcccuuau

SEQ ID NO: 9583 - RNA, 19 nt, Homo sapiens
  misc_RNA (1)...(19): siRNA sense strand
ccaccuccagaaaguauuu

SEQ ID NO: 9584 - RNA, 19 nt, Homo sapiens
  misc_RNA (1)...(19): siRNA sense strand
gcaugucccaccuccagaa

SEQ ID NO: 9585 - RNA, 19 nt, Homo sapiens
  misc_RNA (1)...(19): siRNA sense strand
caaccaggagcuccaggaa

SEQ ID NO: 9586 - RNA, 19 nt, Homo sapiens
  misc_RNA (1)...(19): siRNA sense strand
cacaaaggaacuuacauca

SEQ ID NO: 9587 - RNA, 19 nt, Homo sapiens
  misc_RNA (1)...(19): siRNA sense strand
uaugaugcuucugagcuaa

SEQ ID NO: 9588 - RNA, 19 nt, Homo sapiens
  misc_RNA (1)...(19): siRNA sense strand
cagagucuacaaagaaaug

SEQ ID NO: 9589 - RNA, 19 nt, Homo sapiens
  misc_RNA (1)...(19): siRNA sense strand
aguuggaagugaaaucuau

SEQ ID NO: 9590 - RNA, 19 nt, Homo sapiens
  misc_RNA (1)...(19): siRNA sense strand
aguauggcaugucccugua

SEQ ID NO: 9591 - RNA, 19 nt, Homo sapiens
  misc_RNA (1)...(19): siRNA sense strand
gucaacugaucucgaaauc

SEQ ID NO: 9592 - RNA, 19 nt, Homo sapiens
  misc_RNA (1)...(19): siRNA sense strand
guuggaaagcaucaagaaa

SEQ ID NO: 9593 - RNA, 19 nt, Homo sapiens
  misc_RNA (1)...(19): siRNA sense strand
ucucagcucucgacucacu

SEQ ID NO: 9594 - RNA, 19 nt, Homo sapiens
  misc_RNA (1)...(19): siRNA sense strand
ugaaguggacauguugaaa

SEQ ID NO: 9595 - RNA, 19 nt, Homo sapiens
  misc_RNA (1)...(19): siRNA sense strand
uggcuguacuacuccauga

SEQ ID NO: 9596 - RNA, 19 nt, Homo sapiens
  misc_RNA (1)...(19): siRNA sense strand
gcucaaggcuguccuguuu

SEQ ID NO: 9597 - RNA, 19 nt, Homo sapiens
  misc_RNA (1)...(19): siRNA sense strand
gacacaaacuccaaaggua

SEQ ID NO: 9598 - RNA, 19 nt, Homo sapiens
  misc_RNA (1)...(19): siRNA sense strand
guacuuucuucuuggaaua

SEQ ID NO: 9599 - RNA, 19 nt, Homo sapiens
  misc_RNA (1)...(19): siRNA sense strand
gaacacugucuuugagauu

SEQ ID NO: 9600 - RNA, 19 nt, Homo sapiens
  misc_RNA (1)...(19): siRNA sense strand
gguaccaccugcggucuua

SEQ ID NO: 9601 - RNA, 19 nt, Homo sapiens
  misc_RNA (1)...(19): siRNA sense strand
aaaugaaccuccugcaaga

SEQ ID NO: 9602 - RNA, 19 nt, Homo sapiens
  misc_RNA (1)...(19): siRNA sense strand
gcauugcccuccucacugu

SEQ ID NO: 9603 - RNA, 19 nt, Homo sapiens
  misc_RNA (1)...(19): siRNA sense strand
ggaacacugucuuugagau

SEQ ID NO: 9604 - RNA, 19 nt, Homo sapiens
  misc_RNA (1)...(19): siRNA sense strand
gcaaaugaaccuccugcaa

SEQ ID NO: 9605 - RNA, 19 nt, Homo sapiens
  misc_RNA (1)...(19): siRNA sense strand
guccaguacuuucuucuug

SEQ ID NO: 9606 - RNA, 19 nt, Homo sapiens
  misc_RNA (1)...(19): siRNA sense strand
gcaaagagugcaaaugaac

SEQ ID NO: 9607 - RNA, 19 nt, Homo sapiens
  misc_RNA (1)...(19): siRNA sense strand
ucaaggcuguccuguuuca

SEQ ID NO: 9608 - RNA, 19 nt, Homo sapiens
  misc_RNA (1)...(19): siRNA sense strand
ccaauucccagccacagua

SEQ ID NO: 9609 - RNA, 19 nt, Homo sapiens
  misc_RNA (1)...(19): siRNA sense strand
ccacugcuguaccuucuuc

SEQ ID NO: 9610 - RNA, 19 nt, Homo sapiens
  misc_RNA (1)...(19): siRNA sense strand
gcacacuggagacucauug

SEQ ID NO: 9611 - RNA, 19 nt, Homo sapiens
  misc_RNA (1)...(19): siRNA sense strand
guacagugucccugcguuu

SEQ ID NO: 9612 - RNA, 19 nt, Homo sapiens
  misc_RNA (1)...(19): siRNA sense strand
gcagggaacacugucuuug

SEQ ID NO: 9613 - RNA, 19 nt, Homo sapiens
  misc_RNA (1)...(19): siRNA sense strand
gagcuguacuaaccuaaaa

SEQ ID NO: 9614 - RNA, 19 nt, Homo sapiens
  misc_RNA (1)...(19): siRNA sense strand
ucacugugccucuauguca

SEQ ID NO: 9615 - RNA, 19 nt, Homo sapiens
  misc_RNA (1)...(19): siRNA sense strand
gggaagugccugauugagu

SEQ ID NO: 9616 - RNA, 19 nt, Homo sapiens
  misc_RNA (1)...(19): siRNA sense strand
ccaguacuuucuucuugga

SEQ ID NO: 9617 - RNA, 19 nt, Homo sapiens
  misc_RNA (1)...(19): siRNA sense strand
cagggaacacugucuuuga

SEQ ID NO: 9618 - RNA, 19 nt, Homo sapiens
  misc_RNA (1)...(19): siRNA sense strand
ucacuugcccacugcguuu

SEQ ID NO: 9619 - RNA, 19 nt, Homo sapiens
  misc_RNA (1)...(19): siRNA sense strand
gcuguccuguuucacauca

SEQ ID NO: 9620 - RNA, 19 nt, Homo sapiens
  misc_RNA (1)...(19): siRNA sense strand
caccugcggucuuagaaca

SEQ ID NO: 9621 - RNA, 19 nt, Homo sapiens
  misc_RNA (1)...(19): siRNA sense strand
gagcauugcccuccucacu

SEQ ID NO: 9622 - RNA, 19 nt, Homo sapiens
  misc_RNA (1)...(19): siRNA sense strand
gcaaaggggcgucggagaa

SEQ ID NO: 9623 - RNA, 19 nt, Homo sapiens
  misc_RNA (1)...(19): siRNA sense strand
ucccaguccuccuguguug

SEQ ID NO: 9624 - RNA, 19 nt, Homo sapiens
  misc_RNA (1)...(19): siRNA sense strand
caugggcugugccaagugu

SEQ ID NO: 9625 - RNA, 19 nt, Homo sapiens
  misc_RNA (1)...(19): siRNA sense strand
ugaaccuccugcaagaaga

SEQ ID NO: 9626 - RNA, 19 nt, Homo sapiens
  misc_RNA (1)...(19): siRNA sense strand
ucauugacccacugcugua

SEQ ID NO: 9627 - RNA, 19 nt, Homo sapiens
  misc_RNA (1)...(19): siRNA sense strand
gggaacacugucuuugaga

SEQ ID NO: 9628 - RNA, 19 nt, Homo sapiens
  misc_RNA (1)...(19): siRNA sense strand
ggcgcacacuggagacuca

SEQ ID NO: 9629 - RNA, 19 nt, Homo sapiens
  misc_RNA (1)...(19): siRNA sense strand
acacugucuuugagauuca

SEQ ID NO: 9630 - RNA, 19 nt, Homo sapiens
  misc_RNA (1)...(19): siRNA sense strand
agacacaaacuccaaaggu

SEQ ID NO: 9631 - RNA, 19 nt, Homo sapiens
  misc_RNA (1)...(19): siRNA sense strand
ggcagggaacacugucuuu

SEQ ID NO: 9632 - RNA, 19 nt, Homo sapiens
  misc_RNA (1)...(19): siRNA sense strand
gucuuucucugcucuaagu

SEQ ID NO: 9633 - RNA, 19 nt, Homo sapiens
  misc_RNA (1)...(19): siRNA sense strand
cauucccucuccaggcuuu

SEQ ID NO: 9634 - RNA, 19 nt, Homo sapiens
  misc_RNA (1)...(19): siRNA sense strand
gcuccugcgccacugguaa

SEQ ID NO: 9635 - RNA, 19 nt, Homo sapiens
  misc_RNA (1)...(19): siRNA sense strand
ccuccuguguugugugugu

SEQ ID NO: 9636 - RNA, 19 nt, Homo sapiens
  misc_RNA (1)...(19): siRNA sense strand
ccagggcugcgucugcaaa

SEQ ID NO: 9637 - RNA, 19 nt, Homo sapiens
  misc_RNA (1)...(19): siRNA sense strand
gaaccuccugcaagaagag

SEQ ID NO: 9638 - RNA, 19 nt, Homo sapiens
  misc_RNA (1)...(19): siRNA sense strand
cgaaccaggccugcuguug

SEQ ID NO: 9639 - RNA, 19 nt, Homo sapiens
  misc_RNA (1)...(19): siRNA sense strand
gaaaucaguugguaaagaa

SEQ ID NO: 9640 - RNA, 19 nt, Homo sapiens
  misc_RNA (1)...(19): siRNA sense strand
agacagagaugaaacauuu

SEQ ID NO: 9641 - RNA, 19 nt, Homo sapiens
  misc_RNA (1)...(19): siRNA sense strand
ggaaggaagugaagaaugu

SEQ ID NO: 9642 - RNA, 19 nt, Homo sapiens
  misc_RNA (1)...(19): siRNA sense strand
gaagaaagcagcaguaaca

SEQ ID NO: 9643 - RNA, 19 nt, Homo sapiens
  misc_RNA (1)...(19): siRNA sense strand
gacaaacccucuugaaaug

SEQ ID NO: 9644 - RNA, 19 nt, Homo sapiens
  misc_RNA (1)...(19): siRNA sense strand
gaaaugcauuguaaacaug

SEQ ID NO: 9645 - RNA, 19 nt, Homo sapiens
  misc_RNA (1)...(19): siRNA sense strand
ggaaaucaguugguaaaga

SEQ ID NO: 9646 - RNA, 19 nt, Homo sapiens
  misc_RNA (1)...(19): siRNA sense strand
gaacacagagacuuaauau

SEQ ID NO: 9647 - RNA, 19 nt, Homo sapiens
  misc_RNA (1)...(19): siRNA sense strand
aaacagauccagaacauaa

SEQ ID NO: 9648 - RNA, 19 nt, Homo sapiens
  misc_RNA (1)...(19): siRNA sense strand
cauguuagauuccugauga

SEQ ID NO: 9649 - RNA, 19 nt, Homo sapiens
  misc_RNA (1)...(19): siRNA sense strand
ucagauggauugcaauuau

SEQ ID NO: 9650 - RNA, 19 nt, Homo sapiens
  misc_RNA (1)...(19): siRNA sense strand
caaauucucuugugacucu

SEQ ID NO: 9651 - RNA, 19 nt, Homo sapiens
  misc_RNA (1)...(19): siRNA sense strand
guuauucccucgauauauu

SEQ ID NO: 9652 - RNA, 19 nt, Homo sapiens
  misc_RNA (1)...(19): siRNA sense strand
caaaccggcuaauaugauu

SEQ ID NO: 9653 - RNA, 19 nt, Homo sapiens
  misc_RNA (1)...(19): siRNA sense strand
acacagagacuuaauauca

SEQ ID NO: 9654 - RNA, 19 nt, Homo sapiens
  misc_RNA (1)...(19): siRNA sense strand
cagagaagauuucaucauc

SEQ ID NO: 9655 - RNA, 19 nt, Homo sapiens
  misc_RNA (1)...(19): siRNA sense strand
guccugauauguauuguuu

SEQ ID NO: 9656 - RNA, 19 nt, Homo sapiens
  misc_RNA (1)...(19): siRNA sense strand
uagcuuggaugacuuuaaa

SEQ ID NO: 9657 - RNA, 19 nt, Homo sapiens
  misc_RNA (1)...(19): siRNA sense strand
gcaaggagcauuuggaagu

SEQ ID NO: 9658 - RNA, 19 nt, Homo sapiens
  misc_RNA (1)...(19): siRNA sense strand
cagauggauugcaauuaua

SEQ ID NO: 9659 - RNA, 19 nt, Homo sapiens
  misc_RNA (1)...(19): siRNA sense strand
caaggagcauuuggaagua

SEQ ID NO: 9660 - RNA, 19 nt, Homo sapiens
  misc_RNA (1)...(19): siRNA sense strand
gauauaauccuccuuacug

SEQ ID NO: 9661 - RNA, 19 nt, Homo sapiens
  misc_RNA (1)...(19): siRNA sense strand
cgaaaugcauuguaaacau

SEQ ID NO: 9662 - RNA, 19 nt, Homo sapiens
  misc_RNA (1)...(19): siRNA sense strand
ggaacacagagacuuaaua

SEQ ID NO: 9663 - RNA, 19 nt, Homo sapiens
  misc_RNA (1)...(19): siRNA sense strand
gaaugugacuguggcacua

SEQ ID NO: 9664 - RNA, 19 nt, Homo sapiens
  misc_RNA (1)...(19): siRNA sense strand
cagcuucuguuauuaauuc

SEQ ID NO: 9665 - RNA, 19 nt, Homo sapiens
  misc_RNA (1)...(19): siRNA sense strand
gacaaacaaugugaugauu

SEQ ID NO: 9666 - RNA, 19 nt, Homo sapiens
  misc_RNA (1)...(19): siRNA sense strand
gauggagaauauugugauu

SEQ ID NO: 9667 - RNA, 19 nt, Homo sapiens
  misc_RNA (1)...(19): siRNA sense strand
ccaaaccucugcuaguuca

SEQ ID NO: 9668 - RNA, 19 nt, Homo sapiens
  misc_RNA (1)...(19): siRNA sense strand
ggauugcaauuauaaugga

SEQ ID NO: 9669 - RNA, 19 nt, Homo sapiens
  misc_RNA (1)...(19): siRNA sense strand
ugaaagcaccagucucuaa

SEQ ID NO: 9670 - RNA, 19 nt, Homo sapiens
  misc_RNA (1)...(19): siRNA sense strand
gaugaaacauuuguacaag

SEQ ID NO: 9671 - RNA, 19 nt, Homo sapiens
  misc_RNA (1)...(19): siRNA sense strand
caucucauauggaauugaa

SEQ ID NO: 9672 - RNA, 19 nt, Homo sapiens
  misc_RNA (1)...(19): siRNA sense strand
gaccaaacaugugugucua

SEQ ID NO: 9673 - RNA, 19 nt, Homo sapiens
  misc_RNA (1)...(19): siRNA sense strand
agacaaacccucuugaaau

SEQ ID NO: 9674 - RNA, 19 nt, Homo sapiens
  misc_RNA (1)...(19): siRNA sense strand
gaggcuguaucaggauuua

SEQ ID NO: 9675 - RNA, 19 nt, Homo sapiens
  misc_RNA (1)...(19): siRNA sense strand
ggccuuacaugucuucaga

SEQ ID NO: 9676 - RNA, 19 nt, Homo sapiens
  misc_RNA (1)...(19): siRNA sense strand
gcuaauaugauuuguagga

SEQ ID NO: 9677 - RNA, 19 nt, Homo sapiens
  misc_RNA (1)...(19): siRNA sense strand
cuaccugugcuucuuauua

SEQ ID NO: 9678 - RNA, 19 nt, Homo sapiens
  misc_RNA (1)...(19): siRNA sense strand
uaacaucuguagcuuggau

SEQ ID NO: 9679 - RNA, 19 nt, Homo sapiens
  misc_RNA (1)...(19): siRNA sense strand
gcagaccucaauccucaua

SEQ ID NO: 9680 - RNA, 19 nt, Homo sapiens
  misc_RNA (1)...(19): siRNA sense strand
gguaaagaaugcgauuuca

SEQ ID NO: 9681 - RNA, 19 nt, Homo sapiens
  misc_RNA (1)...(19): siRNA sense strand
cggcuaauaugauuuguag

SEQ ID NO: 9682 - RNA, 19 nt, Homo sapiens
  misc_RNA (1)...(19): siRNA sense strand
gaagauaggccacuuuuca

SEQ ID NO: 9683 - RNA, 19 nt, Homo sapiens
  misc_RNA (1)...(19): siRNA sense strand
ugaaaugcauauuguugug

SEQ ID NO: 9684 - RNA, 19 nt, Homo sapiens
  misc_RNA (1)...(19): siRNA sense strand
gcuuggaugacuuuaaaua

SEQ ID NO: 9685 - RNA, 19 nt, Homo sapiens
  misc_RNA (1)...(19): siRNA sense strand
cagacaaacccucuugaaa

SEQ ID NO: 9686 - RNA, 19 nt, Homo sapiens
  misc_RNA (1)...(19): siRNA sense strand
gcaagucaucccucaguga

SEQ ID NO: 9687 - RNA, 19 nt, Homo sapiens
  misc_RNA (1)...(19): siRNA sense strand
gaaagugagagcucugugu

SEQ ID NO: 9688 - RNA, 19 nt, Homo sapiens
  misc_RNA (1)...(19): siRNA sense strand
gcacauguacgagaccaaa

SEQ ID NO: 9689 - RNA, 19 nt, Homo sapiens
  misc_RNA (1)...(19): siRNA sense strand
guuucgaaaugcauuguaa

SEQ ID NO: 9690 - RNA, 19 nt, Homo sapiens
  misc_RNA (1)...(19): siRNA sense strand
ggacgccaccuccaguaaa

SEQ ID NO: 9691 - RNA, 19 nt, Homo sapiens
  misc_RNA (1)...(19): siRNA sense strand
agaccucaauccucauaaa

SEQ ID NO: 9692 - RNA, 19 nt, Homo sapiens
  misc_RNA (1)...(19): siRNA sense strand
cauaauggccuuacauguc

SEQ ID NO: 9693 - RNA, 19 nt, Homo sapiens
  misc_RNA (1)...(19): siRNA sense strand
uguaggaaaucaguuggua

SEQ ID NO: 9694 - RNA, 19 nt, Homo sapiens
  misc_RNA (1)...(19): siRNA sense strand
uaaguuauucccucgauau

SEQ ID NO: 9695 - RNA, 19 nt, Homo sapiens
  misc_RNA (1)...(19): siRNA sense strand
ucauggaguuugcaacaau

SEQ ID NO: 9696 - RNA, 19 nt, Homo sapiens
  misc_RNA (1)...(19): siRNA sense strand
gacgccaccuccaguaaau

SEQ ID NO: 9697 - RNA, 19 nt, Homo sapiens
  misc_RNA (1)...(19): siRNA sense strand
cguccaaauuuaucuguga

SEQ ID NO: 9698 - RNA, 19 nt, Homo sapiens
  misc_RNA (1)...(19): siRNA sense strand
cauagggaaagccauauuu

SEQ ID NO: 9699 - RNA, 19 nt, Homo sapiens
  misc_RNA (1)...(19): siRNA sense strand
gacuuaauaucacguccaa

SEQ ID NO: 9700 - RNA, 19 nt, Homo sapiens
  misc_RNA (1)...(19): siRNA sense strand
guacucuggugguguaaag

SEQ ID NO: 9701 - RNA, 19 nt, Homo sapiens
  misc_RNA (1)...(19): siRNA sense strand
cagaguaucaagucagaaa

SEQ ID NO: 9702 - RNA, 19 nt, Homo sapiens
  misc_RNA (1)...(19): siRNA sense strand
caagucaucccucagugaa

SEQ ID NO: 9703 - RNA, 19 nt, Homo sapiens
  misc_RNA (1)...(19): siRNA sense strand
uauugaugauggacgcuua

SEQ ID NO: 9704 - RNA, 19 nt, Homo sapiens
  misc_RNA (1)...(19): siRNA sense strand
ugacacuuauacuugguuu

SEQ ID NO: 9705 - RNA, 19 nt, Homo sapiens
  misc_RNA (1)...(19): siRNA sense strand
gaugauggacgcuuaguac

SEQ ID NO: 9706 - RNA, 19 nt, Homo sapiens
  misc_RNA (1)...(19): siRNA sense strand
cauggaguuugcaacaauu

SEQ ID NO: 9707 - RNA, 19 nt, Homo sapiens
  misc_RNA (1)...(19): siRNA sense strand
uaggaaaucaguugguaaa

SEQ ID NO: 9708 - RNA, 19 nt, Homo sapiens
  misc_RNA (1)...(19): siRNA sense strand
gaccacaauuccagagaag

SEQ ID NO: 9709 - RNA, 19 nt, Homo sapiens
  misc_RNA (1)...(19): siRNA sense strand
cagaagaaagcagcaguaa

SEQ ID NO: 9710 - RNA, 19 nt, Homo sapiens
  misc_RNA (1)...(19): siRNA sense strand
gcauuuggaaguauugaug

SEQ ID NO: 9711 - RNA, 19 nt, Homo sapiens
  misc_RNA (1)...(19): siRNA sense strand
guacaugggaacacagaga

SEQ ID NO: 9712 - RNA, 19 nt, Homo sapiens
  misc_RNA (1)...(19): siRNA sense strand
gaaaauuagucuguacaug

SEQ ID NO: 9713 - RNA, 19 nt, Homo sapiens
  misc_RNA (1)...(19): siRNA sense strand
ggcuguaucaggauuuaua

SEQ ID NO: 9714 - RNA, 19 nt, Homo sapiens
  misc_RNA (1)...(19): siRNA sense strand
uccaguaaauucaccuauu

SEQ ID NO: 9715 - RNA, 19 nt, Homo sapiens
  misc_RNA (1)...(19): siRNA sense strand
gcaguaacagcaagucauc

SEQ ID NO: 9716 - RNA, 19 nt, Homo sapiens
  misc_RNA (1)...(19): siRNA sense strand
guaggaaaucaguugguaa

SEQ ID NO: 9717 - RNA, 19 nt, Homo sapiens
  misc_RNA (1)...(19): siRNA sense strand
gagggaagauaggccacuu

SEQ ID NO: 9718 - RNA, 19 nt, Homo sapiens
  misc_RNA (1)...(19): siRNA sense strand
ccaaacaugugugucuaca

SEQ ID NO: 9719 - RNA, 19 nt, Homo sapiens
  misc_RNA (1)...(19): siRNA sense strand
uaaagaaugcgauuucacu

SEQ ID NO: 9720 - RNA, 19 nt, Homo sapiens
  misc_RNA (1)...(19): siRNA sense strand
uuaaguuauucccucgaua

SEQ ID NO: 9721 - RNA, 19 nt, Homo sapiens
  misc_RNA (1)...(19): siRNA sense strand
ugacaaacaaugugaugau

SEQ ID NO: 9722 - RNA, 19 nt, Homo sapiens
  misc_RNA (1)...(19): siRNA sense strand
uuauguacgugauggagaa

SEQ ID NO: 9723 - RNA, 19 nt, Homo sapiens
  misc_RNA (1)...(19): siRNA sense strand
agaccacaauuccagagaa

SEQ ID NO: 9724 - RNA, 19 nt, Homo sapiens
  misc_RNA (1)...(19): siRNA sense strand
auaauggccuuacaugucu

SEQ ID NO: 9725 - RNA, 19 nt, Homo sapiens
  misc_RNA (1)...(19): siRNA sense strand
gagaugaaacauuuguaca

SEQ ID NO: 9726 - RNA, 19 nt, Homo sapiens
  misc_RNA (1)...(19): siRNA sense strand
acaacgguuucaacucauu

SEQ ID NO: 9727 - RNA, 19 nt, Homo sapiens
  misc_RNA (1)...(19): siRNA sense strand
guucagauggauugcaauu

SEQ ID NO: 9728 - RNA, 19 nt, Homo sapiens
  misc_RNA (1)...(19): siRNA sense strand
ucagaagaaagcagcagua

SEQ ID NO: 9729 - RNA, 19 nt, Homo sapiens
  misc_RNA (1)...(19): siRNA sense strand
ggaguuugcaacaauuuua

SEQ ID NO: 9730 - RNA, 19 nt, Homo sapiens
  misc_RNA (1)...(19): siRNA sense strand
guacgagaccaaacaugug

SEQ ID NO: 9731 - RNA, 19 nt, Homo sapiens
  misc_RNA (1)...(19): siRNA sense strand
gugcuccgguuuucuguua

SEQ ID NO: 9732 - RNA, 19 nt, Homo sapiens
  misc_RNA (1)...(19): siRNA sense strand
uuccaaaccucugcuaguu

SEQ ID NO: 9733 - RNA, 19 nt, Homo sapiens
  misc_RNA (1)...(19): siRNA sense strand
caugugugguccugauaug

SEQ ID NO: 9734 - RNA, 19 nt, Homo sapiens
  misc_RNA (1)...(19): siRNA sense strand
ucagacaaacccucuugaa

SEQ ID NO: 9735 - RNA, 19 nt, Homo sapiens
  misc_RNA (1)...(19): siRNA sense strand
caacgguuucaacucauuu

SEQ ID NO: 9736 - RNA, 19 nt, Homo sapiens
  misc_RNA (1)...(19): siRNA sense strand
cuuaauaucacguccaaau

SEQ ID NO: 9737 - RNA, 19 nt, Homo sapiens
  misc_RNA (1)...(19): siRNA sense strand
uguacgugauggagaauau

SEQ ID NO: 9738 - RNA, 19 nt, Homo sapiens
  misc_RNA (1)...(19): siRNA sense strand
acuguuugccugacacuua

SEQ ID NO: 9739 - RNA, 19 nt, Homo sapiens
  misc_RNA (1)...(19): siRNA sense strand
gcacaucuauccucaaaua

SEQ ID NO: 9740 - RNA, 19 nt, Homo sapiens
  misc_RNA (1)...(19): siRNA sense strand
gaaguugacucaucuuuaa

SEQ ID NO: 9741 - RNA, 19 nt, Homo sapiens
  misc_RNA (1)...(19): siRNA sense strand
ggagauggcucuaauggua

SEQ ID NO: 9742 - RNA, 19 nt, Homo sapiens
  misc_RNA (1)...(19): siRNA sense strand
gcaguuacuuuaugacuua

SEQ ID NO: 9743 - RNA, 19 nt, Homo sapiens
  misc_RNA (1)...(19): siRNA sense strand
ccaaaggaaucucuaaaua

SEQ ID NO: 9744 - RNA, 19 nt, Homo sapiens
  misc_RNA (1)...(19): siRNA sense strand
ggaaacaggugccagauug

SEQ ID NO: 9745 - RNA, 19 nt, Homo sapiens
  misc_RNA (1)...(19): siRNA sense strand
ggaaaucugugguuuaaau

SEQ ID NO: 9746 - RNA, 19 nt, Homo sapiens
  misc_RNA (1)...(19): siRNA sense strand
ggacguaccuguauaaugg

SEQ ID NO: 9747 - RNA, 19 nt, Homo sapiens
  misc_RNA (1)...(19): siRNA sense strand
gaaaugaagucccaaaucu

SEQ ID NO: 9748 - RNA, 19 nt, Homo sapiens
  misc_RNA (1)...(19): siRNA sense strand
gaauguaucucucccacua

SEQ ID NO: 9749 - RNA, 19 nt, Homo sapiens
  misc_RNA (1)...(19): siRNA sense strand
gcagacauauuaaccaauu

SEQ ID NO: 9750 - RNA, 19 nt, Homo sapiens
  misc_RNA (1)...(19): siRNA sense strand
gcacagauauugcuaccuu

SEQ ID NO: 9751 - RNA, 19 nt, Homo sapiens
  misc_RNA (1)...(19): siRNA sense strand
gaccaaagcacauuuagua

SEQ ID NO: 9752 - RNA, 19 nt, Homo sapiens
  misc_RNA (1)...(19): siRNA sense strand
uagcggaccuguacacuua

SEQ ID NO: 9753 - RNA, 19 nt, Homo sapiens
  misc_RNA (1)...(19): siRNA sense strand
gaucugccauucaauuuaa

SEQ ID NO: 9754 - RNA, 19 nt, Homo sapiens
  misc_RNA (1)...(19): siRNA sense strand
agaauugccugucauauaa

SEQ ID NO: 9755 - RNA, 19 nt, Homo sapiens
  misc_RNA (1)...(19): siRNA sense strand
caaaguaaguaccacuaua

SEQ ID NO: 9756 - RNA, 19 nt, Homo sapiens
  misc_RNA (1)...(19): siRNA sense strand
guagagagguugaaacuca

SEQ ID NO: 9757 - RNA, 19 nt, Homo sapiens
  misc_RNA (1)...(19): siRNA sense strand
uuaaugagcuccuuccuuu

SEQ ID NO: 9758 - RNA, 19 nt, Homo sapiens
  misc_RNA (1)...(19): siRNA sense strand
ccacaaagccauuucagua

SEQ ID NO: 9759 - RNA, 19 nt, Homo sapiens
  misc_RNA (1)...(19): siRNA sense strand
ggagaaaugucacuuuauc

SEQ ID NO: 9760 - RNA, 19 nt, Homo sapiens
  misc_RNA (1)...(19): siRNA sense strand
gugaauaucugugcuaauu

SEQ ID NO: 9761 - RNA, 19 nt, Homo sapiens
  misc_RNA (1)...(19): siRNA sense strand
gaacuagucacccuacuuu

SEQ ID NO: 9762 - RNA, 19 nt, Homo sapiens
  misc_RNA (1)...(19): siRNA sense strand
aaagagcucucaauuagaa

SEQ ID NO: 9763 - RNA, 19 nt, Homo sapiens
  misc_RNA (1)...(19): siRNA sense strand
ccacacacauuaagaaaga

SEQ ID NO: 9764 - RNA, 19 nt, Homo sapiens
  misc_RNA (1)...(19): siRNA sense strand
cacauuggcuuucuucuaa

SEQ ID NO: 9765 - RNA, 19 nt, Homo sapiens
  misc_RNA (1)...(19): siRNA sense strand
gaaaggcuaugaagcugaa

SEQ ID NO: 9766 - RNA, 19 nt, Homo sapiens
  misc_RNA (1)...(19): siRNA sense strand
gcacuaacacuacauuauu

SEQ ID NO: 9767 - RNA, 19 nt, Homo sapiens
  misc_RNA (1)...(19): siRNA sense strand
uaacagaagugaagaugga

SEQ ID NO: 9768 - RNA, 19 nt, Homo sapiens
  misc_RNA (1)...(19): siRNA sense strand
gaaucuaccuuuccacuuc

SEQ ID NO: 9769 - RNA, 19 nt, Homo sapiens
  misc_RNA (1)...(19): siRNA sense strand
ugaaagauccuugguguua

SEQ ID NO: 9770 - RNA, 19 nt, Homo sapiens
  misc_RNA (1)...(19): siRNA sense strand
ggagauggaugauaaugau

SEQ ID NO: 9771 - RNA, 19 nt, Homo sapiens
  misc_RNA (1)...(19): siRNA sense strand
gagaauaagcagcaauaua

SEQ ID NO: 9772 - RNA, 19 nt, Homo sapiens
  misc_RNA (1)...(19): siRNA sense strand
ucaccaagauuucaggaua

SEQ ID NO: 9773 - RNA, 19 nt, Homo sapiens
  misc_RNA (1)...(19): siRNA sense strand
auaaagagcucucaauuag

SEQ ID NO: 9774 - RNA, 19 nt, Homo sapiens
  misc_RNA (1)...(19): siRNA sense strand
gaagagacacaugaaauaa

SEQ ID NO: 9775 - RNA, 19 nt, Homo sapiens
  misc_RNA (1)...(19): siRNA sense strand
gaaagugaggcuuaacaua

SEQ ID NO: 9776 - RNA, 19 nt, Homo sapiens
  misc_RNA (1)...(19): siRNA sense strand
uagcacagaucacuaauau

SEQ ID NO: 9777 - RNA, 19 nt, Homo sapiens
  misc_RNA (1)...(19): siRNA sense strand
uaacaacucuucucaacau

SEQ ID NO: 9778 - RNA, 19 nt, Homo sapiens
  misc_RNA (1)...(19): siRNA sense strand
gagaaaagcuaaugauuug

SEQ ID NO: 9779 - RNA, 19 nt, Homo sapiens
  misc_RNA (1)...(19): siRNA sense strand
ggaccugugugacauguuu

SEQ ID NO: 9780 - RNA, 19 nt, Homo sapiens
  misc_RNA (1)...(19): siRNA sense strand
gaaccuaugcuacacagua

SEQ ID NO: 9781 - RNA, 19 nt, Homo sapiens
  misc_RNA (1)...(19): siRNA sense strand
gcagagaaguugacucauc

SEQ ID NO: 9782 - RNA, 19 nt, Homo sapiens
  misc_RNA (1)...(19): siRNA sense strand
ggaaugccaacaaaucuua

SEQ ID NO: 9783 - RNA, 19 nt, Homo sapiens
  misc_RNA (1)...(19): siRNA sense strand
ccaaauaaaucucaugagu

SEQ ID NO: 9784 - RNA, 19 nt, Homo sapiens
  misc_RNA (1)...(19): siRNA sense strand
ucagauagauucguuugua

SEQ ID NO: 9785 - RNA, 19 nt, Homo sapiens
  misc_RNA (1)...(19): siRNA sense strand
ccagagaccuuaccuguca

SEQ ID NO: 9786 - RNA, 19 nt, Homo sapiens
  misc_RNA (1)...(19): siRNA sense strand
acaaacagguaacacauaa

SEQ ID NO: 9787 - RNA, 19 nt, Homo sapiens
  misc_RNA (1)...(19): siRNA sense strand
guaaauggucuuugccuua

SEQ ID NO: 9788 - RNA, 19 nt, Homo sapiens
  misc_RNA (1)...(19): siRNA sense strand
ggacagauuagcacagaua

SEQ ID NO: 9789 - RNA, 19 nt, Homo sapiens
  misc_RNA (1)...(19): siRNA sense strand
gaaaggcagucauuuggau

SEQ ID NO: 9790 - RNA, 19 nt, Homo sapiens
  misc_RNA (1)...(19): siRNA sense strand
gaacucaugugaagucaag

SEQ ID NO: 9791 - RNA, 19 nt, Homo sapiens
  misc_RNA (1)...(19): siRNA sense strand
gaagguuacuuagcuugua

SEQ ID NO: 9792 - RNA, 19 nt, Homo sapiens
  misc_RNA (1)...(19): siRNA sense strand
gaaccugcauaucaguuaa

SEQ ID NO: 9793 - RNA, 19 nt, Homo sapiens
  misc_RNA (1)...(19): siRNA sense strand
gcacggaucuccuaagaac

SEQ ID NO: 9794 - RNA, 19 nt, Homo sapiens
  misc_RNA (1)...(19): siRNA sense strand
gagcacggaucuccuaaga

SEQ ID NO: 9795 - RNA, 19 nt, Homo sapiens
  misc_RNA (1)...(19): siRNA sense strand
uuacaaacccagaaaguua

SEQ ID NO: 9796 - RNA, 19 nt, Homo sapiens
  misc_RNA (1)...(19): siRNA sense strand
ccaguuauaucauggauug

SEQ ID NO: 9797 - RNA, 19 nt, Homo sapiens
  misc_RNA (1)...(19): siRNA sense strand
ggaccuagaauuuguauug

SEQ ID NO: 9798 - RNA, 19 nt, Homo sapiens
  misc_RNA (1)...(19): siRNA sense strand
caccaucaaucccuuguua

SEQ ID NO: 9799 - RNA, 19 nt, Homo sapiens
  misc_RNA (1)...(19): siRNA sense strand
gaaaggccaucaggacauu

SEQ ID NO: 9800 - RNA, 19 nt, Homo sapiens
  misc_RNA (1)...(19): siRNA sense strand
uaugaucacugcuguguaa

SEQ ID NO: 9801 - RNA, 19 nt, Homo sapiens
  misc_RNA (1)...(19): siRNA sense strand
gagcagagaaucuaccuuu

SEQ ID NO: 9802 - RNA, 19 nt, Homo sapiens
  misc_RNA (1)...(19): siRNA sense strand
caaauaugccuaaagguaa

SEQ ID NO: 9803 - RNA, 19 nt, Homo sapiens
  misc_RNA (1)...(19): siRNA sense strand
gacauagacuccacacuga

SEQ ID NO: 9804 - RNA, 19 nt, Homo sapiens
  misc_RNA (1)...(19): siRNA sense strand
uaacuugucugcauuucaa

SEQ ID NO: 9805 - RNA, 19 nt, Homo sapiens
  misc_RNA (1)...(19): siRNA sense strand
cauaaacagugaacucaaa

SEQ ID NO: 9806 - RNA, 19 nt, Homo sapiens
  misc_RNA (1)...(19): siRNA sense strand
gaccaacucugcagauuuc

SEQ ID NO: 9807 - RNA, 19 nt, Homo sapiens
  misc_RNA (1)...(19): siRNA sense strand
aauaacaucugacagcuaa

SEQ ID NO: 9808 - RNA, 19 nt, Homo sapiens
  misc_RNA (1)...(19): siRNA sense strand
cagauacuguuuccacaua

SEQ ID NO: 9809 - RNA, 19 nt, Homo sapiens
  misc_RNA (1)...(19): siRNA sense strand
ggacugaaccauuucuaaa

SEQ ID NO: 9810 - RNA, 19 nt, Homo sapiens
  misc_RNA (1)...(19): siRNA sense strand
gcacaacccuacccuuaca

SEQ ID NO: 9811 - RNA, 19 nt, Homo sapiens
  misc_RNA (1)...(19): siRNA sense strand
ucaaauaugccuaaaggua

SEQ ID NO: 9812 - RNA, 19 nt, Homo sapiens
  misc_RNA (1)...(19): siRNA sense strand
gcaaauucaucuuguucuu

SEQ ID NO: 9813 - RNA, 19 nt, Homo sapiens
  misc_RNA (1)...(19): siRNA sense strand
cgaaagcacuaauuacugu

SEQ ID NO: 9814 - RNA, 19 nt, Homo sapiens
  misc_RNA (1)...(19): siRNA sense strand
gaaauucaguguugagcau

SEQ ID NO: 9815 - RNA, 19 nt, Homo sapiens
  misc_RNA (1)...(19): siRNA sense strand
gaaacaauuagcagacaua

SEQ ID NO: 9816 - RNA, 19 nt, Homo sapiens
  misc_RNA (1)...(19): siRNA sense strand
aagaagaugugauuccuaa

SEQ ID NO: 9817 - RNA, 19 nt, Homo sapiens
  misc_RNA (1)...(19): siRNA sense strand
guaaguaccacuauaauuc

SEQ ID NO: 9818 - RNA, 19 nt, Homo sapiens
  misc_RNA (1)...(19): siRNA sense strand
ucaaucagcgucuguauuu

SEQ ID NO: 9819 - RNA, 19 nt, Homo sapiens
  misc_RNA (1)...(19): siRNA sense strand
uaccugugcucauauguua

SEQ ID NO: 9820 - RNA, 19 nt, Homo sapiens
  misc_RNA (1)...(19): siRNA sense strand
gauacuguuuccacauaua

SEQ ID NO: 9821 - RNA, 19 nt, Homo sapiens
  misc_RNA (1)...(19): siRNA sense strand
uuacacaucuucaucagaa

SEQ ID NO: 9822 - RNA, 19 nt, Homo sapiens
  misc_RNA (1)...(19): siRNA sense strand
ccaguauucuccagcuuua

SEQ ID NO: 9823 - RNA, 19 nt, Homo sapiens
  misc_RNA (1)...(19): siRNA sense strand
ucacaggacugaucuuuua

SEQ ID NO: 9824 - RNA, 19 nt, Homo sapiens
  misc_RNA (1)...(19): siRNA sense strand
caaaguaagucaaaguaag

SEQ ID NO: 9825 - RNA, 19 nt, Homo sapiens
  misc_RNA (1)...(19): siRNA sense strand
cuagcugguuucauuauua

SEQ ID NO: 9826 - RNA, 19 nt, Homo sapiens
  misc_RNA (1)...(19): siRNA sense strand
ggauauuucuccuuucuuc

SEQ ID NO: 9827 - RNA, 19 nt, Homo sapiens
  misc_RNA (1)...(19): siRNA sense strand
gcauauagcaauucuguug

SEQ ID NO: 9828 - RNA, 19 nt, Homo sapiens
  misc_RNA (1)...(19): siRNA sense strand
gaaagauccuugguguuau

SEQ ID NO: 9829 - RNA, 19 nt, Homo sapiens
  misc_RNA (1)...(19): siRNA sense strand
aaacucagaugauagucua

SEQ ID NO: 9830 - RNA, 19 nt, Homo sapiens
  misc_RNA (1)...(19): siRNA sense strand
gaagucaagaggaaacaua

SEQ ID NO: 9831 - RNA, 19 nt, Homo sapiens
  misc_RNA (1)...(19): siRNA sense strand
guaaguaaguuccacaaag

SEQ ID NO: 9832 - RNA, 19 nt, Homo sapiens
  misc_RNA (1)...(19): siRNA sense strand
gcaaguguaacaugugaua

SEQ ID NO: 9833 - RNA, 19 nt, Homo sapiens
  misc_RNA (1)...(19): siRNA sense strand
gaaagauuagugaggaaua

SEQ ID NO: 9834 - RNA, 19 nt, Homo sapiens
  misc_RNA (1)...(19): siRNA sense strand
caauuugcauucgauguua

SEQ ID NO: 9835 - RNA, 19 nt, Homo sapiens
  misc_RNA (1)...(19): siRNA sense strand
gcuccuagaugaaguacaa

SEQ ID NO: 9836 - RNA, 19 nt, Homo sapiens
  misc_RNA (1)...(19): siRNA sense strand
gaaaugucacuuuaucuga

SEQ ID NO: 9837 - RNA, 19 nt, Homo sapiens
  misc_RNA (1)...(19): siRNA sense strand
ggaagaauugccugucaua

SEQ ID NO: 9838 - RNA, 19 nt, Homo sapiens
  misc_RNA (1)...(19): siRNA sense strand
aaacagugcccuacaauga

SEQ ID NO: 9839 - RNA, 19 nt, Homo sapiens
  misc_RNA (1)...(19): siRNA sense strand
ggaauuaucgcaucucuaa

SEQ ID NO: 9840 - RNA, 19 nt, Homo sapiens
  misc_RNA (1)...(19): siRNA sense strand
gaaagaacauguugggaau

SEQ ID NO: 9841 - RNA, 19 nt, Homo sapiens
  misc_RNA (1)...(19): siRNA sense strand
ggaaggcucugucuaugaa

SEQ ID NO: 9842 - RNA, 19 nt, Homo sapiens
  misc_RNA (1)...(19): siRNA sense strand
ggaaguggaggguuaaaua

SEQ ID NO: 9843 - RNA, 19 nt, Homo sapiens
  misc_RNA (1)...(19): siRNA sense strand
acagaaagauccaugaauu

SEQ ID NO: 9844 - RNA, 19 nt, Homo sapiens
  misc_RNA (1)...(19): siRNA sense strand
gaaguggaggguuaaauaa

SEQ ID NO: 9845 - RNA, 19 nt, Homo sapiens
  misc_RNA (1)...(19): siRNA sense strand
caacccaaauggacuaaga

SEQ ID NO: 9846 - RNA, 19 nt, Homo sapiens
  misc_RNA (1)...(19): siRNA sense strand
cauauaugcuuaucagguu

SEQ ID NO: 9847 - RNA, 19 nt, Homo sapiens
  misc_RNA (1)...(19): siRNA sense strand
ccagaacugugggcaauaa

SEQ ID NO: 9848 - RNA, 19 nt, Homo sapiens
  misc_RNA (1)...(19): siRNA sense strand
ccagaggccauaccuaaua

SEQ ID NO: 9849 - RNA, 19 nt, Homo sapiens
  misc_RNA (1)...(19): siRNA sense strand
ccacuguacugcagacuga

SEQ ID NO: 9850 - RNA, 19 nt, Homo sapiens
  misc_RNA (1)...(19): siRNA sense strand
uaacucccauugcuaaaga

SEQ ID NO: 9851 - RNA, 19 nt, Homo sapiens
  misc_RNA (1)...(19): siRNA sense strand
gauauuuguucacaggaaa

SEQ ID NO: 9852 - RNA, 19 nt, Homo sapiens
  misc_RNA (1)...(19): siRNA sense strand
cagaggccauaccuaauaa

SEQ ID NO: 9853 - RNA, 19 nt, Homo sapiens
  misc_RNA (1)...(19): siRNA sense strand
gaaaauaacucccauugcu

SEQ ID NO: 9854 - RNA, 19 nt, Homo sapiens
  misc_RNA (1)...(19): siRNA sense strand
gaacugugggcaauaaaug

SEQ ID NO: 9855 - RNA, 19 nt, Homo sapiens
  misc_RNA (1)...(19): siRNA sense strand
caacaucuuucaucacucu

SEQ ID NO: 9856 - RNA, 19 nt, Homo sapiens
  misc_RNA (1)...(19): siRNA sense strand
ggcaauaaaugucuguugu

SEQ ID NO: 9857 - RNA, 19 nt, Homo sapiens
  misc_RNA (1)...(19): siRNA sense strand
uaacuucccacgaguguuu

SEQ ID NO: 9858 - RNA, 19 nt, Homo sapiens
  misc_RNA (1)...(19): siRNA sense strand
uccaguaucuuugguauuu

SEQ ID NO: 9859 - RNA, 19 nt, Homo sapiens
  misc_RNA (1)...(19): siRNA sense strand
ggauauuuguucacaggaa

SEQ ID NO: 9860 - RNA, 19 nt, Homo sapiens
  misc_RNA (1)...(19): siRNA sense strand
gguacuggcuagaaauuuc

SEQ ID NO: 9861 - RNA, 19 nt, Homo sapiens
  misc_RNA (1)...(19): siRNA sense strand
gacauugugugcaucuuug

SEQ ID NO: 9862 - RNA, 19 nt, Homo sapiens
  misc_RNA (1)...(19): siRNA sense strand
uccaugaauuccagaaaua

SEQ ID NO: 9863 - RNA, 19 nt, Homo sapiens
  misc_RNA (1)...(19): siRNA sense strand
agauggaaguggaggguua

SEQ ID NO: 9864 - RNA, 19 nt, Homo sapiens
  misc_RNA (1)...(19): siRNA sense strand
uuuauuaccuguccaguau

SEQ ID NO: 9865 - RNA, 19 nt, Homo sapiens
  misc_RNA (1)...(19): siRNA sense strand
gcaauaaaugucuguuguu

SEQ ID NO: 9866 - RNA, 19 nt, Homo sapiens
  misc_RNA (1)...(19): siRNA sense strand
gagggaaggcucugucuau

SEQ ID NO: 9867 - RNA, 19 nt, Homo sapiens
  misc_RNA (1)...(19): siRNA sense strand
ccagaaauaucacugaaaa

SEQ ID NO: 9868 - RNA, 19 nt, Homo sapiens
  misc_RNA (1)...(19): siRNA sense strand
gaugagcacuccuacaaaa

SEQ ID NO: 9869 - RNA, 19 nt, Homo sapiens
  misc_RNA (1)...(19): siRNA sense strand
gggaugagcacuccuacaa

SEQ ID NO: 9870 - RNA, 19 nt, Homo sapiens
  misc_RNA (1)...(19): siRNA sense strand
guggaggguuaaauaauga

SEQ ID NO: 9871 - RNA, 19 nt, Homo sapiens
  misc_RNA (1)...(19): siRNA sense strand
gaguggagccucaugaaug

SEQ ID NO: 9872 - RNA, 19 nt, Homo sapiens
  misc_RNA (1)...(19): siRNA sense strand
gaacuuuauugcuuuagac

SEQ ID NO: 9873 - RNA, 19 nt, Homo sapiens
  misc_RNA (1)...(19): siRNA sense strand
ucccauugcuaaagacaua

SEQ ID NO: 9874 - RNA, 19 nt, Homo sapiens
  misc_RNA (1)...(19): siRNA sense strand
aaauaacucccauugcuaa

SEQ ID NO: 9875 - RNA, 19 nt, Homo sapiens
  misc_RNA (1)...(19): siRNA sense strand
uuacuaugguucacaauuc

SEQ ID NO: 9876 - RNA, 19 nt, Homo sapiens
  misc_RNA (1)...(19): siRNA sense strand
aauaaggcaugcaguucua

SEQ ID NO: 9877 - RNA, 19 nt, Homo sapiens
  misc_RNA (1)...(19): siRNA sense strand
gagguaggcagaucacuug

SEQ ID NO: 9878 - RNA, 19 nt, Homo sapiens
  misc_RNA (1)...(19): siRNA sense strand
caccagaggccauaccuaa

SEQ ID NO: 9879 - RNA, 19 nt, Homo sapiens
  misc_RNA (1)...(19): siRNA sense strand
gaagagaugauuggaagau

SEQ ID NO: 9880 - RNA, 19 nt, Homo sapiens
  misc_RNA (1)...(19): siRNA sense strand
caaccuugcuaaauugagu

SEQ ID NO: 9881 - RNA, 19 nt, Homo sapiens
  misc_RNA (1)...(19): siRNA sense strand
uaacagaaagauccaugaa

SEQ ID NO: 9882 - RNA, 19 nt, Homo sapiens
  misc_RNA (1)...(19): siRNA sense strand
ccugaugucuauaugaaga

SEQ ID NO: 9883 - RNA, 19 nt, Homo sapiens
  misc_RNA (1)...(19): siRNA sense strand
aagaacauguugggaauug

SEQ ID NO: 9884 - RNA, 19 nt, Homo sapiens
  misc_RNA (1)...(19): siRNA sense strand
agacauauaugcuuaucag

SEQ ID NO: 9885 - RNA, 19 nt, Homo sapiens
  misc_RNA (1)...(19): siRNA sense strand
gcuaaagacauauaugcuu

SEQ ID NO: 9886 - RNA, 19 nt, Homo sapiens
  misc_RNA (1)...(19): siRNA sense strand
gccaacaucuuucaucacu

SEQ ID NO: 9887 - RNA, 19 nt, Homo sapiens
  misc_RNA (1)...(19): siRNA sense strand
gaauaaggcaugcaguucu

SEQ ID NO: 9888 - RNA, 19 nt, Homo sapiens
  misc_RNA (1)...(19): siRNA sense strand
cuacagcuacucuuuaaau

SEQ ID NO: 9889 - RNA, 19 nt, Homo sapiens
  misc_RNA (1)...(19): siRNA sense strand
uggcaaacucccaccauua

SEQ ID NO: 9890 - RNA, 19 nt, Homo sapiens
  misc_RNA (1)...(19): siRNA sense strand
ggcaugcaguucuaacaga

SEQ ID NO: 9891 - RNA, 19 nt, Homo sapiens
  misc_RNA (1)...(19): siRNA sense strand
gggaaggcucugucuauga

SEQ ID NO: 9892 - RNA, 19 nt, Homo sapiens
  misc_RNA (1)...(19): siRNA sense strand
cccuacagcuacucuuuaa

SEQ ID NO: 9893 - RNA, 19 nt, Homo sapiens
  misc_RNA (1)...(19): siRNA sense strand
ugacauuucaggauauuug

SEQ ID NO: 9894 - RNA, 19 nt, Homo sapiens
  misc_RNA (1)...(19): siRNA sense strand
ccaaaucaaaugaguuuca

SEQ ID NO: 9895 - RNA, 19 nt, Homo sapiens
  misc_RNA (1)...(19): siRNA sense strand
cagcuacucuuuaaaucuc

SEQ ID NO: 9896 - RNA, 19 nt, Homo sapiens
  misc_RNA (1)...(19): siRNA sense strand
gaggcugucugccaacauc

SEQ ID NO: 9897 - RNA, 19 nt, Homo sapiens
  misc_RNA (1)...(19): siRNA sense strand
ggaugagcacuccuacaaa

SEQ ID NO: 9898 - RNA, 19 nt, Homo sapiens
  misc_RNA (1)...(19): siRNA sense strand
gcccuacagcuacucuuua

SEQ ID NO: 9899 - RNA, 19 nt, Homo sapiens
  misc_RNA (1)...(19): siRNA sense strand
cagaauaaggcaugcaguu

SEQ ID NO: 9900 - RNA, 19 nt, Homo sapiens
  misc_RNA (1)...(19): siRNA sense strand
gagaguggagccucaugaa

SEQ ID NO: 9901 - RNA, 19 nt, Homo sapiens
  misc_RNA (1)...(19): siRNA sense strand
caaacucccaccauuacaa

SEQ ID NO: 9902 - RNA, 19 nt, Homo sapiens
  misc_RNA (1)...(19): siRNA sense strand
ccacgaguguuuaugaaaa

SEQ ID NO: 9903 - RNA, 19 nt, Homo sapiens
  misc_RNA (1)...(19): siRNA sense strand
cuugcuaaauugaguacua

SEQ ID NO: 9904 - RNA, 19 nt, Homo sapiens
  misc_RNA (1)...(19): siRNA sense strand
aguggaggguuaaauaaug

SEQ ID NO: 9905 - RNA, 19 nt, Homo sapiens
  misc_RNA (1)...(19): siRNA sense strand
gaauugguacuggcuagaa

SEQ ID NO: 9906 - RNA, 19 nt, Homo sapiens
  misc_RNA (1)...(19): siRNA sense strand
cagaaagauccaugaauuc

SEQ ID NO: 9907 - RNA, 19 nt, Homo sapiens
  misc_RNA (1)...(19): siRNA sense strand
ugacauugugugcaucuuu

SEQ ID NO: 9908 - RNA, 19 nt, Homo sapiens
  misc_RNA (1)...(19): siRNA sense strand
gaaaacaccagaggccaua

SEQ ID NO: 9909 - RNA, 19 nt, Homo sapiens
  misc_RNA (1)...(19): siRNA sense strand
cauugaaucugccgcaucu

SEQ ID NO: 9910 - RNA, 19 nt, Homo sapiens
  misc_RNA (1)...(19): siRNA sense strand
ccacaguuuagaaagauuu

SEQ ID NO: 9911 - RNA, 19 nt, Homo sapiens
  misc_RNA (1)...(19): siRNA sense strand
gaacauguugggaauuggu

SEQ ID NO: 9912 - RNA, 19 nt, Homo sapiens
  misc_RNA (1)...(19): siRNA sense strand
uuuauucacuuccugaugu

SEQ ID NO: 9913 - RNA, 19 nt, Homo sapiens
  misc_RNA (1)...(19): siRNA sense strand
gggaugggaggaucucuug

SEQ ID NO: 9914 - RNA, 19 nt, Homo sapiens
  misc_RNA (1)...(19): siRNA sense strand
cuuuauugcuuuagacaga

SEQ ID NO: 9915 - RNA, 19 nt, Homo sapiens
  misc_RNA (1)...(19): siRNA sense strand
caaaucaaaugaguuucag

SEQ ID NO: 9916 - RNA, 19 nt, Homo sapiens
  misc_RNA (1)...(19): siRNA sense strand
aaacucccaccauuacaaa

SEQ ID NO: 9917 - RNA, 19 nt, Homo sapiens
  misc_RNA (1)...(19): siRNA sense strand
gaaagauccaugaauucca

SEQ ID NO: 9918 - RNA, 19 nt, Homo sapiens
  misc_RNA (1)...(19): siRNA sense strand
ucacaggaaagaacauguu

SEQ ID NO: 9919 - RNA, 19 nt, Homo sapiens
  misc_RNA (1)...(19): siRNA sense strand
uaucaauucaugcugguuu

SEQ ID NO: 9920 - RNA, 19 nt, Homo sapiens
  misc_RNA (1)...(19): siRNA sense strand
gauccaugaauuccagaaa

SEQ ID NO: 9921 - RNA, 19 nt, Homo sapiens
  misc_RNA (1)...(19): siRNA sense strand
gagaugauuggaagaugga

SEQ ID NO: 9922 - RNA, 19 nt, Homo sapiens
  misc_RNA (1)...(19): siRNA sense strand
ccuguaaucccagcacuuu

SEQ ID NO: 9923 - RNA, 19 nt, Homo sapiens
  misc_RNA (1)...(19): siRNA sense strand
gggcaauaaaugucuguug

SEQ ID NO: 9924 - RNA, 19 nt, Homo sapiens
  misc_RNA (1)...(19): siRNA sense strand
ucacucugccugcaacuau

SEQ ID NO: 9925 - RNA, 19 nt, Homo sapiens
  misc_RNA (1)...(19): siRNA sense strand
guuacuaugguucacaauu

SEQ ID NO: 9926 - RNA, 19 nt, Homo sapiens
  misc_RNA (1)...(19): siRNA sense strand
cuccaaaucaaaugaguuu

SEQ ID NO: 9927 - RNA, 19 nt, Homo sapiens
  misc_RNA (1)...(19): siRNA sense strand
gcaaacucccaccauuaca

SEQ ID NO: 9928 - RNA, 19 nt, Homo sapiens
  misc_RNA (1)...(19): siRNA sense strand
uuccugaugucuauaugaa

SEQ ID NO: 9929 - RNA, 19 nt, Homo sapiens
  misc_RNA (1)...(19): siRNA sense strand
cugccaacaucuuucauca

SEQ ID NO: 9930 - RNA, 19 nt, Homo sapiens
  misc_RNA (1)...(19): siRNA sense strand
uuaccuguccaguaucuuu

SEQ ID NO: 9931 - RNA, 19 nt, Homo sapiens
  misc_RNA (1)...(19): siRNA sense strand
guuuauuaccuguccagua

SEQ ID NO: 9932 - RNA, 19 nt, Homo sapiens
  misc_RNA (1)...(19): siRNA sense strand
ugaaucugccgcaucuuga

SEQ ID NO: 9933 - RNA, 19 nt, Homo sapiens
  misc_RNA (1)...(19): siRNA sense strand
ggaggguuaaauaaugaaa

SEQ ID NO: 9934 - RNA, 19 nt, Homo sapiens
  misc_RNA (1)...(19): siRNA sense strand
gauggaaguggaggguuaa

SEQ ID NO: 9935 - RNA, 19 nt, Homo sapiens
  misc_RNA (1)...(19): siRNA sense strand
ggcaaacucccaccauuac

SEQ ID NO: 9936 - RNA, 19 nt, Homo sapiens
  misc_RNA (1)...(19): siRNA sense strand
ucuguuccauauugacauu

SEQ ID NO: 9937 - RNA, 19 nt, Homo sapiens
  misc_RNA (1)...(19): siRNA sense strand
caaauggacuaagaaaaca

SEQ ID NO: 9938 - RNA, 19 nt, Homo sapiens
  misc_RNA (1)...(19): siRNA sense strand
aauucaugcugguuuauuc

SEQ ID NO: 9939 - RNA, 19 nt, Homo sapiens
  misc_RNA (1)...(19): siRNA sense strand
caacagacaugacaccuua

SEQ ID NO: 9940 - RNA, 19 nt, Homo sapiens
  misc_RNA (1)...(19): siRNA sense strand
caacuuaccuugcauucua

SEQ ID NO: 9941 - RNA, 19 nt, Homo sapiens
  misc_RNA (1)...(19): siRNA sense strand
ucacuaagcucaagggaua

SEQ ID NO: 9942 - RNA, 19 nt, Homo sapiens
  misc_RNA (1)...(19): siRNA sense strand
uaacauauguccauucuug

SEQ ID NO: 9943 - RNA, 19 nt, Homo sapiens
  misc_RNA (1)...(19): siRNA sense strand
gaaacacugucucuacuaa

SEQ ID NO: 9944 - RNA, 19 nt, Homo sapiens
  misc_RNA (1)...(19): siRNA sense strand
guacauagccugcuuaaau

SEQ ID NO: 9945 - RNA, 19 nt, Homo sapiens
  misc_RNA (1)...(19): siRNA sense strand
ccacagagcuggaauucuu

SEQ ID NO: 9946 - RNA, 19 nt, Homo sapiens
  misc_RNA (1)...(19): siRNA sense strand
gaagaggacgggucuaaua

SEQ ID NO: 9947 - RNA, 19 nt, Homo sapiens
  misc_RNA (1)...(19): siRNA sense strand
uaaaggaacugauaaguca

SEQ ID NO: 9948 - RNA, 19 nt, Homo sapiens
  misc_RNA (1)...(19): siRNA sense strand
ugagaucucugcuguauuu

SEQ ID NO: 9949 - RNA, 19 nt, Homo sapiens
  misc_RNA (1)...(19): siRNA sense strand
gacgagagauuuccuugua

SEQ ID NO: 9950 - RNA, 19 nt, Homo sapiens
  misc_RNA (1)...(19): siRNA sense strand
gagcuggaauucuuuguaa

SEQ ID NO: 9951 - RNA, 19 nt, Homo sapiens
  misc_RNA (1)...(19): siRNA sense strand
caccuuaccuggcuaguua

SEQ ID NO: 9952 - RNA, 19 nt, Homo sapiens
  misc_RNA (1)...(19): siRNA sense strand
caacgaaucgguauauuaa

SEQ ID NO: 9953 - RNA, 19 nt, Homo sapiens
  misc_RNA (1)...(19): siRNA sense strand
guagauugccuuugucuua

SEQ ID NO: 9954 - RNA, 19 nt, Homo sapiens
  misc_RNA (1)...(19): siRNA sense strand
gaacaugguuauuggacaa

SEQ ID NO: 9955 - RNA, 19 nt, Homo sapiens
  misc_RNA (1)...(19): siRNA sense strand
cagagagacucauuuguuu

SEQ ID NO: 9956 - RNA, 19 nt, Homo sapiens
  misc_RNA (1)...(19): siRNA sense strand
gaucucugcuguauuugua

SEQ ID NO: 9957 - RNA, 19 nt, Homo sapiens
  misc_RNA (1)...(19): siRNA sense strand
uacauagccugcuuaaaua

SEQ ID NO: 9958 - RNA, 19 nt, Homo sapiens
  misc_RNA (1)...(19): siRNA sense strand
ccaacauacuucuuagaua

SEQ ID NO: 9959 - RNA, 19 nt, Homo sapiens
  misc_RNA (1)...(19): siRNA sense strand
gggaauccgugaguucuua

SEQ ID NO: 9960 - RNA, 19 nt, Homo sapiens
  misc_RNA (1)...(19): siRNA sense strand
gcaaugauguagaauacug

SEQ ID NO: 9961 - RNA, 19 nt, Homo sapiens
  misc_RNA (1)...(19): siRNA sense strand
caagggauaagucaaguua

SEQ ID NO: 9962 - RNA, 19 nt, Homo sapiens
  misc_RNA (1)...(19): siRNA sense strand
gaucaugccacuacacuuu

SEQ ID NO: 9963 - RNA, 19 nt, Homo sapiens
  misc_RNA (1)...(19): siRNA sense strand
uuacauugcuuccagcuuu

SEQ ID NO: 9964 - RNA, 19 nt, Homo sapiens
  misc_RNA (1)...(19): siRNA sense strand
gaucagaacaugguuauug

SEQ ID NO: 9965 - RNA, 19 nt, Homo sapiens
  misc_RNA (1)...(19): siRNA sense strand
gaaaccucaugucuacuaa

SEQ ID NO: 9966 - RNA, 19 nt, Homo sapiens
  misc_RNA (1)...(19): siRNA sense strand
caguaucccuuucccuuua

SEQ ID NO: 9967 - RNA, 19 nt, Homo sapiens
  misc_RNA (1)...(19): siRNA sense strand
uguauagacuucagaguaa

SEQ ID NO: 9968 - RNA, 19 nt, Homo sapiens
  misc_RNA (1)...(19): siRNA sense strand
gauaacauauguccauucu

SEQ ID NO: 9969 - RNA, 19 nt, Homo sapiens
  misc_RNA (1)...(19): siRNA sense strand
gaaccaacauacuucuuag

SEQ ID NO: 9970 - RNA, 19 nt, Homo sapiens
  misc_RNA (1)...(19): siRNA sense strand
caugagagaucagaugaaa

SEQ ID NO: 9971 - RNA, 19 nt, Homo sapiens
  misc_RNA (1)...(19): siRNA sense strand
ggugaaaccucaugucuac

SEQ ID NO: 9972 - RNA, 19 nt, Homo sapiens
  misc_RNA (1)...(19): siRNA sense strand
gaaggucaguugauaggau

SEQ ID NO: 9973 - RNA, 19 nt, Homo sapiens
  misc_RNA (1)...(19): siRNA sense strand
uaaagaccauucugggaaa

SEQ ID NO: 9974 - RNA, 19 nt, Homo sapiens
  misc_RNA (1)...(19): siRNA sense strand
cauugaaccuuguaacauu

SEQ ID NO: 9975 - RNA, 19 nt, Homo sapiens
  misc_RNA (1)...(19): siRNA sense strand
ugagaccuguccuaaauuu

SEQ ID NO: 9976 - RNA, 19 nt, Homo sapiens
  misc_RNA (1)...(19): siRNA sense strand
ggagagaccuggccgaaaa

SEQ ID NO: 9977 - RNA, 19 nt, Homo sapiens
  misc_RNA (1)...(19): siRNA sense strand
guaagucugucguuuguuc

SEQ ID NO: 9978 - RNA, 19 nt, Homo sapiens
  misc_RNA (1)...(19): siRNA sense strand
caacuuaaaccucagaaga

SEQ ID NO: 9979 - RNA, 19 nt, Homo sapiens
  misc_RNA (1)...(19): siRNA sense strand
ccaccuccaucuaauauug

SEQ ID NO: 9980 - RNA, 19 nt, Homo sapiens
  misc_RNA (1)...(19): siRNA sense strand
cgagagauuuccuuguauu

SEQ ID NO: 9981 - RNA, 19 nt, Homo sapiens
  misc_RNA (1)...(19): siRNA sense strand
gaguuuaguuguguucuuu

SEQ ID NO: 9982 - RNA, 19 nt, Homo sapiens
  misc_RNA (1)...(19): siRNA sense strand
uagguaggcuccaaauuga

SEQ ID NO: 9983 - RNA, 19 nt, Homo sapiens
  misc_RNA (1)...(19): siRNA sense strand
gggaggugcuacacacuuu

SEQ ID NO: 9984 - RNA, 19 nt, Homo sapiens
  misc_RNA (1)...(19): siRNA sense strand
uacagaagcugacgagaga

SEQ ID NO: 9985 - RNA, 19 nt, Homo sapiens
  misc_RNA (1)...(19): siRNA sense strand
ucaacgaaucgguauauua

SEQ ID NO: 9986 - RNA, 19 nt, Homo sapiens
  misc_RNA (1)...(19): siRNA sense strand
ugauuuagcuguguccuuu

SEQ ID NO: 9987 - RNA, 19 nt, Homo sapiens
  misc_RNA (1)...(19): siRNA sense strand
ggaaaggccucaggaaacu

SEQ ID NO: 9988 - RNA, 19 nt, Homo sapiens
  misc_RNA (1)...(19): siRNA sense strand
cauucuaccucccaugaua

SEQ ID NO: 9989 - RNA, 19 nt, Homo sapiens
  misc_RNA (1)...(19): siRNA sense strand
gcuauaauggcaaucauaa

SEQ ID NO: 9990 - RNA, 19 nt, Homo sapiens
  misc_RNA (1)...(19): siRNA sense strand
ccagagagacucauuuguu

SEQ ID NO: 9991 - RNA, 19 nt, Homo sapiens
  misc_RNA (1)...(19): siRNA sense strand
caaguaacauggaagucuu

SEQ ID NO: 9992 - RNA, 19 nt, Homo sapiens
  misc_RNA (1)...(19): siRNA sense strand
guagguaaaggaacugaua

SEQ ID NO: 9993 - RNA, 19 nt, Homo sapiens
  misc_RNA (1)...(19): siRNA sense strand
ggagacacaauuuaacuga

SEQ ID NO: 9994 - RNA, 19 nt, Homo sapiens
  misc_RNA (1)...(19): siRNA sense strand
uaaaguaguugucuagacu

SEQ ID NO: 9995 - RNA, 19 nt, Homo sapiens
  misc_RNA (1)...(19): siRNA sense strand
gaaaauaacagcaaccuau

SEQ ID NO: 9996 - RNA, 19 nt, Homo sapiens
  misc_RNA (1)...(19): siRNA sense strand
gucaucaacugaaagauug

SEQ ID NO: 9997 - RNA, 19 nt, Homo sapiens
  misc_RNA (1)...(19): siRNA sense strand
gaucaauacaagagguuua

SEQ ID NO: 9998 - RNA, 19 nt, Homo sapiens
  misc_RNA (1)...(19): siRNA sense strand
gaugggaucuuggcuuugu

SEQ ID NO: 9999 - RNA, 19 nt, Homo sapiens
  misc_RNA (1)...(19): siRNA sense strand
gcacaugucguuaggacuu

SEQ ID NO: 10000 - RNA, 19 nt, Homo sapiens
  misc_RNA (1)...(19): siRNA sense strand
uacauaagccacuuucaua

SEQ ID NO: 10001 - RNA, 19 nt, Homo sapiens
  misc_RNA (1)...(19): siRNA sense strand
ugaaccaacauacuucuua

SEQ ID NO: 10002 - RNA, 19 nt, Homo sapiens
  misc_RNA (1)...(19): siRNA sense strand
gugauuauuggcagaauua

SEQ ID NO: 10003 - RNA, 19 nt, Homo sapiens
  misc_RNA (1)...(19): siRNA sense strand
gagcagggagcaagaaaga

SEQ ID NO: 10004 - RNA, 19 nt, Homo sapiens
  misc_RNA (1)...(19): siRNA sense strand
gggaagcaggcacaucuua

SEQ ID NO: 10005 - RNA, 19 nt, Homo sapiens
  misc_RNA (1)...(19): siRNA sense strand
gcugauuauuaccagauua

SEQ ID NO: 10006 - RNA, 19 nt, Homo sapiens
  misc_RNA (1)...(19): siRNA sense strand
gcuucucucuuucaucuuu

SEQ ID NO: 10007 - RNA, 19 nt, Homo sapiens
  misc_RNA (1)...(19): siRNA sense strand
uaacugagaccuguccuaa

SEQ ID NO: 10008 - RNA, 19 nt, Homo sapiens
  misc_RNA (1)...(19): siRNA sense strand
gauaaucucaguucaucaa

SEQ ID NO: 10009 - RNA, 19 nt, Homo sapiens
  misc_RNA (1)...(19): siRNA sense strand
ugaauacaggcaugauuua

SEQ ID NO: 10010 - RNA, 19 nt, Homo sapiens
  misc_RNA (1)...(19): siRNA sense strand
gagauuuauuggcucauga

SEQ ID NO: 10011 - RNA, 19 nt, Homo sapiens
  misc_RNA (1)...(19): siRNA sense strand
ggauacuggcuaauuuaua

SEQ ID NO: 10012 - RNA, 19 nt, Homo sapiens
  misc_RNA (1)...(19): siRNA sense strand
gagacacaauuuaacugaa

SEQ ID NO: 10013 - RNA, 19 nt, Homo sapiens
  misc_RNA (1)...(19): siRNA sense strand
caaacauggugguucaaug

SEQ ID NO: 10014 - RNA, 19 nt, Homo sapiens
  misc_RNA (1)...(19): siRNA sense strand
gaugguuuauggucauuga

SEQ ID NO: 10015 - RNA, 19 nt, Homo sapiens
  misc_RNA (1)...(19): siRNA sense strand
gaagugcugggauuacauu

SEQ ID NO: 10016 - RNA, 19 nt, Homo sapiens
  misc_RNA (1)...(19): siRNA sense strand
ccaaauugaucagaacaug

SEQ ID NO: 10017 - RNA, 19 nt, Homo sapiens
  misc_RNA (1)...(19): siRNA sense strand
ucaaagcuguaaucagguu

SEQ ID NO: 10018 - RNA, 19 nt, Homo sapiens
  misc_RNA (1)...(19): siRNA sense strand
gaacucacugucagaagaa

SEQ ID NO: 10019 - RNA, 19 nt, Homo sapiens
  misc_RNA (1)...(19): siRNA sense strand
ugauguagauugccuuugu

SEQ ID NO: 10020 - RNA, 19 nt, Homo sapiens
  misc_RNA (1)...(19): siRNA sense strand
aagacaagcugcagcaaau

SEQ ID NO: 10021 - RNA, 19 nt, Homo sapiens
  misc_RNA (1)...(19): siRNA sense strand
ccaguucagucuuuacaga

SEQ ID NO: 10022 - RNA, 19 nt, Homo sapiens
  misc_RNA (1)...(19): siRNA sense strand
gcauguggcuguggucuca

SEQ ID NO: 10023 - RNA, 19 nt, Homo sapiens
  misc_RNA (1)...(19): siRNA sense strand
agaguaauguggccuguau

SEQ ID NO: 10024 - RNA, 19 nt, Homo sapiens
  misc_RNA (1)...(19): siRNA sense strand
caacugaaagauugacuga

SEQ ID NO: 10025 - RNA, 19 nt, Homo sapiens
  misc_RNA (1)...(19): siRNA sense strand
cauauuauccugacuguag

SEQ ID NO: 10026 - RNA, 19 nt, Homo sapiens
  misc_RNA (1)...(19): siRNA sense strand
caauauaguuguguugaca

SEQ ID NO: 10027 - RNA, 19 nt, Homo sapiens
  misc_RNA (1)...(19): siRNA sense strand
gcagagaucaugccacuac

SEQ ID NO: 10028 - RNA, 19 nt, Homo sapiens
  misc_RNA (1)...(19): siRNA sense strand
ggccagagaagagaaauaa

SEQ ID NO: 10029 - RNA, 19 nt, Homo sapiens
  misc_RNA (1)...(19): siRNA sense strand
acugagaccuguccuaaau

SEQ ID NO: 10030 - RNA, 19 nt, Homo sapiens
  misc_RNA (1)...(19): siRNA sense strand
ggauaagucaaguuagaaa

SEQ ID NO: 10031 - RNA, 19 nt, Homo sapiens
  misc_RNA (1)...(19): siRNA sense strand
ugacuguagugguuuaaga

SEQ ID NO: 10032 - RNA, 19 nt, Homo sapiens
  misc_RNA (1)...(19): siRNA sense strand
ggccaaacauggugguuca

SEQ ID NO: 10033 - RNA, 19 nt, Homo sapiens
  misc_RNA (1)...(19): siRNA sense strand
ggaguccugagauuuauuu

SEQ ID NO: 10034 - RNA, 19 nt, Homo sapiens
  misc_RNA (1)...(19): siRNA sense strand
gagggaugauuucgaguuc

SEQ ID NO: 10035 - RNA, 19 nt, Homo sapiens
  misc_RNA (1)...(19): siRNA sense strand
caucagauaugcauuucuc

SEQ ID NO: 10036 - RNA, 19 nt, Homo sapiens
  misc_RNA (1)...(19): siRNA sense strand
aauauuggauacuggcuaa

SEQ ID NO: 10037 - RNA, 19 nt, Homo sapiens
  misc_RNA (1)...(19): siRNA sense strand
guugauaggaugaaugaaa

SEQ ID NO: 10038 - RNA, 19 nt, Homo sapiens
  misc_RNA (1)...(19): siRNA sense strand
gagagauuuccuuguauuu

SEQ ID NO: 10039 - RNA, 19 nt, Homo sapiens
  misc_RNA (1)...(19): siRNA sense strand
guaaagaccugccuaaugg

SEQ ID NO: 10040 - RNA, 19 nt, Homo sapiens
  misc_RNA (1)...(19): siRNA sense strand
ggaagagugugacagaugu

SEQ ID NO: 10041 - RNA, 19 nt, Homo sapiens
  misc_RNA (1)...(19): siRNA sense strand
ggacgaugcuucucuucug

SEQ ID NO: 10042 - RNA, 19 nt, Homo sapiens
  misc_RNA (1)...(19): siRNA sense strand
uaucauugcuccauugugu

SEQ ID NO: 10043 - RNA, 19 nt, Homo sapiens
  misc_RNA (1)...(19): siRNA sense strand
ugacagauguuaucauugc

SEQ ID NO: 10044 - RNA, 19 nt, Homo sapiens
  misc_RNA (1)...(19): siRNA sense strand
ugugacagauguuaucauu

SEQ ID NO: 10045 - RNA, 19 nt, Homo sapiens
  misc_RNA (1)...(19): siRNA sense strand
ggacguacagcucuucaug

SEQ ID NO: 10046 - RNA, 19 nt, Homo sapiens
  misc_RNA (1)...(19): siRNA sense strand
guaggacgaugcuucucuu

SEQ ID NO: 10047 - RNA, 19 nt, Homo sapiens
  misc_RNA (1)...(19): siRNA sense strand
cggcucaacucgcaucuca

SEQ ID NO: 10048 - RNA, 19 nt, Homo sapiens
  misc_RNA (1)...(19): siRNA sense strand
uguaaagaccugccuaaug

SEQ ID NO: 10049 - RNA, 19 nt, Homo sapiens
  misc_RNA (1)...(19): siRNA sense strand
gacgaugcuucucuucugu

SEQ ID NO: 10050 - RNA, 19 nt, Homo sapiens
  misc_RNA (1)...(19): siRNA sense strand
ggagaaggcggacguacag

SEQ ID NO: 10051 - RNA, 19 nt, Homo sapiens
  misc_RNA (1)...(19): siRNA sense strand
gugcagacaauauggaaga

SEQ ID NO: 10052 - RNA, 19 nt, Homo sapiens
  misc_RNA (1)...(19): siRNA sense strand
gcucaacucgcaucucaag

SEQ ID NO: 10053 - RNA, 19 nt, Homo sapiens
  misc_RNA (1)...(19): siRNA sense strand
gcaacugagccaggauuga

SEQ ID NO: 10054 - RNA, 19 nt, Homo sapiens
  misc_RNA (1)...(19): siRNA sense strand
gaagagugugacagauguu

SEQ ID NO: 10055 - RNA, 19 nt, Homo sapiens
  misc_RNA (1)...(19): siRNA sense strand
uaaugguucugccuucagu

SEQ ID NO: 10056 - RNA, 19 nt, Homo sapiens
  misc_RNA (1)...(19): siRNA sense strand
acguacagcucuucaugga

SEQ ID NO: 10057 - RNA, 19 nt, Homo sapiens
  misc_RNA (1)...(19): siRNA sense strand
uauggaagagugugacaga

SEQ ID NO: 10058 - RNA, 19 nt, Homo sapiens
  misc_RNA (1)...(19): siRNA sense strand
cgaugcuucucuucuguca

SEQ ID NO: 10059 - RNA, 19 nt, Homo sapiens
  misc_RNA (1)...(19): siRNA sense strand
aaagaccugccuaaugguu

SEQ ID NO: 10060 - RNA, 19 nt, Homo sapiens
  misc_RNA (1)...(19): siRNA sense strand
uguuaucauugcuccauug

SEQ ID NO: 10061 - RNA, 19 nt, Homo sapiens
  misc_RNA (1)...(19): siRNA sense strand
ccuaaugguucugccuuca

SEQ ID NO: 10062 - RNA, 19 nt, Homo sapiens
  misc_RNA (1)...(19): siRNA sense strand
uggaagagugugacagaug

SEQ ID NO: 10063 - RNA, 19 nt, Homo sapiens
  misc_RNA (1)...(19): siRNA sense strand
aagagugugacagauguua

SEQ ID NO: 10064 - RNA, 19 nt, Homo sapiens
  misc_RNA (1)...(19): siRNA sense strand
gauguuaucauugcuccau

SEQ ID NO: 10065 - RNA, 19 nt, Homo sapiens
  misc_RNA (1)...(19): siRNA sense strand
gagugugacagauguuauc

SEQ ID NO: 10066 - RNA, 19 nt, Homo sapiens
  misc_RNA (1)...(19): siRNA sense strand
guaaagaccugccuaaugg

SEQ ID NO: 10067 - RNA, 19 nt, Homo sapiens
  misc_RNA (1)...(19): siRNA sense strand
ggaagagugugacagaugu

SEQ ID NO: 10068 - RNA, 19 nt, Homo sapiens
  misc_RNA (1)...(19): siRNA sense strand
ggacgaugcuucucuucug

SEQ ID NO: 10069 - RNA, 19 nt, Homo sapiens
  misc_RNA (1)...(19): siRNA sense strand
gagccaggauugaauacuu

SEQ ID NO: 10070 - RNA, 19 nt, Homo sapiens
  misc_RNA (1)...(19): siRNA sense strand
uaucauugcuccauugugu

SEQ ID NO: 10071 - RNA, 19 nt, Homo sapiens
  misc_RNA (1)...(19): siRNA sense strand
ugacagauguuaucauugc

SEQ ID NO: 10072 - RNA, 19 nt, Homo sapiens
  misc_RNA (1)...(19): siRNA sense strand
ugugacagauguuaucauu

SEQ ID NO: 10073 - RNA, 19 nt, Homo sapiens
  misc_RNA (1)...(19): siRNA sense strand
ggacguacagcucuucaug

SEQ ID NO: 10074 - RNA, 19 nt, Homo sapiens
  misc_RNA (1)...(19): siRNA sense strand
caacugagccaggauugaa

SEQ ID NO: 10075 - RNA, 19 nt, Homo sapiens
  misc_RNA (1)...(19): siRNA sense strand
ggagauugggauacuguaa

SEQ ID NO: 10076 - RNA, 19 nt, Homo sapiens
  misc_RNA (1)...(19): siRNA sense strand
guaggacgaugcuucucuu

SEQ ID NO: 10077 - RNA, 19 nt, Homo sapiens
  misc_RNA (1)...(19): siRNA sense strand
cggcucaacucgcaucuca

SEQ ID NO: 10078 - RNA, 19 nt, Homo sapiens
  misc_RNA (1)...(19): siRNA sense strand
uguaaagaccugccuaaug

SEQ ID NO: 10079 - RNA, 19 nt, Homo sapiens
  misc_RNA (1)...(19): siRNA sense strand
gacgaugcuucucuucugu

SEQ ID NO: 10080 - RNA, 19 nt, Homo sapiens
  misc_RNA (1)...(19): siRNA sense strand
ggagaaggcggacguacag

SEQ ID NO: 10081 - RNA, 19 nt, Homo sapiens
  misc_RNA (1)...(19): siRNA sense strand
gugcagacaauauggaaga

SEQ ID NO: 10082 - RNA, 19 nt, Homo sapiens
  misc_RNA (1)...(19): siRNA sense strand
gcucaacucgcaucucaag

SEQ ID NO: 10083 - RNA, 19 nt, Homo sapiens
  misc_RNA (1)...(19): siRNA sense strand
gcaacugagccaggauuga

SEQ ID NO: 10084 - RNA, 19 nt, Homo sapiens
  misc_RNA (1)...(19): siRNA sense strand
gaagagugugacagauguu

SEQ ID NO: 10085 - RNA, 19 nt, Homo sapiens
  misc_RNA (1)...(19): siRNA sense strand
uaaugguucugccuucagu

SEQ ID NO: 10086 - RNA, 19 nt, Homo sapiens
  misc_RNA (1)...(19): siRNA sense strand
acguacagcucuucaugga

SEQ ID NO: 10087 - RNA, 19 nt, Homo sapiens
  misc_RNA (1)...(19): siRNA sense strand
uauggaagagugugacaga

SEQ ID NO: 10088 - RNA, 19 nt, Homo sapiens
  misc_RNA (1)...(19): siRNA sense strand
cgaugcuucucuucuguca

SEQ ID NO: 10089 - RNA, 19 nt, Homo sapiens
  misc_RNA (1)...(19): siRNA sense strand
aaagaccugccuaaugguu

SEQ ID NO: 10090 - RNA, 19 nt, Homo sapiens
  misc_RNA (1)...(19): siRNA sense strand
uguuaucauugcuccauug

SEQ ID NO: 10091 - RNA, 19 nt, Homo sapiens
  misc_RNA (1)...(19): siRNA sense strand
ccuaaugguucugccuuca

SEQ ID NO: 10092 - RNA, 19 nt, Homo sapiens
  misc_RNA (1)...(19): siRNA sense strand
agccaggauugaauacuug

SEQ ID NO: 10093 - RNA, 19 nt, Homo sapiens
  misc_RNA (1)...(19): siRNA sense strand
uggaagagugugacagaug

SEQ ID NO: 10094 - RNA, 19 nt, Homo sapiens
  misc_RNA (1)...(19): siRNA sense strand
aagagugugacagauguua

SEQ ID NO: 10095 - RNA, 19 nt, Homo sapiens
  misc_RNA (1)...(19): siRNA sense strand
gauguuaucauugcuccau

SEQ ID NO: 10096 - RNA, 19 nt, Homo sapiens
  misc_RNA (1)...(19): siRNA sense strand
gagugugacagauguuauc

SEQ ID NO: 10097 - RNA, 19 nt, Homo sapiens
  misc_RNA (1)...(19): siRNA sense strand
caagacaucuccucaauau

SEQ ID NO: 10098 - RNA, 19 nt, Homo sapiens
  misc_RNA (1)...(19): siRNA sense strand
agacaucuccucaauauaa

SEQ ID NO: 10099 - RNA, 19 nt, Homo sapiens
  misc_RNA (1)...(19): siRNA sense strand
gggcauaccugguucaucu

SEQ ID NO: 10100 - RNA, 19 nt, Homo sapiens
  misc_RNA (1)...(19): siRNA sense strand
gcacacugcguuacuauau

SEQ ID NO: 10101 - RNA, 19 nt, Homo sapiens
  misc_RNA (1)...(19): siRNA sense strand
uaacuagugugcauaucaa

SEQ ID NO: 10102 - RNA, 19 nt, Homo sapiens
  misc_RNA (1)...(19): siRNA sense strand
uaaauugcaucacagaaag

SEQ ID NO: 10103 - RNA, 19 nt, Homo sapiens
  misc_RNA (1)...(19): siRNA sense strand
gacaucuccucaauauaaa

SEQ ID NO: 10104 - RNA, 19 nt, Homo sapiens
  misc_RNA (1)...(19): siRNA sense strand
gcucuagcauugucccauu

SEQ ID NO: 10105 - RNA, 19 nt, Homo sapiens
  misc_RNA (1)...(19): siRNA sense strand
gcucaugugcugccuguuu

SEQ ID NO: 10106 - RNA, 19 nt, Homo sapiens
  misc_RNA (1)...(19): siRNA sense strand
gcgaggcucuguagaugga

SEQ ID NO: 10107 - RNA, 19 nt, Homo sapiens
  misc_RNA (1)...(19): siRNA sense strand
gcauaccugguucaucuua

SEQ ID NO: 10108 - RNA, 19 nt, Homo sapiens
  misc_RNA (1)...(19): siRNA sense strand
uaagugguguguauaucuu

SEQ ID NO: 10109 - RNA, 19 nt, Homo sapiens
  misc_RNA (1)...(19): siRNA sense strand
gaauucuacugcuuuccaa

SEQ ID NO: 10110 - RNA, 19 nt, Homo sapiens
  misc_RNA (1)...(19): siRNA sense strand
guagcacacugcguuacua

SEQ ID NO: 10111 - RNA, 19 nt, Homo sapiens
  misc_RNA (1)...(19): siRNA sense strand
ccacagcccugaguuacug

SEQ ID NO: 10112 - RNA, 19 nt, Homo sapiens
  misc_RNA (1)...(19): siRNA sense strand
uaagaauucuacugcuuuc

SEQ ID NO: 10113 - RNA, 19 nt, Homo sapiens
  misc_RNA (1)...(19): siRNA sense strand
ccaagacaucuccucaaua

SEQ ID NO: 10114 - RNA, 19 nt, Homo sapiens
  misc_RNA (1)...(19): siRNA sense strand
caaagaaggaacacuaagu

SEQ ID NO: 10115 - RNA, 19 nt, Homo sapiens
  misc_RNA (1)...(19): siRNA sense strand
caacugcaaagaacacuga

SEQ ID NO: 10116 - RNA, 19 nt, Homo sapiens
  misc_RNA (1)...(19): siRNA sense strand
ccuaagaauucuacugcuu

SEQ ID NO: 10117 - RNA, 19 nt, Homo sapiens
  misc_RNA (1)...(19): siRNA sense strand
aauuguggcucuagcauug

SEQ ID NO: 10118 - RNA, 19 nt, Homo sapiens
  misc_RNA (1)...(19): siRNA sense strand
gaaguauucacgucuaagu

SEQ ID NO: 10119 - RNA, 19 nt, Homo sapiens
  misc_RNA (1)...(19): siRNA sense strand
guaacuagugugcauauca

SEQ ID NO: 10120 - RNA, 19 nt, Homo sapiens
  misc_RNA (1)...(19): siRNA sense strand
gggagccaguacagacuuu

SEQ ID NO: 10121 - RNA, 19 nt, Homo sapiens
  misc_RNA (1)...(19): siRNA sense strand
cuaagaauucuacugcuuu

SEQ ID NO: 10122 - RNA, 19 nt, Homo sapiens
  misc_RNA (1)...(19): siRNA sense strand
ucuaggcagucccaaauau

SEQ ID NO: 10123 - RNA, 19 nt, Homo sapiens
  misc_RNA (1)...(19): siRNA sense strand
acacugcguuacuauaugu

SEQ ID NO: 10124 - RNA, 19 nt, Homo sapiens
  misc_RNA (1)...(19): siRNA sense strand
uaggaaguauucacgucua

SEQ ID NO: 10125 - RNA, 19 nt, Homo sapiens
  misc_RNA (1)...(19): siRNA sense strand
ccucacaguugcaaguguu

SEQ ID NO: 10126 - RNA, 19 nt, Homo sapiens
  misc_RNA (1)...(19): siRNA sense strand
gugugcauaucaauucauu

SEQ ID NO: 10127 - RNA, 19 nt, Homo sapiens
  misc_RNA (1)...(19): siRNA sense strand
ccaccucggucuugugaag

SEQ ID NO: 10128 - RNA, 19 nt, Homo sapiens
  misc_RNA (1)...(19): siRNA sense strand
uccaagacaucuccucaau

SEQ ID NO: 10129 - RNA, 19 nt, Homo sapiens
  misc_RNA (1)...(19): siRNA sense strand
uugugaagcuucuagaaug

SEQ ID NO: 10130 - RNA, 19 nt, Homo sapiens
  misc_RNA (1)...(19): siRNA sense strand
gcaaagaaggaacacuaag

SEQ ID NO: 10131 - RNA, 19 nt, Homo sapiens
  misc_RNA (1)...(19): siRNA sense strand
gacuuucgcagacaaugua

SEQ ID NO: 10132 - RNA, 19 nt, Homo sapiens
  misc_RNA (1)...(19): siRNA sense strand
cuaggcagucccaaauaua

SEQ ID NO: 10133 - RNA, 19 nt, Homo sapiens
  misc_RNA (1)...(19): siRNA sense strand
cccugucacuucuaaauug

SEQ ID NO: 10134 - RNA, 19 nt, Homo sapiens
  misc_RNA (1)...(19): siRNA sense strand
ggcagucccaaauauagua

SEQ ID NO: 10135 - RNA, 19 nt, Homo sapiens
  misc_RNA (1)...(19): siRNA sense strand
aaaguagcacacugcguua

SEQ ID NO: 10136 - RNA, 19 nt, Homo sapiens
  misc_RNA (1)...(19): siRNA sense strand
gagucagagugugucauuu

SEQ ID NO: 10137 - RNA, 19 nt, Homo sapiens
  misc_RNA (1)...(19): siRNA sense strand
cuuauaggaacacuuagua

SEQ ID NO: 10138 - RNA, 19 nt, Homo sapiens
  misc_RNA (1)...(19): siRNA sense strand
cuguugagccuguguauga

SEQ ID NO: 10139 - RNA, 19 nt, Homo sapiens
  misc_RNA (1)...(19): siRNA sense strand
guucaaugcagucacaaug

SEQ ID NO: 10140 - RNA, 19 nt, Homo sapiens
  misc_RNA (1)...(19): siRNA sense strand
ugaagcuucuagaauguca

SEQ ID NO: 10141 - RNA, 19 nt, Homo sapiens
  misc_RNA (1)...(19): siRNA sense strand
cugcaaagaaggaacacua

SEQ ID NO: 10142 - RNA, 19 nt, Homo sapiens
  misc_RNA (1)...(19): siRNA sense strand
aggaaguauucacgucuaa

SEQ ID NO: 10143 - RNA, 19 nt, Homo sapiens
  misc_RNA (1)...(19): siRNA sense strand
uuuguugacugaaugaaug

SEQ ID NO: 10144 - RNA, 19 nt, Homo sapiens
  misc_RNA (1)...(19): siRNA sense strand
ugagucagagugugucauu

SEQ ID NO: 10145 - RNA, 19 nt, Homo sapiens
  misc_RNA (1)...(19): siRNA sense strand
ccaccacccugucacuucu

SEQ ID NO: 10146 - RNA, 19 nt, Homo sapiens
  misc_RNA (1)...(19): siRNA sense strand
caacugcaaagaaggaaca

SEQ ID NO: 10147 - RNA, 19 nt, Homo sapiens
  misc_RNA (1)...(19): siRNA sense strand
ugugaagcuucuagaaugu

SEQ ID NO: 10148 - RNA, 19 nt, Homo sapiens
  misc_RNA (1)...(19): siRNA sense strand
uauuaaaggccaacugcaa

SEQ ID NO: 10149 - RNA, 19 nt, Homo sapiens
  misc_RNA (1)...(19): siRNA sense strand
cuagugugcauaucaauuc

SEQ ID NO: 10150 - RNA, 19 nt, Homo sapiens
  misc_RNA (1)...(19): siRNA sense strand
uauuaaaggccaacugcaa

SEQ ID NO: 10151 - RNA, 19 nt, Homo sapiens
  misc_RNA (1)...(19): siRNA sense strand
ggagccaguacagacuuua

SEQ ID NO: 10152 - RNA, 19 nt, Homo sapiens
  misc_RNA (1)...(19): siRNA sense strand
cacacugcguuacuauaug

SEQ ID NO: 10153 - RNA, 19 nt, Homo sapiens
  misc_RNA (1)...(19): siRNA sense strand
gagccaguacagacuuuau

SEQ ID NO: 10154 - RNA, 19 nt, Homo sapiens
  misc_RNA (1)...(19): siRNA sense strand
gccaguacagacuuuauuc

SEQ ID NO: 10155 - RNA, 19 nt, Homo sapiens
  misc_RNA (1)...(19): siRNA sense strand
ugucauuuccucaccuaaa

SEQ ID NO: 10156 - RNA, 19 nt, Homo sapiens
  misc_RNA (1)...(19): siRNA sense strand
cucuagcauugucccauua

SEQ ID NO: 10157 - RNA, 19 nt, Homo sapiens
  misc_RNA (1)...(19): siRNA sense strand
uaaaggccaacugcaaaga

SEQ ID NO: 10158 - RNA, 19 nt, Homo sapiens
  misc_RNA (1)...(19): siRNA sense strand
uaaaggccaacugcaaaga

SEQ ID NO: 10159 - RNA, 19 nt, Homo sapiens
  misc_RNA (1)...(19): siRNA sense strand
uuuauucaccucacaguug

SEQ ID NO: 10160 - RNA, 19 nt, Homo sapiens
  misc_RNA (1)...(19): siRNA sense strand
ccaguacagacuuuauuca

SEQ ID NO: 10161 - RNA, 19 nt, Homo sapiens
  misc_RNA (1)...(19): siRNA sense strand
cuccagcccuucccucugu

SEQ ID NO: 10162 - RNA, 19 nt, Homo sapiens
  misc_RNA (1)...(19): siRNA sense strand
aaaggccaacugcaaagaa

SEQ ID NO: 10163 - RNA, 19 nt, Homo sapiens
  misc_RNA (1)...(19): siRNA sense strand
aaaggccaacugcaaagaa

SEQ ID NO: 10164 - RNA, 19 nt, Homo sapiens
  misc_RNA (1)...(19): siRNA sense strand
gcagucccaaauauaguau

SEQ ID NO: 10165 - RNA, 19 nt, Homo sapiens
  misc_RNA (1)...(19): siRNA sense strand
ccugucacuucuaaauugu

SEQ ID NO: 10166 - RNA, 19 nt, Homo sapiens
  misc_RNA (1)...(19): siRNA sense strand
uuauguaacuagugugcau

SEQ ID NO: 10167 - RNA, 19 nt, Homo sapiens
  misc_RNA (1)...(19): siRNA sense strand
ucaggcacgugagcauaug

SEQ ID NO: 10168 - RNA, 19 nt, Homo sapiens
  misc_RNA (1)...(19): siRNA sense strand
ugcaaagaaggaacacuaa

SEQ ID NO: 10169 - RNA, 19 nt, Homo sapiens
  misc_RNA (1)...(19): siRNA sense strand
uugagccuguguaugaauu

SEQ ID NO: 10170 - RNA, 19 nt, Homo sapiens
  misc_RNA (1)...(19): siRNA sense strand
ugugucauuuccucaccua

SEQ ID NO: 10171 - RNA, 19 nt, Homo sapiens
  misc_RNA (1)...(19): siRNA sense strand
cgucuaagugguguguaua

SEQ ID NO: 10172 - RNA, 19 nt, Homo sapiens
  misc_RNA (1)...(19): siRNA sense strand
gcaucacagaaaguuauaa

SEQ ID NO: 10173 - RNA, 19 nt, Homo sapiens
  misc_RNA (1)...(19): siRNA sense strand
gucauuuccucaccuaaaa

SEQ ID NO: 10174 - RNA, 19 nt, Homo sapiens
  misc_RNA (1)...(19): siRNA sense strand
agacuuuauucaccucaca

SEQ ID NO: 10175 - RNA, 19 nt, Homo sapiens
  misc_RNA (1)...(19): siRNA sense strand
auuaaaggccaacugcaaa

SEQ ID NO: 10176 - RNA, 19 nt, Homo sapiens
  misc_RNA (1)...(19): siRNA sense strand
ggccaacugcaaagaagga

SEQ ID NO: 10177 - RNA, 19 nt, Homo sapiens
  misc_RNA (1)...(19): siRNA sense strand
auuaaaggccaacugcaaa

SEQ ID NO: 10178 - RNA, 19 nt, Homo sapiens
  misc_RNA (1)...(19): siRNA sense strand
ucuaagugguguguauauc

SEQ ID NO: 10179 - RNA, 19 nt, Homo sapiens
  misc_RNA (1)...(19): siRNA sense strand
gaaauggaaacgcagcaaa

SEQ ID NO: 10180 - RNA, 19 nt, Homo sapiens
  misc_RNA (1)...(19): siRNA sense strand
aguucaagcucaacaagua

SEQ ID NO: 10181 - RNA, 19 nt, Homo sapiens
  misc_RNA (1)...(19): siRNA sense strand
gcaugauccugccuaagau

SEQ ID NO: 10182 - RNA, 19 nt, Homo sapiens
  misc_RNA (1)...(19): siRNA sense strand
agacccaggugaagauuug

SEQ ID NO: 10183 - RNA, 19 nt, Homo sapiens
  misc_RNA (1)...(19): siRNA sense strand
ggacgacgaggaccauuuc

SEQ ID NO: 10184 - RNA, 19 nt, Homo sapiens
  misc_RNA (1)...(19): siRNA sense strand
uaagaugcccgacuucaac

SEQ ID NO: 10185 - RNA, 19 nt, Homo sapiens
  misc_RNA (1)...(19): siRNA sense strand
ugccuaagaugcccgacuu

SEQ ID NO: 10186 - RNA, 19 nt, Homo sapiens
  misc_RNA (1)...(19): siRNA sense strand
gcaggaagcggagaaacag

SEQ ID NO: 10187 - RNA, 19 nt, Homo sapiens
  misc_RNA (1)...(19): siRNA sense strand
cuaagaugcccgacuucaa

SEQ ID NO: 10188 - RNA, 19 nt, Homo sapiens
  misc_RNA (1)...(19): siRNA sense strand
gagacccaggugaagauuu

SEQ ID NO: 10189 - RNA, 19 nt, Homo sapiens
  misc_RNA (1)...(19): siRNA sense strand
ggaagcggagaaacagaag

SEQ ID NO: 10190 - RNA, 19 nt, Homo sapiens
  misc_RNA (1)...(19): siRNA sense strand
gaaacgauagcaucucuga

SEQ ID NO: 10191 - RNA, 19 nt, Homo sapiens
  misc_RNA (1)...(19): siRNA sense strand
ggacugugcucacuuccau

SEQ ID NO: 10192 - RNA, 19 nt, Homo sapiens
  misc_RNA (1)...(19): siRNA sense strand
aagcugagguggaggguuu

SEQ ID NO: 10193 - RNA, 19 nt, Homo sapiens
  misc_RNA (1)...(19): siRNA sense strand
ccagggaggagcagaauuu

SEQ ID NO: 10194 - RNA, 19 nt, Homo sapiens
  misc_RNA (1)...(19): siRNA sense strand
ggcagcagcuuggaagaaa

SEQ ID NO: 10195 - RNA, 19 nt, Homo sapiens
  misc_RNA (1)...(19): siRNA sense strand
gaacagauuuuagcaacuu

SEQ ID NO: 10196 - RNA, 19 nt, Homo sapiens
  misc_RNA (1)...(19): siRNA sense strand
gggccgaggcugagaagua

SEQ ID NO: 10197 - RNA, 19 nt, Homo sapiens
  misc_RNA (1)...(19): siRNA sense strand
ggaagaaacgauagcaucu

SEQ ID NO: 10198 - RNA, 19 nt, Homo sapiens
  misc_RNA (1)...(19): siRNA sense strand
uggcuacucucaacaacaa

SEQ ID NO: 10199 - RNA, 19 nt, Homo sapiens
  misc_RNA (1)...(19): siRNA sense strand
gauagcaucucugaaagcu

SEQ ID NO: 10200 - RNA, 19 nt, Homo sapiens
  misc_RNA (1)...(19): siRNA sense strand
cgaggacugugcucacuuc

SEQ ID NO: 10201 - RNA, 19 nt, Homo sapiens
  misc_RNA (1)...(19): siRNA sense strand
caaacacuguggcggagau

SEQ ID NO: 10202 - RNA, 19 nt, Homo sapiens
  misc_RNA (1)...(19): siRNA sense strand
cagcuuggaagaaacgaua

SEQ ID NO: 10203 - RNA, 19 nt, Homo sapiens
  misc_RNA (1)...(19): siRNA sense strand
caacuucaccucaaacacu

SEQ ID NO: 10204 - RNA, 19 nt, Homo sapiens
  misc_RNA (1)...(19): siRNA sense strand
ugcaagaccugaagaaacu

SEQ ID NO: 10205 - RNA, 19 nt, Homo sapiens
  misc_RNA (1)...(19): siRNA sense strand
aacgauagcaucucugaaa

SEQ ID NO: 10206 - RNA, 19 nt, Homo sapiens
  misc_RNA (1)...(19): siRNA sense strand
ccagguggcuacucucaac

SEQ ID NO: 10207 - RNA, 19 nt, Homo sapiens
  misc_RNA (1)...(19): siRNA sense strand
caucaucugugugguugga

SEQ ID NO: 10208 - RNA, 19 nt, Homo sapiens
  misc_RNA (1)...(19): siRNA sense strand
aagaaacgauagcaucucu

SEQ ID NO: 10209 - RNA, 19 nt, Homo sapiens
  misc_RNA (1)...(19): siRNA sense strand
uuagcaacuucaccucaaa

SEQ ID NO: 10210 - RNA, 19 nt, Homo sapiens
  misc_RNA (1)...(19): siRNA sense strand
ggucaucaucugugugguu

SEQ ID NO: 10211 - RNA, 19 nt, Homo sapiens
  misc_RNA (1)...(19): siRNA sense strand
gaaguggguggauggaaca

SEQ ID NO: 10212 - RNA, 19 nt, Homo sapiens
  misc_RNA (1)...(19): siRNA sense strand
gcagaauuuuguccagaaa

SEQ ID NO: 10213 - RNA, 19 nt, Homo sapiens
  misc_RNA (1)...(19): siRNA sense strand
gcggagauccaggcacuga

SEQ ID NO: 10214 - RNA, 19 nt, Homo sapiens
  misc_RNA (1)...(19): siRNA sense strand
ggccgaggcugagaaguac

SEQ ID NO: 10215 - RNA, 19 nt, Homo sapiens
  misc_RNA (1)...(19): siRNA sense strand
gggcagcagcuuggaagaa

SEQ ID NO: 10216 - RNA, 19 nt, Homo sapiens
  misc_RNA (1)...(19): siRNA sense strand
ccagacggcagguggaaug

SEQ ID NO: 10217 - RNA, 19 nt, Homo sapiens
  misc_RNA (1)...(19): siRNA sense strand
gaagaaacgauagcaucuc

SEQ ID NO: 10218 - RNA, 19 nt, Homo sapiens
  misc_RNA (1)...(19): siRNA sense strand
ggugcaagaccugaagaaa

SEQ ID NO: 10219 - RNA, 19 nt, Homo sapiens
  misc_RNA (1)...(19): siRNA sense strand
caagaccugaagaaacuga

SEQ ID NO: 10220 - RNA, 19 nt, Homo sapiens
  misc_RNA (1)...(19): siRNA sense strand
gugcaagaccugaagaaac

SEQ ID NO: 10221 - RNA, 19 nt, Homo sapiens
  misc_RNA (1)...(19): siRNA sense strand
gcgaccggcuuccagaacu

SEQ ID NO: 10222 - RNA, 19 nt, Homo sapiens
  misc_RNA (1)...(19): siRNA sense strand
gaaguacugccagcugaag

SEQ ID NO: 10223 - RNA, 19 nt, Homo sapiens
  misc_RNA (1)...(19): siRNA sense strand
uuuagcaacuucaccucaa

SEQ ID NO: 10224 - RNA, 19 nt, Homo sapiens
  misc_RNA (1)...(19): siRNA sense strand
ucaucugugugguuggauu

SEQ ID NO: 10225 - RNA, 19 nt, Homo sapiens
  misc_RNA (1)...(19): siRNA sense strand
gcagcagcuuggaagaaac

SEQ ID NO: 10226 - RNA, 19 nt, Homo sapiens
  misc_RNA (1)...(19): siRNA sense strand
gggaggagcagaauuuugu

SEQ ID NO: 10227 - RNA, 19 nt, Homo sapiens
  misc_RNA (1)...(19): siRNA sense strand
cgaccggcuuccagaacug

SEQ ID NO: 10228 - RNA, 19 nt, Homo sapiens
  misc_RNA (1)...(19): siRNA sense strand
gaaacgauagcaucucuga

SEQ ID NO: 10229 - RNA, 19 nt, Homo sapiens
  misc_RNA (1)...(19): siRNA sense strand
ggacugugcucacuuccau

SEQ ID NO: 10230 - RNA, 19 nt, Homo sapiens
  misc_RNA (1)...(19): siRNA sense strand
aagcugagguggaggguuu

SEQ ID NO: 10231 - RNA, 19 nt, Homo sapiens
  misc_RNA (1)...(19): siRNA sense strand
ccagggaggagcagaauuu

SEQ ID NO: 10232 - RNA, 19 nt, Homo sapiens
  misc_RNA (1)...(19): siRNA sense strand
ggcagcagcuuggaagaaa

SEQ ID NO: 10233 - RNA, 19 nt, Homo sapiens
  misc_RNA (1)...(19): siRNA sense strand
gaacagauuuuagcaacuu

SEQ ID NO: 10234 - RNA, 19 nt, Homo sapiens
  misc_RNA (1)...(19): siRNA sense strand
gggccgaggcugagaagua

SEQ ID NO: 10235 - RNA, 19 nt, Homo sapiens
  misc_RNA (1)...(19): siRNA sense strand
ggaagaaacgauagcaucu

SEQ ID NO: 10236 - RNA, 19 nt, Homo sapiens
  misc_RNA (1)...(19): siRNA sense strand
uggcuacucucaacaacaa

SEQ ID NO: 10237 - RNA, 19 nt, Homo sapiens
  misc_RNA (1)...(19): siRNA sense strand
gauagcaucucugaaagcu

SEQ ID NO: 10238 - RNA, 19 nt, Homo sapiens
  misc_RNA (1)...(19): siRNA sense strand
cgaggacugugcucacuuc

SEQ ID NO: 10239 - RNA, 19 nt, Homo sapiens
  misc_RNA (1)...(19): siRNA sense strand
caaacacuguggcggagau

SEQ ID NO: 10240 - RNA, 19 nt, Homo sapiens
  misc_RNA (1)...(19): siRNA sense strand
cagcuuggaagaaacgaua

SEQ ID NO: 10241 - RNA, 19 nt, Homo sapiens
  misc_RNA (1)...(19): siRNA sense strand
caacuucaccucaaacacu

SEQ ID NO: 10242 - RNA, 19 nt, Homo sapiens
  misc_RNA (1)...(19): siRNA sense strand
ugcaagaccugaagaaacu

SEQ ID NO: 10243 - RNA, 19 nt, Homo sapiens
  misc_RNA (1)...(19): siRNA sense strand
aacgauagcaucucugaaa

SEQ ID NO: 10244 - RNA, 19 nt, Homo sapiens
  misc_RNA (1)...(19): siRNA sense strand
ccagguggcuacucucaac

SEQ ID NO: 10245 - RNA, 19 nt, Homo sapiens
  misc_RNA (1)...(19): siRNA sense strand
caucaucugugugguugga

SEQ ID NO: 10246 - RNA, 19 nt, Homo sapiens
  misc_RNA (1)...(19): siRNA sense strand
aagaaacgauagcaucucu

SEQ ID NO: 10247 - RNA, 19 nt, Homo sapiens
  misc_RNA (1)...(19): siRNA sense strand
uuagcaacuucaccucaaa

SEQ ID NO: 10248 - RNA, 19 nt, Homo sapiens
  misc_RNA (1)...(19): siRNA sense strand
ggucaucaucugugugguu

SEQ ID NO: 10249 - RNA, 19 nt, Homo sapiens
  misc_RNA (1)...(19): siRNA sense strand
gaaguggguggauggaaca

SEQ ID NO: 10250 - RNA, 19 nt, Homo sapiens
  misc_RNA (1)...(19): siRNA sense strand
gcagaauuuuguccagaaa

SEQ ID NO: 10251 - RNA, 19 nt, Homo sapiens
  misc_RNA (1)...(19): siRNA sense strand
gcggagauccaggcacuga

SEQ ID NO: 10252 - RNA, 19 nt, Homo sapiens
  misc_RNA (1)...(19): siRNA sense strand
ggccgaggcugagaaguac

SEQ ID NO: 10253 - RNA, 19 nt, Homo sapiens
  misc_RNA (1)...(19): siRNA sense strand
gggcagcagcuuggaagaa

SEQ ID NO: 10254 - RNA, 19 nt, Homo sapiens
  misc_RNA (1)...(19): siRNA sense strand
ccagacggcagguggaaug

SEQ ID NO: 10255 - RNA, 19 nt, Homo sapiens
  misc_RNA (1)...(19): siRNA sense strand
gaagaaacgauagcaucuc

SEQ ID NO: 10256 - RNA, 19 nt, Homo sapiens
  misc_RNA (1)...(19): siRNA sense strand
ggugcaagaccugaagaaa

SEQ ID NO: 10257 - RNA, 19 nt, Homo sapiens
  misc_RNA (1)...(19): siRNA sense strand
caagaccugaagaaacuga

SEQ ID NO: 10258 - RNA, 19 nt, Homo sapiens
  misc_RNA (1)...(19): siRNA sense strand
gugcaagaccugaagaaac

SEQ ID NO: 10259 - RNA, 19 nt, Homo sapiens
  misc_RNA (1)...(19): siRNA sense strand
gcgaccggcuuccagaacu

SEQ ID NO: 10260 - RNA, 19 nt, Homo sapiens
  misc_RNA (1)...(19): siRNA sense strand
gaaguacugccagcugaag

SEQ ID NO: 10261 - RNA, 19 nt, Homo sapiens
  misc_RNA (1)...(19): siRNA sense strand
uuuagcaacuucaccucaa

SEQ ID NO: 10262 - RNA, 19 nt, Homo sapiens
  misc_RNA (1)...(19): siRNA sense strand
ucaucugugugguuggauu

SEQ ID NO: 10263 - RNA, 19 nt, Homo sapiens
  misc_RNA (1)...(19): siRNA sense strand
gcagcagcuuggaagaaac

SEQ ID NO: 10264 - RNA, 19 nt, Homo sapiens
  misc_RNA (1)...(19): siRNA sense strand
gggaggagcagaauuuugu

SEQ ID NO: 10265 - RNA, 19 nt, Homo sapiens
  misc_RNA (1)...(19): siRNA sense strand
cgaccggcuuccagaacug

SEQ ID NO: 10266 - RNA, 19 nt, Homo sapiens
  misc_RNA (1)...(19): siRNA sense strand
ccaacaaccugguguauga

SEQ ID NO: 10267 - RNA, 19 nt, Homo sapiens
  misc_RNA (1)...(19): siRNA sense strand
ggaaggacauggacaaggu

SEQ ID NO: 10268 - RNA, 19 nt, Homo sapiens
  misc_RNA (1)...(19): siRNA sense strand
cagcagaaauccaacuuag

SEQ ID NO: 10269 - RNA, 19 nt, Homo sapiens
  misc_RNA (1)...(19): siRNA sense strand
gcagaaauccaacuuagag

SEQ ID NO: 10270 - RNA, 19 nt, Homo sapiens
  misc_RNA (1)...(19): siRNA sense strand
ggaguaccuucaccaacaa

SEQ ID NO: 10271 - RNA, 19 nt, Homo sapiens
  misc_RNA (1)...(19): siRNA sense strand
caaacucgcacaaccauga

SEQ ID NO: 10272 - RNA, 19 nt, Homo sapiens
  misc_RNA (1)...(19): siRNA sense strand
ggacagcgaugacuaucac

SEQ ID NO: 10273 - RNA, 19 nt, Homo sapiens
  misc_RNA (1)...(19): siRNA sense strand
gcagcagaaauccaacuua

SEQ ID NO: 10274 - RNA, 19 nt, Homo sapiens
  misc_RNA (1)...(19): siRNA sense strand
ggaggaaacgcagcagaaa

SEQ ID NO: 10275 - RNA, 19 nt, Homo sapiens
  misc_RNA (1)...(19): siRNA sense strand
uggacaaggucgagacauu

SEQ ID NO: 10276 - RNA, 19 nt, Homo sapiens
  misc_RNA (1)...(19): siRNA sense strand
gcagaccuacagcaaguuu

SEQ ID NO: 10277 - RNA, 19 nt, Homo sapiens
  misc_RNA (1)...(19): siRNA sense strand
ggacaaggucgagacauuc

SEQ ID NO: 10278 - RNA, 19 nt, Homo sapiens
  misc_RNA (1)...(19): siRNA sense strand
cgaugacuaucaccuccua

SEQ ID NO: 10279 - RNA, 19 nt, Homo sapiens
  misc_RNA (1)...(19): siRNA sense strand
aagcagaccuacagcaagu

SEQ ID NO: 10280 - RNA, 19 nt, Homo sapiens
  misc_RNA (1)...(19): siRNA sense strand
acgcacugcucaagaacua

SEQ ID NO: 10281 - RNA, 19 nt, Homo sapiens
  misc_RNA (1)...(19): siRNA sense strand
aaacgcagcagaaauccaa

SEQ ID NO: 10282 - RNA, 19 nt, Homo sapiens
  misc_RNA (1)...(19): siRNA sense strand
aggaguaccuucaccaaca

SEQ ID NO: 10283 - RNA, 19 nt, Homo sapiens
  misc_RNA (1)...(19): siRNA sense strand
gaggaaacgcagcagaaau

SEQ ID NO: 10284 - RNA, 19 nt, Homo sapiens
  misc_RNA (1)...(19): siRNA sense strand
ccuaaaggaccuagaggaa

SEQ ID NO: 10285 - RNA, 19 nt, Homo sapiens
  misc_RNA (1)...(19): siRNA sense strand
ucaagcagaccuacagcaa

SEQ ID NO: 10286 - RNA, 19 nt, Homo sapiens
  misc_RNA (1)...(19): siRNA sense strand
agaggaaggcauccaaaug

SEQ ID NO: 10287 - RNA, 19 nt, Homo sapiens
  misc_RNA (1)...(19): siRNA sense strand
agaccuacagcaaguuuga

SEQ ID NO: 10288 - RNA, 19 nt, Homo sapiens
  misc_RNA (1)...(19): siRNA sense strand
ucaggaaggacauggacaa

SEQ ID NO: 10289 - RNA, 19 nt, Homo sapiens
  misc_RNA (1)...(19): siRNA sense strand
aggaaacgcagcagaaauc

SEQ ID NO: 10290 - RNA, 19 nt, Homo sapiens
  misc_RNA (1)...(19): siRNA sense strand
gacuaucaccuccuaaagg

SEQ ID NO: 10291 - RNA, 19 nt, Homo sapiens
  misc_RNA (1)...(19): siRNA sense strand
ugacugggcagacccucaa

SEQ ID NO: 10292 - RNA, 19 nt, Homo sapiens
  misc_RNA (1)...(19): siRNA sense strand
augacgcacugcucaagaa

SEQ ID NO: 10293 - RNA, 19 nt, Homo sapiens
  misc_RNA (1)...(19): siRNA sense strand
uagaggaaggcauccaaau

SEQ ID NO: 10294 - RNA, 19 nt, Homo sapiens
  misc_RNA (1)...(19): siRNA sense strand
cuacagcaaguuugacaca

SEQ ID NO: 10295 - RNA, 19 nt, Homo sapiens
  misc_RNA (1)...(19): siRNA sense strand
ccaacaaccugguguauga

SEQ ID NO: 10296 - RNA, 19 nt, Homo sapiens
  misc_RNA (1)...(19): siRNA sense strand
ggaaggacauggacaaggu

SEQ ID NO: 10297 - RNA, 19 nt, Homo sapiens
  misc_RNA (1)...(19): siRNA sense strand
cagcagaaauccaacuuag

SEQ ID NO: 10298 - RNA, 19 nt, Homo sapiens
  misc_RNA (1)...(19): siRNA sense strand
gcagaaauccaacuuagag

SEQ ID NO: 10299 - RNA, 19 nt, Homo sapiens
  misc_RNA (1)...(19): siRNA sense strand
ggaguaccuucaccaacaa

SEQ ID NO: 10300 - RNA, 19 nt, Homo sapiens
  misc_RNA (1)...(19): siRNA sense strand
caaacucgcacaaccauga

SEQ ID NO: 10301 - RNA, 19 nt, Homo sapiens
  misc_RNA (1)...(19): siRNA sense strand
ggacagcgaugacuaucac

SEQ ID NO: 10302 - RNA, 19 nt, Homo sapiens
  misc_RNA (1)...(19): siRNA sense strand
gcagcagaaauccaacuua

SEQ ID NO: 10303 - RNA, 19 nt, Homo sapiens
  misc_RNA (1)...(19): siRNA sense strand
ggaggaaacgcagcagaaa

SEQ ID NO: 10304 - RNA, 19 nt, Homo sapiens
  misc_RNA (1)...(19): siRNA sense strand
uggacaaggucgagacauu

SEQ ID NO: 10305 - RNA, 19 nt, Homo sapiens
  misc_RNA (1)...(19): siRNA sense strand
gcagaccuacagcaaguuu

SEQ ID NO: 10306 - RNA, 19 nt, Homo sapiens
  misc_RNA (1)...(19): siRNA sense strand
ggacaaggucgagacauuc

SEQ ID NO: 10307 - RNA, 19 nt, Homo sapiens
  misc_RNA (1)...(19): siRNA sense strand
cgaugacuaucaccuccua

SEQ ID NO: 10308 - RNA, 19 nt, Homo sapiens
  misc_RNA (1)...(19): siRNA sense strand
aagcagaccuacagcaagu

SEQ ID NO: 10309 - RNA, 19 nt, Homo sapiens
  misc_RNA (1)...(19): siRNA sense strand
acgcacugcucaagaacua

SEQ ID NO: 10310 - RNA, 19 nt, Homo sapiens
  misc_RNA (1)...(19): siRNA sense strand
aaacgcagcagaaauccaa

SEQ ID NO: 10311 - RNA, 19 nt, Homo sapiens
  misc_RNA (1)...(19): siRNA sense strand
aggaguaccuucaccaaca

SEQ ID NO: 10312 - RNA, 19 nt, Homo sapiens
  misc_RNA (1)...(19): siRNA sense strand
gaggaaacgcagcagaaau

SEQ ID NO: 10313 - RNA, 19 nt, Homo sapiens
  misc_RNA (1)...(19): siRNA sense strand
ccuaaaggaccuagaggaa

SEQ ID NO: 10314 - RNA, 19 nt, Homo sapiens
  misc_RNA (1)...(19): siRNA sense strand
ucaagcagaccuacagcaa

SEQ ID NO: 10315 - RNA, 19 nt, Homo sapiens
  misc_RNA (1)...(19): siRNA sense strand
agaggaaggcauccaaaug

SEQ ID NO: 10316 - RNA, 19 nt, Homo sapiens
  misc_RNA (1)...(19): siRNA sense strand
agaccuacagcaaguuuga

SEQ ID NO: 10317 - RNA, 19 nt, Homo sapiens
  misc_RNA (1)...(19): siRNA sense strand
ucaggaaggacauggacaa

SEQ ID NO: 10318 - RNA, 19 nt, Homo sapiens
  misc_RNA (1)...(19): siRNA sense strand
aggaaacgcagcagaaauc

SEQ ID NO: 10319 - RNA, 19 nt, Homo sapiens
  misc_RNA (1)...(19): siRNA sense strand
gacuaucaccuccuaaagg

SEQ ID NO: 10320 - RNA, 19 nt, Homo sapiens
  misc_RNA (1)...(19): siRNA sense strand
ugacugggcagacccucaa

SEQ ID NO: 10321 - RNA, 19 nt, Homo sapiens
  misc_RNA (1)...(19): siRNA sense strand
augacgcacugcucaagaa

SEQ ID NO: 10322 - RNA, 19 nt, Homo sapiens
  misc_RNA (1)...(19): siRNA sense strand
uagaggaaggcauccaaau

SEQ ID NO: 10323 - RNA, 19 nt, Homo sapiens
  misc_RNA (1)...(19): siRNA sense strand
cuacagcaaguuugacaca

SEQ ID NO: 10324 - RNA, 19 nt, Homo sapiens
  misc_RNA (1)...(19): siRNA sense strand
uggaggaaacgcagcagaa

SEQ ID NO: 10325 - RNA, 19 nt, Homo sapiens
  misc_RNA (1)...(19): siRNA sense strand
ccaacaaccugguguauga

SEQ ID NO: 10326 - RNA, 19 nt, Homo sapiens
  misc_RNA (1)...(19): siRNA sense strand
ggaaggacauggacaaggu

SEQ ID NO: 10327 - RNA, 19 nt, Homo sapiens
  misc_RNA (1)...(19): siRNA sense strand
cagcagaaauccaacuuag

SEQ ID NO: 10328 - RNA, 19 nt, Homo sapiens
  misc_RNA (1)...(19): siRNA sense strand
gcagaaauccaacuuagag

SEQ ID NO: 10329 - RNA, 19 nt, Homo sapiens
  misc_RNA (1)...(19): siRNA sense strand
ggaguaccuucaccaacaa

SEQ ID NO: 10330 - RNA, 19 nt, Homo sapiens
  misc_RNA (1)...(19): siRNA sense strand
caaacucgcacaaccauga

SEQ ID NO: 10331 - RNA, 19 nt, Homo sapiens
  misc_RNA (1)...(19): siRNA sense strand
ggacagcgaugacuaucac

SEQ ID NO: 10332 - RNA, 19 nt, Homo sapiens
  misc_RNA (1)...(19): siRNA sense strand
gcagcagaaauccaacuua

SEQ ID NO: 10333 - RNA, 19 nt, Homo sapiens
  misc_RNA (1)...(19): siRNA sense strand
ggaggaaacgcagcagaaa

SEQ ID NO: 10334 - RNA, 19 nt, Homo sapiens
  misc_RNA (1)...(19): siRNA sense strand
uggacaaggucgagacauu

SEQ ID NO: 10335 - RNA, 19 nt, Homo sapiens
  misc_RNA (1)...(19): siRNA sense strand
gcagaccuacagcaaguuu

SEQ ID NO: 10336 - RNA, 19 nt, Homo sapiens
  misc_RNA (1)...(19): siRNA sense strand
ggacaaggucgagacauuc

SEQ ID NO: 10337 - RNA, 19 nt, Homo sapiens
  misc_RNA (1)...(19): siRNA sense strand
cgaugacuaucaccuccua

SEQ ID NO: 10338 - RNA, 19 nt, Homo sapiens
  misc_RNA (1)...(19): siRNA sense strand
aagcagaccuacagcaagu

SEQ ID NO: 10339 - RNA, 19 nt, Homo sapiens
  misc_RNA (1)...(19): siRNA sense strand
acgcacugcucaagaacua

SEQ ID NO: 10340 - RNA, 19 nt, Homo sapiens
  misc_RNA (1)...(19): siRNA sense strand
aaacgcagcagaaauccaa

SEQ ID NO: 10341 - RNA, 19 nt, Homo sapiens
  misc_RNA (1)...(19): siRNA sense strand
aggaguaccuucaccaaca

SEQ ID NO: 10342 - RNA, 19 nt, Homo sapiens
  misc_RNA (1)...(19): siRNA sense strand
gaggaaacgcagcagaaau

SEQ ID NO: 10343 - RNA, 19 nt, Homo sapiens
  misc_RNA (1)...(19): siRNA sense strand
ccuaaaggaccuagaggaa

SEQ ID NO: 10344 - RNA, 19 nt, Homo sapiens
  misc_RNA (1)...(19): siRNA sense strand
ucaagcagaccuacagcaa

SEQ ID NO: 10345 - RNA, 19 nt, Homo sapiens
  misc_RNA (1)...(19): siRNA sense strand
agaggaaggcauccaaaug

SEQ ID NO: 10346 - RNA, 19 nt, Homo sapiens
  misc_RNA (1)...(19): siRNA sense strand
agaccuacagcaaguuuga

SEQ ID NO: 10347 - RNA, 19 nt, Homo sapiens
  misc_RNA (1)...(19): siRNA sense strand
ucaggaaggacauggacaa

SEQ ID NO: 10348 - RNA, 19 nt, Homo sapiens
  misc_RNA (1)...(19): siRNA sense strand
aggaaacgcagcagaaauc

SEQ ID NO: 10349 - RNA, 19 nt, Homo sapiens
  misc_RNA (1)...(19): siRNA sense strand
gacuaucaccuccuaaagg

SEQ ID NO: 10350 - RNA, 19 nt, Homo sapiens
  misc_RNA (1)...(19): siRNA sense strand
ugacugggcagacccucaa

SEQ ID NO: 10351 - RNA, 19 nt, Homo sapiens
  misc_RNA (1)...(19): siRNA sense strand
augacgcacugcucaagaa

SEQ ID NO: 10352 - RNA, 19 nt, Homo sapiens
  misc_RNA (1)...(19): siRNA sense strand
uagaggaaggcauccaaau

SEQ ID NO: 10353 - RNA, 19 nt, Homo sapiens
  misc_RNA (1)...(19): siRNA sense strand
cuacagcaaguuugacaca

SEQ ID NO: 10354 - RNA, 19 nt, Homo sapiens
  misc_RNA (1)...(19): siRNA sense strand
uggaggaaacgcagcagaa

SEQ ID NO: 10355 - RNA, 19 nt, Homo sapiens
  misc_RNA (1)...(19): siRNA sense strand
ccaacaaccugguguauga

SEQ ID NO: 10356 - RNA, 19 nt, Homo sapiens
  misc_RNA (1)...(19): siRNA sense strand
ggaaggacauggacaaggu

SEQ ID NO: 10357 - RNA, 19 nt, Homo sapiens
  misc_RNA (1)...(19): siRNA sense strand
cagcagaaauccaacuuag

SEQ ID NO: 10358 - RNA, 19 nt, Homo sapiens
  misc_RNA (1)...(19): siRNA sense strand
gcagaaauccaacuuagag

SEQ ID NO: 10359 - RNA, 19 nt, Homo sapiens
  misc_RNA (1)...(19): siRNA sense strand
ggaguaccuucaccaacaa

SEQ ID NO: 10360 - RNA, 19 nt, Homo sapiens
  misc_RNA (1)...(19): siRNA sense strand
caaacucgcacaaccauga

SEQ ID NO: 10361 - RNA, 19 nt, Homo sapiens
  misc_RNA (1)...(19): siRNA sense strand
ggacagcgaugacuaucac

SEQ ID NO: 10362 - RNA, 19 nt, Homo sapiens
  misc_RNA (1)...(19): siRNA sense strand
gcagcagaaauccaacuua

SEQ ID NO: 10363 - RNA, 19 nt, Homo sapiens
  misc_RNA (1)...(19): siRNA sense strand
ggaggaaacgcagcagaaa

SEQ ID NO: 10364 - RNA, 19 nt, Homo sapiens
  misc_RNA (1)...(19): siRNA sense strand
uggacaaggucgagacauu

SEQ ID NO: 10365 - RNA, 19 nt, Homo sapiens
  misc_RNA (1)...(19): siRNA sense strand
gcagaccuacagcaaguuu

SEQ ID NO: 10366 - RNA, 19 nt, Homo sapiens
  misc_RNA (1)...(19): siRNA sense strand
ggacaaggucgagacauuc

SEQ ID NO: 10367 - RNA, 19 nt, Homo sapiens
  misc_RNA (1)...(19): siRNA sense strand
cgaugacuaucaccuccua

SEQ ID NO: 10368 - RNA, 19 nt, Homo sapiens
  misc_RNA (1)...(19): siRNA sense strand
aagcagaccuacagcaagu

SEQ ID NO: 10369 - RNA, 19 nt, Homo sapiens
  misc_RNA (1)...(19): siRNA sense strand
acgcacugcucaagaacua

SEQ ID NO: 10370 - RNA, 19 nt, Homo sapiens
  misc_RNA (1)...(19): siRNA sense strand
aaacgcagcagaaauccaa

SEQ ID NO: 10371 - RNA, 19 nt, Homo sapiens
  misc_RNA (1)...(19): siRNA sense strand
aggaguaccuucaccaaca

SEQ ID NO: 10372 - RNA, 19 nt, Homo sapiens
  misc_RNA (1)...(19): siRNA sense strand
gaggaaacgcagcagaaau

SEQ ID NO: 10373 - RNA, 19 nt, Homo sapiens
  misc_RNA (1)...(19): siRNA sense strand
ccuaaaggaccuagaggaa

SEQ ID NO: 10374 - RNA, 19 nt, Homo sapiens
  misc_RNA (1)...(19): siRNA sense strand
ucaagcagaccuacagcaa

SEQ ID NO: 10375 - RNA, 19 nt, Homo sapiens
  misc_RNA (1)...(19): siRNA sense strand
agaggaaggcauccaaaug

SEQ ID NO: 10376 - RNA, 19 nt, Homo sapiens
  misc_RNA (1)...(19): siRNA sense strand
agaccuacagcaaguuuga

SEQ ID NO: 10377 - RNA, 19 nt, Homo sapiens
  misc_RNA (1)...(19): siRNA sense strand
ucaggaaggacauggacaa

SEQ ID NO: 10378 - RNA, 19 nt, Homo sapiens
  misc_RNA (1)...(19): siRNA sense strand
aggaaacgcagcagaaauc

SEQ ID NO: 10379 - RNA, 19 nt, Homo sapiens
  misc_RNA (1)...(19): siRNA sense strand
gacuaucaccuccuaaagg

SEQ ID NO: 10380 - RNA, 19 nt, Homo sapiens
  misc_RNA (1)...(19): siRNA sense strand
ugacugggcagacccucaa

SEQ ID NO: 10381 - RNA, 19 nt, Homo sapiens
  misc_RNA (1)...(19): siRNA sense strand
augacgcacugcucaagaa

SEQ ID NO: 10382 - RNA, 19 nt, Homo sapiens
  misc_RNA (1)...(19): siRNA sense strand
uagaggaaggcauccaaau

SEQ ID NO: 10383 - RNA, 19 nt, Homo sapiens
  misc_RNA (1)...(19): siRNA sense strand
cuacagcaaguuugacaca

SEQ ID NO: 10384 - RNA, 19 nt, Homo sapiens
  misc_RNA (1)...(19): siRNA sense strand
uggaggaaacgcagcagaa

SEQ ID NO: 10385 - RNA, 19 nt, Homo sapiens
  misc_RNA (1)...(19): siRNA sense strand
ggacaaaucuuucucuauu

SEQ ID NO: 10386 - RNA, 19 nt, Homo sapiens
  misc_RNA (1)...(19): siRNA sense strand
guaccaagaugaaacauua

SEQ ID NO: 10387 - RNA, 19 nt, Homo sapiens
  misc_RNA (1)...(19): siRNA sense strand
gauauugacuguacugaua

SEQ ID NO: 10388 - RNA, 19 nt, Homo sapiens
  misc_RNA (1)...(19): siRNA sense strand
gaucagauguucuuccaua

SEQ ID NO: 10389 - RNA, 19 nt, Homo sapiens
  misc_RNA (1)...(19): siRNA sense strand
cagcagagcuugcaaauau

SEQ ID NO: 10390 - RNA, 19 nt, Homo sapiens
  misc_RNA (1)...(19): siRNA sense strand
gcaguaaacuaugagaaua

SEQ ID NO: 10391 - RNA, 19 nt, Homo sapiens
  misc_RNA (1)...(19): siRNA sense strand
ggacacacaggaucaauua

SEQ ID NO: 10392 - RNA, 19 nt, Homo sapiens
  misc_RNA (1)...(19): siRNA sense strand
cagaugagcuagagaaauu

SEQ ID NO: 10393 - RNA, 19 nt, Homo sapiens
  misc_RNA (1)...(19): siRNA sense strand
gaaauugagugauugugaa

SEQ ID NO: 10394 - RNA, 19 nt, Homo sapiens
  misc_RNA (1)...(19): siRNA sense strand
ggacaucuaucugcuguuu

SEQ ID NO: 10395 - RNA, 19 nt, Homo sapiens
  misc_RNA (1)...(19): siRNA sense strand
gaugaaauaucuacugaga

SEQ ID NO: 10396 - RNA, 19 nt, Homo sapiens
  misc_RNA (1)...(19): siRNA sense strand
ucaaaugggugaugaggua

SEQ ID NO: 10397 - RNA, 19 nt, Homo sapiens
  misc_RNA (1)...(19): siRNA sense strand
aaagauaacugaccaacuu

SEQ ID NO: 10398 - RNA, 19 nt, Homo sapiens
  misc_RNA (1)...(19): siRNA sense strand
gcacggauuuggagauuug

SEQ ID NO: 10399 - RNA, 19 nt, Homo sapiens
  misc_RNA (1)...(19): siRNA sense strand
gaagaugucaguuuagaaa

SEQ ID NO: 10400 - RNA, 19 nt, Homo sapiens
  misc_RNA (1)...(19): siRNA sense strand
gaaagauucugcaucacaa

SEQ ID NO: 10401 - RNA, 19 nt, Homo sapiens
  misc_RNA (1)...(19): siRNA sense strand
caggaaaucugaacuguga

SEQ ID NO: 10402 - RNA, 19 nt, Homo sapiens
  misc_RNA (1)...(19): siRNA sense strand
cgaaagagagucuauuuaa

SEQ ID NO: 10403 - RNA, 19 nt, Homo sapiens
  misc_RNA (1)...(19): siRNA sense strand
caaccgaucuuuacacaau

SEQ ID NO: 10404 - RNA, 19 nt, Homo sapiens
  misc_RNA (1)...(19): siRNA sense strand
gcacaggcauaccaauauu

SEQ ID NO: 10405 - RNA, 19 nt, Homo sapiens
  misc_RNA (1)...(19): siRNA sense strand
gaaagagagucuauuuaag

SEQ ID NO: 10406 - RNA, 19 nt, Homo sapiens
  misc_RNA (1)...(19): siRNA sense strand
cauagaaucuuuacagguu

SEQ ID NO: 10407 - RNA, 19 nt, Homo sapiens
  misc_RNA (1)...(19): siRNA sense strand
uguagaagaugucaguuua

SEQ ID NO: 10408 - RNA, 19 nt, Homo sapiens
  misc_RNA (1)...(19): siRNA sense strand
gaucaugcauguaacagaa

SEQ ID NO: 10409 - RNA, 19 nt, Homo sapiens
  misc_RNA (1)...(19): siRNA sense strand
guaaggaacuagugaacuu

SEQ ID NO: 10410 - RNA, 19 nt, Homo sapiens
  misc_RNA (1)...(19): siRNA sense strand
gaaagcaacuggaagaaac

SEQ ID NO: 10411 - RNA, 19 nt, Homo sapiens
  misc_RNA (1)...(19): siRNA sense strand
caagaggacuuucaaaugg

SEQ ID NO: 10412 - RNA, 19 nt, Homo sapiens
  misc_RNA (1)...(19): siRNA sense strand
gcaaauggauguggcagaa

SEQ ID NO: 10413 - RNA, 19 nt, Homo sapiens
  misc_RNA (1)...(19): siRNA sense strand
ucagaugacuguuugguaa

SEQ ID NO: 10414 - RNA, 19 nt, Homo sapiens
  misc_RNA (1)...(19): siRNA sense strand
gaagauauguugaauucag

SEQ ID NO: 10415 - RNA, 19 nt, Homo sapiens
  misc_RNA (1)...(19): siRNA sense strand
aaaccaagauucugaguga

SEQ ID NO: 10416 - RNA, 19 nt, Homo sapiens
  misc_RNA (1)...(19): siRNA sense strand
gcuaaugagugauguagaa

SEQ ID NO: 10417 - RNA, 19 nt, Homo sapiens
  misc_RNA (1)...(19): siRNA sense strand
ggucagaaaucaagagaug

SEQ ID NO: 10418 - RNA, 19 nt, Homo sapiens
  misc_RNA (1)...(19): siRNA sense strand
gaacugaacccuaauaagg

SEQ ID NO: 10419 - RNA, 19 nt, Homo sapiens
  misc_RNA (1)...(19): siRNA sense strand
gcagucagauugcuacaga

SEQ ID NO: 10420 - RNA, 19 nt, Homo sapiens
  misc_RNA (1)...(19): siRNA sense strand
gaagaugggaaaugucaua

SEQ ID NO: 10421 - RNA, 19 nt, Homo sapiens
  misc_RNA (1)...(19): siRNA sense strand
gcgcaucgguccuauguug

SEQ ID NO: 10422 - RNA, 19 nt, Homo sapiens
  misc_RNA (1)...(19): siRNA sense strand
gcucaugagugauguagaa

SEQ ID NO: 10423 - RNA, 19 nt, Homo sapiens
  misc_RNA (1)...(19): siRNA sense strand
uaacgaaccugagagugua

SEQ ID NO: 10424 - RNA, 19 nt, Homo sapiens
  misc_RNA (1)...(19): siRNA sense strand
gaauuaggagcuaguauuu

SEQ ID NO: 10425 - RNA, 19 nt, Homo sapiens
  misc_RNA (1)...(19): siRNA sense strand
ggaauuggcagucuuguga

SEQ ID NO: 10426 - RNA, 19 nt, Homo sapiens
  misc_RNA (1)...(19): siRNA sense strand
gaagaggaaagguuuauga

SEQ ID NO: 10427 - RNA, 19 nt, Homo sapiens
  misc_RNA (1)...(19): siRNA sense strand
gacaggacauagaaucuuu

SEQ ID NO: 10428 - RNA, 19 nt, Homo sapiens
  misc_RNA (1)...(19): siRNA sense strand
ugaagauucugaaccauuu

SEQ ID NO: 10429 - RNA, 19 nt, Homo sapiens
  misc_RNA (1)...(19): siRNA sense strand
ucaagugacucuucaucua

SEQ ID NO: 10430 - RNA, 19 nt, Homo sapiens
  misc_RNA (1)...(19): siRNA sense strand
gcagaagacucaggaccua

SEQ ID NO: 10431 - RNA, 19 nt, Homo sapiens
  misc_RNA (1)...(19): siRNA sense strand
gaacacaagcacaggcaua

SEQ ID NO: 10432 - RNA, 19 nt, Homo sapiens
  misc_RNA (1)...(19): siRNA sense strand
gaagaaacaguguaaggaa

SEQ ID NO: 10433 - RNA, 19 nt, Homo sapiens
  misc_RNA (1)...(19): siRNA sense strand
ggaauacgauaugaaguug

SEQ ID NO: 10434 - RNA, 19 nt, Homo sapiens
  misc_RNA (1)...(19): siRNA sense strand
gaauuucacccuccaguuu

SEQ ID NO: 10435 - RNA, 19 nt, Homo sapiens
  misc_RNA (1)...(19): siRNA sense strand
caggaucaauuacaucuuu

SEQ ID NO: 10436 - RNA, 19 nt, Homo sapiens
  misc_RNA (1)...(19): siRNA sense strand
guacaaauaucucagaacu

SEQ ID NO: 10437 - RNA, 19 nt, Homo sapiens
  misc_RNA (1)...(19): siRNA sense strand
ugauccaccugaagaauua

SEQ ID NO: 10438 - RNA, 19 nt, Homo sapiens
  misc_RNA (1)...(19): siRNA sense strand
gaauuuaucuccuccaaaa

SEQ ID NO: 10439 - RNA, 19 nt, Homo sapiens
  misc_RNA (1)...(19): siRNA sense strand
gagcagaucaggauacuau

SEQ ID NO: 10440 - RNA, 19 nt, Homo sapiens
  misc_RNA (1)...(19): siRNA sense strand
gggacaugcugaugaagua

SEQ ID NO: 10441 - RNA, 19 nt, Homo sapiens
  misc_RNA (1)...(19): siRNA sense strand
caaaggcucucaaagauac

SEQ ID NO: 10442 - RNA, 19 nt, Homo sapiens
  misc_RNA (1)...(19): siRNA sense strand
gccaaaggcucucaaagau

SEQ ID NO: 10443 - RNA, 19 nt, Homo sapiens
  misc_RNA (1)...(19): siRNA sense strand
gaagagaucgcauccugaa

SEQ ID NO: 10444 - RNA, 19 nt, Homo sapiens
  misc_RNA (1)...(19): siRNA sense strand
ugacagcccuuuggaguuu

SEQ ID NO: 10445 - RNA, 19 nt, Homo sapiens
  misc_RNA (1)...(19): siRNA sense strand
gaaaucaagagaugaagaa

SEQ ID NO: 10446 - RNA, 19 nt, Homo sapiens
  misc_RNA (1)...(19): siRNA sense strand
ugaguuaucuucuggaaau

SEQ ID NO: 10447 - RNA, 19 nt, Homo sapiens
  misc_RNA (1)...(19): siRNA sense strand
gcaaaccaaugauaaugau

SEQ ID NO: 10448 - RNA, 19 nt, Homo sapiens
  misc_RNA (1)...(19): siRNA sense strand
gacuaucgaccacuuauua

SEQ ID NO: 10449 - RNA, 19 nt, Homo sapiens
  misc_RNA (1)...(19): siRNA sense strand
caugauggcagcauauuua

SEQ ID NO: 10450 - RNA, 19 nt, Homo sapiens
  misc_RNA (1)...(19): siRNA sense strand
gagcuguguuugacuguaa

SEQ ID NO: 10451 - RNA, 19 nt, Homo sapiens
  misc_RNA (1)...(19): siRNA sense strand
uaugaaagauucugcauca

SEQ ID NO: 10452 - RNA, 19 nt, Homo sapiens
  misc_RNA (1)...(19): siRNA sense strand
gaaugcgaguuucuuuaaa

SEQ ID NO: 10453 - RNA, 19 nt, Homo sapiens
  misc_RNA (1)...(19): siRNA sense strand
caucagagcuacgaacuau

SEQ ID NO: 10454 - RNA, 19 nt, Homo sapiens
  misc_RNA (1)...(19): siRNA sense strand
gaaugagacuuguuaaucg

SEQ ID NO: 10455 - RNA, 19 nt, Homo sapiens
  misc_RNA (1)...(19): siRNA sense strand
agagaaaggugaagaggaa

SEQ ID NO: 10456 - RNA, 19 nt, Homo sapiens
  misc_RNA (1)...(19): siRNA sense strand
gagcuuaaagucagaaauu

SEQ ID NO: 10457 - RNA, 19 nt, Homo sapiens
  misc_RNA (1)...(19): siRNA sense strand
ucucaaagauacaugguuu

SEQ ID NO: 10458 - RNA, 19 nt, Homo sapiens
  misc_RNA (1)...(19): siRNA sense strand
gagaucgcauccugaauug

SEQ ID NO: 10459 - RNA, 19 nt, Homo sapiens
  misc_RNA (1)...(19): siRNA sense strand
ggagacuggugaaauucua

SEQ ID NO: 10460 - RNA, 19 nt, Homo sapiens
  misc_RNA (1)...(19): siRNA sense strand
gacagauuccgcucuauua

SEQ ID NO: 10461 - RNA, 19 nt, Homo sapiens
  misc_RNA (1)...(19): siRNA sense strand
ggacauguaggcguaaaua

SEQ ID NO: 10462 - RNA, 19 nt, Homo sapiens
  misc_RNA (1)...(19): siRNA sense strand
ggauauggcuaccagaauc

SEQ ID NO: 10463 - RNA, 19 nt, Homo sapiens
  misc_RNA (1)...(19): siRNA sense strand
ggaaaugagucuucaagcu

SEQ ID NO: 10464 - RNA, 19 nt, Homo sapiens
  misc_RNA (1)...(19): siRNA sense strand
gaagaugaacagagcuuaa

SEQ ID NO: 10465 - RNA, 19 nt, Homo sapiens
  misc_RNA (1)...(19): siRNA sense strand
gaugaagaaugugauagaa

SEQ ID NO: 10466 - RNA, 19 nt, Homo sapiens
  misc_RNA (1)...(19): siRNA sense strand
uaacaaugauagcuuggaa

SEQ ID NO: 10467 - RNA, 19 nt, Homo sapiens
  misc_RNA (1)...(19): siRNA sense strand
gaaaggaggaaaagaaaua

SEQ ID NO: 10468 - RNA, 19 nt, Homo sapiens
  misc_RNA (1)...(19): siRNA sense strand
gaagucagauauauagaac

SEQ ID NO: 10469 - RNA, 19 nt, Homo sapiens
  misc_RNA (1)...(19): siRNA sense strand
gacaacugcuucauaacuu

SEQ ID NO: 10470 - RNA, 19 nt, Homo sapiens
  misc_RNA (1)...(19): siRNA sense strand
gaaugaucauguccucaaa

SEQ ID NO: 10471 - RNA, 19 nt, Homo sapiens
  misc_RNA (1)...(19): siRNA sense strand
ggagauacaucgaggaaaa

SEQ ID NO: 10472 - RNA, 19 nt, Homo sapiens
  misc_RNA (1)...(19): siRNA sense strand
ugaaggaaguguacauugu

SEQ ID NO: 10473 - RNA, 19 nt, Homo sapiens
  misc_RNA (1)...(19): siRNA sense strand
gaaacaguguaaggaacua

SEQ ID NO: 10474 - RNA, 19 nt, Homo sapiens
  misc_RNA (1)...(19): siRNA sense strand
cgaaagagaaagaaagaaa

SEQ ID NO: 10475 - RNA, 19 nt, Homo sapiens
  misc_RNA (1)...(19): siRNA sense strand
gaggaugaauggagaagug

SEQ ID NO: 10476 - RNA, 19 nt, Homo sapiens
  misc_RNA (1)...(19): siRNA sense strand
gaucauguccucaaagugu

SEQ ID NO: 10477 - RNA, 19 nt, Homo sapiens
  misc_RNA (1)...(19): siRNA sense strand
gcagaaauuucagauaugg

SEQ ID NO: 10478 - RNA, 19 nt, Homo sapiens
  misc_RNA (1)...(19): siRNA sense strand
gagaggugauugaacaaau

SEQ ID NO: 10479 - RNA, 19 nt, Homo sapiens
  misc_RNA (1)...(19): siRNA sense strand
cugaagauauguugaauuc

SEQ ID NO: 10480 - RNA, 19 nt, Homo sapiens
  misc_RNA (1)...(19): siRNA sense strand
gaggauuacucgaagaugu

SEQ ID NO: 10481 - RNA, 19 nt, Homo sapiens
  misc_RNA (1)...(19): siRNA sense strand
gaucauggaugugaaacug

SEQ ID NO: 10482 - RNA, 19 nt, Homo sapiens
  misc_RNA (1)...(19): siRNA sense strand
gaaauuaugacagcccuuu

SEQ ID NO: 10483 - RNA, 19 nt, Homo sapiens
  misc_RNA (1)...(19): siRNA sense strand
gggauaauacugaaauuga

SEQ ID NO: 10484 - RNA, 19 nt, Homo sapiens
  misc_RNA (1)...(19): siRNA sense strand
gaagcaagacagaggaauu

SEQ ID NO: 10485 - RNA, 19 nt, Homo sapiens
  misc_RNA (1)...(19): siRNA sense strand
ggacaaaucuuucucuauu

SEQ ID NO: 10486 - RNA, 19 nt, Homo sapiens
  misc_RNA (1)...(19): siRNA sense strand
guaccaagaugaaacauua

SEQ ID NO: 10487 - RNA, 19 nt, Homo sapiens
  misc_RNA (1)...(19): siRNA sense strand
gauauugacuguacugaua

SEQ ID NO: 10488 - RNA, 19 nt, Homo sapiens
  misc_RNA (1)...(19): siRNA sense strand
gaucagauguucuuccaua

SEQ ID NO: 10489 - RNA, 19 nt, Homo sapiens
  misc_RNA (1)...(19): siRNA sense strand
cagcagagcuugcaaauau

SEQ ID NO: 10490 - RNA, 19 nt, Homo sapiens
  misc_RNA (1)...(19): siRNA sense strand
gcaguaaacuaugagaaua

SEQ ID NO: 10491 - RNA, 19 nt, Homo sapiens
  misc_RNA (1)...(19): siRNA sense strand
ggacacacaggaucaauua

SEQ ID NO: 10492 - RNA, 19 nt, Homo sapiens
  misc_RNA (1)...(19): siRNA sense strand
cagaugagcuagagaaauu

SEQ ID NO: 10493 - RNA, 19 nt, Homo sapiens
  misc_RNA (1)...(19): siRNA sense strand
gaaauugagugauugugaa

SEQ ID NO: 10494 - RNA, 19 nt, Homo sapiens
  misc_RNA (1)...(19): siRNA sense strand
ggacaucuaucugcuguuu

SEQ ID NO: 10495 - RNA, 19 nt, Homo sapiens
  misc_RNA (1)...(19): siRNA sense strand
gaugaaauaucuacugaga

SEQ ID NO: 10496 - RNA, 19 nt, Homo sapiens
  misc_RNA (1)...(19): siRNA sense strand
ucaaaugggugaugaggua

SEQ ID NO: 10497 - RNA, 19 nt, Homo sapiens
  misc_RNA (1)...(19): siRNA sense strand
aaagauaacugaccaacuu

SEQ ID NO: 10498 - RNA, 19 nt, Homo sapiens
  misc_RNA (1)...(19): siRNA sense strand
gcacggauuuggagauuug

SEQ ID NO: 10499 - RNA, 19 nt, Homo sapiens
  misc_RNA (1)...(19): siRNA sense strand
gaagaugucaguuuagaaa

SEQ ID NO: 10500 - RNA, 19 nt, Homo sapiens
  misc_RNA (1)...(19): siRNA sense strand
gaaagauucugcaucacaa

SEQ ID NO: 10501 - RNA, 19 nt, Homo sapiens
  misc_RNA (1)...(19): siRNA sense strand
caggaaaucugaacuguga

SEQ ID NO: 10502 - RNA, 19 nt, Homo sapiens
  misc_RNA (1)...(19): siRNA sense strand
cgaaagagagucuauuuaa

SEQ ID NO: 10503 - RNA, 19 nt, Homo sapiens
  misc_RNA (1)...(19): siRNA sense strand
caaccgaucuuuacacaau

SEQ ID NO: 10504 - RNA, 19 nt, Homo sapiens
  misc_RNA (1)...(19): siRNA sense strand
gcacaggcauaccaauauu

SEQ ID NO: 10505 - RNA, 19 nt, Homo sapiens
  misc_RNA (1)...(19): siRNA sense strand
gaaagagagucuauuuaag

SEQ ID NO: 10506 - RNA, 19 nt, Homo sapiens
  misc_RNA (1)...(19): siRNA sense strand
cauagaaucuuuacagguu

SEQ ID NO: 10507 - RNA, 19 nt, Homo sapiens
  misc_RNA (1)...(19): siRNA sense strand
uguagaagaugucaguuua

SEQ ID NO: 10508 - RNA, 19 nt, Homo sapiens
  misc_RNA (1)...(19): siRNA sense strand
gaucaugcauguaacagaa

SEQ ID NO: 10509 - RNA, 19 nt, Homo sapiens
  misc_RNA (1)...(19): siRNA sense strand
guaaggaacuagugaacuu

SEQ ID NO: 10510 - RNA, 19 nt, Homo sapiens
  misc_RNA (1)...(19): siRNA sense strand
gaaagcaacuggaagaaac

SEQ ID NO: 10511 - RNA, 19 nt, Homo sapiens
  misc_RNA (1)...(19): siRNA sense strand
caagaggacuuucaaaugg

SEQ ID NO: 10512 - RNA, 19 nt, Homo sapiens
  misc_RNA (1)...(19): siRNA sense strand
gcaaauggauguggcagaa

SEQ ID NO: 10513 - RNA, 19 nt, Homo sapiens
  misc_RNA (1)...(19): siRNA sense strand
ucagaugacuguuugguaa

SEQ ID NO: 10514 - RNA, 19 nt, Homo sapiens
  misc_RNA (1)...(19): siRNA sense strand
gaagauauguugaauucag

SEQ ID NO: 10515 - RNA, 19 nt, Homo sapiens
  misc_RNA (1)...(19): siRNA sense strand
aaaccaagauucugaguga

SEQ ID NO: 10516 - RNA, 19 nt, Homo sapiens
  misc_RNA (1)...(19): siRNA sense strand
gcuaaugagugauguagaa

SEQ ID NO: 10517 - RNA, 19 nt, Homo sapiens
  misc_RNA (1)...(19): siRNA sense strand
ggucagaaaucaagagaug

SEQ ID NO: 10518 - RNA, 19 nt, Homo sapiens
  misc_RNA (1)...(19): siRNA sense strand
gaacugaacccuaauaagg

SEQ ID NO: 10519 - RNA, 19 nt, Homo sapiens
  misc_RNA (1)...(19): siRNA sense strand
gcagucagauugcuacaga

SEQ ID NO: 10520 - RNA, 19 nt, Homo sapiens
  misc_RNA (1)...(19): siRNA sense strand
gaagaugggaaaugucaua

SEQ ID NO: 10521 - RNA, 19 nt, Homo sapiens
  misc_RNA (1)...(19): siRNA sense strand
gcgcaucgguccuauguug

SEQ ID NO: 10522 - RNA, 19 nt, Homo sapiens
  misc_RNA (1)...(19): siRNA sense strand
gcucaugagugauguagaa

SEQ ID NO: 10523 - RNA, 19 nt, Homo sapiens
  misc_RNA (1)...(19): siRNA sense strand
uaacgaaccugagagugua

SEQ ID NO: 10524 - RNA, 19 nt, Homo sapiens
  misc_RNA (1)...(19): siRNA sense strand
gaauuaggagcuaguauuu

SEQ ID NO: 10525 - RNA, 19 nt, Homo sapiens
  misc_RNA (1)...(19): siRNA sense strand
ggaauuggcagucuuguga

SEQ ID NO: 10526 - RNA, 19 nt, Homo sapiens
  misc_RNA (1)...(19): siRNA sense strand
gaagaggaaagguuuauga

SEQ ID NO: 10527 - RNA, 19 nt, Homo sapiens
  misc_RNA (1)...(19): siRNA sense strand
gacaggacauagaaucuuu

SEQ ID NO: 10528 - RNA, 19 nt, Homo sapiens
  misc_RNA (1)...(19): siRNA sense strand
ugaagauucugaaccauuu

SEQ ID NO: 10529 - RNA, 19 nt, Homo sapiens
  misc_RNA (1)...(19): siRNA sense strand
ucaagugacucuucaucua

SEQ ID NO: 10530 - RNA, 19 nt, Homo sapiens
  misc_RNA (1)...(19): siRNA sense strand
gcagaagacucaggaccua

SEQ ID NO: 10531 - RNA, 19 nt, Homo sapiens
  misc_RNA (1)...(19): siRNA sense strand
gaacacaagcacaggcaua

SEQ ID NO: 10532 - RNA, 19 nt, Homo sapiens
  misc_RNA (1)...(19): siRNA sense strand
gaagaaacaguguaaggaa

SEQ ID NO: 10533 - RNA, 19 nt, Homo sapiens
  misc_RNA (1)...(19): siRNA sense strand
ggaauacgauaugaaguug

SEQ ID NO: 10534 - RNA, 19 nt, Homo sapiens
  misc_RNA (1)...(19): siRNA sense strand
gaauuucacccuccaguuu

SEQ ID NO: 10535 - RNA, 19 nt, Homo sapiens
  misc_RNA (1)...(19): siRNA sense strand
caggaucaauuacaucuuu

SEQ ID NO: 10536 - RNA, 19 nt, Homo sapiens
  misc_RNA (1)...(19): siRNA sense strand
guacaaauaucucagaacu

SEQ ID NO: 10537 - RNA, 19 nt, Homo sapiens
  misc_RNA (1)...(19): siRNA sense strand
ugauccaccugaagaauua

SEQ ID NO: 10538 - RNA, 19 nt, Homo sapiens
  misc_RNA (1)...(19): siRNA sense strand
gaauuuaucuccuccaaaa

SEQ ID NO: 10539 - RNA, 19 nt, Homo sapiens
  misc_RNA (1)...(19): siRNA sense strand
gagcagaucaggauacuau

SEQ ID NO: 10540 - RNA, 19 nt, Homo sapiens
  misc_RNA (1)...(19): siRNA sense strand
gggacaugcugaugaagua

SEQ ID NO: 10541 - RNA, 19 nt, Homo sapiens
  misc_RNA (1)...(19): siRNA sense strand
caaaggcucucaaagauac

SEQ ID NO: 10542 - RNA, 19 nt, Homo sapiens
  misc_RNA (1)...(19): siRNA sense strand
gccaaaggcucucaaagau

SEQ ID NO: 10543 - RNA, 19 nt, Homo sapiens
  misc_RNA (1)...(19): siRNA sense strand
gaagagaucgcauccugaa

SEQ ID NO: 10544 - RNA, 19 nt, Homo sapiens
  misc_RNA (1)...(19): siRNA sense strand
ugacagcccuuuggaguuu

SEQ ID NO: 10545 - RNA, 19 nt, Homo sapiens
  misc_RNA (1)...(19): siRNA sense strand
gaaaucaagagaugaagaa

SEQ ID NO: 10546 - RNA, 19 nt, Homo sapiens
  misc_RNA (1)...(19): siRNA sense strand
ugaguuaucuucuggaaau

SEQ ID NO: 10547 - RNA, 19 nt, Homo sapiens
  misc_RNA (1)...(19): siRNA sense strand
gcaaaccaaugauaaugau

SEQ ID NO: 10548 - RNA, 19 nt, Homo sapiens
  misc_RNA (1)...(19): siRNA sense strand
gacuaucgaccacuuauua

SEQ ID NO: 10549 - RNA, 19 nt, Homo sapiens
  misc_RNA (1)...(19): siRNA sense strand
caugauggcagcauauuua

SEQ ID NO: 10550 - RNA, 19 nt, Homo sapiens
  misc_RNA (1)...(19): siRNA sense strand
gagcuguguuugacuguaa

SEQ ID NO: 10551 - RNA, 19 nt, Homo sapiens
  misc_RNA (1)...(19): siRNA sense strand
uaugaaagauucugcauca

SEQ ID NO: 10552 - RNA, 19 nt, Homo sapiens
  misc_RNA (1)...(19): siRNA sense strand
gaaugcgaguuucuuuaaa

SEQ ID NO: 10553 - RNA, 19 nt, Homo sapiens
  misc_RNA (1)...(19): siRNA sense strand
caucagagcuacgaacuau

SEQ ID NO: 10554 - RNA, 19 nt, Homo sapiens
  misc_RNA (1)...(19): siRNA sense strand
gaaugagacuuguuaaucg

SEQ ID NO: 10555 - RNA, 19 nt, Homo sapiens
  misc_RNA (1)...(19): siRNA sense strand
agagaaaggugaagaggaa

SEQ ID NO: 10556 - RNA, 19 nt, Homo sapiens
  misc_RNA (1)...(19): siRNA sense strand
gagcuuaaagucagaaauu

SEQ ID NO: 10557 - RNA, 19 nt, Homo sapiens
  misc_RNA (1)...(19): siRNA sense strand
ucucaaagauacaugguuu

SEQ ID NO: 10558 - RNA, 19 nt, Homo sapiens
  misc_RNA (1)...(19): siRNA sense strand
gagaucgcauccugaauug

SEQ ID NO: 10559 - RNA, 19 nt, Homo sapiens
  misc_RNA (1)...(19): siRNA sense strand
ggagacuggugaaauucua

SEQ ID NO: 10560 - RNA, 19 nt, Homo sapiens
  misc_RNA (1)...(19): siRNA sense strand
gacagauuccgcucuauua

SEQ ID NO: 10561 - RNA, 19 nt, Homo sapiens
  misc_RNA (1)...(19): siRNA sense strand
ggacauguaggcguaaaua

SEQ ID NO: 10562 - RNA, 19 nt, Homo sapiens
  misc_RNA (1)...(19): siRNA sense strand
ggauauggcuaccagaauc

SEQ ID NO: 10563 - RNA, 19 nt, Homo sapiens
  misc_RNA (1)...(19): siRNA sense strand
ggaaaugagucuucaagcu

SEQ ID NO: 10564 - RNA, 19 nt, Homo sapiens
  misc_RNA (1)...(19): siRNA sense strand
gaagaugaacagagcuuaa

SEQ ID NO: 10565 - RNA, 19 nt, Homo sapiens
  misc_RNA (1)...(19): siRNA sense strand
gaugaagaaugugauagaa

SEQ ID NO: 10566 - RNA, 19 nt, Homo sapiens
  misc_RNA (1)...(19): siRNA sense strand
uaacaaugauagcuuggaa

SEQ ID NO: 10567 - RNA, 19 nt, Homo sapiens
  misc_RNA (1)...(19): siRNA sense strand
gaaaggaggaaaagaaaua

SEQ ID NO: 10568 - RNA, 19 nt, Homo sapiens
  misc_RNA (1)...(19): siRNA sense strand
gaagucagauauauagaac

SEQ ID NO: 10569 - RNA, 19 nt, Homo sapiens
  misc_RNA (1)...(19): siRNA sense strand
gacaacugcuucauaacuu

SEQ ID NO: 10570 - RNA, 19 nt, Homo sapiens
  misc_RNA (1)...(19): siRNA sense strand
gaaugaucauguccucaaa

SEQ ID NO: 10571 - RNA, 19 nt, Homo sapiens
  misc_RNA (1)...(19): siRNA sense strand
ggagauacaucgaggaaaa

SEQ ID NO: 10572 - RNA, 19 nt, Homo sapiens
  misc_RNA (1)...(19): siRNA sense strand
ugaaggaaguguacauugu

SEQ ID NO: 10573 - RNA, 19 nt, Homo sapiens
  misc_RNA (1)...(19): siRNA sense strand
gaaacaguguaaggaacua

SEQ ID NO: 10574 - RNA, 19 nt, Homo sapiens
  misc_RNA (1)...(19): siRNA sense strand
cgaaagagaaagaaagaaa

SEQ ID NO: 10575 - RNA, 19 nt, Homo sapiens
  misc_RNA (1)...(19): siRNA sense strand
gaggaugaauggagaagug

SEQ ID NO: 10576 - RNA, 19 nt, Homo sapiens
  misc_RNA (1)...(19): siRNA sense strand
gaucauguccucaaagugu

SEQ ID NO: 10577 - RNA, 19 nt, Homo sapiens
  misc_RNA (1)...(19): siRNA sense strand
gcagaaauuucagauaugg

SEQ ID NO: 10578 - RNA, 19 nt, Homo sapiens
  misc_RNA (1)...(19): siRNA sense strand
gagaggugauugaacaaau

SEQ ID NO: 10579 - RNA, 19 nt, Homo sapiens
  misc_RNA (1)...(19): siRNA sense strand
cugaagauauguugaauuc

SEQ ID NO: 10580 - RNA, 19 nt, Homo sapiens
  misc_RNA (1)...(19): siRNA sense strand
gaggauuacucgaagaugu

SEQ ID NO: 10581 - RNA, 19 nt, Homo sapiens
  misc_RNA (1)...(19): siRNA sense strand
gaucauggaugugaaacug

SEQ ID NO: 10582 - RNA, 19 nt, Homo sapiens
  misc_RNA (1)...(19): siRNA sense strand
gaaauuaugacagcccuuu

SEQ ID NO: 10583 - RNA, 19 nt, Homo sapiens
  misc_RNA (1)...(19): siRNA sense strand
gggauaauacugaaauuga

SEQ ID NO: 10584 - RNA, 19 nt, Homo sapiens
  misc_RNA (1)...(19): siRNA sense strand
gaagcaagacagaggaauu

SEQ ID NO: 10585 - RNA, 19 nt, Homo sapiens
  misc_RNA (1)...(19): siRNA sense strand
ggacaaaucuuucucuauu

SEQ ID NO: 10586 - RNA, 19 nt, Homo sapiens
  misc_RNA (1)...(19): siRNA sense strand
guaccaagaugaaacauua

SEQ ID NO: 10587 - RNA, 19 nt, Homo sapiens
  misc_RNA (1)...(19): siRNA sense strand
gauauugacuguacugaua

SEQ ID NO: 10588 - RNA, 19 nt, Homo sapiens
  misc_RNA (1)...(19): siRNA sense strand
gaucagauguucuuccaua

SEQ ID NO: 10589 - RNA, 19 nt, Homo sapiens
  misc_RNA (1)...(19): siRNA sense strand
cagcagagcuugcaaauau

SEQ ID NO: 10590 - RNA, 19 nt, Homo sapiens
  misc_RNA (1)...(19): siRNA sense strand
gcaguaaacuaugagaaua

SEQ ID NO: 10591 - RNA, 19 nt, Homo sapiens
  misc_RNA (1)...(19): siRNA sense strand
ggacacacaggaucaauua

SEQ ID NO: 10592 - RNA, 19 nt, Homo sapiens
  misc_RNA (1)...(19): siRNA sense strand
cagaugagcuagagaaauu

SEQ ID NO: 10593 - RNA, 19 nt, Homo sapiens
  misc_RNA (1)...(19): siRNA sense strand
gaaauugagugauugugaa

SEQ ID NO: 10594 - RNA, 19 nt, Homo sapiens
  misc_RNA (1)...(19): siRNA sense strand
ggacaucuaucugcuguuu

SEQ ID NO: 10595 - RNA, 19 nt, Homo sapiens
  misc_RNA (1)...(19): siRNA sense strand
gaugaaauaucuacugaga

SEQ ID NO: 10596 - RNA, 19 nt, Homo sapiens
  misc_RNA (1)...(19): siRNA sense strand
ucaaaugggugaugaggua

SEQ ID NO: 10597 - RNA, 19 nt, Homo sapiens
  misc_RNA (1)...(19): siRNA sense strand
aaagauaacugaccaacuu

SEQ ID NO: 10598 - RNA, 19 nt, Homo sapiens
  misc_RNA (1)...(19): siRNA sense strand
gcacggauuuggagauuug

SEQ ID NO: 10599 - RNA, 19 nt, Homo sapiens
  misc_RNA (1)...(19): siRNA sense strand
gaagaugucaguuuagaaa

SEQ ID NO: 10600 - RNA, 19 nt, Homo sapiens
  misc_RNA (1)...(19): siRNA sense strand
gaaagauucugcaucacaa

SEQ ID NO: 10601 - RNA, 19 nt, Homo sapiens
  misc_RNA (1)...(19): siRNA sense strand
caggaaaucugaacuguga

SEQ ID NO: 10602 - RNA, 19 nt, Homo sapiens
  misc_RNA (1)...(19): siRNA sense strand
cgaaagagagucuauuuaa

SEQ ID NO: 10603 - RNA, 19 nt, Homo sapiens
  misc_RNA (1)...(19): siRNA sense strand
caaccgaucuuuacacaau

SEQ ID NO: 10604 - RNA, 19 nt, Homo sapiens
  misc_RNA (1)...(19): siRNA sense strand
gcacaggcauaccaauauu

SEQ ID NO: 10605 - RNA, 19 nt, Homo sapiens
  misc_RNA (1)...(19): siRNA sense strand
gaaagagagucuauuuaag

SEQ ID NO: 10606 - RNA, 19 nt, Homo sapiens
  misc_RNA (1)...(19): siRNA sense strand
cauagaaucuuuacagguu

SEQ ID NO: 10607 - RNA, 19 nt, Homo sapiens
  misc_RNA (1)...(19): siRNA sense strand
uguagaagaugucaguuua

SEQ ID NO: 10608 - RNA, 19 nt, Homo sapiens
  misc_RNA (1)...(19): siRNA sense strand
gaucaugcauguaacagaa

SEQ ID NO: 10609 - RNA, 19 nt, Homo sapiens
  misc_RNA (1)...(19): siRNA sense strand
guaaggaacuagugaacuu

SEQ ID NO: 10610 - RNA, 19 nt, Homo sapiens
  misc_RNA (1)...(19): siRNA sense strand
gaaagcaacuggaagaaac

SEQ ID NO: 10611 - RNA, 19 nt, Homo sapiens
  misc_RNA (1)...(19): siRNA sense strand
caagaggacuuucaaaugg

SEQ ID NO: 10612 - RNA, 19 nt, Homo sapiens
  misc_RNA (1)...(19): siRNA sense strand
gcaaauggauguggcagaa

SEQ ID NO: 10613 - RNA, 19 nt, Homo sapiens
  misc_RNA (1)...(19): siRNA sense strand
ucagaugacuguuugguaa

SEQ ID NO: 10614 - RNA, 19 nt, Homo sapiens
  misc_RNA (1)...(19): siRNA sense strand
gaagauauguugaauucag

SEQ ID NO: 10615 - RNA, 19 nt, Homo sapiens
  misc_RNA (1)...(19): siRNA sense strand
aaaccaagauucugaguga

SEQ ID NO: 10616 - RNA, 19 nt, Homo sapiens
  misc_RNA (1)...(19): siRNA sense strand
gcuaaugagugauguagaa

SEQ ID NO: 10617 - RNA, 19 nt, Homo sapiens
  misc_RNA (1)...(19): siRNA sense strand
ggucagaaaucaagagaug

SEQ ID NO: 10618 - RNA, 19 nt, Homo sapiens
  misc_RNA (1)...(19): siRNA sense strand
gaacugaacccuaauaagg

SEQ ID NO: 10619 - RNA, 19 nt, Homo sapiens
  misc_RNA (1)...(19): siRNA sense strand
gcagucagauugcuacaga

SEQ ID NO: 10620 - RNA, 19 nt, Homo sapiens
  misc_RNA (1)...(19): siRNA sense strand
gaagaugggaaaugucaua

SEQ ID NO: 10621 - RNA, 19 nt, Homo sapiens
  misc_RNA (1)...(19): siRNA sense strand
gcgcaucgguccuauguug

SEQ ID NO: 10622 - RNA, 19 nt, Homo sapiens
  misc_RNA (1)...(19): siRNA sense strand
gcucaugagugauguagaa

SEQ ID NO: 10623 - RNA, 19 nt, Homo sapiens
  misc_RNA (1)...(19): siRNA sense strand
uaacgaaccugagagugua

SEQ ID NO: 10624 - RNA, 19 nt, Homo sapiens
  misc_RNA (1)...(19): siRNA sense strand
gaauuaggagcuaguauuu

SEQ ID NO: 10625 - RNA, 19 nt, Homo sapiens
  misc_RNA (1)...(19): siRNA sense strand
ggaauuggcagucuuguga

SEQ ID NO: 10626 - RNA, 19 nt, Homo sapiens
  misc_RNA (1)...(19): siRNA sense strand
gaagaggaaagguuuauga

SEQ ID NO: 10627 - RNA, 19 nt, Homo sapiens
  misc_RNA (1)...(19): siRNA sense strand
gacaggacauagaaucuuu

SEQ ID NO: 10628 - RNA, 19 nt, Homo sapiens
  misc_RNA (1)...(19): siRNA sense strand
ugaagauucugaaccauuu

SEQ ID NO: 10629 - RNA, 19 nt, Homo sapiens
  misc_RNA (1)...(19): siRNA sense strand
ucaagugacucuucaucua

SEQ ID NO: 10630 - RNA, 19 nt, Homo sapiens
  misc_RNA (1)...(19): siRNA sense strand
gcagaagacucaggaccua

SEQ ID NO: 10631 - RNA, 19 nt, Homo sapiens
  misc_RNA (1)...(19): siRNA sense strand
gaacacaagcacaggcaua

SEQ ID NO: 10632 - RNA, 19 nt, Homo sapiens
  misc_RNA (1)...(19): siRNA sense strand
gaagaaacaguguaaggaa

SEQ ID NO: 10633 - RNA, 19 nt, Homo sapiens
  misc_RNA (1)...(19): siRNA sense strand
ggaauacgauaugaaguug

SEQ ID NO: 10634 - RNA, 19 nt, Homo sapiens
  misc_RNA (1)...(19): siRNA sense strand
gaauuucacccuccaguuu

SEQ ID NO: 10635 - RNA, 19 nt, Homo sapiens
  misc_RNA (1)...(19): siRNA sense strand
caggaucaauuacaucuuu

SEQ ID NO: 10636 - RNA, 19 nt, Homo sapiens
  misc_RNA (1)...(19): siRNA sense strand
guacaaauaucucagaacu

SEQ ID NO: 10637 - RNA, 19 nt, Homo sapiens
  misc_RNA (1)...(19): siRNA sense strand
ugauccaccugaagaauua

SEQ ID NO: 10638 - RNA, 19 nt, Homo sapiens
  misc_RNA (1)...(19): siRNA sense strand
gaauuuaucuccuccaaaa

SEQ ID NO: 10639 - RNA, 19 nt, Homo sapiens
  misc_RNA (1)...(19): siRNA sense strand
gagcagaucaggauacuau

SEQ ID NO: 10640 - RNA, 19 nt, Homo sapiens
  misc_RNA (1)...(19): siRNA sense strand
gggacaugcugaugaagua

SEQ ID NO: 10641 - RNA, 19 nt, Homo sapiens
  misc_RNA (1)...(19): siRNA sense strand
caaaggcucucaaagauac

SEQ ID NO: 10642 - RNA, 19 nt, Homo sapiens
  misc_RNA (1)...(19): siRNA sense strand
gccaaaggcucucaaagau

SEQ ID NO: 10643 - RNA, 19 nt, Homo sapiens
  misc_RNA (1)...(19): siRNA sense strand
gaagagaucgcauccugaa

SEQ ID NO: 10644 - RNA, 19 nt, Homo sapiens
  misc_RNA (1)...(19): siRNA sense strand
ugacagcccuuuggaguuu

SEQ ID NO: 10645 - RNA, 19 nt, Homo sapiens
  misc_RNA (1)...(19): siRNA sense strand
gaaaucaagagaugaagaa

SEQ ID NO: 10646 - RNA, 19 nt, Homo sapiens
  misc_RNA (1)...(19): siRNA sense strand
ugaguuaucuucuggaaau

SEQ ID NO: 10647 - RNA, 19 nt, Homo sapiens
  misc_RNA (1)...(19): siRNA sense strand
gcaaaccaaugauaaugau

SEQ ID NO: 10648 - RNA, 19 nt, Homo sapiens
  misc_RNA (1)...(19): siRNA sense strand
gacuaucgaccacuuauua

SEQ ID NO: 10649 - RNA, 19 nt, Homo sapiens
  misc_RNA (1)...(19): siRNA sense strand
caugauggcagcauauuua

SEQ ID NO: 10650 - RNA, 19 nt, Homo sapiens
  misc_RNA (1)...(19): siRNA sense strand
gagcuguguuugacuguaa

SEQ ID NO: 10651 - RNA, 19 nt, Homo sapiens
  misc_RNA (1)...(19): siRNA sense strand
uaugaaagauucugcauca

SEQ ID NO: 10652 - RNA, 19 nt, Homo sapiens
  misc_RNA (1)...(19): siRNA sense strand
gaaugcgaguuucuuuaaa

SEQ ID NO: 10653 - RNA, 19 nt, Homo sapiens
  misc_RNA (1)...(19): siRNA sense strand
caucagagcuacgaacuau

SEQ ID NO: 10654 - RNA, 19 nt, Homo sapiens
  misc_RNA (1)...(19): siRNA sense strand
gaaugagacuuguuaaucg

SEQ ID NO: 10655 - RNA, 19 nt, Homo sapiens
  misc_RNA (1)...(19): siRNA sense strand
agagaaaggugaagaggaa

SEQ ID NO: 10656 - RNA, 19 nt, Homo sapiens
  misc_RNA (1)...(19): siRNA sense strand
gagcuuaaagucagaaauu

SEQ ID NO: 10657 - RNA, 19 nt, Homo sapiens
  misc_RNA (1)...(19): siRNA sense strand
ucucaaagauacaugguuu

SEQ ID NO: 10658 - RNA, 19 nt, Homo sapiens
  misc_RNA (1)...(19): siRNA sense strand
gagaucgcauccugaauug

SEQ ID NO: 10659 - RNA, 19 nt, Homo sapiens
  misc_RNA (1)...(19): siRNA sense strand
ggagacuggugaaauucua

SEQ ID NO: 10660 - RNA, 19 nt, Homo sapiens
  misc_RNA (1)...(19): siRNA sense strand
gacagauuccgcucuauua

SEQ ID NO: 10661 - RNA, 19 nt, Homo sapiens
  misc_RNA (1)...(19): siRNA sense strand
ggacauguaggcguaaaua

SEQ ID NO: 10662 - RNA, 19 nt, Homo sapiens
  misc_RNA (1)...(19): siRNA sense strand
ggauauggcuaccagaauc

SEQ ID NO: 10663 - RNA, 19 nt, Homo sapiens
  misc_RNA (1)...(19): siRNA sense strand
ggaaaugagucuucaagcu

SEQ ID NO: 10664 - RNA, 19 nt, Homo sapiens
  misc_RNA (1)...(19): siRNA sense strand
gaagaugaacagagcuuaa

SEQ ID NO: 10665 - RNA, 19 nt, Homo sapiens
  misc_RNA (1)...(19): siRNA sense strand
gaugaagaaugugauagaa

SEQ ID NO: 10666 - RNA, 19 nt, Homo sapiens
  misc_RNA (1)...(19): siRNA sense strand
uaacaaugauagcuuggaa

SEQ ID NO: 10667 - RNA, 19 nt, Homo sapiens
  misc_RNA (1)...(19): siRNA sense strand
gaaaggaggaaaagaaaua

SEQ ID NO: 10668 - RNA, 19 nt, Homo sapiens
  misc_RNA (1)...(19): siRNA sense strand
gaagucagauauauagaac

SEQ ID NO: 10669 - RNA, 19 nt, Homo sapiens
  misc_RNA (1)...(19): siRNA sense strand
gacaacugcuucauaacuu

SEQ ID NO: 10670 - RNA, 19 nt, Homo sapiens
  misc_RNA (1)...(19): siRNA sense strand
gaaugaucauguccucaaa

SEQ ID NO: 10671 - RNA, 19 nt, Homo sapiens
  misc_RNA (1)...(19): siRNA sense strand
ggagauacaucgaggaaaa

SEQ ID NO: 10672 - RNA, 19 nt, Homo sapiens
  misc_RNA (1)...(19): siRNA sense strand
ugaaggaaguguacauugu

SEQ ID NO: 10673 - RNA, 19 nt, Homo sapiens
  misc_RNA (1)...(19): siRNA sense strand
gaaacaguguaaggaacua

SEQ ID NO: 10674 - RNA, 19 nt, Homo sapiens
  misc_RNA (1)...(19): siRNA sense strand
cgaaagagaaagaaagaaa

SEQ ID NO: 10675 - RNA, 19 nt, Homo sapiens
  misc_RNA (1)...(19): siRNA sense strand
gaggaugaauggagaagug

SEQ ID NO: 10676 - RNA, 19 nt, Homo sapiens
  misc_RNA (1)...(19): siRNA sense strand
gaucauguccucaaagugu

SEQ ID NO: 10677 - RNA, 19 nt, Homo sapiens
  misc_RNA (1)...(19): siRNA sense strand
gcagaaauuucagauaugg

SEQ ID NO: 10678 - RNA, 19 nt, Homo sapiens
  misc_RNA (1)...(19): siRNA sense strand
gagaggugauugaacaaau

SEQ ID NO: 10679 - RNA, 19 nt, Homo sapiens
  misc_RNA (1)...(19): siRNA sense strand
cugaagauauguugaauuc

SEQ ID NO: 10680 - RNA, 19 nt, Homo sapiens
  misc_RNA (1)...(19): siRNA sense strand
gaggauuacucgaagaugu

SEQ ID NO: 10681 - RNA, 19 nt, Homo sapiens
  misc_RNA (1)...(19): siRNA sense strand
gaucauggaugugaaacug

SEQ ID NO: 10682 - RNA, 19 nt, Homo sapiens
  misc_RNA (1)...(19): siRNA sense strand
gaaauuaugacagcccuuu

SEQ ID NO: 10683 - RNA, 19 nt, Homo sapiens
  misc_RNA (1)...(19): siRNA sense strand
gggauaauacugaaauuga

SEQ ID NO: 10684 - RNA, 19 nt, Homo sapiens
  misc_RNA (1)...(19): siRNA sense strand
gaagcaagacagaggaauu

SEQ ID NO: 10685 - RNA, 19 nt, Homo sapiens
  misc_RNA (1)...(19): siRNA sense strand
ggacaaaucuuucucuauu

SEQ ID NO: 10686 - RNA, 19 nt, Homo sapiens
  misc_RNA (1)...(19): siRNA sense strand
guaccaagaugaaacauua

SEQ ID NO: 10687 - RNA, 19 nt, Homo sapiens
  misc_RNA (1)...(19): siRNA sense strand
gauauugacuguacugaua

SEQ ID NO: 10688 - RNA, 19 nt, Homo sapiens
  misc_RNA (1)...(19): siRNA sense strand
gaucagauguucuuccaua

SEQ ID NO: 10689 - RNA, 19 nt, Homo sapiens
  misc_RNA (1)...(19): siRNA sense strand
cagcagagcuugcaaauau

SEQ ID NO: 10690 - RNA, 19 nt, Homo sapiens
  misc_RNA (1)...(19): siRNA sense strand
gcaguaaacuaugagaaua

SEQ ID NO: 10691 - RNA, 19 nt, Homo sapiens
  misc_RNA (1)...(19): siRNA sense strand
ggacacacaggaucaauua

SEQ ID NO: 10692 - RNA, 19 nt, Homo sapiens
  misc_RNA (1)...(19): siRNA sense strand
cagaugagcuagagaaauu

SEQ ID NO: 10693 - RNA, 19 nt, Homo sapiens
  misc_RNA (1)...(19): siRNA sense strand
gaaauugagugauugugaa

SEQ ID NO: 10694 - RNA, 19 nt, Homo sapiens
  misc_RNA (1)...(19): siRNA sense strand
ggacaucuaucugcuguuu

SEQ ID NO: 10695 - RNA, 19 nt, Homo sapiens
  misc_RNA (1)...(19): siRNA sense strand
gaugaaauaucuacugaga

SEQ ID NO: 10696 - RNA, 19 nt, Homo sapiens
  misc_RNA (1)...(19): siRNA sense strand
ucaaaugggugaugaggua

SEQ ID NO: 10697 - RNA, 19 nt, Homo sapiens
  misc_RNA (1)...(19): siRNA sense strand
aaagauaacugaccaacuu

SEQ ID NO: 10698 - RNA, 19 nt, Homo sapiens
  misc_RNA (1)...(19): siRNA sense strand
gcacggauuuggagauuug

SEQ ID NO: 10699 - RNA, 19 nt, Homo sapiens
  misc_RNA (1)...(19): siRNA sense strand
gaagaugucaguuuagaaa

SEQ ID NO: 10700 - RNA, 19 nt, Homo sapiens
  misc_RNA (1)...(19): siRNA sense strand
gaaagauucugcaucacaa

SEQ ID NO: 10701 - RNA, 19 nt, Homo sapiens
  misc_RNA (1)...(19): siRNA sense strand
caggaaaucugaacuguga

SEQ ID NO: 10702 - RNA, 19 nt, Homo sapiens
  misc_RNA (1)...(19): siRNA sense strand
cgaaagagagucuauuuaa

SEQ ID NO: 10703 - RNA, 19 nt, Homo sapiens
  misc_RNA (1)...(19): siRNA sense strand
caaccgaucuuuacacaau

SEQ ID NO: 10704 - RNA, 19 nt, Homo sapiens
  misc_RNA (1)...(19): siRNA sense strand
gcacaggcauaccaauauu

SEQ ID NO: 10705 - RNA, 19 nt, Homo sapiens
  misc_RNA (1)...(19): siRNA sense strand
gaaagagagucuauuuaag

SEQ ID NO: 10706 - RNA, 19 nt, Homo sapiens
  misc_RNA (1)...(19): siRNA sense strand
cauagaaucuuuacagguu

SEQ ID NO: 10707 - RNA, 19 nt, Homo sapiens
  misc_RNA (1)...(19): siRNA sense strand
uguagaagaugucaguuua

SEQ ID NO: 10708 - RNA, 19 nt, Homo sapiens
  misc_RNA (1)...(19): siRNA sense strand
gaucaugcauguaacagaa

SEQ ID NO: 10709 - RNA, 19 nt, Homo sapiens
  misc_RNA (1)...(19): siRNA sense strand
guaaggaacuagugaacuu

SEQ ID NO: 10710 - RNA, 19 nt, Homo sapiens
  misc_RNA (1)...(19): siRNA sense strand
gaaagcaacuggaagaaac

SEQ ID NO: 10711 - RNA, 19 nt, Homo sapiens
  misc_RNA (1)...(19): siRNA sense strand
caagaggacuuucaaaugg

SEQ ID NO: 10712 - RNA, 19 nt, Homo sapiens
  misc_RNA (1)...(19): siRNA sense strand
gcaaauggauguggcagaa

SEQ ID NO: 10713 - RNA, 19 nt, Homo sapiens
  misc_RNA (1)...(19): siRNA sense strand
ucagaugacuguuugguaa

SEQ ID NO: 10714 - RNA, 19 nt, Homo sapiens
  misc_RNA (1)...(19): siRNA sense strand
gaagauauguugaauucag

SEQ ID NO: 10715 - RNA, 19 nt, Homo sapiens
  misc_RNA (1)...(19): siRNA sense strand
aaaccaagauucugaguga

SEQ ID NO: 10716 - RNA, 19 nt, Homo sapiens
  misc_RNA (1)...(19): siRNA sense strand
gcuaaugagugauguagaa

SEQ ID NO: 10717 - RNA, 19 nt, Homo sapiens
  misc_RNA (1)...(19): siRNA sense strand
ggucagaaaucaagagaug

SEQ ID NO: 10718 - RNA, 19 nt, Homo sapiens
  misc_RNA (1)...(19): siRNA sense strand
gaacugaacccuaauaagg

SEQ ID NO: 10719 - RNA, 19 nt, Homo sapiens
  misc_RNA (1)...(19): siRNA sense strand
gcagucagauugcuacaga

SEQ ID NO: 10720 - RNA, 19 nt, Homo sapiens
  misc_RNA (1)...(19): siRNA sense strand
gaagaugggaaaugucaua

SEQ ID NO: 10721 - RNA, 19 nt, Homo sapiens
  misc_RNA (1)...(19): siRNA sense strand
gcgcaucgguccuauguug

SEQ ID NO: 10722 - RNA, 19 nt, Homo sapiens
  misc_RNA (1)...(19): siRNA sense strand
gcucaugagugauguagaa

SEQ ID NO: 10723 - RNA, 19 nt, Homo sapiens
  misc_RNA (1)...(19): siRNA sense strand
uaacgaaccugagagugua

SEQ ID NO: 10724 - RNA, 19 nt, Homo sapiens
  misc_RNA (1)...(19): siRNA sense strand
gaauuaggagcuaguauuu

SEQ ID NO: 10725 - RNA, 19 nt, Homo sapiens
  misc_RNA (1)...(19): siRNA sense strand
ggaauuggcagucuuguga

SEQ ID NO: 10726 - RNA, 19 nt, Homo sapiens
  misc_RNA (1)...(19): siRNA sense strand
gaagaggaaagguuuauga

SEQ ID NO: 10727 - RNA, 19 nt, Homo sapiens
  misc_RNA (1)...(19): siRNA sense strand
gacaggacauagaaucuuu

SEQ ID NO: 10728 - RNA, 19 nt, Homo sapiens
  misc_RNA (1)...(19): siRNA sense strand
ugaagauucugaaccauuu

SEQ ID NO: 10729 - RNA, 19 nt, Homo sapiens
  misc_RNA (1)...(19): siRNA sense strand
ucaagugacucuucaucua

SEQ ID NO: 10730 - RNA, 19 nt, Homo sapiens
  misc_RNA (1)...(19): siRNA sense strand
gcagaagacucaggaccua

SEQ ID NO: 10731 - RNA, 19 nt, Homo sapiens
  misc_RNA (1)...(19): siRNA sense strand
gaacacaagcacaggcaua

SEQ ID NO: 10732 - RNA, 19 nt, Homo sapiens
  misc_RNA (1)...(19): siRNA sense strand
gaagaaacaguguaaggaa

SEQ ID NO: 10733 - RNA, 19 nt, Homo sapiens
  misc_RNA (1)...(19): siRNA sense strand
ggaauacgauaugaaguug

SEQ ID NO: 10734 - RNA, 19 nt, Homo sapiens
  misc_RNA (1)...(19): siRNA sense strand
gaauuucacccuccaguuu

SEQ ID NO: 10735 - RNA, 19 nt, Homo sapiens
  misc_RNA (1)...(19): siRNA sense strand
caggaucaauuacaucuuu

SEQ ID NO: 10736 - RNA, 19 nt, Homo sapiens
  misc_RNA (1)...(19): siRNA sense strand
guacaaauaucucagaacu

SEQ ID NO: 10737 - RNA, 19 nt, Homo sapiens
  misc_RNA (1)...(19): siRNA sense strand
ugauccaccugaagaauua

SEQ ID NO: 10738 - RNA, 19 nt, Homo sapiens
  misc_RNA (1)...(19): siRNA sense strand
gaauuuaucuccuccaaaa

SEQ ID NO: 10739 - RNA, 19 nt, Homo sapiens
  misc_RNA (1)...(19): siRNA sense strand
gagcagaucaggauacuau

SEQ ID NO: 10740 - RNA, 19 nt, Homo sapiens
  misc_RNA (1)...(19): siRNA sense strand
gggacaugcugaugaagua

SEQ ID NO: 10741 - RNA, 19 nt, Homo sapiens
  misc_RNA (1)...(19): siRNA sense strand
caaaggcucucaaagauac

SEQ ID NO: 10742 - RNA, 19 nt, Homo sapiens
  misc_RNA (1)...(19): siRNA sense strand
gccaaaggcucucaaagau

SEQ ID NO: 10743 - RNA, 19 nt, Homo sapiens
  misc_RNA (1)...(19): siRNA sense strand
gaagagaucgcauccugaa

SEQ ID NO: 10744 - RNA, 19 nt, Homo sapiens
  misc_RNA (1)...(19): siRNA sense strand
ugacagcccuuuggaguuu

SEQ ID NO: 10745 - RNA, 19 nt, Homo sapiens
  misc_RNA (1)...(19): siRNA sense strand
gaaaucaagagaugaagaa

SEQ ID NO: 10746 - RNA, 19 nt, Homo sapiens
  misc_RNA (1)...(19): siRNA sense strand
ugaguuaucuucuggaaau

SEQ ID NO: 10747 - RNA, 19 nt, Homo sapiens
  misc_RNA (1)...(19): siRNA sense strand
gcaaaccaaugauaaugau

SEQ ID NO: 10748 - RNA, 19 nt, Homo sapiens
  misc_RNA (1)...(19): siRNA sense strand
gacuaucgaccacuuauua

SEQ ID NO: 10749 - RNA, 19 nt, Homo sapiens
  misc_RNA (1)...(19): siRNA sense strand
caugauggcagcauauuua

SEQ ID NO: 10750 - RNA, 19 nt, Homo sapiens
  misc_RNA (1)...(19): siRNA sense strand
gagcuguguuugacuguaa

SEQ ID NO: 10751 - RNA, 19 nt, Homo sapiens
  misc_RNA (1)...(19): siRNA sense strand
uaugaaagauucugcauca

SEQ ID NO: 10752 - RNA, 19 nt, Homo sapiens
  misc_RNA (1)...(19): siRNA sense strand
gaaugcgaguuucuuuaaa

SEQ ID NO: 10753 - RNA, 19 nt, Homo sapiens
  misc_RNA (1)...(19): siRNA sense strand
caucagagcuacgaacuau

SEQ ID NO: 10754 - RNA, 19 nt, Homo sapiens
  misc_RNA (1)...(19): siRNA sense strand
gaaugagacuuguuaaucg

SEQ ID NO: 10755 - RNA, 19 nt, Homo sapiens
  misc_RNA (1)...(19): siRNA sense strand
agagaaaggugaagaggaa

SEQ ID NO: 10756 - RNA, 19 nt, Homo sapiens
  misc_RNA (1)...(19): siRNA sense strand
gagcuuaaagucagaaauu

SEQ ID NO: 10757 - RNA, 19 nt, Homo sapiens
  misc_RNA (1)...(19): siRNA sense strand
ucucaaagauacaugguuu

SEQ ID NO: 10758 - RNA, 19 nt, Homo sapiens
  misc_RNA (1)...(19): siRNA sense strand
gagaucgcauccugaauug

SEQ ID NO: 10759 - RNA, 19 nt, Homo sapiens
  misc_RNA (1)...(19): siRNA sense strand
ggagacuggugaaauucua

SEQ ID NO: 10760 - RNA, 19 nt, Homo sapiens
  misc_RNA (1)...(19): siRNA sense strand
gacagauuccgcucuauua

SEQ ID NO: 10761 - RNA, 19 nt, Homo sapiens
  misc_RNA (1)...(19): siRNA sense strand
ggacauguaggcguaaaua

SEQ ID NO: 10762 - RNA, 19 nt, Homo sapiens
  misc_RNA (1)...(19): siRNA sense strand
ggauauggcuaccagaauc

SEQ ID NO: 10763 - RNA, 19 nt, Homo sapiens
  misc_RNA (1)...(19): siRNA sense strand
ggaaaugagucuucaagcu

SEQ ID NO: 10764 - RNA, 19 nt, Homo sapiens
  misc_RNA (1)...(19): siRNA sense strand
gaagaugaacagagcuuaa

SEQ ID NO: 10765 - RNA, 19 nt, Homo sapiens
  misc_RNA (1)...(19): siRNA sense strand
gaugaagaaugugauagaa

SEQ ID NO: 10766 - RNA, 19 nt, Homo sapiens
  misc_RNA (1)...(19): siRNA sense strand
uaacaaugauagcuuggaa

SEQ ID NO: 10767 - RNA, 19 nt, Homo sapiens
  misc_RNA (1)...(19): siRNA sense strand
gaaaggaggaaaagaaaua

SEQ ID NO: 10768 - RNA, 19 nt, Homo sapiens
  misc_RNA (1)...(19): siRNA sense strand
gaagucagauauauagaac

SEQ ID NO: 10769 - RNA, 19 nt, Homo sapiens
  misc_RNA (1)...(19): siRNA sense strand
gacaacugcuucauaacuu

SEQ ID NO: 10770 - RNA, 19 nt, Homo sapiens
  misc_RNA (1)...(19): siRNA sense strand
gaaugaucauguccucaaa

SEQ ID NO: 10771 - RNA, 19 nt, Homo sapiens
  misc_RNA (1)...(19): siRNA sense strand
ggagauacaucgaggaaaa

SEQ ID NO: 10772 - RNA, 19 nt, Homo sapiens
  misc_RNA (1)...(19): siRNA sense strand
ugaaggaaguguacauugu

SEQ ID NO: 10773 - RNA, 19 nt, Homo sapiens
  misc_RNA (1)...(19): siRNA sense strand
gaaacaguguaaggaacua

SEQ ID NO: 10774 - RNA, 19 nt, Homo sapiens
  misc_RNA (1)...(19): siRNA sense strand
cgaaagagaaagaaagaaa

SEQ ID NO: 10775 - RNA, 19 nt, Homo sapiens
  misc_RNA (1)...(19): siRNA sense strand
gaggaugaauggagaagug

SEQ ID NO: 10776 - RNA, 19 nt, Homo sapiens
  misc_RNA (1)...(19): siRNA sense strand
gaucauguccucaaagugu

SEQ ID NO: 10777 - RNA, 19 nt, Homo sapiens
  misc_RNA (1)...(19): siRNA sense strand
gcagaaauuucagauaugg

SEQ ID NO: 10778 - RNA, 19 nt, Homo sapiens
  misc_RNA (1)...(19): siRNA sense strand
gagaggugauugaacaaau

SEQ ID NO: 10779 - RNA, 19 nt, Homo sapiens
  misc_RNA (1)...(19): siRNA sense strand
cugaagauauguugaauuc

SEQ ID NO: 10780 - RNA, 19 nt, Homo sapiens
  misc_RNA (1)...(19): siRNA sense strand
gaggauuacucgaagaugu

SEQ ID NO: 10781 - RNA, 19 nt, Homo sapiens
  misc_RNA (1)...(19): siRNA sense strand
gaucauggaugugaaacug

SEQ ID NO: 10782 - RNA, 19 nt, Homo sapiens
  misc_RNA (1)...(19): siRNA sense strand
gaaauuaugacagcccuuu

SEQ ID NO: 10783 - RNA, 19 nt, Homo sapiens
  misc_RNA (1)...(19): siRNA sense strand
gggauaauacugaaauuga

SEQ ID NO: 10784 - RNA, 19 nt, Homo sapiens
  misc_RNA (1)...(19): siRNA sense strand
gaagcaagacagaggaauu

SEQ ID NO: 10785 - RNA, 19 nt, Homo sapiens
  misc_RNA (1)...(19): siRNA sense strand
ugaaugccaucacauauua

SEQ ID NO: 10786 - RNA, 19 nt, Homo sapiens
  misc_RNA (1)...(19): siRNA sense strand
ggacugagauguggacucu

SEQ ID NO: 10787 - RNA, 19 nt, Homo sapiens
  misc_RNA (1)...(19): siRNA sense strand
ccaggacuauguaaugauu

SEQ ID NO: 10788 - RNA, 19 nt, Homo sapiens
  misc_RNA (1)...(19): siRNA sense strand
caacaucaucucccaguuu

SEQ ID NO: 10789 - RNA, 19 nt, Homo sapiens
  misc_RNA (1)...(19): siRNA sense strand
gcauuaccuugacaacgua

SEQ ID NO: 10790 - RNA, 19 nt, Homo sapiens
  misc_RNA (1)...(19): siRNA sense strand
ccaucucacucacaccuua

SEQ ID NO: 10791 - RNA, 19 nt, Homo sapiens
  misc_RNA (1)...(19): siRNA sense strand
caucacauauuacaucauc

SEQ ID NO: 10792 - RNA, 19 nt, Homo sapiens
  misc_RNA (1)...(19): siRNA sense strand
gaaagcaguccuaucuuca

SEQ ID NO: 10793 - RNA, 19 nt, Homo sapiens
  misc_RNA (1)...(19): siRNA sense strand
ggccaucuguugugucuau

SEQ ID NO: 10794 - RNA, 19 nt, Homo sapiens
  misc_RNA (1)...(19): siRNA sense strand
agaaagcaguccuaucuuc

SEQ ID NO: 10795 - RNA, 19 nt, Homo sapiens
  misc_RNA (1)...(19): siRNA sense strand
gucaaugucugcggaguuu

SEQ ID NO: 10796 - RNA, 19 nt, Homo sapiens
  misc_RNA (1)...(19): siRNA sense strand
ccacugggcauccuucuga

SEQ ID NO: 10797 - RNA, 19 nt, Homo sapiens
  misc_RNA (1)...(19): siRNA sense strand
ugagaaagcaguccuaucu

SEQ ID NO: 10798 - RNA, 19 nt, Homo sapiens
  misc_RNA (1)...(19): siRNA sense strand
ggcauuaccuugacaacgu

SEQ ID NO: 10799 - RNA, 19 nt, Homo sapiens
  misc_RNA (1)...(19): siRNA sense strand
ucaacgguguggccaacua

SEQ ID NO: 10800 - RNA, 19 nt, Homo sapiens
  misc_RNA (1)...(19): siRNA sense strand
ggccaacuaugcccugguu

SEQ ID NO: 10801 - RNA, 19 nt, Homo sapiens
  misc_RNA (1)...(19): siRNA sense strand
cagaggaggcuaagaaaca

SEQ ID NO: 10802 - RNA, 19 nt, Homo sapiens
  misc_RNA (1)...(19): siRNA sense strand
gcugggcgcucuuccucaa

SEQ ID NO: 10803 - RNA, 19 nt, Homo sapiens
  misc_RNA (1)...(19): siRNA sense strand
gggcauccuucugaccuuu

SEQ ID NO: 10804 - RNA, 19 nt, Homo sapiens
  misc_RNA (1)...(19): siRNA sense strand
acaaucugcuggcaaaaua

SEQ ID NO: 10805 - RNA, 19 nt, Homo sapiens
  misc_RNA (1)...(19): siRNA sense strand
gaggccaucuguugugucu

SEQ ID NO: 10806 - RNA, 19 nt, Homo sapiens
  misc_RNA (1)...(19): siRNA sense strand
uuuacaaucugcuggcaaa

SEQ ID NO: 10807 - RNA, 19 nt, Homo sapiens
  misc_RNA (1)...(19): siRNA sense strand
gccaucacauauuacauca

SEQ ID NO: 10808 - RNA, 19 nt, Homo sapiens
  misc_RNA (1)...(19): siRNA sense strand
cagcauaguuggcauuucc

SEQ ID NO: 10809 - RNA, 19 nt, Homo sapiens
  misc_RNA (1)...(19): siRNA sense strand
cggaguuucuguaggaguu

SEQ ID NO: 10810 - RNA, 19 nt, Homo sapiens
  misc_RNA (1)...(19): siRNA sense strand
cagcagacuaucagugaaa

SEQ ID NO: 10811 - RNA, 19 nt, Homo sapiens
  misc_RNA (1)...(19): siRNA sense strand
gagaaagcaguccuaucuu

SEQ ID NO: 10812 - RNA, 19 nt, Homo sapiens
  misc_RNA (1)...(19): siRNA sense strand
aacaucaucucccaguuug

SEQ ID NO: 10813 - RNA, 19 nt, Homo sapiens
  misc_RNA (1)...(19): siRNA sense strand
gacccaggacuauguaaug

SEQ ID NO: 10814 - RNA, 19 nt, Homo sapiens
  misc_RNA (1)...(19): siRNA sense strand
gcgguggccuuugucaaug

SEQ ID NO: 10815 - RNA, 19 nt, Homo sapiens
  misc_RNA (1)...(19): siRNA sense strand
gcuccuaccagcagacuau

SEQ ID NO: 10816 - RNA, 19 nt, Homo sapiens
  misc_RNA (1)...(19): siRNA sense strand
cugcugccuuuguugcuua

SEQ ID NO: 10817 - RNA, 19 nt, Homo sapiens
  misc_RNA (1)...(19): siRNA sense strand
gaucgggagcuuccucaug

SEQ ID NO: 10818 - RNA, 19 nt, Homo sapiens
  misc_RNA (1)...(19): siRNA sense strand
cugcggaguuucuguagga

SEQ ID NO: 10819 - RNA, 19 nt, Homo sapiens
  misc_RNA (1)...(19): siRNA sense strand
ccagaggcuuugggacuga

SEQ ID NO: 10820 - RNA, 19 nt, Homo sapiens
  misc_RNA (1)...(19): siRNA sense strand
agccaggucuugccgguuu

SEQ ID NO: 10821 - RNA, 19 nt, Homo sapiens
  misc_RNA (1)...(19): siRNA sense strand
ccaacaucaucucccaguu

SEQ ID NO: 10822 - RNA, 19 nt, Homo sapiens
  misc_RNA (1)...(19): siRNA sense strand
gcaugugacaccuugaugu

SEQ ID NO: 10823 - RNA, 19 nt, Homo sapiens
  misc_RNA (1)...(19): siRNA sense strand
ccagcagacuaucagugaa

SEQ ID NO: 10824 - RNA, 19 nt, Homo sapiens
  misc_RNA (1)...(19): siRNA sense strand
caacguauucaaggucuga

SEQ ID NO: 10825 - RNA, 19 nt, Homo sapiens
  misc_RNA (1)...(19): siRNA sense strand
gccaggucuugccgguuua

SEQ ID NO: 10826 - RNA, 19 nt, Homo sapiens
  misc_RNA (1)...(19): siRNA sense strand
aaaaucagcuggggcauau

SEQ ID NO: 10827 - RNA, 19 nt, Homo sapiens
  misc_RNA (1)...(19): siRNA sense strand
ccuaugagaucgggagcuu

SEQ ID NO: 10828 - RNA, 19 nt, Homo sapiens
  misc_RNA (1)...(19): siRNA sense strand
acuaugcccugguuucugu

SEQ ID NO: 10829 - RNA, 19 nt, Homo sapiens
  misc_RNA (1)...(19): siRNA sense strand
uguaggaguugguuugucu

SEQ ID NO: 10830 - RNA, 19 nt, Homo sapiens
  misc_RNA (1)...(19): siRNA sense strand
guccugggcacccugauaa

SEQ ID NO: 10831 - RNA, 19 nt, Homo sapiens
  misc_RNA (1)...(19): siRNA sense strand
ucuacgagguggccacugu

SEQ ID NO: 10832 - RNA, 19 nt, Homo sapiens
  misc_RNA (1)...(19): siRNA sense strand
uagugucuuucacguguuu

SEQ ID NO: 10833 - RNA, 19 nt, Homo sapiens
  misc_RNA (1)...(19): siRNA sense strand
gguccugggcacccugaua

SEQ ID NO: 10834 - RNA, 19 nt, Homo sapiens
  misc_RNA (1)...(19): siRNA sense strand
acugugaccuacaugauuc

SEQ ID NO: 10835 - RNA, 19 nt, Homo sapiens
  misc_RNA (1)...(19): siRNA sense strand
cugcagaggaggcuaagaa

SEQ ID NO: 10836 - RNA, 19 nt, Homo sapiens
  misc_RNA (1)...(19): siRNA sense strand
ggacucucuuugcccuuuc

SEQ ID NO: 10837 - RNA, 19 nt, Homo sapiens
  misc_RNA (1)...(19): siRNA sense strand
ccugauaagcauccugaaa

SEQ ID NO: 10838 - RNA, 19 nt, Homo sapiens
  misc_RNA (1)...(19): siRNA sense strand
gccgguuuauagugucuuu

SEQ ID NO: 10839 - RNA, 19 nt, Homo sapiens
  misc_RNA (1)...(19): siRNA sense strand
ggccaguuuucauuuauuu

SEQ ID NO: 10840 - RNA, 19 nt, Homo sapiens
  misc_RNA (1)...(19): siRNA sense strand
gcauccuucugaccuuugu

SEQ ID NO: 10841 - RNA, 19 nt, Homo sapiens
  misc_RNA (1)...(19): siRNA sense strand
acccaggacuauguaauga

SEQ ID NO: 10842 - RNA, 19 nt, Homo sapiens
  misc_RNA (1)...(19): siRNA sense strand
ccaacuaugcccugguuuc

SEQ ID NO: 10843 - RNA, 19 nt, Homo sapiens
  misc_RNA (1)...(19): siRNA sense strand
caacuaugcccugguuucu

SEQ ID NO: 10844 - RNA, 19 nt, Homo sapiens
  misc_RNA (1)...(19): siRNA sense strand
gaccugggccugagaaagc

SEQ ID NO: 10845 - RNA, 19 nt, Homo sapiens
  misc_RNA (1)...(19): siRNA sense strand
ggucuugccgguuuauagu

SEQ ID NO: 10846 - RNA, 19 nt, Homo sapiens
  misc_RNA (1)...(19): siRNA sense strand
uaccaaugaugaagauguc

SEQ ID NO: 10847 - RNA, 19 nt, Homo sapiens
  misc_RNA (1)...(19): siRNA sense strand
uguuccaggugcugacuuu

SEQ ID NO: 10848 - RNA, 19 nt, Homo sapiens
  misc_RNA (1)...(19): siRNA sense strand
uggacucucuuugcccuuu

SEQ ID NO: 10849 - RNA, 19 nt, Homo sapiens
  misc_RNA (1)...(19): siRNA sense strand
caacgguguggccaacuau

SEQ ID NO: 10850 - RNA, 19 nt, Homo sapiens
  misc_RNA (1)...(19): siRNA sense strand
ccagguugacccaggacua

SEQ ID NO: 10851 - RNA, 19 nt, Homo sapiens
  misc_RNA (1)...(19): siRNA sense strand
gcagaggaggcuaagaaac

SEQ ID NO: 10852 - RNA, 19 nt, Homo sapiens
  misc_RNA (1)...(19): siRNA sense strand
gcucagcauaguuggcauu

SEQ ID NO: 10853 - RNA, 19 nt, Homo sapiens
  misc_RNA (1)...(19): siRNA sense strand
cagggccaguuuucauuua

SEQ ID NO: 10854 - RNA, 19 nt, Homo sapiens
  misc_RNA (1)...(19): siRNA sense strand
gcacauccugcugcucuuc

SEQ ID NO: 10855 - RNA, 19 nt, Homo sapiens
  misc_RNA (1)...(19): siRNA sense strand
aagcaguccuaucuucagu

SEQ ID NO: 10856 - RNA, 19 nt, Homo sapiens
  misc_RNA (1)...(19): siRNA sense strand
gaggaggcuaagaaacauu

SEQ ID NO: 10857 - RNA, 19 nt, Homo sapiens
  misc_RNA (1)...(19): siRNA sense strand
agaggaggcuaagaaacau

SEQ ID NO: 10858 - RNA, 19 nt, Homo sapiens
  misc_RNA (1)...(19): siRNA sense strand
caugcuggccugugucuuc

SEQ ID NO: 10859 - RNA, 19 nt, Homo sapiens
  misc_RNA (1)...(19): siRNA sense strand
guggucagaaugagaauca

SEQ ID NO: 10860 - RNA, 19 nt, Homo sapiens
  misc_RNA (1)...(19): siRNA sense strand
ccacugugaccuacaugau

SEQ ID NO: 10861 - RNA, 19 nt, Homo sapiens
  misc_RNA (1)...(19): siRNA sense strand
ucuacauugugcugaagaa

SEQ ID NO: 10862 - RNA, 19 nt, Homo sapiens
  misc_RNA (1)...(19): siRNA sense strand
guggugggccuaugagauc

SEQ ID NO: 10863 - RNA, 19 nt, Homo sapiens
  misc_RNA (1)...(19): siRNA sense strand
uguuugaggccaucuguug

SEQ ID NO: 10864 - RNA, 19 nt, Homo sapiens
  misc_RNA (1)...(19): siRNA sense strand
ggacagccuccaggacaca

SEQ ID NO: 10865 - RNA, 19 nt, Homo sapiens
  misc_RNA (1)...(19): siRNA sense strand
ggagagauguggaauaaca

SEQ ID NO: 10866 - RNA, 19 nt, Homo sapiens
  misc_RNA (1)...(19): siRNA sense strand
ggaggaagaugaagaagau

SEQ ID NO: 10867 - RNA, 19 nt, Homo sapiens
  misc_RNA (1)...(19): siRNA sense strand
ggacaaggcccauuacgaa

SEQ ID NO: 10868 - RNA, 19 nt, Homo sapiens
  misc_RNA (1)...(19): siRNA sense strand
ugaagaagaugaagaugaa

SEQ ID NO: 10869 - RNA, 19 nt, Homo sapiens
  misc_RNA (1)...(19): siRNA sense strand
ggaggaagaugaggaagau

SEQ ID NO: 10870 - RNA, 19 nt, Homo sapiens
  misc_RNA (1)...(19): siRNA sense strand
gaccaugucugcuaaagag

SEQ ID NO: 10871 - RNA, 19 nt, Homo sapiens
  misc_RNA (1)...(19): siRNA sense strand
ugggagagauguggaauaa

SEQ ID NO: 10872 - RNA, 19 nt, Homo sapiens
  misc_RNA (1)...(19): siRNA sense strand
ucuaagaagugcucagaga

SEQ ID NO: 10873 - RNA, 19 nt, Homo sapiens
  misc_RNA (1)...(19): siRNA sense strand
ugaggaagaugaagaggau

SEQ ID NO: 10874 - RNA, 19 nt, Homo sapiens
  misc_RNA (1)...(19): siRNA sense strand
gaagaaacugggagagaug

SEQ ID NO: 10875 - RNA, 19 nt, Homo sapiens
  misc_RNA (1)...(19): siRNA sense strand
cgaagaaacugggagagau

SEQ ID NO: 10876 - RNA, 19 nt, Homo sapiens
  misc_RNA (1)...(19): siRNA sense strand
caaggcccauuacgaaaga

SEQ ID NO: 10877 - RNA, 19 nt, Homo sapiens
  misc_RNA (1)...(19): siRNA sense strand
aaaaggauauugcugcaua

SEQ ID NO: 10878 - RNA, 19 nt, Homo sapiens
  misc_RNA (1)...(19): siRNA sense strand
ggaggaggaagaugaagaa

SEQ ID NO: 10879 - RNA, 19 nt, Homo sapiens
  misc_RNA (1)...(19): siRNA sense strand
gacaagcagccuuaugaaa

SEQ ID NO: 10880 - RNA, 19 nt, Homo sapiens
  misc_RNA (1)...(19): siRNA sense strand
gggaggcgcauaagaagaa

SEQ ID NO: 10881 - RNA, 19 nt, Homo sapiens
  misc_RNA (1)...(19): siRNA sense strand
agaugaagaugaagaagau

SEQ ID NO: 10882 - RNA, 19 nt, Homo sapiens
  misc_RNA (1)...(19): siRNA sense strand
gcauaucgagcuaaaggaa

SEQ ID NO: 10883 - RNA, 19 nt, Homo sapiens
  misc_RNA (1)...(19): siRNA sense strand
cagaugacaagcagccuua

SEQ ID NO: 10884 - RNA, 19 nt, Homo sapiens
  misc_RNA (1)...(19): siRNA sense strand
ggaagaugaagaagaugaa

SEQ ID NO: 10885 - RNA, 19 nt, Homo sapiens
  misc_RNA (1)...(19): siRNA sense strand
gaaggaagaggaggaagau

SEQ ID NO: 10886 - RNA, 19 nt, Homo sapiens
  misc_RNA (1)...(19): siRNA sense strand
ggaagaugaggaagaugaa

SEQ ID NO: 10887 - RNA, 19 nt, Homo sapiens
  misc_RNA (1)...(19): siRNA sense strand
gacaaggcccauuacgaaa

SEQ ID NO: 10888 - RNA, 19 nt, Homo sapiens
  misc_RNA (1)...(19): siRNA sense strand
gaaagccugaugcagcaaa

SEQ ID NO: 10889 - RNA, 19 nt, Homo sapiens
  misc_RNA (1)...(19): siRNA sense strand
caugucugcuaaagagaaa

SEQ ID NO: 10890 - RNA, 19 nt, Homo sapiens
  misc_RNA (1)...(19): siRNA sense strand
cauccuggccuguccauug

SEQ ID NO: 10891 - RNA, 19 nt, Homo sapiens
  misc_RNA (1)...(19): siRNA sense strand
gaaguucaaggauccgaau

SEQ ID NO: 10892 - RNA, 19 nt, Homo sapiens
  misc_RNA (1)...(19): siRNA sense strand
gcgaagaaacugggagaga

SEQ ID NO: 10893 - RNA, 19 nt, Homo sapiens
  misc_RNA (1)...(19): siRNA sense strand
cugcgaagcugaaggaaaa

SEQ ID NO: 10894 - RNA, 19 nt, Homo sapiens
  misc_RNA (1)...(19): siRNA sense strand
gaagaugaagaagaugaug

SEQ ID NO: 10895 - RNA, 19 nt, Homo sapiens
  misc_RNA (1)...(19): siRNA sense strand
ugacaagcagccuuaugaa

SEQ ID NO: 10896 - RNA, 19 nt, Homo sapiens
  misc_RNA (1)...(19): siRNA sense strand
ggaagaggaggaagaugag

SEQ ID NO: 10897 - RNA, 19 nt, Homo sapiens
  misc_RNA (1)...(19): siRNA sense strand
uuggugauguugcgaagaa

SEQ ID NO: 10898 - RNA, 19 nt, Homo sapiens
  misc_RNA (1)...(19): siRNA sense strand
aggaagaggaggaagauga

SEQ ID NO: 10899 - RNA, 19 nt, Homo sapiens
  misc_RNA (1)...(19): siRNA sense strand
gcuaaaggaaagccugaug

SEQ ID NO: 10900 - RNA, 19 nt, Homo sapiens
  misc_RNA (1)...(19): siRNA sense strand
gaugacaagcagccuuaug

SEQ ID NO: 10901 - RNA, 19 nt, Homo sapiens
  misc_RNA (1)...(19): siRNA sense strand
guucaaggauccgaaugca

SEQ ID NO: 10902 - RNA, 19 nt, Homo sapiens
  misc_RNA (1)...(19): siRNA sense strand
ggaguugucaaggcugaaa

SEQ ID NO: 10903 - RNA, 19 nt, Homo sapiens
  misc_RNA (1)...(19): siRNA sense strand
uaaaggaaagccugaugca

SEQ ID NO: 10904 - RNA, 19 nt, Homo sapiens
  misc_RNA (1)...(19): siRNA sense strand
agaagaugaagaugaagaa

SEQ ID NO: 10905 - RNA, 19 nt, Homo sapiens
  misc_RNA (1)...(19): siRNA sense strand
acaagcagccuuaugaaaa

SEQ ID NO: 10906 - RNA, 19 nt, Homo sapiens
  misc_RNA (1)...(19): siRNA sense strand
caagcagccuuaugaaaag

SEQ ID NO: 10907 - RNA, 19 nt, Homo sapiens
  misc_RNA (1)...(19): siRNA sense strand
aggaagaugaggaagauga

SEQ ID NO: 10908 - RNA, 19 nt, Homo sapiens
  misc_RNA (1)...(19): siRNA sense strand
agaaggaagaggaggaaga

SEQ ID NO: 10909 - RNA, 19 nt, Homo sapiens
  misc_RNA (1)...(19): siRNA sense strand
aggcggacaaggcccauua

SEQ ID NO: 10910 - RNA, 19 nt, Homo sapiens
  misc_RNA (1)...(19): siRNA sense strand
agaugaagaagaugaugaa

SEQ ID NO: 10911 - RNA, 19 nt, Homo sapiens
  misc_RNA (1)...(19): siRNA sense strand
aagaugaagaugaagaaga

SEQ ID NO: 10912 - RNA, 19 nt, Homo sapiens
  misc_RNA (1)...(19): siRNA sense strand
gucgggaggcgcauaagaa

SEQ ID NO: 10913 - RNA, 19 nt, Homo sapiens
  misc_RNA (1)...(19): siRNA sense strand
gcugcgaagcugaaggaaa

SEQ ID NO: 10914 - RNA, 19 nt, Homo sapiens
  misc_RNA (1)...(19): siRNA sense strand
gaagaugaagaugaagaag

SEQ ID NO: 10915 - RNA, 19 nt, Homo sapiens
  misc_RNA (1)...(19): siRNA sense strand
gaagaugaagaagaugaag

SEQ ID NO: 10916 - RNA, 19 nt, Homo sapiens
  misc_RNA (1)...(19): siRNA sense strand
cauaucgagcuaaaggaaa

SEQ ID NO: 10917 - RNA, 19 nt, Homo sapiens
  misc_RNA (1)...(19): siRNA sense strand
uaagaagaagcacccagau

SEQ ID NO: 10918 - RNA, 19 nt, Homo sapiens
  misc_RNA (1)...(19): siRNA sense strand
aagaagaugaagaugaaga

SEQ ID NO: 10919 - RNA, 19 nt, Homo sapiens
  misc_RNA (1)...(19): siRNA sense strand
ugaggaggaggaagaugaa

SEQ ID NO: 10920 - RNA, 19 nt, Homo sapiens
  misc_RNA (1)...(19): siRNA sense strand
ccaugucugcuaaagagaa

SEQ ID NO: 10921 - RNA, 19 nt, Homo sapiens
  misc_RNA (1)...(19): siRNA sense strand
augacaagcagccuuauga

SEQ ID NO: 10922 - RNA, 19 nt, Homo sapiens
  misc_RNA (1)...(19): siRNA sense strand
gauccgaaugcacccaaga

SEQ ID NO: 10923 - RNA, 19 nt, Homo sapiens
  misc_RNA (1)...(19): siRNA sense strand
gcccauuacgaaagagaaa

SEQ ID NO: 10924 - RNA, 19 nt, Homo sapiens
  misc_RNA (1)...(19): siRNA sense strand
aaagaaggaagaggaggaa

SEQ ID NO: 10925 - RNA, 19 nt, Homo sapiens
  misc_RNA (1)...(19): siRNA sense strand
aagaugaagaagaugauga

SEQ ID NO: 10926 - RNA, 19 nt, Homo sapiens
  misc_RNA (1)...(19): siRNA sense strand
aagaagaagcacccagaug

SEQ ID NO: 10927 - RNA, 19 nt, Homo sapiens
  misc_RNA (1)...(19): siRNA sense strand
gaaaugaaaaccuauaucc

SEQ ID NO: 10928 - RNA, 19 nt, Homo sapiens
  misc_RNA (1)...(19): siRNA sense strand
augaagaagaugaagauga

SEQ ID NO: 10929 - RNA, 19 nt, Homo sapiens
  misc_RNA (1)...(19): siRNA sense strand
agaugaagaagaugaagau

SEQ ID NO: 10930 - RNA, 19 nt, Homo sapiens
  misc_RNA (1)...(19): siRNA sense strand
aagaugaggaagaugaaga

SEQ ID NO: 10931 - RNA, 19 nt, Homo sapiens
  misc_RNA (1)...(19): siRNA sense strand
gaagaugaggaagaugaag

SEQ ID NO: 10932 - RNA, 19 nt, Homo sapiens
  misc_RNA (1)...(19): siRNA sense strand
auaucgagcuaaaggaaag

SEQ ID NO: 10933 - RNA, 19 nt, Homo sapiens
  misc_RNA (1)...(19): siRNA sense strand
ggagagaaaugaagugaua

SEQ ID NO: 10934 - RNA, 19 nt, Homo sapiens
  misc_RNA (1)...(19): siRNA sense strand
gaaaugaagugauagaaug

SEQ ID NO: 10935 - RNA, 19 nt, Homo sapiens
  misc_RNA (1)...(19): siRNA sense strand
gaacagcacuggaugauac

SEQ ID NO: 10936 - RNA, 19 nt, Homo sapiens
  misc_RNA (1)...(19): siRNA sense strand
aauacaggcugcauaauua

SEQ ID NO: 10937 - RNA, 19 nt, Homo sapiens
  misc_RNA (1)...(19): siRNA sense strand
gcugaacucuggcuugaaa

SEQ ID NO: 10938 - RNA, 19 nt, Homo sapiens
  misc_RNA (1)...(19): siRNA sense strand
ggaccuggcaugaucuuua

SEQ ID NO: 10939 - RNA, 19 nt, Homo sapiens
  misc_RNA (1)...(19): siRNA sense strand
gaagaugcguucgccguuu

SEQ ID NO: 10940 - RNA, 19 nt, Homo sapiens
  misc_RNA (1)...(19): siRNA sense strand
gaaauccucccacugauga

SEQ ID NO: 10941 - RNA, 19 nt, Homo sapiens
  misc_RNA (1)...(19): siRNA sense strand
gauauggcaucaccuguau

SEQ ID NO: 10942 - RNA, 19 nt, Homo sapiens
  misc_RNA (1)...(19): siRNA sense strand
cagcaagccuuucuucaga

SEQ ID NO: 10943 - RNA, 19 nt, Homo sapiens
  misc_RNA (1)...(19): siRNA sense strand
gaaaguacacauucucguu

SEQ ID NO: 10944 - RNA, 19 nt, Homo sapiens
  misc_RNA (1)...(19): siRNA sense strand
caauacaggcugcauaauu

SEQ ID NO: 10945 - RNA, 19 nt, Homo sapiens
  misc_RNA (1)...(19): siRNA sense strand
gauguugacuugaucuuca

SEQ ID NO: 10946 - RNA, 19 nt, Homo sapiens
  misc_RNA (1)...(19): siRNA sense strand
ucaaggaaauucaguaugg

SEQ ID NO: 10947 - RNA, 19 nt, Homo sapiens
  misc_RNA (1)...(19): siRNA sense strand
cgacagagccucaguagca

SEQ ID NO: 10948 - RNA, 19 nt, Homo sapiens
  misc_RNA (1)...(19): siRNA sense strand
gaggacggcucauugacuu

SEQ ID NO: 10949 - RNA, 19 nt, Homo sapiens
  misc_RNA (1)...(19): siRNA sense strand
ggaggauggugccacauau

SEQ ID NO: 10950 - RNA, 19 nt, Homo sapiens
  misc_RNA (1)...(19): siRNA sense strand
gauccaaggcaaauacuuu

SEQ ID NO: 10951 - RNA, 19 nt, Homo sapiens
  misc_RNA (1)...(19): siRNA sense strand
caaagcagaauguaaaguu

SEQ ID NO: 10952 - RNA, 19 nt, Homo sapiens
  misc_RNA (1)...(19): siRNA sense strand
guacacgacucaugaggau

SEQ ID NO: 10953 - RNA, 19 nt, Homo sapiens
  misc_RNA (1)...(19): siRNA sense strand
gggaggaccuggcaugauc

SEQ ID NO: 10954 - RNA, 19 nt, Homo sapiens
  misc_RNA (1)...(19): siRNA sense strand
gaaaugggagggcacaaug

SEQ ID NO: 10955 - RNA, 19 nt, Homo sapiens
  misc_RNA (1)...(19): siRNA sense strand
acacagaagugagcaaaga

SEQ ID NO: 10956 - RNA, 19 nt, Homo sapiens
  misc_RNA (1)...(19): siRNA sense strand
ggauauggcaucaccugua

SEQ ID NO: 10957 - RNA, 19 nt, Homo sapiens
  misc_RNA (1)...(19): siRNA sense strand
gcaagcauauugagcugau

SEQ ID NO: 10958 - RNA, 19 nt, Homo sapiens
  misc_RNA (1)...(19): siRNA sense strand
uccaagaccuucacaauag

SEQ ID NO: 10959 - RNA, 19 nt, Homo sapiens
  misc_RNA (1)...(19): siRNA sense strand
gcaaauacuuucgccucaa

SEQ ID NO: 10960 - RNA, 19 nt, Homo sapiens
  misc_RNA (1)...(19): siRNA sense strand
gcagaggacggcucauuga

SEQ ID NO: 10961 - RNA, 19 nt, Homo sapiens
  misc_RNA (1)...(19): siRNA sense strand
caaaauccaugcagccaua

SEQ ID NO: 10962 - RNA, 19 nt, Homo sapiens
  misc_RNA (1)...(19): siRNA sense strand
ggagugauaccuucuuuca

SEQ ID NO: 10963 - RNA, 19 nt, Homo sapiens
  misc_RNA (1)...(19): siRNA sense strand
cagggaagcuucuauacuc

SEQ ID NO: 10964 - RNA, 19 nt, Homo sapiens
  misc_RNA (1)...(19): siRNA sense strand
gaaauguacacgacucaug

SEQ ID NO: 10965 - RNA, 19 nt, Homo sapiens
  misc_RNA (1)...(19): siRNA sense strand
ccgaagagcuagaugucaa

SEQ ID NO: 10966 - RNA, 19 nt, Homo sapiens
  misc_RNA (1)...(19): siRNA sense strand
gcaagccuuucuucagaga

SEQ ID NO: 10967 - RNA, 19 nt, Homo sapiens
  misc_RNA (1)...(19): siRNA sense strand
ggugaaugccuuagagaaa

SEQ ID NO: 10968 - RNA, 19 nt, Homo sapiens
  misc_RNA (1)...(19): siRNA sense strand
ugacagggaagcuucuaua

SEQ ID NO: 10969 - RNA, 19 nt, Homo sapiens
  misc_RNA (1)...(19): siRNA sense strand
ccagaggucuuggucuuga

SEQ ID NO: 10970 - RNA, 19 nt, Homo sapiens
  misc_RNA (1)...(19): siRNA sense strand
caaugacacuuugcugcua

SEQ ID NO: 10971 - RNA, 19 nt, Homo sapiens
  misc_RNA (1)...(19): siRNA sense strand
gaaguaggaguggugcaua

SEQ ID NO: 10972 - RNA, 19 nt, Homo sapiens
  misc_RNA (1)...(19): siRNA sense strand
gugaaugccuuagagaaau

SEQ ID NO: 10973 - RNA, 19 nt, Homo sapiens
  misc_RNA (1)...(19): siRNA sense strand
guacuaucccaucaucuuu

SEQ ID NO: 10974 - RNA, 19 nt, Homo sapiens
  misc_RNA (1)...(19): siRNA sense strand
gacaacagguguacuaucc

SEQ ID NO: 10975 - RNA, 19 nt, Homo sapiens
  misc_RNA (1)...(19): siRNA sense strand
guagagacaauacaauuca

SEQ ID NO: 10976 - RNA, 19 nt, Homo sapiens
  misc_RNA (1)...(19): siRNA sense strand
aaagcagaauguaaaguug

SEQ ID NO: 10977 - RNA, 19 nt, Homo sapiens
  misc_RNA (1)...(19): siRNA sense strand
gaaaagaaaguacacauuc

SEQ ID NO: 10978 - RNA, 19 nt, Homo sapiens
  misc_RNA (1)...(19): siRNA sense strand
aaagugcccugaugagcaa

SEQ ID NO: 10979 - RNA, 19 nt, Homo sapiens
  misc_RNA (1)...(19): siRNA sense strand
ggaaauccucccacugaug

SEQ ID NO: 10980 - RNA, 19 nt, Homo sapiens
  misc_RNA (1)...(19): siRNA sense strand
caaaaggccugcauaccaa

SEQ ID NO: 10981 - RNA, 19 nt, Homo sapiens
  misc_RNA (1)...(19): siRNA sense strand
gaccuggcaugaucuuuag

SEQ ID NO: 10982 - RNA, 19 nt, Homo sapiens
  misc_RNA (1)...(19): siRNA sense strand
guaggaguggugcauauuu

SEQ ID NO: 10983 - RNA, 19 nt, Homo sapiens
  misc_RNA (1)...(19): siRNA sense strand
ucaugaggauguggaagua

SEQ ID NO: 10984 - RNA, 19 nt, Homo sapiens
  misc_RNA (1)...(19): siRNA sense strand
uggagaguauuaacaguga

SEQ ID NO: 10985 - RNA, 19 nt, Homo sapiens
  misc_RNA (1)...(19): siRNA sense strand
ggugucagguacaaucgaa

SEQ ID NO: 10986 - RNA, 19 nt, Homo sapiens
  misc_RNA (1)...(19): siRNA sense strand
ccaacgauguagagacaau

SEQ ID NO: 10987 - RNA, 19 nt, Homo sapiens
  misc_RNA (1)...(19): siRNA sense strand
acucagucauucuccuuua

SEQ ID NO: 10988 - RNA, 19 nt, Homo sapiens
  misc_RNA (1)...(19): siRNA sense strand
caucaucuuuagccaguau

SEQ ID NO: 10989 - RNA, 19 nt, Homo sapiens
  misc_RNA (1)...(19): siRNA sense strand
gaaaacaugugucuuaucc

SEQ ID NO: 10990 - RNA, 19 nt, Homo sapiens
  misc_RNA (1)...(19): siRNA sense strand
acaugugucuuaucccaaa

SEQ ID NO: 10991 - RNA, 19 nt, Homo sapiens
  misc_RNA (1)...(19): siRNA sense strand
ugucuggucuuacgagaug

SEQ ID NO: 10992 - RNA, 19 nt, Homo sapiens
  misc_RNA (1)...(19): siRNA sense strand
ugagauucauggagaacuu

SEQ ID NO: 10993 - RNA, 19 nt, Homo sapiens
  misc_RNA (1)...(19): siRNA sense strand
ugaaugccuuagagaaaug

SEQ ID NO: 10994 - RNA, 19 nt, Homo sapiens
  misc_RNA (1)...(19): siRNA sense strand
ggaguacauuuuggauuua

SEQ ID NO: 10995 - RNA, 19 nt, Homo sapiens
  misc_RNA (1)...(19): siRNA sense strand
ucauugugauccuaacuug

SEQ ID NO: 10996 - RNA, 19 nt, Homo sapiens
  misc_RNA (1)...(19): siRNA sense strand
caaauacuuucgccucaac

SEQ ID NO: 10997 - RNA, 19 nt, Homo sapiens
  misc_RNA (1)...(19): siRNA sense strand
caagcucaguaacacagaa

SEQ ID NO: 10998 - RNA, 19 nt, Homo sapiens
  misc_RNA (1)...(19): siRNA sense strand
gagaguauuaacagugaaa

SEQ ID NO: 10999 - RNA, 19 nt, Homo sapiens
  misc_RNA (1)...(19): siRNA sense strand
ggagaguauuaacagugaa

SEQ ID NO: 11000 - RNA, 19 nt, Homo sapiens
  misc_RNA (1)...(19): siRNA sense strand
gagaaaugaagugauagaa

SEQ ID NO: 11001 - RNA, 19 nt, Homo sapiens
  misc_RNA (1)...(19): siRNA sense strand
uaacacagaagugagcaaa

SEQ ID NO: 11002 - RNA, 19 nt, Homo sapiens
  misc_RNA (1)...(19): siRNA sense strand
gaggauggugccacauauu

SEQ ID NO: 11003 - RNA, 19 nt, Homo sapiens
  misc_RNA (1)...(19): siRNA sense strand
ccuaagcaguauaagaugu

SEQ ID NO: 11004 - RNA, 19 nt, Homo sapiens
  misc_RNA (1)...(19): siRNA sense strand
uauggcaucaccuguauuu

SEQ ID NO: 11005 - RNA, 19 nt, Homo sapiens
  misc_RNA (1)...(19): siRNA sense strand
caguaugacccaaagguaa

SEQ ID NO: 11006 - RNA, 19 nt, Homo sapiens
  misc_RNA (1)...(19): siRNA sense strand
cagagagaccgaagagcua

SEQ ID NO: 11007 - RNA, 19 nt, Homo sapiens
  misc_RNA (1)...(19): siRNA sense strand
gaucuuuagccgagaaguu

SEQ ID NO: 11008 - RNA, 19 nt, Homo sapiens
  misc_RNA (1)...(19): siRNA sense strand
uaagaacagcacuggauga

SEQ ID NO: 11009 - RNA, 19 nt, Homo sapiens
  misc_RNA (1)...(19): siRNA sense strand
acagugaaacucagucauu

SEQ ID NO: 11010 - RNA, 19 nt, Homo sapiens
  misc_RNA (1)...(19): siRNA sense strand
gguguacuaucccaucauc

SEQ ID NO: 11011 - RNA, 19 nt, Homo sapiens
  misc_RNA (1)...(19): siRNA sense strand
ggacaacagguguacuauc

SEQ ID NO: 11012 - RNA, 19 nt, Homo sapiens
  misc_RNA (1)...(19): siRNA sense strand
aaauguacacgacucauga

SEQ ID NO: 11013 - RNA, 19 nt, Homo sapiens
  misc_RNA (1)...(19): siRNA sense strand
aaggguaccagaacaagua

SEQ ID NO: 11014 - RNA, 19 nt, Homo sapiens
  misc_RNA (1)...(19): siRNA sense strand
ggagaacuuugaaaacaug

SEQ ID NO: 11015 - RNA, 19 nt, Homo sapiens
  misc_RNA (1)...(19): siRNA sense strand
caucggaagguaugacauu

SEQ ID NO: 11016 - RNA, 19 nt, Homo sapiens
  misc_RNA (1)...(19): siRNA sense strand
ucagucauucuccuuuaua

SEQ ID NO: 11017 - RNA, 19 nt, Homo sapiens
  misc_RNA (1)...(19): siRNA sense strand
cagugaaacucagucauuc

SEQ ID NO: 11018 - RNA, 19 nt, Homo sapiens
  misc_RNA (1)...(19): siRNA sense strand
gagccucaguagcauuuua

SEQ ID NO: 11019 - RNA, 19 nt, Homo sapiens
  misc_RNA (1)...(19): siRNA sense strand
ccaguaugacccaaaggua

SEQ ID NO: 11020 - RNA, 19 nt, Homo sapiens
  misc_RNA (1)...(19): siRNA sense strand
aaaugacccugaucccaau

SEQ ID NO: 11021 - RNA, 19 nt, Homo sapiens
  misc_RNA (1)...(19): siRNA sense strand
aagcagaaaugacccugau

SEQ ID NO: 11022 - RNA, 19 nt, Homo sapiens
  misc_RNA (1)...(19): siRNA sense strand
ucccaaagcagaauguaaa

SEQ ID NO: 11023 - RNA, 19 nt, Homo sapiens
  misc_RNA (1)...(19): siRNA sense strand
ucaaggugccaaagaaaug

SEQ ID NO: 11024 - RNA, 19 nt, Homo sapiens
  misc_RNA (1)...(19): siRNA sense strand
agagcuagaugucaacagu

SEQ ID NO: 11025 - RNA, 19 nt, Homo sapiens
  misc_RNA (1)...(19): siRNA sense strand
gagaugaucaaugagaaug

SEQ ID NO: 11026 - RNA, 19 nt, Homo sapiens
  misc_RNA (1)...(19): siRNA sense strand
uggcugaacucuggcuuga

SEQ ID NO: 11027 - RNA, 19 nt, Homo sapiens
  misc_RNA (1)...(19): siRNA sense strand
auucagaagccaagaagua

SEQ ID NO: 11028 - RNA, 19 nt, Homo sapiens
  misc_RNA (1)...(19): siRNA sense strand
caagacuccagcaagcaua

SEQ ID NO: 11029 - RNA, 19 nt, Homo sapiens
  misc_RNA (1)...(19): siRNA sense strand
cauccaagaccuucacaau

SEQ ID NO: 11030 - RNA, 19 nt, Homo sapiens
  misc_RNA (1)...(19): siRNA sense strand
caaaagugaucuucuaggu

SEQ ID NO: 11031 - RNA, 19 nt, Homo sapiens
  misc_RNA (1)...(19): siRNA sense strand
ggauguggaaguaggaaga

SEQ ID NO: 11032 - RNA, 19 nt, Homo sapiens
  misc_RNA (1)...(19): siRNA sense strand
cagucauucuccuuuauau

SEQ ID NO: 11033 - RNA, 19 nt, Homo sapiens
  misc_RNA (1)...(19): siRNA sense strand
ggaaagagcuggugaugaa

SEQ ID NO: 11034 - RNA, 19 nt, Homo sapiens
  misc_RNA (1)...(19): siRNA sense strand
gguggaagcuuauauuauu

SEQ ID NO: 11035 - RNA, 19 nt, Homo sapiens
  misc_RNA (1)...(19): siRNA sense strand
caacauuacugggcauuua

SEQ ID NO: 11036 - RNA, 19 nt, Homo sapiens
  misc_RNA (1)...(19): siRNA sense strand
gaacacaaaugcuuuaaac

SEQ ID NO: 11037 - RNA, 19 nt, Homo sapiens
  misc_RNA (1)...(19): siRNA sense strand
gagcuuauccagacauuua

SEQ ID NO: 11038 - RNA, 19 nt, Homo sapiens
  misc_RNA (1)...(19): siRNA sense strand
caacaaucaucaccacuuu

SEQ ID NO: 11039 - RNA, 19 nt, Homo sapiens
  misc_RNA (1)...(19): siRNA sense strand
ggucuuaaauggucauaug

SEQ ID NO: 11040 - RNA, 19 nt, Homo sapiens
  misc_RNA (1)...(19): siRNA sense strand
guucaaugguggaagcuua

SEQ ID NO: 11041 - RNA, 19 nt, Homo sapiens
  misc_RNA (1)...(19): siRNA sense strand
acacagauguuaaggaguu

SEQ ID NO: 11042 - RNA, 19 nt, Homo sapiens
  misc_RNA (1)...(19): siRNA sense strand
gcagaacacaaaugcuuua

SEQ ID NO: 11043 - RNA, 19 nt, Homo sapiens
  misc_RNA (1)...(19): siRNA sense strand
gcagaaaugcgagagcuua

SEQ ID NO: 11044 - RNA, 19 nt, Homo sapiens
  misc_RNA (1)...(19): siRNA sense strand
gccaauagcaguuuaaaga

SEQ ID NO: 11045 - RNA, 19 nt, Homo sapiens
  misc_RNA (1)...(19): siRNA sense strand
ccagacagauacucagauu

SEQ ID NO: 11046 - RNA, 19 nt, Homo sapiens
  misc_RNA (1)...(19): siRNA sense strand
ggucauuacuucacaggaa

SEQ ID NO: 11047 - RNA, 19 nt, Homo sapiens
  misc_RNA (1)...(19): siRNA sense strand
cuuaagaggucauuuggaa

SEQ ID NO: 11048 - RNA, 19 nt, Homo sapiens
  misc_RNA (1)...(19): siRNA sense strand
uaaaggaugccacuacauu

SEQ ID NO: 11049 - RNA, 19 nt, Homo sapiens
  misc_RNA (1)...(19): siRNA sense strand
guagaaauccagauguuga

SEQ ID NO: 11050 - RNA, 19 nt, Homo sapiens
  misc_RNA (1)...(19): siRNA sense strand
ccaaagcucuaaccaugga

SEQ ID NO: 11051 - RNA, 19 nt, Homo sapiens
  misc_RNA (1)...(19): siRNA sense strand
gauguugaaugccaguuug

SEQ ID NO: 11052 - RNA, 19 nt, Homo sapiens
  misc_RNA (1)...(19): siRNA sense strand
aaagucagcuucuccagau

SEQ ID NO: 11053 - RNA, 19 nt, Homo sapiens
  misc_RNA (1)...(19): siRNA sense strand
gcugagauccaguucuuaa

SEQ ID NO: 11054 - RNA, 19 nt, Homo sapiens
  misc_RNA (1)...(19): siRNA sense strand
gagcagagucgccugaaga

SEQ ID NO: 11055 - RNA, 19 nt, Homo sapiens
  misc_RNA (1)...(19): siRNA sense strand
gugcugagauccaguucuu

SEQ ID NO: 11056 - RNA, 19 nt, Homo sapiens
  misc_RNA (1)...(19): siRNA sense strand
ggagcaggcauuucuggua

SEQ ID NO: 11057 - RNA, 19 nt, Homo sapiens
  misc_RNA (1)...(19): siRNA sense strand
gagcccaucuggcaucugu

SEQ ID NO: 11058 - RNA, 19 nt, Homo sapiens
  misc_RNA (1)...(19): siRNA sense strand
gcaugaggcugagcaguuc

SEQ ID NO: 11059 - RNA, 19 nt, Homo sapiens
  misc_RNA (1)...(19): siRNA sense strand
uaccuuaaaugcccagauu

SEQ ID NO: 11060 - RNA, 19 nt, Homo sapiens
  misc_RNA (1)...(19): siRNA sense strand
ugguagaguucacaaguaa

SEQ ID NO: 11061 - RNA, 19 nt, Homo sapiens
  misc_RNA (1)...(19): siRNA sense strand
gaacgcuaaugcugagauc

SEQ ID NO: 11062 - RNA, 19 nt, Homo sapiens
  misc_RNA (1)...(19): siRNA sense strand
gagaggccaucuagauagu

SEQ ID NO: 11063 - RNA, 19 nt, Homo sapiens
  misc_RNA (1)...(19): siRNA sense strand
aaacaaggaaugaagaaug

SEQ ID NO: 11064 - RNA, 19 nt, Homo sapiens
  misc_RNA (1)...(19): siRNA sense strand
gagagcuuauccagacauu

SEQ ID NO: 11065 - RNA, 19 nt, Homo sapiens
  misc_RNA (1)...(19): siRNA sense strand
uaguagaaauccagauguu

SEQ ID NO: 11066 - RNA, 19 nt, Homo sapiens
  misc_RNA (1)...(19): siRNA sense strand
caaauacccaggcucaguu

SEQ ID NO: 11067 - RNA, 19 nt, Homo sapiens
  misc_RNA (1)...(19): siRNA sense strand
ggcagaugcuuuaacuuuc

SEQ ID NO: 11068 - RNA, 19 nt, Homo sapiens
  misc_RNA (1)...(19): siRNA sense strand
caauagcaguuuaaagaac

SEQ ID NO: 11069 - RNA, 19 nt, Homo sapiens
  misc_RNA (1)...(19): siRNA sense strand
agacagauacucagauuca

SEQ ID NO: 11070 - RNA, 19 nt, Homo sapiens
  misc_RNA (1)...(19): siRNA sense strand
aaacaccaaugcugacauc

SEQ ID NO: 11071 - RNA, 19 nt, Homo sapiens
  misc_RNA (1)...(19): siRNA sense strand
gagaacaccaaagcucuaa

SEQ ID NO: 11072 - RNA, 19 nt, Homo sapiens
  misc_RNA (1)...(19): siRNA sense strand
gugccgagauccagagguu

SEQ ID NO: 11073 - RNA, 19 nt, Homo sapiens
  misc_RNA (1)...(19): siRNA sense strand
gaaggccagugccgagauc

SEQ ID NO: 11074 - RNA, 19 nt, Homo sapiens
  misc_RNA (1)...(19): siRNA sense strand
ggucuucucucuugugacu

SEQ ID NO: 11075 - RNA, 19 nt, Homo sapiens
  misc_RNA (1)...(19): siRNA sense strand
ccaauagcaguuuaaagaa

SEQ ID NO: 11076 - RNA, 19 nt, Homo sapiens
  misc_RNA (1)...(19): siRNA sense strand
guuagccaauagcaguuua

SEQ ID NO: 11077 - RNA, 19 nt, Homo sapiens
  misc_RNA (1)...(19): siRNA sense strand
uaaaaggaguucuaaagga

SEQ ID NO: 11078 - RNA, 19 nt, Homo sapiens
  misc_RNA (1)...(19): siRNA sense strand
gcaaauacccaggcucagu

SEQ ID NO: 11079 - RNA, 19 nt, Homo sapiens
  misc_RNA (1)...(19): siRNA sense strand
cugcaaggcuggaaguuca

SEQ ID NO: 11080 - RNA, 19 nt, Homo sapiens
  misc_RNA (1)...(19): siRNA sense strand
gagauccaguucuuaagag

SEQ ID NO: 11081 - RNA, 19 nt, Homo sapiens
  misc_RNA (1)...(19): siRNA sense strand
uuacugggcauuuaccuuu

SEQ ID NO: 11082 - RNA, 19 nt, Homo sapiens
  misc_RNA (1)...(19): siRNA sense strand
caacacuagugcugagauc

SEQ ID NO: 11083 - RNA, 19 nt, Homo sapiens
  misc_RNA (1)...(19): siRNA sense strand
aggcagaugcuuuaacuuu

SEQ ID NO: 11084 - RNA, 19 nt, Homo sapiens
  misc_RNA (1)...(19): siRNA sense strand
gcugagauccagggacuaa

SEQ ID NO: 11085 - RNA, 19 nt, Homo sapiens
  misc_RNA (1)...(19): siRNA sense strand
gggaaccaaugcugagauc

SEQ ID NO: 11086 - RNA, 19 nt, Homo sapiens
  misc_RNA (1)...(19): siRNA sense strand
ccaaggaggagcaggcauu

SEQ ID NO: 11087 - RNA, 19 nt, Homo sapiens
  misc_RNA (1)...(19): siRNA sense strand
gaggccaucuagauagugu

SEQ ID NO: 11088 - RNA, 19 nt, Homo sapiens
  misc_RNA (1)...(19): siRNA sense strand
ucuugugacucucuuugua

SEQ ID NO: 11089 - RNA, 19 nt, Homo sapiens
  misc_RNA (1)...(19): siRNA sense strand
cuacaaagaacccaaaguc

SEQ ID NO: 11090 - RNA, 19 nt, Homo sapiens
  misc_RNA (1)...(19): siRNA sense strand
uccagaggcucaaggaaga

SEQ ID NO: 11091 - RNA, 19 nt, Homo sapiens
  misc_RNA (1)...(19): siRNA sense strand
cugguagaguucacaagua

SEQ ID NO: 11092 - RNA, 19 nt, Homo sapiens
  misc_RNA (1)...(19): siRNA sense strand
gccgagauccagagguuaa

SEQ ID NO: 11093 - RNA, 19 nt, Homo sapiens
  misc_RNA (1)...(19): siRNA sense strand
gaaagagcuggugaugaaa

SEQ ID NO: 11094 - RNA, 19 nt, Homo sapiens
  misc_RNA (1)...(19): siRNA sense strand
ccaucuagauagugucaau

SEQ ID NO: 11095 - RNA, 19 nt, Homo sapiens
  misc_RNA (1)...(19): siRNA sense strand
gcagaugcuuuaacuuucc

SEQ ID NO: 11096 - RNA, 19 nt, Homo sapiens
  misc_RNA (1)...(19): siRNA sense strand
aaauccagauguugaagug

SEQ ID NO: 11097 - RNA, 19 nt, Homo sapiens
  misc_RNA (1)...(19): siRNA sense strand
ucacaggaacagcuacaaa

SEQ ID NO: 11098 - RNA, 19 nt, Homo sapiens
  misc_RNA (1)...(19): siRNA sense strand
aagagcuggugaugaaauu

SEQ ID NO: 11099 - RNA, 19 nt, Homo sapiens
  misc_RNA (1)...(19): siRNA sense strand
gaaccaaugcugagaucca

SEQ ID NO: 11100 - RNA, 19 nt, Homo sapiens
  misc_RNA (1)...(19): siRNA sense strand
gguaguagaaauccagaug

SEQ ID NO: 11101 - RNA, 19 nt, Homo sapiens
  misc_RNA (1)...(19): siRNA sense strand
ggcaugaggcugagcaguu

SEQ ID NO: 11102 - RNA, 19 nt, Homo sapiens
  misc_RNA (1)...(19): siRNA sense strand
caggaacagcuacaaagaa

SEQ ID NO: 11103 - RNA, 19 nt, Homo sapiens
  misc_RNA (1)...(19): siRNA sense strand
agauucaggucuuaaaugg

SEQ ID NO: 11104 - RNA, 19 nt, Homo sapiens
  misc_RNA (1)...(19): siRNA sense strand
acacaaaugcuuuaaacuc

SEQ ID NO: 11105 - RNA, 19 nt, Homo sapiens
  misc_RNA (1)...(19): siRNA sense strand
gcaguuuaaagaacgcuaa

SEQ ID NO: 11106 - RNA, 19 nt, Homo sapiens
  misc_RNA (1)...(19): siRNA sense strand
aaugcaaacucugaaauuc

SEQ ID NO: 11107 - RNA, 19 nt, Homo sapiens
  misc_RNA (1)...(19): siRNA sense strand
gaaauccagauguugaagu

SEQ ID NO: 11108 - RNA, 19 nt, Homo sapiens
  misc_RNA (1)...(19): siRNA sense strand
ucuaaaggaugccacuaca

SEQ ID NO: 11109 - RNA, 19 nt, Homo sapiens
  misc_RNA (1)...(19): siRNA sense strand
guucacaaguaaaguguac

SEQ ID NO: 11110 - RNA, 19 nt, Homo sapiens
  misc_RNA (1)...(19): siRNA sense strand
uaagaggucauuuggaaag

SEQ ID NO: 11111 - RNA, 19 nt, Homo sapiens
  misc_RNA (1)...(19): siRNA sense strand
guucuuaagaggucauuug

SEQ ID NO: 11112 - RNA, 19 nt, Homo sapiens
  misc_RNA (1)...(19): siRNA sense strand
gguggacucuguggcaaug

SEQ ID NO: 11113 - RNA, 19 nt, Homo sapiens
  misc_RNA (1)...(19): siRNA sense strand
uccagacgcugaauuucuu

SEQ ID NO: 11114 - RNA, 19 nt, Homo sapiens
  misc_RNA (1)...(19): siRNA sense strand
gaaaaugcaaacucugaaa

SEQ ID NO: 11115 - RNA, 19 nt, Homo sapiens
  misc_RNA (1)...(19): siRNA sense strand
aggcauuucugguagaguu

SEQ ID NO: 11116 - RNA, 19 nt, Homo sapiens
  misc_RNA (1)...(19): siRNA sense strand
gagagauacagacccuaaa

SEQ ID NO: 11117 - RNA, 19 nt, Homo sapiens
  misc_RNA (1)...(19): siRNA sense strand
agagagauacagacccuaa

SEQ ID NO: 11118 - RNA, 19 nt, Homo sapiens
  misc_RNA (1)...(19): siRNA sense strand
ccaacaaucaucaccacuu

SEQ ID NO: 11119 - RNA, 19 nt, Homo sapiens
  misc_RNA (1)...(19): siRNA sense strand
ugagauccaguucuuaaga

SEQ ID NO: 11120 - RNA, 19 nt, Homo sapiens
  misc_RNA (1)...(19): siRNA sense strand
ggaugccacuacauugagu

SEQ ID NO: 11121 - RNA, 19 nt, Homo sapiens
  misc_RNA (1)...(19): siRNA sense strand
caaggaggagcaggcauuu

SEQ ID NO: 11122 - RNA, 19 nt, Homo sapiens
  misc_RNA (1)...(19): siRNA sense strand
ggagcagagucgccugaag

SEQ ID NO: 11123 - RNA, 19 nt, Homo sapiens
  misc_RNA (1)...(19): siRNA sense strand
uuaaaggccacauggagaa

SEQ ID NO: 11124 - RNA, 19 nt, Homo sapiens
  misc_RNA (1)...(19): siRNA sense strand
guagaguucacaaguaaag

SEQ ID NO: 11125 - RNA, 19 nt, Homo sapiens
  misc_RNA (1)...(19): siRNA sense strand
gaccagacagauacucaga

SEQ ID NO: 11126 - RNA, 19 nt, Homo sapiens
  misc_RNA (1)...(19): siRNA sense strand
gauccagggacuaaaggaa

SEQ ID NO: 11127 - RNA, 19 nt, Homo sapiens
  misc_RNA (1)...(19): siRNA sense strand
gcugagaucuauguuuuga

SEQ ID NO: 11128 - RNA, 19 nt, Homo sapiens
  misc_RNA (1)...(19): siRNA sense strand
cagcagacaagaccuguuc

SEQ ID NO: 11129 - RNA, 19 nt, Homo sapiens
  misc_RNA (1)...(19): siRNA sense strand
gaaaugcgagagcuuaucc

SEQ ID NO: 11130 - RNA, 19 nt, Homo sapiens
  misc_RNA (1)...(19): siRNA sense strand
gauguuagacagcaaucug

SEQ ID NO: 11131 - RNA, 19 nt, Homo sapiens
  misc_RNA (1)...(19): siRNA sense strand
agacccaggccuuuauaaa

SEQ ID NO: 11132 - RNA, 19 nt, Homo sapiens
  misc_RNA (1)...(19): siRNA sense strand
ccagacccaggccuuuaua

SEQ ID NO: 11133 - RNA, 19 nt, Homo sapiens
  misc_RNA (1)...(19): siRNA sense strand
ucggcgagcuccugaaaug

SEQ ID NO: 11134 - RNA, 19 nt, Homo sapiens
  misc_RNA (1)...(19): siRNA sense strand
gcagaacuuugugcccauu

SEQ ID NO: 11135 - RNA, 19 nt, Homo sapiens
  misc_RNA (1)...(19): siRNA sense strand
ucggcgagcuccugaaaug

SEQ ID NO: 11136 - RNA, 19 nt, Homo sapiens
  misc_RNA (1)...(19): siRNA sense strand
gcgagaaucaccagcuguu

SEQ ID NO: 11137 - RNA, 19 nt, Homo sapiens
  misc_RNA (1)...(19): siRNA sense strand
agaacuuugugcccauuga

SEQ ID NO: 11138 - RNA, 19 nt, Homo sapiens
  misc_RNA (1)...(19): siRNA sense strand
gccaaggccugugcaguac

SEQ ID NO: 11139 - RNA, 19 nt, Homo sapiens
  misc_RNA (1)...(19): siRNA sense strand
caaggccugugcaguacgu

SEQ ID NO: 11140 - RNA, 19 nt, Homo sapiens
  misc_RNA (1)...(19): siRNA sense strand
aaacaucucuguacaaaug

SEQ ID NO: 11141 - RNA, 19 nt, Homo sapiens
  misc_RNA (1)...(19): siRNA sense strand
cagcauggcucauauucua

SEQ ID NO: 11142 - RNA, 19 nt, Homo sapiens
  misc_RNA (1)...(19): siRNA sense strand
gacaauagcuguuggaacu

SEQ ID NO: 11143 - RNA, 19 nt, Homo sapiens
  misc_RNA (1)...(19): siRNA sense strand
caagaaagccaucaguaaa

SEQ ID NO: 11144 - RNA, 19 nt, Homo sapiens
  misc_RNA (1)...(19): siRNA sense strand
gaaaucaacauugcaguaa

SEQ ID NO: 11145 - RNA, 19 nt, Homo sapiens
  misc_RNA (1)...(19): siRNA sense strand
ccaagaaagccaucaguaa

SEQ ID NO: 11146 - RNA, 19 nt, Homo sapiens
  misc_RNA (1)...(19): siRNA sense strand
uaacguagcauucgauaug

SEQ ID NO: 11147 - RNA, 19 nt, Homo sapiens
  misc_RNA (1)...(19): siRNA sense strand
aaagaagggugacaaggaa

SEQ ID NO: 11148 - RNA, 19 nt, Homo sapiens
  misc_RNA (1)...(19): siRNA sense strand
uguccuaugugcaaacuua

SEQ ID NO: 11149 - RNA, 19 nt, Homo sapiens
  misc_RNA (1)...(19): siRNA sense strand
ggaaacugacccagacuuu

SEQ ID NO: 11150 - RNA, 19 nt, Homo sapiens
  misc_RNA (1)...(19): siRNA sense strand
cuaaugagguagaaugguu

SEQ ID NO: 11151 - RNA, 19 nt, Homo sapiens
  misc_RNA (1)...(19): siRNA sense strand
gcucauauucuacuucauu

SEQ ID NO: 11152 - RNA, 19 nt, Homo sapiens
  misc_RNA (1)...(19): siRNA sense strand
gcuauaagcagaaugaugu

SEQ ID NO: 11153 - RNA, 19 nt, Homo sapiens
  misc_RNA (1)...(19): siRNA sense strand
agaaagccaucaguaaauu

SEQ ID NO: 11154 - RNA, 19 nt, Homo sapiens
  misc_RNA (1)...(19): siRNA sense strand
gccauguacugauaacgua

SEQ ID NO: 11155 - RNA, 19 nt, Homo sapiens
  misc_RNA (1)...(19): siRNA sense strand
cauuguaccuguccuaugu

SEQ ID NO: 11156 - RNA, 19 nt, Homo sapiens
  misc_RNA (1)...(19): siRNA sense strand
gaagaucagguacacaaau

SEQ ID NO: 11157 - RNA, 19 nt, Homo sapiens
  misc_RNA (1)...(19): siRNA sense strand
gaacauuguaccuguccua

SEQ ID NO: 11158 - RNA, 19 nt, Homo sapiens
  misc_RNA (1)...(19): siRNA sense strand
uaaagaagggugacaagga

SEQ ID NO: 11159 - RNA, 19 nt, Homo sapiens
  misc_RNA (1)...(19): siRNA sense strand
aaacugacccagacuuuga

SEQ ID NO: 11160 - RNA, 19 nt, Homo sapiens
  misc_RNA (1)...(19): siRNA sense strand
gaaagccaucaguaaauug

SEQ ID NO: 11161 - RNA, 19 nt, Homo sapiens
  misc_RNA (1)...(19): siRNA sense strand
gauaacguagcauucgaua

SEQ ID NO: 11162 - RNA, 19 nt, Homo sapiens
  misc_RNA (1)...(19): siRNA sense strand
ccacaaugcaguugcugua

SEQ ID NO: 11163 - RNA, 19 nt, Homo sapiens
  misc_RNA (1)...(19): siRNA sense strand
guacugauaacguagcauu

SEQ ID NO: 11164 - RNA, 19 nt, Homo sapiens
  misc_RNA (1)...(19): siRNA sense strand
gaaacugacccagacuuug

SEQ ID NO: 11165 - RNA, 19 nt, Homo sapiens
  misc_RNA (1)...(19): siRNA sense strand
guggaucccuggcuuagug

SEQ ID NO: 11166 - RNA, 19 nt, Homo sapiens
  misc_RNA (1)...(19): siRNA sense strand
gacccagacuuugaucauu

SEQ ID NO: 11167 - RNA, 19 nt, Homo sapiens
  misc_RNA (1)...(19): siRNA sense strand
caaaugcacgcgacaggaa

SEQ ID NO: 11168 - RNA, 19 nt, Homo sapiens
  misc_RNA (1)...(19): siRNA sense strand
agaaugaugucguccgaau

SEQ ID NO: 11169 - RNA, 19 nt, Homo sapiens
  misc_RNA (1)...(19): siRNA sense strand
caaaugacaauagcuguug

SEQ ID NO: 11170 - RNA, 19 nt, Homo sapiens
  misc_RNA (1)...(19): siRNA sense strand
gguuuauuauugccaguuu

SEQ ID NO: 11171 - RNA, 19 nt, Homo sapiens
  misc_RNA (1)...(19): siRNA sense strand
ccacggaguugcugaucau

SEQ ID NO: 11172 - RNA, 19 nt, Homo sapiens
  misc_RNA (1)...(19): siRNA sense strand
gccaagaaagccaucagua

SEQ ID NO: 11173 - RNA, 19 nt, Homo sapiens
  misc_RNA (1)...(19): siRNA sense strand
cagaagaucagguacacaa

SEQ ID NO: 11174 - RNA, 19 nt, Homo sapiens
  misc_RNA (1)...(19): siRNA sense strand
gaacaggagaaaucaacau

SEQ ID NO: 11175 - RNA, 19 nt, Homo sapiens
  misc_RNA (1)...(19): siRNA sense strand
caaccaggacaguaaagaa

SEQ ID NO: 11176 - RNA, 19 nt, Homo sapiens
  misc_RNA (1)...(19): siRNA sense strand
aagaucagguacacaaaug

SEQ ID NO: 11177 - RNA, 19 nt, Homo sapiens
  misc_RNA (1)...(19): siRNA sense strand
gugccgaauuugccaugua

SEQ ID NO: 11178 - RNA, 19 nt, Homo sapiens
  misc_RNA (1)...(19): siRNA sense strand
gaaugccaccgaagaacuu

SEQ ID NO: 11179 - RNA, 19 nt, Homo sapiens
  misc_RNA (1)...(19): siRNA sense strand
cuugaaugcuaaugaggua

SEQ ID NO: 11180 - RNA, 19 nt, Homo sapiens
  misc_RNA (1)...(19): siRNA sense strand
agaaaucaacauugcagua

SEQ ID NO: 11181 - RNA, 19 nt, Homo sapiens
  misc_RNA (1)...(19): siRNA sense strand
caggagaaaucaacauugc

SEQ ID NO: 11182 - RNA, 19 nt, Homo sapiens
  misc_RNA (1)...(19): siRNA sense strand
aauuugccauguacugaua

SEQ ID NO: 11183 - RNA, 19 nt, Homo sapiens
  misc_RNA (1)...(19): siRNA sense strand
acacggcgcucaucaacgu

SEQ ID NO: 11184 - RNA, 19 nt, Homo sapiens
  misc_RNA (1)...(19): siRNA sense strand
ccuaugugcaaacuuaaua

SEQ ID NO: 11185 - RNA, 19 nt, Homo sapiens
  misc_RNA (1)...(19): siRNA sense strand
caaugcaguugcuguaguc

SEQ ID NO: 11186 - RNA, 19 nt, Homo sapiens
  misc_RNA (1)...(19): siRNA sense strand
aaucaacauugcaguaaca

SEQ ID NO: 11187 - RNA, 19 nt, Homo sapiens
  misc_RNA (1)...(19): siRNA sense strand
uggaaaggcucaccagaac

SEQ ID NO: 11188 - RNA, 19 nt, Homo sapiens
  misc_RNA (1)...(19): siRNA sense strand
ugaaggcccugggaauugu

SEQ ID NO: 11189 - RNA, 19 nt, Homo sapiens
  misc_RNA (1)...(19): siRNA sense strand
gaaugaugucguccgaauu

SEQ ID NO: 11190 - RNA, 19 nt, Homo sapiens
  misc_RNA (1)...(19): siRNA sense strand
gaggagccaguuaccauga

SEQ ID NO: 11191 - RNA, 19 nt, Homo sapiens
  misc_RNA (1)...(19): siRNA sense strand
gauauuauugcugucauga

SEQ ID NO: 11192 - RNA, 19 nt, Homo sapiens
  misc_RNA (1)...(19): siRNA sense strand
gaaugcuaaugagguagaa

SEQ ID NO: 11193 - RNA, 19 nt, Homo sapiens
  misc_RNA (1)...(19): siRNA sense strand
caacauugcaguaacaaaa

SEQ ID NO: 11194 - RNA, 19 nt, Homo sapiens
  misc_RNA (1)...(19): siRNA sense strand
gcaagcauguuuuccacaa

SEQ ID NO: 11195 - RNA, 19 nt, Homo sapiens
  misc_RNA (1)...(19): siRNA sense strand
gaauugagggguaaggaua

SEQ ID NO: 11196 - RNA, 19 nt, Homo sapiens
  misc_RNA (1)...(19): siRNA sense strand
uaacagaauugagggguaa

SEQ ID NO: 11197 - RNA, 19 nt, Homo sapiens
  misc_RNA (1)...(19): siRNA sense strand
gagaacaggagaaaucaac

SEQ ID NO: 11198 - RNA, 19 nt, Homo sapiens
  misc_RNA (1)...(19): siRNA sense strand
ccagaacccaagcuguuaa

SEQ ID NO: 11199 - RNA, 19 nt, Homo sapiens
  misc_RNA (1)...(19): siRNA sense strand
caccagaacccaagcuguu

SEQ ID NO: 11200 - RNA, 19 nt, Homo sapiens
  misc_RNA (1)...(19): siRNA sense strand
guaccuguccuaugugcaa

SEQ ID NO: 11201 - RNA, 19 nt, Homo sapiens
  misc_RNA (1)...(19): siRNA sense strand
ccaaagaggagccaguuac

SEQ ID NO: 11202 - RNA, 19 nt, Homo sapiens
  misc_RNA (1)...(19): siRNA sense strand
aagaaagccaucaguaaau

SEQ ID NO: 11203 - RNA, 19 nt, Homo sapiens
  misc_RNA (1)...(19): siRNA sense strand
ggagauauuauugcuguca

SEQ ID NO: 11204 - RNA, 19 nt, Homo sapiens
  misc_RNA (1)...(19): siRNA sense strand
gagauauuauugcugucau

SEQ ID NO: 11205 - RNA, 19 nt, Homo sapiens
  misc_RNA (1)...(19): siRNA sense strand
acccagacuuugaucauug

SEQ ID NO: 11206 - RNA, 19 nt, Homo sapiens
  misc_RNA (1)...(19): siRNA sense strand
ugacaaccaggacaguaaa

SEQ ID NO: 11207 - RNA, 19 nt, Homo sapiens
  misc_RNA (1)...(19): siRNA sense strand
acacucugcuacaugauca

SEQ ID NO: 11208 - RNA, 19 nt, Homo sapiens
  misc_RNA (1)...(19): siRNA sense strand
gaauuugccauguacugau

SEQ ID NO: 11209 - RNA, 19 nt, Homo sapiens
  misc_RNA (1)...(19): siRNA sense strand
aaagccaucaguaaauuga

SEQ ID NO: 11210 - RNA, 19 nt, Homo sapiens
  misc_RNA (1)...(19): siRNA sense strand
cgaauuugccauguacuga

SEQ ID NO: 11211 - RNA, 19 nt, Homo sapiens
  misc_RNA (1)...(19): siRNA sense strand
ggagaugcagccaagaaag

SEQ ID NO: 11212 - RNA, 19 nt, Homo sapiens
  misc_RNA (1)...(19): siRNA sense strand
acaaugcaguugcuguagu

SEQ ID NO: 11213 - RNA, 19 nt, Homo sapiens
  misc_RNA (1)...(19): siRNA sense strand
agccacagcuagcuugaau

SEQ ID NO: 11214 - RNA, 19 nt, Homo sapiens
  misc_RNA (1)...(19): siRNA sense strand
cggaguugcugaucaucug

SEQ ID NO: 11215 - RNA, 19 nt, Homo sapiens
  misc_RNA (1)...(19): siRNA sense strand
cugaucaucugggcuguga

SEQ ID NO: 11216 - RNA, 19 nt, Homo sapiens
  misc_RNA (1)...(19): siRNA sense strand
gcacuggagauauuauugc

SEQ ID NO: 11217 - RNA, 19 nt, Homo sapiens
  misc_RNA (1)...(19): siRNA sense strand
ucauucagaagaucaggua

SEQ ID NO: 11218 - RNA, 19 nt, Homo sapiens
  misc_RNA (1)...(19): siRNA sense strand
uggcucauauucuacuuca

SEQ ID NO: 11219 - RNA, 19 nt, Homo sapiens
  misc_RNA (1)...(19): siRNA sense strand
gaucagguacacaaaugca

SEQ ID NO: 11220 - RNA, 19 nt, Homo sapiens
  misc_RNA (1)...(19): siRNA sense strand
acaacucccuuggccuuga

SEQ ID NO: 11221 - RNA, 19 nt, Homo sapiens
  misc_RNA (1)...(19): siRNA sense strand
agagcuauaagcagaauga

SEQ ID NO: 11222 - RNA, 19 nt, Homo sapiens
  misc_RNA (1)...(19): siRNA sense strand
uaaugagguagaaugguuu

SEQ ID NO: 11223 - RNA, 19 nt, Homo sapiens
  misc_RNA (1)...(19): siRNA sense strand
acaaaugacaauagcuguu

SEQ ID NO: 11224 - RNA, 19 nt, Homo sapiens
  misc_RNA (1)...(19): siRNA sense strand
cucacacucugcuacauga

SEQ ID NO: 11225 - RNA, 19 nt, Homo sapiens
  misc_RNA (1)...(19): siRNA sense strand
aaugaugucguccgaauuc

SEQ ID NO: 11226 - RNA, 19 nt, Homo sapiens
  misc_RNA (1)...(19): siRNA sense strand
ccguggcucucuagucuuc

SEQ ID NO: 11227 - RNA, 19 nt, Homo sapiens
  misc_RNA (1)...(19): siRNA sense strand
ccaagcuguuaaccgaaga

SEQ ID NO: 11228 - RNA, 19 nt, Homo sapiens
  misc_RNA (1)...(19): siRNA sense strand
caguugcuguagucaucua

SEQ ID NO: 11229 - RNA, 19 nt, Homo sapiens
  misc_RNA (1)...(19): siRNA sense strand
ccacagcuagcuugaaugc

SEQ ID NO: 11230 - RNA, 19 nt, Homo sapiens
  misc_RNA (1)...(19): siRNA sense strand
gcuguuaaccgaagaucag

SEQ ID NO: 11231 - RNA, 19 nt, Homo sapiens
  misc_RNA (1)...(19): siRNA sense strand
cggagaugcagccaagaaa

SEQ ID NO: 11232 - RNA, 19 nt, Homo sapiens
  misc_RNA (1)...(19): siRNA sense strand
caacucccuuggccuugag

SEQ ID NO: 11233 - RNA, 19 nt, Homo sapiens
  misc_RNA (1)...(19): siRNA sense strand
ugcaguugcuguagucauc

SEQ ID NO: 11234 - RNA, 19 nt, Homo sapiens
  misc_RNA (1)...(19): siRNA sense strand
gagaugcagccaagaaagc

SEQ ID NO: 11235 - RNA, 19 nt, Homo sapiens
  misc_RNA (1)...(19): siRNA sense strand
agagagcuauaagcagaau

SEQ ID NO: 11236 - RNA, 19 nt, Homo sapiens
  misc_RNA (1)...(19): siRNA sense strand
ugaaugcuaaugagguaga

SEQ ID NO: 11237 - RNA, 19 nt, Homo sapiens
  misc_RNA (1)...(19): siRNA sense strand
agauauuauugcugucaug

SEQ ID NO: 11238 - RNA, 19 nt, Homo sapiens
  misc_RNA (1)...(19): siRNA sense strand
gguucuuugucccuccuaa

SEQ ID NO: 11239 - RNA, 19 nt, Homo sapiens
  misc_RNA (1)...(19): siRNA sense strand
ggagccaguuaccaugacu

SEQ ID NO: 11240 - RNA, 19 nt, Homo sapiens
  misc_RNA (1)...(19): siRNA sense strand
caaugaagaugaagacaua

SEQ ID NO: 11241 - RNA, 19 nt, Homo sapiens
  misc_RNA (1)...(19): siRNA sense strand
gaaagagagugagcucaua

SEQ ID NO: 11242 - RNA, 19 nt, Homo sapiens
  misc_RNA (1)...(19): siRNA sense strand
caaguuacauguaugagaa

SEQ ID NO: 11243 - RNA, 19 nt, Homo sapiens
  misc_RNA (1)...(19): siRNA sense strand
caaugaaagugaaagauga

SEQ ID NO: 11244 - RNA, 19 nt, Homo sapiens
  misc_RNA (1)...(19): siRNA sense strand
cauaggagaugauucaaug

SEQ ID NO: 11245 - RNA, 19 nt, Homo sapiens
  misc_RNA (1)...(19): siRNA sense strand
ugaaaucccuuacagcuau

SEQ ID NO: 11246 - RNA, 19 nt, Homo sapiens
  misc_RNA (1)...(19): siRNA sense strand
ugaaagagaugagaauguu

SEQ ID NO: 11247 - RNA, 19 nt, Homo sapiens
  misc_RNA (1)...(19): siRNA sense strand
aaccaaaucucaugaaaug

SEQ ID NO: 11248 - RNA, 19 nt, Homo sapiens
  misc_RNA (1)...(19): siRNA sense strand
gagcgugccuucugagaga

SEQ ID NO: 11249 - RNA, 19 nt, Homo sapiens
  misc_RNA (1)...(19): siRNA sense strand
cauguugucucauucgaua

SEQ ID NO: 11250 - RNA, 19 nt, Homo sapiens
  misc_RNA (1)...(19): siRNA sense strand
ggagaugguuccaguuauc

SEQ ID NO: 11251 - RNA, 19 nt, Homo sapiens
  misc_RNA (1)...(19): siRNA sense strand
gaagaacgccagaaucaca

SEQ ID NO: 11252 - RNA, 19 nt, Homo sapiens
  misc_RNA (1)...(19): siRNA sense strand
ucaaagugaucaacaagga

SEQ ID NO: 11253 - RNA, 19 nt, Homo sapiens
  misc_RNA (1)...(19): siRNA sense strand
ugacuacaguuuaaccaaa

SEQ ID NO: 11254 - RNA, 19 nt, Homo sapiens
  misc_RNA (1)...(19): siRNA sense strand
ucacauagccagaggagaa

SEQ ID NO: 11255 - RNA, 19 nt, Homo sapiens
  misc_RNA (1)...(19): siRNA sense strand
gagaaggcccagccaauga

SEQ ID NO: 11256 - RNA, 19 nt, Homo sapiens
  misc_RNA (1)...(19): siRNA sense strand
cagcuucaaugucuuaaug

SEQ ID NO: 11257 - RNA, 19 nt, Homo sapiens
  misc_RNA (1)...(19): siRNA sense strand
uaacauguguggauaucga

SEQ ID NO: 11258 - RNA, 19 nt, Homo sapiens
  misc_RNA (1)...(19): siRNA sense strand
gcaaugggaugccacuucu

SEQ ID NO: 11259 - RNA, 19 nt, Homo sapiens
  misc_RNA (1)...(19): siRNA sense strand
gaaagugaaagaugaauac

SEQ ID NO: 11260 - RNA, 19 nt, Homo sapiens
  misc_RNA (1)...(19): siRNA sense strand
uuacagcuauucaagagaa

SEQ ID NO: 11261 - RNA, 19 nt, Homo sapiens
  misc_RNA (1)...(19): siRNA sense strand
gaaagagaugagaauguuu

SEQ ID NO: 11262 - RNA, 19 nt, Homo sapiens
  misc_RNA (1)...(19): siRNA sense strand
guucauaagcgaagccaua

SEQ ID NO: 11263 - RNA, 19 nt, Homo sapiens
  misc_RNA (1)...(19): siRNA sense strand
gaaaucccuuacagcuauu

SEQ ID NO: 11264 - RNA, 19 nt, Homo sapiens
  misc_RNA (1)...(19): siRNA sense strand
caaaucucaugaaauggaa

SEQ ID NO: 11265 - RNA, 19 nt, Homo sapiens
  misc_RNA (1)...(19): siRNA sense strand
aaucacaucuaucagcaaa

SEQ ID NO: 11266 - RNA, 19 nt, Homo sapiens
  misc_RNA (1)...(19): siRNA sense strand
gcauccaccuuccagagaa

SEQ ID NO: 11267 - RNA, 19 nt, Homo sapiens
  misc_RNA (1)...(19): siRNA sense strand
gaaagaugaauacagugaa

SEQ ID NO: 11268 - RNA, 19 nt, Homo sapiens
  misc_RNA (1)...(19): siRNA sense strand
gggaggugauggaugugua

SEQ ID NO: 11269 - RNA, 19 nt, Homo sapiens
  misc_RNA (1)...(19): siRNA sense strand
gaagacauaggagaugauu

SEQ ID NO: 11270 - RNA, 19 nt, Homo sapiens
  misc_RNA (1)...(19): siRNA sense strand
aaacaaaugcggaacugaa

SEQ ID NO: 11271 - RNA, 19 nt, Homo sapiens
  misc_RNA (1)...(19): siRNA sense strand
ggagaaggcccagccaaug

SEQ ID NO: 11272 - RNA, 19 nt, Homo sapiens
  misc_RNA (1)...(19): siRNA sense strand
ugaauacagugaaagagau

SEQ ID NO: 11273 - RNA, 19 nt, Homo sapiens
  misc_RNA (1)...(19): siRNA sense strand
acagagcccugcugaagug

SEQ ID NO: 11274 - RNA, 19 nt, Homo sapiens
  misc_RNA (1)...(19): siRNA sense strand
ugacagcaaccaugaagaa

SEQ ID NO: 11275 - RNA, 19 nt, Homo sapiens
  misc_RNA (1)...(19): siRNA sense strand
ccaaaucucaugaaaugga

SEQ ID NO: 11276 - RNA, 19 nt, Homo sapiens
  misc_RNA (1)...(19): siRNA sense strand
ucaauaacgccaucagcua

SEQ ID NO: 11277 - RNA, 19 nt, Homo sapiens
  misc_RNA (1)...(19): siRNA sense strand
agacauaggagaugauuca

SEQ ID NO: 11278 - RNA, 19 nt, Homo sapiens
  misc_RNA (1)...(19): siRNA sense strand
gacuacaguuuaaccaaau

SEQ ID NO: 11279 - RNA, 19 nt, Homo sapiens
  misc_RNA (1)...(19): siRNA sense strand
caucagcuucaaugucuua

SEQ ID NO: 11280 - RNA, 19 nt, Homo sapiens
  misc_RNA (1)...(19): siRNA sense strand
ugaaagaugaauacaguga

SEQ ID NO: 11281 - RNA, 19 nt, Homo sapiens
  misc_RNA (1)...(19): siRNA sense strand
gauaguagcaggccaacca

SEQ ID NO: 11282 - RNA, 19 nt, Homo sapiens
  misc_RNA (1)...(19): siRNA sense strand
caauaacgccaucagcuau

SEQ ID NO: 11283 - RNA, 19 nt, Homo sapiens
  misc_RNA (1)...(19): siRNA sense strand
ggaccaagccaucaauaac

SEQ ID NO: 11284 - RNA, 19 nt, Homo sapiens
  misc_RNA (1)...(19): siRNA sense strand
gcagaaagugcagcgguuu

SEQ ID NO: 11285 - RNA, 19 nt, Homo sapiens
  misc_RNA (1)...(19): siRNA sense strand
gccagaaucacaucuauca

SEQ ID NO: 11286 - RNA, 19 nt, Homo sapiens
  misc_RNA (1)...(19): siRNA sense strand
agugaaagaugaauacagu

SEQ ID NO: 11287 - RNA, 19 nt, Homo sapiens
  misc_RNA (1)...(19): siRNA sense strand
gcacucaggagcagucugu

SEQ ID NO: 11288 - RNA, 19 nt, Homo sapiens
  misc_RNA (1)...(19): siRNA sense strand
gagagugagcucauacaga

SEQ ID NO: 11289 - RNA, 19 nt, Homo sapiens
  misc_RNA (1)...(19): siRNA sense strand
gugcagcgguuuugaauga

SEQ ID NO: 11290 - RNA, 19 nt, Homo sapiens
  misc_RNA (1)...(19): siRNA sense strand
caagagacuccgucaaagu

SEQ ID NO: 11291 - RNA, 19 nt, Homo sapiens
  misc_RNA (1)...(19): siRNA sense strand
ucaaugaaagugaaagaug

SEQ ID NO: 11292 - RNA, 19 nt, Homo sapiens
  misc_RNA (1)...(19): siRNA sense strand
aagaugaacugcgaugugu

SEQ ID NO: 11293 - RNA, 19 nt, Homo sapiens
  misc_RNA (1)...(19): siRNA sense strand
ccaagagacuccgucaaag

SEQ ID NO: 11294 - RNA, 19 nt, Homo sapiens
  misc_RNA (1)...(19): siRNA sense strand
cccaagagacuccgucaaa

SEQ ID NO: 11295 - RNA, 19 nt, Homo sapiens
  misc_RNA (1)...(19): siRNA sense strand
gaugaacugcgaugugugu

SEQ ID NO: 11296 - RNA, 19 nt, Homo sapiens
  misc_RNA (1)...(19): siRNA sense strand
gaauacagugaaagagaug

SEQ ID NO: 11297 - RNA, 19 nt, Homo sapiens
  misc_RNA (1)...(19): siRNA sense strand
ccaguuaucagcagcaugu

SEQ ID NO: 11298 - RNA, 19 nt, Homo sapiens
  misc_RNA (1)...(19): siRNA sense strand
ucggagaugguuccaguua

SEQ ID NO: 11299 - RNA, 19 nt, Homo sapiens
  misc_RNA (1)...(19): siRNA sense strand
gccaaccaguggaaagaug

SEQ ID NO: 11300 - RNA, 19 nt, Homo sapiens
  misc_RNA (1)...(19): siRNA sense strand
caugggaaaugcagaagag

SEQ ID NO: 11301 - RNA, 19 nt, Homo sapiens
  misc_RNA (1)...(19): siRNA sense strand
gccaugaucgguaugaguu

SEQ ID NO: 11302 - RNA, 19 nt, Homo sapiens
  misc_RNA (1)...(19): siRNA sense strand
agucagaacccaugggaaa

SEQ ID NO: 11303 - RNA, 19 nt, Homo sapiens
  misc_RNA (1)...(19): siRNA sense strand
ucgaagccaugaucgguau

SEQ ID NO: 11304 - RNA, 19 nt, Homo sapiens
  misc_RNA (1)...(19): siRNA sense strand
cucaagagcuggaaaagaa

SEQ ID NO: 11305 - RNA, 19 nt, Homo sapiens
  misc_RNA (1)...(19): siRNA sense strand
ggauaucgaagccaugauc

SEQ ID NO: 11306 - RNA, 19 nt, Homo sapiens
  misc_RNA (1)...(19): siRNA sense strand
ccacggacacugacagcaa

SEQ ID NO: 11307 - RNA, 19 nt, Homo sapiens
  misc_RNA (1)...(19): siRNA sense strand
gaaagaugaacugcgaugu

SEQ ID NO: 11308 - RNA, 19 nt, Homo sapiens
  misc_RNA (1)...(19): siRNA sense strand
gagacuccgucaaagugau

SEQ ID NO: 11309 - RNA, 19 nt, Homo sapiens
  misc_RNA (1)...(19): siRNA sense strand
acacugacagcaaccauga

SEQ ID NO: 11310 - RNA, 19 nt, Homo sapiens
  misc_RNA (1)...(19): siRNA sense strand
acauuaaguuggagagaca

SEQ ID NO: 11311 - RNA, 19 nt, Homo sapiens
  misc_RNA (1)...(19): siRNA sense strand
gaagccaugaucgguauga

SEQ ID NO: 11312 - RNA, 19 nt, Homo sapiens
  misc_RNA (1)...(19): siRNA sense strand
caaagugaucaacaaggaa

SEQ ID NO: 11313 - RNA, 19 nt, Homo sapiens
  misc_RNA (1)...(19): siRNA sense strand
gaugaagacauaggagaug

SEQ ID NO: 11314 - RNA, 19 nt, Homo sapiens
  misc_RNA (1)...(19): siRNA sense strand
acaaacaaaugcggaacug

SEQ ID NO: 11315 - RNA, 19 nt, Homo sapiens
  misc_RNA (1)...(19): siRNA sense strand
ugcaucagcuucaaugucu

SEQ ID NO: 11316 - RNA, 19 nt, Homo sapiens
  misc_RNA (1)...(19): siRNA sense strand
acacagagcccugcugaag

SEQ ID NO: 11317 - RNA, 19 nt, Homo sapiens
  misc_RNA (1)...(19): siRNA sense strand
gugaaagagaugagaaugu

SEQ ID NO: 11318 - RNA, 19 nt, Homo sapiens
  misc_RNA (1)...(19): siRNA sense strand
cggagaugguuccaguuau

SEQ ID NO: 11319 - RNA, 19 nt, Homo sapiens
  misc_RNA (1)...(19): siRNA sense strand
uuacauguaugagaaagag

SEQ ID NO: 11320 - RNA, 19 nt, Homo sapiens
  misc_RNA (1)...(19): siRNA sense strand
ccuuacagcuauucaagag

SEQ ID NO: 11321 - RNA, 19 nt, Homo sapiens
  misc_RNA (1)...(19): siRNA sense strand
ucaaguuacauguaugaga

SEQ ID NO: 11322 - RNA, 19 nt, Homo sapiens
  misc_RNA (1)...(19): siRNA sense strand
aguguaacauguguggaua

SEQ ID NO: 11323 - RNA, 19 nt, Homo sapiens
  misc_RNA (1)...(19): siRNA sense strand
ggaggugauggauguguau

SEQ ID NO: 11324 - RNA, 19 nt, Homo sapiens
  misc_RNA (1)...(19): siRNA sense strand
cagcagcauguaucccaua

SEQ ID NO: 11325 - RNA, 19 nt, Homo sapiens
  misc_RNA (1)...(19): siRNA sense strand
gaguguaacauguguggau

SEQ ID NO: 11326 - RNA, 19 nt, Homo sapiens
  misc_RNA (1)...(19): siRNA sense strand
gcccagccaaugaagauga

SEQ ID NO: 11327 - RNA, 19 nt, Homo sapiens
  misc_RNA (1)...(19): siRNA sense strand
cauaagcgaagccauacug

SEQ ID NO: 11328 - RNA, 19 nt, Homo sapiens
  misc_RNA (1)...(19): siRNA sense strand
aaagaugaacugcgaugug

SEQ ID NO: 11329 - RNA, 19 nt, Homo sapiens
  misc_RNA (1)...(19): siRNA sense strand
ccaaccaguggaaagauga

SEQ ID NO: 11330 - RNA, 19 nt, Homo sapiens
  misc_RNA (1)...(19): siRNA sense strand
gugacccuuucgaguguaa

SEQ ID NO: 11331 - RNA, 19 nt, Homo sapiens
  misc_RNA (1)...(19): siRNA sense strand
ccaaugaagaugaagacau

SEQ ID NO: 11332 - RNA, 19 nt, Homo sapiens
  misc_RNA (1)...(19): siRNA sense strand
gagaugguuccaguuauca

SEQ ID NO: 11333 - RNA, 19 nt, Homo sapiens
  misc_RNA (1)...(19): siRNA sense strand
uaaguuggagagacauguu

SEQ ID NO: 11334 - RNA, 19 nt, Homo sapiens
  misc_RNA (1)...(19): siRNA sense strand
uguaugagaaagagaguga

SEQ ID NO: 11335 - RNA, 19 nt, Homo sapiens
  misc_RNA (1)...(19): siRNA sense strand
caaacaaaugcggaacuga

SEQ ID NO: 11336 - RNA, 19 nt, Homo sapiens
  misc_RNA (1)...(19): siRNA sense strand
aagagacuccgucaaagug

SEQ ID NO: 11337 - RNA, 19 nt, Homo sapiens
  misc_RNA (1)...(19): siRNA sense strand
ccaugaagaacgccagaau

SEQ ID NO: 11338 - RNA, 19 nt, Homo sapiens
  misc_RNA (1)...(19): siRNA sense strand
uggaccaagccaucaauaa

SEQ ID NO: 11339 - RNA, 19 nt, Homo sapiens
  misc_RNA (1)...(19): siRNA sense strand
cauacagacccgcaugaug

SEQ ID NO: 11340 - RNA, 19 nt, Homo sapiens
  misc_RNA (1)...(19): siRNA sense strand
caaugaagaugaagacaua

SEQ ID NO: 11341 - RNA, 19 nt, Homo sapiens
  misc_RNA (1)...(19): siRNA sense strand
gaaagagagugagcucaua

SEQ ID NO: 11342 - RNA, 19 nt, Homo sapiens
  misc_RNA (1)...(19): siRNA sense strand
caaguuacauguaugagaa

SEQ ID NO: 11343 - RNA, 19 nt, Homo sapiens
  misc_RNA (1)...(19): siRNA sense strand
caaugaaagugaaagauga

SEQ ID NO: 11344 - RNA, 19 nt, Homo sapiens
  misc_RNA (1)...(19): siRNA sense strand
cauaggagaugauucaaug

SEQ ID NO: 11345 - RNA, 19 nt, Homo sapiens
  misc_RNA (1)...(19): siRNA sense strand
ugaaaucccuuacagcuau

SEQ ID NO: 11346 - RNA, 19 nt, Homo sapiens
  misc_RNA (1)...(19): siRNA sense strand
ugaaagagaugagaauguu

SEQ ID NO: 11347 - RNA, 19 nt, Homo sapiens
  misc_RNA (1)...(19): siRNA sense strand
aaccaaaucucaugaaaug

SEQ ID NO: 11348 - RNA, 19 nt, Homo sapiens
  misc_RNA (1)...(19): siRNA sense strand
gagcgugccuucugagaga

SEQ ID NO: 11349 - RNA, 19 nt, Homo sapiens
  misc_RNA (1)...(19): siRNA sense strand
cauguugucucauucgaua

SEQ ID NO: 11350 - RNA, 19 nt, Homo sapiens
  misc_RNA (1)...(19): siRNA sense strand
ggagaugguuccaguuauc

SEQ ID NO: 11351 - RNA, 19 nt, Homo sapiens
  misc_RNA (1)...(19): siRNA sense strand
gaagaacgccagaaucaca

SEQ ID NO: 11352 - RNA, 19 nt, Homo sapiens
  misc_RNA (1)...(19): siRNA sense strand
ucaaagugaucaacaagga

SEQ ID NO: 11353 - RNA, 19 nt, Homo sapiens
  misc_RNA (1)...(19): siRNA sense strand
ugacuacaguuuaaccaaa

SEQ ID NO: 11354 - RNA, 19 nt, Homo sapiens
  misc_RNA (1)...(19): siRNA sense strand
ucacauagccagaggagaa

SEQ ID NO: 11355 - RNA, 19 nt, Homo sapiens
  misc_RNA (1)...(19): siRNA sense strand
gagaaggcccagccaauga

SEQ ID NO: 11356 - RNA, 19 nt, Homo sapiens
  misc_RNA (1)...(19): siRNA sense strand
cagcuucaaugucuuaaug

SEQ ID NO: 11357 - RNA, 19 nt, Homo sapiens
  misc_RNA (1)...(19): siRNA sense strand
uaacauguguggauaucga

SEQ ID NO: 11358 - RNA, 19 nt, Homo sapiens
  misc_RNA (1)...(19): siRNA sense strand
gcaaugggaugccacuucu

SEQ ID NO: 11359 - RNA, 19 nt, Homo sapiens
  misc_RNA (1)...(19): siRNA sense strand
gaaagugaaagaugaauac

SEQ ID NO: 11360 - RNA, 19 nt, Homo sapiens
  misc_RNA (1)...(19): siRNA sense strand
uuacagcuauucaagagaa

SEQ ID NO: 11361 - RNA, 19 nt, Homo sapiens
  misc_RNA (1)...(19): siRNA sense strand
gaaagagaugagaauguuu

SEQ ID NO: 11362 - RNA, 19 nt, Homo sapiens
  misc_RNA (1)...(19): siRNA sense strand
guucauaagcgaagccaua

SEQ ID NO: 11363 - RNA, 19 nt, Homo sapiens
  misc_RNA (1)...(19): siRNA sense strand
gaaaucccuuacagcuauu

SEQ ID NO: 11364 - RNA, 19 nt, Homo sapiens
  misc_RNA (1)...(19): siRNA sense strand
caaaucucaugaaauggaa

SEQ ID NO: 11365 - RNA, 19 nt, Homo sapiens
  misc_RNA (1)...(19): siRNA sense strand
aaucacaucuaucagcaaa

SEQ ID NO: 11366 - RNA, 19 nt, Homo sapiens
  misc_RNA (1)...(19): siRNA sense strand
gcauccaccuuccagagaa

SEQ ID NO: 11367 - RNA, 19 nt, Homo sapiens
  misc_RNA (1)...(19): siRNA sense strand
gaaagaugaauacagugaa

SEQ ID NO: 11368 - RNA, 19 nt, Homo sapiens
  misc_RNA (1)...(19): siRNA sense strand
gggaggugauggaugugua

SEQ ID NO: 11369 - RNA, 19 nt, Homo sapiens
  misc_RNA (1)...(19): siRNA sense strand
gaagacauaggagaugauu

SEQ ID NO: 11370 - RNA, 19 nt, Homo sapiens
  misc_RNA (1)...(19): siRNA sense strand
aaacaaaugcggaacugaa

SEQ ID NO: 11371 - RNA, 19 nt, Homo sapiens
  misc_RNA (1)...(19): siRNA sense strand
ggagaaggcccagccaaug

SEQ ID NO: 11372 - RNA, 19 nt, Homo sapiens
  misc_RNA (1)...(19): siRNA sense strand
ugaauacagugaaagagau

SEQ ID NO: 11373 - RNA, 19 nt, Homo sapiens
  misc_RNA (1)...(19): siRNA sense strand
acagagcccugcugaagug

SEQ ID NO: 11374 - RNA, 19 nt, Homo sapiens
  misc_RNA (1)...(19): siRNA sense strand
ugacagcaaccaugaagaa

SEQ ID NO: 11375 - RNA, 19 nt, Homo sapiens
  misc_RNA (1)...(19): siRNA sense strand
ccaaaucucaugaaaugga

SEQ ID NO: 11376 - RNA, 19 nt, Homo sapiens
  misc_RNA (1)...(19): siRNA sense strand
ucaauaacgccaucagcua

SEQ ID NO: 11377 - RNA, 19 nt, Homo sapiens
  misc_RNA (1)...(19): siRNA sense strand
agacauaggagaugauuca

SEQ ID NO: 11378 - RNA, 19 nt, Homo sapiens
  misc_RNA (1)...(19): siRNA sense strand
gacuacaguuuaaccaaau

SEQ ID NO: 11379 - RNA, 19 nt, Homo sapiens
  misc_RNA (1)...(19): siRNA sense strand
caucagcuucaaugucuua

SEQ ID NO: 11380 - RNA, 19 nt, Homo sapiens
  misc_RNA (1)...(19): siRNA sense strand
ugaaagaugaauacaguga

SEQ ID NO: 11381 - RNA, 19 nt, Homo sapiens
  misc_RNA (1)...(19): siRNA sense strand
gauaguagcaggccaacca

SEQ ID NO: 11382 - RNA, 19 nt, Homo sapiens
  misc_RNA (1)...(19): siRNA sense strand
caauaacgccaucagcuau

SEQ ID NO: 11383 - RNA, 19 nt, Homo sapiens
  misc_RNA (1)...(19): siRNA sense strand
ggaccaagccaucaauaac

SEQ ID NO: 11384 - RNA, 19 nt, Homo sapiens
  misc_RNA (1)...(19): siRNA sense strand
gcagaaagugcagcgguuu

SEQ ID NO: 11385 - RNA, 19 nt, Homo sapiens
  misc_RNA (1)...(19): siRNA sense strand
gccagaaucacaucuauca

SEQ ID NO: 11386 - RNA, 19 nt, Homo sapiens
  misc_RNA (1)...(19): siRNA sense strand
agugaaagaugaauacagu

SEQ ID NO: 11387 - RNA, 19 nt, Homo sapiens
  misc_RNA (1)...(19): siRNA sense strand
gcacucaggagcagucugu

SEQ ID NO: 11388 - RNA, 19 nt, Homo sapiens
  misc_RNA (1)...(19): siRNA sense strand
gagagugagcucauacaga

SEQ ID NO: 11389 - RNA, 19 nt, Homo sapiens
  misc_RNA (1)...(19): siRNA sense strand
gugcagcgguuuugaauga

SEQ ID NO: 11390 - RNA, 19 nt, Homo sapiens
  misc_RNA (1)...(19): siRNA sense strand
caagagacuccgucaaagu

SEQ ID NO: 11391 - RNA, 19 nt, Homo sapiens
  misc_RNA (1)...(19): siRNA sense strand
ucaaugaaagugaaagaug

SEQ ID NO: 11392 - RNA, 19 nt, Homo sapiens
  misc_RNA (1)...(19): siRNA sense strand
aagaugaacugcgaugugu

SEQ ID NO: 11393 - RNA, 19 nt, Homo sapiens
  misc_RNA (1)...(19): siRNA sense strand
ccaagagacuccgucaaag

SEQ ID NO: 11394 - RNA, 19 nt, Homo sapiens
  misc_RNA (1)...(19): siRNA sense strand
cccaagagacuccgucaaa

SEQ ID NO: 11395 - RNA, 19 nt, Homo sapiens
  misc_RNA (1)...(19): siRNA sense strand
gaugaacugcgaugugugu

SEQ ID NO: 11396 - RNA, 19 nt, Homo sapiens
  misc_RNA (1)...(19): siRNA sense strand
gaauacagugaaagagaug

SEQ ID NO: 11397 - RNA, 19 nt, Homo sapiens
  misc_RNA (1)...(19): siRNA sense strand
ccaguuaucagcagcaugu

SEQ ID NO: 11398 - RNA, 19 nt, Homo sapiens
  misc_RNA (1)...(19): siRNA sense strand
ucggagaugguuccaguua

SEQ ID NO: 11399 - RNA, 19 nt, Homo sapiens
  misc_RNA (1)...(19): siRNA sense strand
gccaaccaguggaaagaug

SEQ ID NO: 11400 - RNA, 19 nt, Homo sapiens
  misc_RNA (1)...(19): siRNA sense strand
caugggaaaugcagaagag

SEQ ID NO: 11401 - RNA, 19 nt, Homo sapiens
  misc_RNA (1)...(19): siRNA sense strand
gccaugaucgguaugaguu

SEQ ID NO: 11402 - RNA, 19 nt, Homo sapiens
  misc_RNA (1)...(19): siRNA sense strand
agucagaacccaugggaaa

SEQ ID NO: 11403 - RNA, 19 nt, Homo sapiens
  misc_RNA (1)...(19): siRNA sense strand
ucgaagccaugaucgguau

SEQ ID NO: 11404 - RNA, 19 nt, Homo sapiens
  misc_RNA (1)...(19): siRNA sense strand
cucaagagcuggaaaagaa

SEQ ID NO: 11405 - RNA, 19 nt, Homo sapiens
  misc_RNA (1)...(19): siRNA sense strand
ggauaucgaagccaugauc

SEQ ID NO: 11406 - RNA, 19 nt, Homo sapiens
  misc_RNA (1)...(19): siRNA sense strand
ccacggacacugacagcaa

SEQ ID NO: 11407 - RNA, 19 nt, Homo sapiens
  misc_RNA (1)...(19): siRNA sense strand
gaaagaugaacugcgaugu

SEQ ID NO: 11408 - RNA, 19 nt, Homo sapiens
  misc_RNA (1)...(19): siRNA sense strand
gagacuccgucaaagugau

SEQ ID NO: 11409 - RNA, 19 nt, Homo sapiens
  misc_RNA (1)...(19): siRNA sense strand
acacugacagcaaccauga

SEQ ID NO: 11410 - RNA, 19 nt, Homo sapiens
  misc_RNA (1)...(19): siRNA sense strand
acauuaaguuggagagaca

SEQ ID NO: 11411 - RNA, 19 nt, Homo sapiens
  misc_RNA (1)...(19): siRNA sense strand
gaagccaugaucgguauga

SEQ ID NO: 11412 - RNA, 19 nt, Homo sapiens
  misc_RNA (1)...(19): siRNA sense strand
caaagugaucaacaaggaa

SEQ ID NO: 11413 - RNA, 19 nt, Homo sapiens
  misc_RNA (1)...(19): siRNA sense strand
gaugaagacauaggagaug

SEQ ID NO: 11414 - RNA, 19 nt, Homo sapiens
  misc_RNA (1)...(19): siRNA sense strand
acaaacaaaugcggaacug

SEQ ID NO: 11415 - RNA, 19 nt, Homo sapiens
  misc_RNA (1)...(19): siRNA sense strand
ugcaucagcuucaaugucu

SEQ ID NO: 11416 - RNA, 19 nt, Homo sapiens
  misc_RNA (1)...(19): siRNA sense strand
acacagagcccugcugaag

SEQ ID NO: 11417 - RNA, 19 nt, Homo sapiens
  misc_RNA (1)...(19): siRNA sense strand
gugaaagagaugagaaugu

SEQ ID NO: 11418 - RNA, 19 nt, Homo sapiens
  misc_RNA (1)...(19): siRNA sense strand
cggagaugguuccaguuau

SEQ ID NO: 11419 - RNA, 19 nt, Homo sapiens
  misc_RNA (1)...(19): siRNA sense strand
uuacauguaugagaaagag

SEQ ID NO: 11420 - RNA, 19 nt, Homo sapiens
  misc_RNA (1)...(19): siRNA sense strand
ccuuacagcuauucaagag

SEQ ID NO: 11421 - RNA, 19 nt, Homo sapiens
  misc_RNA (1)...(19): siRNA sense strand
ucaaguuacauguaugaga

SEQ ID NO: 11422 - RNA, 19 nt, Homo sapiens
  misc_RNA (1)...(19): siRNA sense strand
aguguaacauguguggaua

SEQ ID NO: 11423 - RNA, 19 nt, Homo sapiens
  misc_RNA (1)...(19): siRNA sense strand
ggaggugauggauguguau

SEQ ID NO: 11424 - RNA, 19 nt, Homo sapiens
  misc_RNA (1)...(19): siRNA sense strand
cagcagcauguaucccaua

SEQ ID NO: 11425 - RNA, 19 nt, Homo sapiens
  misc_RNA (1)...(19): siRNA sense strand
gaguguaacauguguggau

SEQ ID NO: 11426 - RNA, 19 nt, Homo sapiens
  misc_RNA (1)...(19): siRNA sense strand
gcccagccaaugaagauga

SEQ ID NO: 11427 - RNA, 19 nt, Homo sapiens
  misc_RNA (1)...(19): siRNA sense strand
cauaagcgaagccauacug

SEQ ID NO: 11428 - RNA, 19 nt, Homo sapiens
  misc_RNA (1)...(19): siRNA sense strand
aaagaugaacugcgaugug

SEQ ID NO: 11429 - RNA, 19 nt, Homo sapiens
  misc_RNA (1)...(19): siRNA sense strand
ccaaccaguggaaagauga

SEQ ID NO: 11430 - RNA, 19 nt, Homo sapiens
  misc_RNA (1)...(19): siRNA sense strand
gugacccuuucgaguguaa

SEQ ID NO: 11431 - RNA, 19 nt, Homo sapiens
  misc_RNA (1)...(19): siRNA sense strand
ccaaugaagaugaagacau

SEQ ID NO: 11432 - RNA, 19 nt, Homo sapiens
  misc_RNA (1)...(19): siRNA sense strand
gagaugguuccaguuauca

SEQ ID NO: 11433 - RNA, 19 nt, Homo sapiens
  misc_RNA (1)...(19): siRNA sense strand
uaaguuggagagacauguu

SEQ ID NO: 11434 - RNA, 19 nt, Homo sapiens
  misc_RNA (1)...(19): siRNA sense strand
uguaugagaaagagaguga

SEQ ID NO: 11435 - RNA, 19 nt, Homo sapiens
  misc_RNA (1)...(19): siRNA sense strand
caaacaaaugcggaacuga

SEQ ID NO: 11436 - RNA, 19 nt, Homo sapiens
  misc_RNA (1)...(19): siRNA sense strand
aagagacuccgucaaagug

SEQ ID NO: 11437 - RNA, 19 nt, Homo sapiens
  misc_RNA (1)...(19): siRNA sense strand
ccaugaagaacgccagaau

SEQ ID NO: 11438 - RNA, 19 nt, Homo sapiens
  misc_RNA (1)...(19): siRNA sense strand
uggaccaagccaucaauaa

SEQ ID NO: 11439 - RNA, 19 nt, Homo sapiens
  misc_RNA (1)...(19): siRNA sense strand
cauacagacccgcaugaug

SEQ ID NO: 11440 - RNA, 19 nt, Homo sapiens
  misc_RNA (1)...(19): siRNA sense strand
caaugaagaugaagacaua

SEQ ID NO: 11441 - RNA, 19 nt, Homo sapiens
  misc_RNA (1)...(19): siRNA sense strand
gaaagagagugagcucaua

SEQ ID NO: 11442 - RNA, 19 nt, Homo sapiens
  misc_RNA (1)...(19): siRNA sense strand
caaguuacauguaugagaa

SEQ ID NO: 11443 - RNA, 19 nt, Homo sapiens
  misc_RNA (1)...(19): siRNA sense strand
caaugaaagugaaagauga

SEQ ID NO: 11444 - RNA, 19 nt, Homo sapiens
  misc_RNA (1)...(19): siRNA sense strand
cauaggagaugauucaaug

SEQ ID NO: 11445 - RNA, 19 nt, Homo sapiens
  misc_RNA (1)...(19): siRNA sense strand
ugaaaucccuuacagcuau

SEQ ID NO: 11446 - RNA, 19 nt, Homo sapiens
  misc_RNA (1)...(19): siRNA sense strand
ugaaagagaugagaauguu

SEQ ID NO: 11447 - RNA, 19 nt, Homo sapiens
  misc_RNA (1)...(19): siRNA sense strand
aaccaaaucucaugaaaug

SEQ ID NO: 11448 - RNA, 19 nt, Homo sapiens
  misc_RNA (1)...(19): siRNA sense strand
gagcgugccuucugagaga

SEQ ID NO: 11449 - RNA, 19 nt, Homo sapiens
  misc_RNA (1)...(19): siRNA sense strand
cauguugucucauucgaua

SEQ ID NO: 11450 - RNA, 19 nt, Homo sapiens
  misc_RNA (1)...(19): siRNA sense strand
ggagaugguuccaguuauc

SEQ ID NO: 11451 - RNA, 19 nt, Homo sapiens
  misc_RNA (1)...(19): siRNA sense strand
gaagaacgccagaaucaca

SEQ ID NO: 11452 - RNA, 19 nt, Homo sapiens
  misc_RNA (1)...(19): siRNA sense strand
ucaaagugaucaacaagga

SEQ ID NO: 11453 - RNA, 19 nt, Homo sapiens
  misc_RNA (1)...(19): siRNA sense strand
ugacuacaguuuaaccaaa

SEQ ID NO: 11454 - RNA, 19 nt, Homo sapiens
  misc_RNA (1)...(19): siRNA sense strand
ucacauagccagaggagaa

SEQ ID NO: 11455 - RNA, 19 nt, Homo sapiens
  misc_RNA (1)...(19): siRNA sense strand
gagaaggcccagccaauga

SEQ ID NO: 11456 - RNA, 19 nt, Homo sapiens
  misc_RNA (1)...(19): siRNA sense strand
cagcuucaaugucuuaaug

SEQ ID NO: 11457 - RNA, 19 nt, Homo sapiens
  misc_RNA (1)...(19): siRNA sense strand
uaacauguguggauaucga

SEQ ID NO: 11458 - RNA, 19 nt, Homo sapiens
  misc_RNA (1)...(19): siRNA sense strand
gcaaugggaugccacuucu

SEQ ID NO: 11459 - RNA, 19 nt, Homo sapiens
  misc_RNA (1)...(19): siRNA sense strand
gaaagugaaagaugaauac

SEQ ID NO: 11460 - RNA, 19 nt, Homo sapiens
  misc_RNA (1)...(19): siRNA sense strand
uuacagcuauucaagagaa

SEQ ID NO: 11461 - RNA, 19 nt, Homo sapiens
  misc_RNA (1)...(19): siRNA sense strand
gaaagagaugagaauguuu

SEQ ID NO: 11462 - RNA, 19 nt, Homo sapiens
  misc_RNA (1)...(19): siRNA sense strand
guucauaagcgaagccaua

SEQ ID NO: 11463 - RNA, 19 nt, Homo sapiens
  misc_RNA (1)...(19): siRNA sense strand
gaaaucccuuacagcuauu

SEQ ID NO: 11464 - RNA, 19 nt, Homo sapiens
  misc_RNA (1)...(19): siRNA sense strand
caaaucucaugaaauggaa

SEQ ID NO: 11465 - RNA, 19 nt, Homo sapiens
  misc_RNA (1)...(19): siRNA sense strand
aaucacaucuaucagcaaa

SEQ ID NO: 11466 - RNA, 19 nt, Homo sapiens
  misc_RNA (1)...(19): siRNA sense strand
gcauccaccuuccagagaa

SEQ ID NO: 11467 - RNA, 19 nt, Homo sapiens
  misc_RNA (1)...(19): siRNA sense strand
gaaagaugaauacagugaa

SEQ ID NO: 11468 - RNA, 19 nt, Homo sapiens
  misc_RNA (1)...(19): siRNA sense strand
gggaggugauggaugugua

SEQ ID NO: 11469 - RNA, 19 nt, Homo sapiens
  misc_RNA (1)...(19): siRNA sense strand
gaagacauaggagaugauu

SEQ ID NO: 11470 - RNA, 19 nt, Homo sapiens
  misc_RNA (1)...(19): siRNA sense strand
aaacaaaugcggaacugaa

SEQ ID NO: 11471 - RNA, 19 nt, Homo sapiens
  misc_RNA (1)...(19): siRNA sense strand
ggagaaggcccagccaaug

SEQ ID NO: 11472 - RNA, 19 nt, Homo sapiens
  misc_RNA (1)...(19): siRNA sense strand
ugaauacagugaaagagau

SEQ ID NO: 11473 - RNA, 19 nt, Homo sapiens
  misc_RNA (1)...(19): siRNA sense strand
acagagcccugcugaagug

SEQ ID NO: 11474 - RNA, 19 nt, Homo sapiens
  misc_RNA (1)...(19): siRNA sense strand
ugacagcaaccaugaagaa

SEQ ID NO: 11475 - RNA, 19 nt, Homo sapiens
  misc_RNA (1)...(19): siRNA sense strand
ccaaaucucaugaaaugga

SEQ ID NO: 11476 - RNA, 19 nt, Homo sapiens
  misc_RNA (1)...(19): siRNA sense strand
ucaauaacgccaucagcua

SEQ ID NO: 11477 - RNA, 19 nt, Homo sapiens
  misc_RNA (1)...(19): siRNA sense strand
agacauaggagaugauuca

SEQ ID NO: 11478 - RNA, 19 nt, Homo sapiens
  misc_RNA (1)...(19): siRNA sense strand
gacuacaguuuaaccaaau

SEQ ID NO: 11479 - RNA, 19 nt, Homo sapiens
  misc_RNA (1)...(19): siRNA sense strand
caucagcuucaaugucuua

SEQ ID NO: 11480 - RNA, 19 nt, Homo sapiens
  misc_RNA (1)...(19): siRNA sense strand
ugaaagaugaauacaguga

SEQ ID NO: 11481 - RNA, 19 nt, Homo sapiens
  misc_RNA (1)...(19): siRNA sense strand
gauaguagcaggccaacca

SEQ ID NO: 11482 - RNA, 19 nt, Homo sapiens
  misc_RNA (1)...(19): siRNA sense strand
caauaacgccaucagcuau

SEQ ID NO: 11483 - RNA, 19 nt, Homo sapiens
  misc_RNA (1)...(19): siRNA sense strand
ggaccaagccaucaauaac

SEQ ID NO: 11484 - RNA, 19 nt, Homo sapiens
  misc_RNA (1)...(19): siRNA sense strand
gcagaaagugcagcgguuu

SEQ ID NO: 11485 - RNA, 19 nt, Homo sapiens
  misc_RNA (1)...(19): siRNA sense strand
gccagaaucacaucuauca

SEQ ID NO: 11486 - RNA, 19 nt, Homo sapiens
  misc_RNA (1)...(19): siRNA sense strand
agugaaagaugaauacagu

SEQ ID NO: 11487 - RNA, 19 nt, Homo sapiens
  misc_RNA (1)...(19): siRNA sense strand
gcacucaggagcagucugu

SEQ ID NO: 11488 - RNA, 19 nt, Homo sapiens
  misc_RNA (1)...(19): siRNA sense strand
gagagugagcucauacaga

SEQ ID NO: 11489 - RNA, 19 nt, Homo sapiens
  misc_RNA (1)...(19): siRNA sense strand
gugcagcgguuuugaauga

SEQ ID NO: 11490 - RNA, 19 nt, Homo sapiens
  misc_RNA (1)...(19): siRNA sense strand
caagagacuccgucaaagu

SEQ ID NO: 11491 - RNA, 19 nt, Homo sapiens
  misc_RNA (1)...(19): siRNA sense strand
ucaaugaaagugaaagaug

SEQ ID NO: 11492 - RNA, 19 nt, Homo sapiens
  misc_RNA (1)...(19): siRNA sense strand
aagaugaacugcgaugugu

SEQ ID NO: 11493 - RNA, 19 nt, Homo sapiens
  misc_RNA (1)...(19): siRNA sense strand
ccaagagacuccgucaaag

SEQ ID NO: 11494 - RNA, 19 nt, Homo sapiens
  misc_RNA (1)...(19): siRNA sense strand
cccaagagacuccgucaaa

SEQ ID NO: 11495 - RNA, 19 nt, Homo sapiens
  misc_RNA (1)...(19): siRNA sense strand
gaugaacugcgaugugugu

SEQ ID NO: 11496 - RNA, 19 nt, Homo sapiens
  misc_RNA (1)...(19): siRNA sense strand
gaauacagugaaagagaug

SEQ ID NO: 11497 - RNA, 19 nt, Homo sapiens
  misc_RNA (1)...(19): siRNA sense strand
ccaguuaucagcagcaugu

SEQ ID NO: 11498 - RNA, 19 nt, Homo sapiens
  misc_RNA (1)...(19): siRNA sense strand
ucggagaugguuccaguua

SEQ ID NO: 11499 - RNA, 19 nt, Homo sapiens
  misc_RNA (1)...(19): siRNA sense strand
gccaaccaguggaaagaug

SEQ ID NO: 11500 - RNA, 19 nt, Homo sapiens
  misc_RNA (1)...(19): siRNA sense strand
caugggaaaugcagaagag

SEQ ID NO: 11501 - RNA, 19 nt, Homo sapiens
  misc_RNA (1)...(19): siRNA sense strand
gccaugaucgguaugaguu

SEQ ID NO: 11502 - RNA, 19 nt, Homo sapiens
  misc_RNA (1)...(19): siRNA sense strand
agucagaacccaugggaaa

SEQ ID NO: 11503 - RNA, 19 nt, Homo sapiens
  misc_RNA (1)...(19): siRNA sense strand
ucgaagccaugaucgguau

SEQ ID NO: 11504 - RNA, 19 nt, Homo sapiens
  misc_RNA (1)...(19): siRNA sense strand
cucaagagcuggaaaagaa

SEQ ID NO: 11505 - RNA, 19 nt, Homo sapiens
  misc_RNA (1)...(19): siRNA sense strand
ggauaucgaagccaugauc

SEQ ID NO: 11506 - RNA, 19 nt, Homo sapiens
  misc_RNA (1)...(19): siRNA sense strand
ccacggacacugacagcaa

SEQ ID NO: 11507 - RNA, 19 nt, Homo sapiens
  misc_RNA (1)...(19): siRNA sense strand
gaaagaugaacugcgaugu

SEQ ID NO: 11508 - RNA, 19 nt, Homo sapiens
  misc_RNA (1)...(19): siRNA sense strand
gagacuccgucaaagugau

SEQ ID NO: 11509 - RNA, 19 nt, Homo sapiens
  misc_RNA (1)...(19): siRNA sense strand
acacugacagcaaccauga

SEQ ID NO: 11510 - RNA, 19 nt, Homo sapiens
  misc_RNA (1)...(19): siRNA sense strand
acauuaaguuggagagaca

SEQ ID NO: 11511 - RNA, 19 nt, Homo sapiens
  misc_RNA (1)...(19): siRNA sense strand
gaagccaugaucgguauga

SEQ ID NO: 11512 - RNA, 19 nt, Homo sapiens
  misc_RNA (1)...(19): siRNA sense strand
caaagugaucaacaaggaa

SEQ ID NO: 11513 - RNA, 19 nt, Homo sapiens
  misc_RNA (1)...(19): siRNA sense strand
gaugaagacauaggagaug

SEQ ID NO: 11514 - RNA, 19 nt, Homo sapiens
  misc_RNA (1)...(19): siRNA sense strand
acaaacaaaugcggaacug

SEQ ID NO: 11515 - RNA, 19 nt, Homo sapiens
  misc_RNA (1)...(19): siRNA sense strand
ugcaucagcuucaaugucu

SEQ ID NO: 11516 - RNA, 19 nt, Homo sapiens
  misc_RNA (1)...(19): siRNA sense strand
acacagagcccugcugaag

SEQ ID NO: 11517 - RNA, 19 nt, Homo sapiens
  misc_RNA (1)...(19): siRNA sense strand
gugaaagagaugagaaugu

SEQ ID NO: 11518 - RNA, 19 nt, Homo sapiens
  misc_RNA (1)...(19): siRNA sense strand
cggagaugguuccaguuau

SEQ ID NO: 11519 - RNA, 19 nt, Homo sapiens
  misc_RNA (1)...(19): siRNA sense strand
uuacauguaugagaaagag

SEQ ID NO: 11520 - RNA, 19 nt, Homo sapiens
  misc_RNA (1)...(19): siRNA sense strand
ccuuacagcuauucaagag

SEQ ID NO: 11521 - RNA, 19 nt, Homo sapiens
  misc_RNA (1)...(19): siRNA sense strand
ucaaguuacauguaugaga

SEQ ID NO: 11522 - RNA, 19 nt, Homo sapiens
  misc_RNA (1)...(19): siRNA sense strand
aguguaacauguguggaua

SEQ ID NO: 11523 - RNA, 19 nt, Homo sapiens
  misc_RNA (1)...(19): siRNA sense strand
ggaggugauggauguguau

SEQ ID NO: 11524 - RNA, 19 nt, Homo sapiens
  misc_RNA (1)...(19): siRNA sense strand
cagcagcauguaucccaua

SEQ ID NO: 11525 - RNA, 19 nt, Homo sapiens
  misc_RNA (1)...(19): siRNA sense strand
gaguguaacauguguggau

SEQ ID NO: 11526 - RNA, 19 nt, Homo sapiens
  misc_RNA (1)...(19): siRNA sense strand
gcccagccaaugaagauga

SEQ ID NO: 11527 - RNA, 19 nt, Homo sapiens
  misc_RNA (1)...(19): siRNA sense strand
cauaagcgaagccauacug

SEQ ID NO: 11528 - RNA, 19 nt, Homo sapiens
  misc_RNA (1)...(19): siRNA sense strand
aaagaugaacugcgaugug

SEQ ID NO: 11529 - RNA, 19 nt, Homo sapiens
  misc_RNA (1)...(19): siRNA sense strand
ccaaccaguggaaagauga

SEQ ID NO: 11530 - RNA, 19 nt, Homo sapiens
  misc_RNA (1)...(19): siRNA sense strand
gugacccuuucgaguguaa

SEQ ID NO: 11531 - RNA, 19 nt, Homo sapiens
  misc_RNA (1)...(19): siRNA sense strand
ccaaugaagaugaagacau

SEQ ID NO: 11532 - RNA, 19 nt, Homo sapiens
  misc_RNA (1)...(19): siRNA sense strand
gagaugguuccaguuauca

SEQ ID NO: 11533 - RNA, 19 nt, Homo sapiens
  misc_RNA (1)...(19): siRNA sense strand
uaaguuggagagacauguu

SEQ ID NO: 11534 - RNA, 19 nt, Homo sapiens
  misc_RNA (1)...(19): siRNA sense strand
uguaugagaaagagaguga

SEQ ID NO: 11535 - RNA, 19 nt, Homo sapiens
  misc_RNA (1)...(19): siRNA sense strand
caaacaaaugcggaacuga

SEQ ID NO: 11536 - RNA, 19 nt, Homo sapiens
  misc_RNA (1)...(19): siRNA sense strand
aagagacuccgucaaagug

SEQ ID NO: 11537 - RNA, 19 nt, Homo sapiens
  misc_RNA (1)...(19): siRNA sense strand
ccaugaagaacgccagaau

SEQ ID NO: 11538 - RNA, 19 nt, Homo sapiens
  misc_RNA (1)...(19): siRNA sense strand
uggaccaagccaucaauaa

SEQ ID NO: 11539 - RNA, 19 nt, Homo sapiens
  misc_RNA (1)...(19): siRNA sense strand
cauacagacccgcaugaug

SEQ ID NO: 11540 - RNA, 19 nt, Homo sapiens
  misc_RNA (1)...(19): siRNA sense strand
caaugaagaugaagacaua

SEQ ID NO: 11541 - RNA, 19 nt, Homo sapiens
  misc_RNA (1)...(19): siRNA sense strand
gaaagagagugagcucaua

SEQ ID NO: 11542 - RNA, 19 nt, Homo sapiens
  misc_RNA (1)...(19): siRNA sense strand
caaguuacauguaugagaa

SEQ ID NO: 11543 - RNA, 19 nt, Homo sapiens
  misc_RNA (1)...(19): siRNA sense strand
caaugaaagugaaagauga

SEQ ID NO: 11544 - RNA, 19 nt, Homo sapiens
  misc_RNA (1)...(19): siRNA sense strand
cauaggagaugauucaaug

SEQ ID NO: 11545 - RNA, 19 nt, Homo sapiens
  misc_RNA (1)...(19): siRNA sense strand
ugaaaucccuuacagcuau

SEQ ID NO: 11546 - RNA, 19 nt, Homo sapiens
  misc_RNA (1)...(19): siRNA sense strand
ugaaagagaugagaauguu

SEQ ID NO: 11547 - RNA, 19 nt, Homo sapiens
  misc_RNA (1)...(19): siRNA sense strand
aaccaaaucucaugaaaug

SEQ ID NO: 11548 - RNA, 19 nt, Homo sapiens
  misc_RNA (1)...(19): siRNA sense strand
gagcgugccuucugagaga

SEQ ID NO: 11549 - RNA, 19 nt, Homo sapiens
  misc_RNA (1)...(19): siRNA sense strand
cauguugucucauucgaua

SEQ ID NO: 11550 - RNA, 19 nt, Homo sapiens
  misc_RNA (1)...(19): siRNA sense strand
ggagaugguuccaguuauc

SEQ ID NO: 11551 - RNA, 19 nt, Homo sapiens
  misc_RNA (1)...(19): siRNA sense strand
gaagaacgccagaaucaca

SEQ ID NO: 11552 - RNA, 19 nt, Homo sapiens
  misc_RNA (1)...(19): siRNA sense strand
ucaaagugaucaacaagga

SEQ ID NO: 11553 - RNA, 19 nt, Homo sapiens
  misc_RNA (1)...(19): siRNA sense strand
ugacuacaguuuaaccaaa

SEQ ID NO: 11554 - RNA, 19 nt, Homo sapiens
  misc_RNA (1)...(19): siRNA sense strand
ucacauagccagaggagaa

SEQ ID NO: 11555 - RNA, 19 nt, Homo sapiens
  misc_RNA (1)...(19): siRNA sense strand
gagaaggcccagccaauga

SEQ ID NO: 11556 - RNA, 19 nt, Homo sapiens
  misc_RNA (1)...(19): siRNA sense strand
cagcuucaaugucuuaaug

SEQ ID NO: 11557 - RNA, 19 nt, Homo sapiens
  misc_RNA (1)...(19): siRNA sense strand
uaacauguguggauaucga

SEQ ID NO: 11558 - RNA, 19 nt, Homo sapiens
  misc_RNA (1)...(19): siRNA sense strand
gcaaugggaugccacuucu

SEQ ID NO: 11559 - RNA, 19 nt, Homo sapiens
  misc_RNA (1)...(19): siRNA sense strand
gaaagugaaagaugaauac

SEQ ID NO: 11560 - RNA, 19 nt, Homo sapiens
  misc_RNA (1)...(19): siRNA sense strand
uuacagcuauucaagagaa

SEQ ID NO: 11561 - RNA, 19 nt, Homo sapiens
  misc_RNA (1)...(19): siRNA sense strand
gaaagagaugagaauguuu

SEQ ID NO: 11562 - RNA, 19 nt, Homo sapiens
  misc_RNA (1)...(19): siRNA sense strand
guucauaagcgaagccaua

SEQ ID NO: 11563 - RNA, 19 nt, Homo sapiens
  misc_RNA (1)...(19): siRNA sense strand
gaaaucccuuacagcuauu

SEQ ID NO: 11564 - RNA, 19 nt, Homo sapiens
  misc_RNA (1)...(19): siRNA sense strand
caaaucucaugaaauggaa

SEQ ID NO: 11565 - RNA, 19 nt, Homo sapiens
  misc_RNA (1)...(19): siRNA sense strand
aaucacaucuaucagcaaa

SEQ ID NO: 11566 - RNA, 19 nt, Homo sapiens
  misc_RNA (1)...(19): siRNA sense strand
gcauccaccuuccagagaa

SEQ ID NO: 11567 - RNA, 19 nt, Homo sapiens
  misc_RNA (1)...(19): siRNA sense strand
gaaagaugaauacagugaa

SEQ ID NO: 11568 - RNA, 19 nt, Homo sapiens
  misc_RNA (1)...(19): siRNA sense strand
gggaggugauggaugugua

SEQ ID NO: 11569 - RNA, 19 nt, Homo sapiens
  misc_RNA (1)...(19): siRNA sense strand
gaagacauaggagaugauu

SEQ ID NO: 11570 - RNA, 19 nt, Homo sapiens
  misc_RNA (1)...(19): siRNA sense strand
aaacaaaugcggaacugaa

SEQ ID NO: 11571 - RNA, 19 nt, Homo sapiens
  misc_RNA (1)...(19): siRNA sense strand
ggagaaggcccagccaaug

SEQ ID NO: 11572 - RNA, 19 nt, Homo sapiens
  misc_RNA (1)...(19): siRNA sense strand
ugaauacagugaaagagau

SEQ ID NO: 11573 - RNA, 19 nt, Homo sapiens
  misc_RNA (1)...(19): siRNA sense strand
acagagcccugcugaagug

SEQ ID NO: 11574 - RNA, 19 nt, Homo sapiens
  misc_RNA (1)...(19): siRNA sense strand
ugacagcaaccaugaagaa

SEQ ID NO: 11575 - RNA, 19 nt, Homo sapiens
  misc_RNA (1)...(19): siRNA sense strand
ccaaaucucaugaaaugga

SEQ ID NO: 11576 - RNA, 19 nt, Homo sapiens
  misc_RNA (1)...(19): siRNA sense strand
ucaauaacgccaucagcua

SEQ ID NO: 11577 - RNA, 19 nt, Homo sapiens
  misc_RNA (1)...(19): siRNA sense strand
agacauaggagaugauuca

SEQ ID NO: 11578 - RNA, 19 nt, Homo sapiens
  misc_RNA (1)...(19): siRNA sense strand
gacuacaguuuaaccaaau

SEQ ID NO: 11579 - RNA, 19 nt, Homo sapiens
  misc_RNA (1)...(19): siRNA sense strand
caucagcuucaaugucuua

SEQ ID NO: 11580 - RNA, 19 nt, Homo sapiens
  misc_RNA (1)...(19): siRNA sense strand
ugaaagaugaauacaguga

SEQ ID NO: 11581 - RNA, 19 nt, Homo sapiens
  misc_RNA (1)...(19): siRNA sense strand
gauaguagcaggccaacca

SEQ ID NO: 11582 - RNA, 19 nt, Homo sapiens
  misc_RNA (1)...(19): siRNA sense strand
caauaacgccaucagcuau

SEQ ID NO: 11583 - RNA, 19 nt, Homo sapiens
  misc_RNA (1)...(19): siRNA sense strand
ggaccaagccaucaauaac

SEQ ID NO: 11584 - RNA, 19 nt, Homo sapiens
  misc_RNA (1)...(19): siRNA sense strand
gcagaaagugcagcgguuu

SEQ ID NO: 11585 - RNA, 19 nt, Homo sapiens
  misc_RNA (1)...(19): siRNA sense strand
gccagaaucacaucuauca

SEQ ID NO: 11586 - RNA, 19 nt, Homo sapiens
  misc_RNA (1)...(19): siRNA sense strand
agugaaagaugaauacagu

SEQ ID NO: 11587 - RNA, 19 nt, Homo sapiens
  misc_RNA (1)...(19): siRNA sense strand
gcacucaggagcagucugu

SEQ ID NO: 11588 - RNA, 19 nt, Homo sapiens
  misc_RNA (1)...(19): siRNA sense strand
gagagugagcucauacaga

SEQ ID NO: 11589 - RNA, 19 nt, Homo sapiens
  misc_RNA (1)...(19): siRNA sense strand
gugcagcgguuuugaauga

SEQ ID NO: 11590 - RNA, 19 nt, Homo sapiens
  misc_RNA (1)...(19): siRNA sense strand
caagagacuccgucaaagu

SEQ ID NO: 11591 - RNA, 19 nt, Homo sapiens
  misc_RNA (1)...(19): siRNA sense strand
ucaaugaaagugaaagaug

SEQ ID NO: 11592 - RNA, 19 nt, Homo sapiens
  misc_RNA (1)...(19): siRNA sense strand
aagaugaacugcgaugugu

SEQ ID NO: 11593 - RNA, 19 nt, Homo sapiens
  misc_RNA (1)...(19): siRNA sense strand
ccaagagacuccgucaaag

SEQ ID NO: 11594 - RNA, 19 nt, Homo sapiens
  misc_RNA (1)...(19): siRNA sense strand
cccaagagacuccgucaaa

SEQ ID NO: 11595 - RNA, 19 nt, Homo sapiens
  misc_RNA (1)...(19): siRNA sense strand
gaugaacugcgaugugugu

SEQ ID NO: 11596 - RNA, 19 nt, Homo sapiens
  misc_RNA (1)...(19): siRNA sense strand
gaauacagugaaagagaug

SEQ ID NO: 11597 - RNA, 19 nt, Homo sapiens
  misc_RNA (1)...(19): siRNA sense strand
ccaguuaucagcagcaugu

SEQ ID NO: 11598 - RNA, 19 nt, Homo sapiens
  misc_RNA (1)...(19): siRNA sense strand
ucggagaugguuccaguua

SEQ ID NO: 11599 - RNA, 19 nt, Homo sapiens
  misc_RNA (1)...(19): siRNA sense strand
gccaaccaguggaaagaug

SEQ ID NO: 11600 - RNA, 19 nt, Homo sapiens
  misc_RNA (1)...(19): siRNA sense strand
caugggaaaugcagaagag

SEQ ID NO: 11601 - RNA, 19 nt, Homo sapiens
  misc_RNA (1)...(19): siRNA sense strand
gccaugaucgguaugaguu

SEQ ID NO: 11602 - RNA, 19 nt, Homo sapiens
  misc_RNA (1)...(19): siRNA sense strand
agucagaacccaugggaaa

SEQ ID NO: 11603 - RNA, 19 nt, Homo sapiens
  misc_RNA (1)...(19): siRNA sense strand
ucgaagccaugaucgguau

SEQ ID NO: 11604 - RNA, 19 nt, Homo sapiens
  misc_RNA (1)...(19): siRNA sense strand
cucaagagcuggaaaagaa

SEQ ID NO: 11605 - RNA, 19 nt, Homo sapiens
  misc_RNA (1)...(19): siRNA sense strand
ggauaucgaagccaugauc

SEQ ID NO: 11606 - RNA, 19 nt, Homo sapiens
  misc_RNA (1)...(19): siRNA sense strand
ccacggacacugacagcaa

SEQ ID NO: 11607 - RNA, 19 nt, Homo sapiens
  misc_RNA (1)...(19): siRNA sense strand
gaaagaugaacugcgaugu

SEQ ID NO: 11608 - RNA, 19 nt, Homo sapiens
  misc_RNA (1)...(19): siRNA sense strand
gagacuccgucaaagugau

SEQ ID NO: 11609 - RNA, 19 nt, Homo sapiens
  misc_RNA (1)...(19): siRNA sense strand
acacugacagcaaccauga

SEQ ID NO: 11610 - RNA, 19 nt, Homo sapiens
  misc_RNA (1)...(19): siRNA sense strand
acauuaaguuggagagaca

SEQ ID NO: 11611 - RNA, 19 nt, Homo sapiens
  misc_RNA (1)...(19): siRNA sense strand
gaagccaugaucgguauga

SEQ ID NO: 11612 - RNA, 19 nt, Homo sapiens
  misc_RNA (1)...(19): siRNA sense strand
caaagugaucaacaaggaa

SEQ ID NO: 11613 - RNA, 19 nt, Homo sapiens
  misc_RNA (1)...(19): siRNA sense strand
gaugaagacauaggagaug

SEQ ID NO: 11614 - RNA, 19 nt, Homo sapiens
  misc_RNA (1)...(19): siRNA sense strand
acaaacaaaugcggaacug

SEQ ID NO: 11615 - RNA, 19 nt, Homo sapiens
  misc_RNA (1)...(19): siRNA sense strand
ugcaucagcuucaaugucu

SEQ ID NO: 11616 - RNA, 19 nt, Homo sapiens
  misc_RNA (1)...(19): siRNA sense strand
acacagagcccugcugaag

SEQ ID NO: 11617 - RNA, 19 nt, Homo sapiens
  misc_RNA (1)...(19): siRNA sense strand
gugaaagagaugagaaugu

SEQ ID NO: 11618 - RNA, 19 nt, Homo sapiens
  misc_RNA (1)...(19): siRNA sense strand
cggagaugguuccaguuau

SEQ ID NO: 11619 - RNA, 19 nt, Homo sapiens
  misc_RNA (1)...(19): siRNA sense strand
uuacauguaugagaaagag

SEQ ID NO: 11620 - RNA, 19 nt, Homo sapiens
  misc_RNA (1)...(19): siRNA sense strand
ccuuacagcuauucaagag

SEQ ID NO: 11621 - RNA, 19 nt, Homo sapiens
  misc_RNA (1)...(19): siRNA sense strand
ucaaguuacauguaugaga

SEQ ID NO: 11622 - RNA, 19 nt, Homo sapiens
  misc_RNA (1)...(19): siRNA sense strand
aguguaacauguguggaua

SEQ ID NO: 11623 - RNA, 19 nt, Homo sapiens
  misc_RNA (1)...(19): siRNA sense strand
ggaggugauggauguguau

SEQ ID NO: 11624 - RNA, 19 nt, Homo sapiens
  misc_RNA (1)...(19): siRNA sense strand
cagcagcauguaucccaua

SEQ ID NO: 11625 - RNA, 19 nt, Homo sapiens
  misc_RNA (1)...(19): siRNA sense strand
gaguguaacauguguggau

SEQ ID NO: 11626 - RNA, 19 nt, Homo sapiens
  misc_RNA (1)...(19): siRNA sense strand
gcccagccaaugaagauga

SEQ ID NO: 11627 - RNA, 19 nt, Homo sapiens
  misc_RNA (1)...(19): siRNA sense strand
cauaagcgaagccauacug

SEQ ID NO: 11628 - RNA, 19 nt, Homo sapiens
  misc_RNA (1)...(19): siRNA sense strand
aaagaugaacugcgaugug

SEQ ID NO: 11629 - RNA, 19 nt, Homo sapiens
  misc_RNA (1)...(19): siRNA sense strand
ccaaccaguggaaagauga

SEQ ID NO: 11630 - RNA, 19 nt, Homo sapiens
  misc_RNA (1)...(19): siRNA sense strand
gugacccuuucgaguguaa

SEQ ID NO: 11631 - RNA, 19 nt, Homo sapiens
  misc_RNA (1)...(19): siRNA sense strand
ccaaugaagaugaagacau

SEQ ID NO: 11632 - RNA, 19 nt, Homo sapiens
  misc_RNA (1)...(19): siRNA sense strand
gagaugguuccaguuauca

SEQ ID NO: 11633 - RNA, 19 nt, Homo sapiens
  misc_RNA (1)...(19): siRNA sense strand
uaaguuggagagacauguu

SEQ ID NO: 11634 - RNA, 19 nt, Homo sapiens
  misc_RNA (1)...(19): siRNA sense strand
uguaugagaaagagaguga

SEQ ID NO: 11635 - RNA, 19 nt, Homo sapiens
  misc_RNA (1)...(19): siRNA sense strand
caaacaaaugcggaacuga

SEQ ID NO: 11636 - RNA, 19 nt, Homo sapiens
  misc_RNA (1)...(19): siRNA sense strand
aagagacuccgucaaagug

SEQ ID NO: 11637 - RNA, 19 nt, Homo sapiens
  misc_RNA (1)...(19): siRNA sense strand
ccaugaagaacgccagaau

SEQ ID NO: 11638 - RNA, 19 nt, Homo sapiens
  misc_RNA (1)...(19): siRNA sense strand
uggaccaagccaucaauaa

SEQ ID NO: 11639 - RNA, 19 nt, Homo sapiens
  misc_RNA (1)...(19): siRNA sense strand
cauacagacccgcaugaug

SEQ ID NO: 11640 - RNA, 19 nt, Homo sapiens
  misc_RNA (1)...(19): siRNA sense strand
caaugaagaugaagacaua

SEQ ID NO: 11641 - RNA, 19 nt, Homo sapiens
  misc_RNA (1)...(19): siRNA sense strand
gaaagagagugagcucaua

SEQ ID NO: 11642 - RNA, 19 nt, Homo sapiens
  misc_RNA (1)...(19): siRNA sense strand
caaguuacauguaugagaa

SEQ ID NO: 11643 - RNA, 19 nt, Homo sapiens
  misc_RNA (1)...(19): siRNA sense strand
caaugaaagugaaagauga

SEQ ID NO: 11644 - RNA, 19 nt, Homo sapiens
  misc_RNA (1)...(19): siRNA sense strand
cauaggagaugauucaaug

SEQ ID NO: 11645 - RNA, 19 nt, Homo sapiens
  misc_RNA (1)...(19): siRNA sense strand
ugaaaucccuuacagcuau

SEQ ID NO: 11646 - RNA, 19 nt, Homo sapiens
  misc_RNA (1)...(19): siRNA sense strand
ugaaagagaugagaauguu

SEQ ID NO: 11647 - RNA, 19 nt, Homo sapiens
  misc_RNA (1)...(19): siRNA sense strand
aaccaaaucucaugaaaug

SEQ ID NO: 11648 - RNA, 19 nt, Homo sapiens
  misc_RNA (1)...(19): siRNA sense strand
gagcgugccuucugagaga

SEQ ID NO: 11649 - RNA, 19 nt, Homo sapiens
  misc_RNA (1)...(19): siRNA sense strand
cauguugucucauucgaua

SEQ ID NO: 11650 - RNA, 19 nt, Homo sapiens
  misc_RNA (1)...(19): siRNA sense strand
ggagaugguuccaguuauc

SEQ ID NO: 11651 - RNA, 19 nt, Homo sapiens
  misc_RNA (1)...(19): siRNA sense strand
gaagaacgccagaaucaca

SEQ ID NO: 11652 - RNA, 19 nt, Homo sapiens
  misc_RNA (1)...(19): siRNA sense strand
ucaaagugaucaacaagga

SEQ ID NO: 11653 - RNA, 19 nt, Homo sapiens
  misc_RNA (1)...(19): siRNA sense strand
ugacuacaguuuaaccaaa

SEQ ID NO: 11654 - RNA, 19 nt, Homo sapiens
  misc_RNA (1)...(19): siRNA sense strand
ucacauagccagaggagaa

SEQ ID NO: 11655 - RNA, 19 nt, Homo sapiens
  misc_RNA (1)...(19): siRNA sense strand
gagaaggcccagccaauga

SEQ ID NO: 11656 - RNA, 19 nt, Homo sapiens
  misc_RNA (1)...(19): siRNA sense strand
cagcuucaaugucuuaaug

SEQ ID NO: 11657 - RNA, 19 nt, Homo sapiens
  misc_RNA (1)...(19): siRNA sense strand
uaacauguguggauaucga

SEQ ID NO: 11658 - RNA, 19 nt, Homo sapiens
  misc_RNA (1)...(19): siRNA sense strand
gcaaugggaugccacuucu

SEQ ID NO: 11659 - RNA, 19 nt, Homo sapiens
  misc_RNA (1)...(19): siRNA sense strand
gaaagugaaagaugaauac

SEQ ID NO: 11660 - RNA, 19 nt, Homo sapiens
  misc_RNA (1)...(19): siRNA sense strand
uuacagcuauucaagagaa

SEQ ID NO: 11661 - RNA, 19 nt, Homo sapiens
  misc_RNA (1)...(19): siRNA sense strand
gaaagagaugagaauguuu

SEQ ID NO: 11662 - RNA, 19 nt, Homo sapiens
  misc_RNA (1)...(19): siRNA sense strand
guucauaagcgaagccaua

SEQ ID NO: 11663 - RNA, 19 nt, Homo sapiens
  misc_RNA (1)...(19): siRNA sense strand
gaaaucccuuacagcuauu

SEQ ID NO: 11664 - RNA, 19 nt, Homo sapiens
  misc_RNA (1)...(19): siRNA sense strand
caaaucucaugaaauggaa

SEQ ID NO: 11665 - RNA, 19 nt, Homo sapiens
  misc_RNA (1)...(19): siRNA sense strand
aaucacaucuaucagcaaa

SEQ ID NO: 11666 - RNA, 19 nt, Homo sapiens
  misc_RNA (1)...(19): siRNA sense strand
gcauccaccuuccagagaa

SEQ ID NO: 11667 - RNA, 19 nt, Homo sapiens
  misc_RNA (1)...(19): siRNA sense strand
gaaagaugaauacagugaa

SEQ ID NO: 11668 - RNA, 19 nt, Homo sapiens
  misc_RNA (1)...(19): siRNA sense strand
gggaggugauggaugugua

SEQ ID NO: 11669 - RNA, 19 nt, Homo sapiens
  misc_RNA (1)...(19): siRNA sense strand
gaagacauaggagaugauu

SEQ ID NO: 11670 - RNA, 19 nt, Homo sapiens
  misc_RNA (1)...(19): siRNA sense strand
aaacaaaugcggaacugaa

SEQ ID NO: 11671 - RNA, 19 nt, Homo sapiens
  misc_RNA (1)...(19): siRNA sense strand
ggagaaggcccagccaaug

SEQ ID NO: 11672 - RNA, 19 nt, Homo sapiens
  misc_RNA (1)...(19): siRNA sense strand
ugaauacagugaaagagau

SEQ ID NO: 11673 - RNA, 19 nt, Homo sapiens
  misc_RNA (1)...(19): siRNA sense strand
acagagcccugcugaagug

SEQ ID NO: 11674 - RNA, 19 nt, Homo sapiens
  misc_RNA (1)...(19): siRNA sense strand
ugacagcaaccaugaagaa

SEQ ID NO: 11675 - RNA, 19 nt, Homo sapiens
  misc_RNA (1)...(19): siRNA sense strand
ccaaaucucaugaaaugga

SEQ ID NO: 11676 - RNA, 19 nt, Homo sapiens
  misc_RNA (1)...(19): siRNA sense strand
ucaauaacgccaucagcua

SEQ ID NO: 11677 - RNA, 19 nt, Homo sapiens
  misc_RNA (1)...(19): siRNA sense strand
agacauaggagaugauuca

SEQ ID NO: 11678 - RNA, 19 nt, Homo sapiens
  misc_RNA (1)...(19): siRNA sense strand
gacuacaguuuaaccaaau

SEQ ID NO: 11679 - RNA, 19 nt, Homo sapiens
  misc_RNA (1)...(19): siRNA sense strand
caucagcuucaaugucuua

SEQ ID NO: 11680 - RNA, 19 nt, Homo sapiens
  misc_RNA (1)...(19): siRNA sense strand
ugaaagaugaauacaguga

SEQ ID NO: 11681 - RNA, 19 nt, Homo sapiens
  misc_RNA (1)...(19): siRNA sense strand
gauaguagcaggccaacca

SEQ ID NO: 11682 - RNA, 19 nt, Homo sapiens
  misc_RNA (1)...(19): siRNA sense strand
caauaacgccaucagcuau

SEQ ID NO: 11683 - RNA, 19 nt, Homo sapiens
  misc_RNA (1)...(19): siRNA sense strand
ggaccaagccaucaauaac

SEQ ID NO: 11684 - RNA, 19 nt, Homo sapiens
  misc_RNA (1)...(19): siRNA sense strand
gcagaaagugcagcgguuu

SEQ ID NO: 11685 - RNA, 19 nt, Homo sapiens
  misc_RNA (1)...(19): siRNA sense strand
gccagaaucacaucuauca

SEQ ID NO: 11686 - RNA, 19 nt, Homo sapiens
  misc_RNA (1)...(19): siRNA sense strand
agugaaagaugaauacagu

SEQ ID NO: 11687 - RNA, 19 nt, Homo sapiens
  misc_RNA (1)...(19): siRNA sense strand
gcacucaggagcagucugu

SEQ ID NO: 11688 - RNA, 19 nt, Homo sapiens
  misc_RNA (1)...(19): siRNA sense strand
gagagugagcucauacaga

SEQ ID NO: 11689 - RNA, 19 nt, Homo sapiens
  misc_RNA (1)...(19): siRNA sense strand
gugcagcgguuuugaauga

SEQ ID NO: 11690 - RNA, 19 nt, Homo sapiens
  misc_RNA (1)...(19): siRNA sense strand
caagagacuccgucaaagu

SEQ ID NO: 11691 - RNA, 19 nt, Homo sapiens
  misc_RNA (1)...(19): siRNA sense strand
ucaaugaaagugaaagaug

SEQ ID NO: 11692 - RNA, 19 nt, Homo sapiens
  misc_RNA (1)...(19): siRNA sense strand
aagaugaacugcgaugugu

SEQ ID NO: 11693 - RNA, 19 nt, Homo sapiens
  misc_RNA (1)...(19): siRNA sense strand
ccaagagacuccgucaaag

SEQ ID NO: 11694 - RNA, 19 nt, Homo sapiens
  misc_RNA (1)...(19): siRNA sense strand
cccaagagacuccgucaaa

SEQ ID NO: 11695 - RNA, 19 nt, Homo sapiens
  misc_RNA (1)...(19): siRNA sense strand
gaugaacugcgaugugugu

SEQ ID NO: 11696 - RNA, 19 nt, Homo sapiens
  misc_RNA (1)...(19): siRNA sense strand
gaauacagugaaagagaug

SEQ ID NO: 11697 - RNA, 19 nt, Homo sapiens
  misc_RNA (1)...(19): siRNA sense strand
ccaguuaucagcagcaugu

SEQ ID NO: 11698 - RNA, 19 nt, Homo sapiens
  misc_RNA (1)...(19): siRNA sense strand
ucggagaugguuccaguua

SEQ ID NO: 11699 - RNA, 19 nt, Homo sapiens
  misc_RNA (1)...(19): siRNA sense strand
gccaaccaguggaaagaug

SEQ ID NO: 11700 - RNA, 19 nt, Homo sapiens
  misc_RNA (1)...(19): siRNA sense strand
caugggaaaugcagaagag

SEQ ID NO: 11701 - RNA, 19 nt, Homo sapiens
  misc_RNA (1)...(19): siRNA sense strand
gccaugaucgguaugaguu

SEQ ID NO: 11702 - RNA, 19 nt, Homo sapiens
  misc_RNA (1)...(19): siRNA sense strand
agucagaacccaugggaaa

SEQ ID NO: 11703 - RNA, 19 nt, Homo sapiens
  misc_RNA (1)...(19): siRNA sense strand
ucgaagccaugaucgguau

SEQ ID NO: 11704 - RNA, 19 nt, Homo sapiens
  misc_RNA (1)...(19): siRNA sense strand
cucaagagcuggaaaagaa

SEQ ID NO: 11705 - RNA, 19 nt, Homo sapiens
  misc_RNA (1)...(19): siRNA sense strand
ggauaucgaagccaugauc

SEQ ID NO: 11706 - RNA, 19 nt, Homo sapiens
  misc_RNA (1)...(19): siRNA sense strand
ccacggacacugacagcaa

SEQ ID NO: 11707 - RNA, 19 nt, Homo sapiens
  misc_RNA (1)...(19): siRNA sense strand
gaaagaugaacugcgaugu

SEQ ID NO: 11708 - RNA, 19 nt, Homo sapiens
  misc_RNA (1)...(19): siRNA sense strand
gagacuccgucaaagugau

SEQ ID NO: 11709 - RNA, 19 nt, Homo sapiens
  misc_RNA (1)...(19): siRNA sense strand
acacugacagcaaccauga

SEQ ID NO: 11710 - RNA, 19 nt, Homo sapiens
  misc_RNA (1)...(19): siRNA sense strand
acauuaaguuggagagaca

SEQ ID NO: 11711 - RNA, 19 nt, Homo sapiens
  misc_RNA (1)...(19): siRNA sense strand
gaagccaugaucgguauga

SEQ ID NO: 11712 - RNA, 19 nt, Homo sapiens
  misc_RNA (1)...(19): siRNA sense strand
caaagugaucaacaaggaa

SEQ ID NO: 11713 - RNA, 19 nt, Homo sapiens
  misc_RNA (1)...(19): siRNA sense strand
gaugaagacauaggagaug

SEQ ID NO: 11714 - RNA, 19 nt, Homo sapiens
  misc_RNA (1)...(19): siRNA sense strand
acaaacaaaugcggaacug

SEQ ID NO: 11715 - RNA, 19 nt, Homo sapiens
  misc_RNA (1)...(19): siRNA sense strand
ugcaucagcuucaaugucu

SEQ ID NO: 11716 - RNA, 19 nt, Homo sapiens
  misc_RNA (1)...(19): siRNA sense strand
acacagagcccugcugaag

SEQ ID NO: 11717 - RNA, 19 nt, Homo sapiens
  misc_RNA (1)...(19): siRNA sense strand
gugaaagagaugagaaugu

SEQ ID NO: 11718 - RNA, 19 nt, Homo sapiens
  misc_RNA (1)...(19): siRNA sense strand
cggagaugguuccaguuau

SEQ ID NO: 11719 - RNA, 19 nt, Homo sapiens
  misc_RNA (1)...(19): siRNA sense strand
uuacauguaugagaaagag

SEQ ID NO: 11720 - RNA, 19 nt, Homo sapiens
  misc_RNA (1)...(19): siRNA sense strand
ccuuacagcuauucaagag

SEQ ID NO: 11721 - RNA, 19 nt, Homo sapiens
  misc_RNA (1)...(19): siRNA sense strand
ucaaguuacauguaugaga

SEQ ID NO: 11722 - RNA, 19 nt, Homo sapiens
  misc_RNA (1)...(19): siRNA sense strand
aguguaacauguguggaua

SEQ ID NO: 11723 - RNA, 19 nt, Homo sapiens
  misc_RNA (1)...(19): siRNA sense strand
ggaggugauggauguguau

SEQ ID NO: 11724 - RNA, 19 nt, Homo sapiens
  misc_RNA (1)...(19): siRNA sense strand
cagcagcauguaucccaua

SEQ ID NO: 11725 - RNA, 19 nt, Homo sapiens
  misc_RNA (1)...(19): siRNA sense strand
gaguguaacauguguggau

SEQ ID NO: 11726 - RNA, 19 nt, Homo sapiens
  misc_RNA (1)...(19): siRNA sense strand
gcccagccaaugaagauga

SEQ ID NO: 11727 - RNA, 19 nt, Homo sapiens
  misc_RNA (1)...(19): siRNA sense strand
cauaagcgaagccauacug

SEQ ID NO: 11728 - RNA, 19 nt, Homo sapiens
  misc_RNA (1)...(19): siRNA sense strand
aaagaugaacugcgaugug

SEQ ID NO: 11729 - RNA, 19 nt, Homo sapiens
  misc_RNA (1)...(19): siRNA sense strand
ccaaccaguggaaagauga

SEQ ID NO: 11730 - RNA, 19 nt, Homo sapiens
  misc_RNA (1)...(19): siRNA sense strand
gugacccuuucgaguguaa

SEQ ID NO: 11731 - RNA, 19 nt, Homo sapiens
  misc_RNA (1)...(19): siRNA sense strand
ccaaugaagaugaagacau

SEQ ID NO: 11732 - RNA, 19 nt, Homo sapiens
  misc_RNA (1)...(19): siRNA sense strand
gagaugguuccaguuauca

SEQ ID NO: 11733 - RNA, 19 nt, Homo sapiens
  misc_RNA (1)...(19): siRNA sense strand
uaaguuggagagacauguu

SEQ ID NO: 11734 - RNA, 19 nt, Homo sapiens
  misc_RNA (1)...(19): siRNA sense strand
uguaugagaaagagaguga

SEQ ID NO: 11735 - RNA, 19 nt, Homo sapiens
  misc_RNA (1)...(19): siRNA sense strand
caaacaaaugcggaacuga

SEQ ID NO: 11736 - RNA, 19 nt, Homo sapiens
  misc_RNA (1)...(19): siRNA sense strand
aagagacuccgucaaagug

SEQ ID NO: 11737 - RNA, 19 nt, Homo sapiens
  misc_RNA (1)...(19): siRNA sense strand
ccaugaagaacgccagaau

SEQ ID NO: 11738 - RNA, 19 nt, Homo sapiens
  misc_RNA (1)...(19): siRNA sense strand
uggaccaagccaucaauaa

SEQ ID NO: 11739 - RNA, 19 nt, Homo sapiens
  misc_RNA (1)...(19): siRNA sense strand
cauacagacccgcaugaug

SEQ ID NO: 11740 - RNA, 19 nt, Homo sapiens
  misc_RNA (1)...(19): siRNA sense strand
caaugaagaugaagacaua

SEQ ID NO: 11741 - RNA, 19 nt, Homo sapiens
  misc_RNA (1)...(19): siRNA sense strand
gaaagagagugagcucaua

SEQ ID NO: 11742 - RNA, 19 nt, Homo sapiens
  misc_RNA (1)...(19): siRNA sense strand
caaguuacauguaugagaa

SEQ ID NO: 11743 - RNA, 19 nt, Homo sapiens
  misc_RNA (1)...(19): siRNA sense strand
caaugaaagugaaagauga

SEQ ID NO: 11744 - RNA, 19 nt, Homo sapiens
  misc_RNA (1)...(19): siRNA sense strand
cauaggagaugauucaaug

SEQ ID NO: 11745 - RNA, 19 nt, Homo sapiens
  misc_RNA (1)...(19): siRNA sense strand
ugaaaucccuuacagcuau

SEQ ID NO: 11746 - RNA, 19 nt, Homo sapiens
  misc_RNA (1)...(19): siRNA sense strand
ugaaagagaugagaauguu

SEQ ID NO: 11747 - RNA, 19 nt, Homo sapiens
  misc_RNA (1)...(19): siRNA sense strand
aaccaaaucucaugaaaug

SEQ ID NO: 11748 - RNA, 19 nt, Homo sapiens
  misc_RNA (1)...(19): siRNA sense strand
gagcgugccuucugagaga

SEQ ID NO: 11749 - RNA, 19 nt, Homo sapiens
  misc_RNA (1)...(19): siRNA sense strand
cauguugucucauucgaua

SEQ ID NO: 11750 - RNA, 19 nt, Homo sapiens
  misc_RNA (1)...(19): siRNA sense strand
ggagaugguuccaguuauc

SEQ ID NO: 11751 - RNA, 19 nt, Homo sapiens
  misc_RNA (1)...(19): siRNA sense strand
gaagaacgccagaaucaca

SEQ ID NO: 11752 - RNA, 19 nt, Homo sapiens
  misc_RNA (1)...(19): siRNA sense strand
ucaaagugaucaacaagga

SEQ ID NO: 11753 - RNA, 19 nt, Homo sapiens
  misc_RNA (1)...(19): siRNA sense strand
ugacuacaguuuaaccaaa

SEQ ID NO: 11754 - RNA, 19 nt, Homo sapiens
  misc_RNA (1)...(19): siRNA sense strand
ucacauagccagaggagaa

SEQ ID NO: 11755 - RNA, 19 nt, Homo sapiens
  misc_RNA (1)...(19): siRNA sense strand
gagaaggcccagccaauga

SEQ ID NO: 11756 - RNA, 19 nt, Homo sapiens
  misc_RNA (1)...(19): siRNA sense strand
cagcuucaaugucuuaaug

SEQ ID NO: 11757 - RNA, 19 nt, Homo sapiens
  misc_RNA (1)...(19): siRNA sense strand
uaacauguguggauaucga

SEQ ID NO: 11758 - RNA, 19 nt, Homo sapiens
  misc_RNA (1)...(19): siRNA sense strand
gcaaugggaugccacuucu

SEQ ID NO: 11759 - RNA, 19 nt, Homo sapiens
  misc_RNA (1)...(19): siRNA sense strand
gaaagugaaagaugaauac

SEQ ID NO: 11760 - RNA, 19 nt, Homo sapiens
  misc_RNA (1)...(19): siRNA sense strand
uuacagcuauucaagagaa

SEQ ID NO: 11761 - RNA, 19 nt, Homo sapiens
  misc_RNA (1)...(19): siRNA sense strand
gaaagagaugagaauguuu

SEQ ID NO: 11762 - RNA, 19 nt, Homo sapiens
  misc_RNA (1)...(19): siRNA sense strand
guucauaagcgaagccaua

SEQ ID NO: 11763 - RNA, 19 nt, Homo sapiens
  misc_RNA (1)...(19): siRNA sense strand
gaaaucccuuacagcuauu

SEQ ID NO: 11764 - RNA, 19 nt, Homo sapiens
  misc_RNA (1)...(19): siRNA sense strand
caaaucucaugaaauggaa

SEQ ID NO: 11765 - RNA, 19 nt, Homo sapiens
  misc_RNA (1)...(19): siRNA sense strand
aaucacaucuaucagcaaa

SEQ ID NO: 11766 - RNA, 19 nt, Homo sapiens
  misc_RNA (1)...(19): siRNA sense strand
gcauccaccuuccagagaa

SEQ ID NO: 11767 - RNA, 19 nt, Homo sapiens
  misc_RNA (1)...(19): siRNA sense strand
gaaagaugaauacagugaa

SEQ ID NO: 11768 - RNA, 19 nt, Homo sapiens
  misc_RNA (1)...(19): siRNA sense strand
gggaggugauggaugugua

SEQ ID NO: 11769 - RNA, 19 nt, Homo sapiens
  misc_RNA (1)...(19): siRNA sense strand
gaagacauaggagaugauu

SEQ ID NO: 11770 - RNA, 19 nt, Homo sapiens
  misc_RNA (1)...(19): siRNA sense strand
aaacaaaugcggaacugaa

SEQ ID NO: 11771 - RNA, 19 nt, Homo sapiens
  misc_RNA (1)...(19): siRNA sense strand
ggagaaggcccagccaaug

SEQ ID NO: 11772 - RNA, 19 nt, Homo sapiens
  misc_RNA (1)...(19): siRNA sense strand
ugaauacagugaaagagau

SEQ ID NO: 11773 - RNA, 19 nt, Homo sapiens
  misc_RNA (1)...(19): siRNA sense strand
acagagcccugcugaagug

SEQ ID NO: 11774 - RNA, 19 nt, Homo sapiens
  misc_RNA (1)...(19): siRNA sense strand
ugacagcaaccaugaagaa

SEQ ID NO: 11775 - RNA, 19 nt, Homo sapiens
  misc_RNA (1)...(19): siRNA sense strand
ccaaaucucaugaaaugga

SEQ ID NO: 11776 - RNA, 19 nt, Homo sapiens
  misc_RNA (1)...(19): siRNA sense strand
ucaauaacgccaucagcua

SEQ ID NO: 11777 - RNA, 19 nt, Homo sapiens
  misc_RNA (1)...(19): siRNA sense strand
agacauaggagaugauuca

SEQ ID NO: 11778 - RNA, 19 nt, Homo sapiens
  misc_RNA (1)...(19): siRNA sense strand
gacuacaguuuaaccaaau

SEQ ID NO: 11779 - RNA, 19 nt, Homo sapiens
  misc_RNA (1)...(19): siRNA sense strand
caucagcuucaaugucuua

SEQ ID NO: 11780 - RNA, 19 nt, Homo sapiens
  misc_RNA (1)...(19): siRNA sense strand
ugaaagaugaauacaguga

SEQ ID NO: 11781 - RNA, 19 nt, Homo sapiens
  misc_RNA (1)...(19): siRNA sense strand
gauaguagcaggccaacca

SEQ ID NO: 11782 - RNA, 19 nt, Homo sapiens
  misc_RNA (1)...(19): siRNA sense strand
caauaacgccaucagcuau

SEQ ID NO: 11783 - RNA, 19 nt, Homo sapiens
  misc_RNA (1)...(19): siRNA sense strand
ggaccaagccaucaauaac

SEQ ID NO: 11784 - RNA, 19 nt, Homo sapiens
  misc_RNA (1)...(19): siRNA sense strand
gcagaaagugcagcgguuu

SEQ ID NO: 11785 - RNA, 19 nt, Homo sapiens
  misc_RNA (1)...(19): siRNA sense strand
gccagaaucacaucuauca

SEQ ID NO: 11786 - RNA, 19 nt, Homo sapiens
  misc_RNA (1)...(19): siRNA sense strand
agugaaagaugaauacagu

SEQ ID NO: 11787 - RNA, 19 nt, Homo sapiens
  misc_RNA (1)...(19): siRNA sense strand
gcacucaggagcagucugu

SEQ ID NO: 11788 - RNA, 19 nt, Homo sapiens
  misc_RNA (1)...(19): siRNA sense strand
gagagugagcucauacaga

SEQ ID NO: 11789 - RNA, 19 nt, Homo sapiens
  misc_RNA (1)...(19): siRNA sense strand
gugcagcgguuuugaauga

SEQ ID NO: 11790 - RNA, 19 nt, Homo sapiens
  misc_RNA (1)...(19): siRNA sense strand
caagagacuccgucaaagu

SEQ ID NO: 11791 - RNA, 19 nt, Homo sapiens
  misc_RNA (1)...(19): siRNA sense strand
ucaaugaaagugaaagaug

SEQ ID NO: 11792 - RNA, 19 nt, Homo sapiens
  misc_RNA (1)...(19): siRNA sense strand
aagaugaacugcgaugugu

SEQ ID NO: 11793 - RNA, 19 nt, Homo sapiens
  misc_RNA (1)...(19): siRNA sense strand
ccaagagacuccgucaaag

SEQ ID NO: 11794 - RNA, 19 nt, Homo sapiens
  misc_RNA (1)...(19): siRNA sense strand
cccaagagacuccgucaaa

SEQ ID NO: 11795 - RNA, 19 nt, Homo sapiens
  misc_RNA (1)...(19): siRNA sense strand
gaugaacugcgaugugugu

SEQ ID NO: 11796 - RNA, 19 nt, Homo sapiens
  misc_RNA (1)...(19): siRNA sense strand
gaauacagugaaagagaug

SEQ ID NO: 11797 - RNA, 19 nt, Homo sapiens
  misc_RNA (1)...(19): siRNA sense strand
ccaguuaucagcagcaugu

SEQ ID NO: 11798 - RNA, 19 nt, Homo sapiens
  misc_RNA (1)...(19): siRNA sense strand
ucggagaugguuccaguua

SEQ ID NO: 11799 - RNA, 19 nt, Homo sapiens
  misc_RNA (1)...(19): siRNA sense strand
gccaaccaguggaaagaug

SEQ ID NO: 11800 - RNA, 19 nt, Homo sapiens
  misc_RNA (1)...(19): siRNA sense strand
caugggaaaugcagaagag

SEQ ID NO: 11801 - RNA, 19 nt, Homo sapiens
  misc_RNA (1)...(19): siRNA sense strand
gccaugaucgguaugaguu

SEQ ID NO: 11802 - RNA, 19 nt, Homo sapiens
  misc_RNA (1)...(19): siRNA sense strand
agucagaacccaugggaaa

SEQ ID NO: 11803 - RNA, 19 nt, Homo sapiens
  misc_RNA (1)...(19): siRNA sense strand
ucgaagccaugaucgguau

SEQ ID NO: 11804 - RNA, 19 nt, Homo sapiens
  misc_RNA (1)...(19): siRNA sense strand
cucaagagcuggaaaagaa

SEQ ID NO: 11805 - RNA, 19 nt, Homo sapiens
  misc_RNA (1)...(19): siRNA sense strand
ggauaucgaagccaugauc

SEQ ID NO: 11806 - RNA, 19 nt, Homo sapiens
  misc_RNA (1)...(19): siRNA sense strand
ccacggacacugacagcaa

SEQ ID NO: 11807 - RNA, 19 nt, Homo sapiens
  misc_RNA (1)...(19): siRNA sense strand
gaaagaugaacugcgaugu

SEQ ID NO: 11808 - RNA, 19 nt, Homo sapiens
  misc_RNA (1)...(19): siRNA sense strand
gagacuccgucaaagugau

SEQ ID NO: 11809 - RNA, 19 nt, Homo sapiens
  misc_RNA (1)...(19): siRNA sense strand
acacugacagcaaccauga

SEQ ID NO: 11810 - RNA, 19 nt, Homo sapiens
  misc_RNA (1)...(19): siRNA sense strand
acauuaaguuggagagaca

SEQ ID NO: 11811 - RNA, 19 nt, Homo sapiens
  misc_RNA (1)...(19): siRNA sense strand
gaagccaugaucgguauga

SEQ ID NO: 11812 - RNA, 19 nt, Homo sapiens
  misc_RNA (1)...(19): siRNA sense strand
caaagugaucaacaaggaa

SEQ ID NO: 11813 - RNA, 19 nt, Homo sapiens
  misc_RNA (1)...(19): siRNA sense strand
gaugaagacauaggagaug

SEQ ID NO: 11814 - RNA, 19 nt, Homo sapiens
  misc_RNA (1)...(19): siRNA sense strand
acaaacaaaugcggaacug

SEQ ID NO: 11815 - RNA, 19 nt, Homo sapiens
  misc_RNA (1)...(19): siRNA sense strand
ugcaucagcuucaaugucu

SEQ ID NO: 11816 - RNA, 19 nt, Homo sapiens
  misc_RNA (1)...(19): siRNA sense strand
acacagagcccugcugaag

SEQ ID NO: 11817 - RNA, 19 nt, Homo sapiens
  misc_RNA (1)...(19): siRNA sense strand
gugaaagagaugagaaugu

SEQ ID NO: 11818 - RNA, 19 nt, Homo sapiens
  misc_RNA (1)...(19): siRNA sense strand
cggagaugguuccaguuau

SEQ ID NO: 11819 - RNA, 19 nt, Homo sapiens
  misc_RNA (1)...(19): siRNA sense strand
uuacauguaugagaaagag

SEQ ID NO: 11820 - RNA, 19 nt, Homo sapiens
  misc_RNA (1)...(19): siRNA sense strand
ccuuacagcuauucaagag

SEQ ID NO: 11821 - RNA, 19 nt, Homo sapiens
  misc_RNA (1)...(19): siRNA sense strand
ucaaguuacauguaugaga

SEQ ID NO: 11822 - RNA, 19 nt, Homo sapiens
  misc_RNA (1)...(19): siRNA sense strand
aguguaacauguguggaua

SEQ ID NO: 11823 - RNA, 19 nt, Homo sapiens
  misc_RNA (1)...(19): siRNA sense strand
ggaggugauggauguguau

SEQ ID NO: 11824 - RNA, 19 nt, Homo sapiens
  misc_RNA (1)...(19): siRNA sense strand
cagcagcauguaucccaua

SEQ ID NO: 11825 - RNA, 19 nt, Homo sapiens
  misc_RNA (1)...(19): siRNA sense strand
gaguguaacauguguggau

SEQ ID NO: 11826 - RNA, 19 nt, Homo sapiens
  misc_RNA (1)...(19): siRNA sense strand
gcccagccaaugaagauga

SEQ ID NO: 11827 - RNA, 19 nt, Homo sapiens
  misc_RNA (1)...(19): siRNA sense strand
cauaagcgaagccauacug

SEQ ID NO: 11828 - RNA, 19 nt, Homo sapiens
  misc_RNA (1)...(19): siRNA sense strand
aaagaugaacugcgaugug

SEQ ID NO: 11829 - RNA, 19 nt, Homo sapiens
  misc_RNA (1)...(19): siRNA sense strand
ccaaccaguggaaagauga

SEQ ID NO: 11830 - RNA, 19 nt, Homo sapiens
  misc_RNA (1)...(19): siRNA sense strand
gugacccuuucgaguguaa

SEQ ID NO: 11831 - RNA, 19 nt, Homo sapiens
  misc_RNA (1)...(19): siRNA sense strand
ccaaugaagaugaagacau

SEQ ID NO: 11832 - RNA, 19 nt, Homo sapiens
  misc_RNA (1)...(19): siRNA sense strand
gagaugguuccaguuauca

SEQ ID NO: 11833 - RNA, 19 nt, Homo sapiens
  misc_RNA (1)...(19): siRNA sense strand
uaaguuggagagacauguu

SEQ ID NO: 11834 - RNA, 19 nt, Homo sapiens
  misc_RNA (1)...(19): siRNA sense strand
uguaugagaaagagaguga

SEQ ID NO: 11835 - RNA, 19 nt, Homo sapiens
  misc_RNA (1)...(19): siRNA sense strand
caaacaaaugcggaacuga

SEQ ID NO: 11836 - RNA, 19 nt, Homo sapiens
  misc_RNA (1)...(19): siRNA sense strand
aagagacuccgucaaagug

SEQ ID NO: 11837 - RNA, 19 nt, Homo sapiens
  misc_RNA (1)...(19): siRNA sense strand
ccaugaagaacgccagaau

SEQ ID NO: 11838 - RNA, 19 nt, Homo sapiens
  misc_RNA (1)...(19): siRNA sense strand
uggaccaagccaucaauaa

SEQ ID NO: 11839 - RNA, 19 nt, Homo sapiens
  misc_RNA (1)...(19): siRNA sense strand
cauacagacccgcaugaug

SEQ ID NO: 11840 - RNA, 19 nt, Homo sapiens
  misc_RNA (1)...(19): siRNA sense strand
ggacgaggcuggcaucaag

SEQ ID NO: 11841 - RNA, 19 nt, Homo sapiens
  misc_RNA (1)...(19): siRNA sense strand
ggaguugugucuugucuuc

SEQ ID NO: 11842 - RNA, 19 nt, Homo sapiens
  misc_RNA (1)...(19): siRNA sense strand
gagaagcuccggucuguug

SEQ ID NO: 11843 - RNA, 19 nt, Homo sapiens
  misc_RNA (1)...(19): siRNA sense strand
gugaggagguggagccuuu

SEQ ID NO: 11844 - RNA, 19 nt, Homo sapiens
  misc_RNA (1)...(19): siRNA sense strand
acaggcagcuggagaaaga

SEQ ID NO: 11845 - RNA, 19 nt, Homo sapiens
  misc_RNA (1)...(19): siRNA sense strand
ggaaacggccgugguuauu

SEQ ID NO: 11846 - RNA, 19 nt, Homo sapiens
  misc_RNA (1)...(19): siRNA sense strand
gaaacggccgugguuauuu

SEQ ID NO: 11847 - RNA, 19 nt, Homo sapiens
  misc_RNA (1)...(19): siRNA sense strand
gauggcagcugugaaggaa

SEQ ID NO: 11848 - RNA, 19 nt, Homo sapiens
  misc_RNA (1)...(19): siRNA sense strand
gugaaggaauuucuugaga

SEQ ID NO: 11849 - RNA, 19 nt, Homo sapiens
  misc_RNA (1)...(19): siRNA sense strand
gcugcugccuccugucuaa

SEQ ID NO: 11850 - RNA, 19 nt, Homo sapiens
  misc_RNA (1)...(19): siRNA sense strand
guacaucuguucccaugag

SEQ ID NO: 11851 - RNA, 19 nt, Homo sapiens
  misc_RNA (1)...(19): siRNA sense strand
gugaugcccuccugguuug

SEQ ID NO: 11852 - RNA, 19 nt, Homo sapiens
  misc_RNA (1)...(19): siRNA sense strand
ggccuucccucagcuguuu

SEQ ID NO: 11853 - RNA, 19 nt, Homo sapiens
  misc_RNA (1)...(19): siRNA sense strand
ggagauggcagcugugaag

SEQ ID NO: 11854 - RNA, 19 nt, Homo sapiens
  misc_RNA (1)...(19): siRNA sense strand
ggugaugcccuccugguuu

SEQ ID NO: 11855 - RNA, 19 nt, Homo sapiens
  misc_RNA (1)...(19): siRNA sense strand
uggcagcugugaaggaauu

SEQ ID NO: 11856 - RNA, 19 nt, Homo sapiens
  misc_RNA (1)...(19): siRNA sense strand
gagccuaggaucccuguga

SEQ ID NO: 11857 - RNA, 19 nt, Homo sapiens
  misc_RNA (1)...(19): siRNA sense strand
ugauugagcaugaaaugaa

SEQ ID NO: 11858 - RNA, 19 nt, Homo sapiens
  misc_RNA (1)...(19): siRNA sense strand
uguccuggauucugauaaa

SEQ ID NO: 11859 - RNA, 19 nt, Homo sapiens
  misc_RNA (1)...(19): siRNA sense strand
gggaaacggccgugguuau

SEQ ID NO: 11860 - RNA, 19 nt, Homo sapiens
  misc_RNA (1)...(19): siRNA sense strand
ccacugacccacucacuca

SEQ ID NO: 11861 - RNA, 19 nt, Homo sapiens
  misc_RNA (1)...(19): siRNA sense strand
ucaagaaggcagcagagaa

SEQ ID NO: 11862 - RNA, 19 nt, Homo sapiens
  misc_RNA (1)...(19): siRNA sense strand
gggagaaagaggagaauca

SEQ ID NO: 11863 - RNA, 19 nt, Homo sapiens
  misc_RNA (1)...(19): siRNA sense strand
gcuccggucuguugucaca

SEQ ID NO: 11864 - RNA, 19 nt, Homo sapiens
  misc_RNA (1)...(19): siRNA sense strand
ggagccgugugguguaugu

SEQ ID NO: 11865 - RNA, 19 nt, Homo sapiens
  misc_RNA (1)...(19): siRNA sense strand
gaaggcagcagagaacauc

SEQ ID NO: 11866 - RNA, 19 nt, Homo sapiens
  misc_RNA (1)...(19): siRNA sense strand
cucaggaccucacucacua

SEQ ID NO: 11867 - RNA, 19 nt, Homo sapiens
  misc_RNA (1)...(19): siRNA sense strand
ggguccaguuccagacaua

SEQ ID NO: 11868 - RNA, 19 nt, Homo sapiens
  misc_RNA (1)...(19): siRNA sense strand
gauugagcaugaaaugaag

SEQ ID NO: 11869 - RNA, 19 nt, Homo sapiens
  misc_RNA (1)...(19): siRNA sense strand
ccugugacccucaacauga

SEQ ID NO: 11870 - RNA, 19 nt, Homo sapiens
  misc_RNA (1)...(19): siRNA sense strand
gaggaguugugucuugucu

SEQ ID NO: 11871 - RNA, 19 nt, Homo sapiens
  misc_RNA (1)...(19): siRNA sense strand
gcugcuuucuuaucccauu

SEQ ID NO: 11872 - RNA, 19 nt, Homo sapiens
  misc_RNA (1)...(19): siRNA sense strand
aaacggccgugguuauuuu

SEQ ID NO: 11873 - RNA, 19 nt, Homo sapiens
  misc_RNA (1)...(19): siRNA sense strand
gggaggaguugugucuugu

SEQ ID NO: 11874 - RNA, 19 nt, Homo sapiens
  misc_RNA (1)...(19): siRNA sense strand
ggacucagcaaguaagcau

SEQ ID NO: 11875 - RNA, 19 nt, Homo sapiens
  misc_RNA (1)...(19): siRNA sense strand
cgggaucccugccaaucaa

SEQ ID NO: 11876 - RNA, 19 nt, Homo sapiens
  misc_RNA (1)...(19): siRNA sense strand
caagaaggcagcagagaac

SEQ ID NO: 11877 - RNA, 19 nt, Homo sapiens
  misc_RNA (1)...(19): siRNA sense strand
gaacgggaucccugccaau

SEQ ID NO: 11878 - RNA, 19 nt, Homo sapiens
  misc_RNA (1)...(19): siRNA sense strand
aaagaggcccagccacuga

SEQ ID NO: 11879 - RNA, 19 nt, Homo sapiens
  misc_RNA (1)...(19): siRNA sense strand
cugagaagcuccggucugu

SEQ ID NO: 11880 - RNA, 19 nt, Homo sapiens
  misc_RNA (1)...(19): siRNA sense strand
uggcuggcauccuggcuuu

SEQ ID NO: 11881 - RNA, 19 nt, Homo sapiens
  misc_RNA (1)...(19): siRNA sense strand
ggcaccaucuugggucuga

SEQ ID NO: 11882 - RNA, 19 nt, Homo sapiens
  misc_RNA (1)...(19): siRNA sense strand
ccaagcggccucagaaguc

SEQ ID NO: 11883 - RNA, 19 nt, Homo sapiens
  misc_RNA (1)...(19): siRNA sense strand
gcugccuccugucuaacua

SEQ ID NO: 11884 - RNA, 19 nt, Homo sapiens
  misc_RNA (1)...(19): siRNA sense strand
cauggugcccguacgguuu

SEQ ID NO: 11885 - RNA, 19 nt, Homo sapiens
  misc_RNA (1)...(19): siRNA sense strand
gcuacaggcagcuggagaa

SEQ ID NO: 11886 - RNA, 19 nt, Homo sapiens
  misc_RNA (1)...(19): siRNA sense strand
gcugugaaggaauuucuug

SEQ ID NO: 11887 - RNA, 19 nt, Homo sapiens
  misc_RNA (1)...(19): siRNA sense strand
cuucuuguguccuggauuc

SEQ ID NO: 11888 - RNA, 19 nt, Homo sapiens
  misc_RNA (1)...(19): siRNA sense strand
ucacucaggaccucacuca

SEQ ID NO: 11889 - RNA, 19 nt, Homo sapiens
  misc_RNA (1)...(19): siRNA sense strand
cuuguguccuggauucuga

SEQ ID NO: 11890 - RNA, 19 nt, Homo sapiens
  misc_RNA (1)...(19): siRNA sense strand
gacgcccucuccaccauuc

SEQ ID NO: 11891 - RNA, 19 nt, Homo sapiens
  misc_RNA (1)...(19): siRNA sense strand
caacaugaagauggugaug

SEQ ID NO: 11892 - RNA, 19 nt, Homo sapiens
  misc_RNA (1)...(19): siRNA sense strand
ugucuucugucuccaugug

SEQ ID NO: 11893 - RNA, 19 nt, Homo sapiens
  misc_RNA (1)...(19): siRNA sense strand
ggggaggaguugugucuug

SEQ ID NO: 11894 - RNA, 19 nt, Homo sapiens
  misc_RNA (1)...(19): siRNA sense strand
gcuggcauccuggcuuuga

SEQ ID NO: 11895 - RNA, 19 nt, Homo sapiens
  misc_RNA (1)...(19): siRNA sense strand
ucacgucaaguacaucugu

SEQ ID NO: 11896 - RNA, 19 nt, Homo sapiens
  misc_RNA (1)...(19): siRNA sense strand
gggcccugauggcugagaa

SEQ ID NO: 11897 - RNA, 19 nt, Homo sapiens
  misc_RNA (1)...(19): siRNA sense strand
cacccaagcggccucagaa

SEQ ID NO: 11898 - RNA, 19 nt, Homo sapiens
  misc_RNA (1)...(19): siRNA sense strand
cugugacccucaacaugaa

SEQ ID NO: 11899 - RNA, 19 nt, Homo sapiens
  misc_RNA (1)...(19): siRNA sense strand
ccuggauucugauaaaauu

SEQ ID NO: 11900 - RNA, 19 nt, Homo sapiens
  misc_RNA (1)...(19): siRNA sense strand
cauggagccguguggugua

SEQ ID NO: 11901 - RNA, 19 nt, Homo sapiens
  misc_RNA (1)...(19): siRNA sense strand
ugugguguaugugugguaa

SEQ ID NO: 11902 - RNA, 19 nt, Homo sapiens
  misc_RNA (1)...(19): siRNA sense strand
ggccuugauugagcaugaa

SEQ ID NO: 11903 - RNA, 19 nt, Homo sapiens
  misc_RNA (1)...(19): siRNA sense strand
aggccuugauugagcauga

SEQ ID NO: 11904 - RNA, 19 nt, Homo sapiens
  misc_RNA (1)...(19): siRNA sense strand
gaaaggacauagaagauug

SEQ ID NO: 11905 - RNA, 19 nt, Homo sapiens
  misc_RNA (1)...(19): siRNA sense strand
gaacaggauuucaucauuc

SEQ ID NO: 11906 - RNA, 19 nt, Homo sapiens
  misc_RNA (1)...(19): siRNA sense strand
ucaagaggcuguccaaguu

SEQ ID NO: 11907 - RNA, 19 nt, Homo sapiens
  misc_RNA (1)...(19): siRNA sense strand
gaagucaauuugcaagaug

SEQ ID NO: 11908 - RNA, 19 nt, Homo sapiens
  misc_RNA (1)...(19): siRNA sense strand
gcacucaggugaacccaau

SEQ ID NO: 11909 - RNA, 19 nt, Homo sapiens
  misc_RNA (1)...(19): siRNA sense strand
ggaaggaaaggacauagaa

SEQ ID NO: 11910 - RNA, 19 nt, Homo sapiens
  misc_RNA (1)...(19): siRNA sense strand
cuacugggaugcaaucuug

SEQ ID NO: 11911 - RNA, 19 nt, Homo sapiens
  misc_RNA (1)...(19): siRNA sense strand
gaugagcguugugcgauaa

SEQ ID NO: 11912 - RNA, 19 nt, Homo sapiens
  misc_RNA (1)...(19): siRNA sense strand
ggaaaggacauagaagauu

SEQ ID NO: 11913 - RNA, 19 nt, Homo sapiens
  misc_RNA (1)...(19): siRNA sense strand
gcaauggguugaccagaca

SEQ ID NO: 11914 - RNA, 19 nt, Homo sapiens
  misc_RNA (1)...(19): siRNA sense strand
gggaugcaaucuuggacua

SEQ ID NO: 11915 - RNA, 19 nt, Homo sapiens
  misc_RNA (1)...(19): siRNA sense strand
agaacaggauuucaucauu

SEQ ID NO: 11916 - RNA, 19 nt, Homo sapiens
  misc_RNA (1)...(19): siRNA sense strand
gagaguaucaacaguauca

SEQ ID NO: 11917 - RNA, 19 nt, Homo sapiens
  misc_RNA (1)...(19): siRNA sense strand
caagaggcuguccaaguua

SEQ ID NO: 11918 - RNA, 19 nt, Homo sapiens
  misc_RNA (1)...(19): siRNA sense strand
cagucuaguugcuacuuua

SEQ ID NO: 11919 - RNA, 19 nt, Homo sapiens
  misc_RNA (1)...(19): siRNA sense strand
gggcugaucugguggugau

SEQ ID NO: 11920 - RNA, 19 nt, Homo sapiens
  misc_RNA (1)...(19): siRNA sense strand
ggaagaacaggauuucauc

SEQ ID NO: 11921 - RNA, 19 nt, Homo sapiens
  misc_RNA (1)...(19): siRNA sense strand
gaugaagaagaucuacaua

SEQ ID NO: 11922 - RNA, 19 nt, Homo sapiens
  misc_RNA (1)...(19): siRNA sense strand
gaccagacaccauacaaug

SEQ ID NO: 11923 - RNA, 19 nt, Homo sapiens
  misc_RNA (1)...(19): siRNA sense strand
agaaaggacucuggugguu

SEQ ID NO: 11924 - RNA, 19 nt, Homo sapiens
  misc_RNA (1)...(19): siRNA sense strand
gaagaacaggauuucauca

SEQ ID NO: 11925 - RNA, 19 nt, Homo sapiens
  misc_RNA (1)...(19): siRNA sense strand
gagcguugugcgauaauaa

SEQ ID NO: 11926 - RNA, 19 nt, Homo sapiens
  misc_RNA (1)...(19): siRNA sense strand
gaucaacaccagggaagaa

SEQ ID NO: 11927 - RNA, 19 nt, Homo sapiens
  misc_RNA (1)...(19): siRNA sense strand
ccucagaagucaauuugca

SEQ ID NO: 11928 - RNA, 19 nt, Homo sapiens
  misc_RNA (1)...(19): siRNA sense strand
ccagacaccauacaaugaa

SEQ ID NO: 11929 - RNA, 19 nt, Homo sapiens
  misc_RNA (1)...(19): siRNA sense strand
ugaugagcguugugcgaua

SEQ ID NO: 11930 - RNA, 19 nt, Homo sapiens
  misc_RNA (1)...(19): siRNA sense strand
uaucaacaguaucauccaa

SEQ ID NO: 11931 - RNA, 19 nt, Homo sapiens
  misc_RNA (1)...(19): siRNA sense strand
ucauguaccucagaaguca

SEQ ID NO: 11932 - RNA, 19 nt, Homo sapiens
  misc_RNA (1)...(19): siRNA sense strand
gaauggggcuggaaugaca

SEQ ID NO: 11933 - RNA, 19 nt, Homo sapiens
  misc_RNA (1)...(19): siRNA sense strand
gggaagaacaggauuucau

SEQ ID NO: 11934 - RNA, 19 nt, Homo sapiens
  misc_RNA (1)...(19): siRNA sense strand
uaaauuuccguucuucaga

SEQ ID NO: 11935 - RNA, 19 nt, Homo sapiens
  misc_RNA (1)...(19): siRNA sense strand
cagacaccauacaaugaaa

SEQ ID NO: 11936 - RNA, 19 nt, Homo sapiens
  misc_RNA (1)...(19): siRNA sense strand
ucagucuaguugcuacuuu

SEQ ID NO: 11937 - RNA, 19 nt, Homo sapiens
  misc_RNA (1)...(19): siRNA sense strand
gaaggaaaggacauagaag

SEQ ID NO: 11938 - RNA, 19 nt, Homo sapiens
  misc_RNA (1)...(19): siRNA sense strand
guaccucagaagucaauuu

SEQ ID NO: 11939 - RNA, 19 nt, Homo sapiens
  misc_RNA (1)...(19): siRNA sense strand
gaugcaaucuuggacuaag

SEQ ID NO: 11940 - RNA, 19 nt, Homo sapiens
  misc_RNA (1)...(19): siRNA sense strand
ggguugaccagacaccaua

SEQ ID NO: 11941 - RNA, 19 nt, Homo sapiens
  misc_RNA (1)...(19): siRNA sense strand
acgagaguaucaacaguau

SEQ ID NO: 11942 - RNA, 19 nt, Homo sapiens
  misc_RNA (1)...(19): siRNA sense strand
caauuugcaagaugaagaa

SEQ ID NO: 11943 - RNA, 19 nt, Homo sapiens
  misc_RNA (1)...(19): siRNA sense strand
agaagucaauuugcaagau

SEQ ID NO: 11944 - RNA, 19 nt, Homo sapiens
  misc_RNA (1)...(19): siRNA sense strand
gcuccucagugucuguuuc

SEQ ID NO: 11945 - RNA, 19 nt, Homo sapiens
  misc_RNA (1)...(19): siRNA sense strand
ccagggaagaacaggauuu

SEQ ID NO: 11946 - RNA, 19 nt, Homo sapiens
  misc_RNA (1)...(19): siRNA sense strand
aaggaaaggacauagaaga

SEQ ID NO: 11947 - RNA, 19 nt, Homo sapiens
  misc_RNA (1)...(19): siRNA sense strand
ugagcguugugcgauaaua

SEQ ID NO: 11948 - RNA, 19 nt, Homo sapiens
  misc_RNA (1)...(19): siRNA sense strand
aacaggauuucaucauuca

SEQ ID NO: 11949 - RNA, 19 nt, Homo sapiens
  misc_RNA (1)...(19): siRNA sense strand
ccaucuugcuccucagugu

SEQ ID NO: 11950 - RNA, 19 nt, Homo sapiens
  misc_RNA (1)...(19): siRNA sense strand
ucaauuugcaagaugaaga

SEQ ID NO: 11951 - RNA, 19 nt, Homo sapiens
  misc_RNA (1)...(19): siRNA sense strand
uacgagaguaucaacagua

SEQ ID NO: 11952 - RNA, 19 nt, Homo sapiens
  misc_RNA (1)...(19): siRNA sense strand
ggaugcaaucuuggacuaa

SEQ ID NO: 11953 - RNA, 19 nt, Homo sapiens
  misc_RNA (1)...(19): siRNA sense strand
gucaagaggcuguccaagu

SEQ ID NO: 11954 - RNA, 19 nt, Homo sapiens
  misc_RNA (1)...(19): siRNA sense strand
ccaaguuacgagaguauca

SEQ ID NO: 11955 - RNA, 19 nt, Homo sapiens
  misc_RNA (1)...(19): siRNA sense strand
uuugcaagaugaagaagau

SEQ ID NO: 11956 - RNA, 19 nt, Homo sapiens
  misc_RNA (1)...(19): siRNA sense strand
cauggaaggaaaggacaua

SEQ ID NO: 11957 - RNA, 19 nt, Homo sapiens
  misc_RNA (1)...(19): siRNA sense strand
gaacccaauaaccuugaug

SEQ ID NO: 11958 - RNA, 19 nt, Homo sapiens
  misc_RNA (1)...(19): siRNA sense strand
uuacgagaguaucaacagu

SEQ ID NO: 11959 - RNA, 19 nt, Homo sapiens
  misc_RNA (1)...(19): siRNA sense strand
ugaagaagagccucaagac

SEQ ID NO: 11960 - RNA, 19 nt, Homo sapiens
  misc_RNA (1)...(19): siRNA sense strand
caggauuucaucauucaga

SEQ ID NO: 11961 - RNA, 19 nt, Homo sapiens
  misc_RNA (1)...(19): siRNA sense strand
guugcuacuuuauuucuac

SEQ ID NO: 11962 - RNA, 19 nt, Homo sapiens
  misc_RNA (1)...(19): siRNA sense strand
aggauuucaucauucagaa

SEQ ID NO: 11963 - RNA, 19 nt, Homo sapiens
  misc_RNA (1)...(19): siRNA sense strand
aagucaauuugcaagauga

SEQ ID NO: 11964 - RNA, 19 nt, Homo sapiens
  misc_RNA (1)...(19): siRNA sense strand
caaguuacgagaguaucaa

SEQ ID NO: 11965 - RNA, 19 nt, Homo sapiens
  misc_RNA (1)...(19): siRNA sense strand
uaaccuugaugagcguugu

SEQ ID NO: 11966 - RNA, 19 nt, Homo sapiens
  misc_RNA (1)...(19): siRNA sense strand
uaccucagaagucaauuug

SEQ ID NO: 11967 - RNA, 19 nt, Homo sapiens
  misc_RNA (1)...(19): siRNA sense strand
ugaccagacaccauacaau

SEQ ID NO: 11968 - RNA, 19 nt, Homo sapiens
  misc_RNA (1)...(19): siRNA sense strand
uguccaaguuacgagagua

SEQ ID NO: 11969 - RNA, 19 nt, Homo sapiens
  misc_RNA (1)...(19): siRNA sense strand
cagaagucaauuugcaaga

SEQ ID NO: 11970 - RNA, 19 nt, Homo sapiens
  misc_RNA (1)...(19): siRNA sense strand
gaguaucaacaguaucauc

SEQ ID NO: 11971 - RNA, 19 nt, Homo sapiens
  misc_RNA (1)...(19): siRNA sense strand
gaaagaagcggcagaauug

SEQ ID NO: 11972 - RNA, 19 nt, Homo sapiens
  misc_RNA (1)...(19): siRNA sense strand
gaauggcacuucacgguua

SEQ ID NO: 11973 - RNA, 19 nt, Homo sapiens
  misc_RNA (1)...(19): siRNA sense strand
gaauauaucuggcaaacga

SEQ ID NO: 11974 - RNA, 19 nt, Homo sapiens
  misc_RNA (1)...(19): siRNA sense strand
gaagucaauucaucuggaa

SEQ ID NO: 11975 - RNA, 19 nt, Homo sapiens
  misc_RNA (1)...(19): siRNA sense strand
cagagaagguugucuacuu

SEQ ID NO: 11976 - RNA, 19 nt, Homo sapiens
  misc_RNA (1)...(19): siRNA sense strand
gcucuuauauuccgacgaa

SEQ ID NO: 11977 - RNA, 19 nt, Homo sapiens
  misc_RNA (1)...(19): siRNA sense strand
gaacuggcuaggcaaauaa

SEQ ID NO: 11978 - RNA, 19 nt, Homo sapiens
  misc_RNA (1)...(19): siRNA sense strand
aagccaagcugaccaagaa

SEQ ID NO: 11979 - RNA, 19 nt, Homo sapiens
  misc_RNA (1)...(19): siRNA sense strand
caagauuucuguugugaag

SEQ ID NO: 11980 - RNA, 19 nt, Homo sapiens
  misc_RNA (1)...(19): siRNA sense strand
ugauauaccuacaacauuc

SEQ ID NO: 11981 - RNA, 19 nt, Homo sapiens
  misc_RNA (1)...(19): siRNA sense strand
gauguccuguugccuuuaa

SEQ ID NO: 11982 - RNA, 19 nt, Homo sapiens
  misc_RNA (1)...(19): siRNA sense strand
ugaaagaagcggcagaauu

SEQ ID NO: 11983 - RNA, 19 nt, Homo sapiens
  misc_RNA (1)...(19): siRNA sense strand
gaagaguccggcuguuaaa

SEQ ID NO: 11984 - RNA, 19 nt, Homo sapiens
  misc_RNA (1)...(19): siRNA sense strand
agaacuggcuaggcaaaua

SEQ ID NO: 11985 - RNA, 19 nt, Homo sapiens
  misc_RNA (1)...(19): siRNA sense strand
gaguauaaggacagcauua

SEQ ID NO: 11986 - RNA, 19 nt, Homo sapiens
  misc_RNA (1)...(19): siRNA sense strand
caagagacaaccacacuga

SEQ ID NO: 11987 - RNA, 19 nt, Homo sapiens
  misc_RNA (1)...(19): siRNA sense strand
gaaaccaccaagcauuauu

SEQ ID NO: 11988 - RNA, 19 nt, Homo sapiens
  misc_RNA (1)...(19): siRNA sense strand
gccauagguucucuagauu

SEQ ID NO: 11989 - RNA, 19 nt, Homo sapiens
  misc_RNA (1)...(19): siRNA sense strand
ggcauuggcagcucuuaua

SEQ ID NO: 11990 - RNA, 19 nt, Homo sapiens
  misc_RNA (1)...(19): siRNA sense strand
ccaagaagccaaagaacug

SEQ ID NO: 11991 - RNA, 19 nt, Homo sapiens
  misc_RNA (1)...(19): siRNA sense strand
caaccuguagcuaagaaua

SEQ ID NO: 11992 - RNA, 19 nt, Homo sapiens
  misc_RNA (1)...(19): siRNA sense strand
gaugauauaccuacaacau

SEQ ID NO: 11993 - RNA, 19 nt, Homo sapiens
  misc_RNA (1)...(19): siRNA sense strand
gauuugaagugggcaagaa

SEQ ID NO: 11994 - RNA, 19 nt, Homo sapiens
  misc_RNA (1)...(19): siRNA sense strand
ccauagguucucuagauua

SEQ ID NO: 11995 - RNA, 19 nt, Homo sapiens
  misc_RNA (1)...(19): siRNA sense strand
gcuaggcaaauaagcuuua

SEQ ID NO: 11996 - RNA, 19 nt, Homo sapiens
  misc_RNA (1)...(19): siRNA sense strand
ugaagaguccggcuguuaa

SEQ ID NO: 11997 - RNA, 19 nt, Homo sapiens
  misc_RNA (1)...(19): siRNA sense strand
ggagagggagccauagguu

SEQ ID NO: 11998 - RNA, 19 nt, Homo sapiens
  misc_RNA (1)...(19): siRNA sense strand
gcucugccaugaaggaugu

SEQ ID NO: 11999 - RNA, 19 nt, Homo sapiens
  misc_RNA (1)...(19): siRNA sense strand
aagaagagcacuugccaaa

SEQ ID NO: 12000 - RNA, 19 nt, Homo sapiens
  misc_RNA (1)...(19): siRNA sense strand
gcgcagccuuuagaggaua

SEQ ID NO: 12001 - RNA, 19 nt, Homo sapiens
  misc_RNA (1)...(19): siRNA sense strand
gaggaaagaagagcacuug

SEQ ID NO: 12002 - RNA, 19 nt, Homo sapiens
  misc_RNA (1)...(19): siRNA sense strand
gcuaagaauaccuccauga

SEQ ID NO: 12003 - RNA, 19 nt, Homo sapiens
  misc_RNA (1)...(19): siRNA sense strand
ggaaagacuaucucugagu

SEQ ID NO: 12004 - RNA, 19 nt, Homo sapiens
  misc_RNA (1)...(19): siRNA sense strand
cagccuucguggaguauaa

SEQ ID NO: 12005 - RNA, 19 nt, Homo sapiens
  misc_RNA (1)...(19): siRNA sense strand
caauucaucuggaaagacu

SEQ ID NO: 12006 - RNA, 19 nt, Homo sapiens
  misc_RNA (1)...(19): siRNA sense strand
gagacaaccacacugauca

SEQ ID NO: 12007 - RNA, 19 nt, Homo sapiens
  misc_RNA (1)...(19): siRNA sense strand
caugaaaccaccaagcauu

SEQ ID NO: 12008 - RNA, 19 nt, Homo sapiens
  misc_RNA (1)...(19): siRNA sense strand
cguacggacuccagaauuc

SEQ ID NO: 12009 - RNA, 19 nt, Homo sapiens
  misc_RNA (1)...(19): siRNA sense strand
gccaucauccugaaacuug

SEQ ID NO: 12010 - RNA, 19 nt, Homo sapiens
  misc_RNA (1)...(19): siRNA sense strand
ccaccagaguaucccauga

SEQ ID NO: 12011 - RNA, 19 nt, Homo sapiens
  misc_RNA (1)...(19): siRNA sense strand
agccauagguucucuagau

SEQ ID NO: 12012 - RNA, 19 nt, Homo sapiens
  misc_RNA (1)...(19): siRNA sense strand
cauagguucucuagauuac

SEQ ID NO: 12013 - RNA, 19 nt, Homo sapiens
  misc_RNA (1)...(19): siRNA sense strand
cauccugacuuuggcauug

SEQ ID NO: 12014 - RNA, 19 nt, Homo sapiens
  misc_RNA (1)...(19): siRNA sense strand
ugaccaagaagccaaagaa

SEQ ID NO: 12015 - RNA, 19 nt, Homo sapiens
  misc_RNA (1)...(19): siRNA sense strand
guccggcuguuaaacguuu

SEQ ID NO: 12016 - RNA, 19 nt, Homo sapiens
  misc_RNA (1)...(19): siRNA sense strand
aggcagaagucaauucauc

SEQ ID NO: 12017 - RNA, 19 nt, Homo sapiens
  misc_RNA (1)...(19): siRNA sense strand
cuggaaagacuaucucuga

SEQ ID NO: 12018 - RNA, 19 nt, Homo sapiens
  misc_RNA (1)...(19): siRNA sense strand
auuggcagcucuuauauuc

SEQ ID NO: 12019 - RNA, 19 nt, Homo sapiens
  misc_RNA (1)...(19): siRNA sense strand
gcauuggcagcucuuauau

SEQ ID NO: 12020 - RNA, 19 nt, Homo sapiens
  misc_RNA (1)...(19): siRNA sense strand
caagaugauauaccuacaa

SEQ ID NO: 12021 - RNA, 19 nt, Homo sapiens
  misc_RNA (1)...(19): siRNA sense strand
gcuaauggucgauuugaag

SEQ ID NO: 12022 - RNA, 19 nt, Homo sapiens
  misc_RNA (1)...(19): siRNA sense strand
gcagcauccuuucaucaac

SEQ ID NO: 12023 - RNA, 19 nt, Homo sapiens
  misc_RNA (1)...(19): siRNA sense strand
agaagcggcagaauugaaa

SEQ ID NO: 12024 - RNA, 19 nt, Homo sapiens
  misc_RNA (1)...(19): siRNA sense strand
cuaacugauuuacaagaug

SEQ ID NO: 12025 - RNA, 19 nt, Homo sapiens
  misc_RNA (1)...(19): siRNA sense strand
cuaggcaaauaagcuuuaa

SEQ ID NO: 12026 - RNA, 19 nt, Homo sapiens
  misc_RNA (1)...(19): siRNA sense strand
uggcagccuucguggagua

SEQ ID NO: 12027 - RNA, 19 nt, Homo sapiens
  misc_RNA (1)...(19): siRNA sense strand
uaaggcagaagucaauuca

SEQ ID NO: 12028 - RNA, 19 nt, Homo sapiens
  misc_RNA (1)...(19): siRNA sense strand
augaaaccaccaagcauua

SEQ ID NO: 12029 - RNA, 19 nt, Homo sapiens
  misc_RNA (1)...(19): siRNA sense strand
cugaagaguccggcuguua

SEQ ID NO: 12030 - RNA, 19 nt, Homo sapiens
  misc_RNA (1)...(19): siRNA sense strand
ggcuaauggucgauuugaa

SEQ ID NO: 12031 - RNA, 19 nt, Homo sapiens
  misc_RNA (1)...(19): siRNA sense strand
ccaagcauuauucuccuaa

SEQ ID NO: 12032 - RNA, 19 nt, Homo sapiens
  misc_RNA (1)...(19): siRNA sense strand
agauuucuguugugaagga

SEQ ID NO: 12033 - RNA, 19 nt, Homo sapiens
  misc_RNA (1)...(19): siRNA sense strand
auugaaagauccaacagau

SEQ ID NO: 12034 - RNA, 19 nt, Homo sapiens
  misc_RNA (1)...(19): siRNA sense strand
gagcaucucaggccaucau

SEQ ID NO: 12035 - RNA, 19 nt, Homo sapiens
  misc_RNA (1)...(19): siRNA sense strand
gcggcagaauugaaagauc

SEQ ID NO: 12036 - RNA, 19 nt, Homo sapiens
  misc_RNA (1)...(19): siRNA sense strand
aaagaacuggcuaggcaaa

SEQ ID NO: 12037 - RNA, 19 nt, Homo sapiens
  misc_RNA (1)...(19): siRNA sense strand
ggaguauaaggacagcauu

SEQ ID NO: 12038 - RNA, 19 nt, Homo sapiens
  misc_RNA (1)...(19): siRNA sense strand
ucuggcaaacgaauacaua

SEQ ID NO: 12039 - RNA, 19 nt, Homo sapiens
  misc_RNA (1)...(19): siRNA sense strand
gucaauucaucuggaaaga

SEQ ID NO: 12040 - RNA, 19 nt, Homo sapiens
  misc_RNA (1)...(19): siRNA sense strand
uccaacagaucauuaccau

SEQ ID NO: 12041 - RNA, 19 nt, Homo sapiens
  misc_RNA (1)...(19): siRNA sense strand
gcauuauuagccaucauug

SEQ ID NO: 12042 - RNA, 19 nt, Homo sapiens
  misc_RNA (1)...(19): siRNA sense strand
gcaagaaaaucuguuugag

SEQ ID NO: 12043 - RNA, 19 nt, Homo sapiens
  misc_RNA (1)...(19): siRNA sense strand
caccagaguaucccaugaa

SEQ ID NO: 12044 - RNA, 19 nt, Homo sapiens
  misc_RNA (1)...(19): siRNA sense strand
accagaguaucccaugaaa

SEQ ID NO: 12045 - RNA, 19 nt, Homo sapiens
  misc_RNA (1)...(19): siRNA sense strand
cagcagcauccuuucauca

SEQ ID NO: 12046 - RNA, 19 nt, Homo sapiens
  misc_RNA (1)...(19): siRNA sense strand
aagaugauauaccuacaac

SEQ ID NO: 12047 - RNA, 19 nt, Homo sapiens
  misc_RNA (1)...(19): siRNA sense strand
aaaccaccaagcauuauuc

SEQ ID NO: 12048 - RNA, 19 nt, Homo sapiens
  misc_RNA (1)...(19): siRNA sense strand
caagccaagcugaccaaga

SEQ ID NO: 12049 - RNA, 19 nt, Homo sapiens
  misc_RNA (1)...(19): siRNA sense strand
aaaaggagagggagccaua

SEQ ID NO: 12050 - RNA, 19 nt, Homo sapiens
  misc_RNA (1)...(19): siRNA sense strand
cagcuguacugauugucau

SEQ ID NO: 12051 - RNA, 19 nt, Homo sapiens
  misc_RNA (1)...(19): siRNA sense strand
agucagagaagguugucua

SEQ ID NO: 12052 - RNA, 19 nt, Homo sapiens
  misc_RNA (1)...(19): siRNA sense strand
cagcagcagagucagagaa

SEQ ID NO: 12053 - RNA, 19 nt, Homo sapiens
  misc_RNA (1)...(19): siRNA sense strand
aagaagcggcagaauugaa

SEQ ID NO: 12054 - RNA, 19 nt, Homo sapiens
  misc_RNA (1)...(19): siRNA sense strand
ucagcagcauccuuucauc

SEQ ID NO: 12055 - RNA, 19 nt, Homo sapiens
  misc_RNA (1)...(19): siRNA sense strand
acaagaugauauaccuaca

SEQ ID NO: 12056 - RNA, 19 nt, Homo sapiens
  misc_RNA (1)...(19): siRNA sense strand
ugaaaccaccaagcauuau

SEQ ID NO: 12057 - RNA, 19 nt, Homo sapiens
  misc_RNA (1)...(19): siRNA sense strand
uauaucuggcaaacgaaua

SEQ ID NO: 12058 - RNA, 19 nt, Homo sapiens
  misc_RNA (1)...(19): siRNA sense strand
cccaaccuguagcuaagaa

SEQ ID NO: 12059 - RNA, 19 nt, Homo sapiens
  misc_RNA (1)...(19): siRNA sense strand
uacccaaccuguagcuaag

SEQ ID NO: 12060 - RNA, 19 nt, Homo sapiens
  misc_RNA (1)...(19): siRNA sense strand
gaguccggcuguuaaacgu

SEQ ID NO: 12061 - RNA, 19 nt, Homo sapiens
  misc_RNA (1)...(19): siRNA sense strand
gaauugaaagauccaacag

SEQ ID NO: 12062 - RNA, 19 nt, Homo sapiens
  misc_RNA (1)...(19): siRNA sense strand
cagaguaucccaugaaacc

SEQ ID NO: 12063 - RNA, 19 nt, Homo sapiens
  misc_RNA (1)...(19): siRNA sense strand
cuacuucaccagauguaau

SEQ ID NO: 12064 - RNA, 19 nt, Homo sapiens
  misc_RNA (1)...(19): siRNA sense strand
cagcagagucagagaaggu

SEQ ID NO: 12065 - RNA, 19 nt, Homo sapiens
  misc_RNA (1)...(19): siRNA sense strand
cuaagaauaccuccaugag

SEQ ID NO: 12066 - RNA, 19 nt, Homo sapiens
  misc_RNA (1)...(19): siRNA sense strand
cagaauuccucagcagcau

SEQ ID NO: 12067 - RNA, 19 nt, Homo sapiens
  misc_RNA (1)...(19): siRNA sense strand
ggagccauagguucucuag

SEQ ID NO: 12068 - RNA, 19 nt, Homo sapiens
  misc_RNA (1)...(19): siRNA sense strand
cauuggcagcucuuauauu

SEQ ID NO: 12069 - RNA, 19 nt, Homo sapiens
  misc_RNA (1)...(19): siRNA sense strand
aaagaagcggcagaauuga

SEQ ID NO: 12070 - RNA, 19 nt, Homo sapiens
  misc_RNA (1)...(19): siRNA sense strand
ggauguccuguugccuuua

SEQ ID NO: 12071 - RNA, 19 nt, Homo sapiens
  misc_RNA (1)...(19): siRNA sense strand
caaccuggcugaagaauuu

SEQ ID NO: 12072 - RNA, 19 nt, Homo sapiens
  misc_RNA (1)...(19): siRNA sense strand
uaacaaggcuuaucucuag

SEQ ID NO: 12073 - RNA, 19 nt, Homo sapiens
  misc_RNA (1)...(19): siRNA sense strand
ugagaaagcuccuacagaa

SEQ ID NO: 12074 - RNA, 19 nt, Homo sapiens
  misc_RNA (1)...(19): siRNA sense strand
gagcugcuguuccuaagua

SEQ ID NO: 12075 - RNA, 19 nt, Homo sapiens
  misc_RNA (1)...(19): siRNA sense strand
acaauuggcuucaacauga

SEQ ID NO: 12076 - RNA, 19 nt, Homo sapiens
  misc_RNA (1)...(19): siRNA sense strand
gcgcuuugaucaaccuuua

SEQ ID NO: 12077 - RNA, 19 nt, Homo sapiens
  misc_RNA (1)...(19): siRNA sense strand
gaaaccagcccuagaacuu

SEQ ID NO: 12078 - RNA, 19 nt, Homo sapiens
  misc_RNA (1)...(19): siRNA sense strand
agaaguaugucuggaauaa

SEQ ID NO: 12079 - RNA, 19 nt, Homo sapiens
  misc_RNA (1)...(19): siRNA sense strand
gaaagcuccuacagaagaa

SEQ ID NO: 12080 - RNA, 19 nt, Homo sapiens
  misc_RNA (1)...(19): siRNA sense strand
cuaagucuuugccauguua

SEQ ID NO: 12081 - RNA, 19 nt, Homo sapiens
  misc_RNA (1)...(19): siRNA sense strand
caaaugagcgcuuccugaa

SEQ ID NO: 12082 - RNA, 19 nt, Homo sapiens
  misc_RNA (1)...(19): siRNA sense strand
aaacaggacuggcugauac

SEQ ID NO: 12083 - RNA, 19 nt, Homo sapiens
  misc_RNA (1)...(19): siRNA sense strand
gggaagaaccacucugaaa

SEQ ID NO: 12084 - RNA, 19 nt, Homo sapiens
  misc_RNA (1)...(19): siRNA sense strand
gaagcuugccugaugguaa

SEQ ID NO: 12085 - RNA, 19 nt, Homo sapiens
  misc_RNA (1)...(19): siRNA sense strand
cagugaagcuugccugaug

SEQ ID NO: 12086 - RNA, 19 nt, Homo sapiens
  misc_RNA (1)...(19): siRNA sense strand
ggaaaggaaggauuugaug

SEQ ID NO: 12087 - RNA, 19 nt, Homo sapiens
  misc_RNA (1)...(19): siRNA sense strand
gcuauacgauaucuucugu

SEQ ID NO: 12088 - RNA, 19 nt, Homo sapiens
  misc_RNA (1)...(19): siRNA sense strand
uacgauaucuucuguaugg

SEQ ID NO: 12089 - RNA, 19 nt, Homo sapiens
  misc_RNA (1)...(19): siRNA sense strand
ggagagaagggaacaggaa

SEQ ID NO: 12090 - RNA, 19 nt, Homo sapiens
  misc_RNA (1)...(19): siRNA sense strand
aaaggaauaacaaggcuua

SEQ ID NO: 12091 - RNA, 19 nt, Homo sapiens
  misc_RNA (1)...(19): siRNA sense strand
gagcuaaagaggcaaaguu

SEQ ID NO: 12092 - RNA, 19 nt, Homo sapiens
  misc_RNA (1)...(19): siRNA sense strand
gagagaaagcacugagaaa

SEQ ID NO: 12093 - RNA, 19 nt, Homo sapiens
  misc_RNA (1)...(19): siRNA sense strand
ucucuaggauccauaaguu

SEQ ID NO: 12094 - RNA, 19 nt, Homo sapiens
  misc_RNA (1)...(19): siRNA sense strand
aaacagcgcuuugaucaac

SEQ ID NO: 12095 - RNA, 19 nt, Homo sapiens
  misc_RNA (1)...(19): siRNA sense strand
ggucagcacuacaacaucu

SEQ ID NO: 12096 - RNA, 19 nt, Homo sapiens
  misc_RNA (1)...(19): siRNA sense strand
aaguaugucuggaauaaga

SEQ ID NO: 12097 - RNA, 19 nt, Homo sapiens
  misc_RNA (1)...(19): siRNA sense strand
gauacuacauauuccagau

SEQ ID NO: 12098 - RNA, 19 nt, Homo sapiens
  misc_RNA (1)...(19): siRNA sense strand
ggauuuggagacuguauuu

SEQ ID NO: 12099 - RNA, 19 nt, Homo sapiens
  misc_RNA (1)...(19): siRNA sense strand
ugaugcaggugaagacauu

SEQ ID NO: 12100 - RNA, 19 nt, Homo sapiens
  misc_RNA (1)...(19): siRNA sense strand
gaacgccacagaugcaguu

SEQ ID NO: 12101 - RNA, 19 nt, Homo sapiens
  misc_RNA (1)...(19): siRNA sense strand
gauaaaaguucaagagaag

SEQ ID NO: 12102 - RNA, 19 nt, Homo sapiens
  misc_RNA (1)...(19): siRNA sense strand
gcacgagggucagcacuac

SEQ ID NO: 12103 - RNA, 19 nt, Homo sapiens
  misc_RNA (1)...(19): siRNA sense strand
agaaagcuccuacagaaga

SEQ ID NO: 12104 - RNA, 19 nt, Homo sapiens
  misc_RNA (1)...(19): siRNA sense strand
ggccguggauggaaucaau

SEQ ID NO: 12105 - RNA, 19 nt, Homo sapiens
  misc_RNA (1)...(19): siRNA sense strand
ggaauuagcacuuguucac

SEQ ID NO: 12106 - RNA, 19 nt, Homo sapiens
  misc_RNA (1)...(19): siRNA sense strand
gagagaagggaacaggaaa

SEQ ID NO: 12107 - RNA, 19 nt, Homo sapiens
  misc_RNA (1)...(19): siRNA sense strand
guucacaacuugaggaaaa

SEQ ID NO: 12108 - RNA, 19 nt, Homo sapiens
  misc_RNA (1)...(19): siRNA sense strand
ggaagaaccacucugaaaa

SEQ ID NO: 12109 - RNA, 19 nt, Homo sapiens
  misc_RNA (1)...(19): siRNA sense strand
gagaaguaugucuggaaua

SEQ ID NO: 12110 - RNA, 19 nt, Homo sapiens
  misc_RNA (1)...(19): siRNA sense strand
gcauaacacgggugaggaa

SEQ ID NO: 12111 - RNA, 19 nt, Homo sapiens
  misc_RNA (1)...(19): siRNA sense strand
aaagagcugcuguuccuaa

SEQ ID NO: 12112 - RNA, 19 nt, Homo sapiens
  misc_RNA (1)...(19): siRNA sense strand
cauccugguuuccaacuau

SEQ ID NO: 12113 - RNA, 19 nt, Homo sapiens
  misc_RNA (1)...(19): siRNA sense strand
gcaguccagcuacaacaaa

SEQ ID NO: 12114 - RNA, 19 nt, Homo sapiens
  misc_RNA (1)...(19): siRNA sense strand
gcugggaaaggaaggauuu

SEQ ID NO: 12115 - RNA, 19 nt, Homo sapiens
  misc_RNA (1)...(19): siRNA sense strand
gaagauaaaagcccgauug

SEQ ID NO: 12116 - RNA, 19 nt, Homo sapiens
  misc_RNA (1)...(19): siRNA sense strand
gagaaagcacugagaaagg

SEQ ID NO: 12117 - RNA, 19 nt, Homo sapiens
  misc_RNA (1)...(19): siRNA sense strand
caacuauaacccaaaggaa

SEQ ID NO: 12118 - RNA, 19 nt, Homo sapiens
  misc_RNA (1)...(19): siRNA sense strand
gaaaagagaagauaaaagc

SEQ ID NO: 12119 - RNA, 19 nt, Homo sapiens
  misc_RNA (1)...(19): siRNA sense strand
agagaaguaugucuggaau

SEQ ID NO: 12120 - RNA, 19 nt, Homo sapiens
  misc_RNA (1)...(19): siRNA sense strand
gagaguccgagagcuauuu

SEQ ID NO: 12121 - RNA, 19 nt, Homo sapiens
  misc_RNA (1)...(19): siRNA sense strand
gaaaacaauuggcuucaac

SEQ ID NO: 12122 - RNA, 19 nt, Homo sapiens
  misc_RNA (1)...(19): siRNA sense strand
guuauucauuucugugcaa

SEQ ID NO: 12123 - RNA, 19 nt, Homo sapiens
  misc_RNA (1)...(19): siRNA sense strand
uaaggaaaccagcccuaga

SEQ ID NO: 12124 - RNA, 19 nt, Homo sapiens
  misc_RNA (1)...(19): siRNA sense strand
ccacagaugcaguuggaau

SEQ ID NO: 12125 - RNA, 19 nt, Homo sapiens
  misc_RNA (1)...(19): siRNA sense strand
guugagaguccgagagcua

SEQ ID NO: 12126 - RNA, 19 nt, Homo sapiens
  misc_RNA (1)...(19): siRNA sense strand
ggaaaacaauuggcuucaa

SEQ ID NO: 12127 - RNA, 19 nt, Homo sapiens
  misc_RNA (1)...(19): siRNA sense strand
gggaaaggaaggauuugau

SEQ ID NO: 12128 - RNA, 19 nt, Homo sapiens
  misc_RNA (1)...(19): siRNA sense strand
ggaguccucugggagaagu

SEQ ID NO: 12129 - RNA, 19 nt, Homo sapiens
  misc_RNA (1)...(19): siRNA sense strand
uggcugauacuacauauuc

SEQ ID NO: 12130 - RNA, 19 nt, Homo sapiens
  misc_RNA (1)...(19): siRNA sense strand
aaggaaaccagcccuagaa

SEQ ID NO: 12131 - RNA, 19 nt, Homo sapiens
  misc_RNA (1)...(19): siRNA sense strand
gacugggucucucuuuaag

SEQ ID NO: 12132 - RNA, 19 nt, Homo sapiens
  misc_RNA (1)...(19): siRNA sense strand
gccauugugucggcuuuga

SEQ ID NO: 12133 - RNA, 19 nt, Homo sapiens
  misc_RNA (1)...(19): siRNA sense strand
cgccacagaugcaguugga

SEQ ID NO: 12134 - RNA, 19 nt, Homo sapiens
  misc_RNA (1)...(19): siRNA sense strand
ugggagaagugguugaaca

SEQ ID NO: 12135 - RNA, 19 nt, Homo sapiens
  misc_RNA (1)...(19): siRNA sense strand
ccagcuauacgauaucuuc

SEQ ID NO: 12136 - RNA, 19 nt, Homo sapiens
  misc_RNA (1)...(19): siRNA sense strand
acuauaacccaaaggaauu

SEQ ID NO: 12137 - RNA, 19 nt, Homo sapiens
  misc_RNA (1)...(19): siRNA sense strand
ccaacuauaacccaaagga

SEQ ID NO: 12138 - RNA, 19 nt, Homo sapiens
  misc_RNA (1)...(19): siRNA sense strand
gcgccauugugucggcuuu

SEQ ID NO: 12139 - RNA, 19 nt, Homo sapiens
  misc_RNA (1)...(19): siRNA sense strand
gaggaacgccacagaugca

SEQ ID NO: 12140 - RNA, 19 nt, Homo sapiens
  misc_RNA (1)...(19): siRNA sense strand
gagaaagcuccuacagaag

SEQ ID NO: 12141 - RNA, 19 nt, Homo sapiens
  misc_RNA (1)...(19): siRNA sense strand
cagaugcaguuggaauugu

SEQ ID NO: 12142 - RNA, 19 nt, Homo sapiens
  misc_RNA (1)...(19): siRNA sense strand
gcuauuucccgcaccaaug

SEQ ID NO: 12143 - RNA, 19 nt, Homo sapiens
  misc_RNA (1)...(19): siRNA sense strand
gugaggaacgccacagaug

SEQ ID NO: 12144 - RNA, 19 nt, Homo sapiens
  misc_RNA (1)...(19): siRNA sense strand
agagagaaagcacugagaa

SEQ ID NO: 12145 - RNA, 19 nt, Homo sapiens
  misc_RNA (1)...(19): siRNA sense strand
gaagaaccacucugaaaag

SEQ ID NO: 12146 - RNA, 19 nt, Homo sapiens
  misc_RNA (1)...(19): siRNA sense strand
ggaaaccagcccuagaacu

SEQ ID NO: 12147 - RNA, 19 nt, Homo sapiens
  misc_RNA (1)...(19): siRNA sense strand
aagcuugccugaugguaag

SEQ ID NO: 12148 - RNA, 19 nt, Homo sapiens
  misc_RNA (1)...(19): siRNA sense strand
caacaugagaaagcuccua

SEQ ID NO: 12149 - RNA, 19 nt, Homo sapiens
  misc_RNA (1)...(19): siRNA sense strand
ccuaagucuuugccauguu

SEQ ID NO: 12150 - RNA, 19 nt, Homo sapiens
  misc_RNA (1)...(19): siRNA sense strand
caaggcuuaucucuaggau

SEQ ID NO: 12151 - RNA, 19 nt, Homo sapiens
  misc_RNA (1)...(19): siRNA sense strand
gaauuagcacuuguucaca

SEQ ID NO: 12152 - RNA, 19 nt, Homo sapiens
  misc_RNA (1)...(19): siRNA sense strand
gcuuugugaugcaggugaa

SEQ ID NO: 12153 - RNA, 19 nt, Homo sapiens
  misc_RNA (1)...(19): siRNA sense strand
cuauuucccgcaccaauga

SEQ ID NO: 12154 - RNA, 19 nt, Homo sapiens
  misc_RNA (1)...(19): siRNA sense strand
ccauccugguuuccaacua

SEQ ID NO: 12155 - RNA, 19 nt, Homo sapiens
  misc_RNA (1)...(19): siRNA sense strand
ugcccuggaucccuuuauu

SEQ ID NO: 12156 - RNA, 19 nt, Homo sapiens
  misc_RNA (1)...(19): siRNA sense strand
ggaguugcugggaaaggaa

SEQ ID NO: 12157 - RNA, 19 nt, Homo sapiens
  misc_RNA (1)...(19): siRNA sense strand
gaggaauuagcacuuguuc

SEQ ID NO: 12158 - RNA, 19 nt, Homo sapiens
  misc_RNA (1)...(19): siRNA sense strand
gugcugaaagagcuaaaga

SEQ ID NO: 12159 - RNA, 19 nt, Homo sapiens
  misc_RNA (1)...(19): siRNA sense strand
caguuggaauugugcugaa

SEQ ID NO: 12160 - RNA, 19 nt, Homo sapiens
  misc_RNA (1)...(19): siRNA sense strand
cacagaugcaguuggaauu

SEQ ID NO: 12161 - RNA, 19 nt, Homo sapiens
  misc_RNA (1)...(19): siRNA sense strand
gacuggcugauacuacaua

SEQ ID NO: 12162 - RNA, 19 nt, Homo sapiens
  misc_RNA (1)...(19): siRNA sense strand
gcauugcugcucaccuaga

SEQ ID NO: 12163 - RNA, 19 nt, Homo sapiens
  misc_RNA (1)...(19): siRNA sense strand
gcuuugaucaaccuuuaga

SEQ ID NO: 12164 - RNA, 19 nt, Homo sapiens
  misc_RNA (1)...(19): siRNA sense strand
agagaaagcacugagaaag

SEQ ID NO: 12165 - RNA, 19 nt, Homo sapiens
  misc_RNA (1)...(19): siRNA sense strand
gccauguuauucauuucug

SEQ ID NO: 12166 - RNA, 19 nt, Homo sapiens
  misc_RNA (1)...(19): siRNA sense strand
caauuggcuucaacaugag

SEQ ID NO: 12167 - RNA, 19 nt, Homo sapiens
  misc_RNA (1)...(19): siRNA sense strand
cgaggaauuagcacuuguu

SEQ ID NO: 12168 - RNA, 19 nt, Homo sapiens
  misc_RNA (1)...(19): siRNA sense strand
cccaggauuuggagacugu

SEQ ID NO: 12169 - RNA, 19 nt, Homo sapiens
  misc_RNA (1)...(19): siRNA sense strand
ccauguuauucauuucugu

SEQ ID NO: 12170 - RNA, 19 nt, Homo sapiens
  misc_RNA (1)...(19): siRNA sense strand
cuauaacccaaaggaauuu

SEQ ID NO: 12171 - RNA, 19 nt, Homo sapiens
  misc_RNA (1)...(19): siRNA sense strand
caaccuggcugaagaauuu

SEQ ID NO: 12172 - RNA, 19 nt, Homo sapiens
  misc_RNA (1)...(19): siRNA sense strand
uaacaaggcuuaucucuag

SEQ ID NO: 12173 - RNA, 19 nt, Homo sapiens
  misc_RNA (1)...(19): siRNA sense strand
ugagaaagcuccuacagaa

SEQ ID NO: 12174 - RNA, 19 nt, Homo sapiens
  misc_RNA (1)...(19): siRNA sense strand
gagcugcuguuccuaagua

SEQ ID NO: 12175 - RNA, 19 nt, Homo sapiens
  misc_RNA (1)...(19): siRNA sense strand
acaauuggcuucaacauga

SEQ ID NO: 12176 - RNA, 19 nt, Homo sapiens
  misc_RNA (1)...(19): siRNA sense strand
gcgcuuugaucaaccuuua

SEQ ID NO: 12177 - RNA, 19 nt, Homo sapiens
  misc_RNA (1)...(19): siRNA sense strand
gaaaccagcccuagaacuu

SEQ ID NO: 12178 - RNA, 19 nt, Homo sapiens
  misc_RNA (1)...(19): siRNA sense strand
agaaguaugucuggaauaa

SEQ ID NO: 12179 - RNA, 19 nt, Homo sapiens
  misc_RNA (1)...(19): siRNA sense strand
gaaagcuccuacagaagaa

SEQ ID NO: 12180 - RNA, 19 nt, Homo sapiens
  misc_RNA (1)...(19): siRNA sense strand
cuaagucuuugccauguua

SEQ ID NO: 12181 - RNA, 19 nt, Homo sapiens
  misc_RNA (1)...(19): siRNA sense strand
caaaugagcgcuuccugaa

SEQ ID NO: 12182 - RNA, 19 nt, Homo sapiens
  misc_RNA (1)...(19): siRNA sense strand
aaacaggacuggcugauac

SEQ ID NO: 12183 - RNA, 19 nt, Homo sapiens
  misc_RNA (1)...(19): siRNA sense strand
gggaagaaccacucugaaa

SEQ ID NO: 12184 - RNA, 19 nt, Homo sapiens
  misc_RNA (1)...(19): siRNA sense strand
gaagcuugccugaugguaa

SEQ ID NO: 12185 - RNA, 19 nt, Homo sapiens
  misc_RNA (1)...(19): siRNA sense strand
cagugaagcuugccugaug

SEQ ID NO: 12186 - RNA, 19 nt, Homo sapiens
  misc_RNA (1)...(19): siRNA sense strand
ggaaaggaaggauuugaug

SEQ ID NO: 12187 - RNA, 19 nt, Homo sapiens
  misc_RNA (1)...(19): siRNA sense strand
gcuauacgauaucuucugu

SEQ ID NO: 12188 - RNA, 19 nt, Homo sapiens
  misc_RNA (1)...(19): siRNA sense strand
uacgauaucuucuguaugg

SEQ ID NO: 12189 - RNA, 19 nt, Homo sapiens
  misc_RNA (1)...(19): siRNA sense strand
ggagagaagggaacaggaa

SEQ ID NO: 12190 - RNA, 19 nt, Homo sapiens
  misc_RNA (1)...(19): siRNA sense strand
aaaggaauaacaaggcuua

SEQ ID NO: 12191 - RNA, 19 nt, Homo sapiens
  misc_RNA (1)...(19): siRNA sense strand
gagcuaaagaggcaaaguu

SEQ ID NO: 12192 - RNA, 19 nt, Homo sapiens
  misc_RNA (1)...(19): siRNA sense strand
gagagaaagcacugagaaa

SEQ ID NO: 12193 - RNA, 19 nt, Homo sapiens
  misc_RNA (1)...(19): siRNA sense strand
ucucuaggauccauaaguu

SEQ ID NO: 12194 - RNA, 19 nt, Homo sapiens
  misc_RNA (1)...(19): siRNA sense strand
aaacagcgcuuugaucaac

SEQ ID NO: 12195 - RNA, 19 nt, Homo sapiens
  misc_RNA (1)...(19): siRNA sense strand
ggucagcacuacaacaucu

SEQ ID NO: 12196 - RNA, 19 nt, Homo sapiens
  misc_RNA (1)...(19): siRNA sense strand
aaguaugucuggaauaaga

SEQ ID NO: 12197 - RNA, 19 nt, Homo sapiens
  misc_RNA (1)...(19): siRNA sense strand
gauacuacauauuccagau

SEQ ID NO: 12198 - RNA, 19 nt, Homo sapiens
  misc_RNA (1)...(19): siRNA sense strand
ggauuuggagacuguauuu

SEQ ID NO: 12199 - RNA, 19 nt, Homo sapiens
  misc_RNA (1)...(19): siRNA sense strand
ugaugcaggugaagacauu

SEQ ID NO: 12200 - RNA, 19 nt, Homo sapiens
  misc_RNA (1)...(19): siRNA sense strand
gaacgccacagaugcaguu

SEQ ID NO: 12201 - RNA, 19 nt, Homo sapiens
  misc_RNA (1)...(19): siRNA sense strand
gauaaaaguucaagagaag

SEQ ID NO: 12202 - RNA, 19 nt, Homo sapiens
  misc_RNA (1)...(19): siRNA sense strand
gcacgagggucagcacuac

SEQ ID NO: 12203 - RNA, 19 nt, Homo sapiens
  misc_RNA (1)...(19): siRNA sense strand
agaaagcuccuacagaaga

SEQ ID NO: 12204 - RNA, 19 nt, Homo sapiens
  misc_RNA (1)...(19): siRNA sense strand
ggccguggauggaaucaau

SEQ ID NO: 12205 - RNA, 19 nt, Homo sapiens
  misc_RNA (1)...(19): siRNA sense strand
ggaauuagcacuuguucac

SEQ ID NO: 12206 - RNA, 19 nt, Homo sapiens
  misc_RNA (1)...(19): siRNA sense strand
gagagaagggaacaggaaa

SEQ ID NO: 12207 - RNA, 19 nt, Homo sapiens
  misc_RNA (1)...(19): siRNA sense strand
guucacaacuugaggaaaa

SEQ ID NO: 12208 - RNA, 19 nt, Homo sapiens
  misc_RNA (1)...(19): siRNA sense strand
ggaagaaccacucugaaaa

SEQ ID NO: 12209 - RNA, 19 nt, Homo sapiens
  misc_RNA (1)...(19): siRNA sense strand
gagaaguaugucuggaaua

SEQ ID NO: 12210 - RNA, 19 nt, Homo sapiens
  misc_RNA (1)...(19): siRNA sense strand
gcauaacacgggugaggaa

SEQ ID NO: 12211 - RNA, 19 nt, Homo sapiens
  misc_RNA (1)...(19): siRNA sense strand
aaagagcugcuguuccuaa

SEQ ID NO: 12212 - RNA, 19 nt, Homo sapiens
  misc_RNA (1)...(19): siRNA sense strand
cauccugguuuccaacuau

SEQ ID NO: 12213 - RNA, 19 nt, Homo sapiens
  misc_RNA (1)...(19): siRNA sense strand
gcaguccagcuacaacaaa

SEQ ID NO: 12214 - RNA, 19 nt, Homo sapiens
  misc_RNA (1)...(19): siRNA sense strand
gcugggaaaggaaggauuu

SEQ ID NO: 12215 - RNA, 19 nt, Homo sapiens
  misc_RNA (1)...(19): siRNA sense strand
gaagauaaaagcccgauug

SEQ ID NO: 12216 - RNA, 19 nt, Homo sapiens
  misc_RNA (1)...(19): siRNA sense strand
gagaaagcacugagaaagg

SEQ ID NO: 12217 - RNA, 19 nt, Homo sapiens
  misc_RNA (1)...(19): siRNA sense strand
caacuauaacccaaaggaa

SEQ ID NO: 12218 - RNA, 19 nt, Homo sapiens
  misc_RNA (1)...(19): siRNA sense strand
gaaaagagaagauaaaagc

SEQ ID NO: 12219 - RNA, 19 nt, Homo sapiens
  misc_RNA (1)...(19): siRNA sense strand
agagaaguaugucuggaau

SEQ ID NO: 12220 - RNA, 19 nt, Homo sapiens
  misc_RNA (1)...(19): siRNA sense strand
gagaguccgagagcuauuu

SEQ ID NO: 12221 - RNA, 19 nt, Homo sapiens
  misc_RNA (1)...(19): siRNA sense strand
gaaaacaauuggcuucaac

SEQ ID NO: 12222 - RNA, 19 nt, Homo sapiens
  misc_RNA (1)...(19): siRNA sense strand
guuauucauuucugugcaa

SEQ ID NO: 12223 - RNA, 19 nt, Homo sapiens
  misc_RNA (1)...(19): siRNA sense strand
uaaggaaaccagcccuaga

SEQ ID NO: 12224 - RNA, 19 nt, Homo sapiens
  misc_RNA (1)...(19): siRNA sense strand
ccacagaugcaguuggaau

SEQ ID NO: 12225 - RNA, 19 nt, Homo sapiens
  misc_RNA (1)...(19): siRNA sense strand
guugagaguccgagagcua

SEQ ID NO: 12226 - RNA, 19 nt, Homo sapiens
  misc_RNA (1)...(19): siRNA sense strand
ggaaaacaauuggcuucaa

SEQ ID NO: 12227 - RNA, 19 nt, Homo sapiens
  misc_RNA (1)...(19): siRNA sense strand
gggaaaggaaggauuugau

SEQ ID NO: 12228 - RNA, 19 nt, Homo sapiens
  misc_RNA (1)...(19): siRNA sense strand
ggaguccucugggagaagu

SEQ ID NO: 12229 - RNA, 19 nt, Homo sapiens
  misc_RNA (1)...(19): siRNA sense strand
uggcugauacuacauauuc

SEQ ID NO: 12230 - RNA, 19 nt, Homo sapiens
  misc_RNA (1)...(19): siRNA sense strand
aaggaaaccagcccuagaa

SEQ ID NO: 12231 - RNA, 19 nt, Homo sapiens
  misc_RNA (1)...(19): siRNA sense strand
gacugggucucucuuuaag

SEQ ID NO: 12232 - RNA, 19 nt, Homo sapiens
  misc_RNA (1)...(19): siRNA sense strand
gccauugugucggcuuuga

SEQ ID NO: 12233 - RNA, 19 nt, Homo sapiens
  misc_RNA (1)...(19): siRNA sense strand
cgccacagaugcaguugga

SEQ ID NO: 12234 - RNA, 19 nt, Homo sapiens
  misc_RNA (1)...(19): siRNA sense strand
ugggagaagugguugaaca

SEQ ID NO: 12235 - RNA, 19 nt, Homo sapiens
  misc_RNA (1)...(19): siRNA sense strand
ccagcuauacgauaucuuc

SEQ ID NO: 12236 - RNA, 19 nt, Homo sapiens
  misc_RNA (1)...(19): siRNA sense strand
acuauaacccaaaggaauu

SEQ ID NO: 12237 - RNA, 19 nt, Homo sapiens
  misc_RNA (1)...(19): siRNA sense strand
ccaacuauaacccaaagga

SEQ ID NO: 12238 - RNA, 19 nt, Homo sapiens
  misc_RNA (1)...(19): siRNA sense strand
gcgccauugugucggcuuu

SEQ ID NO: 12239 - RNA, 19 nt, Homo sapiens
  misc_RNA (1)...(19): siRNA sense strand
gaggaacgccacagaugca

SEQ ID NO: 12240 - RNA, 19 nt, Homo sapiens
  misc_RNA (1)...(19): siRNA sense strand
gagaaagcuccuacagaag

SEQ ID NO: 12241 - RNA, 19 nt, Homo sapiens
  misc_RNA (1)...(19): siRNA sense strand
cagaugcaguuggaauugu

SEQ ID NO: 12242 - RNA, 19 nt, Homo sapiens
  misc_RNA (1)...(19): siRNA sense strand
gcuauuucccgcaccaaug

SEQ ID NO: 12243 - RNA, 19 nt, Homo sapiens
  misc_RNA (1)...(19): siRNA sense strand
gugaggaacgccacagaug

SEQ ID NO: 12244 - RNA, 19 nt, Homo sapiens
  misc_RNA (1)...(19): siRNA sense strand
agagagaaagcacugagaa

SEQ ID NO: 12245 - RNA, 19 nt, Homo sapiens
  misc_RNA (1)...(19): siRNA sense strand
gaagaaccacucugaaaag

SEQ ID NO: 12246 - RNA, 19 nt, Homo sapiens
  misc_RNA (1)...(19): siRNA sense strand
ggaaaccagcccuagaacu

SEQ ID NO: 12247 - RNA, 19 nt, Homo sapiens
  misc_RNA (1)...(19): siRNA sense strand
aagcuugccugaugguaag

SEQ ID NO: 12248 - RNA, 19 nt, Homo sapiens
  misc_RNA (1)...(19): siRNA sense strand
caacaugagaaagcuccua

SEQ ID NO: 12249 - RNA, 19 nt, Homo sapiens
  misc_RNA (1)...(19): siRNA sense strand
ccuaagucuuugccauguu

SEQ ID NO: 12250 - RNA, 19 nt, Homo sapiens
  misc_RNA (1)...(19): siRNA sense strand
caaggcuuaucucuaggau

SEQ ID NO: 12251 - RNA, 19 nt, Homo sapiens
  misc_RNA (1)...(19): siRNA sense strand
gaauuagcacuuguucaca

SEQ ID NO: 12252 - RNA, 19 nt, Homo sapiens
  misc_RNA (1)...(19): siRNA sense strand
gcuuugugaugcaggugaa

SEQ ID NO: 12253 - RNA, 19 nt, Homo sapiens
  misc_RNA (1)...(19): siRNA sense strand
cuauuucccgcaccaauga

SEQ ID NO: 12254 - RNA, 19 nt, Homo sapiens
  misc_RNA (1)...(19): siRNA sense strand
ccauccugguuuccaacua

SEQ ID NO: 12255 - RNA, 19 nt, Homo sapiens
  misc_RNA (1)...(19): siRNA sense strand
ugcccuggaucccuuuauu

SEQ ID NO: 12256 - RNA, 19 nt, Homo sapiens
  misc_RNA (1)...(19): siRNA sense strand
ggaguugcugggaaaggaa

SEQ ID NO: 12257 - RNA, 19 nt, Homo sapiens
  misc_RNA (1)...(19): siRNA sense strand
gaggaauuagcacuuguuc

SEQ ID NO: 12258 - RNA, 19 nt, Homo sapiens
  misc_RNA (1)...(19): siRNA sense strand
gugcugaaagagcuaaaga

SEQ ID NO: 12259 - RNA, 19 nt, Homo sapiens
  misc_RNA (1)...(19): siRNA sense strand
caguuggaauugugcugaa

SEQ ID NO: 12260 - RNA, 19 nt, Homo sapiens
  misc_RNA (1)...(19): siRNA sense strand
cacagaugcaguuggaauu

SEQ ID NO: 12261 - RNA, 19 nt, Homo sapiens
  misc_RNA (1)...(19): siRNA sense strand
gacuggcugauacuacaua

SEQ ID NO: 12262 - RNA, 19 nt, Homo sapiens
  misc_RNA (1)...(19): siRNA sense strand
gcauugcugcucaccuaga

SEQ ID NO: 12263 - RNA, 19 nt, Homo sapiens
  misc_RNA (1)...(19): siRNA sense strand
gcuuugaucaaccuuuaga

SEQ ID NO: 12264 - RNA, 19 nt, Homo sapiens
  misc_RNA (1)...(19): siRNA sense strand
agagaaagcacugagaaag

SEQ ID NO: 12265 - RNA, 19 nt, Homo sapiens
  misc_RNA (1)...(19): siRNA sense strand
gccauguuauucauuucug

SEQ ID NO: 12266 - RNA, 19 nt, Homo sapiens
  misc_RNA (1)...(19): siRNA sense strand
caauuggcuucaacaugag

SEQ ID NO: 12267 - RNA, 19 nt, Homo sapiens
  misc_RNA (1)...(19): siRNA sense strand
cgaggaauuagcacuuguu

SEQ ID NO: 12268 - RNA, 19 nt, Homo sapiens
  misc_RNA (1)...(19): siRNA sense strand
cccaggauuuggagacugu

SEQ ID NO: 12269 - RNA, 19 nt, Homo sapiens
  misc_RNA (1)...(19): siRNA sense strand
ccauguuauucauuucugu

SEQ ID NO: 12270 - RNA, 19 nt, Homo sapiens
  misc_RNA (1)...(19): siRNA sense strand
cuauaacccaaaggaauuu

SEQ ID NO: 12271 - RNA, 19 nt, Homo sapiens
  misc_RNA (1)...(19): siRNA sense strand
caaccuggcugaagaauuu

SEQ ID NO: 12272 - RNA, 19 nt, Homo sapiens
  misc_RNA (1)...(19): siRNA sense strand
uaacaaggcuuaucucuag

SEQ ID NO: 12273 - RNA, 19 nt, Homo sapiens
  misc_RNA (1)...(19): siRNA sense strand
ugagaaagcuccuacagaa

SEQ ID NO: 12274 - RNA, 19 nt, Homo sapiens
  misc_RNA (1)...(19): siRNA sense strand
gagcugcuguuccuaagua

SEQ ID NO: 12275 - RNA, 19 nt, Homo sapiens
  misc_RNA (1)...(19): siRNA sense strand
acaauuggcuucaacauga

SEQ ID NO: 12276 - RNA, 19 nt, Homo sapiens
  misc_RNA (1)...(19): siRNA sense strand
gcgcuuugaucaaccuuua

SEQ ID NO: 12277 - RNA, 19 nt, Homo sapiens
  misc_RNA (1)...(19): siRNA sense strand
gaaaccagcccuagaacuu

SEQ ID NO: 12278 - RNA, 19 nt, Homo sapiens
  misc_RNA (1)...(19): siRNA sense strand
agaaguaugucuggaauaa

SEQ ID NO: 12279 - RNA, 19 nt, Homo sapiens
  misc_RNA (1)...(19): siRNA sense strand
gaaagcuccuacagaagaa

SEQ ID NO: 12280 - RNA, 19 nt, Homo sapiens
  misc_RNA (1)...(19): siRNA sense strand
cuaagucuuugccauguua

SEQ ID NO: 12281 - RNA, 19 nt, Homo sapiens
  misc_RNA (1)...(19): siRNA sense strand
caaaugagcgcuuccugaa

SEQ ID NO: 12282 - RNA, 19 nt, Homo sapiens
  misc_RNA (1)...(19): siRNA sense strand
aaacaggacuggcugauac

SEQ ID NO: 12283 - RNA, 19 nt, Homo sapiens
  misc_RNA (1)...(19): siRNA sense strand
gggaagaaccacucugaaa

SEQ ID NO: 12284 - RNA, 19 nt, Homo sapiens
  misc_RNA (1)...(19): siRNA sense strand
gaagcuugccugaugguaa

SEQ ID NO: 12285 - RNA, 19 nt, Homo sapiens
  misc_RNA (1)...(19): siRNA sense strand
cagugaagcuugccugaug

SEQ ID NO: 12286 - RNA, 19 nt, Homo sapiens
  misc_RNA (1)...(19): siRNA sense strand
ggaaaggaaggauuugaug

SEQ ID NO: 12287 - RNA, 19 nt, Homo sapiens
  misc_RNA (1)...(19): siRNA sense strand
gcuauacgauaucuucugu

SEQ ID NO: 12288 - RNA, 19 nt, Homo sapiens
  misc_RNA (1)...(19): siRNA sense strand
uacgauaucuucuguaugg

SEQ ID NO: 12289 - RNA, 19 nt, Homo sapiens
  misc_RNA (1)...(19): siRNA sense strand
ggagagaagggaacaggaa

SEQ ID NO: 12290 - RNA, 19 nt, Homo sapiens
  misc_RNA (1)...(19): siRNA sense strand
aaaggaauaacaaggcuua

SEQ ID NO: 12291 - RNA, 19 nt, Homo sapiens
  misc_RNA (1)...(19): siRNA sense strand
gagcuaaagaggcaaaguu

SEQ ID NO: 12292 - RNA, 19 nt, Homo sapiens
  misc_RNA (1)...(19): siRNA sense strand
gagagaaagcacugagaaa

SEQ ID NO: 12293 - RNA, 19 nt, Homo sapiens
  misc_RNA (1)...(19): siRNA sense strand
ucucuaggauccauaaguu

SEQ ID NO: 12294 - RNA, 19 nt, Homo sapiens
  misc_RNA (1)...(19): siRNA sense strand
aaacagcgcuuugaucaac

SEQ ID NO: 12295 - RNA, 19 nt, Homo sapiens
  misc_RNA (1)...(19): siRNA sense strand
ggucagcacuacaacaucu

SEQ ID NO: 12296 - RNA, 19 nt, Homo sapiens
  misc_RNA (1)...(19): siRNA sense strand
aaguaugucuggaauaaga

SEQ ID NO: 12297 - RNA, 19 nt, Homo sapiens
  misc_RNA (1)...(19): siRNA sense strand
gauacuacauauuccagau

SEQ ID NO: 12298 - RNA, 19 nt, Homo sapiens
  misc_RNA (1)...(19): siRNA sense strand
ggauuuggagacuguauuu

SEQ ID NO: 12299 - RNA, 19 nt, Homo sapiens
  misc_RNA (1)...(19): siRNA sense strand
ugaugcaggugaagacauu

SEQ ID NO: 12300 - RNA, 19 nt, Homo sapiens
  misc_RNA (1)...(19): siRNA sense strand
gaacgccacagaugcaguu

SEQ ID NO: 12301 - RNA, 19 nt, Homo sapiens
  misc_RNA (1)...(19): siRNA sense strand
gauaaaaguucaagagaag

SEQ ID NO: 12302 - RNA, 19 nt, Homo sapiens
  misc_RNA (1)...(19): siRNA sense strand
gcacgagggucagcacuac

SEQ ID NO: 12303 - RNA, 19 nt, Homo sapiens
  misc_RNA (1)...(19): siRNA sense strand
agaaagcuccuacagaaga

SEQ ID NO: 12304 - RNA, 19 nt, Homo sapiens
  misc_RNA (1)...(19): siRNA sense strand
ggccguggauggaaucaau

SEQ ID NO: 12305 - RNA, 19 nt, Homo sapiens
  misc_RNA (1)...(19): siRNA sense strand
ggaauuagcacuuguucac

SEQ ID NO: 12306 - RNA, 19 nt, Homo sapiens
  misc_RNA (1)...(19): siRNA sense strand
gagagaagggaacaggaaa

SEQ ID NO: 12307 - RNA, 19 nt, Homo sapiens
  misc_RNA (1)...(19): siRNA sense strand
guucacaacuugaggaaaa

SEQ ID NO: 12308 - RNA, 19 nt, Homo sapiens
  misc_RNA (1)...(19): siRNA sense strand
ggaagaaccacucugaaaa

SEQ ID NO: 12309 - RNA, 19 nt, Homo sapiens
  misc_RNA (1)...(19): siRNA sense strand
gagaaguaugucuggaaua

SEQ ID NO: 12310 - RNA, 19 nt, Homo sapiens
  misc_RNA (1)...(19): siRNA sense strand
gcauaacacgggugaggaa

SEQ ID NO: 12311 - RNA, 19 nt, Homo sapiens
  misc_RNA (1)...(19): siRNA sense strand
aaagagcugcuguuccuaa

SEQ ID NO: 12312 - RNA, 19 nt, Homo sapiens
  misc_RNA (1)...(19): siRNA sense strand
cauccugguuuccaacuau

SEQ ID NO: 12313 - RNA, 19 nt, Homo sapiens
  misc_RNA (1)...(19): siRNA sense strand
gcaguccagcuacaacaaa

SEQ ID NO: 12314 - RNA, 19 nt, Homo sapiens
  misc_RNA (1)...(19): siRNA sense strand
gcugggaaaggaaggauuu

SEQ ID NO: 12315 - RNA, 19 nt, Homo sapiens
  misc_RNA (1)...(19): siRNA sense strand
gaagauaaaagcccgauug

SEQ ID NO: 12316 - RNA, 19 nt, Homo sapiens
  misc_RNA (1)...(19): siRNA sense strand
gagaaagcacugagaaagg

SEQ ID NO: 12317 - RNA, 19 nt, Homo sapiens
  misc_RNA (1)...(19): siRNA sense strand
caacuauaacccaaaggaa

SEQ ID NO: 12318 - RNA, 19 nt, Homo sapiens
  misc_RNA (1)...(19): siRNA sense strand
gaaaagagaagauaaaagc

SEQ ID NO: 12319 - RNA, 19 nt, Homo sapiens
  misc_RNA (1)...(19): siRNA sense strand
agagaaguaugucuggaau

SEQ ID NO: 12320 - RNA, 19 nt, Homo sapiens
  misc_RNA (1)...(19): siRNA sense strand
gagaguccgagagcuauuu

SEQ ID NO: 12321 - RNA, 19 nt, Homo sapiens
  misc_RNA (1)...(19): siRNA sense strand
gaaaacaauuggcuucaac

SEQ ID NO: 12322 - RNA, 19 nt, Homo sapiens
  misc_RNA (1)...(19): siRNA sense strand
guuauucauuucugugcaa

SEQ ID NO: 12323 - RNA, 19 nt, Homo sapiens
  misc_RNA (1)...(19): siRNA sense strand
uaaggaaaccagcccuaga

SEQ ID NO: 12324 - RNA, 19 nt, Homo sapiens
  misc_RNA (1)...(19): siRNA sense strand
ccacagaugcaguuggaau

SEQ ID NO: 12325 - RNA, 19 nt, Homo sapiens
  misc_RNA (1)...(19): siRNA sense strand
guugagaguccgagagcua

SEQ ID NO: 12326 - RNA, 19 nt, Homo sapiens
  misc_RNA (1)...(19): siRNA sense strand
ggaaaacaauuggcuucaa

SEQ ID NO: 12327 - RNA, 19 nt, Homo sapiens
  misc_RNA (1)...(19): siRNA sense strand
gggaaaggaaggauuugau

SEQ ID NO: 12328 - RNA, 19 nt, Homo sapiens
  misc_RNA (1)...(19): siRNA sense strand
ggaguccucugggagaagu

SEQ ID NO: 12329 - RNA, 19 nt, Homo sapiens
  misc_RNA (1)...(19): siRNA sense strand
uggcugauacuacauauuc

SEQ ID NO: 12330 - RNA, 19 nt, Homo sapiens
  misc_RNA (1)...(19): siRNA sense strand
aaggaaaccagcccuagaa

SEQ ID NO: 12331 - RNA, 19 nt, Homo sapiens
  misc_RNA (1)...(19): siRNA sense strand
gacugggucucucuuuaag

SEQ ID NO: 12332 - RNA, 19 nt, Homo sapiens
  misc_RNA (1)...(19): siRNA sense strand
gccauugugucggcuuuga

SEQ ID NO: 12333 - RNA, 19 nt, Homo sapiens
  misc_RNA (1)...(19): siRNA sense strand
cgccacagaugcaguugga

SEQ ID NO: 12334 - RNA, 19 nt, Homo sapiens
  misc_RNA (1)...(19): siRNA sense strand
ugggagaagugguugaaca

SEQ ID NO: 12335 - RNA, 19 nt, Homo sapiens
  misc_RNA (1)...(19): siRNA sense strand
ccagcuauacgauaucuuc

SEQ ID NO: 12336 - RNA, 19 nt, Homo sapiens
  misc_RNA (1)...(19): siRNA sense strand
acuauaacccaaaggaauu

SEQ ID NO: 12337 - RNA, 19 nt, Homo sapiens
  misc_RNA (1)...(19): siRNA sense strand
ccaacuauaacccaaagga

SEQ ID NO: 12338 - RNA, 19 nt, Homo sapiens
  misc_RNA (1)...(19): siRNA sense strand
gcgccauugugucggcuuu

SEQ ID NO: 12339 - RNA, 19 nt, Homo sapiens
  misc_RNA (1)...(19): siRNA sense strand
gaggaacgccacagaugca

SEQ ID NO: 12340 - RNA, 19 nt, Homo sapiens
  misc_RNA (1)...(19): siRNA sense strand
gagaaagcuccuacagaag

SEQ ID NO: 12341 - RNA, 19 nt, Homo sapiens
  misc_RNA (1)...(19): siRNA sense strand
cagaugcaguuggaauugu

SEQ ID NO: 12342 - RNA, 19 nt, Homo sapiens
  misc_RNA (1)...(19): siRNA sense strand
gcuauuucccgcaccaaug

SEQ ID NO: 12343 - RNA, 19 nt, Homo sapiens
  misc_RNA (1)...(19): siRNA sense strand
gugaggaacgccacagaug

SEQ ID NO: 12344 - RNA, 19 nt, Homo sapiens
  misc_RNA (1)...(19): siRNA sense strand
agagagaaagcacugagaa

SEQ ID NO: 12345 - RNA, 19 nt, Homo sapiens
  misc_RNA (1)...(19): siRNA sense strand
gaagaaccacucugaaaag

SEQ ID NO: 12346 - RNA, 19 nt, Homo sapiens
  misc_RNA (1)...(19): siRNA sense strand
ggaaaccagcccuagaacu

SEQ ID NO: 12347 - RNA, 19 nt, Homo sapiens
  misc_RNA (1)...(19): siRNA sense strand
aagcuugccugaugguaag

SEQ ID NO: 12348 - RNA, 19 nt, Homo sapiens
  misc_RNA (1)...(19): siRNA sense strand
caacaugagaaagcuccua

SEQ ID NO: 12349 - RNA, 19 nt, Homo sapiens
  misc_RNA (1)...(19): siRNA sense strand
ccuaagucuuugccauguu

SEQ ID NO: 12350 - RNA, 19 nt, Homo sapiens
  misc_RNA (1)...(19): siRNA sense strand
caaggcuuaucucuaggau

SEQ ID NO: 12351 - RNA, 19 nt, Homo sapiens
  misc_RNA (1)...(19): siRNA sense strand
gaauuagcacuuguucaca

SEQ ID NO: 12352 - RNA, 19 nt, Homo sapiens
  misc_RNA (1)...(19): siRNA sense strand
gcuuugugaugcaggugaa

SEQ ID NO: 12353 - RNA, 19 nt, Homo sapiens
  misc_RNA (1)...(19): siRNA sense strand
cuauuucccgcaccaauga

SEQ ID NO: 12354 - RNA, 19 nt, Homo sapiens
  misc_RNA (1)...(19): siRNA sense strand
ccauccugguuuccaacua

SEQ ID NO: 12355 - RNA, 19 nt, Homo sapiens
  misc_RNA (1)...(19): siRNA sense strand
ugcccuggaucccuuuauu

SEQ ID NO: 12356 - RNA, 19 nt, Homo sapiens
  misc_RNA (1)...(19): siRNA sense strand
ggaguugcugggaaaggaa

SEQ ID NO: 12357 - RNA, 19 nt, Homo sapiens
  misc_RNA (1)...(19): siRNA sense strand
gaggaauuagcacuuguuc

SEQ ID NO: 12358 - RNA, 19 nt, Homo sapiens
  misc_RNA (1)...(19): siRNA sense strand
gugcugaaagagcuaaaga

SEQ ID NO: 12359 - RNA, 19 nt, Homo sapiens
  misc_RNA (1)...(19): siRNA sense strand
caguuggaauugugcugaa

SEQ ID NO: 12360 - RNA, 19 nt, Homo sapiens
  misc_RNA (1)...(19): siRNA sense strand
cacagaugcaguuggaauu

SEQ ID NO: 12361 - RNA, 19 nt, Homo sapiens
  misc_RNA (1)...(19): siRNA sense strand
gacuggcugauacuacaua

SEQ ID NO: 12362 - RNA, 19 nt, Homo sapiens
  misc_RNA (1)...(19): siRNA sense strand
gcauugcugcucaccuaga

SEQ ID NO: 12363 - RNA, 19 nt, Homo sapiens
  misc_RNA (1)...(19): siRNA sense strand
gcuuugaucaaccuuuaga

SEQ ID NO: 12364 - RNA, 19 nt, Homo sapiens
  misc_RNA (1)...(19): siRNA sense strand
agagaaagcacugagaaag

SEQ ID NO: 12365 - RNA, 19 nt, Homo sapiens
  misc_RNA (1)...(19): siRNA sense strand
gccauguuauucauuucug

SEQ ID NO: 12366 - RNA, 19 nt, Homo sapiens
  misc_RNA (1)...(19): siRNA sense strand
caauuggcuucaacaugag

SEQ ID NO: 12367 - RNA, 19 nt, Homo sapiens
  misc_RNA (1)...(19): siRNA sense strand
cgaggaauuagcacuuguu

SEQ ID NO: 12368 - RNA, 19 nt, Homo sapiens
  misc_RNA (1)...(19): siRNA sense strand
cccaggauuuggagacugu

SEQ ID NO: 12369 - RNA, 19 nt, Homo sapiens
  misc_RNA (1)...(19): siRNA sense strand
ccauguuauucauuucugu

SEQ ID NO: 12370 - RNA, 19 nt, Homo sapiens
  misc_RNA (1)...(19): siRNA sense strand
cuauaacccaaaggaauuu

SEQ ID NO: 12371 - RNA, 19 nt, Homo sapiens
  misc_RNA (1)...(19): siRNA sense strand
caaccuggcugaagaauuu

SEQ ID NO: 12372 - RNA, 19 nt, Homo sapiens
  misc_RNA (1)...(19): siRNA sense strand
uaacaaggcuuaucucuag

SEQ ID NO: 12373 - RNA, 19 nt, Homo sapiens
  misc_RNA (1)...(19): siRNA sense strand
ugagaaagcuccuacagaa

SEQ ID NO: 12374 - RNA, 19 nt, Homo sapiens
  misc_RNA (1)...(19): siRNA sense strand
gagcugcuguuccuaagua

SEQ ID NO: 12375 - RNA, 19 nt, Homo sapiens
  misc_RNA (1)...(19): siRNA sense strand
acaauuggcuucaacauga

SEQ ID NO: 12376 - RNA, 19 nt, Homo sapiens
  misc_RNA (1)...(19): siRNA sense strand
gcgcuuugaucaaccuuua

SEQ ID NO: 12377 - RNA, 19 nt, Homo sapiens
  misc_RNA (1)...(19): siRNA sense strand
gaaaccagcccuagaacuu

SEQ ID NO: 12378 - RNA, 19 nt, Homo sapiens
  misc_RNA (1)...(19): siRNA sense strand
agaaguaugucuggaauaa

SEQ ID NO: 12379 - RNA, 19 nt, Homo sapiens
  misc_RNA (1)...(19): siRNA sense strand
gaaagcuccuacagaagaa

SEQ ID NO: 12380 - RNA, 19 nt, Homo sapiens
  misc_RNA (1)...(19): siRNA sense strand
cuaagucuuugccauguua

SEQ ID NO: 12381 - RNA, 19 nt, Homo sapiens
  misc_RNA (1)...(19): siRNA sense strand
caaaugagcgcuuccugaa

SEQ ID NO: 12382 - RNA, 19 nt, Homo sapiens
  misc_RNA (1)...(19): siRNA sense strand
aaacaggacuggcugauac

SEQ ID NO: 12383 - RNA, 19 nt, Homo sapiens
  misc_RNA (1)...(19): siRNA sense strand
gggaagaaccacucugaaa

SEQ ID NO: 12384 - RNA, 19 nt, Homo sapiens
  misc_RNA (1)...(19): siRNA sense strand
gaagcuugccugaugguaa

SEQ ID NO: 12385 - RNA, 19 nt, Homo sapiens
  misc_RNA (1)...(19): siRNA sense strand
cagugaagcuugccugaug

SEQ ID NO: 12386 - RNA, 19 nt, Homo sapiens
  misc_RNA (1)...(19): siRNA sense strand
ggaaaggaaggauuugaug

SEQ ID NO: 12387 - RNA, 19 nt, Homo sapiens
  misc_RNA (1)...(19): siRNA sense strand
gcuauacgauaucuucugu

SEQ ID NO: 12388 - RNA, 19 nt, Homo sapiens
  misc_RNA (1)...(19): siRNA sense strand
uacgauaucuucuguaugg

SEQ ID NO: 12389 - RNA, 19 nt, Homo sapiens
  misc_RNA (1)...(19): siRNA sense strand
ggagagaagggaacaggaa

SEQ ID NO: 12390 - RNA, 19 nt, Homo sapiens
  misc_RNA (1)...(19): siRNA sense strand
aaaggaauaacaaggcuua

SEQ ID NO: 12391 - RNA, 19 nt, Homo sapiens
  misc_RNA (1)...(19): siRNA sense strand
gagcuaaagaggcaaaguu

SEQ ID NO: 12392 - RNA, 19 nt, Homo sapiens
  misc_RNA (1)...(19): siRNA sense strand
gagagaaagcacugagaaa

SEQ ID NO: 12393 - RNA, 19 nt, Homo sapiens
  misc_RNA (1)...(19): siRNA sense strand
ucucuaggauccauaaguu

SEQ ID NO: 12394 - RNA, 19 nt, Homo sapiens
  misc_RNA (1)...(19): siRNA sense strand
aaacagcgcuuugaucaac

SEQ ID NO: 12395 - RNA, 19 nt, Homo sapiens
  misc_RNA (1)...(19): siRNA sense strand
ggucagcacuacaacaucu

SEQ ID NO: 12396 - RNA, 19 nt, Homo sapiens
  misc_RNA (1)...(19): siRNA sense strand
aaguaugucuggaauaaga

SEQ ID NO: 12397 - RNA, 19 nt, Homo sapiens
  misc_RNA (1)...(19): siRNA sense strand
gauacuacauauuccagau

SEQ ID NO: 12398 - RNA, 19 nt, Homo sapiens
  misc_RNA (1)...(19): siRNA sense strand
ggauuuggagacuguauuu

SEQ ID NO: 12399 - RNA, 19 nt, Homo sapiens
  misc_RNA (1)...(19): siRNA sense strand
ugaugcaggugaagacauu

SEQ ID NO: 12400 - RNA, 19 nt, Homo sapiens
  misc_RNA (1)...(19): siRNA sense strand
gaacgccacagaugcaguu

SEQ ID NO: 12401 - RNA, 19 nt, Homo sapiens
  misc_RNA (1)...(19): siRNA sense strand
gauaaaaguucaagagaag

SEQ ID NO: 12402 - RNA, 19 nt, Homo sapiens
  misc_RNA (1)...(19): siRNA sense strand
gcacgagggucagcacuac

SEQ ID NO: 12403 - RNA, 19 nt, Homo sapiens
  misc_RNA (1)...(19): siRNA sense strand
agaaagcuccuacagaaga

SEQ ID NO: 12404 - RNA, 19 nt, Homo sapiens
  misc_RNA (1)...(19): siRNA sense strand
ggccguggauggaaucaau

SEQ ID NO: 12405 - RNA, 19 nt, Homo sapiens
  misc_RNA (1)...(19): siRNA sense strand
ggaauuagcacuuguucac

SEQ ID NO: 12406 - RNA, 19 nt, Homo sapiens
  misc_RNA (1)...(19): siRNA sense strand
gagagaagggaacaggaaa

SEQ ID NO: 12407 - RNA, 19 nt, Homo sapiens
  misc_RNA (1)...(19): siRNA sense strand
guucacaacuugaggaaaa

SEQ ID NO: 12408 - RNA, 19 nt, Homo sapiens
  misc_RNA (1)...(19): siRNA sense strand
ggaagaaccacucugaaaa

SEQ ID NO: 12409 - RNA, 19 nt, Homo sapiens
  misc_RNA (1)...(19): siRNA sense strand
gagaaguaugucuggaaua

SEQ ID NO: 12410 - RNA, 19 nt, Homo sapiens
  misc_RNA (1)...(19): siRNA sense strand
gcauaacacgggugaggaa

SEQ ID NO: 12411 - RNA, 19 nt, Homo sapiens
  misc_RNA (1)...(19): siRNA sense strand
aaagagcugcuguuccuaa

SEQ ID NO: 12412 - RNA, 19 nt, Homo sapiens
  misc_RNA (1)...(19): siRNA sense strand
cauccugguuuccaacuau

SEQ ID NO: 12413 - RNA, 19 nt, Homo sapiens
  misc_RNA (1)...(19): siRNA sense strand
gcaguccagcuacaacaaa

SEQ ID NO: 12414 - RNA, 19 nt, Homo sapiens
  misc_RNA (1)...(19): siRNA sense strand
gcugggaaaggaaggauuu

SEQ ID NO: 12415 - RNA, 19 nt, Homo sapiens
  misc_RNA (1)...(19): siRNA sense strand
gaagauaaaagcccgauug

SEQ ID NO: 12416 - RNA, 19 nt, Homo sapiens
  misc_RNA (1)...(19): siRNA sense strand
gagaaagcacugagaaagg

SEQ ID NO: 12417 - RNA, 19 nt, Homo sapiens
  misc_RNA (1)...(19): siRNA sense strand
caacuauaacccaaaggaa

SEQ ID NO: 12418 - RNA, 19 nt, Homo sapiens
  misc_RNA (1)...(19): siRNA sense strand
gaaaagagaagauaaaagc

SEQ ID NO: 12419 - RNA, 19 nt, Homo sapiens
  misc_RNA (1)...(19): siRNA sense strand
agagaaguaugucuggaau

SEQ ID NO: 12420 - RNA, 19 nt, Homo sapiens
  misc_RNA (1)...(19): siRNA sense strand
gagaguccgagagcuauuu

SEQ ID NO: 12421 - RNA, 19 nt, Homo sapiens
  misc_RNA (1)...(19): siRNA sense strand
gaaaacaauuggcuucaac

SEQ ID NO: 12422 - RNA, 19 nt, Homo sapiens
  misc_RNA (1)...(19): siRNA sense strand
guuauucauuucugugcaa

SEQ ID NO: 12423 - RNA, 19 nt, Homo sapiens
  misc_RNA (1)...(19): siRNA sense strand
uaaggaaaccagcccuaga

SEQ ID NO: 12424 - RNA, 19 nt, Homo sapiens
  misc_RNA (1)...(19): siRNA sense strand
ccacagaugcaguuggaau

SEQ ID NO: 12425 - RNA, 19 nt, Homo sapiens
  misc_RNA (1)...(19): siRNA sense strand
guugagaguccgagagcua

SEQ ID NO: 12426 - RNA, 19 nt, Homo sapiens
  misc_RNA (1)...(19): siRNA sense strand
ggaaaacaauuggcuucaa

SEQ ID NO: 12427 - RNA, 19 nt, Homo sapiens
  misc_RNA (1)...(19): siRNA sense strand
gggaaaggaaggauuugau

SEQ ID NO: 12428 - RNA, 19 nt, Homo sapiens
  misc_RNA (1)...(19): siRNA sense strand
ggaguccucugggagaagu

SEQ ID NO: 12429 - RNA, 19 nt, Homo sapiens
  misc_RNA (1)...(19): siRNA sense strand
uggcugauacuacauauuc

SEQ ID NO: 12430 - RNA, 19 nt, Homo sapiens
  misc_RNA (1)...(19): siRNA sense strand
aaggaaaccagcccuagaa

SEQ ID NO: 12431 - RNA, 19 nt, Homo sapiens
  misc_RNA (1)...(19): siRNA sense strand
gacugggucucucuuuaag

SEQ ID NO: 12432 - RNA, 19 nt, Homo sapiens
  misc_RNA (1)...(19): siRNA sense strand
gccauugugucggcuuuga

SEQ ID NO: 12433 - RNA, 19 nt, Homo sapiens
  misc_RNA (1)...(19): siRNA sense strand
cgccacagaugcaguugga

SEQ ID NO: 12434 - RNA, 19 nt, Homo sapiens
  misc_RNA (1)...(19): siRNA sense strand
ugggagaagugguugaaca

SEQ ID NO: 12435 - RNA, 19 nt, Homo sapiens
  misc_RNA (1)...(19): siRNA sense strand
ccagcuauacgauaucuuc

SEQ ID NO: 12436 - RNA, 19 nt, Homo sapiens
  misc_RNA (1)...(19): siRNA sense strand
acuauaacccaaaggaauu

SEQ ID NO: 12437 - RNA, 19 nt, Homo sapiens
  misc_RNA (1)...(19): siRNA sense strand
ccaacuauaacccaaagga

SEQ ID NO: 12438 - RNA, 19 nt, Homo sapiens
  misc_RNA (1)...(19): siRNA sense strand
gcgccauugugucggcuuu

SEQ ID NO: 12439 - RNA, 19 nt, Homo sapiens
  misc_RNA (1)...(19): siRNA sense strand
gaggaacgccacagaugca

SEQ ID NO: 12440 - RNA, 19 nt, Homo sapiens
  misc_RNA (1)...(19): siRNA sense strand
gagaaagcuccuacagaag

SEQ ID NO: 12441 - RNA, 19 nt, Homo sapiens
  misc_RNA (1)...(19): siRNA sense strand
cagaugcaguuggaauugu

SEQ ID NO: 12442 - RNA, 19 nt, Homo sapiens
  misc_RNA (1)...(19): siRNA sense strand
gcuauuucccgcaccaaug

SEQ ID NO: 12443 - RNA, 19 nt, Homo sapiens
  misc_RNA (1)...(19): siRNA sense strand
gugaggaacgccacagaug

SEQ ID NO: 12444 - RNA, 19 nt, Homo sapiens
  misc_RNA (1)...(19): siRNA sense strand
agagagaaagcacugagaa

SEQ ID NO: 12445 - RNA, 19 nt, Homo sapiens
  misc_RNA (1)...(19): siRNA sense strand
gaagaaccacucugaaaag

SEQ ID NO: 12446 - RNA, 19 nt, Homo sapiens
  misc_RNA (1)...(19): siRNA sense strand
ggaaaccagcccuagaacu

SEQ ID NO: 12447 - RNA, 19 nt, Homo sapiens
  misc_RNA (1)...(19): siRNA sense strand
aagcuugccugaugguaag

SEQ ID NO: 12448 - RNA, 19 nt, Homo sapiens
  misc_RNA (1)...(19): siRNA sense strand
caacaugagaaagcuccua

SEQ ID NO: 12449 - RNA, 19 nt, Homo sapiens
  misc_RNA (1)...(19): siRNA sense strand
ccuaagucuuugccauguu

SEQ ID NO: 12450 - RNA, 19 nt, Homo sapiens
  misc_RNA (1)...(19): siRNA sense strand
caaggcuuaucucuaggau

SEQ ID NO: 12451 - RNA, 19 nt, Homo sapiens
  misc_RNA (1)...(19): siRNA sense strand
gaauuagcacuuguucaca

SEQ ID NO: 12452 - RNA, 19 nt, Homo sapiens
  misc_RNA (1)...(19): siRNA sense strand
gcuuugugaugcaggugaa

SEQ ID NO: 12453 - RNA, 19 nt, Homo sapiens
  misc_RNA (1)...(19): siRNA sense strand
cuauuucccgcaccaauga

SEQ ID NO: 12454 - RNA, 19 nt, Homo sapiens
  misc_RNA (1)...(19): siRNA sense strand
ccauccugguuuccaacua

SEQ ID NO: 12455 - RNA, 19 nt, Homo sapiens
  misc_RNA (1)...(19): siRNA sense strand
ugcccuggaucccuuuauu

SEQ ID NO: 12456 - RNA, 19 nt, Homo sapiens
  misc_RNA (1)...(19): siRNA sense strand
ggaguugcugggaaaggaa

SEQ ID NO: 12457 - RNA, 19 nt, Homo sapiens
  misc_RNA (1)...(19): siRNA sense strand
gaggaauuagcacuuguuc

SEQ ID NO: 12458 - RNA, 19 nt, Homo sapiens
  misc_RNA (1)...(19): siRNA sense strand
gugcugaaagagcuaaaga

SEQ ID NO: 12459 - RNA, 19 nt, Homo sapiens
  misc_RNA (1)...(19): siRNA sense strand
caguuggaauugugcugaa

SEQ ID NO: 12460 - RNA, 19 nt, Homo sapiens
  misc_RNA (1)...(19): siRNA sense strand
cacagaugcaguuggaauu

SEQ ID NO: 12461 - RNA, 19 nt, Homo sapiens
  misc_RNA (1)...(19): siRNA sense strand
gacuggcugauacuacaua

SEQ ID NO: 12462 - RNA, 19 nt, Homo sapiens
  misc_RNA (1)...(19): siRNA sense strand
gcauugcugcucaccuaga

SEQ ID NO: 12463 - RNA, 19 nt, Homo sapiens
  misc_RNA (1)...(19): siRNA sense strand
gcuuugaucaaccuuuaga

SEQ ID NO: 12464 - RNA, 19 nt, Homo sapiens
  misc_RNA (1)...(19): siRNA sense strand
agagaaagcacugagaaag

SEQ ID NO: 12465 - RNA, 19 nt, Homo sapiens
  misc_RNA (1)...(19): siRNA sense strand
gccauguuauucauuucug

SEQ ID NO: 12466 - RNA, 19 nt, Homo sapiens
  misc_RNA (1)...(19): siRNA sense strand
caauuggcuucaacaugag

SEQ ID NO: 12467 - RNA, 19 nt, Homo sapiens
  misc_RNA (1)...(19): siRNA sense strand
cgaggaauuagcacuuguu

SEQ ID NO: 12468 - RNA, 19 nt, Homo sapiens
  misc_RNA (1)...(19): siRNA sense strand
cccaggauuuggagacugu

SEQ ID NO: 12469 - RNA, 19 nt, Homo sapiens
  misc_RNA (1)...(19): siRNA sense strand
ccauguuauucauuucugu

SEQ ID NO: 12470 - RNA, 19 nt, Homo sapiens
  misc_RNA (1)...(19): siRNA sense strand
cuauaacccaaaggaauuu

SEQ ID NO: 12471 - RNA, 19 nt, Homo sapiens
  misc_RNA (1)...(19): siRNA sense strand
uaacuuagccaugacaaua

SEQ ID NO: 12472 - RNA, 19 nt, Homo sapiens
  misc_RNA (1)...(19): siRNA sense strand
cgaaagaggugcuuauacu

SEQ ID NO: 12473 - RNA, 19 nt, Homo sapiens
  misc_RNA (1)...(19): siRNA sense strand
gaaauucauucucgaaagg

SEQ ID NO: 12474 - RNA, 19 nt, Homo sapiens
  misc_RNA (1)...(19): siRNA sense strand
gaagguauaucugaguuuc

SEQ ID NO: 12475 - RNA, 19 nt, Homo sapiens
  misc_RNA (1)...(19): siRNA sense strand
gagcagagccaucccaaga

SEQ ID NO: 12476 - RNA, 19 nt, Homo sapiens
  misc_RNA (1)...(19): siRNA sense strand
gaagaugagauuaccauug

SEQ ID NO: 12477 - RNA, 19 nt, Homo sapiens
  misc_RNA (1)...(19): siRNA sense strand
ucacccagcuccucaaguu

SEQ ID NO: 12478 - RNA, 19 nt, Homo sapiens
  misc_RNA (1)...(19): siRNA sense strand
gaacaauacauacuagcaa

SEQ ID NO: 12479 - RNA, 19 nt, Homo sapiens
  misc_RNA (1)...(19): siRNA sense strand
cuacuuccauuguauguga

SEQ ID NO: 12480 - RNA, 19 nt, Homo sapiens
  misc_RNA (1)...(19): siRNA sense strand
gcagagccaucccaagauc

SEQ ID NO: 12481 - RNA, 19 nt, Homo sapiens
  misc_RNA (1)...(19): siRNA sense strand
cagaauaaccugccaagga

SEQ ID NO: 12482 - RNA, 19 nt, Homo sapiens
  misc_RNA (1)...(19): siRNA sense strand
gaaagaggugcuuauacuu

SEQ ID NO: 12483 - RNA, 19 nt, Homo sapiens
  misc_RNA (1)...(19): siRNA sense strand
gacacgagaacaauacaua

SEQ ID NO: 12484 - RNA, 19 nt, Homo sapiens
  misc_RNA (1)...(19): siRNA sense strand
gaagggaauccgacuugaa

SEQ ID NO: 12485 - RNA, 19 nt, Homo sapiens
  misc_RNA (1)...(19): siRNA sense strand
gaauccgacuugaagguau

SEQ ID NO: 12486 - RNA, 19 nt, Homo sapiens
  misc_RNA (1)...(19): siRNA sense strand
gaagugagagccagugaag

SEQ ID NO: 12487 - RNA, 19 nt, Homo sapiens
  misc_RNA (1)...(19): siRNA sense strand
gcagaugaagaugagauua

SEQ ID NO: 12488 - RNA, 19 nt, Homo sapiens
  misc_RNA (1)...(19): siRNA sense strand
cgagaacaauacauacuag

SEQ ID NO: 12489 - RNA, 19 nt, Homo sapiens
  misc_RNA (1)...(19): siRNA sense strand
caaucaagcugggaaaucu

SEQ ID NO: 12490 - RNA, 19 nt, Homo sapiens
  misc_RNA (1)...(19): siRNA sense strand
auaguuaacuuagccauga

SEQ ID NO: 12491 - RNA, 19 nt, Homo sapiens
  misc_RNA (1)...(19): siRNA sense strand
aagaugagauuaccauugg

SEQ ID NO: 12492 - RNA, 19 nt, Homo sapiens
  misc_RNA (1)...(19): siRNA sense strand
ggaauccgacuugaaggua

SEQ ID NO: 12493 - RNA, 19 nt, Homo sapiens
  misc_RNA (1)...(19): siRNA sense strand
gaugguaugggaaaucuga

SEQ ID NO: 12494 - RNA, 19 nt, Homo sapiens
  misc_RNA (1)...(19): siRNA sense strand
gaaaguuacaggcacugaa

SEQ ID NO: 12495 - RNA, 19 nt, Homo sapiens
  misc_RNA (1)...(19): siRNA sense strand
uagcaacccaacagaauaa

SEQ ID NO: 12496 - RNA, 19 nt, Homo sapiens
  misc_RNA (1)...(19): siRNA sense strand
ggaguagguuccacuuguc

SEQ ID NO: 12497 - RNA, 19 nt, Homo sapiens
  misc_RNA (1)...(19): siRNA sense strand
gaauuucacuguggauggu

SEQ ID NO: 12498 - RNA, 19 nt, Homo sapiens
  misc_RNA (1)...(19): siRNA sense strand
gcugaaaagcugaaaguua

SEQ ID NO: 12499 - RNA, 19 nt, Homo sapiens
  misc_RNA (1)...(19): siRNA sense strand
ggacugagaaugcacaacu

SEQ ID NO: 12500 - RNA, 19 nt, Homo sapiens
  misc_RNA (1)...(19): siRNA sense strand
uguggaagcucaguguaaa

SEQ ID NO: 12501 - RNA, 19 nt, Homo sapiens
  misc_RNA (1)...(19): siRNA sense strand
aauccgacuugaagguaua

SEQ ID NO: 12502 - RNA, 19 nt, Homo sapiens
  misc_RNA (1)...(19): siRNA sense strand
gcacugaaggagccguauu

SEQ ID NO: 12503 - RNA, 19 nt, Homo sapiens
  misc_RNA (1)...(19): siRNA sense strand
ggauaguccgcuggucuua

SEQ ID NO: 12504 - RNA, 19 nt, Homo sapiens
  misc_RNA (1)...(19): siRNA sense strand
cuagcaacccaacagaaua

SEQ ID NO: 12505 - RNA, 19 nt, Homo sapiens
  misc_RNA (1)...(19): siRNA sense strand
ccaacuggcuccuucucau

SEQ ID NO: 12506 - RNA, 19 nt, Homo sapiens
  misc_RNA (1)...(19): siRNA sense strand
aaagaggugcuuauacuuc

SEQ ID NO: 12507 - RNA, 19 nt, Homo sapiens
  misc_RNA (1)...(19): siRNA sense strand
cacagugaaugcaagaaau

SEQ ID NO: 12508 - RNA, 19 nt, Homo sapiens
  misc_RNA (1)...(19): siRNA sense strand
ggcgaaagaggugcuuaua

SEQ ID NO: 12509 - RNA, 19 nt, Homo sapiens
  misc_RNA (1)...(19): siRNA sense strand
ggagacgccgcacaucaga

SEQ ID NO: 12510 - RNA, 19 nt, Homo sapiens
  misc_RNA (1)...(19): siRNA sense strand
gcaggaaggagcuccaucu

SEQ ID NO: 12511 - RNA, 19 nt, Homo sapiens
  misc_RNA (1)...(19): siRNA sense strand
gcugggaaaucuaccaacu

SEQ ID NO: 12512 - RNA, 19 nt, Homo sapiens
  misc_RNA (1)...(19): siRNA sense strand
gaggugcuuauacuucuuu

SEQ ID NO: 12513 - RNA, 19 nt, Homo sapiens
  misc_RNA (1)...(19): siRNA sense strand
gacagacaguguaugaacu

SEQ ID NO: 12514 - RNA, 19 nt, Homo sapiens
  misc_RNA (1)...(19): siRNA sense strand
gaaaucacauggggcaguu

SEQ ID NO: 12515 - RNA, 19 nt, Homo sapiens
  misc_RNA (1)...(19): siRNA sense strand
gacugagaaugcacaacuu

SEQ ID NO: 12516 - RNA, 19 nt, Homo sapiens
  misc_RNA (1)...(19): siRNA sense strand
agguauaucugaguuucua

SEQ ID NO: 12517 - RNA, 19 nt, Homo sapiens
  misc_RNA (1)...(19): siRNA sense strand
aggaguagguuccacuugu

SEQ ID NO: 12518 - RNA, 19 nt, Homo sapiens
  misc_RNA (1)...(19): siRNA sense strand
gaaggagcuccaucugcaa

SEQ ID NO: 12519 - RNA, 19 nt, Homo sapiens
  misc_RNA (1)...(19): siRNA sense strand
gaagcucaguguaaaagau

SEQ ID NO: 12520 - RNA, 19 nt, Homo sapiens
  misc_RNA (1)...(19): siRNA sense strand
ccacuugucaguccaguag

SEQ ID NO: 12521 - RNA, 19 nt, Homo sapiens
  misc_RNA (1)...(19): siRNA sense strand
uggcaaacuuuaccuuucu

SEQ ID NO: 12522 - RNA, 19 nt, Homo sapiens
  misc_RNA (1)...(19): siRNA sense strand
ccggacagcugaccauagg

SEQ ID NO: 12523 - RNA, 19 nt, Homo sapiens
  misc_RNA (1)...(19): siRNA sense strand
guccuucugcuguugguua

SEQ ID NO: 12524 - RNA, 19 nt, Homo sapiens
  misc_RNA (1)...(19): siRNA sense strand
uaaaugcagagacaaucaa

SEQ ID NO: 12525 - RNA, 19 nt, Homo sapiens
  misc_RNA (1)...(19): siRNA sense strand
cugagaaugcacaacuuua

SEQ ID NO: 12526 - RNA, 19 nt, Homo sapiens
  misc_RNA (1)...(19): siRNA sense strand
agaagggaauccgacuuga

SEQ ID NO: 12527 - RNA, 19 nt, Homo sapiens
  misc_RNA (1)...(19): siRNA sense strand
gccaaggacugagaaugca

SEQ ID NO: 12528 - RNA, 19 nt, Homo sapiens
  misc_RNA (1)...(19): siRNA sense strand
cgacagacaguguaugaac

SEQ ID NO: 12529 - RNA, 19 nt, Homo sapiens
  misc_RNA (1)...(19): siRNA sense strand
ggagcuccaucugcaaucu

SEQ ID NO: 12530 - RNA, 19 nt, Homo sapiens
  misc_RNA (1)...(19): siRNA sense strand
gcgaaagaggugcuuauac

SEQ ID NO: 12531 - RNA, 19 nt, Homo sapiens
  misc_RNA (1)...(19): siRNA sense strand
gacuugaagguauaucuga

SEQ ID NO: 12532 - RNA, 19 nt, Homo sapiens
  misc_RNA (1)...(19): siRNA sense strand
aaucugagagucaccaaga

SEQ ID NO: 12533 - RNA, 19 nt, Homo sapiens
  misc_RNA (1)...(19): siRNA sense strand
gaaugcaagaaaucacaug

SEQ ID NO: 12534 - RNA, 19 nt, Homo sapiens
  misc_RNA (1)...(19): siRNA sense strand
aagaagggaauccgacuug

SEQ ID NO: 12535 - RNA, 19 nt, Homo sapiens
  misc_RNA (1)...(19): siRNA sense strand
caagaagggaauccgacuu

SEQ ID NO: 12536 - RNA, 19 nt, Homo sapiens
  misc_RNA (1)...(19): siRNA sense strand
aagaggugcuuauacuucu

SEQ ID NO: 12537 - RNA, 19 nt, Homo sapiens
  misc_RNA (1)...(19): siRNA sense strand
cacugaaggagccguauuu

SEQ ID NO: 12538 - RNA, 19 nt, Homo sapiens
  misc_RNA (1)...(19): siRNA sense strand
gaauuuauggauggcgaaa

SEQ ID NO: 12539 - RNA, 19 nt, Homo sapiens
  misc_RNA (1)...(19): siRNA sense strand
guuucuacuuccauuguau

SEQ ID NO: 12540 - RNA, 19 nt, Homo sapiens
  misc_RNA (1)...(19): siRNA sense strand
uugaagguauaucugaguu

SEQ ID NO: 12541 - RNA, 19 nt, Homo sapiens
  misc_RNA (1)...(19): siRNA sense strand
gaaaucugagagucaccaa

SEQ ID NO: 12542 - RNA, 19 nt, Homo sapiens
  misc_RNA (1)...(19): siRNA sense strand
auuuauggauggcgaaaga

SEQ ID NO: 12543 - RNA, 19 nt, Homo sapiens
  misc_RNA (1)...(19): siRNA sense strand
gcaggaguagguuccacuu

SEQ ID NO: 12544 - RNA, 19 nt, Homo sapiens
  misc_RNA (1)...(19): siRNA sense strand
caacuggcuccuucucauc

SEQ ID NO: 12545 - RNA, 19 nt, Homo sapiens
  misc_RNA (1)...(19): siRNA sense strand
acgagaacaauacauacua

SEQ ID NO: 12546 - RNA, 19 nt, Homo sapiens
  misc_RNA (1)...(19): siRNA sense strand
gagcuccaucugcaaucua

SEQ ID NO: 12547 - RNA, 19 nt, Homo sapiens
  misc_RNA (1)...(19): siRNA sense strand
gaguuucuacuuccauugu

SEQ ID NO: 12548 - RNA, 19 nt, Homo sapiens
  misc_RNA (1)...(19): siRNA sense strand
auaguccgcuggucuuaca

SEQ ID NO: 12549 - RNA, 19 nt, Homo sapiens
  misc_RNA (1)...(19): siRNA sense strand
gugcuuauacuucuuuguc

SEQ ID NO: 12550 - RNA, 19 nt, Homo sapiens
  misc_RNA (1)...(19): siRNA sense strand
ugagaaugcacaacuuuac

SEQ ID NO: 12551 - RNA, 19 nt, Homo sapiens
  misc_RNA (1)...(19): siRNA sense strand
cugaaaagcugaaaguuac

SEQ ID NO: 12552 - RNA, 19 nt, Homo sapiens
  misc_RNA (1)...(19): siRNA sense strand
uccauuguaugugaaagaa

SEQ ID NO: 12553 - RNA, 19 nt, Homo sapiens
  misc_RNA (1)...(19): siRNA sense strand
uuaaaugcagagacaauca

SEQ ID NO: 12554 - RNA, 19 nt, Homo sapiens
  misc_RNA (1)...(19): siRNA sense strand
guggagacgccgcacauca

SEQ ID NO: 12555 - RNA, 19 nt, Homo sapiens
  misc_RNA (1)...(19): siRNA sense strand
cagaugaagaugagauuac

SEQ ID NO: 12556 - RNA, 19 nt, Homo sapiens
  misc_RNA (1)...(19): siRNA sense strand
ugaagguauaucugaguuu

SEQ ID NO: 12557 - RNA, 19 nt, Homo sapiens
  misc_RNA (1)...(19): siRNA sense strand
gaguagguuccacuuguca

SEQ ID NO: 12558 - RNA, 19 nt, Homo sapiens
  misc_RNA (1)...(19): siRNA sense strand
aauggcaaacuuuaccuuu

SEQ ID NO: 12559 - RNA, 19 nt, Homo sapiens
  misc_RNA (1)...(19): siRNA sense strand
ccagugggaauuuauggau

SEQ ID NO: 12560 - RNA, 19 nt, Homo sapiens
  misc_RNA (1)...(19): siRNA sense strand
agugagagccagugaagau

SEQ ID NO: 12561 - RNA, 19 nt, Homo sapiens
  misc_RNA (1)...(19): siRNA sense strand
cugaguuucuacuuccauu

SEQ ID NO: 12562 - RNA, 19 nt, Homo sapiens
  misc_RNA (1)...(19): siRNA sense strand
cuuacagucugacaggaau

SEQ ID NO: 12563 - RNA, 19 nt, Homo sapiens
  misc_RNA (1)...(19): siRNA sense strand
gaccauaggagcugaugcu

SEQ ID NO: 12564 - RNA, 19 nt, Homo sapiens
  misc_RNA (1)...(19): siRNA sense strand
gggaauccgacuugaaggu

SEQ ID NO: 12565 - RNA, 19 nt, Homo sapiens
  misc_RNA (1)...(19): siRNA sense strand
acuuagccaugacaauaug

SEQ ID NO: 12566 - RNA, 19 nt, Homo sapiens
  misc_RNA (1)...(19): siRNA sense strand
caaguucucgacagacagu

SEQ ID NO: 12567 - RNA, 19 nt, Homo sapiens
  misc_RNA (1)...(19): siRNA sense strand
ucacccaccagauccuuga

SEQ ID NO: 12568 - RNA, 19 nt, Homo sapiens
  misc_RNA (1)...(19): siRNA sense strand
ggagauaucuucaguaauc

SEQ ID NO: 12569 - RNA, 19 nt, Homo sapiens
  misc_RNA (1)...(19): siRNA sense strand
gaaagaagccaaggaauuu

SEQ ID NO: 12570 - RNA, 19 nt, Homo sapiens
  misc_RNA (1)...(19): siRNA sense strand
ggaauucccucuucagauu

SEQ ID NO: 12571 - RNA, 19 nt, Homo sapiens
  misc_RNA (1)...(19): siRNA sense strand
ggugaaaucuccagaauga

SEQ ID NO: 12572 - RNA, 19 nt, Homo sapiens
  misc_RNA (1)...(19): siRNA sense strand
gauaauggaugaaaggauu

SEQ ID NO: 12573 - RNA, 19 nt, Homo sapiens
  misc_RNA (1)...(19): siRNA sense strand
gcaaguaaauaccaugauu

SEQ ID NO: 12574 - RNA, 19 nt, Homo sapiens
  misc_RNA (1)...(19): siRNA sense strand
cuaauaagcucuucuccua

SEQ ID NO: 12575 - RNA, 19 nt, Homo sapiens
  misc_RNA (1)...(19): siRNA sense strand
gaaauuggauacuggcauu

SEQ ID NO: 12576 - RNA, 19 nt, Homo sapiens
  misc_RNA (1)...(19): siRNA sense strand
gagaacaacuugcuaaucu

SEQ ID NO: 12577 - RNA, 19 nt, Homo sapiens
  misc_RNA (1)...(19): siRNA sense strand
ccaaugguauuacaucuuu

SEQ ID NO: 12578 - RNA, 19 nt, Homo sapiens
  misc_RNA (1)...(19): siRNA sense strand
gcucagaaauugaugaaau

SEQ ID NO: 12579 - RNA, 19 nt, Homo sapiens
  misc_RNA (1)...(19): siRNA sense strand
ggacagaugaagcauauuu

SEQ ID NO: 12580 - RNA, 19 nt, Homo sapiens
  misc_RNA (1)...(19): siRNA sense strand
cuacagcgcuauuaugauu

SEQ ID NO: 12581 - RNA, 19 nt, Homo sapiens
  misc_RNA (1)...(19): siRNA sense strand
gcaagcugauggaguuuaa

SEQ ID NO: 12582 - RNA, 19 nt, Homo sapiens
  misc_RNA (1)...(19): siRNA sense strand
ggaagaauguggauacagu

SEQ ID NO: 12583 - RNA, 19 nt, Homo sapiens
  misc_RNA (1)...(19): siRNA sense strand
ggagggugcuuauuugaga

SEQ ID NO: 12584 - RNA, 19 nt, Homo sapiens
  misc_RNA (1)...(19): siRNA sense strand
gaaacuagagcaacaaugu

SEQ ID NO: 12585 - RNA, 19 nt, Homo sapiens
  misc_RNA (1)...(19): siRNA sense strand
gcaacaaugucagaaagaa

SEQ ID NO: 12586 - RNA, 19 nt, Homo sapiens
  misc_RNA (1)...(19): siRNA sense strand
ggaagcagcagacaucauu

SEQ ID NO: 12587 - RNA, 19 nt, Homo sapiens
  misc_RNA (1)...(19): siRNA sense strand
aggaaugccuucagaauuu

SEQ ID NO: 12588 - RNA, 19 nt, Homo sapiens
  misc_RNA (1)...(19): siRNA sense strand
ugucuaagcuuaucaaauc

SEQ ID NO: 12589 - RNA, 19 nt, Homo sapiens
  misc_RNA (1)...(19): siRNA sense strand
cagcagacaucauucagaa

SEQ ID NO: 12590 - RNA, 19 nt, Homo sapiens
  misc_RNA (1)...(19): siRNA sense strand
ccaaggaauuugccaagaa

SEQ ID NO: 12591 - RNA, 19 nt, Homo sapiens
  misc_RNA (1)...(19): siRNA sense strand
gcugauggaguuuaauuua

SEQ ID NO: 12592 - RNA, 19 nt, Homo sapiens
  misc_RNA (1)...(19): siRNA sense strand
ugaaagagcaguuagaaga

SEQ ID NO: 12593 - RNA, 19 nt, Homo sapiens
  misc_RNA (1)...(19): siRNA sense strand
gaacaaacaaguuggagau

SEQ ID NO: 12594 - RNA, 19 nt, Homo sapiens
  misc_RNA (1)...(19): siRNA sense strand
gccaaagacuucaagauuc

SEQ ID NO: 12595 - RNA, 19 nt, Homo sapiens
  misc_RNA (1)...(19): siRNA sense strand
gaacaaauggagaugaaau

SEQ ID NO: 12596 - RNA, 19 nt, Homo sapiens
  misc_RNA (1)...(19): siRNA sense strand
caggagguauucaagauuu

SEQ ID NO: 12597 - RNA, 19 nt, Homo sapiens
  misc_RNA (1)...(19): siRNA sense strand
gaaagagcaguuagaagaa

SEQ ID NO: 12598 - RNA, 19 nt, Homo sapiens
  misc_RNA (1)...(19): siRNA sense strand
gaacuagaugagcacauua

SEQ ID NO: 12599 - RNA, 19 nt, Homo sapiens
  misc_RNA (1)...(19): siRNA sense strand
aaacaggacuugcuggaau

SEQ ID NO: 12600 - RNA, 19 nt, Homo sapiens
  misc_RNA (1)...(19): siRNA sense strand
gaaguggugguuaaucuuu

SEQ ID NO: 12601 - RNA, 19 nt, Homo sapiens
  misc_RNA (1)...(19): siRNA sense strand
gagcaacaaugucagaaag

SEQ ID NO: 12602 - RNA, 19 nt, Homo sapiens
  misc_RNA (1)...(19): siRNA sense strand
gguggagacuggauauuug

SEQ ID NO: 12603 - RNA, 19 nt, Homo sapiens
  misc_RNA (1)...(19): siRNA sense strand
cagaaacaguccuggcuaa

SEQ ID NO: 12604 - RNA, 19 nt, Homo sapiens
  misc_RNA (1)...(19): siRNA sense strand
caaacaaguuggagauauc

SEQ ID NO: 12605 - RNA, 19 nt, Homo sapiens
  misc_RNA (1)...(19): siRNA sense strand
gaggugaaaucuccagaau

SEQ ID NO: 12606 - RNA, 19 nt, Homo sapiens
  misc_RNA (1)...(19): siRNA sense strand
ccuaauugcccaagaguua

SEQ ID NO: 12607 - RNA, 19 nt, Homo sapiens
  misc_RNA (1)...(19): siRNA sense strand
gaaguccgaugcagagcaa

SEQ ID NO: 12608 - RNA, 19 nt, Homo sapiens
  misc_RNA (1)...(19): siRNA sense strand
ccaccaaucuuuccagcaa

SEQ ID NO: 12609 - RNA, 19 nt, Homo sapiens
  misc_RNA (1)...(19): siRNA sense strand
ccaggagggugcuuauuug

SEQ ID NO: 12610 - RNA, 19 nt, Homo sapiens
  misc_RNA (1)...(19): siRNA sense strand
caacaauauuccuacaguu

SEQ ID NO: 12611 - RNA, 19 nt, Homo sapiens
  misc_RNA (1)...(19): siRNA sense strand
gaagugcuaugauccuaca

SEQ ID NO: 12612 - RNA, 19 nt, Homo sapiens
  misc_RNA (1)...(19): siRNA sense strand
gaaaacaaguggagaagau

SEQ ID NO: 12613 - RNA, 19 nt, Homo sapiens
  misc_RNA (1)...(19): siRNA sense strand
gaaaguagagaaacuagag

SEQ ID NO: 12614 - RNA, 19 nt, Homo sapiens
  misc_RNA (1)...(19): siRNA sense strand
gagaugaaauuggauacug

SEQ ID NO: 12615 - RNA, 19 nt, Homo sapiens
  misc_RNA (1)...(19): siRNA sense strand
ugaagacgcuggaauacuc

SEQ ID NO: 12616 - RNA, 19 nt, Homo sapiens
  misc_RNA (1)...(19): siRNA sense strand
aaacaaguggagaagauua

SEQ ID NO: 12617 - RNA, 19 nt, Homo sapiens
  misc_RNA (1)...(19): siRNA sense strand
aaauggagaugaaauugga

SEQ ID NO: 12618 - RNA, 19 nt, Homo sapiens
  misc_RNA (1)...(19): siRNA sense strand
agaaagaagccaaggaauu

SEQ ID NO: 12619 - RNA, 19 nt, Homo sapiens
  misc_RNA (1)...(19): siRNA sense strand
uugcuaaucuggacaagaa

SEQ ID NO: 12620 - RNA, 19 nt, Homo sapiens
  misc_RNA (1)...(19): siRNA sense strand
guacugauaaacagacuuu

SEQ ID NO: 12621 - RNA, 19 nt, Homo sapiens
  misc_RNA (1)...(19): siRNA sense strand
uaaagucugucaccuugga

SEQ ID NO: 12622 - RNA, 19 nt, Homo sapiens
  misc_RNA (1)...(19): siRNA sense strand
uuggagauaucuucaguaa

SEQ ID NO: 12623 - RNA, 19 nt, Homo sapiens
  misc_RNA (1)...(19): siRNA sense strand
gcagaugaauauauugaac

SEQ ID NO: 12624 - RNA, 19 nt, Homo sapiens
  misc_RNA (1)...(19): siRNA sense strand
cccaagaaguggugguuaa

SEQ ID NO: 12625 - RNA, 19 nt, Homo sapiens
  misc_RNA (1)...(19): siRNA sense strand
gcacaggagguauucaaga

SEQ ID NO: 12626 - RNA, 19 nt, Homo sapiens
  misc_RNA (1)...(19): siRNA sense strand
aagcucuucuccuaaguua

SEQ ID NO: 12627 - RNA, 19 nt, Homo sapiens
  misc_RNA (1)...(19): siRNA sense strand
uagaugagcacauuagcua

SEQ ID NO: 12628 - RNA, 19 nt, Homo sapiens
  misc_RNA (1)...(19): siRNA sense strand
augagcaucuucaacaaua

SEQ ID NO: 12629 - RNA, 19 nt, Homo sapiens
  misc_RNA (1)...(19): siRNA sense strand
gcauugauaggacauuaaa

SEQ ID NO: 12630 - RNA, 19 nt, Homo sapiens
  misc_RNA (1)...(19): siRNA sense strand
ucuaugaucuguauacaag

SEQ ID NO: 12631 - RNA, 19 nt, Homo sapiens
  misc_RNA (1)...(19): siRNA sense strand
gccaggagggugcuuauuu

SEQ ID NO: 12632 - RNA, 19 nt, Homo sapiens
  misc_RNA (1)...(19): siRNA sense strand
cccauuguguugauguuua

SEQ ID NO: 12633 - RNA, 19 nt, Homo sapiens
  misc_RNA (1)...(19): siRNA sense strand
caaggaauuugccaagaag

SEQ ID NO: 12634 - RNA, 19 nt, Homo sapiens
  misc_RNA (1)...(19): siRNA sense strand
gcaagucugcucaggagaa

SEQ ID NO: 12635 - RNA, 19 nt, Homo sapiens
  misc_RNA (1)...(19): siRNA sense strand
caagauuccaaugguauua

SEQ ID NO: 12636 - RNA, 19 nt, Homo sapiens
  misc_RNA (1)...(19): siRNA sense strand
agaacuagaugagcacauu

SEQ ID NO: 12637 - RNA, 19 nt, Homo sapiens
  misc_RNA (1)...(19): siRNA sense strand
ggaauuugccaagaaggua

SEQ ID NO: 12638 - RNA, 19 nt, Homo sapiens
  misc_RNA (1)...(19): siRNA sense strand
gcaccuaauugcccaagag

SEQ ID NO: 12639 - RNA, 19 nt, Homo sapiens
  misc_RNA (1)...(19): siRNA sense strand
gaauauauugaacgucuug

SEQ ID NO: 12640 - RNA, 19 nt, Homo sapiens
  misc_RNA (1)...(19): siRNA sense strand
acaaacaaguuggagauau

SEQ ID NO: 12641 - RNA, 19 nt, Homo sapiens
  misc_RNA (1)...(19): siRNA sense strand
uaccagugcucaaagaaga

SEQ ID NO: 12642 - RNA, 19 nt, Homo sapiens
  misc_RNA (1)...(19): siRNA sense strand
uagagaaacuagagcaaca

SEQ ID NO: 12643 - RNA, 19 nt, Homo sapiens
  misc_RNA (1)...(19): siRNA sense strand
ucaacaauauuccuacagu

SEQ ID NO: 12644 - RNA, 19 nt, Homo sapiens
  misc_RNA (1)...(19): siRNA sense strand
gcgcuauuaugauucgaaa

SEQ ID NO: 12645 - RNA, 19 nt, Homo sapiens
  misc_RNA (1)...(19): siRNA sense strand
aaacaguccuggcuaaacu

SEQ ID NO: 12646 - RNA, 19 nt, Homo sapiens
  misc_RNA (1)...(19): siRNA sense strand
gcucaaagaagaggugaaa

SEQ ID NO: 12647 - RNA, 19 nt, Homo sapiens
  misc_RNA (1)...(19): siRNA sense strand
gaacgucuuguauggagaa

SEQ ID NO: 12648 - RNA, 19 nt, Homo sapiens
  misc_RNA (1)...(19): siRNA sense strand
gcuaaucuggacaagaaua

SEQ ID NO: 12649 - RNA, 19 nt, Homo sapiens
  misc_RNA (1)...(19): siRNA sense strand
gcagacaucauucagaagu

SEQ ID NO: 12650 - RNA, 19 nt, Homo sapiens
  misc_RNA (1)...(19): siRNA sense strand
auucagaaguugcaccuaa

SEQ ID NO: 12651 - RNA, 19 nt, Homo sapiens
  misc_RNA (1)...(19): siRNA sense strand
gaagaauguggauacaguu

SEQ ID NO: 12652 - RNA, 19 nt, Homo sapiens
  misc_RNA (1)...(19): siRNA sense strand
gaaacaggacuugcuggaa

SEQ ID NO: 12653 - RNA, 19 nt, Homo sapiens
  misc_RNA (1)...(19): siRNA sense strand
cguaccaacuuaccacuug

SEQ ID NO: 12654 - RNA, 19 nt, Homo sapiens
  misc_RNA (1)...(19): siRNA sense strand
uagacagcguaccaacuua

SEQ ID NO: 12655 - RNA, 19 nt, Homo sapiens
  misc_RNA (1)...(19): siRNA sense strand
uguggcagaugaauauauu

SEQ ID NO: 12656 - RNA, 19 nt, Homo sapiens
  misc_RNA (1)...(19): siRNA sense strand
gcuggaauacucugucaaa

SEQ ID NO: 12657 - RNA, 19 nt, Homo sapiens
  misc_RNA (1)...(19): siRNA sense strand
gauggagaauugaaaucug

SEQ ID NO: 12658 - RNA, 19 nt, Homo sapiens
  misc_RNA (1)...(19): siRNA sense strand
caacuucgugcugauuaua

SEQ ID NO: 12659 - RNA, 19 nt, Homo sapiens
  misc_RNA (1)...(19): siRNA sense strand
gagcaucuucaacaauauu

SEQ ID NO: 12660 - RNA, 19 nt, Homo sapiens
  misc_RNA (1)...(19): siRNA sense strand
gaggaaaguagagaaacua

SEQ ID NO: 12661 - RNA, 19 nt, Homo sapiens
  misc_RNA (1)...(19): siRNA sense strand
cagaagugcuaugauccua

SEQ ID NO: 12662 - RNA, 19 nt, Homo sapiens
  misc_RNA (1)...(19): siRNA sense strand
cuaggaaugcaaaucuuua

SEQ ID NO: 12663 - RNA, 19 nt, Homo sapiens
  misc_RNA (1)...(19): siRNA sense strand
agaauauacuucacuccuu

SEQ ID NO: 12664 - RNA, 19 nt, Homo sapiens
  misc_RNA (1)...(19): siRNA sense strand
ggacaagaauauacuucac

SEQ ID NO: 12665 - RNA, 19 nt, Homo sapiens
  misc_RNA (1)...(19): siRNA sense strand
ucagaaagaagccaaggaa

SEQ ID NO: 12666 - RNA, 19 nt, Homo sapiens
  misc_RNA (1)...(19): siRNA sense strand
gaacagaagaaaacagauu

SEQ ID NO: 12667 - RNA, 19 nt, Homo sapiens
  misc_RNA (1)...(19): siRNA sense strand
gaaaggauucagaggaaag

SEQ ID NO: 12668 - RNA, 19 nt, Homo sapiens
  misc_RNA (1)...(19): siRNA sense strand
gaauggagcccaaacagau

SEQ ID NO: 12669 - RNA, 19 nt, Homo sapiens
  misc_RNA (1)...(19): siRNA sense strand
ggaccuccguagcgucuug

SEQ ID NO: 12670 - RNA, 19 nt, Homo sapiens
  misc_RNA (1)...(19): siRNA sense strand
ugagccagcugcagagaau

SEQ ID NO: 12671 - RNA, 19 nt, Homo sapiens
  misc_RNA (1)...(19): siRNA sense strand
caaaagagguacccauugg

SEQ ID NO: 12672 - RNA, 19 nt, Homo sapiens
  misc_RNA (1)...(19): siRNA sense strand
aagagcugcuugacuguga

SEQ ID NO: 12673 - RNA, 19 nt, Homo sapiens
  misc_RNA (1)...(19): siRNA sense strand
ccucauugaccaguauuua

SEQ ID NO: 12674 - RNA, 19 nt, Homo sapiens
  misc_RNA (1)...(19): siRNA sense strand
gauggaguccuagcuguga

SEQ ID NO: 12675 - RNA, 19 nt, Homo sapiens
  misc_RNA (1)...(19): siRNA sense strand
gacccucauugaccaguau

SEQ ID NO: 12676 - RNA, 19 nt, Homo sapiens
  misc_RNA (1)...(19): siRNA sense strand
cauuggcgcucaaccgaau

SEQ ID NO: 12677 - RNA, 19 nt, Homo sapiens
  misc_RNA (1)...(19): siRNA sense strand
caaguggagcggacacgaa

SEQ ID NO: 12678 - RNA, 19 nt, Homo sapiens
  misc_RNA (1)...(19): siRNA sense strand
gagaauggagcccaaacag

SEQ ID NO: 12679 - RNA, 19 nt, Homo sapiens
  misc_RNA (1)...(19): siRNA sense strand
cgaacagggucgagcuucu

SEQ ID NO: 12680 - RNA, 19 nt, Homo sapiens
  misc_RNA (1)...(19): siRNA sense strand
gcagagaauggagcccaaa

SEQ ID NO: 12681 - RNA, 19 nt, Homo sapiens
  misc_RNA (1)...(19): siRNA sense strand
gugaaggccgugcaacaug

SEQ ID NO: 12682 - RNA, 19 nt, Homo sapiens
  misc_RNA (1)...(19): siRNA sense strand
gaacagggucgagcuucuc

SEQ ID NO: 12683 - RNA, 19 nt, Homo sapiens
  misc_RNA (1)...(19): siRNA sense strand
cgaagcugccaguacugua

SEQ ID NO: 12684 - RNA, 19 nt, Homo sapiens
  misc_RNA (1)...(19): siRNA sense strand
agaauggagcccaaacaga

SEQ ID NO: 12685 - RNA, 19 nt, Homo sapiens
  misc_RNA (1)...(19): siRNA sense strand
caccagaagagcugcuuga

SEQ ID NO: 12686 - RNA, 19 nt, Homo sapiens
  misc_RNA (1)...(19): siRNA sense strand
agacccucauugaccagua

SEQ ID NO: 12687 - RNA, 19 nt, Homo sapiens
  misc_RNA (1)...(19): siRNA sense strand
ucauugaccaguauuuaag

SEQ ID NO: 12688 - RNA, 19 nt, Homo sapiens
  misc_RNA (1)...(19): siRNA sense strand
cucauugaccaguauuuaa

SEQ ID NO: 12689 - RNA, 19 nt, Homo sapiens
  misc_RNA (1)...(19): siRNA sense strand
gcuggacgaggaucucuuc

SEQ ID NO: 12690 - RNA, 19 nt, Homo sapiens
  misc_RNA (1)...(19): siRNA sense strand
gacccuaaccuccaaaaga

SEQ ID NO: 12691 - RNA, 19 nt, Homo sapiens
  misc_RNA (1)...(19): siRNA sense strand
ggaccuccguagcgucuug

SEQ ID NO: 12692 - RNA, 19 nt, Homo sapiens
  misc_RNA (1)...(19): siRNA sense strand
caaguggagcggacacgaa

SEQ ID NO: 12693 - RNA, 19 nt, Homo sapiens
  misc_RNA (1)...(19): siRNA sense strand
cgaacagggucgagcuucu

SEQ ID NO: 12694 - RNA, 19 nt, Homo sapiens
  misc_RNA (1)...(19): siRNA sense strand
gugaaggccgugcaacaug

SEQ ID NO: 12695 - RNA, 19 nt, Homo sapiens
  misc_RNA (1)...(19): siRNA sense strand
gaacagggucgagcuucuc

SEQ ID NO: 12696 - RNA, 19 nt, Homo sapiens
  misc_RNA (1)...(19): siRNA sense strand
cgaagcugccaguacugua

SEQ ID NO: 12697 - RNA, 19 nt, Homo sapiens
  misc_RNA (1)...(19): siRNA sense strand
caccagaagagcugcuuga

SEQ ID NO: 12698 - RNA, 19 nt, Homo sapiens
  misc_RNA (1)...(19): siRNA sense strand
gcuggacgaggaucucuuc

SEQ ID NO: 12699 - RNA, 19 nt, Homo sapiens
  misc_RNA (1)...(19): siRNA sense strand
gaauggagcccaaacagau

SEQ ID NO: 12700 - RNA, 19 nt, Homo sapiens
  misc_RNA (1)...(19): siRNA sense strand
ggaccuccguagcgucuug

SEQ ID NO: 12701 - RNA, 19 nt, Homo sapiens
  misc_RNA (1)...(19): siRNA sense strand
ugagccagcugcagagaau

SEQ ID NO: 12702 - RNA, 19 nt, Homo sapiens
  misc_RNA (1)...(19): siRNA sense strand
caaaagagguacccauugg

SEQ ID NO: 12703 - RNA, 19 nt, Homo sapiens
  misc_RNA (1)...(19): siRNA sense strand
aagagcugcuugacuguga

SEQ ID NO: 12704 - RNA, 19 nt, Homo sapiens
  misc_RNA (1)...(19): siRNA sense strand
ccucauugaccaguauuua

SEQ ID NO: 12705 - RNA, 19 nt, Homo sapiens
  misc_RNA (1)...(19): siRNA sense strand
gauggaguccuagcuguga

SEQ ID NO: 12706 - RNA, 19 nt, Homo sapiens
  misc_RNA (1)...(19): siRNA sense strand
gacccucauugaccaguau

SEQ ID NO: 12707 - RNA, 19 nt, Homo sapiens
  misc_RNA (1)...(19): siRNA sense strand
cauuggcgcucaaccgaau

SEQ ID NO: 12708 - RNA, 19 nt, Homo sapiens
  misc_RNA (1)...(19): siRNA sense strand
caaguggagcggacacgaa

SEQ ID NO: 12709 - RNA, 19 nt, Homo sapiens
  misc_RNA (1)...(19): siRNA sense strand
gagaauggagcccaaacag

SEQ ID NO: 12710 - RNA, 19 nt, Homo sapiens
  misc_RNA (1)...(19): siRNA sense strand
cgaacagggucgagcuucu

SEQ ID NO: 12711 - RNA, 19 nt, Homo sapiens
  misc_RNA (1)...(19): siRNA sense strand
gcagagaauggagcccaaa

SEQ ID NO: 12712 - RNA, 19 nt, Homo sapiens
  misc_RNA (1)...(19): siRNA sense strand
gugaaggccgugcaacaug

SEQ ID NO: 12713 - RNA, 19 nt, Homo sapiens
  misc_RNA (1)...(19): siRNA sense strand
gaacagggucgagcuucuc

SEQ ID NO: 12714 - RNA, 19 nt, Homo sapiens
  misc_RNA (1)...(19): siRNA sense strand
cgaagcugccaguacugua

SEQ ID NO: 12715 - RNA, 19 nt, Homo sapiens
  misc_RNA (1)...(19): siRNA sense strand
agaauggagcccaaacaga

SEQ ID NO: 12716 - RNA, 19 nt, Homo sapiens
  misc_RNA (1)...(19): siRNA sense strand
caccagaagagcugcuuga

SEQ ID NO: 12717 - RNA, 19 nt, Homo sapiens
  misc_RNA (1)...(19): siRNA sense strand
agacccucauugaccagua

SEQ ID NO: 12718 - RNA, 19 nt, Homo sapiens
  misc_RNA (1)...(19): siRNA sense strand
ucauugaccaguauuuaag

SEQ ID NO: 12719 - RNA, 19 nt, Homo sapiens
  misc_RNA (1)...(19): siRNA sense strand
cucauugaccaguauuuaa

SEQ ID NO: 12720 - RNA, 19 nt, Homo sapiens
  misc_RNA (1)...(19): siRNA sense strand
gcuggacgaggaucucuuc

SEQ ID NO: 12721 - RNA, 19 nt, Homo sapiens
  misc_RNA (1)...(19): siRNA sense strand
gacccuaaccuccaaaaga

SEQ ID NO: 12722 - RNA, 19 nt, Homo sapiens
  misc_RNA (1)...(19): siRNA sense strand
ggaucuggcucacgaguuc

SEQ ID NO: 12723 - RNA, 19 nt, Homo sapiens
  misc_RNA (1)...(19): siRNA sense strand
gcucuauguucuaugauga

SEQ ID NO: 12724 - RNA, 19 nt, Homo sapiens
  misc_RNA (1)...(19): siRNA sense strand
gcggcucuauguucuauga

SEQ ID NO: 12725 - RNA, 19 nt, Homo sapiens
  misc_RNA (1)...(19): siRNA sense strand
agacaaucgucaccaagaa

SEQ ID NO: 12726 - RNA, 19 nt, Homo sapiens
  misc_RNA (1)...(19): siRNA sense strand
gagacaaucgucaccaaga

SEQ ID NO: 12727 - RNA, 19 nt, Homo sapiens
  misc_RNA (1)...(19): siRNA sense strand
ugaggcgagugcauaagaa

SEQ ID NO: 12728 - RNA, 19 nt, Homo sapiens
  misc_RNA (1)...(19): siRNA sense strand
ucccugugauccucuauga

SEQ ID NO: 12729 - RNA, 19 nt, Homo sapiens
  misc_RNA (1)...(19): siRNA sense strand
uauguucuaugaugaggau

SEQ ID NO: 12730 - RNA, 19 nt, Homo sapiens
  misc_RNA (1)...(19): siRNA sense strand
ggcucuauguucuaugaug

SEQ ID NO: 12731 - RNA, 19 nt, Homo sapiens
  misc_RNA (1)...(19): siRNA sense strand
aagcugaggcgagugcaua

SEQ ID NO: 12732 - RNA, 19 nt, Homo sapiens
  misc_RNA (1)...(19): siRNA sense strand
cgaguucuaugaggagaca

SEQ ID NO: 12733 - RNA, 19 nt, Homo sapiens
  misc_RNA (1)...(19): siRNA sense strand
cacguggauuucccuguga

SEQ ID NO: 12734 - RNA, 19 nt, Homo sapiens
  misc_RNA (1)...(19): siRNA sense strand
gaggcgagugcauaagaau

SEQ ID NO: 12735 - RNA, 19 nt, Homo sapiens
  misc_RNA (1)...(19): siRNA sense strand
aaacuaagaccgaguauga

SEQ ID NO: 12736 - RNA, 19 nt, Homo sapiens
  misc_RNA (1)...(19): siRNA sense strand
ggaacaauuucgcagagaa

SEQ ID NO: 12737 - RNA, 19 nt, Homo sapiens
  misc_RNA (1)...(19): siRNA sense strand
cggauaagguggucgugaa

SEQ ID NO: 12738 - RNA, 19 nt, Homo sapiens
  misc_RNA (1)...(19): siRNA sense strand
gaaccugaccgcaagaaag

SEQ ID NO: 12739 - RNA, 19 nt, Homo sapiens
  misc_RNA (1)...(19): siRNA sense strand
gguuuaaggucuccguguu

SEQ ID NO: 12740 - RNA, 19 nt, Homo sapiens
  misc_RNA (1)...(19): siRNA sense strand
cagaaggcuuggagagcua

SEQ ID NO: 12741 - RNA, 19 nt, Homo sapiens
  misc_RNA (1)...(19): siRNA sense strand
ggauaagguggucgugaaa

SEQ ID NO: 12742 - RNA, 19 nt, Homo sapiens
  misc_RNA (1)...(19): siRNA sense strand
ugaagcggcugagaaguca

SEQ ID NO: 12743 - RNA, 19 nt, Homo sapiens
  misc_RNA (1)...(19): siRNA sense strand
gaacaauuucgcagagaag

SEQ ID NO: 12744 - RNA, 19 nt, Homo sapiens
  misc_RNA (1)...(19): siRNA sense strand
gggaacaauuucgcagaga

SEQ ID NO: 12745 - RNA, 19 nt, Homo sapiens
  misc_RNA (1)...(19): siRNA sense strand
acacagucauaaaccacua

SEQ ID NO: 12746 - RNA, 19 nt, Homo sapiens
  misc_RNA (1)...(19): siRNA sense strand
agacugaagcggcugagaa

SEQ ID NO: 12747 - RNA, 19 nt, Homo sapiens
  misc_RNA (1)...(19): siRNA sense strand
gcuacuacgcggagcaaga

SEQ ID NO: 12748 - RNA, 19 nt, Homo sapiens
  misc_RNA (1)...(19): siRNA sense strand
acuacaaccuggccaagca

SEQ ID NO: 12749 - RNA, 19 nt, Homo sapiens
  misc_RNA (1)...(19): siRNA sense strand
uguccgagcaggagacuga

SEQ ID NO: 12750 - RNA, 19 nt, Homo sapiens
  misc_RNA (1)...(19): siRNA sense strand
cagagaagggcaccaagca

SEQ ID NO: 12751 - RNA, 19 nt, Homo sapiens
  misc_RNA (1)...(19): siRNA sense strand
gaguucaccgucagcauca

SEQ ID NO: 12752 - RNA, 19 nt, Homo sapiens
  misc_RNA (1)...(19): siRNA sense strand
ucaagaacacccagugcau

SEQ ID NO: 12753 - RNA, 19 nt, Homo sapiens
  misc_RNA (1)...(19): siRNA sense strand
gauggguucguccucaaga

SEQ ID NO: 12754 - RNA, 19 nt, Homo sapiens
  misc_RNA (1)...(19): siRNA sense strand
acaagguguacaaguauga

SEQ ID NO: 12755 - RNA, 19 nt, Homo sapiens
  misc_RNA (1)...(19): siRNA sense strand
ucaccgagagguuuaaggu

SEQ ID NO: 12756 - RNA, 19 nt, Homo sapiens
  misc_RNA (1)...(19): siRNA sense strand
guuuaaggucuccguguug

SEQ ID NO: 12757 - RNA, 19 nt, Homo sapiens
  misc_RNA (1)...(19): siRNA sense strand
gacugaagcggcugagaag

SEQ ID NO: 12758 - RNA, 19 nt, Homo sapiens
  misc_RNA (1)...(19): siRNA sense strand
gggagaaauuuuacacagu

SEQ ID NO: 12759 - RNA, 19 nt, Homo sapiens
  misc_RNA (1)...(19): siRNA sense strand
aggaaucucucuccaguua

SEQ ID NO: 12760 - RNA, 19 nt, Homo sapiens
  misc_RNA (1)...(19): siRNA sense strand
cagcagccaugagcacuua

SEQ ID NO: 12761 - RNA, 19 nt, Homo sapiens
  misc_RNA (1)...(19): siRNA sense strand
gaaucucucuccaguuacu

SEQ ID NO: 12762 - RNA, 19 nt, Homo sapiens
  misc_RNA (1)...(19): siRNA sense strand
gcugaagggagaggaguaa

SEQ ID NO: 12763 - RNA, 19 nt, Homo sapiens
  misc_RNA (1)...(19): siRNA sense strand
ucccagcucuguuucuugu

SEQ ID NO: 12764 - RNA, 19 nt, Homo sapiens
  misc_RNA (1)...(19): siRNA sense strand
ccucccagcucuguuucuu

SEQ ID NO: 12765 - RNA, 19 nt, Homo sapiens
  misc_RNA (1)...(19): siRNA sense strand
gcacuuacacaggcauuuu

SEQ ID NO: 12766 - RNA, 19 nt, Homo sapiens
  misc_RNA (1)...(19): siRNA sense strand
uuacugaccaaguucuuuc

SEQ ID NO: 12767 - RNA, 19 nt, Homo sapiens
  misc_RNA (1)...(19): siRNA sense strand
ggucaaggguauacgagua

SEQ ID NO: 12768 - RNA, 19 nt, Homo sapiens
  misc_RNA (1)...(19): siRNA sense strand
gcuagaaccuccaaacaag

SEQ ID NO: 12769 - RNA, 19 nt, Homo sapiens
  misc_RNA (1)...(19): siRNA sense strand
caaaugaggcgcugcaugu

SEQ ID NO: 12770 - RNA, 19 nt, Homo sapiens
  misc_RNA (1)...(19): siRNA sense strand
ggucuucggucaaggguau

SEQ ID NO: 12771 - RNA, 19 nt, Homo sapiens
  misc_RNA (1)...(19): siRNA sense strand
gcagacacauccaaaugag

SEQ ID NO: 12772 - RNA, 19 nt, Homo sapiens
  misc_RNA (1)...(19): siRNA sense strand
ccaaacaagcucucaaggu

SEQ ID NO: 12773 - RNA, 19 nt, Homo sapiens
  misc_RNA (1)...(19): siRNA sense strand
ggacgaccauccccgauag

SEQ ID NO: 12774 - RNA, 19 nt, Homo sapiens
  misc_RNA (1)...(19): siRNA sense strand
gguagucaagcuuccaaga

SEQ ID NO: 12775 - RNA, 19 nt, Homo sapiens
  misc_RNA (1)...(19): siRNA sense strand
ggagaacguaggguaguca

SEQ ID NO: 12776 - RNA, 19 nt, Homo sapiens
  misc_RNA (1)...(19): siRNA sense strand
ucaagguccauuuguagga

SEQ ID NO: 12777 - RNA, 19 nt, Homo sapiens
  misc_RNA (1)...(19): siRNA sense strand
gcucucaagguccauuugu

SEQ ID NO: 12778 - RNA, 19 nt, Homo sapiens
  misc_RNA (1)...(19): siRNA sense strand
cugcagacacauccaaaug

SEQ ID NO: 12779 - RNA, 19 nt, Homo sapiens
  misc_RNA (1)...(19): siRNA sense strand
cucucaagguccauuugua

SEQ ID NO: 12780 - RNA, 19 nt, Homo sapiens
  misc_RNA (1)...(19): siRNA sense strand
ugcagacacauccaaauga

SEQ ID NO: 12781 - RNA, 19 nt, Homo sapiens
  misc_RNA (1)...(19): siRNA sense strand
uuccaagacugcagacaca

SEQ ID NO: 12782 - RNA, 19 nt, Homo sapiens
  misc_RNA (1)...(19): siRNA sense strand
ucucaagguccauuuguag

SEQ ID NO: 12783 - RNA, 19 nt, Homo sapiens
  misc_RNA (1)...(19): siRNA sense strand
gagugagucuuucaaauaa

SEQ ID NO: 12784 - RNA, 19 nt, Homo sapiens
  misc_RNA (1)...(19): siRNA sense strand
gagaagaauuugcaaacuu

SEQ ID NO: 12785 - RNA, 19 nt, Homo sapiens
  misc_RNA (1)...(19): siRNA sense strand
ccaguggacuugcuacaua

SEQ ID NO: 12786 - RNA, 19 nt, Homo sapiens
  misc_RNA (1)...(19): siRNA sense strand
cagcugccauuaaagauua

SEQ ID NO: 12787 - RNA, 19 nt, Homo sapiens
  misc_RNA (1)...(19): siRNA sense strand
gaauagagcacugcaauga

SEQ ID NO: 12788 - RNA, 19 nt, Homo sapiens
  misc_RNA (1)...(19): siRNA sense strand
ggagauagaggaagacaaa

SEQ ID NO: 12789 - RNA, 19 nt, Homo sapiens
  misc_RNA (1)...(19): siRNA sense strand
gauaaugacugggcuaugu

SEQ ID NO: 12790 - RNA, 19 nt, Homo sapiens
  misc_RNA (1)...(19): siRNA sense strand
ggaaagguuuguugaaugg

SEQ ID NO: 12791 - RNA, 19 nt, Homo sapiens
  misc_RNA (1)...(19): siRNA sense strand
gaacaguaaugaggaguau

SEQ ID NO: 12792 - RNA, 19 nt, Homo sapiens
  misc_RNA (1)...(19): siRNA sense strand
gcaaccgcuuuguuaguua

SEQ ID NO: 12793 - RNA, 19 nt, Homo sapiens
  misc_RNA (1)...(19): siRNA sense strand
caagcaacaugaacagaaa

SEQ ID NO: 12794 - RNA, 19 nt, Homo sapiens
  misc_RNA (1)...(19): siRNA sense strand
ugaggaggguuacauaauu

SEQ ID NO: 12795 - RNA, 19 nt, Homo sapiens
  misc_RNA (1)...(19): siRNA sense strand
gaaaugagaagcagauaca

SEQ ID NO: 12796 - RNA, 19 nt, Homo sapiens
  misc_RNA (1)...(19): siRNA sense strand
gagaucaggagaagaauuu

SEQ ID NO: 12797 - RNA, 19 nt, Homo sapiens
  misc_RNA (1)...(19): siRNA sense strand
gaggaggguuacauaauug

SEQ ID NO: 12798 - RNA, 19 nt, Homo sapiens
  misc_RNA (1)...(19): siRNA sense strand
ggugaucuguuuaugcuuu

SEQ ID NO: 12799 - RNA, 19 nt, Homo sapiens
  misc_RNA (1)...(19): siRNA sense strand
ugagugagucuuucaaaua

SEQ ID NO: 12800 - RNA, 19 nt, Homo sapiens
  misc_RNA (1)...(19): siRNA sense strand
aaaguaaacucggcacauu

SEQ ID NO: 12801 - RNA, 19 nt, Homo sapiens
  misc_RNA (1)...(19): siRNA sense strand
aaacuuauauccugagaca

SEQ ID NO: 12802 - RNA, 19 nt, Homo sapiens
  misc_RNA (1)...(19): siRNA sense strand
uaccagugcuugacaauau

SEQ ID NO: 12803 - RNA, 19 nt, Homo sapiens
  misc_RNA (1)...(19): siRNA sense strand
uaaguacugccacaaguua

SEQ ID NO: 12804 - RNA, 19 nt, Homo sapiens
  misc_RNA (1)...(19): siRNA sense strand
gauaguuucuggucacugu

SEQ ID NO: 12805 - RNA, 19 nt, Homo sapiens
  misc_RNA (1)...(19): siRNA sense strand
ugagaguguucgaauuuaa

SEQ ID NO: 12806 - RNA, 19 nt, Homo sapiens
  misc_RNA (1)...(19): siRNA sense strand
gcacuuaacaauagagaau

SEQ ID NO: 12807 - RNA, 19 nt, Homo sapiens
  misc_RNA (1)...(19): siRNA sense strand
gcauaauuguuguuucaga

SEQ ID NO: 12808 - RNA, 19 nt, Homo sapiens
  misc_RNA (1)...(19): siRNA sense strand
gaaauuuaccaggugcuua

SEQ ID NO: 12809 - RNA, 19 nt, Homo sapiens
  misc_RNA (1)...(19): siRNA sense strand
caagagggaagacgacuuu

SEQ ID NO: 12810 - RNA, 19 nt, Homo sapiens
  misc_RNA (1)...(19): siRNA sense strand
caaccgcuuuguuaguuaa

SEQ ID NO: 12811 - RNA, 19 nt, Homo sapiens
  misc_RNA (1)...(19): siRNA sense strand
gcuugacaauauacaguua

SEQ ID NO: 12812 - RNA, 19 nt, Homo sapiens
  misc_RNA (1)...(19): siRNA sense strand
gcagaagcauaauuguugu

SEQ ID NO: 12813 - RNA, 19 nt, Homo sapiens
  misc_RNA (1)...(19): siRNA sense strand
guuccuaccuguguuguaa

SEQ ID NO: 12814 - RNA, 19 nt, Homo sapiens
  misc_RNA (1)...(19): siRNA sense strand
caacuuaaauaacgaacag

SEQ ID NO: 12815 - RNA, 19 nt, Homo sapiens
  misc_RNA (1)...(19): siRNA sense strand
gaaaaugcaugcgauaguu

SEQ ID NO: 12816 - RNA, 19 nt, Homo sapiens
  misc_RNA (1)...(19): siRNA sense strand
uaagaguaauccuugagaa

SEQ ID NO: 12817 - RNA, 19 nt, Homo sapiens
  misc_RNA (1)...(19): siRNA sense strand
cuacaaggaucaguaacaa

SEQ ID NO: 12818 - RNA, 19 nt, Homo sapiens
  misc_RNA (1)...(19): siRNA sense strand
gcaaacuuauauccugaga

SEQ ID NO: 12819 - RNA, 19 nt, Homo sapiens
  misc_RNA (1)...(19): siRNA sense strand
gauuccaccuuucucauug

SEQ ID NO: 12820 - RNA, 19 nt, Homo sapiens
  misc_RNA (1)...(19): siRNA sense strand
caggaaagguuuguugaau

SEQ ID NO: 12821 - RNA, 19 nt, Homo sapiens
  misc_RNA (1)...(19): siRNA sense strand
ggcaaccgcuuuguuaguu

SEQ ID NO: 12822 - RNA, 19 nt, Homo sapiens
  misc_RNA (1)...(19): siRNA sense strand
gcuguuccaugugcaauuu

SEQ ID NO: 12823 - RNA, 19 nt, Homo sapiens
  misc_RNA (1)...(19): siRNA sense strand
acuaagaagugaauucguu

SEQ ID NO: 12824 - RNA, 19 nt, Homo sapiens
  misc_RNA (1)...(19): siRNA sense strand
gaucaggaaagguuuguug

SEQ ID NO: 12825 - RNA, 19 nt, Homo sapiens
  misc_RNA (1)...(19): siRNA sense strand
gaagcauaauuguuguuuc

SEQ ID NO: 12826 - RNA, 19 nt, Homo sapiens
  misc_RNA (1)...(19): siRNA sense strand
caacaugaacagaaauaug

SEQ ID NO: 12827 - RNA, 19 nt, Homo sapiens
  misc_RNA (1)...(19): siRNA sense strand
gaggugaucuguuuaugcu

SEQ ID NO: 12828 - RNA, 19 nt, Homo sapiens
  misc_RNA (1)...(19): siRNA sense strand
gaaagucucaaugucauau

SEQ ID NO: 12829 - RNA, 19 nt, Homo sapiens
  misc_RNA (1)...(19): siRNA sense strand
ggagaagaauuugcaaacu

SEQ ID NO: 12830 - RNA, 19 nt, Homo sapiens
  misc_RNA (1)...(19): siRNA sense strand
ggaaucuucugugaucguu

SEQ ID NO: 12831 - RNA, 19 nt, Homo sapiens
  misc_RNA (1)...(19): siRNA sense strand
gaacguuguauuaaguuga

SEQ ID NO: 12832 - RNA, 19 nt, Homo sapiens
  misc_RNA (1)...(19): siRNA sense strand
ggacccaucgugagaaaug

SEQ ID NO: 12833 - RNA, 19 nt, Homo sapiens
  misc_RNA (1)...(19): siRNA sense strand
ggcaggcauugcagaagua

SEQ ID NO: 12834 - RNA, 19 nt, Homo sapiens
  misc_RNA (1)...(19): siRNA sense strand
ggaacaagcaacaugaaca

SEQ ID NO: 12835 - RNA, 19 nt, Homo sapiens
  misc_RNA (1)...(19): siRNA sense strand
gagaguguucgaauuuaaa

SEQ ID NO: 12836 - RNA, 19 nt, Homo sapiens
  misc_RNA (1)...(19): siRNA sense strand
uuuagcagauggaguguuu

SEQ ID NO: 12837 - RNA, 19 nt, Homo sapiens
  misc_RNA (1)...(19): siRNA sense strand
gagauauuguuuagcagau

SEQ ID NO: 12838 - RNA, 19 nt, Homo sapiens
  misc_RNA (1)...(19): siRNA sense strand
gcagucgagauauuguuua

SEQ ID NO: 12839 - RNA, 19 nt, Homo sapiens
  misc_RNA (1)...(19): siRNA sense strand
uuuacuagcuugguuauug

SEQ ID NO: 12840 - RNA, 19 nt, Homo sapiens
  misc_RNA (1)...(19): siRNA sense strand
gcucugcucucccuuguac

SEQ ID NO: 12841 - RNA, 19 nt, Homo sapiens
  misc_RNA (1)...(19): siRNA sense strand
gcacauuacccgaaagucu

SEQ ID NO: 12842 - RNA, 19 nt, Homo sapiens
  misc_RNA (1)...(19): siRNA sense strand
guugaacguuguauuaagu

SEQ ID NO: 12843 - RNA, 19 nt, Homo sapiens
  misc_RNA (1)...(19): siRNA sense strand
auagagcacugcaaugaga

SEQ ID NO: 12844 - RNA, 19 nt, Homo sapiens
  misc_RNA (1)...(19): siRNA sense strand
gaagaauaaauccggaaga

SEQ ID NO: 12845 - RNA, 19 nt, Homo sapiens
  misc_RNA (1)...(19): siRNA sense strand
gaggguuacauaauuguuu

SEQ ID NO: 12846 - RNA, 19 nt, Homo sapiens
  misc_RNA (1)...(19): siRNA sense strand
caguggacuugcuacauaa

SEQ ID NO: 12847 - RNA, 19 nt, Homo sapiens
  misc_RNA (1)...(19): siRNA sense strand
ggaacuaagaagugaauuc

SEQ ID NO: 12848 - RNA, 19 nt, Homo sapiens
  misc_RNA (1)...(19): siRNA sense strand
gcagcugccauuaaagauu

SEQ ID NO: 12849 - RNA, 19 nt, Homo sapiens
  misc_RNA (1)...(19): siRNA sense strand
gaacaagcaacaugaacag

SEQ ID NO: 12850 - RNA, 19 nt, Homo sapiens
  misc_RNA (1)...(19): siRNA sense strand
uuacuagcuugguuauuga

SEQ ID NO: 12851 - RNA, 19 nt, Homo sapiens
  misc_RNA (1)...(19): siRNA sense strand
cauaaucuguagucuugga

SEQ ID NO: 12852 - RNA, 19 nt, Homo sapiens
  misc_RNA (1)...(19): siRNA sense strand
gugagugagucuuucaaau

SEQ ID NO: 12853 - RNA, 19 nt, Homo sapiens
  misc_RNA (1)...(19): siRNA sense strand
gaacuaagaagugaauucg

SEQ ID NO: 12854 - RNA, 19 nt, Homo sapiens
  misc_RNA (1)...(19): siRNA sense strand
agauugagauggccuuugu

SEQ ID NO: 12855 - RNA, 19 nt, Homo sapiens
  misc_RNA (1)...(19): siRNA sense strand
gcugucaacuuaaauaacg

SEQ ID NO: 12856 - RNA, 19 nt, Homo sapiens
  misc_RNA (1)...(19): siRNA sense strand
gcuuugcagucgagauauu

SEQ ID NO: 12857 - RNA, 19 nt, Homo sapiens
  misc_RNA (1)...(19): siRNA sense strand
gaaaguaaacucggcacau

SEQ ID NO: 12858 - RNA, 19 nt, Homo sapiens
  misc_RNA (1)...(19): siRNA sense strand
ugacuacaaggaucaguaa

SEQ ID NO: 12859 - RNA, 19 nt, Homo sapiens
  misc_RNA (1)...(19): siRNA sense strand
gauaguuaacuguguguau

SEQ ID NO: 12860 - RNA, 19 nt, Homo sapiens
  misc_RNA (1)...(19): siRNA sense strand
ggaauagagcacugcaaug

SEQ ID NO: 12861 - RNA, 19 nt, Homo sapiens
  misc_RNA (1)...(19): siRNA sense strand
aaauuuaccaggugcuuaa

SEQ ID NO: 12862 - RNA, 19 nt, Homo sapiens
  misc_RNA (1)...(19): siRNA sense strand
gugagucuuucaaauaauc

SEQ ID NO: 12863 - RNA, 19 nt, Homo sapiens
  misc_RNA (1)...(19): siRNA sense strand
acucuaaacuguaauucug

SEQ ID NO: 12864 - RNA, 19 nt, Homo sapiens
  misc_RNA (1)...(19): siRNA sense strand
guuauuuacuagcuugguu

SEQ ID NO: 12865 - RNA, 19 nt, Homo sapiens
  misc_RNA (1)...(19): siRNA sense strand
uguauuaaguugagaaugc

SEQ ID NO: 12866 - RNA, 19 nt, Homo sapiens
  misc_RNA (1)...(19): siRNA sense strand
aaauaauccuucggcauga

SEQ ID NO: 12867 - RNA, 19 nt, Homo sapiens
  misc_RNA (1)...(19): siRNA sense strand
gucgagauauuguuuagca

SEQ ID NO: 12868 - RNA, 19 nt, Homo sapiens
  misc_RNA (1)...(19): siRNA sense strand
aggaaagguuuguugaaug

SEQ ID NO: 12869 - RNA, 19 nt, Homo sapiens
  misc_RNA (1)...(19): siRNA sense strand
uaaauaacgaacagagaga

SEQ ID NO: 12870 - RNA, 19 nt, Homo sapiens
  misc_RNA (1)...(19): siRNA sense strand
guuggucucuugggaggua

SEQ ID NO: 12871 - RNA, 19 nt, Homo sapiens
  misc_RNA (1)...(19): siRNA sense strand
agagccagcuguuccaugu

SEQ ID NO: 12872 - RNA, 19 nt, Homo sapiens
  misc_RNA (1)...(19): siRNA sense strand
gcacaccagacuugcagaa

SEQ ID NO: 12873 - RNA, 19 nt, Homo sapiens
  misc_RNA (1)...(19): siRNA sense strand
cgugguaagugcuccuauu

SEQ ID NO: 12874 - RNA, 19 nt, Homo sapiens
  misc_RNA (1)...(19): siRNA sense strand
ggagugcagaggagacaaa

SEQ ID NO: 12875 - RNA, 19 nt, Homo sapiens
  misc_RNA (1)...(19): siRNA sense strand
gagaaaugagaagcagaua

SEQ ID NO: 12876 - RNA, 19 nt, Homo sapiens
  misc_RNA (1)...(19): siRNA sense strand
aggcauugcagaaguauuu

SEQ ID NO: 12877 - RNA, 19 nt, Homo sapiens
  misc_RNA (1)...(19): siRNA sense strand
aaaugaggaggguuacaua

SEQ ID NO: 12878 - RNA, 19 nt, Homo sapiens
  misc_RNA (1)...(19): siRNA sense strand
gcgcgauuauuucucuaga

SEQ ID NO: 12879 - RNA, 19 nt, Homo sapiens
  misc_RNA (1)...(19): siRNA sense strand
uaaugugggaccugaaauu

SEQ ID NO: 12880 - RNA, 19 nt, Homo sapiens
  misc_RNA (1)...(19): siRNA sense strand
uugagaguguucgaauuua

SEQ ID NO: 12881 - RNA, 19 nt, Homo sapiens
  misc_RNA (1)...(19): siRNA sense strand
gagcaggaccaguggacuu

SEQ ID NO: 12882 - RNA, 19 nt, Homo sapiens
  misc_RNA (1)...(19): siRNA sense strand
gucggcaaccgcuuuguua

SEQ ID NO: 12883 - RNA, 19 nt, Homo sapiens
  misc_RNA (1)...(19): siRNA sense strand
ugacagaagugcaccaaua

SEQ ID NO: 12884 - RNA, 19 nt, Homo sapiens
  misc_RNA (1)...(19): siRNA sense strand
ggaagaaacuaaagaagac

SEQ ID NO: 12885 - RNA, 19 nt, Homo sapiens
  misc_RNA (1)...(19): siRNA sense strand
gcaaagggaagaaacuaaa

SEQ ID NO: 12886 - RNA, 19 nt, Homo sapiens
  misc_RNA (1)...(19): siRNA sense strand
agaagacggucaccaauga

SEQ ID NO: 12887 - RNA, 19 nt, Homo sapiens
  misc_RNA (1)...(19): siRNA sense strand
caacagggauaaugauucu

SEQ ID NO: 12888 - RNA, 19 nt, Homo sapiens
  misc_RNA (1)...(19): siRNA sense strand
ccaagacucuccaugugaa

SEQ ID NO: 12889 - RNA, 19 nt, Homo sapiens
  misc_RNA (1)...(19): siRNA sense strand
gggaagaaacuaaagaaga

SEQ ID NO: 12890 - RNA, 19 nt, Homo sapiens
  misc_RNA (1)...(19): siRNA sense strand
cagagaagccuaccuugaa

SEQ ID NO: 12891 - RNA, 19 nt, Homo sapiens
  misc_RNA (1)...(19): siRNA sense strand
gaagaugagugggaaagca

SEQ ID NO: 12892 - RNA, 19 nt, Homo sapiens
  misc_RNA (1)...(19): siRNA sense strand
uagcauuccuccuccagua

SEQ ID NO: 12893 - RNA, 19 nt, Homo sapiens
  misc_RNA (1)...(19): siRNA sense strand
aagccuaccuugaauaaga

SEQ ID NO: 12894 - RNA, 19 nt, Homo sapiens
  misc_RNA (1)...(19): siRNA sense strand
gcucaaagccugauagcau

SEQ ID NO: 12895 - RNA, 19 nt, Homo sapiens
  misc_RNA (1)...(19): siRNA sense strand
agaaauggcuuccaagacu

SEQ ID NO: 12896 - RNA, 19 nt, Homo sapiens
  misc_RNA (1)...(19): siRNA sense strand
uaaagaagacggucaccaa

SEQ ID NO: 12897 - RNA, 19 nt, Homo sapiens
  misc_RNA (1)...(19): siRNA sense strand
ggaaagcagauucuacuuc

SEQ ID NO: 12898 - RNA, 19 nt, Homo sapiens
  misc_RNA (1)...(19): siRNA sense strand
gauaaugauucuggaggaa

SEQ ID NO: 12899 - RNA, 19 nt, Homo sapiens
  misc_RNA (1)...(19): siRNA sense strand
gagaagccuaccuugaaua

SEQ ID NO: 12900 - RNA, 19 nt, Homo sapiens
  misc_RNA (1)...(19): siRNA sense strand
ggaggaagccgaccaccau

SEQ ID NO: 12901 - RNA, 19 nt, Homo sapiens
  misc_RNA (1)...(19): siRNA sense strand
caagacccauucaaucaag

SEQ ID NO: 12902 - RNA, 19 nt, Homo sapiens
  misc_RNA (1)...(19): siRNA sense strand
cggaaucugucccucaguu

SEQ ID NO: 12903 - RNA, 19 nt, Homo sapiens
  misc_RNA (1)...(19): siRNA sense strand
agagaagccuaccuugaau

SEQ ID NO: 12904 - RNA, 19 nt, Homo sapiens
  misc_RNA (1)...(19): siRNA sense strand
gcacuggccaauacagaga

SEQ ID NO: 12905 - RNA, 19 nt, Homo sapiens
  misc_RNA (1)...(19): siRNA sense strand
ggauccaaccgaagagaaa

SEQ ID NO: 12906 - RNA, 19 nt, Homo sapiens
  misc_RNA (1)...(19): siRNA sense strand
ccagagccauauguacaaa

SEQ ID NO: 12907 - RNA, 19 nt, Homo sapiens
  misc_RNA (1)...(19): siRNA sense strand
uauuagaaauggcuuccaa

SEQ ID NO: 12908 - RNA, 19 nt, Homo sapiens
  misc_RNA (1)...(19): siRNA sense strand
ccaccaucaacaucuauua

SEQ ID NO: 12909 - RNA, 19 nt, Homo sapiens
  misc_RNA (1)...(19): siRNA sense strand
gcagggccuuggaugacaa

SEQ ID NO: 12910 - RNA, 19 nt, Homo sapiens
  misc_RNA (1)...(19): siRNA sense strand
ggaagccgaccaccauugu

SEQ ID NO: 12911 - RNA, 19 nt, Homo sapiens
  misc_RNA (1)...(19): siRNA sense strand
agaagccuaccuugaauaa

SEQ ID NO: 12912 - RNA, 19 nt, Homo sapiens
  misc_RNA (1)...(19): siRNA sense strand
caaacuggcaagaaacgaa

SEQ ID NO: 12913 - RNA, 19 nt, Homo sapiens
  misc_RNA (1)...(19): siRNA sense strand
cucaaagccugauagcauu

SEQ ID NO: 12914 - RNA, 19 nt, Homo sapiens
  misc_RNA (1)...(19): siRNA sense strand
caaaaguuaucccagcaaa

SEQ ID NO: 12915 - RNA, 19 nt, Homo sapiens
  misc_RNA (1)...(19): siRNA sense strand
uccauccgauuuccgauuu

SEQ ID NO: 12916 - RNA, 19 nt, Homo sapiens
  misc_RNA (1)...(19): siRNA sense strand
cagcaaagggaagaaacua

SEQ ID NO: 12917 - RNA, 19 nt, Homo sapiens
  misc_RNA (1)...(19): siRNA sense strand
acagagaagccuaccuuga

SEQ ID NO: 12918 - RNA, 19 nt, Homo sapiens
  misc_RNA (1)...(19): siRNA sense strand
ccaagacccauucaaucaa

SEQ ID NO: 12919 - RNA, 19 nt, Homo sapiens
  misc_RNA (1)...(19): siRNA sense strand
gagcaggcugggagaaaug

SEQ ID NO: 12920 - RNA, 19 nt, Homo sapiens
  misc_RNA (1)...(19): siRNA sense strand
gaguggauccaaccgaaga

SEQ ID NO: 12921 - RNA, 19 nt, Homo sapiens
  misc_RNA (1)...(19): siRNA sense strand
gauaucagcaaagggaaga

SEQ ID NO: 12922 - RNA, 19 nt, Homo sapiens
  misc_RNA (1)...(19): siRNA sense strand
gccaacagggauaaugauu

SEQ ID NO: 12923 - RNA, 19 nt, Homo sapiens
  misc_RNA (1)...(19): siRNA sense strand
guacaaacgaccaaaaguu

SEQ ID NO: 12924 - RNA, 19 nt, Homo sapiens
  misc_RNA (1)...(19): siRNA sense strand
gcaacaggcccuccaucca

SEQ ID NO: 12925 - RNA, 19 nt, Homo sapiens
  misc_RNA (1)...(19): siRNA sense strand
ccuccaccaucaacaucua

SEQ ID NO: 12926 - RNA, 19 nt, Homo sapiens
  misc_RNA (1)...(19): siRNA sense strand
aaagggaagaaacuaaaga

SEQ ID NO: 12927 - RNA, 19 nt, Homo sapiens
  misc_RNA (1)...(19): siRNA sense strand
cccaccaccuccuccagua

SEQ ID NO: 12928 - RNA, 19 nt, Homo sapiens
  misc_RNA (1)...(19): siRNA sense strand
gacagaagugcaccaauac

SEQ ID NO: 12929 - RNA, 19 nt, Homo sapiens
  misc_RNA (1)...(19): siRNA sense strand
aaacuggcaagaaacgaaa

SEQ ID NO: 12930 - RNA, 19 nt, Homo sapiens
  misc_RNA (1)...(19): siRNA sense strand
aaugcucuccuuucugaua

SEQ ID NO: 12931 - RNA, 19 nt, Homo sapiens
  misc_RNA (1)...(19): siRNA sense strand
uacaaacgaccaaaaguua

SEQ ID NO: 12932 - RNA, 19 nt, Homo sapiens
  misc_RNA (1)...(19): siRNA sense strand
gggaggaggcucaauacgu

SEQ ID NO: 12933 - RNA, 19 nt, Homo sapiens
  misc_RNA (1)...(19): siRNA sense strand
ccaacagggauaaugauuc

SEQ ID NO: 12934 - RNA, 19 nt, Homo sapiens
  misc_RNA (1)...(19): siRNA sense strand
caaagggaagaaacuaaag

SEQ ID NO: 12935 - RNA, 19 nt, Homo sapiens
  misc_RNA (1)...(19): siRNA sense strand
uccaagacccauucaauca

SEQ ID NO: 12936 - RNA, 19 nt, Homo sapiens
  misc_RNA (1)...(19): siRNA sense strand
gaagccgaccaccauuguu

SEQ ID NO: 12937 - RNA, 19 nt, Homo sapiens
  misc_RNA (1)...(19): siRNA sense strand
gaggaagccgaccaccauu

SEQ ID NO: 12938 - RNA, 19 nt, Homo sapiens
  misc_RNA (1)...(19): siRNA sense strand
uuagaaauggcuuccaaga

SEQ ID NO: 12939 - RNA, 19 nt, Homo sapiens
  misc_RNA (1)...(19): siRNA sense strand
gcucuccuuucugauauca

SEQ ID NO: 12940 - RNA, 19 nt, Homo sapiens
  misc_RNA (1)...(19): siRNA sense strand
aaagaagacggucaccaau

SEQ ID NO: 12941 - RNA, 19 nt, Homo sapiens
  misc_RNA (1)...(19): siRNA sense strand
caauacuggacaaaccuaa

SEQ ID NO: 12942 - RNA, 19 nt, Homo sapiens
  misc_RNA (1)...(19): siRNA sense strand
cagaagugcaccaauacug

SEQ ID NO: 12943 - RNA, 19 nt, Homo sapiens
  misc_RNA (1)...(19): siRNA sense strand
gcagaaacggcagcacauc

SEQ ID NO: 12944 - RNA, 19 nt, Homo sapiens
  misc_RNA (1)...(19): siRNA sense strand
ggaaucugucccucaguuc

SEQ ID NO: 12945 - RNA, 19 nt, Homo sapiens
  misc_RNA (1)...(19): siRNA sense strand
ccagcagggccuuggauga

SEQ ID NO: 12946 - RNA, 19 nt, Homo sapiens
  misc_RNA (1)...(19): siRNA sense strand
auacagagaagccuaccuu

SEQ ID NO: 12947 - RNA, 19 nt, Homo sapiens
  misc_RNA (1)...(19): siRNA sense strand
ccaauacuggacaaaccua

SEQ ID NO: 12948 - RNA, 19 nt, Homo sapiens
  misc_RNA (1)...(19): siRNA sense strand
gggaaagcagauucuacuu

SEQ ID NO: 12949 - RNA, 19 nt, Homo sapiens
  misc_RNA (1)...(19): siRNA sense strand
ccaccaccuccuccaguaa

SEQ ID NO: 12950 - RNA, 19 nt, Homo sapiens
  misc_RNA (1)...(19): siRNA sense strand
caaguuccagcggcaauga

SEQ ID NO: 12951 - RNA, 19 nt, Homo sapiens
  misc_RNA (1)...(19): siRNA sense strand
cguuugcacuggccaauac

SEQ ID NO: 12952 - RNA, 19 nt, Homo sapiens
  misc_RNA (1)...(19): siRNA sense strand
gugcaccaauacuggacaa

SEQ ID NO: 12953 - RNA, 19 nt, Homo sapiens
  misc_RNA (1)...(19): siRNA sense strand
agagcaggcugggagaaau

SEQ ID NO: 12954 - RNA, 19 nt, Homo sapiens
  misc_RNA (1)...(19): siRNA sense strand
aagaagacggucaccaaug

SEQ ID NO: 12955 - RNA, 19 nt, Homo sapiens
  misc_RNA (1)...(19): siRNA sense strand
cagagcaggcugggagaaa

SEQ ID NO: 12956 - RNA, 19 nt, Homo sapiens
  misc_RNA (1)...(19): siRNA sense strand
gaaugccgaagcugagauc

SEQ ID NO: 12957 - RNA, 19 nt, Homo sapiens
  misc_RNA (1)...(19): siRNA sense strand
uuccaagacucuccaugug

SEQ ID NO: 12958 - RNA, 19 nt, Homo sapiens
  misc_RNA (1)...(19): siRNA sense strand
aagggaagaaacuaaagaa

SEQ ID NO: 12959 - RNA, 19 nt, Homo sapiens
  misc_RNA (1)...(19): siRNA sense strand
cggccaacagggauaauga

SEQ ID NO: 12960 - RNA, 19 nt, Homo sapiens
  misc_RNA (1)...(19): siRNA sense strand
ccacggccaacagggauaa

SEQ ID NO: 12961 - RNA, 19 nt, Homo sapiens
  misc_RNA (1)...(19): siRNA sense strand
gcaccaauacuggacaaac

SEQ ID NO: 12962 - RNA, 19 nt, Homo sapiens
  misc_RNA (1)...(19): siRNA sense strand
aacgaaagccggaguggau

SEQ ID NO: 12963 - RNA, 19 nt, Homo sapiens
  misc_RNA (1)...(19): siRNA sense strand
aagccgaccaccauuguug

SEQ ID NO: 12964 - RNA, 19 nt, Homo sapiens
  misc_RNA (1)...(19): siRNA sense strand
ggaaugccgaagcugagau

SEQ ID NO: 12965 - RNA, 19 nt, Homo sapiens
  misc_RNA (1)...(19): siRNA sense strand
aggcgguggugguggcuuu

SEQ ID NO: 12966 - RNA, 19 nt, Homo sapiens
  misc_RNA (1)...(19): siRNA sense strand
uuugggaggaggcucaaua

SEQ ID NO: 12967 - RNA, 19 nt, Homo sapiens
  misc_RNA (1)...(19): siRNA sense strand
gaacucagauuacuacuug

SEQ ID NO: 12968 - RNA, 19 nt, Homo sapiens
  misc_RNA (1)...(19): siRNA sense strand
gccaagaaauucauugaua

SEQ ID NO: 12969 - RNA, 19 nt, Homo sapiens
  misc_RNA (1)...(19): siRNA sense strand
uaaagcagcuggcaaucaa

SEQ ID NO: 12970 - RNA, 19 nt, Homo sapiens
  misc_RNA (1)...(19): siRNA sense strand
ccgagaagcucaaggcuaa

SEQ ID NO: 12971 - RNA, 19 nt, Homo sapiens
  misc_RNA (1)...(19): siRNA sense strand
caacauaacccagauagaa

SEQ ID NO: 12972 - RNA, 19 nt, Homo sapiens
  misc_RNA (1)...(19): siRNA sense strand
gcagcacauugacaacaua

SEQ ID NO: 12973 - RNA, 19 nt, Homo sapiens
  misc_RNA (1)...(19): siRNA sense strand
gagagcaacuugacaucau

SEQ ID NO: 12974 - RNA, 19 nt, Homo sapiens
  misc_RNA (1)...(19): siRNA sense strand
gaaacucagccaagaaugu

SEQ ID NO: 12975 - RNA, 19 nt, Homo sapiens
  misc_RNA (1)...(19): siRNA sense strand
ugaaugaucucuccaacag

SEQ ID NO: 12976 - RNA, 19 nt, Homo sapiens
  misc_RNA (1)...(19): siRNA sense strand
aggaagcgcuggccaagaa

SEQ ID NO: 12977 - RNA, 19 nt, Homo sapiens
  misc_RNA (1)...(19): siRNA sense strand
caacuugacaucaugaaug

SEQ ID NO: 12978 - RNA, 19 nt, Homo sapiens
  misc_RNA (1)...(19): siRNA sense strand
gcagaaacucagccaagaa

SEQ ID NO: 12979 - RNA, 19 nt, Homo sapiens
  misc_RNA (1)...(19): siRNA sense strand
uccagaggcuucaggcaua

SEQ ID NO: 12980 - RNA, 19 nt, Homo sapiens
  misc_RNA (1)...(19): siRNA sense strand
gauuacuacuugacgaaga

SEQ ID NO: 12981 - RNA, 19 nt, Homo sapiens
  misc_RNA (1)...(19): siRNA sense strand
gcagagagcaacuugacau

SEQ ID NO: 12982 - RNA, 19 nt, Homo sapiens
  misc_RNA (1)...(19): siRNA sense strand
gcuaaugcagagucaagua

SEQ ID NO: 12983 - RNA, 19 nt, Homo sapiens
  misc_RNA (1)...(19): siRNA sense strand
agaagcagcagcacauuga

SEQ ID NO: 12984 - RNA, 19 nt, Homo sapiens
  misc_RNA (1)...(19): siRNA sense strand
guacauuacagacgccauu

SEQ ID NO: 12985 - RNA, 19 nt, Homo sapiens
  misc_RNA (1)...(19): siRNA sense strand
ccaacagggucuggaguau

SEQ ID NO: 12986 - RNA, 19 nt, Homo sapiens
  misc_RNA (1)...(19): siRNA sense strand
uagaagaugccaccgagaa

SEQ ID NO: 12987 - RNA, 19 nt, Homo sapiens
  misc_RNA (1)...(19): siRNA sense strand
aacagggucuggaguauca

SEQ ID NO: 12988 - RNA, 19 nt, Homo sapiens
  misc_RNA (1)...(19): siRNA sense strand
cuaaugcagagucaaguaa

SEQ ID NO: 12989 - RNA, 19 nt, Homo sapiens
  misc_RNA (1)...(19): siRNA sense strand
gagaugcagcagcagauga

SEQ ID NO: 12990 - RNA, 19 nt, Homo sapiens
  misc_RNA (1)...(19): siRNA sense strand
cagaaacucagccaagaau

SEQ ID NO: 12991 - RNA, 19 nt, Homo sapiens
  misc_RNA (1)...(19): siRNA sense strand
ucaagaagcagcagcacau

SEQ ID NO: 12992 - RNA, 19 nt, Homo sapiens
  misc_RNA (1)...(19): siRNA sense strand
gagcaacuugacaucauga

SEQ ID NO: 12993 - RNA, 19 nt, Homo sapiens
  misc_RNA (1)...(19): siRNA sense strand
gagaagcucaaggcuaaug

SEQ ID NO: 12994 - RNA, 19 nt, Homo sapiens
  misc_RNA (1)...(19): siRNA sense strand
ugacaacauaacccagaua

SEQ ID NO: 12995 - RNA, 19 nt, Homo sapiens
  misc_RNA (1)...(19): siRNA sense strand
aaacucagccaagaauguu

SEQ ID NO: 12996 - RNA, 19 nt, Homo sapiens
  misc_RNA (1)...(19): siRNA sense strand
caaggcuaaugcagaguca

SEQ ID NO: 12997 - RNA, 19 nt, Homo sapiens
  misc_RNA (1)...(19): siRNA sense strand
gacaacauaacccagauag

SEQ ID NO: 12998 - RNA, 19 nt, Homo sapiens
  misc_RNA (1)...(19): siRNA sense strand
gcaacuugacaucaugaau

SEQ ID NO: 12999 - RNA, 19 nt, Homo sapiens
  misc_RNA (1)...(19): siRNA sense strand
uaaugcagagucaaguaaa

SEQ ID NO: 13000 - RNA, 19 nt, Homo sapiens
  misc_RNA (1)...(19): siRNA sense strand
caagaagcagcagcacauu

SEQ ID NO: 13001 - RNA, 19 nt, Homo sapiens
  misc_RNA (1)...(19): siRNA sense strand
cagccaagaauguuuaaag

SEQ ID NO: 13002 - RNA, 19 nt, Homo sapiens
  misc_RNA (1)...(19): siRNA sense strand
agagcaacuugacaucaug

SEQ ID NO: 13003 - RNA, 19 nt, Homo sapiens
  misc_RNA (1)...(19): siRNA sense strand
ugcagaaacucagccaaga

SEQ ID NO: 13004 - RNA, 19 nt, Homo sapiens
  misc_RNA (1)...(19): siRNA sense strand
cagcacauugacaacauaa

SEQ ID NO: 13005 - RNA, 19 nt, Homo sapiens
  misc_RNA (1)...(19): siRNA sense strand
guggagaguacauuacaga

SEQ ID NO: 13006 - RNA, 19 nt, Homo sapiens
  misc_RNA (1)...(19): siRNA sense strand
acucagccaagaauguuua

SEQ ID NO: 13007 - RNA, 19 nt, Homo sapiens
  misc_RNA (1)...(19): siRNA sense strand
gaagcgcuggccaagaaau

SEQ ID NO: 13008 - RNA, 19 nt, Homo sapiens
  misc_RNA (1)...(19): siRNA sense strand
guuuaaagcagcuggcaau

SEQ ID NO: 13009 - RNA, 19 nt, Homo sapiens
  misc_RNA (1)...(19): siRNA sense strand
cagauuacuacuugacgaa

SEQ ID NO: 13010 - RNA, 19 nt, Homo sapiens
  misc_RNA (1)...(19): siRNA sense strand
ggaagcgcuggccaagaaa

SEQ ID NO: 13011 - RNA, 19 nt, Homo sapiens
  misc_RNA (1)...(19): siRNA sense strand
gcacauugacaacauaacc

SEQ ID NO: 13012 - RNA, 19 nt, Homo sapiens
  misc_RNA (1)...(19): siRNA sense strand
ggagaugcagcagcagaug

SEQ ID NO: 13013 - RNA, 19 nt, Homo sapiens
  misc_RNA (1)...(19): siRNA sense strand
ccaccgagcaggagaugca

SEQ ID NO: 13014 - RNA, 19 nt, Homo sapiens
  misc_RNA (1)...(19): siRNA sense strand
acauaacccagauagaaga

SEQ ID NO: 13015 - RNA, 19 nt, Homo sapiens
  misc_RNA (1)...(19): siRNA sense strand
uggaagccguggagaguac

SEQ ID NO: 13016 - RNA, 19 nt, Homo sapiens
  misc_RNA (1)...(19): siRNA sense strand
gccaagaauguuuaaagca

SEQ ID NO: 13017 - RNA, 19 nt, Homo sapiens
  misc_RNA (1)...(19): siRNA sense strand
gcagcuggcaaucaagaag

SEQ ID NO: 13018 - RNA, 19 nt, Homo sapiens
  misc_RNA (1)...(19): siRNA sense strand
caacagggucuggaguauc

SEQ ID NO: 13019 - RNA, 19 nt, Homo sapiens
  misc_RNA (1)...(19): siRNA sense strand
gcgcuggccaagaaauuca

SEQ ID NO: 13020 - RNA, 19 nt, Homo sapiens
  misc_RNA (1)...(19): siRNA sense strand
uuaaagcagcuggcaauca

SEQ ID NO: 13021 - RNA, 19 nt, Homo sapiens
  misc_RNA (1)...(19): siRNA sense strand
gaggaagcgcuggccaaga

SEQ ID NO: 13022 - RNA, 19 nt, Homo sapiens
  misc_RNA (1)...(19): siRNA sense strand
cauuacagacgccauugga

SEQ ID NO: 13023 - RNA, 19 nt, Homo sapiens
  misc_RNA (1)...(19): siRNA sense strand
gaacucagauuacuacuug

SEQ ID NO: 13024 - RNA, 19 nt, Homo sapiens
  misc_RNA (1)...(19): siRNA sense strand
gccaagaaauucauugaua

SEQ ID NO: 13025 - RNA, 19 nt, Homo sapiens
  misc_RNA (1)...(19): siRNA sense strand
uaaagcagcuggcaaucaa

SEQ ID NO: 13026 - RNA, 19 nt, Homo sapiens
  misc_RNA (1)...(19): siRNA sense strand
ccgagaagcucaaggcuaa

SEQ ID NO: 13027 - RNA, 19 nt, Homo sapiens
  misc_RNA (1)...(19): siRNA sense strand
caacauaacccagauagaa

SEQ ID NO: 13028 - RNA, 19 nt, Homo sapiens
  misc_RNA (1)...(19): siRNA sense strand
gcagcacauugacaacaua

SEQ ID NO: 13029 - RNA, 19 nt, Homo sapiens
  misc_RNA (1)...(19): siRNA sense strand
gagagcaacuugacaucau

SEQ ID NO: 13030 - RNA, 19 nt, Homo sapiens
  misc_RNA (1)...(19): siRNA sense strand
gaaacucagccaagaaugu

SEQ ID NO: 13031 - RNA, 19 nt, Homo sapiens
  misc_RNA (1)...(19): siRNA sense strand
ugaaugaucucuccaacag

SEQ ID NO: 13032 - RNA, 19 nt, Homo sapiens
  misc_RNA (1)...(19): siRNA sense strand
aggaagcgcuggccaagaa

SEQ ID NO: 13033 - RNA, 19 nt, Homo sapiens
  misc_RNA (1)...(19): siRNA sense strand
caacuugacaucaugaaug

SEQ ID NO: 13034 - RNA, 19 nt, Homo sapiens
  misc_RNA (1)...(19): siRNA sense strand
gcagaaacucagccaagaa

SEQ ID NO: 13035 - RNA, 19 nt, Homo sapiens
  misc_RNA (1)...(19): siRNA sense strand
uccagaggcuucaggcaua

SEQ ID NO: 13036 - RNA, 19 nt, Homo sapiens
  misc_RNA (1)...(19): siRNA sense strand
gauuacuacuugacgaaga

SEQ ID NO: 13037 - RNA, 19 nt, Homo sapiens
  misc_RNA (1)...(19): siRNA sense strand
gcagagagcaacuugacau

SEQ ID NO: 13038 - RNA, 19 nt, Homo sapiens
  misc_RNA (1)...(19): siRNA sense strand
gcuaaugcagagucaagua

SEQ ID NO: 13039 - RNA, 19 nt, Homo sapiens
  misc_RNA (1)...(19): siRNA sense strand
agaagcagcagcacauuga

SEQ ID NO: 13040 - RNA, 19 nt, Homo sapiens
  misc_RNA (1)...(19): siRNA sense strand
guacauuacagacgccauu

SEQ ID NO: 13041 - RNA, 19 nt, Homo sapiens
  misc_RNA (1)...(19): siRNA sense strand
ccaacagggucuggaguau

SEQ ID NO: 13042 - RNA, 19 nt, Homo sapiens
  misc_RNA (1)...(19): siRNA sense strand
uagaagaugccaccgagaa

SEQ ID NO: 13043 - RNA, 19 nt, Homo sapiens
  misc_RNA (1)...(19): siRNA sense strand
aacagggucuggaguauca

SEQ ID NO: 13044 - RNA, 19 nt, Homo sapiens
  misc_RNA (1)...(19): siRNA sense strand
cuaaugcagagucaaguaa

SEQ ID NO: 13045 - RNA, 19 nt, Homo sapiens
  misc_RNA (1)...(19): siRNA sense strand
gagaugcagcagcagauga

SEQ ID NO: 13046 - RNA, 19 nt, Homo sapiens
  misc_RNA (1)...(19): siRNA sense strand
cagaaacucagccaagaau

SEQ ID NO: 13047 - RNA, 19 nt, Homo sapiens
  misc_RNA (1)...(19): siRNA sense strand
ucaagaagcagcagcacau

SEQ ID NO: 13048 - RNA, 19 nt, Homo sapiens
  misc_RNA (1)...(19): siRNA sense strand
gagcaacuugacaucauga

SEQ ID NO: 13049 - RNA, 19 nt, Homo sapiens
  misc_RNA (1)...(19): siRNA sense strand
gagaagcucaaggcuaaug

SEQ ID NO: 13050 - RNA, 19 nt, Homo sapiens
  misc_RNA (1)...(19): siRNA sense strand
ugacaacauaacccagaua

SEQ ID NO: 13051 - RNA, 19 nt, Homo sapiens
  misc_RNA (1)...(19): siRNA sense strand
aaacucagccaagaauguu

SEQ ID NO: 13052 - RNA, 19 nt, Homo sapiens
  misc_RNA (1)...(19): siRNA sense strand
caaggcuaaugcagaguca

SEQ ID NO: 13053 - RNA, 19 nt, Homo sapiens
  misc_RNA (1)...(19): siRNA sense strand
gacaacauaacccagauag

SEQ ID NO: 13054 - RNA, 19 nt, Homo sapiens
  misc_RNA (1)...(19): siRNA sense strand
gcaacuugacaucaugaau

SEQ ID NO: 13055 - RNA, 19 nt, Homo sapiens
  misc_RNA (1)...(19): siRNA sense strand
uaaugcagagucaaguaaa

SEQ ID NO: 13056 - RNA, 19 nt, Homo sapiens
  misc_RNA (1)...(19): siRNA sense strand
caagaagcagcagcacauu

SEQ ID NO: 13057 - RNA, 19 nt, Homo sapiens
  misc_RNA (1)...(19): siRNA sense strand
cagccaagaauguuuaaag

SEQ ID NO: 13058 - RNA, 19 nt, Homo sapiens
  misc_RNA (1)...(19): siRNA sense strand
agagcaacuugacaucaug

SEQ ID NO: 13059 - RNA, 19 nt, Homo sapiens
  misc_RNA (1)...(19): siRNA sense strand
ugcagaaacucagccaaga

SEQ ID NO: 13060 - RNA, 19 nt, Homo sapiens
  misc_RNA (1)...(19): siRNA sense strand
cagcacauugacaacauaa

SEQ ID NO: 13061 - RNA, 19 nt, Homo sapiens
  misc_RNA (1)...(19): siRNA sense strand
guggagaguacauuacaga

SEQ ID NO: 13062 - RNA, 19 nt, Homo sapiens
  misc_RNA (1)...(19): siRNA sense strand
acucagccaagaauguuua

SEQ ID NO: 13063 - RNA, 19 nt, Homo sapiens
  misc_RNA (1)...(19): siRNA sense strand
gaagcgcuggccaagaaau

SEQ ID NO: 13064 - RNA, 19 nt, Homo sapiens
  misc_RNA (1)...(19): siRNA sense strand
guuuaaagcagcuggcaau

SEQ ID NO: 13065 - RNA, 19 nt, Homo sapiens
  misc_RNA (1)...(19): siRNA sense strand
cagauuacuacuugacgaa

SEQ ID NO: 13066 - RNA, 19 nt, Homo sapiens
  misc_RNA (1)...(19): siRNA sense strand
ggaagcgcuggccaagaaa

SEQ ID NO: 13067 - RNA, 19 nt, Homo sapiens
  misc_RNA (1)...(19): siRNA sense strand
gcacauugacaacauaacc

SEQ ID NO: 13068 - RNA, 19 nt, Homo sapiens
  misc_RNA (1)...(19): siRNA sense strand
ggagaugcagcagcagaug

SEQ ID NO: 13069 - RNA, 19 nt, Homo sapiens
  misc_RNA (1)...(19): siRNA sense strand
ccaccgagcaggagaugca

SEQ ID NO: 13070 - RNA, 19 nt, Homo sapiens
  misc_RNA (1)...(19): siRNA sense strand
acauaacccagauagaaga

SEQ ID NO: 13071 - RNA, 19 nt, Homo sapiens
  misc_RNA (1)...(19): siRNA sense strand
uggaagccguggagaguac

SEQ ID NO: 13072 - RNA, 19 nt, Homo sapiens
  misc_RNA (1)...(19): siRNA sense strand
gccaagaauguuuaaagca

SEQ ID NO: 13073 - RNA, 19 nt, Homo sapiens
  misc_RNA (1)...(19): siRNA sense strand
gcagcuggcaaucaagaag

SEQ ID NO: 13074 - RNA, 19 nt, Homo sapiens
  misc_RNA (1)...(19): siRNA sense strand
caacagggucuggaguauc

SEQ ID NO: 13075 - RNA, 19 nt, Homo sapiens
  misc_RNA (1)...(19): siRNA sense strand
gcgcuggccaagaaauuca

SEQ ID NO: 13076 - RNA, 19 nt, Homo sapiens
  misc_RNA (1)...(19): siRNA sense strand
uuaaagcagcuggcaauca

SEQ ID NO: 13077 - RNA, 19 nt, Homo sapiens
  misc_RNA (1)...(19): siRNA sense strand
gaggaagcgcuggccaaga

SEQ ID NO: 13078 - RNA, 19 nt, Homo sapiens
  misc_RNA (1)...(19): siRNA sense strand
cauuacagacgccauugga

SEQ ID NO: 13079 - RNA, 19 nt, Homo sapiens
  misc_RNA (1)...(19): siRNA sense strand
gaacucagauuacuacuug

SEQ ID NO: 13080 - RNA, 19 nt, Homo sapiens
  misc_RNA (1)...(19): siRNA sense strand
gccaagaaauucauugaua

SEQ ID NO: 13081 - RNA, 19 nt, Homo sapiens
  misc_RNA (1)...(19): siRNA sense strand
uaaagcagcuggcaaucaa

SEQ ID NO: 13082 - RNA, 19 nt, Homo sapiens
  misc_RNA (1)...(19): siRNA sense strand
ccgagaagcucaaggcuaa

SEQ ID NO: 13083 - RNA, 19 nt, Homo sapiens
  misc_RNA (1)...(19): siRNA sense strand
caacauaacccagauagaa

SEQ ID NO: 13084 - RNA, 19 nt, Homo sapiens
  misc_RNA (1)...(19): siRNA sense strand
gcagcacauugacaacaua

SEQ ID NO: 13085 - RNA, 19 nt, Homo sapiens
  misc_RNA (1)...(19): siRNA sense strand
gagagcaacuugacaucau

SEQ ID NO: 13086 - RNA, 19 nt, Homo sapiens
  misc_RNA (1)...(19): siRNA sense strand
gaaacucagccaagaaugu

SEQ ID NO: 13087 - RNA, 19 nt, Homo sapiens
  misc_RNA (1)...(19): siRNA sense strand
ugaaugaucucuccaacag

SEQ ID NO: 13088 - RNA, 19 nt, Homo sapiens
  misc_RNA (1)...(19): siRNA sense strand
aggaagcgcuggccaagaa

SEQ ID NO: 13089 - RNA, 19 nt, Homo sapiens
  misc_RNA (1)...(19): siRNA sense strand
caacuugacaucaugaaug

SEQ ID NO: 13090 - RNA, 19 nt, Homo sapiens
  misc_RNA (1)...(19): siRNA sense strand
gcagaaacucagccaagaa

SEQ ID NO: 13091 - RNA, 19 nt, Homo sapiens
  misc_RNA (1)...(19): siRNA sense strand
uccagaggcuucaggcaua

SEQ ID NO: 13092 - RNA, 19 nt, Homo sapiens
  misc_RNA (1)...(19): siRNA sense strand
gauuacuacuugacgaaga

SEQ ID NO: 13093 - RNA, 19 nt, Homo sapiens
  misc_RNA (1)...(19): siRNA sense strand
gcagagagcaacuugacau

SEQ ID NO: 13094 - RNA, 19 nt, Homo sapiens
  misc_RNA (1)...(19): siRNA sense strand
gcuaaugcagagucaagua

SEQ ID NO: 13095 - RNA, 19 nt, Homo sapiens
  misc_RNA (1)...(19): siRNA sense strand
agaagcagcagcacauuga

SEQ ID NO: 13096 - RNA, 19 nt, Homo sapiens
  misc_RNA (1)...(19): siRNA sense strand
guacauuacagacgccauu

SEQ ID NO: 13097 - RNA, 19 nt, Homo sapiens
  misc_RNA (1)...(19): siRNA sense strand
ccaacagggucuggaguau

SEQ ID NO: 13098 - RNA, 19 nt, Homo sapiens
  misc_RNA (1)...(19): siRNA sense strand
uagaagaugccaccgagaa

SEQ ID NO: 13099 - RNA, 19 nt, Homo sapiens
  misc_RNA (1)...(19): siRNA sense strand
aacagggucuggaguauca

SEQ ID NO: 13100 - RNA, 19 nt, Homo sapiens
  misc_RNA (1)...(19): siRNA sense strand
cuaaugcagagucaaguaa

SEQ ID NO: 13101 - RNA, 19 nt, Homo sapiens
  misc_RNA (1)...(19): siRNA sense strand
gagaugcagcagcagauga

SEQ ID NO: 13102 - RNA, 19 nt, Homo sapiens
  misc_RNA (1)...(19): siRNA sense strand
cagaaacucagccaagaau

SEQ ID NO: 13103 - RNA, 19 nt, Homo sapiens
  misc_RNA (1)...(19): siRNA sense strand
ucaagaagcagcagcacau

SEQ ID NO: 13104 - RNA, 19 nt, Homo sapiens
  misc_RNA (1)...(19): siRNA sense strand
gagcaacuugacaucauga

SEQ ID NO: 13105 - RNA, 19 nt, Homo sapiens
  misc_RNA (1)...(19): siRNA sense strand
gagaagcucaaggcuaaug

SEQ ID NO: 13106 - RNA, 19 nt, Homo sapiens
  misc_RNA (1)...(19): siRNA sense strand
ugacaacauaacccagaua

SEQ ID NO: 13107 - RNA, 19 nt, Homo sapiens
  misc_RNA (1)...(19): siRNA sense strand
aaacucagccaagaauguu

SEQ ID NO: 13108 - RNA, 19 nt, Homo sapiens
  misc_RNA (1)...(19): siRNA sense strand
caaggcuaaugcagaguca

SEQ ID NO: 13109 - RNA, 19 nt, Homo sapiens
  misc_RNA (1)...(19): siRNA sense strand
gacaacauaacccagauag

SEQ ID NO: 13110 - RNA, 19 nt, Homo sapiens
  misc_RNA (1)...(19): siRNA sense strand
gcaacuugacaucaugaau

SEQ ID NO: 13111 - RNA, 19 nt, Homo sapiens
  misc_RNA (1)...(19): siRNA sense strand
uaaugcagagucaaguaaa

SEQ ID NO: 13112 - RNA, 19 nt, Homo sapiens
  misc_RNA (1)...(19): siRNA sense strand
caagaagcagcagcacauu

SEQ ID NO: 13113 - RNA, 19 nt, Homo sapiens
  misc_RNA (1)...(19): siRNA sense strand
cagccaagaauguuuaaag

SEQ ID NO: 13114 - RNA, 19 nt, Homo sapiens
  misc_RNA (1)...(19): siRNA sense strand
agagcaacuugacaucaug

SEQ ID NO: 13115 - RNA, 19 nt, Homo sapiens
  misc_RNA (1)...(19): siRNA sense strand
ugcagaaacucagccaaga

SEQ ID NO: 13116 - RNA, 19 nt, Homo sapiens
  misc_RNA (1)...(19): siRNA sense strand
cagcacauugacaacauaa

SEQ ID NO: 13117 - RNA, 19 nt, Homo sapiens
  misc_RNA (1)...(19): siRNA sense strand
guggagaguacauuacaga

SEQ ID NO: 13118 - RNA, 19 nt, Homo sapiens
  misc_RNA (1)...(19): siRNA sense strand
acucagccaagaauguuua

SEQ ID NO: 13119 - RNA, 19 nt, Homo sapiens
  misc_RNA (1)...(19): siRNA sense strand
gaagcgcuggccaagaaau

SEQ ID NO: 13120 - RNA, 19 nt, Homo sapiens
  misc_RNA (1)...(19): siRNA sense strand
guuuaaagcagcuggcaau

SEQ ID NO: 13121 - RNA, 19 nt, Homo sapiens
  misc_RNA (1)...(19): siRNA sense strand
cagauuacuacuugacgaa

SEQ ID NO: 13122 - RNA, 19 nt, Homo sapiens
  misc_RNA (1)...(19): siRNA sense strand
ggaagcgcuggccaagaaa

SEQ ID NO: 13123 - RNA, 19 nt, Homo sapiens
  misc_RNA (1)...(19): siRNA sense strand
gcacauugacaacauaacc

SEQ ID NO: 13124 - RNA, 19 nt, Homo sapiens
  misc_RNA (1)...(19): siRNA sense strand
ggagaugcagcagcagaug

SEQ ID NO: 13125 - RNA, 19 nt, Homo sapiens
  misc_RNA (1)...(19): siRNA sense strand
ccaccgagcaggagaugca

SEQ ID NO: 13126 - RNA, 19 nt, Homo sapiens
  misc_RNA (1)...(19): siRNA sense strand
acauaacccagauagaaga

SEQ ID NO: 13127 - RNA, 19 nt, Homo sapiens
  misc_RNA (1)...(19): siRNA sense strand
uggaagccguggagaguac

SEQ ID NO: 13128 - RNA, 19 nt, Homo sapiens
  misc_RNA (1)...(19): siRNA sense strand
gccaagaauguuuaaagca

SEQ ID NO: 13129 - RNA, 19 nt, Homo sapiens
  misc_RNA (1)...(19): siRNA sense strand
gcagcuggcaaucaagaag

SEQ ID NO: 13130 - RNA, 19 nt, Homo sapiens
  misc_RNA (1)...(19): siRNA sense strand
caacagggucuggaguauc

SEQ ID NO: 13131 - RNA, 19 nt, Homo sapiens
  misc_RNA (1)...(19): siRNA sense strand
gcgcuggccaagaaauuca

SEQ ID NO: 13132 - RNA, 19 nt, Homo sapiens
  misc_RNA (1)...(19): siRNA sense strand
uuaaagcagcuggcaauca

SEQ ID NO: 13133 - RNA, 19 nt, Homo sapiens
  misc_RNA (1)...(19): siRNA sense strand
gaggaagcgcuggccaaga

SEQ ID NO: 13134 - RNA, 19 nt, Homo sapiens
  misc_RNA (1)...(19): siRNA sense strand
cauuacagacgccauugga

SEQ ID NO: 13135 - RNA, 19 nt, Homo sapiens
  misc_RNA (1)...(19): siRNA sense strand
gaacucagauuacuacuug

SEQ ID NO: 13136 - RNA, 19 nt, Homo sapiens
  misc_RNA (1)...(19): siRNA sense strand
gccaagaaauucauugaua

SEQ ID NO: 13137 - RNA, 19 nt, Homo sapiens
  misc_RNA (1)...(19): siRNA sense strand
uaaagcagcuggcaaucaa

SEQ ID NO: 13138 - RNA, 19 nt, Homo sapiens
  misc_RNA (1)...(19): siRNA sense strand
ccgagaagcucaaggcuaa

SEQ ID NO: 13139 - RNA, 19 nt, Homo sapiens
  misc_RNA (1)...(19): siRNA sense strand
caacauaacccagauagaa

SEQ ID NO: 13140 - RNA, 19 nt, Homo sapiens
  misc_RNA (1)...(19): siRNA sense strand
gcagcacauugacaacaua

SEQ ID NO: 13141 - RNA, 19 nt, Homo sapiens
  misc_RNA (1)...(19): siRNA sense strand
gagagcaacuugacaucau

SEQ ID NO: 13142 - RNA, 19 nt, Homo sapiens
  misc_RNA (1)...(19): siRNA sense strand
gaaacucagccaagaaugu

SEQ ID NO: 13143 - RNA, 19 nt, Homo sapiens
  misc_RNA (1)...(19): siRNA sense strand
ugaaugaucucuccaacag

SEQ ID NO: 13144 - RNA, 19 nt, Homo sapiens
  misc_RNA (1)...(19): siRNA sense strand
aggaagcgcuggccaagaa

SEQ ID NO: 13145 - RNA, 19 nt, Homo sapiens
  misc_RNA (1)...(19): siRNA sense strand
caacuugacaucaugaaug

SEQ ID NO: 13146 - RNA, 19 nt, Homo sapiens
  misc_RNA (1)...(19): siRNA sense strand
gcagaaacucagccaagaa

SEQ ID NO: 13147 - RNA, 19 nt, Homo sapiens
  misc_RNA (1)...(19): siRNA sense strand
uccagaggcuucaggcaua

SEQ ID NO: 13148 - RNA, 19 nt, Homo sapiens
  misc_RNA (1)...(19): siRNA sense strand
gauuacuacuugacgaaga

SEQ ID NO: 13149 - RNA, 19 nt, Homo sapiens
  misc_RNA (1)...(19): siRNA sense strand
gcagagagcaacuugacau

SEQ ID NO: 13150 - RNA, 19 nt, Homo sapiens
  misc_RNA (1)...(19): siRNA sense strand
gcuaaugcagagucaagua

SEQ ID NO: 13151 - RNA, 19 nt, Homo sapiens
  misc_RNA (1)...(19): siRNA sense strand
agaagcagcagcacauuga

SEQ ID NO: 13152 - RNA, 19 nt, Homo sapiens
  misc_RNA (1)...(19): siRNA sense strand
guacauuacagacgccauu

SEQ ID NO: 13153 - RNA, 19 nt, Homo sapiens
  misc_RNA (1)...(19): siRNA sense strand
ccaacagggucuggaguau

SEQ ID NO: 13154 - RNA, 19 nt, Homo sapiens
  misc_RNA (1)...(19): siRNA sense strand
uagaagaugccaccgagaa

SEQ ID NO: 13155 - RNA, 19 nt, Homo sapiens
  misc_RNA (1)...(19): siRNA sense strand
aacagggucuggaguauca

SEQ ID NO: 13156 - RNA, 19 nt, Homo sapiens
  misc_RNA (1)...(19): siRNA sense strand
cuaaugcagagucaaguaa

SEQ ID NO: 13157 - RNA, 19 nt, Homo sapiens
  misc_RNA (1)...(19): siRNA sense strand
gagaugcagcagcagauga

SEQ ID NO: 13158 - RNA, 19 nt, Homo sapiens
  misc_RNA (1)...(19): siRNA sense strand
cagaaacucagccaagaau

SEQ ID NO: 13159 - RNA, 19 nt, Homo sapiens
  misc_RNA (1)...(19): siRNA sense strand
ucaagaagcagcagcacau

SEQ ID NO: 13160 - RNA, 19 nt, Homo sapiens
  misc_RNA (1)...(19): siRNA sense strand
gagcaacuugacaucauga

SEQ ID NO: 13161 - RNA, 19 nt, Homo sapiens
  misc_RNA (1)...(19): siRNA sense strand
gagaagcucaaggcuaaug

SEQ ID NO: 13162 - RNA, 19 nt, Homo sapiens
  misc_RNA (1)...(19): siRNA sense strand
ugacaacauaacccagaua

SEQ ID NO: 13163 - RNA, 19 nt, Homo sapiens
  misc_RNA (1)...(19): siRNA sense strand
aaacucagccaagaauguu

SEQ ID NO: 13164 - RNA, 19 nt, Homo sapiens
  misc_RNA (1)...(19): siRNA sense strand
caaggcuaaugcagaguca

SEQ ID NO: 13165 - RNA, 19 nt, Homo sapiens
  misc_RNA (1)...(19): siRNA sense strand
gacaacauaacccagauag

SEQ ID NO: 13166 - RNA, 19 nt, Homo sapiens
  misc_RNA (1)...(19): siRNA sense strand
gcaacuugacaucaugaau

SEQ ID NO: 13167 - RNA, 19 nt, Homo sapiens
  misc_RNA (1)...(19): siRNA sense strand
uaaugcagagucaaguaaa

SEQ ID NO: 13168 - RNA, 19 nt, Homo sapiens
  misc_RNA (1)...(19): siRNA sense strand
caagaagcagcagcacauu

SEQ ID NO: 13169 - RNA, 19 nt, Homo sapiens
  misc_RNA (1)...(19): siRNA sense strand
cagccaagaauguuuaaag

SEQ ID NO: 13170 - RNA, 19 nt, Homo sapiens
  misc_RNA (1)...(19): siRNA sense strand
agagcaacuugacaucaug

SEQ ID NO: 13171 - RNA, 19 nt, Homo sapiens
  misc_RNA (1)...(19): siRNA sense strand
ugcagaaacucagccaaga

SEQ ID NO: 13172 - RNA, 19 nt, Homo sapiens
  misc_RNA (1)...(19): siRNA sense strand
cagcacauugacaacauaa

SEQ ID NO: 13173 - RNA, 19 nt, Homo sapiens
  misc_RNA (1)...(19): siRNA sense strand
guggagaguacauuacaga

SEQ ID NO: 13174 - RNA, 19 nt, Homo sapiens
  misc_RNA (1)...(19): siRNA sense strand
acucagccaagaauguuua

SEQ ID NO: 13175 - RNA, 19 nt, Homo sapiens
  misc_RNA (1)...(19): siRNA sense strand
gaagcgcuggccaagaaau

SEQ ID NO: 13176 - RNA, 19 nt, Homo sapiens
  misc_RNA (1)...(19): siRNA sense strand
guuuaaagcagcuggcaau

SEQ ID NO: 13177 - RNA, 19 nt, Homo sapiens
  misc_RNA (1)...(19): siRNA sense strand
cagauuacuacuugacgaa

SEQ ID NO: 13178 - RNA, 19 nt, Homo sapiens
  misc_RNA (1)...(19): siRNA sense strand
ggaagcgcuggccaagaaa

SEQ ID NO: 13179 - RNA, 19 nt, Homo sapiens
  misc_RNA (1)...(19): siRNA sense strand
gcacauugacaacauaacc

SEQ ID NO: 13180 - RNA, 19 nt, Homo sapiens
  misc_RNA (1)...(19): siRNA sense strand
ggagaugcagcagcagaug

SEQ ID NO: 13181 - RNA, 19 nt, Homo sapiens
  misc_RNA (1)...(19): siRNA sense strand
ccaccgagcaggagaugca

SEQ ID NO: 13182 - RNA, 19 nt, Homo sapiens
  misc_RNA (1)...(19): siRNA sense strand
acauaacccagauagaaga

SEQ ID NO: 13183 - RNA, 19 nt, Homo sapiens
  misc_RNA (1)...(19): siRNA sense strand
uggaagccguggagaguac

SEQ ID NO: 13184 - RNA, 19 nt, Homo sapiens
  misc_RNA (1)...(19): siRNA sense strand
gccaagaauguuuaaagca

SEQ ID NO: 13185 - RNA, 19 nt, Homo sapiens
  misc_RNA (1)...(19): siRNA sense strand
gcagcuggcaaucaagaag

SEQ ID NO: 13186 - RNA, 19 nt, Homo sapiens
  misc_RNA (1)...(19): siRNA sense strand
caacagggucuggaguauc

SEQ ID NO: 13187 - RNA, 19 nt, Homo sapiens
  misc_RNA (1)...(19): siRNA sense strand
gcgcuggccaagaaauuca

SEQ ID NO: 13188 - RNA, 19 nt, Homo sapiens
  misc_RNA (1)...(19): siRNA sense strand
uuaaagcagcuggcaauca

SEQ ID NO: 13189 - RNA, 19 nt, Homo sapiens
  misc_RNA (1)...(19): siRNA sense strand
gaggaagcgcuggccaaga

SEQ ID NO: 13190 - RNA, 19 nt, Homo sapiens
  misc_RNA (1)...(19): siRNA sense strand
cauuacagacgccauugga

SEQ ID NO: 13191 - RNA, 19 nt, Homo sapiens
  misc_RNA (1)...(19): siRNA sense strand
caagagcuccaauugcuau

SEQ ID NO: 13192 - RNA, 19 nt, Homo sapiens
  misc_RNA (1)...(19): siRNA sense strand
gacccaagagcuccaauug

SEQ ID NO: 13193 - RNA, 19 nt, Homo sapiens
  misc_RNA (1)...(19): siRNA sense strand
caaaaugucccucaaagug

SEQ ID NO: 13194 - RNA, 19 nt, Homo sapiens
  misc_RNA (1)...(19): siRNA sense strand
cccaagagcuccaauugcu

SEQ ID NO: 13195 - RNA, 19 nt, Homo sapiens
  misc_RNA (1)...(19): siRNA sense strand
caaagugugcauccucaug

SEQ ID NO: 13196 - RNA, 19 nt, Homo sapiens
  misc_RNA (1)...(19): siRNA sense strand
ccaagagcuccaauugcua

SEQ ID NO: 13197 - RNA, 19 nt, Homo sapiens
  misc_RNA (1)...(19): siRNA sense strand
gcaagcaggcgaaucuuaa

SEQ ID NO: 13198 - RNA, 19 nt, Homo sapiens
  misc_RNA (1)...(19): siRNA sense strand
uggcugagaucgagaaauu

SEQ ID NO: 13199 - RNA, 19 nt, Homo sapiens
  misc_RNA (1)...(19): siRNA sense strand
caaagaaacuaucgaacag

SEQ ID NO: 13200 - RNA, 19 nt, Homo sapiens
  misc_RNA (1)...(19): siRNA sense strand
ccaaagaaacuaucgaaca

SEQ ID NO: 13201 - RNA, 19 nt, Homo sapiens
  misc_RNA (1)...(19): siRNA sense strand
agacagaaacgcaagagaa

SEQ ID NO: 13202 - RNA, 19 nt, Homo sapiens
  misc_RNA (1)...(19): siRNA sense strand
cagaaacgcaagagaagaa

SEQ ID NO: 13203 - RNA, 19 nt, Homo sapiens
  misc_RNA (1)...(19): siRNA sense strand
ggcaagcaggcgaaucuua

SEQ ID NO: 13204 - RNA, 19 nt, Homo sapiens
  misc_RNA (1)...(19): siRNA sense strand
gcaagagaagaauccauug

SEQ ID NO: 13205 - RNA, 19 nt, Homo sapiens
  misc_RNA (1)...(19): siRNA sense strand
aaacugaagaagacagaaa

SEQ ID NO: 13206 - RNA, 19 nt, Homo sapiens
  misc_RNA (1)...(19): siRNA sense strand
caagagaagaauccauugu

SEQ ID NO: 13207 - RNA, 19 nt, Homo sapiens
  misc_RNA (1)...(19): siRNA sense strand
agagaagaauccauugucu

SEQ ID NO: 13208 - RNA, 19 nt, Homo sapiens
  misc_RNA (1)...(19): siRNA sense strand
gacagaaacgcaagagaag

SEQ ID NO: 13209 - RNA, 19 nt, Homo sapiens
  misc_RNA (1)...(19): siRNA sense strand
gaggcaagcaggcgaaucu

SEQ ID NO: 13210 - RNA, 19 nt, Homo sapiens
  misc_RNA (1)...(19): siRNA sense strand
agucgaaacugaagaagac

SEQ ID NO: 13211 - RNA, 19 nt, Homo sapiens
  misc_RNA (1)...(19): siRNA sense strand
cgcaagagaagaauccauu

SEQ ID NO: 13212 - RNA, 19 nt, Homo sapiens
  misc_RNA (1)...(19): siRNA sense strand
gaaacgcaagagaagaauc

SEQ ID NO: 13213 - RNA, 19 nt, Homo sapiens
  misc_RNA (1)...(19): siRNA sense strand
cgaaacugaagaagacaga

SEQ ID NO: 13214 - RNA, 19 nt, Homo sapiens
  misc_RNA (1)...(19): siRNA sense strand
gauaagucgaaacugaaga

SEQ ID NO: 13215 - RNA, 19 nt, Homo sapiens
  misc_RNA (1)...(19): siRNA sense strand
gaagacagaaacgcaagag

SEQ ID NO: 13216 - RNA, 19 nt, Homo sapiens
  misc_RNA (1)...(19): siRNA sense strand
gaaacugaagaagacagaa

SEQ ID NO: 13217 - RNA, 19 nt, Homo sapiens
  misc_RNA (1)...(19): siRNA sense strand
agaauccauugucuuccaa

SEQ ID NO: 13218 - RNA, 19 nt, Homo sapiens
  misc_RNA (1)...(19): siRNA sense strand
gaauccauugucuuccaaa

SEQ ID NO: 13219 - RNA, 19 nt, Homo sapiens
  misc_RNA (1)...(19): siRNA sense strand
ucacugaaauggcuuuauu

SEQ ID NO: 13220 - RNA, 19 nt, Homo sapiens
  misc_RNA (1)...(19): siRNA sense strand
caguggagcuggccgguuu

SEQ ID NO: 13221 - RNA, 19 nt, Homo sapiens
  misc_RNA (1)...(19): siRNA sense strand
gcccuguccuucuucauau

SEQ ID NO: 13222 - RNA, 19 nt, Homo sapiens
  misc_RNA (1)...(19): siRNA sense strand
gggagugcacuacguauug

SEQ ID NO: 13223 - RNA, 19 nt, Homo sapiens
  misc_RNA (1)...(19): siRNA sense strand
ggcccuguccuucuucaua

SEQ ID NO: 13224 - RNA, 19 nt, Homo sapiens
  misc_RNA (1)...(19): siRNA sense strand
ggagugcacuacguauugg

SEQ ID NO: 13225 - RNA, 19 nt, Homo sapiens
  misc_RNA (1)...(19): siRNA sense strand
gcuggccgguuuccucuca

SEQ ID NO: 13226 - RNA, 19 nt, Homo sapiens
  misc_RNA (1)...(19): siRNA sense strand
guugggagugcacuacgua

SEQ ID NO: 13227 - RNA, 19 nt, Homo sapiens
  misc_RNA (1)...(19): siRNA sense strand
cagagccucaucuccauug

SEQ ID NO: 13228 - RNA, 19 nt, Homo sapiens
  misc_RNA (1)...(19): siRNA sense strand
ggucgucaucaccuuauuc

SEQ ID NO: 13229 - RNA, 19 nt, Homo sapiens
  misc_RNA (1)...(19): siRNA sense strand
ccuuccagcugucacugaa

SEQ ID NO: 13230 - RNA, 19 nt, Homo sapiens
  misc_RNA (1)...(19): siRNA sense strand
gcacuacguauugguacau

SEQ ID NO: 13231 - RNA, 19 nt, Homo sapiens
  misc_RNA (1)...(19): siRNA sense strand
ucacugaaauggcuuuauu

SEQ ID NO: 13232 - RNA, 19 nt, Homo sapiens
  misc_RNA (1)...(19): siRNA sense strand
caguggagcuggccgguuu

SEQ ID NO: 13233 - RNA, 19 nt, Homo sapiens
  misc_RNA (1)...(19): siRNA sense strand
gcccuguccuucuucauau

SEQ ID NO: 13234 - RNA, 19 nt, Homo sapiens
  misc_RNA (1)...(19): siRNA sense strand
gggagugcacuacguauug

SEQ ID NO: 13235 - RNA, 19 nt, Homo sapiens
  misc_RNA (1)...(19): siRNA sense strand
ggcccuguccuucuucaua

SEQ ID NO: 13236 - RNA, 19 nt, Homo sapiens
  misc_RNA (1)...(19): siRNA sense strand
ggagugcacuacguauugg

SEQ ID NO: 13237 - RNA, 19 nt, Homo sapiens
  misc_RNA (1)...(19): siRNA sense strand
gcuggccgguuuccucuca

SEQ ID NO: 13238 - RNA, 19 nt, Homo sapiens
  misc_RNA (1)...(19): siRNA sense strand
guugggagugcacuacgua

SEQ ID NO: 13239 - RNA, 19 nt, Homo sapiens
  misc_RNA (1)...(19): siRNA sense strand
cagagccucaucuccauug

SEQ ID NO: 13240 - RNA, 19 nt, Homo sapiens
  misc_RNA (1)...(19): siRNA sense strand
ggucgucaucaccuuauuc

SEQ ID NO: 13241 - RNA, 19 nt, Homo sapiens
  misc_RNA (1)...(19): siRNA sense strand
ccuuccagcugucacugaa

SEQ ID NO: 13242 - RNA, 19 nt, Homo sapiens
  misc_RNA (1)...(19): siRNA sense strand
gcacuacguauugguacau

SEQ ID NO: 13243 - RNA, 19 nt, Homo sapiens
  misc_RNA (1)...(19): siRNA sense strand
ucacugaaauggcuuuauu

SEQ ID NO: 13244 - RNA, 19 nt, Homo sapiens
  misc_RNA (1)...(19): siRNA sense strand
caguggagcuggccgguuu

SEQ ID NO: 13245 - RNA, 19 nt, Homo sapiens
  misc_RNA (1)...(19): siRNA sense strand
gcccuguccuucuucauau

SEQ ID NO: 13246 - RNA, 19 nt, Homo sapiens
  misc_RNA (1)...(19): siRNA sense strand
gggagugcacuacguauug

SEQ ID NO: 13247 - RNA, 19 nt, Homo sapiens
  misc_RNA (1)...(19): siRNA sense strand
ggcccuguccuucuucaua

SEQ ID NO: 13248 - RNA, 19 nt, Homo sapiens
  misc_RNA (1)...(19): siRNA sense strand
ggagugcacuacguauugg

SEQ ID NO: 13249 - RNA, 19 nt, Homo sapiens
  misc_RNA (1)...(19): siRNA sense strand
gcuggccgguuuccucuca

SEQ ID NO: 13250 - RNA, 19 nt, Homo sapiens
  misc_RNA (1)...(19): siRNA sense strand
guugggagugcacuacgua

SEQ ID NO: 13251 - RNA, 19 nt, Homo sapiens
  misc_RNA (1)...(19): siRNA sense strand
cagagccucaucuccauug

SEQ ID NO: 13252 - RNA, 19 nt, Homo sapiens
  misc_RNA (1)...(19): siRNA sense strand
ggucgucaucaccuuauuc

SEQ ID NO: 13253 - RNA, 19 nt, Homo sapiens
  misc_RNA (1)...(19): siRNA sense strand
ccuuccagcugucacugaa

SEQ ID NO: 13254 - RNA, 19 nt, Homo sapiens
  misc_RNA (1)...(19): siRNA sense strand
gcacuacguauugguacau

SEQ ID NO: 13255 - RNA, 19 nt, Homo sapiens
  misc_RNA (1)...(19): siRNA sense strand
ucacugaaauggcuuuauu

SEQ ID NO: 13256 - RNA, 19 nt, Homo sapiens
  misc_RNA (1)...(19): siRNA sense strand
caguggagcuggccgguuu

SEQ ID NO: 13257 - RNA, 19 nt, Homo sapiens
  misc_RNA (1)...(19): siRNA sense strand
gcccuguccuucuucauau

SEQ ID NO: 13258 - RNA, 19 nt, Homo sapiens
  misc_RNA (1)...(19): siRNA sense strand
gggagugcacuacguauug

SEQ ID NO: 13259 - RNA, 19 nt, Homo sapiens
  misc_RNA (1)...(19): siRNA sense strand
ggcccuguccuucuucaua

SEQ ID NO: 13260 - RNA, 19 nt, Homo sapiens
  misc_RNA (1)...(19): siRNA sense strand
ggagugcacuacguauugg

SEQ ID NO: 13261 - RNA, 19 nt, Homo sapiens
  misc_RNA (1)...(19): siRNA sense strand
gcuggccgguuuccucuca

SEQ ID NO: 13262 - RNA, 19 nt, Homo sapiens
  misc_RNA (1)...(19): siRNA sense strand
guugggagugcacuacgua

SEQ ID NO: 13263 - RNA, 19 nt, Homo sapiens
  misc_RNA (1)...(19): siRNA sense strand
cagagccucaucuccauug

SEQ ID NO: 13264 - RNA, 19 nt, Homo sapiens
  misc_RNA (1)...(19): siRNA sense strand
ggucgucaucaccuuauuc

SEQ ID NO: 13265 - RNA, 19 nt, Homo sapiens
  misc_RNA (1)...(19): siRNA sense strand
ccuuccagcugucacugaa

SEQ ID NO: 13266 - RNA, 19 nt, Homo sapiens
  misc_RNA (1)...(19): siRNA sense strand
gcacuacguauugguacau

SEQ ID NO: 13267 - RNA, 19 nt, Homo sapiens
  misc_RNA (1)...(19): siRNA sense strand
ggacaaguacuuuaugaua

SEQ ID NO: 13268 - RNA, 19 nt, Homo sapiens
  misc_RNA (1)...(19): siRNA sense strand
gacaaguacuuuaugauag

SEQ ID NO: 13269 - RNA, 19 nt, Homo sapiens
  misc_RNA (1)...(19): siRNA sense strand
ggacgaaucacugcaguuu

SEQ ID NO: 13270 - RNA, 19 nt, Homo sapiens
  misc_RNA (1)...(19): siRNA sense strand
gaagaagauccuugacauu

SEQ ID NO: 13271 - RNA, 19 nt, Homo sapiens
  misc_RNA (1)...(19): siRNA sense strand
acgaaucacugcaguuuaa

SEQ ID NO: 13272 - RNA, 19 nt, Homo sapiens
  misc_RNA (1)...(19): siRNA sense strand
caagcagucugugcacaua

SEQ ID NO: 13273 - RNA, 19 nt, Homo sapiens
  misc_RNA (1)...(19): siRNA sense strand
caggacaaguacuuuauga

SEQ ID NO: 13274 - RNA, 19 nt, Homo sapiens
  misc_RNA (1)...(19): siRNA sense strand
gauauucagccgucuagaa

SEQ ID NO: 13275 - RNA, 19 nt, Homo sapiens
  misc_RNA (1)...(19): siRNA sense strand
agaagaagauccuugacau

SEQ ID NO: 13276 - RNA, 19 nt, Homo sapiens
  misc_RNA (1)...(19): siRNA sense strand
cgaaauccaagcaagcaua

SEQ ID NO: 13277 - RNA, 19 nt, Homo sapiens
  misc_RNA (1)...(19): siRNA sense strand
ggguugaccaguuaaagua

SEQ ID NO: 13278 - RNA, 19 nt, Homo sapiens
  misc_RNA (1)...(19): siRNA sense strand
agacugcgcucagaaacuu

SEQ ID NO: 13279 - RNA, 19 nt, Homo sapiens
  misc_RNA (1)...(19): siRNA sense strand
uaacuccucccuccagaaa

SEQ ID NO: 13280 - RNA, 19 nt, Homo sapiens
  misc_RNA (1)...(19): siRNA sense strand
uuagaugggcacaauauuu

SEQ ID NO: 13281 - RNA, 19 nt, Homo sapiens
  misc_RNA (1)...(19): siRNA sense strand
gaaauccaagcaagcauag

SEQ ID NO: 13282 - RNA, 19 nt, Homo sapiens
  misc_RNA (1)...(19): siRNA sense strand
aagaagauccuugacauug

SEQ ID NO: 13283 - RNA, 19 nt, Homo sapiens
  misc_RNA (1)...(19): siRNA sense strand
gcaagcauagaccagauau

SEQ ID NO: 13284 - RNA, 19 nt, Homo sapiens
  misc_RNA (1)...(19): siRNA sense strand
gacgaaucacugcaguuua

SEQ ID NO: 13285 - RNA, 19 nt, Homo sapiens
  misc_RNA (1)...(19): siRNA sense strand
aagcauagaccagauauuc

SEQ ID NO: 13286 - RNA, 19 nt, Homo sapiens
  misc_RNA (1)...(19): siRNA sense strand
acaagcagguccacgagau

SEQ ID NO: 13287 - RNA, 19 nt, Homo sapiens
  misc_RNA (1)...(19): siRNA sense strand
gcacauaguagaaaacgaa

SEQ ID NO: 13288 - RNA, 19 nt, Homo sapiens
  misc_RNA (1)...(19): siRNA sense strand
gggcuuuccaggacaagua

SEQ ID NO: 13289 - RNA, 19 nt, Homo sapiens
  misc_RNA (1)...(19): siRNA sense strand
ggagagacagcgagaagag

SEQ ID NO: 13290 - RNA, 19 nt, Homo sapiens
  misc_RNA (1)...(19): siRNA sense strand
ucuagaacgucuggagauu

SEQ ID NO: 13291 - RNA, 19 nt, Homo sapiens
  misc_RNA (1)...(19): siRNA sense strand
acaaguacuuuaugauagg

SEQ ID NO: 13292 - RNA, 19 nt, Homo sapiens
  misc_RNA (1)...(19): siRNA sense strand
cccagagacugaccuugaa

SEQ ID NO: 13293 - RNA, 19 nt, Homo sapiens
  misc_RNA (1)...(19): siRNA sense strand
uagaacgucuggagauuuu

SEQ ID NO: 13294 - RNA, 19 nt, Homo sapiens
  misc_RNA (1)...(19): siRNA sense strand
gcucagaaacuuccagcau

SEQ ID NO: 13295 - RNA, 19 nt, Homo sapiens
  misc_RNA (1)...(19): siRNA sense strand
uccacgagauccagucuug

SEQ ID NO: 13296 - RNA, 19 nt, Homo sapiens
  misc_RNA (1)...(19): siRNA sense strand
gcauagaccagauauucag

SEQ ID NO: 13297 - RNA, 19 nt, Homo sapiens
  misc_RNA (1)...(19): siRNA sense strand
gaaccuucaccacuaacga

SEQ ID NO: 13298 - RNA, 19 nt, Homo sapiens
  misc_RNA (1)...(19): siRNA sense strand
guugaccaguuaaaguaug

SEQ ID NO: 13299 - RNA, 19 nt, Homo sapiens
  misc_RNA (1)...(19): siRNA sense strand
cagaagaagauccuugaca

SEQ ID NO: 13300 - RNA, 19 nt, Homo sapiens
  misc_RNA (1)...(19): siRNA sense strand
gcagucugugcacauagua

SEQ ID NO: 13301 - RNA, 19 nt, Homo sapiens
  misc_RNA (1)...(19): siRNA sense strand
gcacaauauuuuagaugga

SEQ ID NO: 13302 - RNA, 19 nt, Homo sapiens
  misc_RNA (1)...(19): siRNA sense strand
ugacaccaccauaccaaug

SEQ ID NO: 13303 - RNA, 19 nt, Homo sapiens
  misc_RNA (1)...(19): siRNA sense strand
cuagaacgucuggagauuu

SEQ ID NO: 13304 - RNA, 19 nt, Homo sapiens
  misc_RNA (1)...(19): siRNA sense strand
agaagauccuugacauugc

SEQ ID NO: 13305 - RNA, 19 nt, Homo sapiens
  misc_RNA (1)...(19): siRNA sense strand
gggagcagcaggagagaca

SEQ ID NO: 13306 - RNA, 19 nt, Homo sapiens
  misc_RNA (1)...(19): siRNA sense strand
ccagauauucagccgucua

SEQ ID NO: 13307 - RNA, 19 nt, Homo sapiens
  misc_RNA (1)...(19): siRNA sense strand
gaaggggacucagaagaag

SEQ ID NO: 13308 - RNA, 19 nt, Homo sapiens
  misc_RNA (1)...(19): siRNA sense strand
aagcaagcauagaccagau

SEQ ID NO: 13309 - RNA, 19 nt, Homo sapiens
  misc_RNA (1)...(19): siRNA sense strand
uugaccaguuaaaguauga

SEQ ID NO: 13310 - RNA, 19 nt, Homo sapiens
  misc_RNA (1)...(19): siRNA sense strand
ccaggacaaguacuuuaug

SEQ ID NO: 13311 - RNA, 19 nt, Homo sapiens
  misc_RNA (1)...(19): siRNA sense strand
augcugggcuuguccaaca

SEQ ID NO: 13312 - RNA, 19 nt, Homo sapiens
  misc_RNA (1)...(19): siRNA sense strand
ccaguuaaaguaugauguc

SEQ ID NO: 13313 - RNA, 19 nt, Homo sapiens
  misc_RNA (1)...(19): siRNA sense strand
cgacucugacaccaccaua

SEQ ID NO: 13314 - RNA, 19 nt, Homo sapiens
  misc_RNA (1)...(19): siRNA sense strand
uagaugggcacaauauuuu

SEQ ID NO: 13315 - RNA, 19 nt, Homo sapiens
  misc_RNA (1)...(19): siRNA sense strand
acuucggguugaccaguua

SEQ ID NO: 13316 - RNA, 19 nt, Homo sapiens
  misc_RNA (1)...(19): siRNA sense strand
acccagagacugaccuuga

SEQ ID NO: 13317 - RNA, 19 nt, Homo sapiens
  misc_RNA (1)...(19): siRNA sense strand
cugaggacccagagacuga

SEQ ID NO: 13318 - RNA, 19 nt, Homo sapiens
  misc_RNA (1)...(19): siRNA sense strand
caggagagacagcgagaag

SEQ ID NO: 13319 - RNA, 19 nt, Homo sapiens
  misc_RNA (1)...(19): siRNA sense strand
ccaacaugcugggcuuguc

SEQ ID NO: 13320 - RNA, 19 nt, Homo sapiens
  misc_RNA (1)...(19): siRNA sense strand
ggacccagagacugaccuu

SEQ ID NO: 13321 - RNA, 19 nt, Homo sapiens
  misc_RNA (1)...(19): siRNA sense strand
ggacaaguacuuuaugaua

SEQ ID NO: 13322 - RNA, 19 nt, Homo sapiens
  misc_RNA (1)...(19): siRNA sense strand
gacaaguacuuuaugauag

SEQ ID NO: 13323 - RNA, 19 nt, Homo sapiens
  misc_RNA (1)...(19): siRNA sense strand
ggacgaaucacugcaguuu

SEQ ID NO: 13324 - RNA, 19 nt, Homo sapiens
  misc_RNA (1)...(19): siRNA sense strand
gaagaagauccuugacauu

SEQ ID NO: 13325 - RNA, 19 nt, Homo sapiens
  misc_RNA (1)...(19): siRNA sense strand
acgaaucacugcaguuuaa

SEQ ID NO: 13326 - RNA, 19 nt, Homo sapiens
  misc_RNA (1)...(19): siRNA sense strand
caagcagucugugcacaua

SEQ ID NO: 13327 - RNA, 19 nt, Homo sapiens
  misc_RNA (1)...(19): siRNA sense strand
caggacaaguacuuuauga

SEQ ID NO: 13328 - RNA, 19 nt, Homo sapiens
  misc_RNA (1)...(19): siRNA sense strand
gauauucagccgucuagaa

SEQ ID NO: 13329 - RNA, 19 nt, Homo sapiens
  misc_RNA (1)...(19): siRNA sense strand
agaagaagauccuugacau

SEQ ID NO: 13330 - RNA, 19 nt, Homo sapiens
  misc_RNA (1)...(19): siRNA sense strand
cgaaauccaagcaagcaua

SEQ ID NO: 13331 - RNA, 19 nt, Homo sapiens
  misc_RNA (1)...(19): siRNA sense strand
ggguugaccaguuaaagua

SEQ ID NO: 13332 - RNA, 19 nt, Homo sapiens
  misc_RNA (1)...(19): siRNA sense strand
agacugcgcucagaaacuu

SEQ ID NO: 13333 - RNA, 19 nt, Homo sapiens
  misc_RNA (1)...(19): siRNA sense strand
uaacuccucccuccagaaa

SEQ ID NO: 13334 - RNA, 19 nt, Homo sapiens
  misc_RNA (1)...(19): siRNA sense strand
uuagaugggcacaauauuu

SEQ ID NO: 13335 - RNA, 19 nt, Homo sapiens
  misc_RNA (1)...(19): siRNA sense strand
gaaauccaagcaagcauag

SEQ ID NO: 13336 - RNA, 19 nt, Homo sapiens
  misc_RNA (1)...(19): siRNA sense strand
aagaagauccuugacauug

SEQ ID NO: 13337 - RNA, 19 nt, Homo sapiens
  misc_RNA (1)...(19): siRNA sense strand
gcaagcauagaccagauau

SEQ ID NO: 13338 - RNA, 19 nt, Homo sapiens
  misc_RNA (1)...(19): siRNA sense strand
gacgaaucacugcaguuua

SEQ ID NO: 13339 - RNA, 19 nt, Homo sapiens
  misc_RNA (1)...(19): siRNA sense strand
aagcauagaccagauauuc

SEQ ID NO: 13340 - RNA, 19 nt, Homo sapiens
  misc_RNA (1)...(19): siRNA sense strand
acaagcagguccacgagau

SEQ ID NO: 13341 - RNA, 19 nt, Homo sapiens
  misc_RNA (1)...(19): siRNA sense strand
gcacauaguagaaaacgaa

SEQ ID NO: 13342 - RNA, 19 nt, Homo sapiens
  misc_RNA (1)...(19): siRNA sense strand
gggcuuuccaggacaagua

SEQ ID NO: 13343 - RNA, 19 nt, Homo sapiens
  misc_RNA (1)...(19): siRNA sense strand
ggagagacagcgagaagag

SEQ ID NO: 13344 - RNA, 19 nt, Homo sapiens
  misc_RNA (1)...(19): siRNA sense strand
ucuagaacgucuggagauu

SEQ ID NO: 13345 - RNA, 19 nt, Homo sapiens
  misc_RNA (1)...(19): siRNA sense strand
acaaguacuuuaugauagg

SEQ ID NO: 13346 - RNA, 19 nt, Homo sapiens
  misc_RNA (1)...(19): siRNA sense strand
cccagagacugaccuugaa

SEQ ID NO: 13347 - RNA, 19 nt, Homo sapiens
  misc_RNA (1)...(19): siRNA sense strand
uagaacgucuggagauuuu

SEQ ID NO: 13348 - RNA, 19 nt, Homo sapiens
  misc_RNA (1)...(19): siRNA sense strand
gcucagaaacuuccagcau

SEQ ID NO: 13349 - RNA, 19 nt, Homo sapiens
  misc_RNA (1)...(19): siRNA sense strand
uccacgagauccagucuug

SEQ ID NO: 13350 - RNA, 19 nt, Homo sapiens
  misc_RNA (1)...(19): siRNA sense strand
gcauagaccagauauucag

SEQ ID NO: 13351 - RNA, 19 nt, Homo sapiens
  misc_RNA (1)...(19): siRNA sense strand
gaaccuucaccacuaacga

SEQ ID NO: 13352 - RNA, 19 nt, Homo sapiens
  misc_RNA (1)...(19): siRNA sense strand
guugaccaguuaaaguaug

SEQ ID NO: 13353 - RNA, 19 nt, Homo sapiens
  misc_RNA (1)...(19): siRNA sense strand
cagaagaagauccuugaca

SEQ ID NO: 13354 - RNA, 19 nt, Homo sapiens
  misc_RNA (1)...(19): siRNA sense strand
gcagucugugcacauagua

SEQ ID NO: 13355 - RNA, 19 nt, Homo sapiens
  misc_RNA (1)...(19): siRNA sense strand
gcacaauauuuuagaugga

SEQ ID NO: 13356 - RNA, 19 nt, Homo sapiens
  misc_RNA (1)...(19): siRNA sense strand
ugacaccaccauaccaaug

SEQ ID NO: 13357 - RNA, 19 nt, Homo sapiens
  misc_RNA (1)...(19): siRNA sense strand
cuagaacgucuggagauuu

SEQ ID NO: 13358 - RNA, 19 nt, Homo sapiens
  misc_RNA (1)...(19): siRNA sense strand
agaagauccuugacauugc

SEQ ID NO: 13359 - RNA, 19 nt, Homo sapiens
  misc_RNA (1)...(19): siRNA sense strand
gggagcagcaggagagaca

SEQ ID NO: 13360 - RNA, 19 nt, Homo sapiens
  misc_RNA (1)...(19): siRNA sense strand
ccagauauucagccgucua

SEQ ID NO: 13361 - RNA, 19 nt, Homo sapiens
  misc_RNA (1)...(19): siRNA sense strand
gaaggggacucagaagaag

SEQ ID NO: 13362 - RNA, 19 nt, Homo sapiens
  misc_RNA (1)...(19): siRNA sense strand
aagcaagcauagaccagau

SEQ ID NO: 13363 - RNA, 19 nt, Homo sapiens
  misc_RNA (1)...(19): siRNA sense strand
uugaccaguuaaaguauga

SEQ ID NO: 13364 - RNA, 19 nt, Homo sapiens
  misc_RNA (1)...(19): siRNA sense strand
ccaggacaaguacuuuaug

SEQ ID NO: 13365 - RNA, 19 nt, Homo sapiens
  misc_RNA (1)...(19): siRNA sense strand
augcugggcuuguccaaca

SEQ ID NO: 13366 - RNA, 19 nt, Homo sapiens
  misc_RNA (1)...(19): siRNA sense strand
ccaguuaaaguaugauguc

SEQ ID NO: 13367 - RNA, 19 nt, Homo sapiens
  misc_RNA (1)...(19): siRNA sense strand
cgacucugacaccaccaua

SEQ ID NO: 13368 - RNA, 19 nt, Homo sapiens
  misc_RNA (1)...(19): siRNA sense strand
uagaugggcacaauauuuu

SEQ ID NO: 13369 - RNA, 19 nt, Homo sapiens
  misc_RNA (1)...(19): siRNA sense strand
acuucggguugaccaguua

SEQ ID NO: 13370 - RNA, 19 nt, Homo sapiens
  misc_RNA (1)...(19): siRNA sense strand
acccagagacugaccuuga

SEQ ID NO: 13371 - RNA, 19 nt, Homo sapiens
  misc_RNA (1)...(19): siRNA sense strand
cugaggacccagagacuga

SEQ ID NO: 13372 - RNA, 19 nt, Homo sapiens
  misc_RNA (1)...(19): siRNA sense strand
caggagagacagcgagaag

SEQ ID NO: 13373 - RNA, 19 nt, Homo sapiens
  misc_RNA (1)...(19): siRNA sense strand
ccaacaugcugggcuuguc

SEQ ID NO: 13374 - RNA, 19 nt, Homo sapiens
  misc_RNA (1)...(19): siRNA sense strand
ggacccagagacugaccuu

SEQ ID NO: 13375 - RNA, 19 nt, Homo sapiens
  misc_RNA (1)...(19): siRNA sense strand
gaaguaaccugugucauuu

SEQ ID NO: 13376 - RNA, 19 nt, Homo sapiens
  misc_RNA (1)...(19): siRNA sense strand
caagugagaugucaagaaa

SEQ ID NO: 13377 - RNA, 19 nt, Homo sapiens
  misc_RNA (1)...(19): siRNA sense strand
ucaaugggaugcaguaaua

SEQ ID NO: 13378 - RNA, 19 nt, Homo sapiens
  misc_RNA (1)...(19): siRNA sense strand
gaaagccacuucaauagga

SEQ ID NO: 13379 - RNA, 19 nt, Homo sapiens
  misc_RNA (1)...(19): siRNA sense strand
gaagccaucucagcaauaa

SEQ ID NO: 13380 - RNA, 19 nt, Homo sapiens
  misc_RNA (1)...(19): siRNA sense strand
caucuccacugauucauua

SEQ ID NO: 13381 - RNA, 19 nt, Homo sapiens
  misc_RNA (1)...(19): siRNA sense strand
gaguugccaucuauuaaua

SEQ ID NO: 13382 - RNA, 19 nt, Homo sapiens
  misc_RNA (1)...(19): siRNA sense strand
guacugcacugcugaaugu

SEQ ID NO: 13383 - RNA, 19 nt, Homo sapiens
  misc_RNA (1)...(19): siRNA sense strand
guacguauuucaagugaga

SEQ ID NO: 13384 - RNA, 19 nt, Homo sapiens
  misc_RNA (1)...(19): siRNA sense strand
gagcagguccuauauguug

SEQ ID NO: 13385 - RNA, 19 nt, Homo sapiens
  misc_RNA (1)...(19): siRNA sense strand
gcuguuauguugucaauuc

SEQ ID NO: 13386 - RNA, 19 nt, Homo sapiens
  misc_RNA (1)...(19): siRNA sense strand
uaucucaccucaagcuaua

SEQ ID NO: 13387 - RNA, 19 nt, Homo sapiens
  misc_RNA (1)...(19): siRNA sense strand
caaauucaccuggaugaua

SEQ ID NO: 13388 - RNA, 19 nt, Homo sapiens
  misc_RNA (1)...(19): siRNA sense strand
gaauuugucuccuguuugg

SEQ ID NO: 13389 - RNA, 19 nt, Homo sapiens
  misc_RNA (1)...(19): siRNA sense strand
gaaauuacuuccuuaacac

SEQ ID NO: 13390 - RNA, 19 nt, Homo sapiens
  misc_RNA (1)...(19): siRNA sense strand
ucucaacacuggauauaaa

SEQ ID NO: 13391 - RNA, 19 nt, Homo sapiens
  misc_RNA (1)...(19): siRNA sense strand
caacagcucggcuuuggua

SEQ ID NO: 13392 - RNA, 19 nt, Homo sapiens
  misc_RNA (1)...(19): siRNA sense strand
gaaauaaucccagguuaca

SEQ ID NO: 13393 - RNA, 19 nt, Homo sapiens
  misc_RNA (1)...(19): siRNA sense strand
gauacaaggcuacaacaaa

SEQ ID NO: 13394 - RNA, 19 nt, Homo sapiens
  misc_RNA (1)...(19): siRNA sense strand
ugaaguaaccugugucauu

SEQ ID NO: 13395 - RNA, 19 nt, Homo sapiens
  misc_RNA (1)...(19): siRNA sense strand
gaggaguugccaucuauua

SEQ ID NO: 13396 - RNA, 19 nt, Homo sapiens
  misc_RNA (1)...(19): siRNA sense strand
cagcucggcuuugguauaa

SEQ ID NO: 13397 - RNA, 19 nt, Homo sapiens
  misc_RNA (1)...(19): siRNA sense strand
agacauuucuucuggauau

SEQ ID NO: 13398 - RNA, 19 nt, Homo sapiens
  misc_RNA (1)...(19): siRNA sense strand
gaggaaaccaccaugcuuu

SEQ ID NO: 13399 - RNA, 19 nt, Homo sapiens
  misc_RNA (1)...(19): siRNA sense strand
caaaacaacugcaaauuca

SEQ ID NO: 13400 - RNA, 19 nt, Homo sapiens
  misc_RNA (1)...(19): siRNA sense strand
ucacuaagcaacacaauau

SEQ ID NO: 13401 - RNA, 19 nt, Homo sapiens
  misc_RNA (1)...(19): siRNA sense strand
agauauuccugaugaagua

SEQ ID NO: 13402 - RNA, 19 nt, Homo sapiens
  misc_RNA (1)...(19): siRNA sense strand
caauaggauuucacucuug

SEQ ID NO: 13403 - RNA, 19 nt, Homo sapiens
  misc_RNA (1)...(19): siRNA sense strand
caacagaggagacauugga

SEQ ID NO: 13404 - RNA, 19 nt, Homo sapiens
  misc_RNA (1)...(19): siRNA sense strand
ccagugagcagguccuaua

SEQ ID NO: 13405 - RNA, 19 nt, Homo sapiens
  misc_RNA (1)...(19): siRNA sense strand
aaauucaccuggaugauau

SEQ ID NO: 13406 - RNA, 19 nt, Homo sapiens
  misc_RNA (1)...(19): siRNA sense strand
cgucuuugcuguuauguug

SEQ ID NO: 13407 - RNA, 19 nt, Homo sapiens
  misc_RNA (1)...(19): siRNA sense strand
guagaaccagccacaauuu

SEQ ID NO: 13408 - RNA, 19 nt, Homo sapiens
  misc_RNA (1)...(19): siRNA sense strand
uaaaacaccugaaacaguu

SEQ ID NO: 13409 - RNA, 19 nt, Homo sapiens
  misc_RNA (1)...(19): siRNA sense strand
gauagucaaacaacaauug

SEQ ID NO: 13410 - RNA, 19 nt, Homo sapiens
  misc_RNA (1)...(19): siRNA sense strand
caaaauacgugguacaugu

SEQ ID NO: 13411 - RNA, 19 nt, Homo sapiens
  misc_RNA (1)...(19): siRNA sense strand
ggaaccacaugcuucuaug

SEQ ID NO: 13412 - RNA, 19 nt, Homo sapiens
  misc_RNA (1)...(19): siRNA sense strand
gaucgugaaugaggaguug

SEQ ID NO: 13413 - RNA, 19 nt, Homo sapiens
  misc_RNA (1)...(19): siRNA sense strand
gugagcagguccuauaugu

SEQ ID NO: 13414 - RNA, 19 nt, Homo sapiens
  misc_RNA (1)...(19): siRNA sense strand
gaacugggauuaaaagaag

SEQ ID NO: 13415 - RNA, 19 nt, Homo sapiens
  misc_RNA (1)...(19): siRNA sense strand
gaucgucuuugcuguuaug

SEQ ID NO: 13416 - RNA, 19 nt, Homo sapiens
  misc_RNA (1)...(19): siRNA sense strand
cagggcaccuuacuucuga

SEQ ID NO: 13417 - RNA, 19 nt, Homo sapiens
  misc_RNA (1)...(19): siRNA sense strand
cgccagauauuccugauga

SEQ ID NO: 13418 - RNA, 19 nt, Homo sapiens
  misc_RNA (1)...(19): siRNA sense strand
gaaugcaguucuccugaca

SEQ ID NO: 13419 - RNA, 19 nt, Homo sapiens
  misc_RNA (1)...(19): siRNA sense strand
ucaauaggauuucacucuu

SEQ ID NO: 13420 - RNA, 19 nt, Homo sapiens
  misc_RNA (1)...(19): siRNA sense strand
ggguaugaauaucucuaua

SEQ ID NO: 13421 - RNA, 19 nt, Homo sapiens
  misc_RNA (1)...(19): siRNA sense strand
gguagaaccagccacaauu

SEQ ID NO: 13422 - RNA, 19 nt, Homo sapiens
  misc_RNA (1)...(19): siRNA sense strand
gaucucaacacuggauaua

SEQ ID NO: 13423 - RNA, 19 nt, Homo sapiens
  misc_RNA (1)...(19): siRNA sense strand
gaagagcaacaguaucuca

SEQ ID NO: 13424 - RNA, 19 nt, Homo sapiens
  misc_RNA (1)...(19): siRNA sense strand
aaacugcucuggccacauc

SEQ ID NO: 13425 - RNA, 19 nt, Homo sapiens
  misc_RNA (1)...(19): siRNA sense strand
ucaccuacauagacacaaa

SEQ ID NO: 13426 - RNA, 19 nt, Homo sapiens
  misc_RNA (1)...(19): siRNA sense strand
gaacugccaaccaaggaaa

SEQ ID NO: 13427 - RNA, 19 nt, Homo sapiens
  misc_RNA (1)...(19): siRNA sense strand
caagagacacugauaugug

SEQ ID NO: 13428 - RNA, 19 nt, Homo sapiens
  misc_RNA (1)...(19): siRNA sense strand
cauggaggaauuacaaaua

SEQ ID NO: 13429 - RNA, 19 nt, Homo sapiens
  misc_RNA (1)...(19): siRNA sense strand
ucaccuggaugauauagug

SEQ ID NO: 13430 - RNA, 19 nt, Homo sapiens
  misc_RNA (1)...(19): siRNA sense strand
uaacaucuccacugauuca

SEQ ID NO: 13431 - RNA, 19 nt, Homo sapiens
  misc_RNA (1)...(19): siRNA sense strand
cagaagaagagcaacagua

SEQ ID NO: 13432 - RNA, 19 nt, Homo sapiens
  misc_RNA (1)...(19): siRNA sense strand
ggaagccaucucagcaaua

SEQ ID NO: 13433 - RNA, 19 nt, Homo sapiens
  misc_RNA (1)...(19): siRNA sense strand
ggauauaaaccccaaauuu

SEQ ID NO: 13434 - RNA, 19 nt, Homo sapiens
  misc_RNA (1)...(19): siRNA sense strand
gaacacaagccuacagacu

SEQ ID NO: 13435 - RNA, 19 nt, Homo sapiens
  misc_RNA (1)...(19): siRNA sense strand
auuaacaucuccacugauu

SEQ ID NO: 13436 - RNA, 19 nt, Homo sapiens
  misc_RNA (1)...(19): siRNA sense strand
gugaaacuauuccagaaca

SEQ ID NO: 13437 - RNA, 19 nt, Homo sapiens
  misc_RNA (1)...(19): siRNA sense strand
gggaagccaucucagcaau

SEQ ID NO: 13438 - RNA, 19 nt, Homo sapiens
  misc_RNA (1)...(19): siRNA sense strand
caaccaaggaaacuucauu

SEQ ID NO: 13439 - RNA, 19 nt, Homo sapiens
  misc_RNA (1)...(19): siRNA sense strand
ggaguugccaucuauuaau

SEQ ID NO: 13440 - RNA, 19 nt, Homo sapiens
  misc_RNA (1)...(19): siRNA sense strand
uaauagcccuuuacauacu

SEQ ID NO: 13441 - RNA, 19 nt, Homo sapiens
  misc_RNA (1)...(19): siRNA sense strand
ggaaauaaucccagguuac

SEQ ID NO: 13442 - RNA, 19 nt, Homo sapiens
  misc_RNA (1)...(19): siRNA sense strand
caaaagcauuccaacauga

SEQ ID NO: 13443 - RNA, 19 nt, Homo sapiens
  misc_RNA (1)...(19): siRNA sense strand
gaugauauagugauaccuu

SEQ ID NO: 13444 - RNA, 19 nt, Homo sapiens
  misc_RNA (1)...(19): siRNA sense strand
cagugaaacuauuccagaa

SEQ ID NO: 13445 - RNA, 19 nt, Homo sapiens
  misc_RNA (1)...(19): siRNA sense strand
gcaguucuccugacauaca

SEQ ID NO: 13446 - RNA, 19 nt, Homo sapiens
  misc_RNA (1)...(19): siRNA sense strand
uaacagaucauuccgaacu

SEQ ID NO: 13447 - RNA, 19 nt, Homo sapiens
  misc_RNA (1)...(19): siRNA sense strand
ggaggaaaccaccaugcuu

SEQ ID NO: 13448 - RNA, 19 nt, Homo sapiens
  misc_RNA (1)...(19): siRNA sense strand
aggaaauaaucccagguua

SEQ ID NO: 13449 - RNA, 19 nt, Homo sapiens
  misc_RNA (1)...(19): siRNA sense strand
acaagagacuacccgcaaa

SEQ ID NO: 13450 - RNA, 19 nt, Homo sapiens
  misc_RNA (1)...(19): siRNA sense strand
ggaaaauagugaacuuaug

SEQ ID NO: 13451 - RNA, 19 nt, Homo sapiens
  misc_RNA (1)...(19): siRNA sense strand
gaauauucaggcaacauga

SEQ ID NO: 13452 - RNA, 19 nt, Homo sapiens
  misc_RNA (1)...(19): siRNA sense strand
uuggaaagccacuucaaua

SEQ ID NO: 13453 - RNA, 19 nt, Homo sapiens
  misc_RNA (1)...(19): siRNA sense strand
gaaacuauuccagaacaga

SEQ ID NO: 13454 - RNA, 19 nt, Homo sapiens
  misc_RNA (1)...(19): siRNA sense strand
gagaauuaagccucauauu

SEQ ID NO: 13455 - RNA, 19 nt, Homo sapiens
  misc_RNA (1)...(19): siRNA sense strand
acacuuaaaccaccaguug

SEQ ID NO: 13456 - RNA, 19 nt, Homo sapiens
  misc_RNA (1)...(19): siRNA sense strand
caagcuauauuaacaucuc

SEQ ID NO: 13457 - RNA, 19 nt, Homo sapiens
  misc_RNA (1)...(19): siRNA sense strand
agaagaagagcaacaguau

SEQ ID NO: 13458 - RNA, 19 nt, Homo sapiens
  misc_RNA (1)...(19): siRNA sense strand
auuaagaacugccaaccaa

SEQ ID NO: 13459 - RNA, 19 nt, Homo sapiens
  misc_RNA (1)...(19): siRNA sense strand
ggaaagccacuucaauagg

SEQ ID NO: 13460 - RNA, 19 nt, Homo sapiens
  misc_RNA (1)...(19): siRNA sense strand
caucucagcaauaauaaug

SEQ ID NO: 13461 - RNA, 19 nt, Homo sapiens
  misc_RNA (1)...(19): siRNA sense strand
uaagauggguaugaauauc

SEQ ID NO: 13462 - RNA, 19 nt, Homo sapiens
  misc_RNA (1)...(19): siRNA sense strand
gcaccuuacuucugacaac

SEQ ID NO: 13463 - RNA, 19 nt, Homo sapiens
  misc_RNA (1)...(19): siRNA sense strand
gggcugagacuauaaaugc

SEQ ID NO: 13464 - RNA, 19 nt, Homo sapiens
  misc_RNA (1)...(19): siRNA sense strand
ucaggucacuauucaaugg

SEQ ID NO: 13465 - RNA, 19 nt, Homo sapiens
  misc_RNA (1)...(19): siRNA sense strand
acacaagccuacagacuac

SEQ ID NO: 13466 - RNA, 19 nt, Homo sapiens
  misc_RNA (1)...(19): siRNA sense strand
cuacagggcaccuuacuuc

SEQ ID NO: 13467 - RNA, 19 nt, Homo sapiens
  misc_RNA (1)...(19): siRNA sense strand
auauuaacaucuccacuga

SEQ ID NO: 13468 - RNA, 19 nt, Homo sapiens
  misc_RNA (1)...(19): siRNA sense strand
ccugcuuccugaugaauuu

SEQ ID NO: 13469 - RNA, 19 nt, Homo sapiens
  misc_RNA (1)...(19): siRNA sense strand
augcaguucuccugacaua

SEQ ID NO: 13470 - RNA, 19 nt, Homo sapiens
  misc_RNA (1)...(19): siRNA sense strand
gauauaaaccccaaauuuc

SEQ ID NO: 13471 - RNA, 19 nt, Homo sapiens
  misc_RNA (1)...(19): siRNA sense strand
ugaaaaugcuacaggaaaa

SEQ ID NO: 13472 - RNA, 19 nt, Homo sapiens
  misc_RNA (1)...(19): siRNA sense strand
aagcagcaauuaagaacug

SEQ ID NO: 13473 - RNA, 19 nt, Homo sapiens
  misc_RNA (1)...(19): siRNA sense strand
ggagaauuaagccucauau

SEQ ID NO: 13474 - RNA, 19 nt, Homo sapiens
  misc_RNA (1)...(19): siRNA sense strand
aauaaucccagguuacaaa

SEQ ID NO: 13475 - RNA, 19 nt, Homo sapiens
  misc_RNA (1)...(19): siRNA sense strand
ggaaauccauucaaucuga

SEQ ID NO: 13476 - RNA, 19 nt, Homo sapiens
  misc_RNA (1)...(19): siRNA sense strand
ggaacugucuuucacauaa

SEQ ID NO: 13477 - RNA, 19 nt, Homo sapiens
  misc_RNA (1)...(19): siRNA sense strand
gaaacagcauuuacagauu

SEQ ID NO: 13478 - RNA, 19 nt, Homo sapiens
  misc_RNA (1)...(19): siRNA sense strand
cagaugaccuugaucacua

SEQ ID NO: 13479 - RNA, 19 nt, Homo sapiens
  misc_RNA (1)...(19): siRNA sense strand
gaacugucuuucacauaaa

SEQ ID NO: 13480 - RNA, 19 nt, Homo sapiens
  misc_RNA (1)...(19): siRNA sense strand
ggaaacagcauuuacagau

SEQ ID NO: 13481 - RNA, 19 nt, Homo sapiens
  misc_RNA (1)...(19): siRNA sense strand
aaacagcauuuacagauuc

SEQ ID NO: 13482 - RNA, 19 nt, Homo sapiens
  misc_RNA (1)...(19): siRNA sense strand
acacaacgcauucucuaua

SEQ ID NO: 13483 - RNA, 19 nt, Homo sapiens
  misc_RNA (1)...(19): siRNA sense strand
caccagaacucaucaacug

SEQ ID NO: 13484 - RNA, 19 nt, Homo sapiens
  misc_RNA (1)...(19): siRNA sense strand
cuugaucacuauaccaaua

SEQ ID NO: 13485 - RNA, 19 nt, Homo sapiens
  misc_RNA (1)...(19): siRNA sense strand
ucacauaaaccauggaaau

SEQ ID NO: 13486 - RNA, 19 nt, Homo sapiens
  misc_RNA (1)...(19): siRNA sense strand
caaacaaacacaacgcauu

SEQ ID NO: 13487 - RNA, 19 nt, Homo sapiens
  misc_RNA (1)...(19): siRNA sense strand
gaaugaggcuauacaaaau

SEQ ID NO: 13488 - RNA, 19 nt, Homo sapiens
  misc_RNA (1)...(19): siRNA sense strand
caacuggaaacagcauuua

SEQ ID NO: 13489 - RNA, 19 nt, Homo sapiens
  misc_RNA (1)...(19): siRNA sense strand
cacaacgcauucucuauau

SEQ ID NO: 13490 - RNA, 19 nt, Homo sapiens
  misc_RNA (1)...(19): siRNA sense strand
gagccucccagcauccuua

SEQ ID NO: 13491 - RNA, 19 nt, Homo sapiens
  misc_RNA (1)...(19): siRNA sense strand
aaacacaacgcauucucua

SEQ ID NO: 13492 - RNA, 19 nt, Homo sapiens
  misc_RNA (1)...(19): siRNA sense strand
aaacaaacacaacgcauuc

SEQ ID NO: 13493 - RNA, 19 nt, Homo sapiens
  misc_RNA (1)...(19): siRNA sense strand
gccauuaaguccuucaaag

SEQ ID NO: 13494 - RNA, 19 nt, Homo sapiens
  misc_RNA (1)...(19): siRNA sense strand
guggacaaguggccugauu

SEQ ID NO: 13495 - RNA, 19 nt, Homo sapiens
  misc_RNA (1)...(19): siRNA sense strand
uaccaauacuuaccaaauc

SEQ ID NO: 13496 - RNA, 19 nt, Homo sapiens
  misc_RNA (1)...(19): siRNA sense strand
uaccaaaucuacuccaaag

SEQ ID NO: 13497 - RNA, 19 nt, Homo sapiens
  misc_RNA (1)...(19): siRNA sense strand
uaugacagaugaccuugau

SEQ ID NO: 13498 - RNA, 19 nt, Homo sapiens
  misc_RNA (1)...(19): siRNA sense strand
ugacagaugaccuugauca

SEQ ID NO: 13499 - RNA, 19 nt, Homo sapiens
  misc_RNA (1)...(19): siRNA sense strand
ugaaggcugugguggacaa

SEQ ID NO: 13500 - RNA, 19 nt, Homo sapiens
  misc_RNA (1)...(19): siRNA sense strand
ggauaugacagaugaccuu

SEQ ID NO: 13501 - RNA, 19 nt, Homo sapiens
  misc_RNA (1)...(19): siRNA sense strand
caaagucaaacaaacacaa

SEQ ID NO: 13502 - RNA, 19 nt, Homo sapiens
  misc_RNA (1)...(19): siRNA sense strand
caaguggccugauuuuaau

SEQ ID NO: 13503 - RNA, 19 nt, Homo sapiens
  misc_RNA (1)...(19): siRNA sense strand
gaacucaucaacuggaaac

SEQ ID NO: 13504 - RNA, 19 nt, Homo sapiens
  misc_RNA (1)...(19): siRNA sense strand
agcaggauaugacagauga

SEQ ID NO: 13505 - RNA, 19 nt, Homo sapiens
  misc_RNA (1)...(19): siRNA sense strand
gaaacagccaaggaacuga

SEQ ID NO: 13506 - RNA, 19 nt, Homo sapiens
  misc_RNA (1)...(19): siRNA sense strand
caacgcauucucuauaugg

SEQ ID NO: 13507 - RNA, 19 nt, Homo sapiens
  misc_RNA (1)...(19): siRNA sense strand
cagaacucaucaacuggaa

SEQ ID NO: 13508 - RNA, 19 nt, Homo sapiens
  misc_RNA (1)...(19): siRNA sense strand
ugaaugaggcuauacaaaa

SEQ ID NO: 13509 - RNA, 19 nt, Homo sapiens
  misc_RNA (1)...(19): siRNA sense strand
ggacaaguggccugauuuu

SEQ ID NO: 13510 - RNA, 19 nt, Homo sapiens
  misc_RNA (1)...(19): siRNA sense strand
acaaguggccugauuuuaa

SEQ ID NO: 13511 - RNA, 19 nt, Homo sapiens
  misc_RNA (1)...(19): siRNA sense strand
gagcaggauaugacagaug

SEQ ID NO: 13512 - RNA, 19 nt, Homo sapiens
  misc_RNA (1)...(19): siRNA sense strand
ccaauacuuaccaaaucua

SEQ ID NO: 13513 - RNA, 19 nt, Homo sapiens
  misc_RNA (1)...(19): siRNA sense strand
ccauuaaguccuucaaagu

SEQ ID NO: 13514 - RNA, 19 nt, Homo sapiens
  misc_RNA (1)...(19): siRNA sense strand
gcauuuacagauucaaagu

SEQ ID NO: 13515 - RNA, 19 nt, Homo sapiens
  misc_RNA (1)...(19): siRNA sense strand
ccaaagauccccaaaacug

SEQ ID NO: 13516 - RNA, 19 nt, Homo sapiens
  misc_RNA (1)...(19): siRNA sense strand
acaacgcauucucuauaug

SEQ ID NO: 13517 - RNA, 19 nt, Homo sapiens
  misc_RNA (1)...(19): siRNA sense strand
auuaaguccuucaaaguca

SEQ ID NO: 13518 - RNA, 19 nt, Homo sapiens
  misc_RNA (1)...(19): siRNA sense strand
cagcauuuacagauucaaa

SEQ ID NO: 13519 - RNA, 19 nt, Homo sapiens
  misc_RNA (1)...(19): siRNA sense strand
ucaacuggaaacagcauuu

SEQ ID NO: 13520 - RNA, 19 nt, Homo sapiens
  misc_RNA (1)...(19): siRNA sense strand
ccaaaacugucaggaauuc

SEQ ID NO: 13521 - RNA, 19 nt, Homo sapiens
  misc_RNA (1)...(19): siRNA sense strand
ggagcaggauaugacagau

SEQ ID NO: 13522 - RNA, 19 nt, Homo sapiens
  misc_RNA (1)...(19): siRNA sense strand
gcaaacccaaggccaugug

SEQ ID NO: 13523 - RNA, 19 nt, Homo sapiens
  misc_RNA (1)...(19): siRNA sense strand
cuauauggcagcugaaaca

SEQ ID NO: 13524 - RNA, 19 nt, Homo sapiens
  misc_RNA (1)...(19): siRNA sense strand
ugcagaugcuggagaaauc

SEQ ID NO: 13525 - RNA, 19 nt, Homo sapiens
  misc_RNA (1)...(19): siRNA sense strand
cauuaaguccuucaaaguc

SEQ ID NO: 13526 - RNA, 19 nt, Homo sapiens
  misc_RNA (1)...(19): siRNA sense strand
ugaaacagccaaggaacug

SEQ ID NO: 13527 - RNA, 19 nt, Homo sapiens
  misc_RNA (1)...(19): siRNA sense strand
caaacacaacgcauucucu

SEQ ID NO: 13528 - RNA, 19 nt, Homo sapiens
  misc_RNA (1)...(19): siRNA sense strand
gugcccagaugcugcagau

SEQ ID NO: 13529 - RNA, 19 nt, Homo sapiens
  misc_RNA (1)...(19): siRNA sense strand
uuaaguccuucaaagucaa

SEQ ID NO: 13530 - RNA, 19 nt, Homo sapiens
  misc_RNA (1)...(19): siRNA sense strand
agaugaccuugaucacuau

SEQ ID NO: 13531 - RNA, 19 nt, Homo sapiens
  misc_RNA (1)...(19): siRNA sense strand
uugcagccauuaaguccuu

SEQ ID NO: 13532 - RNA, 19 nt, Homo sapiens
  misc_RNA (1)...(19): siRNA sense strand
ugacuccuuuccugcugaa

SEQ ID NO: 13533 - RNA, 19 nt, Homo sapiens
  misc_RNA (1)...(19): siRNA sense strand
cuucaaagucaaacaaaca

SEQ ID NO: 13534 - RNA, 19 nt, Homo sapiens
  misc_RNA (1)...(19): siRNA sense strand
caaaaucuugcagccauua

SEQ ID NO: 13535 - RNA, 19 nt, Homo sapiens
  misc_RNA (1)...(19): siRNA sense strand
caaacccaaggccauguga

SEQ ID NO: 13536 - RNA, 19 nt, Homo sapiens
  misc_RNA (1)...(19): siRNA sense strand
gaugaccuugaucacuaua

SEQ ID NO: 13537 - RNA, 19 nt, Homo sapiens
  misc_RNA (1)...(19): siRNA sense strand
uggaacugucuuucacaua

SEQ ID NO: 13538 - RNA, 19 nt, Homo sapiens
  misc_RNA (1)...(19): siRNA sense strand
aggaagagccucccagcau

SEQ ID NO: 13539 - RNA, 19 nt, Homo sapiens
  misc_RNA (1)...(19): siRNA sense strand
cugaaugaggcuauacaaa

SEQ ID NO: 13540 - RNA, 19 nt, Homo sapiens
  misc_RNA (1)...(19): siRNA sense strand
gcccucaggagcaggauau

SEQ ID NO: 13541 - RNA, 19 nt, Homo sapiens
  misc_RNA (1)...(19): siRNA sense strand
uuaccaaaucuacuccaaa

SEQ ID NO: 13542 - RNA, 19 nt, Homo sapiens
  misc_RNA (1)...(19): siRNA sense strand
ggacaaguacuuuaugaua

SEQ ID NO: 13543 - RNA, 19 nt, Homo sapiens
  misc_RNA (1)...(19): siRNA sense strand
gacaaguacuuuaugauag

SEQ ID NO: 13544 - RNA, 19 nt, Homo sapiens
  misc_RNA (1)...(19): siRNA sense strand
ggacgaaucacugcaguuu

SEQ ID NO: 13545 - RNA, 19 nt, Homo sapiens
  misc_RNA (1)...(19): siRNA sense strand
gaagaagauccuugacauu

SEQ ID NO: 13546 - RNA, 19 nt, Homo sapiens
  misc_RNA (1)...(19): siRNA sense strand
acgaaucacugcaguuuaa

SEQ ID NO: 13547 - RNA, 19 nt, Homo sapiens
  misc_RNA (1)...(19): siRNA sense strand
caagcagucugugcacaua

SEQ ID NO: 13548 - RNA, 19 nt, Homo sapiens
  misc_RNA (1)...(19): siRNA sense strand
caggacaaguacuuuauga

SEQ ID NO: 13549 - RNA, 19 nt, Homo sapiens
  misc_RNA (1)...(19): siRNA sense strand
gauauucagccgucuagaa

SEQ ID NO: 13550 - RNA, 19 nt, Homo sapiens
  misc_RNA (1)...(19): siRNA sense strand
agaagaagauccuugacau

SEQ ID NO: 13551 - RNA, 19 nt, Homo sapiens
  misc_RNA (1)...(19): siRNA sense strand
cgaaauccaagcaagcaua

SEQ ID NO: 13552 - RNA, 19 nt, Homo sapiens
  misc_RNA (1)...(19): siRNA sense strand
ggguugaccaguuaaagua

SEQ ID NO: 13553 - RNA, 19 nt, Homo sapiens
  misc_RNA (1)...(19): siRNA sense strand
agacugcgcucagaaacuu

SEQ ID NO: 13554 - RNA, 19 nt, Homo sapiens
  misc_RNA (1)...(19): siRNA sense strand
uaacuccucccuccagaaa

SEQ ID NO: 13555 - RNA, 19 nt, Homo sapiens
  misc_RNA (1)...(19): siRNA sense strand
uuagaugggcacaauauuu

SEQ ID NO: 13556 - RNA, 19 nt, Homo sapiens
  misc_RNA (1)...(19): siRNA sense strand
gaaauccaagcaagcauag

SEQ ID NO: 13557 - RNA, 19 nt, Homo sapiens
  misc_RNA (1)...(19): siRNA sense strand
aagaagauccuugacauug

SEQ ID NO: 13558 - RNA, 19 nt, Homo sapiens
  misc_RNA (1)...(19): siRNA sense strand
gcaagcauagaccagauau

SEQ ID NO: 13559 - RNA, 19 nt, Homo sapiens
  misc_RNA (1)...(19): siRNA sense strand
gacgaaucacugcaguuua

SEQ ID NO: 13560 - RNA, 19 nt, Homo sapiens
  misc_RNA (1)...(19): siRNA sense strand
aagcauagaccagauauuc

SEQ ID NO: 13561 - RNA, 19 nt, Homo sapiens
  misc_RNA (1)...(19): siRNA sense strand
acaagcagguccacgagau

SEQ ID NO: 13562 - RNA, 19 nt, Homo sapiens
  misc_RNA (1)...(19): siRNA sense strand
gcacauaguagaaaacgaa

SEQ ID NO: 13563 - RNA, 19 nt, Homo sapiens
  misc_RNA (1)...(19): siRNA sense strand
gggcuuuccaggacaagua

SEQ ID NO: 13564 - RNA, 19 nt, Homo sapiens
  misc_RNA (1)...(19): siRNA sense strand
ggagagacagcgagaagag

SEQ ID NO: 13565 - RNA, 19 nt, Homo sapiens
  misc_RNA (1)...(19): siRNA sense strand
ucuagaacgucuggagauu

SEQ ID NO: 13566 - RNA, 19 nt, Homo sapiens
  misc_RNA (1)...(19): siRNA sense strand
acaaguacuuuaugauagg

SEQ ID NO: 13567 - RNA, 19 nt, Homo sapiens
  misc_RNA (1)...(19): siRNA sense strand
cccagagacugaccuugaa

SEQ ID NO: 13568 - RNA, 19 nt, Homo sapiens
  misc_RNA (1)...(19): siRNA sense strand
uagaacgucuggagauuuu

SEQ ID NO: 13569 - RNA, 19 nt, Homo sapiens
  misc_RNA (1)...(19): siRNA sense strand
gcucagaaacuuccagcau

SEQ ID NO: 13570 - RNA, 19 nt, Homo sapiens
  misc_RNA (1)...(19): siRNA sense strand
uccacgagauccagucuug

SEQ ID NO: 13571 - RNA, 19 nt, Homo sapiens
  misc_RNA (1)...(19): siRNA sense strand
gcauagaccagauauucag

SEQ ID NO: 13572 - RNA, 19 nt, Homo sapiens
  misc_RNA (1)...(19): siRNA sense strand
gaaccuucaccacuaacga

SEQ ID NO: 13573 - RNA, 19 nt, Homo sapiens
  misc_RNA (1)...(19): siRNA sense strand
guugaccaguuaaaguaug

SEQ ID NO: 13574 - RNA, 19 nt, Homo sapiens
  misc_RNA (1)...(19): siRNA sense strand
cagaagaagauccuugaca

SEQ ID NO: 13575 - RNA, 19 nt, Homo sapiens
  misc_RNA (1)...(19): siRNA sense strand
gcagucugugcacauagua

SEQ ID NO: 13576 - RNA, 19 nt, Homo sapiens
  misc_RNA (1)...(19): siRNA sense strand
gcacaauauuuuagaugga

SEQ ID NO: 13577 - RNA, 19 nt, Homo sapiens
  misc_RNA (1)...(19): siRNA sense strand
ugacaccaccauaccaaug

SEQ ID NO: 13578 - RNA, 19 nt, Homo sapiens
  misc_RNA (1)...(19): siRNA sense strand
cuagaacgucuggagauuu

SEQ ID NO: 13579 - RNA, 19 nt, Homo sapiens
  misc_RNA (1)...(19): siRNA sense strand
agaagauccuugacauugc

SEQ ID NO: 13580 - RNA, 19 nt, Homo sapiens
  misc_RNA (1)...(19): siRNA sense strand
gggagcagcaggagagaca

SEQ ID NO: 13581 - RNA, 19 nt, Homo sapiens
  misc_RNA (1)...(19): siRNA sense strand
ccagauauucagccgucua

SEQ ID NO: 13582 - RNA, 19 nt, Homo sapiens
  misc_RNA (1)...(19): siRNA sense strand
gaaggggacucagaagaag

SEQ ID NO: 13583 - RNA, 19 nt, Homo sapiens
  misc_RNA (1)...(19): siRNA sense strand
aagcaagcauagaccagau

SEQ ID NO: 13584 - RNA, 19 nt, Homo sapiens
  misc_RNA (1)...(19): siRNA sense strand
uugaccaguuaaaguauga

SEQ ID NO: 13585 - RNA, 19 nt, Homo sapiens
  misc_RNA (1)...(19): siRNA sense strand
ccaggacaaguacuuuaug

SEQ ID NO: 13586 - RNA, 19 nt, Homo sapiens
  misc_RNA (1)...(19): siRNA sense strand
augcugggcuuguccaaca

SEQ ID NO: 13587 - RNA, 19 nt, Homo sapiens
  misc_RNA (1)...(19): siRNA sense strand
ccaguuaaaguaugauguc

SEQ ID NO: 13588 - RNA, 19 nt, Homo sapiens
  misc_RNA (1)...(19): siRNA sense strand
cgacucugacaccaccaua

SEQ ID NO: 13589 - RNA, 19 nt, Homo sapiens
  misc_RNA (1)...(19): siRNA sense strand
uagaugggcacaauauuuu

SEQ ID NO: 13590 - RNA, 19 nt, Homo sapiens
  misc_RNA (1)...(19): siRNA sense strand
acuucggguugaccaguua

SEQ ID NO: 13591 - RNA, 19 nt, Homo sapiens
  misc_RNA (1)...(19): siRNA sense strand
acccagagacugaccuuga

SEQ ID NO: 13592 - RNA, 19 nt, Homo sapiens
  misc_RNA (1)...(19): siRNA sense strand
cugaggacccagagacuga

SEQ ID NO: 13593 - RNA, 19 nt, Homo sapiens
  misc_RNA (1)...(19): siRNA sense strand
caggagagacagcgagaag

SEQ ID NO: 13594 - RNA, 19 nt, Homo sapiens
  misc_RNA (1)...(19): siRNA sense strand
ccaacaugcugggcuuguc

SEQ ID NO: 13595 - RNA, 19 nt, Homo sapiens
  misc_RNA (1)...(19): siRNA sense strand
ggacccagagacugaccuu

SEQ ID NO: 13596 - RNA, 19 nt, Homo sapiens
  misc_RNA (1)...(19): siRNA sense strand
ggacaaguacuuuaugaua

SEQ ID NO: 13597 - RNA, 19 nt, Homo sapiens
  misc_RNA (1)...(19): siRNA sense strand
gacaaguacuuuaugauag

SEQ ID NO: 13598 - RNA, 19 nt, Homo sapiens
  misc_RNA (1)...(19): siRNA sense strand
ggacgaaucacugcaguuu

SEQ ID NO: 13599 - RNA, 19 nt, Homo sapiens
  misc_RNA (1)...(19): siRNA sense strand
gaagaagauccuugacauu

SEQ ID NO: 13600 - RNA, 19 nt, Homo sapiens
  misc_RNA (1)...(19): siRNA sense strand
acgaaucacugcaguuuaa

SEQ ID NO: 13601 - RNA, 19 nt, Homo sapiens
  misc_RNA (1)...(19): siRNA sense strand
caagcagucugugcacaua

SEQ ID NO: 13602 - RNA, 19 nt, Homo sapiens
  misc_RNA (1)...(19): siRNA sense strand
caggacaaguacuuuauga

SEQ ID NO: 13603 - RNA, 19 nt, Homo sapiens
  misc_RNA (1)...(19): siRNA sense strand
gauauucagccgucuagaa

SEQ ID NO: 13604 - RNA, 19 nt, Homo sapiens
  misc_RNA (1)...(19): siRNA sense strand
agaagaagauccuugacau

SEQ ID NO: 13605 - RNA, 19 nt, Homo sapiens
  misc_RNA (1)...(19): siRNA sense strand
cgaaauccaagcaagcaua

SEQ ID NO: 13606 - RNA, 19 nt, Homo sapiens
  misc_RNA (1)...(19): siRNA sense strand
ggguugaccaguuaaagua

SEQ ID NO: 13607 - RNA, 19 nt, Homo sapiens
  misc_RNA (1)...(19): siRNA sense strand
agacugcgcucagaaacuu

SEQ ID NO: 13608 - RNA, 19 nt, Homo sapiens
  misc_RNA (1)...(19): siRNA sense strand
uaacuccucccuccagaaa

SEQ ID NO: 13609 - RNA, 19 nt, Homo sapiens
  misc_RNA (1)...(19): siRNA sense strand
uuagaugggcacaauauuu

SEQ ID NO: 13610 - RNA, 19 nt, Homo sapiens
  misc_RNA (1)...(19): siRNA sense strand
gaaauccaagcaagcauag

SEQ ID NO: 13611 - RNA, 19 nt, Homo sapiens
  misc_RNA (1)...(19): siRNA sense strand
aagaagauccuugacauug

SEQ ID NO: 13612 - RNA, 19 nt, Homo sapiens
  misc_RNA (1)...(19): siRNA sense strand
gcaagcauagaccagauau

SEQ ID NO: 13613 - RNA, 19 nt, Homo sapiens
  misc_RNA (1)...(19): siRNA sense strand
gacgaaucacugcaguuua

SEQ ID NO: 13614 - RNA, 19 nt, Homo sapiens
  misc_RNA (1)...(19): siRNA sense strand
aagcauagaccagauauuc

SEQ ID NO: 13615 - RNA, 19 nt, Homo sapiens
  misc_RNA (1)...(19): siRNA sense strand
acaagcagguccacgagau

SEQ ID NO: 13616 - RNA, 19 nt, Homo sapiens
  misc_RNA (1)...(19): siRNA sense strand
gcacauaguagaaaacgaa

SEQ ID NO: 13617 - RNA, 19 nt, Homo sapiens
  misc_RNA (1)...(19): siRNA sense strand
gggcuuuccaggacaagua

SEQ ID NO: 13618 - RNA, 19 nt, Homo sapiens
  misc_RNA (1)...(19): siRNA sense strand
ggagagacagcgagaagag

SEQ ID NO: 13619 - RNA, 19 nt, Homo sapiens
  misc_RNA (1)...(19): siRNA sense strand
ucuagaacgucuggagauu

SEQ ID NO: 13620 - RNA, 19 nt, Homo sapiens
  misc_RNA (1)...(19): siRNA sense strand
acaaguacuuuaugauagg

SEQ ID NO: 13621 - RNA, 19 nt, Homo sapiens
  misc_RNA (1)...(19): siRNA sense strand
cccagagacugaccuugaa

SEQ ID NO: 13622 - RNA, 19 nt, Homo sapiens
  misc_RNA (1)...(19): siRNA sense strand
uagaacgucuggagauuuu

SEQ ID NO: 13623 - RNA, 19 nt, Homo sapiens
  misc_RNA (1)...(19): siRNA sense strand
gcucagaaacuuccagcau

SEQ ID NO: 13624 - RNA, 19 nt, Homo sapiens
  misc_RNA (1)...(19): siRNA sense strand
uccacgagauccagucuug

SEQ ID NO: 13625 - RNA, 19 nt, Homo sapiens
  misc_RNA (1)...(19): siRNA sense strand
gcauagaccagauauucag

SEQ ID NO: 13626 - RNA, 19 nt, Homo sapiens
  misc_RNA (1)...(19): siRNA sense strand
gaaccuucaccacuaacga

SEQ ID NO: 13627 - RNA, 19 nt, Homo sapiens
  misc_RNA (1)...(19): siRNA sense strand
guugaccaguuaaaguaug

SEQ ID NO: 13628 - RNA, 19 nt, Homo sapiens
  misc_RNA (1)...(19): siRNA sense strand
cagaagaagauccuugaca

SEQ ID NO: 13629 - RNA, 19 nt, Homo sapiens
  misc_RNA (1)...(19): siRNA sense strand
gcagucugugcacauagua

SEQ ID NO: 13630 - RNA, 19 nt, Homo sapiens
  misc_RNA (1)...(19): siRNA sense strand
gcacaauauuuuagaugga

SEQ ID NO: 13631 - RNA, 19 nt, Homo sapiens
  misc_RNA (1)...(19): siRNA sense strand
ugacaccaccauaccaaug

SEQ ID NO: 13632 - RNA, 19 nt, Homo sapiens
  misc_RNA (1)...(19): siRNA sense strand
cuagaacgucuggagauuu

SEQ ID NO: 13633 - RNA, 19 nt, Homo sapiens
  misc_RNA (1)...(19): siRNA sense strand
agaagauccuugacauugc

SEQ ID NO: 13634 - RNA, 19 nt, Homo sapiens
  misc_RNA (1)...(19): siRNA sense strand
gggagcagcaggagagaca

SEQ ID NO: 13635 - RNA, 19 nt, Homo sapiens
  misc_RNA (1)...(19): siRNA sense strand
ccagauauucagccgucua

SEQ ID NO: 13636 - RNA, 19 nt, Homo sapiens
  misc_RNA (1)...(19): siRNA sense strand
gaaggggacucagaagaag

SEQ ID NO: 13637 - RNA, 19 nt, Homo sapiens
  misc_RNA (1)...(19): siRNA sense strand
aagcaagcauagaccagau

SEQ ID NO: 13638 - RNA, 19 nt, Homo sapiens
  misc_RNA (1)...(19): siRNA sense strand
uugaccaguuaaaguauga

SEQ ID NO: 13639 - RNA, 19 nt, Homo sapiens
  misc_RNA (1)...(19): siRNA sense strand
ccaggacaaguacuuuaug

SEQ ID NO: 13640 - RNA, 19 nt, Homo sapiens
  misc_RNA (1)...(19): siRNA sense strand
augcugggcuuguccaaca

SEQ ID NO: 13641 - RNA, 19 nt, Homo sapiens
  misc_RNA (1)...(19): siRNA sense strand
ccaguuaaaguaugauguc

SEQ ID NO: 13642 - RNA, 19 nt, Homo sapiens
  misc_RNA (1)...(19): siRNA sense strand
cgacucugacaccaccaua

SEQ ID NO: 13643 - RNA, 19 nt, Homo sapiens
  misc_RNA (1)...(19): siRNA sense strand
uagaugggcacaauauuuu

SEQ ID NO: 13644 - RNA, 19 nt, Homo sapiens
  misc_RNA (1)...(19): siRNA sense strand
acuucggguugaccaguua

SEQ ID NO: 13645 - RNA, 19 nt, Homo sapiens
  misc_RNA (1)...(19): siRNA sense strand
acccagagacugaccuuga

SEQ ID NO: 13646 - RNA, 19 nt, Homo sapiens
  misc_RNA (1)...(19): siRNA sense strand
cugaggacccagagacuga

SEQ ID NO: 13647 - RNA, 19 nt, Homo sapiens
  misc_RNA (1)...(19): siRNA sense strand
caggagagacagcgagaag

SEQ ID NO: 13648 - RNA, 19 nt, Homo sapiens
  misc_RNA (1)...(19): siRNA sense strand
ccaacaugcugggcuuguc

SEQ ID NO: 13649 - RNA, 19 nt, Homo sapiens
  misc_RNA (1)...(19): siRNA sense strand
ggacccagagacugaccuu

SEQ ID NO: 13650 - RNA, 19 nt, Homo sapiens
  misc_RNA (1)...(19): siRNA sense strand
ggacggagcuggauaagaa

SEQ ID NO: 13651 - RNA, 19 nt, Homo sapiens
  misc_RNA (1)...(19): siRNA sense strand
ggagagaaccgcauacuga

SEQ ID NO: 13652 - RNA, 19 nt, Homo sapiens
  misc_RNA (1)...(19): siRNA sense strand
ugagugagcuggauaugaa

SEQ ID NO: 13653 - RNA, 19 nt, Homo sapiens
  misc_RNA (1)...(19): siRNA sense strand
ggaggagacuugacagaga

SEQ ID NO: 13654 - RNA, 19 nt, Homo sapiens
  misc_RNA (1)...(19): siRNA sense strand
ggaaggagagaaccgcaua

SEQ ID NO: 13655 - RNA, 19 nt, Homo sapiens
  misc_RNA (1)...(19): siRNA sense strand
gggacagggugcagcauuu

SEQ ID NO: 13656 - RNA, 19 nt, Homo sapiens
  misc_RNA (1)...(19): siRNA sense strand
agaaacugcugcugaguga

SEQ ID NO: 13657 - RNA, 19 nt, Homo sapiens
  misc_RNA (1)...(19): siRNA sense strand
aagagaaggugaucgagaa

SEQ ID NO: 13658 - RNA, 19 nt, Homo sapiens
  misc_RNA (1)...(19): siRNA sense strand
gaaagaaugaucgagagaa

SEQ ID NO: 13659 - RNA, 19 nt, Homo sapiens
  misc_RNA (1)...(19): siRNA sense strand
ugacagagaggcuacaaga

SEQ ID NO: 13660 - RNA, 19 nt, Homo sapiens
  misc_RNA (1)...(19): siRNA sense strand
cgaacuccaucaucauaga

SEQ ID NO: 13661 - RNA, 19 nt, Homo sapiens
  misc_RNA (1)...(19): siRNA sense strand
gaucuccucucugguacuu

SEQ ID NO: 13662 - RNA, 19 nt, Homo sapiens
  misc_RNA (1)...(19): siRNA sense strand
aaagaaugaucgagagaag

SEQ ID NO: 13663 - RNA, 19 nt, Homo sapiens
  misc_RNA (1)...(19): siRNA sense strand
gaacuccaucaucauagaa

SEQ ID NO: 13664 - RNA, 19 nt, Homo sapiens
  misc_RNA (1)...(19): siRNA sense strand
acagagaggcuacaagaga

SEQ ID NO: 13665 - RNA, 19 nt, Homo sapiens
  misc_RNA (1)...(19): siRNA sense strand
gcaagcugcagaagaugaa

SEQ ID NO: 13666 - RNA, 19 nt, Homo sapiens
  misc_RNA (1)...(19): siRNA sense strand
agaaggugaucgagaagau

SEQ ID NO: 13667 - RNA, 19 nt, Homo sapiens
  misc_RNA (1)...(19): siRNA sense strand
ggacagggugcagcauuug

SEQ ID NO: 13668 - RNA, 19 nt, Homo sapiens
  misc_RNA (1)...(19): siRNA sense strand
ggccuucccuuggguucua

SEQ ID NO: 13669 - RNA, 19 nt, Homo sapiens
  misc_RNA (1)...(19): siRNA sense strand
gggcuucccuaugcucuca

SEQ ID NO: 13670 - RNA, 19 nt, Homo sapiens
  misc_RNA (1)...(19): siRNA sense strand
cgaaagaaugaucgagaga

SEQ ID NO: 13671 - RNA, 19 nt, Homo sapiens
  misc_RNA (1)...(19): siRNA sense strand
gggagcaggaggagacuug

SEQ ID NO: 13672 - RNA, 19 nt, Homo sapiens
  misc_RNA (1)...(19): siRNA sense strand
agaaugaucgagagaagga

SEQ ID NO: 13673 - RNA, 19 nt, Homo sapiens
  misc_RNA (1)...(19): siRNA sense strand
agggcaagcugcagaagau

SEQ ID NO: 13674 - RNA, 19 nt, Homo sapiens
  misc_RNA (1)...(19): siRNA sense strand
gaacaggcagcagggaaag

SEQ ID NO: 13675 - RNA, 19 nt, Homo sapiens
  misc_RNA (1)...(19): siRNA sense strand
ugagcuggauaugaagaaa

SEQ ID NO: 13676 - RNA, 19 nt, Homo sapiens
  misc_RNA (1)...(19): siRNA sense strand
ugaacaggcagcagggaaa

SEQ ID NO: 13677 - RNA, 19 nt, Homo sapiens
  misc_RNA (1)...(19): siRNA sense strand
gaaggugaucgagaagaug

SEQ ID NO: 13678 - RNA, 19 nt, Homo sapiens
  misc_RNA (1)...(19): siRNA sense strand
gagaaggugaucgagaaga

SEQ ID NO: 13679 - RNA, 19 nt, Homo sapiens
  misc_RNA (1)...(19): siRNA sense strand
ggcaagcugcagaagauga

SEQ ID NO: 13680 - RNA, 19 nt, Homo sapiens
  misc_RNA (1)...(19): siRNA sense strand
gacgagagaagcaggaucu

SEQ ID NO: 13681 - RNA, 19 nt, Homo sapiens
  misc_RNA (1)...(19): siRNA sense strand
ucauugacagcuucucuga

SEQ ID NO: 13682 - RNA, 19 nt, Homo sapiens
  misc_RNA (1)...(19): siRNA sense strand
ucuccucucugguacuuca

SEQ ID NO: 13683 - RNA, 19 nt, Homo sapiens
  misc_RNA (1)...(19): siRNA sense strand
uacacgggcuucccuaugc

SEQ ID NO: 13684 - RNA, 19 nt, Homo sapiens
  misc_RNA (1)...(19): siRNA sense strand
cggauccugucccuggaaa

SEQ ID NO: 13685 - RNA, 19 nt, Homo sapiens
  misc_RNA (1)...(19): siRNA sense strand
cuacacgggcuucccuaug

SEQ ID NO: 13686 - RNA, 19 nt, Homo sapiens
  misc_RNA (1)...(19): siRNA sense strand
gaaggagagaaccgcauac

SEQ ID NO: 13687 - RNA, 19 nt, Homo sapiens
  misc_RNA (1)...(19): siRNA sense strand
ggacggagcuggauaagaa

SEQ ID NO: 13688 - RNA, 19 nt, Homo sapiens
  misc_RNA (1)...(19): siRNA sense strand
ggagagaaccgcauacuga

SEQ ID NO: 13689 - RNA, 19 nt, Homo sapiens
  misc_RNA (1)...(19): siRNA sense strand
ugagugagcuggauaugaa

SEQ ID NO: 13690 - RNA, 19 nt, Homo sapiens
  misc_RNA (1)...(19): siRNA sense strand
ggaggagacuugacagaga

SEQ ID NO: 13691 - RNA, 19 nt, Homo sapiens
  misc_RNA (1)...(19): siRNA sense strand
ggaaggagagaaccgcaua

SEQ ID NO: 13692 - RNA, 19 nt, Homo sapiens
  misc_RNA (1)...(19): siRNA sense strand
gggacagggugcagcauuu

SEQ ID NO: 13693 - RNA, 19 nt, Homo sapiens
  misc_RNA (1)...(19): siRNA sense strand
agaaacugcugcugaguga

SEQ ID NO: 13694 - RNA, 19 nt, Homo sapiens
  misc_RNA (1)...(19): siRNA sense strand
aagagaaggugaucgagaa

SEQ ID NO: 13695 - RNA, 19 nt, Homo sapiens
  misc_RNA (1)...(19): siRNA sense strand
gaaagaaugaucgagagaa

SEQ ID NO: 13696 - RNA, 19 nt, Homo sapiens
  misc_RNA (1)...(19): siRNA sense strand
ugacagagaggcuacaaga

SEQ ID NO: 13697 - RNA, 19 nt, Homo sapiens
  misc_RNA (1)...(19): siRNA sense strand
cgaacuccaucaucauaga

SEQ ID NO: 13698 - RNA, 19 nt, Homo sapiens
  misc_RNA (1)...(19): siRNA sense strand
gaucuccucucugguacuu

SEQ ID NO: 13699 - RNA, 19 nt, Homo sapiens
  misc_RNA (1)...(19): siRNA sense strand
aaagaaugaucgagagaag

SEQ ID NO: 13700 - RNA, 19 nt, Homo sapiens
  misc_RNA (1)...(19): siRNA sense strand
gaacuccaucaucauagaa

SEQ ID NO: 13701 - RNA, 19 nt, Homo sapiens
  misc_RNA (1)...(19): siRNA sense strand
acagagaggcuacaagaga

SEQ ID NO: 13702 - RNA, 19 nt, Homo sapiens
  misc_RNA (1)...(19): siRNA sense strand
gcaagcugcagaagaugaa

SEQ ID NO: 13703 - RNA, 19 nt, Homo sapiens
  misc_RNA (1)...(19): siRNA sense strand
agaaggugaucgagaagau

SEQ ID NO: 13704 - RNA, 19 nt, Homo sapiens
  misc_RNA (1)...(19): siRNA sense strand
ggacagggugcagcauuug

SEQ ID NO: 13705 - RNA, 19 nt, Homo sapiens
  misc_RNA (1)...(19): siRNA sense strand
ggccuucccuuggguucua

SEQ ID NO: 13706 - RNA, 19 nt, Homo sapiens
  misc_RNA (1)...(19): siRNA sense strand
gggcuucccuaugcucuca

SEQ ID NO: 13707 - RNA, 19 nt, Homo sapiens
  misc_RNA (1)...(19): siRNA sense strand
cgaaagaaugaucgagaga

SEQ ID NO: 13708 - RNA, 19 nt, Homo sapiens
  misc_RNA (1)...(19): siRNA sense strand
gggagcaggaggagacuug

SEQ ID NO: 13709 - RNA, 19 nt, Homo sapiens
  misc_RNA (1)...(19): siRNA sense strand
agaaugaucgagagaagga

SEQ ID NO: 13710 - RNA, 19 nt, Homo sapiens
  misc_RNA (1)...(19): siRNA sense strand
agggcaagcugcagaagau

SEQ ID NO: 13711 - RNA, 19 nt, Homo sapiens
  misc_RNA (1)...(19): siRNA sense strand
gaacaggcagcagggaaag

SEQ ID NO: 13712 - RNA, 19 nt, Homo sapiens
  misc_RNA (1)...(19): siRNA sense strand
ugagcuggauaugaagaaa

SEQ ID NO: 13713 - RNA, 19 nt, Homo sapiens
  misc_RNA (1)...(19): siRNA sense strand
ugaacaggcagcagggaaa

SEQ ID NO: 13714 - RNA, 19 nt, Homo sapiens
  misc_RNA (1)...(19): siRNA sense strand
gaaggugaucgagaagaug

SEQ ID NO: 13715 - RNA, 19 nt, Homo sapiens
  misc_RNA (1)...(19): siRNA sense strand
gagaaggugaucgagaaga

SEQ ID NO: 13716 - RNA, 19 nt, Homo sapiens
  misc_RNA (1)...(19): siRNA sense strand
ggcaagcugcagaagauga

SEQ ID NO: 13717 - RNA, 19 nt, Homo sapiens
  misc_RNA (1)...(19): siRNA sense strand
gacgagagaagcaggaucu

SEQ ID NO: 13718 - RNA, 19 nt, Homo sapiens
  misc_RNA (1)...(19): siRNA sense strand
ucauugacagcuucucuga

SEQ ID NO: 13719 - RNA, 19 nt, Homo sapiens
  misc_RNA (1)...(19): siRNA sense strand
ucuccucucugguacuuca

SEQ ID NO: 13720 - RNA, 19 nt, Homo sapiens
  misc_RNA (1)...(19): siRNA sense strand
uacacgggcuucccuaugc

SEQ ID NO: 13721 - RNA, 19 nt, Homo sapiens
  misc_RNA (1)...(19): siRNA sense strand
cggauccugucccuggaaa

SEQ ID NO: 13722 - RNA, 19 nt, Homo sapiens
  misc_RNA (1)...(19): siRNA sense strand
cuacacgggcuucccuaug

SEQ ID NO: 13723 - RNA, 19 nt, Homo sapiens
  misc_RNA (1)...(19): siRNA sense strand
gaaggagagaaccgcauac

SEQ ID NO: 13724 - RNA, 19 nt, Homo sapiens
  misc_RNA (1)...(19): siRNA sense strand
gcacagacuuuaacacuaa

SEQ ID NO: 13725 - RNA, 19 nt, Homo sapiens
  misc_RNA (1)...(19): siRNA sense strand
ggacagcucuggauaacaa

SEQ ID NO: 13726 - RNA, 19 nt, Homo sapiens
  misc_RNA (1)...(19): siRNA sense strand
gaagugauauugaugugaa

SEQ ID NO: 13727 - RNA, 19 nt, Homo sapiens
  misc_RNA (1)...(19): siRNA sense strand
gcacuggcguuaagaguuu

SEQ ID NO: 13728 - RNA, 19 nt, Homo sapiens
  misc_RNA (1)...(19): siRNA sense strand
gcagacacauucacuagaa

SEQ ID NO: 13729 - RNA, 19 nt, Homo sapiens
  misc_RNA (1)...(19): siRNA sense strand
gccaagaacugauagacua

SEQ ID NO: 13730 - RNA, 19 nt, Homo sapiens
  misc_RNA (1)...(19): siRNA sense strand
gcuguuagguuaauuauuc

SEQ ID NO: 13731 - RNA, 19 nt, Homo sapiens
  misc_RNA (1)...(19): siRNA sense strand
gaagaacucagacagcaua

SEQ ID NO: 13732 - RNA, 19 nt, Homo sapiens
  misc_RNA (1)...(19): siRNA sense strand
gaaagaggcuguguucgau

SEQ ID NO: 13733 - RNA, 19 nt, Homo sapiens
  misc_RNA (1)...(19): siRNA sense strand
gaucuucacucggauguuu

SEQ ID NO: 13734 - RNA, 19 nt, Homo sapiens
  misc_RNA (1)...(19): siRNA sense strand
gaccagaccauguuagaua

SEQ ID NO: 13735 - RNA, 19 nt, Homo sapiens
  misc_RNA (1)...(19): siRNA sense strand
ugaaagagcuguccaacca

SEQ ID NO: 13736 - RNA, 19 nt, Homo sapiens
  misc_RNA (1)...(19): siRNA sense strand
gaacgacacauaucaguau

SEQ ID NO: 13737 - RNA, 19 nt, Homo sapiens
  misc_RNA (1)...(19): siRNA sense strand
gauacaaucugcaaaugau

SEQ ID NO: 13738 - RNA, 19 nt, Homo sapiens
  misc_RNA (1)...(19): siRNA sense strand
gaauuuaccauguuacuug

SEQ ID NO: 13739 - RNA, 19 nt, Homo sapiens
  misc_RNA (1)...(19): siRNA sense strand
ggaccaaacucugcugcua

SEQ ID NO: 13740 - RNA, 19 nt, Homo sapiens
  misc_RNA (1)...(19): siRNA sense strand
ggccacaucugguguugua

SEQ ID NO: 13741 - RNA, 19 nt, Homo sapiens
  misc_RNA (1)...(19): siRNA sense strand
uguuguagcuguuagguua

SEQ ID NO: 13742 - RNA, 19 nt, Homo sapiens
  misc_RNA (1)...(19): siRNA sense strand
gagaaaggcagcacagauu

SEQ ID NO: 13743 - RNA, 19 nt, Homo sapiens
  misc_RNA (1)...(19): siRNA sense strand
acacaucccuagguuaaua

SEQ ID NO: 13744 - RNA, 19 nt, Homo sapiens
  misc_RNA (1)...(19): siRNA sense strand
gugcuaaucucucuguuug

SEQ ID NO: 13745 - RNA, 19 nt, Homo sapiens
  misc_RNA (1)...(19): siRNA sense strand
agacaaagaccauucaauu

SEQ ID NO: 13746 - RNA, 19 nt, Homo sapiens
  misc_RNA (1)...(19): siRNA sense strand
ugaaauacauugagucucu

SEQ ID NO: 13747 - RNA, 19 nt, Homo sapiens
  misc_RNA (1)...(19): siRNA sense strand
gcuaaucucucuguuugaa

SEQ ID NO: 13748 - RNA, 19 nt, Homo sapiens
  misc_RNA (1)...(19): siRNA sense strand
ccacauauaugcaacuuac

SEQ ID NO: 13749 - RNA, 19 nt, Homo sapiens
  misc_RNA (1)...(19): siRNA sense strand
agaaggagcuggugcuguu

SEQ ID NO: 13750 - RNA, 19 nt, Homo sapiens
  misc_RNA (1)...(19): siRNA sense strand
gagggcagaucucaguaaa

SEQ ID NO: 13751 - RNA, 19 nt, Homo sapiens
  misc_RNA (1)...(19): siRNA sense strand
gguucgagaugcagcaaua

SEQ ID NO: 13752 - RNA, 19 nt, Homo sapiens
  misc_RNA (1)...(19): siRNA sense strand
gaucugaaugagccaauua

SEQ ID NO: 13753 - RNA, 19 nt, Homo sapiens
  misc_RNA (1)...(19): siRNA sense strand
gaauaaguuugaccaugga

SEQ ID NO: 13754 - RNA, 19 nt, Homo sapiens
  misc_RNA (1)...(19): siRNA sense strand
gaaccugaacucugaagaa

SEQ ID NO: 13755 - RNA, 19 nt, Homo sapiens
  misc_RNA (1)...(19): siRNA sense strand
cugcagaacuuacugaaga

SEQ ID NO: 13756 - RNA, 19 nt, Homo sapiens
  misc_RNA (1)...(19): siRNA sense strand
gaacucagacagcauagug

SEQ ID NO: 13757 - RNA, 19 nt, Homo sapiens
  misc_RNA (1)...(19): siRNA sense strand
uggcugaccuucugaaaga

SEQ ID NO: 13758 - RNA, 19 nt, Homo sapiens
  misc_RNA (1)...(19): siRNA sense strand
ucauauggcuccaggaaug

SEQ ID NO: 13759 - RNA, 19 nt, Homo sapiens
  misc_RNA (1)...(19): siRNA sense strand
caacagugaugccucaagu

SEQ ID NO: 13760 - RNA, 19 nt, Homo sapiens
  misc_RNA (1)...(19): siRNA sense strand
gggcaucugucaucaguuc

SEQ ID NO: 13761 - RNA, 19 nt, Homo sapiens
  misc_RNA (1)...(19): siRNA sense strand
ccaccaaacuccugcacaa

SEQ ID NO: 13762 - RNA, 19 nt, Homo sapiens
  misc_RNA (1)...(19): siRNA sense strand
uggagacucuuguggauuu

SEQ ID NO: 13763 - RNA, 19 nt, Homo sapiens
  misc_RNA (1)...(19): siRNA sense strand
cguaugggauguauucuga

SEQ ID NO: 13764 - RNA, 19 nt, Homo sapiens
  misc_RNA (1)...(19): siRNA sense strand
gggaauacaugaugcugau

SEQ ID NO: 13765 - RNA, 19 nt, Homo sapiens
  misc_RNA (1)...(19): siRNA sense strand
gaugaagcuacuaaacuua

SEQ ID NO: 13766 - RNA, 19 nt, Homo sapiens
  misc_RNA (1)...(19): siRNA sense strand
caaagaccauucaauucga

SEQ ID NO: 13767 - RNA, 19 nt, Homo sapiens
  misc_RNA (1)...(19): siRNA sense strand
cgacaagaccgcccugaaa

SEQ ID NO: 13768 - RNA, 19 nt, Homo sapiens
  misc_RNA (1)...(19): siRNA sense strand
auaaacagcuuaguggaaa

SEQ ID NO: 13769 - RNA, 19 nt, Homo sapiens
  misc_RNA (1)...(19): siRNA sense strand
ggagacccuuggagacaaa

SEQ ID NO: 13770 - RNA, 19 nt, Homo sapiens
  misc_RNA (1)...(19): siRNA sense strand
gcacaaccaccucaagaau

SEQ ID NO: 13771 - RNA, 19 nt, Homo sapiens
  misc_RNA (1)...(19): siRNA sense strand
gggagcagauuuacuugga

SEQ ID NO: 13772 - RNA, 19 nt, Homo sapiens
  misc_RNA (1)...(19): siRNA sense strand
uaaagaagggaauacauga

SEQ ID NO: 13773 - RNA, 19 nt, Homo sapiens
  misc_RNA (1)...(19): siRNA sense strand
gaauuuccguacucgagaa

SEQ ID NO: 13774 - RNA, 19 nt, Homo sapiens
  misc_RNA (1)...(19): siRNA sense strand
gcgcuaaagugguuucaca

SEQ ID NO: 13775 - RNA, 19 nt, Homo sapiens
  misc_RNA (1)...(19): siRNA sense strand
ccuuuaaacucucugcuaa

SEQ ID NO: 13776 - RNA, 19 nt, Homo sapiens
  misc_RNA (1)...(19): siRNA sense strand
gauggagccuuuaaacucu

SEQ ID NO: 13777 - RNA, 19 nt, Homo sapiens
  misc_RNA (1)...(19): siRNA sense strand
gaaaucuggaaacaugaua

SEQ ID NO: 13778 - RNA, 19 nt, Homo sapiens
  misc_RNA (1)...(19): siRNA sense strand
aacaagaccucacuacuca

SEQ ID NO: 13779 - RNA, 19 nt, Homo sapiens
  misc_RNA (1)...(19): siRNA sense strand
cugaagaaaucuauaguuc

SEQ ID NO: 13780 - RNA, 19 nt, Homo sapiens
  misc_RNA (1)...(19): siRNA sense strand
ccucauagcaagagaguuu

SEQ ID NO: 13781 - RNA, 19 nt, Homo sapiens
  misc_RNA (1)...(19): siRNA sense strand
gaggagauaugagccguau

SEQ ID NO: 13782 - RNA, 19 nt, Homo sapiens
  misc_RNA (1)...(19): siRNA sense strand
gagcacaaguacagaucuu

SEQ ID NO: 13783 - RNA, 19 nt, Homo sapiens
  misc_RNA (1)...(19): siRNA sense strand
ggaaguaccacaucuagag

SEQ ID NO: 13784 - RNA, 19 nt, Homo sapiens
  misc_RNA (1)...(19): siRNA sense strand
acaagcaacuguaccucua

SEQ ID NO: 13785 - RNA, 19 nt, Homo sapiens
  misc_RNA (1)...(19): siRNA sense strand
ugggugaacucuagcaauu

SEQ ID NO: 13786 - RNA, 19 nt, Homo sapiens
  misc_RNA (1)...(19): siRNA sense strand
agaugaagcuacuaaacuu

SEQ ID NO: 13787 - RNA, 19 nt, Homo sapiens
  misc_RNA (1)...(19): siRNA sense strand
ccacaaagacucccauaag

SEQ ID NO: 13788 - RNA, 19 nt, Homo sapiens
  misc_RNA (1)...(19): siRNA sense strand
gacaaagaccauucaauuc

SEQ ID NO: 13789 - RNA, 19 nt, Homo sapiens
  misc_RNA (1)...(19): siRNA sense strand
acaaccaccucaagaauuc

SEQ ID NO: 13790 - RNA, 19 nt, Homo sapiens
  misc_RNA (1)...(19): siRNA sense strand
acacacaucccuagguuaa

SEQ ID NO: 13791 - RNA, 19 nt, Homo sapiens
  misc_RNA (1)...(19): siRNA sense strand
cgacacauaucaguauuag

SEQ ID NO: 13792 - RNA, 19 nt, Homo sapiens
  misc_RNA (1)...(19): siRNA sense strand
gaaaguagugugcguaagg

SEQ ID NO: 13793 - RNA, 19 nt, Homo sapiens
  misc_RNA (1)...(19): siRNA sense strand
agugaugccucaaguguuu

SEQ ID NO: 13794 - RNA, 19 nt, Homo sapiens
  misc_RNA (1)...(19): siRNA sense strand
aaacucugcugcuaaagau

SEQ ID NO: 13795 - RNA, 19 nt, Homo sapiens
  misc_RNA (1)...(19): siRNA sense strand
ccugaacucugaagaaauc

SEQ ID NO: 13796 - RNA, 19 nt, Homo sapiens
  misc_RNA (1)...(19): siRNA sense strand
gaugagauuuauuguggau

SEQ ID NO: 13797 - RNA, 19 nt, Homo sapiens
  misc_RNA (1)...(19): siRNA sense strand
cgugagagcagccgagaua

SEQ ID NO: 13798 - RNA, 19 nt, Homo sapiens
  misc_RNA (1)...(19): siRNA sense strand
gagaagcagagcacuugua

SEQ ID NO: 13799 - RNA, 19 nt, Homo sapiens
  misc_RNA (1)...(19): siRNA sense strand
acacacacaucccuagguu

SEQ ID NO: 13800 - RNA, 19 nt, Homo sapiens
  misc_RNA (1)...(19): siRNA sense strand
gccgagaccuugaggaauc

SEQ ID NO: 13801 - RNA, 19 nt, Homo sapiens
  misc_RNA (1)...(19): siRNA sense strand
cgaugaagauucuguggau

SEQ ID NO: 13802 - RNA, 19 nt, Homo sapiens
  misc_RNA (1)...(19): siRNA sense strand
gccaagaagaucugaauga

SEQ ID NO: 13803 - RNA, 19 nt, Homo sapiens
  misc_RNA (1)...(19): siRNA sense strand
gaacucugaagaaaucuau

SEQ ID NO: 13804 - RNA, 19 nt, Homo sapiens
  misc_RNA (1)...(19): siRNA sense strand
gcaagagaguuuucaguau

SEQ ID NO: 13805 - RNA, 19 nt, Homo sapiens
  misc_RNA (1)...(19): siRNA sense strand
ggauggagccuuuaaacuc

SEQ ID NO: 13806 - RNA, 19 nt, Homo sapiens
  misc_RNA (1)...(19): siRNA sense strand
gaccaaacucugcugcuaa

SEQ ID NO: 13807 - RNA, 19 nt, Homo sapiens
  misc_RNA (1)...(19): siRNA sense strand
gaagucugcugaccuugag

SEQ ID NO: 13808 - RNA, 19 nt, Homo sapiens
  misc_RNA (1)...(19): siRNA sense strand
cauguuagauaaacuugug

SEQ ID NO: 13809 - RNA, 19 nt, Homo sapiens
  misc_RNA (1)...(19): siRNA sense strand
ugaggaauccauaaacaaa

SEQ ID NO: 13810 - RNA, 19 nt, Homo sapiens
  misc_RNA (1)...(19): siRNA sense strand
caggcuugcugcaggguua

SEQ ID NO: 13811 - RNA, 19 nt, Homo sapiens
  misc_RNA (1)...(19): siRNA sense strand
aagauucuguggaugguaa

SEQ ID NO: 13812 - RNA, 19 nt, Homo sapiens
  misc_RNA (1)...(19): siRNA sense strand
gagcugacgauuaugaaga

SEQ ID NO: 13813 - RNA, 19 nt, Homo sapiens
  misc_RNA (1)...(19): siRNA sense strand
ccaagaagaucugaaugag

SEQ ID NO: 13814 - RNA, 19 nt, Homo sapiens
  misc_RNA (1)...(19): siRNA sense strand
aaguugcaauccugaaaua

SEQ ID NO: 13815 - RNA, 19 nt, Homo sapiens
  misc_RNA (1)...(19): siRNA sense strand
caaaguugcaauccugaaa

SEQ ID NO: 13816 - RNA, 19 nt, Homo sapiens
  misc_RNA (1)...(19): siRNA sense strand
gauguauucugacgaugau

SEQ ID NO: 13817 - RNA, 19 nt, Homo sapiens
  misc_RNA (1)...(19): siRNA sense strand
ggagauaugagccguaugg

SEQ ID NO: 13818 - RNA, 19 nt, Homo sapiens
  misc_RNA (1)...(19): siRNA sense strand
ggauguagccgggaaacaa

SEQ ID NO: 13819 - RNA, 19 nt, Homo sapiens
  misc_RNA (1)...(19): siRNA sense strand
gggaaauauuaucugauga

SEQ ID NO: 13820 - RNA, 19 nt, Homo sapiens
  misc_RNA (1)...(19): siRNA sense strand
gagcuggugcuguugauga

SEQ ID NO: 13821 - RNA, 19 nt, Homo sapiens
  misc_RNA (1)...(19): siRNA sense strand
uaacaagaccucacuacuc

SEQ ID NO: 13822 - RNA, 19 nt, Homo sapiens
  misc_RNA (1)...(19): siRNA sense strand
gcaagaugaagcuacuaaa

SEQ ID NO: 13823 - RNA, 19 nt, Homo sapiens
  misc_RNA (1)...(19): siRNA sense strand
ggagcaagaugaagcuacu

SEQ ID NO: 13824 - RNA, 19 nt, Homo sapiens
  misc_RNA (1)...(19): siRNA sense strand
gcaagggccuguccaaagg

SEQ ID NO: 13825 - RNA, 19 nt, Homo sapiens
  misc_RNA (1)...(19): siRNA sense strand
ggaggaagagcccaagauu

SEQ ID NO: 13826 - RNA, 19 nt, Homo sapiens
  misc_RNA (1)...(19): siRNA sense strand
gaggaagagcccaagauuc

SEQ ID NO: 13827 - RNA, 19 nt, Homo sapiens
  misc_RNA (1)...(19): siRNA sense strand
cgagagccguacagugcuu

SEQ ID NO: 13828 - RNA, 19 nt, Homo sapiens
  misc_RNA (1)...(19): siRNA sense strand
ggcuggagcuccucuugag

SEQ ID NO: 13829 - RNA, 19 nt, Homo sapiens
  misc_RNA (1)...(19): siRNA sense strand
gggacaggaccuauugcaa

SEQ ID NO: 13830 - RNA, 19 nt, Homo sapiens
  misc_RNA (1)...(19): siRNA sense strand
augcggaucuggaccaucu

SEQ ID NO: 13831 - RNA, 19 nt, Homo sapiens
  misc_RNA (1)...(19): siRNA sense strand
gcaagggccuguccaaagg

SEQ ID NO: 13832 - RNA, 19 nt, Homo sapiens
  misc_RNA (1)...(19): siRNA sense strand
ggaggaagagcccaagauu

SEQ ID NO: 13833 - RNA, 19 nt, Homo sapiens
  misc_RNA (1)...(19): siRNA sense strand
caccaucuaugcaguugua

SEQ ID NO: 13834 - RNA, 19 nt, Homo sapiens
  misc_RNA (1)...(19): siRNA sense strand
cuaugcaguuguaguuuga

SEQ ID NO: 13835 - RNA, 19 nt, Homo sapiens
  misc_RNA (1)...(19): siRNA sense strand
gaggaagagcccaagauuc

SEQ ID NO: 13836 - RNA, 19 nt, Homo sapiens
  misc_RNA (1)...(19): siRNA sense strand
caucuaugcaguuguaguu

SEQ ID NO: 13837 - RNA, 19 nt, Homo sapiens
  misc_RNA (1)...(19): siRNA sense strand
ucuaugcaguuguaguuug

SEQ ID NO: 13838 - RNA, 19 nt, Homo sapiens
  misc_RNA (1)...(19): siRNA sense strand
cgagagccguacagugcuu

SEQ ID NO: 13839 - RNA, 19 nt, Homo sapiens
  misc_RNA (1)...(19): siRNA sense strand
ggcuggagcuccucuugag

SEQ ID NO: 13840 - RNA, 19 nt, Homo sapiens
  misc_RNA (1)...(19): siRNA sense strand
gggacaggaccuauugcaa

SEQ ID NO: 13841 - RNA, 19 nt, Homo sapiens
  misc_RNA (1)...(19): siRNA sense strand
augcggaucuggaccaucu

SEQ ID NO: 13842 - RNA, 19 nt, Homo sapiens
  misc_RNA (1)...(19): siRNA sense strand
gcaagggccuguccaaagg

SEQ ID NO: 13843 - RNA, 19 nt, Homo sapiens
  misc_RNA (1)...(19): siRNA sense strand
ggaggaagagcccaagauu

SEQ ID NO: 13844 - RNA, 19 nt, Homo sapiens
  misc_RNA (1)...(19): siRNA sense strand
caccaucuaugcaguugua

SEQ ID NO: 13845 - RNA, 19 nt, Homo sapiens
  misc_RNA (1)...(19): siRNA sense strand
cuaugcaguuguaguuuga

SEQ ID NO: 13846 - RNA, 19 nt, Homo sapiens
  misc_RNA (1)...(19): siRNA sense strand
gaggaagagcccaagauuc

SEQ ID NO: 13847 - RNA, 19 nt, Homo sapiens
  misc_RNA (1)...(19): siRNA sense strand
caucuaugcaguuguaguu

SEQ ID NO: 13848 - RNA, 19 nt, Homo sapiens
  misc_RNA (1)...(19): siRNA sense strand
ucuaugcaguuguaguuug

SEQ ID NO: 13849 - RNA, 19 nt, Homo sapiens
  misc_RNA (1)...(19): siRNA sense strand
cgagagccguacagugcuu

SEQ ID NO: 13850 - RNA, 19 nt, Homo sapiens
  misc_RNA (1)...(19): siRNA sense strand
ggcuggagcuccucuugag

SEQ ID NO: 13851 - RNA, 19 nt, Homo sapiens
  misc_RNA (1)...(19): siRNA sense strand
gggacaggaccuauugcaa

SEQ ID NO: 13852 - RNA, 19 nt, Homo sapiens
  misc_RNA (1)...(19): siRNA sense strand
augcggaucuggaccaucu

SEQ ID NO: 13853 - RNA, 19 nt, Homo sapiens
  misc_RNA (1)...(19): siRNA sense strand
gcaagggccuguccaaagg

SEQ ID NO: 13854 - RNA, 19 nt, Homo sapiens
  misc_RNA (1)...(19): siRNA sense strand
ggaggaagagcccaagauu

SEQ ID NO: 13855 - RNA, 19 nt, Homo sapiens
  misc_RNA (1)...(19): siRNA sense strand
gaggaagagcccaagauuc

SEQ ID NO: 13856 - RNA, 19 nt, Homo sapiens
  misc_RNA (1)...(19): siRNA sense strand
cgagagccguacagugcuu

SEQ ID NO: 13857 - RNA, 19 nt, Homo sapiens
  misc_RNA (1)...(19): siRNA sense strand
ggcuggagcuccucuugag

SEQ ID NO: 13858 - RNA, 19 nt, Homo sapiens
  misc_RNA (1)...(19): siRNA sense strand
gggacaggaccuauugcaa

SEQ ID NO: 13859 - RNA, 19 nt, Homo sapiens
  misc_RNA (1)...(19): siRNA sense strand
augcggaucuggaccaucu

SEQ ID NO: 13860 - RNA, 19 nt, Homo sapiens
  misc_RNA (1)...(19): siRNA sense strand
gcaagggccuguccaaagg

SEQ ID NO: 13861 - RNA, 19 nt, Homo sapiens
  misc_RNA (1)...(19): siRNA sense strand
ggaggaagagcccaagauu

SEQ ID NO: 13862 - RNA, 19 nt, Homo sapiens
  misc_RNA (1)...(19): siRNA sense strand
caccaucuaugcaguugua

SEQ ID NO: 13863 - RNA, 19 nt, Homo sapiens
  misc_RNA (1)...(19): siRNA sense strand
cuaugcaguuguaguuuga

SEQ ID NO: 13864 - RNA, 19 nt, Homo sapiens
  misc_RNA (1)...(19): siRNA sense strand
gaggaagagcccaagauuc

SEQ ID NO: 13865 - RNA, 19 nt, Homo sapiens
  misc_RNA (1)...(19): siRNA sense strand
caucuaugcaguuguaguu

SEQ ID NO: 13866 - RNA, 19 nt, Homo sapiens
  misc_RNA (1)...(19): siRNA sense strand
ucuaugcaguuguaguuug

SEQ ID NO: 13867 - RNA, 19 nt, Homo sapiens
  misc_RNA (1)...(19): siRNA sense strand
cgagagccguacagugcuu

SEQ ID NO: 13868 - RNA, 19 nt, Homo sapiens
  misc_RNA (1)...(19): siRNA sense strand
ggcuggagcuccucuugag

SEQ ID NO: 13869 - RNA, 19 nt, Homo sapiens
  misc_RNA (1)...(19): siRNA sense strand
gggacaggaccuauugcaa

SEQ ID NO: 13870 - RNA, 19 nt, Homo sapiens
  misc_RNA (1)...(19): siRNA sense strand
augcggaucuggaccaucu

SEQ ID NO: 13871 - RNA, 19 nt, Homo sapiens
  misc_RNA (1)...(19): siRNA sense strand
gcaagggccuguccaaagg

SEQ ID NO: 13872 - RNA, 19 nt, Homo sapiens
  misc_RNA (1)...(19): siRNA sense strand
cgagagccguacagugcuu

SEQ ID NO: 13873 - RNA, 19 nt, Homo sapiens
  misc_RNA (1)...(19): siRNA sense strand
ggcuggagcuccucuugag

SEQ ID NO: 13874 - RNA, 19 nt, Homo sapiens
  misc_RNA (1)...(19): siRNA sense strand
gggacaggaccuauugcaa

SEQ ID NO: 13875 - RNA, 19 nt, Homo sapiens
  misc_RNA (1)...(19): siRNA sense strand
gcaagggccuguccaaagg

SEQ ID NO: 13876 - RNA, 19 nt, Homo sapiens
  misc_RNA (1)...(19): siRNA sense strand
ggaggaagagcccaagauu

SEQ ID NO: 13877 - RNA, 19 nt, Homo sapiens
  misc_RNA (1)...(19): siRNA sense strand
gaggaagagcccaagauuc

SEQ ID NO: 13878 - RNA, 19 nt, Homo sapiens
  misc_RNA (1)...(19): siRNA sense strand
cgagagccguacagugcuu

SEQ ID NO: 13879 - RNA, 19 nt, Homo sapiens
  misc_RNA (1)...(19): siRNA sense strand
ggcuggagcuccucuugag

SEQ ID NO: 13880 - RNA, 19 nt, Homo sapiens
  misc_RNA (1)...(19): siRNA sense strand
gggacaggaccuauugcaa

SEQ ID NO: 13881 - RNA, 19 nt, Homo sapiens
  misc_RNA (1)...(19): siRNA sense strand
gcaagggccuguccaaagg

SEQ ID NO: 13882 - RNA, 19 nt, Homo sapiens
  misc_RNA (1)...(19): siRNA sense strand
ggaggaagagcccaagauu

SEQ ID NO: 13883 - RNA, 19 nt, Homo sapiens
  misc_RNA (1)...(19): siRNA sense strand
gaggaagagcccaagauuc

SEQ ID NO: 13884 - RNA, 19 nt, Homo sapiens
  misc_RNA (1)...(19): siRNA sense strand
cgagagccguacagugcuu

SEQ ID NO: 13885 - RNA, 19 nt, Homo sapiens
  misc_RNA (1)...(19): siRNA sense strand
ggcuggagcuccucuugag

SEQ ID NO: 13886 - RNA, 19 nt, Homo sapiens
  misc_RNA (1)...(19): siRNA sense strand
gggacaggaccuauugcaa

SEQ ID NO: 13887 - RNA, 19 nt, Homo sapiens
  misc_RNA (1)...(19): siRNA sense strand
augcggaucuggaccaucu

SEQ ID NO: 13888 - RNA, 19 nt, Homo sapiens
  misc_RNA (1)...(19): siRNA sense strand
gcaagggccuguccaaagg

SEQ ID NO: 13889 - RNA, 19 nt, Homo sapiens
  misc_RNA (1)...(19): siRNA sense strand
ggaggaagagcccaagauu

SEQ ID NO: 13890 - RNA, 19 nt, Homo sapiens
  misc_RNA (1)...(19): siRNA sense strand
caccaucuaugcaguugua

SEQ ID NO: 13891 - RNA, 19 nt, Homo sapiens
  misc_RNA (1)...(19): siRNA sense strand
cuaugcaguuguaguuuga

SEQ ID NO: 13892 - RNA, 19 nt, Homo sapiens
  misc_RNA (1)...(19): siRNA sense strand
gaggaagagcccaagauuc

SEQ ID NO: 13893 - RNA, 19 nt, Homo sapiens
  misc_RNA (1)...(19): siRNA sense strand
caucuaugcaguuguaguu

SEQ ID NO: 13894 - RNA, 19 nt, Homo sapiens
  misc_RNA (1)...(19): siRNA sense strand
ucuaugcaguuguaguuug

SEQ ID NO: 13895 - RNA, 19 nt, Homo sapiens
  misc_RNA (1)...(19): siRNA sense strand
cgagagccguacagugcuu

SEQ ID NO: 13896 - RNA, 19 nt, Homo sapiens
  misc_RNA (1)...(19): siRNA sense strand
ggcuggagcuccucuugag

SEQ ID NO: 13897 - RNA, 19 nt, Homo sapiens
  misc_RNA (1)...(19): siRNA sense strand
gggacaggaccuauugcaa

SEQ ID NO: 13898 - RNA, 19 nt, Homo sapiens
  misc_RNA (1)...(19): siRNA sense strand
augcggaucuggaccaucu

SEQ ID NO: 13899 - RNA, 19 nt, Homo sapiens
  misc_RNA (1)...(19): siRNA sense strand
gcaagggccuguccaaagg

SEQ ID NO: 13900 - RNA, 19 nt, Homo sapiens
  misc_RNA (1)...(19): siRNA sense strand
ggaggaagagcccaagauu

SEQ ID NO: 13901 - RNA, 19 nt, Homo sapiens
  misc_RNA (1)...(19): siRNA sense strand
caccaucuaugcaguugua

SEQ ID NO: 13902 - RNA, 19 nt, Homo sapiens
  misc_RNA (1)...(19): siRNA sense strand
cuaugcaguuguaguuuga

SEQ ID NO: 13903 - RNA, 19 nt, Homo sapiens
  misc_RNA (1)...(19): siRNA sense strand
gaggaagagcccaagauuc

SEQ ID NO: 13904 - RNA, 19 nt, Homo sapiens
  misc_RNA (1)...(19): siRNA sense strand
caucuaugcaguuguaguu

SEQ ID NO: 13905 - RNA, 19 nt, Homo sapiens
  misc_RNA (1)...(19): siRNA sense strand
ucuaugcaguuguaguuug

SEQ ID NO: 13906 - RNA, 19 nt, Homo sapiens
  misc_RNA (1)...(19): siRNA sense strand
cgagagccguacagugcuu

SEQ ID NO: 13907 - RNA, 19 nt, Homo sapiens
  misc_RNA (1)...(19): siRNA sense strand
ggcuggagcuccucuugag

SEQ ID NO: 13908 - RNA, 19 nt, Homo sapiens
  misc_RNA (1)...(19): siRNA sense strand
gggacaggaccuauugcaa

SEQ ID NO: 13909 - RNA, 19 nt, Homo sapiens
  misc_RNA (1)...(19): siRNA sense strand
augcggaucuggaccaucu

SEQ ID NO: 13910 - RNA, 19 nt, Homo sapiens
  misc_RNA (1)...(19): siRNA sense strand
gcaagggccuguccaaagg

SEQ ID NO: 13911 - RNA, 19 nt, Homo sapiens
  misc_RNA (1)...(19): siRNA sense strand
ggaggaagagcccaagauu

SEQ ID NO: 13912 - RNA, 19 nt, Homo sapiens
  misc_RNA (1)...(19): siRNA sense strand
gaggaagagcccaagauuc

SEQ ID NO: 13913 - RNA, 19 nt, Homo sapiens
  misc_RNA (1)...(19): siRNA sense strand
cgagagccguacagugcuu

SEQ ID NO: 13914 - RNA, 19 nt, Homo sapiens
  misc_RNA (1)...(19): siRNA sense strand
ggcuggagcuccucuugag

SEQ ID NO: 13915 - RNA, 19 nt, Homo sapiens
  misc_RNA (1)...(19): siRNA sense strand
gggacaggaccuauugcaa

SEQ ID NO: 13916 - RNA, 19 nt, Homo sapiens
  misc_RNA (1)...(19): siRNA sense strand
augcggaucuggaccaucu

SEQ ID NO: 13917 - RNA, 19 nt, Homo sapiens
  misc_RNA (1)...(19): siRNA sense strand
gcaagggccuguccaaagg

SEQ ID NO: 13918 - RNA, 19 nt, Homo sapiens
  misc_RNA (1)...(19): siRNA sense strand
ggaggaagagcccaagauu

SEQ ID NO: 13919 - RNA, 19 nt, Homo sapiens
  misc_RNA (1)...(19): siRNA sense strand
caccaucuaugcaguugua

SEQ ID NO: 13920 - RNA, 19 nt, Homo sapiens
  misc_RNA (1)...(19): siRNA sense strand
cuaugcaguuguaguuuga

SEQ ID NO: 13921 - RNA, 19 nt, Homo sapiens
  misc_RNA (1)...(19): siRNA sense strand
gaggaagagcccaagauuc

SEQ ID NO: 13922 - RNA, 19 nt, Homo sapiens
  misc_RNA (1)...(19): siRNA sense strand
caucuaugcaguuguaguu

SEQ ID NO: 13923 - RNA, 19 nt, Homo sapiens
  misc_RNA (1)...(19): siRNA sense strand
ucuaugcaguuguaguuug

SEQ ID NO: 13924 - RNA, 19 nt, Homo sapiens
  misc_RNA (1)...(19): siRNA sense strand
cgagagccguacagugcuu

SEQ ID NO: 13925 - RNA, 19 nt, Homo sapiens
  misc_RNA (1)...(19): siRNA sense strand
ggcuggagcuccucuugag

SEQ ID NO: 13926 - RNA, 19 nt, Homo sapiens
  misc_RNA (1)...(19): siRNA sense strand
gggacaggaccuauugcaa

SEQ ID NO: 13927 - RNA, 19 nt, Homo sapiens
  misc_RNA (1)...(19): siRNA sense strand
augcggaucuggaccaucu

SEQ ID NO: 13928 - RNA, 19 nt, Homo sapiens
  misc_RNA (1)...(19): siRNA sense strand
gcaagggccuguccaaagg

SEQ ID NO: 13929 - RNA, 19 nt, Homo sapiens
  misc_RNA (1)...(19): siRNA sense strand
cgagagccguacagugcuu

SEQ ID NO: 13930 - RNA, 19 nt, Homo sapiens
  misc_RNA (1)...(19): siRNA sense strand
ggcuggagcuccucuugag

SEQ ID NO: 13931 - RNA, 19 nt, Homo sapiens
  misc_RNA (1)...(19): siRNA sense strand
gggacaggaccuauugcaa

SEQ ID NO: 13932 - RNA, 19 nt, Homo sapiens
  misc_RNA (1)...(19): siRNA sense strand
gcaagggccuguccaaagg

SEQ ID NO: 13933 - RNA, 19 nt, Homo sapiens
  misc_RNA (1)...(19): siRNA sense strand
ggaggaagagcccaagauu

SEQ ID NO: 13934 - RNA, 19 nt, Homo sapiens
  misc_RNA (1)...(19): siRNA sense strand
gaggaagagcccaagauuc

SEQ ID NO: 13935 - RNA, 19 nt, Homo sapiens
  misc_RNA (1)...(19): siRNA sense strand
cgagagccguacagugcuu

SEQ ID NO: 13936 - RNA, 19 nt, Homo sapiens
  misc_RNA (1)...(19): siRNA sense strand
ggcuggagcuccucuugag

SEQ ID NO: 13937 - RNA, 19 nt, Homo sapiens
  misc_RNA (1)...(19): siRNA sense strand
gggacaggaccuauugcaa

SEQ ID NO: 13938 - RNA, 19 nt, Homo sapiens
  misc_RNA (1)...(19): siRNA sense strand
gcaagggccuguccaaagg

SEQ ID NO: 13939 - RNA, 19 nt, Homo sapiens
  misc_RNA (1)...(19): siRNA sense strand
ggaggaagagcccaagauu

SEQ ID NO: 13940 - RNA, 19 nt, Homo sapiens
  misc_RNA (1)...(19): siRNA sense strand
gaggaagagcccaagauuc

SEQ ID NO: 13941 - RNA, 19 nt, Homo sapiens
  misc_RNA (1)...(19): siRNA sense strand
cgagagccguacagugcuu

SEQ ID NO: 13942 - RNA, 19 nt, Homo sapiens
  misc_RNA (1)...(19): siRNA sense strand
ggcuggagcuccucuugag

SEQ ID NO: 13943 - RNA, 19 nt, Homo sapiens
  misc_RNA (1)...(19): siRNA sense strand
gggacaggaccuauugcaa

SEQ ID NO: 13944 - RNA, 19 nt, Homo sapiens
  misc_RNA (1)...(19): siRNA sense strand
augcggaucuggaccaucu

SEQ ID NO: 13945 - RNA, 19 nt, Homo sapiens
  misc_RNA (1)...(19): siRNA sense strand
gcaagggccuguccaaagg

SEQ ID NO: 13946 - RNA, 19 nt, Homo sapiens
  misc_RNA (1)...(19): siRNA sense strand
ggaggaagagcccaagauu

SEQ ID NO: 13947 - RNA, 19 nt, Homo sapiens
  misc_RNA (1)...(19): siRNA sense strand
caccaucuaugcaguugua

SEQ ID NO: 13948 - RNA, 19 nt, Homo sapiens
  misc_RNA (1)...(19): siRNA sense strand
cuaugcaguuguaguuuga

SEQ ID NO: 13949 - RNA, 19 nt, Homo sapiens
  misc_RNA (1)...(19): siRNA sense strand
gaggaagagcccaagauuc

SEQ ID NO: 13950 - RNA, 19 nt, Homo sapiens
  misc_RNA (1)...(19): siRNA sense strand
caucuaugcaguuguaguu

SEQ ID NO: 13951 - RNA, 19 nt, Homo sapiens
  misc_RNA (1)...(19): siRNA sense strand
ucuaugcaguuguaguuug

SEQ ID NO: 13952 - RNA, 19 nt, Homo sapiens
  misc_RNA (1)...(19): siRNA sense strand
cgagagccguacagugcuu

SEQ ID NO: 13953 - RNA, 19 nt, Homo sapiens
  misc_RNA (1)...(19): siRNA sense strand
ggcuggagcuccucuugag

SEQ ID NO: 13954 - RNA, 19 nt, Homo sapiens
  misc_RNA (1)...(19): siRNA sense strand
gggacaggaccuauugcaa

SEQ ID NO: 13955 - RNA, 19 nt, Homo sapiens
  misc_RNA (1)...(19): siRNA sense strand
augcggaucuggaccaucu

SEQ ID NO: 13956 - RNA, 19 nt, Homo sapiens
  misc_RNA (1)...(19): siRNA sense strand
gcaagggccuguccaaagg

SEQ ID NO: 13957 - RNA, 19 nt, Homo sapiens
  misc_RNA (1)...(19): siRNA sense strand
ggaggaagagcccaagauu

SEQ ID NO: 13958 - RNA, 19 nt, Homo sapiens
  misc_RNA (1)...(19): siRNA sense strand
caccaucuaugcaguugua

SEQ ID NO: 13959 - RNA, 19 nt, Homo sapiens
  misc_RNA (1)...(19): siRNA sense strand
cuaugcaguuguaguuuga

SEQ ID NO: 13960 - RNA, 19 nt, Homo sapiens
  misc_RNA (1)...(19): siRNA sense strand
gaggaagagcccaagauuc

SEQ ID NO: 13961 - RNA, 19 nt, Homo sapiens
  misc_RNA (1)...(19): siRNA sense strand
caucuaugcaguuguaguu

SEQ ID NO: 13962 - RNA, 19 nt, Homo sapiens
  misc_RNA (1)...(19): siRNA sense strand
ucuaugcaguuguaguuug

SEQ ID NO: 13963 - RNA, 19 nt, Homo sapiens
  misc_RNA (1)...(19): siRNA sense strand
cgagagccguacagugcuu

SEQ ID NO: 13964 - RNA, 19 nt, Homo sapiens
  misc_RNA (1)...(19): siRNA sense strand
ggcuggagcuccucuugag

SEQ ID NO: 13965 - RNA, 19 nt, Homo sapiens
  misc_RNA (1)...(19): siRNA sense strand
gggacaggaccuauugcaa

SEQ ID NO: 13966 - RNA, 19 nt, Homo sapiens
  misc_RNA (1)...(19): siRNA sense strand
augcggaucuggaccaucu

SEQ ID NO: 13967 - RNA, 19 nt, Homo sapiens
  misc_RNA (1)...(19): siRNA sense strand
gcaagggccuguccaaagg

SEQ ID NO: 13968 - RNA, 19 nt, Homo sapiens
  misc_RNA (1)...(19): siRNA sense strand
ggaggaagagcccaagauu

SEQ ID NO: 13969 - RNA, 19 nt, Homo sapiens
  misc_RNA (1)...(19): siRNA sense strand
gaggaagagcccaagauuc

SEQ ID NO: 13970 - RNA, 19 nt, Homo sapiens
  misc_RNA (1)...(19): siRNA sense strand
cgagagccguacagugcuu

SEQ ID NO: 13971 - RNA, 19 nt, Homo sapiens
  misc_RNA (1)...(19): siRNA sense strand
ggcuggagcuccucuugag

SEQ ID NO: 13972 - RNA, 19 nt, Homo sapiens
  misc_RNA (1)...(19): siRNA sense strand
gggacaggaccuauugcaa

SEQ ID NO: 13973 - RNA, 19 nt, Homo sapiens
  misc_RNA (1)...(19): siRNA sense strand
augcggaucuggaccaucu

SEQ ID NO: 13974 - RNA, 19 nt, Homo sapiens
  misc_RNA (1)...(19): siRNA sense strand
gcaagggccuguccaaagg

SEQ ID NO: 13975 - RNA, 19 nt, Homo sapiens
  misc_RNA (1)...(19): siRNA sense strand
ggaggaagagcccaagauu

SEQ ID NO: 13976 - RNA, 19 nt, Homo sapiens
  misc_RNA (1)...(19): siRNA sense strand
caccaucuaugcaguugua

SEQ ID NO: 13977 - RNA, 19 nt, Homo sapiens
  misc_RNA (1)...(19): siRNA sense strand
cuaugcaguuguaguuuga

SEQ ID NO: 13978 - RNA, 19 nt, Homo sapiens
  misc_RNA (1)...(19): siRNA sense strand
gaggaagagcccaagauuc

SEQ ID NO: 13979 - RNA, 19 nt, Homo sapiens
  misc_RNA (1)...(19): siRNA sense strand
caucuaugcaguuguaguu

SEQ ID NO: 13980 - RNA, 19 nt, Homo sapiens
  misc_RNA (1)...(19): siRNA sense strand
ucuaugcaguuguaguuug

SEQ ID NO: 13981 - RNA, 19 nt, Homo sapiens
  misc_RNA (1)...(19): siRNA sense strand
cgagagccguacagugcuu

SEQ ID NO: 13982 - RNA, 19 nt, Homo sapiens
  misc_RNA (1)...(19): siRNA sense strand
ggcuggagcuccucuugag

SEQ ID NO: 13983 - RNA, 19 nt, Homo sapiens
  misc_RNA (1)...(19): siRNA sense strand
gggacaggaccuauugcaa

SEQ ID NO: 13984 - RNA, 19 nt, Homo sapiens
  misc_RNA (1)...(19): siRNA sense strand
augcggaucuggaccaucu

SEQ ID NO: 13985 - RNA, 19 nt, Homo sapiens
  misc_RNA (1)...(19): siRNA sense strand
gcaagggccuguccaaagg

SEQ ID NO: 13986 - RNA, 19 nt, Homo sapiens
  misc_RNA (1)...(19): siRNA sense strand
cgagagccguacagugcuu

SEQ ID NO: 13987 - RNA, 19 nt, Homo sapiens
  misc_RNA (1)...(19): siRNA sense strand
ggcuggagcuccucuugag

SEQ ID NO: 13988 - RNA, 19 nt, Homo sapiens
  misc_RNA (1)...(19): siRNA sense strand
gggacaggaccuauugcaa

SEQ ID NO: 13989 - RNA, 19 nt, Homo sapiens
  misc_RNA (1)...(19): siRNA sense strand
gcaagggccuguccaaagg

SEQ ID NO: 13990 - RNA, 19 nt, Homo sapiens
  misc_RNA (1)...(19): siRNA sense strand
ggaggaagagcccaagauu

SEQ ID NO: 13991 - RNA, 19 nt, Homo sapiens
  misc_RNA (1)...(19): siRNA sense strand
gaggaagagcccaagauuc

SEQ ID NO: 13992 - RNA, 19 nt, Homo sapiens
  misc_RNA (1)...(19): siRNA sense strand
cgagagccguacagugcuu

SEQ ID NO: 13993 - RNA, 19 nt, Homo sapiens
  misc_RNA (1)...(19): siRNA sense strand
ggcuggagcuccucuugag

SEQ ID NO: 13994 - RNA, 19 nt, Homo sapiens
  misc_RNA (1)...(19): siRNA sense strand
gggacaggaccuauugcaa

SEQ ID NO: 13995 - RNA, 19 nt, Homo sapiens
  misc_RNA (1)...(19): siRNA sense strand
gcaagggccuguccaaagg

SEQ ID NO: 13996 - RNA, 19 nt, Homo sapiens
  misc_RNA (1)...(19): siRNA sense strand
ggaggaagagcccaagauu

SEQ ID NO: 13997 - RNA, 19 nt, Homo sapiens
  misc_RNA (1)...(19): siRNA sense strand
gaggaagagcccaagauuc

SEQ ID NO: 13998 - RNA, 19 nt, Homo sapiens
  misc_RNA (1)...(19): siRNA sense strand
cgagagccguacagugcuu

SEQ ID NO: 13999 - RNA, 19 nt, Homo sapiens
  misc_RNA (1)...(19): siRNA sense strand
ggcuggagcuccucuugag

SEQ ID NO: 14000 - RNA, 19 nt, Homo sapiens
  misc_RNA (1)...(19): siRNA sense strand
gggacaggaccuauugcaa

SEQ ID NO: 14001 - RNA, 19 nt, Homo sapiens
  misc_RNA (1)...(19): siRNA sense strand
augcggaucuggaccaucu

SEQ ID NO: 14002 - RNA, 19 nt, Homo sapiens
  misc_RNA (1)...(19): siRNA sense strand
gcaagggccuguccaaagg

SEQ ID NO: 14003 - RNA, 19 nt, Homo sapiens
  misc_RNA (1)...(19): siRNA sense strand
ggaggaagagcccaagauu

SEQ ID NO: 14004 - RNA, 19 nt, Homo sapiens
  misc_RNA (1)...(19): siRNA sense strand
caccaucuaugcaguugua

SEQ ID NO: 14005 - RNA, 19 nt, Homo sapiens
  misc_RNA (1)...(19): siRNA sense strand
cuaugcaguuguaguuuga

SEQ ID NO: 14006 - RNA, 19 nt, Homo sapiens
  misc_RNA (1)...(19): siRNA sense strand
gaggaagagcccaagauuc

SEQ ID NO: 14007 - RNA, 19 nt, Homo sapiens
  misc_RNA (1)...(19): siRNA sense strand
caucuaugcaguuguaguu

SEQ ID NO: 14008 - RNA, 19 nt, Homo sapiens
  misc_RNA (1)...(19): siRNA sense strand
ucuaugcaguuguaguuug

SEQ ID NO: 14009 - RNA, 19 nt, Homo sapiens
  misc_RNA (1)...(19): siRNA sense strand
cgagagccguacagugcuu

SEQ ID NO: 14010 - RNA, 19 nt, Homo sapiens
  misc_RNA (1)...(19): siRNA sense strand
ggcuggagcuccucuugag

SEQ ID NO: 14011 - RNA, 19 nt, Homo sapiens
  misc_RNA (1)...(19): siRNA sense strand
gggacaggaccuauugcaa

SEQ ID NO: 14012 - RNA, 19 nt, Homo sapiens
  misc_RNA (1)...(19): siRNA sense strand
augcggaucuggaccaucu

SEQ ID NO: 14013 - RNA, 19 nt, Homo sapiens
  misc_RNA (1)...(19): siRNA sense strand
gcaagggccuguccaaagg

SEQ ID NO: 14014 - RNA, 19 nt, Homo sapiens
  misc_RNA (1)...(19): siRNA sense strand
ggaggaagagcccaagauu

SEQ ID NO: 14015 - RNA, 19 nt, Homo sapiens
  misc_RNA (1)...(19): siRNA sense strand
caccaucuaugcaguugua

SEQ ID NO: 14016 - RNA, 19 nt, Homo sapiens
  misc_RNA (1)...(19): siRNA sense strand
cuaugcaguuguaguuuga

SEQ ID NO: 14017 - RNA, 19 nt, Homo sapiens
  misc_RNA (1)...(19): siRNA sense strand
gaggaagagcccaagauuc

SEQ ID NO: 14018 - RNA, 19 nt, Homo sapiens
  misc_RNA (1)...(19): siRNA sense strand
caucuaugcaguuguaguu

SEQ ID NO: 14019 - RNA, 19 nt, Homo sapiens
  misc_RNA (1)...(19): siRNA sense strand
ucuaugcaguuguaguuug

SEQ ID NO: 14020 - RNA, 19 nt, Homo sapiens
  misc_RNA (1)...(19): siRNA sense strand
cgagagccguacagugcuu

SEQ ID NO: 14021 - RNA, 19 nt, Homo sapiens
  misc_RNA (1)...(19): siRNA sense strand
ggcuggagcuccucuugag

SEQ ID NO: 14022 - RNA, 19 nt, Homo sapiens
  misc_RNA (1)...(19): siRNA sense strand
gggacaggaccuauugcaa

SEQ ID NO: 14023 - RNA, 19 nt, Homo sapiens
  misc_RNA (1)...(19): siRNA sense strand
augcggaucuggaccaucu

SEQ ID NO: 14024 - RNA, 19 nt, Homo sapiens
  misc_RNA (1)...(19): siRNA sense strand
gcaagggccuguccaaagg

SEQ ID NO: 14025 - RNA, 19 nt, Homo sapiens
  misc_RNA (1)...(19): siRNA sense strand
ggaggaagagcccaagauu

SEQ ID NO: 14026 - RNA, 19 nt, Homo sapiens
  misc_RNA (1)...(19): siRNA sense strand
gaggaagagcccaagauuc

SEQ ID NO: 14027 - RNA, 19 nt, Homo sapiens
  misc_RNA (1)...(19): siRNA sense strand
cgagagccguacagugcuu

SEQ ID NO: 14028 - RNA, 19 nt, Homo sapiens
  misc_RNA (1)...(19): siRNA sense strand
ggcuggagcuccucuugag

SEQ ID NO: 14029 - RNA, 19 nt, Homo sapiens
  misc_RNA (1)...(19): siRNA sense strand
gggacaggaccuauugcaa

SEQ ID NO: 14030 - RNA, 19 nt, Homo sapiens
  misc_RNA (1)...(19): siRNA sense strand
augcggaucuggaccaucu

SEQ ID NO: 14031 - RNA, 19 nt, Homo sapiens
  misc_RNA (1)...(19): siRNA sense strand
gcaagggccuguccaaagg

SEQ ID NO: 14032 - RNA, 19 nt, Homo sapiens
  misc_RNA (1)...(19): siRNA sense strand
ggaggaagagcccaagauu

SEQ ID NO: 14033 - RNA, 19 nt, Homo sapiens
  misc_RNA (1)...(19): siRNA sense strand
caccaucuaugcaguugua

SEQ ID NO: 14034 - RNA, 19 nt, Homo sapiens
  misc_RNA (1)...(19): siRNA sense strand
cuaugcaguuguaguuuga

SEQ ID NO: 14035 - RNA, 19 nt, Homo sapiens
  misc_RNA (1)...(19): siRNA sense strand
gaggaagagcccaagauuc

SEQ ID NO: 14036 - RNA, 19 nt, Homo sapiens
  misc_RNA (1)...(19): siRNA sense strand
caucuaugcaguuguaguu

SEQ ID NO: 14037 - RNA, 19 nt, Homo sapiens
  misc_RNA (1)...(19): siRNA sense strand
ucuaugcaguuguaguuug

SEQ ID NO: 14038 - RNA, 19 nt, Homo sapiens
  misc_RNA (1)...(19): siRNA sense strand
cgagagccguacagugcuu

SEQ ID NO: 14039 - RNA, 19 nt, Homo sapiens
  misc_RNA (1)...(19): siRNA sense strand
ggcuggagcuccucuugag

SEQ ID NO: 14040 - RNA, 19 nt, Homo sapiens
  misc_RNA (1)...(19): siRNA sense strand
gggacaggaccuauugcaa

SEQ ID NO: 14041 - RNA, 19 nt, Homo sapiens
  misc_RNA (1)...(19): siRNA sense strand
augcggaucuggaccaucu

SEQ ID NO: 14042 - RNA, 19 nt, Homo sapiens
  misc_RNA (1)...(19): siRNA sense strand
gcaagggccuguccaaagg

SEQ ID NO: 14043 - RNA, 19 nt, Homo sapiens
  misc_RNA (1)...(19): siRNA sense strand
cgagagccguacagugcuu

SEQ ID NO: 14044 - RNA, 19 nt, Homo sapiens
  misc_RNA (1)...(19): siRNA sense strand
ggcuggagcuccucuugag

SEQ ID NO: 14045 - RNA, 19 nt, Homo sapiens
  misc_RNA (1)...(19): siRNA sense strand
gggacaggaccuauugcaa

SEQ ID NO: 14046 - RNA, 19 nt, Homo sapiens
  misc_RNA (1)...(19): siRNA sense strand
gcaagggccuguccaaagg

SEQ ID NO: 14047 - RNA, 19 nt, Homo sapiens
  misc_RNA (1)...(19): siRNA sense strand
ggaggaagagcccaagauu

SEQ ID NO: 14048 - RNA, 19 nt, Homo sapiens
  misc_RNA (1)...(19): siRNA sense strand
gaggaagagcccaagauuc

SEQ ID NO: 14049 - RNA, 19 nt, Homo sapiens
  misc_RNA (1)...(19): siRNA sense strand
cgagagccguacagugcuu

SEQ ID NO: 14050 - RNA, 19 nt, Homo sapiens
  misc_RNA (1)...(19): siRNA sense strand
ggcuggagcuccucuugag

SEQ ID NO: 14051 - RNA, 19 nt, Homo sapiens
  misc_RNA (1)...(19): siRNA sense strand
gggacaggaccuauugcaa

SEQ ID NO: 14052 - RNA, 19 nt, Homo sapiens
  misc_RNA (1)...(19): siRNA sense strand
gcaagggccuguccaaagg

SEQ ID NO: 14053 - RNA, 19 nt, Homo sapiens
  misc_RNA (1)...(19): siRNA sense strand
ggaggaagagcccaagauu

SEQ ID NO: 14054 - RNA, 19 nt, Homo sapiens
  misc_RNA (1)...(19): siRNA sense strand
gaggaagagcccaagauuc

SEQ ID NO: 14055 - RNA, 19 nt, Homo sapiens
  misc_RNA (1)...(19): siRNA sense strand
cgagagccguacagugcuu

SEQ ID NO: 14056 - RNA, 19 nt, Homo sapiens
  misc_RNA (1)...(19): siRNA sense strand
ggcuggagcuccucuugag

SEQ ID NO: 14057 - RNA, 19 nt, Homo sapiens
  misc_RNA (1)...(19): siRNA sense strand
gggacaggaccuauugcaa

SEQ ID NO: 14058 - RNA, 19 nt, Homo sapiens
  misc_RNA (1)...(19): siRNA sense strand
augcggaucuggaccaucu

SEQ ID NO: 14059 - RNA, 19 nt, Homo sapiens
  misc_RNA (1)...(19): siRNA sense strand
gcaagggccuguccaaagg

SEQ ID NO: 14060 - RNA, 19 nt, Homo sapiens
  misc_RNA (1)...(19): siRNA sense strand
ggaggaagagcccaagauu

SEQ ID NO: 14061 - RNA, 19 nt, Homo sapiens
  misc_RNA (1)...(19): siRNA sense strand
caccaucuaugcaguugua

SEQ ID NO: 14062 - RNA, 19 nt, Homo sapiens
  misc_RNA (1)...(19): siRNA sense strand
cuaugcaguuguaguuuga

SEQ ID NO: 14063 - RNA, 19 nt, Homo sapiens
  misc_RNA (1)...(19): siRNA sense strand
gaggaagagcccaagauuc

SEQ ID NO: 14064 - RNA, 19 nt, Homo sapiens
  misc_RNA (1)...(19): siRNA sense strand
caucuaugcaguuguaguu

SEQ ID NO: 14065 - RNA, 19 nt, Homo sapiens
  misc_RNA (1)...(19): siRNA sense strand
ucuaugcaguuguaguuug

SEQ ID NO: 14066 - RNA, 19 nt, Homo sapiens
  misc_RNA (1)...(19): siRNA sense strand
cgagagccguacagugcuu

SEQ ID NO: 14067 - RNA, 19 nt, Homo sapiens
  misc_RNA (1)...(19): siRNA sense strand
ggcuggagcuccucuugag

SEQ ID NO: 14068 - RNA, 19 nt, Homo sapiens
  misc_RNA (1)...(19): siRNA sense strand
gggacaggaccuauugcaa

SEQ ID NO: 14069 - RNA, 19 nt, Homo sapiens
  misc_RNA (1)...(19): siRNA sense strand
augcggaucuggaccaucu

SEQ ID NO: 14070 - RNA, 19 nt, Homo sapiens
  misc_RNA (1)...(19): siRNA sense strand
gcaagggccuguccaaagg

SEQ ID NO: 14071 - RNA, 19 nt, Homo sapiens
  misc_RNA (1)...(19): siRNA sense strand
ggaggaagagcccaagauu

SEQ ID NO: 14072 - RNA, 19 nt, Homo sapiens
  misc_RNA (1)...(19): siRNA sense strand
caccaucuaugcaguugua

SEQ ID NO: 14073 - RNA, 19 nt, Homo sapiens
  misc_RNA (1)...(19): siRNA sense strand
cuaugcaguuguaguuuga

SEQ ID NO: 14074 - RNA, 19 nt, Homo sapiens
  misc_RNA (1)...(19): siRNA sense strand
gaggaagagcccaagauuc

SEQ ID NO: 14075 - RNA, 19 nt, Homo sapiens
  misc_RNA (1)...(19): siRNA sense strand
caucuaugcaguuguaguu

SEQ ID NO: 14076 - RNA, 19 nt, Homo sapiens
  misc_RNA (1)...(19): siRNA sense strand
ucuaugcaguuguaguuug

SEQ ID NO: 14077 - RNA, 19 nt, Homo sapiens
  misc_RNA (1)...(19): siRNA sense strand
cgagagccguacagugcuu

SEQ ID NO: 14078 - RNA, 19 nt, Homo sapiens
  misc_RNA (1)...(19): siRNA sense strand
ggcuggagcuccucuugag

SEQ ID NO: 14079 - RNA, 19 nt, Homo sapiens
  misc_RNA (1)...(19): siRNA sense strand
gggacaggaccuauugcaa

SEQ ID NO: 14080 - RNA, 19 nt, Homo sapiens
  misc_RNA (1)...(19): siRNA sense strand
augcggaucuggaccaucu

SEQ ID NO: 14081 - RNA, 19 nt, Homo sapiens
  misc_RNA (1)...(19): siRNA sense strand
gcaagggccuguccaaagg

SEQ ID NO: 14082 - RNA, 19 nt, Homo sapiens
  misc_RNA (1)...(19): siRNA sense strand
ggaggaagagcccaagauu

SEQ ID NO: 14083 - RNA, 19 nt, Homo sapiens
  misc_RNA (1)...(19): siRNA sense strand
gaggaagagcccaagauuc

SEQ ID NO: 14084 - RNA, 19 nt, Homo sapiens
  misc_RNA (1)...(19): siRNA sense strand
cgagagccguacagugcuu

SEQ ID NO: 14085 - RNA, 19 nt, Homo sapiens
  misc_RNA (1)...(19): siRNA sense strand
ggcuggagcuccucuugag

SEQ ID NO: 14086 - RNA, 19 nt, Homo sapiens
  misc_RNA (1)...(19): siRNA sense strand
gggacaggaccuauugcaa

SEQ ID NO: 14087 - RNA, 19 nt, Homo sapiens
  misc_RNA (1)...(19): siRNA sense strand
augcggaucuggaccaucu

SEQ ID NO: 14088 - RNA, 19 nt, Homo sapiens
  misc_RNA (1)...(19): siRNA sense strand
gcaagggccuguccaaagg

SEQ ID NO: 14089 - RNA, 19 nt, Homo sapiens
  misc_RNA (1)...(19): siRNA sense strand
ggaggaagagcccaagauu

SEQ ID NO: 14090 - RNA, 19 nt, Homo sapiens
  misc_RNA (1)...(19): siRNA sense strand
caccaucuaugcaguugua

SEQ ID NO: 14091 - RNA, 19 nt, Homo sapiens
  misc_RNA (1)...(19): siRNA sense strand
cuaugcaguuguaguuuga

SEQ ID NO: 14092 - RNA, 19 nt, Homo sapiens
  misc_RNA (1)...(19): siRNA sense strand
gaggaagagcccaagauuc

SEQ ID NO: 14093 - RNA, 19 nt, Homo sapiens
  misc_RNA (1)...(19): siRNA sense strand
caucuaugcaguuguaguu

SEQ ID NO: 14094 - RNA, 19 nt, Homo sapiens
  misc_RNA (1)...(19): siRNA sense strand
ucuaugcaguuguaguuug

SEQ ID NO: 14095 - RNA, 19 nt, Homo sapiens
  misc_RNA (1)...(19): siRNA sense strand
cgagagccguacagugcuu

SEQ ID NO: 14096 - RNA, 19 nt, Homo sapiens
  misc_RNA (1)...(19): siRNA sense strand
ggcuggagcuccucuugag

SEQ ID NO: 14097 - RNA, 19 nt, Homo sapiens
  misc_RNA (1)...(19): siRNA sense strand
gggacaggaccuauugcaa

SEQ ID NO: 14098 - RNA, 19 nt, Homo sapiens
  misc_RNA (1)...(19): siRNA sense strand
augcggaucuggaccaucu

SEQ ID NO: 14099 - RNA, 19 nt, Homo sapiens
  misc_RNA (1)...(19): siRNA sense strand
gcaagggccuguccaaagg

SEQ ID NO: 14100 - RNA, 19 nt, Homo sapiens
  misc_RNA (1)...(19): siRNA sense strand
cgagagccguacagugcuu

SEQ ID NO: 14101 - RNA, 19 nt, Homo sapiens
  misc_RNA (1)...(19): siRNA sense strand
ggcuggagcuccucuugag

SEQ ID NO: 14102 - RNA, 19 nt, Homo sapiens
  misc_RNA (1)...(19): siRNA sense strand
gggacaggaccuauugcaa

SEQ ID NO: 14103 - RNA, 19 nt, Homo sapiens
  misc_RNA (1)...(19): siRNA sense strand
gcaagggccuguccaaagg

SEQ ID NO: 14104 - RNA, 19 nt, Homo sapiens
  misc_RNA (1)...(19): siRNA sense strand
ggaggaagagcccaagauu

SEQ ID NO: 14105 - RNA, 19 nt, Homo sapiens
  misc_RNA (1)...(19): siRNA sense strand
gaggaagagcccaagauuc

SEQ ID NO: 14106 - RNA, 19 nt, Homo sapiens
  misc_RNA (1)...(19): siRNA sense strand
cgagagccguacagugcuu

SEQ ID NO: 14107 - RNA, 19 nt, Homo sapiens
  misc_RNA (1)...(19): siRNA sense strand
ggcuggagcuccucuugag

SEQ ID NO: 14108 - RNA, 19 nt, Homo sapiens
  misc_RNA (1)...(19): siRNA sense strand
gggacaggaccuauugcaa

SEQ ID NO: 14109 - RNA, 19 nt, Homo sapiens
  misc_RNA (1)...(19): siRNA sense strand
gcaagggccuguccaaagg

SEQ ID NO: 14110 - RNA, 19 nt, Homo sapiens
  misc_RNA (1)...(19): siRNA sense strand
ggaggaagagcccaagauu

SEQ ID NO: 14111 - RNA, 19 nt, Homo sapiens
  misc_RNA (1)...(19): siRNA sense strand
gaggaagagcccaagauuc

SEQ ID NO: 14112 - RNA, 19 nt, Homo sapiens
  misc_RNA (1)...(19): siRNA sense strand
cgagagccguacagugcuu

SEQ ID NO: 14113 - RNA, 19 nt, Homo sapiens
  misc_RNA (1)...(19): siRNA sense strand
ggcuggagcuccucuugag

SEQ ID NO: 14114 - RNA, 19 nt, Homo sapiens
  misc_RNA (1)...(19): siRNA sense strand
gggacaggaccuauugcaa

SEQ ID NO: 14115 - RNA, 19 nt, Homo sapiens
  misc_RNA (1)...(19): siRNA sense strand
augcggaucuggaccaucu

SEQ ID NO: 14116 - RNA, 19 nt, Homo sapiens
  misc_RNA (1)...(19): siRNA sense strand
gcaagggccuguccaaagg

SEQ ID NO: 14117 - RNA, 19 nt, Homo sapiens
  misc_RNA (1)...(19): siRNA sense strand
ggaggaagagcccaagauu

SEQ ID NO: 14118 - RNA, 19 nt, Homo sapiens
  misc_RNA (1)...(19): siRNA sense strand
caccaucuaugcaguugua

SEQ ID NO: 14119 - RNA, 19 nt, Homo sapiens
  misc_RNA (1)...(19): siRNA sense strand
cuaugcaguuguaguuuga

SEQ ID NO: 14120 - RNA, 19 nt, Homo sapiens
  misc_RNA (1)...(19): siRNA sense strand
gaggaagagcccaagauuc

SEQ ID NO: 14121 - RNA, 19 nt, Homo sapiens
  misc_RNA (1)...(19): siRNA sense strand
caucuaugcaguuguaguu

SEQ ID NO: 14122 - RNA, 19 nt, Homo sapiens
  misc_RNA (1)...(19): siRNA sense strand
ucuaugcaguuguaguuug

SEQ ID NO: 14123 - RNA, 19 nt, Homo sapiens
  misc_RNA (1)...(19): siRNA sense strand
cgagagccguacagugcuu

SEQ ID NO: 14124 - RNA, 19 nt, Homo sapiens
  misc_RNA (1)...(19): siRNA sense strand
ggcuggagcuccucuugag

SEQ ID NO: 14125 - RNA, 19 nt, Homo sapiens
  misc_RNA (1)...(19): siRNA sense strand
gggacaggaccuauugcaa

SEQ ID NO: 14126 - RNA, 19 nt, Homo sapiens
  misc_RNA (1)...(19): siRNA sense strand
augcggaucuggaccaucu

SEQ ID NO: 14127 - RNA, 19 nt, Homo sapiens
  misc_RNA (1)...(19): siRNA sense strand
gcaagggccuguccaaagg

SEQ ID NO: 14128 - RNA, 19 nt, Homo sapiens
  misc_RNA (1)...(19): siRNA sense strand
ggaggaagagcccaagauu

SEQ ID NO: 14129 - RNA, 19 nt, Homo sapiens
  misc_RNA (1)...(19): siRNA sense strand
caccaucuaugcaguugua

SEQ ID NO: 14130 - RNA, 19 nt, Homo sapiens
  misc_RNA (1)...(19): siRNA sense strand
cuaugcaguuguaguuuga

SEQ ID NO: 14131 - RNA, 19 nt, Homo sapiens
  misc_RNA (1)...(19): siRNA sense strand
gaggaagagcccaagauuc

SEQ ID NO: 14132 - RNA, 19 nt, Homo sapiens
  misc_RNA (1)...(19): siRNA sense strand
caucuaugcaguuguaguu

SEQ ID NO: 14133 - RNA, 19 nt, Homo sapiens
  misc_RNA (1)...(19): siRNA sense strand
ucuaugcaguuguaguuug

SEQ ID NO: 14134 - RNA, 19 nt, Homo sapiens
  misc_RNA (1)...(19): siRNA sense strand
cgagagccguacagugcuu

SEQ ID NO: 14135 - RNA, 19 nt, Homo sapiens
  misc_RNA (1)...(19): siRNA sense strand
ggcuggagcuccucuugag

SEQ ID NO: 14136 - RNA, 19 nt, Homo sapiens
  misc_RNA (1)...(19): siRNA sense strand
gggacaggaccuauugcaa

SEQ ID NO: 14137 - RNA, 19 nt, Homo sapiens
  misc_RNA (1)...(19): siRNA sense strand
augcggaucuggaccaucu

SEQ ID NO: 14138 - RNA, 19 nt, Homo sapiens
  misc_RNA (1)...(19): siRNA sense strand
gcaagggccuguccaaagg

SEQ ID NO: 14139 - RNA, 19 nt, Homo sapiens
  misc_RNA (1)...(19): siRNA sense strand
ggaggaagagcccaagauu

SEQ ID NO: 14140 - RNA, 19 nt, Homo sapiens
  misc_RNA (1)...(19): siRNA sense strand
gaggaagagcccaagauuc

SEQ ID NO: 14141 - RNA, 19 nt, Homo sapiens
  misc_RNA (1)...(19): siRNA sense strand
cgagagccguacagugcuu

SEQ ID NO: 14142 - RNA, 19 nt, Homo sapiens
  misc_RNA (1)...(19): siRNA sense strand
ggcuggagcuccucuugag

SEQ ID NO: 14143 - RNA, 19 nt, Homo sapiens
  misc_RNA (1)...(19): siRNA sense strand
gggacaggaccuauugcaa

SEQ ID NO: 14144 - RNA, 19 nt, Homo sapiens
  misc_RNA (1)...(19): siRNA sense strand
augcggaucuggaccaucu

SEQ ID NO: 14145 - RNA, 19 nt, Homo sapiens
  misc_RNA (1)...(19): siRNA sense strand
gcaagggccuguccaaagg

SEQ ID NO: 14146 - RNA, 19 nt, Homo sapiens
  misc_RNA (1)...(19): siRNA sense strand
ggaggaagagcccaagauu

SEQ ID NO: 14147 - RNA, 19 nt, Homo sapiens
  misc_RNA (1)...(19): siRNA sense strand
caccaucuaugcaguugua

SEQ ID NO: 14148 - RNA, 19 nt, Homo sapiens
  misc_RNA (1)...(19): siRNA sense strand
cuaugcaguuguaguuuga

SEQ ID NO: 14149 - RNA, 19 nt, Homo sapiens
  misc_RNA (1)...(19): siRNA sense strand
gaggaagagcccaagauuc

SEQ ID NO: 14150 - RNA, 19 nt, Homo sapiens
  misc_RNA (1)...(19): siRNA sense strand
caucuaugcaguuguaguu

SEQ ID NO: 14151 - RNA, 19 nt, Homo sapiens
  misc_RNA (1)...(19): siRNA sense strand
ucuaugcaguuguaguuug

SEQ ID NO: 14152 - RNA, 19 nt, Homo sapiens
  misc_RNA (1)...(19): siRNA sense strand
cgagagccguacagugcuu

SEQ ID NO: 14153 - RNA, 19 nt, Homo sapiens
  misc_RNA (1)...(19): siRNA sense strand
ggcuggagcuccucuugag

SEQ ID NO: 14154 - RNA, 19 nt, Homo sapiens
  misc_RNA (1)...(19): siRNA sense strand
gggacaggaccuauugcaa

SEQ ID NO: 14155 - RNA, 19 nt, Homo sapiens
  misc_RNA (1)...(19): siRNA sense strand
augcggaucuggaccaucu

SEQ ID NO: 14156 - RNA, 19 nt, Homo sapiens
  misc_RNA (1)...(19): siRNA sense strand
gcaagggccuguccaaagg

SEQ ID NO: 14157 - RNA, 19 nt, Homo sapiens
  misc_RNA (1)...(19): siRNA sense strand
cgagagccguacagugcuu

SEQ ID NO: 14158 - RNA, 19 nt, Homo sapiens
  misc_RNA (1)...(19): siRNA sense strand
ggcuggagcuccucuugag

SEQ ID NO: 14159 - RNA, 19 nt, Homo sapiens
  misc_RNA (1)...(19): siRNA sense strand
gggacaggaccuauugcaa

SEQ ID NO: 14160 - RNA, 19 nt, Homo sapiens
  misc_RNA (1)...(19): siRNA sense strand
gcaagggccuguccaaagg

SEQ ID NO: 14161 - RNA, 19 nt, Homo sapiens
  misc_RNA (1)...(19): siRNA sense strand
ggaggaagagcccaagauu

SEQ ID NO: 14162 - RNA, 19 nt, Homo sapiens
  misc_RNA (1)...(19): siRNA sense strand
gaggaagagcccaagauuc

SEQ ID NO: 14163 - RNA, 19 nt, Homo sapiens
  misc_RNA (1)...(19): siRNA sense strand
cgagagccguacagugcuu

SEQ ID NO: 14164 - RNA, 19 nt, Homo sapiens
  misc_RNA (1)...(19): siRNA sense strand
ggcuggagcuccucuugag

SEQ ID NO: 14165 - RNA, 19 nt, Homo sapiens
  misc_RNA (1)...(19): siRNA sense strand
gggacaggaccuauugcaa

SEQ ID NO: 14166 - RNA, 19 nt, Homo sapiens
  misc_RNA (1)...(19): siRNA sense strand
gcagggagaucuucaaguu

SEQ ID NO: 14167 - RNA, 19 nt, Homo sapiens
  misc_RNA (1)...(19): siRNA sense strand
gaaccgagcagacuucuuc

SEQ ID NO: 14168 - RNA, 19 nt, Homo sapiens
  misc_RNA (1)...(19): siRNA sense strand
gaaacuucuucaaugcuuu

SEQ ID NO: 14169 - RNA, 19 nt, Homo sapiens
  misc_RNA (1)...(19): siRNA sense strand
ccguuuaccugcucuauaa

SEQ ID NO: 14170 - RNA, 19 nt, Homo sapiens
  misc_RNA (1)...(19): siRNA sense strand
gaugggaacugcuucuaca

SEQ ID NO: 14171 - RNA, 19 nt, Homo sapiens
  misc_RNA (1)...(19): siRNA sense strand
gacauucuauccauucuuc

SEQ ID NO: 14172 - RNA, 19 nt, Homo sapiens
  misc_RNA (1)...(19): siRNA sense strand
ucaaagacuucugcacuca

SEQ ID NO: 14173 - RNA, 19 nt, Homo sapiens
  misc_RNA (1)...(19): siRNA sense strand
agggagaucuucaaguuca

SEQ ID NO: 14174 - RNA, 19 nt, Homo sapiens
  misc_RNA (1)...(19): siRNA sense strand
aaacaucccacuacaacau

SEQ ID NO: 14175 - RNA, 19 nt, Homo sapiens
  misc_RNA (1)...(19): siRNA sense strand
gaggagcacaaguucagaa

SEQ ID NO: 14176 - RNA, 19 nt, Homo sapiens
  misc_RNA (1)...(19): siRNA sense strand
ccacuacaacauccuuuau

SEQ ID NO: 14177 - RNA, 19 nt, Homo sapiens
  misc_RNA (1)...(19): siRNA sense strand
ugguggaacugguagagaa

SEQ ID NO: 14178 - RNA, 19 nt, Homo sapiens
  misc_RNA (1)...(19): siRNA sense strand
ggagaucuucaaguucaaa

SEQ ID NO: 14179 - RNA, 19 nt, Homo sapiens
  misc_RNA (1)...(19): siRNA sense strand
gcuuugaggagcacaaguu

SEQ ID NO: 14180 - RNA, 19 nt, Homo sapiens
  misc_RNA (1)...(19): siRNA sense strand
cuacagggccuugggcuau

SEQ ID NO: 14181 - RNA, 19 nt, Homo sapiens
  misc_RNA (1)...(19): siRNA sense strand
ccuucuggcugcuggcuuu

SEQ ID NO: 14182 - RNA, 19 nt, Homo sapiens
  misc_RNA (1)...(19): siRNA sense strand
gggaagagcagggagaucu

SEQ ID NO: 14183 - RNA, 19 nt, Homo sapiens
  misc_RNA (1)...(19): siRNA sense strand
ggaguacguggacgagaug

SEQ ID NO: 14184 - RNA, 19 nt, Homo sapiens
  misc_RNA (1)...(19): siRNA sense strand
gagcagggagaucuucaag

SEQ ID NO: 14185 - RNA, 19 nt, Homo sapiens
  misc_RNA (1)...(19): siRNA sense strand
uggaguacguggacgagau

SEQ ID NO: 14186 - RNA, 19 nt, Homo sapiens
  misc_RNA (1)...(19): siRNA sense strand
gggagaucuucaaguucaa

SEQ ID NO: 14187 - RNA, 19 nt, Homo sapiens
  misc_RNA (1)...(19): siRNA sense strand
gagaaggauggcucagugu

SEQ ID NO: 14188 - RNA, 19 nt, Homo sapiens
  misc_RNA (1)...(19): siRNA sense strand
ggaggaaaaucgaggaacu

SEQ ID NO: 14189 - RNA, 19 nt, Homo sapiens
  misc_RNA (1)...(19): siRNA sense strand
cgucggccuucaucaggaa

SEQ ID NO: 14190 - RNA, 19 nt, Homo sapiens
  misc_RNA (1)...(19): siRNA sense strand
guacguggacgagauggau

SEQ ID NO: 14191 - RNA, 19 nt, Homo sapiens
  misc_RNA (1)...(19): siRNA sense strand
uacagggccuugggcuauu

SEQ ID NO: 14192 - RNA, 19 nt, Homo sapiens
  misc_RNA (1)...(19): siRNA sense strand
cggaccacaucgugcaguu

SEQ ID NO: 14193 - RNA, 19 nt, Homo sapiens
  misc_RNA (1)...(19): siRNA sense strand
ggaugggaacugcuucuac

SEQ ID NO: 14194 - RNA, 19 nt, Homo sapiens
  misc_RNA (1)...(19): siRNA sense strand
acuacaacauccuuuaugc

SEQ ID NO: 14195 - RNA, 19 nt, Homo sapiens
  misc_RNA (1)...(19): siRNA sense strand
uauaaaacaucccacuaca

SEQ ID NO: 14196 - RNA, 19 nt, Homo sapiens
  misc_RNA (1)...(19): siRNA sense strand
uuccggcacuucauugaug

SEQ ID NO: 14197 - RNA, 19 nt, Homo sapiens
  misc_RNA (1)...(19): siRNA sense strand
gggaugggaacugcuucua

SEQ ID NO: 14198 - RNA, 19 nt, Homo sapiens
  misc_RNA (1)...(19): siRNA sense strand
ugcagccgauaaacauuga

SEQ ID NO: 14199 - RNA, 19 nt, Homo sapiens
  misc_RNA (1)...(19): siRNA sense strand
cccacuacaacauccuuua

SEQ ID NO: 14200 - RNA, 19 nt, Homo sapiens
  misc_RNA (1)...(19): siRNA sense strand
cuuucaaccuaauaucaga

SEQ ID NO: 14201 - RNA, 19 nt, Homo sapiens
  misc_RNA (1)...(19): siRNA sense strand
gcaagggccuguccaaagg

SEQ ID NO: 14202 - RNA, 19 nt, Homo sapiens
  misc_RNA (1)...(19): siRNA sense strand
ggaggaagagcccaagauu

SEQ ID NO: 14203 - RNA, 19 nt, Homo sapiens
  misc_RNA (1)...(19): siRNA sense strand
gaggaagagcccaagauuc

SEQ ID NO: 14204 - RNA, 19 nt, Homo sapiens
  misc_RNA (1)...(19): siRNA sense strand
cgagagccguacagugcuu

SEQ ID NO: 14205 - RNA, 19 nt, Homo sapiens
  misc_RNA (1)...(19): siRNA sense strand
ggcuggagcuccucuugag

SEQ ID NO: 14206 - RNA, 19 nt, Homo sapiens
  misc_RNA (1)...(19): siRNA sense strand
gggacaggaccuauugcaa

SEQ ID NO: 14207 - RNA, 19 nt, Homo sapiens
  misc_RNA (1)...(19): siRNA sense strand
augcggaucuggaccaucu

SEQ ID NO: 14208 - RNA, 19 nt, Homo sapiens
  misc_RNA (1)...(19): siRNA sense strand
gcaagggccuguccaaagg

SEQ ID NO: 14209 - RNA, 19 nt, Homo sapiens
  misc_RNA (1)...(19): siRNA sense strand
ggaggaagagcccaagauu

SEQ ID NO: 14210 - RNA, 19 nt, Homo sapiens
  misc_RNA (1)...(19): siRNA sense strand
caccaucuaugcaguugua

SEQ ID NO: 14211 - RNA, 19 nt, Homo sapiens
  misc_RNA (1)...(19): siRNA sense strand
cuaugcaguuguaguuuga

SEQ ID NO: 14212 - RNA, 19 nt, Homo sapiens
  misc_RNA (1)...(19): siRNA sense strand
gaggaagagcccaagauuc

SEQ ID NO: 14213 - RNA, 19 nt, Homo sapiens
  misc_RNA (1)...(19): siRNA sense strand
caucuaugcaguuguaguu

SEQ ID NO: 14214 - RNA, 19 nt, Homo sapiens
  misc_RNA (1)...(19): siRNA sense strand
ucuaugcaguuguaguuug

SEQ ID NO: 14215 - RNA, 19 nt, Homo sapiens
  misc_RNA (1)...(19): siRNA sense strand
cgagagccguacagugcuu

SEQ ID NO: 14216 - RNA, 19 nt, Homo sapiens
  misc_RNA (1)...(19): siRNA sense strand
ggcuggagcuccucuugag

SEQ ID NO: 14217 - RNA, 19 nt, Homo sapiens
  misc_RNA (1)...(19): siRNA sense strand
gggacaggaccuauugcaa

SEQ ID NO: 14218 - RNA, 19 nt, Homo sapiens
  misc_RNA (1)...(19): siRNA sense strand
augcggaucuggaccaucu

SEQ ID NO: 14219 - RNA, 19 nt, Homo sapiens
  misc_RNA (1)...(19): siRNA sense strand
gcaagggccuguccaaagg

SEQ ID NO: 14220 - RNA, 19 nt, Homo sapiens
  misc_RNA (1)...(19): siRNA sense strand
ggaggaagagcccaagauu

SEQ ID NO: 14221 - RNA, 19 nt, Homo sapiens
  misc_RNA (1)...(19): siRNA sense strand
caccaucuaugcaguugua

SEQ ID NO: 14222 - RNA, 19 nt, Homo sapiens
  misc_RNA (1)...(19): siRNA sense strand
cuaugcaguuguaguuuga

SEQ ID NO: 14223 - RNA, 19 nt, Homo sapiens
  misc_RNA (1)...(19): siRNA sense strand
gaggaagagcccaagauuc

SEQ ID NO: 14224 - RNA, 19 nt, Homo sapiens
  misc_RNA (1)...(19): siRNA sense strand
caucuaugcaguuguaguu

SEQ ID NO: 14225 - RNA, 19 nt, Homo sapiens
  misc_RNA (1)...(19): siRNA sense strand
ucuaugcaguuguaguuug

SEQ ID NO: 14226 - RNA, 19 nt, Homo sapiens
  misc_RNA (1)...(19): siRNA sense strand
cgagagccguacagugcuu

SEQ ID NO: 14227 - RNA, 19 nt, Homo sapiens
  misc_RNA (1)...(19): siRNA sense strand
ggcuggagcuccucuugag

SEQ ID NO: 14228 - RNA, 19 nt, Homo sapiens
  misc_RNA (1)...(19): siRNA sense strand
gggacaggaccuauugcaa

SEQ ID NO: 14229 - RNA, 19 nt, Homo sapiens
  misc_RNA (1)...(19): siRNA sense strand
augcggaucuggaccaucu

SEQ ID NO: 14230 - RNA, 19 nt, Homo sapiens
  misc_RNA (1)...(19): siRNA sense strand
gcaagggccuguccaaagg

SEQ ID NO: 14231 - RNA, 19 nt, Homo sapiens
  misc_RNA (1)...(19): siRNA sense strand
ggaggaagagcccaagauu

SEQ ID NO: 14232 - RNA, 19 nt, Homo sapiens
  misc_RNA (1)...(19): siRNA sense strand
gaggaagagcccaagauuc

SEQ ID NO: 14233 - RNA, 19 nt, Homo sapiens
  misc_RNA (1)...(19): siRNA sense strand
cgagagccguacagugcuu

SEQ ID NO: 14234 - RNA, 19 nt, Homo sapiens
  misc_RNA (1)...(19): siRNA sense strand
ggcuggagcuccucuugag

SEQ ID NO: 14235 - RNA, 19 nt, Homo sapiens
  misc_RNA (1)...(19): siRNA sense strand
gggacaggaccuauugcaa

SEQ ID NO: 14236 - RNA, 19 nt, Homo sapiens
  misc_RNA (1)...(19): siRNA sense strand
augcggaucuggaccaucu

SEQ ID NO: 14237 - RNA, 19 nt, Homo sapiens
  misc_RNA (1)...(19): siRNA sense strand
gcaagggccuguccaaagg

SEQ ID NO: 14238 - RNA, 19 nt, Homo sapiens
  misc_RNA (1)...(19): siRNA sense strand
ggaggaagagcccaagauu

SEQ ID NO: 14239 - RNA, 19 nt, Homo sapiens
  misc_RNA (1)...(19): siRNA sense strand
caccaucuaugcaguugua

SEQ ID NO: 14240 - RNA, 19 nt, Homo sapiens
  misc_RNA (1)...(19): siRNA sense strand
cuaugcaguuguaguuuga

SEQ ID NO: 14241 - RNA, 19 nt, Homo sapiens
  misc_RNA (1)...(19): siRNA sense strand
gaggaagagcccaagauuc

SEQ ID NO: 14242 - RNA, 19 nt, Homo sapiens
  misc_RNA (1)...(19): siRNA sense strand
caucuaugcaguuguaguu

SEQ ID NO: 14243 - RNA, 19 nt, Homo sapiens
  misc_RNA (1)...(19): siRNA sense strand
ucuaugcaguuguaguuug

SEQ ID NO: 14244 - RNA, 19 nt, Homo sapiens
  misc_RNA (1)...(19): siRNA sense strand
cgagagccguacagugcuu

SEQ ID NO: 14245 - RNA, 19 nt, Homo sapiens
  misc_RNA (1)...(19): siRNA sense strand
ggcuggagcuccucuugag

SEQ ID NO: 14246 - RNA, 19 nt, Homo sapiens
  misc_RNA (1)...(19): siRNA sense strand
gggacaggaccuauugcaa

SEQ ID NO: 14247 - RNA, 19 nt, Homo sapiens
  misc_RNA (1)...(19): siRNA sense strand
augcggaucuggaccaucu

SEQ ID NO: 14248 - RNA, 19 nt, Homo sapiens
  misc_RNA (1)...(19): siRNA sense strand
gcaagggccuguccaaagg

SEQ ID NO: 14249 - RNA, 19 nt, Homo sapiens
  misc_RNA (1)...(19): siRNA sense strand
cgagagccguacagugcuu

SEQ ID NO: 14250 - RNA, 19 nt, Homo sapiens
  misc_RNA (1)...(19): siRNA sense strand
ggcuggagcuccucuugag

SEQ ID NO: 14251 - RNA, 19 nt, Homo sapiens
  misc_RNA (1)...(19): siRNA sense strand
gggacaggaccuauugcaa

SEQ ID NO: 14252 - RNA, 19 nt, Homo sapiens
  misc_RNA (1)...(19): siRNA sense strand
gcaagggccuguccaaagg

SEQ ID NO: 14253 - RNA, 19 nt, Homo sapiens
  misc_RNA (1)...(19): siRNA sense strand
ggaggaagagcccaagauu

SEQ ID NO: 14254 - RNA, 19 nt, Homo sapiens
  misc_RNA (1)...(19): siRNA sense strand
gaggaagagcccaagauuc

SEQ ID NO: 14255 - RNA, 19 nt, Homo sapiens
  misc_RNA (1)...(19): siRNA sense strand
cgagagccguacagugcuu

SEQ ID NO: 14256 - RNA, 19 nt, Homo sapiens
  misc_RNA (1)...(19): siRNA sense strand
ggcuggagcuccucuugag

SEQ ID NO: 14257 - RNA, 19 nt, Homo sapiens
  misc_RNA (1)...(19): siRNA sense strand
gggacaggaccuauugcaa

SEQ ID NO: 14258 - RNA, 19 nt, Homo sapiens
  misc_RNA (1)...(19): siRNA sense strand
ccugugagcuguccaauaa

SEQ ID NO: 14259 - RNA, 19 nt, Homo sapiens
  misc_RNA (1)...(19): siRNA sense strand
gagcacagaucucagaacu

SEQ ID NO: 14260 - RNA, 19 nt, Homo sapiens
  misc_RNA (1)...(19): siRNA sense strand
gcccugacaugaagacuga

SEQ ID NO: 14261 - RNA, 19 nt, Homo sapiens
  misc_RNA (1)...(19): siRNA sense strand
ggacuccaaagccuucuua

SEQ ID NO: 14262 - RNA, 19 nt, Homo sapiens
  misc_RNA (1)...(19): siRNA sense strand
gaagggagcacagaucuca

SEQ ID NO: 14263 - RNA, 19 nt, Homo sapiens
  misc_RNA (1)...(19): siRNA sense strand
uccaaagccuucuuauuga

SEQ ID NO: 14264 - RNA, 19 nt, Homo sapiens
  misc_RNA (1)...(19): siRNA sense strand
cuccaaagccuucuuauug

SEQ ID NO: 14265 - RNA, 19 nt, Homo sapiens
  misc_RNA (1)...(19): siRNA sense strand
uacaaucgcucaccacauc

SEQ ID NO: 14266 - RNA, 19 nt, Homo sapiens
  misc_RNA (1)...(19): siRNA sense strand
caugaaagaugggcucugu

SEQ ID NO: 14267 - RNA, 19 nt, Homo sapiens
  misc_RNA (1)...(19): siRNA sense strand
ggaaucaagaggccuguga

SEQ ID NO: 14268 - RNA, 19 nt, Homo sapiens
  misc_RNA (1)...(19): siRNA sense strand
gcucugcucuacuucuaug

SEQ ID NO: 14269 - RNA, 19 nt, Homo sapiens
  misc_RNA (1)...(19): siRNA sense strand
cagcucugcucuacuucua

SEQ ID NO: 14270 - RNA, 19 nt, Homo sapiens
  misc_RNA (1)...(19): siRNA sense strand
cuacuucuaugguauuauc

SEQ ID NO: 14271 - RNA, 19 nt, Homo sapiens
  misc_RNA (1)...(19): siRNA sense strand
ggaucuaccaccugacuga

SEQ ID NO: 14272 - RNA, 19 nt, Homo sapiens
  misc_RNA (1)...(19): siRNA sense strand
gguggaaucaugcugaaug

SEQ ID NO: 14273 - RNA, 19 nt, Homo sapiens
  misc_RNA (1)...(19): siRNA sense strand
ugaaagaugggcucugugu

SEQ ID NO: 14274 - RNA, 19 nt, Homo sapiens
  misc_RNA (1)...(19): siRNA sense strand
ccaaagccuucuuauugac

SEQ ID NO: 14275 - RNA, 19 nt, Homo sapiens
  misc_RNA (1)...(19): siRNA sense strand
cuuauugacuccuaggaau

SEQ ID NO: 14276 - RNA, 19 nt, Homo sapiens
  misc_RNA (1)...(19): siRNA sense strand
guauuauccuuaacuccau

SEQ ID NO: 14277 - RNA, 19 nt, Homo sapiens
  misc_RNA (1)...(19): siRNA sense strand
aaaaguguguggaggaauu

SEQ ID NO: 14278 - RNA, 19 nt, Homo sapiens
  misc_RNA (1)...(19): siRNA sense strand
cagguggaaucaugcugaa

SEQ ID NO: 14279 - RNA, 19 nt, Homo sapiens
  misc_RNA (1)...(19): siRNA sense strand
gcucuacuucuaugguauu

SEQ ID NO: 14280 - RNA, 19 nt, Homo sapiens
  misc_RNA (1)...(19): siRNA sense strand
cugcucuacuucuauggua

SEQ ID NO: 14281 - RNA, 19 nt, Homo sapiens
  misc_RNA (1)...(19): siRNA sense strand
cagcuccaccuucgugcua

SEQ ID NO: 14282 - RNA, 19 nt, Homo sapiens
  misc_RNA (1)...(19): siRNA sense strand
gugcuaccauccgcaugaa

SEQ ID NO: 14283 - RNA, 19 nt, Homo sapiens
  misc_RNA (1)...(19): siRNA sense strand
ugagcuguccaauaacuga

SEQ ID NO: 14284 - RNA, 19 nt, Homo sapiens
  misc_RNA (1)...(19): siRNA sense strand
ggccagugguacuuuaucg

SEQ ID NO: 14285 - RNA, 19 nt, Homo sapiens
  misc_RNA (1)...(19): siRNA sense strand
gcuaccauccgcaugaaag

SEQ ID NO: 14286 - RNA, 19 nt, Homo sapiens
  misc_RNA (1)...(19): siRNA sense strand
gaucuaccaccugacugaa

SEQ ID NO: 14287 - RNA, 19 nt, Homo sapiens
  misc_RNA (1)...(19): siRNA sense strand
cgaaaaguguguggaggaa

SEQ ID NO: 14288 - RNA, 19 nt, Homo sapiens
  misc_RNA (1)...(19): siRNA sense strand
ugugagcuguccaauaacu

SEQ ID NO: 14289 - RNA, 19 nt, Homo sapiens
  misc_RNA (1)...(19): siRNA sense strand
gccugugagcuguccaaua

SEQ ID NO: 14290 - RNA, 19 nt, Homo sapiens
  misc_RNA (1)...(19): siRNA sense strand
gaacuggaauucuuaagua

SEQ ID NO: 14291 - RNA, 19 nt, Homo sapiens
  misc_RNA (1)...(19): siRNA sense strand
uaaccaaccugaacgacua

SEQ ID NO: 14292 - RNA, 19 nt, Homo sapiens
  misc_RNA (1)...(19): siRNA sense strand
gcagacggauucauucaga

SEQ ID NO: 14293 - RNA, 19 nt, Homo sapiens
  misc_RNA (1)...(19): siRNA sense strand
ugaagaagguuauaacgau

SEQ ID NO: 14294 - RNA, 19 nt, Homo sapiens
  misc_RNA (1)...(19): siRNA sense strand
ccucacgcaucuauauuua

SEQ ID NO: 14295 - RNA, 19 nt, Homo sapiens
  misc_RNA (1)...(19): siRNA sense strand
ugaugaagaugcucaggua

SEQ ID NO: 14296 - RNA, 19 nt, Homo sapiens
  misc_RNA (1)...(19): siRNA sense strand
ggaggaguaugaugaagau

SEQ ID NO: 14297 - RNA, 19 nt, Homo sapiens
  misc_RNA (1)...(19): siRNA sense strand
ccucacagaugaauuugaa

SEQ ID NO: 14298 - RNA, 19 nt, Homo sapiens
  misc_RNA (1)...(19): siRNA sense strand
aagaagagcuuggugaaga

SEQ ID NO: 14299 - RNA, 19 nt, Homo sapiens
  misc_RNA (1)...(19): siRNA sense strand
cgaggaagaugaagaagag

SEQ ID NO: 14300 - RNA, 19 nt, Homo sapiens
  misc_RNA (1)...(19): siRNA sense strand
caauagagccacugaaaca

SEQ ID NO: 14301 - RNA, 19 nt, Homo sapiens
  misc_RNA (1)...(19): siRNA sense strand
gaaugaaggcaaacucgaa

SEQ ID NO: 14302 - RNA, 19 nt, Homo sapiens
  misc_RNA (1)...(19): siRNA sense strand
uuaaagaccucagcacaau

SEQ ID NO: 14303 - RNA, 19 nt, Homo sapiens
  misc_RNA (1)...(19): siRNA sense strand
ucgaagcccucacagauga

SEQ ID NO: 14304 - RNA, 19 nt, Homo sapiens
  misc_RNA (1)...(19): siRNA sense strand
uuauaacgauggagaggua

SEQ ID NO: 14305 - RNA, 19 nt, Homo sapiens
  misc_RNA (1)...(19): siRNA sense strand
gcuuagaccuuuucaauug

SEQ ID NO: 14306 - RNA, 19 nt, Homo sapiens
  misc_RNA (1)...(19): siRNA sense strand
ggacaacagucggucgaau

SEQ ID NO: 14307 - RNA, 19 nt, Homo sapiens
  misc_RNA (1)...(19): siRNA sense strand
agagguagauggcgaggaa

SEQ ID NO: 14308 - RNA, 19 nt, Homo sapiens
  misc_RNA (1)...(19): siRNA sense strand
cucaagagcuuagaccuuu

SEQ ID NO: 14309 - RNA, 19 nt, Homo sapiens
  misc_RNA (1)...(19): siRNA sense strand
ucacgcaucuauauuuaag

SEQ ID NO: 14310 - RNA, 19 nt, Homo sapiens
  misc_RNA (1)...(19): siRNA sense strand
gagaugggcagacggauuc

SEQ ID NO: 14311 - RNA, 19 nt, Homo sapiens
  misc_RNA (1)...(19): siRNA sense strand
guccaaaccucacgcaucu

SEQ ID NO: 14312 - RNA, 19 nt, Homo sapiens
  misc_RNA (1)...(19): siRNA sense strand
cacaauagagccacugaaa

SEQ ID NO: 14313 - RNA, 19 nt, Homo sapiens
  misc_RNA (1)...(19): siRNA sense strand
ggagaugggcagacggauu

SEQ ID NO: 14314 - RNA, 19 nt, Homo sapiens
  misc_RNA (1)...(19): siRNA sense strand
agaagagcuuggugaagaa

SEQ ID NO: 14315 - RNA, 19 nt, Homo sapiens
  misc_RNA (1)...(19): siRNA sense strand
ugaagaugcucagguagug

SEQ ID NO: 14316 - RNA, 19 nt, Homo sapiens
  misc_RNA (1)...(19): siRNA sense strand
uaaagaccucagcacaaua

SEQ ID NO: 14317 - RNA, 19 nt, Homo sapiens
  misc_RNA (1)...(19): siRNA sense strand
guugagaaagcuugaacua

SEQ ID NO: 14318 - RNA, 19 nt, Homo sapiens
  misc_RNA (1)...(19): siRNA sense strand
ccaaaccucacgcaucuau

SEQ ID NO: 14319 - RNA, 19 nt, Homo sapiens
  misc_RNA (1)...(19): siRNA sense strand
aaaccucacgcaucuauau

SEQ ID NO: 14320 - RNA, 19 nt, Homo sapiens
  misc_RNA (1)...(19): siRNA sense strand
ucacagaugaauuugaaga

SEQ ID NO: 14321 - RNA, 19 nt, Homo sapiens
  misc_RNA (1)...(19): siRNA sense strand
ugaagaagagcuuggugaa

SEQ ID NO: 14322 - RNA, 19 nt, Homo sapiens
  misc_RNA (1)...(19): siRNA sense strand
cagaugaauuugaagaacu

SEQ ID NO: 14323 - RNA, 19 nt, Homo sapiens
  misc_RNA (1)...(19): siRNA sense strand
ggaguaugaugaagaugcu

SEQ ID NO: 14324 - RNA, 19 nt, Homo sapiens
  misc_RNA (1)...(19): siRNA sense strand
gacaacagucggucgaaug

SEQ ID NO: 14325 - RNA, 19 nt, Homo sapiens
  misc_RNA (1)...(19): siRNA sense strand
uagaaaaccucaagagcuu

SEQ ID NO: 14326 - RNA, 19 nt, Homo sapiens
  misc_RNA (1)...(19): siRNA sense strand
gcgaggaagaugaagaaga

SEQ ID NO: 14327 - RNA, 19 nt, Homo sapiens
  misc_RNA (1)...(19): siRNA sense strand
gaagaagagcuuggugaag

SEQ ID NO: 14328 - RNA, 19 nt, Homo sapiens
  misc_RNA (1)...(19): siRNA sense strand
ggaagaugaagaagagcuu

SEQ ID NO: 14329 - RNA, 19 nt, Homo sapiens
  misc_RNA (1)...(19): siRNA sense strand
ucaccucaaucucagacuu

SEQ ID NO: 14330 - RNA, 19 nt, Homo sapiens
  misc_RNA (1)...(19): siRNA sense strand
guucaagcuucuccugcaa

SEQ ID NO: 14331 - RNA, 19 nt, Homo sapiens
  misc_RNA (1)...(19): siRNA sense strand
caccucaaucucagacuua

SEQ ID NO: 14332 - RNA, 19 nt, Homo sapiens
  misc_RNA (1)...(19): siRNA sense strand
gcacaauagagccacugaa

SEQ ID NO: 14333 - RNA, 19 nt, Homo sapiens
  misc_RNA (1)...(19): siRNA sense strand
ggaggaggaggaaggugaa

SEQ ID NO: 14334 - RNA, 19 nt, Homo sapiens
  misc_RNA (1)...(19): siRNA sense strand
gagaaaacguguucaagcu

SEQ ID NO: 14335 - RNA, 19 nt, Homo sapiens
  misc_RNA (1)...(19): siRNA sense strand
gagcuuagaccuuuucaau

SEQ ID NO: 14336 - RNA, 19 nt, Homo sapiens
  misc_RNA (1)...(19): siRNA sense strand
acgcaucuauauuuaagug

SEQ ID NO: 14337 - RNA, 19 nt, Homo sapiens
  misc_RNA (1)...(19): siRNA sense strand
agagcuuggugaagaagaa

SEQ ID NO: 14338 - RNA, 19 nt, Homo sapiens
  misc_RNA (1)...(19): siRNA sense strand
ggaugaagaagguuauaac

SEQ ID NO: 14339 - RNA, 19 nt, Homo sapiens
  misc_RNA (1)...(19): siRNA sense strand
gaggaugaagaagguuaua

SEQ ID NO: 14340 - RNA, 19 nt, Homo sapiens
  misc_RNA (1)...(19): siRNA sense strand
ggaggagggugagcaugag

SEQ ID NO: 14341 - RNA, 19 nt, Homo sapiens
  misc_RNA (1)...(19): siRNA sense strand
ccucugaugugaaagaacu

SEQ ID NO: 14342 - RNA, 19 nt, Homo sapiens
  misc_RNA (1)...(19): siRNA sense strand
acaacagucggucgaauga

SEQ ID NO: 14343 - RNA, 19 nt, Homo sapiens
  misc_RNA (1)...(19): siRNA sense strand
ggaggaugaagaagguuau

SEQ ID NO: 14344 - RNA, 19 nt, Homo sapiens
  misc_RNA (1)...(19): siRNA sense strand
aaagaccucagcacaauag

SEQ ID NO: 14345 - RNA, 19 nt, Homo sapiens
  misc_RNA (1)...(19): siRNA sense strand
uaccaaaguuaaaguugag

SEQ ID NO: 14346 - RNA, 19 nt, Homo sapiens
  misc_RNA (1)...(19): siRNA sense strand
gggcagacggauucauuca

SEQ ID NO: 14347 - RNA, 19 nt, Homo sapiens
  misc_RNA (1)...(19): siRNA sense strand
ggaggaggaaggugaagag

SEQ ID NO: 14348 - RNA, 19 nt, Homo sapiens
  misc_RNA (1)...(19): siRNA sense strand
agaugaauuugaagaacug

SEQ ID NO: 14349 - RNA, 19 nt, Homo sapiens
  misc_RNA (1)...(19): siRNA sense strand
ugaauuugaagaacuggaa

SEQ ID NO: 14350 - RNA, 19 nt, Homo sapiens
  misc_RNA (1)...(19): siRNA sense strand
uaaaguugagaaagcuuga

SEQ ID NO: 14351 - RNA, 19 nt, Homo sapiens
  misc_RNA (1)...(19): siRNA sense strand
gaggaggaguaugaugaag

SEQ ID NO: 14352 - RNA, 19 nt, Homo sapiens
  misc_RNA (1)...(19): siRNA sense strand
caaaccucacgcaucuaua

SEQ ID NO: 14353 - RNA, 19 nt, Homo sapiens
  misc_RNA (1)...(19): siRNA sense strand
guagauggcgaggaagaug

SEQ ID NO: 14354 - RNA, 19 nt, Homo sapiens
  misc_RNA (1)...(19): siRNA sense strand
ugaggaggaguaugaugaa

SEQ ID NO: 14355 - RNA, 19 nt, Homo sapiens
  misc_RNA (1)...(19): siRNA sense strand
ccugaacgacuacggagaa

SEQ ID NO: 14356 - RNA, 19 nt, Homo sapiens
  misc_RNA (1)...(19): siRNA sense strand
gcagaaaaguguccaaacc

SEQ ID NO: 14357 - RNA, 19 nt, Homo sapiens
  misc_RNA (1)...(19): siRNA sense strand
caaacucgaagcccucaca

SEQ ID NO: 14358 - RNA, 19 nt, Homo sapiens
  misc_RNA (1)...(19): siRNA sense strand
aagcuucuccugcaacuca

SEQ ID NO: 14359 - RNA, 19 nt, Homo sapiens
  misc_RNA (1)...(19): siRNA sense strand
ccaaaguuaaaguugagaa

SEQ ID NO: 14360 - RNA, 19 nt, Homo sapiens
  misc_RNA (1)...(19): siRNA sense strand
cuggaaguauuggcagaaa

SEQ ID NO: 14361 - RNA, 19 nt, Homo sapiens
  misc_RNA (1)...(19): siRNA sense strand
acucgaagcccucacagau

SEQ ID NO: 14362 - RNA, 19 nt, Homo sapiens
  misc_RNA (1)...(19): siRNA sense strand
gaauuugaagaacuggaau

SEQ ID NO: 14363 - RNA, 19 nt, Homo sapiens
  misc_RNA (1)...(19): siRNA sense strand
gcccucugaugugaaagaa

SEQ ID NO: 14364 - RNA, 19 nt, Homo sapiens
  misc_RNA (1)...(19): siRNA sense strand
aacagucggucgaaugaag

SEQ ID NO: 14365 - RNA, 19 nt, Homo sapiens
  misc_RNA (1)...(19): siRNA sense strand
gugagcaugaggaggagua

SEQ ID NO: 14366 - RNA, 19 nt, Homo sapiens
  misc_RNA (1)...(19): siRNA sense strand
acagaugaauuugaagaac

SEQ ID NO: 14367 - RNA, 19 nt, Homo sapiens
  misc_RNA (1)...(19): siRNA sense strand
agaagguuauaacgaugga

SEQ ID NO: 14368 - RNA, 19 nt, Homo sapiens
  misc_RNA (1)...(19): siRNA sense strand
gaugaagaagguuauaacg

SEQ ID NO: 14369 - RNA, 19 nt, Homo sapiens
  misc_RNA (1)...(19): siRNA sense strand
cacagaugaauuugaagaa

SEQ ID NO: 14370 - RNA, 19 nt, Homo sapiens
  misc_RNA (1)...(19): siRNA sense strand
ccucaagagcuuagaccuu

SEQ ID NO: 14371 - RNA, 19 nt, Homo sapiens
  misc_RNA (1)...(19): siRNA sense strand
gagcuuggugaagaagaaa

SEQ ID NO: 14372 - RNA, 19 nt, Homo sapiens
  misc_RNA (1)...(19): siRNA sense strand
agcaugaggaggaguauga

SEQ ID NO: 14373 - RNA, 19 nt, Homo sapiens
  misc_RNA (1)...(19): siRNA sense strand
uugagaaagcuugaacuaa

SEQ ID NO: 14374 - RNA, 19 nt, Homo sapiens
  misc_RNA (1)...(19): siRNA sense strand
gcaaccaugucuugauuua

SEQ ID NO: 14375 - RNA, 19 nt, Homo sapiens
  misc_RNA (1)...(19): siRNA sense strand
gaaggaguaugaaaugaaa

SEQ ID NO: 14376 - RNA, 19 nt, Homo sapiens
  misc_RNA (1)...(19): siRNA sense strand
gaaauucaguggacagcua

SEQ ID NO: 14377 - RNA, 19 nt, Homo sapiens
  misc_RNA (1)...(19): siRNA sense strand
gaacuacccuguggccaua

SEQ ID NO: 14378 - RNA, 19 nt, Homo sapiens
  misc_RNA (1)...(19): siRNA sense strand
gcaaagaucuuggaaaugc

SEQ ID NO: 14379 - RNA, 19 nt, Homo sapiens
  misc_RNA (1)...(19): siRNA sense strand
ugaagaagcucuccuuuua

SEQ ID NO: 14380 - RNA, 19 nt, Homo sapiens
  misc_RNA (1)...(19): siRNA sense strand
gaaagucuaugauuacuac

SEQ ID NO: 14381 - RNA, 19 nt, Homo sapiens
  misc_RNA (1)...(19): siRNA sense strand
gauaaggugucaaaucaga

SEQ ID NO: 14382 - RNA, 19 nt, Homo sapiens
  misc_RNA (1)...(19): siRNA sense strand
ggaaggcaguccagugaaa

SEQ ID NO: 14383 - RNA, 19 nt, Homo sapiens
  misc_RNA (1)...(19): siRNA sense strand
cagcaaagaucuuggaaau

SEQ ID NO: 14384 - RNA, 19 nt, Homo sapiens
  misc_RNA (1)...(19): siRNA sense strand
ggagaggccuucacacuca

SEQ ID NO: 14385 - RNA, 19 nt, Homo sapiens
  misc_RNA (1)...(19): siRNA sense strand
gaaaucacaagaaccauaa

SEQ ID NO: 14386 - RNA, 19 nt, Homo sapiens
  misc_RNA (1)...(19): siRNA sense strand
ccacagugaugguuaagaa

SEQ ID NO: 14387 - RNA, 19 nt, Homo sapiens
  misc_RNA (1)...(19): siRNA sense strand
guccacagcuucaacagua

SEQ ID NO: 14388 - RNA, 19 nt, Homo sapiens
  misc_RNA (1)...(19): siRNA sense strand
gauggucucuggcuucauu

SEQ ID NO: 14389 - RNA, 19 nt, Homo sapiens
  misc_RNA (1)...(19): siRNA sense strand
gaaaggaccaacccaagaa

SEQ ID NO: 14390 - RNA, 19 nt, Homo sapiens
  misc_RNA (1)...(19): siRNA sense strand
gaaaucgcaucgcacaaug

SEQ ID NO: 14391 - RNA, 19 nt, Homo sapiens
  misc_RNA (1)...(19): siRNA sense strand
ugaggaagcugugaagaaa

SEQ ID NO: 14392 - RNA, 19 nt, Homo sapiens
  misc_RNA (1)...(19): siRNA sense strand
ugaaagaucuaaccaugug

SEQ ID NO: 14393 - RNA, 19 nt, Homo sapiens
  misc_RNA (1)...(19): siRNA sense strand
ggacagaagucagcagcaa

SEQ ID NO: 14394 - RNA, 19 nt, Homo sapiens
  misc_RNA (1)...(19): siRNA sense strand
ggaccaacccaagaauuua

SEQ ID NO: 14395 - RNA, 19 nt, Homo sapiens
  misc_RNA (1)...(19): siRNA sense strand
guacaguucucuaucaaca

SEQ ID NO: 14396 - RNA, 19 nt, Homo sapiens
  misc_RNA (1)...(19): siRNA sense strand
cgaaaguacuucccugaga

SEQ ID NO: 14397 - RNA, 19 nt, Homo sapiens
  misc_RNA (1)...(19): siRNA sense strand
caaccaacaucgugaagug

SEQ ID NO: 14398 - RNA, 19 nt, Homo sapiens
  misc_RNA (1)...(19): siRNA sense strand
ggaaggaaguacucaaguc

SEQ ID NO: 14399 - RNA, 19 nt, Homo sapiens
  misc_RNA (1)...(19): siRNA sense strand
gaaggacaauggcuguuuc

SEQ ID NO: 14400 - RNA, 19 nt, Homo sapiens
  misc_RNA (1)...(19): siRNA sense strand
gaagaagagaugaauguau

SEQ ID NO: 14401 - RNA, 19 nt, Homo sapiens
  misc_RNA (1)...(19): siRNA sense strand
cagcaaccaugucuugauu

SEQ ID NO: 14402 - RNA, 19 nt, Homo sapiens
  misc_RNA (1)...(19): siRNA sense strand
agacauggaucugggauuu

SEQ ID NO: 14403 - RNA, 19 nt, Homo sapiens
  misc_RNA (1)...(19): siRNA sense strand
ccuaugugcuccucgcuua

SEQ ID NO: 14404 - RNA, 19 nt, Homo sapiens
  misc_RNA (1)...(19): siRNA sense strand
gaacagugguggaauugac

SEQ ID NO: 14405 - RNA, 19 nt, Homo sapiens
  misc_RNA (1)...(19): siRNA sense strand
gcucaacaaugccauaaag

SEQ ID NO: 14406 - RNA, 19 nt, Homo sapiens
  misc_RNA (1)...(19): siRNA sense strand
gcucaucuaugcuguuuua

SEQ ID NO: 14407 - RNA, 19 nt, Homo sapiens
  misc_RNA (1)...(19): siRNA sense strand
ggaugagcauggccuugua

SEQ ID NO: 14408 - RNA, 19 nt, Homo sapiens
  misc_RNA (1)...(19): siRNA sense strand
ggaaaugaagcaaacuauu

SEQ ID NO: 14409 - RNA, 19 nt, Homo sapiens
  misc_RNA (1)...(19): siRNA sense strand
ggaaggaguaugaaaugaa

SEQ ID NO: 14410 - RNA, 19 nt, Homo sapiens
  misc_RNA (1)...(19): siRNA sense strand
acagugaaauuucguguug

SEQ ID NO: 14411 - RNA, 19 nt, Homo sapiens
  misc_RNA (1)...(19): siRNA sense strand
uccaugcucuguccaaaua

SEQ ID NO: 14412 - RNA, 19 nt, Homo sapiens
  misc_RNA (1)...(19): siRNA sense strand
gauaaucaccaucuuggaa

SEQ ID NO: 14413 - RNA, 19 nt, Homo sapiens
  misc_RNA (1)...(19): siRNA sense strand
ggaaagacacagucaucaa

SEQ ID NO: 14414 - RNA, 19 nt, Homo sapiens
  misc_RNA (1)...(19): siRNA sense strand
guacuggauuaucuaaaug

SEQ ID NO: 14415 - RNA, 19 nt, Homo sapiens
  misc_RNA (1)...(19): siRNA sense strand
gaagaauuaucccugaaac

SEQ ID NO: 14416 - RNA, 19 nt, Homo sapiens
  misc_RNA (1)...(19): siRNA sense strand
ugaguugauuccacuagua

SEQ ID NO: 14417 - RNA, 19 nt, Homo sapiens
  misc_RNA (1)...(19): siRNA sense strand
caaaccagccauagugaaa

SEQ ID NO: 14418 - RNA, 19 nt, Homo sapiens
  misc_RNA (1)...(19): siRNA sense strand
gaaggaaguacucaaguca

SEQ ID NO: 14419 - RNA, 19 nt, Homo sapiens
  misc_RNA (1)...(19): siRNA sense strand
acauucaacucccuacuuu

SEQ ID NO: 14420 - RNA, 19 nt, Homo sapiens
  misc_RNA (1)...(19): siRNA sense strand
gaaagacacagucaucaag

SEQ ID NO: 14421 - RNA, 19 nt, Homo sapiens
  misc_RNA (1)...(19): siRNA sense strand
aagaagagaugaauguauc

SEQ ID NO: 14422 - RNA, 19 nt, Homo sapiens
  misc_RNA (1)...(19): siRNA sense strand
ggaagaagagaugaaugua

SEQ ID NO: 14423 - RNA, 19 nt, Homo sapiens
  misc_RNA (1)...(19): siRNA sense strand
cagaagaaaucagguggaa

SEQ ID NO: 14424 - RNA, 19 nt, Homo sapiens
  misc_RNA (1)...(19): siRNA sense strand
guggugagguuucugaaga

SEQ ID NO: 14425 - RNA, 19 nt, Homo sapiens
  misc_RNA (1)...(19): siRNA sense strand
gaagaugcuggacuuggua

SEQ ID NO: 14426 - RNA, 19 nt, Homo sapiens
  misc_RNA (1)...(19): siRNA sense strand
ugaaaugcauggaccugaa

SEQ ID NO: 14427 - RNA, 19 nt, Homo sapiens
  misc_RNA (1)...(19): siRNA sense strand
guaccucucuuacuguuag

SEQ ID NO: 14428 - RNA, 19 nt, Homo sapiens
  misc_RNA (1)...(19): siRNA sense strand
ggaaaucgcaucgcacaau

SEQ ID NO: 14429 - RNA, 19 nt, Homo sapiens
  misc_RNA (1)...(19): siRNA sense strand
gaggaaggaguaugaaaug

SEQ ID NO: 14430 - RNA, 19 nt, Homo sapiens
  misc_RNA (1)...(19): siRNA sense strand
acaggagccucuucacuga

SEQ ID NO: 14431 - RNA, 19 nt, Homo sapiens
  misc_RNA (1)...(19): siRNA sense strand
caucaagccucuguugguu

SEQ ID NO: 14432 - RNA, 19 nt, Homo sapiens
  misc_RNA (1)...(19): siRNA sense strand
guaacagugccaaagauaa

SEQ ID NO: 14433 - RNA, 19 nt, Homo sapiens
  misc_RNA (1)...(19): siRNA sense strand
caaguuugaaguacaagua

SEQ ID NO: 14434 - RNA, 19 nt, Homo sapiens
  misc_RNA (1)...(19): siRNA sense strand
gaccaacccaagaauuuaa

SEQ ID NO: 14435 - RNA, 19 nt, Homo sapiens
  misc_RNA (1)...(19): siRNA sense strand
gaacaaacuccuucaucca

SEQ ID NO: 14436 - RNA, 19 nt, Homo sapiens
  misc_RNA (1)...(19): siRNA sense strand
ugaaguggaucacgaagca

SEQ ID NO: 14437 - RNA, 19 nt, Homo sapiens
  misc_RNA (1)...(19): siRNA sense strand
caaaugugguagaagaauc

SEQ ID NO: 14438 - RNA, 19 nt, Homo sapiens
  misc_RNA (1)...(19): siRNA sense strand
gaacacggaaggaaagaca

SEQ ID NO: 14439 - RNA, 19 nt, Homo sapiens
  misc_RNA (1)...(19): siRNA sense strand
gggauuugguggugguaaa

SEQ ID NO: 14440 - RNA, 19 nt, Homo sapiens
  misc_RNA (1)...(19): siRNA sense strand
ugaaaucacaagaaccaua

SEQ ID NO: 14441 - RNA, 19 nt, Homo sapiens
  misc_RNA (1)...(19): siRNA sense strand
ccaaugaggagguaauguu

SEQ ID NO: 14442 - RNA, 19 nt, Homo sapiens
  misc_RNA (1)...(19): siRNA sense strand
ggaaacaggagccucuuca

SEQ ID NO: 14443 - RNA, 19 nt, Homo sapiens
  misc_RNA (1)...(19): siRNA sense strand
gaacuacaaacacuaugau

SEQ ID NO: 14444 - RNA, 19 nt, Homo sapiens
  misc_RNA (1)...(19): siRNA sense strand
gaggaaaugaagcaaacua

SEQ ID NO: 14445 - RNA, 19 nt, Homo sapiens
  misc_RNA (1)...(19): siRNA sense strand
caaguaacagugccaaaga

SEQ ID NO: 14446 - RNA, 19 nt, Homo sapiens
  misc_RNA (1)...(19): siRNA sense strand
uaacagugccaaagauaau

SEQ ID NO: 14447 - RNA, 19 nt, Homo sapiens
  misc_RNA (1)...(19): siRNA sense strand
gagccuacaucuucaucga

SEQ ID NO: 14448 - RNA, 19 nt, Homo sapiens
  misc_RNA (1)...(19): siRNA sense strand
ccaacaagguggauuugag

SEQ ID NO: 14449 - RNA, 19 nt, Homo sapiens
  misc_RNA (1)...(19): siRNA sense strand
caagagcuuuguccaccuu

SEQ ID NO: 14450 - RNA, 19 nt, Homo sapiens
  misc_RNA (1)...(19): siRNA sense strand
ugaagaggaaggaguauga

SEQ ID NO: 14451 - RNA, 19 nt, Homo sapiens
  misc_RNA (1)...(19): siRNA sense strand
cuucugagcuaccugaaug

SEQ ID NO: 14452 - RNA, 19 nt, Homo sapiens
  misc_RNA (1)...(19): siRNA sense strand
gcaagaugucccaguaaga

SEQ ID NO: 14453 - RNA, 19 nt, Homo sapiens
  misc_RNA (1)...(19): siRNA sense strand
gaucguugaugugaagaug

SEQ ID NO: 14454 - RNA, 19 nt, Homo sapiens
  misc_RNA (1)...(19): siRNA sense strand
caagaaccauaaccaaacu

SEQ ID NO: 14455 - RNA, 19 nt, Homo sapiens
  misc_RNA (1)...(19): siRNA sense strand
ccaaagucuucauccaaug

SEQ ID NO: 14456 - RNA, 19 nt, Homo sapiens
  misc_RNA (1)...(19): siRNA sense strand
ggucacugcucaacaaugc

SEQ ID NO: 14457 - RNA, 19 nt, Homo sapiens
  misc_RNA (1)...(19): siRNA sense strand
gcaucaaucgucauaaugu

SEQ ID NO: 14458 - RNA, 19 nt, Homo sapiens
  misc_RNA (1)...(19): siRNA sense strand
agacaguccaggcacauua

SEQ ID NO: 14459 - RNA, 19 nt, Homo sapiens
  misc_RNA (1)...(19): siRNA sense strand
gcuguguccuucugagcua

SEQ ID NO: 14460 - RNA, 19 nt, Homo sapiens
  misc_RNA (1)...(19): siRNA sense strand
ucacgguucugcaagaugu

SEQ ID NO: 14461 - RNA, 19 nt, Homo sapiens
  misc_RNA (1)...(19): siRNA sense strand
gaaaaugcuugaaagaucu

SEQ ID NO: 14462 - RNA, 19 nt, Homo sapiens
  misc_RNA (1)...(19): siRNA sense strand
ggacaagaggaaggaagua

SEQ ID NO: 14463 - RNA, 19 nt, Homo sapiens
  misc_RNA (1)...(19): siRNA sense strand
cauaaagggaggaguagaa

SEQ ID NO: 14464 - RNA, 19 nt, Homo sapiens
  misc_RNA (1)...(19): siRNA sense strand
ucacagccuuuguucugaa

SEQ ID NO: 14465 - RNA, 19 nt, Homo sapiens
  misc_RNA (1)...(19): siRNA sense strand
gcucacagccuuuguucug

SEQ ID NO: 14466 - RNA, 19 nt, Homo sapiens
  misc_RNA (1)...(19): siRNA sense strand
gaaacugccaccaaaugug

SEQ ID NO: 14467 - RNA, 19 nt, Homo sapiens
  misc_RNA (1)...(19): siRNA sense strand
gagaaggaaacaacauuca

SEQ ID NO: 14468 - RNA, 19 nt, Homo sapiens
  misc_RNA (1)...(19): siRNA sense strand
cgaggacagucuggucuuu

SEQ ID NO: 14469 - RNA, 19 nt, Homo sapiens
  misc_RNA (1)...(19): siRNA sense strand
uagaggacaugggcuuaaa

SEQ ID NO: 14470 - RNA, 19 nt, Homo sapiens
  misc_RNA (1)...(19): siRNA sense strand
gcaaacuauuacuccaaug

SEQ ID NO: 14471 - RNA, 19 nt, Homo sapiens
  misc_RNA (1)...(19): siRNA sense strand
acacugagaccacugagaa

SEQ ID NO: 14472 - RNA, 19 nt, Homo sapiens
  misc_RNA (1)...(19): siRNA sense strand
ggacagagcacccuuucac

SEQ ID NO: 14473 - RNA, 19 nt, Homo sapiens
  misc_RNA (1)...(19): siRNA sense strand
aguaagagaucucaaacca

SEQ ID NO: 14474 - RNA, 19 nt, Homo sapiens
  misc_RNA (1)...(19): siRNA sense strand
gauccgggcuguucccuuu

SEQ ID NO: 14475 - RNA, 19 nt, Homo sapiens
  misc_RNA (1)...(19): siRNA sense strand
ggaagagguugaagaagug

SEQ ID NO: 14476 - RNA, 19 nt, Homo sapiens
  misc_RNA (1)...(19): siRNA sense strand
gaaagaauuggcuauaaga

SEQ ID NO: 14477 - RNA, 19 nt, Homo sapiens
  misc_RNA (1)...(19): siRNA sense strand
uauaagaacucuaggaaca

SEQ ID NO: 14478 - RNA, 19 nt, Homo sapiens
  misc_RNA (1)...(19): siRNA sense strand
gaacaaauuggacuuggaa

SEQ ID NO: 14479 - RNA, 19 nt, Homo sapiens
  misc_RNA (1)...(19): siRNA sense strand
ggagagagcaguauauuac

SEQ ID NO: 14480 - RNA, 19 nt, Homo sapiens
  misc_RNA (1)...(19): siRNA sense strand
auacagaucuggucgaguu

SEQ ID NO: 14481 - RNA, 19 nt, Homo sapiens
  misc_RNA (1)...(19): siRNA sense strand
ucuccaacaucuucauuua

SEQ ID NO: 14482 - RNA, 19 nt, Homo sapiens
  misc_RNA (1)...(19): siRNA sense strand
uaagaacucuaggaacaaa

SEQ ID NO: 14483 - RNA, 19 nt, Homo sapiens
  misc_RNA (1)...(19): siRNA sense strand
ggaacaaauuggacuugga

SEQ ID NO: 14484 - RNA, 19 nt, Homo sapiens
  misc_RNA (1)...(19): siRNA sense strand
ucaaucaacuucuguacug

SEQ ID NO: 14485 - RNA, 19 nt, Homo sapiens
  misc_RNA (1)...(19): siRNA sense strand
gcagacgucuccaacaucu

SEQ ID NO: 14486 - RNA, 19 nt, Homo sapiens
  misc_RNA (1)...(19): siRNA sense strand
ugaaagaauuggcuauaag

SEQ ID NO: 14487 - RNA, 19 nt, Homo sapiens
  misc_RNA (1)...(19): siRNA sense strand
auacagcacuggcaugguu

SEQ ID NO: 14488 - RNA, 19 nt, Homo sapiens
  misc_RNA (1)...(19): siRNA sense strand
gcuauaagaacucuaggaa

SEQ ID NO: 14489 - RNA, 19 nt, Homo sapiens
  misc_RNA (1)...(19): siRNA sense strand
ggaagcuccucccagaugu

SEQ ID NO: 14490 - RNA, 19 nt, Homo sapiens
  misc_RNA (1)...(19): siRNA sense strand
gaucacauuguaagaagaa

SEQ ID NO: 14491 - RNA, 19 nt, Homo sapiens
  misc_RNA (1)...(19): siRNA sense strand
cagaucuggucgaguuuaa

SEQ ID NO: 14492 - RNA, 19 nt, Homo sapiens
  misc_RNA (1)...(19): siRNA sense strand
cagaagggguuuacuguuu

SEQ ID NO: 14493 - RNA, 19 nt, Homo sapiens
  misc_RNA (1)...(19): siRNA sense strand
gagagcaguauauuacaaa

SEQ ID NO: 14494 - RNA, 19 nt, Homo sapiens
  misc_RNA (1)...(19): siRNA sense strand
ggaaacauuaacugacauu

SEQ ID NO: 14495 - RNA, 19 nt, Homo sapiens
  misc_RNA (1)...(19): siRNA sense strand
aggaagagguugaagaagu

SEQ ID NO: 14496 - RNA, 19 nt, Homo sapiens
  misc_RNA (1)...(19): siRNA sense strand
caaauuggacuuggaaaca

SEQ ID NO: 14497 - RNA, 19 nt, Homo sapiens
  misc_RNA (1)...(19): siRNA sense strand
agaauuggcuauaagaacu

SEQ ID NO: 14498 - RNA, 19 nt, Homo sapiens
  misc_RNA (1)...(19): siRNA sense strand
ugaggaagagguugaagaa

SEQ ID NO: 14499 - RNA, 19 nt, Homo sapiens
  misc_RNA (1)...(19): siRNA sense strand
ccaaagaagaaacaccaaa

SEQ ID NO: 14500 - RNA, 19 nt, Homo sapiens
  misc_RNA (1)...(19): siRNA sense strand
agagagcaguauauuacaa

SEQ ID NO: 14501 - RNA, 19 nt, Homo sapiens
  misc_RNA (1)...(19): siRNA sense strand
uaaagacaauacagaucug

SEQ ID NO: 14502 - RNA, 19 nt, Homo sapiens
  misc_RNA (1)...(19): siRNA sense strand
ucccuccaguuaacaaaua

SEQ ID NO: 14503 - RNA, 19 nt, Homo sapiens
  misc_RNA (1)...(19): siRNA sense strand
ggacauugaagcauauuuu

SEQ ID NO: 14504 - RNA, 19 nt, Homo sapiens
  misc_RNA (1)...(19): siRNA sense strand
gaacucuaggaacaaauug

SEQ ID NO: 14505 - RNA, 19 nt, Homo sapiens
  misc_RNA (1)...(19): siRNA sense strand
ucucaucuccugccaaaga

SEQ ID NO: 14506 - RNA, 19 nt, Homo sapiens
  misc_RNA (1)...(19): siRNA sense strand
gguggugucuccaggucaa

SEQ ID NO: 14507 - RNA, 19 nt, Homo sapiens
  misc_RNA (1)...(19): siRNA sense strand
ccucaggugccuugcauuu

SEQ ID NO: 14508 - RNA, 19 nt, Homo sapiens
  misc_RNA (1)...(19): siRNA sense strand
ggacuuggaaacauuaacu

SEQ ID NO: 14509 - RNA, 19 nt, Homo sapiens
  misc_RNA (1)...(19): siRNA sense strand
ccaggucaaucaacuucug

SEQ ID NO: 14510 - RNA, 19 nt, Homo sapiens
  misc_RNA (1)...(19): siRNA sense strand
uugagaaccuuaacaugca

SEQ ID NO: 14511 - RNA, 19 nt, Homo sapiens
  misc_RNA (1)...(19): siRNA sense strand
aggagagagcaguauauua

SEQ ID NO: 14512 - RNA, 19 nt, Homo sapiens
  misc_RNA (1)...(19): siRNA sense strand
caggagagagcaguauauu

SEQ ID NO: 14513 - RNA, 19 nt, Homo sapiens
  misc_RNA (1)...(19): siRNA sense strand
cggcaggaauuacauuguc

SEQ ID NO: 14514 - RNA, 19 nt, Homo sapiens
  misc_RNA (1)...(19): siRNA sense strand
gggcuguucccuuugagaa

SEQ ID NO: 14515 - RNA, 19 nt, Homo sapiens
  misc_RNA (1)...(19): siRNA sense strand
ucacugaggaagagguuga

SEQ ID NO: 14516 - RNA, 19 nt, Homo sapiens
  misc_RNA (1)...(19): siRNA sense strand
cugcagacgucuccaacau

SEQ ID NO: 14517 - RNA, 19 nt, Homo sapiens
  misc_RNA (1)...(19): siRNA sense strand
caaagaagaaacaccaaaa

SEQ ID NO: 14518 - RNA, 19 nt, Homo sapiens
  misc_RNA (1)...(19): siRNA sense strand
gagagagcaguauauuaca

SEQ ID NO: 14519 - RNA, 19 nt, Homo sapiens
  misc_RNA (1)...(19): siRNA sense strand
aauuggacuuggaaacauu

SEQ ID NO: 14520 - RNA, 19 nt, Homo sapiens
  misc_RNA (1)...(19): siRNA sense strand
uuggaaacauuaacugaca

SEQ ID NO: 14521 - RNA, 19 nt, Homo sapiens
  misc_RNA (1)...(19): siRNA sense strand
ccauggaguugggcuuaga

SEQ ID NO: 14522 - RNA, 19 nt, Homo sapiens
  misc_RNA (1)...(19): siRNA sense strand
gauguggcagccucuagaa

SEQ ID NO: 14523 - RNA, 19 nt, Homo sapiens
  misc_RNA (1)...(19): siRNA sense strand
uguggcagccucuagaauu

SEQ ID NO: 14524 - RNA, 19 nt, Homo sapiens
  misc_RNA (1)...(19): siRNA sense strand
auucucaucuccugccaaa

SEQ ID NO: 14525 - RNA, 19 nt, Homo sapiens
  misc_RNA (1)...(19): siRNA sense strand
aaauuggacuuggaaacau

SEQ ID NO: 14526 - RNA, 19 nt, Homo sapiens
  misc_RNA (1)...(19): siRNA sense strand
gaaaucucgugcccaaacc

SEQ ID NO: 14527 - RNA, 19 nt, Homo sapiens
  misc_RNA (1)...(19): siRNA sense strand
gagcaguauauuacaaaca

SEQ ID NO: 14528 - RNA, 19 nt, Homo sapiens
  misc_RNA (1)...(19): siRNA sense strand
agaacucuaggaacaaauu

SEQ ID NO: 14529 - RNA, 19 nt, Homo sapiens
  misc_RNA (1)...(19): siRNA sense strand
gcuucauccucaccuauag

SEQ ID NO: 14530 - RNA, 19 nt, Homo sapiens
  misc_RNA (1)...(19): siRNA sense strand
ggcuucauccucaccuaua

SEQ ID NO: 14531 - RNA, 19 nt, Homo sapiens
  misc_RNA (1)...(19): siRNA sense strand
gacagaagagagaggaauc

SEQ ID NO: 14532 - RNA, 19 nt, Homo sapiens
  misc_RNA (1)...(19): siRNA sense strand
uggaagcuccucccagaug

SEQ ID NO: 14533 - RNA, 19 nt, Homo sapiens
  misc_RNA (1)...(19): siRNA sense strand
agacgucuccaacaucuuc

SEQ ID NO: 14534 - RNA, 19 nt, Homo sapiens
  misc_RNA (1)...(19): siRNA sense strand
ucaggagagagcaguauau

SEQ ID NO: 14535 - RNA, 19 nt, Homo sapiens
  misc_RNA (1)...(19): siRNA sense strand
gaaacauuaacugacauuc

SEQ ID NO: 14536 - RNA, 19 nt, Homo sapiens
  misc_RNA (1)...(19): siRNA sense strand
gaucuggucgaguuuaaaa

SEQ ID NO: 14537 - RNA, 19 nt, Homo sapiens
  misc_RNA (1)...(19): siRNA sense strand
caccagauccgggcuguuc

SEQ ID NO: 14538 - RNA, 19 nt, Homo sapiens
  misc_RNA (1)...(19): siRNA sense strand
ugaucacauuguaagaaga

SEQ ID NO: 14539 - RNA, 19 nt, Homo sapiens
  misc_RNA (1)...(19): siRNA sense strand
acagaucuggucgaguuua

SEQ ID NO: 14540 - RNA, 19 nt, Homo sapiens
  misc_RNA (1)...(19): siRNA sense strand
acugggcucugaccacaau

SEQ ID NO: 14541 - RNA, 19 nt, Homo sapiens
  misc_RNA (1)...(19): siRNA sense strand
ucaggugccuugcauuuuc

SEQ ID NO: 14542 - RNA, 19 nt, Homo sapiens
  misc_RNA (1)...(19): siRNA sense strand
gacggcaggaauuacauug

SEQ ID NO: 14543 - RNA, 19 nt, Homo sapiens
  misc_RNA (1)...(19): siRNA sense strand
ugacggcaggaauuacauu

SEQ ID NO: 14544 - RNA, 19 nt, Homo sapiens
  misc_RNA (1)...(19): siRNA sense strand
gaagcuccucccagaugug

SEQ ID NO: 14545 - RNA, 19 nt, Homo sapiens
  misc_RNA (1)...(19): siRNA sense strand
gaaaggagaugaguauauu

SEQ ID NO: 14546 - RNA, 19 nt, Homo sapiens
  misc_RNA (1)...(19): siRNA sense strand
gaaccaggauuaggauuua

SEQ ID NO: 14547 - RNA, 19 nt, Homo sapiens
  misc_RNA (1)...(19): siRNA sense strand
ugacggagcugguuucaaa

SEQ ID NO: 14548 - RNA, 19 nt, Homo sapiens
  misc_RNA (1)...(19): siRNA sense strand
gaacuugguuuaaugaaca

SEQ ID NO: 14549 - RNA, 19 nt, Homo sapiens
  misc_RNA (1)...(19): siRNA sense strand
ggaugaagcuaccaaguau

SEQ ID NO: 14550 - RNA, 19 nt, Homo sapiens
  misc_RNA (1)...(19): siRNA sense strand
ggccagcgauguucagaua

SEQ ID NO: 14551 - RNA, 19 nt, Homo sapiens
  misc_RNA (1)...(19): siRNA sense strand
gugaacacauugacaagua

SEQ ID NO: 14552 - RNA, 19 nt, Homo sapiens
  misc_RNA (1)...(19): siRNA sense strand
gcaccaagcaauaucauuu

SEQ ID NO: 14553 - RNA, 19 nt, Homo sapiens
  misc_RNA (1)...(19): siRNA sense strand
gcaauggauuuaauacaga

SEQ ID NO: 14554 - RNA, 19 nt, Homo sapiens
  misc_RNA (1)...(19): siRNA sense strand
gaugugugcuuauugugua

SEQ ID NO: 14555 - RNA, 19 nt, Homo sapiens
  misc_RNA (1)...(19): siRNA sense strand
cuaaagcuccugcuaauaa

SEQ ID NO: 14556 - RNA, 19 nt, Homo sapiens
  misc_RNA (1)...(19): siRNA sense strand
gaauucagauugggagaaa

SEQ ID NO: 14557 - RNA, 19 nt, Homo sapiens
  misc_RNA (1)...(19): siRNA sense strand
agaauuggcuuauggaugu

SEQ ID NO: 14558 - RNA, 19 nt, Homo sapiens
  misc_RNA (1)...(19): siRNA sense strand
ggagaucacagcauacaaa

SEQ ID NO: 14559 - RNA, 19 nt, Homo sapiens
  misc_RNA (1)...(19): siRNA sense strand
gaaauggcaaugaaaguug

SEQ ID NO: 14560 - RNA, 19 nt, Homo sapiens
  misc_RNA (1)...(19): siRNA sense strand
ugauguagcugguauaaag

SEQ ID NO: 14561 - RNA, 19 nt, Homo sapiens
  misc_RNA (1)...(19): siRNA sense strand
gcagauacuuggaggcaau

SEQ ID NO: 14562 - RNA, 19 nt, Homo sapiens
  misc_RNA (1)...(19): siRNA sense strand
uaaagcuccugcuaauaaa

SEQ ID NO: 14563 - RNA, 19 nt, Homo sapiens
  misc_RNA (1)...(19): siRNA sense strand
gagagcagcuugggagguu

SEQ ID NO: 14564 - RNA, 19 nt, Homo sapiens
  misc_RNA (1)...(19): siRNA sense strand
gaaagugccuaaagaaaau

SEQ ID NO: 14565 - RNA, 19 nt, Homo sapiens
  misc_RNA (1)...(19): siRNA sense strand
cauuggagaucacagcaua

SEQ ID NO: 14566 - RNA, 19 nt, Homo sapiens
  misc_RNA (1)...(19): siRNA sense strand
ggucagaagauguggauaa

SEQ ID NO: 14567 - RNA, 19 nt, Homo sapiens
  misc_RNA (1)...(19): siRNA sense strand
ggagcugguuucaaaguug

SEQ ID NO: 14568 - RNA, 19 nt, Homo sapiens
  misc_RNA (1)...(19): siRNA sense strand
gagaaaggaauuaaacaug

SEQ ID NO: 14569 - RNA, 19 nt, Homo sapiens
  misc_RNA (1)...(19): siRNA sense strand
ggcauuugcuggagauauu

SEQ ID NO: 14570 - RNA, 19 nt, Homo sapiens
  misc_RNA (1)...(19): siRNA sense strand
ggaggcaauggauuuaaua

SEQ ID NO: 14571 - RNA, 19 nt, Homo sapiens
  misc_RNA (1)...(19): siRNA sense strand
acacacacauuccagagaa

SEQ ID NO: 14572 - RNA, 19 nt, Homo sapiens
  misc_RNA (1)...(19): siRNA sense strand
ugaacuagcuagaaugagu

SEQ ID NO: 14573 - RNA, 19 nt, Homo sapiens
  misc_RNA (1)...(19): siRNA sense strand
caagcaauaucauuuaugc

SEQ ID NO: 14574 - RNA, 19 nt, Homo sapiens
  misc_RNA (1)...(19): siRNA sense strand
cccaguggcugcagaauau

SEQ ID NO: 14575 - RNA, 19 nt, Homo sapiens
  misc_RNA (1)...(19): siRNA sense strand
uagaaugaguuaccagaga

SEQ ID NO: 14576 - RNA, 19 nt, Homo sapiens
  misc_RNA (1)...(19): siRNA sense strand
aaagaaaggagaugaguau

SEQ ID NO: 14577 - RNA, 19 nt, Homo sapiens
  misc_RNA (1)...(19): siRNA sense strand
cagaagauguggauaacca

SEQ ID NO: 14578 - RNA, 19 nt, Homo sapiens
  misc_RNA (1)...(19): siRNA sense strand
gugaagaauuggcuuaugg

SEQ ID NO: 14579 - RNA, 19 nt, Homo sapiens
  misc_RNA (1)...(19): siRNA sense strand
agacugcuauugaaggaaa

SEQ ID NO: 14580 - RNA, 19 nt, Homo sapiens
  misc_RNA (1)...(19): siRNA sense strand
gcuguuggauuagcacaaa

SEQ ID NO: 14581 - RNA, 19 nt, Homo sapiens
  misc_RNA (1)...(19): siRNA sense strand
ggagaaaggaauuaaacau

SEQ ID NO: 14582 - RNA, 19 nt, Homo sapiens
  misc_RNA (1)...(19): siRNA sense strand
gcucugauguagcugguau

SEQ ID NO: 14583 - RNA, 19 nt, Homo sapiens
  misc_RNA (1)...(19): siRNA sense strand
ggcaauggauuuaauacag

SEQ ID NO: 14584 - RNA, 19 nt, Homo sapiens
  misc_RNA (1)...(19): siRNA sense strand
caccaagcaauaucauuua

SEQ ID NO: 14585 - RNA, 19 nt, Homo sapiens
  misc_RNA (1)...(19): siRNA sense strand
cuggagauauugcaaauca

SEQ ID NO: 14586 - RNA, 19 nt, Homo sapiens
  misc_RNA (1)...(19): siRNA sense strand
ggauuaggauuuaguuuug

SEQ ID NO: 14587 - RNA, 19 nt, Homo sapiens
  misc_RNA (1)...(19): siRNA sense strand
uagaggaauugucuucgaa

SEQ ID NO: 14588 - RNA, 19 nt, Homo sapiens
  misc_RNA (1)...(19): siRNA sense strand
ggaacuugguuuaaugaac

SEQ ID NO: 14589 - RNA, 19 nt, Homo sapiens
  misc_RNA (1)...(19): siRNA sense strand
ccgaacagcagaaagaauu

SEQ ID NO: 14590 - RNA, 19 nt, Homo sapiens
  misc_RNA (1)...(19): siRNA sense strand
ccauugaugugugcuuauu

SEQ ID NO: 14591 - RNA, 19 nt, Homo sapiens
  misc_RNA (1)...(19): siRNA sense strand
agaagagccugggaacuug

SEQ ID NO: 14592 - RNA, 19 nt, Homo sapiens
  misc_RNA (1)...(19): siRNA sense strand
uggcugaaauggcaaugaa

SEQ ID NO: 14593 - RNA, 19 nt, Homo sapiens
  misc_RNA (1)...(19): siRNA sense strand
gugaaagugccuaaagaaa

SEQ ID NO: 14594 - RNA, 19 nt, Homo sapiens
  misc_RNA (1)...(19): siRNA sense strand
gaccaaagcagaaaagaaa

SEQ ID NO: 14595 - RNA, 19 nt, Homo sapiens
  misc_RNA (1)...(19): siRNA sense strand
gaauuggcuuauggaugua

SEQ ID NO: 14596 - RNA, 19 nt, Homo sapiens
  misc_RNA (1)...(19): siRNA sense strand
uaaauuugccagagaggaa

SEQ ID NO: 14597 - RNA, 19 nt, Homo sapiens
  misc_RNA (1)...(19): siRNA sense strand
aaauggcaaugaaaguuga

SEQ ID NO: 14598 - RNA, 19 nt, Homo sapiens
  misc_RNA (1)...(19): siRNA sense strand
gcaaugggagcuuuugaua

SEQ ID NO: 14599 - RNA, 19 nt, Homo sapiens
  misc_RNA (1)...(19): siRNA sense strand
uagaagagccugggaacuu

SEQ ID NO: 14600 - RNA, 19 nt, Homo sapiens
  misc_RNA (1)...(19): siRNA sense strand
uggaugaagcuaccaagua

SEQ ID NO: 14601 - RNA, 19 nt, Homo sapiens
  misc_RNA (1)...(19): siRNA sense strand
ucagacugcuauugaagga

SEQ ID NO: 14602 - RNA, 19 nt, Homo sapiens
  misc_RNA (1)...(19): siRNA sense strand
ggagauauugcaaaucagu

SEQ ID NO: 14603 - RNA, 19 nt, Homo sapiens
  misc_RNA (1)...(19): siRNA sense strand
ucaagcuacugcucguaaa

SEQ ID NO: 14604 - RNA, 19 nt, Homo sapiens
  misc_RNA (1)...(19): siRNA sense strand
agaaaggagaugaguauau

SEQ ID NO: 14605 - RNA, 19 nt, Homo sapiens
  misc_RNA (1)...(19): siRNA sense strand
gaugcuuguuuaauuagug

SEQ ID NO: 14606 - RNA, 19 nt, Homo sapiens
  misc_RNA (1)...(19): siRNA sense strand
gauucuggucgucgaaaua

SEQ ID NO: 14607 - RNA, 19 nt, Homo sapiens
  misc_RNA (1)...(19): siRNA sense strand
ugaaauggcaaugaaaguu

SEQ ID NO: 14608 - RNA, 19 nt, Homo sapiens
  misc_RNA (1)...(19): siRNA sense strand
guagagcaccaagcaauau

SEQ ID NO: 14609 - RNA, 19 nt, Homo sapiens
  misc_RNA (1)...(19): siRNA sense strand
aaugggagcuuuugauaaa

SEQ ID NO: 14610 - RNA, 19 nt, Homo sapiens
  misc_RNA (1)...(19): siRNA sense strand
gaacuguggaggucuugga

SEQ ID NO: 14611 - RNA, 19 nt, Homo sapiens
  misc_RNA (1)...(19): siRNA sense strand
gaggaaaagcuaauuggua

SEQ ID NO: 14612 - RNA, 19 nt, Homo sapiens
  misc_RNA (1)...(19): siRNA sense strand
ucaccgaacagcagaaaga

SEQ ID NO: 14613 - RNA, 19 nt, Homo sapiens
  misc_RNA (1)...(19): siRNA sense strand
uauaaagaccaaagcagaa

SEQ ID NO: 14614 - RNA, 19 nt, Homo sapiens
  misc_RNA (1)...(19): siRNA sense strand
ugaaccaggauuaggauuu

SEQ ID NO: 14615 - RNA, 19 nt, Homo sapiens
  misc_RNA (1)...(19): siRNA sense strand
gauccuaaagcuccugcua

SEQ ID NO: 14616 - RNA, 19 nt, Homo sapiens
  misc_RNA (1)...(19): siRNA sense strand
uaccaaguaugcccuggaa

SEQ ID NO: 14617 - RNA, 19 nt, Homo sapiens
  misc_RNA (1)...(19): siRNA sense strand
gauacuagaggaauugucu

SEQ ID NO: 14618 - RNA, 19 nt, Homo sapiens
  misc_RNA (1)...(19): siRNA sense strand
aguaugcccuggaaaggaa

SEQ ID NO: 14619 - RNA, 19 nt, Homo sapiens
  misc_RNA (1)...(19): siRNA sense strand
gaagaauuggcuuauggau

SEQ ID NO: 14620 - RNA, 19 nt, Homo sapiens
  misc_RNA (1)...(19): siRNA sense strand
ccugggaacuugguuuaau

SEQ ID NO: 14621 - RNA, 19 nt, Homo sapiens
  misc_RNA (1)...(19): siRNA sense strand
guugaacuagcuagaauga

SEQ ID NO: 14622 - RNA, 19 nt, Homo sapiens
  misc_RNA (1)...(19): siRNA sense strand
ugcuggugcuguuggauua

SEQ ID NO: 14623 - RNA, 19 nt, Homo sapiens
  misc_RNA (1)...(19): siRNA sense strand
gaugugaaagugccuaaag

SEQ ID NO: 14624 - RNA, 19 nt, Homo sapiens
  misc_RNA (1)...(19): siRNA sense strand
cuucgaagaugugaaagug

SEQ ID NO: 14625 - RNA, 19 nt, Homo sapiens
  misc_RNA (1)...(19): siRNA sense strand
cuagaggaauugucuucga

SEQ ID NO: 14626 - RNA, 19 nt, Homo sapiens
  misc_RNA (1)...(19): siRNA sense strand
cgaacagcagaaagaauuu

SEQ ID NO: 14627 - RNA, 19 nt, Homo sapiens
  misc_RNA (1)...(19): siRNA sense strand
ccaaguaugcccuggaaag

SEQ ID NO: 14628 - RNA, 19 nt, Homo sapiens
  misc_RNA (1)...(19): siRNA sense strand
uccuaaagcuccugcuaau

SEQ ID NO: 14629 - RNA, 19 nt, Homo sapiens
  misc_RNA (1)...(19): siRNA sense strand
aaccagaccuguaguagcu

SEQ ID NO: 14630 - RNA, 19 nt, Homo sapiens
  misc_RNA (1)...(19): siRNA sense strand
cagcgauguucagauacua

SEQ ID NO: 14631 - RNA, 19 nt, Homo sapiens
  misc_RNA (1)...(19): siRNA sense strand
ggaauucagauugggagaa

SEQ ID NO: 14632 - RNA, 19 nt, Homo sapiens
  misc_RNA (1)...(19): siRNA sense strand
ggguucagacugcuauuga

SEQ ID NO: 14633 - RNA, 19 nt, Homo sapiens
  misc_RNA (1)...(19): siRNA sense strand
gaacacauugacaaguaca

SEQ ID NO: 14634 - RNA, 19 nt, Homo sapiens
  misc_RNA (1)...(19): siRNA sense strand
guacuucacaaauucaaag

SEQ ID NO: 14635 - RNA, 19 nt, Homo sapiens
  misc_RNA (1)...(19): siRNA sense strand
uggaggcaauggauuuaau

SEQ ID NO: 14636 - RNA, 19 nt, Homo sapiens
  misc_RNA (1)...(19): siRNA sense strand
uguagagcaccaagcaaua

SEQ ID NO: 14637 - RNA, 19 nt, Homo sapiens
  misc_RNA (1)...(19): siRNA sense strand
gauaaaaccagaccuguag

SEQ ID NO: 14638 - RNA, 19 nt, Homo sapiens
  misc_RNA (1)...(19): siRNA sense strand
ugaaagugccuaaagaaaa

SEQ ID NO: 14639 - RNA, 19 nt, Homo sapiens
  misc_RNA (1)...(19): siRNA sense strand
gaacuuuugaugcuuguuu

SEQ ID NO: 14640 - RNA, 19 nt, Homo sapiens
  misc_RNA (1)...(19): siRNA sense strand
cggagcugguuucaaaguu

SEQ ID NO: 14641 - RNA, 19 nt, Homo sapiens
  misc_RNA (1)...(19): siRNA sense strand
gauguagcugguauaaaga

SEQ ID NO: 14642 - RNA, 19 nt, Homo sapiens
  misc_RNA (1)...(19): siRNA sense strand
gggagaaaggaauuaaaca

SEQ ID NO: 14643 - RNA, 19 nt, Homo sapiens
  misc_RNA (1)...(19): siRNA sense strand
ccuaaagcuccugcuaaua

SEQ ID NO: 14644 - RNA, 19 nt, Homo sapiens
  misc_RNA (1)...(19): siRNA sense strand
gagauauugcaaaucaguu

SEQ ID NO: 14645 - RNA, 19 nt, Homo sapiens
  misc_RNA (1)...(19): siRNA sense strand
caagaagccuuucaucaag

SEQ ID NO: 14646 - RNA, 19 nt, Homo sapiens
  misc_RNA (1)...(19): siRNA sense strand
gggaugggcuucaagauag

SEQ ID NO: 14647 - RNA, 19 nt, Homo sapiens
  misc_RNA (1)...(19): siRNA sense strand
cggccaaccucaucuuuga

SEQ ID NO: 14648 - RNA, 19 nt, Homo sapiens
  misc_RNA (1)...(19): siRNA sense strand
acaagaagccuuucaucaa

SEQ ID NO: 14649 - RNA, 19 nt, Homo sapiens
  misc_RNA (1)...(19): siRNA sense strand
gggcccaucuugaaguuug

SEQ ID NO: 14650 - RNA, 19 nt, Homo sapiens
  misc_RNA (1)...(19): siRNA sense strand
ggauaaggaacaucucuuc

SEQ ID NO: 14651 - RNA, 19 nt, Homo sapiens
  misc_RNA (1)...(19): siRNA sense strand
gcugaaggauaacaagaag

SEQ ID NO: 14652 - RNA, 19 nt, Homo sapiens
  misc_RNA (1)...(19): siRNA sense strand
gcgcugccaugcugaagga

SEQ ID NO: 14653 - RNA, 19 nt, Homo sapiens
  misc_RNA (1)...(19): siRNA sense strand
ucaccaagcuccaggucau

SEQ ID NO: 14654 - RNA, 19 nt, Homo sapiens
  misc_RNA (1)...(19): siRNA sense strand
ugacaaaauuggcugcuuu

SEQ ID NO: 14655 - RNA, 19 nt, Homo sapiens
  misc_RNA (1)...(19): siRNA sense strand
ggucauccaguucaaguug

SEQ ID NO: 14656 - RNA, 19 nt, Homo sapiens
  misc_RNA (1)...(19): siRNA sense strand
cagcccagguggauaagga

SEQ ID NO: 14657 - RNA, 19 nt, Homo sapiens
  misc_RNA (1)...(19): siRNA sense strand
gcugugaacuacgcugaga

SEQ ID NO: 14658 - RNA, 19 nt, Homo sapiens
  misc_RNA (1)...(19): siRNA sense strand
caucaugagugucaacaac

SEQ ID NO: 14659 - RNA, 19 nt, Homo sapiens
  misc_RNA (1)...(19): siRNA sense strand
cggcucaggugaagaagau

SEQ ID NO: 14660 - RNA, 19 nt, Homo sapiens
  misc_RNA (1)...(19): siRNA sense strand
ggaguuguuucccauugca

SEQ ID NO: 14661 - RNA, 19 nt, Homo sapiens
  misc_RNA (1)...(19): siRNA sense strand
cugccaugcugaaggauaa

SEQ ID NO: 14662 - RNA, 19 nt, Homo sapiens
  misc_RNA (1)...(19): siRNA sense strand
acucauggguucugaaugg

SEQ ID NO: 14663 - RNA, 19 nt, Homo sapiens
  misc_RNA (1)...(19): siRNA sense strand
gaaggaguuguuucccauu

SEQ ID NO: 14664 - RNA, 19 nt, Homo sapiens
  misc_RNA (1)...(19): siRNA sense strand
uaacaagaagccuuucauc

SEQ ID NO: 14665 - RNA, 19 nt, Homo sapiens
  misc_RNA (1)...(19): siRNA sense strand
gauaacaagaagccuuuca

SEQ ID NO: 14666 - RNA, 19 nt, Homo sapiens
  misc_RNA (1)...(19): siRNA sense strand
ccagaccgcccucgauugu

SEQ ID NO: 14667 - RNA, 19 nt, Homo sapiens
  misc_RNA (1)...(19): siRNA sense strand
gcaguuacacaccaucuac

SEQ ID NO: 14668 - RNA, 19 nt, Homo sapiens
  misc_RNA (1)...(19): siRNA sense strand
gcggugcuggccucgauua

SEQ ID NO: 14669 - RNA, 19 nt, Homo sapiens
  misc_RNA (1)...(19): siRNA sense strand
ccagggaacggcagugaug

SEQ ID NO: 14670 - RNA, 19 nt, Homo sapiens
  misc_RNA (1)...(19): siRNA sense strand
agggaugggcuucaagaua

SEQ ID NO: 14671 - RNA, 19 nt, Homo sapiens
  misc_RNA (1)...(19): siRNA sense strand
aaggaguuguuucccauug

SEQ ID NO: 14672 - RNA, 19 nt, Homo sapiens
  misc_RNA (1)...(19): siRNA sense strand
cagcggcucaggugaagaa

SEQ ID NO: 14673 - RNA, 19 nt, Homo sapiens
  misc_RNA (1)...(19): siRNA sense strand
ccgcaucacugagaucuac

SEQ ID NO: 14674 - RNA, 19 nt, Homo sapiens
  misc_RNA (1)...(19): siRNA sense strand
ccagacaugccgggacuuu

SEQ ID NO: 14675 - RNA, 19 nt, Homo sapiens
  misc_RNA (1)...(19): siRNA sense strand
ggaaccaaagccuggauca

SEQ ID NO: 14676 - RNA, 19 nt, Homo sapiens
  misc_RNA (1)...(19): siRNA sense strand
ggacagagcccugcaaaac

SEQ ID NO: 14677 - RNA, 19 nt, Homo sapiens
  misc_RNA (1)...(19): siRNA sense strand
gccgggacuuugccgagaa

SEQ ID NO: 14678 - RNA, 19 nt, Homo sapiens
  misc_RNA (1)...(19): siRNA sense strand
cgagacacaccagauguug

SEQ ID NO: 14679 - RNA, 19 nt, Homo sapiens
  misc_RNA (1)...(19): siRNA sense strand
aacaagaagccuuucauca

SEQ ID NO: 14680 - RNA, 19 nt, Homo sapiens
  misc_RNA (1)...(19): siRNA sense strand
ggaagaaagaagacaagcu

SEQ ID NO: 14681 - RNA, 19 nt, Homo sapiens
  misc_RNA (1)...(19): siRNA sense strand
ccagggaugggcuucaaga

SEQ ID NO: 14682 - RNA, 19 nt, Homo sapiens
  misc_RNA (1)...(19): siRNA sense strand
cgacucauggguucugaau

SEQ ID NO: 14683 - RNA, 19 nt, Homo sapiens
  misc_RNA (1)...(19): siRNA sense strand
ucgauugugcugugaacua

SEQ ID NO: 14684 - RNA, 19 nt, Homo sapiens
  misc_RNA (1)...(19): siRNA sense strand
caagauagccaugcaaacc

SEQ ID NO: 14685 - RNA, 19 nt, Homo sapiens
  misc_RNA (1)...(19): siRNA sense strand
acagagcccugcaaaacaa

SEQ ID NO: 14686 - RNA, 19 nt, Homo sapiens
  misc_RNA (1)...(19): siRNA sense strand
gcugccaugcugaaggaua

SEQ ID NO: 14687 - RNA, 19 nt, Homo sapiens
  misc_RNA (1)...(19): siRNA sense strand
ccagguggauaaggaacau

SEQ ID NO: 14688 - RNA, 19 nt, Homo sapiens
  misc_RNA (1)...(19): siRNA sense strand
uugcagcccagguggauaa

SEQ ID NO: 14689 - RNA, 19 nt, Homo sapiens
  misc_RNA (1)...(19): siRNA sense strand
cgauugugcugugaacuac

SEQ ID NO: 14690 - RNA, 19 nt, Homo sapiens
  misc_RNA (1)...(19): siRNA sense strand
gugcuggccucgauuaccu

SEQ ID NO: 14691 - RNA, 19 nt, Homo sapiens
  misc_RNA (1)...(19): siRNA sense strand
ccaccaggccauccagauc

SEQ ID NO: 14692 - RNA, 19 nt, Homo sapiens
  misc_RNA (1)...(19): siRNA sense strand
caucuaccagucuguggaa

SEQ ID NO: 14693 - RNA, 19 nt, Homo sapiens
  misc_RNA (1)...(19): siRNA sense strand
cgagggcaccagcgaaauc

SEQ ID NO: 14694 - RNA, 19 nt, Homo sapiens
  misc_RNA (1)...(19): siRNA sense strand
aggauaacaagaagccuuu

SEQ ID NO: 14695 - RNA, 19 nt, Homo sapiens
  misc_RNA (1)...(19): siRNA sense strand
gcacaaaggcccagaaaga

SEQ ID NO: 14696 - RNA, 19 nt, Homo sapiens
  misc_RNA (1)...(19): siRNA sense strand
cagcagagguguucuuuga

SEQ ID NO: 14697 - RNA, 19 nt, Homo sapiens
  misc_RNA (1)...(19): siRNA sense strand
gaaggaaccuggaguagag

SEQ ID NO: 14698 - RNA, 19 nt, Homo sapiens
  misc_RNA (1)...(19): siRNA sense strand
gagcagacacaguuucuua

SEQ ID NO: 14699 - RNA, 19 nt, Homo sapiens
  misc_RNA (1)...(19): siRNA sense strand
gcagagguguucuuugaug

SEQ ID NO: 14700 - RNA, 19 nt, Homo sapiens
  misc_RNA (1)...(19): siRNA sense strand
caucaaggcuucaaacaca

SEQ ID NO: 14701 - RNA, 19 nt, Homo sapiens
  misc_RNA (1)...(19): siRNA sense strand
uaacugaguccauggcuua

SEQ ID NO: 14702 - RNA, 19 nt, Homo sapiens
  misc_RNA (1)...(19): siRNA sense strand
cagaucagguguucccaua

SEQ ID NO: 14703 - RNA, 19 nt, Homo sapiens
  misc_RNA (1)...(19): siRNA sense strand
gaucaugccacuaaucgua

SEQ ID NO: 14704 - RNA, 19 nt, Homo sapiens
  misc_RNA (1)...(19): siRNA sense strand
gaaugacgcucuggagaug

SEQ ID NO: 14705 - RNA, 19 nt, Homo sapiens
  misc_RNA (1)...(19): siRNA sense strand
ggagaaaauucacaacuuu

SEQ ID NO: 14706 - RNA, 19 nt, Homo sapiens
  misc_RNA (1)...(19): siRNA sense strand
ugagaggcaucauugcuaa

SEQ ID NO: 14707 - RNA, 19 nt, Homo sapiens
  misc_RNA (1)...(19): siRNA sense strand
gcagacacaguuucuuaaa

SEQ ID NO: 14708 - RNA, 19 nt, Homo sapiens
  misc_RNA (1)...(19): siRNA sense strand
ccucaacaauggaagguuu

SEQ ID NO: 14709 - RNA, 19 nt, Homo sapiens
  misc_RNA (1)...(19): siRNA sense strand
aggagaagaucacagcuuu

SEQ ID NO: 14710 - RNA, 19 nt, Homo sapiens
  misc_RNA (1)...(19): siRNA sense strand
ccuggaaggugacagauga

SEQ ID NO: 14711 - RNA, 19 nt, Homo sapiens
  misc_RNA (1)...(19): siRNA sense strand
ccacggacuuccagauaga

SEQ ID NO: 14712 - RNA, 19 nt, Homo sapiens
  misc_RNA (1)...(19): siRNA sense strand
gaacgaucccgccaagaau

SEQ ID NO: 14713 - RNA, 19 nt, Homo sapiens
  misc_RNA (1)...(19): siRNA sense strand
ggaugguuaugcugcagua

SEQ ID NO: 14714 - RNA, 19 nt, Homo sapiens
  misc_RNA (1)...(19): siRNA sense strand
gggagacuguggccgcuuu

SEQ ID NO: 14715 - RNA, 19 nt, Homo sapiens
  misc_RNA (1)...(19): siRNA sense strand
gguguucuuugauggagua

SEQ ID NO: 14716 - RNA, 19 nt, Homo sapiens
  misc_RNA (1)...(19): siRNA sense strand
ccacuaaucguacccaguu

SEQ ID NO: 14717 - RNA, 19 nt, Homo sapiens
  misc_RNA (1)...(19): siRNA sense strand
gaccuuggcgugggcauua

SEQ ID NO: 14718 - RNA, 19 nt, Homo sapiens
  misc_RNA (1)...(19): siRNA sense strand
uggcagugcucuaaagaau

SEQ ID NO: 14719 - RNA, 19 nt, Homo sapiens
  misc_RNA (1)...(19): siRNA sense strand
ugaacgaucccgccaagaa

SEQ ID NO: 14720 - RNA, 19 nt, Homo sapiens
  misc_RNA (1)...(19): siRNA sense strand
gcagugcucuaaagaaucc

SEQ ID NO: 14721 - RNA, 19 nt, Homo sapiens
  misc_RNA (1)...(19): siRNA sense strand
gaagagcagacacaguuuc

SEQ ID NO: 14722 - RNA, 19 nt, Homo sapiens
  misc_RNA (1)...(19): siRNA sense strand
gaaggugacagaugaaugc

SEQ ID NO: 14723 - RNA, 19 nt, Homo sapiens
  misc_RNA (1)...(19): siRNA sense strand
ucaaaggcauccugcucuu

SEQ ID NO: 14724 - RNA, 19 nt, Homo sapiens
  misc_RNA (1)...(19): siRNA sense strand
caagagcucuaccgcaacu

SEQ ID NO: 14725 - RNA, 19 nt, Homo sapiens
  misc_RNA (1)...(19): siRNA sense strand
gcagggcuguauggacaaa

SEQ ID NO: 14726 - RNA, 19 nt, Homo sapiens
  misc_RNA (1)...(19): siRNA sense strand
acaaaggcccagaaagaaa

SEQ ID NO: 14727 - RNA, 19 nt, Homo sapiens
  misc_RNA (1)...(19): siRNA sense strand
caggagccgugaaggagaa

SEQ ID NO: 14728 - RNA, 19 nt, Homo sapiens
  misc_RNA (1)...(19): siRNA sense strand
caucagagcaucgguuuca

SEQ ID NO: 14729 - RNA, 19 nt, Homo sapiens
  misc_RNA (1)...(19): siRNA sense strand
gcuaggagaggcaggcaaa

SEQ ID NO: 14730 - RNA, 19 nt, Homo sapiens
  misc_RNA (1)...(19): siRNA sense strand
caagacaccaguuacagau

SEQ ID NO: 14731 - RNA, 19 nt, Homo sapiens
  misc_RNA (1)...(19): siRNA sense strand
ggcggaaucuaaguccuuu

SEQ ID NO: 14732 - RNA, 19 nt, Homo sapiens
  misc_RNA (1)...(19): siRNA sense strand
gggcuuggcagugcucuaa

SEQ ID NO: 14733 - RNA, 19 nt, Homo sapiens
  misc_RNA (1)...(19): siRNA sense strand
ggaaggugacagaugaaug

SEQ ID NO: 14734 - RNA, 19 nt, Homo sapiens
  misc_RNA (1)...(19): siRNA sense strand
ccaagacaccaguuacaga

SEQ ID NO: 14735 - RNA, 19 nt, Homo sapiens
  misc_RNA (1)...(19): siRNA sense strand
gggccuagcagacaucuuc

SEQ ID NO: 14736 - RNA, 19 nt, Homo sapiens
  misc_RNA (1)...(19): siRNA sense strand
cagacacaguuucuuaaag

SEQ ID NO: 14737 - RNA, 19 nt, Homo sapiens
  misc_RNA (1)...(19): siRNA sense strand
ugacauucuucggcuguuu

SEQ ID NO: 14738 - RNA, 19 nt, Homo sapiens
  misc_RNA (1)...(19): siRNA sense strand
caugaaggaaccuggagua

SEQ ID NO: 14739 - RNA, 19 nt, Homo sapiens
  misc_RNA (1)...(19): siRNA sense strand
gggagaaaauucacaacuu

SEQ ID NO: 14740 - RNA, 19 nt, Homo sapiens
  misc_RNA (1)...(19): siRNA sense strand
ccaugcacauccucaacaa

SEQ ID NO: 14741 - RNA, 19 nt, Homo sapiens
  misc_RNA (1)...(19): siRNA sense strand
cacaaaggcccagaaagaa

SEQ ID NO: 14742 - RNA, 19 nt, Homo sapiens
  misc_RNA (1)...(19): siRNA sense strand
ccacaggagccgugaagga

SEQ ID NO: 14743 - RNA, 19 nt, Homo sapiens
  misc_RNA (1)...(19): siRNA sense strand
gaacgugcugggugagguu

SEQ ID NO: 14744 - RNA, 19 nt, Homo sapiens
  misc_RNA (1)...(19): siRNA sense strand
cggccaaggcggaaucuaa

SEQ ID NO: 14745 - RNA, 19 nt, Homo sapiens
  misc_RNA (1)...(19): siRNA sense strand
acgaagagcagacacaguu

SEQ ID NO: 14746 - RNA, 19 nt, Homo sapiens
  misc_RNA (1)...(19): siRNA sense strand
gccacggacuuccagauag

SEQ ID NO: 14747 - RNA, 19 nt, Homo sapiens
  misc_RNA (1)...(19): siRNA sense strand
cgguagaucaugccacuaa

SEQ ID NO: 14748 - RNA, 19 nt, Homo sapiens
  misc_RNA (1)...(19): siRNA sense strand
gcacauccucaacaaugga

SEQ ID NO: 14749 - RNA, 19 nt, Homo sapiens
  misc_RNA (1)...(19): siRNA sense strand
gaucagguguucccauacc

SEQ ID NO: 14750 - RNA, 19 nt, Homo sapiens
  misc_RNA (1)...(19): siRNA sense strand
gguggaggccaagcugaua

SEQ ID NO: 14751 - RNA, 19 nt, Homo sapiens
  misc_RNA (1)...(19): siRNA sense strand
guuaugcugcaguauguaa

SEQ ID NO: 14752 - RNA, 19 nt, Homo sapiens
  misc_RNA (1)...(19): siRNA sense strand
gaagcuggcacggaugguu

SEQ ID NO: 14753 - RNA, 19 nt, Homo sapiens
  misc_RNA (1)...(19): siRNA sense strand
gguagaucaugccacuaau

SEQ ID NO: 14754 - RNA, 19 nt, Homo sapiens
  misc_RNA (1)...(19): siRNA sense strand
gagccugugucccguuucu

SEQ ID NO: 14755 - RNA, 19 nt, Homo sapiens
  misc_RNA (1)...(19): siRNA sense strand
cgaagagcagacacaguuu

SEQ ID NO: 14756 - RNA, 19 nt, Homo sapiens
  misc_RNA (1)...(19): siRNA sense strand
ggugugggccuuugcaaca

SEQ ID NO: 14757 - RNA, 19 nt, Homo sapiens
  misc_RNA (1)...(19): siRNA sense strand
ucagagcaucgguuucaaa

SEQ ID NO: 14758 - RNA, 19 nt, Homo sapiens
  misc_RNA (1)...(19): siRNA sense strand
gcucuaccgcaacuucaaa

SEQ ID NO: 14759 - RNA, 19 nt, Homo sapiens
  misc_RNA (1)...(19): siRNA sense strand
ccacggcccagcaugagaa

SEQ ID NO: 14760 - RNA, 19 nt, Homo sapiens
  misc_RNA (1)...(19): siRNA sense strand
ugaaggaaccuggaguaga

SEQ ID NO: 14761 - RNA, 19 nt, Homo sapiens
  misc_RNA (1)...(19): siRNA sense strand
cguccgugcucaacgaaga

SEQ ID NO: 14762 - RNA, 19 nt, Homo sapiens
  misc_RNA (1)...(19): siRNA sense strand
gcaagcuuuggaucaguaa

SEQ ID NO: 14763 - RNA, 19 nt, Homo sapiens
  misc_RNA (1)...(19): siRNA sense strand
aaggccagcucaccacaga

SEQ ID NO: 14764 - RNA, 19 nt, Homo sapiens
  misc_RNA (1)...(19): siRNA sense strand
aagcuggcacggaugguua

SEQ ID NO: 14765 - RNA, 19 nt, Homo sapiens
  misc_RNA (1)...(19): siRNA sense strand
uacuauacccucaauggaa

SEQ ID NO: 14766 - RNA, 19 nt, Homo sapiens
  misc_RNA (1)...(19): siRNA sense strand
gcuuggcagugcucuaaag

SEQ ID NO: 14767 - RNA, 19 nt, Homo sapiens
  misc_RNA (1)...(19): siRNA sense strand
agcaagcuuuggaucagua

SEQ ID NO: 14768 - RNA, 19 nt, Homo sapiens
  misc_RNA (1)...(19): siRNA sense strand
caaaggcccagaaagaaaa

SEQ ID NO: 14769 - RNA, 19 nt, Homo sapiens
  misc_RNA (1)...(19): siRNA sense strand
gaaugcuggccuccugcua

SEQ ID NO: 14770 - RNA, 19 nt, Homo sapiens
  misc_RNA (1)...(19): siRNA sense strand
ugaaugcauccaaaucaug

SEQ ID NO: 14771 - RNA, 19 nt, Homo sapiens
  misc_RNA (1)...(19): siRNA sense strand
ugguuaugcugcaguaugu

SEQ ID NO: 14772 - RNA, 19 nt, Homo sapiens
  misc_RNA (1)...(19): siRNA sense strand
ucacaacuuugggcugauc

SEQ ID NO: 14773 - RNA, 19 nt, Homo sapiens
  misc_RNA (1)...(19): siRNA sense strand
gagaagaucacagcuuuug

SEQ ID NO: 14774 - RNA, 19 nt, Homo sapiens
  misc_RNA (1)...(19): siRNA sense strand
uguggccgcuuucugucua

SEQ ID NO: 14775 - RNA, 19 nt, Homo sapiens
  misc_RNA (1)...(19): siRNA sense strand
gaaaauacuauacccucaa

SEQ ID NO: 14776 - RNA, 19 nt, Homo sapiens
  misc_RNA (1)...(19): siRNA sense strand
guggaggccaagcugauaa

SEQ ID NO: 14777 - RNA, 19 nt, Homo sapiens
  misc_RNA (1)...(19): siRNA sense strand
guagaucaugccacuaauc

SEQ ID NO: 14778 - RNA, 19 nt, Homo sapiens
  misc_RNA (1)...(19): siRNA sense strand
gcuucaagguugccaugca

SEQ ID NO: 14779 - RNA, 19 nt, Homo sapiens
  misc_RNA (1)...(19): siRNA sense strand
gacuguggccgcuuucugu

SEQ ID NO: 14780 - RNA, 19 nt, Homo sapiens
  misc_RNA (1)...(19): siRNA sense strand
gagaaaaugcucugugaca

SEQ ID NO: 14781 - RNA, 19 nt, Homo sapiens
  misc_RNA (1)...(19): siRNA sense strand
agaaugacgcucuggagau

SEQ ID NO: 14782 - RNA, 19 nt, Homo sapiens
  misc_RNA (1)...(19): siRNA sense strand
cugacgcucugaccaggaa

SEQ ID NO: 14783 - RNA, 19 nt, Homo sapiens
  misc_RNA (1)...(19): siRNA sense strand
guccuuugcugugggaaug

SEQ ID NO: 14784 - RNA, 19 nt, Homo sapiens
  misc_RNA (1)...(19): siRNA sense strand
gacauucuucggcuguuug

SEQ ID NO: 14785 - RNA, 19 nt, Homo sapiens
  misc_RNA (1)...(19): siRNA sense strand
cuucgcaucuuccggaucu

SEQ ID NO: 14786 - RNA, 19 nt, Homo sapiens
  misc_RNA (1)...(19): siRNA sense strand
uggagccugugucccguuu

SEQ ID NO: 14787 - RNA, 19 nt, Homo sapiens
  misc_RNA (1)...(19): siRNA sense strand
gcaucuuccggaucuuuga

SEQ ID NO: 14788 - RNA, 19 nt, Homo sapiens
  misc_RNA (1)...(19): siRNA sense strand
ucagcuggcucuggacaag

SEQ ID NO: 14789 - RNA, 19 nt, Homo sapiens
  misc_RNA (1)...(19): siRNA sense strand
caaaggaaaggagcucucu

SEQ ID NO: 14790 - RNA, 19 nt, Homo sapiens
  misc_RNA (1)...(19): siRNA sense strand
ggagaucgugggcaugcau

SEQ ID NO: 14791 - RNA, 19 nt, Homo sapiens
  misc_RNA (1)...(19): siRNA sense strand
ggccaaggcggaaucuaag

SEQ ID NO: 14792 - RNA, 19 nt, Homo sapiens
  misc_RNA (1)...(19): siRNA sense strand
ggccuuuggucugcaagug

SEQ ID NO: 14793 - RNA, 19 nt, Homo sapiens
  misc_RNA (1)...(19): siRNA sense strand
gagcucuaccgcaacuuca

SEQ ID NO: 14794 - RNA, 19 nt, Homo sapiens
  misc_RNA (1)...(19): siRNA sense strand
gcuuacauggugagugcua

SEQ ID NO: 14795 - RNA, 19 nt, Homo sapiens
  misc_RNA (1)...(19): siRNA sense strand
ggaaguaaaugaagccuuu

SEQ ID NO: 14796 - RNA, 19 nt, Homo sapiens
  misc_RNA (1)...(19): siRNA sense strand
gaaaugaacaggacgcuua

SEQ ID NO: 14797 - RNA, 19 nt, Homo sapiens
  misc_RNA (1)...(19): siRNA sense strand
ggguaaagcuugaagauuu

SEQ ID NO: 14798 - RNA, 19 nt, Homo sapiens
  misc_RNA (1)...(19): siRNA sense strand
gcaaagaagcugaauauug

SEQ ID NO: 14799 - RNA, 19 nt, Homo sapiens
  misc_RNA (1)...(19): siRNA sense strand
gcgaagaggcucaauguua

SEQ ID NO: 14800 - RNA, 19 nt, Homo sapiens
  misc_RNA (1)...(19): siRNA sense strand
caaagaagcugaauauugc

SEQ ID NO: 14801 - RNA, 19 nt, Homo sapiens
  misc_RNA (1)...(19): siRNA sense strand
gaacacccauuggaucuuu

SEQ ID NO: 14802 - RNA, 19 nt, Homo sapiens
  misc_RNA (1)...(19): siRNA sense strand
gaaagaaaauggcacagua

SEQ ID NO: 14803 - RNA, 19 nt, Homo sapiens
  misc_RNA (1)...(19): siRNA sense strand
gaacaggacgcuuaugcua

SEQ ID NO: 14804 - RNA, 19 nt, Homo sapiens
  misc_RNA (1)...(19): siRNA sense strand
gaaggaaguggucauagua

SEQ ID NO: 14805 - RNA, 19 nt, Homo sapiens
  misc_RNA (1)...(19): siRNA sense strand
ggugcaggcuuaccuauuu

SEQ ID NO: 14806 - RNA, 19 nt, Homo sapiens
  misc_RNA (1)...(19): siRNA sense strand
ggaaauaagauauguggaa

SEQ ID NO: 14807 - RNA, 19 nt, Homo sapiens
  misc_RNA (1)...(19): siRNA sense strand
ggaacggaguuauguauca

SEQ ID NO: 14808 - RNA, 19 nt, Homo sapiens
  misc_RNA (1)...(19): siRNA sense strand
gaacggaguuauguaucaa

SEQ ID NO: 14809 - RNA, 19 nt, Homo sapiens
  misc_RNA (1)...(19): siRNA sense strand
gguaaagcuugaagauuug

SEQ ID NO: 14810 - RNA, 19 nt, Homo sapiens
  misc_RNA (1)...(19): siRNA sense strand
cauaguaagugcuacaaga

SEQ ID NO: 14811 - RNA, 19 nt, Homo sapiens
  misc_RNA (1)...(19): siRNA sense strand
gagagcauguccaauguuc

SEQ ID NO: 14812 - RNA, 19 nt, Homo sapiens
  misc_RNA (1)...(19): siRNA sense strand
gcuugaagauuugauugua

SEQ ID NO: 14813 - RNA, 19 nt, Homo sapiens
  misc_RNA (1)...(19): siRNA sense strand
cgaagaggcucaauguuac

SEQ ID NO: 14814 - RNA, 19 nt, Homo sapiens
  misc_RNA (1)...(19): siRNA sense strand
gaauauugcacgaaaugaa

SEQ ID NO: 14815 - RNA, 19 nt, Homo sapiens
  misc_RNA (1)...(19): siRNA sense strand
acaggacgcuuaugcuauu

SEQ ID NO: 14816 - RNA, 19 nt, Homo sapiens
  misc_RNA (1)...(19): siRNA sense strand
ggugaaagaagaugaagaa

SEQ ID NO: 14817 - RNA, 19 nt, Homo sapiens
  misc_RNA (1)...(19): siRNA sense strand
acaaggaggugaaggacaa

SEQ ID NO: 14818 - RNA, 19 nt, Homo sapiens
  misc_RNA (1)...(19): siRNA sense strand
ccacuaagcuugguuccau

SEQ ID NO: 14819 - RNA, 19 nt, Homo sapiens
  misc_RNA (1)...(19): siRNA sense strand
aagaagauauugcaaugug

SEQ ID NO: 14820 - RNA, 19 nt, Homo sapiens
  misc_RNA (1)...(19): siRNA sense strand
aguauugggugcaggcuua

SEQ ID NO: 14821 - RNA, 19 nt, Homo sapiens
  misc_RNA (1)...(19): siRNA sense strand
uccaauugcuccuguauau

SEQ ID NO: 14822 - RNA, 19 nt, Homo sapiens
  misc_RNA (1)...(19): siRNA sense strand
gcaagaauaguagcauuug

SEQ ID NO: 14823 - RNA, 19 nt, Homo sapiens
  misc_RNA (1)...(19): siRNA sense strand
ugaaggaaguggucauagu

SEQ ID NO: 14824 - RNA, 19 nt, Homo sapiens
  misc_RNA (1)...(19): siRNA sense strand
uuaaagaugugggauugaa

SEQ ID NO: 14825 - RNA, 19 nt, Homo sapiens
  misc_RNA (1)...(19): siRNA sense strand
gcuaacugaugucuacaau

SEQ ID NO: 14826 - RNA, 19 nt, Homo sapiens
  misc_RNA (1)...(19): siRNA sense strand
ggacgcuuaugcuauuaau

SEQ ID NO: 14827 - RNA, 19 nt, Homo sapiens
  misc_RNA (1)...(19): siRNA sense strand
cugcaucuaugguucuuaa

SEQ ID NO: 14828 - RNA, 19 nt, Homo sapiens
  misc_RNA (1)...(19): siRNA sense strand
gcaaggagaauacggucuu

SEQ ID NO: 14829 - RNA, 19 nt, Homo sapiens
  misc_RNA (1)...(19): siRNA sense strand
gcaaaguuccaaagcugaa

SEQ ID NO: 14830 - RNA, 19 nt, Homo sapiens
  misc_RNA (1)...(19): siRNA sense strand
uuacaccacuggcaagaau

SEQ ID NO: 14831 - RNA, 19 nt, Homo sapiens
  misc_RNA (1)...(19): siRNA sense strand
cuacaaggcaggcaguauu

SEQ ID NO: 14832 - RNA, 19 nt, Homo sapiens
  misc_RNA (1)...(19): siRNA sense strand
cagauguaguggugaaaga

SEQ ID NO: 14833 - RNA, 19 nt, Homo sapiens
  misc_RNA (1)...(19): siRNA sense strand
augggaagcugggaaauuu

SEQ ID NO: 14834 - RNA, 19 nt, Homo sapiens
  misc_RNA (1)...(19): siRNA sense strand
guccaauguuccauaugua

SEQ ID NO: 14835 - RNA, 19 nt, Homo sapiens
  misc_RNA (1)...(19): siRNA sense strand
caugauggccucucaaagu

SEQ ID NO: 14836 - RNA, 19 nt, Homo sapiens
  misc_RNA (1)...(19): siRNA sense strand
caggauuguuggucauuug

SEQ ID NO: 14837 - RNA, 19 nt, Homo sapiens
  misc_RNA (1)...(19): siRNA sense strand
ggcaagaauaguagcauuu

SEQ ID NO: 14838 - RNA, 19 nt, Homo sapiens
  misc_RNA (1)...(19): siRNA sense strand
gaaguggucauaguaagug

SEQ ID NO: 14839 - RNA, 19 nt, Homo sapiens
  misc_RNA (1)...(19): siRNA sense strand
guaccaccauaaacaaagu

SEQ ID NO: 14840 - RNA, 19 nt, Homo sapiens
  misc_RNA (1)...(19): siRNA sense strand
ccaaagcugaagacaguuu

SEQ ID NO: 14841 - RNA, 19 nt, Homo sapiens
  misc_RNA (1)...(19): siRNA sense strand
gcuacaagaacacccauug

SEQ ID NO: 14842 - RNA, 19 nt, Homo sapiens
  misc_RNA (1)...(19): siRNA sense strand
cuguagaaccuauugauuu

SEQ ID NO: 14843 - RNA, 19 nt, Homo sapiens
  misc_RNA (1)...(19): siRNA sense strand
uuccaaagcugaagacagu

SEQ ID NO: 14844 - RNA, 19 nt, Homo sapiens
  misc_RNA (1)...(19): siRNA sense strand
ggaaguggucauaguaagu

SEQ ID NO: 14845 - RNA, 19 nt, Homo sapiens
  misc_RNA (1)...(19): siRNA sense strand
gauggccucucaaagucuu

SEQ ID NO: 14846 - RNA, 19 nt, Homo sapiens
  misc_RNA (1)...(19): siRNA sense strand
guuguacuagcaaacauua

SEQ ID NO: 14847 - RNA, 19 nt, Homo sapiens
  misc_RNA (1)...(19): siRNA sense strand
ggaggcuggugcaggaaau

SEQ ID NO: 14848 - RNA, 19 nt, Homo sapiens
  misc_RNA (1)...(19): siRNA sense strand
uguccaauguuccauaugu

SEQ ID NO: 14849 - RNA, 19 nt, Homo sapiens
  misc_RNA (1)...(19): siRNA sense strand
gcauguccaauguuccaua

SEQ ID NO: 14850 - RNA, 19 nt, Homo sapiens
  misc_RNA (1)...(19): siRNA sense strand
guaaugaacagaggaucaa

SEQ ID NO: 14851 - RNA, 19 nt, Homo sapiens
  misc_RNA (1)...(19): siRNA sense strand
ccaggauuguuggucauuu

SEQ ID NO: 14852 - RNA, 19 nt, Homo sapiens
  misc_RNA (1)...(19): siRNA sense strand
gcuguagaaccuauugauu

SEQ ID NO: 14853 - RNA, 19 nt, Homo sapiens
  misc_RNA (1)...(19): siRNA sense strand
cagcgaagaggcucaaugu

SEQ ID NO: 14854 - RNA, 19 nt, Homo sapiens
  misc_RNA (1)...(19): siRNA sense strand
cauguccaauguuccauau

SEQ ID NO: 14855 - RNA, 19 nt, Homo sapiens
  misc_RNA (1)...(19): siRNA sense strand
gaauacggucuugccagua

SEQ ID NO: 14856 - RNA, 19 nt, Homo sapiens
  misc_RNA (1)...(19): siRNA sense strand
caaugugggaaguaaauga

SEQ ID NO: 14857 - RNA, 19 nt, Homo sapiens
  misc_RNA (1)...(19): siRNA sense strand
caggacgcuuaugcuauua

SEQ ID NO: 14858 - RNA, 19 nt, Homo sapiens
  misc_RNA (1)...(19): siRNA sense strand
gaagaauauaaacguguug

SEQ ID NO: 14859 - RNA, 19 nt, Homo sapiens
  misc_RNA (1)...(19): siRNA sense strand
gaagcugggaaauuuggaa

SEQ ID NO: 14860 - RNA, 19 nt, Homo sapiens
  misc_RNA (1)...(19): siRNA sense strand
ggguaauguucuacaagga

SEQ ID NO: 14861 - RNA, 19 nt, Homo sapiens
  misc_RNA (1)...(19): siRNA sense strand
uggcaagaauaguagcauu

SEQ ID NO: 14862 - RNA, 19 nt, Homo sapiens
  misc_RNA (1)...(19): siRNA sense strand
gaagaggcucaauguuaca

SEQ ID NO: 14863 - RNA, 19 nt, Homo sapiens
  misc_RNA (1)...(19): siRNA sense strand
cagaggaucaacaccauau

SEQ ID NO: 14864 - RNA, 19 nt, Homo sapiens
  misc_RNA (1)...(19): siRNA sense strand
ggagagcauguccaauguu

SEQ ID NO: 14865 - RNA, 19 nt, Homo sapiens
  misc_RNA (1)...(19): siRNA sense strand
uaaagaugugggauugaaa

SEQ ID NO: 14866 - RNA, 19 nt, Homo sapiens
  misc_RNA (1)...(19): siRNA sense strand
gcugaauauugcacgaaau

SEQ ID NO: 14867 - RNA, 19 nt, Homo sapiens
  misc_RNA (1)...(19): siRNA sense strand
gauauguggaacggaguua

SEQ ID NO: 14868 - RNA, 19 nt, Homo sapiens
  misc_RNA (1)...(19): siRNA sense strand
cauggguaauguucuacaa

SEQ ID NO: 14869 - RNA, 19 nt, Homo sapiens
  misc_RNA (1)...(19): siRNA sense strand
caauguuccauauguaaug

SEQ ID NO: 14870 - RNA, 19 nt, Homo sapiens
  misc_RNA (1)...(19): siRNA sense strand
ccauguaccaccauaaaca

SEQ ID NO: 14871 - RNA, 19 nt, Homo sapiens
  misc_RNA (1)...(19): siRNA sense strand
aaagacgggcuaacugaug

SEQ ID NO: 14872 - RNA, 19 nt, Homo sapiens
  misc_RNA (1)...(19): siRNA sense strand
caauugcuccuguauaugc

SEQ ID NO: 14873 - RNA, 19 nt, Homo sapiens
  misc_RNA (1)...(19): siRNA sense strand
caagaauaguagcauuugc

SEQ ID NO: 14874 - RNA, 19 nt, Homo sapiens
  misc_RNA (1)...(19): siRNA sense strand
acgcuuaugcuauuaauuc

SEQ ID NO: 14875 - RNA, 19 nt, Homo sapiens
  misc_RNA (1)...(19): siRNA sense strand
caaaagaagaagugaaaga

SEQ ID NO: 14876 - RNA, 19 nt, Homo sapiens
  misc_RNA (1)...(19): siRNA sense strand
aagcuugguuccauugcaa

SEQ ID NO: 14877 - RNA, 19 nt, Homo sapiens
  misc_RNA (1)...(19): siRNA sense strand
cagcugcucugguucucau

SEQ ID NO: 14878 - RNA, 19 nt, Homo sapiens
  misc_RNA (1)...(19): siRNA sense strand
aagacgggcuaacugaugu

SEQ ID NO: 14879 - RNA, 19 nt, Homo sapiens
  misc_RNA (1)...(19): siRNA sense strand
gugcaggcuuaccuauuuc

SEQ ID NO: 14880 - RNA, 19 nt, Homo sapiens
  misc_RNA (1)...(19): siRNA sense strand
gagcauguccaauguucca

SEQ ID NO: 14881 - RNA, 19 nt, Homo sapiens
  misc_RNA (1)...(19): siRNA sense strand
aguaagugcuacaagaaca

SEQ ID NO: 14882 - RNA, 19 nt, Homo sapiens
  misc_RNA (1)...(19): siRNA sense strand
gcagcgaagaggcucaaug

SEQ ID NO: 14883 - RNA, 19 nt, Homo sapiens
  misc_RNA (1)...(19): siRNA sense strand
guggaacggaguuauguau

SEQ ID NO: 14884 - RNA, 19 nt, Homo sapiens
  misc_RNA (1)...(19): siRNA sense strand
uaaaagacgggcuaacuga

SEQ ID NO: 14885 - RNA, 19 nt, Homo sapiens
  misc_RNA (1)...(19): siRNA sense strand
gaggaucaacaccauaugg

SEQ ID NO: 14886 - RNA, 19 nt, Homo sapiens
  misc_RNA (1)...(19): siRNA sense strand
gcaggcuuaccuauuucua

SEQ ID NO: 14887 - RNA, 19 nt, Homo sapiens
  misc_RNA (1)...(19): siRNA sense strand
cuucugccaugcuaauuca

SEQ ID NO: 14888 - RNA, 19 nt, Homo sapiens
  misc_RNA (1)...(19): siRNA sense strand
gcaucuaugguucuuaaag

SEQ ID NO: 14889 - RNA, 19 nt, Homo sapiens
  misc_RNA (1)...(19): siRNA sense strand
cgggcuaacugaugucuac

SEQ ID NO: 14890 - RNA, 19 nt, Homo sapiens
  misc_RNA (1)...(19): siRNA sense strand
gugcaggaaauaagauaug

SEQ ID NO: 14891 - RNA, 19 nt, Homo sapiens
  misc_RNA (1)...(19): siRNA sense strand
ugcugacgcugcuguagaa

SEQ ID NO: 14892 - RNA, 19 nt, Homo sapiens
  misc_RNA (1)...(19): siRNA sense strand
caugggaagcugggaaauu

SEQ ID NO: 14893 - RNA, 19 nt, Homo sapiens
  misc_RNA (1)...(19): siRNA sense strand
uacaagaacacccauugga

SEQ ID NO: 14894 - RNA, 19 nt, Homo sapiens
  misc_RNA (1)...(19): siRNA sense strand
acaagaacacccauuggau

SEQ ID NO: 14895 - RNA, 19 nt, Homo sapiens
  misc_RNA (1)...(19): siRNA sense strand
guacaucgacuuccucuac

SEQ ID NO: 14896 - RNA, 19 nt, Homo sapiens
  misc_RNA (1)...(19): siRNA sense strand
ggacaagcugagcaagauu

SEQ ID NO: 14897 - RNA, 19 nt, Homo sapiens
  misc_RNA (1)...(19): siRNA sense strand
gacgacagccugagcaaca

SEQ ID NO: 14898 - RNA, 19 nt, Homo sapiens
  misc_RNA (1)...(19): siRNA sense strand
cggacaagcugagcaagau

SEQ ID NO: 14899 - RNA, 19 nt, Homo sapiens
  misc_RNA (1)...(19): siRNA sense strand
ggaguccgcagucuuacga

SEQ ID NO: 14900 - RNA, 19 nt, Homo sapiens
  misc_RNA (1)...(19): siRNA sense strand
gacaagcugagcaagauuc

SEQ ID NO: 14901 - RNA, 19 nt, Homo sapiens
  misc_RNA (1)...(19): siRNA sense strand
gcaagauucagacccucaa

SEQ ID NO: 14902 - RNA, 19 nt, Homo sapiens
  misc_RNA (1)...(19): siRNA sense strand
gcacccagucgcugaacga

SEQ ID NO: 14903 - RNA, 19 nt, Homo sapiens
  misc_RNA (1)...(19): siRNA sense strand
ccagguacaucgacuuccu

SEQ ID NO: 14904 - RNA, 19 nt, Homo sapiens
  misc_RNA (1)...(19): siRNA sense strand
gagcaacagcgaggaagag

SEQ ID NO: 14905 - RNA, 19 nt, Homo sapiens
  misc_RNA (1)...(19): siRNA sense strand
gcaaugugcuggucaagag

SEQ ID NO: 14906 - RNA, 19 nt, Homo sapiens
  misc_RNA (1)...(19): siRNA sense strand
ugaagaagguggugugugu

SEQ ID NO: 14907 - RNA, 19 nt, Homo sapiens
  misc_RNA (1)...(19): siRNA sense strand
ggaaaggccuucugaugcu

SEQ ID NO: 14908 - RNA, 19 nt, Homo sapiens
  misc_RNA (1)...(19): siRNA sense strand
agagaagccuaaagugauu

SEQ ID NO: 14909 - RNA, 19 nt, Homo sapiens
  misc_RNA (1)...(19): siRNA sense strand
ccagagaagccuaaaguga

SEQ ID NO: 14910 - RNA, 19 nt, Homo sapiens
  misc_RNA (1)...(19): siRNA sense strand
agccuaaagugauucaaua

SEQ ID NO: 14911 - RNA, 19 nt, Homo sapiens
  misc_RNA (1)...(19): siRNA sense strand
gacaugaccucccgcaacu

SEQ ID NO: 14912 - RNA, 19 nt, Homo sapiens
  misc_RNA (1)...(19): siRNA sense strand
gcacgcagcuguggcucau

SEQ ID NO: 14913 - RNA, 19 nt, Homo sapiens
  misc_RNA (1)...(19): siRNA sense strand
agaccacccuucuaugaug

SEQ ID NO: 14914 - RNA, 19 nt, Homo sapiens
  misc_RNA (1)...(19): siRNA sense strand
gggaugaacaguccugguu

SEQ ID NO: 14915 - RNA, 19 nt, Homo sapiens
  misc_RNA (1)...(19): siRNA sense strand
caggaaaggccuucugaug

SEQ ID NO: 14916 - RNA, 19 nt, Homo sapiens
  misc_RNA (1)...(19): siRNA sense strand
cagagaagccuaaagugau

SEQ ID NO: 14917 - RNA, 19 nt, Homo sapiens
  misc_RNA (1)...(19): siRNA sense strand
gcucagacacgacaacauc

SEQ ID NO: 14918 - RNA, 19 nt, Homo sapiens
  misc_RNA (1)...(19): siRNA sense strand
gagcagggcgacacgaugu

SEQ ID NO: 14919 - RNA, 19 nt, Homo sapiens
  misc_RNA (1)...(19): siRNA sense strand
gaucaagaagacacuacaa

SEQ ID NO: 14920 - RNA, 19 nt, Homo sapiens
  misc_RNA (1)...(19): siRNA sense strand
gaccacccuucuaugaugu

SEQ ID NO: 14921 - RNA, 19 nt, Homo sapiens
  misc_RNA (1)...(19): siRNA sense strand
uagcaacaguccagagaag

SEQ ID NO: 14922 - RNA, 19 nt, Homo sapiens
  misc_RNA (1)...(19): siRNA sense strand
gcuuugaggacaugaagaa

SEQ ID NO: 14923 - RNA, 19 nt, Homo sapiens
  misc_RNA (1)...(19): siRNA sense strand
ccaccgaguucgucaacca

SEQ ID NO: 14924 - RNA, 19 nt, Homo sapiens
  misc_RNA (1)...(19): siRNA sense strand
gagcagccgggaacagaug

SEQ ID NO: 14925 - RNA, 19 nt, Homo sapiens
  misc_RNA (1)...(19): siRNA sense strand
cuucaucgccucagacaug

SEQ ID NO: 14926 - RNA, 19 nt, Homo sapiens
  misc_RNA (1)...(19): siRNA sense strand
gggaccuccuggacaguga

SEQ ID NO: 14927 - RNA, 19 nt, Homo sapiens
  misc_RNA (1)...(19): siRNA sense strand
gaaggugguguguguggau

SEQ ID NO: 14928 - RNA, 19 nt, Homo sapiens
  misc_RNA (1)...(19): siRNA sense strand
gaguguggccgucaagauc

SEQ ID NO: 14929 - RNA, 19 nt, Homo sapiens
  misc_RNA (1)...(19): siRNA sense strand
gcucugaggcuagcugugu

SEQ ID NO: 14930 - RNA, 19 nt, Homo sapiens
  misc_RNA (1)...(19): siRNA sense strand
gacaacauccuaggcuuca

SEQ ID NO: 14931 - RNA, 19 nt, Homo sapiens
  misc_RNA (1)...(19): siRNA sense strand
gcgcugcggaucaagaaga

SEQ ID NO: 14932 - RNA, 19 nt, Homo sapiens
  misc_RNA (1)...(19): siRNA sense strand
caacauccuaggcuucauc

SEQ ID NO: 14933 - RNA, 19 nt, Homo sapiens
  misc_RNA (1)...(19): siRNA sense strand
aggccuagcucagaugaug

SEQ ID NO: 14934 - RNA, 19 nt, Homo sapiens
  misc_RNA (1)...(19): siRNA sense strand
caucguggaggacuauaga

SEQ ID NO: 14935 - RNA, 19 nt, Homo sapiens
  misc_RNA (1)...(19): siRNA sense strand
gcagggcgacacgauguug

SEQ ID NO: 14936 - RNA, 19 nt, Homo sapiens
  misc_RNA (1)...(19): siRNA sense strand
guccagagaagccuaaagu

SEQ ID NO: 14937 - RNA, 19 nt, Homo sapiens
  misc_RNA (1)...(19): siRNA sense strand
ucucaggccuagcucagau

SEQ ID NO: 14938 - RNA, 19 nt, Homo sapiens
  misc_RNA (1)...(19): siRNA sense strand
ccgaguucgucaaccacua

SEQ ID NO: 14939 - RNA, 19 nt, Homo sapiens
  misc_RNA (1)...(19): siRNA sense strand
acgcagcuguggcucauca

SEQ ID NO: 14940 - RNA, 19 nt, Homo sapiens
  misc_RNA (1)...(19): siRNA sense strand
gcuuugaguccuacaagug

SEQ ID NO: 14941 - RNA, 19 nt, Homo sapiens
  misc_RNA (1)...(19): siRNA sense strand
caagagcaaccugcagugu

SEQ ID NO: 14942 - RNA, 19 nt, Homo sapiens
  misc_RNA (1)...(19): siRNA sense strand
ucaagaagacacuacaaaa

SEQ ID NO: 14943 - RNA, 19 nt, Homo sapiens
  misc_RNA (1)...(19): siRNA sense strand
augauguggugcccaauga

SEQ ID NO: 14944 - RNA, 19 nt, Homo sapiens
  misc_RNA (1)...(19): siRNA sense strand
gugagaguguggccgucaa

SEQ ID NO: 14945 - RNA, 19 nt, Homo sapiens
  misc_RNA (1)...(19): siRNA sense strand
uugaggacaugaagaaggu

SEQ ID NO: 14946 - RNA, 19 nt, Homo sapiens
  misc_RNA (1)...(19): siRNA sense strand
cuacgacuuucugcagaga

SEQ ID NO: 14947 - RNA, 19 nt, Homo sapiens
  misc_RNA (1)...(19): siRNA sense strand
guggagaucuucgguacac

SEQ ID NO: 14948 - RNA, 19 nt, Homo sapiens
  misc_RNA (1)...(19): siRNA sense strand
ggaucaagaagacacuaca

SEQ ID NO: 14949 - RNA, 19 nt, Homo sapiens
  misc_RNA (1)...(19): siRNA sense strand
gacuauagaccacccuucu

SEQ ID NO: 14950 - RNA, 19 nt, Homo sapiens
  misc_RNA (1)...(19): siRNA sense strand
acucacagggcagcgauua

SEQ ID NO: 14951 - RNA, 19 nt, Homo sapiens
  misc_RNA (1)...(19): siRNA sense strand
cagacacgacaacauccua

SEQ ID NO: 14952 - RNA, 19 nt, Homo sapiens
  misc_RNA (1)...(19): siRNA sense strand
aguccagucucauccugaa

SEQ ID NO: 14953 - RNA, 19 nt, Homo sapiens
  misc_RNA (1)...(19): siRNA sense strand
gacaguggcacggcagguu

SEQ ID NO: 14954 - RNA, 19 nt, Homo sapiens
  misc_RNA (1)...(19): siRNA sense strand
gaaaccaucuuauacuaug

SEQ ID NO: 14955 - RNA, 19 nt, Homo sapiens
  misc_RNA (1)...(19): siRNA sense strand
gaacaucaaugcggccaaa

SEQ ID NO: 14956 - RNA, 19 nt, Homo sapiens
  misc_RNA (1)...(19): siRNA sense strand
ggacacugauuaccagaug

SEQ ID NO: 14957 - RNA, 19 nt, Homo sapiens
  misc_RNA (1)...(19): siRNA sense strand
ggacaugggcuuuacugaa

SEQ ID NO: 14958 - RNA, 19 nt, Homo sapiens
  misc_RNA (1)...(19): siRNA sense strand
gacaugggcuuuacugaag

SEQ ID NO: 14959 - RNA, 19 nt, Homo sapiens
  misc_RNA (1)...(19): siRNA sense strand
gaagaccaggcccuuuaua

SEQ ID NO: 14960 - RNA, 19 nt, Homo sapiens
  misc_RNA (1)...(19): siRNA sense strand
cugaaaccaucuuauacua

SEQ ID NO: 14961 - RNA, 19 nt, Homo sapiens
  misc_RNA (1)...(19): siRNA sense strand
ccaaagagggcguggugua

SEQ ID NO: 14962 - RNA, 19 nt, Homo sapiens
  misc_RNA (1)...(19): siRNA sense strand
ggaucgcccucccagcuaa

SEQ ID NO: 14963 - RNA, 19 nt, Homo sapiens
  misc_RNA (1)...(19): siRNA sense strand
cgacaagcccaaaguagaa

SEQ ID NO: 14964 - RNA, 19 nt, Homo sapiens
  misc_RNA (1)...(19): siRNA sense strand
ucaaaaggaucgccuauga

SEQ ID NO: 14965 - RNA, 19 nt, Homo sapiens
  misc_RNA (1)...(19): siRNA sense strand
gggcucggccgaaguagua

SEQ ID NO: 14966 - RNA, 19 nt, Homo sapiens
  misc_RNA (1)...(19): siRNA sense strand
caaauuugacuacuacaug

SEQ ID NO: 14967 - RNA, 19 nt, Homo sapiens
  misc_RNA (1)...(19): siRNA sense strand
aaggaucgccuaugaguuu

SEQ ID NO: 14968 - RNA, 19 nt, Homo sapiens
  misc_RNA (1)...(19): siRNA sense strand
gaucgccuaugaguuugua

SEQ ID NO: 14969 - RNA, 19 nt, Homo sapiens
  misc_RNA (1)...(19): siRNA sense strand
gaccaggcccuuuauaaca

SEQ ID NO: 14970 - RNA, 19 nt, Homo sapiens
  misc_RNA (1)...(19): siRNA sense strand
cagacuuccuggccaaauu

SEQ ID NO: 14971 - RNA, 19 nt, Homo sapiens
  misc_RNA (1)...(19): siRNA sense strand
aaaagaggcuguggacaua

SEQ ID NO: 14972 - RNA, 19 nt, Homo sapiens
  misc_RNA (1)...(19): siRNA sense strand
uggaagaccaggcccuuua

SEQ ID NO: 14973 - RNA, 19 nt, Homo sapiens
  misc_RNA (1)...(19): siRNA sense strand
ggccaaauuugacuacuac

SEQ ID NO: 14974 - RNA, 19 nt, Homo sapiens
  misc_RNA (1)...(19): siRNA sense strand
ccuaugaguuuguagagau

SEQ ID NO: 14975 - RNA, 19 nt, Homo sapiens
  misc_RNA (1)...(19): siRNA sense strand
ggaagaccaggcccuuuau

SEQ ID NO: 14976 - RNA, 19 nt, Homo sapiens
  misc_RNA (1)...(19): siRNA sense strand
gcuaacuacucgcucaaca

SEQ ID NO: 14977 - RNA, 19 nt, Homo sapiens
  misc_RNA (1)...(19): siRNA sense strand
uuacugaagaggaguuuaa

SEQ ID NO: 14978 - RNA, 19 nt, Homo sapiens
  misc_RNA (1)...(19): siRNA sense strand
caaagagggcgugguguau

SEQ ID NO: 14979 - RNA, 19 nt, Homo sapiens
  misc_RNA (1)...(19): siRNA sense strand
uggccaaauuugacuacua

SEQ ID NO: 14980 - RNA, 19 nt, Homo sapiens
  misc_RNA (1)...(19): siRNA sense strand
uuaaaaggcugaacaucaa

SEQ ID NO: 14981 - RNA, 19 nt, Homo sapiens
  misc_RNA (1)...(19): siRNA sense strand
agaacugcauguccaccua

SEQ ID NO: 14982 - RNA, 19 nt, Homo sapiens
  misc_RNA (1)...(19): siRNA sense strand
cuaguuuccucccagaaga

SEQ ID NO: 14983 - RNA, 19 nt, Homo sapiens
  misc_RNA (1)...(19): siRNA sense strand
aaacgggacaugggcuuua

SEQ ID NO: 14984 - RNA, 19 nt, Homo sapiens
  misc_RNA (1)...(19): siRNA sense strand
gcucacccuuccagacuuc

SEQ ID NO: 14985 - RNA, 19 nt, Homo sapiens
  misc_RNA (1)...(19): siRNA sense strand
ucaaugcggccaaaucuag

SEQ ID NO: 14986 - RNA, 19 nt, Homo sapiens
  misc_RNA (1)...(19): siRNA sense strand
acuacucgcucaacacaga

SEQ ID NO: 14987 - RNA, 19 nt, Homo sapiens
  misc_RNA (1)...(19): siRNA sense strand
uaacuacucgcucaacaca

SEQ ID NO: 14988 - RNA, 19 nt, Homo sapiens
  misc_RNA (1)...(19): siRNA sense strand
aaacaugcacuucgagauc

SEQ ID NO: 14989 - RNA, 19 nt, Homo sapiens
  misc_RNA (1)...(19): siRNA sense strand
aagaccaggcccuuuauaa

SEQ ID NO: 14990 - RNA, 19 nt, Homo sapiens
  misc_RNA (1)...(19): siRNA sense strand
ugaccuggcuggagaugag

SEQ ID NO: 14991 - RNA, 19 nt, Homo sapiens
  misc_RNA (1)...(19): siRNA sense strand
ugguggagcuguguaagaa

SEQ ID NO: 14992 - RNA, 19 nt, Homo sapiens
  misc_RNA (1)...(19): siRNA sense strand
aagagggcgugguguaugu

SEQ ID NO: 14993 - RNA, 19 nt, Homo sapiens
  misc_RNA (1)...(19): siRNA sense strand
gacacugauuaccagauga

SEQ ID NO: 14994 - RNA, 19 nt, Homo sapiens
  misc_RNA (1)...(19): siRNA sense strand
cacggagcaugcagucauu

SEQ ID NO: 14995 - RNA, 19 nt, Homo sapiens
  misc_RNA (1)...(19): siRNA sense strand
caaaguagaacugcauguc

SEQ ID NO: 14996 - RNA, 19 nt, Homo sapiens
  misc_RNA (1)...(19): siRNA sense strand
aaaaugaccaggcuaacua

SEQ ID NO: 14997 - RNA, 19 nt, Homo sapiens
  misc_RNA (1)...(19): siRNA sense strand
agacuuccuggccaaauuu

SEQ ID NO: 14998 - RNA, 19 nt, Homo sapiens
  misc_RNA (1)...(19): siRNA sense strand
caucaaugcggccaaaucu

SEQ ID NO: 14999 - RNA, 19 nt, Homo sapiens
  misc_RNA (1)...(19): siRNA sense strand
gcuguggacauacucaaga

SEQ ID NO: 15000 - RNA, 19 nt, Homo sapiens
  misc_RNA (1)...(19): siRNA sense strand
ccucuugccuggacauguc

SEQ ID NO: 15001 - RNA, 19 nt, Homo sapiens
  misc_RNA (1)...(19): siRNA sense strand
agccugaaaccaucuuaua

SEQ ID NO: 15002 - RNA, 19 nt, Homo sapiens
  misc_RNA (1)...(19): siRNA sense strand
ucgacaagcccaaaguaga

SEQ ID NO: 15003 - RNA, 19 nt, Homo sapiens
  misc_RNA (1)...(19): siRNA sense strand
uucucgaccugcucuauaa

SEQ ID NO: 15004 - RNA, 19 nt, Homo sapiens
  misc_RNA (1)...(19): siRNA sense strand
ccacccuggacacugauua

SEQ ID NO: 15005 - RNA, 19 nt, Homo sapiens
  misc_RNA (1)...(19): siRNA sense strand
acuacuacaugccugcuau

SEQ ID NO: 15006 - RNA, 19 nt, Homo sapiens
  misc_RNA (1)...(19): siRNA sense strand
cuaugaguuuguagagaug

SEQ ID NO: 15007 - RNA, 19 nt, Homo sapiens
  misc_RNA (1)...(19): siRNA sense strand
caaacgggacaugggcuuu

SEQ ID NO: 15008 - RNA, 19 nt, Homo sapiens
  misc_RNA (1)...(19): siRNA sense strand
uggacauacucaagacaga

SEQ ID NO: 15009 - RNA, 19 nt, Homo sapiens
  misc_RNA (1)...(19): siRNA sense strand
gccuaugaguuuguagaga

SEQ ID NO: 15010 - RNA, 19 nt, Homo sapiens
  misc_RNA (1)...(19): siRNA sense strand
ggauccaucaagccugaaa

SEQ ID NO: 15011 - RNA, 19 nt, Homo sapiens
  misc_RNA (1)...(19): siRNA sense strand
ccaucaagccugaaaccau

SEQ ID NO: 15012 - RNA, 19 nt, Homo sapiens
  misc_RNA (1)...(19): siRNA sense strand
caagccugaaaccaucuua

SEQ ID NO: 15013 - RNA, 19 nt, Homo sapiens
  misc_RNA (1)...(19): siRNA sense strand
ccaaauuugacuacuacau

SEQ ID NO: 15014 - RNA, 19 nt, Homo sapiens
  misc_RNA (1)...(19): siRNA sense strand
uaaaagaggcuguggacau

SEQ ID NO: 15015 - RNA, 19 nt, Homo sapiens
  misc_RNA (1)...(19): siRNA sense strand
aaagagggcgugguguaug

SEQ ID NO: 15016 - RNA, 19 nt, Homo sapiens
  misc_RNA (1)...(19): siRNA sense strand
acaugggcuuuacugaaga

SEQ ID NO: 15017 - RNA, 19 nt, Homo sapiens
  misc_RNA (1)...(19): siRNA sense strand
gagcggcauucaccguacu

SEQ ID NO: 15018 - RNA, 19 nt, Homo sapiens
  misc_RNA (1)...(19): siRNA sense strand
gaaccaagccuaugccauu

SEQ ID NO: 15019 - RNA, 19 nt, Homo sapiens
  misc_RNA (1)...(19): siRNA sense strand
ccgcagaucuuccaaguuc

SEQ ID NO: 15020 - RNA, 19 nt, Homo sapiens
  misc_RNA (1)...(19): siRNA sense strand
ucacagccauugccaaguu

SEQ ID NO: 15021 - RNA, 19 nt, Homo sapiens
  misc_RNA (1)...(19): siRNA sense strand
gaucgcuacuuugccauua

SEQ ID NO: 15022 - RNA, 19 nt, Homo sapiens
  misc_RNA (1)...(19): siRNA sense strand
acaaagcccucaagacguu

SEQ ID NO: 15023 - RNA, 19 nt, Homo sapiens
  misc_RNA (1)...(19): siRNA sense strand
gcgauaacauugauucaca

SEQ ID NO: 15024 - RNA, 19 nt, Homo sapiens
  misc_RNA (1)...(19): siRNA sense strand
gagcccagauuucaggauu

SEQ ID NO: 15025 - RNA, 19 nt, Homo sapiens
  misc_RNA (1)...(19): siRNA sense strand
aaaggcagcuccagaagau

SEQ ID NO: 15026 - RNA, 19 nt, Homo sapiens
  misc_RNA (1)...(19): siRNA sense strand
aaaauaaacugcuguguga

SEQ ID NO: 15027 - RNA, 19 nt, Homo sapiens
  misc_RNA (1)...(19): siRNA sense strand
ccauucagaugcacuggua

SEQ ID NO: 15028 - RNA, 19 nt, Homo sapiens
  misc_RNA (1)...(19): siRNA sense strand
gaacggcagcgccuucuug

SEQ ID NO: 15029 - RNA, 19 nt, Homo sapiens
  misc_RNA (1)...(19): siRNA sense strand
caagggaggaauuguagua

SEQ ID NO: 15030 - RNA, 19 nt, Homo sapiens
  misc_RNA (1)...(19): siRNA sense strand
gaaguuuacauccuccuaa

SEQ ID NO: 15031 - RNA, 19 nt, Homo sapiens
  misc_RNA (1)...(19): siRNA sense strand
gaguggauaucacguggaa

SEQ ID NO: 15032 - RNA, 19 nt, Homo sapiens
  misc_RNA (1)...(19): siRNA sense strand
ccaacuacuucaucacuuc

SEQ ID NO: 15033 - RNA, 19 nt, Homo sapiens
  misc_RNA (1)...(19): siRNA sense strand
gaccugcugugacuucuuc

SEQ ID NO: 15034 - RNA, 19 nt, Homo sapiens
  misc_RNA (1)...(19): siRNA sense strand
cgcaguggaucgcuacuuu

SEQ ID NO: 15035 - RNA, 19 nt, Homo sapiens
  misc_RNA (1)...(19): siRNA sense strand
ccaaugagaccugcuguga

SEQ ID NO: 15036 - RNA, 19 nt, Homo sapiens
  misc_RNA (1)...(19): siRNA sense strand
caacugcuaugccaaugag

SEQ ID NO: 15037 - RNA, 19 nt, Homo sapiens
  misc_RNA (1)...(19): siRNA sense strand
gcaaugugcuggucaucac

SEQ ID NO: 15038 - RNA, 19 nt, Homo sapiens
  misc_RNA (1)...(19): siRNA sense strand
gccauuacuucaccuuuca

SEQ ID NO: 15039 - RNA, 19 nt, Homo sapiens
  misc_RNA (1)...(19): siRNA sense strand
ugucaauucugguuucaau

SEQ ID NO: 15040 - RNA, 19 nt, Homo sapiens
  misc_RNA (1)...(19): siRNA sense strand
gaucauggucuucgucuac

SEQ ID NO: 15041 - RNA, 19 nt, Homo sapiens
  misc_RNA (1)...(19): siRNA sense strand
cgauaacauugauucacaa

SEQ ID NO: 15042 - RNA, 19 nt, Homo sapiens
  misc_RNA (1)...(19): siRNA sense strand
cugcgcaggucuucuuuga

SEQ ID NO: 15043 - RNA, 19 nt, Homo sapiens
  misc_RNA (1)...(19): siRNA sense strand
gagcacaaagcccucaaga

SEQ ID NO: 15044 - RNA, 19 nt, Homo sapiens
  misc_RNA (1)...(19): siRNA sense strand
caucguguccuucuacguu

SEQ ID NO: 15045 - RNA, 19 nt, Homo sapiens
  misc_RNA (1)...(19): siRNA sense strand
ugcagacggucaccaacua

SEQ ID NO: 15046 - RNA, 19 nt, Homo sapiens
  misc_RNA (1)...(19): siRNA sense strand
gaacaggagaaagaaaaua

SEQ ID NO: 15047 - RNA, 19 nt, Homo sapiens
  misc_RNA (1)...(19): siRNA sense strand
ggaaguuuacauccuccua

SEQ ID NO: 15048 - RNA, 19 nt, Homo sapiens
  misc_RNA (1)...(19): siRNA sense strand
aggaagccaucaacugcua

SEQ ID NO: 15049 - RNA, 19 nt, Homo sapiens
  misc_RNA (1)...(19): siRNA sense strand
uggauugugucaggccuua

SEQ ID NO: 15050 - RNA, 19 nt, Homo sapiens
  misc_RNA (1)...(19): siRNA sense strand
ccuaugccauugccucuuc

SEQ ID NO: 15051 - RNA, 19 nt, Homo sapiens
  misc_RNA (1)...(19): siRNA sense strand
aaugagaccugcugugacu

SEQ ID NO: 15052 - RNA, 19 nt, Homo sapiens
  misc_RNA (1)...(19): siRNA sense strand
ucacuggccugugcugauc

SEQ ID NO: 15053 - RNA, 19 nt, Homo sapiens
  misc_RNA (1)...(19): siRNA sense strand
gacguuaggcaucaucaug

SEQ ID NO: 15054 - RNA, 19 nt, Homo sapiens
  misc_RNA (1)...(19): siRNA sense strand
gcaguggaucgcuacuuug

SEQ ID NO: 15055 - RNA, 19 nt, Homo sapiens
  misc_RNA (1)...(19): siRNA sense strand
gugccuagcgauaacauug

SEQ ID NO: 15056 - RNA, 19 nt, Homo sapiens
  misc_RNA (1)...(19): siRNA sense strand
gauaaccucauccguaagg

SEQ ID NO: 15057 - RNA, 19 nt, Homo sapiens
  misc_RNA (1)...(19): siRNA sense strand
gggcauggacuccgcagau

SEQ ID NO: 15058 - RNA, 19 nt, Homo sapiens
  misc_RNA (1)...(19): siRNA sense strand
auaaacugcugugugaaga

SEQ ID NO: 15059 - RNA, 19 nt, Homo sapiens
  misc_RNA (1)...(19): siRNA sense strand
caucguguuuggcaaugug

SEQ ID NO: 15060 - RNA, 19 nt, Homo sapiens
  misc_RNA (1)...(19): siRNA sense strand
gcaucaucaugggcacuuu

SEQ ID NO: 15061 - RNA, 19 nt, Homo sapiens
  misc_RNA (1)...(19): siRNA sense strand
gaucuuccaaguucugcuu

SEQ ID NO: 15062 - RNA, 19 nt, Homo sapiens
  misc_RNA (1)...(19): siRNA sense strand
caucaacugcuaugccaau

SEQ ID NO: 15063 - RNA, 19 nt, Homo sapiens
  misc_RNA (1)...(19): siRNA sense strand
ccucauccguaaggaaguu

SEQ ID NO: 15064 - RNA, 19 nt, Homo sapiens
  misc_RNA (1)...(19): siRNA sense strand
ccucuuccaucguguccuu

SEQ ID NO: 15065 - RNA, 19 nt, Homo sapiens
  misc_RNA (1)...(19): siRNA sense strand
agagccugcugaccaagaa

SEQ ID NO: 15066 - RNA, 19 nt, Homo sapiens
  misc_RNA (1)...(19): siRNA sense strand
guggauaucacguggaaca

SEQ ID NO: 15067 - RNA, 19 nt, Homo sapiens
  misc_RNA (1)...(19): siRNA sense strand
gaagccaucaacugcuaug

SEQ ID NO: 15068 - RNA, 19 nt, Homo sapiens
  misc_RNA (1)...(19): siRNA sense strand
gcuaugucaauucugguuu

SEQ ID NO: 15069 - RNA, 19 nt, Homo sapiens
  misc_RNA (1)...(19): siRNA sense strand
cguccuggccaucguguuu

SEQ ID NO: 15070 - RNA, 19 nt, Homo sapiens
  misc_RNA (1)...(19): siRNA sense strand
cuaugucaauucugguuuc

SEQ ID NO: 15071 - RNA, 19 nt, Homo sapiens
  misc_RNA (1)...(19): siRNA sense strand
aaccaagccuaugccauug

SEQ ID NO: 15072 - RNA, 19 nt, Homo sapiens
  misc_RNA (1)...(19): siRNA sense strand
ggucaccaacuacuucauc

SEQ ID NO: 15073 - RNA, 19 nt, Homo sapiens
  misc_RNA (1)...(19): siRNA sense strand
gucaccaacuacuucauca

SEQ ID NO: 15074 - RNA, 19 nt, Homo sapiens
  misc_RNA (1)...(19): siRNA sense strand
ggacuccgcagaucuucca

SEQ ID NO: 15075 - RNA, 19 nt, Homo sapiens
  misc_RNA (1)...(19): siRNA sense strand
ggaucgcuacuuugccauu

SEQ ID NO: 15076 - RNA, 19 nt, Homo sapiens
  misc_RNA (1)...(19): siRNA sense strand
gccuagcgauaacauugau

SEQ ID NO: 15077 - RNA, 19 nt, Homo sapiens
  misc_RNA (1)...(19): siRNA sense strand
ggagaaagaaaauaaacug

SEQ ID NO: 15078 - RNA, 19 nt, Homo sapiens
  misc_RNA (1)...(19): siRNA sense strand
cuucaucguuaacauugug

SEQ ID NO: 15079 - RNA, 19 nt, Homo sapiens
  misc_RNA (1)...(19): siRNA sense strand
cugcccuucuucaucguua

SEQ ID NO: 15080 - RNA, 19 nt, Homo sapiens
  misc_RNA (1)...(19): siRNA sense strand
ggcauggacuccgcagauc

SEQ ID NO: 15081 - RNA, 19 nt, Homo sapiens
  misc_RNA (1)...(19): siRNA sense strand
ccaaaaggcagcuccagaa

SEQ ID NO: 15082 - RNA, 19 nt, Homo sapiens
  misc_RNA (1)...(19): siRNA sense strand
caacuacuucaucacuuca

SEQ ID NO: 15083 - RNA, 19 nt, Homo sapiens
  misc_RNA (1)...(19): siRNA sense strand
cugaugguguggauugugu

SEQ ID NO: 15084 - RNA, 19 nt, Homo sapiens
  misc_RNA (1)...(19): siRNA sense strand
ugccauuacuucaccuuuc

SEQ ID NO: 15085 - RNA, 19 nt, Homo sapiens
  misc_RNA (1)...(19): siRNA sense strand
uaaccucauccguaaggaa

SEQ ID NO: 15086 - RNA, 19 nt, Homo sapiens
  misc_RNA (1)...(19): siRNA sense strand
ucacguggaacaggagaaa

SEQ ID NO: 15087 - RNA, 19 nt, Homo sapiens
  misc_RNA (1)...(19): siRNA sense strand
gggagcagaguggauauca

SEQ ID NO: 15088 - RNA, 19 nt, Homo sapiens
  misc_RNA (1)...(19): siRNA sense strand
cuacuuugccauuacuuca

SEQ ID NO: 15089 - RNA, 19 nt, Homo sapiens
  misc_RNA (1)...(19): siRNA sense strand
gauaacauugauucacaag

SEQ ID NO: 15090 - RNA, 19 nt, Homo sapiens
  misc_RNA (1)...(19): siRNA sense strand
gacggucaccaacuacuuc

SEQ ID NO: 15091 - RNA, 19 nt, Homo sapiens
  misc_RNA (1)...(19): siRNA sense strand
uuccauguccagaaccuua

SEQ ID NO: 15092 - RNA, 19 nt, Homo sapiens
  misc_RNA (1)...(19): siRNA sense strand
ggaagccaucaacugcuau

SEQ ID NO: 15093 - RNA, 19 nt, Homo sapiens
  misc_RNA (1)...(19): siRNA sense strand
cucaagacguuaggcauca

SEQ ID NO: 15094 - RNA, 19 nt, Homo sapiens
  misc_RNA (1)...(19): siRNA sense strand
caaagcccucaagacguua

SEQ ID NO: 15095 - RNA, 19 nt, Homo sapiens
  misc_RNA (1)...(19): siRNA sense strand
gcccugaacuggcuagguu

SEQ ID NO: 15096 - RNA, 19 nt, Homo sapiens
  misc_RNA (1)...(19): siRNA sense strand
ugaccaacccgcugcguua

SEQ ID NO: 15097 - RNA, 19 nt, Homo sapiens
  misc_RNA (1)...(19): siRNA sense strand
caccuugggucucaucaug

SEQ ID NO: 15098 - RNA, 19 nt, Homo sapiens
  misc_RNA (1)...(19): siRNA sense strand
ucaacccgcucaucuacug

SEQ ID NO: 15099 - RNA, 19 nt, Homo sapiens
  misc_RNA (1)...(19): siRNA sense strand
gaccaugaccaacguguuc

SEQ ID NO: 15100 - RNA, 19 nt, Homo sapiens
  misc_RNA (1)...(19): siRNA sense strand
gaggcaaccugcuggucau

SEQ ID NO: 15101 - RNA, 19 nt, Homo sapiens
  misc_RNA (1)...(19): siRNA sense strand
ccaacguguucgugacuuc

SEQ ID NO: 15102 - RNA, 19 nt, Homo sapiens
  misc_RNA (1)...(19): siRNA sense strand
gcuagguuaugccaauucu

SEQ ID NO: 15103 - RNA, 19 nt, Homo sapiens
  misc_RNA (1)...(19): siRNA sense strand
gcaaccugcuggucaucgu

SEQ ID NO: 15104 - RNA, 19 nt, Homo sapiens
  misc_RNA (1)...(19): siRNA sense strand
ccuccuccgucuccuucua

SEQ ID NO: 15105 - RNA, 19 nt, Homo sapiens
  misc_RNA (1)...(19): siRNA sense strand
ugaacuggcuagguuaugc

SEQ ID NO: 15106 - RNA, 19 nt, Homo sapiens
  misc_RNA (1)...(19): siRNA sense strand
cggcuuuccuugcccugaa

SEQ ID NO: 15107 - RNA, 19 nt, Homo sapiens
  misc_RNA (1)...(19): siRNA sense strand
ccgagacuccagaccauga

SEQ ID NO: 15108 - RNA, 19 nt, Homo sapiens
  misc_RNA (1)...(19): siRNA sense strand
gcugugccuucgccuccaa

SEQ ID NO: 15109 - RNA, 19 nt, Homo sapiens
  misc_RNA (1)...(19): siRNA sense strand
gaacauuucugaaggauug

SEQ ID NO: 15110 - RNA, 19 nt, Homo sapiens
  misc_RNA (1)...(19): siRNA sense strand
gaacauagacuucaagaug

SEQ ID NO: 15111 - RNA, 19 nt, Homo sapiens
  misc_RNA (1)...(19): siRNA sense strand
gaacguugcugcagucuug

SEQ ID NO: 15112 - RNA, 19 nt, Homo sapiens
  misc_RNA (1)...(19): siRNA sense strand
caagugcgaugccauauaa

SEQ ID NO: 15113 - RNA, 19 nt, Homo sapiens
  misc_RNA (1)...(19): siRNA sense strand
uaagagagcuuucaucauc

SEQ ID NO: 15114 - RNA, 19 nt, Homo sapiens
  misc_RNA (1)...(19): siRNA sense strand
gaaggugaaagcagaauua

SEQ ID NO: 15115 - RNA, 19 nt, Homo sapiens
  misc_RNA (1)...(19): siRNA sense strand
gcaggcagcuucugugguu

SEQ ID NO: 15116 - RNA, 19 nt, Homo sapiens
  misc_RNA (1)...(19): siRNA sense strand
gaacaaauccaggagauga

SEQ ID NO: 15117 - RNA, 19 nt, Homo sapiens
  misc_RNA (1)...(19): siRNA sense strand
gagaugugcuucguguuua

SEQ ID NO: 15118 - RNA, 19 nt, Homo sapiens
  misc_RNA (1)...(19): siRNA sense strand
gggaaacguugcugucuuu

SEQ ID NO: 15119 - RNA, 19 nt, Homo sapiens
  misc_RNA (1)...(19): siRNA sense strand
gagaaacguuuacgacaug

SEQ ID NO: 15120 - RNA, 19 nt, Homo sapiens
  misc_RNA (1)...(19): siRNA sense strand
ggagaugugcuucguguuu

SEQ ID NO: 15121 - RNA, 19 nt, Homo sapiens
  misc_RNA (1)...(19): siRNA sense strand
ggagguagccgccaggauu

SEQ ID NO: 15122 - RNA, 19 nt, Homo sapiens
  misc_RNA (1)...(19): siRNA sense strand
agacaauacugacuugauu

SEQ ID NO: 15123 - RNA, 19 nt, Homo sapiens
  misc_RNA (1)...(19): siRNA sense strand
uaucacagaugaacaaauc

SEQ ID NO: 15124 - RNA, 19 nt, Homo sapiens
  misc_RNA (1)...(19): siRNA sense strand
ggugaaagcagaauuaugu

SEQ ID NO: 15125 - RNA, 19 nt, Homo sapiens
  misc_RNA (1)...(19): siRNA sense strand
gaacgcacacuggaugaua

SEQ ID NO: 15126 - RNA, 19 nt, Homo sapiens
  misc_RNA (1)...(19): siRNA sense strand
gggcagacauauacacgaa

SEQ ID NO: 15127 - RNA, 19 nt, Homo sapiens
  misc_RNA (1)...(19): siRNA sense strand
ugaauacgcugcagaacau

SEQ ID NO: 15128 - RNA, 19 nt, Homo sapiens
  misc_RNA (1)...(19): siRNA sense strand
aaucaaaccuggagaacau

SEQ ID NO: 15129 - RNA, 19 nt, Homo sapiens
  misc_RNA (1)...(19): siRNA sense strand
ggagauggaggaacccuuu

SEQ ID NO: 15130 - RNA, 19 nt, Homo sapiens
  misc_RNA (1)...(19): siRNA sense strand
gacaauacugacuugauua

SEQ ID NO: 15131 - RNA, 19 nt, Homo sapiens
  misc_RNA (1)...(19): siRNA sense strand
aaacguugcugucuuugga

SEQ ID NO: 15132 - RNA, 19 nt, Homo sapiens
  misc_RNA (1)...(19): siRNA sense strand
gagccagucuacccacauu

SEQ ID NO: 15133 - RNA, 19 nt, Homo sapiens
  misc_RNA (1)...(19): siRNA sense strand
caagauggcagcugaggaa

SEQ ID NO: 15134 - RNA, 19 nt, Homo sapiens
  misc_RNA (1)...(19): siRNA sense strand
ggagguguauccccuguua

SEQ ID NO: 15135 - RNA, 19 nt, Homo sapiens
  misc_RNA (1)...(19): siRNA sense strand
gggcaucagugcacaagau

SEQ ID NO: 15136 - RNA, 19 nt, Homo sapiens
  misc_RNA (1)...(19): siRNA sense strand
uccaggagaugaaaucaaa

SEQ ID NO: 15137 - RNA, 19 nt, Homo sapiens
  misc_RNA (1)...(19): siRNA sense strand
gcacagcugaccacaguug

SEQ ID NO: 15138 - RNA, 19 nt, Homo sapiens
  misc_RNA (1)...(19): siRNA sense strand
gacaagauggugacagaaa

SEQ ID NO: 15139 - RNA, 19 nt, Homo sapiens
  misc_RNA (1)...(19): siRNA sense strand
gagaugaccauaagguaga

SEQ ID NO: 15140 - RNA, 19 nt, Homo sapiens
  misc_RNA (1)...(19): siRNA sense strand
cagcaucuguccagugguu

SEQ ID NO: 15141 - RNA, 19 nt, Homo sapiens
  misc_RNA (1)...(19): siRNA sense strand
uggcaaaccucaaggagau

SEQ ID NO: 15142 - RNA, 19 nt, Homo sapiens
  misc_RNA (1)...(19): siRNA sense strand
gcaggugcagagauucuua

SEQ ID NO: 15143 - RNA, 19 nt, Homo sapiens
  misc_RNA (1)...(19): siRNA sense strand
gcucaagugcgaugccaua

SEQ ID NO: 15144 - RNA, 19 nt, Homo sapiens
  misc_RNA (1)...(19): siRNA sense strand
cauuagguuucacacauuu

SEQ ID NO: 15145 - RNA, 19 nt, Homo sapiens
  misc_RNA (1)...(19): siRNA sense strand
ugagggagaugaccauaag

SEQ ID NO: 15146 - RNA, 19 nt, Homo sapiens
  misc_RNA (1)...(19): siRNA sense strand
uaccgcagauacuauauug

SEQ ID NO: 15147 - RNA, 19 nt, Homo sapiens
  misc_RNA (1)...(19): siRNA sense strand
ugaggaagagaaacguuua

SEQ ID NO: 15148 - RNA, 19 nt, Homo sapiens
  misc_RNA (1)...(19): siRNA sense strand
ugccaaagcuugccagagu

SEQ ID NO: 15149 - RNA, 19 nt, Homo sapiens
  misc_RNA (1)...(19): siRNA sense strand
ucacagggcagacauauac

SEQ ID NO: 15150 - RNA, 19 nt, Homo sapiens
  misc_RNA (1)...(19): siRNA sense strand
ggaaucccaugcguucaga

SEQ ID NO: 15151 - RNA, 19 nt, Homo sapiens
  misc_RNA (1)...(19): siRNA sense strand
gagcagacauuggguuugc

SEQ ID NO: 15152 - RNA, 19 nt, Homo sapiens
  misc_RNA (1)...(19): siRNA sense strand
cacauuagguuucacacau

SEQ ID NO: 15153 - RNA, 19 nt, Homo sapiens
  misc_RNA (1)...(19): siRNA sense strand
gcagacauauacacgaaaa

SEQ ID NO: 15154 - RNA, 19 nt, Homo sapiens
  misc_RNA (1)...(19): siRNA sense strand
gguauaaauuccggacaug

SEQ ID NO: 15155 - RNA, 19 nt, Homo sapiens
  misc_RNA (1)...(19): siRNA sense strand
ccgcagauacuauauugaa

SEQ ID NO: 15156 - RNA, 19 nt, Homo sapiens
  misc_RNA (1)...(19): siRNA sense strand
caagauuugcaccgacaua

SEQ ID NO: 15157 - RNA, 19 nt, Homo sapiens
  misc_RNA (1)...(19): siRNA sense strand
caucagugcacaagauuug

SEQ ID NO: 15158 - RNA, 19 nt, Homo sapiens
  misc_RNA (1)...(19): siRNA sense strand
gaaaaggcaggauuuaaga

SEQ ID NO: 15159 - RNA, 19 nt, Homo sapiens
  misc_RNA (1)...(19): siRNA sense strand
gauggcagcugaggaagag

SEQ ID NO: 15160 - RNA, 19 nt, Homo sapiens
  misc_RNA (1)...(19): siRNA sense strand
agagaaacguuuacgacau

SEQ ID NO: 15161 - RNA, 19 nt, Homo sapiens
  misc_RNA (1)...(19): siRNA sense strand
ccagguugaugccuacuuc

SEQ ID NO: 15162 - RNA, 19 nt, Homo sapiens
  misc_RNA (1)...(19): siRNA sense strand
gggagaugaccauaaggua

SEQ ID NO: 15163 - RNA, 19 nt, Homo sapiens
  misc_RNA (1)...(19): siRNA sense strand
guaauugaacggcgcauuc

SEQ ID NO: 15164 - RNA, 19 nt, Homo sapiens
  misc_RNA (1)...(19): siRNA sense strand
ggaagagaaacguuuacga

SEQ ID NO: 15165 - RNA, 19 nt, Homo sapiens
  misc_RNA (1)...(19): siRNA sense strand
ccacagagaacaucaucau

SEQ ID NO: 15166 - RNA, 19 nt, Homo sapiens
  misc_RNA (1)...(19): siRNA sense strand
ucaagugcgaugccauaua

SEQ ID NO: 15167 - RNA, 19 nt, Homo sapiens
  misc_RNA (1)...(19): siRNA sense strand
acauuagguuucacacauu

SEQ ID NO: 15168 - RNA, 19 nt, Homo sapiens
  misc_RNA (1)...(19): siRNA sense strand
gagaacauagacuucaaga

SEQ ID NO: 15169 - RNA, 19 nt, Homo sapiens
  misc_RNA (1)...(19): siRNA sense strand
cugcacagcugaccacagu

SEQ ID NO: 15170 - RNA, 19 nt, Homo sapiens
  misc_RNA (1)...(19): siRNA sense strand
gagacaauacugacuugau

SEQ ID NO: 15171 - RNA, 19 nt, Homo sapiens
  misc_RNA (1)...(19): siRNA sense strand
cccagcaggugcagagauu

SEQ ID NO: 15172 - RNA, 19 nt, Homo sapiens
  misc_RNA (1)...(19): siRNA sense strand
ugaaaucaaaccuggagaa

SEQ ID NO: 15173 - RNA, 19 nt, Homo sapiens
  misc_RNA (1)...(19): siRNA sense strand
gagcguauccagguugaug

SEQ ID NO: 15174 - RNA, 19 nt, Homo sapiens
  misc_RNA (1)...(19): siRNA sense strand
cauagagcguauccagguu

SEQ ID NO: 15175 - RNA, 19 nt, Homo sapiens
  misc_RNA (1)...(19): siRNA sense strand
gagguagccgccaggauug

SEQ ID NO: 15176 - RNA, 19 nt, Homo sapiens
  misc_RNA (1)...(19): siRNA sense strand
cauaugaaagcgugaugaa

SEQ ID NO: 15177 - RNA, 19 nt, Homo sapiens
  misc_RNA (1)...(19): siRNA sense strand
uggcucacgugcacacauu

SEQ ID NO: 15178 - RNA, 19 nt, Homo sapiens
  misc_RNA (1)...(19): siRNA sense strand
gauggaggaacccuuugaa

SEQ ID NO: 15179 - RNA, 19 nt, Homo sapiens
  misc_RNA (1)...(19): siRNA sense strand
cgacuuugcuaaggaacga

SEQ ID NO: 15180 - RNA, 19 nt, Homo sapiens
  misc_RNA (1)...(19): siRNA sense strand
ccaaagcuugccagaguga

SEQ ID NO: 15181 - RNA, 19 nt, Homo sapiens
  misc_RNA (1)...(19): siRNA sense strand
ccucuugccucccgcuaug

SEQ ID NO: 15182 - RNA, 19 nt, Homo sapiens
  misc_RNA (1)...(19): siRNA sense strand
uugacaagauggugacaga

SEQ ID NO: 15183 - RNA, 19 nt, Homo sapiens
  misc_RNA (1)...(19): siRNA sense strand
acauuggguuugccuauca

SEQ ID NO: 15184 - RNA, 19 nt, Homo sapiens
  misc_RNA (1)...(19): siRNA sense strand
gcuacuucuugcuauguug

SEQ ID NO: 15185 - RNA, 19 nt, Homo sapiens
  misc_RNA (1)...(19): siRNA sense strand
gaaaucaaaccuggagaac

SEQ ID NO: 15186 - RNA, 19 nt, Homo sapiens
  misc_RNA (1)...(19): siRNA sense strand
uacuggauccuucuucuuu

SEQ ID NO: 15187 - RNA, 19 nt, Homo sapiens
  misc_RNA (1)...(19): siRNA sense strand
gcaagagcugccuuucaug

SEQ ID NO: 15188 - RNA, 19 nt, Homo sapiens
  misc_RNA (1)...(19): siRNA sense strand
acauacgccuccuggcaaa

SEQ ID NO: 15189 - RNA, 19 nt, Homo sapiens
  misc_RNA (1)...(19): siRNA sense strand
gacauuggguuugccuauc

SEQ ID NO: 15190 - RNA, 19 nt, Homo sapiens
  misc_RNA (1)...(19): siRNA sense strand
uggagacaauacugacuug

SEQ ID NO: 15191 - RNA, 19 nt, Homo sapiens
  misc_RNA (1)...(19): siRNA sense strand
acucccaguuggaucauuu

SEQ ID NO: 15192 - RNA, 19 nt, Homo sapiens
  misc_RNA (1)...(19): siRNA sense strand
gagaaaaucagagugcuuu

SEQ ID NO: 15193 - RNA, 19 nt, Homo sapiens
  misc_RNA (1)...(19): siRNA sense strand
aaaggcaggauuuaagaga

SEQ ID NO: 15194 - RNA, 19 nt, Homo sapiens
  misc_RNA (1)...(19): siRNA sense strand
guguuuagcgacagguaua

SEQ ID NO: 15195 - RNA, 19 nt, Homo sapiens
  misc_RNA (1)...(19): siRNA sense strand
uagagcguauccagguuga

SEQ ID NO: 15196 - RNA, 19 nt, Homo sapiens
  misc_RNA (1)...(19): siRNA sense strand
uggagaacauagacuucaa

SEQ ID NO: 15197 - RNA, 19 nt, Homo sapiens
  misc_RNA (1)...(19): siRNA sense strand
cugaaggauuggucgugua

SEQ ID NO: 15198 - RNA, 19 nt, Homo sapiens
  misc_RNA (1)...(19): siRNA sense strand
ccaaccgacggaucuguuu

SEQ ID NO: 15199 - RNA, 19 nt, Homo sapiens
  misc_RNA (1)...(19): siRNA sense strand
gcaucagugcacaagauuu

SEQ ID NO: 15200 - RNA, 19 nt, Homo sapiens
  misc_RNA (1)...(19): siRNA sense strand
ccaguuuccugcagcucuu

SEQ ID NO: 15201 - RNA, 19 nt, Homo sapiens
  misc_RNA (1)...(19): siRNA sense strand
ugaagcguguccgagauga

SEQ ID NO: 15202 - RNA, 19 nt, Homo sapiens
  misc_RNA (1)...(19): siRNA sense strand
uccaaaagcugcaggcauu

SEQ ID NO: 15203 - RNA, 19 nt, Homo sapiens
  misc_RNA (1)...(19): siRNA sense strand
ugucugugcuggcuagcuu

SEQ ID NO: 15204 - RNA, 19 nt, Homo sapiens
  misc_RNA (1)...(19): siRNA sense strand
cacgaaaaguggauauuga

SEQ ID NO: 15205 - RNA, 19 nt, Homo sapiens
  misc_RNA (1)...(19): siRNA sense strand
aagagagcuuucaucauca

SEQ ID NO: 15206 - RNA, 19 nt, Homo sapiens
  misc_RNA (1)...(19): siRNA sense strand
ggugcuacuucuugcuaug

SEQ ID NO: 15207 - RNA, 19 nt, Homo sapiens
  misc_RNA (1)...(19): siRNA sense strand
aaaucagagugcuuucuca

SEQ ID NO: 15208 - RNA, 19 nt, Homo sapiens
  misc_RNA (1)...(19): siRNA sense strand
gaugaaggugaaagcagaa

SEQ ID NO: 15209 - RNA, 19 nt, Homo sapiens
  misc_RNA (1)...(19): siRNA sense strand
ggagaucucagacgaauua

SEQ ID NO: 15210 - RNA, 19 nt, Homo sapiens
  misc_RNA (1)...(19): siRNA sense strand
ggaaaguacuggaacauac

SEQ ID NO: 15211 - RNA, 19 nt, Homo sapiens
  misc_RNA (1)...(19): siRNA sense strand
ugacggcucuguaggcuuu

SEQ ID NO: 15212 - RNA, 19 nt, Homo sapiens
  misc_RNA (1)...(19): siRNA sense strand
gcugguacaucuacaaaug

SEQ ID NO: 15213 - RNA, 19 nt, Homo sapiens
  misc_RNA (1)...(19): siRNA sense strand
ggagaaaccacacuagaug

SEQ ID NO: 15214 - RNA, 19 nt, Homo sapiens
  misc_RNA (1)...(19): siRNA sense strand
guaggagacucaccaauac

SEQ ID NO: 15215 - RNA, 19 nt, Homo sapiens
  misc_RNA (1)...(19): siRNA sense strand
aggagaagauccaaccaua

SEQ ID NO: 15216 - RNA, 19 nt, Homo sapiens
  misc_RNA (1)...(19): siRNA sense strand
gaauggugauauauugaug

SEQ ID NO: 15217 - RNA, 19 nt, Homo sapiens
  misc_RNA (1)...(19): siRNA sense strand
cauaagacaggacauauug

SEQ ID NO: 15218 - RNA, 19 nt, Homo sapiens
  misc_RNA (1)...(19): siRNA sense strand
acacuuggcccuuuaagaa

SEQ ID NO: 15219 - RNA, 19 nt, Homo sapiens
  misc_RNA (1)...(19): siRNA sense strand
caguuuaguuucaugguuu

SEQ ID NO: 15220 - RNA, 19 nt, Homo sapiens
  misc_RNA (1)...(19): siRNA sense strand
caagaauccagaagcauuu

SEQ ID NO: 15221 - RNA, 19 nt, Homo sapiens
  misc_RNA (1)...(19): siRNA sense strand
gaucauggauggcacuacu

SEQ ID NO: 15222 - RNA, 19 nt, Homo sapiens
  misc_RNA (1)...(19): siRNA sense strand
gaacuugccugugcuucuc

SEQ ID NO: 15223 - RNA, 19 nt, Homo sapiens
  misc_RNA (1)...(19): siRNA sense strand
uguaggagacucaccaaua

SEQ ID NO: 15224 - RNA, 19 nt, Homo sapiens
  misc_RNA (1)...(19): siRNA sense strand
gaaaguacuggaacauaca

SEQ ID NO: 15225 - RNA, 19 nt, Homo sapiens
  misc_RNA (1)...(19): siRNA sense strand
ggacauauugcugcuggua

SEQ ID NO: 15226 - RNA, 19 nt, Homo sapiens
  misc_RNA (1)...(19): siRNA sense strand
gagcggcugugccaugugu

SEQ ID NO: 15227 - RNA, 19 nt, Homo sapiens
  misc_RNA (1)...(19): siRNA sense strand
gucaacacuuggcccuuua

SEQ ID NO: 15228 - RNA, 19 nt, Homo sapiens
  misc_RNA (1)...(19): siRNA sense strand
cgucaacacuuggcccuuu

SEQ ID NO: 15229 - RNA, 19 nt, Homo sapiens
  misc_RNA (1)...(19): siRNA sense strand
ccaaugugacuggaaguua

SEQ ID NO: 15230 - RNA, 19 nt, Homo sapiens
  misc_RNA (1)...(19): siRNA sense strand
ucaagaauccagaagcauu

SEQ ID NO: 15231 - RNA, 19 nt, Homo sapiens
  misc_RNA (1)...(19): siRNA sense strand
gaagauccaaccauagcuu

SEQ ID NO: 15232 - RNA, 19 nt, Homo sapiens
  misc_RNA (1)...(19): siRNA sense strand
ugggaauggugauauauug

SEQ ID NO: 15233 - RNA, 19 nt, Homo sapiens
  misc_RNA (1)...(19): siRNA sense strand
caacauuuacucaguuuag

SEQ ID NO: 15234 - RNA, 19 nt, Homo sapiens
  misc_RNA (1)...(19): siRNA sense strand
gagagcggcugugccaugu

SEQ ID NO: 15235 - RNA, 19 nt, Homo sapiens
  misc_RNA (1)...(19): siRNA sense strand
guacaucuacaaaugguau

SEQ ID NO: 15236 - RNA, 19 nt, Homo sapiens
  misc_RNA (1)...(19): siRNA sense strand
gagagucagccaccacauu

SEQ ID NO: 15237 - RNA, 19 nt, Homo sapiens
  misc_RNA (1)...(19): siRNA sense strand
ggauggcacuacuauggau

SEQ ID NO: 15238 - RNA, 19 nt, Homo sapiens
  misc_RNA (1)...(19): siRNA sense strand
gcuguuauaugugccaaug

SEQ ID NO: 15239 - RNA, 19 nt, Homo sapiens
  misc_RNA (1)...(19): siRNA sense strand
gaucucagacgaauuaaaa

SEQ ID NO: 15240 - RNA, 19 nt, Homo sapiens
  misc_RNA (1)...(19): siRNA sense strand
caaugugacuggaaguuac

SEQ ID NO: 15241 - RNA, 19 nt, Homo sapiens
  misc_RNA (1)...(19): siRNA sense strand
ggauguaggagcaguagga

SEQ ID NO: 15242 - RNA, 19 nt, Homo sapiens
  misc_RNA (1)...(19): siRNA sense strand
ggaauggugauauauugau

SEQ ID NO: 15243 - RNA, 19 nt, Homo sapiens
  misc_RNA (1)...(19): siRNA sense strand
cucaagcucuucauucaga

SEQ ID NO: 15244 - RNA, 19 nt, Homo sapiens
  misc_RNA (1)...(19): siRNA sense strand
ggagaagauccaaccauag

SEQ ID NO: 15245 - RNA, 19 nt, Homo sapiens
  misc_RNA (1)...(19): siRNA sense strand
ccauaagacaggacauauu

SEQ ID NO: 15246 - RNA, 19 nt, Homo sapiens
  misc_RNA (1)...(19): siRNA sense strand
gcagugugacggcucugua

SEQ ID NO: 15247 - RNA, 19 nt, Homo sapiens
  misc_RNA (1)...(19): siRNA sense strand
agagucagccaccacauuu

SEQ ID NO: 15248 - RNA, 19 nt, Homo sapiens
  misc_RNA (1)...(19): siRNA sense strand
uaggagaucucagacgaau

SEQ ID NO: 15249 - RNA, 19 nt, Homo sapiens
  misc_RNA (1)...(19): siRNA sense strand
cacacuagaugccaugauc

SEQ ID NO: 15250 - RNA, 19 nt, Homo sapiens
  misc_RNA (1)...(19): siRNA sense strand
ucaguuuaguuucaugguu

SEQ ID NO: 15251 - RNA, 19 nt, Homo sapiens
  misc_RNA (1)...(19): siRNA sense strand
gagaagaggagaagaucca

SEQ ID NO: 15252 - RNA, 19 nt, Homo sapiens
  misc_RNA (1)...(19): siRNA sense strand
uaccagaucccucaaaaua

SEQ ID NO: 15253 - RNA, 19 nt, Homo sapiens
  misc_RNA (1)...(19): siRNA sense strand
aaugaagacuuaucuacca

SEQ ID NO: 15254 - RNA, 19 nt, Homo sapiens
  misc_RNA (1)...(19): siRNA sense strand
cacugggaauggugauaua

SEQ ID NO: 15255 - RNA, 19 nt, Homo sapiens
  misc_RNA (1)...(19): siRNA sense strand
gagaagauccaaccauagc

SEQ ID NO: 15256 - RNA, 19 nt, Homo sapiens
  misc_RNA (1)...(19): siRNA sense strand
gggaauggugauauauuga

SEQ ID NO: 15257 - RNA, 19 nt, Homo sapiens
  misc_RNA (1)...(19): siRNA sense strand
cauacaacacacacacuuu

SEQ ID NO: 15258 - RNA, 19 nt, Homo sapiens
  misc_RNA (1)...(19): siRNA sense strand
uuacggugcugcuugcaau

SEQ ID NO: 15259 - RNA, 19 nt, Homo sapiens
  misc_RNA (1)...(19): siRNA sense strand
caaauuauuggaggaaugu

SEQ ID NO: 15260 - RNA, 19 nt, Homo sapiens
  misc_RNA (1)...(19): siRNA sense strand
gaggaauguuauaccagau

SEQ ID NO: 15261 - RNA, 19 nt, Homo sapiens
  misc_RNA (1)...(19): siRNA sense strand
cggaaaguacuggaacaua

SEQ ID NO: 15262 - RNA, 19 nt, Homo sapiens
  misc_RNA (1)...(19): siRNA sense strand
guaugggguuuaucaauga

SEQ ID NO: 15263 - RNA, 19 nt, Homo sapiens
  misc_RNA (1)...(19): siRNA sense strand
ccauaaagaaacagaagau

SEQ ID NO: 15264 - RNA, 19 nt, Homo sapiens
  misc_RNA (1)...(19): siRNA sense strand
caccugguaucuuaaagca

SEQ ID NO: 15265 - RNA, 19 nt, Homo sapiens
  misc_RNA (1)...(19): siRNA sense strand
aaaaguggacugcaucuaa

SEQ ID NO: 15266 - RNA, 19 nt, Homo sapiens
  misc_RNA (1)...(19): siRNA sense strand
ucuguaggcuuuggaggaa

SEQ ID NO: 15267 - RNA, 19 nt, Homo sapiens
  misc_RNA (1)...(19): siRNA sense strand
uguuauaugugccaaugug

SEQ ID NO: 15268 - RNA, 19 nt, Homo sapiens
  misc_RNA (1)...(19): siRNA sense strand
ccagaagcauuuuccagaa

SEQ ID NO: 15269 - RNA, 19 nt, Homo sapiens
  misc_RNA (1)...(19): siRNA sense strand
ucaaugaagacuuaucuac

SEQ ID NO: 15270 - RNA, 19 nt, Homo sapiens
  misc_RNA (1)...(19): siRNA sense strand
ugacacuauuggcaugguu

SEQ ID NO: 15271 - RNA, 19 nt, Homo sapiens
  misc_RNA (1)...(19): siRNA sense strand
gagccuaugcugacgauac

SEQ ID NO: 15272 - RNA, 19 nt, Homo sapiens
  misc_RNA (1)...(19): siRNA sense strand
acauauugcugcugguaca

SEQ ID NO: 15273 - RNA, 19 nt, Homo sapiens
  misc_RNA (1)...(19): siRNA sense strand
caaaguaugggguuuauca

SEQ ID NO: 15274 - RNA, 19 nt, Homo sapiens
  misc_RNA (1)...(19): siRNA sense strand
guagaauacaugagaagag

SEQ ID NO: 15275 - RNA, 19 nt, Homo sapiens
  misc_RNA (1)...(19): siRNA sense strand
caugagaagaggagaagau

SEQ ID NO: 15276 - RNA, 19 nt, Homo sapiens
  misc_RNA (1)...(19): siRNA sense strand
ccacugggaauggugauau

SEQ ID NO: 15277 - RNA, 19 nt, Homo sapiens
  misc_RNA (1)...(19): siRNA sense strand
uuucaagaauccagaagca

SEQ ID NO: 15278 - RNA, 19 nt, Homo sapiens
  misc_RNA (1)...(19): siRNA sense strand
gaggagaagauccaaccau

SEQ ID NO: 15279 - RNA, 19 nt, Homo sapiens
  misc_RNA (1)...(19): siRNA sense strand
guaggagaucucagacgaa

SEQ ID NO: 15280 - RNA, 19 nt, Homo sapiens
  misc_RNA (1)...(19): siRNA sense strand
cggugcugcuugcaauaaa

SEQ ID NO: 15281 - RNA, 19 nt, Homo sapiens
  misc_RNA (1)...(19): siRNA sense strand
gcugcuugcaauaaacuuu

SEQ ID NO: 15282 - RNA, 19 nt, Homo sapiens
  misc_RNA (1)...(19): siRNA sense strand
uguaggagcaguaggagau

SEQ ID NO: 15283 - RNA, 19 nt, Homo sapiens
  misc_RNA (1)...(19): siRNA sense strand
uggaggcucugcccuggau

SEQ ID NO: 15284 - RNA, 19 nt, Homo sapiens
  misc_RNA (1)...(19): siRNA sense strand
acuauuggcaugguuguaa

SEQ ID NO: 15285 - RNA, 19 nt, Homo sapiens
  misc_RNA (1)...(19): siRNA sense strand
uggagaaaccacacuagau

SEQ ID NO: 15286 - RNA, 19 nt, Homo sapiens
  misc_RNA (1)...(19): siRNA sense strand
gaagcauuuuccagaauuc

SEQ ID NO: 15287 - RNA, 19 nt, Homo sapiens
  misc_RNA (1)...(19): siRNA sense strand
uaagaaugcaaccgaagca

SEQ ID NO: 15288 - RNA, 19 nt, Homo sapiens
  misc_RNA (1)...(19): siRNA sense strand
cuauuggcaugguuguaau

SEQ ID NO: 15289 - RNA, 19 nt, Homo sapiens
  misc_RNA (1)...(19): siRNA sense strand
gaucguggucaugacacua

SEQ ID NO: 15290 - RNA, 19 nt, Homo sapiens
  misc_RNA (1)...(19): siRNA sense strand
uauaccagaucccucaaaa

SEQ ID NO: 15291 - RNA, 19 nt, Homo sapiens
  misc_RNA (1)...(19): siRNA sense strand
acuuggcccuuuaagaaug

SEQ ID NO: 15292 - RNA, 19 nt, Homo sapiens
  misc_RNA (1)...(19): siRNA sense strand
cauaaagaaacagaagaug

SEQ ID NO: 15293 - RNA, 19 nt, Homo sapiens
  misc_RNA (1)...(19): siRNA sense strand
cacggaaaguacuggaaca

SEQ ID NO: 15294 - RNA, 19 nt, Homo sapiens
  misc_RNA (1)...(19): siRNA sense strand
cugaugaacuuggagaaac

SEQ ID NO: 15295 - RNA, 19 nt, Homo sapiens
  misc_RNA (1)...(19): siRNA sense strand
ccaaccauagcuugccaaa

SEQ ID NO: 15296 - RNA, 19 nt, Homo sapiens
  misc_RNA (1)...(19): siRNA sense strand
ucauggauggcacuacuau

SEQ ID NO: 15297 - RNA, 19 nt, Homo sapiens
  misc_RNA (1)...(19): siRNA sense strand
auacugcggacccuacaaa

SEQ ID NO: 15298 - RNA, 19 nt, Homo sapiens
  misc_RNA (1)...(19): siRNA sense strand
ccagaucccucaaaauacu

SEQ ID NO: 15299 - RNA, 19 nt, Homo sapiens
  misc_RNA (1)...(19): siRNA sense strand
caagcucuucauucagauu

SEQ ID NO: 15300 - RNA, 19 nt, Homo sapiens
  misc_RNA (1)...(19): siRNA sense strand
gaaaucaucugacacaauu

SEQ ID NO: 15301 - RNA, 19 nt, Homo sapiens
  misc_RNA (1)...(19): siRNA sense strand
gcaacaaucugguucauuu

SEQ ID NO: 15302 - RNA, 19 nt, Homo sapiens
  misc_RNA (1)...(19): siRNA sense strand
caaugcagauccuauauua

SEQ ID NO: 15303 - RNA, 19 nt, Homo sapiens
  misc_RNA (1)...(19): siRNA sense strand
gggaauaccugcuuugauu

SEQ ID NO: 15304 - RNA, 19 nt, Homo sapiens
  misc_RNA (1)...(19): siRNA sense strand
gggagacaguguuaaauua

SEQ ID NO: 15305 - RNA, 19 nt, Homo sapiens
  misc_RNA (1)...(19): siRNA sense strand
ccaaguagaugucaacaaa

SEQ ID NO: 15306 - RNA, 19 nt, Homo sapiens
  misc_RNA (1)...(19): siRNA sense strand
gaaauaagaccaaagaaug

SEQ ID NO: 15307 - RNA, 19 nt, Homo sapiens
  misc_RNA (1)...(19): siRNA sense strand
gauaaugaguguccuauug

SEQ ID NO: 15308 - RNA, 19 nt, Homo sapiens
  misc_RNA (1)...(19): siRNA sense strand
gaagggaaauacaaagaaa

SEQ ID NO: 15309 - RNA, 19 nt, Homo sapiens
  misc_RNA (1)...(19): siRNA sense strand
gaagagggcagauuaguuu

SEQ ID NO: 15310 - RNA, 19 nt, Homo sapiens
  misc_RNA (1)...(19): siRNA sense strand
gcaaugagugcauauaaua

SEQ ID NO: 15311 - RNA, 19 nt, Homo sapiens
  misc_RNA (1)...(19): siRNA sense strand
gagaacauauucagcuuaa

SEQ ID NO: 15312 - RNA, 19 nt, Homo sapiens
  misc_RNA (1)...(19): siRNA sense strand
ggacgaagguuuuaauaua

SEQ ID NO: 15313 - RNA, 19 nt, Homo sapiens
  misc_RNA (1)...(19): siRNA sense strand
ugacagagcuagaaacaga

SEQ ID NO: 15314 - RNA, 19 nt, Homo sapiens
  misc_RNA (1)...(19): siRNA sense strand
ggagaaacauuuaauagag

SEQ ID NO: 15315 - RNA, 19 nt, Homo sapiens
  misc_RNA (1)...(19): siRNA sense strand
gagauuggaugauugacua

SEQ ID NO: 15316 - RNA, 19 nt, Homo sapiens
  misc_RNA (1)...(19): siRNA sense strand
guagaagccaggaauauua

SEQ ID NO: 15317 - RNA, 19 nt, Homo sapiens
  misc_RNA (1)...(19): siRNA sense strand
ccagauagaucgaaacaug

SEQ ID NO: 15318 - RNA, 19 nt, Homo sapiens
  misc_RNA (1)...(19): siRNA sense strand
gugaagaucuggacaaugu

SEQ ID NO: 15319 - RNA, 19 nt, Homo sapiens
  misc_RNA (1)...(19): siRNA sense strand
cuauaaaggucucauauga

SEQ ID NO: 15320 - RNA, 19 nt, Homo sapiens
  misc_RNA (1)...(19): siRNA sense strand
gcaaggaagugccucaaau

SEQ ID NO: 15321 - RNA, 19 nt, Homo sapiens
  misc_RNA (1)...(19): siRNA sense strand
gaaaguauaccuggaauga

SEQ ID NO: 15322 - RNA, 19 nt, Homo sapiens
  misc_RNA (1)...(19): siRNA sense strand
ugaagcagaucccacguua

SEQ ID NO: 15323 - RNA, 19 nt, Homo sapiens
  misc_RNA (1)...(19): siRNA sense strand
gcagauuaguuuaccgaua

SEQ ID NO: 15324 - RNA, 19 nt, Homo sapiens
  misc_RNA (1)...(19): siRNA sense strand
gaagaaugcuguaauuggu

SEQ ID NO: 15325 - RNA, 19 nt, Homo sapiens
  misc_RNA (1)...(19): siRNA sense strand
ggaauggaauguuauuugu

SEQ ID NO: 15326 - RNA, 19 nt, Homo sapiens
  misc_RNA (1)...(19): siRNA sense strand
gaaugugccuauaaucuug

SEQ ID NO: 15327 - RNA, 19 nt, Homo sapiens
  misc_RNA (1)...(19): siRNA sense strand
acacaagccuggucaauug

SEQ ID NO: 15328 - RNA, 19 nt, Homo sapiens
  misc_RNA (1)...(19): siRNA sense strand
ccuauaaucuugugaauuc

SEQ ID NO: 15329 - RNA, 19 nt, Homo sapiens
  misc_RNA (1)...(19): siRNA sense strand
gaacauauucagcuuaaug

SEQ ID NO: 15330 - RNA, 19 nt, Homo sapiens
  misc_RNA (1)...(19): siRNA sense strand
caacuacaaucuugcuaaa

SEQ ID NO: 15331 - RNA, 19 nt, Homo sapiens
  misc_RNA (1)...(19): siRNA sense strand
gaaaggacuuccagaacug

SEQ ID NO: 15332 - RNA, 19 nt, Homo sapiens
  misc_RNA (1)...(19): siRNA sense strand
gaaucaggcuacaacauga

SEQ ID NO: 15333 - RNA, 19 nt, Homo sapiens
  misc_RNA (1)...(19): siRNA sense strand
acaagucgcuguuggaauu

SEQ ID NO: 15334 - RNA, 19 nt, Homo sapiens
  misc_RNA (1)...(19): siRNA sense strand
aaacacaggugaaguuaau

SEQ ID NO: 15335 - RNA, 19 nt, Homo sapiens
  misc_RNA (1)...(19): siRNA sense strand
aagaggcuaugaugaauua

SEQ ID NO: 15336 - RNA, 19 nt, Homo sapiens
  misc_RNA (1)...(19): siRNA sense strand
guaaauggauccaggaaca

SEQ ID NO: 15337 - RNA, 19 nt, Homo sapiens
  misc_RNA (1)...(19): siRNA sense strand
ugauucaucugccaaauaa

SEQ ID NO: 15338 - RNA, 19 nt, Homo sapiens
  misc_RNA (1)...(19): siRNA sense strand
gaugagaauucaaucaaug

SEQ ID NO: 15339 - RNA, 19 nt, Homo sapiens
  misc_RNA (1)...(19): siRNA sense strand
gcaacccaauuuauaugua

SEQ ID NO: 15340 - RNA, 19 nt, Homo sapiens
  misc_RNA (1)...(19): siRNA sense strand
acaaagcgguugagcaauu

SEQ ID NO: 15341 - RNA, 19 nt, Homo sapiens
  misc_RNA (1)...(19): siRNA sense strand
gagaagcaucgacucauua

SEQ ID NO: 15342 - RNA, 19 nt, Homo sapiens
  misc_RNA (1)...(19): siRNA sense strand
guaaaugguugcaggcuau

SEQ ID NO: 15343 - RNA, 19 nt, Homo sapiens
  misc_RNA (1)...(19): siRNA sense strand
gaagaacgguuuuacacua

SEQ ID NO: 15344 - RNA, 19 nt, Homo sapiens
  misc_RNA (1)...(19): siRNA sense strand
cagauuaguuuaccgauau

SEQ ID NO: 15345 - RNA, 19 nt, Homo sapiens
  misc_RNA (1)...(19): siRNA sense strand
gagaugauccucuucgaaa

SEQ ID NO: 15346 - RNA, 19 nt, Homo sapiens
  misc_RNA (1)...(19): siRNA sense strand
gcagaaauaagaccaaaga

SEQ ID NO: 15347 - RNA, 19 nt, Homo sapiens
  misc_RNA (1)...(19): siRNA sense strand
ucacaaacguggcauauac

SEQ ID NO: 15348 - RNA, 19 nt, Homo sapiens
  misc_RNA (1)...(19): siRNA sense strand
gcacauggauggauaaaau

SEQ ID NO: 15349 - RNA, 19 nt, Homo sapiens
  misc_RNA (1)...(19): siRNA sense strand
ucacguagcugaguacaug

SEQ ID NO: 15350 - RNA, 19 nt, Homo sapiens
  misc_RNA (1)...(19): siRNA sense strand
gcacaugcccuguuuaugg

SEQ ID NO: 15351 - RNA, 19 nt, Homo sapiens
  misc_RNA (1)...(19): siRNA sense strand
gauccaaaccaacaccuua

SEQ ID NO: 15352 - RNA, 19 nt, Homo sapiens
  misc_RNA (1)...(19): siRNA sense strand
gaaaagcaguuaccgugua

SEQ ID NO: 15353 - RNA, 19 nt, Homo sapiens
  misc_RNA (1)...(19): siRNA sense strand
gauaugaacauugcacuaa

SEQ ID NO: 15354 - RNA, 19 nt, Homo sapiens
  misc_RNA (1)...(19): siRNA sense strand
gaaauugugggccugagua

SEQ ID NO: 15355 - RNA, 19 nt, Homo sapiens
  misc_RNA (1)...(19): siRNA sense strand
caaaagggcccaaugaaua

SEQ ID NO: 15356 - RNA, 19 nt, Homo sapiens
  misc_RNA (1)...(19): siRNA sense strand
caaagcgguugagcaauuu

SEQ ID NO: 15357 - RNA, 19 nt, Homo sapiens
  misc_RNA (1)...(19): siRNA sense strand
gcuaaagguuucaauuauc

SEQ ID NO: 15358 - RNA, 19 nt, Homo sapiens
  misc_RNA (1)...(19): siRNA sense strand
gaucagccauuguuugaag

SEQ ID NO: 15359 - RNA, 19 nt, Homo sapiens
  misc_RNA (1)...(19): siRNA sense strand
ggugguggcugcaguguau

SEQ ID NO: 15360 - RNA, 19 nt, Homo sapiens
  misc_RNA (1)...(19): siRNA sense strand
ggcauggucucauuccuaa

SEQ ID NO: 15361 - RNA, 19 nt, Homo sapiens
  misc_RNA (1)...(19): siRNA sense strand
gcaauguuguguuucucua

SEQ ID NO: 15362 - RNA, 19 nt, Homo sapiens
  misc_RNA (1)...(19): siRNA sense strand
ggucagcccuuaaauaugc

SEQ ID NO: 15363 - RNA, 19 nt, Homo sapiens
  misc_RNA (1)...(19): siRNA sense strand
acaauucaguccucacuuu

SEQ ID NO: 15364 - RNA, 19 nt, Homo sapiens
  misc_RNA (1)...(19): siRNA sense strand
cuagaacuauugagagaaa

SEQ ID NO: 15365 - RNA, 19 nt, Homo sapiens
  misc_RNA (1)...(19): siRNA sense strand
gaaugggaaagcagacuua

SEQ ID NO: 15366 - RNA, 19 nt, Homo sapiens
  misc_RNA (1)...(19): siRNA sense strand
auaaaggucucauaugaug

SEQ ID NO: 15367 - RNA, 19 nt, Homo sapiens
  misc_RNA (1)...(19): siRNA sense strand
gcaguuaccguguauacaa

SEQ ID NO: 15368 - RNA, 19 nt, Homo sapiens
  misc_RNA (1)...(19): siRNA sense strand
gccaaucaguuagaauuaa

SEQ ID NO: 15369 - RNA, 19 nt, Homo sapiens
  misc_RNA (1)...(19): siRNA sense strand
caacagaaagagaagauga

SEQ ID NO: 15370 - RNA, 19 nt, Homo sapiens
  misc_RNA (1)...(19): siRNA sense strand
gaagcuagaacuauugaga

SEQ ID NO: 15371 - RNA, 19 nt, Homo sapiens
  misc_RNA (1)...(19): siRNA sense strand
gagaggcaaugagugcaua

SEQ ID NO: 15372 - RNA, 19 nt, Homo sapiens
  misc_RNA (1)...(19): siRNA sense strand
ccaaugagaaugcccagua

SEQ ID NO: 15373 - RNA, 19 nt, Homo sapiens
  misc_RNA (1)...(19): siRNA sense strand
gaaagugacagagcuagaa

SEQ ID NO: 15374 - RNA, 19 nt, Homo sapiens
  misc_RNA (1)...(19): siRNA sense strand
gcugcaggcuuaccucauu

SEQ ID NO: 15375 - RNA, 19 nt, Homo sapiens
  misc_RNA (1)...(19): siRNA sense strand
ucucuugccuccagauuaa

SEQ ID NO: 15376 - RNA, 19 nt, Homo sapiens
  misc_RNA (1)...(19): siRNA sense strand
ggaugagaauucaaucaau

SEQ ID NO: 15377 - RNA, 19 nt, Homo sapiens
  misc_RNA (1)...(19): siRNA sense strand
agagaaacacgaaaccuua

SEQ ID NO: 15378 - RNA, 19 nt, Homo sapiens
  misc_RNA (1)...(19): siRNA sense strand
cagcagcaauugaagaaug

SEQ ID NO: 15379 - RNA, 19 nt, Homo sapiens
  misc_RNA (1)...(19): siRNA sense strand
gccauuguuugaagucaua

SEQ ID NO: 15380 - RNA, 19 nt, Homo sapiens
  misc_RNA (1)...(19): siRNA sense strand
gagcuacaguuccgauuag

SEQ ID NO: 15381 - RNA, 19 nt, Homo sapiens
  misc_RNA (1)...(19): siRNA sense strand
gcuacucccuugccaauca

SEQ ID NO: 15382 - RNA, 19 nt, Homo sapiens
  misc_RNA (1)...(19): siRNA sense strand
uuccagaacugaccaauga

SEQ ID NO: 15383 - RNA, 19 nt, Homo sapiens
  misc_RNA (1)...(19): siRNA sense strand
agagguauacugcugauua

SEQ ID NO: 15384 - RNA, 19 nt, Homo sapiens
  misc_RNA (1)...(19): siRNA sense strand
gucaguaaccggcuuauuu

SEQ ID NO: 15385 - RNA, 19 nt, Homo sapiens
  misc_RNA (1)...(19): siRNA sense strand
uccaggaaguguuauuaua

SEQ ID NO: 15386 - RNA, 19 nt, Homo sapiens
  misc_RNA (1)...(19): siRNA sense strand
gaaugauguuggacagcua

SEQ ID NO: 15387 - RNA, 19 nt, Homo sapiens
  misc_RNA (1)...(19): siRNA sense strand
ccgauuaggcccaacuuua

SEQ ID NO: 15388 - RNA, 19 nt, Homo sapiens
  misc_RNA (1)...(19): siRNA sense strand
cagaugauaugguuuacug

SEQ ID NO: 15389 - RNA, 19 nt, Homo sapiens
  misc_RNA (1)...(19): siRNA sense strand
ggaaggaugagaauucaau

SEQ ID NO: 15390 - RNA, 19 nt, Homo sapiens
  misc_RNA (1)...(19): siRNA sense strand
gaagacauaguggcaguaa

SEQ ID NO: 15391 - RNA, 19 nt, Homo sapiens
  misc_RNA (1)...(19): siRNA sense strand
aaauuacgcuaugggaaua

SEQ ID NO: 15392 - RNA, 19 nt, Homo sapiens
  misc_RNA (1)...(19): siRNA sense strand
ucaagauccugaauacaga

SEQ ID NO: 15393 - RNA, 19 nt, Homo sapiens
  misc_RNA (1)...(19): siRNA sense strand
caucagauuucagugguuu

SEQ ID NO: 15394 - RNA, 19 nt, Homo sapiens
  misc_RNA (1)...(19): siRNA sense strand
gaauaccugcuuugauuga

SEQ ID NO: 15395 - RNA, 19 nt, Homo sapiens
  misc_RNA (1)...(19): siRNA sense strand
ggaaagcuuuggagauugc

SEQ ID NO: 15396 - RNA, 19 nt, Homo sapiens
  misc_RNA (1)...(19): siRNA sense strand
ggagcaauguuguguuucu

SEQ ID NO: 15397 - RNA, 19 nt, Homo sapiens
  misc_RNA (1)...(19): siRNA sense strand
ugacaaugcagauccuaua

SEQ ID NO: 15398 - RNA, 19 nt, Homo sapiens
  misc_RNA (1)...(19): siRNA sense strand
aaccaacaccuuacgauua

SEQ ID NO: 15399 - RNA, 19 nt, Homo sapiens
  misc_RNA (1)...(19): siRNA sense strand
aaggagcaauguuguguuu

SEQ ID NO: 15400 - RNA, 19 nt, Homo sapiens
  misc_RNA (1)...(19): siRNA sense strand
gaaaucaucugacacaauu

SEQ ID NO: 15401 - RNA, 19 nt, Homo sapiens
  misc_RNA (1)...(19): siRNA sense strand
gcaacaaucugguucauuu

SEQ ID NO: 15402 - RNA, 19 nt, Homo sapiens
  misc_RNA (1)...(19): siRNA sense strand
caaugcagauccuauauua

SEQ ID NO: 15403 - RNA, 19 nt, Homo sapiens
  misc_RNA (1)...(19): siRNA sense strand
gggaauaccugcuuugauu

SEQ ID NO: 15404 - RNA, 19 nt, Homo sapiens
  misc_RNA (1)...(19): siRNA sense strand
gggagacaguguuaaauua

SEQ ID NO: 15405 - RNA, 19 nt, Homo sapiens
  misc_RNA (1)...(19): siRNA sense strand
ccaaguagaugucaacaaa

SEQ ID NO: 15406 - RNA, 19 nt, Homo sapiens
  misc_RNA (1)...(19): siRNA sense strand
gaaauaagaccaaagaaug

SEQ ID NO: 15407 - RNA, 19 nt, Homo sapiens
  misc_RNA (1)...(19): siRNA sense strand
gauaaugaguguccuauug

SEQ ID NO: 15408 - RNA, 19 nt, Homo sapiens
  misc_RNA (1)...(19): siRNA sense strand
gaagggaaauacaaagaaa

SEQ ID NO: 15409 - RNA, 19 nt, Homo sapiens
  misc_RNA (1)...(19): siRNA sense strand
gaagagggcagauuaguuu

SEQ ID NO: 15410 - RNA, 19 nt, Homo sapiens
  misc_RNA (1)...(19): siRNA sense strand
gcaaugagugcauauaaua

SEQ ID NO: 15411 - RNA, 19 nt, Homo sapiens
  misc_RNA (1)...(19): siRNA sense strand
gagaacauauucagcuuaa

SEQ ID NO: 15412 - RNA, 19 nt, Homo sapiens
  misc_RNA (1)...(19): siRNA sense strand
ggacgaagguuuuaauaua

SEQ ID NO: 15413 - RNA, 19 nt, Homo sapiens
  misc_RNA (1)...(19): siRNA sense strand
ugacagagcuagaaacaga

SEQ ID NO: 15414 - RNA, 19 nt, Homo sapiens
  misc_RNA (1)...(19): siRNA sense strand
ggagaaacauuuaauagag

SEQ ID NO: 15415 - RNA, 19 nt, Homo sapiens
  misc_RNA (1)...(19): siRNA sense strand
gagauuggaugauugacua

SEQ ID NO: 15416 - RNA, 19 nt, Homo sapiens
  misc_RNA (1)...(19): siRNA sense strand
guagaagccaggaauauua

SEQ ID NO: 15417 - RNA, 19 nt, Homo sapiens
  misc_RNA (1)...(19): siRNA sense strand
ccagauagaucgaaacaug

SEQ ID NO: 15418 - RNA, 19 nt, Homo sapiens
  misc_RNA (1)...(19): siRNA sense strand
gugaagaucuggacaaugu

SEQ ID NO: 15419 - RNA, 19 nt, Homo sapiens
  misc_RNA (1)...(19): siRNA sense strand
cuauaaaggucucauauga

SEQ ID NO: 15420 - RNA, 19 nt, Homo sapiens
  misc_RNA (1)...(19): siRNA sense strand
gcaaggaagugccucaaau

SEQ ID NO: 15421 - RNA, 19 nt, Homo sapiens
  misc_RNA (1)...(19): siRNA sense strand
gaaaguauaccuggaauga

SEQ ID NO: 15422 - RNA, 19 nt, Homo sapiens
  misc_RNA (1)...(19): siRNA sense strand
ugaagcagaucccacguua

SEQ ID NO: 15423 - RNA, 19 nt, Homo sapiens
  misc_RNA (1)...(19): siRNA sense strand
gcagauuaguuuaccgaua

SEQ ID NO: 15424 - RNA, 19 nt, Homo sapiens
  misc_RNA (1)...(19): siRNA sense strand
gaagaaugcuguaauuggu

SEQ ID NO: 15425 - RNA, 19 nt, Homo sapiens
  misc_RNA (1)...(19): siRNA sense strand
ggaauggaauguuauuugu

SEQ ID NO: 15426 - RNA, 19 nt, Homo sapiens
  misc_RNA (1)...(19): siRNA sense strand
gaaugugccuauaaucuug

SEQ ID NO: 15427 - RNA, 19 nt, Homo sapiens
  misc_RNA (1)...(19): siRNA sense strand
acacaagccuggucaauug

SEQ ID NO: 15428 - RNA, 19 nt, Homo sapiens
  misc_RNA (1)...(19): siRNA sense strand
ccuauaaucuugugaauuc

SEQ ID NO: 15429 - RNA, 19 nt, Homo sapiens
  misc_RNA (1)...(19): siRNA sense strand
gaacauauucagcuuaaug

SEQ ID NO: 15430 - RNA, 19 nt, Homo sapiens
  misc_RNA (1)...(19): siRNA sense strand
caacuacaaucuugcuaaa

SEQ ID NO: 15431 - RNA, 19 nt, Homo sapiens
  misc_RNA (1)...(19): siRNA sense strand
gaaaggacuuccagaacug

SEQ ID NO: 15432 - RNA, 19 nt, Homo sapiens
  misc_RNA (1)...(19): siRNA sense strand
gaaucaggcuacaacauga

SEQ ID NO: 15433 - RNA, 19 nt, Homo sapiens
  misc_RNA (1)...(19): siRNA sense strand
acaagucgcuguuggaauu

SEQ ID NO: 15434 - RNA, 19 nt, Homo sapiens
  misc_RNA (1)...(19): siRNA sense strand
aaacacaggugaaguuaau

SEQ ID NO: 15435 - RNA, 19 nt, Homo sapiens
  misc_RNA (1)...(19): siRNA sense strand
aagaggcuaugaugaauua

SEQ ID NO: 15436 - RNA, 19 nt, Homo sapiens
  misc_RNA (1)...(19): siRNA sense strand
guaaauggauccaggaaca

SEQ ID NO: 15437 - RNA, 19 nt, Homo sapiens
  misc_RNA (1)...(19): siRNA sense strand
ugauucaucugccaaauaa

SEQ ID NO: 15438 - RNA, 19 nt, Homo sapiens
  misc_RNA (1)...(19): siRNA sense strand
gaugagaauucaaucaaug

SEQ ID NO: 15439 - RNA, 19 nt, Homo sapiens
  misc_RNA (1)...(19): siRNA sense strand
gcaacccaauuuauaugua

SEQ ID NO: 15440 - RNA, 19 nt, Homo sapiens
  misc_RNA (1)...(19): siRNA sense strand
acaaagcgguugagcaauu

SEQ ID NO: 15441 - RNA, 19 nt, Homo sapiens
  misc_RNA (1)...(19): siRNA sense strand
gagaagcaucgacucauua

SEQ ID NO: 15442 - RNA, 19 nt, Homo sapiens
  misc_RNA (1)...(19): siRNA sense strand
guaaaugguugcaggcuau

SEQ ID NO: 15443 - RNA, 19 nt, Homo sapiens
  misc_RNA (1)...(19): siRNA sense strand
gaagaacgguuuuacacua

SEQ ID NO: 15444 - RNA, 19 nt, Homo sapiens
  misc_RNA (1)...(19): siRNA sense strand
cagauuaguuuaccgauau

SEQ ID NO: 15445 - RNA, 19 nt, Homo sapiens
  misc_RNA (1)...(19): siRNA sense strand
gagaugauccucuucgaaa

SEQ ID NO: 15446 - RNA, 19 nt, Homo sapiens
  misc_RNA (1)...(19): siRNA sense strand
gcagaaauaagaccaaaga

SEQ ID NO: 15447 - RNA, 19 nt, Homo sapiens
  misc_RNA (1)...(19): siRNA sense strand
ucacaaacguggcauauac

SEQ ID NO: 15448 - RNA, 19 nt, Homo sapiens
  misc_RNA (1)...(19): siRNA sense strand
gcacauggauggauaaaau

SEQ ID NO: 15449 - RNA, 19 nt, Homo sapiens
  misc_RNA (1)...(19): siRNA sense strand
ucacguagcugaguacaug

SEQ ID NO: 15450 - RNA, 19 nt, Homo sapiens
  misc_RNA (1)...(19): siRNA sense strand
gcacaugcccuguuuaugg

SEQ ID NO: 15451 - RNA, 19 nt, Homo sapiens
  misc_RNA (1)...(19): siRNA sense strand
gauccaaaccaacaccuua

SEQ ID NO: 15452 - RNA, 19 nt, Homo sapiens
  misc_RNA (1)...(19): siRNA sense strand
gaaaagcaguuaccgugua

SEQ ID NO: 15453 - RNA, 19 nt, Homo sapiens
  misc_RNA (1)...(19): siRNA sense strand
gauaugaacauugcacuaa

SEQ ID NO: 15454 - RNA, 19 nt, Homo sapiens
  misc_RNA (1)...(19): siRNA sense strand
gaaauugugggccugagua

SEQ ID NO: 15455 - RNA, 19 nt, Homo sapiens
  misc_RNA (1)...(19): siRNA sense strand
caaaagggcccaaugaaua

SEQ ID NO: 15456 - RNA, 19 nt, Homo sapiens
  misc_RNA (1)...(19): siRNA sense strand
caaagcgguugagcaauuu

SEQ ID NO: 15457 - RNA, 19 nt, Homo sapiens
  misc_RNA (1)...(19): siRNA sense strand
gcuaaagguuucaauuauc

SEQ ID NO: 15458 - RNA, 19 nt, Homo sapiens
  misc_RNA (1)...(19): siRNA sense strand
gaucagccauuguuugaag

SEQ ID NO: 15459 - RNA, 19 nt, Homo sapiens
  misc_RNA (1)...(19): siRNA sense strand
ggugguggcugcaguguau

SEQ ID NO: 15460 - RNA, 19 nt, Homo sapiens
  misc_RNA (1)...(19): siRNA sense strand
ggcauggucucauuccuaa

SEQ ID NO: 15461 - RNA, 19 nt, Homo sapiens
  misc_RNA (1)...(19): siRNA sense strand
gcaauguuguguuucucua

SEQ ID NO: 15462 - RNA, 19 nt, Homo sapiens
  misc_RNA (1)...(19): siRNA sense strand
ggucagcccuuaaauaugc

SEQ ID NO: 15463 - RNA, 19 nt, Homo sapiens
  misc_RNA (1)...(19): siRNA sense strand
acaauucaguccucacuuu

SEQ ID NO: 15464 - RNA, 19 nt, Homo sapiens
  misc_RNA (1)...(19): siRNA sense strand
cuagaacuauugagagaaa

SEQ ID NO: 15465 - RNA, 19 nt, Homo sapiens
  misc_RNA (1)...(19): siRNA sense strand
gaaugggaaagcagacuua

SEQ ID NO: 15466 - RNA, 19 nt, Homo sapiens
  misc_RNA (1)...(19): siRNA sense strand
auaaaggucucauaugaug

SEQ ID NO: 15467 - RNA, 19 nt, Homo sapiens
  misc_RNA (1)...(19): siRNA sense strand
gcaguuaccguguauacaa

SEQ ID NO: 15468 - RNA, 19 nt, Homo sapiens
  misc_RNA (1)...(19): siRNA sense strand
gccaaucaguuagaauuaa

SEQ ID NO: 15469 - RNA, 19 nt, Homo sapiens
  misc_RNA (1)...(19): siRNA sense strand
caacagaaagagaagauga

SEQ ID NO: 15470 - RNA, 19 nt, Homo sapiens
  misc_RNA (1)...(19): siRNA sense strand
gaagcuagaacuauugaga

SEQ ID NO: 15471 - RNA, 19 nt, Homo sapiens
  misc_RNA (1)...(19): siRNA sense strand
gagaggcaaugagugcaua

SEQ ID NO: 15472 - RNA, 19 nt, Homo sapiens
  misc_RNA (1)...(19): siRNA sense strand
ccaaugagaaugcccagua

SEQ ID NO: 15473 - RNA, 19 nt, Homo sapiens
  misc_RNA (1)...(19): siRNA sense strand
gaaagugacagagcuagaa

SEQ ID NO: 15474 - RNA, 19 nt, Homo sapiens
  misc_RNA (1)...(19): siRNA sense strand
gcugcaggcuuaccucauu

SEQ ID NO: 15475 - RNA, 19 nt, Homo sapiens
  misc_RNA (1)...(19): siRNA sense strand
ucucuugccuccagauuaa

SEQ ID NO: 15476 - RNA, 19 nt, Homo sapiens
  misc_RNA (1)...(19): siRNA sense strand
ggaugagaauucaaucaau

SEQ ID NO: 15477 - RNA, 19 nt, Homo sapiens
  misc_RNA (1)...(19): siRNA sense strand
agagaaacacgaaaccuua

SEQ ID NO: 15478 - RNA, 19 nt, Homo sapiens
  misc_RNA (1)...(19): siRNA sense strand
cagcagcaauugaagaaug

SEQ ID NO: 15479 - RNA, 19 nt, Homo sapiens
  misc_RNA (1)...(19): siRNA sense strand
gccauuguuugaagucaua

SEQ ID NO: 15480 - RNA, 19 nt, Homo sapiens
  misc_RNA (1)...(19): siRNA sense strand
gagcuacaguuccgauuag

SEQ ID NO: 15481 - RNA, 19 nt, Homo sapiens
  misc_RNA (1)...(19): siRNA sense strand
gcuacucccuugccaauca

SEQ ID NO: 15482 - RNA, 19 nt, Homo sapiens
  misc_RNA (1)...(19): siRNA sense strand
uuccagaacugaccaauga

SEQ ID NO: 15483 - RNA, 19 nt, Homo sapiens
  misc_RNA (1)...(19): siRNA sense strand
agagguauacugcugauua

SEQ ID NO: 15484 - RNA, 19 nt, Homo sapiens
  misc_RNA (1)...(19): siRNA sense strand
gucaguaaccggcuuauuu

SEQ ID NO: 15485 - RNA, 19 nt, Homo sapiens
  misc_RNA (1)...(19): siRNA sense strand
uccaggaaguguuauuaua

SEQ ID NO: 15486 - RNA, 19 nt, Homo sapiens
  misc_RNA (1)...(19): siRNA sense strand
gaaugauguuggacagcua

SEQ ID NO: 15487 - RNA, 19 nt, Homo sapiens
  misc_RNA (1)...(19): siRNA sense strand
ccgauuaggcccaacuuua

SEQ ID NO: 15488 - RNA, 19 nt, Homo sapiens
  misc_RNA (1)...(19): siRNA sense strand
cagaugauaugguuuacug

SEQ ID NO: 15489 - RNA, 19 nt, Homo sapiens
  misc_RNA (1)...(19): siRNA sense strand
ggaaggaugagaauucaau

SEQ ID NO: 15490 - RNA, 19 nt, Homo sapiens
  misc_RNA (1)...(19): siRNA sense strand
gaagacauaguggcaguaa

SEQ ID NO: 15491 - RNA, 19 nt, Homo sapiens
  misc_RNA (1)...(19): siRNA sense strand
aaauuacgcuaugggaaua

SEQ ID NO: 15492 - RNA, 19 nt, Homo sapiens
  misc_RNA (1)...(19): siRNA sense strand
ucaagauccugaauacaga

SEQ ID NO: 15493 - RNA, 19 nt, Homo sapiens
  misc_RNA (1)...(19): siRNA sense strand
caucagauuucagugguuu

SEQ ID NO: 15494 - RNA, 19 nt, Homo sapiens
  misc_RNA (1)...(19): siRNA sense strand
gaauaccugcuuugauuga

SEQ ID NO: 15495 - RNA, 19 nt, Homo sapiens
  misc_RNA (1)...(19): siRNA sense strand
ggaaagcuuuggagauugc

SEQ ID NO: 15496 - RNA, 19 nt, Homo sapiens
  misc_RNA (1)...(19): siRNA sense strand
ggagcaauguuguguuucu

SEQ ID NO: 15497 - RNA, 19 nt, Homo sapiens
  misc_RNA (1)...(19): siRNA sense strand
ugacaaugcagauccuaua

SEQ ID NO: 15498 - RNA, 19 nt, Homo sapiens
  misc_RNA (1)...(19): siRNA sense strand
aaccaacaccuuacgauua

SEQ ID NO: 15499 - RNA, 19 nt, Homo sapiens
  misc_RNA (1)...(19): siRNA sense strand
aaggagcaauguuguguuu

SEQ ID NO: 15500 - RNA, 19 nt, Homo sapiens
  misc_RNA (1)...(19): siRNA sense strand
gaaaucaucugacacaauu

SEQ ID NO: 15501 - RNA, 19 nt, Homo sapiens
  misc_RNA (1)...(19): siRNA sense strand
gcaacaaucugguucauuu

SEQ ID NO: 15502 - RNA, 19 nt, Homo sapiens
  misc_RNA (1)...(19): siRNA sense strand
caaugcagauccuauauua

SEQ ID NO: 15503 - RNA, 19 nt, Homo sapiens
  misc_RNA (1)...(19): siRNA sense strand
gggaauaccugcuuugauu

SEQ ID NO: 15504 - RNA, 19 nt, Homo sapiens
  misc_RNA (1)...(19): siRNA sense strand
gggagacaguguuaaauua

SEQ ID NO: 15505 - RNA, 19 nt, Homo sapiens
  misc_RNA (1)...(19): siRNA sense strand
ccaaguagaugucaacaaa

SEQ ID NO: 15506 - RNA, 19 nt, Homo sapiens
  misc_RNA (1)...(19): siRNA sense strand
gaaauaagaccaaagaaug

SEQ ID NO: 15507 - RNA, 19 nt, Homo sapiens
  misc_RNA (1)...(19): siRNA sense strand
gauaaugaguguccuauug

SEQ ID NO: 15508 - RNA, 19 nt, Homo sapiens
  misc_RNA (1)...(19): siRNA sense strand
gaagggaaauacaaagaaa

SEQ ID NO: 15509 - RNA, 19 nt, Homo sapiens
  misc_RNA (1)...(19): siRNA sense strand
gaagagggcagauuaguuu

SEQ ID NO: 15510 - RNA, 19 nt, Homo sapiens
  misc_RNA (1)...(19): siRNA sense strand
gcaaugagugcauauaaua

SEQ ID NO: 15511 - RNA, 19 nt, Homo sapiens
  misc_RNA (1)...(19): siRNA sense strand
gagaacauauucagcuuaa

SEQ ID NO: 15512 - RNA, 19 nt, Homo sapiens
  misc_RNA (1)...(19): siRNA sense strand
ggacgaagguuuuaauaua

SEQ ID NO: 15513 - RNA, 19 nt, Homo sapiens
  misc_RNA (1)...(19): siRNA sense strand
ugacagagcuagaaacaga

SEQ ID NO: 15514 - RNA, 19 nt, Homo sapiens
  misc_RNA (1)...(19): siRNA sense strand
ggagaaacauuuaauagag

SEQ ID NO: 15515 - RNA, 19 nt, Homo sapiens
  misc_RNA (1)...(19): siRNA sense strand
gagauuggaugauugacua

SEQ ID NO: 15516 - RNA, 19 nt, Homo sapiens
  misc_RNA (1)...(19): siRNA sense strand
guagaagccaggaauauua

SEQ ID NO: 15517 - RNA, 19 nt, Homo sapiens
  misc_RNA (1)...(19): siRNA sense strand
ccagauagaucgaaacaug

SEQ ID NO: 15518 - RNA, 19 nt, Homo sapiens
  misc_RNA (1)...(19): siRNA sense strand
gugaagaucuggacaaugu

SEQ ID NO: 15519 - RNA, 19 nt, Homo sapiens
  misc_RNA (1)...(19): siRNA sense strand
cuauaaaggucucauauga

SEQ ID NO: 15520 - RNA, 19 nt, Homo sapiens
  misc_RNA (1)...(19): siRNA sense strand
gcaaggaagugccucaaau

SEQ ID NO: 15521 - RNA, 19 nt, Homo sapiens
  misc_RNA (1)...(19): siRNA sense strand
gaaaguauaccuggaauga

SEQ ID NO: 15522 - RNA, 19 nt, Homo sapiens
  misc_RNA (1)...(19): siRNA sense strand
ugaagcagaucccacguua

SEQ ID NO: 15523 - RNA, 19 nt, Homo sapiens
  misc_RNA (1)...(19): siRNA sense strand
gcagauuaguuuaccgaua

SEQ ID NO: 15524 - RNA, 19 nt, Homo sapiens
  misc_RNA (1)...(19): siRNA sense strand
gaagaaugcuguaauuggu

SEQ ID NO: 15525 - RNA, 19 nt, Homo sapiens
  misc_RNA (1)...(19): siRNA sense strand
ggaauggaauguuauuugu

SEQ ID NO: 15526 - RNA, 19 nt, Homo sapiens
  misc_RNA (1)...(19): siRNA sense strand
gaaugugccuauaaucuug

SEQ ID NO: 15527 - RNA, 19 nt, Homo sapiens
  misc_RNA (1)...(19): siRNA sense strand
acacaagccuggucaauug

SEQ ID NO: 15528 - RNA, 19 nt, Homo sapiens
  misc_RNA (1)...(19): siRNA sense strand
ccuauaaucuugugaauuc

SEQ ID NO: 15529 - RNA, 19 nt, Homo sapiens
  misc_RNA (1)...(19): siRNA sense strand
gaacauauucagcuuaaug

SEQ ID NO: 15530 - RNA, 19 nt, Homo sapiens
  misc_RNA (1)...(19): siRNA sense strand
caacuacaaucuugcuaaa

SEQ ID NO: 15531 - RNA, 19 nt, Homo sapiens
  misc_RNA (1)...(19): siRNA sense strand
gaaaggacuuccagaacug

SEQ ID NO: 15532 - RNA, 19 nt, Homo sapiens
  misc_RNA (1)...(19): siRNA sense strand
gaaucaggcuacaacauga

SEQ ID NO: 15533 - RNA, 19 nt, Homo sapiens
  misc_RNA (1)...(19): siRNA sense strand
acaagucgcuguuggaauu

SEQ ID NO: 15534 - RNA, 19 nt, Homo sapiens
  misc_RNA (1)...(19): siRNA sense strand
aaacacaggugaaguuaau

SEQ ID NO: 15535 - RNA, 19 nt, Homo sapiens
  misc_RNA (1)...(19): siRNA sense strand
aagaggcuaugaugaauua

SEQ ID NO: 15536 - RNA, 19 nt, Homo sapiens
  misc_RNA (1)...(19): siRNA sense strand
guaaauggauccaggaaca

SEQ ID NO: 15537 - RNA, 19 nt, Homo sapiens
  misc_RNA (1)...(19): siRNA sense strand
ugauucaucugccaaauaa

SEQ ID NO: 15538 - RNA, 19 nt, Homo sapiens
  misc_RNA (1)...(19): siRNA sense strand
gaugagaauucaaucaaug

SEQ ID NO: 15539 - RNA, 19 nt, Homo sapiens
  misc_RNA (1)...(19): siRNA sense strand
gcaacccaauuuauaugua

SEQ ID NO: 15540 - RNA, 19 nt, Homo sapiens
  misc_RNA (1)...(19): siRNA sense strand
acaaagcgguugagcaauu

SEQ ID NO: 15541 - RNA, 19 nt, Homo sapiens
  misc_RNA (1)...(19): siRNA sense strand
gagaagcaucgacucauua

SEQ ID NO: 15542 - RNA, 19 nt, Homo sapiens
  misc_RNA (1)...(19): siRNA sense strand
guaaaugguugcaggcuau

SEQ ID NO: 15543 - RNA, 19 nt, Homo sapiens
  misc_RNA (1)...(19): siRNA sense strand
gaagaacgguuuuacacua

SEQ ID NO: 15544 - RNA, 19 nt, Homo sapiens
  misc_RNA (1)...(19): siRNA sense strand
cagauuaguuuaccgauau

SEQ ID NO: 15545 - RNA, 19 nt, Homo sapiens
  misc_RNA (1)...(19): siRNA sense strand
gagaugauccucuucgaaa

SEQ ID NO: 15546 - RNA, 19 nt, Homo sapiens
  misc_RNA (1)...(19): siRNA sense strand
gcagaaauaagaccaaaga

SEQ ID NO: 15547 - RNA, 19 nt, Homo sapiens
  misc_RNA (1)...(19): siRNA sense strand
ucacaaacguggcauauac

SEQ ID NO: 15548 - RNA, 19 nt, Homo sapiens
  misc_RNA (1)...(19): siRNA sense strand
gcacauggauggauaaaau

SEQ ID NO: 15549 - RNA, 19 nt, Homo sapiens
  misc_RNA (1)...(19): siRNA sense strand
ucacguagcugaguacaug

SEQ ID NO: 15550 - RNA, 19 nt, Homo sapiens
  misc_RNA (1)...(19): siRNA sense strand
gcacaugcccuguuuaugg

SEQ ID NO: 15551 - RNA, 19 nt, Homo sapiens
  misc_RNA (1)...(19): siRNA sense strand
gauccaaaccaacaccuua

SEQ ID NO: 15552 - RNA, 19 nt, Homo sapiens
  misc_RNA (1)...(19): siRNA sense strand
gaaaagcaguuaccgugua

SEQ ID NO: 15553 - RNA, 19 nt, Homo sapiens
  misc_RNA (1)...(19): siRNA sense strand
gauaugaacauugcacuaa

SEQ ID NO: 15554 - RNA, 19 nt, Homo sapiens
  misc_RNA (1)...(19): siRNA sense strand
gaaauugugggccugagua

SEQ ID NO: 15555 - RNA, 19 nt, Homo sapiens
  misc_RNA (1)...(19): siRNA sense strand
caaaagggcccaaugaaua

SEQ ID NO: 15556 - RNA, 19 nt, Homo sapiens
  misc_RNA (1)...(19): siRNA sense strand
caaagcgguugagcaauuu

SEQ ID NO: 15557 - RNA, 19 nt, Homo sapiens
  misc_RNA (1)...(19): siRNA sense strand
gcuaaagguuucaauuauc

SEQ ID NO: 15558 - RNA, 19 nt, Homo sapiens
  misc_RNA (1)...(19): siRNA sense strand
gaucagccauuguuugaag

SEQ ID NO: 15559 - RNA, 19 nt, Homo sapiens
  misc_RNA (1)...(19): siRNA sense strand
ggugguggcugcaguguau

SEQ ID NO: 15560 - RNA, 19 nt, Homo sapiens
  misc_RNA (1)...(19): siRNA sense strand
ggcauggucucauuccuaa

SEQ ID NO: 15561 - RNA, 19 nt, Homo sapiens
  misc_RNA (1)...(19): siRNA sense strand
gcaauguuguguuucucua

SEQ ID NO: 15562 - RNA, 19 nt, Homo sapiens
  misc_RNA (1)...(19): siRNA sense strand
ggucagcccuuaaauaugc

SEQ ID NO: 15563 - RNA, 19 nt, Homo sapiens
  misc_RNA (1)...(19): siRNA sense strand
acaauucaguccucacuuu

SEQ ID NO: 15564 - RNA, 19 nt, Homo sapiens
  misc_RNA (1)...(19): siRNA sense strand
cuagaacuauugagagaaa

SEQ ID NO: 15565 - RNA, 19 nt, Homo sapiens
  misc_RNA (1)...(19): siRNA sense strand
gaaugggaaagcagacuua

SEQ ID NO: 15566 - RNA, 19 nt, Homo sapiens
  misc_RNA (1)...(19): siRNA sense strand
auaaaggucucauaugaug

SEQ ID NO: 15567 - RNA, 19 nt, Homo sapiens
  misc_RNA (1)...(19): siRNA sense strand
gcaguuaccguguauacaa

SEQ ID NO: 15568 - RNA, 19 nt, Homo sapiens
  misc_RNA (1)...(19): siRNA sense strand
gccaaucaguuagaauuaa

SEQ ID NO: 15569 - RNA, 19 nt, Homo sapiens
  misc_RNA (1)...(19): siRNA sense strand
caacagaaagagaagauga

SEQ ID NO: 15570 - RNA, 19 nt, Homo sapiens
  misc_RNA (1)...(19): siRNA sense strand
gaagcuagaacuauugaga

SEQ ID NO: 15571 - RNA, 19 nt, Homo sapiens
  misc_RNA (1)...(19): siRNA sense strand
gagaggcaaugagugcaua

SEQ ID NO: 15572 - RNA, 19 nt, Homo sapiens
  misc_RNA (1)...(19): siRNA sense strand
ccaaugagaaugcccagua

SEQ ID NO: 15573 - RNA, 19 nt, Homo sapiens
  misc_RNA (1)...(19): siRNA sense strand
gaaagugacagagcuagaa

SEQ ID NO: 15574 - RNA, 19 nt, Homo sapiens
  misc_RNA (1)...(19): siRNA sense strand
gcugcaggcuuaccucauu

SEQ ID NO: 15575 - RNA, 19 nt, Homo sapiens
  misc_RNA (1)...(19): siRNA sense strand
ucucuugccuccagauuaa

SEQ ID NO: 15576 - RNA, 19 nt, Homo sapiens
  misc_RNA (1)...(19): siRNA sense strand
ggaugagaauucaaucaau

SEQ ID NO: 15577 - RNA, 19 nt, Homo sapiens
  misc_RNA (1)...(19): siRNA sense strand
agagaaacacgaaaccuua

SEQ ID NO: 15578 - RNA, 19 nt, Homo sapiens
  misc_RNA (1)...(19): siRNA sense strand
cagcagcaauugaagaaug

SEQ ID NO: 15579 - RNA, 19 nt, Homo sapiens
  misc_RNA (1)...(19): siRNA sense strand
gccauuguuugaagucaua

SEQ ID NO: 15580 - RNA, 19 nt, Homo sapiens
  misc_RNA (1)...(19): siRNA sense strand
gagcuacaguuccgauuag

SEQ ID NO: 15581 - RNA, 19 nt, Homo sapiens
  misc_RNA (1)...(19): siRNA sense strand
gcuacucccuugccaauca

SEQ ID NO: 15582 - RNA, 19 nt, Homo sapiens
  misc_RNA (1)...(19): siRNA sense strand
uuccagaacugaccaauga

SEQ ID NO: 15583 - RNA, 19 nt, Homo sapiens
  misc_RNA (1)...(19): siRNA sense strand
agagguauacugcugauua

SEQ ID NO: 15584 - RNA, 19 nt, Homo sapiens
  misc_RNA (1)...(19): siRNA sense strand
gucaguaaccggcuuauuu

SEQ ID NO: 15585 - RNA, 19 nt, Homo sapiens
  misc_RNA (1)...(19): siRNA sense strand
uccaggaaguguuauuaua

SEQ ID NO: 15586 - RNA, 19 nt, Homo sapiens
  misc_RNA (1)...(19): siRNA sense strand
gaaugauguuggacagcua

SEQ ID NO: 15587 - RNA, 19 nt, Homo sapiens
  misc_RNA (1)...(19): siRNA sense strand
ccgauuaggcccaacuuua

SEQ ID NO: 15588 - RNA, 19 nt, Homo sapiens
  misc_RNA (1)...(19): siRNA sense strand
cagaugauaugguuuacug

SEQ ID NO: 15589 - RNA, 19 nt, Homo sapiens
  misc_RNA (1)...(19): siRNA sense strand
ggaaggaugagaauucaau

SEQ ID NO: 15590 - RNA, 19 nt, Homo sapiens
  misc_RNA (1)...(19): siRNA sense strand
gaagacauaguggcaguaa

SEQ ID NO: 15591 - RNA, 19 nt, Homo sapiens
  misc_RNA (1)...(19): siRNA sense strand
aaauuacgcuaugggaaua

SEQ ID NO: 15592 - RNA, 19 nt, Homo sapiens
  misc_RNA (1)...(19): siRNA sense strand
ucaagauccugaauacaga

SEQ ID NO: 15593 - RNA, 19 nt, Homo sapiens
  misc_RNA (1)...(19): siRNA sense strand
caucagauuucagugguuu

SEQ ID NO: 15594 - RNA, 19 nt, Homo sapiens
  misc_RNA (1)...(19): siRNA sense strand
gaauaccugcuuugauuga

SEQ ID NO: 15595 - RNA, 19 nt, Homo sapiens
  misc_RNA (1)...(19): siRNA sense strand
ggaaagcuuuggagauugc

SEQ ID NO: 15596 - RNA, 19 nt, Homo sapiens
  misc_RNA (1)...(19): siRNA sense strand
ggagcaauguuguguuucu

SEQ ID NO: 15597 - RNA, 19 nt, Homo sapiens
  misc_RNA (1)...(19): siRNA sense strand
ugacaaugcagauccuaua

SEQ ID NO: 15598 - RNA, 19 nt, Homo sapiens
  misc_RNA (1)...(19): siRNA sense strand
aaccaacaccuuacgauua

SEQ ID NO: 15599 - RNA, 19 nt, Homo sapiens
  misc_RNA (1)...(19): siRNA sense strand
aaggagcaauguuguguuu

SEQ ID NO: 15600 - RNA, 19 nt, Homo sapiens
  misc_RNA (1)...(19): siRNA sense strand
gaaaucaucugacacaauu

SEQ ID NO: 15601 - RNA, 19 nt, Homo sapiens
  misc_RNA (1)...(19): siRNA sense strand
gcaacaaucugguucauuu

SEQ ID NO: 15602 - RNA, 19 nt, Homo sapiens
  misc_RNA (1)...(19): siRNA sense strand
caaugcagauccuauauua

SEQ ID NO: 15603 - RNA, 19 nt, Homo sapiens
  misc_RNA (1)...(19): siRNA sense strand
gggaauaccugcuuugauu

SEQ ID NO: 15604 - RNA, 19 nt, Homo sapiens
  misc_RNA (1)...(19): siRNA sense strand
gggagacaguguuaaauua

SEQ ID NO: 15605 - RNA, 19 nt, Homo sapiens
  misc_RNA (1)...(19): siRNA sense strand
ccaaguagaugucaacaaa

SEQ ID NO: 15606 - RNA, 19 nt, Homo sapiens
  misc_RNA (1)...(19): siRNA sense strand
gaaauaagaccaaagaaug

SEQ ID NO: 15607 - RNA, 19 nt, Homo sapiens
  misc_RNA (1)...(19): siRNA sense strand
gauaaugaguguccuauug

SEQ ID NO: 15608 - RNA, 19 nt, Homo sapiens
  misc_RNA (1)...(19): siRNA sense strand
gaagggaaauacaaagaaa

SEQ ID NO: 15609 - RNA, 19 nt, Homo sapiens
  misc_RNA (1)...(19): siRNA sense strand
gaagagggcagauuaguuu

SEQ ID NO: 15610 - RNA, 19 nt, Homo sapiens
  misc_RNA (1)...(19): siRNA sense strand
gcaaugagugcauauaaua

SEQ ID NO: 15611 - RNA, 19 nt, Homo sapiens
  misc_RNA (1)...(19): siRNA sense strand
gagaacauauucagcuuaa

SEQ ID NO: 15612 - RNA, 19 nt, Homo sapiens
  misc_RNA (1)...(19): siRNA sense strand
ggacgaagguuuuaauaua

SEQ ID NO: 15613 - RNA, 19 nt, Homo sapiens
  misc_RNA (1)...(19): siRNA sense strand
ugacagagcuagaaacaga

SEQ ID NO: 15614 - RNA, 19 nt, Homo sapiens
  misc_RNA (1)...(19): siRNA sense strand
ggagaaacauuuaauagag

SEQ ID NO: 15615 - RNA, 19 nt, Homo sapiens
  misc_RNA (1)...(19): siRNA sense strand
gagauuggaugauugacua

SEQ ID NO: 15616 - RNA, 19 nt, Homo sapiens
  misc_RNA (1)...(19): siRNA sense strand
guagaagccaggaauauua

SEQ ID NO: 15617 - RNA, 19 nt, Homo sapiens
  misc_RNA (1)...(19): siRNA sense strand
ccagauagaucgaaacaug

SEQ ID NO: 15618 - RNA, 19 nt, Homo sapiens
  misc_RNA (1)...(19): siRNA sense strand
gugaagaucuggacaaugu

SEQ ID NO: 15619 - RNA, 19 nt, Homo sapiens
  misc_RNA (1)...(19): siRNA sense strand
cuauaaaggucucauauga

SEQ ID NO: 15620 - RNA, 19 nt, Homo sapiens
  misc_RNA (1)...(19): siRNA sense strand
gcaaggaagugccucaaau

SEQ ID NO: 15621 - RNA, 19 nt, Homo sapiens
  misc_RNA (1)...(19): siRNA sense strand
gaaaguauaccuggaauga

SEQ ID NO: 15622 - RNA, 19 nt, Homo sapiens
  misc_RNA (1)...(19): siRNA sense strand
ugaagcagaucccacguua

SEQ ID NO: 15623 - RNA, 19 nt, Homo sapiens
  misc_RNA (1)...(19): siRNA sense strand
gcagauuaguuuaccgaua

SEQ ID NO: 15624 - RNA, 19 nt, Homo sapiens
  misc_RNA (1)...(19): siRNA sense strand
gaagaaugcuguaauuggu

SEQ ID NO: 15625 - RNA, 19 nt, Homo sapiens
  misc_RNA (1)...(19): siRNA sense strand
ggaauggaauguuauuugu

SEQ ID NO: 15626 - RNA, 19 nt, Homo sapiens
  misc_RNA (1)...(19): siRNA sense strand
gaaugugccuauaaucuug

SEQ ID NO: 15627 - RNA, 19 nt, Homo sapiens
  misc_RNA (1)...(19): siRNA sense strand
acacaagccuggucaauug

SEQ ID NO: 15628 - RNA, 19 nt, Homo sapiens
  misc_RNA (1)...(19): siRNA sense strand
ccuauaaucuugugaauuc

SEQ ID NO: 15629 - RNA, 19 nt, Homo sapiens
  misc_RNA (1)...(19): siRNA sense strand
gaacauauucagcuuaaug

SEQ ID NO: 15630 - RNA, 19 nt, Homo sapiens
  misc_RNA (1)...(19): siRNA sense strand
caacuacaaucuugcuaaa

SEQ ID NO: 15631 - RNA, 19 nt, Homo sapiens
  misc_RNA (1)...(19): siRNA sense strand
gaaaggacuuccagaacug

SEQ ID NO: 15632 - RNA, 19 nt, Homo sapiens
  misc_RNA (1)...(19): siRNA sense strand
gaaucaggcuacaacauga

SEQ ID NO: 15633 - RNA, 19 nt, Homo sapiens
  misc_RNA (1)...(19): siRNA sense strand
acaagucgcuguuggaauu

SEQ ID NO: 15634 - RNA, 19 nt, Homo sapiens
  misc_RNA (1)...(19): siRNA sense strand
aaacacaggugaaguuaau

SEQ ID NO: 15635 - RNA, 19 nt, Homo sapiens
  misc_RNA (1)...(19): siRNA sense strand
aagaggcuaugaugaauua

SEQ ID NO: 15636 - RNA, 19 nt, Homo sapiens
  misc_RNA (1)...(19): siRNA sense strand
guaaauggauccaggaaca

SEQ ID NO: 15637 - RNA, 19 nt, Homo sapiens
  misc_RNA (1)...(19): siRNA sense strand
ugauucaucugccaaauaa

SEQ ID NO: 15638 - RNA, 19 nt, Homo sapiens
  misc_RNA (1)...(19): siRNA sense strand
gaugagaauucaaucaaug

SEQ ID NO: 15639 - RNA, 19 nt, Homo sapiens
  misc_RNA (1)...(19): siRNA sense strand
gcaacccaauuuauaugua

SEQ ID NO: 15640 - RNA, 19 nt, Homo sapiens
  misc_RNA (1)...(19): siRNA sense strand
acaaagcgguugagcaauu

SEQ ID NO: 15641 - RNA, 19 nt, Homo sapiens
  misc_RNA (1)...(19): siRNA sense strand
gagaagcaucgacucauua

SEQ ID NO: 15642 - RNA, 19 nt, Homo sapiens
  misc_RNA (1)...(19): siRNA sense strand
guaaaugguugcaggcuau

SEQ ID NO: 15643 - RNA, 19 nt, Homo sapiens
  misc_RNA (1)...(19): siRNA sense strand
gaagaacgguuuuacacua

SEQ ID NO: 15644 - RNA, 19 nt, Homo sapiens
  misc_RNA (1)...(19): siRNA sense strand
cagauuaguuuaccgauau

SEQ ID NO: 15645 - RNA, 19 nt, Homo sapiens
  misc_RNA (1)...(19): siRNA sense strand
gagaugauccucuucgaaa

SEQ ID NO: 15646 - RNA, 19 nt, Homo sapiens
  misc_RNA (1)...(19): siRNA sense strand
gcagaaauaagaccaaaga

SEQ ID NO: 15647 - RNA, 19 nt, Homo sapiens
  misc_RNA (1)...(19): siRNA sense strand
ucacaaacguggcauauac

SEQ ID NO: 15648 - RNA, 19 nt, Homo sapiens
  misc_RNA (1)...(19): siRNA sense strand
gcacauggauggauaaaau

SEQ ID NO: 15649 - RNA, 19 nt, Homo sapiens
  misc_RNA (1)...(19): siRNA sense strand
ucacguagcugaguacaug

SEQ ID NO: 15650 - RNA, 19 nt, Homo sapiens
  misc_RNA (1)...(19): siRNA sense strand
gcacaugcccuguuuaugg

SEQ ID NO: 15651 - RNA, 19 nt, Homo sapiens
  misc_RNA (1)...(19): siRNA sense strand
gauccaaaccaacaccuua

SEQ ID NO: 15652 - RNA, 19 nt, Homo sapiens
  misc_RNA (1)...(19): siRNA sense strand
gaaaagcaguuaccgugua

SEQ ID NO: 15653 - RNA, 19 nt, Homo sapiens
  misc_RNA (1)...(19): siRNA sense strand
gauaugaacauugcacuaa

SEQ ID NO: 15654 - RNA, 19 nt, Homo sapiens
  misc_RNA (1)...(19): siRNA sense strand
gaaauugugggccugagua

SEQ ID NO: 15655 - RNA, 19 nt, Homo sapiens
  misc_RNA (1)...(19): siRNA sense strand
caaaagggcccaaugaaua

SEQ ID NO: 15656 - RNA, 19 nt, Homo sapiens
  misc_RNA (1)...(19): siRNA sense strand
caaagcgguugagcaauuu

SEQ ID NO: 15657 - RNA, 19 nt, Homo sapiens
  misc_RNA (1)...(19): siRNA sense strand
gcuaaagguuucaauuauc

SEQ ID NO: 15658 - RNA, 19 nt, Homo sapiens
  misc_RNA (1)...(19): siRNA sense strand
gaucagccauuguuugaag

SEQ ID NO: 15659 - RNA, 19 nt, Homo sapiens
  misc_RNA (1)...(19): siRNA sense strand
ggugguggcugcaguguau

SEQ ID NO: 15660 - RNA, 19 nt, Homo sapiens
  misc_RNA (1)...(19): siRNA sense strand
ggcauggucucauuccuaa

SEQ ID NO: 15661 - RNA, 19 nt, Homo sapiens
  misc_RNA (1)...(19): siRNA sense strand
gcaauguuguguuucucua

SEQ ID NO: 15662 - RNA, 19 nt, Homo sapiens
  misc_RNA (1)...(19): siRNA sense strand
ggucagcccuuaaauaugc

SEQ ID NO: 15663 - RNA, 19 nt, Homo sapiens
  misc_RNA (1)...(19): siRNA sense strand
acaauucaguccucacuuu

SEQ ID NO: 15664 - RNA, 19 nt, Homo sapiens
  misc_RNA (1)...(19): siRNA sense strand
cuagaacuauugagagaaa

SEQ ID NO: 15665 - RNA, 19 nt, Homo sapiens
  misc_RNA (1)...(19): siRNA sense strand
gaaugggaaagcagacuua

SEQ ID NO: 15666 - RNA, 19 nt, Homo sapiens
  misc_RNA (1)...(19): siRNA sense strand
auaaaggucucauaugaug

SEQ ID NO: 15667 - RNA, 19 nt, Homo sapiens
  misc_RNA (1)...(19): siRNA sense strand
gcaguuaccguguauacaa

SEQ ID NO: 15668 - RNA, 19 nt, Homo sapiens
  misc_RNA (1)...(19): siRNA sense strand
gccaaucaguuagaauuaa

SEQ ID NO: 15669 - RNA, 19 nt, Homo sapiens
  misc_RNA (1)...(19): siRNA sense strand
caacagaaagagaagauga

SEQ ID NO: 15670 - RNA, 19 nt, Homo sapiens
  misc_RNA (1)...(19): siRNA sense strand
gaagcuagaacuauugaga

SEQ ID NO: 15671 - RNA, 19 nt, Homo sapiens
  misc_RNA (1)...(19): siRNA sense strand
gagaggcaaugagugcaua

SEQ ID NO: 15672 - RNA, 19 nt, Homo sapiens
  misc_RNA (1)...(19): siRNA sense strand
ccaaugagaaugcccagua

SEQ ID NO: 15673 - RNA, 19 nt, Homo sapiens
  misc_RNA (1)...(19): siRNA sense strand
gaaagugacagagcuagaa

SEQ ID NO: 15674 - RNA, 19 nt, Homo sapiens
  misc_RNA (1)...(19): siRNA sense strand
gcugcaggcuuaccucauu

SEQ ID NO: 15675 - RNA, 19 nt, Homo sapiens
  misc_RNA (1)...(19): siRNA sense strand
ucucuugccuccagauuaa

SEQ ID NO: 15676 - RNA, 19 nt, Homo sapiens
  misc_RNA (1)...(19): siRNA sense strand
ggaugagaauucaaucaau

SEQ ID NO: 15677 - RNA, 19 nt, Homo sapiens
  misc_RNA (1)...(19): siRNA sense strand
agagaaacacgaaaccuua

SEQ ID NO: 15678 - RNA, 19 nt, Homo sapiens
  misc_RNA (1)...(19): siRNA sense strand
cagcagcaauugaagaaug

SEQ ID NO: 15679 - RNA, 19 nt, Homo sapiens
  misc_RNA (1)...(19): siRNA sense strand
gccauuguuugaagucaua

SEQ ID NO: 15680 - RNA, 19 nt, Homo sapiens
  misc_RNA (1)...(19): siRNA sense strand
gagcuacaguuccgauuag

SEQ ID NO: 15681 - RNA, 19 nt, Homo sapiens
  misc_RNA (1)...(19): siRNA sense strand
gcuacucccuugccaauca

SEQ ID NO: 15682 - RNA, 19 nt, Homo sapiens
  misc_RNA (1)...(19): siRNA sense strand
uuccagaacugaccaauga

SEQ ID NO: 15683 - RNA, 19 nt, Homo sapiens
  misc_RNA (1)...(19): siRNA sense strand
agagguauacugcugauua

SEQ ID NO: 15684 - RNA, 19 nt, Homo sapiens
  misc_RNA (1)...(19): siRNA sense strand
gucaguaaccggcuuauuu

SEQ ID NO: 15685 - RNA, 19 nt, Homo sapiens
  misc_RNA (1)...(19): siRNA sense strand
uccaggaaguguuauuaua

SEQ ID NO: 15686 - RNA, 19 nt, Homo sapiens
  misc_RNA (1)...(19): siRNA sense strand
gaaugauguuggacagcua

SEQ ID NO: 15687 - RNA, 19 nt, Homo sapiens
  misc_RNA (1)...(19): siRNA sense strand
ccgauuaggcccaacuuua

SEQ ID NO: 15688 - RNA, 19 nt, Homo sapiens
  misc_RNA (1)...(19): siRNA sense strand
cagaugauaugguuuacug

SEQ ID NO: 15689 - RNA, 19 nt, Homo sapiens
  misc_RNA (1)...(19): siRNA sense strand
ggaaggaugagaauucaau

SEQ ID NO: 15690 - RNA, 19 nt, Homo sapiens
  misc_RNA (1)...(19): siRNA sense strand
gaagacauaguggcaguaa

SEQ ID NO: 15691 - RNA, 19 nt, Homo sapiens
  misc_RNA (1)...(19): siRNA sense strand
aaauuacgcuaugggaaua

SEQ ID NO: 15692 - RNA, 19 nt, Homo sapiens
  misc_RNA (1)...(19): siRNA sense strand
ucaagauccugaauacaga

SEQ ID NO: 15693 - RNA, 19 nt, Homo sapiens
  misc_RNA (1)...(19): siRNA sense strand
caucagauuucagugguuu

SEQ ID NO: 15694 - RNA, 19 nt, Homo sapiens
  misc_RNA (1)...(19): siRNA sense strand
gaauaccugcuuugauuga

SEQ ID NO: 15695 - RNA, 19 nt, Homo sapiens
  misc_RNA (1)...(19): siRNA sense strand
ggaaagcuuuggagauugc

SEQ ID NO: 15696 - RNA, 19 nt, Homo sapiens
  misc_RNA (1)...(19): siRNA sense strand
ggagcaauguuguguuucu

SEQ ID NO: 15697 - RNA, 19 nt, Homo sapiens
  misc_RNA (1)...(19): siRNA sense strand
ugacaaugcagauccuaua

SEQ ID NO: 15698 - RNA, 19 nt, Homo sapiens
  misc_RNA (1)...(19): siRNA sense strand
aaccaacaccuuacgauua

SEQ ID NO: 15699 - RNA, 19 nt, Homo sapiens
  misc_RNA (1)...(19): siRNA sense strand
aaggagcaauguuguguuu

SEQ ID NO: 15700 - RNA, 19 nt, Homo sapiens
  misc_RNA (1)...(19): siRNA sense strand
gaaaucaucugacacaauu

SEQ ID NO: 15701 - RNA, 19 nt, Homo sapiens
  misc_RNA (1)...(19): siRNA sense strand
gcaacaaucugguucauuu

SEQ ID NO: 15702 - RNA, 19 nt, Homo sapiens
  misc_RNA (1)...(19): siRNA sense strand
caaugcagauccuauauua

SEQ ID NO: 15703 - RNA, 19 nt, Homo sapiens
  misc_RNA (1)...(19): siRNA sense strand
gggaauaccugcuuugauu

SEQ ID NO: 15704 - RNA, 19 nt, Homo sapiens
  misc_RNA (1)...(19): siRNA sense strand
gggagacaguguuaaauua

SEQ ID NO: 15705 - RNA, 19 nt, Homo sapiens
  misc_RNA (1)...(19): siRNA sense strand
ccaaguagaugucaacaaa

SEQ ID NO: 15706 - RNA, 19 nt, Homo sapiens
  misc_RNA (1)...(19): siRNA sense strand
gaaauaagaccaaagaaug

SEQ ID NO: 15707 - RNA, 19 nt, Homo sapiens
  misc_RNA (1)...(19): siRNA sense strand
gauaaugaguguccuauug

SEQ ID NO: 15708 - RNA, 19 nt, Homo sapiens
  misc_RNA (1)...(19): siRNA sense strand
gaagggaaauacaaagaaa

SEQ ID NO: 15709 - RNA, 19 nt, Homo sapiens
  misc_RNA (1)...(19): siRNA sense strand
gaagagggcagauuaguuu

SEQ ID NO: 15710 - RNA, 19 nt, Homo sapiens
  misc_RNA (1)...(19): siRNA sense strand
gcaaugagugcauauaaua

SEQ ID NO: 15711 - RNA, 19 nt, Homo sapiens
  misc_RNA (1)...(19): siRNA sense strand
gagaacauauucagcuuaa

SEQ ID NO: 15712 - RNA, 19 nt, Homo sapiens
  misc_RNA (1)...(19): siRNA sense strand
ggacgaagguuuuaauaua

SEQ ID NO: 15713 - RNA, 19 nt, Homo sapiens
  misc_RNA (1)...(19): siRNA sense strand
ugacagagcuagaaacaga

SEQ ID NO: 15714 - RNA, 19 nt, Homo sapiens
  misc_RNA (1)...(19): siRNA sense strand
ggagaaacauuuaauagag

SEQ ID NO: 15715 - RNA, 19 nt, Homo sapiens
  misc_RNA (1)...(19): siRNA sense strand
gagauuggaugauugacua

SEQ ID NO: 15716 - RNA, 19 nt, Homo sapiens
  misc_RNA (1)...(19): siRNA sense strand
guagaagccaggaauauua

SEQ ID NO: 15717 - RNA, 19 nt, Homo sapiens
  misc_RNA (1)...(19): siRNA sense strand
ccagauagaucgaaacaug

SEQ ID NO: 15718 - RNA, 19 nt, Homo sapiens
  misc_RNA (1)...(19): siRNA sense strand
gugaagaucuggacaaugu

SEQ ID NO: 15719 - RNA, 19 nt, Homo sapiens
  misc_RNA (1)...(19): siRNA sense strand
cuauaaaggucucauauga

SEQ ID NO: 15720 - RNA, 19 nt, Homo sapiens
  misc_RNA (1)...(19): siRNA sense strand
gcaaggaagugccucaaau

SEQ ID NO: 15721 - RNA, 19 nt, Homo sapiens
  misc_RNA (1)...(19): siRNA sense strand
gaaaguauaccuggaauga

SEQ ID NO: 15722 - RNA, 19 nt, Homo sapiens
  misc_RNA (1)...(19): siRNA sense strand
ugaagcagaucccacguua

SEQ ID NO: 15723 - RNA, 19 nt, Homo sapiens
  misc_RNA (1)...(19): siRNA sense strand
gcagauuaguuuaccgaua

SEQ ID NO: 15724 - RNA, 19 nt, Homo sapiens
  misc_RNA (1)...(19): siRNA sense strand
gaagaaugcuguaauuggu

SEQ ID NO: 15725 - RNA, 19 nt, Homo sapiens
  misc_RNA (1)...(19): siRNA sense strand
ggaauggaauguuauuugu

SEQ ID NO: 15726 - RNA, 19 nt, Homo sapiens
  misc_RNA (1)...(19): siRNA sense strand
gaaugugccuauaaucuug

SEQ ID NO: 15727 - RNA, 19 nt, Homo sapiens
  misc_RNA (1)...(19): siRNA sense strand
acacaagccuggucaauug

SEQ ID NO: 15728 - RNA, 19 nt, Homo sapiens
  misc_RNA (1)...(19): siRNA sense strand
ccuauaaucuugugaauuc

SEQ ID NO: 15729 - RNA, 19 nt, Homo sapiens
  misc_RNA (1)...(19): siRNA sense strand
gaacauauucagcuuaaug

SEQ ID NO: 15730 - RNA, 19 nt, Homo sapiens
  misc_RNA (1)...(19): siRNA sense strand
caacuacaaucuugcuaaa

SEQ ID NO: 15731 - RNA, 19 nt, Homo sapiens
  misc_RNA (1)...(19): siRNA sense strand
gaaaggacuuccagaacug

SEQ ID NO: 15732 - RNA, 19 nt, Homo sapiens
  misc_RNA (1)...(19): siRNA sense strand
gaaucaggcuacaacauga

SEQ ID NO: 15733 - RNA, 19 nt, Homo sapiens
  misc_RNA (1)...(19): siRNA sense strand
acaagucgcuguuggaauu

SEQ ID NO: 15734 - RNA, 19 nt, Homo sapiens
  misc_RNA (1)...(19): siRNA sense strand
aaacacaggugaaguuaau

SEQ ID NO: 15735 - RNA, 19 nt, Homo sapiens
  misc_RNA (1)...(19): siRNA sense strand
aagaggcuaugaugaauua

SEQ ID NO: 15736 - RNA, 19 nt, Homo sapiens
  misc_RNA (1)...(19): siRNA sense strand
guaaauggauccaggaaca

SEQ ID NO: 15737 - RNA, 19 nt, Homo sapiens
  misc_RNA (1)...(19): siRNA sense strand
ugauucaucugccaaauaa

SEQ ID NO: 15738 - RNA, 19 nt, Homo sapiens
  misc_RNA (1)...(19): siRNA sense strand
gaugagaauucaaucaaug

SEQ ID NO: 15739 - RNA, 19 nt, Homo sapiens
  misc_RNA (1)...(19): siRNA sense strand
gcaacccaauuuauaugua

SEQ ID NO: 15740 - RNA, 19 nt, Homo sapiens
  misc_RNA (1)...(19): siRNA sense strand
acaaagcgguugagcaauu

SEQ ID NO: 15741 - RNA, 19 nt, Homo sapiens
  misc_RNA (1)...(19): siRNA sense strand
gagaagcaucgacucauua

SEQ ID NO: 15742 - RNA, 19 nt, Homo sapiens
  misc_RNA (1)...(19): siRNA sense strand
guaaaugguugcaggcuau

SEQ ID NO: 15743 - RNA, 19 nt, Homo sapiens
  misc_RNA (1)...(19): siRNA sense strand
gaagaacgguuuuacacua

SEQ ID NO: 15744 - RNA, 19 nt, Homo sapiens
  misc_RNA (1)...(19): siRNA sense strand
cagauuaguuuaccgauau

SEQ ID NO: 15745 - RNA, 19 nt, Homo sapiens
  misc_RNA (1)...(19): siRNA sense strand
gagaugauccucuucgaaa

SEQ ID NO: 15746 - RNA, 19 nt, Homo sapiens
  misc_RNA (1)...(19): siRNA sense strand
gcagaaauaagaccaaaga

SEQ ID NO: 15747 - RNA, 19 nt, Homo sapiens
  misc_RNA (1)...(19): siRNA sense strand
ucacaaacguggcauauac

SEQ ID NO: 15748 - RNA, 19 nt, Homo sapiens
  misc_RNA (1)...(19): siRNA sense strand
gcacauggauggauaaaau

SEQ ID NO: 15749 - RNA, 19 nt, Homo sapiens
  misc_RNA (1)...(19): siRNA sense strand
ucacguagcugaguacaug

SEQ ID NO: 15750 - RNA, 19 nt, Homo sapiens
  misc_RNA (1)...(19): siRNA sense strand
gcacaugcccuguuuaugg

SEQ ID NO: 15751 - RNA, 19 nt, Homo sapiens
  misc_RNA (1)...(19): siRNA sense strand
gauccaaaccaacaccuua

SEQ ID NO: 15752 - RNA, 19 nt, Homo sapiens
  misc_RNA (1)...(19): siRNA sense strand
gaaaagcaguuaccgugua

SEQ ID NO: 15753 - RNA, 19 nt, Homo sapiens
  misc_RNA (1)...(19): siRNA sense strand
gauaugaacauugcacuaa

SEQ ID NO: 15754 - RNA, 19 nt, Homo sapiens
  misc_RNA (1)...(19): siRNA sense strand
gaaauugugggccugagua

SEQ ID NO: 15755 - RNA, 19 nt, Homo sapiens
  misc_RNA (1)...(19): siRNA sense strand
caaaagggcccaaugaaua

SEQ ID NO: 15756 - RNA, 19 nt, Homo sapiens
  misc_RNA (1)...(19): siRNA sense strand
caaagcgguugagcaauuu

SEQ ID NO: 15757 - RNA, 19 nt, Homo sapiens
  misc_RNA (1)...(19): siRNA sense strand
gcuaaagguuucaauuauc

SEQ ID NO: 15758 - RNA, 19 nt, Homo sapiens
  misc_RNA (1)...(19): siRNA sense strand
gaucagccauuguuugaag

SEQ ID NO: 15759 - RNA, 19 nt, Homo sapiens
  misc_RNA (1)...(19): siRNA sense strand
ggugguggcugcaguguau

SEQ ID NO: 15760 - RNA, 19 nt, Homo sapiens
  misc_RNA (1)...(19): siRNA sense strand
ggcauggucucauuccuaa

SEQ ID NO: 15761 - RNA, 19 nt, Homo sapiens
  misc_RNA (1)...(19): siRNA sense strand
gcaauguuguguuucucua

SEQ ID NO: 15762 - RNA, 19 nt, Homo sapiens
  misc_RNA (1)...(19): siRNA sense strand
ggucagcccuuaaauaugc

SEQ ID NO: 15763 - RNA, 19 nt, Homo sapiens
  misc_RNA (1)...(19): siRNA sense strand
acaauucaguccucacuuu

SEQ ID NO: 15764 - RNA, 19 nt, Homo sapiens
  misc_RNA (1)...(19): siRNA sense strand
cuagaacuauugagagaaa

SEQ ID NO: 15765 - RNA, 19 nt, Homo sapiens
  misc_RNA (1)...(19): siRNA sense strand
gaaugggaaagcagacuua

SEQ ID NO: 15766 - RNA, 19 nt, Homo sapiens
  misc_RNA (1)...(19): siRNA sense strand
auaaaggucucauaugaug

SEQ ID NO: 15767 - RNA, 19 nt, Homo sapiens
  misc_RNA (1)...(19): siRNA sense strand
gcaguuaccguguauacaa

SEQ ID NO: 15768 - RNA, 19 nt, Homo sapiens
  misc_RNA (1)...(19): siRNA sense strand
gccaaucaguuagaauuaa

SEQ ID NO: 15769 - RNA, 19 nt, Homo sapiens
  misc_RNA (1)...(19): siRNA sense strand
caacagaaagagaagauga

SEQ ID NO: 15770 - RNA, 19 nt, Homo sapiens
  misc_RNA (1)...(19): siRNA sense strand
gaagcuagaacuauugaga

SEQ ID NO: 15771 - RNA, 19 nt, Homo sapiens
  misc_RNA (1)...(19): siRNA sense strand
gagaggcaaugagugcaua

SEQ ID NO: 15772 - RNA, 19 nt, Homo sapiens
  misc_RNA (1)...(19): siRNA sense strand
ccaaugagaaugcccagua

SEQ ID NO: 15773 - RNA, 19 nt, Homo sapiens
  misc_RNA (1)...(19): siRNA sense strand
gaaagugacagagcuagaa

SEQ ID NO: 15774 - RNA, 19 nt, Homo sapiens
  misc_RNA (1)...(19): siRNA sense strand
gcugcaggcuuaccucauu

SEQ ID NO: 15775 - RNA, 19 nt, Homo sapiens
  misc_RNA (1)...(19): siRNA sense strand
ucucuugccuccagauuaa

SEQ ID NO: 15776 - RNA, 19 nt, Homo sapiens
  misc_RNA (1)...(19): siRNA sense strand
ggaugagaauucaaucaau

SEQ ID NO: 15777 - RNA, 19 nt, Homo sapiens
  misc_RNA (1)...(19): siRNA sense strand
agagaaacacgaaaccuua

SEQ ID NO: 15778 - RNA, 19 nt, Homo sapiens
  misc_RNA (1)...(19): siRNA sense strand
cagcagcaauugaagaaug

SEQ ID NO: 15779 - RNA, 19 nt, Homo sapiens
  misc_RNA (1)...(19): siRNA sense strand
gccauuguuugaagucaua

SEQ ID NO: 15780 - RNA, 19 nt, Homo sapiens
  misc_RNA (1)...(19): siRNA sense strand
gagcuacaguuccgauuag

SEQ ID NO: 15781 - RNA, 19 nt, Homo sapiens
  misc_RNA (1)...(19): siRNA sense strand
gcuacucccuugccaauca

SEQ ID NO: 15782 - RNA, 19 nt, Homo sapiens
  misc_RNA (1)...(19): siRNA sense strand
uuccagaacugaccaauga

SEQ ID NO: 15783 - RNA, 19 nt, Homo sapiens
  misc_RNA (1)...(19): siRNA sense strand
agagguauacugcugauua

SEQ ID NO: 15784 - RNA, 19 nt, Homo sapiens
  misc_RNA (1)...(19): siRNA sense strand
gucaguaaccggcuuauuu

SEQ ID NO: 15785 - RNA, 19 nt, Homo sapiens
  misc_RNA (1)...(19): siRNA sense strand
uccaggaaguguuauuaua

SEQ ID NO: 15786 - RNA, 19 nt, Homo sapiens
  misc_RNA (1)...(19): siRNA sense strand
gaaugauguuggacagcua

SEQ ID NO: 15787 - RNA, 19 nt, Homo sapiens
  misc_RNA (1)...(19): siRNA sense strand
ccgauuaggcccaacuuua

SEQ ID NO: 15788 - RNA, 19 nt, Homo sapiens
  misc_RNA (1)...(19): siRNA sense strand
cagaugauaugguuuacug

SEQ ID NO: 15789 - RNA, 19 nt, Homo sapiens
  misc_RNA (1)...(19): siRNA sense strand
ggaaggaugagaauucaau

SEQ ID NO: 15790 - RNA, 19 nt, Homo sapiens
  misc_RNA (1)...(19): siRNA sense strand
gaagacauaguggcaguaa

SEQ ID NO: 15791 - RNA, 19 nt, Homo sapiens
  misc_RNA (1)...(19): siRNA sense strand
aaauuacgcuaugggaaua

SEQ ID NO: 15792 - RNA, 19 nt, Homo sapiens
  misc_RNA (1)...(19): siRNA sense strand
ucaagauccugaauacaga

SEQ ID NO: 15793 - RNA, 19 nt, Homo sapiens
  misc_RNA (1)...(19): siRNA sense strand
caucagauuucagugguuu

SEQ ID NO: 15794 - RNA, 19 nt, Homo sapiens
  misc_RNA (1)...(19): siRNA sense strand
gaauaccugcuuugauuga

SEQ ID NO: 15795 - RNA, 19 nt, Homo sapiens
  misc_RNA (1)...(19): siRNA sense strand
ggaaagcuuuggagauugc

SEQ ID NO: 15796 - RNA, 19 nt, Homo sapiens
  misc_RNA (1)...(19): siRNA sense strand
ggagcaauguuguguuucu

SEQ ID NO: 15797 - RNA, 19 nt, Homo sapiens
  misc_RNA (1)...(19): siRNA sense strand
ugacaaugcagauccuaua

SEQ ID NO: 15798 - RNA, 19 nt, Homo sapiens
  misc_RNA (1)...(19): siRNA sense strand
aaccaacaccuuacgauua

SEQ ID NO: 15799 - RNA, 19 nt, Homo sapiens
  misc_RNA (1)...(19): siRNA sense strand
aaggagcaauguuguguuu

SEQ ID NO: 15800 - RNA, 19 nt, Homo sapiens
  misc_RNA (1)...(19): siRNA sense strand
gaaaucaucugacacaauu

SEQ ID NO: 15801 - RNA, 19 nt, Homo sapiens
  misc_RNA (1)...(19): siRNA sense strand
gcaacaaucugguucauuu

SEQ ID NO: 15802 - RNA, 19 nt, Homo sapiens
  misc_RNA (1)...(19): siRNA sense strand
caaugcagauccuauauua

SEQ ID NO: 15803 - RNA, 19 nt, Homo sapiens
  misc_RNA (1)...(19): siRNA sense strand
gggaauaccugcuuugauu

SEQ ID NO: 15804 - RNA, 19 nt, Homo sapiens
  misc_RNA (1)...(19): siRNA sense strand
gggagacaguguuaaauua

SEQ ID NO: 15805 - RNA, 19 nt, Homo sapiens
  misc_RNA (1)...(19): siRNA sense strand
ccaaguagaugucaacaaa

SEQ ID NO: 15806 - RNA, 19 nt, Homo sapiens
  misc_RNA (1)...(19): siRNA sense strand
gaaauaagaccaaagaaug

SEQ ID NO: 15807 - RNA, 19 nt, Homo sapiens
  misc_RNA (1)...(19): siRNA sense strand
gauaaugaguguccuauug

SEQ ID NO: 15808 - RNA, 19 nt, Homo sapiens
  misc_RNA (1)...(19): siRNA sense strand
gaagggaaauacaaagaaa

SEQ ID NO: 15809 - RNA, 19 nt, Homo sapiens
  misc_RNA (1)...(19): siRNA sense strand
gaagagggcagauuaguuu

SEQ ID NO: 15810 - RNA, 19 nt, Homo sapiens
  misc_RNA (1)...(19): siRNA sense strand
gcaaugagugcauauaaua

SEQ ID NO: 15811 - RNA, 19 nt, Homo sapiens
  misc_RNA (1)...(19): siRNA sense strand
gagaacauauucagcuuaa

SEQ ID NO: 15812 - RNA, 19 nt, Homo sapiens
  misc_RNA (1)...(19): siRNA sense strand
ggacgaagguuuuaauaua

SEQ ID NO: 15813 - RNA, 19 nt, Homo sapiens
  misc_RNA (1)...(19): siRNA sense strand
ugacagagcuagaaacaga

SEQ ID NO: 15814 - RNA, 19 nt, Homo sapiens
  misc_RNA (1)...(19): siRNA sense strand
ggagaaacauuuaauagag

SEQ ID NO: 15815 - RNA, 19 nt, Homo sapiens
  misc_RNA (1)...(19): siRNA sense strand
gagauuggaugauugacua

SEQ ID NO: 15816 - RNA, 19 nt, Homo sapiens
  misc_RNA (1)...(19): siRNA sense strand
guagaagccaggaauauua

SEQ ID NO: 15817 - RNA, 19 nt, Homo sapiens
  misc_RNA (1)...(19): siRNA sense strand
ccagauagaucgaaacaug

SEQ ID NO: 15818 - RNA, 19 nt, Homo sapiens
  misc_RNA (1)...(19): siRNA sense strand
gugaagaucuggacaaugu

SEQ ID NO: 15819 - RNA, 19 nt, Homo sapiens
  misc_RNA (1)...(19): siRNA sense strand
cuauaaaggucucauauga

SEQ ID NO: 15820 - RNA, 19 nt, Homo sapiens
  misc_RNA (1)...(19): siRNA sense strand
gcaaggaagugccucaaau

SEQ ID NO: 15821 - RNA, 19 nt, Homo sapiens
  misc_RNA (1)...(19): siRNA sense strand
gaaaguauaccuggaauga

SEQ ID NO: 15822 - RNA, 19 nt, Homo sapiens
  misc_RNA (1)...(19): siRNA sense strand
ugaagcagaucccacguua

SEQ ID NO: 15823 - RNA, 19 nt, Homo sapiens
  misc_RNA (1)...(19): siRNA sense strand
gcagauuaguuuaccgaua

SEQ ID NO: 15824 - RNA, 19 nt, Homo sapiens
  misc_RNA (1)...(19): siRNA sense strand
gaagaaugcuguaauuggu

SEQ ID NO: 15825 - RNA, 19 nt, Homo sapiens
  misc_RNA (1)...(19): siRNA sense strand
ggaauggaauguuauuugu

SEQ ID NO: 15826 - RNA, 19 nt, Homo sapiens
  misc_RNA (1)...(19): siRNA sense strand
gaaugugccuauaaucuug

SEQ ID NO: 15827 - RNA, 19 nt, Homo sapiens
  misc_RNA (1)...(19): siRNA sense strand
acacaagccuggucaauug

SEQ ID NO: 15828 - RNA, 19 nt, Homo sapiens
  misc_RNA (1)...(19): siRNA sense strand
ccuauaaucuugugaauuc

SEQ ID NO: 15829 - RNA, 19 nt, Homo sapiens
  misc_RNA (1)...(19): siRNA sense strand
gaacauauucagcuuaaug

SEQ ID NO: 15830 - RNA, 19 nt, Homo sapiens
  misc_RNA (1)...(19): siRNA sense strand
caacuacaaucuugcuaaa

SEQ ID NO: 15831 - RNA, 19 nt, Homo sapiens
  misc_RNA (1)...(19): siRNA sense strand
gaaaggacuuccagaacug

SEQ ID NO: 15832 - RNA, 19 nt, Homo sapiens
  misc_RNA (1)...(19): siRNA sense strand
gaaucaggcuacaacauga

SEQ ID NO: 15833 - RNA, 19 nt, Homo sapiens
  misc_RNA (1)...(19): siRNA sense strand
acaagucgcuguuggaauu

SEQ ID NO: 15834 - RNA, 19 nt, Homo sapiens
  misc_RNA (1)...(19): siRNA sense strand
aaacacaggugaaguuaau

SEQ ID NO: 15835 - RNA, 19 nt, Homo sapiens
  misc_RNA (1)...(19): siRNA sense strand
aagaggcuaugaugaauua

SEQ ID NO: 15836 - RNA, 19 nt, Homo sapiens
  misc_RNA (1)...(19): siRNA sense strand
guaaauggauccaggaaca

SEQ ID NO: 15837 - RNA, 19 nt, Homo sapiens
  misc_RNA (1)...(19): siRNA sense strand
ugauucaucugccaaauaa

SEQ ID NO: 15838 - RNA, 19 nt, Homo sapiens
  misc_RNA (1)...(19): siRNA sense strand
gaugagaauucaaucaaug

SEQ ID NO: 15839 - RNA, 19 nt, Homo sapiens
  misc_RNA (1)...(19): siRNA sense strand
gcaacccaauuuauaugua

SEQ ID NO: 15840 - RNA, 19 nt, Homo sapiens
  misc_RNA (1)...(19): siRNA sense strand
acaaagcgguugagcaauu

SEQ ID NO: 15841 - RNA, 19 nt, Homo sapiens
  misc_RNA (1)...(19): siRNA sense strand
gagaagcaucgacucauua

SEQ ID NO: 15842 - RNA, 19 nt, Homo sapiens
  misc_RNA (1)...(19): siRNA sense strand
guaaaugguugcaggcuau

SEQ ID NO: 15843 - RNA, 19 nt, Homo sapiens
  misc_RNA (1)...(19): siRNA sense strand
gaagaacgguuuuacacua

SEQ ID NO: 15844 - RNA, 19 nt, Homo sapiens
  misc_RNA (1)...(19): siRNA sense strand
cagauuaguuuaccgauau

SEQ ID NO: 15845 - RNA, 19 nt, Homo sapiens
  misc_RNA (1)...(19): siRNA sense strand
gagaugauccucuucgaaa

SEQ ID NO: 15846 - RNA, 19 nt, Homo sapiens
  misc_RNA (1)...(19): siRNA sense strand
gcagaaauaagaccaaaga

SEQ ID NO: 15847 - RNA, 19 nt, Homo sapiens
  misc_RNA (1)...(19): siRNA sense strand
ucacaaacguggcauauac

SEQ ID NO: 15848 - RNA, 19 nt, Homo sapiens
  misc_RNA (1)...(19): siRNA sense strand
gcacauggauggauaaaau

SEQ ID NO: 15849 - RNA, 19 nt, Homo sapiens
  misc_RNA (1)...(19): siRNA sense strand
ucacguagcugaguacaug

SEQ ID NO: 15850 - RNA, 19 nt, Homo sapiens
  misc_RNA (1)...(19): siRNA sense strand
gcacaugcccuguuuaugg

SEQ ID NO: 15851 - RNA, 19 nt, Homo sapiens
  misc_RNA (1)...(19): siRNA sense strand
gauccaaaccaacaccuua

SEQ ID NO: 15852 - RNA, 19 nt, Homo sapiens
  misc_RNA (1)...(19): siRNA sense strand
gaaaagcaguuaccgugua

SEQ ID NO: 15853 - RNA, 19 nt, Homo sapiens
  misc_RNA (1)...(19): siRNA sense strand
gauaugaacauugcacuaa

SEQ ID NO: 15854 - RNA, 19 nt, Homo sapiens
  misc_RNA (1)...(19): siRNA sense strand
gaaauugugggccugagua

SEQ ID NO: 15855 - RNA, 19 nt, Homo sapiens
  misc_RNA (1)...(19): siRNA sense strand
caaaagggcccaaugaaua

SEQ ID NO: 15856 - RNA, 19 nt, Homo sapiens
  misc_RNA (1)...(19): siRNA sense strand
caaagcgguugagcaauuu

SEQ ID NO: 15857 - RNA, 19 nt, Homo sapiens
  misc_RNA (1)...(19): siRNA sense strand
gcuaaagguuucaauuauc

SEQ ID NO: 15858 - RNA, 19 nt, Homo sapiens
  misc_RNA (1)...(19): siRNA sense strand
gaucagccauuguuugaag

SEQ ID NO: 15859 - RNA, 19 nt, Homo sapiens
  misc_RNA (1)...(19): siRNA sense strand
ggugguggcugcaguguau

SEQ ID NO: 15860 - RNA, 19 nt, Homo sapiens
  misc_RNA (1)...(19): siRNA sense strand
ggcauggucucauuccuaa

SEQ ID NO: 15861 - RNA, 19 nt, Homo sapiens
  misc_RNA (1)...(19): siRNA sense strand
gcaauguuguguuucucua

SEQ ID NO: 15862 - RNA, 19 nt, Homo sapiens
  misc_RNA (1)...(19): siRNA sense strand
ggucagcccuuaaauaugc

SEQ ID NO: 15863 - RNA, 19 nt, Homo sapiens
  misc_RNA (1)...(19): siRNA sense strand
acaauucaguccucacuuu

SEQ ID NO: 15864 - RNA, 19 nt, Homo sapiens
  misc_RNA (1)...(19): siRNA sense strand
cuagaacuauugagagaaa

SEQ ID NO: 15865 - RNA, 19 nt, Homo sapiens
  misc_RNA (1)...(19): siRNA sense strand
gaaugggaaagcagacuua

SEQ ID NO: 15866 - RNA, 19 nt, Homo sapiens
  misc_RNA (1)...(19): siRNA sense strand
auaaaggucucauaugaug

SEQ ID NO: 15867 - RNA, 19 nt, Homo sapiens
  misc_RNA (1)...(19): siRNA sense strand
gcaguuaccguguauacaa

SEQ ID NO: 15868 - RNA, 19 nt, Homo sapiens
  misc_RNA (1)...(19): siRNA sense strand
gccaaucaguuagaauuaa

SEQ ID NO: 15869 - RNA, 19 nt, Homo sapiens
  misc_RNA (1)...(19): siRNA sense strand
caacagaaagagaagauga

SEQ ID NO: 15870 - RNA, 19 nt, Homo sapiens
  misc_RNA (1)...(19): siRNA sense strand
gaagcuagaacuauugaga

SEQ ID NO: 15871 - RNA, 19 nt, Homo sapiens
  misc_RNA (1)...(19): siRNA sense strand
gagaggcaaugagugcaua

SEQ ID NO: 15872 - RNA, 19 nt, Homo sapiens
  misc_RNA (1)...(19): siRNA sense strand
ccaaugagaaugcccagua

SEQ ID NO: 15873 - RNA, 19 nt, Homo sapiens
  misc_RNA (1)...(19): siRNA sense strand
gaaagugacagagcuagaa

SEQ ID NO: 15874 - RNA, 19 nt, Homo sapiens
  misc_RNA (1)...(19): siRNA sense strand
gcugcaggcuuaccucauu

SEQ ID NO: 15875 - RNA, 19 nt, Homo sapiens
  misc_RNA (1)...(19): siRNA sense strand
ucucuugccuccagauuaa

SEQ ID NO: 15876 - RNA, 19 nt, Homo sapiens
  misc_RNA (1)...(19): siRNA sense strand
ggaugagaauucaaucaau

SEQ ID NO: 15877 - RNA, 19 nt, Homo sapiens
  misc_RNA (1)...(19): siRNA sense strand
agagaaacacgaaaccuua

SEQ ID NO: 15878 - RNA, 19 nt, Homo sapiens
  misc_RNA (1)...(19): siRNA sense strand
cagcagcaauugaagaaug

SEQ ID NO: 15879 - RNA, 19 nt, Homo sapiens
  misc_RNA (1)...(19): siRNA sense strand
gccauuguuugaagucaua

SEQ ID NO: 15880 - RNA, 19 nt, Homo sapiens
  misc_RNA (1)...(19): siRNA sense strand
gagcuacaguuccgauuag

SEQ ID NO: 15881 - RNA, 19 nt, Homo sapiens
  misc_RNA (1)...(19): siRNA sense strand
gcuacucccuugccaauca

SEQ ID NO: 15882 - RNA, 19 nt, Homo sapiens
  misc_RNA (1)...(19): siRNA sense strand
uuccagaacugaccaauga

SEQ ID NO: 15883 - RNA, 19 nt, Homo sapiens
  misc_RNA (1)...(19): siRNA sense strand
agagguauacugcugauua

SEQ ID NO: 15884 - RNA, 19 nt, Homo sapiens
  misc_RNA (1)...(19): siRNA sense strand
gucaguaaccggcuuauuu

SEQ ID NO: 15885 - RNA, 19 nt, Homo sapiens
  misc_RNA (1)...(19): siRNA sense strand
uccaggaaguguuauuaua

SEQ ID NO: 15886 - RNA, 19 nt, Homo sapiens
  misc_RNA (1)...(19): siRNA sense strand
gaaugauguuggacagcua

SEQ ID NO: 15887 - RNA, 19 nt, Homo sapiens
  misc_RNA (1)...(19): siRNA sense strand
ccgauuaggcccaacuuua

SEQ ID NO: 15888 - RNA, 19 nt, Homo sapiens
  misc_RNA (1)...(19): siRNA sense strand
cagaugauaugguuuacug

SEQ ID NO: 15889 - RNA, 19 nt, Homo sapiens
  misc_RNA (1)...(19): siRNA sense strand
ggaaggaugagaauucaau

SEQ ID NO: 15890 - RNA, 19 nt, Homo sapiens
  misc_RNA (1)...(19): siRNA sense strand
gaagacauaguggcaguaa

SEQ ID NO: 15891 - RNA, 19 nt, Homo sapiens
  misc_RNA (1)...(19): siRNA sense strand
aaauuacgcuaugggaaua

SEQ ID NO: 15892 - RNA, 19 nt, Homo sapiens
  misc_RNA (1)...(19): siRNA sense strand
ucaagauccugaauacaga

SEQ ID NO: 15893 - RNA, 19 nt, Homo sapiens
  misc_RNA (1)...(19): siRNA sense strand
caucagauuucagugguuu

SEQ ID NO: 15894 - RNA, 19 nt, Homo sapiens
  misc_RNA (1)...(19): siRNA sense strand
gaauaccugcuuugauuga

SEQ ID NO: 15895 - RNA, 19 nt, Homo sapiens
  misc_RNA (1)...(19): siRNA sense strand
ggaaagcuuuggagauugc

SEQ ID NO: 15896 - RNA, 19 nt, Homo sapiens
  misc_RNA (1)...(19): siRNA sense strand
ggagcaauguuguguuucu

SEQ ID NO: 15897 - RNA, 19 nt, Homo sapiens
  misc_RNA (1)...(19): siRNA sense strand
ugacaaugcagauccuaua

SEQ ID NO: 15898 - RNA, 19 nt, Homo sapiens
  misc_RNA (1)...(19): siRNA sense strand
aaccaacaccuuacgauua

SEQ ID NO: 15899 - RNA, 19 nt, Homo sapiens
  misc_RNA (1)...(19): siRNA sense strand
aaggagcaauguuguguuu

SEQ ID NO: 15900 - RNA, 19 nt, Homo sapiens
  misc_RNA (1)...(19): siRNA sense strand
cuucauaccugcuccaauu

SEQ ID NO: 15901 - RNA, 19 nt, Homo sapiens
  misc_RNA (1)...(19): siRNA sense strand
ggagugacauccaggacaa

SEQ ID NO: 15902 - RNA, 19 nt, Homo sapiens
  misc_RNA (1)...(19): siRNA sense strand
gaaccgcccauuccuguuu

SEQ ID NO: 15903 - RNA, 19 nt, Homo sapiens
  misc_RNA (1)...(19): siRNA sense strand
uauauggcaugcacaguga

SEQ ID NO: 15904 - RNA, 19 nt, Homo sapiens
  misc_RNA (1)...(19): siRNA sense strand
cugagaagauugacagguu

SEQ ID NO: 15905 - RNA, 19 nt, Homo sapiens
  misc_RNA (1)...(19): siRNA sense strand
caacagcaccucagugucu

SEQ ID NO: 15906 - RNA, 19 nt, Homo sapiens
  misc_RNA (1)...(19): siRNA sense strand
ggauguugcugcugagaag

SEQ ID NO: 15907 - RNA, 19 nt, Homo sapiens
  misc_RNA (1)...(19): siRNA sense strand
acaaugagaguaccuguga

SEQ ID NO: 15908 - RNA, 19 nt, Homo sapiens
  misc_RNA (1)...(19): siRNA sense strand
gacaacagcaccucagugu

SEQ ID NO: 15909 - RNA, 19 nt, Homo sapiens
  misc_RNA (1)...(19): siRNA sense strand
ggucucacuuuccagcaaa

SEQ ID NO: 15910 - RNA, 19 nt, Homo sapiens
  misc_RNA (1)...(19): siRNA sense strand
ccacagagucuacccaaca

SEQ ID NO: 15911 - RNA, 19 nt, Homo sapiens
  misc_RNA (1)...(19): siRNA sense strand
gagucuacccaacagcuua

SEQ ID NO: 15912 - RNA, 19 nt, Homo sapiens
  misc_RNA (1)...(19): siRNA sense strand
gcuagucgcugcaaaacuu

SEQ ID NO: 15913 - RNA, 19 nt, Homo sapiens
  misc_RNA (1)...(19): siRNA sense strand
ggacagcacccuggcuuuc

SEQ ID NO: 15914 - RNA, 19 nt, Homo sapiens
  misc_RNA (1)...(19): siRNA sense strand
gguggagggucucacuuuc

SEQ ID NO: 15915 - RNA, 19 nt, Homo sapiens
  misc_RNA (1)...(19): siRNA sense strand
caacaccuacguccacuuc

SEQ ID NO: 15916 - RNA, 19 nt, Homo sapiens
  misc_RNA (1)...(19): siRNA sense strand
gaagauugacagguucaug

SEQ ID NO: 15917 - RNA, 19 nt, Homo sapiens
  misc_RNA (1)...(19): siRNA sense strand
ugacaccgaagacaaguug

SEQ ID NO: 15918 - RNA, 19 nt, Homo sapiens
  misc_RNA (1)...(19): siRNA sense strand
caaagaccccaccuucaua

SEQ ID NO: 15919 - RNA, 19 nt, Homo sapiens
  misc_RNA (1)...(19): siRNA sense strand
caacuggugcugcaaggau

SEQ ID NO: 15920 - RNA, 19 nt, Homo sapiens
  misc_RNA (1)...(19): siRNA sense strand
ugacauccaggacaacuuc

SEQ ID NO: 15921 - RNA, 19 nt, Homo sapiens
  misc_RNA (1)...(19): siRNA sense strand
caauucaggccaagacauc

SEQ ID NO: 15922 - RNA, 19 nt, Homo sapiens
  misc_RNA (1)...(19): siRNA sense strand
gagaagauugacagguuca

SEQ ID NO: 15923 - RNA, 19 nt, Homo sapiens
  misc_RNA (1)...(19): siRNA sense strand
uuaacaagccugaggucuu

SEQ ID NO: 15924 - RNA, 19 nt, Homo sapiens
  misc_RNA (1)...(19): siRNA sense strand
gggucucacuuuccagcaa

SEQ ID NO: 15925 - RNA, 19 nt, Homo sapiens
  misc_RNA (1)...(19): siRNA sense strand
acagcacccuggcuuucaa

SEQ ID NO: 15926 - RNA, 19 nt, Homo sapiens
  misc_RNA (1)...(19): siRNA sense strand
gagagagagcccacagagu

SEQ ID NO: 15927 - RNA, 19 nt, Homo sapiens
  misc_RNA (1)...(19): siRNA sense strand
cagcaaaacucccucaacu

SEQ ID NO: 15928 - RNA, 19 nt, Homo sapiens
  misc_RNA (1)...(19): siRNA sense strand
gagagagcccacagagucu

SEQ ID NO: 15929 - RNA, 19 nt, Homo sapiens
  misc_RNA (1)...(19): siRNA sense strand
ccacugcccugcacuuccu

SEQ ID NO: 15930 - RNA, 19 nt, Homo sapiens
  misc_RNA (1)...(19): siRNA sense strand
cacccuggccucucucuau

SEQ ID NO: 15931 - RNA, 19 nt, Homo sapiens
  misc_RNA (1)...(19): siRNA sense strand
ucuuggaggugacccugaa

SEQ ID NO: 15932 - RNA, 19 nt, Homo sapiens
  misc_RNA (1)...(19): siRNA sense strand
gcaccugaagcagccguuu

SEQ ID NO: 15933 - RNA, 19 nt, Homo sapiens
  misc_RNA (1)...(19): siRNA sense strand
cuacccaacagcuuaacaa

SEQ ID NO: 15934 - RNA, 19 nt, Homo sapiens
  misc_RNA (1)...(19): siRNA sense strand
caacuucucggugacucaa

SEQ ID NO: 15935 - RNA, 19 nt, Homo sapiens
  misc_RNA (1)...(19): siRNA sense strand
gacagcacccuggcuuuca

SEQ ID NO: 15936 - RNA, 19 nt, Homo sapiens
  misc_RNA (1)...(19): siRNA sense strand
gggccuggcucucuauacc

SEQ ID NO: 15937 - RNA, 19 nt, Homo sapiens
  misc_RNA (1)...(19): siRNA sense strand
ggagagacaucgucagcua

SEQ ID NO: 15938 - RNA, 19 nt, Homo sapiens
  misc_RNA (1)...(19): siRNA sense strand
gcaaggauauguaccagau

SEQ ID NO: 15939 - RNA, 19 nt, Homo sapiens
  misc_RNA (1)...(19): siRNA sense strand
ggaccucgcucaucuccuu

SEQ ID NO: 15940 - RNA, 19 nt, Homo sapiens
  misc_RNA (1)...(19): siRNA sense strand
ccagggaccucgcucaucu

SEQ ID NO: 15941 - RNA, 19 nt, Homo sapiens
  misc_RNA (1)...(19): siRNA sense strand
cagaugaucggguccauga

SEQ ID NO: 15942 - RNA, 19 nt, Homo sapiens
  misc_RNA (1)...(19): siRNA sense strand
caucgucagcuacgucaua

SEQ ID NO: 15943 - RNA, 19 nt, Homo sapiens
  misc_RNA (1)...(19): siRNA sense strand
ucaaggaaggcauccagua

SEQ ID NO: 15944 - RNA, 19 nt, Homo sapiens
  misc_RNA (1)...(19): siRNA sense strand
gagagagccuggcccucau

SEQ ID NO: 15945 - RNA, 19 nt, Homo sapiens
  misc_RNA (1)...(19): siRNA sense strand
aaggauauguaccagauca

SEQ ID NO: 15946 - RNA, 19 nt, Homo sapiens
  misc_RNA (1)...(19): siRNA sense strand
ccagugcugcuguucuuaa

SEQ ID NO: 15947 - RNA, 19 nt, Homo sapiens
  misc_RNA (1)...(19): siRNA sense strand
cauagaccacuucgacauu

SEQ ID NO: 15948 - RNA, 19 nt, Homo sapiens
  misc_RNA (1)...(19): siRNA sense strand
gcaucgacauccuguacuc

SEQ ID NO: 15949 - RNA, 19 nt, Homo sapiens
  misc_RNA (1)...(19): siRNA sense strand
caaggaaggcauccaguac

SEQ ID NO: 15950 - RNA, 19 nt, Homo sapiens
  misc_RNA (1)...(19): siRNA sense strand
ggcuaugacuggagagaca

SEQ ID NO: 15951 - RNA, 19 nt, Homo sapiens
  misc_RNA (1)...(19): siRNA sense strand
ggcugcagcucuucgugaa

SEQ ID NO: 15952 - RNA, 19 nt, Homo sapiens
  misc_RNA (1)...(19): siRNA sense strand
aagauguacucccgcaaga

SEQ ID NO: 15953 - RNA, 19 nt, Homo sapiens
  misc_RNA (1)...(19): siRNA sense strand
ggauauguaccagaucaug

SEQ ID NO: 15954 - RNA, 19 nt, Homo sapiens
  misc_RNA (1)...(19): siRNA sense strand
gaacucugccacagguaca

SEQ ID NO: 15955 - RNA, 19 nt, Homo sapiens
  misc_RNA (1)...(19): siRNA sense strand
gcaaugccacccgcgagaa

SEQ ID NO: 15956 - RNA, 19 nt, Homo sapiens
  misc_RNA (1)...(19): siRNA sense strand
uagaccacuucgacauuga

SEQ ID NO: 15957 - RNA, 19 nt, Homo sapiens
  misc_RNA (1)...(19): siRNA sense strand
auagaccacuucgacauug

SEQ ID NO: 15958 - RNA, 19 nt, Homo sapiens
  misc_RNA (1)...(19): siRNA sense strand
ccacuucgacauugagauc

SEQ ID NO: 15959 - RNA, 19 nt, Homo sapiens
  misc_RNA (1)...(19): siRNA sense strand
gaccaggaacccacucaca

SEQ ID NO: 15960 - RNA, 19 nt, Homo sapiens
  misc_RNA (1)...(19): siRNA sense strand
ccuucuaccuggacaucaa

SEQ ID NO: 15961 - RNA, 19 nt, Homo sapiens
  misc_RNA (1)...(19): siRNA sense strand
gagugcacccgaugaccaa

SEQ ID NO: 15962 - RNA, 19 nt, Homo sapiens
  misc_RNA (1)...(19): siRNA sense strand
ccaugagcaaggauaugua

SEQ ID NO: 15963 - RNA, 19 nt, Homo sapiens
  misc_RNA (1)...(19): siRNA sense strand
acaagccagugcugcuguu

SEQ ID NO: 15964 - RNA, 19 nt, Homo sapiens
  misc_RNA (1)...(19): siRNA sense strand
gagagccuggcccucauug

SEQ ID NO: 15965 - RNA, 19 nt, Homo sapiens
  misc_RNA (1)...(19): siRNA sense strand
guacucgggcucccagaag

SEQ ID NO: 15966 - RNA, 19 nt, Homo sapiens
  misc_RNA (1)...(19): siRNA sense strand
agccagugcugcuguucuu

SEQ ID NO: 15967 - RNA, 19 nt, Homo sapiens
  misc_RNA (1)...(19): siRNA sense strand
gaaaugcucuguacaaaga

SEQ ID NO: 15968 - RNA, 19 nt, Homo sapiens
  misc_RNA (1)...(19): siRNA sense strand
gaacuuaauaguacccuuu

SEQ ID NO: 15969 - RNA, 19 nt, Homo sapiens
  misc_RNA (1)...(19): siRNA sense strand
cagcauggaugauaugaug

SEQ ID NO: 15970 - RNA, 19 nt, Homo sapiens
  misc_RNA (1)...(19): siRNA sense strand
gccaucaagugcuuucuuu

SEQ ID NO: 15971 - RNA, 19 nt, Homo sapiens
  misc_RNA (1)...(19): siRNA sense strand
caagugcuuucuuuccaaa

SEQ ID NO: 15972 - RNA, 19 nt, Homo sapiens
  misc_RNA (1)...(19): siRNA sense strand
gaacguggcgcuccuguac

SEQ ID NO: 15973 - RNA, 19 nt, Homo sapiens
  misc_RNA (1)...(19): siRNA sense strand
gaugauaugaugcuggaaa

SEQ ID NO: 15974 - RNA, 19 nt, Homo sapiens
  misc_RNA (1)...(19): siRNA sense strand
cugcugagauucaucaaug

SEQ ID NO: 15975 - RNA, 19 nt, Homo sapiens
  misc_RNA (1)...(19): siRNA sense strand
ggaguacgccuaccucaag

SEQ ID NO: 15976 - RNA, 19 nt, Homo sapiens
  misc_RNA (1)...(19): siRNA sense strand
acagauucaucgaacuuaa

SEQ ID NO: 15977 - RNA, 19 nt, Homo sapiens
  misc_RNA (1)...(19): siRNA sense strand
uggaaaugcucuguacaaa

SEQ ID NO: 15978 - RNA, 19 nt, Homo sapiens
  misc_RNA (1)...(19): siRNA sense strand
gcacagucagcauggauga

SEQ ID NO: 15979 - RNA, 19 nt, Homo sapiens
  misc_RNA (1)...(19): siRNA sense strand
ggaaaugcucuguacaaag

SEQ ID NO: 15980 - RNA, 19 nt, Homo sapiens
  misc_RNA (1)...(19): siRNA sense strand
agacgcggcugguggauca

SEQ ID NO: 15981 - RNA, 19 nt, Homo sapiens
  misc_RNA (1)...(19): siRNA sense strand
gcagcauccucuacagcuu

SEQ ID NO: 15982 - RNA, 19 nt, Homo sapiens
  misc_RNA (1)...(19): siRNA sense strand
cucacuagcucaaagcaaa

SEQ ID NO: 15983 - RNA, 19 nt, Homo sapiens
  misc_RNA (1)...(19): siRNA sense strand
ucaucgaacuuaauaguac

SEQ ID NO: 15984 - RNA, 19 nt, Homo sapiens
  misc_RNA (1)...(19): siRNA sense strand
gcagcauccucuacaacau

SEQ ID NO: 15985 - RNA, 19 nt, Homo sapiens
  misc_RNA (1)...(19): siRNA sense strand
ucaagugcuuucuuuccaa

SEQ ID NO: 15986 - RNA, 19 nt, Homo sapiens
  misc_RNA (1)...(19): siRNA sense strand
gacagauucaucgaacuua

SEQ ID NO: 15987 - RNA, 19 nt, Homo sapiens
  misc_RNA (1)...(19): siRNA sense strand
ggaacguggcgcuccugua

SEQ ID NO: 15988 - RNA, 19 nt, Homo sapiens
  misc_RNA (1)...(19): siRNA sense strand
ugacagauucaucgaacuu

SEQ ID NO: 15989 - RNA, 19 nt, Homo sapiens
  misc_RNA (1)...(19): siRNA sense strand
ggaacucagcaaauacuca

SEQ ID NO: 15990 - RNA, 19 nt, Homo sapiens
  misc_RNA (1)...(19): siRNA sense strand
guggggaacucagcaaaua

SEQ ID NO: 15991 - RNA, 19 nt, Homo sapiens
  misc_RNA (1)...(19): siRNA sense strand
ccacgcugcagcaccauuu

SEQ ID NO: 15992 - RNA, 19 nt, Homo sapiens
  misc_RNA (1)...(19): siRNA sense strand
acagucagcauggaugaua

SEQ ID NO: 15993 - RNA, 19 nt, Homo sapiens
  misc_RNA (1)...(19): siRNA sense strand
gcagcauccucuacagcau

SEQ ID NO: 15994 - RNA, 19 nt, Homo sapiens
  misc_RNA (1)...(19): siRNA sense strand
cucuacagcuugcucacua

SEQ ID NO: 15995 - RNA, 19 nt, Homo sapiens
  misc_RNA (1)...(19): siRNA sense strand
aaugcucuguacaaagaua

SEQ ID NO: 15996 - RNA, 19 nt, Homo sapiens
  misc_RNA (1)...(19): siRNA sense strand
gauaugaugcuggaaaugc

SEQ ID NO: 15997 - RNA, 19 nt, Homo sapiens
  misc_RNA (1)...(19): siRNA sense strand
caaauacucagugaacaca

SEQ ID NO: 15998 - RNA, 19 nt, Homo sapiens
  misc_RNA (1)...(19): siRNA sense strand
cagcaaauacucagugaac

SEQ ID NO: 15999 - RNA, 19 nt, Homo sapiens
  misc_RNA (1)...(19): siRNA sense strand
cuuaugagcgcgaagcaaa

SEQ ID NO: 16000 - RNA, 19 nt, Homo sapiens
  misc_RNA (1)...(19): siRNA sense strand
gcaaauacucagugaacac

SEQ ID NO: 16001 - RNA, 19 nt, Homo sapiens
  misc_RNA (1)...(19): siRNA sense strand
ggugggaccgcuccuacuu

SEQ ID NO: 16002 - RNA, 19 nt, Homo sapiens
  misc_RNA (1)...(19): siRNA sense strand
gcucuguacaaagauauaa

SEQ ID NO: 16003 - RNA, 19 nt, Homo sapiens
  misc_RNA (1)...(19): siRNA sense strand
cagcauccucuacaacaug

SEQ ID NO: 16004 - RNA, 19 nt, Homo sapiens
  misc_RNA (1)...(19): siRNA sense strand
ucagugaacacaccaggau

SEQ ID NO: 16005 - RNA, 19 nt, Homo sapiens
  misc_RNA (1)...(19): siRNA sense strand
cagucagcauggaugauau

SEQ ID NO: 16006 - RNA, 19 nt, Homo sapiens
  misc_RNA (1)...(19): siRNA sense strand
ggcagcauccucuacaaca

SEQ ID NO: 16007 - RNA, 19 nt, Homo sapiens
  misc_RNA (1)...(19): siRNA sense strand
cagauucaucgaacuuaau

SEQ ID NO: 16008 - RNA, 19 nt, Homo sapiens
  misc_RNA (1)...(19): siRNA sense strand
cgucccugcucaugcuuga

SEQ ID NO: 16009 - RNA, 19 nt, Homo sapiens
  misc_RNA (1)...(19): siRNA sense strand
cuggaaaugcucuguacaa

SEQ ID NO: 16010 - RNA, 19 nt, Homo sapiens
  misc_RNA (1)...(19): siRNA sense strand
ucuacaacaugcuuaugag

SEQ ID NO: 16011 - RNA, 19 nt, Homo sapiens
  misc_RNA (1)...(19): siRNA sense strand
gcaagaagcugucggaaau

SEQ ID NO: 16012 - RNA, 19 nt, Homo sapiens
  misc_RNA (1)...(19): siRNA sense strand
gugagaagaucgugcagaa

SEQ ID NO: 16013 - RNA, 19 nt, Homo sapiens
  misc_RNA (1)...(19): siRNA sense strand
ccacacugcugcuguaugu

SEQ ID NO: 16014 - RNA, 19 nt, Homo sapiens
  misc_RNA (1)...(19): siRNA sense strand
ccaaaggcuuccugauuga

SEQ ID NO: 16015 - RNA, 19 nt, Homo sapiens
  misc_RNA (1)...(19): siRNA sense strand
gcagcaaggagaagaguuu

SEQ ID NO: 16016 - RNA, 19 nt, Homo sapiens
  misc_RNA (1)...(19): siRNA sense strand
uccaaaggcuuccugauug

SEQ ID NO: 16017 - RNA, 19 nt, Homo sapiens
  misc_RNA (1)...(19): siRNA sense strand
gagaagaucgugcagaagu

SEQ ID NO: 16018 - RNA, 19 nt, Homo sapiens
  misc_RNA (1)...(19): siRNA sense strand
gaagagaagcugaagaaaa

SEQ ID NO: 16019 - RNA, 19 nt, Homo sapiens
  misc_RNA (1)...(19): siRNA sense strand
ugagaaacguggcauugug

SEQ ID NO: 16020 - RNA, 19 nt, Homo sapiens
  misc_RNA (1)...(19): siRNA sense strand
ggaagggcacccaguguga

SEQ ID NO: 16021 - RNA, 19 nt, Homo sapiens
  misc_RNA (1)...(19): siRNA sense strand
agaagaucgugcagaagua

SEQ ID NO: 16022 - RNA, 19 nt, Homo sapiens
  misc_RNA (1)...(19): siRNA sense strand
gaagcugucggaaaucaug

SEQ ID NO: 16023 - RNA, 19 nt, Homo sapiens
  misc_RNA (1)...(19): siRNA sense strand
ugucggaaaucauggagaa

SEQ ID NO: 16024 - RNA, 19 nt, Homo sapiens
  misc_RNA (1)...(19): siRNA sense strand
gaagaucgugcagaaguau

SEQ ID NO: 16025 - RNA, 19 nt, Homo sapiens
  misc_RNA (1)...(19): siRNA sense strand
ggcaagaagcugucggaaa

SEQ ID NO: 16026 - RNA, 19 nt, Homo sapiens
  misc_RNA (1)...(19): siRNA sense strand
ggaagagaagcugaagaaa

SEQ ID NO: 16027 - RNA, 19 nt, Homo sapiens
  misc_RNA (1)...(19): siRNA sense strand
aagaagcugucggaaauca

SEQ ID NO: 16028 - RNA, 19 nt, Homo sapiens
  misc_RNA (1)...(19): siRNA sense strand
aaaagcggcuggagaccua

SEQ ID NO: 16029 - RNA, 19 nt, Homo sapiens
  misc_RNA (1)...(19): siRNA sense strand
ggaggugcagcaaggagaa

SEQ ID NO: 16030 - RNA, 19 nt, Homo sapiens
  misc_RNA (1)...(19): siRNA sense strand
gcaaggagaagaguuugag

SEQ ID NO: 16031 - RNA, 19 nt, Homo sapiens
  misc_RNA (1)...(19): siRNA sense strand
acaaugaggagaccaucaa

SEQ ID NO: 16032 - RNA, 19 nt, Homo sapiens
  misc_RNA (1)...(19): siRNA sense strand
aagagaagcugaagaaaac

SEQ ID NO: 16033 - RNA, 19 nt, Homo sapiens
  misc_RNA (1)...(19): siRNA sense strand
caaugaggagaccaucaaa

SEQ ID NO: 16034 - RNA, 19 nt, Homo sapiens
  misc_RNA (1)...(19): siRNA sense strand
gaguuugagcgacggauug

SEQ ID NO: 16035 - RNA, 19 nt, Homo sapiens
  misc_RNA (1)...(19): siRNA sense strand
ggagacaguguuggacaug

SEQ ID NO: 16036 - RNA, 19 nt, Homo sapiens
  misc_RNA (1)...(19): siRNA sense strand
gcuggagaccuauuacaag

SEQ ID NO: 16037 - RNA, 19 nt, Homo sapiens
  misc_RNA (1)...(19): siRNA sense strand
gcacccagugugagaagau

SEQ ID NO: 16038 - RNA, 19 nt, Homo sapiens
  misc_RNA (1)...(19): siRNA sense strand
uuccaaaggcuuccugauu

SEQ ID NO: 16039 - RNA, 19 nt, Homo sapiens
  misc_RNA (1)...(19): siRNA sense strand
gaagaaaaccaagaucauc

SEQ ID NO: 16040 - RNA, 19 nt, Homo sapiens
  misc_RNA (1)...(19): siRNA sense strand
uaugagaaacguggcauug

SEQ ID NO: 16041 - RNA, 19 nt, Homo sapiens
  misc_RNA (1)...(19): siRNA sense strand
ugacccagcggcucuugaa

SEQ ID NO: 16042 - RNA, 19 nt, Homo sapiens
  misc_RNA (1)...(19): siRNA sense strand
caugguggccaaagucaau

SEQ ID NO: 16043 - RNA, 19 nt, Homo sapiens
  misc_RNA (1)...(19): siRNA sense strand
ggcuggagaccuauuacaa

SEQ ID NO: 16044 - RNA, 19 nt, Homo sapiens
  misc_RNA (1)...(19): siRNA sense strand
ccaccuggacgcccuaaag

SEQ ID NO: 16045 - RNA, 19 nt, Homo sapiens
  misc_RNA (1)...(19): siRNA sense strand
ccuggacgcccuaaaguag

SEQ ID NO: 16046 - RNA, 19 nt, Homo sapiens
  misc_RNA (1)...(19): siRNA sense strand
gacaaugaggagaccauca

SEQ ID NO: 16047 - RNA, 19 nt, Homo sapiens
  misc_RNA (1)...(19): siRNA sense strand
gugcagaaguauggcuaca

SEQ ID NO: 16048 - RNA, 19 nt, Homo sapiens
  misc_RNA (1)...(19): siRNA sense strand
ccuauuacaaggccacaga

SEQ ID NO: 16049 - RNA, 19 nt, Homo sapiens
  misc_RNA (1)...(19): siRNA sense strand
ggaccaaacuguucucaaa

SEQ ID NO: 16050 - RNA, 19 nt, Homo sapiens
  misc_RNA (1)...(19): siRNA sense strand
caauaugccuggaaacuau

SEQ ID NO: 16051 - RNA, 19 nt, Homo sapiens
  misc_RNA (1)...(19): siRNA sense strand
gcugcaggcuucaucuuua

SEQ ID NO: 16052 - RNA, 19 nt, Homo sapiens
  misc_RNA (1)...(19): siRNA sense strand
gcaaggugguuaagacuca

SEQ ID NO: 16053 - RNA, 19 nt, Homo sapiens
  misc_RNA (1)...(19): siRNA sense strand
gggacaagaucauggagaa

SEQ ID NO: 16054 - RNA, 19 nt, Homo sapiens
  misc_RNA (1)...(19): siRNA sense strand
caaugacccugaccaccua

SEQ ID NO: 16055 - RNA, 19 nt, Homo sapiens
  misc_RNA (1)...(19): siRNA sense strand
uggcugagcugcaccagaa

SEQ ID NO: 16056 - RNA, 19 nt, Homo sapiens
  misc_RNA (1)...(19): siRNA sense strand
guucucaaauccaccuuaa

SEQ ID NO: 16057 - RNA, 19 nt, Homo sapiens
  misc_RNA (1)...(19): siRNA sense strand
ccacagcccucagaugaug

SEQ ID NO: 16058 - RNA, 19 nt, Homo sapiens
  misc_RNA (1)...(19): siRNA sense strand
ggugcgagauuuacucaga

SEQ ID NO: 16059 - RNA, 19 nt, Homo sapiens
  misc_RNA (1)...(19): siRNA sense strand
ccgcugggcugaugcauau

SEQ ID NO: 16060 - RNA, 19 nt, Homo sapiens
  misc_RNA (1)...(19): siRNA sense strand
gguuaagacucaccaguuc

SEQ ID NO: 16061 - RNA, 19 nt, Homo sapiens
  misc_RNA (1)...(19): siRNA sense strand
caucaucucuggaacucuu

SEQ ID NO: 16062 - RNA, 19 nt, Homo sapiens
  misc_RNA (1)...(19): siRNA sense strand
aggaagaugugaaggcuuu

SEQ ID NO: 16063 - RNA, 19 nt, Homo sapiens
  misc_RNA (1)...(19): siRNA sense strand
gaagucuaacccuaagaua

SEQ ID NO: 16064 - RNA, 19 nt, Homo sapiens
  misc_RNA (1)...(19): siRNA sense strand
gcauaagauugacaucauc

SEQ ID NO: 16065 - RNA, 19 nt, Homo sapiens
  misc_RNA (1)...(19): siRNA sense strand
agaacaauaugccuggaaa

SEQ ID NO: 16066 - RNA, 19 nt, Homo sapiens
  misc_RNA (1)...(19): siRNA sense strand
gcccucagaugauggaaga

SEQ ID NO: 16067 - RNA, 19 nt, Homo sapiens
  misc_RNA (1)...(19): siRNA sense strand
caaugacucuacucucuuc

SEQ ID NO: 16068 - RNA, 19 nt, Homo sapiens
  misc_RNA (1)...(19): siRNA sense strand
gccaaugacucuacucucu

SEQ ID NO: 16069 - RNA, 19 nt, Homo sapiens
  misc_RNA (1)...(19): siRNA sense strand
ggacucagcccugcucuuc

SEQ ID NO: 16070 - RNA, 19 nt, Homo sapiens
  misc_RNA (1)...(19): siRNA sense strand
ggagcgugauggaauuaug

SEQ ID NO: 16071 - RNA, 19 nt, Homo sapiens
  misc_RNA (1)...(19): siRNA sense strand
gcucuucuccuccugcuuu

SEQ ID NO: 16072 - RNA, 19 nt, Homo sapiens
  misc_RNA (1)...(19): siRNA sense strand
agagcaagauugugcagaa

SEQ ID NO: 16073 - RNA, 19 nt, Homo sapiens
  misc_RNA (1)...(19): siRNA sense strand
acuuugagcucaugaguga

SEQ ID NO: 16074 - RNA, 19 nt, Homo sapiens
  misc_RNA (1)...(19): siRNA sense strand
caccacagcccucagauga

SEQ ID NO: 16075 - RNA, 19 nt, Homo sapiens
  misc_RNA (1)...(19): siRNA sense strand
acaagaucauggagaagaa

SEQ ID NO: 16076 - RNA, 19 nt, Homo sapiens
  misc_RNA (1)...(19): siRNA sense strand
gcugaugcauaucccuuug

SEQ ID NO: 16077 - RNA, 19 nt, Homo sapiens
  misc_RNA (1)...(19): siRNA sense strand
ggacauggugcgcuccuau

SEQ ID NO: 16078 - RNA, 19 nt, Homo sapiens
  misc_RNA (1)...(19): siRNA sense strand
gaugggaagagcaagauug

SEQ ID NO: 16079 - RNA, 19 nt, Homo sapiens
  misc_RNA (1)...(19): siRNA sense strand
gacaagaucauggagaaga

SEQ ID NO: 16080 - RNA, 19 nt, Homo sapiens
  misc_RNA (1)...(19): siRNA sense strand
cuucaguuaugaccaguuu

SEQ ID NO: 16081 - RNA, 19 nt, Homo sapiens
  misc_RNA (1)...(19): siRNA sense strand
aacaaaggcuggaggagau

SEQ ID NO: 16082 - RNA, 19 nt, Homo sapiens
  misc_RNA (1)...(19): siRNA sense strand
caguggagcagccaaguuu

SEQ ID NO: 16083 - RNA, 19 nt, Homo sapiens
  misc_RNA (1)...(19): siRNA sense strand
agaaacaggaucacaccua

SEQ ID NO: 16084 - RNA, 19 nt, Homo sapiens
  misc_RNA (1)...(19): siRNA sense strand
cccaguaugucaccaccua

SEQ ID NO: 16085 - RNA, 19 nt, Homo sapiens
  misc_RNA (1)...(19): siRNA sense strand
gcaaggccuuuggcugugu

SEQ ID NO: 16086 - RNA, 19 nt, Homo sapiens
  misc_RNA (1)...(19): siRNA sense strand
ugagguccaugcuguagga

SEQ ID NO: 16087 - RNA, 19 nt, Homo sapiens
  misc_RNA (1)...(19): siRNA sense strand
gugaaccgcugggcugaug

SEQ ID NO: 16088 - RNA, 19 nt, Homo sapiens
  misc_RNA (1)...(19): siRNA sense strand
gagcaagauugugcagaag

SEQ ID NO: 16089 - RNA, 19 nt, Homo sapiens
  misc_RNA (1)...(19): siRNA sense strand
cgugauggaauuaugcaua

SEQ ID NO: 16090 - RNA, 19 nt, Homo sapiens
  misc_RNA (1)...(19): siRNA sense strand
gauccaagguauccguaac

SEQ ID NO: 16091 - RNA, 19 nt, Homo sapiens
  misc_RNA (1)...(19): siRNA sense strand
gaccaaacuguucucaaau

SEQ ID NO: 16092 - RNA, 19 nt, Homo sapiens
  misc_RNA (1)...(19): siRNA sense strand
ggaugagguccaugcugua

SEQ ID NO: 16093 - RNA, 19 nt, Homo sapiens
  misc_RNA (1)...(19): siRNA sense strand
uggaaacuaugucuucagu

SEQ ID NO: 16094 - RNA, 19 nt, Homo sapiens
  misc_RNA (1)...(19): siRNA sense strand
gggccacugucccuucaug

SEQ ID NO: 16095 - RNA, 19 nt, Homo sapiens
  misc_RNA (1)...(19): siRNA sense strand
gccaucaacuacccaacug

SEQ ID NO: 16096 - RNA, 19 nt, Homo sapiens
  misc_RNA (1)...(19): siRNA sense strand
gacaucaucucuggaacuc

SEQ ID NO: 16097 - RNA, 19 nt, Homo sapiens
  misc_RNA (1)...(19): siRNA sense strand
acaauaugccuggaaacua

SEQ ID NO: 16098 - RNA, 19 nt, Homo sapiens
  misc_RNA (1)...(19): siRNA sense strand
gcaccaguaaguuucaugu

SEQ ID NO: 16099 - RNA, 19 nt, Homo sapiens
  misc_RNA (1)...(19): siRNA sense strand
cucagaugauggaagauuu

SEQ ID NO: 16100 - RNA, 19 nt, Homo sapiens
  misc_RNA (1)...(19): siRNA sense strand
acucuacucucuucaccuu

SEQ ID NO: 16101 - RNA, 19 nt, Homo sapiens
  misc_RNA (1)...(19): siRNA sense strand
ccaagcauggcaucuaugu

SEQ ID NO: 16102 - RNA, 19 nt, Homo sapiens
  misc_RNA (1)...(19): siRNA sense strand
ggcuucaucuuuaccacuu

SEQ ID NO: 16103 - RNA, 19 nt, Homo sapiens
  misc_RNA (1)...(19): siRNA sense strand
gaggaguugugugaugugu

SEQ ID NO: 16104 - RNA, 19 nt, Homo sapiens
  misc_RNA (1)...(19): siRNA sense strand
gagaagaaacaggaucaca

SEQ ID NO: 16105 - RNA, 19 nt, Homo sapiens
  misc_RNA (1)...(19): siRNA sense strand
ugcauaagauugacaucau

SEQ ID NO: 16106 - RNA, 19 nt, Homo sapiens
  misc_RNA (1)...(19): siRNA sense strand
gcagccaaguuugucuuca

SEQ ID NO: 16107 - RNA, 19 nt, Homo sapiens
  misc_RNA (1)...(19): siRNA sense strand
agagaagucuaacccuaag

SEQ ID NO: 16108 - RNA, 19 nt, Homo sapiens
  misc_RNA (1)...(19): siRNA sense strand
ucgccguccuguacacuuu

SEQ ID NO: 16109 - RNA, 19 nt, Homo sapiens
  misc_RNA (1)...(19): siRNA sense strand
guguccgucugguguagua

SEQ ID NO: 16110 - RNA, 19 nt, Homo sapiens
  misc_RNA (1)...(19): siRNA sense strand
accaaacuguucucaaauc

SEQ ID NO: 16111 - RNA, 19 nt, Homo sapiens
  misc_RNA (1)...(19): siRNA sense strand
cuccaagcauggcaucuau

SEQ ID NO: 16112 - RNA, 19 nt, Homo sapiens
  misc_RNA (1)...(19): siRNA sense strand
caagaucauggagaagaaa

SEQ ID NO: 16113 - RNA, 19 nt, Homo sapiens
  misc_RNA (1)...(19): siRNA sense strand
augcagcacucaacagcaa

SEQ ID NO: 16114 - RNA, 19 nt, Homo sapiens
  misc_RNA (1)...(19): siRNA sense strand
gacccugaccaccuaaaga

SEQ ID NO: 16115 - RNA, 19 nt, Homo sapiens
  misc_RNA (1)...(19): siRNA sense strand
gagcagccaaguuugucuu

SEQ ID NO: 16116 - RNA, 19 nt, Homo sapiens
  misc_RNA (1)...(19): siRNA sense strand
ccaaugacucuacucucuu

SEQ ID NO: 16117 - RNA, 19 nt, Homo sapiens
  misc_RNA (1)...(19): siRNA sense strand
gauguguccgucuggugua

SEQ ID NO: 16118 - RNA, 19 nt, Homo sapiens
  misc_RNA (1)...(19): siRNA sense strand
ccaaacuguucucaaaucc

SEQ ID NO: 16119 - RNA, 19 nt, Homo sapiens
  misc_RNA (1)...(19): siRNA sense strand
ugaugugucccaccaguau

SEQ ID NO: 16120 - RNA, 19 nt, Homo sapiens
  misc_RNA (1)...(19): siRNA sense strand
gaaggcagccccagaaguc

SEQ ID NO: 16121 - RNA, 19 nt, Homo sapiens
  misc_RNA (1)...(19): siRNA sense strand
ccuaagauacccaaaauug

SEQ ID NO: 16122 - RNA, 19 nt, Homo sapiens
  misc_RNA (1)...(19): siRNA sense strand
gaacaauaugccuggaaac

SEQ ID NO: 16123 - RNA, 19 nt, Homo sapiens
  misc_RNA (1)...(19): siRNA sense strand
cuggagcucuagaaucugu

SEQ ID NO: 16124 - RNA, 19 nt, Homo sapiens
  misc_RNA (1)...(19): siRNA sense strand
gcagaaggcagccccagaa

SEQ ID NO: 16125 - RNA, 19 nt, Homo sapiens
  misc_RNA (1)...(19): siRNA sense strand
ucucaaauccaccuuaagg

SEQ ID NO: 16126 - RNA, 19 nt, Homo sapiens
  misc_RNA (1)...(19): siRNA sense strand
ucgaggaguugugugaugu

SEQ ID NO: 16127 - RNA, 19 nt, Homo sapiens
  misc_RNA (1)...(19): siRNA sense strand
ccgacacccucaggucuug

SEQ ID NO: 16128 - RNA, 19 nt, Homo sapiens
  misc_RNA (1)...(19): siRNA sense strand
ccucagaugauggaagauu

SEQ ID NO: 16129 - RNA, 19 nt, Homo sapiens
  misc_RNA (1)...(19): siRNA sense strand
gcacaugcgccagcuacuc

SEQ ID NO: 16130 - RNA, 19 nt, Homo sapiens
  misc_RNA (1)...(19): siRNA sense strand
cucuggagcucuagaaucu

SEQ ID NO: 16131 - RNA, 19 nt, Homo sapiens
  misc_RNA (1)...(19): siRNA sense strand
gaugagguccaugcuguag

SEQ ID NO: 16132 - RNA, 19 nt, Homo sapiens
  misc_RNA (1)...(19): siRNA sense strand
acucaccaguuccuguuug

SEQ ID NO: 16133 - RNA, 19 nt, Homo sapiens
  misc_RNA (1)...(19): siRNA sense strand
uaggcaaggugguuaagac

SEQ ID NO: 16134 - RNA, 19 nt, Homo sapiens
  misc_RNA (1)...(19): siRNA sense strand
ccuggaaacuaugucuuca

SEQ ID NO: 16135 - RNA, 19 nt, Homo sapiens
  misc_RNA (1)...(19): siRNA sense strand
gugaucuccugcucuccaa

SEQ ID NO: 16136 - RNA, 19 nt, Homo sapiens
  misc_RNA (1)...(19): siRNA sense strand
gcaaugcagcacucaacag

SEQ ID NO: 16137 - RNA, 19 nt, Homo sapiens
  misc_RNA (1)...(19): siRNA sense strand
cagccaaguuugucuucag

SEQ ID NO: 16138 - RNA, 19 nt, Homo sapiens
  misc_RNA (1)...(19): siRNA sense strand
cuagcucccuggucucagu

SEQ ID NO: 16139 - RNA, 19 nt, Homo sapiens
  misc_RNA (1)...(19): siRNA sense strand
ugccagggugcgagauuua

SEQ ID NO: 16140 - RNA, 19 nt, Homo sapiens
  misc_RNA (1)...(19): siRNA sense strand
cagaaguccaggaagaugu

SEQ ID NO: 16141 - RNA, 19 nt, Homo sapiens
  misc_RNA (1)...(19): siRNA sense strand
ccugcuuuguugccaauga

SEQ ID NO: 16142 - RNA, 19 nt, Homo sapiens
  misc_RNA (1)...(19): siRNA sense strand
uaaguuucauguggagcuu

SEQ ID NO: 16143 - RNA, 19 nt, Homo sapiens
  misc_RNA (1)...(19): siRNA sense strand
ggaugggaagagcaagauu

SEQ ID NO: 16144 - RNA, 19 nt, Homo sapiens
  misc_RNA (1)...(19): siRNA sense strand
caucuguggccucaaagga

SEQ ID NO: 16145 - RNA, 19 nt, Homo sapiens
  misc_RNA (1)...(19): siRNA sense strand
cagaacaauaugccuggaa

SEQ ID NO: 16146 - RNA, 19 nt, Homo sapiens
  misc_RNA (1)...(19): siRNA sense strand
ccagaaguccaggaagaug

SEQ ID NO: 16147 - RNA, 19 nt, Homo sapiens
  misc_RNA (1)...(19): siRNA sense strand
uaagauacccaaaauugug

SEQ ID NO: 16148 - RNA, 19 nt, Homo sapiens
  misc_RNA (1)...(19): siRNA sense strand
caguuccuguuugguauug

SEQ ID NO: 16149 - RNA, 19 nt, Homo sapiens
  misc_RNA (1)...(19): siRNA sense strand
gcagauauaugcacacuuu

SEQ ID NO: 16150 - RNA, 19 nt, Homo sapiens
  misc_RNA (1)...(19): siRNA sense strand
ggaagagccucagaauuua

SEQ ID NO: 16151 - RNA, 19 nt, Homo sapiens
  misc_RNA (1)...(19): siRNA sense strand
cagaagacauccuuacuuu

SEQ ID NO: 16152 - RNA, 19 nt, Homo sapiens
  misc_RNA (1)...(19): siRNA sense strand
caagaaggcauccugauua

SEQ ID NO: 16153 - RNA, 19 nt, Homo sapiens
  misc_RNA (1)...(19): siRNA sense strand
gcucaucgguuuaaagauu

SEQ ID NO: 16154 - RNA, 19 nt, Homo sapiens
  misc_RNA (1)...(19): siRNA sense strand
aaacauacguucccaaaga

SEQ ID NO: 16155 - RNA, 19 nt, Homo sapiens
  misc_RNA (1)...(19): siRNA sense strand
ugacagaucuuaccaaagu

SEQ ID NO: 16156 - RNA, 19 nt, Homo sapiens
  misc_RNA (1)...(19): siRNA sense strand
gaagacauccuuacuuuua

SEQ ID NO: 16157 - RNA, 19 nt, Homo sapiens
  misc_RNA (1)...(19): siRNA sense strand
ggaagucgaugaaacauac

SEQ ID NO: 16158 - RNA, 19 nt, Homo sapiens
  misc_RNA (1)...(19): siRNA sense strand
uggaagagccucagaauuu

SEQ ID NO: 16159 - RNA, 19 nt, Homo sapiens
  misc_RNA (1)...(19): siRNA sense strand
ugaaagcuguuauggauga

SEQ ID NO: 16160 - RNA, 19 nt, Homo sapiens
  misc_RNA (1)...(19): siRNA sense strand
gcaagaaggcauccugauu

SEQ ID NO: 16161 - RNA, 19 nt, Homo sapiens
  misc_RNA (1)...(19): siRNA sense strand
guaaacauccugaagcaaa

SEQ ID NO: 16162 - RNA, 19 nt, Homo sapiens
  misc_RNA (1)...(19): siRNA sense strand
ugaaguaacugaauuugca

SEQ ID NO: 16163 - RNA, 19 nt, Homo sapiens
  misc_RNA (1)...(19): siRNA sense strand
caaaguguucgaugaauuu

SEQ ID NO: 16164 - RNA, 19 nt, Homo sapiens
  misc_RNA (1)...(19): siRNA sense strand
ccaaaguguucgaugaauu

SEQ ID NO: 16165 - RNA, 19 nt, Homo sapiens
  misc_RNA (1)...(19): siRNA sense strand
ugagaugccugcugacuug

SEQ ID NO: 16166 - RNA, 19 nt, Homo sapiens
  misc_RNA (1)...(19): siRNA sense strand
gaacaggcgaccaugcuuu

SEQ ID NO: 16167 - RNA, 19 nt, Homo sapiens
  misc_RNA (1)...(19): siRNA sense strand
gaccagagguugaugugau

SEQ ID NO: 16168 - RNA, 19 nt, Homo sapiens
  misc_RNA (1)...(19): siRNA sense strand
ugcagaaguuuccaaguua

SEQ ID NO: 16169 - RNA, 19 nt, Homo sapiens
  misc_RNA (1)...(19): siRNA sense strand
gacaaauuaugcacaguug

SEQ ID NO: 16170 - RNA, 19 nt, Homo sapiens
  misc_RNA (1)...(19): siRNA sense strand
gaagagccucagaauuuaa

SEQ ID NO: 16171 - RNA, 19 nt, Homo sapiens
  misc_RNA (1)...(19): siRNA sense strand
ugaaaccuauggugaaaug

SEQ ID NO: 16172 - RNA, 19 nt, Homo sapiens
  misc_RNA (1)...(19): siRNA sense strand
gaaauugccagaagacauc

SEQ ID NO: 16173 - RNA, 19 nt, Homo sapiens
  misc_RNA (1)...(19): siRNA sense strand
gaugugaugugcacugcuu

SEQ ID NO: 16174 - RNA, 19 nt, Homo sapiens
  misc_RNA (1)...(19): siRNA sense strand
ggagagacaaaucaagaaa

SEQ ID NO: 16175 - RNA, 19 nt, Homo sapiens
  misc_RNA (1)...(19): siRNA sense strand
gcagaaguuuccaaguuag

SEQ ID NO: 16176 - RNA, 19 nt, Homo sapiens
  misc_RNA (1)...(19): siRNA sense strand
caccuuccaugcagauaua

SEQ ID NO: 16177 - RNA, 19 nt, Homo sapiens
  misc_RNA (1)...(19): siRNA sense strand
gcacagaauccuuggugaa

SEQ ID NO: 16178 - RNA, 19 nt, Homo sapiens
  misc_RNA (1)...(19): siRNA sense strand
acaagaaccugagagaaau

SEQ ID NO: 16179 - RNA, 19 nt, Homo sapiens
  misc_RNA (1)...(19): siRNA sense strand
ugaaugcuaugccaaagug

SEQ ID NO: 16180 - RNA, 19 nt, Homo sapiens
  misc_RNA (1)...(19): siRNA sense strand
gagaugcacacaagaguga

SEQ ID NO: 16181 - RNA, 19 nt, Homo sapiens
  misc_RNA (1)...(19): siRNA sense strand
ugaaaccacucuagagaag

SEQ ID NO: 16182 - RNA, 19 nt, Homo sapiens
  misc_RNA (1)...(19): siRNA sense strand
acugaaagcuguuauggau

SEQ ID NO: 16183 - RNA, 19 nt, Homo sapiens
  misc_RNA (1)...(19): siRNA sense strand
uugcagaaguuuccaaguu

SEQ ID NO: 16184 - RNA, 19 nt, Homo sapiens
  misc_RNA (1)...(19): siRNA sense strand
agagacaaaucaagaaaca

SEQ ID NO: 16185 - RNA, 19 nt, Homo sapiens
  misc_RNA (1)...(19): siRNA sense strand
gaaaguaccccaaguguca

SEQ ID NO: 16186 - RNA, 19 nt, Homo sapiens
  misc_RNA (1)...(19): siRNA sense strand
uugccaagcugcugauaaa

SEQ ID NO: 16187 - RNA, 19 nt, Homo sapiens
  misc_RNA (1)...(19): siRNA sense strand
gagaaggagagacaaauca

SEQ ID NO: 16188 - RNA, 19 nt, Homo sapiens
  misc_RNA (1)...(19): siRNA sense strand
gaaggcauccugauuacuc

SEQ ID NO: 16189 - RNA, 19 nt, Homo sapiens
  misc_RNA (1)...(19): siRNA sense strand
uauaugaaauugccagaag

SEQ ID NO: 16190 - RNA, 19 nt, Homo sapiens
  misc_RNA (1)...(19): siRNA sense strand
caaagaguuuaaugcugaa

SEQ ID NO: 16191 - RNA, 19 nt, Homo sapiens
  misc_RNA (1)...(19): siRNA sense strand
guuuaaagauuugggagaa

SEQ ID NO: 16192 - RNA, 19 nt, Homo sapiens
  misc_RNA (1)...(19): siRNA sense strand
aacaagaaccugagagaaa

SEQ ID NO: 16193 - RNA, 19 nt, Homo sapiens
  misc_RNA (1)...(19): siRNA sense strand
gcugcaaggcugacgauaa

SEQ ID NO: 16194 - RNA, 19 nt, Homo sapiens
  misc_RNA (1)...(19): siRNA sense strand
ccagaaugcgcuauuaguu

SEQ ID NO: 16195 - RNA, 19 nt, Homo sapiens
  misc_RNA (1)...(19): siRNA sense strand
gauucgaucuccaguaaac

SEQ ID NO: 16196 - RNA, 19 nt, Homo sapiens
  misc_RNA (1)...(19): siRNA sense strand
gaaguuuccaaguuaguga

SEQ ID NO: 16197 - RNA, 19 nt, Homo sapiens
  misc_RNA (1)...(19): siRNA sense strand
ucgaugaacuucgggauga

SEQ ID NO: 16198 - RNA, 19 nt, Homo sapiens
  misc_RNA (1)...(19): siRNA sense strand
cgugaaaccuauggugaaa

SEQ ID NO: 16199 - RNA, 19 nt, Homo sapiens
  misc_RNA (1)...(19): siRNA sense strand
ugaaacauacguucccaaa

SEQ ID NO: 16200 - RNA, 19 nt, Homo sapiens
  misc_RNA (1)...(19): siRNA sense strand
guagaggucucaagaaacc

SEQ ID NO: 16201 - RNA, 19 nt, Homo sapiens
  misc_RNA (1)...(19): siRNA sense strand
cugaaggaaugcugugaaa

SEQ ID NO: 16202 - RNA, 19 nt, Homo sapiens
  misc_RNA (1)...(19): siRNA sense strand
gaaugcuucuugcaacaca

SEQ ID NO: 16203 - RNA, 19 nt, Homo sapiens
  misc_RNA (1)...(19): siRNA sense strand
gaaaugaaugcuucuugca

SEQ ID NO: 16204 - RNA, 19 nt, Homo sapiens
  misc_RNA (1)...(19): siRNA sense strand
gagcaacugaaagcuguua

SEQ ID NO: 16205 - RNA, 19 nt, Homo sapiens
  misc_RNA (1)...(19): siRNA sense strand
gaaguggguaaccuuuauu

SEQ ID NO: 16206 - RNA, 19 nt, Homo sapiens
  misc_RNA (1)...(19): siRNA sense strand
ugacuugccuucauuagcu

SEQ ID NO: 16207 - RNA, 19 nt, Homo sapiens
  misc_RNA (1)...(19): siRNA sense strand
gaaccugagagaaaugaau

SEQ ID NO: 16208 - RNA, 19 nt, Homo sapiens
  misc_RNA (1)...(19): siRNA sense strand
aagcuguuauggaugauuu

SEQ ID NO: 16209 - RNA, 19 nt, Homo sapiens
  misc_RNA (1)...(19): siRNA sense strand
uuaaagauuugggagaaga

SEQ ID NO: 16210 - RNA, 19 nt, Homo sapiens
  misc_RNA (1)...(19): siRNA sense strand
ccauggagaucugcuugaa

SEQ ID NO: 16211 - RNA, 19 nt, Homo sapiens
  misc_RNA (1)...(19): siRNA sense strand
aaguaaggauguuugcaaa

SEQ ID NO: 16212 - RNA, 19 nt, Homo sapiens
  misc_RNA (1)...(19): siRNA sense strand
uggaugauuucgcagcuuu

SEQ ID NO: 16213 - RNA, 19 nt, Homo sapiens
  misc_RNA (1)...(19): siRNA sense strand
gaaccaguuauguguguug

SEQ ID NO: 16214 - RNA, 19 nt, Homo sapiens
  misc_RNA (1)...(19): siRNA sense strand
uuguagaggucucaagaaa

SEQ ID NO: 16215 - RNA, 19 nt, Homo sapiens
  misc_RNA (1)...(19): siRNA sense strand
cuucagcaguguccauuug

SEQ ID NO: 16216 - RNA, 19 nt, Homo sapiens
  misc_RNA (1)...(19): siRNA sense strand
gauaaggagaccugcuuug

SEQ ID NO: 16217 - RNA, 19 nt, Homo sapiens
  misc_RNA (1)...(19): siRNA sense strand
gcaaggcugacgauaagga

SEQ ID NO: 16218 - RNA, 19 nt, Homo sapiens
  misc_RNA (1)...(19): siRNA sense strand
cugcaaggcugacgauaag

SEQ ID NO: 16219 - RNA, 19 nt, Homo sapiens
  misc_RNA (1)...(19): siRNA sense strand
agugacagaucuuaccaaa

SEQ ID NO: 16220 - RNA, 19 nt, Homo sapiens
  misc_RNA (1)...(19): siRNA sense strand
ccagaagacauccuuacuu

SEQ ID NO: 16221 - RNA, 19 nt, Homo sapiens
  misc_RNA (1)...(19): siRNA sense strand
acaaagaugacaacccaaa

SEQ ID NO: 16222 - RNA, 19 nt, Homo sapiens
  misc_RNA (1)...(19): siRNA sense strand
gagaguacaaauuccagaa

SEQ ID NO: 16223 - RNA, 19 nt, Homo sapiens
  misc_RNA (1)...(19): siRNA sense strand
ugccaaagcucgaugaacu

SEQ ID NO: 16224 - RNA, 19 nt, Homo sapiens
  misc_RNA (1)...(19): siRNA sense strand
uaaagcugccugccuguug

SEQ ID NO: 16225 - RNA, 19 nt, Homo sapiens
  misc_RNA (1)...(19): siRNA sense strand
gaacuccuuuucuuugcua

SEQ ID NO: 16226 - RNA, 19 nt, Homo sapiens
  misc_RNA (1)...(19): siRNA sense strand
ggaaugcugccauggagau

SEQ ID NO: 16227 - RNA, 19 nt, Homo sapiens
  misc_RNA (1)...(19): siRNA sense strand
ccucagaauuuaaucaaac

SEQ ID NO: 16228 - RNA, 19 nt, Homo sapiens
  misc_RNA (1)...(19): siRNA sense strand
uaugaaaccacucuagaga

SEQ ID NO: 16229 - RNA, 19 nt, Homo sapiens
  misc_RNA (1)...(19): siRNA sense strand
gaaguaacugaauuugcaa

SEQ ID NO: 16230 - RNA, 19 nt, Homo sapiens
  misc_RNA (1)...(19): siRNA sense strand
cagaaugcgcuauuaguuc

SEQ ID NO: 16231 - RNA, 19 nt, Homo sapiens
  misc_RNA (1)...(19): siRNA sense strand
aaacuaugcugaggcaaag

SEQ ID NO: 16232 - RNA, 19 nt, Homo sapiens
  misc_RNA (1)...(19): siRNA sense strand
ccaaguauaucugugaaaa

SEQ ID NO: 16233 - RNA, 19 nt, Homo sapiens
  misc_RNA (1)...(19): siRNA sense strand
auggagaucugcuugaaug

SEQ ID NO: 16234 - RNA, 19 nt, Homo sapiens
  misc_RNA (1)...(19): siRNA sense strand
ccagagauuucccaaagcu

SEQ ID NO: 16235 - RNA, 19 nt, Homo sapiens
  misc_RNA (1)...(19): siRNA sense strand
aaaguaaggauguuugcaa

SEQ ID NO: 16236 - RNA, 19 nt, Homo sapiens
  misc_RNA (1)...(19): siRNA sense strand
aaagugggcagcaaauguu

SEQ ID NO: 16237 - RNA, 19 nt, Homo sapiens
  misc_RNA (1)...(19): siRNA sense strand
uugagcagcuuggagagua

SEQ ID NO: 16238 - RNA, 19 nt, Homo sapiens
  misc_RNA (1)...(19): siRNA sense strand
cugcagauccucaugaaug

SEQ ID NO: 16239 - RNA, 19 nt, Homo sapiens
  misc_RNA (1)...(19): siRNA sense strand
cauaugaaaccacucuaga

SEQ ID NO: 16240 - RNA, 19 nt, Homo sapiens
  misc_RNA (1)...(19): siRNA sense strand
aagcugaguuugcagaagu

SEQ ID NO: 16241 - RNA, 19 nt, Homo sapiens
  misc_RNA (1)...(19): siRNA sense strand
gaaggagagacaaaucaag

SEQ ID NO: 16242 - RNA, 19 nt, Homo sapiens
  misc_RNA (1)...(19): siRNA sense strand
caccaaaugcugcacagaa

SEQ ID NO: 16243 - RNA, 19 nt, Homo sapiens
  misc_RNA (1)...(19): siRNA sense strand
gggcagcaaauguuguaaa

SEQ ID NO: 16244 - RNA, 19 nt, Homo sapiens
  misc_RNA (1)...(19): siRNA sense strand
ugauugccuuugcucagua

SEQ ID NO: 16245 - RNA, 19 nt, Homo sapiens
  misc_RNA (1)...(19): siRNA sense strand
gcuuggagaguacaaauuc

SEQ ID NO: 16246 - RNA, 19 nt, Homo sapiens
  misc_RNA (1)...(19): siRNA sense strand
gccaaaguguucgaugaau

SEQ ID NO: 16247 - RNA, 19 nt, Homo sapiens
  misc_RNA (1)...(19): siRNA sense strand
caagaaacaaacugcacuu

SEQ ID NO: 16248 - RNA, 19 nt, Homo sapiens
  misc_RNA (1)...(19): siRNA sense strand
gcaacugaaagcuguuaug

SEQ ID NO: 16249 - RNA, 19 nt, Homo sapiens
  misc_RNA (1)...(19): siRNA sense strand
gaacgccugugguauguua

SEQ ID NO: 16250 - RNA, 19 nt, Homo sapiens
  misc_RNA (1)...(19): siRNA sense strand
ggaaauaccacacacacuu

SEQ ID NO: 16251 - RNA, 19 nt, Homo sapiens
  misc_RNA (1)...(19): siRNA sense strand
gaaauaccacacacacuug

SEQ ID NO: 16252 - RNA, 19 nt, Homo sapiens
  misc_RNA (1)...(19): siRNA sense strand
guucagcgcugucacuuca

SEQ ID NO: 16253 - RNA, 19 nt, Homo sapiens
  misc_RNA (1)...(19): siRNA sense strand
ggagcuggcuggcuacaca

SEQ ID NO: 16254 - RNA, 19 nt, Homo sapiens
  misc_RNA (1)...(19): siRNA sense strand
cggaggagaucgccuucua

SEQ ID NO: 16255 - RNA, 19 nt, Homo sapiens
  misc_RNA (1)...(19): siRNA sense strand
ccagguauuugaagauguu

SEQ ID NO: 16256 - RNA, 19 nt, Homo sapiens
  misc_RNA (1)...(19): siRNA sense strand
gaccuggccucgcagauca

SEQ ID NO: 16257 - RNA, 19 nt, Homo sapiens
  misc_RNA (1)...(19): siRNA sense strand
ggcccucccuguggaaaua

SEQ ID NO: 16258 - RNA, 19 nt, Homo sapiens
  misc_RNA (1)...(19): siRNA sense strand
gaggagaucgccuucuaug

SEQ ID NO: 16259 - RNA, 19 nt, Homo sapiens
  misc_RNA (1)...(19): siRNA sense strand
acacacacuugcuacaguu

SEQ ID NO: 16260 - RNA, 19 nt, Homo sapiens
  misc_RNA (1)...(19): siRNA sense strand
gcagaggcccuacaugucu

SEQ ID NO: 16261 - RNA, 19 nt, Homo sapiens
  misc_RNA (1)...(19): siRNA sense strand
gcagaucaaccucauccuu

SEQ ID NO: 16262 - RNA, 19 nt, Homo sapiens
  misc_RNA (1)...(19): siRNA sense strand
gcacgagauguuccaggua

SEQ ID NO: 16263 - RNA, 19 nt, Homo sapiens
  misc_RNA (1)...(19): siRNA sense strand
cacgagauguuccagguau

SEQ ID NO: 16264 - RNA, 19 nt, Homo sapiens
  misc_RNA (1)...(19): siRNA sense strand
uggaggacaugcaaaggaa

SEQ ID NO: 16265 - RNA, 19 nt, Homo sapiens
  misc_RNA (1)...(19): siRNA sense strand
caaguacgcccuccuggau

SEQ ID NO: 16266 - RNA, 19 nt, Homo sapiens
  misc_RNA (1)...(19): siRNA sense strand
gcauugcccugcucuccau

SEQ ID NO: 16267 - RNA, 19 nt, Homo sapiens
  misc_RNA (1)...(19): siRNA sense strand
gaggccaggugguggaugu

SEQ ID NO: 16268 - RNA, 19 nt, Homo sapiens
  misc_RNA (1)...(19): siRNA sense strand
gagcaguuccucaugaagu

SEQ ID NO: 16269 - RNA, 19 nt, Homo sapiens
  misc_RNA (1)...(19): siRNA sense strand
guugggaggcuauguguga

SEQ ID NO: 16270 - RNA, 19 nt, Homo sapiens
  misc_RNA (1)...(19): siRNA sense strand
gggaucaucugcgagaaca

SEQ ID NO: 16271 - RNA, 19 nt, Homo sapiens
  misc_RNA (1)...(19): siRNA sense strand
ucaacagugccauccguua

SEQ ID NO: 16272 - RNA, 19 nt, Homo sapiens
  misc_RNA (1)...(19): siRNA sense strand
cgagauguuccagguauuu

SEQ ID NO: 16273 - RNA, 19 nt, Homo sapiens
  misc_RNA (1)...(19): siRNA sense strand
ggaggagaucgccuucuau

SEQ ID NO: 16274 - RNA, 19 nt, Homo sapiens
  misc_RNA (1)...(19): siRNA sense strand
agcaguuccucaugaagua

SEQ ID NO: 16275 - RNA, 19 nt, Homo sapiens
  misc_RNA (1)...(19): siRNA sense strand
ccgcagaggcccuacaugu

SEQ ID NO: 16276 - RNA, 19 nt, Homo sapiens
  misc_RNA (1)...(19): siRNA sense strand
cccaauggcugcggcaaga

SEQ ID NO: 16277 - RNA, 19 nt, Homo sapiens
  misc_RNA (1)...(19): siRNA sense strand
gcuggaaguucgagaagcu

SEQ ID NO: 16278 - RNA, 19 nt, Homo sapiens
  misc_RNA (1)...(19): siRNA sense strand
ucgcaacccugaccagucu

SEQ ID NO: 16279 - RNA, 19 nt, Homo sapiens
  misc_RNA (1)...(19): siRNA sense strand
gauguuccagguauuugaa

SEQ ID NO: 16280 - RNA, 19 nt, Homo sapiens
  misc_RNA (1)...(19): siRNA sense strand
cuggagcaguuccucauga

SEQ ID NO: 16281 - RNA, 19 nt, Homo sapiens
  misc_RNA (1)...(19): siRNA sense strand
caacagugccauccguuac

SEQ ID NO: 16282 - RNA, 19 nt, Homo sapiens
  misc_RNA (1)...(19): siRNA sense strand
uggagcaguuccucaugaa

SEQ ID NO: 16283 - RNA, 19 nt, Homo sapiens
  misc_RNA (1)...(19): siRNA sense strand
gcaugcaucugcucaucac

SEQ ID NO: 16284 - RNA, 19 nt, Homo sapiens
  misc_RNA (1)...(19): siRNA sense strand
gaucaugucgucguacaag

SEQ ID NO: 16285 - RNA, 19 nt, Homo sapiens
  misc_RNA (1)...(19): siRNA sense strand
caacaucaggguggaggaa

SEQ ID NO: 16286 - RNA, 19 nt, Homo sapiens
  misc_RNA (1)...(19): siRNA sense strand
gaucaucugcgagaacauc

SEQ ID NO: 16287 - RNA, 19 nt, Homo sapiens
  misc_RNA (1)...(19): siRNA sense strand
cuauggagcccacaaaguc

SEQ ID NO: 16288 - RNA, 19 nt, Homo sapiens
  misc_RNA (1)...(19): siRNA sense strand
aguacgcccuccuggauga

SEQ ID NO: 16289 - RNA, 19 nt, Homo sapiens
  misc_RNA (1)...(19): siRNA sense strand
caaccucauccuucuggaa

SEQ ID NO: 16290 - RNA, 19 nt, Homo sapiens
  misc_RNA (1)...(19): siRNA sense strand
cacacacacuugcuacagu

SEQ ID NO: 16291 - RNA, 19 nt, Homo sapiens
  misc_RNA (1)...(19): siRNA sense strand
guacgguggugugcucuac

SEQ ID NO: 16292 - RNA, 19 nt, Homo sapiens
  misc_RNA (1)...(19): siRNA sense strand
caagaggcccagggagcua

SEQ ID NO: 16293 - RNA, 19 nt, Homo sapiens
  misc_RNA (1)...(19): siRNA sense strand
ggugagcgagcgcacagaa

SEQ ID NO: 16294 - RNA, 19 nt, Homo sapiens
  misc_RNA (1)...(19): siRNA sense strand
uggaacgccugugguaugu

SEQ ID NO: 16295 - RNA, 19 nt, Homo sapiens
  misc_RNA (1)...(19): siRNA sense strand
gagauguuccagguauuug

SEQ ID NO: 16296 - RNA, 19 nt, Homo sapiens
  misc_RNA (1)...(19): siRNA sense strand
augcagaggccgugaagaa

SEQ ID NO: 16297 - RNA, 19 nt, Homo sapiens
  misc_RNA (1)...(19): siRNA sense strand
ccauugagcggaucauguc

SEQ ID NO: 16298 - RNA, 19 nt, Homo sapiens
  misc_RNA (1)...(19): siRNA sense strand
cgacguggaaggcaagauc

SEQ ID NO: 16299 - RNA, 19 nt, Homo sapiens
  misc_RNA (1)...(19): siRNA sense strand
ggacucaguggaggacaug

SEQ ID NO: 16300 - RNA, 19 nt, Homo sapiens
  misc_RNA (1)...(19): siRNA sense strand
guggaggacaugcaaagga

SEQ ID NO: 16301 - RNA, 19 nt, Homo sapiens
  misc_RNA (1)...(19): siRNA sense strand
gagguugggaggcuaugug

SEQ ID NO: 16302 - RNA, 19 nt, Homo sapiens
  misc_RNA (1)...(19): siRNA sense strand
ccucgcagaucaaccucau

SEQ ID NO: 16303 - RNA, 19 nt, Homo sapiens
  misc_RNA (1)...(19): siRNA sense strand
ggaggacgugguggccuuu

SEQ ID NO: 16304 - RNA, 19 nt, Homo sapiens
  misc_RNA (1)...(19): siRNA sense strand
ucucccagcagaccuacua

SEQ ID NO: 16305 - RNA, 19 nt, Homo sapiens
  misc_RNA (1)...(19): siRNA sense strand
cggaucaugucgucguaca

SEQ ID NO: 16306 - RNA, 19 nt, Homo sapiens
  misc_RNA (1)...(19): siRNA sense strand
uggcccaccucuacuccaa

SEQ ID NO: 16307 - RNA, 19 nt, Homo sapiens
  misc_RNA (1)...(19): siRNA sense strand
agaucaaccucauccuucu

SEQ ID NO: 16308 - RNA, 19 nt, Homo sapiens
  misc_RNA (1)...(19): siRNA sense strand
gagagaaggugcuaacaaa

SEQ ID NO: 16309 - RNA, 19 nt, Homo sapiens
  misc_RNA (1)...(19): siRNA sense strand
gcucaacucuuucccauuu

SEQ ID NO: 16310 - RNA, 19 nt, Homo sapiens
  misc_RNA (1)...(19): siRNA sense strand
caggaucucuauauuguua

SEQ ID NO: 16311 - RNA, 19 nt, Homo sapiens
  misc_RNA (1)...(19): siRNA sense strand
gaaaggaucaucaaucuuc

SEQ ID NO: 16312 - RNA, 19 nt, Homo sapiens
  misc_RNA (1)...(19): siRNA sense strand
cagcgucccuguuuauuaa

SEQ ID NO: 16313 - RNA, 19 nt, Homo sapiens
  misc_RNA (1)...(19): siRNA sense strand
ggaaaugcugugauuauaa

SEQ ID NO: 16314 - RNA, 19 nt, Homo sapiens
  misc_RNA (1)...(19): siRNA sense strand
caacaguacuuaccgaugu

SEQ ID NO: 16315 - RNA, 19 nt, Homo sapiens
  misc_RNA (1)...(19): siRNA sense strand
ccacggagcuccugaagca

SEQ ID NO: 16316 - RNA, 19 nt, Homo sapiens
  misc_RNA (1)...(19): siRNA sense strand
uagaugaggccauaaauuu

SEQ ID NO: 16317 - RNA, 19 nt, Homo sapiens
  misc_RNA (1)...(19): siRNA sense strand
caaagcuucucccucagua

SEQ ID NO: 16318 - RNA, 19 nt, Homo sapiens
  misc_RNA (1)...(19): siRNA sense strand
aaaccaaggugaugcaaga

SEQ ID NO: 16319 - RNA, 19 nt, Homo sapiens
  misc_RNA (1)...(19): siRNA sense strand
gcagcgauuugaccacauu

SEQ ID NO: 16320 - RNA, 19 nt, Homo sapiens
  misc_RNA (1)...(19): siRNA sense strand
cuaaaccaguuaagaagaa

SEQ ID NO: 16321 - RNA, 19 nt, Homo sapiens
  misc_RNA (1)...(19): siRNA sense strand
uaaaagagucuccugauua

SEQ ID NO: 16322 - RNA, 19 nt, Homo sapiens
  misc_RNA (1)...(19): siRNA sense strand
uauaaagccuucugaacug

SEQ ID NO: 16323 - RNA, 19 nt, Homo sapiens
  misc_RNA (1)...(19): siRNA sense strand
gauacuaaguuugcuugaa

SEQ ID NO: 16324 - RNA, 19 nt, Homo sapiens
  misc_RNA (1)...(19): siRNA sense strand
cugaauggguuacugcuaa

SEQ ID NO: 16325 - RNA, 19 nt, Homo sapiens
  misc_RNA (1)...(19): siRNA sense strand
ccagugggaugggagcuua

SEQ ID NO: 16326 - RNA, 19 nt, Homo sapiens
  misc_RNA (1)...(19): siRNA sense strand
aaauguagaugaggccaua

SEQ ID NO: 16327 - RNA, 19 nt, Homo sapiens
  misc_RNA (1)...(19): siRNA sense strand
gcauugcacccgacuauau

SEQ ID NO: 16328 - RNA, 19 nt, Homo sapiens
  misc_RNA (1)...(19): siRNA sense strand
ccaaggugaugcaagaaga

SEQ ID NO: 16329 - RNA, 19 nt, Homo sapiens
  misc_RNA (1)...(19): siRNA sense strand
agaccaggaucucuauauu

SEQ ID NO: 16330 - RNA, 19 nt, Homo sapiens
  misc_RNA (1)...(19): siRNA sense strand
gaccaauucuuccaauagu

SEQ ID NO: 16331 - RNA, 19 nt, Homo sapiens
  misc_RNA (1)...(19): siRNA sense strand
ggaaacagugaaggaauuu

SEQ ID NO: 16332 - RNA, 19 nt, Homo sapiens
  misc_RNA (1)...(19): siRNA sense strand
aggaaaugcugugauuaua

SEQ ID NO: 16333 - RNA, 19 nt, Homo sapiens
  misc_RNA (1)...(19): siRNA sense strand
gugcaagagugaauucaau

SEQ ID NO: 16334 - RNA, 19 nt, Homo sapiens
  misc_RNA (1)...(19): siRNA sense strand
uuaccgauguugauccuaa

SEQ ID NO: 16335 - RNA, 19 nt, Homo sapiens
  misc_RNA (1)...(19): siRNA sense strand
gaaggaauuuuauggagaa

SEQ ID NO: 16336 - RNA, 19 nt, Homo sapiens
  misc_RNA (1)...(19): siRNA sense strand
gaucaucaaucuucgucau

SEQ ID NO: 16337 - RNA, 19 nt, Homo sapiens
  misc_RNA (1)...(19): siRNA sense strand
guagaugaggccauaaauu

SEQ ID NO: 16338 - RNA, 19 nt, Homo sapiens
  misc_RNA (1)...(19): siRNA sense strand
gcaggaaaugcugugauua

SEQ ID NO: 16339 - RNA, 19 nt, Homo sapiens
  misc_RNA (1)...(19): siRNA sense strand
ucaucaaucuucgucauuu

SEQ ID NO: 16340 - RNA, 19 nt, Homo sapiens
  misc_RNA (1)...(19): siRNA sense strand
ccgacuauauucucuguga

SEQ ID NO: 16341 - RNA, 19 nt, Homo sapiens
  misc_RNA (1)...(19): siRNA sense strand
ggaccaauucuuccaauag

SEQ ID NO: 16342 - RNA, 19 nt, Homo sapiens
  misc_RNA (1)...(19): siRNA sense strand
agagugaauucaaugugua

SEQ ID NO: 16343 - RNA, 19 nt, Homo sapiens
  misc_RNA (1)...(19): siRNA sense strand
ggaagucauuacuguccuu

SEQ ID NO: 16344 - RNA, 19 nt, Homo sapiens
  misc_RNA (1)...(19): siRNA sense strand
gaugaggccauaaauuuca

SEQ ID NO: 16345 - RNA, 19 nt, Homo sapiens
  misc_RNA (1)...(19): siRNA sense strand
gcuucucccucaguauuua

SEQ ID NO: 16346 - RNA, 19 nt, Homo sapiens
  misc_RNA (1)...(19): siRNA sense strand
uugagaaucuuccugaaug

SEQ ID NO: 16347 - RNA, 19 nt, Homo sapiens
  misc_RNA (1)...(19): siRNA sense strand
gaccaggaucucuauauug

SEQ ID NO: 16348 - RNA, 19 nt, Homo sapiens
  misc_RNA (1)...(19): siRNA sense strand
ugaauggguuacugcuaaa

SEQ ID NO: 16349 - RNA, 19 nt, Homo sapiens
  misc_RNA (1)...(19): siRNA sense strand
gccucuggcucuuuaugua

SEQ ID NO: 16350 - RNA, 19 nt, Homo sapiens
  misc_RNA (1)...(19): siRNA sense strand
cuacauagccccaacagua

SEQ ID NO: 16351 - RNA, 19 nt, Homo sapiens
  misc_RNA (1)...(19): siRNA sense strand
aagagucuccugauuauga

SEQ ID NO: 16352 - RNA, 19 nt, Homo sapiens
  misc_RNA (1)...(19): siRNA sense strand
aggaaacagugaaggaauu

SEQ ID NO: 16353 - RNA, 19 nt, Homo sapiens
  misc_RNA (1)...(19): siRNA sense strand
caggaaaugcugugauuau

SEQ ID NO: 16354 - RNA, 19 nt, Homo sapiens
  misc_RNA (1)...(19): siRNA sense strand
gggaaaaguccauguuaua

SEQ ID NO: 16355 - RNA, 19 nt, Homo sapiens
  misc_RNA (1)...(19): siRNA sense strand
gaaacgguucaacaaagaa

SEQ ID NO: 16356 - RNA, 19 nt, Homo sapiens
  misc_RNA (1)...(19): siRNA sense strand
ucagcgucccuguuuauua

SEQ ID NO: 16357 - RNA, 19 nt, Homo sapiens
  misc_RNA (1)...(19): siRNA sense strand
gauaaucggagcuuggaau

SEQ ID NO: 16358 - RNA, 19 nt, Homo sapiens
  misc_RNA (1)...(19): siRNA sense strand
ggugaugcaagaagaaauu

SEQ ID NO: 16359 - RNA, 19 nt, Homo sapiens
  misc_RNA (1)...(19): siRNA sense strand
aaaagagucuccugauuau

SEQ ID NO: 16360 - RNA, 19 nt, Homo sapiens
  misc_RNA (1)...(19): siRNA sense strand
gucaggaagucauuacugu

SEQ ID NO: 16361 - RNA, 19 nt, Homo sapiens
  misc_RNA (1)...(19): siRNA sense strand
gcaagagugaauucaaugu

SEQ ID NO: 16362 - RNA, 19 nt, Homo sapiens
  misc_RNA (1)...(19): siRNA sense strand
uauggaagauuaaggaaac

SEQ ID NO: 16363 - RNA, 19 nt, Homo sapiens
  misc_RNA (1)...(19): siRNA sense strand
gcuaaaccaguuaagaaga

SEQ ID NO: 16364 - RNA, 19 nt, Homo sapiens
  misc_RNA (1)...(19): siRNA sense strand
auacuaaguuugcuugaag

SEQ ID NO: 16365 - RNA, 19 nt, Homo sapiens
  misc_RNA (1)...(19): siRNA sense strand
aaucggagcuuggaauuac

SEQ ID NO: 16366 - RNA, 19 nt, Homo sapiens
  misc_RNA (1)...(19): siRNA sense strand
ugcaggaaaugcugugauu

SEQ ID NO: 16367 - RNA, 19 nt, Homo sapiens
  misc_RNA (1)...(19): siRNA sense strand
gcuaacaaacucagauauc

SEQ ID NO: 16368 - RNA, 19 nt, Homo sapiens
  misc_RNA (1)...(19): siRNA sense strand
gagaaggugcuaacaaacu

SEQ ID NO: 16369 - RNA, 19 nt, Homo sapiens
  misc_RNA (1)...(19): siRNA sense strand
gcacuucacgcucaacucu

SEQ ID NO: 16370 - RNA, 19 nt, Homo sapiens
  misc_RNA (1)...(19): siRNA sense strand
gcacccgacuauauucucu

SEQ ID NO: 16371 - RNA, 19 nt, Homo sapiens
  misc_RNA (1)...(19): siRNA sense strand
uaauggugguguugaggaa

SEQ ID NO: 16372 - RNA, 19 nt, Homo sapiens
  misc_RNA (1)...(19): siRNA sense strand
aagagugaauucaaugugu

SEQ ID NO: 16373 - RNA, 19 nt, Homo sapiens
  misc_RNA (1)...(19): siRNA sense strand
gcaaagcuucucccucagu

SEQ ID NO: 16374 - RNA, 19 nt, Homo sapiens
  misc_RNA (1)...(19): siRNA sense strand
ucaucagcgucccuguuua

SEQ ID NO: 16375 - RNA, 19 nt, Homo sapiens
  misc_RNA (1)...(19): siRNA sense strand
guacagucaggaagucauu

SEQ ID NO: 16376 - RNA, 19 nt, Homo sapiens
  misc_RNA (1)...(19): siRNA sense strand
accaggaucucuauauugu

SEQ ID NO: 16377 - RNA, 19 nt, Homo sapiens
  misc_RNA (1)...(19): siRNA sense strand
gauuauaaagccuucugaa

SEQ ID NO: 16378 - RNA, 19 nt, Homo sapiens
  misc_RNA (1)...(19): siRNA sense strand
gugcuaacaaacucagaua

SEQ ID NO: 16379 - RNA, 19 nt, Homo sapiens
  misc_RNA (1)...(19): siRNA sense strand
caucagcgucccuguuuau

SEQ ID NO: 16380 - RNA, 19 nt, Homo sapiens
  misc_RNA (1)...(19): siRNA sense strand
agccaucgcugcaggaaau

SEQ ID NO: 16381 - RNA, 19 nt, Homo sapiens
  misc_RNA (1)...(19): siRNA sense strand
agaagaacgugcucaccau

SEQ ID NO: 16382 - RNA, 19 nt, Homo sapiens
  misc_RNA (1)...(19): siRNA sense strand
ggaaaaguccauguuauau

SEQ ID NO: 16383 - RNA, 19 nt, Homo sapiens
  misc_RNA (1)...(19): siRNA sense strand
uaaggaaacagugaaggaa

SEQ ID NO: 16384 - RNA, 19 nt, Homo sapiens
  misc_RNA (1)...(19): siRNA sense strand
cgacuauauucucugugaa

SEQ ID NO: 16385 - RNA, 19 nt, Homo sapiens
  misc_RNA (1)...(19): siRNA sense strand
caggagcgcgagaaggaua

SEQ ID NO: 16386 - RNA, 19 nt, Homo sapiens
  misc_RNA (1)...(19): siRNA sense strand
ucagauauccucccaacag

SEQ ID NO: 16387 - RNA, 19 nt, Homo sapiens
  misc_RNA (1)...(19): siRNA sense strand
ugaauucaauguguacagu

SEQ ID NO: 16388 - RNA, 19 nt, Homo sapiens
  misc_RNA (1)...(19): siRNA sense strand
guauggaagauuaaggaaa

SEQ ID NO: 16389 - RNA, 19 nt, Homo sapiens
  misc_RNA (1)...(19): siRNA sense strand
gaaaauacagccaagaucu

SEQ ID NO: 16390 - RNA, 19 nt, Homo sapiens
  misc_RNA (1)...(19): siRNA sense strand
gagggaaaaguccauguua

SEQ ID NO: 16391 - RNA, 19 nt, Homo sapiens
  misc_RNA (1)...(19): siRNA sense strand
ucacuuuccuggguauugu

SEQ ID NO: 16392 - RNA, 19 nt, Homo sapiens
  misc_RNA (1)...(19): siRNA sense strand
ggucuccuguugcucacuu

SEQ ID NO: 16393 - RNA, 19 nt, Homo sapiens
  misc_RNA (1)...(19): siRNA sense strand
acuucacgcucaacucuuu

SEQ ID NO: 16394 - RNA, 19 nt, Homo sapiens
  misc_RNA (1)...(19): siRNA sense strand
gcauaaccauaagcucauc

SEQ ID NO: 16395 - RNA, 19 nt, Homo sapiens
  misc_RNA (1)...(19): siRNA sense strand
uggaugaggccuauauuca

SEQ ID NO: 16396 - RNA, 19 nt, Homo sapiens
  misc_RNA (1)...(19): siRNA sense strand
gcuugagaaucuuccugaa

SEQ ID NO: 16397 - RNA, 19 nt, Homo sapiens
  misc_RNA (1)...(19): siRNA sense strand
ugugaagcaucccuccaaa

SEQ ID NO: 16398 - RNA, 19 nt, Homo sapiens
  misc_RNA (1)...(19): siRNA sense strand
cugcuaaaccaguuaagaa

SEQ ID NO: 16399 - RNA, 19 nt, Homo sapiens
  misc_RNA (1)...(19): siRNA sense strand
caagagugaauucaaugug

SEQ ID NO: 16400 - RNA, 19 nt, Homo sapiens
  misc_RNA (1)...(19): siRNA sense strand
auaaagccuucugaacuga

SEQ ID NO: 16401 - RNA, 19 nt, Homo sapiens
  misc_RNA (1)...(19): siRNA sense strand
aaacacugcgguuggcaaa

SEQ ID NO: 16402 - RNA, 19 nt, Homo sapiens
  misc_RNA (1)...(19): siRNA sense strand
aagcaucccuccaaaauca

SEQ ID NO: 16403 - RNA, 19 nt, Homo sapiens
  misc_RNA (1)...(19): siRNA sense strand
ggaugaggccuauauucag

SEQ ID NO: 16404 - RNA, 19 nt, Homo sapiens
  misc_RNA (1)...(19): siRNA sense strand
agaaggugcuaacaaacuc

SEQ ID NO: 16405 - RNA, 19 nt, Homo sapiens
  misc_RNA (1)...(19): siRNA sense strand
caaggugaugcaagaagaa

SEQ ID NO: 16406 - RNA, 19 nt, Homo sapiens
  misc_RNA (1)...(19): siRNA sense strand
agagucuccugauuaugaa

SEQ ID NO: 16407 - RNA, 19 nt, Homo sapiens
  misc_RNA (1)...(19): siRNA sense strand
ggaguggugcugauaaucg

SEQ ID NO: 16408 - RNA, 19 nt, Homo sapiens
  misc_RNA (1)...(19): siRNA sense strand
ccaaagcccuggaaacuaa

SEQ ID NO: 16409 - RNA, 19 nt, Homo sapiens
  misc_RNA (1)...(19): siRNA sense strand
ggacaugccugcaccaaga

SEQ ID NO: 16410 - RNA, 19 nt, Homo sapiens
  misc_RNA (1)...(19): siRNA sense strand
gaaguauacuccagaacaa

SEQ ID NO: 16411 - RNA, 19 nt, Homo sapiens
  misc_RNA (1)...(19): siRNA sense strand
agaaggagcucucagaaau

SEQ ID NO: 16412 - RNA, 19 nt, Homo sapiens
  misc_RNA (1)...(19): siRNA sense strand
gaaauugcccagagcauug

SEQ ID NO: 16413 - RNA, 19 nt, Homo sapiens
  misc_RNA (1)...(19): siRNA sense strand
gauccuggcugcagaugaa

SEQ ID NO: 16414 - RNA, 19 nt, Homo sapiens
  misc_RNA (1)...(19): siRNA sense strand
agggaaagcuguucagaaa

SEQ ID NO: 16415 - RNA, 19 nt, Homo sapiens
  misc_RNA (1)...(19): siRNA sense strand
gaagaaggagcucucagaa

SEQ ID NO: 16416 - RNA, 19 nt, Homo sapiens
  misc_RNA (1)...(19): siRNA sense strand
caagaaagaugguguugac

SEQ ID NO: 16417 - RNA, 19 nt, Homo sapiens
  misc_RNA (1)...(19): siRNA sense strand
caagaaguauacuccagaa

SEQ ID NO: 16418 - RNA, 19 nt, Homo sapiens
  misc_RNA (1)...(19): siRNA sense strand
ggacugguaccuauuguug

SEQ ID NO: 16419 - RNA, 19 nt, Homo sapiens
  misc_RNA (1)...(19): siRNA sense strand
gaaggagcucucagaaauu

SEQ ID NO: 16420 - RNA, 19 nt, Homo sapiens
  misc_RNA (1)...(19): siRNA sense strand
caaagaaaccaccauucaa

SEQ ID NO: 16421 - RNA, 19 nt, Homo sapiens
  misc_RNA (1)...(19): siRNA sense strand
ucaaugcuaucaaccuuug

SEQ ID NO: 16422 - RNA, 19 nt, Homo sapiens
  misc_RNA (1)...(19): siRNA sense strand
agaauggacugguaccuau

SEQ ID NO: 16423 - RNA, 19 nt, Homo sapiens
  misc_RNA (1)...(19): siRNA sense strand
aaacaaagaaaccaccauu

SEQ ID NO: 16424 - RNA, 19 nt, Homo sapiens
  misc_RNA (1)...(19): siRNA sense strand
gcaggaacaaacaaagaaa

SEQ ID NO: 16425 - RNA, 19 nt, Homo sapiens
  misc_RNA (1)...(19): siRNA sense strand
ggaaaacacugaagagaac

SEQ ID NO: 16426 - RNA, 19 nt, Homo sapiens
  misc_RNA (1)...(19): siRNA sense strand
uggcaaggcugcaaacaag

SEQ ID NO: 16427 - RNA, 19 nt, Homo sapiens
  misc_RNA (1)...(19): siRNA sense strand
aaggagcucucagaaauug

SEQ ID NO: 16428 - RNA, 19 nt, Homo sapiens
  misc_RNA (1)...(19): siRNA sense strand
acaaagaaaccaccauuca

SEQ ID NO: 16429 - RNA, 19 nt, Homo sapiens
  misc_RNA (1)...(19): siRNA sense strand
gguccuggcugcugucuac

SEQ ID NO: 16430 - RNA, 19 nt, Homo sapiens
  misc_RNA (1)...(19): siRNA sense strand
ggaaccgccugcagaggau

SEQ ID NO: 16431 - RNA, 19 nt, Homo sapiens
  misc_RNA (1)...(19): siRNA sense strand
ucagcagaauggacuggua

SEQ ID NO: 16432 - RNA, 19 nt, Homo sapiens
  misc_RNA (1)...(19): siRNA sense strand
ccaaaggacaguauguuca

SEQ ID NO: 16433 - RNA, 19 nt, Homo sapiens
  misc_RNA (1)...(19): siRNA sense strand
gaggauugccgaccagugu

SEQ ID NO: 16434 - RNA, 19 nt, Homo sapiens
  misc_RNA (1)...(19): siRNA sense strand
cagccucgcuauccaggaa

SEQ ID NO: 16435 - RNA, 19 nt, Homo sapiens
  misc_RNA (1)...(19): siRNA sense strand
aaagaaaccaccauucaag

SEQ ID NO: 16436 - RNA, 19 nt, Homo sapiens
  misc_RNA (1)...(19): siRNA sense strand
gcaaggcugcaaacaagga

SEQ ID NO: 16437 - RNA, 19 nt, Homo sapiens
  misc_RNA (1)...(19): siRNA sense strand
ccucaaugcuaucaaccuu

SEQ ID NO: 16438 - RNA, 19 nt, Homo sapiens
  misc_RNA (1)...(19): siRNA sense strand
caaccucaaugcuaucaac

SEQ ID NO: 16439 - RNA, 19 nt, Homo sapiens
  misc_RNA (1)...(19): siRNA sense strand
guacaagaaagaugguguu

SEQ ID NO: 16440 - RNA, 19 nt, Homo sapiens
  misc_RNA (1)...(19): siRNA sense strand
uaucaaccuuugcccucua

SEQ ID NO: 16441 - RNA, 19 nt, Homo sapiens
  misc_RNA (1)...(19): siRNA sense strand
gaauggacugguaccuauu

SEQ ID NO: 16442 - RNA, 19 nt, Homo sapiens
  misc_RNA (1)...(19): siRNA sense strand
gcugugcucaguacaagaa

SEQ ID NO: 16443 - RNA, 19 nt, Homo sapiens
  misc_RNA (1)...(19): siRNA sense strand
agaagaaggagcucucaga

SEQ ID NO: 16444 - RNA, 19 nt, Homo sapiens
  misc_RNA (1)...(19): siRNA sense strand
acgagacccucuaccagaa

SEQ ID NO: 16445 - RNA, 19 nt, Homo sapiens
  misc_RNA (1)...(19): siRNA sense strand
acugguaccuauuguugaa

SEQ ID NO: 16446 - RNA, 19 nt, Homo sapiens
  misc_RNA (1)...(19): siRNA sense strand
cagaauggacugguaccua

SEQ ID NO: 16447 - RNA, 19 nt, Homo sapiens
  misc_RNA (1)...(19): siRNA sense strand
agaaagaugguguugacuu

SEQ ID NO: 16448 - RNA, 19 nt, Homo sapiens
  misc_RNA (1)...(19): siRNA sense strand
agagguaauuccugaugga

SEQ ID NO: 16449 - RNA, 19 nt, Homo sapiens
  misc_RNA (1)...(19): siRNA sense strand
aagaaggagcucucagaaa

SEQ ID NO: 16450 - RNA, 19 nt, Homo sapiens
  misc_RNA (1)...(19): siRNA sense strand
agaaguauacuccagaaca

SEQ ID NO: 16451 - RNA, 19 nt, Homo sapiens
  misc_RNA (1)...(19): siRNA sense strand
gcgcugugcucaguacaag

SEQ ID NO: 16452 - RNA, 19 nt, Homo sapiens
  misc_RNA (1)...(19): siRNA sense strand
gccaaaggacaguauguuc

SEQ ID NO: 16453 - RNA, 19 nt, Homo sapiens
  misc_RNA (1)...(19): siRNA sense strand
cagggaaagcuguucagaa

SEQ ID NO: 16454 - RNA, 19 nt, Homo sapiens
  misc_RNA (1)...(19): siRNA sense strand
guagcuauggccaccguaa

SEQ ID NO: 16455 - RNA, 19 nt, Homo sapiens
  misc_RNA (1)...(19): siRNA sense strand
agaaauugcccagagcauu

SEQ ID NO: 16456 - RNA, 19 nt, Homo sapiens
  misc_RNA (1)...(19): siRNA sense strand
uggcaugagugaagaggau

SEQ ID NO: 16457 - RNA, 19 nt, Homo sapiens
  misc_RNA (1)...(19): siRNA sense strand
gcucuccaccguacuguuc

SEQ ID NO: 16458 - RNA, 19 nt, Homo sapiens
  misc_RNA (1)...(19): siRNA sense strand
cauggugacugcuggacau

SEQ ID NO: 16459 - RNA, 19 nt, Homo sapiens
  misc_RNA (1)...(19): siRNA sense strand
uggagaccaugaccuggaa

SEQ ID NO: 16460 - RNA, 19 nt, Homo sapiens
  misc_RNA (1)...(19): siRNA sense strand
ccagagguaauuccugaug

SEQ ID NO: 16461 - RNA, 19 nt, Homo sapiens
  misc_RNA (1)...(19): siRNA sense strand
ccaggaggcuuuuaugaag

SEQ ID NO: 16462 - RNA, 19 nt, Homo sapiens
  misc_RNA (1)...(19): siRNA sense strand
ggccaaaggacaguauguu

SEQ ID NO: 16463 - RNA, 19 nt, Homo sapiens
  misc_RNA (1)...(19): siRNA sense strand
gcagaagaaggagcucuca

SEQ ID NO: 16464 - RNA, 19 nt, Homo sapiens
  misc_RNA (1)...(19): siRNA sense strand
aagaugguguugacuuugg

SEQ ID NO: 16465 - RNA, 19 nt, Homo sapiens
  misc_RNA (1)...(19): siRNA sense strand
cguggugggaaucaaguua

SEQ ID NO: 16466 - RNA, 19 nt, Homo sapiens
  misc_RNA (1)...(19): siRNA sense strand
ucacagccugcuauaccua

SEQ ID NO: 16467 - RNA, 19 nt, Homo sapiens
  misc_RNA (1)...(19): siRNA sense strand
gcucaguacaagaaagaug

SEQ ID NO: 16468 - RNA, 19 nt, Homo sapiens
  misc_RNA (1)...(19): siRNA sense strand
cccaggagcagaagaagga

SEQ ID NO: 16469 - RNA, 19 nt, Homo sapiens
  misc_RNA (1)...(19): siRNA sense strand
guucagaaacauccucaag

SEQ ID NO: 16470 - RNA, 19 nt, Homo sapiens
  misc_RNA (1)...(19): siRNA sense strand
acucucaaccucaaugcua

SEQ ID NO: 16471 - RNA, 19 nt, Homo sapiens
  misc_RNA (1)...(19): siRNA sense strand
ucacccaggagcagaagaa

SEQ ID NO: 16472 - RNA, 19 nt, Homo sapiens
  misc_RNA (1)...(19): siRNA sense strand
gugcucaguacaagaaaga

SEQ ID NO: 16473 - RNA, 19 nt, Homo sapiens
  misc_RNA (1)...(19): siRNA sense strand
agaaggacagccagggaaa

SEQ ID NO: 16474 - RNA, 19 nt, Homo sapiens
  misc_RNA (1)...(19): siRNA sense strand
gaaggacagccagggaaag

SEQ ID NO: 16475 - RNA, 19 nt, Homo sapiens
  misc_RNA (1)...(19): siRNA sense strand
gaucguggugggaaucaag

SEQ ID NO: 16476 - RNA, 19 nt, Homo sapiens
  misc_RNA (1)...(19): siRNA sense strand
guggcaaggcugcaaacaa

SEQ ID NO: 16477 - RNA, 19 nt, Homo sapiens
  misc_RNA (1)...(19): siRNA sense strand
uaccaaagcccuggaaacu

SEQ ID NO: 16478 - RNA, 19 nt, Homo sapiens
  misc_RNA (1)...(19): siRNA sense strand
ggaacaaacaaagaaacca

SEQ ID NO: 16479 - RNA, 19 nt, Homo sapiens
  misc_RNA (1)...(19): siRNA sense strand
ccuaccaggccaacaauug

SEQ ID NO: 16480 - RNA, 19 nt, Homo sapiens
  misc_RNA (1)...(19): siRNA sense strand
uggcgcugcuggugcugua

SEQ ID NO: 16481 - RNA, 19 nt, Homo sapiens
  misc_RNA (1)...(19): siRNA sense strand
agaccuaccaggccaacaa

SEQ ID NO: 16482 - RNA, 19 nt, Homo sapiens
  misc_RNA (1)...(19): siRNA sense strand
gcaccaguggccucaucuu

SEQ ID NO: 16483 - RNA, 19 nt, Homo sapiens
  misc_RNA (1)...(19): siRNA sense strand
cuccaggcaucccacaaga

SEQ ID NO: 16484 - RNA, 19 nt, Homo sapiens
  misc_RNA (1)...(19): siRNA sense strand
gaugagaucuguccgauuu

SEQ ID NO: 16485 - RNA, 19 nt, Homo sapiens
  misc_RNA (1)...(19): siRNA sense strand
ccaaugcaauuccacuuua

SEQ ID NO: 16486 - RNA, 19 nt, Homo sapiens
  misc_RNA (1)...(19): siRNA sense strand
ggacaaauguagcccaaau

SEQ ID NO: 16487 - RNA, 19 nt, Homo sapiens
  misc_RNA (1)...(19): siRNA sense strand
gagcuucuauccagucuuu

SEQ ID NO: 16488 - RNA, 19 nt, Homo sapiens
  misc_RNA (1)...(19): siRNA sense strand
ccacauugaugaauacauu

SEQ ID NO: 16489 - RNA, 19 nt, Homo sapiens
  misc_RNA (1)...(19): siRNA sense strand
gcagauuacuggugacuau

SEQ ID NO: 16490 - RNA, 19 nt, Homo sapiens
  misc_RNA (1)...(19): siRNA sense strand
ugaaacaucuuccaccaaa

SEQ ID NO: 16491 - RNA, 19 nt, Homo sapiens
  misc_RNA (1)...(19): siRNA sense strand
gaagacagacaauuacauu

SEQ ID NO: 16492 - RNA, 19 nt, Homo sapiens
  misc_RNA (1)...(19): siRNA sense strand
ggaaggcccugcuggaaau

SEQ ID NO: 16493 - RNA, 19 nt, Homo sapiens
  misc_RNA (1)...(19): siRNA sense strand
agaagaaucugacccuaaa

SEQ ID NO: 16494 - RNA, 19 nt, Homo sapiens
  misc_RNA (1)...(19): siRNA sense strand
gaagagaaacaaauugaug

SEQ ID NO: 16495 - RNA, 19 nt, Homo sapiens
  misc_RNA (1)...(19): siRNA sense strand
cuaaugaucucacugucua

SEQ ID NO: 16496 - RNA, 19 nt, Homo sapiens
  misc_RNA (1)...(19): siRNA sense strand
gaaggacgguguaguuuac

SEQ ID NO: 16497 - RNA, 19 nt, Homo sapiens
  misc_RNA (1)...(19): siRNA sense strand
gacggaagacuguuaauuu

SEQ ID NO: 16498 - RNA, 19 nt, Homo sapiens
  misc_RNA (1)...(19): siRNA sense strand
ggucuuaaaucaacagaau

SEQ ID NO: 16499 - RNA, 19 nt, Homo sapiens
  misc_RNA (1)...(19): siRNA sense strand
ccaaauugaugcugacaga

SEQ ID NO: 16500 - RNA, 19 nt, Homo sapiens
  misc_RNA (1)...(19): siRNA sense strand
uaugaaaccugguguuaug

SEQ ID NO: 16501 - RNA, 19 nt, Homo sapiens
  misc_RNA (1)...(19): siRNA sense strand
agaauuuccuuccacauuu

SEQ ID NO: 16502 - RNA, 19 nt, Homo sapiens
  misc_RNA (1)...(19): siRNA sense strand
gaaacaaauugaugaugca

SEQ ID NO: 16503 - RNA, 19 nt, Homo sapiens
  misc_RNA (1)...(19): siRNA sense strand
ggaagacuguuaauuuguc

SEQ ID NO: 16504 - RNA, 19 nt, Homo sapiens
  misc_RNA (1)...(19): siRNA sense strand
gagaagaaucugacccuaa

SEQ ID NO: 16505 - RNA, 19 nt, Homo sapiens
  misc_RNA (1)...(19): siRNA sense strand
ucucauggccuaaauuuaa

SEQ ID NO: 16506 - RNA, 19 nt, Homo sapiens
  misc_RNA (1)...(19): siRNA sense strand
agaaauacaugcagaaguc

SEQ ID NO: 16507 - RNA, 19 nt, Homo sapiens
  misc_RNA (1)...(19): siRNA sense strand
ccucugaagucaaagauga

SEQ ID NO: 16508 - RNA, 19 nt, Homo sapiens
  misc_RNA (1)...(19): siRNA sense strand
gcuaugaaaccugguguua

SEQ ID NO: 16509 - RNA, 19 nt, Homo sapiens
  misc_RNA (1)...(19): siRNA sense strand
gaugaugaguccaaacaca

SEQ ID NO: 16510 - RNA, 19 nt, Homo sapiens
  misc_RNA (1)...(19): siRNA sense strand
gaugcaagcacacauauuc

SEQ ID NO: 16511 - RNA, 19 nt, Homo sapiens
  misc_RNA (1)...(19): siRNA sense strand
gaacgaggcaugaauacgu

SEQ ID NO: 16512 - RNA, 19 nt, Homo sapiens
  misc_RNA (1)...(19): siRNA sense strand
ggguuacaguugaagauuu

SEQ ID NO: 16513 - RNA, 19 nt, Homo sapiens
  misc_RNA (1)...(19): siRNA sense strand
ggacggaagacuguuaauu

SEQ ID NO: 16514 - RNA, 19 nt, Homo sapiens
  misc_RNA (1)...(19): siRNA sense strand
gcacuaugcauacgugaga

SEQ ID NO: 16515 - RNA, 19 nt, Homo sapiens
  misc_RNA (1)...(19): siRNA sense strand
aagcugagcaccugugaua

SEQ ID NO: 16516 - RNA, 19 nt, Homo sapiens
  misc_RNA (1)...(19): siRNA sense strand
cuuaugaccugacuguuga

SEQ ID NO: 16517 - RNA, 19 nt, Homo sapiens
  misc_RNA (1)...(19): siRNA sense strand
ugaaggacgguguaguuua

SEQ ID NO: 16518 - RNA, 19 nt, Homo sapiens
  misc_RNA (1)...(19): siRNA sense strand
caaggacggaagacuguua

SEQ ID NO: 16519 - RNA, 19 nt, Homo sapiens
  misc_RNA (1)...(19): siRNA sense strand
gaauccaucuuacacuuac

SEQ ID NO: 16520 - RNA, 19 nt, Homo sapiens
  misc_RNA (1)...(19): siRNA sense strand
caaacacaguggccacaug

SEQ ID NO: 16521 - RNA, 19 nt, Homo sapiens
  misc_RNA (1)...(19): siRNA sense strand
uuucagagagugcagauua

SEQ ID NO: 16522 - RNA, 19 nt, Homo sapiens
  misc_RNA (1)...(19): siRNA sense strand
uuaacgagauggacgaguu

SEQ ID NO: 16523 - RNA, 19 nt, Homo sapiens
  misc_RNA (1)...(19): siRNA sense strand
caggaucuaugauguguuc

SEQ ID NO: 16524 - RNA, 19 nt, Homo sapiens
  misc_RNA (1)...(19): siRNA sense strand
gaaaggaacgaggcaugaa

SEQ ID NO: 16525 - RNA, 19 nt, Homo sapiens
  misc_RNA (1)...(19): siRNA sense strand
acggaagacuguuaauuug

SEQ ID NO: 16526 - RNA, 19 nt, Homo sapiens
  misc_RNA (1)...(19): siRNA sense strand
gcauaucacuggcuuugac

SEQ ID NO: 16527 - RNA, 19 nt, Homo sapiens
  misc_RNA (1)...(19): siRNA sense strand
uaguuuacgucuauccuaa

SEQ ID NO: 16528 - RNA, 19 nt, Homo sapiens
  misc_RNA (1)...(19): siRNA sense strand
ccaccaaacugucccacau

SEQ ID NO: 16529 - RNA, 19 nt, Homo sapiens
  misc_RNA (1)...(19): siRNA sense strand
cagaugacccaaugcaauu

SEQ ID NO: 16530 - RNA, 19 nt, Homo sapiens
  misc_RNA (1)...(19): siRNA sense strand
gaaucugacccuaaaggaa

SEQ ID NO: 16531 - RNA, 19 nt, Homo sapiens
  misc_RNA (1)...(19): siRNA sense strand
uuacgucuauccuaaugaa

SEQ ID NO: 16532 - RNA, 19 nt, Homo sapiens
  misc_RNA (1)...(19): siRNA sense strand
agaagucguuucagagguu

SEQ ID NO: 16533 - RNA, 19 nt, Homo sapiens
  misc_RNA (1)...(19): siRNA sense strand
ccacagaagccaggagaaa

SEQ ID NO: 16534 - RNA, 19 nt, Homo sapiens
  misc_RNA (1)...(19): siRNA sense strand
gguguuaugaacucaauuu

SEQ ID NO: 16535 - RNA, 19 nt, Homo sapiens
  misc_RNA (1)...(19): siRNA sense strand
ccuacuacauguaugcaaa

SEQ ID NO: 16536 - RNA, 19 nt, Homo sapiens
  misc_RNA (1)...(19): siRNA sense strand
acagacaaccuuccugaaa

SEQ ID NO: 16537 - RNA, 19 nt, Homo sapiens
  misc_RNA (1)...(19): siRNA sense strand
gaauacauuuccucaucuc

SEQ ID NO: 16538 - RNA, 19 nt, Homo sapiens
  misc_RNA (1)...(19): siRNA sense strand
ugucccacauugaugaaua

SEQ ID NO: 16539 - RNA, 19 nt, Homo sapiens
  misc_RNA (1)...(19): siRNA sense strand
gcucaaggaccuguuaaga

SEQ ID NO: 16540 - RNA, 19 nt, Homo sapiens
  misc_RNA (1)...(19): siRNA sense strand
cuaaaaccccuuccaaaua

SEQ ID NO: 16541 - RNA, 19 nt, Homo sapiens
  misc_RNA (1)...(19): siRNA sense strand
ugaaauuguuugcaaaggu

SEQ ID NO: 16542 - RNA, 19 nt, Homo sapiens
  misc_RNA (1)...(19): siRNA sense strand
ccaaauacuugcggaacau

SEQ ID NO: 16543 - RNA, 19 nt, Homo sapiens
  misc_RNA (1)...(19): siRNA sense strand
agaaagggcuaaugaucuc

SEQ ID NO: 16544 - RNA, 19 nt, Homo sapiens
  misc_RNA (1)...(19): siRNA sense strand
gcaugaauacguuucuguu

SEQ ID NO: 16545 - RNA, 19 nt, Homo sapiens
  misc_RNA (1)...(19): siRNA sense strand
gaauuuccuuccacauuuu

SEQ ID NO: 16546 - RNA, 19 nt, Homo sapiens
  misc_RNA (1)...(19): siRNA sense strand
acucccagcugaagagaaa

SEQ ID NO: 16547 - RNA, 19 nt, Homo sapiens
  misc_RNA (1)...(19): siRNA sense strand
gaaaccugguguuaugaac

SEQ ID NO: 16548 - RNA, 19 nt, Homo sapiens
  misc_RNA (1)...(19): siRNA sense strand
uagccuauuucuagaguau

SEQ ID NO: 16549 - RNA, 19 nt, Homo sapiens
  misc_RNA (1)...(19): siRNA sense strand
uacgggaccucuacuugaa

SEQ ID NO: 16550 - RNA, 19 nt, Homo sapiens
  misc_RNA (1)...(19): siRNA sense strand
ugaaguuccucuccuccaa

SEQ ID NO: 16551 - RNA, 19 nt, Homo sapiens
  misc_RNA (1)...(19): siRNA sense strand
cagcaaagaugagccuaag

SEQ ID NO: 16552 - RNA, 19 nt, Homo sapiens
  misc_RNA (1)...(19): siRNA sense strand
ugaagcagcagucagcaaa

SEQ ID NO: 16553 - RNA, 19 nt, Homo sapiens
  misc_RNA (1)...(19): siRNA sense strand
ugagaugcaagcacacaua

SEQ ID NO: 16554 - RNA, 19 nt, Homo sapiens
  misc_RNA (1)...(19): siRNA sense strand
gcugagcaccugugauaug

SEQ ID NO: 16555 - RNA, 19 nt, Homo sapiens
  misc_RNA (1)...(19): siRNA sense strand
gggaauauuuugccacuau

SEQ ID NO: 16556 - RNA, 19 nt, Homo sapiens
  misc_RNA (1)...(19): siRNA sense strand
ggacacccauauccaugca

SEQ ID NO: 16557 - RNA, 19 nt, Homo sapiens
  misc_RNA (1)...(19): siRNA sense strand
gcaaaugagagcuucuauc

SEQ ID NO: 16558 - RNA, 19 nt, Homo sapiens
  misc_RNA (1)...(19): siRNA sense strand
gaggaaggcccugcuggaa

SEQ ID NO: 16559 - RNA, 19 nt, Homo sapiens
  misc_RNA (1)...(19): siRNA sense strand
gagaugcaagcacacauau

SEQ ID NO: 16560 - RNA, 19 nt, Homo sapiens
  misc_RNA (1)...(19): siRNA sense strand
ugaccugacuguugauucu

SEQ ID NO: 16561 - RNA, 19 nt, Homo sapiens
  misc_RNA (1)...(19): siRNA sense strand
gcaccaaagagaagaaucu

SEQ ID NO: 16562 - RNA, 19 nt, Homo sapiens
  misc_RNA (1)...(19): siRNA sense strand
gcuaucaccucaaaaugaa

SEQ ID NO: 16563 - RNA, 19 nt, Homo sapiens
  misc_RNA (1)...(19): siRNA sense strand
caaaugagagcuucuaucc

SEQ ID NO: 16564 - RNA, 19 nt, Homo sapiens
  misc_RNA (1)...(19): siRNA sense strand
gaacagugucuugcagugu

SEQ ID NO: 16565 - RNA, 19 nt, Homo sapiens
  misc_RNA (1)...(19): siRNA sense strand
uaaaguuucugggcgacaa

SEQ ID NO: 16566 - RNA, 19 nt, Homo sapiens
  misc_RNA (1)...(19): siRNA sense strand
caaacugucccacauugau

SEQ ID NO: 16567 - RNA, 19 nt, Homo sapiens
  misc_RNA (1)...(19): siRNA sense strand
ccgcauggccuaucgcuau

SEQ ID NO: 16568 - RNA, 19 nt, Homo sapiens
  misc_RNA (1)...(19): siRNA sense strand
gauauccggaggacaaaug

SEQ ID NO: 16569 - RNA, 19 nt, Homo sapiens
  misc_RNA (1)...(19): siRNA sense strand
agaauccaucuuacacuua

SEQ ID NO: 16570 - RNA, 19 nt, Homo sapiens
  misc_RNA (1)...(19): siRNA sense strand
aggcuuggguagcaaauga

SEQ ID NO: 16571 - RNA, 19 nt, Homo sapiens
  misc_RNA (1)...(19): siRNA sense strand
uaaaaccccuuccaaauac

SEQ ID NO: 16572 - RNA, 19 nt, Homo sapiens
  misc_RNA (1)...(19): siRNA sense strand
ugaauacauuuccucaucu

SEQ ID NO: 16573 - RNA, 19 nt, Homo sapiens
  misc_RNA (1)...(19): siRNA sense strand
cgacaauuaccuugaggaa

SEQ ID NO: 16574 - RNA, 19 nt, Homo sapiens
  misc_RNA (1)...(19): siRNA sense strand
ucagaaagggcuaaugauc

SEQ ID NO: 16575 - RNA, 19 nt, Homo sapiens
  misc_RNA (1)...(19): siRNA sense strand
ucaccacuaaguaacaaua

SEQ ID NO: 16576 - RNA, 19 nt, Homo sapiens
  misc_RNA (1)...(19): siRNA sense strand
ccaugucaccacuaaguaa

SEQ ID NO: 16577 - RNA, 19 nt, Homo sapiens
  misc_RNA (1)...(19): siRNA sense strand
ucaacagccugagaaagga

SEQ ID NO: 16578 - RNA, 19 nt, Homo sapiens
  misc_RNA (1)...(19): siRNA sense strand
gcaugaaccagaaacaucu

SEQ ID NO: 16579 - RNA, 19 nt, Homo sapiens
  misc_RNA (1)...(19): siRNA sense strand
acccaaaucuggacaccuu

SEQ ID NO: 16580 - RNA, 19 nt, Homo sapiens
  misc_RNA (1)...(19): siRNA sense strand
cagacaaccuuccugaaaa

SEQ ID NO: 16581 - RNA, 19 nt, Homo sapiens
  misc_RNA (1)...(19): siRNA sense strand
acuugaagacagacaauua

SEQ ID NO: 16582 - RNA, 19 nt, Homo sapiens
  misc_RNA (1)...(19): siRNA sense strand
cacauguucuccuccaaga

SEQ ID NO: 16583 - RNA, 19 nt, Homo sapiens
  misc_RNA (1)...(19): siRNA sense strand
aagaauuuccuuccacauu

SEQ ID NO: 16584 - RNA, 19 nt, Homo sapiens
  misc_RNA (1)...(19): siRNA sense strand
gcacaaagcuguugaauuu

SEQ ID NO: 16585 - RNA, 19 nt, Homo sapiens
  misc_RNA (1)...(19): siRNA sense strand
cgaaauagcuccucaagua

SEQ ID NO: 16586 - RNA, 19 nt, Homo sapiens
  misc_RNA (1)...(19): siRNA sense strand
ggaggaaucugcuucauuu

SEQ ID NO: 16587 - RNA, 19 nt, Homo sapiens
  misc_RNA (1)...(19): siRNA sense strand
gacaagagcuagaagauaa

SEQ ID NO: 16588 - RNA, 19 nt, Homo sapiens
  misc_RNA (1)...(19): siRNA sense strand
gaaauaggauguaaucaga

SEQ ID NO: 16589 - RNA, 19 nt, Homo sapiens
  misc_RNA (1)...(19): siRNA sense strand
agaaagaccuguauuagua

SEQ ID NO: 16590 - RNA, 19 nt, Homo sapiens
  misc_RNA (1)...(19): siRNA sense strand
gaagagagaccaacaaauu

SEQ ID NO: 16591 - RNA, 19 nt, Homo sapiens
  misc_RNA (1)...(19): siRNA sense strand
gaacauaugucuucaagca

SEQ ID NO: 16592 - RNA, 19 nt, Homo sapiens
  misc_RNA (1)...(19): siRNA sense strand
gaaaccaacuucaccagua

SEQ ID NO: 16593 - RNA, 19 nt, Homo sapiens
  misc_RNA (1)...(19): siRNA sense strand
gagaacaacugucuacaaa

SEQ ID NO: 16594 - RNA, 19 nt, Homo sapiens
  misc_RNA (1)...(19): siRNA sense strand
gagcagauguaaauaguaa

SEQ ID NO: 16595 - RNA, 19 nt, Homo sapiens
  misc_RNA (1)...(19): siRNA sense strand
ggaaugugcuuuagaaguu

SEQ ID NO: 16596 - RNA, 19 nt, Homo sapiens
  misc_RNA (1)...(19): siRNA sense strand
gauaauaggucagacaauu

SEQ ID NO: 16597 - RNA, 19 nt, Homo sapiens
  misc_RNA (1)...(19): siRNA sense strand
caaagacucuguauuguug

SEQ ID NO: 16598 - RNA, 19 nt, Homo sapiens
  misc_RNA (1)...(19): siRNA sense strand
guacaaggaugccaauauu

SEQ ID NO: 16599 - RNA, 19 nt, Homo sapiens
  misc_RNA (1)...(19): siRNA sense strand
acagaaagauguggaauua

SEQ ID NO: 16600 - RNA, 19 nt, Homo sapiens
  misc_RNA (1)...(19): siRNA sense strand
uagaagaacuugagaaaga

SEQ ID NO: 16601 - RNA, 19 nt, Homo sapiens
  misc_RNA (1)...(19): siRNA sense strand
caacaugacuguccuuuca

SEQ ID NO: 16602 - RNA, 19 nt, Homo sapiens
  misc_RNA (1)...(19): siRNA sense strand
gggaagugcugcagcuuua

SEQ ID NO: 16603 - RNA, 19 nt, Homo sapiens
  misc_RNA (1)...(19): siRNA sense strand
gaagauaauuccaaucauc

SEQ ID NO: 16604 - RNA, 19 nt, Homo sapiens
  misc_RNA (1)...(19): siRNA sense strand
aaacauagucccagaaaua

SEQ ID NO: 16605 - RNA, 19 nt, Homo sapiens
  misc_RNA (1)...(19): siRNA sense strand
ggaaaaggcugaauuaaga

SEQ ID NO: 16606 - RNA, 19 nt, Homo sapiens
  misc_RNA (1)...(19): siRNA sense strand
gcucagcacuuaucagaaa

SEQ ID NO: 16607 - RNA, 19 nt, Homo sapiens
  misc_RNA (1)...(19): siRNA sense strand
caaauaggccugcgaagua

SEQ ID NO: 16608 - RNA, 19 nt, Homo sapiens
  misc_RNA (1)...(19): siRNA sense strand
gaaggcaauuggaauauga

SEQ ID NO: 16609 - RNA, 19 nt, Homo sapiens
  misc_RNA (1)...(19): siRNA sense strand
ggaaguacuuaaacaacua

SEQ ID NO: 16610 - RNA, 19 nt, Homo sapiens
  misc_RNA (1)...(19): siRNA sense strand
gaacaacugucuacaaacu

SEQ ID NO: 16611 - RNA, 19 nt, Homo sapiens
  misc_RNA (1)...(19): siRNA sense strand
guacaaguccuguuucuaa

SEQ ID NO: 16612 - RNA, 19 nt, Homo sapiens
  misc_RNA (1)...(19): siRNA sense strand
gaauauaggacacguguaa

SEQ ID NO: 16613 - RNA, 19 nt, Homo sapiens
  misc_RNA (1)...(19): siRNA sense strand
gaacucaaaucuucgacaa

SEQ ID NO: 16614 - RNA, 19 nt, Homo sapiens
  misc_RNA (1)...(19): siRNA sense strand
gaagaucucccacagguaa

SEQ ID NO: 16615 - RNA, 19 nt, Homo sapiens
  misc_RNA (1)...(19): siRNA sense strand
gaagaggguuuguaaaugg

SEQ ID NO: 16616 - RNA, 19 nt, Homo sapiens
  misc_RNA (1)...(19): siRNA sense strand
uaaggaaucucauggcaaa

SEQ ID NO: 16617 - RNA, 19 nt, Homo sapiens
  misc_RNA (1)...(19): siRNA sense strand
ccaaggacuucaaugauaa

SEQ ID NO: 16618 - RNA, 19 nt, Homo sapiens
  misc_RNA (1)...(19): siRNA sense strand
caagucagcugccugugua

SEQ ID NO: 16619 - RNA, 19 nt, Homo sapiens
  misc_RNA (1)...(19): siRNA sense strand
uaagcaagcugcaguaaau

SEQ ID NO: 16620 - RNA, 19 nt, Homo sapiens
  misc_RNA (1)...(19): siRNA sense strand
ucaagaagaugacuaugaa

SEQ ID NO: 16621 - RNA, 19 nt, Homo sapiens
  misc_RNA (1)...(19): siRNA sense strand
gcaaaguccuucacagaau

SEQ ID NO: 16622 - RNA, 19 nt, Homo sapiens
  misc_RNA (1)...(19): siRNA sense strand
gaaaccggcucacaugaug

SEQ ID NO: 16623 - RNA, 19 nt, Homo sapiens
  misc_RNA (1)...(19): siRNA sense strand
ucaguuagaugguaagaaa

SEQ ID NO: 16624 - RNA, 19 nt, Homo sapiens
  misc_RNA (1)...(19): siRNA sense strand
ucaagaaccucauucauuc

SEQ ID NO: 16625 - RNA, 19 nt, Homo sapiens
  misc_RNA (1)...(19): siRNA sense strand
gacaaacacuuuagccauu

SEQ ID NO: 16626 - RNA, 19 nt, Homo sapiens
  misc_RNA (1)...(19): siRNA sense strand
gauggaaugugcuuuagaa

SEQ ID NO: 16627 - RNA, 19 nt, Homo sapiens
  misc_RNA (1)...(19): siRNA sense strand
ugacaaagacucuguauug

SEQ ID NO: 16628 - RNA, 19 nt, Homo sapiens
  misc_RNA (1)...(19): siRNA sense strand
gcaggaagcucaugaacca

SEQ ID NO: 16629 - RNA, 19 nt, Homo sapiens
  misc_RNA (1)...(19): siRNA sense strand
gugaagaucugacacuuga

SEQ ID NO: 16630 - RNA, 19 nt, Homo sapiens
  misc_RNA (1)...(19): siRNA sense strand
gaagauagagucagaggaa

SEQ ID NO: 16631 - RNA, 19 nt, Homo sapiens
  misc_RNA (1)...(19): siRNA sense strand
ucaguucacuugauaguuu

SEQ ID NO: 16632 - RNA, 19 nt, Homo sapiens
  misc_RNA (1)...(19): siRNA sense strand
guacaaacuucuaccauca

SEQ ID NO: 16633 - RNA, 19 nt, Homo sapiens
  misc_RNA (1)...(19): siRNA sense strand
gaugauaugucgcgaacuu

SEQ ID NO: 16634 - RNA, 19 nt, Homo sapiens
  misc_RNA (1)...(19): siRNA sense strand
uaaagcaccuucuagauca

SEQ ID NO: 16635 - RNA, 19 nt, Homo sapiens
  misc_RNA (1)...(19): siRNA sense strand
ggaucaccauuucaucuua

SEQ ID NO: 16636 - RNA, 19 nt, Homo sapiens
  misc_RNA (1)...(19): siRNA sense strand
gauaagcucccaaauaaug

SEQ ID NO: 16637 - RNA, 19 nt, Homo sapiens
  misc_RNA (1)...(19): siRNA sense strand
augauaagcucccaaauaa

SEQ ID NO: 16638 - RNA, 19 nt, Homo sapiens
  misc_RNA (1)...(19): siRNA sense strand
gaaaugcacuuagaagaag

SEQ ID NO: 16639 - RNA, 19 nt, Homo sapiens
  misc_RNA (1)...(19): siRNA sense strand
ccagucaacuuucaucaaa

SEQ ID NO: 16640 - RNA, 19 nt, Homo sapiens
  misc_RNA (1)...(19): siRNA sense strand
caaauuaucucaacuucca

SEQ ID NO: 16641 - RNA, 19 nt, Homo sapiens
  misc_RNA (1)...(19): siRNA sense strand
ugaguuagcugcuggagaa

SEQ ID NO: 16642 - RNA, 19 nt, Homo sapiens
  misc_RNA (1)...(19): siRNA sense strand
gagaauacguccacaccuu

SEQ ID NO: 16643 - RNA, 19 nt, Homo sapiens
  misc_RNA (1)...(19): siRNA sense strand
gaagaugacuaugaagaug

SEQ ID NO: 16644 - RNA, 19 nt, Homo sapiens
  misc_RNA (1)...(19): siRNA sense strand
ugagagcacugaugauaaa

SEQ ID NO: 16645 - RNA, 19 nt, Homo sapiens
  misc_RNA (1)...(19): siRNA sense strand
ggacauguucuaugccuua

SEQ ID NO: 16646 - RNA, 19 nt, Homo sapiens
  misc_RNA (1)...(19): siRNA sense strand
gaaacugaggcaucuaaua

SEQ ID NO: 16647 - RNA, 19 nt, Homo sapiens
  misc_RNA (1)...(19): siRNA sense strand
caacuuauccuguuuauac

SEQ ID NO: 16648 - RNA, 19 nt, Homo sapiens
  misc_RNA (1)...(19): siRNA sense strand
gaacuagauacaccaauaa

SEQ ID NO: 16649 - RNA, 19 nt, Homo sapiens
  misc_RNA (1)...(19): siRNA sense strand
gaaugugcuuuagaaguua

SEQ ID NO: 16650 - RNA, 19 nt, Homo sapiens
  misc_RNA (1)...(19): siRNA sense strand
ccacagauauuccuucauc

SEQ ID NO: 16651 - RNA, 19 nt, Homo sapiens
  misc_RNA (1)...(19): siRNA sense strand
gaaaugauucuuugaguuc

SEQ ID NO: 16652 - RNA, 19 nt, Homo sapiens
  misc_RNA (1)...(19): siRNA sense strand
ccaacaaagucaucacgua

SEQ ID NO: 16653 - RNA, 19 nt, Homo sapiens
  misc_RNA (1)...(19): siRNA sense strand
gaagauacuccaauauguu

SEQ ID NO: 16654 - RNA, 19 nt, Homo sapiens
  misc_RNA (1)...(19): siRNA sense strand
gcuaauacccugcaaauag

SEQ ID NO: 16655 - RNA, 19 nt, Homo sapiens
  misc_RNA (1)...(19): siRNA sense strand
gcagagaaaguacuggaua

SEQ ID NO: 16656 - RNA, 19 nt, Homo sapiens
  misc_RNA (1)...(19): siRNA sense strand
gaugagccauuuauacaga

SEQ ID NO: 16657 - RNA, 19 nt, Homo sapiens
  misc_RNA (1)...(19): siRNA sense strand
agaacuagauacaccaaua

SEQ ID NO: 16658 - RNA, 19 nt, Homo sapiens
  misc_RNA (1)...(19): siRNA sense strand
gaaaguaaguuuugcaguu

SEQ ID NO: 16659 - RNA, 19 nt, Homo sapiens
  misc_RNA (1)...(19): siRNA sense strand
gaauagauagucuuccuuu

SEQ ID NO: 16660 - RNA, 19 nt, Homo sapiens
  misc_RNA (1)...(19): siRNA sense strand
gcaaguggacugugaaaug

SEQ ID NO: 16661 - RNA, 19 nt, Homo sapiens
  misc_RNA (1)...(19): siRNA sense strand
ggucuuaccuugugacauc

SEQ ID NO: 16662 - RNA, 19 nt, Homo sapiens
  misc_RNA (1)...(19): siRNA sense strand
gaauaaguccuccuaacaa

SEQ ID NO: 16663 - RNA, 19 nt, Homo sapiens
  misc_RNA (1)...(19): siRNA sense strand
caacaaagucaucacguaa

SEQ ID NO: 16664 - RNA, 19 nt, Homo sapiens
  misc_RNA (1)...(19): siRNA sense strand
gagcuuaacuuagauagca

SEQ ID NO: 16665 - RNA, 19 nt, Homo sapiens
  misc_RNA (1)...(19): siRNA sense strand
ucauauacaucuccaggua

SEQ ID NO: 16666 - RNA, 19 nt, Homo sapiens
  misc_RNA (1)...(19): siRNA sense strand
uguagaagauacuccaaua

SEQ ID NO: 16667 - RNA, 19 nt, Homo sapiens
  misc_RNA (1)...(19): siRNA sense strand
ccaauuauagugaacguua

SEQ ID NO: 16668 - RNA, 19 nt, Homo sapiens
  misc_RNA (1)...(19): siRNA sense strand
gcaguuagcaugcucaaga

SEQ ID NO: 16669 - RNA, 19 nt, Homo sapiens
  misc_RNA (1)...(19): siRNA sense strand
gaacuuugcuagcuauguc

SEQ ID NO: 16670 - RNA, 19 nt, Homo sapiens
  misc_RNA (1)...(19): siRNA sense strand
ccaagaagaggguuuguaa

SEQ ID NO: 16671 - RNA, 19 nt, Homo sapiens
  misc_RNA (1)...(19): siRNA sense strand
gagauaccauuccuacaga

SEQ ID NO: 16672 - RNA, 19 nt, Homo sapiens
  misc_RNA (1)...(19): siRNA sense strand
caaaugaaacccucgauug

SEQ ID NO: 16673 - RNA, 19 nt, Homo sapiens
  misc_RNA (1)...(19): siRNA sense strand
ugagagaaaugcacuuaga

SEQ ID NO: 16674 - RNA, 19 nt, Homo sapiens
  misc_RNA (1)...(19): siRNA sense strand
gaagaagugucagccauuc

SEQ ID NO: 16675 - RNA, 19 nt, Homo sapiens
  misc_RNA (1)...(19): siRNA sense strand
ggagagagaacgcggaauu

SEQ ID NO: 16676 - RNA, 19 nt, Homo sapiens
  misc_RNA (1)...(19): siRNA sense strand
gcacauugcacugagaaua

SEQ ID NO: 16677 - RNA, 19 nt, Homo sapiens
  misc_RNA (1)...(19): siRNA sense strand
gauacgcgcuuacugugaa

SEQ ID NO: 16678 - RNA, 19 nt, Homo sapiens
  misc_RNA (1)...(19): siRNA sense strand
caagacagcuguauaucca

SEQ ID NO: 16679 - RNA, 19 nt, Homo sapiens
  misc_RNA (1)...(19): siRNA sense strand
aaacagauaugaccagaag

SEQ ID NO: 16680 - RNA, 19 nt, Homo sapiens
  misc_RNA (1)...(19): siRNA sense strand
gaugauaagccuaccaauu

SEQ ID NO: 16681 - RNA, 19 nt, Homo sapiens
  misc_RNA (1)...(19): siRNA sense strand
aaacaugccuucaaucucu

SEQ ID NO: 16682 - RNA, 19 nt, Homo sapiens
  misc_RNA (1)...(19): siRNA sense strand
cgaaaugauucuuugaguu

SEQ ID NO: 16683 - RNA, 19 nt, Homo sapiens
  misc_RNA (1)...(19): siRNA sense strand
augauaagccuaccaauua

SEQ ID NO: 16684 - RNA, 19 nt, Homo sapiens
  misc_RNA (1)...(19): siRNA sense strand
ggacgagugugccgugugu

SEQ ID NO: 16685 - RNA, 19 nt, Homo sapiens
  misc_RNA (1)...(19): siRNA sense strand
gaccuggagucccuucuga

SEQ ID NO: 16686 - RNA, 19 nt, Homo sapiens
  misc_RNA (1)...(19): siRNA sense strand
gaagaaugaggacgagugu

SEQ ID NO: 16687 - RNA, 19 nt, Homo sapiens
  misc_RNA (1)...(19): siRNA sense strand
gugcugcgguguacucacu

SEQ ID NO: 16688 - RNA, 19 nt, Homo sapiens
  misc_RNA (1)...(19): siRNA sense strand
ggacgagugugccgugugu

SEQ ID NO: 16689 - RNA, 19 nt, Homo sapiens
  misc_RNA (1)...(19): siRNA sense strand
gaccuggagucccuucuga

SEQ ID NO: 16690 - RNA, 19 nt, Homo sapiens
  misc_RNA (1)...(19): siRNA sense strand
gaagaaugaggacgagugu

SEQ ID NO: 16691 - RNA, 19 nt, Homo sapiens
  misc_RNA (1)...(19): siRNA sense strand
gugcugcgguguacucacu

SEQ ID NO: 16692 - RNA, 19 nt, Homo sapiens
  misc_RNA (1)...(19): siRNA sense strand
ggacgagugugccgugugu

SEQ ID NO: 16693 - RNA, 19 nt, Homo sapiens
  misc_RNA (1)...(19): siRNA sense strand
gaagaaugaggacgagugu

SEQ ID NO: 16694 - RNA, 19 nt, Homo sapiens
  misc_RNA (1)...(19): siRNA sense strand
gugcugcgguguacucacu

SEQ ID NO: 16695 - RNA, 19 nt, Homo sapiens
  misc_RNA (1)...(19): siRNA sense strand
gaaaacagcuaaaccuaaa

SEQ ID NO: 16696 - RNA, 19 nt, Homo sapiens
  misc_RNA (1)...(19): siRNA sense strand
guacguggaugugcucaaa

SEQ ID NO: 16697 - RNA, 19 nt, Homo sapiens
  misc_RNA (1)...(19): siRNA sense strand
ugaaggaccuggccacugu

SEQ ID NO: 16698 - RNA, 19 nt, Homo sapiens
  misc_RNA (1)...(19): siRNA sense strand
gagacuaugugucccaguu

SEQ ID NO: 16699 - RNA, 19 nt, Homo sapiens
  misc_RNA (1)...(19): siRNA sense strand
ugagcgcucucgaggagua

SEQ ID NO: 16700 - RNA, 19 nt, Homo sapiens
  misc_RNA (1)...(19): siRNA sense strand
gggauaaccuggaaaagga

SEQ ID NO: 16701 - RNA, 19 nt, Homo sapiens
  misc_RNA (1)...(19): siRNA sense strand
ggaaaacagcuaaaccuaa

SEQ ID NO: 16702 - RNA, 19 nt, Homo sapiens
  misc_RNA (1)...(19): siRNA sense strand
uaaagcuccuugacaacug

SEQ ID NO: 16703 - RNA, 19 nt, Homo sapiens
  misc_RNA (1)...(19): siRNA sense strand
guucugggauaaccuggaa

SEQ ID NO: 16704 - RNA, 19 nt, Homo sapiens
  misc_RNA (1)...(19): siRNA sense strand
gacuaugugucccaguuug

SEQ ID NO: 16705 - RNA, 19 nt, Homo sapiens
  misc_RNA (1)...(19): siRNA sense strand
aggaggagauggagcucua

SEQ ID NO: 16706 - RNA, 19 nt, Homo sapiens
  misc_RNA (1)...(19): siRNA sense strand
gaagcucaacacccaguga

SEQ ID NO: 16707 - RNA, 19 nt, Homo sapiens
  misc_RNA (1)...(19): siRNA sense strand
ggaccuggccacuguguac

SEQ ID NO: 16708 - RNA, 19 nt, Homo sapiens
  misc_RNA (1)...(19): siRNA sense strand
accuaaagcuccuugacaa

SEQ ID NO: 16709 - RNA, 19 nt, Homo sapiens
  misc_RNA (1)...(19): siRNA sense strand
agacagcggcagagacuau

SEQ ID NO: 16710 - RNA, 19 nt, Homo sapiens
  misc_RNA (1)...(19): siRNA sense strand
gaccuuggccgugcucuuc

SEQ ID NO: 16711 - RNA, 19 nt, Homo sapiens
  misc_RNA (1)...(19): siRNA sense strand
aagcugcggugcugaccuu

SEQ ID NO: 16712 - RNA, 19 nt, Homo sapiens
  misc_RNA (1)...(19): siRNA sense strand
acguggaugugcucaaaga

SEQ ID NO: 16713 - RNA, 19 nt, Homo sapiens
  misc_RNA (1)...(19): siRNA sense strand
ucaaagacagcggcagaga

SEQ ID NO: 16714 - RNA, 19 nt, Homo sapiens
  misc_RNA (1)...(19): siRNA sense strand
ucgaggaguacacuaagaa

SEQ ID NO: 16715 - RNA, 19 nt, Homo sapiens
  misc_RNA (1)...(19): siRNA sense strand
aaagacagcggcagagacu

SEQ ID NO: 16716 - RNA, 19 nt, Homo sapiens
  misc_RNA (1)...(19): siRNA sense strand
gggaaaacagcuaaaccua

SEQ ID NO: 16717 - RNA, 19 nt, Homo sapiens
  misc_RNA (1)...(19): siRNA sense strand
agacuaugugucccaguuu

SEQ ID NO: 16718 - RNA, 19 nt, Homo sapiens
  misc_RNA (1)...(19): siRNA sense strand
ggccugaccuuccagauga

SEQ ID NO: 16719 - RNA, 19 nt, Homo sapiens
  misc_RNA (1)...(19): siRNA sense strand
gcccuacgcugacgaauuc

SEQ ID NO: 16720 - RNA, 19 nt, Homo sapiens
  misc_RNA (1)...(19): siRNA sense strand
ccaaugaggugagccagaa

SEQ ID NO: 16721 - RNA, 19 nt, Homo sapiens
  misc_RNA (1)...(19): siRNA sense strand
gcaacucaaugcccucuuc

SEQ ID NO: 16722 - RNA, 19 nt, Homo sapiens
  misc_RNA (1)...(19): siRNA sense strand
gaacucacccagcaacuca

SEQ ID NO: 16723 - RNA, 19 nt, Homo sapiens
  misc_RNA (1)...(19): siRNA sense strand
gaauucaaagucaagauug

SEQ ID NO: 16724 - RNA, 19 nt, Homo sapiens
  misc_RNA (1)...(19): siRNA sense strand
gaacagcucaggacgaaac

SEQ ID NO: 16725 - RNA, 19 nt, Homo sapiens
  misc_RNA (1)...(19): siRNA sense strand
cgaauucaaagucaagauu

SEQ ID NO: 16726 - RNA, 19 nt, Homo sapiens
  misc_RNA (1)...(19): siRNA sense strand
uggaacagcucaggacgaa

SEQ ID NO: 16727 - RNA, 19 nt, Homo sapiens
  misc_RNA (1)...(19): siRNA sense strand
agaaggaccugagggacaa

SEQ ID NO: 16728 - RNA, 19 nt, Homo sapiens
  misc_RNA (1)...(19): siRNA sense strand
ccaaggaggccguggaaca

SEQ ID NO: 16729 - RNA, 19 nt, Homo sapiens
  misc_RNA (1)...(19): siRNA sense strand
aaagagagccaggacaaga

SEQ ID NO: 16730 - RNA, 19 nt, Homo sapiens
  misc_RNA (1)...(19): siRNA sense strand
gaaacugaaggaggagauu

SEQ ID NO: 16731 - RNA, 19 nt, Homo sapiens
  misc_RNA (1)...(19): siRNA sense strand
ucccugagcuggagcaaca

SEQ ID NO: 16732 - RNA, 19 nt, Homo sapiens
  misc_RNA (1)...(19): siRNA sense strand
agaaagagagccaggacaa

SEQ ID NO: 16733 - RNA, 19 nt, Homo sapiens
  misc_RNA (1)...(19): siRNA sense strand
ggggaaaacuucaacaaag

SEQ ID NO: 16734 - RNA, 19 nt, Homo sapiens
  misc_RNA (1)...(19): siRNA sense strand
gaagaagcuggugcccuuu

SEQ ID NO: 16735 - RNA, 19 nt, Homo sapiens
  misc_RNA (1)...(19): siRNA sense strand
gaaagagagccaggacaag

SEQ ID NO: 16736 - RNA, 19 nt, Homo sapiens
  misc_RNA (1)...(19): siRNA sense strand
agagagugcugcgggagaa

SEQ ID NO: 16737 - RNA, 19 nt, Homo sapiens
  misc_RNA (1)...(19): siRNA sense strand
aggccaagaucgaccagaa

SEQ ID NO: 16738 - RNA, 19 nt, Homo sapiens
  misc_RNA (1)...(19): siRNA sense strand
gaacguggaggagcucaag

SEQ ID NO: 16739 - RNA, 19 nt, Homo sapiens
  misc_RNA (1)...(19): siRNA sense strand
ggacaaccugcgagagcuu

SEQ ID NO: 16740 - RNA, 19 nt, Homo sapiens
  misc_RNA (1)...(19): siRNA sense strand
ggccaaggacucggagaaa

SEQ ID NO: 16741 - RNA, 19 nt, Homo sapiens
  misc_RNA (1)...(19): siRNA sense strand
aggaggagauugggaagga

SEQ ID NO: 16742 - RNA, 19 nt, Homo sapiens
  misc_RNA (1)...(19): siRNA sense strand
gggccugaccuuccagaug

SEQ ID NO: 16743 - RNA, 19 nt, Homo sapiens
  misc_RNA (1)...(19): siRNA sense strand
caaggaggccguggaacau

SEQ ID NO: 16744 - RNA, 19 nt, Homo sapiens
  misc_RNA (1)...(19): siRNA sense strand
gccaaggacucggagaaac

SEQ ID NO: 16745 - RNA, 19 nt, Homo sapiens
  misc_RNA (1)...(19): siRNA sense strand
cuacgcugacgaauucaaa

SEQ ID NO: 16746 - RNA, 19 nt, Homo sapiens
  misc_RNA (1)...(19): siRNA sense strand
ccaaggacucggagaaacu

SEQ ID NO: 16747 - RNA, 19 nt, Homo sapiens
  misc_RNA (1)...(19): siRNA sense strand
ccaggacaaacuuggagaa

SEQ ID NO: 16748 - RNA, 19 nt, Homo sapiens
  misc_RNA (1)...(19): siRNA sense strand
ggacucggagaaacugaag

SEQ ID NO: 16749 - RNA, 19 nt, Homo sapiens
  misc_RNA (1)...(19): siRNA sense strand
aaacugaaggaggagauug

SEQ ID NO: 16750 - RNA, 19 nt, Homo sapiens
  misc_RNA (1)...(19): siRNA sense strand
gcaccuagcuggaaaguua

SEQ ID NO: 16751 - RNA, 19 nt, Homo sapiens
  misc_RNA (1)...(19): siRNA sense strand
gagcuaaucucuucaauaa

SEQ ID NO: 16752 - RNA, 19 nt, Homo sapiens
  misc_RNA (1)...(19): siRNA sense strand
gcacguggguuccaaauua

SEQ ID NO: 16753 - RNA, 19 nt, Homo sapiens
  misc_RNA (1)...(19): siRNA sense strand
gaagaaaucugcagaacaa

SEQ ID NO: 16754 - RNA, 19 nt, Homo sapiens
  misc_RNA (1)...(19): siRNA sense strand
ucaauaagcugguuacuga

SEQ ID NO: 16755 - RNA, 19 nt, Homo sapiens
  misc_RNA (1)...(19): siRNA sense strand
gauguaaucucgauguaua

SEQ ID NO: 16756 - RNA, 19 nt, Homo sapiens
  misc_RNA (1)...(19): siRNA sense strand
gcugagaacuucaucauuu

SEQ ID NO: 16757 - RNA, 19 nt, Homo sapiens
  misc_RNA (1)...(19): siRNA sense strand
caaaggagaguccaaauua

SEQ ID NO: 16758 - RNA, 19 nt, Homo sapiens
  misc_RNA (1)...(19): siRNA sense strand
gacaagagcuuaugggauu

SEQ ID NO: 16759 - RNA, 19 nt, Homo sapiens
  misc_RNA (1)...(19): siRNA sense strand
guuaaaugcugacaucuua

SEQ ID NO: 16760 - RNA, 19 nt, Homo sapiens
  misc_RNA (1)...(19): siRNA sense strand
gaauaacuaugcacuguuu

SEQ ID NO: 16761 - RNA, 19 nt, Homo sapiens
  misc_RNA (1)...(19): siRNA sense strand
ggaacaauccucagaguua

SEQ ID NO: 16762 - RNA, 19 nt, Homo sapiens
  misc_RNA (1)...(19): siRNA sense strand
gcaaggaucuggagaaaca

SEQ ID NO: 16763 - RNA, 19 nt, Homo sapiens
  misc_RNA (1)...(19): siRNA sense strand
guugaaagcuggccacaua

SEQ ID NO: 16764 - RNA, 19 nt, Homo sapiens
  misc_RNA (1)...(19): siRNA sense strand
ggaugaagaugacgacuuu

SEQ ID NO: 16765 - RNA, 19 nt, Homo sapiens
  misc_RNA (1)...(19): siRNA sense strand
ccacagaggugcuacguaa

SEQ ID NO: 16766 - RNA, 19 nt, Homo sapiens
  misc_RNA (1)...(19): siRNA sense strand
ggaagcuucucaagaguua

SEQ ID NO: 16767 - RNA, 19 nt, Homo sapiens
  misc_RNA (1)...(19): siRNA sense strand
caacagaaauauccacuga

SEQ ID NO: 16768 - RNA, 19 nt, Homo sapiens
  misc_RNA (1)...(19): siRNA sense strand
gcacagaaauauucaggaa

SEQ ID NO: 16769 - RNA, 19 nt, Homo sapiens
  misc_RNA (1)...(19): siRNA sense strand
gaaaugcuauugagggaaa

SEQ ID NO: 16770 - RNA, 19 nt, Homo sapiens
  misc_RNA (1)...(19): siRNA sense strand
ccaaauaacuaccuuccua

SEQ ID NO: 16771 - RNA, 19 nt, Homo sapiens
  misc_RNA (1)...(19): siRNA sense strand
gaacaauccucagaguuaa

SEQ ID NO: 16772 - RNA, 19 nt, Homo sapiens
  misc_RNA (1)...(19): siRNA sense strand
gaaagaaucucaacuucca

SEQ ID NO: 16773 - RNA, 19 nt, Homo sapiens
  misc_RNA (1)...(19): siRNA sense strand
gacuuaagcucucaaauga

SEQ ID NO: 16774 - RNA, 19 nt, Homo sapiens
  misc_RNA (1)...(19): siRNA sense strand
gcagauccaucaauacauu

SEQ ID NO: 16775 - RNA, 19 nt, Homo sapiens
  misc_RNA (1)...(19): siRNA sense strand
ggaaacaacgagaacauua

SEQ ID NO: 16776 - RNA, 19 nt, Homo sapiens
  misc_RNA (1)...(19): siRNA sense strand
caaauggacucaucugcua

SEQ ID NO: 16777 - RNA, 19 nt, Homo sapiens
  misc_RNA (1)...(19): siRNA sense strand
caaagcagauuauguugaa

SEQ ID NO: 16778 - RNA, 19 nt, Homo sapiens
  misc_RNA (1)...(19): siRNA sense strand
ccuaagagcuugcauaugu

SEQ ID NO: 16779 - RNA, 19 nt, Homo sapiens
  misc_RNA (1)...(19): siRNA sense strand
gcuggacagugaaauauua

SEQ ID NO: 16780 - RNA, 19 nt, Homo sapiens
  misc_RNA (1)...(19): siRNA sense strand
caaauuaguuucaccauag

SEQ ID NO: 16781 - RNA, 19 nt, Homo sapiens
  misc_RNA (1)...(19): siRNA sense strand
gaagaugggccucgcauuu

SEQ ID NO: 16782 - RNA, 19 nt, Homo sapiens
  misc_RNA (1)...(19): siRNA sense strand
ccaauaagaucaauagcaa

SEQ ID NO: 16783 - RNA, 19 nt, Homo sapiens
  misc_RNA (1)...(19): siRNA sense strand
aaacuugacuucagagaaa

SEQ ID NO: 16784 - RNA, 19 nt, Homo sapiens
  misc_RNA (1)...(19): siRNA sense strand
gaagggaauuugaaaguuc

SEQ ID NO: 16785 - RNA, 19 nt, Homo sapiens
  misc_RNA (1)...(19): siRNA sense strand
gaacacaggcaccaaugua

SEQ ID NO: 16786 - RNA, 19 nt, Homo sapiens
  misc_RNA (1)...(19): siRNA sense strand
caggagagauugagcagua

SEQ ID NO: 16787 - RNA, 19 nt, Homo sapiens
  misc_RNA (1)...(19): siRNA sense strand
aaucgaagaugguacguua

SEQ ID NO: 16788 - RNA, 19 nt, Homo sapiens
  misc_RNA (1)...(19): siRNA sense strand
uuacagcucugacaaguuu

SEQ ID NO: 16789 - RNA, 19 nt, Homo sapiens
  misc_RNA (1)...(19): siRNA sense strand
gcuuauggcuccacaguuu

SEQ ID NO: 16790 - RNA, 19 nt, Homo sapiens
  misc_RNA (1)...(19): siRNA sense strand
ggaugaagauuacaccuau

SEQ ID NO: 16791 - RNA, 19 nt, Homo sapiens
  misc_RNA (1)...(19): siRNA sense strand
gagcaaggguucacuguuc

SEQ ID NO: 16792 - RNA, 19 nt, Homo sapiens
  misc_RNA (1)...(19): siRNA sense strand
gaaauacaaugcucuggau

SEQ ID NO: 16793 - RNA, 19 nt, Homo sapiens
  misc_RNA (1)...(19): siRNA sense strand
gaacauugcaggcuuauca

SEQ ID NO: 16794 - RNA, 19 nt, Homo sapiens
  misc_RNA (1)...(19): siRNA sense strand
gaacaagaacaguuugaaa

SEQ ID NO: 16795 - RNA, 19 nt, Homo sapiens
  misc_RNA (1)...(19): siRNA sense strand
uggaaagccucaccucuua

SEQ ID NO: 16796 - RNA, 19 nt, Homo sapiens
  misc_RNA (1)...(19): siRNA sense strand
gcaagcaaguuggcaagua

SEQ ID NO: 16797 - RNA, 19 nt, Homo sapiens
  misc_RNA (1)...(19): siRNA sense strand
gcauguggcugguaaccua

SEQ ID NO: 16798 - RNA, 19 nt, Homo sapiens
  misc_RNA (1)...(19): siRNA sense strand
caacaacuaucauaagaca

SEQ ID NO: 16799 - RNA, 19 nt, Homo sapiens
  misc_RNA (1)...(19): siRNA sense strand
caagcaaguuggcaaguaa

SEQ ID NO: 16800 - RNA, 19 nt, Homo sapiens
  misc_RNA (1)...(19): siRNA sense strand
uaucucaacugcagacaua

SEQ ID NO: 16801 - RNA, 19 nt, Homo sapiens
  misc_RNA (1)...(19): siRNA sense strand
ggaauaaugcucaguguug

SEQ ID NO: 16802 - RNA, 19 nt, Homo sapiens
  misc_RNA (1)...(19): siRNA sense strand
gcaaacaccuaagaguaaa

SEQ ID NO: 16803 - RNA, 19 nt, Homo sapiens
  misc_RNA (1)...(19): siRNA sense strand
gaaacugacugcucucaca

SEQ ID NO: 16804 - RNA, 19 nt, Homo sapiens
  misc_RNA (1)...(19): siRNA sense strand
ggauuacaguugcaaauau

SEQ ID NO: 16805 - RNA, 19 nt, Homo sapiens
  misc_RNA (1)...(19): siRNA sense strand
gagauucccuccauuaagu

SEQ ID NO: 16806 - RNA, 19 nt, Homo sapiens
  misc_RNA (1)...(19): siRNA sense strand
ggacuuaagcucucaaaug

SEQ ID NO: 16807 - RNA, 19 nt, Homo sapiens
  misc_RNA (1)...(19): siRNA sense strand
gaaacaacccagucucaaa

SEQ ID NO: 16808 - RNA, 19 nt, Homo sapiens
  misc_RNA (1)...(19): siRNA sense strand
gaauaaugcucaguguuga

SEQ ID NO: 16809 - RNA, 19 nt, Homo sapiens
  misc_RNA (1)...(19): siRNA sense strand
aagauagacuuccugaaua

SEQ ID NO: 16810 - RNA, 19 nt, Homo sapiens
  misc_RNA (1)...(19): siRNA sense strand
cgacaaaccauuauaguug

SEQ ID NO: 16811 - RNA, 19 nt, Homo sapiens
  misc_RNA (1)...(19): siRNA sense strand
acagaaauauccacugaaa

SEQ ID NO: 16812 - RNA, 19 nt, Homo sapiens
  misc_RNA (1)...(19): siRNA sense strand
gaacggagcaugggaguga

SEQ ID NO: 16813 - RNA, 19 nt, Homo sapiens
  misc_RNA (1)...(19): siRNA sense strand
gagacucaauggugaaauu

SEQ ID NO: 16814 - RNA, 19 nt, Homo sapiens
  misc_RNA (1)...(19): siRNA sense strand
gacaugagcacaaacuaua

SEQ ID NO: 16815 - RNA, 19 nt, Homo sapiens
  misc_RNA (1)...(19): siRNA sense strand
cuacaaaucuguuucucuu

SEQ ID NO: 16816 - RNA, 19 nt, Homo sapiens
  misc_RNA (1)...(19): siRNA sense strand
gaagggaaucuuauauuug

SEQ ID NO: 16817 - RNA, 19 nt, Homo sapiens
  misc_RNA (1)...(19): siRNA sense strand
ccacaagauugacaagaaa

SEQ ID NO: 16818 - RNA, 19 nt, Homo sapiens
  misc_RNA (1)...(19): siRNA sense strand
ggaaguacacauacaacua

SEQ ID NO: 16819 - RNA, 19 nt, Homo sapiens
  misc_RNA (1)...(19): siRNA sense strand
caaauuccuugacauguug

SEQ ID NO: 16820 - RNA, 19 nt, Homo sapiens
  misc_RNA (1)...(19): siRNA sense strand
gauaugaccuucucuaagc

SEQ ID NO: 16821 - RNA, 19 nt, Homo sapiens
  misc_RNA (1)...(19): siRNA sense strand
gagauuggcuuggaaggaa

SEQ ID NO: 16822 - RNA, 19 nt, Homo sapiens
  misc_RNA (1)...(19): siRNA sense strand
ggagaaagaugaaccuacu

SEQ ID NO: 16823 - RNA, 19 nt, Homo sapiens
  misc_RNA (1)...(19): siRNA sense strand
gcauggauauggaugaaga

SEQ ID NO: 16824 - RNA, 19 nt, Homo sapiens
  misc_RNA (1)...(19): siRNA sense strand
ccagaagacuccuugauuc

SEQ ID NO: 16825 - RNA, 19 nt, Homo sapiens
  misc_RNA (1)...(19): siRNA sense strand
gcaagaacuuaauggaaau

SEQ ID NO: 16826 - RNA, 19 nt, Homo sapiens
  misc_RNA (1)...(19): siRNA sense strand
ggaggcccauguaggaaua

SEQ ID NO: 16827 - RNA, 19 nt, Homo sapiens
  misc_RNA (1)...(19): siRNA sense strand
gaccaugccugccuuugaa

SEQ ID NO: 16828 - RNA, 19 nt, Homo sapiens
  misc_RNA (1)...(19): siRNA sense strand
gaacuacgagcugacuuua

SEQ ID NO: 16829 - RNA, 19 nt, Homo sapiens
  misc_RNA (1)...(19): siRNA sense strand
caacauaugaccacaagaa

SEQ ID NO: 16830 - RNA, 19 nt, Homo sapiens
  misc_RNA (1)...(19): siRNA sense strand
gaagauuacaccuauuuga

SEQ ID NO: 16831 - RNA, 19 nt, Homo sapiens
  misc_RNA (1)...(19): siRNA sense strand
ccaacucucugauuacuau

SEQ ID NO: 16832 - RNA, 19 nt, Homo sapiens
  misc_RNA (1)...(19): siRNA sense strand
caccagcaguuuagauaua

SEQ ID NO: 16833 - RNA, 19 nt, Homo sapiens
  misc_RNA (1)...(19): siRNA sense strand
gcgucuaccuuacacaaua

SEQ ID NO: 16834 - RNA, 19 nt, Homo sapiens
  misc_RNA (1)...(19): siRNA sense strand
gaaguacacauacaacuau

SEQ ID NO: 16835 - RNA, 19 nt, Homo sapiens
  misc_RNA (1)...(19): siRNA sense strand
gcacauauggccugucuug

SEQ ID NO: 16836 - RNA, 19 nt, Homo sapiens
  misc_RNA (1)...(19): siRNA sense strand
ccuaugagcuccagagaga

SEQ ID NO: 16837 - RNA, 19 nt, Homo sapiens
  misc_RNA (1)...(19): siRNA sense strand
uugagaagcugauuaaaga

SEQ ID NO: 16838 - RNA, 19 nt, Homo sapiens
  misc_RNA (1)...(19): siRNA sense strand
acacagacuuugaaacuug

SEQ ID NO: 16839 - RNA, 19 nt, Homo sapiens
  misc_RNA (1)...(19): siRNA sense strand
uuaaacagcugaaagagau

SEQ ID NO: 16840 - RNA, 19 nt, Homo sapiens
  misc_RNA (1)...(19): siRNA sense strand
ccauagagaugucggcauu

SEQ ID NO: 16841 - RNA, 19 nt, Homo sapiens
  misc_RNA (1)...(19): siRNA sense strand
gcaauauucuauccaagau

SEQ ID NO: 16842 - RNA, 19 nt, Homo sapiens
  misc_RNA (1)...(19): siRNA sense strand
gaaggagacuauucagaag

SEQ ID NO: 16843 - RNA, 19 nt, Homo sapiens
  misc_RNA (1)...(19): siRNA sense strand
gaauaccaaugcugaacuu

SEQ ID NO: 16844 - RNA, 19 nt, Homo sapiens
  misc_RNA (1)...(19): siRNA sense strand
gaaagucaagcaucugauu

SEQ ID NO: 16845 - RNA, 19 nt, Homo sapiens
  misc_RNA (1)...(19): siRNA sense strand
ugacuucagugcagaauau

SEQ ID NO: 16846 - RNA, 19 nt, Homo sapiens
  misc_RNA (1)...(19): siRNA sense strand
gguagacucucccguguau

SEQ ID NO: 16847 - RNA, 19 nt, Homo sapiens
  misc_RNA (1)...(19): siRNA sense strand
gaucuaaauucaguucuug

SEQ ID NO: 16848 - RNA, 19 nt, Homo sapiens
  misc_RNA (1)...(19): siRNA sense strand
gaaguggcccugaaugcua

SEQ ID NO: 16849 - RNA, 19 nt, Homo sapiens
  misc_RNA (1)...(19): siRNA sense strand
gcaaaugucagcucuuguu

SEQ ID NO: 16850 - RNA, 19 nt, Homo sapiens
  misc_RNA (1)...(19): siRNA sense strand
ggacaaguucucugaguuc

SEQ ID NO: 16851 - RNA, 19 nt, Homo sapiens
  misc_RNA (1)...(19): siRNA sense strand
ggagcaccguuaaggacaa

SEQ ID NO: 16852 - RNA, 19 nt, Homo sapiens
  misc_RNA (1)...(19): siRNA sense strand
ucucugaguucugggauuu

SEQ ID NO: 16853 - RNA, 19 nt, Homo sapiens
  misc_RNA (1)...(19): siRNA sense strand
ccaccaagaccgccaagga

SEQ ID NO: 16854 - RNA, 19 nt, Homo sapiens
  misc_RNA (1)...(19): siRNA sense strand
ggugaccgauggcuucagu

SEQ ID NO: 16855 - RNA, 19 nt, Homo sapiens
  misc_RNA (1)...(19): siRNA sense strand
uuaaggacaaguucucuga

SEQ ID NO: 16856 - RNA, 19 nt, Homo sapiens
  misc_RNA (1)...(19): siRNA sense strand
aggacaaguucucugaguu

SEQ ID NO: 16857 - RNA, 19 nt, Homo sapiens
  misc_RNA (1)...(19): siRNA sense strand
gacaaguucucugaguucu

SEQ ID NO: 16858 - RNA, 19 nt, Homo sapiens
  misc_RNA (1)...(19): siRNA sense strand
gcaccguuaaggacaaguu

SEQ ID NO: 16859 - RNA, 19 nt, Homo sapiens
  misc_RNA (1)...(19): siRNA sense strand
aaggacaaguucucugagu

SEQ ID NO: 16860 - RNA, 19 nt, Homo sapiens
  misc_RNA (1)...(19): siRNA sense strand
gagcaccguuaaggacaag

SEQ ID NO: 16861 - RNA, 19 nt, Homo sapiens
  misc_RNA (1)...(19): siRNA sense strand
caccaagaccgccaaggau

SEQ ID NO: 16862 - RNA, 19 nt, Homo sapiens
  misc_RNA (1)...(19): siRNA sense strand
gaacuggaggaacaacuga

SEQ ID NO: 16863 - RNA, 19 nt, Homo sapiens
  misc_RNA (1)...(19): siRNA sense strand
ggagcaggcccagcagaua

SEQ ID NO: 16864 - RNA, 19 nt, Homo sapiens
  misc_RNA (1)...(19): siRNA sense strand
aaucggaacuggaggaaca

SEQ ID NO: 16865 - RNA, 19 nt, Homo sapiens
  misc_RNA (1)...(19): siRNA sense strand
ggaguugaaggccuacaaa

SEQ ID NO: 16866 - RNA, 19 nt, Homo sapiens
  misc_RNA (1)...(19): siRNA sense strand
cugcguugcuggucacauu

SEQ ID NO: 16867 - RNA, 19 nt, Homo sapiens
  misc_RNA (1)...(19): siRNA sense strand
ggaacuggaggaacaacug

SEQ ID NO: 16868 - RNA, 19 nt, Homo sapiens
  misc_RNA (1)...(19): siRNA sense strand
gcccagcgacaaucacuga

SEQ ID NO: 16869 - RNA, 19 nt, Homo sapiens
  misc_RNA (1)...(19): siRNA sense strand
gagcaggcccagcagauac

SEQ ID NO: 16870 - RNA, 19 nt, Homo sapiens
  misc_RNA (1)...(19): siRNA sense strand
guugaaggccuacaaaucg

SEQ ID NO: 16871 - RNA, 19 nt, Homo sapiens
  misc_RNA (1)...(19): siRNA sense strand
agcaagcgguggagacaga

SEQ ID NO: 16872 - RNA, 19 nt, Homo sapiens
  misc_RNA (1)...(19): siRNA sense strand
acgagaccaugaaggaguu

SEQ ID NO: 16873 - RNA, 19 nt, Homo sapiens
  misc_RNA (1)...(19): siRNA sense strand
gaguugaaggccuacaaau

SEQ ID NO: 16874 - RNA, 19 nt, Homo sapiens
  misc_RNA (1)...(19): siRNA sense strand
ggagcaagcgguggagaca

SEQ ID NO: 16875 - RNA, 19 nt, Homo sapiens
  misc_RNA (1)...(19): siRNA sense strand
caaaucggaacuggaggaa

SEQ ID NO: 16876 - RNA, 19 nt, Homo sapiens
  misc_RNA (1)...(19): siRNA sense strand
gagaagagauuacguauuc

SEQ ID NO: 16877 - RNA, 19 nt, Homo sapiens
  misc_RNA (1)...(19): siRNA sense strand
gaaaagaaguguagcuaua

SEQ ID NO: 16878 - RNA, 19 nt, Homo sapiens
  misc_RNA (1)...(19): siRNA sense strand
gaaauagaauguaccaaac

SEQ ID NO: 16879 - RNA, 19 nt, Homo sapiens
  misc_RNA (1)...(19): siRNA sense strand
ggagagagaguaaagauuc

SEQ ID NO: 16880 - RNA, 19 nt, Homo sapiens
  misc_RNA (1)...(19): siRNA sense strand
ggagggaugagaaaguuua

SEQ ID NO: 16881 - RNA, 19 nt, Homo sapiens
  misc_RNA (1)...(19): siRNA sense strand
gaaauguacacccagagua

SEQ ID NO: 16882 - RNA, 19 nt, Homo sapiens
  misc_RNA (1)...(19): siRNA sense strand
gaggagggaugagaaaguu

SEQ ID NO: 16883 - RNA, 19 nt, Homo sapiens
  misc_RNA (1)...(19): siRNA sense strand
gccagaugauuuaccauuu

SEQ ID NO: 16884 - RNA, 19 nt, Homo sapiens
  misc_RNA (1)...(19): siRNA sense strand
gccaucagcuggaaacaau

SEQ ID NO: 16885 - RNA, 19 nt, Homo sapiens
  misc_RNA (1)...(19): siRNA sense strand
gaguaaagauucaggaaaa

SEQ ID NO: 16886 - RNA, 19 nt, Homo sapiens
  misc_RNA (1)...(19): siRNA sense strand
gagagagaguaaagauuca

SEQ ID NO: 16887 - RNA, 19 nt, Homo sapiens
  misc_RNA (1)...(19): siRNA sense strand
ggucugccaugccaaguug

SEQ ID NO: 16888 - RNA, 19 nt, Homo sapiens
  misc_RNA (1)...(19): siRNA sense strand
gcacgacacauggaaauug

SEQ ID NO: 16889 - RNA, 19 nt, Homo sapiens
  misc_RNA (1)...(19): siRNA sense strand
gcuacauggugauaaaguu

SEQ ID NO: 16890 - RNA, 19 nt, Homo sapiens
  misc_RNA (1)...(19): siRNA sense strand
caagugcacugaggaagga

SEQ ID NO: 16891 - RNA, 19 nt, Homo sapiens
  misc_RNA (1)...(19): siRNA sense strand
guaccaaacugggaaacug

SEQ ID NO: 16892 - RNA, 19 nt, Homo sapiens
  misc_RNA (1)...(19): siRNA sense strand
ggagaagagauuacguauu

SEQ ID NO: 16893 - RNA, 19 nt, Homo sapiens
  misc_RNA (1)...(19): siRNA sense strand
ggaaugcuacauggugaua

SEQ ID NO: 16894 - RNA, 19 nt, Homo sapiens
  misc_RNA (1)...(19): siRNA sense strand
gaagaaauagaauguacca

SEQ ID NO: 16895 - RNA, 19 nt, Homo sapiens
  misc_RNA (1)...(19): siRNA sense strand
gaugcucaguguauagaug

SEQ ID NO: 16896 - RNA, 19 nt, Homo sapiens
  misc_RNA (1)...(19): siRNA sense strand
caauggauuugugaacuau

SEQ ID NO: 16897 - RNA, 19 nt, Homo sapiens
  misc_RNA (1)...(19): siRNA sense strand
gaauaucccaacacgauca

SEQ ID NO: 16898 - RNA, 19 nt, Homo sapiens
  misc_RNA (1)...(19): siRNA sense strand
caagccagaugauuuacca

SEQ ID NO: 16899 - RNA, 19 nt, Homo sapiens
  misc_RNA (1)...(19): siRNA sense strand
caggagaagagauuacgua

SEQ ID NO: 16900 - RNA, 19 nt, Homo sapiens
  misc_RNA (1)...(19): siRNA sense strand
agaggaugcucaguguaua

SEQ ID NO: 16901 - RNA, 19 nt, Homo sapiens
  misc_RNA (1)...(19): siRNA sense strand
cggaagaaauagaauguac

SEQ ID NO: 16902 - RNA, 19 nt, Homo sapiens
  misc_RNA (1)...(19): siRNA sense strand
gaaacaauucccucuaucg

SEQ ID NO: 16903 - RNA, 19 nt, Homo sapiens
  misc_RNA (1)...(19): siRNA sense strand
aaauggagccguacgcuau

SEQ ID NO: 16904 - RNA, 19 nt, Homo sapiens
  misc_RNA (1)...(19): siRNA sense strand
gagaguaaagauucaggaa

SEQ ID NO: 16905 - RNA, 19 nt, Homo sapiens
  misc_RNA (1)...(19): siRNA sense strand
aaugcuacauggugauaaa

SEQ ID NO: 16906 - RNA, 19 nt, Homo sapiens
  misc_RNA (1)...(19): siRNA sense strand
cagaggaugcucaguguau

SEQ ID NO: 16907 - RNA, 19 nt, Homo sapiens
  misc_RNA (1)...(19): siRNA sense strand
gcuauacgacuuuugaaua

SEQ ID NO: 16908 - RNA, 19 nt, Homo sapiens
  misc_RNA (1)...(19): siRNA sense strand
aaguuuaucugcccucuca

SEQ ID NO: 16909 - RNA, 19 nt, Homo sapiens
  misc_RNA (1)...(19): siRNA sense strand
ucccaagccagaugauuua

SEQ ID NO: 16910 - RNA, 19 nt, Homo sapiens
  misc_RNA (1)...(19): siRNA sense strand
cuacauggugauaaaguuu

SEQ ID NO: 16911 - RNA, 19 nt, Homo sapiens
  misc_RNA (1)...(19): siRNA sense strand
ccagaugauuuaccauuuu

SEQ ID NO: 16912 - RNA, 19 nt, Homo sapiens
  misc_RNA (1)...(19): siRNA sense strand
guaccaaggagagagagua

SEQ ID NO: 16913 - RNA, 19 nt, Homo sapiens
  misc_RNA (1)...(19): siRNA sense strand
guuguaaagcaucuuguaa

SEQ ID NO: 16914 - RNA, 19 nt, Homo sapiens
  misc_RNA (1)...(19): siRNA sense strand
uauaagccaucagcuggaa

SEQ ID NO: 16915 - RNA, 19 nt, Homo sapiens
  misc_RNA (1)...(19): siRNA sense strand
ugauggauauucucuggau

SEQ ID NO: 16916 - RNA, 19 nt, Homo sapiens
  misc_RNA (1)...(19): siRNA sense strand
gucccaagccagaugauuu

SEQ ID NO: 16917 - RNA, 19 nt, Homo sapiens
  misc_RNA (1)...(19): siRNA sense strand
gaacuauccugcaaaacca

SEQ ID NO: 16918 - RNA, 19 nt, Homo sapiens
  misc_RNA (1)...(19): siRNA sense strand
ccagaaugcagggaaguaa

SEQ ID NO: 16919 - RNA, 19 nt, Homo sapiens
  misc_RNA (1)...(19): siRNA sense strand
ggacuguggcccaucaaca

SEQ ID NO: 16920 - RNA, 19 nt, Homo sapiens
  misc_RNA (1)...(19): siRNA sense strand
uacagaggaugcucagugu

SEQ ID NO: 16921 - RNA, 19 nt, Homo sapiens
  misc_RNA (1)...(19): siRNA sense strand
aauagaauguaccaaacug

SEQ ID NO: 16922 - RNA, 19 nt, Homo sapiens
  misc_RNA (1)...(19): siRNA sense strand
caaggauaaagccacauuu

SEQ ID NO: 16923 - RNA, 19 nt, Homo sapiens
  misc_RNA (1)...(19): siRNA sense strand
gcaaaaccaacacuuuauu

SEQ ID NO: 16924 - RNA, 19 nt, Homo sapiens
  misc_RNA (1)...(19): siRNA sense strand
gggaugagaaaguuuaucu

SEQ ID NO: 16925 - RNA, 19 nt, Homo sapiens
  misc_RNA (1)...(19): siRNA sense strand
ccaaggagagagaguaaag

SEQ ID NO: 16926 - RNA, 19 nt, Homo sapiens
  misc_RNA (1)...(19): siRNA sense strand
caccauccauaccuacguu

SEQ ID NO: 16927 - RNA, 19 nt, Homo sapiens
  misc_RNA (1)...(19): siRNA sense strand
aaauguacacccagaguau

SEQ ID NO: 16928 - RNA, 19 nt, Homo sapiens
  misc_RNA (1)...(19): siRNA sense strand
ucucugccauguugcuauu

SEQ ID NO: 16929 - RNA, 19 nt, Homo sapiens
  misc_RNA (1)...(19): siRNA sense strand
gagccaggagaagagauua

SEQ ID NO: 16930 - RNA, 19 nt, Homo sapiens
  misc_RNA (1)...(19): siRNA sense strand
caucaagaccagacaaugg

SEQ ID NO: 16931 - RNA, 19 nt, Homo sapiens
  misc_RNA (1)...(19): siRNA sense strand
caugcgauguuuggaaaug

SEQ ID NO: 16932 - RNA, 19 nt, Homo sapiens
  misc_RNA (1)...(19): siRNA sense strand
cgauguaaagccaugcuaa

SEQ ID NO: 16933 - RNA, 19 nt, Homo sapiens
  misc_RNA (1)...(19): siRNA sense strand
cagaaugcagggaaguaaa

SEQ ID NO: 16934 - RNA, 19 nt, Homo sapiens
  misc_RNA (1)...(19): siRNA sense strand
gcgcugauucugccaagug

SEQ ID NO: 16935 - RNA, 19 nt, Homo sapiens
  misc_RNA (1)...(19): siRNA sense strand
caagaccagacaauggauu

SEQ ID NO: 16936 - RNA, 19 nt, Homo sapiens
  misc_RNA (1)...(19): siRNA sense strand
ccuccaccauccauaccua

SEQ ID NO: 16937 - RNA, 19 nt, Homo sapiens
  misc_RNA (1)...(19): siRNA sense strand
gcgauguuuggaaaugaua

SEQ ID NO: 16938 - RNA, 19 nt, Homo sapiens
  misc_RNA (1)...(19): siRNA sense strand
ucaucuuguucucgaguuu

SEQ ID NO: 16939 - RNA, 19 nt, Homo sapiens
  misc_RNA (1)...(19): siRNA sense strand
gaaugcuacauggugauaa

SEQ ID NO: 16940 - RNA, 19 nt, Homo sapiens
  misc_RNA (1)...(19): siRNA sense strand
aagaauggaaugcuacaug

SEQ ID NO: 16941 - RNA, 19 nt, Homo sapiens
  misc_RNA (1)...(19): siRNA sense strand
aaggauaaagccacauuug

SEQ ID NO: 16942 - RNA, 19 nt, Homo sapiens
  misc_RNA (1)...(19): siRNA sense strand
acaaggauaaagccacauu

SEQ ID NO: 16943 - RNA, 19 nt, Homo sapiens
  misc_RNA (1)...(19): siRNA sense strand
agaguaaagauucaggaaa

SEQ ID NO: 16944 - RNA, 19 nt, Homo sapiens
  misc_RNA (1)...(19): siRNA sense strand
uugaauaucccaacacgau

SEQ ID NO: 16945 - RNA, 19 nt, Homo sapiens
  misc_RNA (1)...(19): siRNA sense strand
gaggaugcucaguguauag

SEQ ID NO: 16946 - RNA, 19 nt, Homo sapiens
  misc_RNA (1)...(19): siRNA sense strand
uaccaaggagagagaguaa

SEQ ID NO: 16947 - RNA, 19 nt, Homo sapiens
  misc_RNA (1)...(19): siRNA sense strand
cacgacacauggaaauugg

SEQ ID NO: 16948 - RNA, 19 nt, Homo sapiens
  misc_RNA (1)...(19): siRNA sense strand
caucagcuggaaacaauuc

SEQ ID NO: 16949 - RNA, 19 nt, Homo sapiens
  misc_RNA (1)...(19): siRNA sense strand
gaagagauuacguauuccu

SEQ ID NO: 16950 - RNA, 19 nt, Homo sapiens
  misc_RNA (1)...(19): siRNA sense strand
ggaaaagaaguguagcuau

SEQ ID NO: 16951 - RNA, 19 nt, Homo sapiens
  misc_RNA (1)...(19): siRNA sense strand
ggaaaugauacaauuaccu

SEQ ID NO: 16952 - RNA, 19 nt, Homo sapiens
  misc_RNA (1)...(19): siRNA sense strand
caaggagagagaguaaaga

SEQ ID NO: 16953 - RNA, 19 nt, Homo sapiens
  misc_RNA (1)...(19): siRNA sense strand
uuugugaacuauccugcaa

SEQ ID NO: 16954 - RNA, 19 nt, Homo sapiens
  misc_RNA (1)...(19): siRNA sense strand
caugccaaguuguaaagca

SEQ ID NO: 16955 - RNA, 19 nt, Homo sapiens
  misc_RNA (1)...(19): siRNA sense strand
caacacuuuauuacaagga

SEQ ID NO: 16956 - RNA, 19 nt, Homo sapiens
  misc_RNA (1)...(19): siRNA sense strand
cgaggagggaugagaaagu

SEQ ID NO: 16957 - RNA, 19 nt, Homo sapiens
  misc_RNA (1)...(19): siRNA sense strand
aagaccagacaauggauuu

SEQ ID NO: 16958 - RNA, 19 nt, Homo sapiens
  misc_RNA (1)...(19): siRNA sense strand
uaucgggacacagcaguuu

SEQ ID NO: 16959 - RNA, 19 nt, Homo sapiens
  misc_RNA (1)...(19): siRNA sense strand
ugaaauguacacccagagu

SEQ ID NO: 16960 - RNA, 19 nt, Homo sapiens
  misc_RNA (1)...(19): siRNA sense strand
gaauggaaugcuacauggu

SEQ ID NO: 16961 - RNA, 19 nt, Homo sapiens
  misc_RNA (1)...(19): siRNA sense strand
gagggaugagaaaguuuau

SEQ ID NO: 16962 - RNA, 19 nt, Homo sapiens
  misc_RNA (1)...(19): siRNA sense strand
cugcaaaaccaacacuuua

SEQ ID NO: 16963 - RNA, 19 nt, Homo sapiens
  misc_RNA (1)...(19): siRNA sense strand
gccaaguuguaaagcaucu

SEQ ID NO: 16964 - RNA, 19 nt, Homo sapiens
  misc_RNA (1)...(19): siRNA sense strand
gagcugaccucgcuuaagg

SEQ ID NO: 16965 - RNA, 19 nt, Homo sapiens
  misc_RNA (1)...(19): siRNA sense strand
aggcugagcuggagauuca

SEQ ID NO: 16966 - RNA, 19 nt, Homo sapiens
  misc_RNA (1)...(19): siRNA sense strand
ucucucuccugcaguauga

SEQ ID NO: 16967 - RNA, 19 nt, Homo sapiens
  misc_RNA (1)...(19): siRNA sense strand
ggagaagcuggcaccugua

SEQ ID NO: 16968 - RNA, 19 nt, Homo sapiens
  misc_RNA (1)...(19): siRNA sense strand
ccaugaacgcugccuguga

SEQ ID NO: 16969 - RNA, 19 nt, Homo sapiens
  misc_RNA (1)...(19): siRNA sense strand
ggaaggcugagcuggagau

SEQ ID NO: 16970 - RNA, 19 nt, Homo sapiens
  misc_RNA (1)...(19): siRNA sense strand
agcuggagauucagaaaga

SEQ ID NO: 16971 - RNA, 19 nt, Homo sapiens
  misc_RNA (1)...(19): siRNA sense strand
gagaagcuggcaccuguac

SEQ ID NO: 16972 - RNA, 19 nt, Homo sapiens
  misc_RNA (1)...(19): siRNA sense strand
guggagcugaccucgcuua

SEQ ID NO: 16973 - RNA, 19 nt, Homo sapiens
  misc_RNA (1)...(19): siRNA sense strand
ucuucucucuccugcagua

SEQ ID NO: 16974 - RNA, 19 nt, Homo sapiens
  misc_RNA (1)...(19): siRNA sense strand
gagcuggagauucagaaag

SEQ ID NO: 16975 - RNA, 19 nt, Homo sapiens
  misc_RNA (1)...(19): siRNA sense strand
cuacaucgcaggccuagac

SEQ ID NO: 16976 - RNA, 19 nt, Homo sapiens
  misc_RNA (1)...(19): siRNA sense strand
ggguggucgucguggauga

SEQ ID NO: 16977 - RNA, 19 nt, Homo sapiens
  misc_RNA (1)...(19): siRNA sense strand
gaaggcugagcuggagauu

SEQ ID NO: 16978 - RNA, 19 nt, Homo sapiens
  misc_RNA (1)...(19): siRNA sense strand
gcaccuguacccuucuucu

SEQ ID NO: 16979 - RNA, 19 nt, Homo sapiens
  misc_RNA (1)...(19): siRNA sense strand
gaacacagcaguugcaaua

SEQ ID NO: 16980 - RNA, 19 nt, Homo sapiens
  misc_RNA (1)...(19): siRNA sense strand
gaacaagagugugauguga

SEQ ID NO: 16981 - RNA, 19 nt, Homo sapiens
  misc_RNA (1)...(19): siRNA sense strand
gaagaaggcccuacaguau

SEQ ID NO: 16982 - RNA, 19 nt, Homo sapiens
  misc_RNA (1)...(19): siRNA sense strand
gaagacaccagaagaagua

SEQ ID NO: 16983 - RNA, 19 nt, Homo sapiens
  misc_RNA (1)...(19): siRNA sense strand
gcaauaaccuuggcuuguu

SEQ ID NO: 16984 - RNA, 19 nt, Homo sapiens
  misc_RNA (1)...(19): siRNA sense strand
ggaagaaggcccuacagua

SEQ ID NO: 16985 - RNA, 19 nt, Homo sapiens
  misc_RNA (1)...(19): siRNA sense strand
gagaaaggcuggucugcuu

SEQ ID NO: 16986 - RNA, 19 nt, Homo sapiens
  misc_RNA (1)...(19): siRNA sense strand
gacagucccuuucaaauug

SEQ ID NO: 16987 - RNA, 19 nt, Homo sapiens
  misc_RNA (1)...(19): siRNA sense strand
ggaagaaacacucagcuau

SEQ ID NO: 16988 - RNA, 19 nt, Homo sapiens
  misc_RNA (1)...(19): siRNA sense strand
caauaaccuuggcuuguuu

SEQ ID NO: 16989 - RNA, 19 nt, Homo sapiens
  misc_RNA (1)...(19): siRNA sense strand
gaaguaacucgaacaguga

SEQ ID NO: 16990 - RNA, 19 nt, Homo sapiens
  misc_RNA (1)...(19): siRNA sense strand
gaagaaacacucagcuauc

SEQ ID NO: 16991 - RNA, 19 nt, Homo sapiens
  misc_RNA (1)...(19): siRNA sense strand
gaccacaguuuggcaauug

SEQ ID NO: 16992 - RNA, 19 nt, Homo sapiens
  misc_RNA (1)...(19): siRNA sense strand
ggacuggacccaucuuuca

SEQ ID NO: 16993 - RNA, 19 nt, Homo sapiens
  misc_RNA (1)...(19): siRNA sense strand
agaaggcccuacaguauug

SEQ ID NO: 16994 - RNA, 19 nt, Homo sapiens
  misc_RNA (1)...(19): siRNA sense strand
agugugaugugaaggauua

SEQ ID NO: 16995 - RNA, 19 nt, Homo sapiens
  misc_RNA (1)...(19): siRNA sense strand
ugacagucccuuucaaauu

SEQ ID NO: 16996 - RNA, 19 nt, Homo sapiens
  misc_RNA (1)...(19): siRNA sense strand
gaaguggacagacuaggaa

SEQ ID NO: 16997 - RNA, 19 nt, Homo sapiens
  misc_RNA (1)...(19): siRNA sense strand
gauaucaacacuccacuga

SEQ ID NO: 16998 - RNA, 19 nt, Homo sapiens
  misc_RNA (1)...(19): siRNA sense strand
uauuggagcuccuuucuca

SEQ ID NO: 16999 - RNA, 19 nt, Homo sapiens
  misc_RNA (1)...(19): siRNA sense strand
acacucagcuaucuacuag

SEQ ID NO: 17000 - RNA, 19 nt, Homo sapiens
  misc_RNA (1)...(19): siRNA sense strand
uaucaacacuccacugaca

SEQ ID NO: 17001 - RNA, 19 nt, Homo sapiens
  misc_RNA (1)...(19): siRNA sense strand
gaagaaaucuacaaaacag

SEQ ID NO: 17002 - RNA, 19 nt, Homo sapiens
  misc_RNA (1)...(19): siRNA sense strand
ugacaucccuaaugacagu

SEQ ID NO: 17003 - RNA, 19 nt, Homo sapiens
  misc_RNA (1)...(19): siRNA sense strand
ucacaagccuauugacuac

SEQ ID NO: 17004 - RNA, 19 nt, Homo sapiens
  misc_RNA (1)...(19): siRNA sense strand
gcaaggugauggaagaaac

SEQ ID NO: 17005 - RNA, 19 nt, Homo sapiens
  misc_RNA (1)...(19): siRNA sense strand
gaaaggcuggucugcuuga

SEQ ID NO: 17006 - RNA, 19 nt, Homo sapiens
  misc_RNA (1)...(19): siRNA sense strand
gguaaucacaagccuauug

SEQ ID NO: 17007 - RNA, 19 nt, Homo sapiens
  misc_RNA (1)...(19): siRNA sense strand
uugcugacaucccuaauga

SEQ ID NO: 17008 - RNA, 19 nt, Homo sapiens
  misc_RNA (1)...(19): siRNA sense strand
uuaaagaacaagaguguga

SEQ ID NO: 17009 - RNA, 19 nt, Homo sapiens
  misc_RNA (1)...(19): siRNA sense strand
aagaagaacggaagaauca

SEQ ID NO: 17010 - RNA, 19 nt, Homo sapiens
  misc_RNA (1)...(19): siRNA sense strand
gaaacacucagcuaucuac

SEQ ID NO: 17011 - RNA, 19 nt, Homo sapiens
  misc_RNA (1)...(19): siRNA sense strand
guaaucacaagccuauuga

SEQ ID NO: 17012 - RNA, 19 nt, Homo sapiens
  misc_RNA (1)...(19): siRNA sense strand
gggcggagaccacaguuug

SEQ ID NO: 17013 - RNA, 19 nt, Homo sapiens
  misc_RNA (1)...(19): siRNA sense strand
gggcuacucucaggauuag

SEQ ID NO: 17014 - RNA, 19 nt, Homo sapiens
  misc_RNA (1)...(19): siRNA sense strand
ggaagacaccagaagaagu

SEQ ID NO: 17015 - RNA, 19 nt, Homo sapiens
  misc_RNA (1)...(19): siRNA sense strand
gcccuacaguauugagaaa

SEQ ID NO: 17016 - RNA, 19 nt, Homo sapiens
  misc_RNA (1)...(19): siRNA sense strand
caagaagaacggaagaauc

SEQ ID NO: 17017 - RNA, 19 nt, Homo sapiens
  misc_RNA (1)...(19): siRNA sense strand
cuacaucacagaagaaauc

SEQ ID NO: 17018 - RNA, 19 nt, Homo sapiens
  misc_RNA (1)...(19): siRNA sense strand
ggccaauucaucuaaguuu

SEQ ID NO: 17019 - RNA, 19 nt, Homo sapiens
  misc_RNA (1)...(19): siRNA sense strand
gaacuaaaaggaaagauuc

SEQ ID NO: 17020 - RNA, 19 nt, Homo sapiens
  misc_RNA (1)...(19): siRNA sense strand
ugaaggaacuaaaaggaaa

SEQ ID NO: 17021 - RNA, 19 nt, Homo sapiens
  misc_RNA (1)...(19): siRNA sense strand
ugacugaaguggacagacu

SEQ ID NO: 17022 - RNA, 19 nt, Homo sapiens
  misc_RNA (1)...(19): siRNA sense strand
gaaaaggccaauucaucua

SEQ ID NO: 17023 - RNA, 19 nt, Homo sapiens
  misc_RNA (1)...(19): siRNA sense strand
uaaugacagucccuuucaa

SEQ ID NO: 17024 - RNA, 19 nt, Homo sapiens
  misc_RNA (1)...(19): siRNA sense strand
ucacagaagaaaucuacaa

SEQ ID NO: 17025 - RNA, 19 nt, Homo sapiens
  misc_RNA (1)...(19): siRNA sense strand
aagaaacacucagcuaucu

SEQ ID NO: 17026 - RNA, 19 nt, Homo sapiens
  misc_RNA (1)...(19): siRNA sense strand
uggacaaccuguaucuuuc

SEQ ID NO: 17027 - RNA, 19 nt, Homo sapiens
  misc_RNA (1)...(19): siRNA sense strand
gcugacaucccuaaugaca

SEQ ID NO: 17028 - RNA, 19 nt, Homo sapiens
  misc_RNA (1)...(19): siRNA sense strand
gaagaaguaacucgaacag

SEQ ID NO: 17029 - RNA, 19 nt, Homo sapiens
  misc_RNA (1)...(19): siRNA sense strand
acucagcuaucuacuagga

SEQ ID NO: 17030 - RNA, 19 nt, Homo sapiens
  misc_RNA (1)...(19): siRNA sense strand
ugccaaggauauuguguau

SEQ ID NO: 17031 - RNA, 19 nt, Homo sapiens
  misc_RNA (1)...(19): siRNA sense strand
cugggugacucccuguaua

SEQ ID NO: 17032 - RNA, 19 nt, Homo sapiens
  misc_RNA (1)...(19): siRNA sense strand
ccagaaccauagggauuau

SEQ ID NO: 17033 - RNA, 19 nt, Homo sapiens
  misc_RNA (1)...(19): siRNA sense strand
acaagagugugaugugaag

SEQ ID NO: 17034 - RNA, 19 nt, Homo sapiens
  misc_RNA (1)...(19): siRNA sense strand
acacagcaguugcaauaac

SEQ ID NO: 17035 - RNA, 19 nt, Homo sapiens
  misc_RNA (1)...(19): siRNA sense strand
gaaagaaaaggccaauuca

SEQ ID NO: 17036 - RNA, 19 nt, Homo sapiens
  misc_RNA (1)...(19): siRNA sense strand
ugaaaacucuaggcauuaa

SEQ ID NO: 17037 - RNA, 19 nt, Homo sapiens
  misc_RNA (1)...(19): siRNA sense strand
aagaaggcccuacaguauu

SEQ ID NO: 17038 - RNA, 19 nt, Homo sapiens
  misc_RNA (1)...(19): siRNA sense strand
gaccugcccuuugcugaca

SEQ ID NO: 17039 - RNA, 19 nt, Homo sapiens
  misc_RNA (1)...(19): siRNA sense strand
aggcuggucugcuugagaa

SEQ ID NO: 17040 - RNA, 19 nt, Homo sapiens
  misc_RNA (1)...(19): siRNA sense strand
ggggaacacuacauuuuga

SEQ ID NO: 17041 - RNA, 19 nt, Homo sapiens
  misc_RNA (1)...(19): siRNA sense strand
ggucugcuugagaaacuua

SEQ ID NO: 17042 - RNA, 19 nt, Homo sapiens
  misc_RNA (1)...(19): siRNA sense strand
gguggaugcucacacugau

SEQ ID NO: 17043 - RNA, 19 nt, Homo sapiens
  misc_RNA (1)...(19): siRNA sense strand
ccagaagaaguaacucgaa

SEQ ID NO: 17044 - RNA, 19 nt, Homo sapiens
  misc_RNA (1)...(19): siRNA sense strand
cacagaagaaaucuacaaa

SEQ ID NO: 17045 - RNA, 19 nt, Homo sapiens
  misc_RNA (1)...(19): siRNA sense strand
guccagaaccauagggauu

SEQ ID NO: 17046 - RNA, 19 nt, Homo sapiens
  misc_RNA (1)...(19): siRNA sense strand
cagaagaaaucuacaaaac

SEQ ID NO: 17047 - RNA, 19 nt, Homo sapiens
  misc_RNA (1)...(19): siRNA sense strand
cuguauaucugccaaggau

SEQ ID NO: 17048 - RNA, 19 nt, Homo sapiens
  misc_RNA (1)...(19): siRNA sense strand
acucucaggauuagauaua

SEQ ID NO: 17049 - RNA, 19 nt, Homo sapiens
  misc_RNA (1)...(19): siRNA sense strand
caucacagaagaaaucuac

SEQ ID NO: 17050 - RNA, 19 nt, Homo sapiens
  misc_RNA (1)...(19): siRNA sense strand
gcuaucuacuaggaagaaa

SEQ ID NO: 17051 - RNA, 19 nt, Homo sapiens
  misc_RNA (1)...(19): siRNA sense strand
guggacagacuaggaauug

SEQ ID NO: 17052 - RNA, 19 nt, Homo sapiens
  misc_RNA (1)...(19): siRNA sense strand
ugaaguggacagacuagga

SEQ ID NO: 17053 - RNA, 19 nt, Homo sapiens
  misc_RNA (1)...(19): siRNA sense strand
cuaaugacagucccuuuca

SEQ ID NO: 17054 - RNA, 19 nt, Homo sapiens
  misc_RNA (1)...(19): siRNA sense strand
gugacucccuguauaucug

SEQ ID NO: 17055 - RNA, 19 nt, Homo sapiens
  misc_RNA (1)...(19): siRNA sense strand
gcauggacaaccuguaucu

SEQ ID NO: 17056 - RNA, 19 nt, Homo sapiens
  misc_RNA (1)...(19): siRNA sense strand
caaauugugaagaauccaa

SEQ ID NO: 17057 - RNA, 19 nt, Homo sapiens
  misc_RNA (1)...(19): siRNA sense strand
ucaagaagaacggaagaau

SEQ ID NO: 17058 - RNA, 19 nt, Homo sapiens
  misc_RNA (1)...(19): siRNA sense strand
gaaacuuaaagaacaagag

SEQ ID NO: 17059 - RNA, 19 nt, Homo sapiens
  misc_RNA (1)...(19): siRNA sense strand
uaucuacuaggaagaaaga

SEQ ID NO: 17060 - RNA, 19 nt, Homo sapiens
  misc_RNA (1)...(19): siRNA sense strand
ggaacuaaaaggaaagauu

SEQ ID NO: 17061 - RNA, 19 nt, Homo sapiens
  misc_RNA (1)...(19): siRNA sense strand
aaacuugcauggacaaccu

SEQ ID NO: 17062 - RNA, 19 nt, Homo sapiens
  misc_RNA (1)...(19): siRNA sense strand
ggguggaugcucacacuga

SEQ ID NO: 17063 - RNA, 19 nt, Homo sapiens
  misc_RNA (1)...(19): siRNA sense strand
agaccacaguuuggcaauu

SEQ ID NO: 17064 - RNA, 19 nt, Homo sapiens
  misc_RNA (1)...(19): siRNA sense strand
aaugacagucccuuucaaa

SEQ ID NO: 17065 - RNA, 19 nt, Homo sapiens
  misc_RNA (1)...(19): siRNA sense strand
uccagaaccauagggauua

SEQ ID NO: 17066 - RNA, 19 nt, Homo sapiens
  misc_RNA (1)...(19): siRNA sense strand
uggaagaaacacucagcua

SEQ ID NO: 17067 - RNA, 19 nt, Homo sapiens
  misc_RNA (1)...(19): siRNA sense strand
gaauuggcaaggugaugga

SEQ ID NO: 17068 - RNA, 19 nt, Homo sapiens
  misc_RNA (1)...(19): siRNA sense strand
ugaagaauccaaggucugu

SEQ ID NO: 17069 - RNA, 19 nt, Homo sapiens
  misc_RNA (1)...(19): siRNA sense strand
cgccaaguccagaaccaua

SEQ ID NO: 17070 - RNA, 19 nt, Homo sapiens
  misc_RNA (1)...(19): siRNA sense strand
auggacaaccuguaucuuu

SEQ ID NO: 17071 - RNA, 19 nt, Homo sapiens
  misc_RNA (1)...(19): siRNA sense strand
agaaccauagggauuauug

SEQ ID NO: 17072 - RNA, 19 nt, Homo sapiens
  misc_RNA (1)...(19): siRNA sense strand
gggaagacaccagaagaag

SEQ ID NO: 17073 - RNA, 19 nt, Homo sapiens
  misc_RNA (1)...(19): siRNA sense strand
gcuacucucaggauuagau

SEQ ID NO: 17074 - RNA, 19 nt, Homo sapiens
  misc_RNA (1)...(19): siRNA sense strand
gccaauucaucuaaguuuu

SEQ ID NO: 17075 - RNA, 19 nt, Homo sapiens
  misc_RNA (1)...(19): siRNA sense strand
cagggcuacucucaggauu

SEQ ID NO: 17076 - RNA, 19 nt, Homo sapiens
  misc_RNA (1)...(19): siRNA sense strand
gcuugagaaacuuaaagaa

SEQ ID NO: 17077 - RNA, 19 nt, Homo sapiens
  misc_RNA (1)...(19): siRNA sense strand
caaaacagggcuacucuca

SEQ ID NO: 17078 - RNA, 19 nt, Homo sapiens
  misc_RNA (1)...(19): siRNA sense strand
gaaccauagggauuauugg

SEQ ID NO: 17079 - RNA, 19 nt, Homo sapiens
  misc_RNA (1)...(19): siRNA sense strand
guacaaggcucacuucuuc

SEQ ID NO: 17080 - RNA, 19 nt, Homo sapiens
  misc_RNA (1)...(19): siRNA sense strand
caucagggcuuccaucgau

SEQ ID NO: 17081 - RNA, 19 nt, Homo sapiens
  misc_RNA (1)...(19): siRNA sense strand
ggcagucucucuucuucua

SEQ ID NO: 17082 - RNA, 19 nt, Homo sapiens
  misc_RNA (1)...(19): siRNA sense strand
gggcuuccaucgauuucua

SEQ ID NO: 17083 - RNA, 19 nt, Homo sapiens
  misc_RNA (1)...(19): siRNA sense strand
caucuucacugcagacaau

SEQ ID NO: 17084 - RNA, 19 nt, Homo sapiens
  misc_RNA (1)...(19): siRNA sense strand
ucuaugaccuguccaagga

SEQ ID NO: 17085 - RNA, 19 nt, Homo sapiens
  misc_RNA (1)...(19): siRNA sense strand
gccagaaccugaccugcuu

SEQ ID NO: 17086 - RNA, 19 nt, Homo sapiens
  misc_RNA (1)...(19): siRNA sense strand
gaaagggaacgaccuacga

SEQ ID NO: 17087 - RNA, 19 nt, Homo sapiens
  misc_RNA (1)...(19): siRNA sense strand
caacaucgugcugaucuuu

SEQ ID NO: 17088 - RNA, 19 nt, Homo sapiens
  misc_RNA (1)...(19): siRNA sense strand
gaccugagaccaugcguau

SEQ ID NO: 17089 - RNA, 19 nt, Homo sapiens
  misc_RNA (1)...(19): siRNA sense strand
caaggacccuggugagaac

SEQ ID NO: 17090 - RNA, 19 nt, Homo sapiens
  misc_RNA (1)...(19): siRNA sense strand
gaagagacgcuggucaucu

SEQ ID NO: 17091 - RNA, 19 nt, Homo sapiens
  misc_RNA (1)...(19): siRNA sense strand
ccacuacccucaguucagu

SEQ ID NO: 17092 - RNA, 19 nt, Homo sapiens
  misc_RNA (1)...(19): siRNA sense strand
caagagcccucggcagucu

SEQ ID NO: 17093 - RNA, 19 nt, Homo sapiens
  misc_RNA (1)...(19): siRNA sense strand
ccaaggacccuggugagaa

SEQ ID NO: 17094 - RNA, 19 nt, Homo sapiens
  misc_RNA (1)...(19): siRNA sense strand
gggcugcgguucacagacu

SEQ ID NO: 17095 - RNA, 19 nt, Homo sapiens
  misc_RNA (1)...(19): siRNA sense strand
gcagacaauggaccugaga

SEQ ID NO: 17096 - RNA, 19 nt, Homo sapiens
  misc_RNA (1)...(19): siRNA sense strand
ccugagaccaugcguaugu

SEQ ID NO: 17097 - RNA, 19 nt, Homo sapiens
  misc_RNA (1)...(19): siRNA sense strand
ucagggcuuccaucgauuu

SEQ ID NO: 17098 - RNA, 19 nt, Homo sapiens
  misc_RNA (1)...(19): siRNA sense strand
gcugcucaaggcccaguua

SEQ ID NO: 17099 - RNA, 19 nt, Homo sapiens
  misc_RNA (1)...(19): siRNA sense strand
gcucucugacugcucauga

SEQ ID NO: 17100 - RNA, 19 nt, Homo sapiens
  misc_RNA (1)...(19): siRNA sense strand
ccaacaucgugcugaucuu

SEQ ID NO: 17101 - RNA, 19 nt, Homo sapiens
  misc_RNA (1)...(19): siRNA sense strand
guggaaagggaacgaccua

SEQ ID NO: 17102 - RNA, 19 nt, Homo sapiens
  misc_RNA (1)...(19): siRNA sense strand
gcucaaggcccaguuagac

SEQ ID NO: 17103 - RNA, 19 nt, Homo sapiens
  misc_RNA (1)...(19): siRNA sense strand
ucggcagucucucuucuuc

SEQ ID NO: 17104 - RNA, 19 nt, Homo sapiens
  misc_RNA (1)...(19): siRNA sense strand
gagccugccuuggccuucu

SEQ ID NO: 17105 - RNA, 19 nt, Homo sapiens
  misc_RNA (1)...(19): siRNA sense strand
gaauugagcugcugcauaa

SEQ ID NO: 17106 - RNA, 19 nt, Homo sapiens
  misc_RNA (1)...(19): siRNA sense strand
caugaacgcuguacauuaa

SEQ ID NO: 17107 - RNA, 19 nt, Homo sapiens
  misc_RNA (1)...(19): siRNA sense strand
caacaaacauauucaccaa

SEQ ID NO: 17108 - RNA, 19 nt, Homo sapiens
  misc_RNA (1)...(19): siRNA sense strand
aaaugucacugcagcuuua

SEQ ID NO: 17109 - RNA, 19 nt, Homo sapiens
  misc_RNA (1)...(19): siRNA sense strand
cuauagcccucauaacuaa

SEQ ID NO: 17110 - RNA, 19 nt, Homo sapiens
  misc_RNA (1)...(19): siRNA sense strand
ggaauggugucccuuaugg

SEQ ID NO: 17111 - RNA, 19 nt, Homo sapiens
  misc_RNA (1)...(19): siRNA sense strand
ccagauccguacagguuua

SEQ ID NO: 17112 - RNA, 19 nt, Homo sapiens
  misc_RNA (1)...(19): siRNA sense strand
gcagugggcucuggaacaa

SEQ ID NO: 17113 - RNA, 19 nt, Homo sapiens
  misc_RNA (1)...(19): siRNA sense strand
gcaggaauggugucccuua

SEQ ID NO: 17114 - RNA, 19 nt, Homo sapiens
  misc_RNA (1)...(19): siRNA sense strand
gaagccauaugacuuuauc

SEQ ID NO: 17115 - RNA, 19 nt, Homo sapiens
  misc_RNA (1)...(19): siRNA sense strand
gaauguaccggaaagaaug

SEQ ID NO: 17116 - RNA, 19 nt, Homo sapiens
  misc_RNA (1)...(19): siRNA sense strand
gaaaugucacugcagcuuu

SEQ ID NO: 17117 - RNA, 19 nt, Homo sapiens
  misc_RNA (1)...(19): siRNA sense strand
gcuauagcccucauaacua

SEQ ID NO: 17118 - RNA, 19 nt, Homo sapiens
  misc_RNA (1)...(19): siRNA sense strand
cauaugacuuuauccaaga

SEQ ID NO: 17119 - RNA, 19 nt, Homo sapiens
  misc_RNA (1)...(19): siRNA sense strand
ccaugaacgcuguacauua

SEQ ID NO: 17120 - RNA, 19 nt, Homo sapiens
  misc_RNA (1)...(19): siRNA sense strand
ggaugaagcaguaggaaau

SEQ ID NO: 17121 - RNA, 19 nt, Homo sapiens
  misc_RNA (1)...(19): siRNA sense strand
gaaguugcaacaggauaua

SEQ ID NO: 17122 - RNA, 19 nt, Homo sapiens
  misc_RNA (1)...(19): siRNA sense strand
ccuuauggaugaagcagua

SEQ ID NO: 17123 - RNA, 19 nt, Homo sapiens
  misc_RNA (1)...(19): siRNA sense strand
aggaauacuugaagccaua

SEQ ID NO: 17124 - RNA, 19 nt, Homo sapiens
  misc_RNA (1)...(19): siRNA sense strand
ggaauguaccggaaagaau

SEQ ID NO: 17125 - RNA, 19 nt, Homo sapiens
  misc_RNA (1)...(19): siRNA sense strand
ugaacgcuguacauuaauu

SEQ ID NO: 17126 - RNA, 19 nt, Homo sapiens
  misc_RNA (1)...(19): siRNA sense strand
gaacgcuguacauuaauug

SEQ ID NO: 17127 - RNA, 19 nt, Homo sapiens
  misc_RNA (1)...(19): siRNA sense strand
gagcugcugcauaauauug

SEQ ID NO: 17128 - RNA, 19 nt, Homo sapiens
  misc_RNA (1)...(19): siRNA sense strand
gauaucuccuggguaguga

SEQ ID NO: 17129 - RNA, 19 nt, Homo sapiens
  misc_RNA (1)...(19): siRNA sense strand
gaacuucguggacucuuca

SEQ ID NO: 17130 - RNA, 19 nt, Homo sapiens
  misc_RNA (1)...(19): siRNA sense strand
aaagaagcagguuauacua

SEQ ID NO: 17131 - RNA, 19 nt, Homo sapiens
  misc_RNA (1)...(19): siRNA sense strand
caagaacaggcaucacuau

SEQ ID NO: 17132 - RNA, 19 nt, Homo sapiens
  misc_RNA (1)...(19): siRNA sense strand
ggaaaugucacugcagcuu

SEQ ID NO: 17133 - RNA, 19 nt, Homo sapiens
  misc_RNA (1)...(19): siRNA sense strand
gaaaauggcaccugggaau

SEQ ID NO: 17134 - RNA, 19 nt, Homo sapiens
  misc_RNA (1)...(19): siRNA sense strand
caggaauggugucccuuau

SEQ ID NO: 17135 - RNA, 19 nt, Homo sapiens
  misc_RNA (1)...(19): siRNA sense strand
uaauugacgcucugaaugu

SEQ ID NO: 17136 - RNA, 19 nt, Homo sapiens
  misc_RNA (1)...(19): siRNA sense strand
uaccagauccguacagguu

SEQ ID NO: 17137 - RNA, 19 nt, Homo sapiens
  misc_RNA (1)...(19): siRNA sense strand
cagguuauacuacccauau

SEQ ID NO: 17138 - RNA, 19 nt, Homo sapiens
  misc_RNA (1)...(19): siRNA sense strand
agaauugagcugcugcaua

SEQ ID NO: 17139 - RNA, 19 nt, Homo sapiens
  misc_RNA (1)...(19): siRNA sense strand
ccucauaacuaaccaucca

SEQ ID NO: 17140 - RNA, 19 nt, Homo sapiens
  misc_RNA (1)...(19): siRNA sense strand
gccgaggauuugauaccua

SEQ ID NO: 17141 - RNA, 19 nt, Homo sapiens
  misc_RNA (1)...(19): siRNA sense strand
cuacccauauggucggaaa

SEQ ID NO: 17142 - RNA, 19 nt, Homo sapiens
  misc_RNA (1)...(19): siRNA sense strand
gaagcaguaggaaauguca

SEQ ID NO: 17143 - RNA, 19 nt, Homo sapiens
  misc_RNA (1)...(19): siRNA sense strand
gaagaaguugcaacaggau

SEQ ID NO: 17144 - RNA, 19 nt, Homo sapiens
  misc_RNA (1)...(19): siRNA sense strand
ggauaucuccuggguagug

SEQ ID NO: 17145 - RNA, 19 nt, Homo sapiens
  misc_RNA (1)...(19): siRNA sense strand
gggaauguaccggaaagaa

SEQ ID NO: 17146 - RNA, 19 nt, Homo sapiens
  misc_RNA (1)...(19): siRNA sense strand
aggauuugauaccuacuuu

SEQ ID NO: 17147 - RNA, 19 nt, Homo sapiens
  misc_RNA (1)...(19): siRNA sense strand
cacgaugugcucuugauuu

SEQ ID NO: 17148 - RNA, 19 nt, Homo sapiens
  misc_RNA (1)...(19): siRNA sense strand
uugagcugcugcauaauau

SEQ ID NO: 17149 - RNA, 19 nt, Homo sapiens
  misc_RNA (1)...(19): siRNA sense strand
acaagaacaggcaucacua

SEQ ID NO: 17150 - RNA, 19 nt, Homo sapiens
  misc_RNA (1)...(19): siRNA sense strand
gacaagaacaggcaucacu

SEQ ID NO: 17151 - RNA, 19 nt, Homo sapiens
  misc_RNA (1)...(19): siRNA sense strand
aauggcaccugggaaugua

SEQ ID NO: 17152 - RNA, 19 nt, Homo sapiens
  misc_RNA (1)...(19): siRNA sense strand
gguuuacagcaccaaauaa

SEQ ID NO: 17153 - RNA, 19 nt, Homo sapiens
  misc_RNA (1)...(19): siRNA sense strand
uaacggagggcagacuuug

SEQ ID NO: 17154 - RNA, 19 nt, Homo sapiens
  misc_RNA (1)...(19): siRNA sense strand
uggugucccuuauggauga

SEQ ID NO: 17155 - RNA, 19 nt, Homo sapiens
  misc_RNA (1)...(19): siRNA sense strand
uuacagcaccaaauaaucu

SEQ ID NO: 17156 - RNA, 19 nt, Homo sapiens
  misc_RNA (1)...(19): siRNA sense strand
acacaccaauggcacaaag

SEQ ID NO: 17157 - RNA, 19 nt, Homo sapiens
  misc_RNA (1)...(19): siRNA sense strand
gauaacggagggcagacuu

SEQ ID NO: 17158 - RNA, 19 nt, Homo sapiens
  misc_RNA (1)...(19): siRNA sense strand
gcuguguuccucuggauga

SEQ ID NO: 17159 - RNA, 19 nt, Homo sapiens
  misc_RNA (1)...(19): siRNA sense strand
uugaagccauaugacuuua

SEQ ID NO: 17160 - RNA, 19 nt, Homo sapiens
  misc_RNA (1)...(19): siRNA sense strand
uuugauaccuacuuuggau

SEQ ID NO: 17161 - RNA, 19 nt, Homo sapiens
  misc_RNA (1)...(19): siRNA sense strand
gauuugauaccuacuuugg

SEQ ID NO: 17162 - RNA, 19 nt, Homo sapiens
  misc_RNA (1)...(19): siRNA sense strand
cgagauggcgaagaaguug

SEQ ID NO: 17163 - RNA, 19 nt, Homo sapiens
  misc_RNA (1)...(19): siRNA sense strand
ggacacaccaauggcacaa

SEQ ID NO: 17164 - RNA, 19 nt, Homo sapiens
  misc_RNA (1)...(19): siRNA sense strand
gaugaagcaguaggaaaug

SEQ ID NO: 17165 - RNA, 19 nt, Homo sapiens
  misc_RNA (1)...(19): siRNA sense strand
cuugaagccauaugacuuu

SEQ ID NO: 17166 - RNA, 19 nt, Homo sapiens
  misc_RNA (1)...(19): siRNA sense strand
gggugcuccuggacaacua

SEQ ID NO: 17167 - RNA, 19 nt, Homo sapiens
  misc_RNA (1)...(19): siRNA sense strand
cagacgaccuaggcuggaa

SEQ ID NO: 17168 - RNA, 19 nt, Homo sapiens
  misc_RNA (1)...(19): siRNA sense strand
cuaccuugcucuccagucu

SEQ ID NO: 17169 - RNA, 19 nt, Homo sapiens
  misc_RNA (1)...(19): siRNA sense strand
guuuacagcaccaaauaau

SEQ ID NO: 17170 - RNA, 19 nt, Homo sapiens
  misc_RNA (1)...(19): siRNA sense strand
gcagguuauacuacccaua

SEQ ID NO: 17171 - RNA, 19 nt, Homo sapiens
  misc_RNA (1)...(19): siRNA sense strand
uuaauugacgcucugaaug

SEQ ID NO: 17172 - RNA, 19 nt, Homo sapiens
  misc_RNA (1)...(19): siRNA sense strand
gaggauuugauaccuacuu

SEQ ID NO: 17173 - RNA, 19 nt, Homo sapiens
  misc_RNA (1)...(19): siRNA sense strand
gaagaaccgggagcucauc

SEQ ID NO: 17174 - RNA, 19 nt, Homo sapiens
  misc_RNA (1)...(19): siRNA sense strand
uggguagugaagauuauua

SEQ ID NO: 17175 - RNA, 19 nt, Homo sapiens
  misc_RNA (1)...(19): siRNA sense strand
auugagcugcugcauaaua

SEQ ID NO: 17176 - RNA, 19 nt, Homo sapiens
  misc_RNA (1)...(19): siRNA sense strand
gcagaagggcgugaagaac

SEQ ID NO: 17177 - RNA, 19 nt, Homo sapiens
  misc_RNA (1)...(19): siRNA sense strand
gaauggugucccuuaugga

SEQ ID NO: 17178 - RNA, 19 nt, Homo sapiens
  misc_RNA (1)...(19): siRNA sense strand
ccuggguagugaagauuau

SEQ ID NO: 17179 - RNA, 19 nt, Homo sapiens
  misc_RNA (1)...(19): siRNA sense strand
ggguagugaagauuauuau

SEQ ID NO: 17180 - RNA, 19 nt, Homo sapiens
  misc_RNA (1)...(19): siRNA sense strand
ggauuugauaccuacuuug

SEQ ID NO: 17181 - RNA, 19 nt, Homo sapiens
  misc_RNA (1)...(19): siRNA sense strand
agaaguugcaacaggauau

SEQ ID NO: 17182 - RNA, 19 nt, Homo sapiens
  misc_RNA (1)...(19): siRNA sense strand
gauuauuauucccaugaac

SEQ ID NO: 17183 - RNA, 19 nt, Homo sapiens
  misc_RNA (1)...(19): siRNA sense strand
ugauaccuacuuuggauau

SEQ ID NO: 17184 - RNA, 19 nt, Homo sapiens
  misc_RNA (1)...(19): siRNA sense strand
cagcuguguuccucuggau

SEQ ID NO: 17185 - RNA, 19 nt, Homo sapiens
  misc_RNA (1)...(19): siRNA sense strand
gccauaugacuuuauccaa

SEQ ID NO: 17186 - RNA, 19 nt, Homo sapiens
  misc_RNA (1)...(19): siRNA sense strand
acgaugugcucuugauuuu

SEQ ID NO: 17187 - RNA, 19 nt, Homo sapiens
  misc_RNA (1)...(19): siRNA sense strand
ggaauacuugaagccauau

SEQ ID NO: 17188 - RNA, 19 nt, Homo sapiens
  misc_RNA (1)...(19): siRNA sense strand
gaauugagcugcugcauaa

SEQ ID NO: 17189 - RNA, 19 nt, Homo sapiens
  misc_RNA (1)...(19): siRNA sense strand
caugaacgcuguacauuaa

SEQ ID NO: 17190 - RNA, 19 nt, Homo sapiens
  misc_RNA (1)...(19): siRNA sense strand
caacaaacauauucaccaa

SEQ ID NO: 17191 - RNA, 19 nt, Homo sapiens
  misc_RNA (1)...(19): siRNA sense strand
aaaugucacugcagcuuua

SEQ ID NO: 17192 - RNA, 19 nt, Homo sapiens
  misc_RNA (1)...(19): siRNA sense strand
cuauagcccucauaacuaa

SEQ ID NO: 17193 - RNA, 19 nt, Homo sapiens
  misc_RNA (1)...(19): siRNA sense strand
ggaauggugucccuuaugg

SEQ ID NO: 17194 - RNA, 19 nt, Homo sapiens
  misc_RNA (1)...(19): siRNA sense strand
ccagauccguacagguuua

SEQ ID NO: 17195 - RNA, 19 nt, Homo sapiens
  misc_RNA (1)...(19): siRNA sense strand
gcagugggcucuggaacaa

SEQ ID NO: 17196 - RNA, 19 nt, Homo sapiens
  misc_RNA (1)...(19): siRNA sense strand
gcaggaauggugucccuua

SEQ ID NO: 17197 - RNA, 19 nt, Homo sapiens
  misc_RNA (1)...(19): siRNA sense strand
gaagccauaugacuuuauc

SEQ ID NO: 17198 - RNA, 19 nt, Homo sapiens
  misc_RNA (1)...(19): siRNA sense strand
gaauguaccggaaagaaug

SEQ ID NO: 17199 - RNA, 19 nt, Homo sapiens
  misc_RNA (1)...(19): siRNA sense strand
gaaaugucacugcagcuuu

SEQ ID NO: 17200 - RNA, 19 nt, Homo sapiens
  misc_RNA (1)...(19): siRNA sense strand
gcuauagcccucauaacua

SEQ ID NO: 17201 - RNA, 19 nt, Homo sapiens
  misc_RNA (1)...(19): siRNA sense strand
cauaugacuuuauccaaga

SEQ ID NO: 17202 - RNA, 19 nt, Homo sapiens
  misc_RNA (1)...(19): siRNA sense strand
ccaugaacgcuguacauua

SEQ ID NO: 17203 - RNA, 19 nt, Homo sapiens
  misc_RNA (1)...(19): siRNA sense strand
ggaugaagcaguaggaaau

SEQ ID NO: 17204 - RNA, 19 nt, Homo sapiens
  misc_RNA (1)...(19): siRNA sense strand
gaaguugcaacaggauaua

SEQ ID NO: 17205 - RNA, 19 nt, Homo sapiens
  misc_RNA (1)...(19): siRNA sense strand
ccuuauggaugaagcagua

SEQ ID NO: 17206 - RNA, 19 nt, Homo sapiens
  misc_RNA (1)...(19): siRNA sense strand
aggaauacuugaagccaua

SEQ ID NO: 17207 - RNA, 19 nt, Homo sapiens
  misc_RNA (1)...(19): siRNA sense strand
ggaauguaccggaaagaau

SEQ ID NO: 17208 - RNA, 19 nt, Homo sapiens
  misc_RNA (1)...(19): siRNA sense strand
ugaacgcuguacauuaauu

SEQ ID NO: 17209 - RNA, 19 nt, Homo sapiens
  misc_RNA (1)...(19): siRNA sense strand
gaacgcuguacauuaauug

SEQ ID NO: 17210 - RNA, 19 nt, Homo sapiens
  misc_RNA (1)...(19): siRNA sense strand
gagcugcugcauaauauug

SEQ ID NO: 17211 - RNA, 19 nt, Homo sapiens
  misc_RNA (1)...(19): siRNA sense strand
gauaucuccuggguaguga

SEQ ID NO: 17212 - RNA, 19 nt, Homo sapiens
  misc_RNA (1)...(19): siRNA sense strand
gaacuucguggacucuuca

SEQ ID NO: 17213 - RNA, 19 nt, Homo sapiens
  misc_RNA (1)...(19): siRNA sense strand
aaagaagcagguuauacua

SEQ ID NO: 17214 - RNA, 19 nt, Homo sapiens
  misc_RNA (1)...(19): siRNA sense strand
caagaacaggcaucacuau

SEQ ID NO: 17215 - RNA, 19 nt, Homo sapiens
  misc_RNA (1)...(19): siRNA sense strand
ggaaaugucacugcagcuu

SEQ ID NO: 17216 - RNA, 19 nt, Homo sapiens
  misc_RNA (1)...(19): siRNA sense strand
gaaaauggcaccugggaau

SEQ ID NO: 17217 - RNA, 19 nt, Homo sapiens
  misc_RNA (1)...(19): siRNA sense strand
caggaauggugucccuuau

SEQ ID NO: 17218 - RNA, 19 nt, Homo sapiens
  misc_RNA (1)...(19): siRNA sense strand
uaauugacgcucugaaugu

SEQ ID NO: 17219 - RNA, 19 nt, Homo sapiens
  misc_RNA (1)...(19): siRNA sense strand
uaccagauccguacagguu

SEQ ID NO: 17220 - RNA, 19 nt, Homo sapiens
  misc_RNA (1)...(19): siRNA sense strand
cagguuauacuacccauau

SEQ ID NO: 17221 - RNA, 19 nt, Homo sapiens
  misc_RNA (1)...(19): siRNA sense strand
agaauugagcugcugcaua

SEQ ID NO: 17222 - RNA, 19 nt, Homo sapiens
  misc_RNA (1)...(19): siRNA sense strand
ccucauaacuaaccaucca

SEQ ID NO: 17223 - RNA, 19 nt, Homo sapiens
  misc_RNA (1)...(19): siRNA sense strand
gccgaggauuugauaccua

SEQ ID NO: 17224 - RNA, 19 nt, Homo sapiens
  misc_RNA (1)...(19): siRNA sense strand
cuacccauauggucggaaa

SEQ ID NO: 17225 - RNA, 19 nt, Homo sapiens
  misc_RNA (1)...(19): siRNA sense strand
gaagcaguaggaaauguca

SEQ ID NO: 17226 - RNA, 19 nt, Homo sapiens
  misc_RNA (1)...(19): siRNA sense strand
gaagaaguugcaacaggau

SEQ ID NO: 17227 - RNA, 19 nt, Homo sapiens
  misc_RNA (1)...(19): siRNA sense strand
ggauaucuccuggguagug

SEQ ID NO: 17228 - RNA, 19 nt, Homo sapiens
  misc_RNA (1)...(19): siRNA sense strand
gggaauguaccggaaagaa

SEQ ID NO: 17229 - RNA, 19 nt, Homo sapiens
  misc_RNA (1)...(19): siRNA sense strand
aggauuugauaccuacuuu

SEQ ID NO: 17230 - RNA, 19 nt, Homo sapiens
  misc_RNA (1)...(19): siRNA sense strand
cacgaugugcucuugauuu

SEQ ID NO: 17231 - RNA, 19 nt, Homo sapiens
  misc_RNA (1)...(19): siRNA sense strand
uugagcugcugcauaauau

SEQ ID NO: 17232 - RNA, 19 nt, Homo sapiens
  misc_RNA (1)...(19): siRNA sense strand
acaagaacaggcaucacua

SEQ ID NO: 17233 - RNA, 19 nt, Homo sapiens
  misc_RNA (1)...(19): siRNA sense strand
gacaagaacaggcaucacu

SEQ ID NO: 17234 - RNA, 19 nt, Homo sapiens
  misc_RNA (1)...(19): siRNA sense strand
aauggcaccugggaaugua

SEQ ID NO: 17235 - RNA, 19 nt, Homo sapiens
  misc_RNA (1)...(19): siRNA sense strand
gguuuacagcaccaaauaa

SEQ ID NO: 17236 - RNA, 19 nt, Homo sapiens
  misc_RNA (1)...(19): siRNA sense strand
uaacggagggcagacuuug

SEQ ID NO: 17237 - RNA, 19 nt, Homo sapiens
  misc_RNA (1)...(19): siRNA sense strand
uggugucccuuauggauga

SEQ ID NO: 17238 - RNA, 19 nt, Homo sapiens
  misc_RNA (1)...(19): siRNA sense strand
uuacagcaccaaauaaucu

SEQ ID NO: 17239 - RNA, 19 nt, Homo sapiens
  misc_RNA (1)...(19): siRNA sense strand
acacaccaauggcacaaag

SEQ ID NO: 17240 - RNA, 19 nt, Homo sapiens
  misc_RNA (1)...(19): siRNA sense strand
gauaacggagggcagacuu

SEQ ID NO: 17241 - RNA, 19 nt, Homo sapiens
  misc_RNA (1)...(19): siRNA sense strand
gcuguguuccucuggauga

SEQ ID NO: 17242 - RNA, 19 nt, Homo sapiens
  misc_RNA (1)...(19): siRNA sense strand
uugaagccauaugacuuua

SEQ ID NO: 17243 - RNA, 19 nt, Homo sapiens
  misc_RNA (1)...(19): siRNA sense strand
uuugauaccuacuuuggau

SEQ ID NO: 17244 - RNA, 19 nt, Homo sapiens
  misc_RNA (1)...(19): siRNA sense strand
gauuugauaccuacuuugg

SEQ ID NO: 17245 - RNA, 19 nt, Homo sapiens
  misc_RNA (1)...(19): siRNA sense strand
cgagauggcgaagaaguug

SEQ ID NO: 17246 - RNA, 19 nt, Homo sapiens
  misc_RNA (1)...(19): siRNA sense strand
ggacacaccaauggcacaa

SEQ ID NO: 17247 - RNA, 19 nt, Homo sapiens
  misc_RNA (1)...(19): siRNA sense strand
gaugaagcaguaggaaaug

SEQ ID NO: 17248 - RNA, 19 nt, Homo sapiens
  misc_RNA (1)...(19): siRNA sense strand
cuugaagccauaugacuuu

SEQ ID NO: 17249 - RNA, 19 nt, Homo sapiens
  misc_RNA (1)...(19): siRNA sense strand
gggugcuccuggacaacua

SEQ ID NO: 17250 - RNA, 19 nt, Homo sapiens
  misc_RNA (1)...(19): siRNA sense strand
cagacgaccuaggcuggaa

SEQ ID NO: 17251 - RNA, 19 nt, Homo sapiens
  misc_RNA (1)...(19): siRNA sense strand
cuaccuugcucuccagucu

SEQ ID NO: 17252 - RNA, 19 nt, Homo sapiens
  misc_RNA (1)...(19): siRNA sense strand
guuuacagcaccaaauaau

SEQ ID NO: 17253 - RNA, 19 nt, Homo sapiens
  misc_RNA (1)...(19): siRNA sense strand
gcagguuauacuacccaua

SEQ ID NO: 17254 - RNA, 19 nt, Homo sapiens
  misc_RNA (1)...(19): siRNA sense strand
uuaauugacgcucugaaug

SEQ ID NO: 17255 - RNA, 19 nt, Homo sapiens
  misc_RNA (1)...(19): siRNA sense strand
gaggauuugauaccuacuu

SEQ ID NO: 17256 - RNA, 19 nt, Homo sapiens
  misc_RNA (1)...(19): siRNA sense strand
gaagaaccgggagcucauc

SEQ ID NO: 17257 - RNA, 19 nt, Homo sapiens
  misc_RNA (1)...(19): siRNA sense strand
uggguagugaagauuauua

SEQ ID NO: 17258 - RNA, 19 nt, Homo sapiens
  misc_RNA (1)...(19): siRNA sense strand
auugagcugcugcauaaua

SEQ ID NO: 17259 - RNA, 19 nt, Homo sapiens
  misc_RNA (1)...(19): siRNA sense strand
gcagaagggcgugaagaac

SEQ ID NO: 17260 - RNA, 19 nt, Homo sapiens
  misc_RNA (1)...(19): siRNA sense strand
gaauggugucccuuaugga

SEQ ID NO: 17261 - RNA, 19 nt, Homo sapiens
  misc_RNA (1)...(19): siRNA sense strand
ccuggguagugaagauuau

SEQ ID NO: 17262 - RNA, 19 nt, Homo sapiens
  misc_RNA (1)...(19): siRNA sense strand
ggguagugaagauuauuau

SEQ ID NO: 17263 - RNA, 19 nt, Homo sapiens
  misc_RNA (1)...(19): siRNA sense strand
ggauuugauaccuacuuug

SEQ ID NO: 17264 - RNA, 19 nt, Homo sapiens
  misc_RNA (1)...(19): siRNA sense strand
agaaguugcaacaggauau

SEQ ID NO: 17265 - RNA, 19 nt, Homo sapiens
  misc_RNA (1)...(19): siRNA sense strand
gauuauuauucccaugaac

SEQ ID NO: 17266 - RNA, 19 nt, Homo sapiens
  misc_RNA (1)...(19): siRNA sense strand
ugauaccuacuuuggauau

SEQ ID NO: 17267 - RNA, 19 nt, Homo sapiens
  misc_RNA (1)...(19): siRNA sense strand
cagcuguguuccucuggau

SEQ ID NO: 17268 - RNA, 19 nt, Homo sapiens
  misc_RNA (1)...(19): siRNA sense strand
gccauaugacuuuauccaa

SEQ ID NO: 17269 - RNA, 19 nt, Homo sapiens
  misc_RNA (1)...(19): siRNA sense strand
acgaugugcucuugauuuu

SEQ ID NO: 17270 - RNA, 19 nt, Homo sapiens
  misc_RNA (1)...(19): siRNA sense strand
ggaauacuugaagccauau

SEQ ID NO: 17271 - RNA, 19 nt, Homo sapiens
  misc_RNA (1)...(19): siRNA sense strand
caacaaaugagacaacuuu

SEQ ID NO: 17272 - RNA, 19 nt, Homo sapiens
  misc_RNA (1)...(19): siRNA sense strand
ggaagaugacccacaauaa

SEQ ID NO: 17273 - RNA, 19 nt, Homo sapiens
  misc_RNA (1)...(19): siRNA sense strand
ggaauggaauuuauaaagg

SEQ ID NO: 17274 - RNA, 19 nt, Homo sapiens
  misc_RNA (1)...(19): siRNA sense strand
caacagcacccucauuuau

SEQ ID NO: 17275 - RNA, 19 nt, Homo sapiens
  misc_RNA (1)...(19): siRNA sense strand
ccacuggacucauuggaaa

SEQ ID NO: 17276 - RNA, 19 nt, Homo sapiens
  misc_RNA (1)...(19): siRNA sense strand
ggaauaagcaugggccuuu

SEQ ID NO: 17277 - RNA, 19 nt, Homo sapiens
  misc_RNA (1)...(19): siRNA sense strand
gcaacagcacccucauuua

SEQ ID NO: 17278 - RNA, 19 nt, Homo sapiens
  misc_RNA (1)...(19): siRNA sense strand
gaugcucgcuguacugcua

SEQ ID NO: 17279 - RNA, 19 nt, Homo sapiens
  misc_RNA (1)...(19): siRNA sense strand
caucauggcuuugagcauu

SEQ ID NO: 17280 - RNA, 19 nt, Homo sapiens
  misc_RNA (1)...(19): siRNA sense strand
ggaaugccuuucuccuuga

SEQ ID NO: 17281 - RNA, 19 nt, Homo sapiens
  misc_RNA (1)...(19): siRNA sense strand
gaagcucacacaccugaua

SEQ ID NO: 17282 - RNA, 19 nt, Homo sapiens
  misc_RNA (1)...(19): siRNA sense strand
acagcacccucauuuauuu

SEQ ID NO: 17283 - RNA, 19 nt, Homo sapiens
  misc_RNA (1)...(19): siRNA sense strand
gcaccauucuuguuugugu

SEQ ID NO: 17284 - RNA, 19 nt, Homo sapiens
  misc_RNA (1)...(19): siRNA sense strand
gggaagaugacccacaaua

SEQ ID NO: 17285 - RNA, 19 nt, Homo sapiens
  misc_RNA (1)...(19): siRNA sense strand
gccgauugcuuucugauga

SEQ ID NO: 17286 - RNA, 19 nt, Homo sapiens
  misc_RNA (1)...(19): siRNA sense strand
ggagauggacuggauggua

SEQ ID NO: 17287 - RNA, 19 nt, Homo sapiens
  misc_RNA (1)...(19): siRNA sense strand
gacggauccuugacacuuu

SEQ ID NO: 17288 - RNA, 19 nt, Homo sapiens
  misc_RNA (1)...(19): siRNA sense strand
ccucagagcccguguucua

SEQ ID NO: 17289 - RNA, 19 nt, Homo sapiens
  misc_RNA (1)...(19): siRNA sense strand
ucacaucccucuuaucacu

SEQ ID NO: 17290 - RNA, 19 nt, Homo sapiens
  misc_RNA (1)...(19): siRNA sense strand
uaugguggcuggaauggaa

SEQ ID NO: 17291 - RNA, 19 nt, Homo sapiens
  misc_RNA (1)...(19): siRNA sense strand
caugaggacuccgaauauu

SEQ ID NO: 17292 - RNA, 19 nt, Homo sapiens
  misc_RNA (1)...(19): siRNA sense strand
gaacaccagcggacacuca

SEQ ID NO: 17293 - RNA, 19 nt, Homo sapiens
  misc_RNA (1)...(19): siRNA sense strand
acgaguuccugaugcauua

SEQ ID NO: 17294 - RNA, 19 nt, Homo sapiens
  misc_RNA (1)...(19): siRNA sense strand
gcgugaagcugacccaaca

SEQ ID NO: 17295 - RNA, 19 nt, Homo sapiens
  misc_RNA (1)...(19): siRNA sense strand
guucacaucccucuuauca

SEQ ID NO: 17296 - RNA, 19 nt, Homo sapiens
  misc_RNA (1)...(19): siRNA sense strand
gagguugcguccuuucuca

SEQ ID NO: 17297 - RNA, 19 nt, Homo sapiens
  misc_RNA (1)...(19): siRNA sense strand
ccaccacgauccaccuuug

SEQ ID NO: 17298 - RNA, 19 nt, Homo sapiens
  misc_RNA (1)...(19): siRNA sense strand
ggacggauccuugacacuu

SEQ ID NO: 17299 - RNA, 19 nt, Homo sapiens
  misc_RNA (1)...(19): siRNA sense strand
gggaugguuuccagcauug

SEQ ID NO: 17300 - RNA, 19 nt, Homo sapiens
  misc_RNA (1)...(19): siRNA sense strand
gcgguucccuagagaauca

SEQ ID NO: 17301 - RNA, 19 nt, Homo sapiens
  misc_RNA (1)...(19): siRNA sense strand
uagaggagauggacuggau

SEQ ID NO: 17302 - RNA, 19 nt, Homo sapiens
  misc_RNA (1)...(19): siRNA sense strand
gaauaagcaugggccuuuc

SEQ ID NO: 17303 - RNA, 19 nt, Homo sapiens
  misc_RNA (1)...(19): siRNA sense strand
acacaucucugccgcaucu

SEQ ID NO: 17304 - RNA, 19 nt, Homo sapiens
  misc_RNA (1)...(19): siRNA sense strand
ggacagcccaacacucaga

SEQ ID NO: 17305 - RNA, 19 nt, Homo sapiens
  misc_RNA (1)...(19): siRNA sense strand
gcuggaauggaauuuauaa

SEQ ID NO: 17306 - RNA, 19 nt, Homo sapiens
  misc_RNA (1)...(19): siRNA sense strand
ccgaacauccuucuucuga

SEQ ID NO: 17307 - RNA, 19 nt, Homo sapiens
  misc_RNA (1)...(19): siRNA sense strand
ucgcuguacugcuaaguuu

SEQ ID NO: 17308 - RNA, 19 nt, Homo sapiens
  misc_RNA (1)...(19): siRNA sense strand
gaggaacaauguggaaagu

SEQ ID NO: 17309 - RNA, 19 nt, Homo sapiens
  misc_RNA (1)...(19): siRNA sense strand
gcaucugggucucaacugu

SEQ ID NO: 17310 - RNA, 19 nt, Homo sapiens
  misc_RNA (1)...(19): siRNA sense strand
cagcauugguuaccguguu

SEQ ID NO: 17311 - RNA, 19 nt, Homo sapiens
  misc_RNA (1)...(19): siRNA sense strand
uagggaagaugacccacaa

SEQ ID NO: 17312 - RNA, 19 nt, Homo sapiens
  misc_RNA (1)...(19): siRNA sense strand
ugaggacuccgaauauuga

SEQ ID NO: 17313 - RNA, 19 nt, Homo sapiens
  misc_RNA (1)...(19): siRNA sense strand
gagcaacagcacccucauu

SEQ ID NO: 17314 - RNA, 19 nt, Homo sapiens
  misc_RNA (1)...(19): siRNA sense strand
cccaugugcuuccaaagaa

SEQ ID NO: 17315 - RNA, 19 nt, Homo sapiens
  misc_RNA (1)...(19): siRNA sense strand
gaagcugacccaacacauc

SEQ ID NO: 17316 - RNA, 19 nt, Homo sapiens
  misc_RNA (1)...(19): siRNA sense strand
gaccgaacauccuucuucu

SEQ ID NO: 17317 - RNA, 19 nt, Homo sapiens
  misc_RNA (1)...(19): siRNA sense strand
ucaagagacccuucugaga

SEQ ID NO: 17318 - RNA, 19 nt, Homo sapiens
  misc_RNA (1)...(19): siRNA sense strand
gauccaccuuugcucuuug

SEQ ID NO: 17319 - RNA, 19 nt, Homo sapiens
  misc_RNA (1)...(19): siRNA sense strand
ggaggucuuccaacaaaug

SEQ ID NO: 17320 - RNA, 19 nt, Homo sapiens
  misc_RNA (1)...(19): siRNA sense strand
gagaaucaacuuggaaaca

SEQ ID NO: 17321 - RNA, 19 nt, Homo sapiens
  misc_RNA (1)...(19): siRNA sense strand
gcauuauugugagagguuu

SEQ ID NO: 17322 - RNA, 19 nt, Homo sapiens
  misc_RNA (1)...(19): siRNA sense strand
cagauacccugugcgauca

SEQ ID NO: 17323 - RNA, 19 nt, Homo sapiens
  misc_RNA (1)...(19): siRNA sense strand
uggcuggaauggaauuuau

SEQ ID NO: 17324 - RNA, 19 nt, Homo sapiens
  misc_RNA (1)...(19): siRNA sense strand
ucacggcgguucccuagag

SEQ ID NO: 17325 - RNA, 19 nt, Homo sapiens
  misc_RNA (1)...(19): siRNA sense strand
gccggugccugcuauggaa

SEQ ID NO: 17326 - RNA, 19 nt, Homo sapiens
  misc_RNA (1)...(19): siRNA sense strand
cagagcccguguucuauca

SEQ ID NO: 17327 - RNA, 19 nt, Homo sapiens
  misc_RNA (1)...(19): siRNA sense strand
cgauccaccuuugcucuuu

SEQ ID NO: 17328 - RNA, 19 nt, Homo sapiens
  misc_RNA (1)...(19): siRNA sense strand
ccaugaggacuccgaauau

SEQ ID NO: 17329 - RNA, 19 nt, Homo sapiens
  misc_RNA (1)...(19): siRNA sense strand
gcuggugccuuagggaaga

SEQ ID NO: 17330 - RNA, 19 nt, Homo sapiens
  misc_RNA (1)...(19): siRNA sense strand
cgaccgaacauccuucuuc

SEQ ID NO: 17331 - RNA, 19 nt, Homo sapiens
  misc_RNA (1)...(19): siRNA sense strand
gcccaugugcuuccaaaga

SEQ ID NO: 17332 - RNA, 19 nt, Homo sapiens
  misc_RNA (1)...(19): siRNA sense strand
ucacggagcagcccaugug

SEQ ID NO: 17333 - RNA, 19 nt, Homo sapiens
  misc_RNA (1)...(19): siRNA sense strand
ccuagagaaucaacuugga

SEQ ID NO: 17334 - RNA, 19 nt, Homo sapiens
  misc_RNA (1)...(19): siRNA sense strand
cacguucacaucccucuua

SEQ ID NO: 17335 - RNA, 19 nt, Homo sapiens
  misc_RNA (1)...(19): siRNA sense strand
ccucuuuguuuccuuucua

SEQ ID NO: 17336 - RNA, 19 nt, Homo sapiens
  misc_RNA (1)...(19): siRNA sense strand
ggccuuuccuccucuuugu

SEQ ID NO: 17337 - RNA, 19 nt, Homo sapiens
  misc_RNA (1)...(19): siRNA sense strand
cuaugccacuggacucauu

SEQ ID NO: 17338 - RNA, 19 nt, Homo sapiens
  misc_RNA (1)...(19): siRNA sense strand
ggacaacguagaggagaug

SEQ ID NO: 17339 - RNA, 19 nt, Homo sapiens
  misc_RNA (1)...(19): siRNA sense strand
caaagaacgacaccccuua

SEQ ID NO: 17340 - RNA, 19 nt, Homo sapiens
  misc_RNA (1)...(19): siRNA sense strand
cagcccaugugcuuccaaa

SEQ ID NO: 17341 - RNA, 19 nt, Homo sapiens
  misc_RNA (1)...(19): siRNA sense strand
gaaugccuuucuccuugau

SEQ ID NO: 17342 - RNA, 19 nt, Homo sapiens
  misc_RNA (1)...(19): siRNA sense strand
ccaccacccucuccaucau

SEQ ID NO: 17343 - RNA, 19 nt, Homo sapiens
  misc_RNA (1)...(19): siRNA sense strand
gaauauugaccgccuugca

SEQ ID NO: 17344 - RNA, 19 nt, Homo sapiens
  misc_RNA (1)...(19): siRNA sense strand
uagagaaucaacuuggaaa

SEQ ID NO: 17345 - RNA, 19 nt, Homo sapiens
  misc_RNA (1)...(19): siRNA sense strand
guggaggguuugagcaaca

SEQ ID NO: 17346 - RNA, 19 nt, Homo sapiens
  misc_RNA (1)...(19): siRNA sense strand
cgaacauccuucuucugau

SEQ ID NO: 17347 - RNA, 19 nt, Homo sapiens
  misc_RNA (1)...(19): siRNA sense strand
gaggucuuccaacaaauga

SEQ ID NO: 17348 - RNA, 19 nt, Homo sapiens
  misc_RNA (1)...(19): siRNA sense strand
caacgggacagaggaacaa

SEQ ID NO: 17349 - RNA, 19 nt, Homo sapiens
  misc_RNA (1)...(19): siRNA sense strand
gggacaacguagaggagau

SEQ ID NO: 17350 - RNA, 19 nt, Homo sapiens
  misc_RNA (1)...(19): siRNA sense strand
caucugcaccauucuuguu

SEQ ID NO: 17351 - RNA, 19 nt, Homo sapiens
  misc_RNA (1)...(19): siRNA sense strand
cggagcaucuggaggucuu

SEQ ID NO: 17352 - RNA, 19 nt, Homo sapiens
  misc_RNA (1)...(19): siRNA sense strand
ccuccucuuuguuuccuuu

SEQ ID NO: 17353 - RNA, 19 nt, Homo sapiens
  misc_RNA (1)...(19): siRNA sense strand
ggucuuccaacaaaugaga

SEQ ID NO: 17354 - RNA, 19 nt, Homo sapiens
  misc_RNA (1)...(19): siRNA sense strand
gaacgacaccccuuauucu

SEQ ID NO: 17355 - RNA, 19 nt, Homo sapiens
  misc_RNA (1)...(19): siRNA sense strand
agcaacagcacccucauuu

SEQ ID NO: 17356 - RNA, 19 nt, Homo sapiens
  misc_RNA (1)...(19): siRNA sense strand
ggccuugguugcccucaca

SEQ ID NO: 17357 - RNA, 19 nt, Homo sapiens
  misc_RNA (1)...(19): siRNA sense strand
aacagcacccucauuuauu

SEQ ID NO: 17358 - RNA, 19 nt, Homo sapiens
  misc_RNA (1)...(19): siRNA sense strand
agggaugguuuccagcauu

SEQ ID NO: 17359 - RNA, 19 nt, Homo sapiens
  misc_RNA (1)...(19): siRNA sense strand
cgagucugauggacguguu

SEQ ID NO: 17360 - RNA, 19 nt, Homo sapiens
  misc_RNA (1)...(19): siRNA sense strand
acaucccucuuaucacuau

SEQ ID NO: 17361 - RNA, 19 nt, Homo sapiens
  misc_RNA (1)...(19): siRNA sense strand
gguugcguccuuucucaaa

SEQ ID NO: 17362 - RNA, 19 nt, Homo sapiens
  misc_RNA (1)...(19): siRNA sense strand
caucaacgggacagaggaa

SEQ ID NO: 17363 - RNA, 19 nt, Homo sapiens
  misc_RNA (1)...(19): siRNA sense strand
cuagagaaucaacuuggaa

SEQ ID NO: 17364 - RNA, 19 nt, Homo sapiens
  misc_RNA (1)...(19): siRNA sense strand
accaugaggacuccgaaua

SEQ ID NO: 17365 - RNA, 19 nt, Homo sapiens
  misc_RNA (1)...(19): siRNA sense strand
gauugacggccaagaccuu

SEQ ID NO: 17366 - RNA, 19 nt, Homo sapiens
  misc_RNA (1)...(19): siRNA sense strand
cuuuggacguggaggguuu

SEQ ID NO: 17367 - RNA, 19 nt, Homo sapiens
  misc_RNA (1)...(19): siRNA sense strand
gauuguccaugccgauugc

SEQ ID NO: 17368 - RNA, 19 nt, Homo sapiens
  misc_RNA (1)...(19): siRNA sense strand
caucucugccgcaucuuug

SEQ ID NO: 17369 - RNA, 19 nt, Homo sapiens
  misc_RNA (1)...(19): siRNA sense strand
agaaucaacuuggaaacac

SEQ ID NO: 17370 - RNA, 19 nt, Homo sapiens
  misc_RNA (1)...(19): siRNA sense strand
caccauucuuguuuguguu

SEQ ID NO: 17371 - RNA, 19 nt, Homo sapiens
  misc_RNA (1)...(19): siRNA sense strand
gagaagggcucaagaaaua

SEQ ID NO: 17372 - RNA, 19 nt, Homo sapiens
  misc_RNA (1)...(19): siRNA sense strand
gaacagggcuggagguaaa

SEQ ID NO: 17373 - RNA, 19 nt, Homo sapiens
  misc_RNA (1)...(19): siRNA sense strand
gaagauuccuaugacauua

SEQ ID NO: 17374 - RNA, 19 nt, Homo sapiens
  misc_RNA (1)...(19): siRNA sense strand
gcaaagacaacuaaacuaa

SEQ ID NO: 17375 - RNA, 19 nt, Homo sapiens
  misc_RNA (1)...(19): siRNA sense strand
ugaaugaggccgcauauua

SEQ ID NO: 17376 - RNA, 19 nt, Homo sapiens
  misc_RNA (1)...(19): siRNA sense strand
ccagauauauugacuguga

SEQ ID NO: 17377 - RNA, 19 nt, Homo sapiens
  misc_RNA (1)...(19): siRNA sense strand
gaagaaguguaccagauau

SEQ ID NO: 17378 - RNA, 19 nt, Homo sapiens
  misc_RNA (1)...(19): siRNA sense strand
cagaagauuugccauauga

SEQ ID NO: 17379 - RNA, 19 nt, Homo sapiens
  misc_RNA (1)...(19): siRNA sense strand
ucugagagcugauaucuug

SEQ ID NO: 17380 - RNA, 19 nt, Homo sapiens
  misc_RNA (1)...(19): siRNA sense strand
caacuaaacuaacgcucaa

SEQ ID NO: 17381 - RNA, 19 nt, Homo sapiens
  misc_RNA (1)...(19): siRNA sense strand
ucacauugcugaagaacau

SEQ ID NO: 17382 - RNA, 19 nt, Homo sapiens
  misc_RNA (1)...(19): siRNA sense strand
gauuaaacaugcucuugau

SEQ ID NO: 17383 - RNA, 19 nt, Homo sapiens
  misc_RNA (1)...(19): siRNA sense strand
uaucuuggaucaaaugaga

SEQ ID NO: 17384 - RNA, 19 nt, Homo sapiens
  misc_RNA (1)...(19): siRNA sense strand
agaaauugcugcuaucauc

SEQ ID NO: 17385 - RNA, 19 nt, Homo sapiens
  misc_RNA (1)...(19): siRNA sense strand
gaagggcucaagaaauaaa

SEQ ID NO: 17386 - RNA, 19 nt, Homo sapiens
  misc_RNA (1)...(19): siRNA sense strand
gagcauccuucccucaaau

SEQ ID NO: 17387 - RNA, 19 nt, Homo sapiens
  misc_RNA (1)...(19): siRNA sense strand
ugagcuaaccggaguauuu

SEQ ID NO: 17388 - RNA, 19 nt, Homo sapiens
  misc_RNA (1)...(19): siRNA sense strand
ccaaguauccuguggguau

SEQ ID NO: 17389 - RNA, 19 nt, Homo sapiens
  misc_RNA (1)...(19): siRNA sense strand
gaaguguaccagauauauu

SEQ ID NO: 17390 - RNA, 19 nt, Homo sapiens
  misc_RNA (1)...(19): siRNA sense strand
ugaagaaguguaccagaua

SEQ ID NO: 17391 - RNA, 19 nt, Homo sapiens
  misc_RNA (1)...(19): siRNA sense strand
caacaccaccucuaacaug

SEQ ID NO: 17392 - RNA, 19 nt, Homo sapiens
  misc_RNA (1)...(19): siRNA sense strand
ggaugaaaauggagaaauu

SEQ ID NO: 17393 - RNA, 19 nt, Homo sapiens
  misc_RNA (1)...(19): siRNA sense strand
caaguauccuguggguaua

SEQ ID NO: 17394 - RNA, 19 nt, Homo sapiens
  misc_RNA (1)...(19): siRNA sense strand
ccagagcagugaagaagug

SEQ ID NO: 17395 - RNA, 19 nt, Homo sapiens
  misc_RNA (1)...(19): siRNA sense strand
gugaagaaguguaccagau

SEQ ID NO: 17396 - RNA, 19 nt, Homo sapiens
  misc_RNA (1)...(19): siRNA sense strand
gaaugaggccgcauauuac

SEQ ID NO: 17397 - RNA, 19 nt, Homo sapiens
  misc_RNA (1)...(19): siRNA sense strand
ggugcacucuuauucuuga

SEQ ID NO: 17398 - RNA, 19 nt, Homo sapiens
  misc_RNA (1)...(19): siRNA sense strand
gaguauuucugguuaagca

SEQ ID NO: 17399 - RNA, 19 nt, Homo sapiens
  misc_RNA (1)...(19): siRNA sense strand
gucagaagauuugccauau

SEQ ID NO: 17400 - RNA, 19 nt, Homo sapiens
  misc_RNA (1)...(19): siRNA sense strand
guuaagcauuggcuagaga

SEQ ID NO: 17401 - RNA, 19 nt, Homo sapiens
  misc_RNA (1)...(19): siRNA sense strand
ucagaagauuugccauaug

SEQ ID NO: 17402 - RNA, 19 nt, Homo sapiens
  misc_RNA (1)...(19): siRNA sense strand
gaagauuugccauaugaag

SEQ ID NO: 17403 - RNA, 19 nt, Homo sapiens
  misc_RNA (1)...(19): siRNA sense strand
ugaagauuccuaugacauu

SEQ ID NO: 17404 - RNA, 19 nt, Homo sapiens
  misc_RNA (1)...(19): siRNA sense strand
uaccagauauauugacugu

SEQ ID NO: 17405 - RNA, 19 nt, Homo sapiens
  misc_RNA (1)...(19): siRNA sense strand
gagaacagggcuggaggua

SEQ ID NO: 17406 - RNA, 19 nt, Homo sapiens
  misc_RNA (1)...(19): siRNA sense strand
aaacuaacgcucaaugcaa

SEQ ID NO: 17407 - RNA, 19 nt, Homo sapiens
  misc_RNA (1)...(19): siRNA sense strand
aaagacaacuaaacuaacg

SEQ ID NO: 17408 - RNA, 19 nt, Homo sapiens
  misc_RNA (1)...(19): siRNA sense strand
gaggaacccaugggaauga

SEQ ID NO: 17409 - RNA, 19 nt, Homo sapiens
  misc_RNA (1)...(19): siRNA sense strand
gcugaagaacauauacaaa

SEQ ID NO: 17410 - RNA, 19 nt, Homo sapiens
  misc_RNA (1)...(19): siRNA sense strand
aacuaacgcucaaugcaaa

SEQ ID NO: 17411 - RNA, 19 nt, Homo sapiens
  misc_RNA (1)...(19): siRNA sense strand
gagcuaaccggaguauuuc

SEQ ID NO: 17412 - RNA, 19 nt, Homo sapiens
  misc_RNA (1)...(19): siRNA sense strand
ggagaaauugcugcuauca

SEQ ID NO: 17413 - RNA, 19 nt, Homo sapiens
  misc_RNA (1)...(19): siRNA sense strand
uaucauccauccuaaucug

SEQ ID NO: 17414 - RNA, 19 nt, Homo sapiens
  misc_RNA (1)...(19): siRNA sense strand
ugucagaagauuugccaua

SEQ ID NO: 17415 - RNA, 19 nt, Homo sapiens
  misc_RNA (1)...(19): siRNA sense strand
ccauugaggucuauaaaau

SEQ ID NO: 17416 - RNA, 19 nt, Homo sapiens
  misc_RNA (1)...(19): siRNA sense strand
acagugaagauuccuauga

SEQ ID NO: 17417 - RNA, 19 nt, Homo sapiens
  misc_RNA (1)...(19): siRNA sense strand
aguauucgcugcuguuuac

SEQ ID NO: 17418 - RNA, 19 nt, Homo sapiens
  misc_RNA (1)...(19): siRNA sense strand
gcuaucauccauccuaauc

SEQ ID NO: 17419 - RNA, 19 nt, Homo sapiens
  misc_RNA (1)...(19): siRNA sense strand
ggaggaacccaugggaaug

SEQ ID NO: 17420 - RNA, 19 nt, Homo sapiens
  misc_RNA (1)...(19): siRNA sense strand
guugcuaucuuuggaggaa

SEQ ID NO: 17421 - RNA, 19 nt, Homo sapiens
  misc_RNA (1)...(19): siRNA sense strand
ugauuaaacaugcucuuga

SEQ ID NO: 17422 - RNA, 19 nt, Homo sapiens
  misc_RNA (1)...(19): siRNA sense strand
gauuugccauaugaaguga

SEQ ID NO: 17423 - RNA, 19 nt, Homo sapiens
  misc_RNA (1)...(19): siRNA sense strand
gcugcuaucauccauccua

SEQ ID NO: 17424 - RNA, 19 nt, Homo sapiens
  misc_RNA (1)...(19): siRNA sense strand
uaaacuaacgcucaaugca

SEQ ID NO: 17425 - RNA, 19 nt, Homo sapiens
  misc_RNA (1)...(19): siRNA sense strand
caaaagacagugaagauuc

SEQ ID NO: 17426 - RNA, 19 nt, Homo sapiens
  misc_RNA (1)...(19): siRNA sense strand
gagagcugauaucuuggau

SEQ ID NO: 17427 - RNA, 19 nt, Homo sapiens
  misc_RNA (1)...(19): siRNA sense strand
aaguguaccagauauauug

SEQ ID NO: 17428 - RNA, 19 nt, Homo sapiens
  misc_RNA (1)...(19): siRNA sense strand
ucgcugcuguuuacauuag

SEQ ID NO: 17429 - RNA, 19 nt, Homo sapiens
  misc_RNA (1)...(19): siRNA sense strand
caaagacaacuaaacuaac

SEQ ID NO: 17430 - RNA, 19 nt, Homo sapiens
  misc_RNA (1)...(19): siRNA sense strand
ccacugggcggagacugua

SEQ ID NO: 17431 - RNA, 19 nt, Homo sapiens
  misc_RNA (1)...(19): siRNA sense strand
ugcgaccacucguuccaua

SEQ ID NO: 17432 - RNA, 19 nt, Homo sapiens
  misc_RNA (1)...(19): siRNA sense strand
accggaguauuucugguua

SEQ ID NO: 17433 - RNA, 19 nt, Homo sapiens
  misc_RNA (1)...(19): siRNA sense strand
agaaguguaccagauauau

SEQ ID NO: 17434 - RNA, 19 nt, Homo sapiens
  misc_RNA (1)...(19): siRNA sense strand
gagcagugaagaaguguac

SEQ ID NO: 17435 - RNA, 19 nt, Homo sapiens
  misc_RNA (1)...(19): siRNA sense strand
uacaaaagguugcuaucuu

SEQ ID NO: 17436 - RNA, 19 nt, Homo sapiens
  misc_RNA (1)...(19): siRNA sense strand
ccggaguauuucugguuaa

SEQ ID NO: 17437 - RNA, 19 nt, Homo sapiens
  misc_RNA (1)...(19): siRNA sense strand
agagaauggcgcugagauu

SEQ ID NO: 17438 - RNA, 19 nt, Homo sapiens
  misc_RNA (1)...(19): siRNA sense strand
auggagaaauugcugcuau

SEQ ID NO: 17439 - RNA, 19 nt, Homo sapiens
  misc_RNA (1)...(19): siRNA sense strand
aagaaguguaccagauaua

SEQ ID NO: 17440 - RNA, 19 nt, Homo sapiens
  misc_RNA (1)...(19): siRNA sense strand
cugcuaucauccauccuaa

SEQ ID NO: 17441 - RNA, 19 nt, Homo sapiens
  misc_RNA (1)...(19): siRNA sense strand
gagaaauugcugcuaucau

SEQ ID NO: 17442 - RNA, 19 nt, Homo sapiens
  misc_RNA (1)...(19): siRNA sense strand
aacauggggugcacucuua

SEQ ID NO: 17443 - RNA, 19 nt, Homo sapiens
  misc_RNA (1)...(19): siRNA sense strand
cagugaagauuccuaugac

SEQ ID NO: 17444 - RNA, 19 nt, Homo sapiens
  misc_RNA (1)...(19): siRNA sense strand
gggcucaagaaauaaauca

SEQ ID NO: 17445 - RNA, 19 nt, Homo sapiens
  misc_RNA (1)...(19): siRNA sense strand
cacaacaccaccucuaaca

SEQ ID NO: 17446 - RNA, 19 nt, Homo sapiens
  misc_RNA (1)...(19): siRNA sense strand
gcggagacuguaccgugua

SEQ ID NO: 17447 - RNA, 19 nt, Homo sapiens
  misc_RNA (1)...(19): siRNA sense strand
gauaucuuggaucaaauga

SEQ ID NO: 17448 - RNA, 19 nt, Homo sapiens
  misc_RNA (1)...(19): siRNA sense strand
gaaugagcuaaccggagua

SEQ ID NO: 17449 - RNA, 19 nt, Homo sapiens
  misc_RNA (1)...(19): siRNA sense strand
gcauccuucccucaaauau

SEQ ID NO: 17450 - RNA, 19 nt, Homo sapiens
  misc_RNA (1)...(19): siRNA sense strand
uauuucugguuaagcauug

SEQ ID NO: 17451 - RNA, 19 nt, Homo sapiens
  misc_RNA (1)...(19): siRNA sense strand
auucgcugcuguuuacauu

SEQ ID NO: 17452 - RNA, 19 nt, Homo sapiens
  misc_RNA (1)...(19): siRNA sense strand
gaggccgcauauuacgaaa

SEQ ID NO: 17453 - RNA, 19 nt, Homo sapiens
  misc_RNA (1)...(19): siRNA sense strand
ugaggccgcauauuacgaa

SEQ ID NO: 17454 - RNA, 19 nt, Homo sapiens
  misc_RNA (1)...(19): siRNA sense strand
gcaggaucaagacuggaaa

SEQ ID NO: 17455 - RNA, 19 nt, Homo sapiens
  misc_RNA (1)...(19): siRNA sense strand
guauuucugguuaagcauu

SEQ ID NO: 17456 - RNA, 19 nt, Homo sapiens
  misc_RNA (1)...(19): siRNA sense strand
uauugacugugaccugaau

SEQ ID NO: 17457 - RNA, 19 nt, Homo sapiens
  misc_RNA (1)...(19): siRNA sense strand
cuugucacauugcugaaga

SEQ ID NO: 17458 - RNA, 19 nt, Homo sapiens
  misc_RNA (1)...(19): siRNA sense strand
gcgccauugaggucuauaa

SEQ ID NO: 17459 - RNA, 19 nt, Homo sapiens
  misc_RNA (1)...(19): siRNA sense strand
agacagugaagauuccuau

SEQ ID NO: 17460 - RNA, 19 nt, Homo sapiens
  misc_RNA (1)...(19): siRNA sense strand
gugaagauuccuaugacau

SEQ ID NO: 17461 - RNA, 19 nt, Homo sapiens
  misc_RNA (1)...(19): siRNA sense strand
ugcaaagacaacuaaacua

SEQ ID NO: 17462 - RNA, 19 nt, Homo sapiens
  misc_RNA (1)...(19): siRNA sense strand
uggagaaauugcugcuauc

SEQ ID NO: 17463 - RNA, 19 nt, Homo sapiens
  misc_RNA (1)...(19): siRNA sense strand
uggaggaacccaugggaau

SEQ ID NO: 17464 - RNA, 19 nt, Homo sapiens
  misc_RNA (1)...(19): siRNA sense strand
aaaguauucgcugcuguuu

SEQ ID NO: 17465 - RNA, 19 nt, Homo sapiens
  misc_RNA (1)...(19): siRNA sense strand
gcagugaagaaguguacca

SEQ ID NO: 17466 - RNA, 19 nt, Homo sapiens
  misc_RNA (1)...(19): siRNA sense strand
uggcuccacuacccugcua

SEQ ID NO: 17467 - RNA, 19 nt, Homo sapiens
  misc_RNA (1)...(19): siRNA sense strand
gcaaugaccugauggagua

SEQ ID NO: 17468 - RNA, 19 nt, Homo sapiens
  misc_RNA (1)...(19): siRNA sense strand
ggaaugaagucccgaggua

SEQ ID NO: 17469 - RNA, 19 nt, Homo sapiens
  misc_RNA (1)...(19): siRNA sense strand
gagaaccgcuucauuggaa

SEQ ID NO: 17470 - RNA, 19 nt, Homo sapiens
  misc_RNA (1)...(19): siRNA sense strand
caaggucacugccaaauag

SEQ ID NO: 17471 - RNA, 19 nt, Homo sapiens
  misc_RNA (1)...(19): siRNA sense strand
gcaaggucacugccaaaua

SEQ ID NO: 17472 - RNA, 19 nt, Homo sapiens
  misc_RNA (1)...(19): siRNA sense strand
gaggaugccugaauucuac

SEQ ID NO: 17473 - RNA, 19 nt, Homo sapiens
  misc_RNA (1)...(19): siRNA sense strand
ccuuggagcucuucaugua

SEQ ID NO: 17474 - RNA, 19 nt, Homo sapiens
  misc_RNA (1)...(19): siRNA sense strand
guauugacaucguggagaa

SEQ ID NO: 17475 - RNA, 19 nt, Homo sapiens
  misc_RNA (1)...(19): siRNA sense strand
ggaggaugccugaauucua

SEQ ID NO: 17476 - RNA, 19 nt, Homo sapiens
  misc_RNA (1)...(19): siRNA sense strand
gaacgugcagggugauuau

SEQ ID NO: 17477 - RNA, 19 nt, Homo sapiens
  misc_RNA (1)...(19): siRNA sense strand
gaagaaggcacugaagcuu

SEQ ID NO: 17478 - RNA, 19 nt, Homo sapiens
  misc_RNA (1)...(19): siRNA sense strand
cagcaggcaccauccuuua

SEQ ID NO: 17479 - RNA, 19 nt, Homo sapiens
  misc_RNA (1)...(19): siRNA sense strand
cagcaaaggcuccgugguu

SEQ ID NO: 17480 - RNA, 19 nt, Homo sapiens
  misc_RNA (1)...(19): siRNA sense strand
guggagaaccgcuucauug

SEQ ID NO: 17481 - RNA, 19 nt, Homo sapiens
  misc_RNA (1)...(19): siRNA sense strand
ccaggucucuacacgaaga

SEQ ID NO: 17482 - RNA, 19 nt, Homo sapiens
  misc_RNA (1)...(19): siRNA sense strand
uugcugagcugguguauac

SEQ ID NO: 17483 - RNA, 19 nt, Homo sapiens
  misc_RNA (1)...(19): siRNA sense strand
cacugucucucuacaauga

SEQ ID NO: 17484 - RNA, 19 nt, Homo sapiens
  misc_RNA (1)...(19): siRNA sense strand
ucauguaccugaacgaagu

SEQ ID NO: 17485 - RNA, 19 nt, Homo sapiens
  misc_RNA (1)...(19): siRNA sense strand
gaacgaucagguccgguuu

SEQ ID NO: 17486 - RNA, 19 nt, Homo sapiens
  misc_RNA (1)...(19): siRNA sense strand
ggagaaccgcuucauugga

SEQ ID NO: 17487 - RNA, 19 nt, Homo sapiens
  misc_RNA (1)...(19): siRNA sense strand
ccuggaggaugccugaauu

SEQ ID NO: 17488 - RNA, 19 nt, Homo sapiens
  misc_RNA (1)...(19): siRNA sense strand
gagaaccucaugcacauca

SEQ ID NO: 17489 - RNA, 19 nt, Homo sapiens
  misc_RNA (1)...(19): siRNA sense strand
ggaagaaggcacugaagcu

SEQ ID NO: 17490 - RNA, 19 nt, Homo sapiens
  misc_RNA (1)...(19): siRNA sense strand
gggaguuuguggaggaguu

SEQ ID NO: 17491 - RNA, 19 nt, Homo sapiens
  misc_RNA (1)...(19): siRNA sense strand
gagcaaggucacugccaaa

SEQ ID NO: 17492 - RNA, 19 nt, Homo sapiens
  misc_RNA (1)...(19): siRNA sense strand
caacauuggccagaaggaa

SEQ ID NO: 17493 - RNA, 19 nt, Homo sapiens
  misc_RNA (1)...(19): siRNA sense strand
gcagguguccguccucaag

SEQ ID NO: 17494 - RNA, 19 nt, Homo sapiens
  misc_RNA (1)...(19): siRNA sense strand
gaggagcuggugagcauga

SEQ ID NO: 17495 - RNA, 19 nt, Homo sapiens
  misc_RNA (1)...(19): siRNA sense strand
gaaugaagucccgagguau

SEQ ID NO: 17496 - RNA, 19 nt, Homo sapiens
  misc_RNA (1)...(19): siRNA sense strand
gauuaugagccaacugaug

SEQ ID NO: 17497 - RNA, 19 nt, Homo sapiens
  misc_RNA (1)...(19): siRNA sense strand
gugauuaugagccaacuga

SEQ ID NO: 17498 - RNA, 19 nt, Homo sapiens
  misc_RNA (1)...(19): siRNA sense strand
ugaaggaacaaggcuauga

SEQ ID NO: 17499 - RNA, 19 nt, Homo sapiens
  misc_RNA (1)...(19): siRNA sense strand
cuccaggucucuacacgaa

SEQ ID NO: 17500 - RNA, 19 nt, Homo sapiens
  misc_RNA (1)...(19): siRNA sense strand
ccaccggguucaucaacau

SEQ ID NO: 17501 - RNA, 19 nt, Homo sapiens
  misc_RNA (1)...(19): siRNA sense strand
gcugaaggaacaaggcuau

SEQ ID NO: 17502 - RNA, 19 nt, Homo sapiens
  misc_RNA (1)...(19): siRNA sense strand
ggagcgaguggaagggaaa

SEQ ID NO: 17503 - RNA, 19 nt, Homo sapiens
  misc_RNA (1)...(19): siRNA sense strand
ccagcaggcaccauccuuu

SEQ ID NO: 17504 - RNA, 19 nt, Homo sapiens
  misc_RNA (1)...(19): siRNA sense strand
ccaggaagaaggcacugaa

SEQ ID NO: 17505 - RNA, 19 nt, Homo sapiens
  misc_RNA (1)...(19): siRNA sense strand
gaaggaacaaggcuaugac

SEQ ID NO: 17506 - RNA, 19 nt, Homo sapiens
  misc_RNA (1)...(19): siRNA sense strand
ugaacgugcagggugauua

SEQ ID NO: 17507 - RNA, 19 nt, Homo sapiens
  misc_RNA (1)...(19): siRNA sense strand
gauggaguacgcaaagcaa

SEQ ID NO: 17508 - RNA, 19 nt, Homo sapiens
  misc_RNA (1)...(19): siRNA sense strand
cguggagcauggaugagaa

SEQ ID NO: 17509 - RNA, 19 nt, Homo sapiens
  misc_RNA (1)...(19): siRNA sense strand
ugacgucauugccuaucug

SEQ ID NO: 17510 - RNA, 19 nt, Homo sapiens
  misc_RNA (1)...(19): siRNA sense strand
gcaaaggcuccgugguucu

SEQ ID NO: 17511 - RNA, 19 nt, Homo sapiens
  misc_RNA (1)...(19): siRNA sense strand
cccacugucucucuacaau

SEQ ID NO: 17512 - RNA, 19 nt, Homo sapiens
  misc_RNA (1)...(19): siRNA sense strand
acgaucagguccgguuuga

SEQ ID NO: 17513 - RNA, 19 nt, Homo sapiens
  misc_RNA (1)...(19): siRNA sense strand
augaggagcuggugagcau

SEQ ID NO: 17514 - RNA, 19 nt, Homo sapiens
  misc_RNA (1)...(19): siRNA sense strand
aggcuggaauccuggagaa

SEQ ID NO: 17515 - RNA, 19 nt, Homo sapiens
  misc_RNA (1)...(19): siRNA sense strand
gacccaggacccagccaaa

SEQ ID NO: 17516 - RNA, 19 nt, Homo sapiens
  misc_RNA (1)...(19): siRNA sense strand
caaaggcuccgugguucug

SEQ ID NO: 17517 - RNA, 19 nt, Homo sapiens
  misc_RNA (1)...(19): siRNA sense strand
gcccugagugugaauuugu

SEQ ID NO: 17518 - RNA, 19 nt, Homo sapiens
  misc_RNA (1)...(19): siRNA sense strand
ggaagugcgcaaaaucaaa

SEQ ID NO: 17519 - RNA, 19 nt, Homo sapiens
  misc_RNA (1)...(19): siRNA sense strand
ucguguggcugaaggaaca

SEQ ID NO: 17520 - RNA, 19 nt, Homo sapiens
  misc_RNA (1)...(19): siRNA sense strand
ccaagaacccguggagcau

SEQ ID NO: 17521 - RNA, 19 nt, Homo sapiens
  misc_RNA (1)...(19): siRNA sense strand
uugccuaucuggccaacau

SEQ ID NO: 17522 - RNA, 19 nt, Homo sapiens
  misc_RNA (1)...(19): siRNA sense strand
ggguucaucaacaucaauu

SEQ ID NO: 17523 - RNA, 19 nt, Homo sapiens
  misc_RNA (1)...(19): siRNA sense strand
ggaccgggaagugcgcaaa

SEQ ID NO: 17524 - RNA, 19 nt, Homo sapiens
  misc_RNA (1)...(19): siRNA sense strand
gaagucccgagguaucuac

SEQ ID NO: 17525 - RNA, 19 nt, Homo sapiens
  misc_RNA (1)...(19): siRNA sense strand
gcaaugaccugauggagua

SEQ ID NO: 17526 - RNA, 19 nt, Homo sapiens
  misc_RNA (1)...(19): siRNA sense strand
ggaaugaagucccgaggua

SEQ ID NO: 17527 - RNA, 19 nt, Homo sapiens
  misc_RNA (1)...(19): siRNA sense strand
gagaaccgcuucauuggaa

SEQ ID NO: 17528 - RNA, 19 nt, Homo sapiens
  misc_RNA (1)...(19): siRNA sense strand
caaggucacugccaaauag

SEQ ID NO: 17529 - RNA, 19 nt, Homo sapiens
  misc_RNA (1)...(19): siRNA sense strand
gcaaggucacugccaaaua

SEQ ID NO: 17530 - RNA, 19 nt, Homo sapiens
  misc_RNA (1)...(19): siRNA sense strand
gaggaugccugaauucuac

SEQ ID NO: 17531 - RNA, 19 nt, Homo sapiens
  misc_RNA (1)...(19): siRNA sense strand
ccuuggagcucuucaugua

SEQ ID NO: 17532 - RNA, 19 nt, Homo sapiens
  misc_RNA (1)...(19): siRNA sense strand
guauugacaucguggagaa

SEQ ID NO: 17533 - RNA, 19 nt, Homo sapiens
  misc_RNA (1)...(19): siRNA sense strand
ggaggaugccugaauucua

SEQ ID NO: 17534 - RNA, 19 nt, Homo sapiens
  misc_RNA (1)...(19): siRNA sense strand
gaacgugcagggugauuau

SEQ ID NO: 17535 - RNA, 19 nt, Homo sapiens
  misc_RNA (1)...(19): siRNA sense strand
gaagaaggcacugaagcuu

SEQ ID NO: 17536 - RNA, 19 nt, Homo sapiens
  misc_RNA (1)...(19): siRNA sense strand
cagcaggcaccauccuuua

SEQ ID NO: 17537 - RNA, 19 nt, Homo sapiens
  misc_RNA (1)...(19): siRNA sense strand
cagcaaaggcuccgugguu

SEQ ID NO: 17538 - RNA, 19 nt, Homo sapiens
  misc_RNA (1)...(19): siRNA sense strand
guggagaaccgcuucauug

SEQ ID NO: 17539 - RNA, 19 nt, Homo sapiens
  misc_RNA (1)...(19): siRNA sense strand
ccaggucucuacacgaaga

SEQ ID NO: 17540 - RNA, 19 nt, Homo sapiens
  misc_RNA (1)...(19): siRNA sense strand
uugcugagcugguguauac

SEQ ID NO: 17541 - RNA, 19 nt, Homo sapiens
  misc_RNA (1)...(19): siRNA sense strand
cacugucucucuacaauga

SEQ ID NO: 17542 - RNA, 19 nt, Homo sapiens
  misc_RNA (1)...(19): siRNA sense strand
ucauguaccugaacgaagu

SEQ ID NO: 17543 - RNA, 19 nt, Homo sapiens
  misc_RNA (1)...(19): siRNA sense strand
gaacgaucagguccgguuu

SEQ ID NO: 17544 - RNA, 19 nt, Homo sapiens
  misc_RNA (1)...(19): siRNA sense strand
ggagaaccgcuucauugga

SEQ ID NO: 17545 - RNA, 19 nt, Homo sapiens
  misc_RNA (1)...(19): siRNA sense strand
ccuggaggaugccugaauu

SEQ ID NO: 17546 - RNA, 19 nt, Homo sapiens
  misc_RNA (1)...(19): siRNA sense strand
gagaaccucaugcacauca

SEQ ID NO: 17547 - RNA, 19 nt, Homo sapiens
  misc_RNA (1)...(19): siRNA sense strand
ggaagaaggcacugaagcu

SEQ ID NO: 17548 - RNA, 19 nt, Homo sapiens
  misc_RNA (1)...(19): siRNA sense strand
gggaguuuguggaggaguu

SEQ ID NO: 17549 - RNA, 19 nt, Homo sapiens
  misc_RNA (1)...(19): siRNA sense strand
gagcaaggucacugccaaa

SEQ ID NO: 17550 - RNA, 19 nt, Homo sapiens
  misc_RNA (1)...(19): siRNA sense strand
caacauuggccagaaggaa

SEQ ID NO: 17551 - RNA, 19 nt, Homo sapiens
  misc_RNA (1)...(19): siRNA sense strand
gcagguguccguccucaag

SEQ ID NO: 17552 - RNA, 19 nt, Homo sapiens
  misc_RNA (1)...(19): siRNA sense strand
gaggagcuggugagcauga

SEQ ID NO: 17553 - RNA, 19 nt, Homo sapiens
  misc_RNA (1)...(19): siRNA sense strand
gaaugaagucccgagguau

SEQ ID NO: 17554 - RNA, 19 nt, Homo sapiens
  misc_RNA (1)...(19): siRNA sense strand
gauuaugagccaacugaug

SEQ ID NO: 17555 - RNA, 19 nt, Homo sapiens
  misc_RNA (1)...(19): siRNA sense strand
gugauuaugagccaacuga

SEQ ID NO: 17556 - RNA, 19 nt, Homo sapiens
  misc_RNA (1)...(19): siRNA sense strand
ugaaggaacaaggcuauga

SEQ ID NO: 17557 - RNA, 19 nt, Homo sapiens
  misc_RNA (1)...(19): siRNA sense strand
cuccaggucucuacacgaa

SEQ ID NO: 17558 - RNA, 19 nt, Homo sapiens
  misc_RNA (1)...(19): siRNA sense strand
ccaccggguucaucaacau

SEQ ID NO: 17559 - RNA, 19 nt, Homo sapiens
  misc_RNA (1)...(19): siRNA sense strand
gcugaaggaacaaggcuau

SEQ ID NO: 17560 - RNA, 19 nt, Homo sapiens
  misc_RNA (1)...(19): siRNA sense strand
ggagcgaguggaagggaaa

SEQ ID NO: 17561 - RNA, 19 nt, Homo sapiens
  misc_RNA (1)...(19): siRNA sense strand
ccagcaggcaccauccuuu

SEQ ID NO: 17562 - RNA, 19 nt, Homo sapiens
  misc_RNA (1)...(19): siRNA sense strand
ccaggaagaaggcacugaa

SEQ ID NO: 17563 - RNA, 19 nt, Homo sapiens
  misc_RNA (1)...(19): siRNA sense strand
gaaggaacaaggcuaugac

SEQ ID NO: 17564 - RNA, 19 nt, Homo sapiens
  misc_RNA (1)...(19): siRNA sense strand
ugaacgugcagggugauua

SEQ ID NO: 17565 - RNA, 19 nt, Homo sapiens
  misc_RNA (1)...(19): siRNA sense strand
gauggaguacgcaaagcaa

SEQ ID NO: 17566 - RNA, 19 nt, Homo sapiens
  misc_RNA (1)...(19): siRNA sense strand
cguggagcauggaugagaa

SEQ ID NO: 17567 - RNA, 19 nt, Homo sapiens
  misc_RNA (1)...(19): siRNA sense strand
ugacgucauugccuaucug

SEQ ID NO: 17568 - RNA, 19 nt, Homo sapiens
  misc_RNA (1)...(19): siRNA sense strand
gcaaaggcuccgugguucu

SEQ ID NO: 17569 - RNA, 19 nt, Homo sapiens
  misc_RNA (1)...(19): siRNA sense strand
cccacugucucucuacaau

SEQ ID NO: 17570 - RNA, 19 nt, Homo sapiens
  misc_RNA (1)...(19): siRNA sense strand
acgaucagguccgguuuga

SEQ ID NO: 17571 - RNA, 19 nt, Homo sapiens
  misc_RNA (1)...(19): siRNA sense strand
augaggagcuggugagcau

SEQ ID NO: 17572 - RNA, 19 nt, Homo sapiens
  misc_RNA (1)...(19): siRNA sense strand
aggcuggaauccuggagaa

SEQ ID NO: 17573 - RNA, 19 nt, Homo sapiens
  misc_RNA (1)...(19): siRNA sense strand
gacccaggacccagccaaa

SEQ ID NO: 17574 - RNA, 19 nt, Homo sapiens
  misc_RNA (1)...(19): siRNA sense strand
caaaggcuccgugguucug

SEQ ID NO: 17575 - RNA, 19 nt, Homo sapiens
  misc_RNA (1)...(19): siRNA sense strand
gcccugagugugaauuugu

SEQ ID NO: 17576 - RNA, 19 nt, Homo sapiens
  misc_RNA (1)...(19): siRNA sense strand
ggaagugcgcaaaaucaaa

SEQ ID NO: 17577 - RNA, 19 nt, Homo sapiens
  misc_RNA (1)...(19): siRNA sense strand
ucguguggcugaaggaaca

SEQ ID NO: 17578 - RNA, 19 nt, Homo sapiens
  misc_RNA (1)...(19): siRNA sense strand
ccaagaacccguggagcau

SEQ ID NO: 17579 - RNA, 19 nt, Homo sapiens
  misc_RNA (1)...(19): siRNA sense strand
uugccuaucuggccaacau

SEQ ID NO: 17580 - RNA, 19 nt, Homo sapiens
  misc_RNA (1)...(19): siRNA sense strand
ggguucaucaacaucaauu

SEQ ID NO: 17581 - RNA, 19 nt, Homo sapiens
  misc_RNA (1)...(19): siRNA sense strand
ggaccgggaagugcgcaaa

SEQ ID NO: 17582 - RNA, 19 nt, Homo sapiens
  misc_RNA (1)...(19): siRNA sense strand
gaagucccgagguaucuac

SEQ ID NO: 17583 - RNA, 19 nt, Homo sapiens
  misc_RNA (1)...(19): siRNA sense strand
gcacugaccucugugacuu

SEQ ID NO: 17584 - RNA, 19 nt, Homo sapiens
  misc_RNA (1)...(19): siRNA sense strand
gaaaauucuucuugccaua

SEQ ID NO: 17585 - RNA, 19 nt, Homo sapiens
  misc_RNA (1)...(19): siRNA sense strand
ucaccuguuuguuaguuua

SEQ ID NO: 17586 - RNA, 19 nt, Homo sapiens
  misc_RNA (1)...(19): siRNA sense strand
caaaagcccugauuccuau

SEQ ID NO: 17587 - RNA, 19 nt, Homo sapiens
  misc_RNA (1)...(19): siRNA sense strand
uauaucaccuguuuguuag

SEQ ID NO: 17588 - RNA, 19 nt, Homo sapiens
  misc_RNA (1)...(19): siRNA sense strand
gugguggaguuauugauga

SEQ ID NO: 17589 - RNA, 19 nt, Homo sapiens
  misc_RNA (1)...(19): siRNA sense strand
uauaagaagcacagaauuc

SEQ ID NO: 17590 - RNA, 19 nt, Homo sapiens
  misc_RNA (1)...(19): siRNA sense strand
aggaggagcuugggccuuu

SEQ ID NO: 17591 - RNA, 19 nt, Homo sapiens
  misc_RNA (1)...(19): siRNA sense strand
gugauuaaagcaacauuug

SEQ ID NO: 17592 - RNA, 19 nt, Homo sapiens
  misc_RNA (1)...(19): siRNA sense strand
uacaugagccagcaaauuc

SEQ ID NO: 17593 - RNA, 19 nt, Homo sapiens
  misc_RNA (1)...(19): siRNA sense strand
caaauucuagugccaguca

SEQ ID NO: 17594 - RNA, 19 nt, Homo sapiens
  misc_RNA (1)...(19): siRNA sense strand
gaagcacagaauucuuaaa

SEQ ID NO: 17595 - RNA, 19 nt, Homo sapiens
  misc_RNA (1)...(19): siRNA sense strand
uaucaccuguuuguuaguu

SEQ ID NO: 17596 - RNA, 19 nt, Homo sapiens
  misc_RNA (1)...(19): siRNA sense strand
ggaguuauugaugacguua

SEQ ID NO: 17597 - RNA, 19 nt, Homo sapiens
  misc_RNA (1)...(19): siRNA sense strand
cuucgagacguuauuuaua

SEQ ID NO: 17598 - RNA, 19 nt, Homo sapiens
  misc_RNA (1)...(19): siRNA sense strand
cagagauugugguggaguu

SEQ ID NO: 17599 - RNA, 19 nt, Homo sapiens
  misc_RNA (1)...(19): siRNA sense strand
agauugugguggaguuauu

SEQ ID NO: 17600 - RNA, 19 nt, Homo sapiens
  misc_RNA (1)...(19): siRNA sense strand
caucgcaugugauuaaagc

SEQ ID NO: 17601 - RNA, 19 nt, Homo sapiens
  misc_RNA (1)...(19): siRNA sense strand
gcaugugauuaaagcaaca

SEQ ID NO: 17602 - RNA, 19 nt, Homo sapiens
  misc_RNA (1)...(19): siRNA sense strand
uuacaugagccagcaaauu

SEQ ID NO: 17603 - RNA, 19 nt, Homo sapiens
  misc_RNA (1)...(19): siRNA sense strand
ggaggagcuugggccuuug

SEQ ID NO: 17604 - RNA, 19 nt, Homo sapiens
  misc_RNA (1)...(19): siRNA sense strand
gcuccuaauccaccucauu

SEQ ID NO: 17605 - RNA, 19 nt, Homo sapiens
  misc_RNA (1)...(19): siRNA sense strand
ccaaaagcccugauuccua

SEQ ID NO: 17606 - RNA, 19 nt, Homo sapiens
  misc_RNA (1)...(19): siRNA sense strand
aaauucuucuugccauaug

SEQ ID NO: 17607 - RNA, 19 nt, Homo sapiens
  misc_RNA (1)...(19): siRNA sense strand
uuccaucgcaugugauuaa

SEQ ID NO: 17608 - RNA, 19 nt, Homo sapiens
  misc_RNA (1)...(19): siRNA sense strand
gcuugggccuuuguucuuc

SEQ ID NO: 17609 - RNA, 19 nt, Homo sapiens
  misc_RNA (1)...(19): siRNA sense strand
gagcuugggccuuuguucu

SEQ ID NO: 17610 - RNA, 19 nt, Homo sapiens
  misc_RNA (1)...(19): siRNA sense strand
gcaauugucauaaaaccaa

SEQ ID NO: 17611 - RNA, 19 nt, Homo sapiens
  misc_RNA (1)...(19): siRNA sense strand
gauucacuauaucaaccaa

SEQ ID NO: 17612 - RNA, 19 nt, Homo sapiens
  misc_RNA (1)...(19): siRNA sense strand
cuccuaauccaccucauuu

SEQ ID NO: 17613 - RNA, 19 nt, Homo sapiens
  misc_RNA (1)...(19): siRNA sense strand
uucgagacguuauuuauac

SEQ ID NO: 17614 - RNA, 19 nt, Homo sapiens
  misc_RNA (1)...(19): siRNA sense strand
guucuucgagacguuauuu

SEQ ID NO: 17615 - RNA, 19 nt, Homo sapiens
  misc_RNA (1)...(19): siRNA sense strand
caugagccagcaaauucua

SEQ ID NO: 17616 - RNA, 19 nt, Homo sapiens
  misc_RNA (1)...(19): siRNA sense strand
caacauuugccuauaucag

SEQ ID NO: 17617 - RNA, 19 nt, Homo sapiens
  misc_RNA (1)...(19): siRNA sense strand
uaauuuaccagagauugug

SEQ ID NO: 17618 - RNA, 19 nt, Homo sapiens
  misc_RNA (1)...(19): siRNA sense strand
gcacugaccucugugacuu

SEQ ID NO: 17619 - RNA, 19 nt, Homo sapiens
  misc_RNA (1)...(19): siRNA sense strand
gaaaauucuucuugccaua

SEQ ID NO: 17620 - RNA, 19 nt, Homo sapiens
  misc_RNA (1)...(19): siRNA sense strand
ucaccuguuuguuaguuua

SEQ ID NO: 17621 - RNA, 19 nt, Homo sapiens
  misc_RNA (1)...(19): siRNA sense strand
caaaagcccugauuccuau

SEQ ID NO: 17622 - RNA, 19 nt, Homo sapiens
  misc_RNA (1)...(19): siRNA sense strand
uauaucaccuguuuguuag

SEQ ID NO: 17623 - RNA, 19 nt, Homo sapiens
  misc_RNA (1)...(19): siRNA sense strand
uauaagaagcacagaauuc

SEQ ID NO: 17624 - RNA, 19 nt, Homo sapiens
  misc_RNA (1)...(19): siRNA sense strand
aggaggagcuugggccuuu

SEQ ID NO: 17625 - RNA, 19 nt, Homo sapiens
  misc_RNA (1)...(19): siRNA sense strand
gugauuaaagcaacauuug

SEQ ID NO: 17626 - RNA, 19 nt, Homo sapiens
  misc_RNA (1)...(19): siRNA sense strand
caaauucuagugccaguca

SEQ ID NO: 17627 - RNA, 19 nt, Homo sapiens
  misc_RNA (1)...(19): siRNA sense strand
uacaugagccagcaaauuc

SEQ ID NO: 17628 - RNA, 19 nt, Homo sapiens
  misc_RNA (1)...(19): siRNA sense strand
gaagcacagaauucuuaaa

SEQ ID NO: 17629 - RNA, 19 nt, Homo sapiens
  misc_RNA (1)...(19): siRNA sense strand
uaucaccuguuuguuaguu

SEQ ID NO: 17630 - RNA, 19 nt, Homo sapiens
  misc_RNA (1)...(19): siRNA sense strand
cuucgagacguuauuuaua

SEQ ID NO: 17631 - RNA, 19 nt, Homo sapiens
  misc_RNA (1)...(19): siRNA sense strand
caucgcaugugauuaaagc

SEQ ID NO: 17632 - RNA, 19 nt, Homo sapiens
  misc_RNA (1)...(19): siRNA sense strand
gcaugugauuaaagcaaca

SEQ ID NO: 17633 - RNA, 19 nt, Homo sapiens
  misc_RNA (1)...(19): siRNA sense strand
gcuccuaauccaccucauu

SEQ ID NO: 17634 - RNA, 19 nt, Homo sapiens
  misc_RNA (1)...(19): siRNA sense strand
ggaggagcuugggccuuug

SEQ ID NO: 17635 - RNA, 19 nt, Homo sapiens
  misc_RNA (1)...(19): siRNA sense strand
uuacaugagccagcaaauu

SEQ ID NO: 17636 - RNA, 19 nt, Homo sapiens
  misc_RNA (1)...(19): siRNA sense strand
ccaaaagcccugauuccua

SEQ ID NO: 17637 - RNA, 19 nt, Homo sapiens
  misc_RNA (1)...(19): siRNA sense strand
aaauucuucuugccauaug

SEQ ID NO: 17638 - RNA, 19 nt, Homo sapiens
  misc_RNA (1)...(19): siRNA sense strand
uuccaucgcaugugauuaa

SEQ ID NO: 17639 - RNA, 19 nt, Homo sapiens
  misc_RNA (1)...(19): siRNA sense strand
gcuugggccuuuguucuuc

SEQ ID NO: 17640 - RNA, 19 nt, Homo sapiens
  misc_RNA (1)...(19): siRNA sense strand
gagcuugggccuuuguucu

SEQ ID NO: 17641 - RNA, 19 nt, Homo sapiens
  misc_RNA (1)...(19): siRNA sense strand
gcaauugucauaaaaccaa

SEQ ID NO: 17642 - RNA, 19 nt, Homo sapiens
  misc_RNA (1)...(19): siRNA sense strand
gauucacuauaucaaccaa

SEQ ID NO: 17643 - RNA, 19 nt, Homo sapiens
  misc_RNA (1)...(19): siRNA sense strand
cuccuaauccaccucauuu

SEQ ID NO: 17644 - RNA, 19 nt, Homo sapiens
  misc_RNA (1)...(19): siRNA sense strand
uucgagacguuauuuauac

SEQ ID NO: 17645 - RNA, 19 nt, Homo sapiens
  misc_RNA (1)...(19): siRNA sense strand
guucuucgagacguuauuu

SEQ ID NO: 17646 - RNA, 19 nt, Homo sapiens
  misc_RNA (1)...(19): siRNA sense strand
caugagccagcaaauucua

SEQ ID NO: 17647 - RNA, 19 nt, Homo sapiens
  misc_RNA (1)...(19): siRNA sense strand
caacauuugccuauaucag

SEQ ID NO: 17648 - RNA, 19 nt, Homo sapiens
  misc_RNA (1)...(19): siRNA sense strand
gcacugaccucugugacuu

SEQ ID NO: 17649 - RNA, 19 nt, Homo sapiens
  misc_RNA (1)...(19): siRNA sense strand
gaaaauucuucuugccaua

SEQ ID NO: 17650 - RNA, 19 nt, Homo sapiens
  misc_RNA (1)...(19): siRNA sense strand
ucaccuguuuguuaguuua

SEQ ID NO: 17651 - RNA, 19 nt, Homo sapiens
  misc_RNA (1)...(19): siRNA sense strand
caaaagcccugauuccuau

SEQ ID NO: 17652 - RNA, 19 nt, Homo sapiens
  misc_RNA (1)...(19): siRNA sense strand
uauaucaccuguuuguuag

SEQ ID NO: 17653 - RNA, 19 nt, Homo sapiens
  misc_RNA (1)...(19): siRNA sense strand
uauaagaagcacagaauuc

SEQ ID NO: 17654 - RNA, 19 nt, Homo sapiens
  misc_RNA (1)...(19): siRNA sense strand
aggaggagcuugggccuuu

SEQ ID NO: 17655 - RNA, 19 nt, Homo sapiens
  misc_RNA (1)...(19): siRNA sense strand
gugauuaaagcaacauuug

SEQ ID NO: 17656 - RNA, 19 nt, Homo sapiens
  misc_RNA (1)...(19): siRNA sense strand
caaauucuagugccaguca

SEQ ID NO: 17657 - RNA, 19 nt, Homo sapiens
  misc_RNA (1)...(19): siRNA sense strand
uacaugagccagcaaauuc

SEQ ID NO: 17658 - RNA, 19 nt, Homo sapiens
  misc_RNA (1)...(19): siRNA sense strand
gaagcacagaauucuuaaa

SEQ ID NO: 17659 - RNA, 19 nt, Homo sapiens
  misc_RNA (1)...(19): siRNA sense strand
uaucaccuguuuguuaguu

SEQ ID NO: 17660 - RNA, 19 nt, Homo sapiens
  misc_RNA (1)...(19): siRNA sense strand
cuucgagacguuauuuaua

SEQ ID NO: 17661 - RNA, 19 nt, Homo sapiens
  misc_RNA (1)...(19): siRNA sense strand
caucgcaugugauuaaagc

SEQ ID NO: 17662 - RNA, 19 nt, Homo sapiens
  misc_RNA (1)...(19): siRNA sense strand
gcaugugauuaaagcaaca

SEQ ID NO: 17663 - RNA, 19 nt, Homo sapiens
  misc_RNA (1)...(19): siRNA sense strand
gcuccuaauccaccucauu

SEQ ID NO: 17664 - RNA, 19 nt, Homo sapiens
  misc_RNA (1)...(19): siRNA sense strand
ggaggagcuugggccuuug

SEQ ID NO: 17665 - RNA, 19 nt, Homo sapiens
  misc_RNA (1)...(19): siRNA sense strand
uuacaugagccagcaaauu

SEQ ID NO: 17666 - RNA, 19 nt, Homo sapiens
  misc_RNA (1)...(19): siRNA sense strand
ccaaaagcccugauuccua

SEQ ID NO: 17667 - RNA, 19 nt, Homo sapiens
  misc_RNA (1)...(19): siRNA sense strand
aaauucuucuugccauaug

SEQ ID NO: 17668 - RNA, 19 nt, Homo sapiens
  misc_RNA (1)...(19): siRNA sense strand
uuccaucgcaugugauuaa

SEQ ID NO: 17669 - RNA, 19 nt, Homo sapiens
  misc_RNA (1)...(19): siRNA sense strand
gcuugggccuuuguucuuc

SEQ ID NO: 17670 - RNA, 19 nt, Homo sapiens
  misc_RNA (1)...(19): siRNA sense strand
gagcuugggccuuuguucu

SEQ ID NO: 17671 - RNA, 19 nt, Homo sapiens
  misc_RNA (1)...(19): siRNA sense strand
gcaauugucauaaaaccaa

SEQ ID NO: 17672 - RNA, 19 nt, Homo sapiens
  misc_RNA (1)...(19): siRNA sense strand
gauucacuauaucaaccaa

SEQ ID NO: 17673 - RNA, 19 nt, Homo sapiens
  misc_RNA (1)...(19): siRNA sense strand
cuccuaauccaccucauuu

SEQ ID NO: 17674 - RNA, 19 nt, Homo sapiens
  misc_RNA (1)...(19): siRNA sense strand
uucgagacguuauuuauac

SEQ ID NO: 17675 - RNA, 19 nt, Homo sapiens
  misc_RNA (1)...(19): siRNA sense strand
guucuucgagacguuauuu

SEQ ID NO: 17676 - RNA, 19 nt, Homo sapiens
  misc_RNA (1)...(19): siRNA sense strand
caugagccagcaaauucua

SEQ ID NO: 17677 - RNA, 19 nt, Homo sapiens
  misc_RNA (1)...(19): siRNA sense strand
caacauuugccuauaucag

SEQ ID NO: 17678 - RNA, 19 nt, Homo sapiens
  misc_RNA (1)...(19): siRNA sense strand
gcugccaggaggagaacua

SEQ ID NO: 17679 - RNA, 19 nt, Homo sapiens
  misc_RNA (1)...(19): siRNA sense strand
ggaugacgcuagugauugu

SEQ ID NO: 17680 - RNA, 19 nt, Homo sapiens
  misc_RNA (1)...(19): siRNA sense strand
gcaccuaugucaccuggau

SEQ ID NO: 17681 - RNA, 19 nt, Homo sapiens
  misc_RNA (1)...(19): siRNA sense strand
ggauugcccugaugguguu

SEQ ID NO: 17682 - RNA, 19 nt, Homo sapiens
  misc_RNA (1)...(19): siRNA sense strand
gaggaugacgcuagugauu

SEQ ID NO: 17683 - RNA, 19 nt, Homo sapiens
  misc_RNA (1)...(19): siRNA sense strand
gcagauggugggcauguau

SEQ ID NO: 17684 - RNA, 19 nt, Homo sapiens
  misc_RNA (1)...(19): siRNA sense strand
ugagggagcccacguguca

SEQ ID NO: 17685 - RNA, 19 nt, Homo sapiens
  misc_RNA (1)...(19): siRNA sense strand
ccauacacgucuucauugg

SEQ ID NO: 17686 - RNA, 19 nt, Homo sapiens
  misc_RNA (1)...(19): siRNA sense strand
ggccguggcucuguuccaa

SEQ ID NO: 17687 - RNA, 19 nt, Homo sapiens
  misc_RNA (1)...(19): siRNA sense strand
ugauuguggucgucuaugu

SEQ ID NO: 17688 - RNA, 19 nt, Homo sapiens
  misc_RNA (1)...(19): siRNA sense strand
cgucuucauuggccacuug

SEQ ID NO: 17689 - RNA, 19 nt, Homo sapiens
  misc_RNA (1)...(19): siRNA sense strand
gccaagacugugaggauga

SEQ ID NO: 17690 - RNA, 19 nt, Homo sapiens
  misc_RNA (1)...(19): siRNA sense strand
gugaggaugacgcuaguga

SEQ ID NO: 17691 - RNA, 19 nt, Homo sapiens
  misc_RNA (1)...(19): siRNA sense strand
ucaccuggauugcccugau

SEQ ID NO: 17692 - RNA, 19 nt, Homo sapiens
  misc_RNA (1)...(19): siRNA sense strand
gcuguggcccugagcaaug

SEQ ID NO: 17693 - RNA, 19 nt, Homo sapiens
  misc_RNA (1)...(19): siRNA sense strand
ggccgucgcaccuauguca

SEQ ID NO: 17694 - RNA, 19 nt, Homo sapiens
  misc_RNA (1)...(19): siRNA sense strand
ugacugcugggccugcuuu

SEQ ID NO: 17695 - RNA, 19 nt, Homo sapiens
  misc_RNA (1)...(19): siRNA sense strand
cuggaucuaugcaucuuuc

SEQ ID NO: 17696 - RNA, 19 nt, Homo sapiens
  misc_RNA (1)...(19): siRNA sense strand
acccauacacgucuucauu

SEQ ID NO: 17697 - RNA, 19 nt, Homo sapiens
  misc_RNA (1)...(19): siRNA sense strand
guaugccuccuccuacaug

SEQ ID NO: 17698 - RNA, 19 nt, Homo sapiens
  misc_RNA (1)...(19): siRNA sense strand
caccuggauugcccugaug

SEQ ID NO: 17699 - RNA, 19 nt, Homo sapiens
  misc_RNA (1)...(19): siRNA sense strand
gggcacccauacacgucuu

SEQ ID NO: 17700 - RNA, 19 nt, Homo sapiens
  misc_RNA (1)...(19): siRNA sense strand
gcuguggccaagacuguga

SEQ ID NO: 17701 - RNA, 19 nt, Homo sapiens
  misc_RNA (1)...(19): siRNA sense strand
gaacagaacguugaacuua

SEQ ID NO: 17702 - RNA, 19 nt, Homo sapiens
  misc_RNA (1)...(19): siRNA sense strand
gaacauggguuuauuugau

SEQ ID NO: 17703 - RNA, 19 nt, Homo sapiens
  misc_RNA (1)...(19): siRNA sense strand
gaacuuagcuaaauugacu

SEQ ID NO: 17704 - RNA, 19 nt, Homo sapiens
  misc_RNA (1)...(19): siRNA sense strand
gaaaugacaggaaauauug

SEQ ID NO: 17705 - RNA, 19 nt, Homo sapiens
  misc_RNA (1)...(19): siRNA sense strand
gaaacuacgugcucaacaa

SEQ ID NO: 17706 - RNA, 19 nt, Homo sapiens
  misc_RNA (1)...(19): siRNA sense strand
gguaacaucucuuuaugaa

SEQ ID NO: 17707 - RNA, 19 nt, Homo sapiens
  misc_RNA (1)...(19): siRNA sense strand
gaaugagacugaaauaauc

SEQ ID NO: 17708 - RNA, 19 nt, Homo sapiens
  misc_RNA (1)...(19): siRNA sense strand
ugacaugccagacauauua

SEQ ID NO: 17709 - RNA, 19 nt, Homo sapiens
  misc_RNA (1)...(19): siRNA sense strand
ggaaaugacaggaaauauu

SEQ ID NO: 17710 - RNA, 19 nt, Homo sapiens
  misc_RNA (1)...(19): siRNA sense strand
caacaagaauaaugacgaa

SEQ ID NO: 17711 - RNA, 19 nt, Homo sapiens
  misc_RNA (1)...(19): siRNA sense strand
ugaaagaguuauuguagug

SEQ ID NO: 17712 - RNA, 19 nt, Homo sapiens
  misc_RNA (1)...(19): siRNA sense strand
gaacaccgauccuccaaac

SEQ ID NO: 17713 - RNA, 19 nt, Homo sapiens
  misc_RNA (1)...(19): siRNA sense strand
guaacagccuuucuuggaa

SEQ ID NO: 17714 - RNA, 19 nt, Homo sapiens
  misc_RNA (1)...(19): siRNA sense strand
gcacagccaccucuuggua

SEQ ID NO: 17715 - RNA, 19 nt, Homo sapiens
  misc_RNA (1)...(19): siRNA sense strand
gaagucacauacugaagau

SEQ ID NO: 17716 - RNA, 19 nt, Homo sapiens
  misc_RNA (1)...(19): siRNA sense strand
gaacguugaacuuagcuaa

SEQ ID NO: 17717 - RNA, 19 nt, Homo sapiens
  misc_RNA (1)...(19): siRNA sense strand
cagcaaagauaacaauagu

SEQ ID NO: 17718 - RNA, 19 nt, Homo sapiens
  misc_RNA (1)...(19): siRNA sense strand
caaguggucugauauuugg

SEQ ID NO: 17719 - RNA, 19 nt, Homo sapiens
  misc_RNA (1)...(19): siRNA sense strand
gacaggaaauauugaugaa

SEQ ID NO: 17720 - RNA, 19 nt, Homo sapiens
  misc_RNA (1)...(19): siRNA sense strand
aaaugccacuguauugaua

SEQ ID NO: 17721 - RNA, 19 nt, Homo sapiens
  misc_RNA (1)...(19): siRNA sense strand
gcauggcuaugaaauugaa

SEQ ID NO: 17722 - RNA, 19 nt, Homo sapiens
  misc_RNA (1)...(19): siRNA sense strand
ggaaagaagagauaauuac

SEQ ID NO: 17723 - RNA, 19 nt, Homo sapiens
  misc_RNA (1)...(19): siRNA sense strand
ggaagucacauacugaaga

SEQ ID NO: 17724 - RNA, 19 nt, Homo sapiens
  misc_RNA (1)...(19): siRNA sense strand
gaauacagagucaacaaga

SEQ ID NO: 17725 - RNA, 19 nt, Homo sapiens
  misc_RNA (1)...(19): siRNA sense strand
gcaggagcagcuucaguua

SEQ ID NO: 17726 - RNA, 19 nt, Homo sapiens
  misc_RNA (1)...(19): siRNA sense strand
gugaaacggugggcaaauu

SEQ ID NO: 17727 - RNA, 19 nt, Homo sapiens
  misc_RNA (1)...(19): siRNA sense strand
gcgguaacaucucuuuaug

SEQ ID NO: 17728 - RNA, 19 nt, Homo sapiens
  misc_RNA (1)...(19): siRNA sense strand
gguaacagccuuucuugga

SEQ ID NO: 17729 - RNA, 19 nt, Homo sapiens
  misc_RNA (1)...(19): siRNA sense strand
gaguagauccauagugaaa

SEQ ID NO: 17730 - RNA, 19 nt, Homo sapiens
  misc_RNA (1)...(19): siRNA sense strand
gaauuugucuuugguuuac

SEQ ID NO: 17731 - RNA, 19 nt, Homo sapiens
  misc_RNA (1)...(19): siRNA sense strand
gagaaugagacugaaauaa

SEQ ID NO: 17732 - RNA, 19 nt, Homo sapiens
  misc_RNA (1)...(19): siRNA sense strand
ggaacaucaucuuuacaug

SEQ ID NO: 17733 - RNA, 19 nt, Homo sapiens
  misc_RNA (1)...(19): siRNA sense strand
ggacuccuuugucaguaaa

SEQ ID NO: 17734 - RNA, 19 nt, Homo sapiens
  misc_RNA (1)...(19): siRNA sense strand
caucauaauugcaacaaag

SEQ ID NO: 17735 - RNA, 19 nt, Homo sapiens
  misc_RNA (1)...(19): siRNA sense strand
uagcaaagucacaaucaua

SEQ ID NO: 17736 - RNA, 19 nt, Homo sapiens
  misc_RNA (1)...(19): siRNA sense strand
uugaguagauccauaguga

SEQ ID NO: 17737 - RNA, 19 nt, Homo sapiens
  misc_RNA (1)...(19): siRNA sense strand
uaacagccuuucuuggaau

SEQ ID NO: 17738 - RNA, 19 nt, Homo sapiens
  misc_RNA (1)...(19): siRNA sense strand
cgauuacacuagcaagaaa

SEQ ID NO: 17739 - RNA, 19 nt, Homo sapiens
  misc_RNA (1)...(19): siRNA sense strand
uaucuaaccuugaauacag

SEQ ID NO: 17740 - RNA, 19 nt, Homo sapiens
  misc_RNA (1)...(19): siRNA sense strand
agacugaaauaaucaagug

SEQ ID NO: 17741 - RNA, 19 nt, Homo sapiens
  misc_RNA (1)...(19): siRNA sense strand
aagcuggccugucuucaaa

SEQ ID NO: 17742 - RNA, 19 nt, Homo sapiens
  misc_RNA (1)...(19): siRNA sense strand
gcucaacaaugucgauucu

SEQ ID NO: 17743 - RNA, 19 nt, Homo sapiens
  misc_RNA (1)...(19): siRNA sense strand
cauauuacuugaacuugga

SEQ ID NO: 17744 - RNA, 19 nt, Homo sapiens
  misc_RNA (1)...(19): siRNA sense strand
gggacuccuuugucaguaa

SEQ ID NO: 17745 - RNA, 19 nt, Homo sapiens
  misc_RNA (1)...(19): siRNA sense strand
caagaauaaugacgaaacu

SEQ ID NO: 17746 - RNA, 19 nt, Homo sapiens
  misc_RNA (1)...(19): siRNA sense strand
ggccuugggugauguuguu

SEQ ID NO: 17747 - RNA, 19 nt, Homo sapiens
  misc_RNA (1)...(19): siRNA sense strand
ggaagccauucauuguuca

SEQ ID NO: 17748 - RNA, 19 nt, Homo sapiens
  misc_RNA (1)...(19): siRNA sense strand
aaacuuccguggccagaau

SEQ ID NO: 17749 - RNA, 19 nt, Homo sapiens
  misc_RNA (1)...(19): siRNA sense strand
gcuccuggcuucagcaaag

SEQ ID NO: 17750 - RNA, 19 nt, Homo sapiens
  misc_RNA (1)...(19): siRNA sense strand
cuagagagaaugagacuga

SEQ ID NO: 17751 - RNA, 19 nt, Homo sapiens
  misc_RNA (1)...(19): siRNA sense strand
gcuaggaacagaacguuga

SEQ ID NO: 17752 - RNA, 19 nt, Homo sapiens
  misc_RNA (1)...(19): siRNA sense strand
ccaaguggucugauauuug

SEQ ID NO: 17753 - RNA, 19 nt, Homo sapiens
  misc_RNA (1)...(19): siRNA sense strand
ugacaggaaauauugauga

SEQ ID NO: 17754 - RNA, 19 nt, Homo sapiens
  misc_RNA (1)...(19): siRNA sense strand
aaauaaagauccccaagaa

SEQ ID NO: 17755 - RNA, 19 nt, Homo sapiens
  misc_RNA (1)...(19): siRNA sense strand
gcucuucaguggguucaaa

SEQ ID NO: 17756 - RNA, 19 nt, Homo sapiens
  misc_RNA (1)...(19): siRNA sense strand
gcccuaggauucuuagcuu

SEQ ID NO: 17757 - RNA, 19 nt, Homo sapiens
  misc_RNA (1)...(19): siRNA sense strand
ccagacauauuacuugaac

SEQ ID NO: 17758 - RNA, 19 nt, Homo sapiens
  misc_RNA (1)...(19): siRNA sense strand
gagagaaugagacugaaau

SEQ ID NO: 17759 - RNA, 19 nt, Homo sapiens
  misc_RNA (1)...(19): siRNA sense strand
cacagucucugaccaagug

SEQ ID NO: 17760 - RNA, 19 nt, Homo sapiens
  misc_RNA (1)...(19): siRNA sense strand
ggaacagaacguugaacuu

SEQ ID NO: 17761 - RNA, 19 nt, Homo sapiens
  misc_RNA (1)...(19): siRNA sense strand
ggaacauggguuuauuuga

SEQ ID NO: 17762 - RNA, 19 nt, Homo sapiens
  misc_RNA (1)...(19): siRNA sense strand
aaacuggaacaucaucuuu

SEQ ID NO: 17763 - RNA, 19 nt, Homo sapiens
  misc_RNA (1)...(19): siRNA sense strand
gggaacauggguuuauuug

SEQ ID NO: 17764 - RNA, 19 nt, Homo sapiens
  misc_RNA (1)...(19): siRNA sense strand
gcaaagucacaaucauaug

SEQ ID NO: 17765 - RNA, 19 nt, Homo sapiens
  misc_RNA (1)...(19): siRNA sense strand
acaaucauaugcaucagau

SEQ ID NO: 17766 - RNA, 19 nt, Homo sapiens
  misc_RNA (1)...(19): siRNA sense strand
ugaaacggugggcaaauuu

SEQ ID NO: 17767 - RNA, 19 nt, Homo sapiens
  misc_RNA (1)...(19): siRNA sense strand
ucacugacaugccagacau

SEQ ID NO: 17768 - RNA, 19 nt, Homo sapiens
  misc_RNA (1)...(19): siRNA sense strand
gaccguggauggugauuuu

SEQ ID NO: 17769 - RNA, 19 nt, Homo sapiens
  misc_RNA (1)...(19): siRNA sense strand
uggaagccauucauuguuc

SEQ ID NO: 17770 - RNA, 19 nt, Homo sapiens
  misc_RNA (1)...(19): siRNA sense strand
cagggaacauggguuuauu

SEQ ID NO: 17771 - RNA, 19 nt, Homo sapiens
  misc_RNA (1)...(19): siRNA sense strand
ggucugauauuuggaaugc

SEQ ID NO: 17772 - RNA, 19 nt, Homo sapiens
  misc_RNA (1)...(19): siRNA sense strand
ugagugaguuuggaaagga

SEQ ID NO: 17773 - RNA, 19 nt, Homo sapiens
  misc_RNA (1)...(19): siRNA sense strand
guugaaagaguuauuguag

SEQ ID NO: 17774 - RNA, 19 nt, Homo sapiens
  misc_RNA (1)...(19): siRNA sense strand
uuagcuaaauugacugguu

SEQ ID NO: 17775 - RNA, 19 nt, Homo sapiens
  misc_RNA (1)...(19): siRNA sense strand
aauacagagucaacaagaa

SEQ ID NO: 17776 - RNA, 19 nt, Homo sapiens
  misc_RNA (1)...(19): siRNA sense strand
gaugcauggcuaugaaauu

SEQ ID NO: 17777 - RNA, 19 nt, Homo sapiens
  misc_RNA (1)...(19): siRNA sense strand
cuggguagaugaucagaga

SEQ ID NO: 17778 - RNA, 19 nt, Homo sapiens
  misc_RNA (1)...(19): siRNA sense strand
gaaauaaagauccccaaga

SEQ ID NO: 17779 - RNA, 19 nt, Homo sapiens
  misc_RNA (1)...(19): siRNA sense strand
gagucaacaagaauaauga

SEQ ID NO: 17780 - RNA, 19 nt, Homo sapiens
  misc_RNA (1)...(19): siRNA sense strand
gagugaguuuggaaaggaa

SEQ ID NO: 17781 - RNA, 19 nt, Homo sapiens
  misc_RNA (1)...(19): siRNA sense strand
agugaagacuguuuauauc

SEQ ID NO: 17782 - RNA, 19 nt, Homo sapiens
  misc_RNA (1)...(19): siRNA sense strand
caagcuggccugucuucaa

SEQ ID NO: 17783 - RNA, 19 nt, Homo sapiens
  misc_RNA (1)...(19): siRNA sense strand
aauaugggaauccaaauga

SEQ ID NO: 17784 - RNA, 19 nt, Homo sapiens
  misc_RNA (1)...(19): siRNA sense strand
gaggaaauuuugaguagau

SEQ ID NO: 17785 - RNA, 19 nt, Homo sapiens
  misc_RNA (1)...(19): siRNA sense strand
augcauggcuaugaaauug

SEQ ID NO: 17786 - RNA, 19 nt, Homo sapiens
  misc_RNA (1)...(19): siRNA sense strand
ggagugagugaguuuggaa

SEQ ID NO: 17787 - RNA, 19 nt, Homo sapiens
  misc_RNA (1)...(19): siRNA sense strand
cuaugggacuccuuuguca

SEQ ID NO: 17788 - RNA, 19 nt, Homo sapiens
  misc_RNA (1)...(19): siRNA sense strand
gguugaaagaguuauugua

SEQ ID NO: 17789 - RNA, 19 nt, Homo sapiens
  misc_RNA (1)...(19): siRNA sense strand
uuugguggguguuaauaaa

SEQ ID NO: 17790 - RNA, 19 nt, Homo sapiens
  misc_RNA (1)...(19): siRNA sense strand
acuugaacuuggacaauuu

SEQ ID NO: 17791 - RNA, 19 nt, Homo sapiens
  misc_RNA (1)...(19): siRNA sense strand
ugccagacauauuacuuga

SEQ ID NO: 17792 - RNA, 19 nt, Homo sapiens
  misc_RNA (1)...(19): siRNA sense strand
aaguguaacucucuuugga

SEQ ID NO: 17793 - RNA, 19 nt, Homo sapiens
  misc_RNA (1)...(19): siRNA sense strand
ugguagacuucgauucaaa

SEQ ID NO: 17794 - RNA, 19 nt, Homo sapiens
  misc_RNA (1)...(19): siRNA sense strand
caaaauaugggaauccaaa

SEQ ID NO: 17795 - RNA, 19 nt, Homo sapiens
  misc_RNA (1)...(19): siRNA sense strand
agagaaugagacugaaaua

SEQ ID NO: 17796 - RNA, 19 nt, Homo sapiens
  misc_RNA (1)...(19): siRNA sense strand
ucaguuagccugcauuugc

SEQ ID NO: 17797 - RNA, 19 nt, Homo sapiens
  misc_RNA (1)...(19): siRNA sense strand
ucagagggaugaacuugac

SEQ ID NO: 17798 - RNA, 19 nt, Homo sapiens
  misc_RNA (1)...(19): siRNA sense strand
ggaacaauuacaugaugga

SEQ ID NO: 17799 - RNA, 19 nt, Homo sapiens
  misc_RNA (1)...(19): siRNA sense strand
guagauccauagugaaacg

SEQ ID NO: 17800 - RNA, 19 nt, Homo sapiens
  misc_RNA (1)...(19): siRNA sense strand
acaccgauccuccaaacuu

SEQ ID NO: 17801 - RNA, 19 nt, Homo sapiens
  misc_RNA (1)...(19): siRNA sense strand
gagcacaucuguaaauuaa

SEQ ID NO: 17802 - RNA, 19 nt, Homo sapiens
  misc_RNA (1)...(19): siRNA sense strand
ggaagugauuucaguauua

SEQ ID NO: 17803 - RNA, 19 nt, Homo sapiens
  misc_RNA (1)...(19): siRNA sense strand
ggaagaagcugaauuacau

SEQ ID NO: 17804 - RNA, 19 nt, Homo sapiens
  misc_RNA (1)...(19): siRNA sense strand
gaaaagaucugugcaagua

SEQ ID NO: 17805 - RNA, 19 nt, Homo sapiens
  misc_RNA (1)...(19): siRNA sense strand
gcaaguaacagacucauuu

SEQ ID NO: 17806 - RNA, 19 nt, Homo sapiens
  misc_RNA (1)...(19): siRNA sense strand
gaagaagaauuuggaagaa

SEQ ID NO: 17807 - RNA, 19 nt, Homo sapiens
  misc_RNA (1)...(19): siRNA sense strand
gagaaacucacuucaauaa

SEQ ID NO: 17808 - RNA, 19 nt, Homo sapiens
  misc_RNA (1)...(19): siRNA sense strand
caggauggcugucagguua

SEQ ID NO: 17809 - RNA, 19 nt, Homo sapiens
  misc_RNA (1)...(19): siRNA sense strand
gggaagacauaaugcauaa

SEQ ID NO: 17810 - RNA, 19 nt, Homo sapiens
  misc_RNA (1)...(19): siRNA sense strand
caaaggaaaugaugaagau

SEQ ID NO: 17811 - RNA, 19 nt, Homo sapiens
  misc_RNA (1)...(19): siRNA sense strand
caccauggcugacacguua

SEQ ID NO: 17812 - RNA, 19 nt, Homo sapiens
  misc_RNA (1)...(19): siRNA sense strand
ggaauucuaugaaggaguu

SEQ ID NO: 17813 - RNA, 19 nt, Homo sapiens
  misc_RNA (1)...(19): siRNA sense strand
gaaagcaccacccauauga

SEQ ID NO: 17814 - RNA, 19 nt, Homo sapiens
  misc_RNA (1)...(19): siRNA sense strand
gaacgucacucagccagaa

SEQ ID NO: 17815 - RNA, 19 nt, Homo sapiens
  misc_RNA (1)...(19): siRNA sense strand
cuaaaucuguggaggguua

SEQ ID NO: 17816 - RNA, 19 nt, Homo sapiens
  misc_RNA (1)...(19): siRNA sense strand
ugacauagaugacuuugau

SEQ ID NO: 17817 - RNA, 19 nt, Homo sapiens
  misc_RNA (1)...(19): siRNA sense strand
gaaagugacucucugaaaa

SEQ ID NO: 17818 - RNA, 19 nt, Homo sapiens
  misc_RNA (1)...(19): siRNA sense strand
gagaugaagugcagcagaa

SEQ ID NO: 17819 - RNA, 19 nt, Homo sapiens
  misc_RNA (1)...(19): siRNA sense strand
gcacugcugugaaagauca

SEQ ID NO: 17820 - RNA, 19 nt, Homo sapiens
  misc_RNA (1)...(19): siRNA sense strand
ucacaaggaaugagaaaua

SEQ ID NO: 17821 - RNA, 19 nt, Homo sapiens
  misc_RNA (1)...(19): siRNA sense strand
ccagauguuucuugugaua

SEQ ID NO: 17822 - RNA, 19 nt, Homo sapiens
  misc_RNA (1)...(19): siRNA sense strand
gaucaaugcugcacugcuu

SEQ ID NO: 17823 - RNA, 19 nt, Homo sapiens
  misc_RNA (1)...(19): siRNA sense strand
gaauaaacauacugcuuca

SEQ ID NO: 17824 - RNA, 19 nt, Homo sapiens
  misc_RNA (1)...(19): siRNA sense strand
ggauacugcucucaagaaa

SEQ ID NO: 17825 - RNA, 19 nt, Homo sapiens
  misc_RNA (1)...(19): siRNA sense strand
gaaaugaaaggaagaggaa

SEQ ID NO: 17826 - RNA, 19 nt, Homo sapiens
  misc_RNA (1)...(19): siRNA sense strand
ggaaagugacucucugaaa

SEQ ID NO: 17827 - RNA, 19 nt, Homo sapiens
  misc_RNA (1)...(19): siRNA sense strand
ugagaaaguuccauguauu

SEQ ID NO: 17828 - RNA, 19 nt, Homo sapiens
  misc_RNA (1)...(19): siRNA sense strand
gcacagcuuuauacaacaa

SEQ ID NO: 17829 - RNA, 19 nt, Homo sapiens
  misc_RNA (1)...(19): siRNA sense strand
cagcagaaguggauuaauc

SEQ ID NO: 17830 - RNA, 19 nt, Homo sapiens
  misc_RNA (1)...(19): siRNA sense strand
gaaggucggccaauuaaau

SEQ ID NO: 17831 - RNA, 19 nt, Homo sapiens
  misc_RNA (1)...(19): siRNA sense strand
gccagaacacuuaauaaua

SEQ ID NO: 17832 - RNA, 19 nt, Homo sapiens
  misc_RNA (1)...(19): siRNA sense strand
ucuggaagauuuacuauga

SEQ ID NO: 17833 - RNA, 19 nt, Homo sapiens
  misc_RNA (1)...(19): siRNA sense strand
ggacaucgccagcugaaga

SEQ ID NO: 17834 - RNA, 19 nt, Homo sapiens
  misc_RNA (1)...(19): siRNA sense strand
auacugcucucaagaaauu

SEQ ID NO: 17835 - RNA, 19 nt, Homo sapiens
  misc_RNA (1)...(19): siRNA sense strand
gaagcuugcagaaucuuua

SEQ ID NO: 17836 - RNA, 19 nt, Homo sapiens
  misc_RNA (1)...(19): siRNA sense strand
caaggaaggucggccaauu

SEQ ID NO: 17837 - RNA, 19 nt, Homo sapiens
  misc_RNA (1)...(19): siRNA sense strand
gcacugcucagaaaucaaa

SEQ ID NO: 17838 - RNA, 19 nt, Homo sapiens
  misc_RNA (1)...(19): siRNA sense strand
ggucaaggacuucuuuaaa

SEQ ID NO: 17839 - RNA, 19 nt, Homo sapiens
  misc_RNA (1)...(19): siRNA sense strand
ccaccgaagccuauaaaua

SEQ ID NO: 17840 - RNA, 19 nt, Homo sapiens
  misc_RNA (1)...(19): siRNA sense strand
cagaaguccuuuguaagua

SEQ ID NO: 17841 - RNA, 19 nt, Homo sapiens
  misc_RNA (1)...(19): siRNA sense strand
ucagaaagcaccacccaua

SEQ ID NO: 17842 - RNA, 19 nt, Homo sapiens
  misc_RNA (1)...(19): siRNA sense strand
ggagcacaucuguaaauua

SEQ ID NO: 17843 - RNA, 19 nt, Homo sapiens
  misc_RNA (1)...(19): siRNA sense strand
gagaaaguuccauguauug

SEQ ID NO: 17844 - RNA, 19 nt, Homo sapiens
  misc_RNA (1)...(19): siRNA sense strand
gaaauccuccagcaucauu

SEQ ID NO: 17845 - RNA, 19 nt, Homo sapiens
  misc_RNA (1)...(19): siRNA sense strand
ggcgaucgcuuaugugaug

SEQ ID NO: 17846 - RNA, 19 nt, Homo sapiens
  misc_RNA (1)...(19): siRNA sense strand
ugagaucacuuaucguaga

SEQ ID NO: 17847 - RNA, 19 nt, Homo sapiens
  misc_RNA (1)...(19): siRNA sense strand
gggaugauauggaugacuu

SEQ ID NO: 17848 - RNA, 19 nt, Homo sapiens
  misc_RNA (1)...(19): siRNA sense strand
aagagaaacucacuucaau

SEQ ID NO: 17849 - RNA, 19 nt, Homo sapiens
  misc_RNA (1)...(19): siRNA sense strand
gaaaccaucauacaagaga

SEQ ID NO: 17850 - RNA, 19 nt, Homo sapiens
  misc_RNA (1)...(19): siRNA sense strand
ugacucagcugaagauucu

SEQ ID NO: 17851 - RNA, 19 nt, Homo sapiens
  misc_RNA (1)...(19): siRNA sense strand
gaaaguuccauguauugaa

SEQ ID NO: 17852 - RNA, 19 nt, Homo sapiens
  misc_RNA (1)...(19): siRNA sense strand
aaaugaagaugcucaggaa

SEQ ID NO: 17853 - RNA, 19 nt, Homo sapiens
  misc_RNA (1)...(19): siRNA sense strand
gagcguuuccaaagucuua

SEQ ID NO: 17854 - RNA, 19 nt, Homo sapiens
  misc_RNA (1)...(19): siRNA sense strand
uaucguagaucaaguccaa

SEQ ID NO: 17855 - RNA, 19 nt, Homo sapiens
  misc_RNA (1)...(19): siRNA sense strand
ggaugacucagaaugguua

SEQ ID NO: 17856 - RNA, 19 nt, Homo sapiens
  misc_RNA (1)...(19): siRNA sense strand
guaacagacucauuucuac

SEQ ID NO: 17857 - RNA, 19 nt, Homo sapiens
  misc_RNA (1)...(19): siRNA sense strand
uagaugacuuugaugauga

SEQ ID NO: 17858 - RNA, 19 nt, Homo sapiens
  misc_RNA (1)...(19): siRNA sense strand
ucaccagauucuuuaagua

SEQ ID NO: 17859 - RNA, 19 nt, Homo sapiens
  misc_RNA (1)...(19): siRNA sense strand
gaagugauuucaguauuac

SEQ ID NO: 17860 - RNA, 19 nt, Homo sapiens
  misc_RNA (1)...(19): siRNA sense strand
uggcagagcuggaagagau

SEQ ID NO: 17861 - RNA, 19 nt, Homo sapiens
  misc_RNA (1)...(19): siRNA sense strand
gugguaagaguuuguguua

SEQ ID NO: 17862 - RNA, 19 nt, Homo sapiens
  misc_RNA (1)...(19): siRNA sense strand
acagaaggaugacucagaa

SEQ ID NO: 17863 - RNA, 19 nt, Homo sapiens
  misc_RNA (1)...(19): siRNA sense strand
gguuaucugugcuacaauu

SEQ ID NO: 17864 - RNA, 19 nt, Homo sapiens
  misc_RNA (1)...(19): siRNA sense strand
gauuuuggaugaagacuua

SEQ ID NO: 17865 - RNA, 19 nt, Homo sapiens
  misc_RNA (1)...(19): siRNA sense strand
ggaaaaggaucugcuuauu

SEQ ID NO: 17866 - RNA, 19 nt, Homo sapiens
  misc_RNA (1)...(19): siRNA sense strand
ccucagguguuuagcauga

SEQ ID NO: 17867 - RNA, 19 nt, Homo sapiens
  misc_RNA (1)...(19): siRNA sense strand
ggaugaagacuuauauauc

SEQ ID NO: 17868 - RNA, 19 nt, Homo sapiens
  misc_RNA (1)...(19): siRNA sense strand
caagagaaacucacuucaa

SEQ ID NO: 17869 - RNA, 19 nt, Homo sapiens
  misc_RNA (1)...(19): siRNA sense strand
gaacauaagaaggaaacuu

SEQ ID NO: 17870 - RNA, 19 nt, Homo sapiens
  misc_RNA (1)...(19): siRNA sense strand
guaagaaacacccagaugu

SEQ ID NO: 17871 - RNA, 19 nt, Homo sapiens
  misc_RNA (1)...(19): siRNA sense strand
gaaagcgagcaaauagauu

SEQ ID NO: 17872 - RNA, 19 nt, Homo sapiens
  misc_RNA (1)...(19): siRNA sense strand
gcaacuagaacgucacuca

SEQ ID NO: 17873 - RNA, 19 nt, Homo sapiens
  misc_RNA (1)...(19): siRNA sense strand
cucagaagcuacaaauauu

SEQ ID NO: 17874 - RNA, 19 nt, Homo sapiens
  misc_RNA (1)...(19): siRNA sense strand
ggagauacaggccugauuc

SEQ ID NO: 17875 - RNA, 19 nt, Homo sapiens
  misc_RNA (1)...(19): siRNA sense strand
cacaccaacuguaaagaaa

SEQ ID NO: 17876 - RNA, 19 nt, Homo sapiens
  misc_RNA (1)...(19): siRNA sense strand
caagucagcacaaaauuua

SEQ ID NO: 17877 - RNA, 19 nt, Homo sapiens
  misc_RNA (1)...(19): siRNA sense strand
gaugaugacugggaagaca

SEQ ID NO: 17878 - RNA, 19 nt, Homo sapiens
  misc_RNA (1)...(19): siRNA sense strand
aaacccaaccuuccuauga

SEQ ID NO: 17879 - RNA, 19 nt, Homo sapiens
  misc_RNA (1)...(19): siRNA sense strand
gcgaaaagaagaagaauuu

SEQ ID NO: 17880 - RNA, 19 nt, Homo sapiens
  misc_RNA (1)...(19): siRNA sense strand
uuucacaccuucccucaaa

SEQ ID NO: 17881 - RNA, 19 nt, Homo sapiens
  misc_RNA (1)...(19): siRNA sense strand
aaaaggaucugcuuauuca

SEQ ID NO: 17882 - RNA, 19 nt, Homo sapiens
  misc_RNA (1)...(19): siRNA sense strand
ggacgugcgauuugugauu

SEQ ID NO: 17883 - RNA, 19 nt, Homo sapiens
  misc_RNA (1)...(19): siRNA sense strand
guguuuagcaugagcuuua

SEQ ID NO: 17884 - RNA, 19 nt, Homo sapiens
  misc_RNA (1)...(19): siRNA sense strand
caggaaauguucucacaag

SEQ ID NO: 17885 - RNA, 19 nt, Homo sapiens
  misc_RNA (1)...(19): siRNA sense strand
gaagaagcugaauuacauu

SEQ ID NO: 17886 - RNA, 19 nt, Homo sapiens
  misc_RNA (1)...(19): siRNA sense strand
cggaagugauuucaguauu

SEQ ID NO: 17887 - RNA, 19 nt, Homo sapiens
  misc_RNA (1)...(19): siRNA sense strand
cacaaggaaugagaaauau

SEQ ID NO: 17888 - RNA, 19 nt, Homo sapiens
  misc_RNA (1)...(19): siRNA sense strand
caugguacauuacugugaa

SEQ ID NO: 17889 - RNA, 19 nt, Homo sapiens
  misc_RNA (1)...(19): siRNA sense strand
cagguuaucugugcuacaa

SEQ ID NO: 17890 - RNA, 19 nt, Homo sapiens
  misc_RNA (1)...(19): siRNA sense strand
gaaguggauuaaucaggau

SEQ ID NO: 17891 - RNA, 19 nt, Homo sapiens
  misc_RNA (1)...(19): siRNA sense strand
aagcugacuuccuuggaua

SEQ ID NO: 17892 - RNA, 19 nt, Homo sapiens
  misc_RNA (1)...(19): siRNA sense strand
uaauuuagcagccagcaaa

SEQ ID NO: 17893 - RNA, 19 nt, Homo sapiens
  misc_RNA (1)...(19): siRNA sense strand
caaccuuccuaugauauug

SEQ ID NO: 17894 - RNA, 19 nt, Homo sapiens
  misc_RNA (1)...(19): siRNA sense strand
auacaggccugauucacuu

SEQ ID NO: 17895 - RNA, 19 nt, Homo sapiens
  misc_RNA (1)...(19): siRNA sense strand
ugaauaugcuucgccagaa

SEQ ID NO: 17896 - RNA, 19 nt, Homo sapiens
  misc_RNA (1)...(19): siRNA sense strand
gaaagagaaacccaaccuu

SEQ ID NO: 17897 - RNA, 19 nt, Homo sapiens
  misc_RNA (1)...(19): siRNA sense strand
gagaaacccaaccuuccua

SEQ ID NO: 17898 - RNA, 19 nt, Homo sapiens
  misc_RNA (1)...(19): siRNA sense strand
aagguagacuuuauggaaa

SEQ ID NO: 17899 - RNA, 19 nt, Homo sapiens
  misc_RNA (1)...(19): siRNA sense strand
uggaaaccaucauacaaga

SEQ ID NO: 17900 - RNA, 19 nt, Homo sapiens
  misc_RNA (1)...(19): siRNA sense strand
gcauuugauugccuagaau

SEQ ID NO: 17901 - RNA, 19 nt, Homo sapiens
  misc_RNA (1)...(19): siRNA sense strand
gaacauccauuuauccauu

SEQ ID NO: 17902 - RNA, 19 nt, Homo sapiens
  misc_RNA (1)...(19): siRNA sense strand
gaaguaagcuugcucuuuu

SEQ ID NO: 17903 - RNA, 19 nt, Homo sapiens
  misc_RNA (1)...(19): siRNA sense strand
ggauucaacuuuacaagaa

SEQ ID NO: 17904 - RNA, 19 nt, Homo sapiens
  misc_RNA (1)...(19): siRNA sense strand
ucacgaggcugaauauuau

SEQ ID NO: 17905 - RNA, 19 nt, Homo sapiens
  misc_RNA (1)...(19): siRNA sense strand
ccaauggccucugcuguua

SEQ ID NO: 17906 - RNA, 19 nt, Homo sapiens
  misc_RNA (1)...(19): siRNA sense strand
gaaacggacccaucccaua

SEQ ID NO: 17907 - RNA, 19 nt, Homo sapiens
  misc_RNA (1)...(19): siRNA sense strand
gaugauguaugacaauuuc

SEQ ID NO: 17908 - RNA, 19 nt, Homo sapiens
  misc_RNA (1)...(19): siRNA sense strand
gaagauggcauucauggau

SEQ ID NO: 17909 - RNA, 19 nt, Homo sapiens
  misc_RNA (1)...(19): siRNA sense strand
acucugagaugauguauga

SEQ ID NO: 17910 - RNA, 19 nt, Homo sapiens
  misc_RNA (1)...(19): siRNA sense strand
gauaccaguucaacacaaa

SEQ ID NO: 17911 - RNA, 19 nt, Homo sapiens
  misc_RNA (1)...(19): siRNA sense strand
gagaugauguaugacaauu

SEQ ID NO: 17912 - RNA, 19 nt, Homo sapiens
  misc_RNA (1)...(19): siRNA sense strand
ugacaucuaugaacagcaa

SEQ ID NO: 17913 - RNA, 19 nt, Homo sapiens
  misc_RNA (1)...(19): siRNA sense strand
gggagaaugaccacuauuu

SEQ ID NO: 17914 - RNA, 19 nt, Homo sapiens
  misc_RNA (1)...(19): siRNA sense strand
caacuucaguacuuccuau

SEQ ID NO: 17915 - RNA, 19 nt, Homo sapiens
  misc_RNA (1)...(19): siRNA sense strand
aaacacaaccucuacuuug

SEQ ID NO: 17916 - RNA, 19 nt, Homo sapiens
  misc_RNA (1)...(19): siRNA sense strand
ccaaaaggauguacagauu

SEQ ID NO: 17917 - RNA, 19 nt, Homo sapiens
  misc_RNA (1)...(19): siRNA sense strand
gaaggaugcucaggaaguc

SEQ ID NO: 17918 - RNA, 19 nt, Homo sapiens
  misc_RNA (1)...(19): siRNA sense strand
acaagaacauccauuuauc

SEQ ID NO: 17919 - RNA, 19 nt, Homo sapiens
  misc_RNA (1)...(19): siRNA sense strand
caauugagauucagaaagc

SEQ ID NO: 17920 - RNA, 19 nt, Homo sapiens
  misc_RNA (1)...(19): siRNA sense strand
gaugggagauaccaguuca

SEQ ID NO: 17921 - RNA, 19 nt, Homo sapiens
  misc_RNA (1)...(19): siRNA sense strand
ccagaaccuugacaucuau

SEQ ID NO: 17922 - RNA, 19 nt, Homo sapiens
  misc_RNA (1)...(19): siRNA sense strand
uaugggcgcuuguaugaga

SEQ ID NO: 17923 - RNA, 19 nt, Homo sapiens
  misc_RNA (1)...(19): siRNA sense strand
ggagaaugaccacuauuuc

SEQ ID NO: 17924 - RNA, 19 nt, Homo sapiens
  misc_RNA (1)...(19): siRNA sense strand
uaaacacaaccucuacuuu

SEQ ID NO: 17925 - RNA, 19 nt, Homo sapiens
  misc_RNA (1)...(19): siRNA sense strand
caaaugucguguucagcaa

SEQ ID NO: 17926 - RNA, 19 nt, Homo sapiens
  misc_RNA (1)...(19): siRNA sense strand
cacaugcuuugauauauug

SEQ ID NO: 17927 - RNA, 19 nt, Homo sapiens
  misc_RNA (1)...(19): siRNA sense strand
ucagaaagcuuuugcuguu

SEQ ID NO: 17928 - RNA, 19 nt, Homo sapiens
  misc_RNA (1)...(19): siRNA sense strand
guacauggcacuuacuaca

SEQ ID NO: 17929 - RNA, 19 nt, Homo sapiens
  misc_RNA (1)...(19): siRNA sense strand
aacacaaccucuacuuuga

SEQ ID NO: 17930 - RNA, 19 nt, Homo sapiens
  misc_RNA (1)...(19): siRNA sense strand
ucaacguucuggcagcuaa

SEQ ID NO: 17931 - RNA, 19 nt, Homo sapiens
  misc_RNA (1)...(19): siRNA sense strand
aaagucaccuuauaauugc

SEQ ID NO: 17932 - RNA, 19 nt, Homo sapiens
  misc_RNA (1)...(19): siRNA sense strand
ccucaccgcuucaaugaca

SEQ ID NO: 17933 - RNA, 19 nt, Homo sapiens
  misc_RNA (1)...(19): siRNA sense strand
guaaacacaaccucuacuu

SEQ ID NO: 17934 - RNA, 19 nt, Homo sapiens
  misc_RNA (1)...(19): siRNA sense strand
gauuauaguguuuccagaa

SEQ ID NO: 17935 - RNA, 19 nt, Homo sapiens
  misc_RNA (1)...(19): siRNA sense strand
agaagucccugaccagcuu

SEQ ID NO: 17936 - RNA, 19 nt, Homo sapiens
  misc_RNA (1)...(19): siRNA sense strand
gaaccagaaccuugacauc

SEQ ID NO: 17937 - RNA, 19 nt, Homo sapiens
  misc_RNA (1)...(19): siRNA sense strand
cuuccuauaucuuuccuuu

SEQ ID NO: 17938 - RNA, 19 nt, Homo sapiens
  misc_RNA (1)...(19): siRNA sense strand
ccucugcuguuauuuacuu

SEQ ID NO: 17939 - RNA, 19 nt, Homo sapiens
  misc_RNA (1)...(19): siRNA sense strand
gaugacaggaaguggcaua

SEQ ID NO: 17940 - RNA, 19 nt, Homo sapiens
  misc_RNA (1)...(19): siRNA sense strand
ggugaagcauguuguguac

SEQ ID NO: 17941 - RNA, 19 nt, Homo sapiens
  misc_RNA (1)...(19): siRNA sense strand
uuauguggcugccguguau

SEQ ID NO: 17942 - RNA, 19 nt, Homo sapiens
  misc_RNA (1)...(19): siRNA sense strand
gaaccuugacaucuaugaa

SEQ ID NO: 17943 - RNA, 19 nt, Homo sapiens
  misc_RNA (1)...(19): siRNA sense strand
accagaaccuugacaucua

SEQ ID NO: 17944 - RNA, 19 nt, Homo sapiens
  misc_RNA (1)...(19): siRNA sense strand
gaaccagcucccacucuug

SEQ ID NO: 17945 - RNA, 19 nt, Homo sapiens
  misc_RNA (1)...(19): siRNA sense strand
ugaaccagcucccacucuu

SEQ ID NO: 17946 - RNA, 19 nt, Homo sapiens
  misc_RNA (1)...(19): siRNA sense strand
cauucgauguuccucuuaa

SEQ ID NO: 17947 - RNA, 19 nt, Homo sapiens
  misc_RNA (1)...(19): siRNA sense strand
gagcguggcugaccaucac

SEQ ID NO: 17948 - RNA, 19 nt, Homo sapiens
  misc_RNA (1)...(19): siRNA sense strand
cuucacaugcuuugauaua

SEQ ID NO: 17949 - RNA, 19 nt, Homo sapiens
  misc_RNA (1)...(19): siRNA sense strand
ggagauaccaguucaacac

SEQ ID NO: 17950 - RNA, 19 nt, Homo sapiens
  misc_RNA (1)...(19): siRNA sense strand
uggcagcaauugagauuca

SEQ ID NO: 17951 - RNA, 19 nt, Homo sapiens
  misc_RNA (1)...(19): siRNA sense strand
cgauguuccucuuaaagug

SEQ ID NO: 17952 - RNA, 19 nt, Homo sapiens
  misc_RNA (1)...(19): siRNA sense strand
caaaaggauguacagauua

SEQ ID NO: 17953 - RNA, 19 nt, Homo sapiens
  misc_RNA (1)...(19): siRNA sense strand
gcuguuauuuacuuuacga

SEQ ID NO: 17954 - RNA, 19 nt, Homo sapiens
  misc_RNA (1)...(19): siRNA sense strand
gcaauugagauucagaaag

SEQ ID NO: 17955 - RNA, 19 nt, Homo sapiens
  misc_RNA (1)...(19): siRNA sense strand
agaaguaagcuugcucuuu

SEQ ID NO: 17956 - RNA, 19 nt, Homo sapiens
  misc_RNA (1)...(19): siRNA sense strand
aagauggcauucauggauu

SEQ ID NO: 17957 - RNA, 19 nt, Homo sapiens
  misc_RNA (1)...(19): siRNA sense strand
aaugucguguucagcaaua

SEQ ID NO: 17958 - RNA, 19 nt, Homo sapiens
  misc_RNA (1)...(19): siRNA sense strand
ucuaugggcgcuuguauga

SEQ ID NO: 17959 - RNA, 19 nt, Homo sapiens
  misc_RNA (1)...(19): siRNA sense strand
gagccucaccgcuucaaug

SEQ ID NO: 17960 - RNA, 19 nt, Homo sapiens
  misc_RNA (1)...(19): siRNA sense strand
gcugggagaaugaccacua

SEQ ID NO: 17961 - RNA, 19 nt, Homo sapiens
  misc_RNA (1)...(19): siRNA sense strand
uccuauaucuuuccuuugu

SEQ ID NO: 17962 - RNA, 19 nt, Homo sapiens
  misc_RNA (1)...(19): siRNA sense strand
aaacggacccaucccauag

SEQ ID NO: 17963 - RNA, 19 nt, Homo sapiens
  misc_RNA (1)...(19): siRNA sense strand
gagaaugcaacaggugaaa

SEQ ID NO: 17964 - RNA, 19 nt, Homo sapiens
  misc_RNA (1)...(19): siRNA sense strand
gcaauaauggaacccuugu

SEQ ID NO: 17965 - RNA, 19 nt, Homo sapiens
  misc_RNA (1)...(19): siRNA sense strand
gugaugaggccaccaagug

SEQ ID NO: 17966 - RNA, 19 nt, Homo sapiens
  misc_RNA (1)...(19): siRNA sense strand
acauuucacucugagauga

SEQ ID NO: 17967 - RNA, 19 nt, Homo sapiens
  misc_RNA (1)...(19): siRNA sense strand
uauaguguuuccagaagau

SEQ ID NO: 17968 - RNA, 19 nt, Homo sapiens
  misc_RNA (1)...(19): siRNA sense strand
acacaguacauggcacuua

SEQ ID NO: 17969 - RNA, 19 nt, Homo sapiens
  misc_RNA (1)...(19): siRNA sense strand
gguuuggcaucuucacaug

SEQ ID NO: 17970 - RNA, 19 nt, Homo sapiens
  misc_RNA (1)...(19): siRNA sense strand
aauaauggaacccuuguug

SEQ ID NO: 17971 - RNA, 19 nt, Homo sapiens
  misc_RNA (1)...(19): siRNA sense strand
gcauucgauguuccucuua

SEQ ID NO: 17972 - RNA, 19 nt, Homo sapiens
  misc_RNA (1)...(19): siRNA sense strand
aauggccucugcuguuauu

SEQ ID NO: 17973 - RNA, 19 nt, Homo sapiens
  misc_RNA (1)...(19): siRNA sense strand
gauuuguggucugcauuau

SEQ ID NO: 17974 - RNA, 19 nt, Homo sapiens
  misc_RNA (1)...(19): siRNA sense strand
gacaggaaguggcauacac

SEQ ID NO: 17975 - RNA, 19 nt, Homo sapiens
  misc_RNA (1)...(19): siRNA sense strand
acuacaaggugaagcaugu

SEQ ID NO: 17976 - RNA, 19 nt, Homo sapiens
  misc_RNA (1)...(19): siRNA sense strand
ggacccaucccauaguaag

SEQ ID NO: 17977 - RNA, 19 nt, Homo sapiens
  misc_RNA (1)...(19): siRNA sense strand
ugaugggcuucacacagua

SEQ ID NO: 17978 - RNA, 19 nt, Homo sapiens
  misc_RNA (1)...(19): siRNA sense strand
ggauguacagauuauagug

SEQ ID NO: 17979 - RNA, 19 nt, Homo sapiens
  misc_RNA (1)...(19): siRNA sense strand
cuucaguacuuccuauauc

SEQ ID NO: 17980 - RNA, 19 nt, Homo sapiens
  misc_RNA (1)...(19): siRNA sense strand
acauggcacuuacuacauc

SEQ ID NO: 17981 - RNA, 19 nt, Homo sapiens
  misc_RNA (1)...(19): siRNA sense strand
uuuguggucugcauuaugu

SEQ ID NO: 17982 - RNA, 19 nt, Homo sapiens
  misc_RNA (1)...(19): siRNA sense strand
ccuuggagcucaugaacca

SEQ ID NO: 17983 - RNA, 19 nt, Homo sapiens
  misc_RNA (1)...(19): siRNA sense strand
ggaaguccacugugaugag

SEQ ID NO: 17984 - RNA, 19 nt, Homo sapiens
  misc_RNA (1)...(19): siRNA sense strand
cucaggaaguccacuguga

SEQ ID NO: 17985 - RNA, 19 nt, Homo sapiens
  misc_RNA (1)...(19): siRNA sense strand
caggcgauccguacuguga

SEQ ID NO: 17986 - RNA, 19 nt, Homo sapiens
  misc_RNA (1)...(19): siRNA sense strand
aaguggaucucaucaccuu

SEQ ID NO: 17987 - RNA, 19 nt, Homo sapiens
  misc_RNA (1)...(19): siRNA sense strand
ugaggcagcauucgauguu

SEQ ID NO: 17988 - RNA, 19 nt, Homo sapiens
  misc_RNA (1)...(19): siRNA sense strand
gauguacagauuauagugu

SEQ ID NO: 17989 - RNA, 19 nt, Homo sapiens
  misc_RNA (1)...(19): siRNA sense strand
ucccaaaagucaccuuaua

SEQ ID NO: 17990 - RNA, 19 nt, Homo sapiens
  misc_RNA (1)...(19): siRNA sense strand
aucacgaggcugaauauua

SEQ ID NO: 17991 - RNA, 19 nt, Homo sapiens
  misc_RNA (1)...(19): siRNA sense strand
uugaugggcuucacacagu

SEQ ID NO: 17992 - RNA, 19 nt, Homo sapiens
  misc_RNA (1)...(19): siRNA sense strand
ggccucugcuguuauuuac

SEQ ID NO: 17993 - RNA, 19 nt, Homo sapiens
  misc_RNA (1)...(19): siRNA sense strand
cuccagcgccugaguugua

SEQ ID NO: 17994 - RNA, 19 nt, Homo sapiens
  misc_RNA (1)...(19): siRNA sense strand
guacagauuauaguguuuc

SEQ ID NO: 17995 - RNA, 19 nt, Homo sapiens
  misc_RNA (1)...(19): siRNA sense strand
gcaacuucaguacuuccua

SEQ ID NO: 17996 - RNA, 19 nt, Homo sapiens
  misc_RNA (1)...(19): siRNA sense strand
cacaguacauggcacuuac

SEQ ID NO: 17997 - RNA, 19 nt, Homo sapiens
  misc_RNA (1)...(19): siRNA sense strand
acggacccaucccauagua

SEQ ID NO: 17998 - RNA, 19 nt, Homo sapiens
  misc_RNA (1)...(19): siRNA sense strand
gagauaccaguucaacaca

SEQ ID NO: 17999 - RNA, 19 nt, Homo sapiens
  misc_RNA (1)...(19): siRNA sense strand
caguacuuccuauaucuuu

SEQ ID NO: 18000 - RNA, 19 nt, Homo sapiens
  misc_RNA (1)...(19): siRNA sense strand
gagaaugaccacuauuucc

SEQ ID NO: 18001 - RNA, 19 nt, Homo sapiens
  misc_RNA (1)...(19): siRNA sense strand
gaacaggaauggaagcuua

SEQ ID NO: 18002 - RNA, 19 nt, Homo sapiens
  misc_RNA (1)...(19): siRNA sense strand
gaagaucacuuguguugaa

SEQ ID NO: 18003 - RNA, 19 nt, Homo sapiens
  misc_RNA (1)...(19): siRNA sense strand
gcuaugggcugccaaauuu

SEQ ID NO: 18004 - RNA, 19 nt, Homo sapiens
  misc_RNA (1)...(19): siRNA sense strand
gcagaagacuccauagaaa

SEQ ID NO: 18005 - RNA, 19 nt, Homo sapiens
  misc_RNA (1)...(19): siRNA sense strand
ucaaggaguuguuaaagua

SEQ ID NO: 18006 - RNA, 19 nt, Homo sapiens
  misc_RNA (1)...(19): siRNA sense strand
gaaagcaacuuaccauggu

SEQ ID NO: 18007 - RNA, 19 nt, Homo sapiens
  misc_RNA (1)...(19): siRNA sense strand
gaaggagguuucauuguca

SEQ ID NO: 18008 - RNA, 19 nt, Homo sapiens
  misc_RNA (1)...(19): siRNA sense strand
gguaaacgaucaaggaguu

SEQ ID NO: 18009 - RNA, 19 nt, Homo sapiens
  misc_RNA (1)...(19): siRNA sense strand
gagaagaucacuuguguug

SEQ ID NO: 18010 - RNA, 19 nt, Homo sapiens
  misc_RNA (1)...(19): siRNA sense strand
uaagaaggguucaauagau

SEQ ID NO: 18011 - RNA, 19 nt, Homo sapiens
  misc_RNA (1)...(19): siRNA sense strand
gcggaagggugaugaauau

SEQ ID NO: 18012 - RNA, 19 nt, Homo sapiens
  misc_RNA (1)...(19): siRNA sense strand
guacaacagugaucugguu

SEQ ID NO: 18013 - RNA, 19 nt, Homo sapiens
  misc_RNA (1)...(19): siRNA sense strand
gaagcgaucccaacagaaa

SEQ ID NO: 18014 - RNA, 19 nt, Homo sapiens
  misc_RNA (1)...(19): siRNA sense strand
uggaauaccuggagucaaa

SEQ ID NO: 18015 - RNA, 19 nt, Homo sapiens
  misc_RNA (1)...(19): siRNA sense strand
caauagauguugagaagau

SEQ ID NO: 18016 - RNA, 19 nt, Homo sapiens
  misc_RNA (1)...(19): siRNA sense strand
ggagcaaauuucaaucauu

SEQ ID NO: 18017 - RNA, 19 nt, Homo sapiens
  misc_RNA (1)...(19): siRNA sense strand
ggaagggugaugaauauuu

SEQ ID NO: 18018 - RNA, 19 nt, Homo sapiens
  misc_RNA (1)...(19): siRNA sense strand
ggugauacgucauuauguu

SEQ ID NO: 18019 - RNA, 19 nt, Homo sapiens
  misc_RNA (1)...(19): siRNA sense strand
gcacaaacucuccuacuau

SEQ ID NO: 18020 - RNA, 19 nt, Homo sapiens
  misc_RNA (1)...(19): siRNA sense strand
gcaccagucuccacaagug

SEQ ID NO: 18021 - RNA, 19 nt, Homo sapiens
  misc_RNA (1)...(19): siRNA sense strand
gaagaugccauaugagaga

SEQ ID NO: 18022 - RNA, 19 nt, Homo sapiens
  misc_RNA (1)...(19): siRNA sense strand
ugaugaaucuuucccauga

SEQ ID NO: 18023 - RNA, 19 nt, Homo sapiens
  misc_RNA (1)...(19): siRNA sense strand
ucccugagcucauuaacua

SEQ ID NO: 18024 - RNA, 19 nt, Homo sapiens
  misc_RNA (1)...(19): siRNA sense strand
ucaguaggcuccaaauuuc

SEQ ID NO: 18025 - RNA, 19 nt, Homo sapiens
  misc_RNA (1)...(19): siRNA sense strand
gcucaaauauccagugucu

SEQ ID NO: 18026 - RNA, 19 nt, Homo sapiens
  misc_RNA (1)...(19): siRNA sense strand
ggauacggaucaugggaaa

SEQ ID NO: 18027 - RNA, 19 nt, Homo sapiens
  misc_RNA (1)...(19): siRNA sense strand
ggugaagaguccagugaaa

SEQ ID NO: 18028 - RNA, 19 nt, Homo sapiens
  misc_RNA (1)...(19): siRNA sense strand
gguauguccuggaugauga

SEQ ID NO: 18029 - RNA, 19 nt, Homo sapiens
  misc_RNA (1)...(19): siRNA sense strand
aaacaucaccucuaaacuu

SEQ ID NO: 18030 - RNA, 19 nt, Homo sapiens
  misc_RNA (1)...(19): siRNA sense strand
cagaugagcgucccacuuu

SEQ ID NO: 18031 - RNA, 19 nt, Homo sapiens
  misc_RNA (1)...(19): siRNA sense strand
gaagggugaugaauauuuu

SEQ ID NO: 18032 - RNA, 19 nt, Homo sapiens
  misc_RNA (1)...(19): siRNA sense strand
guaagaaggguucaauaga

SEQ ID NO: 18033 - RNA, 19 nt, Homo sapiens
  misc_RNA (1)...(19): siRNA sense strand
ccagugaaauggagcaaau

SEQ ID NO: 18034 - RNA, 19 nt, Homo sapiens
  misc_RNA (1)...(19): siRNA sense strand
ugagacugcugaacacauu

SEQ ID NO: 18035 - RNA, 19 nt, Homo sapiens
  misc_RNA (1)...(19): siRNA sense strand
gaaagacagauuccgagaa

SEQ ID NO: 18036 - RNA, 19 nt, Homo sapiens
  misc_RNA (1)...(19): siRNA sense strand
caugggaaauugauccaaa

SEQ ID NO: 18037 - RNA, 19 nt, Homo sapiens
  misc_RNA (1)...(19): siRNA sense strand
ucaaauauccagugucuca

SEQ ID NO: 18038 - RNA, 19 nt, Homo sapiens
  misc_RNA (1)...(19): siRNA sense strand
caucaucacugaguacaug

SEQ ID NO: 18039 - RNA, 19 nt, Homo sapiens
  misc_RNA (1)...(19): siRNA sense strand
aaagacagauuccgagaag

SEQ ID NO: 18040 - RNA, 19 nt, Homo sapiens
  misc_RNA (1)...(19): siRNA sense strand
gggaagaugccauaugaga

SEQ ID NO: 18041 - RNA, 19 nt, Homo sapiens
  misc_RNA (1)...(19): siRNA sense strand
gugcaaggaugucugugaa

SEQ ID NO: 18042 - RNA, 19 nt, Homo sapiens
  misc_RNA (1)...(19): siRNA sense strand
ugaagaagccaaagucaug

SEQ ID NO: 18043 - RNA, 19 nt, Homo sapiens
  misc_RNA (1)...(19): siRNA sense strand
gaaacagugguuccugaaa

SEQ ID NO: 18044 - RNA, 19 nt, Homo sapiens
  misc_RNA (1)...(19): siRNA sense strand
caaagaaggcuccaugucu

SEQ ID NO: 18045 - RNA, 19 nt, Homo sapiens
  misc_RNA (1)...(19): siRNA sense strand
gaaggcuacauuccuagua

SEQ ID NO: 18046 - RNA, 19 nt, Homo sapiens
  misc_RNA (1)...(19): siRNA sense strand
agaaggagguuucauuguc

SEQ ID NO: 18047 - RNA, 19 nt, Homo sapiens
  misc_RNA (1)...(19): siRNA sense strand
cacaaacucuccuacuaug

SEQ ID NO: 18048 - RNA, 19 nt, Homo sapiens
  misc_RNA (1)...(19): siRNA sense strand
caacucugcaggacucaua

SEQ ID NO: 18049 - RNA, 19 nt, Homo sapiens
  misc_RNA (1)...(19): siRNA sense strand
gcaaagcuggcaaauauac

SEQ ID NO: 18050 - RNA, 19 nt, Homo sapiens
  misc_RNA (1)...(19): siRNA sense strand
gaaugcaaaugaucuacag

SEQ ID NO: 18051 - RNA, 19 nt, Homo sapiens
  misc_RNA (1)...(19): siRNA sense strand
aguauuaccuggcugagaa

SEQ ID NO: 18052 - RNA, 19 nt, Homo sapiens
  misc_RNA (1)...(19): siRNA sense strand
guggagagcacgagauaaa

SEQ ID NO: 18053 - RNA, 19 nt, Homo sapiens
  misc_RNA (1)...(19): siRNA sense strand
gggagaagaggcaguaaga

SEQ ID NO: 18054 - RNA, 19 nt, Homo sapiens
  misc_RNA (1)...(19): siRNA sense strand
gaagaagccaaagucauga

SEQ ID NO: 18055 - RNA, 19 nt, Homo sapiens
  misc_RNA (1)...(19): siRNA sense strand
gagaagaggcaguaagaag

SEQ ID NO: 18056 - RNA, 19 nt, Homo sapiens
  misc_RNA (1)...(19): siRNA sense strand
gucauuauguuguguguuc

SEQ ID NO: 18057 - RNA, 19 nt, Homo sapiens
  misc_RNA (1)...(19): siRNA sense strand
gaugccauaugagagauuu

SEQ ID NO: 18058 - RNA, 19 nt, Homo sapiens
  misc_RNA (1)...(19): siRNA sense strand
caccucagagccaguauua

SEQ ID NO: 18059 - RNA, 19 nt, Homo sapiens
  misc_RNA (1)...(19): siRNA sense strand
aagaaggguucaauagaug

SEQ ID NO: 18060 - RNA, 19 nt, Homo sapiens
  misc_RNA (1)...(19): siRNA sense strand
ugagcaauauucuagaugu

SEQ ID NO: 18061 - RNA, 19 nt, Homo sapiens
  misc_RNA (1)...(19): siRNA sense strand
gccaaugaaugcaaaugau

SEQ ID NO: 18062 - RNA, 19 nt, Homo sapiens
  misc_RNA (1)...(19): siRNA sense strand
aaagaaggagguuucauug

SEQ ID NO: 18063 - RNA, 19 nt, Homo sapiens
  misc_RNA (1)...(19): siRNA sense strand
aaggcuacauuccuaguaa

SEQ ID NO: 18064 - RNA, 19 nt, Homo sapiens
  misc_RNA (1)...(19): siRNA sense strand
gcaauauucuagaugucau

SEQ ID NO: 18065 - RNA, 19 nt, Homo sapiens
  misc_RNA (1)...(19): siRNA sense strand
ugcacaaacucuccuacua

SEQ ID NO: 18066 - RNA, 19 nt, Homo sapiens
  misc_RNA (1)...(19): siRNA sense strand
ggaaauggagaggccagua

SEQ ID NO: 18067 - RNA, 19 nt, Homo sapiens
  misc_RNA (1)...(19): siRNA sense strand
gagguuucauugucagaga

SEQ ID NO: 18068 - RNA, 19 nt, Homo sapiens
  misc_RNA (1)...(19): siRNA sense strand
aagaaaacaucaccucuaa

SEQ ID NO: 18069 - RNA, 19 nt, Homo sapiens
  misc_RNA (1)...(19): siRNA sense strand
augagaagcuggugcaguu

SEQ ID NO: 18070 - RNA, 19 nt, Homo sapiens
  misc_RNA (1)...(19): siRNA sense strand
caucaccucuaaacuucaa

SEQ ID NO: 18071 - RNA, 19 nt, Homo sapiens
  misc_RNA (1)...(19): siRNA sense strand
caccaucccugagcucauu

SEQ ID NO: 18072 - RNA, 19 nt, Homo sapiens
  misc_RNA (1)...(19): siRNA sense strand
ugaagcagaagacuccaua

SEQ ID NO: 18073 - RNA, 19 nt, Homo sapiens
  misc_RNA (1)...(19): siRNA sense strand
caacugaagaacuaaggaa

SEQ ID NO: 18074 - RNA, 19 nt, Homo sapiens
  misc_RNA (1)...(19): siRNA sense strand
agaaauguaugagugguau

SEQ ID NO: 18075 - RNA, 19 nt, Homo sapiens
  misc_RNA (1)...(19): siRNA sense strand
uuguggcccuuuaugauua

SEQ ID NO: 18076 - RNA, 19 nt, Homo sapiens
  misc_RNA (1)...(19): siRNA sense strand
agaaauaucacccuugcuu

SEQ ID NO: 18077 - RNA, 19 nt, Homo sapiens
  misc_RNA (1)...(19): siRNA sense strand
cuaugucacugaagcagaa

SEQ ID NO: 18078 - RNA, 19 nt, Homo sapiens
  misc_RNA (1)...(19): siRNA sense strand
aaucugacauuugggcuuu

SEQ ID NO: 18079 - RNA, 19 nt, Homo sapiens
  misc_RNA (1)...(19): siRNA sense strand
cugaagcgaucccaacaga

SEQ ID NO: 18080 - RNA, 19 nt, Homo sapiens
  misc_RNA (1)...(19): siRNA sense strand
gcuggggacuggacaauuu

SEQ ID NO: 18081 - RNA, 19 nt, Homo sapiens
  misc_RNA (1)...(19): siRNA sense strand
uauccagugucucaacaaa

SEQ ID NO: 18082 - RNA, 19 nt, Homo sapiens
  misc_RNA (1)...(19): siRNA sense strand
uugagaagaucacuugugu

SEQ ID NO: 18083 - RNA, 19 nt, Homo sapiens
  misc_RNA (1)...(19): siRNA sense strand
gaggaggaccagaucuuga

SEQ ID NO: 18084 - RNA, 19 nt, Homo sapiens
  misc_RNA (1)...(19): siRNA sense strand
gaauacacaagcucaguag

SEQ ID NO: 18085 - RNA, 19 nt, Homo sapiens
  misc_RNA (1)...(19): siRNA sense strand
ccuggcagcucgaaacugu

SEQ ID NO: 18086 - RNA, 19 nt, Homo sapiens
  misc_RNA (1)...(19): siRNA sense strand
ucauauccaggcucaaaua

SEQ ID NO: 18087 - RNA, 19 nt, Homo sapiens
  misc_RNA (1)...(19): siRNA sense strand
gaggugaagaguccaguga

SEQ ID NO: 18088 - RNA, 19 nt, Homo sapiens
  misc_RNA (1)...(19): siRNA sense strand
gagcaauauucuagauguc

SEQ ID NO: 18089 - RNA, 19 nt, Homo sapiens
  misc_RNA (1)...(19): siRNA sense strand
agaagcuggugcaguugua

SEQ ID NO: 18090 - RNA, 19 nt, Homo sapiens
  misc_RNA (1)...(19): siRNA sense strand
guagugaaguaugggaaau

SEQ ID NO: 18091 - RNA, 19 nt, Homo sapiens
  misc_RNA (1)...(19): siRNA sense strand
aacaucaccucuaaacuuc

SEQ ID NO: 18092 - RNA, 19 nt, Homo sapiens
  misc_RNA (1)...(19): siRNA sense strand
ugucagagacuccagcaaa

SEQ ID NO: 18093 - RNA, 19 nt, Homo sapiens
  misc_RNA (1)...(19): siRNA sense strand
ugaagaguccagugaaaug

SEQ ID NO: 18094 - RNA, 19 nt, Homo sapiens
  misc_RNA (1)...(19): siRNA sense strand
aaacagugguuccugaaaa

SEQ ID NO: 18095 - RNA, 19 nt, Homo sapiens
  misc_RNA (1)...(19): siRNA sense strand
gcagaugagcgucccacuu

SEQ ID NO: 18096 - RNA, 19 nt, Homo sapiens
  misc_RNA (1)...(19): siRNA sense strand
ugagagauuuacuaacagu

SEQ ID NO: 18097 - RNA, 19 nt, Homo sapiens
  misc_RNA (1)...(19): siRNA sense strand
cucaguaggcuccaaauuu

SEQ ID NO: 18098 - RNA, 19 nt, Homo sapiens
  misc_RNA (1)...(19): siRNA sense strand
ugaauacacaagcucagua

SEQ ID NO: 18099 - RNA, 19 nt, Homo sapiens
  misc_RNA (1)...(19): siRNA sense strand
gaucaaggaguuguuaaag

SEQ ID NO: 18100 - RNA, 19 nt, Homo sapiens
  misc_RNA (1)...(19): siRNA sense strand
cuccaugucugaagaugaa

SEQ ID NO: 18101 - RNA, 19 nt, Homo sapiens
  misc_RNA (1)...(19): siRNA sense strand
caacaacaguuaucuccaa

SEQ ID NO: 18102 - RNA, 19 nt, Homo sapiens
  misc_RNA (1)...(19): siRNA sense strand
gauagagccuccucaaauc

SEQ ID NO: 18103 - RNA, 19 nt, Homo sapiens
  misc_RNA (1)...(19): siRNA sense strand
ggauagagccuccucaaau

SEQ ID NO: 18104 - RNA, 19 nt, Homo sapiens
  misc_RNA (1)...(19): siRNA sense strand
ggacccagaucuucagguu

SEQ ID NO: 18105 - RNA, 19 nt, Homo sapiens
  misc_RNA (1)...(19): siRNA sense strand
caaguucccugucuucaug

SEQ ID NO: 18106 - RNA, 19 nt, Homo sapiens
  misc_RNA (1)...(19): siRNA sense strand
aaacaaaccuggagagcau

SEQ ID NO: 18107 - RNA, 19 nt, Homo sapiens
  misc_RNA (1)...(19): siRNA sense strand
gcucucagcccuucuguuu

SEQ ID NO: 18108 - RNA, 19 nt, Homo sapiens
  misc_RNA (1)...(19): siRNA sense strand
ugaagaagguggagaccaa

SEQ ID NO: 18109 - RNA, 19 nt, Homo sapiens
  misc_RNA (1)...(19): siRNA sense strand
gggaugcuuugguagauuu

SEQ ID NO: 18110 - RNA, 19 nt, Homo sapiens
  misc_RNA (1)...(19): siRNA sense strand
gcacccugcuggucuuuga

SEQ ID NO: 18111 - RNA, 19 nt, Homo sapiens
  misc_RNA (1)...(19): siRNA sense strand
gaauggaacccuuucacuu

SEQ ID NO: 18112 - RNA, 19 nt, Homo sapiens
  misc_RNA (1)...(19): siRNA sense strand
ccagagaguuugcaagaca

SEQ ID NO: 18113 - RNA, 19 nt, Homo sapiens
  misc_RNA (1)...(19): siRNA sense strand
ccaagaugcuauucguuga

SEQ ID NO: 18114 - RNA, 19 nt, Homo sapiens
  misc_RNA (1)...(19): siRNA sense strand
caacagugacgccaacuug

SEQ ID NO: 18115 - RNA, 19 nt, Homo sapiens
  misc_RNA (1)...(19): siRNA sense strand
gaaggucgcaacaacaguu

SEQ ID NO: 18116 - RNA, 19 nt, Homo sapiens
  misc_RNA (1)...(19): siRNA sense strand
ggaacccuuucacuucaaa

SEQ ID NO: 18117 - RNA, 19 nt, Homo sapiens
  misc_RNA (1)...(19): siRNA sense strand
uaacagcuaauaccacuga

SEQ ID NO: 18118 - RNA, 19 nt, Homo sapiens
  misc_RNA (1)...(19): siRNA sense strand
ccugaaacaucgucuugaa

SEQ ID NO: 18119 - RNA, 19 nt, Homo sapiens
  misc_RNA (1)...(19): siRNA sense strand
ccaaggacuucaccugugu

SEQ ID NO: 18120 - RNA, 19 nt, Homo sapiens
  misc_RNA (1)...(19): siRNA sense strand
ccacacaacccaccacaga

SEQ ID NO: 18121 - RNA, 19 nt, Homo sapiens
  misc_RNA (1)...(19): siRNA sense strand
cuacccagcucccaacaga

SEQ ID NO: 18122 - RNA, 19 nt, Homo sapiens
  misc_RNA (1)...(19): siRNA sense strand
ccaagaacaccaacaacaa

SEQ ID NO: 18123 - RNA, 19 nt, Homo sapiens
  misc_RNA (1)...(19): siRNA sense strand
aaagugcccaugaugaaua

SEQ ID NO: 18124 - RNA, 19 nt, Homo sapiens
  misc_RNA (1)...(19): siRNA sense strand
gccaggauaugcucucaau

SEQ ID NO: 18125 - RNA, 19 nt, Homo sapiens
  misc_RNA (1)...(19): siRNA sense strand
cagcuaauaccacugauga

SEQ ID NO: 18126 - RNA, 19 nt, Homo sapiens
  misc_RNA (1)...(19): siRNA sense strand
gcacaaguucccugucuuc

SEQ ID NO: 18127 - RNA, 19 nt, Homo sapiens
  misc_RNA (1)...(19): siRNA sense strand
ccaaguggaagacaacauu

SEQ ID NO: 18128 - RNA, 19 nt, Homo sapiens
  misc_RNA (1)...(19): siRNA sense strand
caacauuugaucccaagaa

SEQ ID NO: 18129 - RNA, 19 nt, Homo sapiens
  misc_RNA (1)...(19): siRNA sense strand
caggauaugcucucaauca

SEQ ID NO: 18130 - RNA, 19 nt, Homo sapiens
  misc_RNA (1)...(19): siRNA sense strand
gaacaccaacaacaagauc

SEQ ID NO: 18131 - RNA, 19 nt, Homo sapiens
  misc_RNA (1)...(19): siRNA sense strand
caacccacccaaccaacua

SEQ ID NO: 18132 - RNA, 19 nt, Homo sapiens
  misc_RNA (1)...(19): siRNA sense strand
caacucaacaaccaauuca

SEQ ID NO: 18133 - RNA, 19 nt, Homo sapiens
  misc_RNA (1)...(19): siRNA sense strand
gaagguggagaccaacaug

SEQ ID NO: 18134 - RNA, 19 nt, Homo sapiens
  misc_RNA (1)...(19): siRNA sense strand
ugaugaauagcaagaagua

SEQ ID NO: 18135 - RNA, 19 nt, Homo sapiens
  misc_RNA (1)...(19): siRNA sense strand
caagaacaccaacaacaag

SEQ ID NO: 18136 - RNA, 19 nt, Homo sapiens
  misc_RNA (1)...(19): siRNA sense strand
cagcacaaguucccugucu

SEQ ID NO: 18137 - RNA, 19 nt, Homo sapiens
  misc_RNA (1)...(19): siRNA sense strand
gggauagagccuccucaaa

SEQ ID NO: 18138 - RNA, 19 nt, Homo sapiens
  misc_RNA (1)...(19): siRNA sense strand
uggagaaacuggagauguc

SEQ ID NO: 18139 - RNA, 19 nt, Homo sapiens
  misc_RNA (1)...(19): siRNA sense strand
caaguggaagacaacauuu

SEQ ID NO: 18140 - RNA, 19 nt, Homo sapiens
  misc_RNA (1)...(19): siRNA sense strand
gaagggaaggucgcaacaa

SEQ ID NO: 18141 - RNA, 19 nt, Homo sapiens
  misc_RNA (1)...(19): siRNA sense strand
acccagaucuucagguuuc

SEQ ID NO: 18142 - RNA, 19 nt, Homo sapiens
  misc_RNA (1)...(19): siRNA sense strand
gacagucugcccuccgaua

SEQ ID NO: 18143 - RNA, 19 nt, Homo sapiens
  misc_RNA (1)...(19): siRNA sense strand
caauucagccaccaaaaua

SEQ ID NO: 18144 - RNA, 19 nt, Homo sapiens
  misc_RNA (1)...(19): siRNA sense strand
gcagcagcccuuccucuuc

SEQ ID NO: 18145 - RNA, 19 nt, Homo sapiens
  misc_RNA (1)...(19): siRNA sense strand
ggauaugcucucaaucaug

SEQ ID NO: 18146 - RNA, 19 nt, Homo sapiens
  misc_RNA (1)...(19): siRNA sense strand
aacauuugaucccaagaaa

SEQ ID NO: 18147 - RNA, 19 nt, Homo sapiens
  misc_RNA (1)...(19): siRNA sense strand
gccaagaacaccaacaaca

SEQ ID NO: 18148 - RNA, 19 nt, Homo sapiens
  misc_RNA (1)...(19): siRNA sense strand
gggaccagcagcacaaguu

SEQ ID NO: 18149 - RNA, 19 nt, Homo sapiens
  misc_RNA (1)...(19): siRNA sense strand
caagaugcuauucguugaa

SEQ ID NO: 18150 - RNA, 19 nt, Homo sapiens
  misc_RNA (1)...(19): siRNA sense strand
ugacagaggacccagaucu

SEQ ID NO: 18151 - RNA, 19 nt, Homo sapiens
  misc_RNA (1)...(19): siRNA sense strand
cugcagcucucccacaauc

SEQ ID NO: 18152 - RNA, 19 nt, Homo sapiens
  misc_RNA (1)...(19): siRNA sense strand
acaaccaacucaacaacca

SEQ ID NO: 18153 - RNA, 19 nt, Homo sapiens
  misc_RNA (1)...(19): siRNA sense strand
caugaugaauagcaagaag

SEQ ID NO: 18154 - RNA, 19 nt, Homo sapiens
  misc_RNA (1)...(19): siRNA sense strand
ucucagcaaugaagaaggu

SEQ ID NO: 18155 - RNA, 19 nt, Homo sapiens
  misc_RNA (1)...(19): siRNA sense strand
ccagaguccuaagcaacaa

SEQ ID NO: 18156 - RNA, 19 nt, Homo sapiens
  misc_RNA (1)...(19): siRNA sense strand
ccagcccacucuccuaaca

SEQ ID NO: 18157 - RNA, 19 nt, Homo sapiens
  misc_RNA (1)...(19): siRNA sense strand
ccaccaaaauaacagcuaa

SEQ ID NO: 18158 - RNA, 19 nt, Homo sapiens
  misc_RNA (1)...(19): siRNA sense strand
gacagaggacccagaucuu

SEQ ID NO: 18159 - RNA, 19 nt, Homo sapiens
  misc_RNA (1)...(19): siRNA sense strand
cccaggauccagagaguuu

SEQ ID NO: 18160 - RNA, 19 nt, Homo sapiens
  misc_RNA (1)...(19): siRNA sense strand
gugacgaccagccaggaua

SEQ ID NO: 18161 - RNA, 19 nt, Homo sapiens
  misc_RNA (1)...(19): siRNA sense strand
gaaccugaaacaucgucuu

SEQ ID NO: 18162 - RNA, 19 nt, Homo sapiens
  misc_RNA (1)...(19): siRNA sense strand
uaaaagugcccaugaugaa

SEQ ID NO: 18163 - RNA, 19 nt, Homo sapiens
  misc_RNA (1)...(19): siRNA sense strand
aauggaacccuuucacuuc

SEQ ID NO: 18164 - RNA, 19 nt, Homo sapiens
  misc_RNA (1)...(19): siRNA sense strand
gggcugggcagaacaccaa

SEQ ID NO: 18165 - RNA, 19 nt, Homo sapiens
  misc_RNA (1)...(19): siRNA sense strand
uaccacgccuucucagcaa

SEQ ID NO: 18166 - RNA, 19 nt, Homo sapiens
  misc_RNA (1)...(19): siRNA sense strand
caacuuggagcucaucaac

SEQ ID NO: 18167 - RNA, 19 nt, Homo sapiens
  misc_RNA (1)...(19): siRNA sense strand
ucaccucagucucucagau

SEQ ID NO: 18168 - RNA, 19 nt, Homo sapiens
  misc_RNA (1)...(19): siRNA sense strand
cagcaucgccagccuccuu

SEQ ID NO: 18169 - RNA, 19 nt, Homo sapiens
  misc_RNA (1)...(19): siRNA sense strand
ggaccagcagcacaaguuc

SEQ ID NO: 18170 - RNA, 19 nt, Homo sapiens
  misc_RNA (1)...(19): siRNA sense strand
gcucuaccacgccuucuca

SEQ ID NO: 18171 - RNA, 19 nt, Homo sapiens
  misc_RNA (1)...(19): siRNA sense strand
cagaggacccagaucuuca

SEQ ID NO: 18172 - RNA, 19 nt, Homo sapiens
  misc_RNA (1)...(19): siRNA sense strand
gcuaauaccacugaugaac

SEQ ID NO: 18173 - RNA, 19 nt, Homo sapiens
  misc_RNA (1)...(19): siRNA sense strand
ccaacucaacaaccaauuc

SEQ ID NO: 18174 - RNA, 19 nt, Homo sapiens
  misc_RNA (1)...(19): siRNA sense strand
guuuccagcuugccgacaa

SEQ ID NO: 18175 - RNA, 19 nt, Homo sapiens
  misc_RNA (1)...(19): siRNA sense strand
gcagcucucccacaaucug

SEQ ID NO: 18176 - RNA, 19 nt, Homo sapiens
  misc_RNA (1)...(19): siRNA sense strand
gaugaacccaccacacaac

SEQ ID NO: 18177 - RNA, 19 nt, Homo sapiens
  misc_RNA (1)...(19): siRNA sense strand
aagggaaggucgcaacaac

SEQ ID NO: 18178 - RNA, 19 nt, Homo sapiens
  misc_RNA (1)...(19): siRNA sense strand
gggcagaacaccaaaacaa

SEQ ID NO: 18179 - RNA, 19 nt, Homo sapiens
  misc_RNA (1)...(19): siRNA sense strand
guuacucucugcucugacu

SEQ ID NO: 18180 - RNA, 19 nt, Homo sapiens
  misc_RNA (1)...(19): siRNA sense strand
caaccaacucaacaaccaa

SEQ ID NO: 18181 - RNA, 19 nt, Homo sapiens
  misc_RNA (1)...(19): siRNA sense strand
aaucauggagaaauuggaa

SEQ ID NO: 18182 - RNA, 19 nt, Homo sapiens
  misc_RNA (1)...(19): siRNA sense strand
ggagaccaacauggccuuu

SEQ ID NO: 18183 - RNA, 19 nt, Homo sapiens
  misc_RNA (1)...(19): siRNA sense strand
uaaccugugugggcugaca

SEQ ID NO: 18184 - RNA, 19 nt, Homo sapiens
  misc_RNA (1)...(19): siRNA sense strand
ugacgaccagccaggauau

SEQ ID NO: 18185 - RNA, 19 nt, Homo sapiens
  misc_RNA (1)...(19): siRNA sense strand
gggaaggucgcaacaacag

SEQ ID NO: 18186 - RNA, 19 nt, Homo sapiens
  misc_RNA (1)...(19): siRNA sense strand
ccauuucauugaccaaacu

SEQ ID NO: 18187 - RNA, 19 nt, Homo sapiens
  misc_RNA (1)...(19): siRNA sense strand
agggacaccuuugugaaug

SEQ ID NO: 18188 - RNA, 19 nt, Homo sapiens
  misc_RNA (1)...(19): siRNA sense strand
gggacaccuuugugaaugc

SEQ ID NO: 18189 - RNA, 19 nt, Homo sapiens
  misc_RNA (1)...(19): siRNA sense strand
gugcuggaacugacagaga

SEQ ID NO: 18190 - RNA, 19 nt, Homo sapiens
  misc_RNA (1)...(19): siRNA sense strand
aggauaugcucucaaucau

SEQ ID NO: 18191 - RNA, 19 nt, Homo sapiens
  misc_RNA (1)...(19): siRNA sense strand
aagaacaccaacaacaaga

SEQ ID NO: 18192 - RNA, 19 nt, Homo sapiens
  misc_RNA (1)...(19): siRNA sense strand
aguggaagacaacauuuga

SEQ ID NO: 18193 - RNA, 19 nt, Homo sapiens
  misc_RNA (1)...(19): siRNA sense strand
gacccagaucuucagguuu

SEQ ID NO: 18194 - RNA, 19 nt, Homo sapiens
  misc_RNA (1)...(19): siRNA sense strand
caaccaauucagccaccaa

SEQ ID NO: 18195 - RNA, 19 nt, Homo sapiens
  misc_RNA (1)...(19): siRNA sense strand
auggaacccuuucacuuca

SEQ ID NO: 18196 - RNA, 19 nt, Homo sapiens
  misc_RNA (1)...(19): siRNA sense strand
uggaagacaacauuugauc

SEQ ID NO: 18197 - RNA, 19 nt, Homo sapiens
  misc_RNA (1)...(19): siRNA sense strand
gaagggagacccagggauu

SEQ ID NO: 18198 - RNA, 19 nt, Homo sapiens
  misc_RNA (1)...(19): siRNA sense strand
ucaccaacaugaacaacaa

SEQ ID NO: 18199 - RNA, 19 nt, Homo sapiens
  misc_RNA (1)...(19): siRNA sense strand
ccaacaugaacaacaauua

SEQ ID NO: 18200 - RNA, 19 nt, Homo sapiens
  misc_RNA (1)...(19): siRNA sense strand
cuacaaggccacccagaaa

SEQ ID NO: 18201 - RNA, 19 nt, Homo sapiens
  misc_RNA (1)...(19): siRNA sense strand
gagggaaccugugcgugaa

SEQ ID NO: 18202 - RNA, 19 nt, Homo sapiens
  misc_RNA (1)...(19): siRNA sense strand
uuccugcucuuuccagaua

SEQ ID NO: 18203 - RNA, 19 nt, Homo sapiens
  misc_RNA (1)...(19): siRNA sense strand
cgacaagaacucacuacug

SEQ ID NO: 18204 - RNA, 19 nt, Homo sapiens
  misc_RNA (1)...(19): siRNA sense strand
cgccuucucugccacaaga

SEQ ID NO: 18205 - RNA, 19 nt, Homo sapiens
  misc_RNA (1)...(19): siRNA sense strand
gcaaggugcccggucucua

SEQ ID NO: 18206 - RNA, 19 nt, Homo sapiens
  misc_RNA (1)...(19): siRNA sense strand
cacgugaucaccaacauga

SEQ ID NO: 18207 - RNA, 19 nt, Homo sapiens
  misc_RNA (1)...(19): siRNA sense strand
caaggugcccggucucuac

SEQ ID NO: 18208 - RNA, 19 nt, Homo sapiens
  misc_RNA (1)...(19): siRNA sense strand
uggagaccauggugaguuc

SEQ ID NO: 18209 - RNA, 19 nt, Homo sapiens
  misc_RNA (1)...(19): siRNA sense strand
ccacaagaaccaucaacgu

SEQ ID NO: 18210 - RNA, 19 nt, Homo sapiens
  misc_RNA (1)...(19): siRNA sense strand
cagcaucccaguacugauc

SEQ ID NO: 18211 - RNA, 19 nt, Homo sapiens
  misc_RNA (1)...(19): siRNA sense strand
cuccugggccuaaucgaua

SEQ ID NO: 18212 - RNA, 19 nt, Homo sapiens
  misc_RNA (1)...(19): siRNA sense strand
guggcaaguucaccugcaa

SEQ ID NO: 18213 - RNA, 19 nt, Homo sapiens
  misc_RNA (1)...(19): siRNA sense strand
ggcagcaucccaguacuga

SEQ ID NO: 18214 - RNA, 19 nt, Homo sapiens
  misc_RNA (1)...(19): siRNA sense strand
cauggugaguucggagaga

SEQ ID NO: 18215 - RNA, 19 nt, Homo sapiens
  misc_RNA (1)...(19): siRNA sense strand
gugaaucgggagacuacaa

SEQ ID NO: 18216 - RNA, 19 nt, Homo sapiens
  misc_RNA (1)...(19): siRNA sense strand
ggagcaaacugaacauuaa

SEQ ID NO: 18217 - RNA, 19 nt, Homo sapiens
  misc_RNA (1)...(19): siRNA sense strand
gaacugggacuaacaccua

SEQ ID NO: 18218 - RNA, 19 nt, Homo sapiens
  misc_RNA (1)...(19): siRNA sense strand
gacaggaucuucagcuuug

SEQ ID NO: 18219 - RNA, 19 nt, Homo sapiens
  misc_RNA (1)...(19): siRNA sense strand
gagguugucucccaagaaa

SEQ ID NO: 18220 - RNA, 19 nt, Homo sapiens
  misc_RNA (1)...(19): siRNA sense strand
agaaugaacugcugaacaa

SEQ ID NO: 18221 - RNA, 19 nt, Homo sapiens
  misc_RNA (1)...(19): siRNA sense strand
gaagaggaaugacuaucug

SEQ ID NO: 18222 - RNA, 19 nt, Homo sapiens
  misc_RNA (1)...(19): siRNA sense strand
caagacagcuguugaccau

SEQ ID NO: 18223 - RNA, 19 nt, Homo sapiens
  misc_RNA (1)...(19): siRNA sense strand
ccacgagacuuucacauca

SEQ ID NO: 18224 - RNA, 19 nt, Homo sapiens
  misc_RNA (1)...(19): siRNA sense strand
aaacagcugugugugauaa

SEQ ID NO: 18225 - RNA, 19 nt, Homo sapiens
  misc_RNA (1)...(19): siRNA sense strand
gaggauggcuucauauugc

SEQ ID NO: 18226 - RNA, 19 nt, Homo sapiens
  misc_RNA (1)...(19): siRNA sense strand
ugacauagcucugcugaag

SEQ ID NO: 18227 - RNA, 19 nt, Homo sapiens
  misc_RNA (1)...(19): siRNA sense strand
caccaggucuuugaacaua

SEQ ID NO: 18228 - RNA, 19 nt, Homo sapiens
  misc_RNA (1)...(19): siRNA sense strand
gggagcaaacugaacauua

SEQ ID NO: 18229 - RNA, 19 nt, Homo sapiens
  misc_RNA (1)...(19): siRNA sense strand
ccaaaguccucaugucugu

SEQ ID NO: 18230 - RNA, 19 nt, Homo sapiens
  misc_RNA (1)...(19): siRNA sense strand
guagggaccaugagaauga

SEQ ID NO: 18231 - RNA, 19 nt, Homo sapiens
  misc_RNA (1)...(19): siRNA sense strand
gagaaacagcuguguguga

SEQ ID NO: 18232 - RNA, 19 nt, Homo sapiens
  misc_RNA (1)...(19): siRNA sense strand
ggacaggaucuucagcuuu

SEQ ID NO: 18233 - RNA, 19 nt, Homo sapiens
  misc_RNA (1)...(19): siRNA sense strand
agacagcuguugaccauau

SEQ ID NO: 18234 - RNA, 19 nt, Homo sapiens
  misc_RNA (1)...(19): siRNA sense strand
gagagauccugaacaucaa

SEQ ID NO: 18235 - RNA, 19 nt, Homo sapiens
  misc_RNA (1)...(19): siRNA sense strand
gagcggagauucagguuuu

SEQ ID NO: 18236 - RNA, 19 nt, Homo sapiens
  misc_RNA (1)...(19): siRNA sense strand
ucagggagguggugacaga

SEQ ID NO: 18237 - RNA, 19 nt, Homo sapiens
  misc_RNA (1)...(19): siRNA sense strand
gaaacagcugugugugaua

SEQ ID NO: 18238 - RNA, 19 nt, Homo sapiens
  misc_RNA (1)...(19): siRNA sense strand
gacaagcugugccgagguu

SEQ ID NO: 18239 - RNA, 19 nt, Homo sapiens
  misc_RNA (1)...(19): siRNA sense strand
ggauaugacugaggugauc

SEQ ID NO: 18240 - RNA, 19 nt, Homo sapiens
  misc_RNA (1)...(19): siRNA sense strand
gugugaggauggcuucaua

SEQ ID NO: 18241 - RNA, 19 nt, Homo sapiens
  misc_RNA (1)...(19): siRNA sense strand
ugaaugagcuaggguccaa

SEQ ID NO: 18242 - RNA, 19 nt, Homo sapiens
  misc_RNA (1)...(19): siRNA sense strand
agagagauccugaacauca

SEQ ID NO: 18243 - RNA, 19 nt, Homo sapiens
  misc_RNA (1)...(19): siRNA sense strand
ccuggcaugucacuauuaa

SEQ ID NO: 18244 - RNA, 19 nt, Homo sapiens
  misc_RNA (1)...(19): siRNA sense strand
caugugggauggagaaaca

SEQ ID NO: 18245 - RNA, 19 nt, Homo sapiens
  misc_RNA (1)...(19): siRNA sense strand
gaacugcugaacaaacaga

SEQ ID NO: 18246 - RNA, 19 nt, Homo sapiens
  misc_RNA (1)...(19): siRNA sense strand
gagaaugaacugcugaaca

SEQ ID NO: 18247 - RNA, 19 nt, Homo sapiens
  misc_RNA (1)...(19): siRNA sense strand
gauguggacuggagagaac

SEQ ID NO: 18248 - RNA, 19 nt, Homo sapiens
  misc_RNA (1)...(19): siRNA sense strand
agaaacagcugugugugau

SEQ ID NO: 18249 - RNA, 19 nt, Homo sapiens
  misc_RNA (1)...(19): siRNA sense strand
ugacagaccaguuccuaug

SEQ ID NO: 18250 - RNA, 19 nt, Homo sapiens
  misc_RNA (1)...(19): siRNA sense strand
gaaugacuaucuggacauc

SEQ ID NO: 18251 - RNA, 19 nt, Homo sapiens
  misc_RNA (1)...(19): siRNA sense strand
ggaaaaugccaacuauaaa

SEQ ID NO: 18252 - RNA, 19 nt, Homo sapiens
  misc_RNA (1)...(19): siRNA sense strand
ccaccaaucccacccagaa

SEQ ID NO: 18253 - RNA, 19 nt, Homo sapiens
  misc_RNA (1)...(19): siRNA sense strand
gcacuuccuucucccacau

SEQ ID NO: 18254 - RNA, 19 nt, Homo sapiens
  misc_RNA (1)...(19): siRNA sense strand
aacgacaacucccgggaua

SEQ ID NO: 18255 - RNA, 19 nt, Homo sapiens
  misc_RNA (1)...(19): siRNA sense strand
ccaggucuuugaacauaug

SEQ ID NO: 18256 - RNA, 19 nt, Homo sapiens
  misc_RNA (1)...(19): siRNA sense strand
ggacuggagagaacugaau

SEQ ID NO: 18257 - RNA, 19 nt, Homo sapiens
  misc_RNA (1)...(19): siRNA sense strand
ggaguucuauggugaugac

SEQ ID NO: 18258 - RNA, 19 nt, Homo sapiens
  misc_RNA (1)...(19): siRNA sense strand
aacagugucuaucucauga

SEQ ID NO: 18259 - RNA, 19 nt, Homo sapiens
  misc_RNA (1)...(19): siRNA sense strand
ggaguggaguggacaagcu

SEQ ID NO: 18260 - RNA, 19 nt, Homo sapiens
  misc_RNA (1)...(19): siRNA sense strand
ggacaggcuuccgcuuugg

SEQ ID NO: 18261 - RNA, 19 nt, Homo sapiens
  misc_RNA (1)...(19): siRNA sense strand
ccucaugucuguccugaac

SEQ ID NO: 18262 - RNA, 19 nt, Homo sapiens
  misc_RNA (1)...(19): siRNA sense strand
ccucagaacgugaauaucu

SEQ ID NO: 18263 - RNA, 19 nt, Homo sapiens
  misc_RNA (1)...(19): siRNA sense strand
ggaaagccugggccguaaa

SEQ ID NO: 18264 - RNA, 19 nt, Homo sapiens
  misc_RNA (1)...(19): siRNA sense strand
ccucaaggcagcaccugua

SEQ ID NO: 18265 - RNA, 19 nt, Homo sapiens
  misc_RNA (1)...(19): siRNA sense strand
gcaccuguagggaccauga

SEQ ID NO: 18266 - RNA, 19 nt, Homo sapiens
  misc_RNA (1)...(19): siRNA sense strand
ugaggauggcuucauauug

SEQ ID NO: 18267 - RNA, 19 nt, Homo sapiens
  misc_RNA (1)...(19): siRNA sense strand
ccuuggcucugcugacaaa

SEQ ID NO: 18268 - RNA, 19 nt, Homo sapiens
  misc_RNA (1)...(19): siRNA sense strand
ccaacuauaaagaucauga

SEQ ID NO: 18269 - RNA, 19 nt, Homo sapiens
  misc_RNA (1)...(19): siRNA sense strand
gaaaaugccaacuauaaag

SEQ ID NO: 18270 - RNA, 19 nt, Homo sapiens
  misc_RNA (1)...(19): siRNA sense strand
cgacaacucccgggauaug

SEQ ID NO: 18271 - RNA, 19 nt, Homo sapiens
  misc_RNA (1)...(19): siRNA sense strand
gccgccaacccuacucuua

SEQ ID NO: 18272 - RNA, 19 nt, Homo sapiens
  misc_RNA (1)...(19): siRNA sense strand
caucacggcugugcaagag

SEQ ID NO: 18273 - RNA, 19 nt, Homo sapiens
  misc_RNA (1)...(19): siRNA sense strand
gaaugaacugcugaacaaa

SEQ ID NO: 18274 - RNA, 19 nt, Homo sapiens
  misc_RNA (1)...(19): siRNA sense strand
gcccagaaaguaaagaugu

SEQ ID NO: 18275 - RNA, 19 nt, Homo sapiens
  misc_RNA (1)...(19): siRNA sense strand
augacuaucuggacaucua

SEQ ID NO: 18276 - RNA, 19 nt, Homo sapiens
  misc_RNA (1)...(19): siRNA sense strand
gaaauccgacaugccauca

SEQ ID NO: 18277 - RNA, 19 nt, Homo sapiens
  misc_RNA (1)...(19): siRNA sense strand
aaacagugucuaucucaug

SEQ ID NO: 18278 - RNA, 19 nt, Homo sapiens
  misc_RNA (1)...(19): siRNA sense strand
cgccaacccuacucuuaug

SEQ ID NO: 18279 - RNA, 19 nt, Homo sapiens
  misc_RNA (1)...(19): siRNA sense strand
cacgagacuuucacaucaa

SEQ ID NO: 18280 - RNA, 19 nt, Homo sapiens
  misc_RNA (1)...(19): siRNA sense strand
gcccucagaacgugaauau

SEQ ID NO: 18281 - RNA, 19 nt, Homo sapiens
  misc_RNA (1)...(19): siRNA sense strand
gugaggauggcuucauauu

SEQ ID NO: 18282 - RNA, 19 nt, Homo sapiens
  misc_RNA (1)...(19): siRNA sense strand
aggaaagccugggccguaa

SEQ ID NO: 18283 - RNA, 19 nt, Homo sapiens
  misc_RNA (1)...(19): siRNA sense strand
cccaggguuugaugucuuu

SEQ ID NO: 18284 - RNA, 19 nt, Homo sapiens
  misc_RNA (1)...(19): siRNA sense strand
gagagaacugaaugagcua

SEQ ID NO: 18285 - RNA, 19 nt, Homo sapiens
  misc_RNA (1)...(19): siRNA sense strand
gacaugccaucauccuucu

SEQ ID NO: 18286 - RNA, 19 nt, Homo sapiens
  misc_RNA (1)...(19): siRNA sense strand
uaaacagugucuaucucau

SEQ ID NO: 18287 - RNA, 19 nt, Homo sapiens
  misc_RNA (1)...(19): siRNA sense strand
gugaucagcagccuggaaa

SEQ ID NO: 18288 - RNA, 19 nt, Homo sapiens
  misc_RNA (1)...(19): siRNA sense strand
gaaaauggaacugggacua

SEQ ID NO: 18289 - RNA, 19 nt, Homo sapiens
  misc_RNA (1)...(19): siRNA sense strand
agaguguuccugcucauuu

SEQ ID NO: 18290 - RNA, 19 nt, Homo sapiens
  misc_RNA (1)...(19): siRNA sense strand
gcaccaggucuuugaacau

SEQ ID NO: 18291 - RNA, 19 nt, Homo sapiens
  misc_RNA (1)...(19): siRNA sense strand
cagugucuaucucaugaug

SEQ ID NO: 18292 - RNA, 19 nt, Homo sapiens
  misc_RNA (1)...(19): siRNA sense strand
ggaaugacuaucuggacau

SEQ ID NO: 18293 - RNA, 19 nt, Homo sapiens
  misc_RNA (1)...(19): siRNA sense strand
ggugacagaccaguuccua

SEQ ID NO: 18294 - RNA, 19 nt, Homo sapiens
  misc_RNA (1)...(19): siRNA sense strand
gagcuucgagugugaggau

SEQ ID NO: 18295 - RNA, 19 nt, Homo sapiens
  misc_RNA (1)...(19): siRNA sense strand
acccuacucuuaugacuuc

SEQ ID NO: 18296 - RNA, 19 nt, Homo sapiens
  misc_RNA (1)...(19): siRNA sense strand
ccucaucuccgaccaaugg

SEQ ID NO: 18297 - RNA, 19 nt, Homo sapiens
  misc_RNA (1)...(19): siRNA sense strand
ggguggcucucccaagaca

SEQ ID NO: 18298 - RNA, 19 nt, Homo sapiens
  misc_RNA (1)...(19): siRNA sense strand
caugaugaacaaccaaaug

SEQ ID NO: 18299 - RNA, 19 nt, Homo sapiens
  misc_RNA (1)...(19): siRNA sense strand
uggaaaaugccaacuauaa

SEQ ID NO: 18300 - RNA, 19 nt, Homo sapiens
  misc_RNA (1)...(19): siRNA sense strand
cugggagccuucucaccua

SEQ ID NO: 18301 - RNA, 19 nt, Homo sapiens
  misc_RNA (1)...(19): siRNA sense strand
gcaucacggcugugcaaga

SEQ ID NO: 18302 - RNA, 19 nt, Homo sapiens
  misc_RNA (1)...(19): siRNA sense strand
ugaaugggagcaaacugaa

SEQ ID NO: 18303 - RNA, 19 nt, Homo sapiens
  misc_RNA (1)...(19): siRNA sense strand
gcacgauggaggccaaucu

SEQ ID NO: 18304 - RNA, 19 nt, Homo sapiens
  misc_RNA (1)...(19): siRNA sense strand
gcguugccauuaucaccuu

SEQ ID NO: 18305 - RNA, 19 nt, Homo sapiens
  misc_RNA (1)...(19): siRNA sense strand
caacccuacucuuaugacu

SEQ ID NO: 18306 - RNA, 19 nt, Homo sapiens
  misc_RNA (1)...(19): siRNA sense strand
caaacugaacauuaaccuu

SEQ ID NO: 18307 - RNA, 19 nt, Homo sapiens
  misc_RNA (1)...(19): siRNA sense strand
gaguguuccugcucauuuu

SEQ ID NO: 18308 - RNA, 19 nt, Homo sapiens
  misc_RNA (1)...(19): siRNA sense strand
uaucgcugcuccucgaauc

SEQ ID NO: 18309 - RNA, 19 nt, Homo sapiens
  misc_RNA (1)...(19): siRNA sense strand
agggaauccuggaguucua

SEQ ID NO: 18310 - RNA, 19 nt, Homo sapiens
  misc_RNA (1)...(19): siRNA sense strand
ggauguggacuggagagaa

SEQ ID NO: 18311 - RNA, 19 nt, Homo sapiens
  misc_RNA (1)...(19): siRNA sense strand
uuaaacagugucuaucuca

SEQ ID NO: 18312 - RNA, 19 nt, Homo sapiens
  misc_RNA (1)...(19): siRNA sense strand
gcccaaaguccucaugucu

SEQ ID NO: 18313 - RNA, 19 nt, Homo sapiens
  misc_RNA (1)...(19): siRNA sense strand
cuggucaucugaaccucua

SEQ ID NO: 18314 - RNA, 19 nt, Homo sapiens
  misc_RNA (1)...(19): siRNA sense strand
gacaacucccgggauauga

SEQ ID NO: 18315 - RNA, 19 nt, Homo sapiens
  misc_RNA (1)...(19): siRNA sense strand
aauccgacaugccaucauc

SEQ ID NO: 18316 - RNA, 19 nt, Homo sapiens
  misc_RNA (1)...(19): siRNA sense strand
gagaauugcuucauacaaa

SEQ ID NO: 18317 - RNA, 19 nt, Homo sapiens
  misc_RNA (1)...(19): siRNA sense strand
cuacgaagcucaugaauau

SEQ ID NO: 18318 - RNA, 19 nt, Homo sapiens
  misc_RNA (1)...(19): siRNA sense strand
caacucaccuguaauaaau

SEQ ID NO: 18319 - RNA, 19 nt, Homo sapiens
  misc_RNA (1)...(19): siRNA sense strand
gagccguucucuacaauua

SEQ ID NO: 18320 - RNA, 19 nt, Homo sapiens
  misc_RNA (1)...(19): siRNA sense strand
gcaggaggcuaaagauauu

SEQ ID NO: 18321 - RNA, 19 nt, Homo sapiens
  misc_RNA (1)...(19): siRNA sense strand
gaucaacucaccuguaaua

SEQ ID NO: 18322 - RNA, 19 nt, Homo sapiens
  misc_RNA (1)...(19): siRNA sense strand
gaacaucguuucccgaagu

SEQ ID NO: 18323 - RNA, 19 nt, Homo sapiens
  misc_RNA (1)...(19): siRNA sense strand
ccaaugguguugacagaua

SEQ ID NO: 18324 - RNA, 19 nt, Homo sapiens
  misc_RNA (1)...(19): siRNA sense strand
agaaaugauugguggauua

SEQ ID NO: 18325 - RNA, 19 nt, Homo sapiens
  misc_RNA (1)...(19): siRNA sense strand
ggaacacccucaucaucua

SEQ ID NO: 18326 - RNA, 19 nt, Homo sapiens
  misc_RNA (1)...(19): siRNA sense strand
gaagagaaccagaaacaau

SEQ ID NO: 18327 - RNA, 19 nt, Homo sapiens
  misc_RNA (1)...(19): siRNA sense strand
ccaaugacuuugacgagua

SEQ ID NO: 18328 - RNA, 19 nt, Homo sapiens
  misc_RNA (1)...(19): siRNA sense strand
gaaacgagcagguggaaau

SEQ ID NO: 18329 - RNA, 19 nt, Homo sapiens
  misc_RNA (1)...(19): siRNA sense strand
gaacugaaccuugaugugu

SEQ ID NO: 18330 - RNA, 19 nt, Homo sapiens
  misc_RNA (1)...(19): siRNA sense strand
gcagaugacccugaagaua

SEQ ID NO: 18331 - RNA, 19 nt, Homo sapiens
  misc_RNA (1)...(19): siRNA sense strand
gaacugccuuugucaucuu

SEQ ID NO: 18332 - RNA, 19 nt, Homo sapiens
  misc_RNA (1)...(19): siRNA sense strand
gaggaugacugucuagcuu

SEQ ID NO: 18333 - RNA, 19 nt, Homo sapiens
  misc_RNA (1)...(19): siRNA sense strand
ggagggaacugccuuuguc

SEQ ID NO: 18334 - RNA, 19 nt, Homo sapiens
  misc_RNA (1)...(19): siRNA sense strand
ugaggagaauugcuucaua

SEQ ID NO: 18335 - RNA, 19 nt, Homo sapiens
  misc_RNA (1)...(19): siRNA sense strand
aagaucaacucaccuguaa

SEQ ID NO: 18336 - RNA, 19 nt, Homo sapiens
  misc_RNA (1)...(19): siRNA sense strand
ccaaggagcugcgcaagug

SEQ ID NO: 18337 - RNA, 19 nt, Homo sapiens
  misc_RNA (1)...(19): siRNA sense strand
guaagcagcucuacaacgu

SEQ ID NO: 18338 - RNA, 19 nt, Homo sapiens
  misc_RNA (1)...(19): siRNA sense strand
gauccgagccuacuaugaa

SEQ ID NO: 18339 - RNA, 19 nt, Homo sapiens
  misc_RNA (1)...(19): siRNA sense strand
gaaggaaucagaaugaaca

SEQ ID NO: 18340 - RNA, 19 nt, Homo sapiens
  misc_RNA (1)...(19): siRNA sense strand
gaaccagcuuggcgucuug

SEQ ID NO: 18341 - RNA, 19 nt, Homo sapiens
  misc_RNA (1)...(19): siRNA sense strand
cagaagcccuugagcauca

SEQ ID NO: 18342 - RNA, 19 nt, Homo sapiens
  misc_RNA (1)...(19): siRNA sense strand
ccacugaguuugaggugaa

SEQ ID NO: 18343 - RNA, 19 nt, Homo sapiens
  misc_RNA (1)...(19): siRNA sense strand
ggacgaaugccaagacgaa

SEQ ID NO: 18344 - RNA, 19 nt, Homo sapiens
  misc_RNA (1)...(19): siRNA sense strand
ugaagcagcuggccaaugg

SEQ ID NO: 18345 - RNA, 19 nt, Homo sapiens
  misc_RNA (1)...(19): siRNA sense strand
ggacaucauugcagaagag

SEQ ID NO: 18346 - RNA, 19 nt, Homo sapiens
  misc_RNA (1)...(19): siRNA sense strand
gaacguugaggacuugaaa

SEQ ID NO: 18347 - RNA, 19 nt, Homo sapiens
  misc_RNA (1)...(19): siRNA sense strand
acaccuaccugaucaugaa

SEQ ID NO: 18348 - RNA, 19 nt, Homo sapiens
  misc_RNA (1)...(19): siRNA sense strand
guaauaaauucgaccucaa

SEQ ID NO: 18349 - RNA, 19 nt, Homo sapiens
  misc_RNA (1)...(19): siRNA sense strand
gugaaggagugcagaaaga

SEQ ID NO: 18350 - RNA, 19 nt, Homo sapiens
  misc_RNA (1)...(19): siRNA sense strand
ggacaaagucggcaaguac

SEQ ID NO: 18351 - RNA, 19 nt, Homo sapiens
  misc_RNA (1)...(19): siRNA sense strand
ggacccaagugguggagaa

SEQ ID NO: 18352 - RNA, 19 nt, Homo sapiens
  misc_RNA (1)...(19): siRNA sense strand
gaggagaauugcuucauac

SEQ ID NO: 18353 - RNA, 19 nt, Homo sapiens
  misc_RNA (1)...(19): siRNA sense strand
gaagauccgagccuacuau

SEQ ID NO: 18354 - RNA, 19 nt, Homo sapiens
  misc_RNA (1)...(19): siRNA sense strand
caacccagcucugccuuug

SEQ ID NO: 18355 - RNA, 19 nt, Homo sapiens
  misc_RNA (1)...(19): siRNA sense strand
gaccagaauucuccugcaa

SEQ ID NO: 18356 - RNA, 19 nt, Homo sapiens
  misc_RNA (1)...(19): siRNA sense strand
cgaagugaguucccagaga

SEQ ID NO: 18357 - RNA, 19 nt, Homo sapiens
  misc_RNA (1)...(19): siRNA sense strand
caacagggaguucaaguca

SEQ ID NO: 18358 - RNA, 19 nt, Homo sapiens
  misc_RNA (1)...(19): siRNA sense strand
gauaggaacacccucauca

SEQ ID NO: 18359 - RNA, 19 nt, Homo sapiens
  misc_RNA (1)...(19): siRNA sense strand
ggaacaacaacgagaaaga

SEQ ID NO: 18360 - RNA, 19 nt, Homo sapiens
  misc_RNA (1)...(19): siRNA sense strand
ggucaucgcugugcauuac

SEQ ID NO: 18361 - RNA, 19 nt, Homo sapiens
  misc_RNA (1)...(19): siRNA sense strand
gaucagaagagaccaagga

SEQ ID NO: 18362 - RNA, 19 nt, Homo sapiens
  misc_RNA (1)...(19): siRNA sense strand
gugggcaacuccaacaauu

SEQ ID NO: 18363 - RNA, 19 nt, Homo sapiens
  misc_RNA (1)...(19): siRNA sense strand
ggccucuucuuaacaaauu

SEQ ID NO: 18364 - RNA, 19 nt, Homo sapiens
  misc_RNA (1)...(19): siRNA sense strand
agacacagaugaccugaag

SEQ ID NO: 18365 - RNA, 19 nt, Homo sapiens
  misc_RNA (1)...(19): siRNA sense strand
caagaacacuaugauccuu

SEQ ID NO: 18366 - RNA, 19 nt, Homo sapiens
  misc_RNA (1)...(19): siRNA sense strand
caccaauacuuuaauguag

SEQ ID NO: 18367 - RNA, 19 nt, Homo sapiens
  misc_RNA (1)...(19): siRNA sense strand
ggucuucuccacugaguuu

SEQ ID NO: 18368 - RNA, 19 nt, Homo sapiens
  misc_RNA (1)...(19): siRNA sense strand
gaaguucggccuagagaag

SEQ ID NO: 18369 - RNA, 19 nt, Homo sapiens
  misc_RNA (1)...(19): siRNA sense strand
cgaagcucaugaauauauu

SEQ ID NO: 18370 - RNA, 19 nt, Homo sapiens
  misc_RNA (1)...(19): siRNA sense strand
ggauuacgccggugucuuc

SEQ ID NO: 18371 - RNA, 19 nt, Homo sapiens
  misc_RNA (1)...(19): siRNA sense strand
cagauccacuucaccaaga

SEQ ID NO: 18372 - RNA, 19 nt, Homo sapiens
  misc_RNA (1)...(19): siRNA sense strand
ccaagacacccaaguacuu

SEQ ID NO: 18373 - RNA, 19 nt, Homo sapiens
  misc_RNA (1)...(19): siRNA sense strand
ucaaugaacagagauacua

SEQ ID NO: 18374 - RNA, 19 nt, Homo sapiens
  misc_RNA (1)...(19): siRNA sense strand
caacaacgagaaagacaug

SEQ ID NO: 18375 - RNA, 19 nt, Homo sapiens
  misc_RNA (1)...(19): siRNA sense strand
ggaacugccuuugucaucu

SEQ ID NO: 18376 - RNA, 19 nt, Homo sapiens
  misc_RNA (1)...(19): siRNA sense strand
ggagaauugcuucauacaa

SEQ ID NO: 18377 - RNA, 19 nt, Homo sapiens
  misc_RNA (1)...(19): siRNA sense strand
ggaugacugucuagcuuuc

SEQ ID NO: 18378 - RNA, 19 nt, Homo sapiens
  misc_RNA (1)...(19): siRNA sense strand
ggccaaugguguugacaga

SEQ ID NO: 18379 - RNA, 19 nt, Homo sapiens
  misc_RNA (1)...(19): siRNA sense strand
acagggaguucaagucaga

SEQ ID NO: 18380 - RNA, 19 nt, Homo sapiens
  misc_RNA (1)...(19): siRNA sense strand
ucaacucaccuguaauaaa

SEQ ID NO: 18381 - RNA, 19 nt, Homo sapiens
  misc_RNA (1)...(19): siRNA sense strand
ucaccaagacacccaagua

SEQ ID NO: 18382 - RNA, 19 nt, Homo sapiens
  misc_RNA (1)...(19): siRNA sense strand
ggacggucauggucaacau

SEQ ID NO: 18383 - RNA, 19 nt, Homo sapiens
  misc_RNA (1)...(19): siRNA sense strand
guucaccaauacuuuaaug

SEQ ID NO: 18384 - RNA, 19 nt, Homo sapiens
  misc_RNA (1)...(19): siRNA sense strand
ggacaaggucucacacucu

SEQ ID NO: 18385 - RNA, 19 nt, Homo sapiens
  misc_RNA (1)...(19): siRNA sense strand
cagaugacccugaagauag

SEQ ID NO: 18386 - RNA, 19 nt, Homo sapiens
  misc_RNA (1)...(19): siRNA sense strand
gggagacccucaacgucaa

SEQ ID NO: 18387 - RNA, 19 nt, Homo sapiens
  misc_RNA (1)...(19): siRNA sense strand
ccaacuacaugaaccuaca

SEQ ID NO: 18388 - RNA, 19 nt, Homo sapiens
  misc_RNA (1)...(19): siRNA sense strand
gcguguucgugcugaauaa

SEQ ID NO: 18389 - RNA, 19 nt, Homo sapiens
  misc_RNA (1)...(19): siRNA sense strand
ggacagcagcgcacguuca

SEQ ID NO: 18390 - RNA, 19 nt, Homo sapiens
  misc_RNA (1)...(19): siRNA sense strand
uuucaaaguucaccaauac

SEQ ID NO: 18391 - RNA, 19 nt, Homo sapiens
  misc_RNA (1)...(19): siRNA sense strand
ggaugccacuaugucuaua

SEQ ID NO: 18392 - RNA, 19 nt, Homo sapiens
  misc_RNA (1)...(19): siRNA sense strand
gcagaagagaacaucguuu

SEQ ID NO: 18393 - RNA, 19 nt, Homo sapiens
  misc_RNA (1)...(19): siRNA sense strand
gcagcuggccuucagacaa

SEQ ID NO: 18394 - RNA, 19 nt, Homo sapiens
  misc_RNA (1)...(19): siRNA sense strand
aaagaucaacucaccugua

SEQ ID NO: 18395 - RNA, 19 nt, Homo sapiens
  misc_RNA (1)...(19): siRNA sense strand
cagaagagaacaucguuuc

SEQ ID NO: 18396 - RNA, 19 nt, Homo sapiens
  misc_RNA (1)...(19): siRNA sense strand
agguucagcuguccaauga

SEQ ID NO: 18397 - RNA, 19 nt, Homo sapiens
  misc_RNA (1)...(19): siRNA sense strand
ggacauauccaugaugacu

SEQ ID NO: 18398 - RNA, 19 nt, Homo sapiens
  misc_RNA (1)...(19): siRNA sense strand
ucacaguaaugcaggacuu

SEQ ID NO: 18399 - RNA, 19 nt, Homo sapiens
  misc_RNA (1)...(19): siRNA sense strand
ggaagauccgagccuacua

SEQ ID NO: 18400 - RNA, 19 nt, Homo sapiens
  misc_RNA (1)...(19): siRNA sense strand
gcucugccgugaugaacug

SEQ ID NO: 18401 - RNA, 19 nt, Homo sapiens
  misc_RNA (1)...(19): siRNA sense strand
agaacacuaugauccuuga

SEQ ID NO: 18402 - RNA, 19 nt, Homo sapiens
  misc_RNA (1)...(19): siRNA sense strand
gaacaacaacgagaaagac

SEQ ID NO: 18403 - RNA, 19 nt, Homo sapiens
  misc_RNA (1)...(19): siRNA sense strand
cggcuacccuacucuguug

SEQ ID NO: 18404 - RNA, 19 nt, Homo sapiens
  misc_RNA (1)...(19): siRNA sense strand
ggcagcagaugacccugaa

SEQ ID NO: 18405 - RNA, 19 nt, Homo sapiens
  misc_RNA (1)...(19): siRNA sense strand
aguuugaggugaaggagua

SEQ ID NO: 18406 - RNA, 19 nt, Homo sapiens
  misc_RNA (1)...(19): siRNA sense strand
agacagacaagaccaucua

SEQ ID NO: 18407 - RNA, 19 nt, Homo sapiens
  misc_RNA (1)...(19): siRNA sense strand
cagcagcgcacguucauca

SEQ ID NO: 18408 - RNA, 19 nt, Homo sapiens
  misc_RNA (1)...(19): siRNA sense strand
aacaagcucugccgugaug

SEQ ID NO: 18409 - RNA, 19 nt, Homo sapiens
  misc_RNA (1)...(19): siRNA sense strand
gaacaagcucugccgugau

SEQ ID NO: 18410 - RNA, 19 nt, Homo sapiens
  misc_RNA (1)...(19): siRNA sense strand
caagaucacccaccguauc

SEQ ID NO: 18411 - RNA, 19 nt, Homo sapiens
  misc_RNA (1)...(19): siRNA sense strand
gaccacagccaaagauaag

SEQ ID NO: 18412 - RNA, 19 nt, Homo sapiens
  misc_RNA (1)...(19): siRNA sense strand
gagaaguucggccuagaga

SEQ ID NO: 18413 - RNA, 19 nt, Homo sapiens
  misc_RNA (1)...(19): siRNA sense strand
agaugacccugaagauaga

SEQ ID NO: 18414 - RNA, 19 nt, Homo sapiens
  misc_RNA (1)...(19): siRNA sense strand
cuacaucuauaacgagaag

SEQ ID NO: 18415 - RNA, 19 nt, Homo sapiens
  misc_RNA (1)...(19): siRNA sense strand
caaggucacccuggaagaa

SEQ ID NO: 18416 - RNA, 19 nt, Homo sapiens
  misc_RNA (1)...(19): siRNA sense strand
gagaggagcuggucuauga

SEQ ID NO: 18417 - RNA, 19 nt, Homo sapiens
  misc_RNA (1)...(19): siRNA sense strand
gaggauggcuacaggauga

SEQ ID NO: 18418 - RNA, 19 nt, Homo sapiens
  misc_RNA (1)...(19): siRNA sense strand
gaguacggcuuccagguua

SEQ ID NO: 18419 - RNA, 19 nt, Homo sapiens
  misc_RNA (1)...(19): siRNA sense strand
caagucagcauuccaauaa

SEQ ID NO: 18420 - RNA, 19 nt, Homo sapiens
  misc_RNA (1)...(19): siRNA sense strand
cgacaaacauccaggguau

SEQ ID NO: 18421 - RNA, 19 nt, Homo sapiens
  misc_RNA (1)...(19): siRNA sense strand
agaaacccaucucguaaua

SEQ ID NO: 18422 - RNA, 19 nt, Homo sapiens
  misc_RNA (1)...(19): siRNA sense strand
gcgcaacccuguacgacua

SEQ ID NO: 18423 - RNA, 19 nt, Homo sapiens
  misc_RNA (1)...(19): siRNA sense strand
gcagcaagaucaaugugaa

SEQ ID NO: 18424 - RNA, 19 nt, Homo sapiens
  misc_RNA (1)...(19): siRNA sense strand
ggaccgcuuucaaauauug

SEQ ID NO: 18425 - RNA, 19 nt, Homo sapiens
  misc_RNA (1)...(19): siRNA sense strand
ggaugaaguuugccugcua

SEQ ID NO: 18426 - RNA, 19 nt, Homo sapiens
  misc_RNA (1)...(19): siRNA sense strand
guggaccgcuuucaaauau

SEQ ID NO: 18427 - RNA, 19 nt, Homo sapiens
  misc_RNA (1)...(19): siRNA sense strand
gaaggcggaugguuccuau

SEQ ID NO: 18428 - RNA, 19 nt, Homo sapiens
  misc_RNA (1)...(19): siRNA sense strand
ccaagguucugcagauuga

SEQ ID NO: 18429 - RNA, 19 nt, Homo sapiens
  misc_RNA (1)...(19): siRNA sense strand
gcuuugggcuccuagauga

SEQ ID NO: 18430 - RNA, 19 nt, Homo sapiens
  misc_RNA (1)...(19): siRNA sense strand
gggcagaucguguucauga

SEQ ID NO: 18431 - RNA, 19 nt, Homo sapiens
  misc_RNA (1)...(19): siRNA sense strand
gagcucacauccugguauu

SEQ ID NO: 18432 - RNA, 19 nt, Homo sapiens
  misc_RNA (1)...(19): siRNA sense strand
gaagaucucagcccgauuc

SEQ ID NO: 18433 - RNA, 19 nt, Homo sapiens
  misc_RNA (1)...(19): siRNA sense strand
gggaaagaauauuugauca

SEQ ID NO: 18434 - RNA, 19 nt, Homo sapiens
  misc_RNA (1)...(19): siRNA sense strand
caaacgaggacuaugagua

SEQ ID NO: 18435 - RNA, 19 nt, Homo sapiens
  misc_RNA (1)...(19): siRNA sense strand
gaucucagcccgauucuca

SEQ ID NO: 18436 - RNA, 19 nt, Homo sapiens
  misc_RNA (1)...(19): siRNA sense strand
aguuugaggugaagaaaua

SEQ ID NO: 18437 - RNA, 19 nt, Homo sapiens
  misc_RNA (1)...(19): siRNA sense strand
ggaggaaacagcaaaggaa

SEQ ID NO: 18438 - RNA, 19 nt, Homo sapiens
  misc_RNA (1)...(19): siRNA sense strand
aaacccaucucguaauaau

SEQ ID NO: 18439 - RNA, 19 nt, Homo sapiens
  misc_RNA (1)...(19): siRNA sense strand
ggaaacaguggaccgcuuu

SEQ ID NO: 18440 - RNA, 19 nt, Homo sapiens
  misc_RNA (1)...(19): siRNA sense strand
agacggaccagcccauuua

SEQ ID NO: 18441 - RNA, 19 nt, Homo sapiens
  misc_RNA (1)...(19): siRNA sense strand
gaagagcuguggccuccau

SEQ ID NO: 18442 - RNA, 19 nt, Homo sapiens
  misc_RNA (1)...(19): siRNA sense strand
ggagaccaguggaccuuau

SEQ ID NO: 18443 - RNA, 19 nt, Homo sapiens
  misc_RNA (1)...(19): siRNA sense strand
gagaugcgguguccaaggu

SEQ ID NO: 18444 - RNA, 19 nt, Homo sapiens
  misc_RNA (1)...(19): siRNA sense strand
aggaggaccugauugauga

SEQ ID NO: 18445 - RNA, 19 nt, Homo sapiens
  misc_RNA (1)...(19): siRNA sense strand
caacagcagcacccaguuu

SEQ ID NO: 18446 - RNA, 19 nt, Homo sapiens
  misc_RNA (1)...(19): siRNA sense strand
caacucugaucccaauaug

SEQ ID NO: 18447 - RNA, 19 nt, Homo sapiens
  misc_RNA (1)...(19): siRNA sense strand
ggcaaggucuuugaagcua

SEQ ID NO: 18448 - RNA, 19 nt, Homo sapiens
  misc_RNA (1)...(19): siRNA sense strand
ggccuguccucuauaacua

SEQ ID NO: 18449 - RNA, 19 nt, Homo sapiens
  misc_RNA (1)...(19): siRNA sense strand
ggaagaaggagguguacau

SEQ ID NO: 18450 - RNA, 19 nt, Homo sapiens
  misc_RNA (1)...(19): siRNA sense strand
gccaggaccuacagauaga

SEQ ID NO: 18451 - RNA, 19 nt, Homo sapiens
  misc_RNA (1)...(19): siRNA sense strand
gaaauugggucaguaugcu

SEQ ID NO: 18452 - RNA, 19 nt, Homo sapiens
  misc_RNA (1)...(19): siRNA sense strand
caacaugggcaaggucuuu

SEQ ID NO: 18453 - RNA, 19 nt, Homo sapiens
  misc_RNA (1)...(19): siRNA sense strand
gcaaggucuuugaagcuau

SEQ ID NO: 18454 - RNA, 19 nt, Homo sapiens
  misc_RNA (1)...(19): siRNA sense strand
gaaguuugccugcuacuac

SEQ ID NO: 18455 - RNA, 19 nt, Homo sapiens
  misc_RNA (1)...(19): siRNA sense strand
gaggaggaccugauugaug

SEQ ID NO: 18456 - RNA, 19 nt, Homo sapiens
  misc_RNA (1)...(19): siRNA sense strand
uguugaagguccugaguuu

SEQ ID NO: 18457 - RNA, 19 nt, Homo sapiens
  misc_RNA (1)...(19): siRNA sense strand
ucaaaggccacgucgagua

SEQ ID NO: 18458 - RNA, 19 nt, Homo sapiens
  misc_RNA (1)...(19): siRNA sense strand
gaagaaggagguguacaug

SEQ ID NO: 18459 - RNA, 19 nt, Homo sapiens
  misc_RNA (1)...(19): siRNA sense strand
ggaguacggcuuccagguu

SEQ ID NO: 18460 - RNA, 19 nt, Homo sapiens
  misc_RNA (1)...(19): siRNA sense strand
gaggacagguagugaaagg

SEQ ID NO: 18461 - RNA, 19 nt, Homo sapiens
  misc_RNA (1)...(19): siRNA sense strand
gcaaaggaacccugaaggu

SEQ ID NO: 18462 - RNA, 19 nt, Homo sapiens
  misc_RNA (1)...(19): siRNA sense strand
acaacaaccucauggcaau

SEQ ID NO: 18463 - RNA, 19 nt, Homo sapiens
  misc_RNA (1)...(19): siRNA sense strand
gagcuggucuaugaacuca

SEQ ID NO: 18464 - RNA, 19 nt, Homo sapiens
  misc_RNA (1)...(19): siRNA sense strand
gaccuuauccagaaagaga

SEQ ID NO: 18465 - RNA, 19 nt, Homo sapiens
  misc_RNA (1)...(19): siRNA sense strand
ccgugaagcuccacuuaga

SEQ ID NO: 18466 - RNA, 19 nt, Homo sapiens
  misc_RNA (1)...(19): siRNA sense strand
gcacccuccuucuacuuug

SEQ ID NO: 18467 - RNA, 19 nt, Homo sapiens
  misc_RNA (1)...(19): siRNA sense strand
ccaagucagcauuccaaua

SEQ ID NO: 18468 - RNA, 19 nt, Homo sapiens
  misc_RNA (1)...(19): siRNA sense strand
uggcauuccugucaaaguu

SEQ ID NO: 18469 - RNA, 19 nt, Homo sapiens
  misc_RNA (1)...(19): siRNA sense strand
caggugcccuugaaagaug

SEQ ID NO: 18470 - RNA, 19 nt, Homo sapiens
  misc_RNA (1)...(19): siRNA sense strand
ucacagucaugguggagaa

SEQ ID NO: 18471 - RNA, 19 nt, Homo sapiens
  misc_RNA (1)...(19): siRNA sense strand
agucagcauuccaauaauu

SEQ ID NO: 18472 - RNA, 19 nt, Homo sapiens
  misc_RNA (1)...(19): siRNA sense strand
gcaacucugaucccaauau

SEQ ID NO: 18473 - RNA, 19 nt, Homo sapiens
  misc_RNA (1)...(19): siRNA sense strand
gggacacucugaaccugaa

SEQ ID NO: 18474 - RNA, 19 nt, Homo sapiens
  misc_RNA (1)...(19): siRNA sense strand
ugacacgucugcccaugau

SEQ ID NO: 18475 - RNA, 19 nt, Homo sapiens
  misc_RNA (1)...(19): siRNA sense strand
ggacgucacccuccugagu

SEQ ID NO: 18476 - RNA, 19 nt, Homo sapiens
  misc_RNA (1)...(19): siRNA sense strand
gaaacccaucucguaauaa

SEQ ID NO: 18477 - RNA, 19 nt, Homo sapiens
  misc_RNA (1)...(19): siRNA sense strand
caaggucuuugaagcuaug

SEQ ID NO: 18478 - RNA, 19 nt, Homo sapiens
  misc_RNA (1)...(19): siRNA sense strand
gggugcagcuccaggaugu

SEQ ID NO: 18479 - RNA, 19 nt, Homo sapiens
  misc_RNA (1)...(19): siRNA sense strand
gcagaucguguucaugaau

SEQ ID NO: 18480 - RNA, 19 nt, Homo sapiens
  misc_RNA (1)...(19): siRNA sense strand
gucagcauuccaauaauua

SEQ ID NO: 18481 - RNA, 19 nt, Homo sapiens
  misc_RNA (1)...(19): siRNA sense strand
gugaagcuccacuuagaaa

SEQ ID NO: 18482 - RNA, 19 nt, Homo sapiens
  misc_RNA (1)...(19): siRNA sense strand
cuaaucagaugcgcaacuu

SEQ ID NO: 18483 - RNA, 19 nt, Homo sapiens
  misc_RNA (1)...(19): siRNA sense strand
agaccaagaucacccaagu

SEQ ID NO: 18484 - RNA, 19 nt, Homo sapiens
  misc_RNA (1)...(19): siRNA sense strand
ggacagguagugaaaggau

SEQ ID NO: 18485 - RNA, 19 nt, Homo sapiens
  misc_RNA (1)...(19): siRNA sense strand
ggaccugauugaugaggau

SEQ ID NO: 18486 - RNA, 19 nt, Homo sapiens
  misc_RNA (1)...(19): siRNA sense strand
ggagaagacaacccggaaa

SEQ ID NO: 18487 - RNA, 19 nt, Homo sapiens
  misc_RNA (1)...(19): siRNA sense strand
gagggcagaucguguucau

SEQ ID NO: 18488 - RNA, 19 nt, Homo sapiens
  misc_RNA (1)...(19): siRNA sense strand
ggaagcaaacgaggacuau

SEQ ID NO: 18489 - RNA, 19 nt, Homo sapiens
  misc_RNA (1)...(19): siRNA sense strand
ucucaaaggcaaacucauu

SEQ ID NO: 18490 - RNA, 19 nt, Homo sapiens
  misc_RNA (1)...(19): siRNA sense strand
gaugaaaugcaguuagaca

SEQ ID NO: 18491 - RNA, 19 nt, Homo sapiens
  misc_RNA (1)...(19): siRNA sense strand
aagcaaacgaggacuauga

SEQ ID NO: 18492 - RNA, 19 nt, Homo sapiens
  misc_RNA (1)...(19): siRNA sense strand
gugcagagccauugaagca

SEQ ID NO: 18493 - RNA, 19 nt, Homo sapiens
  misc_RNA (1)...(19): siRNA sense strand
uggcaacucugaucccaau

SEQ ID NO: 18494 - RNA, 19 nt, Homo sapiens
  misc_RNA (1)...(19): siRNA sense strand
gcugcggccuguccucuau

SEQ ID NO: 18495 - RNA, 19 nt, Homo sapiens
  misc_RNA (1)...(19): siRNA sense strand
gcaagaagagcagggacaa

SEQ ID NO: 18496 - RNA, 19 nt, Homo sapiens
  misc_RNA (1)...(19): siRNA sense strand
gagagucugcgcaagaaga

SEQ ID NO: 18497 - RNA, 19 nt, Homo sapiens
  misc_RNA (1)...(19): siRNA sense strand
aaaaggcgauuaaugagaa

SEQ ID NO: 18498 - RNA, 19 nt, Homo sapiens
  misc_RNA (1)...(19): siRNA sense strand
gaagcugaauaugggcauu

SEQ ID NO: 18499 - RNA, 19 nt, Homo sapiens
  misc_RNA (1)...(19): siRNA sense strand
uugaugaaaugcaguuaga

SEQ ID NO: 18500 - RNA, 19 nt, Homo sapiens
  misc_RNA (1)...(19): siRNA sense strand
gugcccagcucaacgacuu

SEQ ID NO: 18501 - RNA, 19 nt, Homo sapiens
  misc_RNA (1)...(19): siRNA sense strand
gaccaucgcccuucaucau

SEQ ID NO: 18502 - RNA, 19 nt, Homo sapiens
  misc_RNA (1)...(19): siRNA sense strand
gagcaaaccaugaucuacu

SEQ ID NO: 18503 - RNA, 19 nt, Homo sapiens
  misc_RNA (1)...(19): siRNA sense strand
gcugagagucugcgcaaga

SEQ ID NO: 18504 - RNA, 19 nt, Homo sapiens
  misc_RNA (1)...(19): siRNA sense strand
gcauuccugucaaaguuuc

SEQ ID NO: 18505 - RNA, 19 nt, Homo sapiens
  misc_RNA (1)...(19): siRNA sense strand
gagccacauuucccucuca

SEQ ID NO: 18506 - RNA, 19 nt, Homo sapiens
  misc_RNA (1)...(19): siRNA sense strand
ggaggaggagcugcaguuu

SEQ ID NO: 18507 - RNA, 19 nt, Homo sapiens
  misc_RNA (1)...(19): siRNA sense strand
aauauguccuucccaacuu

SEQ ID NO: 18508 - RNA, 19 nt, Homo sapiens
  misc_RNA (1)...(19): siRNA sense strand
gaaccugggaaagaauauu

SEQ ID NO: 18509 - RNA, 19 nt, Homo sapiens
  misc_RNA (1)...(19): siRNA sense strand
gggagugcgugggcuuuga

SEQ ID NO: 18510 - RNA, 19 nt, Homo sapiens
  misc_RNA (1)...(19): siRNA sense strand
gcugaacaaccgccagauu

SEQ ID NO: 18511 - RNA, 19 nt, Homo sapiens
  misc_RNA (1)...(19): siRNA sense strand
gggagcaaaccaugaucua

SEQ ID NO: 18512 - RNA, 19 nt, Homo sapiens
  misc_RNA (1)...(19): siRNA sense strand
acagugcccuucagguguu

SEQ ID NO: 18513 - RNA, 19 nt, Homo sapiens
  misc_RNA (1)...(19): siRNA sense strand
caaggccgcugcuaaucag

SEQ ID NO: 18514 - RNA, 19 nt, Homo sapiens
  misc_RNA (1)...(19): siRNA sense strand
acaucuaacuggcuucugu

SEQ ID NO: 18515 - RNA, 19 nt, Homo sapiens
  misc_RNA (1)...(19): siRNA sense strand
ggcgauuaaugagaaauug

SEQ ID NO: 18516 - RNA, 19 nt, Homo sapiens
  misc_RNA (1)...(19): siRNA sense strand
gaaacagucuccagauuau

SEQ ID NO: 18517 - RNA, 19 nt, Homo sapiens
  misc_RNA (1)...(19): siRNA sense strand
gagaagauguugaaauuuc

SEQ ID NO: 18518 - RNA, 19 nt, Homo sapiens
  misc_RNA (1)...(19): siRNA sense strand
ggacaagacuuucauccaa

SEQ ID NO: 18519 - RNA, 19 nt, Homo sapiens
  misc_RNA (1)...(19): siRNA sense strand
gaauguaacuggcaaagau

SEQ ID NO: 18520 - RNA, 19 nt, Homo sapiens
  misc_RNA (1)...(19): siRNA sense strand
ggaaagcuuugcaagagua

SEQ ID NO: 18521 - RNA, 19 nt, Homo sapiens
  misc_RNA (1)...(19): siRNA sense strand
caacaaggcucauucucaa

SEQ ID NO: 18522 - RNA, 19 nt, Homo sapiens
  misc_RNA (1)...(19): siRNA sense strand
ggacaaccauguaucaaug

SEQ ID NO: 18523 - RNA, 19 nt, Homo sapiens
  misc_RNA (1)...(19): siRNA sense strand
gaaagaauccuguggcuau

SEQ ID NO: 18524 - RNA, 19 nt, Homo sapiens
  misc_RNA (1)...(19): siRNA sense strand
gaaaccaacucuacugugu

SEQ ID NO: 18525 - RNA, 19 nt, Homo sapiens
  misc_RNA (1)...(19): siRNA sense strand
gaagaucucuguguguuug

SEQ ID NO: 18526 - RNA, 19 nt, Homo sapiens
  misc_RNA (1)...(19): siRNA sense strand
ccaacaagcugucagagaa

SEQ ID NO: 18527 - RNA, 19 nt, Homo sapiens
  misc_RNA (1)...(19): siRNA sense strand
gagcagacacagacaaaua

SEQ ID NO: 18528 - RNA, 19 nt, Homo sapiens
  misc_RNA (1)...(19): siRNA sense strand
gcaccuuucugaugucuuu

SEQ ID NO: 18529 - RNA, 19 nt, Homo sapiens
  misc_RNA (1)...(19): siRNA sense strand
gaccuucucuaucaguuua

SEQ ID NO: 18530 - RNA, 19 nt, Homo sapiens
  misc_RNA (1)...(19): siRNA sense strand
ggauuuaacuucucuugga

SEQ ID NO: 18531 - RNA, 19 nt, Homo sapiens
  misc_RNA (1)...(19): siRNA sense strand
gaggcugacugcaagaaua

SEQ ID NO: 18532 - RNA, 19 nt, Homo sapiens
  misc_RNA (1)...(19): siRNA sense strand
uggagaagauguugaaauu

SEQ ID NO: 18533 - RNA, 19 nt, Homo sapiens
  misc_RNA (1)...(19): siRNA sense strand
aaacagauuucuacaagga

SEQ ID NO: 18534 - RNA, 19 nt, Homo sapiens
  misc_RNA (1)...(19): siRNA sense strand
ggaagaagccaaacacugu

SEQ ID NO: 18535 - RNA, 19 nt, Homo sapiens
  misc_RNA (1)...(19): siRNA sense strand
ggacaccacccauuucaaa

SEQ ID NO: 18536 - RNA, 19 nt, Homo sapiens
  misc_RNA (1)...(19): siRNA sense strand
gcaggagacuagagaaugu

SEQ ID NO: 18537 - RNA, 19 nt, Homo sapiens
  misc_RNA (1)...(19): siRNA sense strand
ugaaugcucugaucaacaa

SEQ ID NO: 18538 - RNA, 19 nt, Homo sapiens
  misc_RNA (1)...(19): siRNA sense strand
gaaauuucaugccuuacug

SEQ ID NO: 18539 - RNA, 19 nt, Homo sapiens
  misc_RNA (1)...(19): siRNA sense strand
gauaaguacuaccaggaaa

SEQ ID NO: 18540 - RNA, 19 nt, Homo sapiens
  misc_RNA (1)...(19): siRNA sense strand
gguacaaacugcagaagau

SEQ ID NO: 18541 - RNA, 19 nt, Homo sapiens
  misc_RNA (1)...(19): siRNA sense strand
uguaugaccuucucuauca

SEQ ID NO: 18542 - RNA, 19 nt, Homo sapiens
  misc_RNA (1)...(19): siRNA sense strand
ugaaagcacuuaaccaucu

SEQ ID NO: 18543 - RNA, 19 nt, Homo sapiens
  misc_RNA (1)...(19): siRNA sense strand
agaaacagucuccagauua

SEQ ID NO: 18544 - RNA, 19 nt, Homo sapiens
  misc_RNA (1)...(19): siRNA sense strand
acacagacuccaacgauua

SEQ ID NO: 18545 - RNA, 19 nt, Homo sapiens
  misc_RNA (1)...(19): siRNA sense strand
gcucuggucuggaggagaa

SEQ ID NO: 18546 - RNA, 19 nt, Homo sapiens
  misc_RNA (1)...(19): siRNA sense strand
ggaucugaaugcauuugua

SEQ ID NO: 18547 - RNA, 19 nt, Homo sapiens
  misc_RNA (1)...(19): siRNA sense strand
ccauaauucugccuucaaa

SEQ ID NO: 18548 - RNA, 19 nt, Homo sapiens
  misc_RNA (1)...(19): siRNA sense strand
caaugaugaugaagaaaug

SEQ ID NO: 18549 - RNA, 19 nt, Homo sapiens
  misc_RNA (1)...(19): siRNA sense strand
gagaaguccuugauaacuc

SEQ ID NO: 18550 - RNA, 19 nt, Homo sapiens
  misc_RNA (1)...(19): siRNA sense strand
gaggaagacugcacauuuu

SEQ ID NO: 18551 - RNA, 19 nt, Homo sapiens
  misc_RNA (1)...(19): siRNA sense strand
gaacuaaagaacucagguu

SEQ ID NO: 18552 - RNA, 19 nt, Homo sapiens
  misc_RNA (1)...(19): siRNA sense strand
ccagaaaguuagaaugcaa

SEQ ID NO: 18553 - RNA, 19 nt, Homo sapiens
  misc_RNA (1)...(19): siRNA sense strand
uaacuucucuuggacacaa

SEQ ID NO: 18554 - RNA, 19 nt, Homo sapiens
  misc_RNA (1)...(19): siRNA sense strand
gaaauacugcauccuggaa

SEQ ID NO: 18555 - RNA, 19 nt, Homo sapiens
  misc_RNA (1)...(19): siRNA sense strand
gcaaacaggaagauggaaa

SEQ ID NO: 18556 - RNA, 19 nt, Homo sapiens
  misc_RNA (1)...(19): siRNA sense strand
gaagugggaacuauaagau

SEQ ID NO: 18557 - RNA, 19 nt, Homo sapiens
  misc_RNA (1)...(19): siRNA sense strand
gcagugaggaacuaaagaa

SEQ ID NO: 18558 - RNA, 19 nt, Homo sapiens
  misc_RNA (1)...(19): siRNA sense strand
ugcagaagaugacuugaaa

SEQ ID NO: 18559 - RNA, 19 nt, Homo sapiens
  misc_RNA (1)...(19): siRNA sense strand
ggacagaaacaaucaggau

SEQ ID NO: 18560 - RNA, 19 nt, Homo sapiens
  misc_RNA (1)...(19): siRNA sense strand
uagaauuggugaauccauu

SEQ ID NO: 18561 - RNA, 19 nt, Homo sapiens
  misc_RNA (1)...(19): siRNA sense strand
gaucugcaccuuucugaug

SEQ ID NO: 18562 - RNA, 19 nt, Homo sapiens
  misc_RNA (1)...(19): siRNA sense strand
cuacaaggauuuaacuucu

SEQ ID NO: 18563 - RNA, 19 nt, Homo sapiens
  misc_RNA (1)...(19): siRNA sense strand
ccaaaugugucugccuauu

SEQ ID NO: 18564 - RNA, 19 nt, Homo sapiens
  misc_RNA (1)...(19): siRNA sense strand
gacacagacuccaacgauu

SEQ ID NO: 18565 - RNA, 19 nt, Homo sapiens
  misc_RNA (1)...(19): siRNA sense strand
caggaaagcuuugcaagag

SEQ ID NO: 18566 - RNA, 19 nt, Homo sapiens
  misc_RNA (1)...(19): siRNA sense strand
aaccaugcauuccaucuaa

SEQ ID NO: 18567 - RNA, 19 nt, Homo sapiens
  misc_RNA (1)...(19): siRNA sense strand
agaggaagacugcacauuu

SEQ ID NO: 18568 - RNA, 19 nt, Homo sapiens
  misc_RNA (1)...(19): siRNA sense strand
gcaagcaggagacuagaga

SEQ ID NO: 18569 - RNA, 19 nt, Homo sapiens
  misc_RNA (1)...(19): siRNA sense strand
gacaguggccgcugcauug

SEQ ID NO: 18570 - RNA, 19 nt, Homo sapiens
  misc_RNA (1)...(19): siRNA sense strand
gaaaaugacuguggagaca

SEQ ID NO: 18571 - RNA, 19 nt, Homo sapiens
  misc_RNA (1)...(19): siRNA sense strand
caaaugugucugccuauug

SEQ ID NO: 18572 - RNA, 19 nt, Homo sapiens
  misc_RNA (1)...(19): siRNA sense strand
acacagacaaauaguagua

SEQ ID NO: 18573 - RNA, 19 nt, Homo sapiens
  misc_RNA (1)...(19): siRNA sense strand
ggagaagauguugaaauuu

SEQ ID NO: 18574 - RNA, 19 nt, Homo sapiens
  misc_RNA (1)...(19): siRNA sense strand
guaccugugaugcuacuua

SEQ ID NO: 18575 - RNA, 19 nt, Homo sapiens
  misc_RNA (1)...(19): siRNA sense strand
gaaagcacuuaaccaucug

SEQ ID NO: 18576 - RNA, 19 nt, Homo sapiens
  misc_RNA (1)...(19): siRNA sense strand
caacgaaagcuaaagaucu

SEQ ID NO: 18577 - RNA, 19 nt, Homo sapiens
  misc_RNA (1)...(19): siRNA sense strand
gaagaugacuugaaaacag

SEQ ID NO: 18578 - RNA, 19 nt, Homo sapiens
  misc_RNA (1)...(19): siRNA sense strand
ggaacaaccucaggaaagc

SEQ ID NO: 18579 - RNA, 19 nt, Homo sapiens
  misc_RNA (1)...(19): siRNA sense strand
agaauaaauuucgcuguga

SEQ ID NO: 18580 - RNA, 19 nt, Homo sapiens
  misc_RNA (1)...(19): siRNA sense strand
gaucugaaugcauuuguau

SEQ ID NO: 18581 - RNA, 19 nt, Homo sapiens
  misc_RNA (1)...(19): siRNA sense strand
ccugugaugcuacuuauaa

SEQ ID NO: 18582 - RNA, 19 nt, Homo sapiens
  misc_RNA (1)...(19): siRNA sense strand
caacaagcugucagagaaa

SEQ ID NO: 18583 - RNA, 19 nt, Homo sapiens
  misc_RNA (1)...(19): siRNA sense strand
gagaaaacauugaacaucu

SEQ ID NO: 18584 - RNA, 19 nt, Homo sapiens
  misc_RNA (1)...(19): siRNA sense strand
cagagauuguauagaauug

SEQ ID NO: 18585 - RNA, 19 nt, Homo sapiens
  misc_RNA (1)...(19): siRNA sense strand
gcagcaagcaggagacuag

SEQ ID NO: 18586 - RNA, 19 nt, Homo sapiens
  misc_RNA (1)...(19): siRNA sense strand
uagaauacaacucugcuuu

SEQ ID NO: 18587 - RNA, 19 nt, Homo sapiens
  misc_RNA (1)...(19): siRNA sense strand
aaacauugaacaucuguga

SEQ ID NO: 18588 - RNA, 19 nt, Homo sapiens
  misc_RNA (1)...(19): siRNA sense strand
gacgggaccuggagacaag

SEQ ID NO: 18589 - RNA, 19 nt, Homo sapiens
  misc_RNA (1)...(19): siRNA sense strand
gagcagagaaauccauauc

SEQ ID NO: 18590 - RNA, 19 nt, Homo sapiens
  misc_RNA (1)...(19): siRNA sense strand
aaacaaaaguggaacauag

SEQ ID NO: 18591 - RNA, 19 nt, Homo sapiens
  misc_RNA (1)...(19): siRNA sense strand
acaauuacaccauuucaga

SEQ ID NO: 18592 - RNA, 19 nt, Homo sapiens
  misc_RNA (1)...(19): siRNA sense strand
gcuaugacaccugcuauga

SEQ ID NO: 18593 - RNA, 19 nt, Homo sapiens
  misc_RNA (1)...(19): siRNA sense strand
caacagcacaaagaaagaa

SEQ ID NO: 18594 - RNA, 19 nt, Homo sapiens
  misc_RNA (1)...(19): siRNA sense strand
ggugagaacugugagaaac

SEQ ID NO: 18595 - RNA, 19 nt, Homo sapiens
  misc_RNA (1)...(19): siRNA sense strand
ggaacuauaagaugugcaa

SEQ ID NO: 18596 - RNA, 19 nt, Homo sapiens
  misc_RNA (1)...(19): siRNA sense strand
gagauuguauagaauuggu

SEQ ID NO: 18597 - RNA, 19 nt, Homo sapiens
  misc_RNA (1)...(19): siRNA sense strand
gcuuugaaacuguuggaua

SEQ ID NO: 18598 - RNA, 19 nt, Homo sapiens
  misc_RNA (1)...(19): siRNA sense strand
ggaggaauauguaaaacug

SEQ ID NO: 18599 - RNA, 19 nt, Homo sapiens
  misc_RNA (1)...(19): siRNA sense strand
uuacaccauuucagagauu

SEQ ID NO: 18600 - RNA, 19 nt, Homo sapiens
  misc_RNA (1)...(19): siRNA sense strand
ggaaugaaaagcaacuaua

SEQ ID NO: 18601 - RNA, 19 nt, Homo sapiens
  misc_RNA (1)...(19): siRNA sense strand
uggaguaccugugaugcua

SEQ ID NO: 18602 - RNA, 19 nt, Homo sapiens
  misc_RNA (1)...(19): siRNA sense strand
gugaggaacuaaagaacuc

SEQ ID NO: 18603 - RNA, 19 nt, Homo sapiens
  misc_RNA (1)...(19): siRNA sense strand
guaggacaaguaauccaua

SEQ ID NO: 18604 - RNA, 19 nt, Homo sapiens
  misc_RNA (1)...(19): siRNA sense strand
cugcauugccagaaaguua

SEQ ID NO: 18605 - RNA, 19 nt, Homo sapiens
  misc_RNA (1)...(19): siRNA sense strand
caacuccauuuucuacaua

SEQ ID NO: 18606 - RNA, 19 nt, Homo sapiens
  misc_RNA (1)...(19): siRNA sense strand
ggagaagcgacaagaggaa

SEQ ID NO: 18607 - RNA, 19 nt, Homo sapiens
  misc_RNA (1)...(19): siRNA sense strand
ucacaacgaaagcuaaaga

SEQ ID NO: 18608 - RNA, 19 nt, Homo sapiens
  misc_RNA (1)...(19): siRNA sense strand
ucaacaaggcucauucuca

SEQ ID NO: 18609 - RNA, 19 nt, Homo sapiens
  misc_RNA (1)...(19): siRNA sense strand
acagauuucuacaaggauu

SEQ ID NO: 18610 - RNA, 19 nt, Homo sapiens
  misc_RNA (1)...(19): siRNA sense strand
caaccaugcauuccaucua

SEQ ID NO: 18611 - RNA, 19 nt, Homo sapiens
  misc_RNA (1)...(19): siRNA sense strand
acaggaagauggaaauacu

SEQ ID NO: 18612 - RNA, 19 nt, Homo sapiens
  misc_RNA (1)...(19): siRNA sense strand
aaacaggaagauggaaaua

SEQ ID NO: 18613 - RNA, 19 nt, Homo sapiens
  misc_RNA (1)...(19): siRNA sense strand
caucuaagcucugcaaaau

SEQ ID NO: 18614 - RNA, 19 nt, Homo sapiens
  misc_RNA (1)...(19): siRNA sense strand
aaaaugggaucaucaacaa

SEQ ID NO: 18615 - RNA, 19 nt, Homo sapiens
  misc_RNA (1)...(19): siRNA sense strand
gaagauggaaauacugcau

SEQ ID NO: 18616 - RNA, 19 nt, Homo sapiens
  misc_RNA (1)...(19): siRNA sense strand
gaagcaaacuguagaagga

SEQ ID NO: 18617 - RNA, 19 nt, Homo sapiens
  misc_RNA (1)...(19): siRNA sense strand
caacuucucugacaaggaa

SEQ ID NO: 18618 - RNA, 19 nt, Homo sapiens
  misc_RNA (1)...(19): siRNA sense strand
guacagguaugccuacuug

SEQ ID NO: 18619 - RNA, 19 nt, Homo sapiens
  misc_RNA (1)...(19): siRNA sense strand
aaacgauucucucauacua

SEQ ID NO: 18620 - RNA, 19 nt, Homo sapiens
  misc_RNA (1)...(19): siRNA sense strand
guaaaccgcagacuucuuu

SEQ ID NO: 18621 - RNA, 19 nt, Homo sapiens
  misc_RNA (1)...(19): siRNA sense strand
gaagucaagugcgauguga

SEQ ID NO: 18622 - RNA, 19 nt, Homo sapiens
  misc_RNA (1)...(19): siRNA sense strand
gaacuuggcaucaguaguc

SEQ ID NO: 18623 - RNA, 19 nt, Homo sapiens
  misc_RNA (1)...(19): siRNA sense strand
gaauacacccucguuauga

SEQ ID NO: 18624 - RNA, 19 nt, Homo sapiens
  misc_RNA (1)...(19): siRNA sense strand
gaagccucaugcuccauua

SEQ ID NO: 18625 - RNA, 19 nt, Homo sapiens
  misc_RNA (1)...(19): siRNA sense strand
guaggcaaaugcagaggua

SEQ ID NO: 18626 - RNA, 19 nt, Homo sapiens
  misc_RNA (1)...(19): siRNA sense strand
aacaagagcuuugcuaaga

SEQ ID NO: 18627 - RNA, 19 nt, Homo sapiens
  misc_RNA (1)...(19): siRNA sense strand
caaaggcaguguaacaauc

SEQ ID NO: 18628 - RNA, 19 nt, Homo sapiens
  misc_RNA (1)...(19): siRNA sense strand
gcaagucugguuucaguuu

SEQ ID NO: 18629 - RNA, 19 nt, Homo sapiens
  misc_RNA (1)...(19): siRNA sense strand
ggcaaacacuauauuagga

SEQ ID NO: 18630 - RNA, 19 nt, Homo sapiens
  misc_RNA (1)...(19): siRNA sense strand
ucaaagugaucgaggcaaa

SEQ ID NO: 18631 - RNA, 19 nt, Homo sapiens
  misc_RNA (1)...(19): siRNA sense strand
caaaugcagucaacaagag

SEQ ID NO: 18632 - RNA, 19 nt, Homo sapiens
  misc_RNA (1)...(19): siRNA sense strand
gcagacagaugcggagugu

SEQ ID NO: 18633 - RNA, 19 nt, Homo sapiens
  misc_RNA (1)...(19): siRNA sense strand
gaucgaggcaaacacuaua

SEQ ID NO: 18634 - RNA, 19 nt, Homo sapiens
  misc_RNA (1)...(19): siRNA sense strand
gcaagcaagucugguuuca

SEQ ID NO: 18635 - RNA, 19 nt, Homo sapiens
  misc_RNA (1)...(19): siRNA sense strand
accaaacgauucucucaua

SEQ ID NO: 18636 - RNA, 19 nt, Homo sapiens
  misc_RNA (1)...(19): siRNA sense strand
gaaccaaacgauucucuca

SEQ ID NO: 18637 - RNA, 19 nt, Homo sapiens
  misc_RNA (1)...(19): siRNA sense strand
cgaggcaaacacuauauua

SEQ ID NO: 18638 - RNA, 19 nt, Homo sapiens
  misc_RNA (1)...(19): siRNA sense strand
ggagcuauuucuucucugu

SEQ ID NO: 18639 - RNA, 19 nt, Homo sapiens
  misc_RNA (1)...(19): siRNA sense strand
caagacaaaggcaguguaa

SEQ ID NO: 18640 - RNA, 19 nt, Homo sapiens
  misc_RNA (1)...(19): siRNA sense strand
caacagaccaugcggaagu

SEQ ID NO: 18641 - RNA, 19 nt, Homo sapiens
  misc_RNA (1)...(19): siRNA sense strand
caacccagccaucaucaaa

SEQ ID NO: 18642 - RNA, 19 nt, Homo sapiens
  misc_RNA (1)...(19): siRNA sense strand
ccagugggauaaauuuguu

SEQ ID NO: 18643 - RNA, 19 nt, Homo sapiens
  misc_RNA (1)...(19): siRNA sense strand
aggcaaauacgaauucaua

SEQ ID NO: 18644 - RNA, 19 nt, Homo sapiens
  misc_RNA (1)...(19): siRNA sense strand
gaggagauuauacucuuaa

SEQ ID NO: 18645 - RNA, 19 nt, Homo sapiens
  misc_RNA (1)...(19): siRNA sense strand
gcaaacuguagaaggauuu

SEQ ID NO: 18646 - RNA, 19 nt, Homo sapiens
  misc_RNA (1)...(19): siRNA sense strand
gacugcaucuguccuguug

SEQ ID NO: 18647 - RNA, 19 nt, Homo sapiens
  misc_RNA (1)...(19): siRNA sense strand
ccagccaucaucaaaguua

SEQ ID NO: 18648 - RNA, 19 nt, Homo sapiens
  misc_RNA (1)...(19): siRNA sense strand
gagacgcugugcaguacaa

SEQ ID NO: 18649 - RNA, 19 nt, Homo sapiens
  misc_RNA (1)...(19): siRNA sense strand
agcaugaaauggaccaaua

SEQ ID NO: 18650 - RNA, 19 nt, Homo sapiens
  misc_RNA (1)...(19): siRNA sense strand
ugaaguagcacauuacaag

SEQ ID NO: 18651 - RNA, 19 nt, Homo sapiens
  misc_RNA (1)...(19): siRNA sense strand
auugugagcugucuaguug

SEQ ID NO: 18652 - RNA, 19 nt, Homo sapiens
  misc_RNA (1)...(19): siRNA sense strand
uggagucccuguccugaaa

SEQ ID NO: 18653 - RNA, 19 nt, Homo sapiens
  misc_RNA (1)...(19): siRNA sense strand
ccuacaauguggaaagcua

SEQ ID NO: 18654 - RNA, 19 nt, Homo sapiens
  misc_RNA (1)...(19): siRNA sense strand
ucaacaagagcuuugcuaa

SEQ ID NO: 18655 - RNA, 19 nt, Homo sapiens
  misc_RNA (1)...(19): siRNA sense strand
ggagagaggagauuauacu

SEQ ID NO: 18656 - RNA, 19 nt, Homo sapiens
  misc_RNA (1)...(19): siRNA sense strand
acgauucucucauacuaaa

SEQ ID NO: 18657 - RNA, 19 nt, Homo sapiens
  misc_RNA (1)...(19): siRNA sense strand
ggucaaaugcagucaacaa

SEQ ID NO: 18658 - RNA, 19 nt, Homo sapiens
  misc_RNA (1)...(19): siRNA sense strand
aagcaagucugguuucagu

SEQ ID NO: 18659 - RNA, 19 nt, Homo sapiens
  misc_RNA (1)...(19): siRNA sense strand
gaacgcaaugucacagaga

SEQ ID NO: 18660 - RNA, 19 nt, Homo sapiens
  misc_RNA (1)...(19): siRNA sense strand
ccacagauuuugccuauuc

SEQ ID NO: 18661 - RNA, 19 nt, Homo sapiens
  misc_RNA (1)...(19): siRNA sense strand
gaaacaagagggacaccau

SEQ ID NO: 18662 - RNA, 19 nt, Homo sapiens
  misc_RNA (1)...(19): siRNA sense strand
gggugugucuguaggcaaa

SEQ ID NO: 18663 - RNA, 19 nt, Homo sapiens
  misc_RNA (1)...(19): siRNA sense strand
gcagacuucuuugcaaugg

SEQ ID NO: 18664 - RNA, 19 nt, Homo sapiens
  misc_RNA (1)...(19): siRNA sense strand
ugaauacacccucguuaug

SEQ ID NO: 18665 - RNA, 19 nt, Homo sapiens
  misc_RNA (1)...(19): siRNA sense strand
agacaaaggcaguguaaca

SEQ ID NO: 18666 - RNA, 19 nt, Homo sapiens
  misc_RNA (1)...(19): siRNA sense strand
guacaacccagccaucauc

SEQ ID NO: 18667 - RNA, 19 nt, Homo sapiens
  misc_RNA (1)...(19): siRNA sense strand
guggagaccagucagauga

SEQ ID NO: 18668 - RNA, 19 nt, Homo sapiens
  misc_RNA (1)...(19): siRNA sense strand
gacaaaggcaguguaacaa

SEQ ID NO: 18669 - RNA, 19 nt, Homo sapiens
  misc_RNA (1)...(19): siRNA sense strand
gggagacgcugugcaguac

SEQ ID NO: 18670 - RNA, 19 nt, Homo sapiens
  misc_RNA (1)...(19): siRNA sense strand
aauacacccucguuaugaa

SEQ ID NO: 18671 - RNA, 19 nt, Homo sapiens
  misc_RNA (1)...(19): siRNA sense strand
ccagucagaugaagcaaac

SEQ ID NO: 18672 - RNA, 19 nt, Homo sapiens
  misc_RNA (1)...(19): siRNA sense strand
ccuggaauauuugaacuug

SEQ ID NO: 18673 - RNA, 19 nt, Homo sapiens
  misc_RNA (1)...(19): siRNA sense strand
gguggagccucuguaugaa

SEQ ID NO: 18674 - RNA, 19 nt, Homo sapiens
  misc_RNA (1)...(19): siRNA sense strand
caacaagagcuuugcuaag

SEQ ID NO: 18675 - RNA, 19 nt, Homo sapiens
  misc_RNA (1)...(19): siRNA sense strand
caaagaggccauggagaga

SEQ ID NO: 18676 - RNA, 19 nt, Homo sapiens
  misc_RNA (1)...(19): siRNA sense strand
gaaagcuacacgccacaga

SEQ ID NO: 18677 - RNA, 19 nt, Homo sapiens
  misc_RNA (1)...(19): siRNA sense strand
agacguaagacaagacaaa

SEQ ID NO: 18678 - RNA, 19 nt, Homo sapiens
  misc_RNA (1)...(19): siRNA sense strand
ggucaaauuggucuucaug

SEQ ID NO: 18679 - RNA, 19 nt, Homo sapiens
  misc_RNA (1)...(19): siRNA sense strand
uaaaauugguggugccauu

SEQ ID NO: 18680 - RNA, 19 nt, Homo sapiens
  misc_RNA (1)...(19): siRNA sense strand
ccaaacgauucucucauac

SEQ ID NO: 18681 - RNA, 19 nt, Homo sapiens
  misc_RNA (1)...(19): siRNA sense strand
gaggcaaacacuauauuag

SEQ ID NO: 18682 - RNA, 19 nt, Homo sapiens
  misc_RNA (1)...(19): siRNA sense strand
ccgcagacuucuuugcaau

SEQ ID NO: 18683 - RNA, 19 nt, Homo sapiens
  misc_RNA (1)...(19): siRNA sense strand
ucaaaugcagucaacaaga

SEQ ID NO: 18684 - RNA, 19 nt, Homo sapiens
  misc_RNA (1)...(19): siRNA sense strand
gaugggaaguggaauugcu

SEQ ID NO: 18685 - RNA, 19 nt, Homo sapiens
  misc_RNA (1)...(19): siRNA sense strand
cagccaucaucaaaguuaa

SEQ ID NO: 18686 - RNA, 19 nt, Homo sapiens
  misc_RNA (1)...(19): siRNA sense strand
ccaaggcaaauacgaauuc

SEQ ID NO: 18687 - RNA, 19 nt, Homo sapiens
  misc_RNA (1)...(19): siRNA sense strand
gcagucaacaagagcuuug

SEQ ID NO: 18688 - RNA, 19 nt, Homo sapiens
  misc_RNA (1)...(19): siRNA sense strand
gaagacguaagacaagaca

SEQ ID NO: 18689 - RNA, 19 nt, Homo sapiens
  misc_RNA (1)...(19): siRNA sense strand
ccacauuccuuugggucaa

SEQ ID NO: 18690 - RNA, 19 nt, Homo sapiens
  misc_RNA (1)...(19): siRNA sense strand
caaggcaaauacgaauuca

SEQ ID NO: 18691 - RNA, 19 nt, Homo sapiens
  misc_RNA (1)...(19): siRNA sense strand
gaugaagcaaacuguagaa

SEQ ID NO: 18692 - RNA, 19 nt, Homo sapiens
  misc_RNA (1)...(19): siRNA sense strand
caaacuguagaaggauuua

SEQ ID NO: 18693 - RNA, 19 nt, Homo sapiens
  misc_RNA (1)...(19): siRNA sense strand
gcacagugaggcagaacau

SEQ ID NO: 18694 - RNA, 19 nt, Homo sapiens
  misc_RNA (1)...(19): siRNA sense strand
gaagaaaagguacagguau

SEQ ID NO: 18695 - RNA, 19 nt, Homo sapiens
  misc_RNA (1)...(19): siRNA sense strand
ccacagacccaaggcaaau

SEQ ID NO: 18696 - RNA, 19 nt, Homo sapiens
  misc_RNA (1)...(19): siRNA sense strand
ggaagucaagugcgaugug

SEQ ID NO: 18697 - RNA, 19 nt, Homo sapiens
  misc_RNA (1)...(19): siRNA sense strand
ucaaauuggucuucaugcu

SEQ ID NO: 18698 - RNA, 19 nt, Homo sapiens
  misc_RNA (1)...(19): siRNA sense strand
uaagguggagccucuguau

SEQ ID NO: 18699 - RNA, 19 nt, Homo sapiens
  misc_RNA (1)...(19): siRNA sense strand
uaugaauacacccucguua

SEQ ID NO: 18700 - RNA, 19 nt, Homo sapiens
  misc_RNA (1)...(19): siRNA sense strand
uaggagaaccaaacgauuc

SEQ ID NO: 18701 - RNA, 19 nt, Homo sapiens
  misc_RNA (1)...(19): siRNA sense strand
ggagaccagucagaugaag

SEQ ID NO: 18702 - RNA, 19 nt, Homo sapiens
  misc_RNA (1)...(19): siRNA sense strand
guggagcuauuucuucucu

SEQ ID NO: 18703 - RNA, 19 nt, Homo sapiens
  misc_RNA (1)...(19): siRNA sense strand
acagugaggcagaacauga

SEQ ID NO: 18704 - RNA, 19 nt, Homo sapiens
  misc_RNA (1)...(19): siRNA sense strand
gauugugagcugucuaguu

SEQ ID NO: 18705 - RNA, 19 nt, Homo sapiens
  misc_RNA (1)...(19): siRNA sense strand
ccucuuggaccacauguga

SEQ ID NO: 18706 - RNA, 19 nt, Homo sapiens
  misc_RNA (1)...(19): siRNA sense strand
gaggugaaaggccacauuc

SEQ ID NO: 18707 - RNA, 19 nt, Homo sapiens
  misc_RNA (1)...(19): siRNA sense strand
ucagaugaagcaaacugua

SEQ ID NO: 18708 - RNA, 19 nt, Homo sapiens
  misc_RNA (1)...(19): siRNA sense strand
ugaugcccauugauuguga

SEQ ID NO: 18709 - RNA, 19 nt, Homo sapiens
  misc_RNA (1)...(19): siRNA sense strand
gagaucucuuccgugauuu

SEQ ID NO: 18710 - RNA, 19 nt, Homo sapiens
  misc_RNA (1)...(19): siRNA sense strand
gacccaaggcaaauacgaa

SEQ ID NO: 18711 - RNA, 19 nt, Homo sapiens
  misc_RNA (1)...(19): siRNA sense strand
cagacaggaagguguguaa

SEQ ID NO: 18712 - RNA, 19 nt, Homo sapiens
  misc_RNA (1)...(19): siRNA sense strand
ccugugaggucuccuaucg

SEQ ID NO: 18713 - RNA, 19 nt, Homo sapiens
  misc_RNA (1)...(19): siRNA sense strand
cauuacgaguuccuucaga

SEQ ID NO: 18714 - RNA, 19 nt, Homo sapiens
  misc_RNA (1)...(19): siRNA sense strand
gaggucuccuaucggaaga

SEQ ID NO: 18715 - RNA, 19 nt, Homo sapiens
  misc_RNA (1)...(19): siRNA sense strand
ccauggagagaggagauua

SEQ ID NO: 18716 - RNA, 19 nt, Homo sapiens
  misc_RNA (1)...(19): siRNA sense strand
gaaauaugcugcagaacuu

SEQ ID NO: 18717 - RNA, 19 nt, Homo sapiens
  misc_RNA (1)...(19): siRNA sense strand
aaucaaagcuuccuucaaa

SEQ ID NO: 18718 - RNA, 19 nt, Homo sapiens
  misc_RNA (1)...(19): siRNA sense strand
ggacaagguucagagcaua

SEQ ID NO: 18719 - RNA, 19 nt, Homo sapiens
  misc_RNA (1)...(19): siRNA sense strand
gcgagcagguguugaaauu

SEQ ID NO: 18720 - RNA, 19 nt, Homo sapiens
  misc_RNA (1)...(19): siRNA sense strand
ggauggcacuuacagauug

SEQ ID NO: 18721 - RNA, 19 nt, Homo sapiens
  misc_RNA (1)...(19): siRNA sense strand
aaagaaauaugcugcagaa

SEQ ID NO: 18722 - RNA, 19 nt, Homo sapiens
  misc_RNA (1)...(19): siRNA sense strand
caacaauggucaugcuuuc

SEQ ID NO: 18723 - RNA, 19 nt, Homo sapiens
  misc_RNA (1)...(19): siRNA sense strand
caaagcuuccuucaaauaa

SEQ ID NO: 18724 - RNA, 19 nt, Homo sapiens
  misc_RNA (1)...(19): siRNA sense strand
ucaaagcuuccuucaaaua

SEQ ID NO: 18725 - RNA, 19 nt, Homo sapiens
  misc_RNA (1)...(19): siRNA sense strand
ggacuggccguucuaggua

SEQ ID NO: 18726 - RNA, 19 nt, Homo sapiens
  misc_RNA (1)...(19): siRNA sense strand
gaaauuccguaaacuuaac

SEQ ID NO: 18727 - RNA, 19 nt, Homo sapiens
  misc_RNA (1)...(19): siRNA sense strand
ucagaaaguuguugaugug

SEQ ID NO: 18728 - RNA, 19 nt, Homo sapiens
  misc_RNA (1)...(19): siRNA sense strand
gggcaagagugcugacuuc

SEQ ID NO: 18729 - RNA, 19 nt, Homo sapiens
  misc_RNA (1)...(19): siRNA sense strand
gaccugagcacuggcauaa

SEQ ID NO: 18730 - RNA, 19 nt, Homo sapiens
  misc_RNA (1)...(19): siRNA sense strand
gcagcgagcagguguugaa

SEQ ID NO: 18731 - RNA, 19 nt, Homo sapiens
  misc_RNA (1)...(19): siRNA sense strand
gcacuuacagauugauuca

SEQ ID NO: 18732 - RNA, 19 nt, Homo sapiens
  misc_RNA (1)...(19): siRNA sense strand
acagauugauucaguuuca

SEQ ID NO: 18733 - RNA, 19 nt, Homo sapiens
  misc_RNA (1)...(19): siRNA sense strand
ugacuucacuaacuucgau

SEQ ID NO: 18734 - RNA, 19 nt, Homo sapiens
  misc_RNA (1)...(19): siRNA sense strand
gugcugacuucacuaacuu

SEQ ID NO: 18735 - RNA, 19 nt, Homo sapiens
  misc_RNA (1)...(19): siRNA sense strand
gauggcacuuacagauuga

SEQ ID NO: 18736 - RNA, 19 nt, Homo sapiens
  misc_RNA (1)...(19): siRNA sense strand
gcacuggcauaaggacuuc

SEQ ID NO: 18737 - RNA, 19 nt, Homo sapiens
  misc_RNA (1)...(19): siRNA sense strand
cagagcauacuguggauaa

SEQ ID NO: 18738 - RNA, 19 nt, Homo sapiens
  misc_RNA (1)...(19): siRNA sense strand
gagcagguguugaaauucc

SEQ ID NO: 18739 - RNA, 19 nt, Homo sapiens
  misc_RNA (1)...(19): siRNA sense strand
cauaaggacuuccccauug

SEQ ID NO: 18740 - RNA, 19 nt, Homo sapiens
  misc_RNA (1)...(19): siRNA sense strand
gaaugugugaccuggauug

SEQ ID NO: 18741 - RNA, 19 nt, Homo sapiens
  misc_RNA (1)...(19): siRNA sense strand
cugcagaacuucacuuggu

SEQ ID NO: 18742 - RNA, 19 nt, Homo sapiens
  misc_RNA (1)...(19): siRNA sense strand
ugaugacucucaggacaaa

SEQ ID NO: 18743 - RNA, 19 nt, Homo sapiens
  misc_RNA (1)...(19): siRNA sense strand
ugauucaguuucacuuuca

SEQ ID NO: 18744 - RNA, 19 nt, Homo sapiens
  misc_RNA (1)...(19): siRNA sense strand
ggaccugagcacuggcaua

SEQ ID NO: 18745 - RNA, 19 nt, Homo sapiens
  misc_RNA (1)...(19): siRNA sense strand
guugacaucgacacucaua

SEQ ID NO: 18746 - RNA, 19 nt, Homo sapiens
  misc_RNA (1)...(19): siRNA sense strand
uccguaaacuuaacuucaa

SEQ ID NO: 18747 - RNA, 19 nt, Homo sapiens
  misc_RNA (1)...(19): siRNA sense strand
gaagguuggcagcgcuaaa

SEQ ID NO: 18748 - RNA, 19 nt, Homo sapiens
  misc_RNA (1)...(19): siRNA sense strand
ucaacaauggucaugcuuu

SEQ ID NO: 18749 - RNA, 19 nt, Homo sapiens
  misc_RNA (1)...(19): siRNA sense strand
caaaucaaagcuuccuuca

SEQ ID NO: 18750 - RNA, 19 nt, Homo sapiens
  misc_RNA (1)...(19): siRNA sense strand
ugaccuggauugugcucaa

SEQ ID NO: 18751 - RNA, 19 nt, Homo sapiens
  misc_RNA (1)...(19): siRNA sense strand
ucacuggaacaccaaauau

SEQ ID NO: 18752 - RNA, 19 nt, Homo sapiens
  misc_RNA (1)...(19): siRNA sense strand
acacucauacagccaagua

SEQ ID NO: 18753 - RNA, 19 nt, Homo sapiens
  misc_RNA (1)...(19): siRNA sense strand
ccugagcacuggcauaagg

SEQ ID NO: 18754 - RNA, 19 nt, Homo sapiens
  misc_RNA (1)...(19): siRNA sense strand
guugaaauuccguaaacuu

SEQ ID NO: 18755 - RNA, 19 nt, Homo sapiens
  misc_RNA (1)...(19): siRNA sense strand
ugacaucgacacucauaca

SEQ ID NO: 18756 - RNA, 19 nt, Homo sapiens
  misc_RNA (1)...(19): siRNA sense strand
agaaauaugcugcagaacu

SEQ ID NO: 18757 - RNA, 19 nt, Homo sapiens
  misc_RNA (1)...(19): siRNA sense strand
gaacugaugguggacaacu

SEQ ID NO: 18758 - RNA, 19 nt, Homo sapiens
  misc_RNA (1)...(19): siRNA sense strand
guguugaaauuccguaaac

SEQ ID NO: 18759 - RNA, 19 nt, Homo sapiens
  misc_RNA (1)...(19): siRNA sense strand
uggaaugugugaccuggau

SEQ ID NO: 18760 - RNA, 19 nt, Homo sapiens
  misc_RNA (1)...(19): siRNA sense strand
gacuggccguucuagguau

SEQ ID NO: 18761 - RNA, 19 nt, Homo sapiens
  misc_RNA (1)...(19): siRNA sense strand
uucagaaaguuguugaugu

SEQ ID NO: 18762 - RNA, 19 nt, Homo sapiens
  misc_RNA (1)...(19): siRNA sense strand
caacuucccugaggauccu

SEQ ID NO: 18763 - RNA, 19 nt, Homo sapiens
  misc_RNA (1)...(19): siRNA sense strand
aagaacugaugguggacaa

SEQ ID NO: 18764 - RNA, 19 nt, Homo sapiens
  misc_RNA (1)...(19): siRNA sense strand
ugcagaacuucacuugguu

SEQ ID NO: 18765 - RNA, 19 nt, Homo sapiens
  misc_RNA (1)...(19): siRNA sense strand
acaauggucaugcuuucaa

SEQ ID NO: 18766 - RNA, 19 nt, Homo sapiens
  misc_RNA (1)...(19): siRNA sense strand
cccugucuguuuccuauga

SEQ ID NO: 18767 - RNA, 19 nt, Homo sapiens
  misc_RNA (1)...(19): siRNA sense strand
guaaacuuaacuucaaugg

SEQ ID NO: 18768 - RNA, 19 nt, Homo sapiens
  misc_RNA (1)...(19): siRNA sense strand
ccguaaacuuaacuucaau

SEQ ID NO: 18769 - RNA, 19 nt, Homo sapiens
  misc_RNA (1)...(19): siRNA sense strand
ccuaugaucaagcaacuuc

SEQ ID NO: 18770 - RNA, 19 nt, Homo sapiens
  misc_RNA (1)...(19): siRNA sense strand
acuuacagauugauucagu

SEQ ID NO: 18771 - RNA, 19 nt, Homo sapiens
  misc_RNA (1)...(19): siRNA sense strand
gguguugaaauuccguaaa

SEQ ID NO: 18772 - RNA, 19 nt, Homo sapiens
  misc_RNA (1)...(19): siRNA sense strand
uggacaagguucagagcau

SEQ ID NO: 18773 - RNA, 19 nt, Homo sapiens
  misc_RNA (1)...(19): siRNA sense strand
caacguggaguuugaugac

SEQ ID NO: 18774 - RNA, 19 nt, Homo sapiens
  misc_RNA (1)...(19): siRNA sense strand
ggaaugugugaccuggauu

SEQ ID NO: 18775 - RNA, 19 nt, Homo sapiens
  misc_RNA (1)...(19): siRNA sense strand
agagcauacuguggauaaa

SEQ ID NO: 18776 - RNA, 19 nt, Homo sapiens
  misc_RNA (1)...(19): siRNA sense strand
uugauucaguuucacuuuc

SEQ ID NO: 18777 - RNA, 19 nt, Homo sapiens
  misc_RNA (1)...(19): siRNA sense strand
uggauggcacuuacagauu

SEQ ID NO: 18778 - RNA, 19 nt, Homo sapiens
  misc_RNA (1)...(19): siRNA sense strand
gcauaaggacuuccccauu

SEQ ID NO: 18779 - RNA, 19 nt, Homo sapiens
  misc_RNA (1)...(19): siRNA sense strand
aguaugacccuucccugaa

SEQ ID NO: 18780 - RNA, 19 nt, Homo sapiens
  misc_RNA (1)...(19): siRNA sense strand
ggguucacuugauggacaa

SEQ ID NO: 18781 - RNA, 19 nt, Homo sapiens
  misc_RNA (1)...(19): siRNA sense strand
cagcagcgagcagguguug

SEQ ID NO: 18782 - RNA, 19 nt, Homo sapiens
  misc_RNA (1)...(19): siRNA sense strand
ccucaacaauggucaugcu

SEQ ID NO: 18783 - RNA, 19 nt, Homo sapiens
  misc_RNA (1)...(19): siRNA sense strand
caauggucaugcuuucaac

SEQ ID NO: 18784 - RNA, 19 nt, Homo sapiens
  misc_RNA (1)...(19): siRNA sense strand
gcaaauaccuccucuacga

SEQ ID NO: 18785 - RNA, 19 nt, Homo sapiens
  misc_RNA (1)...(19): siRNA sense strand
ggacugaucuccucuacaa

SEQ ID NO: 18786 - RNA, 19 nt, Homo sapiens
  misc_RNA (1)...(19): siRNA sense strand
gaagaugaguuccaaauca

SEQ ID NO: 18787 - RNA, 19 nt, Homo sapiens
  misc_RNA (1)...(19): siRNA sense strand
ggcaagaaauguccucaua

SEQ ID NO: 18788 - RNA, 19 nt, Homo sapiens
  misc_RNA (1)...(19): siRNA sense strand
ggaacaacgugcugcgaua

SEQ ID NO: 18789 - RNA, 19 nt, Homo sapiens
  misc_RNA (1)...(19): siRNA sense strand
gcacagcccuggacaucaa

SEQ ID NO: 18790 - RNA, 19 nt, Homo sapiens
  misc_RNA (1)...(19): siRNA sense strand
gaaccauacuucauuggaa

SEQ ID NO: 18791 - RNA, 19 nt, Homo sapiens
  misc_RNA (1)...(19): siRNA sense strand
gagagggccugcauugauu

SEQ ID NO: 18792 - RNA, 19 nt, Homo sapiens
  misc_RNA (1)...(19): siRNA sense strand
ggaacgaggucauguacga

SEQ ID NO: 18793 - RNA, 19 nt, Homo sapiens
  misc_RNA (1)...(19): siRNA sense strand
ugacugaguuugggaauaa

SEQ ID NO: 18794 - RNA, 19 nt, Homo sapiens
  misc_RNA (1)...(19): siRNA sense strand
gaagaaguaugaauuccau

SEQ ID NO: 18795 - RNA, 19 nt, Homo sapiens
  misc_RNA (1)...(19): siRNA sense strand
gaaagauugucgaggcaaa

SEQ ID NO: 18796 - RNA, 19 nt, Homo sapiens
  misc_RNA (1)...(19): siRNA sense strand
ggaugcagguguuugguaa

SEQ ID NO: 18797 - RNA, 19 nt, Homo sapiens
  misc_RNA (1)...(19): siRNA sense strand
ccacaaaggcuccuacuug

SEQ ID NO: 18798 - RNA, 19 nt, Homo sapiens
  misc_RNA (1)...(19): siRNA sense strand
gaaacuugcccuacagaaa

SEQ ID NO: 18799 - RNA, 19 nt, Homo sapiens
  misc_RNA (1)...(19): siRNA sense strand
gaacuacacccuccugaau

SEQ ID NO: 18800 - RNA, 19 nt, Homo sapiens
  misc_RNA (1)...(19): siRNA sense strand
gcggucggauucauuauaa

SEQ ID NO: 18801 - RNA, 19 nt, Homo sapiens
  misc_RNA (1)...(19): siRNA sense strand
gggcuucuguugcuuauga

SEQ ID NO: 18802 - RNA, 19 nt, Homo sapiens
  misc_RNA (1)...(19): siRNA sense strand
cacaaaggcuccuacuuga

SEQ ID NO: 18803 - RNA, 19 nt, Homo sapiens
  misc_RNA (1)...(19): siRNA sense strand
cgaauggccucccuuugaa

SEQ ID NO: 18804 - RNA, 19 nt, Homo sapiens
  misc_RNA (1)...(19): siRNA sense strand
ccaccaacuucgauacuuu

SEQ ID NO: 18805 - RNA, 19 nt, Homo sapiens
  misc_RNA (1)...(19): siRNA sense strand
acaagaugauggaggaaua

SEQ ID NO: 18806 - RNA, 19 nt, Homo sapiens
  misc_RNA (1)...(19): siRNA sense strand
gaaaagacaucaacacgau

SEQ ID NO: 18807 - RNA, 19 nt, Homo sapiens
  misc_RNA (1)...(19): siRNA sense strand
ggagaaccaccauaaagaa

SEQ ID NO: 18808 - RNA, 19 nt, Homo sapiens
  misc_RNA (1)...(19): siRNA sense strand
ugaaagagcaacagaagaa

SEQ ID NO: 18809 - RNA, 19 nt, Homo sapiens
  misc_RNA (1)...(19): siRNA sense strand
gcagagaaccagaggagaa

SEQ ID NO: 18810 - RNA, 19 nt, Homo sapiens
  misc_RNA (1)...(19): siRNA sense strand
ccaaaucacugagcacaau

SEQ ID NO: 18811 - RNA, 19 nt, Homo sapiens
  misc_RNA (1)...(19): siRNA sense strand
caagaaauguccucauagg

SEQ ID NO: 18812 - RNA, 19 nt, Homo sapiens
  misc_RNA (1)...(19): siRNA sense strand
ccaaggagguggcagaagu

SEQ ID NO: 18813 - RNA, 19 nt, Homo sapiens
  misc_RNA (1)...(19): siRNA sense strand
ggacagugaugaagaugag

SEQ ID NO: 18814 - RNA, 19 nt, Homo sapiens
  misc_RNA (1)...(19): siRNA sense strand
ggaaugucauggacuuugu

SEQ ID NO: 18815 - RNA, 19 nt, Homo sapiens
  misc_RNA (1)...(19): siRNA sense strand
ggaauauucucgacuucau

SEQ ID NO: 18816 - RNA, 19 nt, Homo sapiens
  misc_RNA (1)...(19): siRNA sense strand
guuacgagcccucagguua

SEQ ID NO: 18817 - RNA, 19 nt, Homo sapiens
  misc_RNA (1)...(19): siRNA sense strand
gcagaggcaucccuuugau

SEQ ID NO: 18818 - RNA, 19 nt, Homo sapiens
  misc_RNA (1)...(19): siRNA sense strand
caggagauguuccagaaga

SEQ ID NO: 18819 - RNA, 19 nt, Homo sapiens
  misc_RNA (1)...(19): siRNA sense strand
gcacugacgaguccaaaga

SEQ ID NO: 18820 - RNA, 19 nt, Homo sapiens
  misc_RNA (1)...(19): siRNA sense strand
aaagacaucaacacgauua

SEQ ID NO: 18821 - RNA, 19 nt, Homo sapiens
  misc_RNA (1)...(19): siRNA sense strand
gcagaucggccuccuccua

SEQ ID NO: 18822 - RNA, 19 nt, Homo sapiens
  misc_RNA (1)...(19): siRNA sense strand
ggacagaccugagcaugac

SEQ ID NO: 18823 - RNA, 19 nt, Homo sapiens
  misc_RNA (1)...(19): siRNA sense strand
ucacugagcacaauaacuu

SEQ ID NO: 18824 - RNA, 19 nt, Homo sapiens
  misc_RNA (1)...(19): siRNA sense strand
gaauauucucgacuucaua

SEQ ID NO: 18825 - RNA, 19 nt, Homo sapiens
  misc_RNA (1)...(19): siRNA sense strand
gaacaucuucgacuuugug

SEQ ID NO: 18826 - RNA, 19 nt, Homo sapiens
  misc_RNA (1)...(19): siRNA sense strand
gagaaccaccauaaagaaa

SEQ ID NO: 18827 - RNA, 19 nt, Homo sapiens
  misc_RNA (1)...(19): siRNA sense strand
gggaaaccgugugauaaga

SEQ ID NO: 18828 - RNA, 19 nt, Homo sapiens
  misc_RNA (1)...(19): siRNA sense strand
ugaauuccauuacgacaau

SEQ ID NO: 18829 - RNA, 19 nt, Homo sapiens
  misc_RNA (1)...(19): siRNA sense strand
gagcagaggcaucccuuug

SEQ ID NO: 18830 - RNA, 19 nt, Homo sapiens
  misc_RNA (1)...(19): siRNA sense strand
ggaccgcuaugcccaggaa

SEQ ID NO: 18831 - RNA, 19 nt, Homo sapiens
  misc_RNA (1)...(19): siRNA sense strand
ccacagguccucaagcauu

SEQ ID NO: 18832 - RNA, 19 nt, Homo sapiens
  misc_RNA (1)...(19): siRNA sense strand
uuucgaggcuggaauuaaa

SEQ ID NO: 18833 - RNA, 19 nt, Homo sapiens
  misc_RNA (1)...(19): siRNA sense strand
ggaaaccgugugauaagaa

SEQ ID NO: 18834 - RNA, 19 nt, Homo sapiens
  misc_RNA (1)...(19): siRNA sense strand
ggaauaacuucaucaaccu

SEQ ID NO: 18835 - RNA, 19 nt, Homo sapiens
  misc_RNA (1)...(19): siRNA sense strand
gggaggcccuguauaacga

SEQ ID NO: 18836 - RNA, 19 nt, Homo sapiens
  misc_RNA (1)...(19): siRNA sense strand
caucugggcugucauaaaa

SEQ ID NO: 18837 - RNA, 19 nt, Homo sapiens
  misc_RNA (1)...(19): siRNA sense strand
aggaauggcuggaauguca

SEQ ID NO: 18838 - RNA, 19 nt, Homo sapiens
  misc_RNA (1)...(19): siRNA sense strand
cagaggauauugacaacau

SEQ ID NO: 18839 - RNA, 19 nt, Homo sapiens
  misc_RNA (1)...(19): siRNA sense strand
agaacugccucacgguuaa

SEQ ID NO: 18840 - RNA, 19 nt, Homo sapiens
  misc_RNA (1)...(19): siRNA sense strand
guccugaagucgaucauga

SEQ ID NO: 18841 - RNA, 19 nt, Homo sapiens
  misc_RNA (1)...(19): siRNA sense strand
gaucuacgcagccaugaug

SEQ ID NO: 18842 - RNA, 19 nt, Homo sapiens
  misc_RNA (1)...(19): siRNA sense strand
cccaggagcucaccaagga

SEQ ID NO: 18843 - RNA, 19 nt, Homo sapiens
  misc_RNA (1)...(19): siRNA sense strand
guacugggcaucucucaga

SEQ ID NO: 18844 - RNA, 19 nt, Homo sapiens
  misc_RNA (1)...(19): siRNA sense strand
gaagacaacguggugagaa

SEQ ID NO: 18845 - RNA, 19 nt, Homo sapiens
  misc_RNA (1)...(19): siRNA sense strand
gaucggccuccuccuauuu

SEQ ID NO: 18846 - RNA, 19 nt, Homo sapiens
  misc_RNA (1)...(19): siRNA sense strand
gcagcgaaccagaaacuug

SEQ ID NO: 18847 - RNA, 19 nt, Homo sapiens
  misc_RNA (1)...(19): siRNA sense strand
gcuggaaugucauggacuu

SEQ ID NO: 18848 - RNA, 19 nt, Homo sapiens
  misc_RNA (1)...(19): siRNA sense strand
ccgaauggccucccuuuga

SEQ ID NO: 18849 - RNA, 19 nt, Homo sapiens
  misc_RNA (1)...(19): siRNA sense strand
ggacgaggacagugaugaa

SEQ ID NO: 18850 - RNA, 19 nt, Homo sapiens
  misc_RNA (1)...(19): siRNA sense strand
cagaacugccucacgguua

SEQ ID NO: 18851 - RNA, 19 nt, Homo sapiens
  misc_RNA (1)...(19): siRNA sense strand
gggaguggaagaaguauga

SEQ ID NO: 18852 - RNA, 19 nt, Homo sapiens
  misc_RNA (1)...(19): siRNA sense strand
ggucaucugggcugucaua

SEQ ID NO: 18853 - RNA, 19 nt, Homo sapiens
  misc_RNA (1)...(19): siRNA sense strand
ugucuggaaucccaaguuu

SEQ ID NO: 18854 - RNA, 19 nt, Homo sapiens
  misc_RNA (1)...(19): siRNA sense strand
gcacauggaguccggaaca

SEQ ID NO: 18855 - RNA, 19 nt, Homo sapiens
  misc_RNA (1)...(19): siRNA sense strand
cuucaucuaugccaucauu

SEQ ID NO: 18856 - RNA, 19 nt, Homo sapiens
  misc_RNA (1)...(19): siRNA sense strand
ugacgaguccaaagaguuu

SEQ ID NO: 18857 - RNA, 19 nt, Homo sapiens
  misc_RNA (1)...(19): siRNA sense strand
gcgauacuuugacuacguu

SEQ ID NO: 18858 - RNA, 19 nt, Homo sapiens
  misc_RNA (1)...(19): siRNA sense strand
gaucuccucuacaauagca

SEQ ID NO: 18859 - RNA, 19 nt, Homo sapiens
  misc_RNA (1)...(19): siRNA sense strand
acagaaccauacuucauug

SEQ ID NO: 18860 - RNA, 19 nt, Homo sapiens
  misc_RNA (1)...(19): siRNA sense strand
ugacaacaccguccacuuc

SEQ ID NO: 18861 - RNA, 19 nt, Homo sapiens
  misc_RNA (1)...(19): siRNA sense strand
gcucguuucugaugcugaa

SEQ ID NO: 18862 - RNA, 19 nt, Homo sapiens
  misc_RNA (1)...(19): siRNA sense strand
gcaucagggugccuacuuc

SEQ ID NO: 18863 - RNA, 19 nt, Homo sapiens
  misc_RNA (1)...(19): siRNA sense strand
gcaacaacaacaccaacaa

SEQ ID NO: 18864 - RNA, 19 nt, Homo sapiens
  misc_RNA (1)...(19): siRNA sense strand
gccgggaggcccuguauaa

SEQ ID NO: 18865 - RNA, 19 nt, Homo sapiens
  misc_RNA (1)...(19): siRNA sense strand
ggacuccucccaccaacuu

SEQ ID NO: 18866 - RNA, 19 nt, Homo sapiens
  misc_RNA (1)...(19): siRNA sense strand
ggaacugguuguacuucau

SEQ ID NO: 18867 - RNA, 19 nt, Homo sapiens
  misc_RNA (1)...(19): siRNA sense strand
gcaaucauaggguuagaau

SEQ ID NO: 18868 - RNA, 19 nt, Homo sapiens
  misc_RNA (1)...(19): siRNA sense strand
ccaaugggaccaaauguca

SEQ ID NO: 18869 - RNA, 19 nt, Homo sapiens
  misc_RNA (1)...(19): siRNA sense strand
cccaggagauguuccagaa

SEQ ID NO: 18870 - RNA, 19 nt, Homo sapiens
  misc_RNA (1)...(19): siRNA sense strand
gcaagaaauguccucauag

SEQ ID NO: 18871 - RNA, 19 nt, Homo sapiens
  misc_RNA (1)...(19): siRNA sense strand
gaaaccgugugauaagaac

SEQ ID NO: 18872 - RNA, 19 nt, Homo sapiens
  misc_RNA (1)...(19): siRNA sense strand
ggaauacagccuggagaaa

SEQ ID NO: 18873 - RNA, 19 nt, Homo sapiens
  misc_RNA (1)...(19): siRNA sense strand
gacaucaacacgauuaaau

SEQ ID NO: 18874 - RNA, 19 nt, Homo sapiens
  misc_RNA (1)...(19): siRNA sense strand
cgugaccucuggaauauuc

SEQ ID NO: 18875 - RNA, 19 nt, Homo sapiens
  misc_RNA (1)...(19): siRNA sense strand
gaagaaggaggaggaggaa

SEQ ID NO: 18876 - RNA, 19 nt, Homo sapiens
  misc_RNA (1)...(19): siRNA sense strand
ccaguuuaauuucgaugaa

SEQ ID NO: 18877 - RNA, 19 nt, Homo sapiens
  misc_RNA (1)...(19): siRNA sense strand
caagacagauuugcucaac

SEQ ID NO: 18878 - RNA, 19 nt, Homo sapiens
  misc_RNA (1)...(19): siRNA sense strand
cagcuaagacugccaggaa

SEQ ID NO: 18879 - RNA, 19 nt, Homo sapiens
  misc_RNA (1)...(19): siRNA sense strand
cccgacgccuggacgauua

SEQ ID NO: 18880 - RNA, 19 nt, Homo sapiens
  misc_RNA (1)...(19): siRNA sense strand
gcgggaaaccgugugauaa

SEQ ID NO: 18881 - RNA, 19 nt, Homo sapiens
  misc_RNA (1)...(19): siRNA sense strand
cgaggacagugaugaagau

SEQ ID NO: 18882 - RNA, 19 nt, Homo sapiens
  misc_RNA (1)...(19): siRNA sense strand
gaaugugugcugaaaguca

SEQ ID NO: 18883 - RNA, 19 nt, Homo sapiens
  misc_RNA (1)...(19): siRNA sense strand
gagauggugaucaagauga

SEQ ID NO: 18884 - RNA, 19 nt, Homo sapiens
  misc_RNA (1)...(19): siRNA sense strand
gcaaauaccuccucuacga

SEQ ID NO: 18885 - RNA, 19 nt, Homo sapiens
  misc_RNA (1)...(19): siRNA sense strand
ggacugaucuccucuacaa

SEQ ID NO: 18886 - RNA, 19 nt, Homo sapiens
  misc_RNA (1)...(19): siRNA sense strand
gaagaugaguuccaaauca

SEQ ID NO: 18887 - RNA, 19 nt, Homo sapiens
  misc_RNA (1)...(19): siRNA sense strand
ggcaagaaauguccucaua

SEQ ID NO: 18888 - RNA, 19 nt, Homo sapiens
  misc_RNA (1)...(19): siRNA sense strand
ggaacaacgugcugcgaua

SEQ ID NO: 18889 - RNA, 19 nt, Homo sapiens
  misc_RNA (1)...(19): siRNA sense strand
gcacagcccuggacaucaa

SEQ ID NO: 18890 - RNA, 19 nt, Homo sapiens
  misc_RNA (1)...(19): siRNA sense strand
gaaccauacuucauuggaa

SEQ ID NO: 18891 - RNA, 19 nt, Homo sapiens
  misc_RNA (1)...(19): siRNA sense strand
gagagggccugcauugauu

SEQ ID NO: 18892 - RNA, 19 nt, Homo sapiens
  misc_RNA (1)...(19): siRNA sense strand
ggaacgaggucauguacga

SEQ ID NO: 18893 - RNA, 19 nt, Homo sapiens
  misc_RNA (1)...(19): siRNA sense strand
ugacugaguuugggaauaa

SEQ ID NO: 18894 - RNA, 19 nt, Homo sapiens
  misc_RNA (1)...(19): siRNA sense strand
gaagaaguaugaauuccau

SEQ ID NO: 18895 - RNA, 19 nt, Homo sapiens
  misc_RNA (1)...(19): siRNA sense strand
gaaagauugucgaggcaaa

SEQ ID NO: 18896 - RNA, 19 nt, Homo sapiens
  misc_RNA (1)...(19): siRNA sense strand
ggaugcagguguuugguaa

SEQ ID NO: 18897 - RNA, 19 nt, Homo sapiens
  misc_RNA (1)...(19): siRNA sense strand
ccacaaaggcuccuacuug

SEQ ID NO: 18898 - RNA, 19 nt, Homo sapiens
  misc_RNA (1)...(19): siRNA sense strand
gaaacuugcccuacagaaa

SEQ ID NO: 18899 - RNA, 19 nt, Homo sapiens
  misc_RNA (1)...(19): siRNA sense strand
gaacuacacccuccugaau

SEQ ID NO: 18900 - RNA, 19 nt, Homo sapiens
  misc_RNA (1)...(19): siRNA sense strand
gcggucggauucauuauaa

SEQ ID NO: 18901 - RNA, 19 nt, Homo sapiens
  misc_RNA (1)...(19): siRNA sense strand
gggcuucuguugcuuauga

SEQ ID NO: 18902 - RNA, 19 nt, Homo sapiens
  misc_RNA (1)...(19): siRNA sense strand
cacaaaggcuccuacuuga

SEQ ID NO: 18903 - RNA, 19 nt, Homo sapiens
  misc_RNA (1)...(19): siRNA sense strand
cgaauggccucccuuugaa

SEQ ID NO: 18904 - RNA, 19 nt, Homo sapiens
  misc_RNA (1)...(19): siRNA sense strand
ggaauaaccucaguaccau

SEQ ID NO: 18905 - RNA, 19 nt, Homo sapiens
  misc_RNA (1)...(19): siRNA sense strand
ccaccaacuucgauacuuu

SEQ ID NO: 18906 - RNA, 19 nt, Homo sapiens
  misc_RNA (1)...(19): siRNA sense strand
acaagaugauggaggaaua

SEQ ID NO: 18907 - RNA, 19 nt, Homo sapiens
  misc_RNA (1)...(19): siRNA sense strand
gaaaagacaucaacacgau

SEQ ID NO: 18908 - RNA, 19 nt, Homo sapiens
  misc_RNA (1)...(19): siRNA sense strand
ggagaaccaccauaaagaa

SEQ ID NO: 18909 - RNA, 19 nt, Homo sapiens
  misc_RNA (1)...(19): siRNA sense strand
ugaaagagcaacagaagaa

SEQ ID NO: 18910 - RNA, 19 nt, Homo sapiens
  misc_RNA (1)...(19): siRNA sense strand
gcagagaaccagaggagaa

SEQ ID NO: 18911 - RNA, 19 nt, Homo sapiens
  misc_RNA (1)...(19): siRNA sense strand
ccaaaucacugagcacaau

SEQ ID NO: 18912 - RNA, 19 nt, Homo sapiens
  misc_RNA (1)...(19): siRNA sense strand
caagaaauguccucauagg

SEQ ID NO: 18913 - RNA, 19 nt, Homo sapiens
  misc_RNA (1)...(19): siRNA sense strand
ccaaggagguggcagaagu

SEQ ID NO: 18914 - RNA, 19 nt, Homo sapiens
  misc_RNA (1)...(19): siRNA sense strand
ggacagugaugaagaugag

SEQ ID NO: 18915 - RNA, 19 nt, Homo sapiens
  misc_RNA (1)...(19): siRNA sense strand
ggaaugucauggacuuugu

SEQ ID NO: 18916 - RNA, 19 nt, Homo sapiens
  misc_RNA (1)...(19): siRNA sense strand
ggaauauucucgacuucau

SEQ ID NO: 18917 - RNA, 19 nt, Homo sapiens
  misc_RNA (1)...(19): siRNA sense strand
guuacgagcccucagguua

SEQ ID NO: 18918 - RNA, 19 nt, Homo sapiens
  misc_RNA (1)...(19): siRNA sense strand
gcagaggcaucccuuugau

SEQ ID NO: 18919 - RNA, 19 nt, Homo sapiens
  misc_RNA (1)...(19): siRNA sense strand
caggagauguuccagaaga

SEQ ID NO: 18920 - RNA, 19 nt, Homo sapiens
  misc_RNA (1)...(19): siRNA sense strand
gcacugacgaguccaaaga

SEQ ID NO: 18921 - RNA, 19 nt, Homo sapiens
  misc_RNA (1)...(19): siRNA sense strand
aaagacaucaacacgauua

SEQ ID NO: 18922 - RNA, 19 nt, Homo sapiens
  misc_RNA (1)...(19): siRNA sense strand
gcagaucggccuccuccua

SEQ ID NO: 18923 - RNA, 19 nt, Homo sapiens
  misc_RNA (1)...(19): siRNA sense strand
ggacagaccugagcaugac

SEQ ID NO: 18924 - RNA, 19 nt, Homo sapiens
  misc_RNA (1)...(19): siRNA sense strand
ucacugagcacaauaacuu

SEQ ID NO: 18925 - RNA, 19 nt, Homo sapiens
  misc_RNA (1)...(19): siRNA sense strand
gaauauucucgacuucaua

SEQ ID NO: 18926 - RNA, 19 nt, Homo sapiens
  misc_RNA (1)...(19): siRNA sense strand
gaacaucuucgacuuugug

SEQ ID NO: 18927 - RNA, 19 nt, Homo sapiens
  misc_RNA (1)...(19): siRNA sense strand
gagaaccaccauaaagaaa

SEQ ID NO: 18928 - RNA, 19 nt, Homo sapiens
  misc_RNA (1)...(19): siRNA sense strand
gggaaaccgugugauaaga

SEQ ID NO: 18929 - RNA, 19 nt, Homo sapiens
  misc_RNA (1)...(19): siRNA sense strand
ugaauuccauuacgacaau

SEQ ID NO: 18930 - RNA, 19 nt, Homo sapiens
  misc_RNA (1)...(19): siRNA sense strand
gagcagaggcaucccuuug

SEQ ID NO: 18931 - RNA, 19 nt, Homo sapiens
  misc_RNA (1)...(19): siRNA sense strand
ggaccgcuaugcccaggaa

SEQ ID NO: 18932 - RNA, 19 nt, Homo sapiens
  misc_RNA (1)...(19): siRNA sense strand
ccacagguccucaagcauu

SEQ ID NO: 18933 - RNA, 19 nt, Homo sapiens
  misc_RNA (1)...(19): siRNA sense strand
uuucgaggcuggaauuaaa

SEQ ID NO: 18934 - RNA, 19 nt, Homo sapiens
  misc_RNA (1)...(19): siRNA sense strand
ggaaaccgugugauaagaa

SEQ ID NO: 18935 - RNA, 19 nt, Homo sapiens
  misc_RNA (1)...(19): siRNA sense strand
ggaauaacuucaucaaccu

SEQ ID NO: 18936 - RNA, 19 nt, Homo sapiens
  misc_RNA (1)...(19): siRNA sense strand
gggaggcccuguauaacga

SEQ ID NO: 18937 - RNA, 19 nt, Homo sapiens
  misc_RNA (1)...(19): siRNA sense strand
caucugggcugucauaaaa

SEQ ID NO: 18938 - RNA, 19 nt, Homo sapiens
  misc_RNA (1)...(19): siRNA sense strand
aggaauggcuggaauguca

SEQ ID NO: 18939 - RNA, 19 nt, Homo sapiens
  misc_RNA (1)...(19): siRNA sense strand
cagaggauauugacaacau

SEQ ID NO: 18940 - RNA, 19 nt, Homo sapiens
  misc_RNA (1)...(19): siRNA sense strand
ggccacacguguccuauuc

SEQ ID NO: 18941 - RNA, 19 nt, Homo sapiens
  misc_RNA (1)...(19): siRNA sense strand
agaacugccucacgguuaa

SEQ ID NO: 18942 - RNA, 19 nt, Homo sapiens
  misc_RNA (1)...(19): siRNA sense strand
guccugaagucgaucauga

SEQ ID NO: 18943 - RNA, 19 nt, Homo sapiens
  misc_RNA (1)...(19): siRNA sense strand
gaucuacgcagccaugaug

SEQ ID NO: 18944 - RNA, 19 nt, Homo sapiens
  misc_RNA (1)...(19): siRNA sense strand
gaagacaacguggugagaa

SEQ ID NO: 18945 - RNA, 19 nt, Homo sapiens
  misc_RNA (1)...(19): siRNA sense strand
cccaggagcucaccaagga

SEQ ID NO: 18946 - RNA, 19 nt, Homo sapiens
  misc_RNA (1)...(19): siRNA sense strand
guacugggcaucucucaga

SEQ ID NO: 18947 - RNA, 19 nt, Homo sapiens
  misc_RNA (1)...(19): siRNA sense strand
gaucggccuccuccuauuu

SEQ ID NO: 18948 - RNA, 19 nt, Homo sapiens
  misc_RNA (1)...(19): siRNA sense strand
gcagcgaaccagaaacuug

SEQ ID NO: 18949 - RNA, 19 nt, Homo sapiens
  misc_RNA (1)...(19): siRNA sense strand
gcuggaaugucauggacuu

SEQ ID NO: 18950 - RNA, 19 nt, Homo sapiens
  misc_RNA (1)...(19): siRNA sense strand
gggaauaaccucaguacca

SEQ ID NO: 18951 - RNA, 19 nt, Homo sapiens
  misc_RNA (1)...(19): siRNA sense strand
cagaacugccucacgguua

SEQ ID NO: 18952 - RNA, 19 nt, Homo sapiens
  misc_RNA (1)...(19): siRNA sense strand
ggacgaggacagugaugaa

SEQ ID NO: 18953 - RNA, 19 nt, Homo sapiens
  misc_RNA (1)...(19): siRNA sense strand
gggaguggaagaaguauga

SEQ ID NO: 18954 - RNA, 19 nt, Homo sapiens
  misc_RNA (1)...(19): siRNA sense strand
ccgaauggccucccuuuga

SEQ ID NO: 18955 - RNA, 19 nt, Homo sapiens
  misc_RNA (1)...(19): siRNA sense strand
ggucaucugggcugucaua

SEQ ID NO: 18956 - RNA, 19 nt, Homo sapiens
  misc_RNA (1)...(19): siRNA sense strand
ugucuggaaucccaaguuu

SEQ ID NO: 18957 - RNA, 19 nt, Homo sapiens
  misc_RNA (1)...(19): siRNA sense strand
gcacauggaguccggaaca

SEQ ID NO: 18958 - RNA, 19 nt, Homo sapiens
  misc_RNA (1)...(19): siRNA sense strand
cuucaucuaugccaucauu

SEQ ID NO: 18959 - RNA, 19 nt, Homo sapiens
  misc_RNA (1)...(19): siRNA sense strand
ugacgaguccaaagaguuu

SEQ ID NO: 18960 - RNA, 19 nt, Homo sapiens
  misc_RNA (1)...(19): siRNA sense strand
gcgauacuuugacuacguu

SEQ ID NO: 18961 - RNA, 19 nt, Homo sapiens
  misc_RNA (1)...(19): siRNA sense strand
ggccaucgcuguggacaau

SEQ ID NO: 18962 - RNA, 19 nt, Homo sapiens
  misc_RNA (1)...(19): siRNA sense strand
gaucuccucuacaauagca

SEQ ID NO: 18963 - RNA, 19 nt, Homo sapiens
  misc_RNA (1)...(19): siRNA sense strand
acagaaccauacuucauug

SEQ ID NO: 18964 - RNA, 19 nt, Homo sapiens
  misc_RNA (1)...(19): siRNA sense strand
ugacaacaccguccacuuc

SEQ ID NO: 18965 - RNA, 19 nt, Homo sapiens
  misc_RNA (1)...(19): siRNA sense strand
gcucguuucugaugcugaa

SEQ ID NO: 18966 - RNA, 19 nt, Homo sapiens
  misc_RNA (1)...(19): siRNA sense strand
gcaucagggugccuacuuc

SEQ ID NO: 18967 - RNA, 19 nt, Homo sapiens
  misc_RNA (1)...(19): siRNA sense strand
gcaacaacaacaccaacaa

SEQ ID NO: 18968 - RNA, 19 nt, Homo sapiens
  misc_RNA (1)...(19): siRNA sense strand
gccgggaggcccuguauaa

SEQ ID NO: 18969 - RNA, 19 nt, Homo sapiens
  misc_RNA (1)...(19): siRNA sense strand
ggacuccucccaccaacuu

SEQ ID NO: 18970 - RNA, 19 nt, Homo sapiens
  misc_RNA (1)...(19): siRNA sense strand
ggaacugguuguacuucau

SEQ ID NO: 18971 - RNA, 19 nt, Homo sapiens
  misc_RNA (1)...(19): siRNA sense strand
gcaaucauaggguuagaau

SEQ ID NO: 18972 - RNA, 19 nt, Homo sapiens
  misc_RNA (1)...(19): siRNA sense strand
ccaaugggaccaaauguca

SEQ ID NO: 18973 - RNA, 19 nt, Homo sapiens
  misc_RNA (1)...(19): siRNA sense strand
cccaggagauguuccagaa

SEQ ID NO: 18974 - RNA, 19 nt, Homo sapiens
  misc_RNA (1)...(19): siRNA sense strand
gcaagaaauguccucauag

SEQ ID NO: 18975 - RNA, 19 nt, Homo sapiens
  misc_RNA (1)...(19): siRNA sense strand
gaaaccgugugauaagaac

SEQ ID NO: 18976 - RNA, 19 nt, Homo sapiens
  misc_RNA (1)...(19): siRNA sense strand
ggaauacagccuggagaaa

SEQ ID NO: 18977 - RNA, 19 nt, Homo sapiens
  misc_RNA (1)...(19): siRNA sense strand
gacaucaacacgauuaaau

SEQ ID NO: 18978 - RNA, 19 nt, Homo sapiens
  misc_RNA (1)...(19): siRNA sense strand
cgugaccucuggaauauuc

SEQ ID NO: 18979 - RNA, 19 nt, Homo sapiens
  misc_RNA (1)...(19): siRNA sense strand
gaagaaggaggaggaggaa

SEQ ID NO: 18980 - RNA, 19 nt, Homo sapiens
  misc_RNA (1)...(19): siRNA sense strand
ccaguuuaauuucgaugaa

SEQ ID NO: 18981 - RNA, 19 nt, Homo sapiens
  misc_RNA (1)...(19): siRNA sense strand
caagacagauuugcucaac

SEQ ID NO: 18982 - RNA, 19 nt, Homo sapiens
  misc_RNA (1)...(19): siRNA sense strand
gcgggaaaccgugugauaa

SEQ ID NO: 18983 - RNA, 19 nt, Homo sapiens
  misc_RNA (1)...(19): siRNA sense strand
cccgacgccuggacgauua

SEQ ID NO: 18984 - RNA, 19 nt, Homo sapiens
  misc_RNA (1)...(19): siRNA sense strand
gaaaucagauccuuaaaca

SEQ ID NO: 18985 - RNA, 19 nt, Homo sapiens
  misc_RNA (1)...(19): siRNA sense strand
ccaagaagcuggagcagaa

SEQ ID NO: 18986 - RNA, 19 nt, Homo sapiens
  misc_RNA (1)...(19): siRNA sense strand
uggagaagcuggaguauuu

SEQ ID NO: 18987 - RNA, 19 nt, Homo sapiens
  misc_RNA (1)...(19): siRNA sense strand
caacagagcuacugaaagg

SEQ ID NO: 18988 - RNA, 19 nt, Homo sapiens
  misc_RNA (1)...(19): siRNA sense strand
ggagucaccugucuucuug

SEQ ID NO: 18989 - RNA, 19 nt, Homo sapiens
  misc_RNA (1)...(19): siRNA sense strand
ccacugagaugcugaugaa

SEQ ID NO: 18990 - RNA, 19 nt, Homo sapiens
  misc_RNA (1)...(19): siRNA sense strand
gcaccaacuuugcauacua

SEQ ID NO: 18991 - RNA, 19 nt, Homo sapiens
  misc_RNA (1)...(19): siRNA sense strand
ggagaugccugccaaaugg

SEQ ID NO: 18992 - RNA, 19 nt, Homo sapiens
  misc_RNA (1)...(19): siRNA sense strand
ccacugaggugcuacauuc

SEQ ID NO: 18993 - RNA, 19 nt, Homo sapiens
  misc_RNA (1)...(19): siRNA sense strand
gcacggcacucaagaucaa

SEQ ID NO: 18994 - RNA, 19 nt, Homo sapiens
  misc_RNA (1)...(19): siRNA sense strand
ggaagaaacagcccaagaa

SEQ ID NO: 18995 - RNA, 19 nt, Homo sapiens
  misc_RNA (1)...(19): siRNA sense strand
ggucaucccuccaauagga

SEQ ID NO: 18996 - RNA, 19 nt, Homo sapiens
  misc_RNA (1)...(19): siRNA sense strand
aagaagaucuggaagagaa

SEQ ID NO: 18997 - RNA, 19 nt, Homo sapiens
  misc_RNA (1)...(19): siRNA sense strand
gcacaagaccugcuacuuc

SEQ ID NO: 18998 - RNA, 19 nt, Homo sapiens
  misc_RNA (1)...(19): siRNA sense strand
gaagccaguuccugagauu

SEQ ID NO: 18999 - RNA, 19 nt, Homo sapiens
  misc_RNA (1)...(19): siRNA sense strand
cagcaacuuugacaacuuu

SEQ ID NO: 19000 - RNA, 19 nt, Homo sapiens
  misc_RNA (1)...(19): siRNA sense strand
caaauaaaccggaacaaca

SEQ ID NO: 19001 - RNA, 19 nt, Homo sapiens
  misc_RNA (1)...(19): siRNA sense strand
gagauuguccucaagauga

SEQ ID NO: 19002 - RNA, 19 nt, Homo sapiens
  misc_RNA (1)...(19): siRNA sense strand
ucgaugaguuugaaucuaa

SEQ ID NO: 19003 - RNA, 19 nt, Homo sapiens
  misc_RNA (1)...(19): siRNA sense strand
ggaccucaaugauguacaa

SEQ ID NO: 19004 - RNA, 19 nt, Homo sapiens
  misc_RNA (1)...(19): siRNA sense strand
gaguauuucuuccucauug

SEQ ID NO: 19005 - RNA, 19 nt, Homo sapiens
  misc_RNA (1)...(19): siRNA sense strand
gaaaaucgaugaguuugaa

SEQ ID NO: 19006 - RNA, 19 nt, Homo sapiens
  misc_RNA (1)...(19): siRNA sense strand
gaagagaaccagcaugaag

SEQ ID NO: 19007 - RNA, 19 nt, Homo sapiens
  misc_RNA (1)...(19): siRNA sense strand
gaugaaggccugaggaaga

SEQ ID NO: 19008 - RNA, 19 nt, Homo sapiens
  misc_RNA (1)...(19): siRNA sense strand
ucacuacccuccuacaguu

SEQ ID NO: 19009 - RNA, 19 nt, Homo sapiens
  misc_RNA (1)...(19): siRNA sense strand
caaaggagccggcuuggau

SEQ ID NO: 19010 - RNA, 19 nt, Homo sapiens
  misc_RNA (1)...(19): siRNA sense strand
gcaacuagaugaggaccuu

SEQ ID NO: 19011 - RNA, 19 nt, Homo sapiens
  misc_RNA (1)...(19): siRNA sense strand
gcaacuacauccugcucaa

SEQ ID NO: 19012 - RNA, 19 nt, Homo sapiens
  misc_RNA (1)...(19): siRNA sense strand
gaaggacauuguacagauc

SEQ ID NO: 19013 - RNA, 19 nt, Homo sapiens
  misc_RNA (1)...(19): siRNA sense strand
ugagaaaucagauccuuaa

SEQ ID NO: 19014 - RNA, 19 nt, Homo sapiens
  misc_RNA (1)...(19): siRNA sense strand
ggccaaggcugaggagaaa

SEQ ID NO: 19015 - RNA, 19 nt, Homo sapiens
  misc_RNA (1)...(19): siRNA sense strand
gugcuggacuucaccauug

SEQ ID NO: 19016 - RNA, 19 nt, Homo sapiens
  misc_RNA (1)...(19): siRNA sense strand
cacaagaccugcuacuuca

SEQ ID NO: 19017 - RNA, 19 nt, Homo sapiens
  misc_RNA (1)...(19): siRNA sense strand
cagagagccuguaugaaau

SEQ ID NO: 19018 - RNA, 19 nt, Homo sapiens
  misc_RNA (1)...(19): siRNA sense strand
gcgccaauguguacaguau

SEQ ID NO: 19019 - RNA, 19 nt, Homo sapiens
  misc_RNA (1)...(19): siRNA sense strand
gcagcaacuuugacaacuu

SEQ ID NO: 19020 - RNA, 19 nt, Homo sapiens
  misc_RNA (1)...(19): siRNA sense strand
caacaaccguguggagaug

SEQ ID NO: 19021 - RNA, 19 nt, Homo sapiens
  misc_RNA (1)...(19): siRNA sense strand
gaucauggcaacagagcua

SEQ ID NO: 19022 - RNA, 19 nt, Homo sapiens
  misc_RNA (1)...(19): siRNA sense strand
gaaccagcaugaagcucuu

SEQ ID NO: 19023 - RNA, 19 nt, Homo sapiens
  misc_RNA (1)...(19): siRNA sense strand
gcaguggaaccgcaucuuu

SEQ ID NO: 19024 - RNA, 19 nt, Homo sapiens
  misc_RNA (1)...(19): siRNA sense strand
acugugagcuggacaagaa

SEQ ID NO: 19025 - RNA, 19 nt, Homo sapiens
  misc_RNA (1)...(19): siRNA sense strand
uaagauccguguccugugu

SEQ ID NO: 19026 - RNA, 19 nt, Homo sapiens
  misc_RNA (1)...(19): siRNA sense strand
ggacuucaccauugucuuc

SEQ ID NO: 19027 - RNA, 19 nt, Homo sapiens
  misc_RNA (1)...(19): siRNA sense strand
gaagaucgccuugguggau

SEQ ID NO: 19028 - RNA, 19 nt, Homo sapiens
  misc_RNA (1)...(19): siRNA sense strand
gaagacuggaccucaauga

SEQ ID NO: 19029 - RNA, 19 nt, Homo sapiens
  misc_RNA (1)...(19): siRNA sense strand
gaaguucuacgccacauuc

SEQ ID NO: 19030 - RNA, 19 nt, Homo sapiens
  misc_RNA (1)...(19): siRNA sense strand
gaagaaacagcccaagaag

SEQ ID NO: 19031 - RNA, 19 nt, Homo sapiens
  misc_RNA (1)...(19): siRNA sense strand
gcaauuacuucaacaugcu

SEQ ID NO: 19032 - RNA, 19 nt, Homo sapiens
  misc_RNA (1)...(19): siRNA sense strand
ucagauccuuaaacacuuu

SEQ ID NO: 19033 - RNA, 19 nt, Homo sapiens
  misc_RNA (1)...(19): siRNA sense strand
gacuggaccucaaugaugu

SEQ ID NO: 19034 - RNA, 19 nt, Homo sapiens
  misc_RNA (1)...(19): siRNA sense strand
caagacggaagguaacuuu

SEQ ID NO: 19035 - RNA, 19 nt, Homo sapiens
  misc_RNA (1)...(19): siRNA sense strand
gaaccagcgccaaugugua

SEQ ID NO: 19036 - RNA, 19 nt, Homo sapiens
  misc_RNA (1)...(19): siRNA sense strand
gaguuugaaucuaauguca

SEQ ID NO: 19037 - RNA, 19 nt, Homo sapiens
  misc_RNA (1)...(19): siRNA sense strand
caucaucuaugccaucauc

SEQ ID NO: 19038 - RNA, 19 nt, Homo sapiens
  misc_RNA (1)...(19): siRNA sense strand
gccaguacuucaugucuau

SEQ ID NO: 19039 - RNA, 19 nt, Homo sapiens
  misc_RNA (1)...(19): siRNA sense strand
aguccaaggucuucuauug

SEQ ID NO: 19040 - RNA, 19 nt, Homo sapiens
  misc_RNA (1)...(19): siRNA sense strand
gaguggcccuggaucuauu

SEQ ID NO: 19041 - RNA, 19 nt, Homo sapiens
  misc_RNA (1)...(19): siRNA sense strand
ggagguaugacuuugaaga

SEQ ID NO: 19042 - RNA, 19 nt, Homo sapiens
  misc_RNA (1)...(19): siRNA sense strand
agaaggacauuguacagau

SEQ ID NO: 19043 - RNA, 19 nt, Homo sapiens
  misc_RNA (1)...(19): siRNA sense strand
agucaacgauggccaagaa

SEQ ID NO: 19044 - RNA, 19 nt, Homo sapiens
  misc_RNA (1)...(19): siRNA sense strand
ugagggccaucaucaagaa

SEQ ID NO: 19045 - RNA, 19 nt, Homo sapiens
  misc_RNA (1)...(19): siRNA sense strand
caacgccaaugucgccuau

SEQ ID NO: 19046 - RNA, 19 nt, Homo sapiens
  misc_RNA (1)...(19): siRNA sense strand
agauagagauggaagagau

SEQ ID NO: 19047 - RNA, 19 nt, Homo sapiens
  misc_RNA (1)...(19): siRNA sense strand
gaaauugcaggcuugaaca

SEQ ID NO: 19048 - RNA, 19 nt, Homo sapiens
  misc_RNA (1)...(19): siRNA sense strand
ucaagaagaucuggaagag

SEQ ID NO: 19049 - RNA, 19 nt, Homo sapiens
  misc_RNA (1)...(19): siRNA sense strand
gggaaguucugcccacauc

SEQ ID NO: 19050 - RNA, 19 nt, Homo sapiens
  misc_RNA (1)...(19): siRNA sense strand
gggagaagcagcaacuaga

SEQ ID NO: 19051 - RNA, 19 nt, Homo sapiens
  misc_RNA (1)...(19): siRNA sense strand
ccaaauggaaccagaggaa

SEQ ID NO: 19052 - RNA, 19 nt, Homo sapiens
  misc_RNA (1)...(19): siRNA sense strand
gagauggagucaccugucu

SEQ ID NO: 19053 - RNA, 19 nt, Homo sapiens
  misc_RNA (1)...(19): siRNA sense strand
gagcugagggccaucauca

SEQ ID NO: 19054 - RNA, 19 nt, Homo sapiens
  misc_RNA (1)...(19): siRNA sense strand
guacggcgcagcaacuuug

SEQ ID NO: 19055 - RNA, 19 nt, Homo sapiens
  misc_RNA (1)...(19): siRNA sense strand
gcuggaaugugcuggacuu

SEQ ID NO: 19056 - RNA, 19 nt, Homo sapiens
  misc_RNA (1)...(19): siRNA sense strand
gaugacaacaacucucuga

SEQ ID NO: 19057 - RNA, 19 nt, Homo sapiens
  misc_RNA (1)...(19): siRNA sense strand
gcauacuacuacuucauca

SEQ ID NO: 19058 - RNA, 19 nt, Homo sapiens
  misc_RNA (1)...(19): siRNA sense strand
guguuugacuuccugauug

SEQ ID NO: 19059 - RNA, 19 nt, Homo sapiens
  misc_RNA (1)...(19): siRNA sense strand
ggaaugugcuggacuucac

SEQ ID NO: 19060 - RNA, 19 nt, Homo sapiens
  misc_RNA (1)...(19): siRNA sense strand
ggaacagguuaacgucauc

SEQ ID NO: 19061 - RNA, 19 nt, Homo sapiens
  misc_RNA (1)...(19): siRNA sense strand
aaauaaaccggaacaacaa

SEQ ID NO: 19062 - RNA, 19 nt, Homo sapiens
  misc_RNA (1)...(19): siRNA sense strand
ggaaaccccuggaaugugu

SEQ ID NO: 19063 - RNA, 19 nt, Homo sapiens
  misc_RNA (1)...(19): siRNA sense strand
ggccuucacuaucaucuuc

SEQ ID NO: 19064 - RNA, 19 nt, Homo sapiens
  misc_RNA (1)...(19): siRNA sense strand
aauguggccuucacuauca

SEQ ID NO: 19065 - RNA, 19 nt, Homo sapiens
  misc_RNA (1)...(19): siRNA sense strand
gcuggucacuacccuccua

SEQ ID NO: 19066 - RNA, 19 nt, Homo sapiens
  misc_RNA (1)...(19): siRNA sense strand
gagaaggccgugcccauuc

SEQ ID NO: 19067 - RNA, 19 nt, Homo sapiens
  misc_RNA (1)...(19): siRNA sense strand
caagaccugcuacuucauu

SEQ ID NO: 19068 - RNA, 19 nt, Homo sapiens
  misc_RNA (1)...(19): siRNA sense strand
gagagccuguaugaaauug

SEQ ID NO: 19069 - RNA, 19 nt, Homo sapiens
  misc_RNA (1)...(19): siRNA sense strand
cuacuggccugcagcuaug

SEQ ID NO: 19070 - RNA, 19 nt, Homo sapiens
  misc_RNA (1)...(19): siRNA sense strand
gagagacugaguacaagaa

SEQ ID NO: 19071 - RNA, 19 nt, Homo sapiens
  misc_RNA (1)...(19): siRNA sense strand
ccucaaugauguacaaugg

SEQ ID NO: 19072 - RNA, 19 nt, Homo sapiens
  misc_RNA (1)...(19): siRNA sense strand
caucagcgucuuccaggua

SEQ ID NO: 19073 - RNA, 19 nt, Homo sapiens
  misc_RNA (1)...(19): siRNA sense strand
gccaugacaucgugaaguc

SEQ ID NO: 19074 - RNA, 19 nt, Homo sapiens
  misc_RNA (1)...(19): siRNA sense strand
ggacgucgcugagcaaccu

SEQ ID NO: 19075 - RNA, 19 nt, Homo sapiens
  misc_RNA (1)...(19): siRNA sense strand
gccaugaugucccucuuca

SEQ ID NO: 19076 - RNA, 19 nt, Homo sapiens
  misc_RNA (1)...(19): siRNA sense strand
gggcugauuccaugagaaa

SEQ ID NO: 19077 - RNA, 19 nt, Homo sapiens
  misc_RNA (1)...(19): siRNA sense strand
gauguacaaugggaucaug

SEQ ID NO: 19078 - RNA, 19 nt, Homo sapiens
  misc_RNA (1)...(19): siRNA sense strand
ucuauuggcuggugauucu

SEQ ID NO: 19079 - RNA, 19 nt, Homo sapiens
  misc_RNA (1)...(19): siRNA sense strand
caacaaugccaacgccaau

SEQ ID NO: 19080 - RNA, 19 nt, Homo sapiens
  misc_RNA (1)...(19): siRNA sense strand
gcagauguuugggaagauc

SEQ ID NO: 19081 - RNA, 19 nt, Homo sapiens
  misc_RNA (1)...(19): siRNA sense strand
caugagaaaucagauccuu

SEQ ID NO: 19082 - RNA, 19 nt, Homo sapiens
  misc_RNA (1)...(19): siRNA sense strand
gcggagagccugacuucug

SEQ ID NO: 19083 - RNA, 19 nt, Homo sapiens
  misc_RNA (1)...(19): siRNA sense strand
gauugaagccgccaugaag

SEQ ID NO: 19084 - RNA, 19 nt, Homo sapiens
  misc_RNA (1)...(19): siRNA sense strand
ggaaauauccuaaugguuu

SEQ ID NO: 19085 - RNA, 19 nt, Homo sapiens
  misc_RNA (1)...(19): siRNA sense strand
ggaagaaacuacaacagaa

SEQ ID NO: 19086 - RNA, 19 nt, Homo sapiens
  misc_RNA (1)...(19): siRNA sense strand
gauguuaucuggcguauuc

SEQ ID NO: 19087 - RNA, 19 nt, Homo sapiens
  misc_RNA (1)...(19): siRNA sense strand
gaaagcaaguacacuggua

SEQ ID NO: 19088 - RNA, 19 nt, Homo sapiens
  misc_RNA (1)...(19): siRNA sense strand
ggacugugcuuacccuuau

SEQ ID NO: 19089 - RNA, 19 nt, Homo sapiens
  misc_RNA (1)...(19): siRNA sense strand
gccaugaaguuccuuaauu

SEQ ID NO: 19090 - RNA, 19 nt, Homo sapiens
  misc_RNA (1)...(19): siRNA sense strand
gaagaaacuacaacagaaa

SEQ ID NO: 19091 - RNA, 19 nt, Homo sapiens
  misc_RNA (1)...(19): siRNA sense strand
cagaagaugugcucagcua

SEQ ID NO: 19092 - RNA, 19 nt, Homo sapiens
  misc_RNA (1)...(19): siRNA sense strand
ccaugaaguuccuuaauug

SEQ ID NO: 19093 - RNA, 19 nt, Homo sapiens
  misc_RNA (1)...(19): siRNA sense strand
gagaacggaucaagugcuu

SEQ ID NO: 19094 - RNA, 19 nt, Homo sapiens
  misc_RNA (1)...(19): siRNA sense strand
gaacggaucaagugcuuau

SEQ ID NO: 19095 - RNA, 19 nt, Homo sapiens
  misc_RNA (1)...(19): siRNA sense strand
caacugggcuguggcaauc

SEQ ID NO: 19096 - RNA, 19 nt, Homo sapiens
  misc_RNA (1)...(19): siRNA sense strand
gggaagaaacuacaacaga

SEQ ID NO: 19097 - RNA, 19 nt, Homo sapiens
  misc_RNA (1)...(19): siRNA sense strand
agacacagccaccgaguuu

SEQ ID NO: 19098 - RNA, 19 nt, Homo sapiens
  misc_RNA (1)...(19): siRNA sense strand
ccuaaugguuucagagaug

SEQ ID NO: 19099 - RNA, 19 nt, Homo sapiens
  misc_RNA (1)...(19): siRNA sense strand
gauccgaggcaucuacaaa

SEQ ID NO: 19100 - RNA, 19 nt, Homo sapiens
  misc_RNA (1)...(19): siRNA sense strand
gcuuugaaguugccaugaa

SEQ ID NO: 19101 - RNA, 19 nt, Homo sapiens
  misc_RNA (1)...(19): siRNA sense strand
guacaaaggguucaaugca

SEQ ID NO: 19102 - RNA, 19 nt, Homo sapiens
  misc_RNA (1)...(19): siRNA sense strand
ggagucacauccuuguaca

SEQ ID NO: 19103 - RNA, 19 nt, Homo sapiens
  misc_RNA (1)...(19): siRNA sense strand
gaagaugugcucagcuauc

SEQ ID NO: 19104 - RNA, 19 nt, Homo sapiens
  misc_RNA (1)...(19): siRNA sense strand
gaaacacccagaagaugug

SEQ ID NO: 19105 - RNA, 19 nt, Homo sapiens
  misc_RNA (1)...(19): siRNA sense strand
caacagaaacacccagaag

SEQ ID NO: 19106 - RNA, 19 nt, Homo sapiens
  misc_RNA (1)...(19): siRNA sense strand
cauguacucugggaccuuu

SEQ ID NO: 19107 - RNA, 19 nt, Homo sapiens
  misc_RNA (1)...(19): siRNA sense strand
gaagcuguaccaggaguuu

SEQ ID NO: 19108 - RNA, 19 nt, Homo sapiens
  misc_RNA (1)...(19): siRNA sense strand
uggaauguauuucaugaca

SEQ ID NO: 19109 - RNA, 19 nt, Homo sapiens
  misc_RNA (1)...(19): siRNA sense strand
gaucaagugcuuauuacag

SEQ ID NO: 19110 - RNA, 19 nt, Homo sapiens
  misc_RNA (1)...(19): siRNA sense strand
ccugggaaauauccuaaug

SEQ ID NO: 19111 - RNA, 19 nt, Homo sapiens
  misc_RNA (1)...(19): siRNA sense strand
gacugcaccuccugggaaa

SEQ ID NO: 19112 - RNA, 19 nt, Homo sapiens
  misc_RNA (1)...(19): siRNA sense strand
gggacugugcuuacccuua

SEQ ID NO: 19113 - RNA, 19 nt, Homo sapiens
  misc_RNA (1)...(19): siRNA sense strand
gcuaguggaauguauuuca

SEQ ID NO: 19114 - RNA, 19 nt, Homo sapiens
  misc_RNA (1)...(19): siRNA sense strand
acggaucaagugcuuauua

SEQ ID NO: 19115 - RNA, 19 nt, Homo sapiens
  misc_RNA (1)...(19): siRNA sense strand
cagccaaugcggccuguuu

SEQ ID NO: 19116 - RNA, 19 nt, Homo sapiens
  misc_RNA (1)...(19): siRNA sense strand
aguggaauguauuucauga

SEQ ID NO: 19117 - RNA, 19 nt, Homo sapiens
  misc_RNA (1)...(19): siRNA sense strand
cagcuaguggaauguauuu

SEQ ID NO: 19118 - RNA, 19 nt, Homo sapiens
  misc_RNA (1)...(19): siRNA sense strand
caagugcuuauuacagauu

SEQ ID NO: 19119 - RNA, 19 nt, Homo sapiens
  misc_RNA (1)...(19): siRNA sense strand
acagaaacacccagaagau

SEQ ID NO: 19120 - RNA, 19 nt, Homo sapiens
  misc_RNA (1)...(19): siRNA sense strand
agaaacacccagaagaugu

SEQ ID NO: 19121 - RNA, 19 nt, Homo sapiens
  misc_RNA (1)...(19): siRNA sense strand
cagaaacacccagaagaug

SEQ ID NO: 19122 - RNA, 19 nt, Homo sapiens
  misc_RNA (1)...(19): siRNA sense strand
cggaucaagugcuuauuac

SEQ ID NO: 19123 - RNA, 19 nt, Homo sapiens
  misc_RNA (1)...(19): siRNA sense strand
ugggaaauauccuaauggu

SEQ ID NO: 19124 - RNA, 19 nt, Homo sapiens
  misc_RNA (1)...(19): siRNA sense strand
uugcagggaucuucaacug

SEQ ID NO: 19125 - RNA, 19 nt, Homo sapiens
  misc_RNA (1)...(19): siRNA sense strand
aucaagugcuuauuacaga

SEQ ID NO: 19126 - RNA, 19 nt, Homo sapiens
  misc_RNA (1)...(19): siRNA sense strand
ucaagugcuuauuacagau

SEQ ID NO: 19127 - RNA, 19 nt, Homo sapiens
  misc_RNA (1)...(19): siRNA sense strand
uggacaaccucccauguac

SEQ ID NO: 19128 - RNA, 19 nt, Homo sapiens
  misc_RNA (1)...(19): siRNA sense strand
gggaauggcugccccuauc

SEQ ID NO: 19129 - RNA, 19 nt, Homo sapiens
  misc_RNA (1)...(19): siRNA sense strand
cuaguggaauguauuucau

SEQ ID NO: 19130 - RNA, 19 nt, Homo sapiens
  misc_RNA (1)...(19): siRNA sense strand
ugucccagcuaguggaaug

SEQ ID NO: 19131 - RNA, 19 nt, Homo sapiens
  misc_RNA (1)...(19): siRNA sense strand
cgagaugucccagcuagug

SEQ ID NO: 19132 - RNA, 19 nt, Homo sapiens
  misc_RNA (1)...(19): siRNA sense strand
cuacaaagggacugugcuu

SEQ ID NO: 19133 - RNA, 19 nt, Homo sapiens
  misc_RNA (1)...(19): siRNA sense strand
gggaaauauccuaaugguu

SEQ ID NO: 19134 - RNA, 19 nt, Homo sapiens
  misc_RNA (1)...(19): siRNA sense strand
caaugcggccuguuuccuu

SEQ ID NO: 19135 - RNA, 19 nt, Homo sapiens
  misc_RNA (1)...(19): siRNA sense strand
cuggacaaccucccaugua

SEQ ID NO: 19136 - RNA, 19 nt, Homo sapiens
  misc_RNA (1)...(19): siRNA sense strand
uuccuuggcuuugaaguug

SEQ ID NO: 19137 - RNA, 19 nt, Homo sapiens
  misc_RNA (1)...(19): siRNA sense strand
gugcaaagaagcuguacca

SEQ ID NO: 19138 - RNA, 19 nt, Homo sapiens
  misc_RNA (1)...(19): siRNA sense strand
gaguuugccuggacaaccu

SEQ ID NO: 19139 - RNA, 19 nt, Homo sapiens
  misc_RNA (1)...(19): siRNA sense strand
cuaaugguuucagagaugu

SEQ ID NO: 19140 - RNA, 19 nt, Homo sapiens
  misc_RNA (1)...(19): siRNA sense strand
caaagggacugugcuuacc

SEQ ID NO: 19141 - RNA, 19 nt, Homo sapiens
  misc_RNA (1)...(19): siRNA sense strand
uacaaagggacugugcuua

SEQ ID NO: 19142 - RNA, 19 nt, Homo sapiens
  misc_RNA (1)...(19): siRNA sense strand
gggauguuaucuggcguau

SEQ ID NO: 19143 - RNA, 19 nt, Homo sapiens
  misc_RNA (1)...(19): siRNA sense strand
agucacauccuuguacaaa

SEQ ID NO: 19144 - RNA, 19 nt, Homo sapiens
  misc_RNA (1)...(19): siRNA sense strand
gacaaccucccauguacuc

SEQ ID NO: 19145 - RNA, 19 nt, Homo sapiens
  misc_RNA (1)...(19): siRNA sense strand
acaaagggacugugcuuac

SEQ ID NO: 19146 - RNA, 19 nt, Homo sapiens
  misc_RNA (1)...(19): siRNA sense strand
cugggaccuuugacuguuu

SEQ ID NO: 19147 - RNA, 19 nt, Homo sapiens
  misc_RNA (1)...(19): siRNA sense strand
cugcaccuccugggaaaua

SEQ ID NO: 19148 - RNA, 19 nt, Homo sapiens
  misc_RNA (1)...(19): siRNA sense strand
gagggucagugagcucagu

SEQ ID NO: 19149 - RNA, 19 nt, Homo sapiens
  misc_RNA (1)...(19): siRNA sense strand
ccagcuaguggaauguauu

SEQ ID NO: 19150 - RNA, 19 nt, Homo sapiens
  misc_RNA (1)...(19): siRNA sense strand
ggaucaagugcuuauuaca

SEQ ID NO: 19151 - RNA, 19 nt, Homo sapiens
  misc_RNA (1)...(19): siRNA sense strand
ucugggaccuuugacuguu

SEQ ID NO: 19152 - RNA, 19 nt, Homo sapiens
  misc_RNA (1)...(19): siRNA sense strand
ggacaaccucccauguacu

SEQ ID NO: 19153 - RNA, 19 nt, Homo sapiens
  misc_RNA (1)...(19): siRNA sense strand
ccuguuuccuuggcuuuga

SEQ ID NO: 19154 - RNA, 19 nt, Homo sapiens
  misc_RNA (1)...(19): siRNA sense strand
agggaaagagggucaguga

SEQ ID NO: 19155 - RNA, 19 nt, Homo sapiens
  misc_RNA (1)...(19): siRNA sense strand
cccaucagcccgcucaaga

SEQ ID NO: 19156 - RNA, 19 nt, Homo sapiens
  misc_RNA (1)...(19): siRNA sense strand
ccaucagcccgcucaagaa

SEQ ID NO: 19157 - RNA, 19 nt, Homo sapiens
  misc_RNA (1)...(19): siRNA sense strand
gggcauugcagggaucuuc

SEQ ID NO: 19158 - RNA, 19 nt, Homo sapiens
  misc_RNA (1)...(19): siRNA sense strand
aacagaaacacccagaaga

SEQ ID NO: 19159 - RNA, 19 nt, Homo sapiens
  misc_RNA (1)...(19): siRNA sense strand
caacaauuccggaacauuu

SEQ ID NO: 19160 - RNA, 19 nt, Homo sapiens
  misc_RNA (1)...(19): siRNA sense strand
gaacaucgacuuugacagu

SEQ ID NO: 19161 - RNA, 19 nt, Homo sapiens
  misc_RNA (1)...(19): siRNA sense strand
cagaugagcucaagaaggu

SEQ ID NO: 19162 - RNA, 19 nt, Homo sapiens
  misc_RNA (1)...(19): siRNA sense strand
acaaggaccugaagacaca

SEQ ID NO: 19163 - RNA, 19 nt, Homo sapiens
  misc_RNA (1)...(19): siRNA sense strand
gcucugaucaggaaaguga

SEQ ID NO: 19164 - RNA, 19 nt, Homo sapiens
  misc_RNA (1)...(19): siRNA sense strand
ucaacaaccagcucuauga

SEQ ID NO: 19165 - RNA, 19 nt, Homo sapiens
  misc_RNA (1)...(19): siRNA sense strand
ggcugcagcucaccaugua

SEQ ID NO: 19166 - RNA, 19 nt, Homo sapiens
  misc_RNA (1)...(19): siRNA sense strand
ugacaaggauggagauggu

SEQ ID NO: 19167 - RNA, 19 nt, Homo sapiens
  misc_RNA (1)...(19): siRNA sense strand
acaugaacaucgacuuuga

SEQ ID NO: 19168 - RNA, 19 nt, Homo sapiens
  misc_RNA (1)...(19): siRNA sense strand
uggcagcucugaucaggaa

SEQ ID NO: 19169 - RNA, 19 nt, Homo sapiens
  misc_RNA (1)...(19): siRNA sense strand
cagcaacaauuccggaaca

SEQ ID NO: 19170 - RNA, 19 nt, Homo sapiens
  misc_RNA (1)...(19): siRNA sense strand
gcagauagcaggagaugac

SEQ ID NO: 19171 - RNA, 19 nt, Homo sapiens
  misc_RNA (1)...(19): siRNA sense strand
uaacacagucgugaacaaa

SEQ ID NO: 19172 - RNA, 19 nt, Homo sapiens
  misc_RNA (1)...(19): siRNA sense strand
gauuaaggccuggcagaaa

SEQ ID NO: 19173 - RNA, 19 nt, Homo sapiens
  misc_RNA (1)...(19): siRNA sense strand
gugaggaacagcaacaauu

SEQ ID NO: 19174 - RNA, 19 nt, Homo sapiens
  misc_RNA (1)...(19): siRNA sense strand
acaaacacaugaacaucga

SEQ ID NO: 19175 - RNA, 19 nt, Homo sapiens
  misc_RNA (1)...(19): siRNA sense strand
caccaccucuggaacaaga

SEQ ID NO: 19176 - RNA, 19 nt, Homo sapiens
  misc_RNA (1)...(19): siRNA sense strand
gagggcauguucagagcuu

SEQ ID NO: 19177 - RNA, 19 nt, Homo sapiens
  misc_RNA (1)...(19): siRNA sense strand
ggaaagugaggaacagcaa

SEQ ID NO: 19178 - RNA, 19 nt, Homo sapiens
  misc_RNA (1)...(19): siRNA sense strand
gauagcaggagaugacaug

SEQ ID NO: 19179 - RNA, 19 nt, Homo sapiens
  misc_RNA (1)...(19): siRNA sense strand
ugauugcgcucauggauac

SEQ ID NO: 19180 - RNA, 19 nt, Homo sapiens
  misc_RNA (1)...(19): siRNA sense strand
acacaugaacaucgacuuu

SEQ ID NO: 19181 - RNA, 19 nt, Homo sapiens
  misc_RNA (1)...(19): siRNA sense strand
acacagucgugaacaaaca

SEQ ID NO: 19182 - RNA, 19 nt, Homo sapiens
  misc_RNA (1)...(19): siRNA sense strand
guacgcagacaaacacaug

SEQ ID NO: 19183 - RNA, 19 nt, Homo sapiens
  misc_RNA (1)...(19): siRNA sense strand
gugcagaugagcucaagaa

SEQ ID NO: 19184 - RNA, 19 nt, Homo sapiens
  misc_RNA (1)...(19): siRNA sense strand
acaaccagcucuaugacau

SEQ ID NO: 19185 - RNA, 19 nt, Homo sapiens
  misc_RNA (1)...(19): siRNA sense strand
gcaacaauuccggaacauu

SEQ ID NO: 19186 - RNA, 19 nt, Homo sapiens
  misc_RNA (1)...(19): siRNA sense strand
guucagagcuuuucaugca

SEQ ID NO: 19187 - RNA, 19 nt, Homo sapiens
  misc_RNA (1)...(19): siRNA sense strand
gcagacaaacacaugaaca

SEQ ID NO: 19188 - RNA, 19 nt, Homo sapiens
  misc_RNA (1)...(19): siRNA sense strand
gaugcgaaaugcagucaac

SEQ ID NO: 19189 - RNA, 19 nt, Homo sapiens
  misc_RNA (1)...(19): siRNA sense strand
gaagacacacggguucaca

SEQ ID NO: 19190 - RNA, 19 nt, Homo sapiens
  misc_RNA (1)...(19): siRNA sense strand
ucaucaagcucaacguucu

SEQ ID NO: 19191 - RNA, 19 nt, Homo sapiens
  misc_RNA (1)...(19): siRNA sense strand
acaucgacuuugacaguuu

SEQ ID NO: 19192 - RNA, 19 nt, Homo sapiens
  misc_RNA (1)...(19): siRNA sense strand
gcuacgagaugcgaaaugc

SEQ ID NO: 19193 - RNA, 19 nt, Homo sapiens
  misc_RNA (1)...(19): siRNA sense strand
uuaacacagucgugaacaa

SEQ ID NO: 19194 - RNA, 19 nt, Homo sapiens
  misc_RNA (1)...(19): siRNA sense strand
ugaggaacagcaacaauuc

SEQ ID NO: 19195 - RNA, 19 nt, Homo sapiens
  misc_RNA (1)...(19): siRNA sense strand
caucgacuuugacaguuuc

SEQ ID NO: 19196 - RNA, 19 nt, Homo sapiens
  misc_RNA (1)...(19): siRNA sense strand
gauuccaccucaacaacca

SEQ ID NO: 19197 - RNA, 19 nt, Homo sapiens
  misc_RNA (1)...(19): siRNA sense strand
uucaucugcugcuucguua

SEQ ID NO: 19198 - RNA, 19 nt, Homo sapiens
  misc_RNA (1)...(19): siRNA sense strand
ucaaacacuaugacacaga

SEQ ID NO: 19199 - RNA, 19 nt, Homo sapiens
  misc_RNA (1)...(19): siRNA sense strand
aaacacaaggaccugaaga

SEQ ID NO: 19200 - RNA, 19 nt, Homo sapiens
  misc_RNA (1)...(19): siRNA sense strand
uaucaucaagcucaacguu

SEQ ID NO: 19201 - RNA, 19 nt, Homo sapiens
  misc_RNA (1)...(19): siRNA sense strand
guccugccguagcaugauu

SEQ ID NO: 19202 - RNA, 19 nt, Homo sapiens
  misc_RNA (1)...(19): siRNA sense strand
cagacaaacacaugaacau

SEQ ID NO: 19203 - RNA, 19 nt, Homo sapiens
  misc_RNA (1)...(19): siRNA sense strand
gcaggauuccaccucaaca

SEQ ID NO: 19204 - RNA, 19 nt, Homo sapiens
  misc_RNA (1)...(19): siRNA sense strand
gaccaguccggcaccauca

SEQ ID NO: 19205 - RNA, 19 nt, Homo sapiens
  misc_RNA (1)...(19): siRNA sense strand
caacaaccagcucuaugac

SEQ ID NO: 19206 - RNA, 19 nt, Homo sapiens
  misc_RNA (1)...(19): siRNA sense strand
ucaggaaagugaggaacag

SEQ ID NO: 19207 - RNA, 19 nt, Homo sapiens
  misc_RNA (1)...(19): siRNA sense strand
gacaaggauggagauggua

SEQ ID NO: 19208 - RNA, 19 nt, Homo sapiens
  misc_RNA (1)...(19): siRNA sense strand
cgacuuugacaguuucauc

SEQ ID NO: 19209 - RNA, 19 nt, Homo sapiens
  misc_RNA (1)...(19): siRNA sense strand
aaccagcucuaugacauca

SEQ ID NO: 19210 - RNA, 19 nt, Homo sapiens
  misc_RNA (1)...(19): siRNA sense strand
agucaacgacgcaggauuc

SEQ ID NO: 19211 - RNA, 19 nt, Homo sapiens
  misc_RNA (1)...(19): siRNA sense strand
uuucaaacacuaugacaca

SEQ ID NO: 19212 - RNA, 19 nt, Homo sapiens
  misc_RNA (1)...(19): siRNA sense strand
acaaacacaaggaccugaa

SEQ ID NO: 19213 - RNA, 19 nt, Homo sapiens
  misc_RNA (1)...(19): siRNA sense strand
caacaauuccggaacauuu

SEQ ID NO: 19214 - RNA, 19 nt, Homo sapiens
  misc_RNA (1)...(19): siRNA sense strand
gaacaucgacuuugacagu

SEQ ID NO: 19215 - RNA, 19 nt, Homo sapiens
  misc_RNA (1)...(19): siRNA sense strand
cagaugagcucaagaaggu

SEQ ID NO: 19216 - RNA, 19 nt, Homo sapiens
  misc_RNA (1)...(19): siRNA sense strand
acaaggaccugaagacaca

SEQ ID NO: 19217 - RNA, 19 nt, Homo sapiens
  misc_RNA (1)...(19): siRNA sense strand
gcucugaucaggaaaguga

SEQ ID NO: 19218 - RNA, 19 nt, Homo sapiens
  misc_RNA (1)...(19): siRNA sense strand
ucaacaaccagcucuauga

SEQ ID NO: 19219 - RNA, 19 nt, Homo sapiens
  misc_RNA (1)...(19): siRNA sense strand
ggcugcagcucaccaugua

SEQ ID NO: 19220 - RNA, 19 nt, Homo sapiens
  misc_RNA (1)...(19): siRNA sense strand
ugacaaggauggagauggu

SEQ ID NO: 19221 - RNA, 19 nt, Homo sapiens
  misc_RNA (1)...(19): siRNA sense strand
acaugaacaucgacuuuga

SEQ ID NO: 19222 - RNA, 19 nt, Homo sapiens
  misc_RNA (1)...(19): siRNA sense strand
uggcagcucugaucaggaa

SEQ ID NO: 19223 - RNA, 19 nt, Homo sapiens
  misc_RNA (1)...(19): siRNA sense strand
cagcaacaauuccggaaca

SEQ ID NO: 19224 - RNA, 19 nt, Homo sapiens
  misc_RNA (1)...(19): siRNA sense strand
gcagauagcaggagaugac

SEQ ID NO: 19225 - RNA, 19 nt, Homo sapiens
  misc_RNA (1)...(19): siRNA sense strand
uaacacagucgugaacaaa

SEQ ID NO: 19226 - RNA, 19 nt, Homo sapiens
  misc_RNA (1)...(19): siRNA sense strand
gauuaaggccuggcagaaa

SEQ ID NO: 19227 - RNA, 19 nt, Homo sapiens
  misc_RNA (1)...(19): siRNA sense strand
gugaggaacagcaacaauu

SEQ ID NO: 19228 - RNA, 19 nt, Homo sapiens
  misc_RNA (1)...(19): siRNA sense strand
acaaacacaugaacaucga

SEQ ID NO: 19229 - RNA, 19 nt, Homo sapiens
  misc_RNA (1)...(19): siRNA sense strand
caccaccucuggaacaaga

SEQ ID NO: 19230 - RNA, 19 nt, Homo sapiens
  misc_RNA (1)...(19): siRNA sense strand
gagggcauguucagagcuu

SEQ ID NO: 19231 - RNA, 19 nt, Homo sapiens
  misc_RNA (1)...(19): siRNA sense strand
ggaaagugaggaacagcaa

SEQ ID NO: 19232 - RNA, 19 nt, Homo sapiens
  misc_RNA (1)...(19): siRNA sense strand
gauagcaggagaugacaug

SEQ ID NO: 19233 - RNA, 19 nt, Homo sapiens
  misc_RNA (1)...(19): siRNA sense strand
ugauugcgcucauggauac

SEQ ID NO: 19234 - RNA, 19 nt, Homo sapiens
  misc_RNA (1)...(19): siRNA sense strand
acacaugaacaucgacuuu

SEQ ID NO: 19235 - RNA, 19 nt, Homo sapiens
  misc_RNA (1)...(19): siRNA sense strand
acacagucgugaacaaaca

SEQ ID NO: 19236 - RNA, 19 nt, Homo sapiens
  misc_RNA (1)...(19): siRNA sense strand
guacgcagacaaacacaug

SEQ ID NO: 19237 - RNA, 19 nt, Homo sapiens
  misc_RNA (1)...(19): siRNA sense strand
gugcagaugagcucaagaa

SEQ ID NO: 19238 - RNA, 19 nt, Homo sapiens
  misc_RNA (1)...(19): siRNA sense strand
acaaccagcucuaugacau

SEQ ID NO: 19239 - RNA, 19 nt, Homo sapiens
  misc_RNA (1)...(19): siRNA sense strand
gcaacaauuccggaacauu

SEQ ID NO: 19240 - RNA, 19 nt, Homo sapiens
  misc_RNA (1)...(19): siRNA sense strand
guucagagcuuuucaugca

SEQ ID NO: 19241 - RNA, 19 nt, Homo sapiens
  misc_RNA (1)...(19): siRNA sense strand
gcagacaaacacaugaaca

SEQ ID NO: 19242 - RNA, 19 nt, Homo sapiens
  misc_RNA (1)...(19): siRNA sense strand
gaugcgaaaugcagucaac

SEQ ID NO: 19243 - RNA, 19 nt, Homo sapiens
  misc_RNA (1)...(19): siRNA sense strand
gaagacacacggguucaca

SEQ ID NO: 19244 - RNA, 19 nt, Homo sapiens
  misc_RNA (1)...(19): siRNA sense strand
ucaucaagcucaacguucu

SEQ ID NO: 19245 - RNA, 19 nt, Homo sapiens
  misc_RNA (1)...(19): siRNA sense strand
acaucgacuuugacaguuu

SEQ ID NO: 19246 - RNA, 19 nt, Homo sapiens
  misc_RNA (1)...(19): siRNA sense strand
gcuacgagaugcgaaaugc

SEQ ID NO: 19247 - RNA, 19 nt, Homo sapiens
  misc_RNA (1)...(19): siRNA sense strand
uuaacacagucgugaacaa

SEQ ID NO: 19248 - RNA, 19 nt, Homo sapiens
  misc_RNA (1)...(19): siRNA sense strand
ugaggaacagcaacaauuc

SEQ ID NO: 19249 - RNA, 19 nt, Homo sapiens
  misc_RNA (1)...(19): siRNA sense strand
caucgacuuugacaguuuc

SEQ ID NO: 19250 - RNA, 19 nt, Homo sapiens
  misc_RNA (1)...(19): siRNA sense strand
gauuccaccucaacaacca

SEQ ID NO: 19251 - RNA, 19 nt, Homo sapiens
  misc_RNA (1)...(19): siRNA sense strand
uucaucugcugcuucguua

SEQ ID NO: 19252 - RNA, 19 nt, Homo sapiens
  misc_RNA (1)...(19): siRNA sense strand
ucaaacacuaugacacaga

SEQ ID NO: 19253 - RNA, 19 nt, Homo sapiens
  misc_RNA (1)...(19): siRNA sense strand
aaacacaaggaccugaaga

SEQ ID NO: 19254 - RNA, 19 nt, Homo sapiens
  misc_RNA (1)...(19): siRNA sense strand
uaucaucaagcucaacguu

SEQ ID NO: 19255 - RNA, 19 nt, Homo sapiens
  misc_RNA (1)...(19): siRNA sense strand
guccugccguagcaugauu

SEQ ID NO: 19256 - RNA, 19 nt, Homo sapiens
  misc_RNA (1)...(19): siRNA sense strand
cagacaaacacaugaacau

SEQ ID NO: 19257 - RNA, 19 nt, Homo sapiens
  misc_RNA (1)...(19): siRNA sense strand
gcaggauuccaccucaaca

SEQ ID NO: 19258 - RNA, 19 nt, Homo sapiens
  misc_RNA (1)...(19): siRNA sense strand
gaccaguccggcaccauca

SEQ ID NO: 19259 - RNA, 19 nt, Homo sapiens
  misc_RNA (1)...(19): siRNA sense strand
caacaaccagcucuaugac

SEQ ID NO: 19260 - RNA, 19 nt, Homo sapiens
  misc_RNA (1)...(19): siRNA sense strand
ucaggaaagugaggaacag

SEQ ID NO: 19261 - RNA, 19 nt, Homo sapiens
  misc_RNA (1)...(19): siRNA sense strand
gacaaggauggagauggua

SEQ ID NO: 19262 - RNA, 19 nt, Homo sapiens
  misc_RNA (1)...(19): siRNA sense strand
cgacuuugacaguuucauc

SEQ ID NO: 19263 - RNA, 19 nt, Homo sapiens
  misc_RNA (1)...(19): siRNA sense strand
aaccagcucuaugacauca

SEQ ID NO: 19264 - RNA, 19 nt, Homo sapiens
  misc_RNA (1)...(19): siRNA sense strand
agucaacgacgcaggauuc

SEQ ID NO: 19265 - RNA, 19 nt, Homo sapiens
  misc_RNA (1)...(19): siRNA sense strand
uuucaaacacuaugacaca

SEQ ID NO: 19266 - RNA, 19 nt, Homo sapiens
  misc_RNA (1)...(19): siRNA sense strand
acaaacacaaggaccugaa

SEQ ID NO: 19267 - RNA, 19 nt, Homo sapiens
  misc_RNA (1)...(19): siRNA sense strand
caacaauuccggaacauuu

SEQ ID NO: 19268 - RNA, 19 nt, Homo sapiens
  misc_RNA (1)...(19): siRNA sense strand
gaacaucgacuuugacagu

SEQ ID NO: 19269 - RNA, 19 nt, Homo sapiens
  misc_RNA (1)...(19): siRNA sense strand
cagaugagcucaagaaggu

SEQ ID NO: 19270 - RNA, 19 nt, Homo sapiens
  misc_RNA (1)...(19): siRNA sense strand
acaaggaccugaagacaca

SEQ ID NO: 19271 - RNA, 19 nt, Homo sapiens
  misc_RNA (1)...(19): siRNA sense strand
gcucugaucaggaaaguga

SEQ ID NO: 19272 - RNA, 19 nt, Homo sapiens
  misc_RNA (1)...(19): siRNA sense strand
ucaacaaccagcucuauga

SEQ ID NO: 19273 - RNA, 19 nt, Homo sapiens
  misc_RNA (1)...(19): siRNA sense strand
ggcugcagcucaccaugua

SEQ ID NO: 19274 - RNA, 19 nt, Homo sapiens
  misc_RNA (1)...(19): siRNA sense strand
ugacaaggauggagauggu

SEQ ID NO: 19275 - RNA, 19 nt, Homo sapiens
  misc_RNA (1)...(19): siRNA sense strand
acaugaacaucgacuuuga

SEQ ID NO: 19276 - RNA, 19 nt, Homo sapiens
  misc_RNA (1)...(19): siRNA sense strand
uggcagcucugaucaggaa

SEQ ID NO: 19277 - RNA, 19 nt, Homo sapiens
  misc_RNA (1)...(19): siRNA sense strand
cagcaacaauuccggaaca

SEQ ID NO: 19278 - RNA, 19 nt, Homo sapiens
  misc_RNA (1)...(19): siRNA sense strand
gcagauagcaggagaugac

SEQ ID NO: 19279 - RNA, 19 nt, Homo sapiens
  misc_RNA (1)...(19): siRNA sense strand
uaacacagucgugaacaaa

SEQ ID NO: 19280 - RNA, 19 nt, Homo sapiens
  misc_RNA (1)...(19): siRNA sense strand
gauuaaggccuggcagaaa

SEQ ID NO: 19281 - RNA, 19 nt, Homo sapiens
  misc_RNA (1)...(19): siRNA sense strand
gugaggaacagcaacaauu

SEQ ID NO: 19282 - RNA, 19 nt, Homo sapiens
  misc_RNA (1)...(19): siRNA sense strand
acaaacacaugaacaucga

SEQ ID NO: 19283 - RNA, 19 nt, Homo sapiens
  misc_RNA (1)...(19): siRNA sense strand
caccaccucuggaacaaga

SEQ ID NO: 19284 - RNA, 19 nt, Homo sapiens
  misc_RNA (1)...(19): siRNA sense strand
gagggcauguucagagcuu

SEQ ID NO: 19285 - RNA, 19 nt, Homo sapiens
  misc_RNA (1)...(19): siRNA sense strand
ggaaagugaggaacagcaa

SEQ ID NO: 19286 - RNA, 19 nt, Homo sapiens
  misc_RNA (1)...(19): siRNA sense strand
gauagcaggagaugacaug

SEQ ID NO: 19287 - RNA, 19 nt, Homo sapiens
  misc_RNA (1)...(19): siRNA sense strand
ugauugcgcucauggauac

SEQ ID NO: 19288 - RNA, 19 nt, Homo sapiens
  misc_RNA (1)...(19): siRNA sense strand
acacaugaacaucgacuuu

SEQ ID NO: 19289 - RNA, 19 nt, Homo sapiens
  misc_RNA (1)...(19): siRNA sense strand
acacagucgugaacaaaca

SEQ ID NO: 19290 - RNA, 19 nt, Homo sapiens
  misc_RNA (1)...(19): siRNA sense strand
guacgcagacaaacacaug

SEQ ID NO: 19291 - RNA, 19 nt, Homo sapiens
  misc_RNA (1)...(19): siRNA sense strand
gugcagaugagcucaagaa

SEQ ID NO: 19292 - RNA, 19 nt, Homo sapiens
  misc_RNA (1)...(19): siRNA sense strand
acaaccagcucuaugacau

SEQ ID NO: 19293 - RNA, 19 nt, Homo sapiens
  misc_RNA (1)...(19): siRNA sense strand
gcaacaauuccggaacauu

SEQ ID NO: 19294 - RNA, 19 nt, Homo sapiens
  misc_RNA (1)...(19): siRNA sense strand
guucagagcuuuucaugca

SEQ ID NO: 19295 - RNA, 19 nt, Homo sapiens
  misc_RNA (1)...(19): siRNA sense strand
gcagacaaacacaugaaca

SEQ ID NO: 19296 - RNA, 19 nt, Homo sapiens
  misc_RNA (1)...(19): siRNA sense strand
gaugcgaaaugcagucaac

SEQ ID NO: 19297 - RNA, 19 nt, Homo sapiens
  misc_RNA (1)...(19): siRNA sense strand
gaagacacacggguucaca

SEQ ID NO: 19298 - RNA, 19 nt, Homo sapiens
  misc_RNA (1)...(19): siRNA sense strand
ucaucaagcucaacguucu

SEQ ID NO: 19299 - RNA, 19 nt, Homo sapiens
  misc_RNA (1)...(19): siRNA sense strand
acaucgacuuugacaguuu

SEQ ID NO: 19300 - RNA, 19 nt, Homo sapiens
  misc_RNA (1)...(19): siRNA sense strand
gcuacgagaugcgaaaugc

SEQ ID NO: 19301 - RNA, 19 nt, Homo sapiens
  misc_RNA (1)...(19): siRNA sense strand
uuaacacagucgugaacaa

SEQ ID NO: 19302 - RNA, 19 nt, Homo sapiens
  misc_RNA (1)...(19): siRNA sense strand
ugaggaacagcaacaauuc

SEQ ID NO: 19303 - RNA, 19 nt, Homo sapiens
  misc_RNA (1)...(19): siRNA sense strand
caucgacuuugacaguuuc

SEQ ID NO: 19304 - RNA, 19 nt, Homo sapiens
  misc_RNA (1)...(19): siRNA sense strand
gauuccaccucaacaacca

SEQ ID NO: 19305 - RNA, 19 nt, Homo sapiens
  misc_RNA (1)...(19): siRNA sense strand
uucaucugcugcuucguua

SEQ ID NO: 19306 - RNA, 19 nt, Homo sapiens
  misc_RNA (1)...(19): siRNA sense strand
ucaaacacuaugacacaga

SEQ ID NO: 19307 - RNA, 19 nt, Homo sapiens
  misc_RNA (1)...(19): siRNA sense strand
aaacacaaggaccugaaga

SEQ ID NO: 19308 - RNA, 19 nt, Homo sapiens
  misc_RNA (1)...(19): siRNA sense strand
uaucaucaagcucaacguu

SEQ ID NO: 19309 - RNA, 19 nt, Homo sapiens
  misc_RNA (1)...(19): siRNA sense strand
guccugccguagcaugauu

SEQ ID NO: 19310 - RNA, 19 nt, Homo sapiens
  misc_RNA (1)...(19): siRNA sense strand
cagacaaacacaugaacau

SEQ ID NO: 19311 - RNA, 19 nt, Homo sapiens
  misc_RNA (1)...(19): siRNA sense strand
gcaggauuccaccucaaca

SEQ ID NO: 19312 - RNA, 19 nt, Homo sapiens
  misc_RNA (1)...(19): siRNA sense strand
gaccaguccggcaccauca

SEQ ID NO: 19313 - RNA, 19 nt, Homo sapiens
  misc_RNA (1)...(19): siRNA sense strand
caacaaccagcucuaugac

SEQ ID NO: 19314 - RNA, 19 nt, Homo sapiens
  misc_RNA (1)...(19): siRNA sense strand
ucaggaaagugaggaacag

SEQ ID NO: 19315 - RNA, 19 nt, Homo sapiens
  misc_RNA (1)...(19): siRNA sense strand
gacaaggauggagauggua

SEQ ID NO: 19316 - RNA, 19 nt, Homo sapiens
  misc_RNA (1)...(19): siRNA sense strand
cgacuuugacaguuucauc

SEQ ID NO: 19317 - RNA, 19 nt, Homo sapiens
  misc_RNA (1)...(19): siRNA sense strand
aaccagcucuaugacauca

SEQ ID NO: 19318 - RNA, 19 nt, Homo sapiens
  misc_RNA (1)...(19): siRNA sense strand
agucaacgacgcaggauuc

SEQ ID NO: 19319 - RNA, 19 nt, Homo sapiens
  misc_RNA (1)...(19): siRNA sense strand
uuucaaacacuaugacaca

SEQ ID NO: 19320 - RNA, 19 nt, Homo sapiens
  misc_RNA (1)...(19): siRNA sense strand
acaaacacaaggaccugaa

SEQ ID NO: 19321 - RNA, 19 nt, Homo sapiens
  misc_RNA (1)...(19): siRNA sense strand
caacaauuccggaacauuu

SEQ ID NO: 19322 - RNA, 19 nt, Homo sapiens
  misc_RNA (1)...(19): siRNA sense strand
gaacaucgacuuugacagu

SEQ ID NO: 19323 - RNA, 19 nt, Homo sapiens
  misc_RNA (1)...(19): siRNA sense strand
cagaugagcucaagaaggu

SEQ ID NO: 19324 - RNA, 19 nt, Homo sapiens
  misc_RNA (1)...(19): siRNA sense strand
acaaggaccugaagacaca

SEQ ID NO: 19325 - RNA, 19 nt, Homo sapiens
  misc_RNA (1)...(19): siRNA sense strand
gcucugaucaggaaaguga

SEQ ID NO: 19326 - RNA, 19 nt, Homo sapiens
  misc_RNA (1)...(19): siRNA sense strand
ucaacaaccagcucuauga

SEQ ID NO: 19327 - RNA, 19 nt, Homo sapiens
  misc_RNA (1)...(19): siRNA sense strand
ggcugcagcucaccaugua

SEQ ID NO: 19328 - RNA, 19 nt, Homo sapiens
  misc_RNA (1)...(19): siRNA sense strand
ugacaaggauggagauggu

SEQ ID NO: 19329 - RNA, 19 nt, Homo sapiens
  misc_RNA (1)...(19): siRNA sense strand
acaugaacaucgacuuuga

SEQ ID NO: 19330 - RNA, 19 nt, Homo sapiens
  misc_RNA (1)...(19): siRNA sense strand
uggcagcucugaucaggaa

SEQ ID NO: 19331 - RNA, 19 nt, Homo sapiens
  misc_RNA (1)...(19): siRNA sense strand
cagcaacaauuccggaaca

SEQ ID NO: 19332 - RNA, 19 nt, Homo sapiens
  misc_RNA (1)...(19): siRNA sense strand
gcagauagcaggagaugac

SEQ ID NO: 19333 - RNA, 19 nt, Homo sapiens
  misc_RNA (1)...(19): siRNA sense strand
uaacacagucgugaacaaa

SEQ ID NO: 19334 - RNA, 19 nt, Homo sapiens
  misc_RNA (1)...(19): siRNA sense strand
gauuaaggccuggcagaaa

SEQ ID NO: 19335 - RNA, 19 nt, Homo sapiens
  misc_RNA (1)...(19): siRNA sense strand
gugaggaacagcaacaauu

SEQ ID NO: 19336 - RNA, 19 nt, Homo sapiens
  misc_RNA (1)...(19): siRNA sense strand
acaaacacaugaacaucga

SEQ ID NO: 19337 - RNA, 19 nt, Homo sapiens
  misc_RNA (1)...(19): siRNA sense strand
caccaccucuggaacaaga

SEQ ID NO: 19338 - RNA, 19 nt, Homo sapiens
  misc_RNA (1)...(19): siRNA sense strand
gagggcauguucagagcuu

SEQ ID NO: 19339 - RNA, 19 nt, Homo sapiens
  misc_RNA (1)...(19): siRNA sense strand
ggaaagugaggaacagcaa

SEQ ID NO: 19340 - RNA, 19 nt, Homo sapiens
  misc_RNA (1)...(19): siRNA sense strand
gauagcaggagaugacaug

SEQ ID NO: 19341 - RNA, 19 nt, Homo sapiens
  misc_RNA (1)...(19): siRNA sense strand
ugauugcgcucauggauac

SEQ ID NO: 19342 - RNA, 19 nt, Homo sapiens
  misc_RNA (1)...(19): siRNA sense strand
acacaugaacaucgacuuu

SEQ ID NO: 19343 - RNA, 19 nt, Homo sapiens
  misc_RNA (1)...(19): siRNA sense strand
acacagucgugaacaaaca

SEQ ID NO: 19344 - RNA, 19 nt, Homo sapiens
  misc_RNA (1)...(19): siRNA sense strand
guacgcagacaaacacaug

SEQ ID NO: 19345 - RNA, 19 nt, Homo sapiens
  misc_RNA (1)...(19): siRNA sense strand
gugcagaugagcucaagaa

SEQ ID NO: 19346 - RNA, 19 nt, Homo sapiens
  misc_RNA (1)...(19): siRNA sense strand
acaaccagcucuaugacau

SEQ ID NO: 19347 - RNA, 19 nt, Homo sapiens
  misc_RNA (1)...(19): siRNA sense strand
gcaacaauuccggaacauu

SEQ ID NO: 19348 - RNA, 19 nt, Homo sapiens
  misc_RNA (1)...(19): siRNA sense strand
guucagagcuuuucaugca

SEQ ID NO: 19349 - RNA, 19 nt, Homo sapiens
  misc_RNA (1)...(19): siRNA sense strand
gcagacaaacacaugaaca

SEQ ID NO: 19350 - RNA, 19 nt, Homo sapiens
  misc_RNA (1)...(19): siRNA sense strand
gaugcgaaaugcagucaac

SEQ ID NO: 19351 - RNA, 19 nt, Homo sapiens
  misc_RNA (1)...(19): siRNA sense strand
gaagacacacggguucaca

SEQ ID NO: 19352 - RNA, 19 nt, Homo sapiens
  misc_RNA (1)...(19): siRNA sense strand
ucaucaagcucaacguucu

SEQ ID NO: 19353 - RNA, 19 nt, Homo sapiens
  misc_RNA (1)...(19): siRNA sense strand
acaucgacuuugacaguuu

SEQ ID NO: 19354 - RNA, 19 nt, Homo sapiens
  misc_RNA (1)...(19): siRNA sense strand
gcuacgagaugcgaaaugc

SEQ ID NO: 19355 - RNA, 19 nt, Homo sapiens
  misc_RNA (1)...(19): siRNA sense strand
uuaacacagucgugaacaa

SEQ ID NO: 19356 - RNA, 19 nt, Homo sapiens
  misc_RNA (1)...(19): siRNA sense strand
ugaggaacagcaacaauuc

SEQ ID NO: 19357 - RNA, 19 nt, Homo sapiens
  misc_RNA (1)...(19): siRNA sense strand
caucgacuuugacaguuuc

SEQ ID NO: 19358 - RNA, 19 nt, Homo sapiens
  misc_RNA (1)...(19): siRNA sense strand
gauuccaccucaacaacca

SEQ ID NO: 19359 - RNA, 19 nt, Homo sapiens
  misc_RNA (1)...(19): siRNA sense strand
uucaucugcugcuucguua

SEQ ID NO: 19360 - RNA, 19 nt, Homo sapiens
  misc_RNA (1)...(19): siRNA sense strand
ucaaacacuaugacacaga

SEQ ID NO: 19361 - RNA, 19 nt, Homo sapiens
  misc_RNA (1)...(19): siRNA sense strand
aaacacaaggaccugaaga

SEQ ID NO: 19362 - RNA, 19 nt, Homo sapiens
  misc_RNA (1)...(19): siRNA sense strand
uaucaucaagcucaacguu

SEQ ID NO: 19363 - RNA, 19 nt, Homo sapiens
  misc_RNA (1)...(19): siRNA sense strand
guccugccguagcaugauu

SEQ ID NO: 19364 - RNA, 19 nt, Homo sapiens
  misc_RNA (1)...(19): siRNA sense strand
cagacaaacacaugaacau

SEQ ID NO: 19365 - RNA, 19 nt, Homo sapiens
  misc_RNA (1)...(19): siRNA sense strand
gcaggauuccaccucaaca

SEQ ID NO: 19366 - RNA, 19 nt, Homo sapiens
  misc_RNA (1)...(19): siRNA sense strand
gaccaguccggcaccauca

SEQ ID NO: 19367 - RNA, 19 nt, Homo sapiens
  misc_RNA (1)...(19): siRNA sense strand
caacaaccagcucuaugac

SEQ ID NO: 19368 - RNA, 19 nt, Homo sapiens
  misc_RNA (1)...(19): siRNA sense strand
ucaggaaagugaggaacag

SEQ ID NO: 19369 - RNA, 19 nt, Homo sapiens
  misc_RNA (1)...(19): siRNA sense strand
gacaaggauggagauggua

SEQ ID NO: 19370 - RNA, 19 nt, Homo sapiens
  misc_RNA (1)...(19): siRNA sense strand
cgacuuugacaguuucauc

SEQ ID NO: 19371 - RNA, 19 nt, Homo sapiens
  misc_RNA (1)...(19): siRNA sense strand
aaccagcucuaugacauca

SEQ ID NO: 19372 - RNA, 19 nt, Homo sapiens
  misc_RNA (1)...(19): siRNA sense strand
agucaacgacgcaggauuc

SEQ ID NO: 19373 - RNA, 19 nt, Homo sapiens
  misc_RNA (1)...(19): siRNA sense strand
uuucaaacacuaugacaca

SEQ ID NO: 19374 - RNA, 19 nt, Homo sapiens
  misc_RNA (1)...(19): siRNA sense strand
acaaacacaaggaccugaa

SEQ ID NO: 19375 - RNA, 19 nt, Homo sapiens
  misc_RNA (1)...(19): siRNA sense strand
gaacaucgacuuugacagu

SEQ ID NO: 19376 - RNA, 19 nt, Homo sapiens
  misc_RNA (1)...(19): siRNA sense strand
cagaugagcucaagaaggu

SEQ ID NO: 19377 - RNA, 19 nt, Homo sapiens
  misc_RNA (1)...(19): siRNA sense strand
acaaggaccugaagacaca

SEQ ID NO: 19378 - RNA, 19 nt, Homo sapiens
  misc_RNA (1)...(19): siRNA sense strand
ucaacaaccagcucuauga

SEQ ID NO: 19379 - RNA, 19 nt, Homo sapiens
  misc_RNA (1)...(19): siRNA sense strand
ggcugcagcucaccaugua

SEQ ID NO: 19380 - RNA, 19 nt, Homo sapiens
  misc_RNA (1)...(19): siRNA sense strand
ugacaaggauggagauggu

SEQ ID NO: 19381 - RNA, 19 nt, Homo sapiens
  misc_RNA (1)...(19): siRNA sense strand
acaugaacaucgacuuuga

SEQ ID NO: 19382 - RNA, 19 nt, Homo sapiens
  misc_RNA (1)...(19): siRNA sense strand
uaacacagucgugaacaaa

SEQ ID NO: 19383 - RNA, 19 nt, Homo sapiens
  misc_RNA (1)...(19): siRNA sense strand
gauuaaggccuggcagaaa

SEQ ID NO: 19384 - RNA, 19 nt, Homo sapiens
  misc_RNA (1)...(19): siRNA sense strand
acaaacacaugaacaucga

SEQ ID NO: 19385 - RNA, 19 nt, Homo sapiens
  misc_RNA (1)...(19): siRNA sense strand
caccaccucuggaacaaga

SEQ ID NO: 19386 - RNA, 19 nt, Homo sapiens
  misc_RNA (1)...(19): siRNA sense strand
gagggcauguucagagcuu

SEQ ID NO: 19387 - RNA, 19 nt, Homo sapiens
  misc_RNA (1)...(19): siRNA sense strand
ugauugcgcucauggauac

SEQ ID NO: 19388 - RNA, 19 nt, Homo sapiens
  misc_RNA (1)...(19): siRNA sense strand
acacaugaacaucgacuuu

SEQ ID NO: 19389 - RNA, 19 nt, Homo sapiens
  misc_RNA (1)...(19): siRNA sense strand
acacagucgugaacaaaca

SEQ ID NO: 19390 - RNA, 19 nt, Homo sapiens
  misc_RNA (1)...(19): siRNA sense strand
guacgcagacaaacacaug

SEQ ID NO: 19391 - RNA, 19 nt, Homo sapiens
  misc_RNA (1)...(19): siRNA sense strand
gugcagaugagcucaagaa

SEQ ID NO: 19392 - RNA, 19 nt, Homo sapiens
  misc_RNA (1)...(19): siRNA sense strand
acaaccagcucuaugacau

SEQ ID NO: 19393 - RNA, 19 nt, Homo sapiens
  misc_RNA (1)...(19): siRNA sense strand
guucagagcuuuucaugca

SEQ ID NO: 19394 - RNA, 19 nt, Homo sapiens
  misc_RNA (1)...(19): siRNA sense strand
gcagacaaacacaugaaca

SEQ ID NO: 19395 - RNA, 19 nt, Homo sapiens
  misc_RNA (1)...(19): siRNA sense strand
gaugcgaaaugcagucaac

SEQ ID NO: 19396 - RNA, 19 nt, Homo sapiens
  misc_RNA (1)...(19): siRNA sense strand
gaagacacacggguucaca

SEQ ID NO: 19397 - RNA, 19 nt, Homo sapiens
  misc_RNA (1)...(19): siRNA sense strand
ucaucaagcucaacguucu

SEQ ID NO: 19398 - RNA, 19 nt, Homo sapiens
  misc_RNA (1)...(19): siRNA sense strand
acaucgacuuugacaguuu

SEQ ID NO: 19399 - RNA, 19 nt, Homo sapiens
  misc_RNA (1)...(19): siRNA sense strand
gcuacgagaugcgaaaugc

SEQ ID NO: 19400 - RNA, 19 nt, Homo sapiens
  misc_RNA (1)...(19): siRNA sense strand
uuaacacagucgugaacaa

SEQ ID NO: 19401 - RNA, 19 nt, Homo sapiens
  misc_RNA (1)...(19): siRNA sense strand
caucgacuuugacaguuuc

SEQ ID NO: 19402 - RNA, 19 nt, Homo sapiens
  misc_RNA (1)...(19): siRNA sense strand
gauuccaccucaacaacca

SEQ ID NO: 19403 - RNA, 19 nt, Homo sapiens
  misc_RNA (1)...(19): siRNA sense strand
uucaucugcugcuucguua

SEQ ID NO: 19404 - RNA, 19 nt, Homo sapiens
  misc_RNA (1)...(19): siRNA sense strand
ucaaacacuaugacacaga

SEQ ID NO: 19405 - RNA, 19 nt, Homo sapiens
  misc_RNA (1)...(19): siRNA sense strand
aaacacaaggaccugaaga

SEQ ID NO: 19406 - RNA, 19 nt, Homo sapiens
  misc_RNA (1)...(19): siRNA sense strand
uaucaucaagcucaacguu

SEQ ID NO: 19407 - RNA, 19 nt, Homo sapiens
  misc_RNA (1)...(19): siRNA sense strand
guccugccguagcaugauu

SEQ ID NO: 19408 - RNA, 19 nt, Homo sapiens
  misc_RNA (1)...(19): siRNA sense strand
cagacaaacacaugaacau

SEQ ID NO: 19409 - RNA, 19 nt, Homo sapiens
  misc_RNA (1)...(19): siRNA sense strand
gcaggauuccaccucaaca

SEQ ID NO: 19410 - RNA, 19 nt, Homo sapiens
  misc_RNA (1)...(19): siRNA sense strand
gaccaguccggcaccauca

SEQ ID NO: 19411 - RNA, 19 nt, Homo sapiens
  misc_RNA (1)...(19): siRNA sense strand
caacaaccagcucuaugac

SEQ ID NO: 19412 - RNA, 19 nt, Homo sapiens
  misc_RNA (1)...(19): siRNA sense strand
uuucaaacacuaugacaca

SEQ ID NO: 19413 - RNA, 19 nt, Homo sapiens
  misc_RNA (1)...(19): siRNA sense strand
gacaaggauggagauggua

SEQ ID NO: 19414 - RNA, 19 nt, Homo sapiens
  misc_RNA (1)...(19): siRNA sense strand
cgacuuugacaguuucauc

SEQ ID NO: 19415 - RNA, 19 nt, Homo sapiens
  misc_RNA (1)...(19): siRNA sense strand
acaaacacaaggaccugaa

SEQ ID NO: 19416 - RNA, 19 nt, Homo sapiens
  misc_RNA (1)...(19): siRNA sense strand
aaccagcucuaugacauca

SEQ ID NO: 19417 - RNA, 19 nt, Homo sapiens
  misc_RNA (1)...(19): siRNA sense strand
agucaacgacgcaggauuc

SEQ ID NO: 19418 - RNA, 19 nt, Homo sapiens
  misc_RNA (1)...(19): siRNA sense strand
gaacaucgacuuugacagu

SEQ ID NO: 19419 - RNA, 19 nt, Homo sapiens
  misc_RNA (1)...(19): siRNA sense strand
cagaugagcucaagaaggu

SEQ ID NO: 19420 - RNA, 19 nt, Homo sapiens
  misc_RNA (1)...(19): siRNA sense strand
acaaggaccugaagacaca

SEQ ID NO: 19421 - RNA, 19 nt, Homo sapiens
  misc_RNA (1)...(19): siRNA sense strand
ucaacaaccagcucuauga

SEQ ID NO: 19422 - RNA, 19 nt, Homo sapiens
  misc_RNA (1)...(19): siRNA sense strand
ggcugcagcucaccaugua

SEQ ID NO: 19423 - RNA, 19 nt, Homo sapiens
  misc_RNA (1)...(19): siRNA sense strand
ugacaaggauggagauggu

SEQ ID NO: 19424 - RNA, 19 nt, Homo sapiens
  misc_RNA (1)...(19): siRNA sense strand
acaugaacaucgacuuuga

SEQ ID NO: 19425 - RNA, 19 nt, Homo sapiens
  misc_RNA (1)...(19): siRNA sense strand
uaacacagucgugaacaaa

SEQ ID NO: 19426 - RNA, 19 nt, Homo sapiens
  misc_RNA (1)...(19): siRNA sense strand
gauuaaggccuggcagaaa

SEQ ID NO: 19427 - RNA, 19 nt, Homo sapiens
  misc_RNA (1)...(19): siRNA sense strand
acaaacacaugaacaucga

SEQ ID NO: 19428 - RNA, 19 nt, Homo sapiens
  misc_RNA (1)...(19): siRNA sense strand
caccaccucuggaacaaga

SEQ ID NO: 19429 - RNA, 19 nt, Homo sapiens
  misc_RNA (1)...(19): siRNA sense strand
gagggcauguucagagcuu

SEQ ID NO: 19430 - RNA, 19 nt, Homo sapiens
  misc_RNA (1)...(19): siRNA sense strand
ugauugcgcucauggauac

SEQ ID NO: 19431 - RNA, 19 nt, Homo sapiens
  misc_RNA (1)...(19): siRNA sense strand
acacaugaacaucgacuuu

SEQ ID NO: 19432 - RNA, 19 nt, Homo sapiens
  misc_RNA (1)...(19): siRNA sense strand
acacagucgugaacaaaca

SEQ ID NO: 19433 - RNA, 19 nt, Homo sapiens
  misc_RNA (1)...(19): siRNA sense strand
guacgcagacaaacacaug

SEQ ID NO: 19434 - RNA, 19 nt, Homo sapiens
  misc_RNA (1)...(19): siRNA sense strand
gugcagaugagcucaagaa

SEQ ID NO: 19435 - RNA, 19 nt, Homo sapiens
  misc_RNA (1)...(19): siRNA sense strand
acaaccagcucuaugacau

SEQ ID NO: 19436 - RNA, 19 nt, Homo sapiens
  misc_RNA (1)...(19): siRNA sense strand
guucagagcuuuucaugca

SEQ ID NO: 19437 - RNA, 19 nt, Homo sapiens
  misc_RNA (1)...(19): siRNA sense strand
gcagacaaacacaugaaca

SEQ ID NO: 19438 - RNA, 19 nt, Homo sapiens
  misc_RNA (1)...(19): siRNA sense strand
gaugcgaaaugcagucaac

SEQ ID NO: 19439 - RNA, 19 nt, Homo sapiens
  misc_RNA (1)...(19): siRNA sense strand
gaagacacacggguucaca

SEQ ID NO: 19440 - RNA, 19 nt, Homo sapiens
  misc_RNA (1)...(19): siRNA sense strand
ucaucaagcucaacguucu

SEQ ID NO: 19441 - RNA, 19 nt, Homo sapiens
  misc_RNA (1)...(19): siRNA sense strand
acaucgacuuugacaguuu

SEQ ID NO: 19442 - RNA, 19 nt, Homo sapiens
  misc_RNA (1)...(19): siRNA sense strand
gcuacgagaugcgaaaugc

SEQ ID NO: 19443 - RNA, 19 nt, Homo sapiens
  misc_RNA (1)...(19): siRNA sense strand
uuaacacagucgugaacaa

SEQ ID NO: 19444 - RNA, 19 nt, Homo sapiens
  misc_RNA (1)...(19): siRNA sense strand
caucgacuuugacaguuuc

SEQ ID NO: 19445 - RNA, 19 nt, Homo sapiens
  misc_RNA (1)...(19): siRNA sense strand
gauuccaccucaacaacca

SEQ ID NO: 19446 - RNA, 19 nt, Homo sapiens
  misc_RNA (1)...(19): siRNA sense strand
uucaucugcugcuucguua

SEQ ID NO: 19447 - RNA, 19 nt, Homo sapiens
  misc_RNA (1)...(19): siRNA sense strand
ucaaacacuaugacacaga

SEQ ID NO: 19448 - RNA, 19 nt, Homo sapiens
  misc_RNA (1)...(19): siRNA sense strand
aaacacaaggaccugaaga

SEQ ID NO: 19449 - RNA, 19 nt, Homo sapiens
  misc_RNA (1)...(19): siRNA sense strand
uaucaucaagcucaacguu

SEQ ID NO: 19450 - RNA, 19 nt, Homo sapiens
  misc_RNA (1)...(19): siRNA sense strand
guccugccguagcaugauu

SEQ ID NO: 19451 - RNA, 19 nt, Homo sapiens
  misc_RNA (1)...(19): siRNA sense strand
cagacaaacacaugaacau

SEQ ID NO: 19452 - RNA, 19 nt, Homo sapiens
  misc_RNA (1)...(19): siRNA sense strand
gcaggauuccaccucaaca

SEQ ID NO: 19453 - RNA, 19 nt, Homo sapiens
  misc_RNA (1)...(19): siRNA sense strand
gaccaguccggcaccauca

SEQ ID NO: 19454 - RNA, 19 nt, Homo sapiens
  misc_RNA (1)...(19): siRNA sense strand
caacaaccagcucuaugac

SEQ ID NO: 19455 - RNA, 19 nt, Homo sapiens
  misc_RNA (1)...(19): siRNA sense strand
uuucaaacacuaugacaca

SEQ ID NO: 19456 - RNA, 19 nt, Homo sapiens
  misc_RNA (1)...(19): siRNA sense strand
gacaaggauggagauggua

SEQ ID NO: 19457 - RNA, 19 nt, Homo sapiens
  misc_RNA (1)...(19): siRNA sense strand
cgacuuugacaguuucauc

SEQ ID NO: 19458 - RNA, 19 nt, Homo sapiens
  misc_RNA (1)...(19): siRNA sense strand
acaaacacaaggaccugaa

SEQ ID NO: 19459 - RNA, 19 nt, Homo sapiens
  misc_RNA (1)...(19): siRNA sense strand
aaccagcucuaugacauca

SEQ ID NO: 19460 - RNA, 19 nt, Homo sapiens
  misc_RNA (1)...(19): siRNA sense strand
agucaacgacgcaggauuc

SEQ ID NO: 19461 - RNA, 19 nt, Homo sapiens
  misc_RNA (1)...(19): siRNA sense strand
ccaggaagcugaaggagaa

SEQ ID NO: 19462 - RNA, 19 nt, Homo sapiens
  misc_RNA (1)...(19): siRNA sense strand
gcaaagucaucuacaagca

SEQ ID NO: 19463 - RNA, 19 nt, Homo sapiens
  misc_RNA (1)...(19): siRNA sense strand
ggacggugguggacaagug

SEQ ID NO: 19464 - RNA, 19 nt, Homo sapiens
  misc_RNA (1)...(19): siRNA sense strand
ggaagaaguucggccugaa

SEQ ID NO: 19465 - RNA, 19 nt, Homo sapiens
  misc_RNA (1)...(19): siRNA sense strand
ucaacaagauugggaagaa

SEQ ID NO: 19466 - RNA, 19 nt, Homo sapiens
  misc_RNA (1)...(19): siRNA sense strand
gaggaggcguucaccuuug

SEQ ID NO: 19467 - RNA, 19 nt, Homo sapiens
  misc_RNA (1)...(19): siRNA sense strand
gaagaugagcuccgagaag

SEQ ID NO: 19468 - RNA, 19 nt, Homo sapiens
  misc_RNA (1)...(19): siRNA sense strand
agacggagcagacaaccua

SEQ ID NO: 19469 - RNA, 19 nt, Homo sapiens
  misc_RNA (1)...(19): siRNA sense strand
uacaagcaguucaaacaga

SEQ ID NO: 19470 - RNA, 19 nt, Homo sapiens
  misc_RNA (1)...(19): siRNA sense strand
guggacaagugguucaaga

SEQ ID NO: 19471 - RNA, 19 nt, Homo sapiens
  misc_RNA (1)...(19): siRNA sense strand
ggaaggugcagccgucaga

SEQ ID NO: 19472 - RNA, 19 nt, Homo sapiens
  misc_RNA (1)...(19): siRNA sense strand
caacaagauugggaagaag

SEQ ID NO: 19473 - RNA, 19 nt, Homo sapiens
  misc_RNA (1)...(19): siRNA sense strand
acagguggaugcugcagaa

SEQ ID NO: 19474 - RNA, 19 nt, Homo sapiens
  misc_RNA (1)...(19): siRNA sense strand
gaaguucggccugaagugu

SEQ ID NO: 19475 - RNA, 19 nt, Homo sapiens
  misc_RNA (1)...(19): siRNA sense strand
ccauugacuugcugaacuu

SEQ ID NO: 19476 - RNA, 19 nt, Homo sapiens
  misc_RNA (1)...(19): siRNA sense strand
caccaccgcugaugagauc

SEQ ID NO: 19477 - RNA, 19 nt, Homo sapiens
  misc_RNA (1)...(19): siRNA sense strand
acaagugguucaagagcaa

SEQ ID NO: 19478 - RNA, 19 nt, Homo sapiens
  misc_RNA (1)...(19): siRNA sense strand
acaagcaguucaaacagau

SEQ ID NO: 19479 - RNA, 19 nt, Homo sapiens
  misc_RNA (1)...(19): siRNA sense strand
gaagaaguucggccugaag

SEQ ID NO: 19480 - RNA, 19 nt, Homo sapiens
  misc_RNA (1)...(19): siRNA sense strand
ugaggaggcguucaccuuu

SEQ ID NO: 19481 - RNA, 19 nt, Homo sapiens
  misc_RNA (1)...(19): siRNA sense strand
ccaauucucacauccuaga

SEQ ID NO: 19482 - RNA, 19 nt, Homo sapiens
  misc_RNA (1)...(19): siRNA sense strand
gcaugcugaucgcgcaaga

SEQ ID NO: 19483 - RNA, 19 nt, Homo sapiens
  misc_RNA (1)...(19): siRNA sense strand
gccauugacuugcugaacu

SEQ ID NO: 19484 - RNA, 19 nt, Homo sapiens
  misc_RNA (1)...(19): siRNA sense strand
ggccaagugugaguucuuc

SEQ ID NO: 19485 - RNA, 19 nt, Homo sapiens
  misc_RNA (1)...(19): siRNA sense strand
gaucggcuacgacuucauc

SEQ ID NO: 19486 - RNA, 19 nt, Homo sapiens
  misc_RNA (1)...(19): siRNA sense strand
gcaccgggaaguccaguca

SEQ ID NO: 19487 - RNA, 19 nt, Homo sapiens
  misc_RNA (1)...(19): siRNA sense strand
acaggacggugguggacaa

SEQ ID NO: 19488 - RNA, 19 nt, Homo sapiens
  misc_RNA (1)...(19): siRNA sense strand
gagccgacauccgggaaca

SEQ ID NO: 19489 - RNA, 19 nt, Homo sapiens
  misc_RNA (1)...(19): siRNA sense strand
ccugaagugugagcucuug

SEQ ID NO: 19490 - RNA, 19 nt, Homo sapiens
  misc_RNA (1)...(19): siRNA sense strand
ggagcgggaccagaaguga

SEQ ID NO: 19491 - RNA, 19 nt, Homo sapiens
  misc_RNA (1)...(19): siRNA sense strand
ggaagcugaaggagaagug

SEQ ID NO: 19492 - RNA, 19 nt, Homo sapiens
  misc_RNA (1)...(19): siRNA sense strand
ucuacaagcaguucaaaca

SEQ ID NO: 19493 - RNA, 19 nt, Homo sapiens
  misc_RNA (1)...(19): siRNA sense strand
gcagccgucagaccaaguu

SEQ ID NO: 19494 - RNA, 19 nt, Homo sapiens
  misc_RNA (1)...(19): siRNA sense strand
ccuggcggcugaagaacga

SEQ ID NO: 19495 - RNA, 19 nt, Homo sapiens
  misc_RNA (1)...(19): siRNA sense strand
gguucaagagcaacgauga

SEQ ID NO: 19496 - RNA, 19 nt, Homo sapiens
  misc_RNA (1)...(19): siRNA sense strand
gggaucggcuacgacuuca

SEQ ID NO: 19497 - RNA, 19 nt, Homo sapiens
  misc_RNA (1)...(19): siRNA sense strand
gaaccagacggagcagaca

SEQ ID NO: 19498 - RNA, 19 nt, Homo sapiens
  misc_RNA (1)...(19): siRNA sense strand
ccaagugugaguucuucaa

SEQ ID NO: 19499 - RNA, 19 nt, Homo sapiens
  misc_RNA (1)...(19): siRNA sense strand
gugaggacgcccaccaaug

SEQ ID NO: 19500 - RNA, 19 nt, Homo sapiens
  misc_RNA (1)...(19): siRNA sense strand
ugaggacgcccaccaaugc

SEQ ID NO: 19501 - RNA, 19 nt, Homo sapiens
  misc_RNA (1)...(19): siRNA sense strand
agaacgaaauccccaauuc

SEQ ID NO: 19502 - RNA, 19 nt, Homo sapiens
  misc_RNA (1)...(19): siRNA sense strand
uggaagggaucggcuacga

SEQ ID NO: 19503 - RNA, 19 nt, Homo sapiens
  misc_RNA (1)...(19): siRNA sense strand
gaacgaaauccccaauucu

SEQ ID NO: 19504 - RNA, 19 nt, Homo sapiens
  misc_RNA (1)...(19): siRNA sense strand
ugcacgagcagauccagua

SEQ ID NO: 19505 - RNA, 19 nt, Homo sapiens
  misc_RNA (1)...(19): siRNA sense strand
ugaccgugcucccgaccau

SEQ ID NO: 19506 - RNA, 19 nt, Homo sapiens
  misc_RNA (1)...(19): siRNA sense strand
ggacaccccuauggucaga

SEQ ID NO: 19507 - RNA, 19 nt, Homo sapiens
  misc_RNA (1)...(19): siRNA sense strand
cgacaccaccgcugaugag

SEQ ID NO: 19508 - RNA, 19 nt, Homo sapiens
  misc_RNA (1)...(19): siRNA sense strand
ucagugcggaacuacauga

SEQ ID NO: 19509 - RNA, 19 nt, Homo sapiens
  misc_RNA (1)...(19): siRNA sense strand
uaaagaaucugaagaggaa

SEQ ID NO: 19510 - RNA, 19 nt, Homo sapiens
  misc_RNA (1)...(19): siRNA sense strand
gaacagaggcugacaacuu

SEQ ID NO: 19511 - RNA, 19 nt, Homo sapiens
  misc_RNA (1)...(19): siRNA sense strand
gcacagaaguuuacagaca

SEQ ID NO: 19512 - RNA, 19 nt, Homo sapiens
  misc_RNA (1)...(19): siRNA sense strand
ggacauacuuggauauuca

SEQ ID NO: 19513 - RNA, 19 nt, Homo sapiens
  misc_RNA (1)...(19): siRNA sense strand
gaaagucacugcgacauga

SEQ ID NO: 19514 - RNA, 19 nt, Homo sapiens
  misc_RNA (1)...(19): siRNA sense strand
gcagcaacauucaaguuaa

SEQ ID NO: 19515 - RNA, 19 nt, Homo sapiens
  misc_RNA (1)...(19): siRNA sense strand
gcaaacauguucagaaguc

SEQ ID NO: 19516 - RNA, 19 nt, Homo sapiens
  misc_RNA (1)...(19): siRNA sense strand
ggaacuauauugugccuau

SEQ ID NO: 19517 - RNA, 19 nt, Homo sapiens
  misc_RNA (1)...(19): siRNA sense strand
gcaaagagguccuuauacg

SEQ ID NO: 19518 - RNA, 19 nt, Homo sapiens
  misc_RNA (1)...(19): siRNA sense strand
caacaauacugcagaugga

SEQ ID NO: 19519 - RNA, 19 nt, Homo sapiens
  misc_RNA (1)...(19): siRNA sense strand
gaagucaaguaacuggaaa

SEQ ID NO: 19520 - RNA, 19 nt, Homo sapiens
  misc_RNA (1)...(19): siRNA sense strand
gucaaucuaugcuguauuu

SEQ ID NO: 19521 - RNA, 19 nt, Homo sapiens
  misc_RNA (1)...(19): siRNA sense strand
gaaaggaaucccuguguau

SEQ ID NO: 19522 - RNA, 19 nt, Homo sapiens
  misc_RNA (1)...(19): siRNA sense strand
gauccucaauucacuuauu

SEQ ID NO: 19523 - RNA, 19 nt, Homo sapiens
  misc_RNA (1)...(19): siRNA sense strand
ugaaaggaaucccugugua

SEQ ID NO: 19524 - RNA, 19 nt, Homo sapiens
  misc_RNA (1)...(19): siRNA sense strand
cgacacauauaaagguaaa

SEQ ID NO: 19525 - RNA, 19 nt, Homo sapiens
  misc_RNA (1)...(19): siRNA sense strand
cauaggacauacuuggaua

SEQ ID NO: 19526 - RNA, 19 nt, Homo sapiens
  misc_RNA (1)...(19): siRNA sense strand
aaagagguccuuauacgua

SEQ ID NO: 19527 - RNA, 19 nt, Homo sapiens
  misc_RNA (1)...(19): siRNA sense strand
ggagaccuguguacauuuc

SEQ ID NO: 19528 - RNA, 19 nt, Homo sapiens
  misc_RNA (1)...(19): siRNA sense strand
ggauucacuuuacaauuug

SEQ ID NO: 19529 - RNA, 19 nt, Homo sapiens
  misc_RNA (1)...(19): siRNA sense strand
gaagaggaacuauauugug

SEQ ID NO: 19530 - RNA, 19 nt, Homo sapiens
  misc_RNA (1)...(19): siRNA sense strand
acauuucacuuccucauuu

SEQ ID NO: 19531 - RNA, 19 nt, Homo sapiens
  misc_RNA (1)...(19): siRNA sense strand
guacagaguucguuuucua

SEQ ID NO: 19532 - RNA, 19 nt, Homo sapiens
  misc_RNA (1)...(19): siRNA sense strand
aaacccaaaugaagaagaa

SEQ ID NO: 19533 - RNA, 19 nt, Homo sapiens
  misc_RNA (1)...(19): siRNA sense strand
cuucgaaccuucacuauca

SEQ ID NO: 19534 - RNA, 19 nt, Homo sapiens
  misc_RNA (1)...(19): siRNA sense strand
aagcaaagagguccuuaua

SEQ ID NO: 19535 - RNA, 19 nt, Homo sapiens
  misc_RNA (1)...(19): siRNA sense strand
guacagaugcagccucauu

SEQ ID NO: 19536 - RNA, 19 nt, Homo sapiens
  misc_RNA (1)...(19): siRNA sense strand
gcagauggaguuuauaaag

SEQ ID NO: 19537 - RNA, 19 nt, Homo sapiens
  misc_RNA (1)...(19): siRNA sense strand
ggacaacacagucucuuuc

SEQ ID NO: 19538 - RNA, 19 nt, Homo sapiens
  misc_RNA (1)...(19): siRNA sense strand
gaacagcagcaacauucaa

SEQ ID NO: 19539 - RNA, 19 nt, Homo sapiens
  misc_RNA (1)...(19): siRNA sense strand
gauuaaacccaaaugaaga

SEQ ID NO: 19540 - RNA, 19 nt, Homo sapiens
  misc_RNA (1)...(19): siRNA sense strand
guucagaagucaaguaacu

SEQ ID NO: 19541 - RNA, 19 nt, Homo sapiens
  misc_RNA (1)...(19): siRNA sense strand
guauuugaauccgacguua

SEQ ID NO: 19542 - RNA, 19 nt, Homo sapiens
  misc_RNA (1)...(19): siRNA sense strand
gaacuauauugugccuauu

SEQ ID NO: 19543 - RNA, 19 nt, Homo sapiens
  misc_RNA (1)...(19): siRNA sense strand
cagauggaguuuauaaagu

SEQ ID NO: 19544 - RNA, 19 nt, Homo sapiens
  misc_RNA (1)...(19): siRNA sense strand
ggauuaaacccaaaugaag

SEQ ID NO: 19545 - RNA, 19 nt, Homo sapiens
  misc_RNA (1)...(19): siRNA sense strand
gaagaagguacaauugcuu

SEQ ID NO: 19546 - RNA, 19 nt, Homo sapiens
  misc_RNA (1)...(19): siRNA sense strand
cagaaccuauugauggauu

SEQ ID NO: 19547 - RNA, 19 nt, Homo sapiens
  misc_RNA (1)...(19): siRNA sense strand
gagaccugcuuauccagaa

SEQ ID NO: 19548 - RNA, 19 nt, Homo sapiens
  misc_RNA (1)...(19): siRNA sense strand
cacaggaagugaugaugaa

SEQ ID NO: 19549 - RNA, 19 nt, Homo sapiens
  misc_RNA (1)...(19): siRNA sense strand
aaaccuccuuggccugaua

SEQ ID NO: 19550 - RNA, 19 nt, Homo sapiens
  misc_RNA (1)...(19): siRNA sense strand
gccauaaucgacacauaua

SEQ ID NO: 19551 - RNA, 19 nt, Homo sapiens
  misc_RNA (1)...(19): siRNA sense strand
gaaccuucacuaucaguug

SEQ ID NO: 19552 - RNA, 19 nt, Homo sapiens
  misc_RNA (1)...(19): siRNA sense strand
uaacuggauucacuuuaca

SEQ ID NO: 19553 - RNA, 19 nt, Homo sapiens
  misc_RNA (1)...(19): siRNA sense strand
agucagaacuuugagagaa

SEQ ID NO: 19554 - RNA, 19 nt, Homo sapiens
  misc_RNA (1)...(19): siRNA sense strand
aaagcaaguuguccucgaa

SEQ ID NO: 19555 - RNA, 19 nt, Homo sapiens
  misc_RNA (1)...(19): siRNA sense strand
gcaaguuguccucgaagaa

SEQ ID NO: 19556 - RNA, 19 nt, Homo sapiens
  misc_RNA (1)...(19): siRNA sense strand
aaaggaaucccuguguaua

SEQ ID NO: 19557 - RNA, 19 nt, Homo sapiens
  misc_RNA (1)...(19): siRNA sense strand
aagaagaacauaggacaua

SEQ ID NO: 19558 - RNA, 19 nt, Homo sapiens
  misc_RNA (1)...(19): siRNA sense strand
ccacaggaagugaugauga

SEQ ID NO: 19559 - RNA, 19 nt, Homo sapiens
  misc_RNA (1)...(19): siRNA sense strand
ggaaagucacugcgacaug

SEQ ID NO: 19560 - RNA, 19 nt, Homo sapiens
  misc_RNA (1)...(19): siRNA sense strand
guuuggagguauucuaaug

SEQ ID NO: 19561 - RNA, 19 nt, Homo sapiens
  misc_RNA (1)...(19): siRNA sense strand
gcagcugcaucccauaucu

SEQ ID NO: 19562 - RNA, 19 nt, Homo sapiens
  misc_RNA (1)...(19): siRNA sense strand
gaugagaaggcaaacaugu

SEQ ID NO: 19563 - RNA, 19 nt, Homo sapiens
  misc_RNA (1)...(19): siRNA sense strand
gauauucaaccuauaacug

SEQ ID NO: 19564 - RNA, 19 nt, Homo sapiens
  misc_RNA (1)...(19): siRNA sense strand
guaugcaaguccugauguu

SEQ ID NO: 19565 - RNA, 19 nt, Homo sapiens
  misc_RNA (1)...(19): siRNA sense strand
aacagaggcugacaacuuc

SEQ ID NO: 19566 - RNA, 19 nt, Homo sapiens
  misc_RNA (1)...(19): siRNA sense strand
guguauagauucguucuuc

SEQ ID NO: 19567 - RNA, 19 nt, Homo sapiens
  misc_RNA (1)...(19): siRNA sense strand
caaucuaugcuguauuuga

SEQ ID NO: 19568 - RNA, 19 nt, Homo sapiens
  misc_RNA (1)...(19): siRNA sense strand
cgaagaagguacaauugcu

SEQ ID NO: 19569 - RNA, 19 nt, Homo sapiens
  misc_RNA (1)...(19): siRNA sense strand
caaaugaagaagaacauag

SEQ ID NO: 19570 - RNA, 19 nt, Homo sapiens
  misc_RNA (1)...(19): siRNA sense strand
gaugaacagcagcaacauu

SEQ ID NO: 19571 - RNA, 19 nt, Homo sapiens
  misc_RNA (1)...(19): siRNA sense strand
ccuauucuuuggcuuaaug

SEQ ID NO: 19572 - RNA, 19 nt, Homo sapiens
  misc_RNA (1)...(19): siRNA sense strand
gaaccuauugauggauuaa

SEQ ID NO: 19573 - RNA, 19 nt, Homo sapiens
  misc_RNA (1)...(19): siRNA sense strand
gauauuugcaggucaaucu

SEQ ID NO: 19574 - RNA, 19 nt, Homo sapiens
  misc_RNA (1)...(19): siRNA sense strand
aaguaaaguugccauaauc

SEQ ID NO: 19575 - RNA, 19 nt, Homo sapiens
  misc_RNA (1)...(19): siRNA sense strand
caaaugauccucaauucac

SEQ ID NO: 19576 - RNA, 19 nt, Homo sapiens
  misc_RNA (1)...(19): siRNA sense strand
gaagguacaauugcuuuua

SEQ ID NO: 19577 - RNA, 19 nt, Homo sapiens
  misc_RNA (1)...(19): siRNA sense strand
cagcaacauucaaguuaag

SEQ ID NO: 19578 - RNA, 19 nt, Homo sapiens
  misc_RNA (1)...(19): siRNA sense strand
gucaaaaucuucuauguuc

SEQ ID NO: 19579 - RNA, 19 nt, Homo sapiens
  misc_RNA (1)...(19): siRNA sense strand
uacaucauauggugugcua

SEQ ID NO: 19580 - RNA, 19 nt, Homo sapiens
  misc_RNA (1)...(19): siRNA sense strand
gaagaagaacauaggacau

SEQ ID NO: 19581 - RNA, 19 nt, Homo sapiens
  misc_RNA (1)...(19): siRNA sense strand
ccaaaugaagaagaacaua

SEQ ID NO: 19582 - RNA, 19 nt, Homo sapiens
  misc_RNA (1)...(19): siRNA sense strand
gaagggagaccuguguaca

SEQ ID NO: 19583 - RNA, 19 nt, Homo sapiens
  misc_RNA (1)...(19): siRNA sense strand
caucagcaaaugcaaagaa

SEQ ID NO: 19584 - RNA, 19 nt, Homo sapiens
  misc_RNA (1)...(19): siRNA sense strand
ccucgaagaagguacaauu

SEQ ID NO: 19585 - RNA, 19 nt, Homo sapiens
  misc_RNA (1)...(19): siRNA sense strand
ccugauagaaaugaucuua

SEQ ID NO: 19586 - RNA, 19 nt, Homo sapiens
  misc_RNA (1)...(19): siRNA sense strand
agggagaccuguguacauu

SEQ ID NO: 19587 - RNA, 19 nt, Homo sapiens
  misc_RNA (1)...(19): siRNA sense strand
gaacuuugagagaacuguu

SEQ ID NO: 19588 - RNA, 19 nt, Homo sapiens
  misc_RNA (1)...(19): siRNA sense strand
gccuuugccucuccaguug

SEQ ID NO: 19589 - RNA, 19 nt, Homo sapiens
  misc_RNA (1)...(19): siRNA sense strand
ucaaaugauccucaauuca

SEQ ID NO: 19590 - RNA, 19 nt, Homo sapiens
  misc_RNA (1)...(19): siRNA sense strand
aggcaaacauguucagaag

SEQ ID NO: 19591 - RNA, 19 nt, Homo sapiens
  misc_RNA (1)...(19): siRNA sense strand
caaaacggcugcaggucaa

SEQ ID NO: 19592 - RNA, 19 nt, Homo sapiens
  misc_RNA (1)...(19): siRNA sense strand
gaauccgacguuaaucuga

SEQ ID NO: 19593 - RNA, 19 nt, Homo sapiens
  misc_RNA (1)...(19): siRNA sense strand
cgacaugauuaaugguaca

SEQ ID NO: 19594 - RNA, 19 nt, Homo sapiens
  misc_RNA (1)...(19): siRNA sense strand
gaacuguuauggggcuaua

SEQ ID NO: 19595 - RNA, 19 nt, Homo sapiens
  misc_RNA (1)...(19): siRNA sense strand
ccaguuggagaccugcuua

SEQ ID NO: 19596 - RNA, 19 nt, Homo sapiens
  misc_RNA (1)...(19): siRNA sense strand
gcaugcagaucgaaaacaa

SEQ ID NO: 19597 - RNA, 19 nt, Homo sapiens
  misc_RNA (1)...(19): siRNA sense strand
gugccuauucuuuggcuua

SEQ ID NO: 19598 - RNA, 19 nt, Homo sapiens
  misc_RNA (1)...(19): siRNA sense strand
ugaagaggaacuauauugu

SEQ ID NO: 19599 - RNA, 19 nt, Homo sapiens
  misc_RNA (1)...(19): siRNA sense strand
cugaagaggaacuauauug

SEQ ID NO: 19600 - RNA, 19 nt, Homo sapiens
  misc_RNA (1)...(19): siRNA sense strand
agaaccuauugauggauua

SEQ ID NO: 19601 - RNA, 19 nt, Homo sapiens
  misc_RNA (1)...(19): siRNA sense strand
aaagccagguauugcaguu

SEQ ID NO: 19602 - RNA, 19 nt, Homo sapiens
  misc_RNA (1)...(19): siRNA sense strand
ccauaaucgacacauauaa

SEQ ID NO: 19603 - RNA, 19 nt, Homo sapiens
  misc_RNA (1)...(19): siRNA sense strand
gguauucuaaugccaguug

SEQ ID NO: 19604 - RNA, 19 nt, Homo sapiens
  misc_RNA (1)...(19): siRNA sense strand
uuacaacaauacugcagau

SEQ ID NO: 19605 - RNA, 19 nt, Homo sapiens
  misc_RNA (1)...(19): siRNA sense strand
caacauucaaguuaagcaa

SEQ ID NO: 19606 - RNA, 19 nt, Homo sapiens
  misc_RNA (1)...(19): siRNA sense strand
caucauauggugugcuaga

SEQ ID NO: 19607 - RNA, 19 nt, Homo sapiens
  misc_RNA (1)...(19): siRNA sense strand
ugagaaggcaaacauguuc

SEQ ID NO: 19608 - RNA, 19 nt, Homo sapiens
  misc_RNA (1)...(19): siRNA sense strand
aaucugaagaggaacuaua

SEQ ID NO: 19609 - RNA, 19 nt, Homo sapiens
  misc_RNA (1)...(19): siRNA sense strand
gaacugcauugaacuaaau

SEQ ID NO: 19610 - RNA, 19 nt, Homo sapiens
  misc_RNA (1)...(19): siRNA sense strand
gaucacagaacaagucaaa

SEQ ID NO: 19611 - RNA, 19 nt, Homo sapiens
  misc_RNA (1)...(19): siRNA sense strand
gaaaccaguugaggaggaa

SEQ ID NO: 19612 - RNA, 19 nt, Homo sapiens
  misc_RNA (1)...(19): siRNA sense strand
aauggaaucugggaaguaa

SEQ ID NO: 19613 - RNA, 19 nt, Homo sapiens
  misc_RNA (1)...(19): siRNA sense strand
cgagggauguaucagugua

SEQ ID NO: 19614 - RNA, 19 nt, Homo sapiens
  misc_RNA (1)...(19): siRNA sense strand
uaagguguaugacuaucaa

SEQ ID NO: 19615 - RNA, 19 nt, Homo sapiens
  misc_RNA (1)...(19): siRNA sense strand
ccucaaggaucgagaagau

SEQ ID NO: 19616 - RNA, 19 nt, Homo sapiens
  misc_RNA (1)...(19): siRNA sense strand
gucgagagcuucagacaag

SEQ ID NO: 19617 - RNA, 19 nt, Homo sapiens
  misc_RNA (1)...(19): siRNA sense strand
guucgguacuucugacuug

SEQ ID NO: 19618 - RNA, 19 nt, Homo sapiens
  misc_RNA (1)...(19): siRNA sense strand
guaugacuaucaagaagau

SEQ ID NO: 19619 - RNA, 19 nt, Homo sapiens
  misc_RNA (1)...(19): siRNA sense strand
uguaaaggaucacagaaca

SEQ ID NO: 19620 - RNA, 19 nt, Homo sapiens
  misc_RNA (1)...(19): siRNA sense strand
ugucagaacugcauugaac

SEQ ID NO: 19621 - RNA, 19 nt, Homo sapiens
  misc_RNA (1)...(19): siRNA sense strand
caccauaucuggcuuucuc

SEQ ID NO: 19622 - RNA, 19 nt, Homo sapiens
  misc_RNA (1)...(19): siRNA sense strand
ucaaggaucgagaagauga

SEQ ID NO: 19623 - RNA, 19 nt, Homo sapiens
  misc_RNA (1)...(19): siRNA sense strand
guuuaaagaugggaagaug

SEQ ID NO: 19624 - RNA, 19 nt, Homo sapiens
  misc_RNA (1)...(19): siRNA sense strand
ugguuaagguguaugacua

SEQ ID NO: 19625 - RNA, 19 nt, Homo sapiens
  misc_RNA (1)...(19): siRNA sense strand
agaacugcauugaacuaaa

SEQ ID NO: 19626 - RNA, 19 nt, Homo sapiens
  misc_RNA (1)...(19): siRNA sense strand
cauccuggcuaucauucuu

SEQ ID NO: 19627 - RNA, 19 nt, Homo sapiens
  misc_RNA (1)...(19): siRNA sense strand
ucgagaagaugaccaguac

SEQ ID NO: 19628 - RNA, 19 nt, Homo sapiens
  misc_RNA (1)...(19): siRNA sense strand
ccacuugguuaagguguau

SEQ ID NO: 19629 - RNA, 19 nt, Homo sapiens
  misc_RNA (1)...(19): siRNA sense strand
gaugaucggcuuccuaacu

SEQ ID NO: 19630 - RNA, 19 nt, Homo sapiens
  misc_RNA (1)...(19): siRNA sense strand
aagaugaucggcuuccuaa

SEQ ID NO: 19631 - RNA, 19 nt, Homo sapiens
  misc_RNA (1)...(19): siRNA sense strand
gguguaugacuaucaagaa

SEQ ID NO: 19632 - RNA, 19 nt, Homo sapiens
  misc_RNA (1)...(19): siRNA sense strand
ucagaacugcauugaacua

SEQ ID NO: 19633 - RNA, 19 nt, Homo sapiens
  misc_RNA (1)...(19): siRNA sense strand
guaaaggaucacagaacaa

SEQ ID NO: 19634 - RNA, 19 nt, Homo sapiens
  misc_RNA (1)...(19): siRNA sense strand
aaucaaaggaaaccacuug

SEQ ID NO: 19635 - RNA, 19 nt, Homo sapiens
  misc_RNA (1)...(19): siRNA sense strand
agacucuguugcccaauga

SEQ ID NO: 19636 - RNA, 19 nt, Homo sapiens
  misc_RNA (1)...(19): siRNA sense strand
guacuucugacuugugaug

SEQ ID NO: 19637 - RNA, 19 nt, Homo sapiens
  misc_RNA (1)...(19): siRNA sense strand
guacuuuggcccagucaau

SEQ ID NO: 19638 - RNA, 19 nt, Homo sapiens
  misc_RNA (1)...(19): siRNA sense strand
gagaagaugaccaguacag

SEQ ID NO: 19639 - RNA, 19 nt, Homo sapiens
  misc_RNA (1)...(19): siRNA sense strand
uaaaugcagccaccauauc

SEQ ID NO: 19640 - RNA, 19 nt, Homo sapiens
  misc_RNA (1)...(19): siRNA sense strand
cuucauugcuggacaggau

SEQ ID NO: 19641 - RNA, 19 nt, Homo sapiens
  misc_RNA (1)...(19): siRNA sense strand
cauaucuggcuuucucuuu

SEQ ID NO: 19642 - RNA, 19 nt, Homo sapiens
  misc_RNA (1)...(19): siRNA sense strand
cccagucaaucaaaggaaa

SEQ ID NO: 19643 - RNA, 19 nt, Homo sapiens
  misc_RNA (1)...(19): siRNA sense strand
cuaaaugcagccaccauau

SEQ ID NO: 19644 - RNA, 19 nt, Homo sapiens
  misc_RNA (1)...(19): siRNA sense strand
uaaaggaucacagaacaag

SEQ ID NO: 19645 - RNA, 19 nt, Homo sapiens
  misc_RNA (1)...(19): siRNA sense strand
ccaaugaccagcucuacca

SEQ ID NO: 19646 - RNA, 19 nt, Homo sapiens
  misc_RNA (1)...(19): siRNA sense strand
gagggauguaucaguguaa

SEQ ID NO: 19647 - RNA, 19 nt, Homo sapiens
  misc_RNA (1)...(19): siRNA sense strand
auaucuggcuuucucuuug

SEQ ID NO: 19648 - RNA, 19 nt, Homo sapiens
  misc_RNA (1)...(19): siRNA sense strand
cagaacugcauugaacuaa

SEQ ID NO: 19649 - RNA, 19 nt, Homo sapiens
  misc_RNA (1)...(19): siRNA sense strand
gaaugugucagaacugcau

SEQ ID NO: 19650 - RNA, 19 nt, Homo sapiens
  misc_RNA (1)...(19): siRNA sense strand
guguaugacuaucaagaag

SEQ ID NO: 19651 - RNA, 19 nt, Homo sapiens
  misc_RNA (1)...(19): siRNA sense strand
agaagaugguucgguacuu

SEQ ID NO: 19652 - RNA, 19 nt, Homo sapiens
  misc_RNA (1)...(19): siRNA sense strand
uuaaagaugggaagaugau

SEQ ID NO: 19653 - RNA, 19 nt, Homo sapiens
  misc_RNA (1)...(19): siRNA sense strand
acuaaaugcagccaccaua

SEQ ID NO: 19654 - RNA, 19 nt, Homo sapiens
  misc_RNA (1)...(19): siRNA sense strand
guaucaguguaaaggauca

SEQ ID NO: 19655 - RNA, 19 nt, Homo sapiens
  misc_RNA (1)...(19): siRNA sense strand
gaucggcuuccuaacugaa

SEQ ID NO: 19656 - RNA, 19 nt, Homo sapiens
  misc_RNA (1)...(19): siRNA sense strand
uacagaaugugucagaacu

SEQ ID NO: 19657 - RNA, 19 nt, Homo sapiens
  misc_RNA (1)...(19): siRNA sense strand
uaucauucuucuucaaggu

SEQ ID NO: 19658 - RNA, 19 nt, Homo sapiens
  misc_RNA (1)...(19): siRNA sense strand
ggauguaucaguguaaagg

SEQ ID NO: 19659 - RNA, 19 nt, Homo sapiens
  misc_RNA (1)...(19): siRNA sense strand
gguuaagguguaugacuau

SEQ ID NO: 19660 - RNA, 19 nt, Homo sapiens
  misc_RNA (1)...(19): siRNA sense strand
cgguacuucugacuuguga

SEQ ID NO: 19661 - RNA, 19 nt, Homo sapiens
  misc_RNA (1)...(19): siRNA sense strand
aaauggaaucugggaagua

SEQ ID NO: 19662 - RNA, 19 nt, Homo sapiens
  misc_RNA (1)...(19): siRNA sense strand
ggcuaucauucuucuucaa

SEQ ID NO: 19663 - RNA, 19 nt, Homo sapiens
  misc_RNA (1)...(19): siRNA sense strand
gaugguucgguacuucuga

SEQ ID NO: 19664 - RNA, 19 nt, Homo sapiens
  misc_RNA (1)...(19): siRNA sense strand
gcuaucauucuucuucaag

SEQ ID NO: 19665 - RNA, 19 nt, Homo sapiens
  misc_RNA (1)...(19): siRNA sense strand
aaaugcagccaccauaucu

SEQ ID NO: 19666 - RNA, 19 nt, Homo sapiens
  misc_RNA (1)...(19): siRNA sense strand
gauguaucaguguaaagga

SEQ ID NO: 19667 - RNA, 19 nt, Homo sapiens
  misc_RNA (1)...(19): siRNA sense strand
uggaaucugggaaguaaug

SEQ ID NO: 19668 - RNA, 19 nt, Homo sapiens
  misc_RNA (1)...(19): siRNA sense strand
ugaucggcuuccuaacuga

SEQ ID NO: 19669 - RNA, 19 nt, Homo sapiens
  misc_RNA (1)...(19): siRNA sense strand
uauuacagaaugugucaga

SEQ ID NO: 19670 - RNA, 19 nt, Homo sapiens
  misc_RNA (1)...(19): siRNA sense strand
ggaaacagcugaccguuaa

SEQ ID NO: 19671 - RNA, 19 nt, Homo sapiens
  misc_RNA (1)...(19): siRNA sense strand
gacaaggacucuauuauau

SEQ ID NO: 19672 - RNA, 19 nt, Homo sapiens
  misc_RNA (1)...(19): siRNA sense strand
gagucaagcuccauuuaua

SEQ ID NO: 19673 - RNA, 19 nt, Homo sapiens
  misc_RNA (1)...(19): siRNA sense strand
agaaagauccuuauccuua

SEQ ID NO: 19674 - RNA, 19 nt, Homo sapiens
  misc_RNA (1)...(19): siRNA sense strand
gauagaagaugaaaggaau

SEQ ID NO: 19675 - RNA, 19 nt, Homo sapiens
  misc_RNA (1)...(19): siRNA sense strand
gaucagaauccucaaauug

SEQ ID NO: 19676 - RNA, 19 nt, Homo sapiens
  misc_RNA (1)...(19): siRNA sense strand
gaaagauccuuauccuuac

SEQ ID NO: 19677 - RNA, 19 nt, Homo sapiens
  misc_RNA (1)...(19): siRNA sense strand
agacaaggacucuauuaua

SEQ ID NO: 19678 - RNA, 19 nt, Homo sapiens
  misc_RNA (1)...(19): siRNA sense strand
gcaacaauccauucacuug

SEQ ID NO: 19679 - RNA, 19 nt, Homo sapiens
  misc_RNA (1)...(19): siRNA sense strand
ggagaaagauccuuauccu

SEQ ID NO: 19680 - RNA, 19 nt, Homo sapiens
  misc_RNA (1)...(19): siRNA sense strand
caaggacucuauuauaucu

SEQ ID NO: 19681 - RNA, 19 nt, Homo sapiens
  misc_RNA (1)...(19): siRNA sense strand
gaaaacagcuuugaaaugc

SEQ ID NO: 19682 - RNA, 19 nt, Homo sapiens
  misc_RNA (1)...(19): siRNA sense strand
gggaaacagcugaccguua

SEQ ID NO: 19683 - RNA, 19 nt, Homo sapiens
  misc_RNA (1)...(19): siRNA sense strand
ggacugcccaucagcauga

SEQ ID NO: 19684 - RNA, 19 nt, Homo sapiens
  misc_RNA (1)...(19): siRNA sense strand
cggcacaugucauaaguga

SEQ ID NO: 19685 - RNA, 19 nt, Homo sapiens
  misc_RNA (1)...(19): siRNA sense strand
gaucgaaacauacaaccaa

SEQ ID NO: 19686 - RNA, 19 nt, Homo sapiens
  misc_RNA (1)...(19): siRNA sense strand
aaacagcuuugaaaugcaa

SEQ ID NO: 19687 - RNA, 19 nt, Homo sapiens
  misc_RNA (1)...(19): siRNA sense strand
aaagacaaggacucuauua

SEQ ID NO: 19688 - RNA, 19 nt, Homo sapiens
  misc_RNA (1)...(19): siRNA sense strand
acaaagaggagacgaagaa

SEQ ID NO: 19689 - RNA, 19 nt, Homo sapiens
  misc_RNA (1)...(19): siRNA sense strand
ucacuugggaggaguauuu

SEQ ID NO: 19690 - RNA, 19 nt, Homo sapiens
  misc_RNA (1)...(19): siRNA sense strand
caagauagaagaugaaagg

SEQ ID NO: 19691 - RNA, 19 nt, Homo sapiens
  misc_RNA (1)...(19): siRNA sense strand
gggaggaguauuugaauug

SEQ ID NO: 19692 - RNA, 19 nt, Homo sapiens
  misc_RNA (1)...(19): siRNA sense strand
aaacauacaaccaaacuuc

SEQ ID NO: 19693 - RNA, 19 nt, Homo sapiens
  misc_RNA (1)...(19): siRNA sense strand
uaagugaggccagcaguaa

SEQ ID NO: 19694 - RNA, 19 nt, Homo sapiens
  misc_RNA (1)...(19): siRNA sense strand
gcacuggcuucacguccuu

SEQ ID NO: 19695 - RNA, 19 nt, Homo sapiens
  misc_RNA (1)...(19): siRNA sense strand
ggacaagauagaagaugaa

SEQ ID NO: 19696 - RNA, 19 nt, Homo sapiens
  misc_RNA (1)...(19): siRNA sense strand
gaacugugaggagauuaaa

SEQ ID NO: 19697 - RNA, 19 nt, Homo sapiens
  misc_RNA (1)...(19): siRNA sense strand
aaaggauacuacaccauga

SEQ ID NO: 19698 - RNA, 19 nt, Homo sapiens
  misc_RNA (1)...(19): siRNA sense strand
caagucaccuucuguucca

SEQ ID NO: 19699 - RNA, 19 nt, Homo sapiens
  misc_RNA (1)...(19): siRNA sense strand
uggacaagauagaagauga

SEQ ID NO: 19700 - RNA, 19 nt, Homo sapiens
  misc_RNA (1)...(19): siRNA sense strand
aagaggagacgaagaaaga

SEQ ID NO: 19701 - RNA, 19 nt, Homo sapiens
  misc_RNA (1)...(19): siRNA sense strand
gaggagacgaagaaagaaa

SEQ ID NO: 19702 - RNA, 19 nt, Homo sapiens
  misc_RNA (1)...(19): siRNA sense strand
uauccuuacugaacuguga

SEQ ID NO: 19703 - RNA, 19 nt, Homo sapiens
  misc_RNA (1)...(19): siRNA sense strand
gggcaacaauccauucacu

SEQ ID NO: 19704 - RNA, 19 nt, Homo sapiens
  misc_RNA (1)...(19): siRNA sense strand
cgagagaaucuuacucaga

SEQ ID NO: 19705 - RNA, 19 nt, Homo sapiens
  misc_RNA (1)...(19): siRNA sense strand
ugaucagaauccucaaauu

SEQ ID NO: 19706 - RNA, 19 nt, Homo sapiens
  misc_RNA (1)...(19): siRNA sense strand
gagaaagauccuuauccuu

SEQ ID NO: 19707 - RNA, 19 nt, Homo sapiens
  misc_RNA (1)...(19): siRNA sense strand
gauacuacaccaugagcaa

SEQ ID NO: 19708 - RNA, 19 nt, Homo sapiens
  misc_RNA (1)...(19): siRNA sense strand
gaaacauacaaccaaacuu

SEQ ID NO: 19709 - RNA, 19 nt, Homo sapiens
  misc_RNA (1)...(19): siRNA sense strand
gugcuucgguguuugucaa

SEQ ID NO: 19710 - RNA, 19 nt, Homo sapiens
  misc_RNA (1)...(19): siRNA sense strand
uaaacaaagaggagacgaa

SEQ ID NO: 19711 - RNA, 19 nt, Homo sapiens
  misc_RNA (1)...(19): siRNA sense strand
caaauugcggcacauguca

SEQ ID NO: 19712 - RNA, 19 nt, Homo sapiens
  misc_RNA (1)...(19): siRNA sense strand
uuacucagagcugcaaaua

SEQ ID NO: 19713 - RNA, 19 nt, Homo sapiens
  misc_RNA (1)...(19): siRNA sense strand
ggaggaguauuugaauugc

SEQ ID NO: 19714 - RNA, 19 nt, Homo sapiens
  misc_RNA (1)...(19): siRNA sense strand
ccacuggacugcccaucag

SEQ ID NO: 19715 - RNA, 19 nt, Homo sapiens
  misc_RNA (1)...(19): siRNA sense strand
gacaagauagaagaugaaa

SEQ ID NO: 19716 - RNA, 19 nt, Homo sapiens
  misc_RNA (1)...(19): siRNA sense strand
gccagccucugccuaaagu

SEQ ID NO: 19717 - RNA, 19 nt, Homo sapiens
  misc_RNA (1)...(19): siRNA sense strand
cgagucaagcuccauuuau

SEQ ID NO: 19718 - RNA, 19 nt, Homo sapiens
  misc_RNA (1)...(19): siRNA sense strand
gagaugcaacacaggagaa

SEQ ID NO: 19719 - RNA, 19 nt, Homo sapiens
  misc_RNA (1)...(19): siRNA sense strand
ugggaggaguauuugaauu

SEQ ID NO: 19720 - RNA, 19 nt, Homo sapiens
  misc_RNA (1)...(19): siRNA sense strand
caaagaggagacgaagaaa

SEQ ID NO: 19721 - RNA, 19 nt, Homo sapiens
  misc_RNA (1)...(19): siRNA sense strand
ugaaaacgauacagagaug

SEQ ID NO: 19722 - RNA, 19 nt, Homo sapiens
  misc_RNA (1)...(19): siRNA sense strand
ggacucuauuauaucuaug

SEQ ID NO: 19723 - RNA, 19 nt, Homo sapiens
  misc_RNA (1)...(19): siRNA sense strand
gaaacagcugaccguuaaa

SEQ ID NO: 19724 - RNA, 19 nt, Homo sapiens
  misc_RNA (1)...(19): siRNA sense strand
caugagcaacaacuuggua

SEQ ID NO: 19725 - RNA, 19 nt, Homo sapiens
  misc_RNA (1)...(19): siRNA sense strand
gaggaguauuugaauugca

SEQ ID NO: 19726 - RNA, 19 nt, Homo sapiens
  misc_RNA (1)...(19): siRNA sense strand
ugaacugugaggagauuaa

SEQ ID NO: 19727 - RNA, 19 nt, Homo sapiens
  misc_RNA (1)...(19): siRNA sense strand
acucagagcugcaaauacc

SEQ ID NO: 19728 - RNA, 19 nt, Homo sapiens
  misc_RNA (1)...(19): siRNA sense strand
ucgagucaagcuccauuua

SEQ ID NO: 19729 - RNA, 19 nt, Homo sapiens
  misc_RNA (1)...(19): siRNA sense strand
uaaaagacaaggacucuau

SEQ ID NO: 19730 - RNA, 19 nt, Homo sapiens
  misc_RNA (1)...(19): siRNA sense strand
aggaguauuugaauugcaa

SEQ ID NO: 19731 - RNA, 19 nt, Homo sapiens
  misc_RNA (1)...(19): siRNA sense strand
cgaaacauacaaccaaacu

SEQ ID NO: 19732 - RNA, 19 nt, Homo sapiens
  misc_RNA (1)...(19): siRNA sense strand
gaaggcuuugugaaggaua

SEQ ID NO: 19733 - RNA, 19 nt, Homo sapiens
  misc_RNA (1)...(19): siRNA sense strand
uuauaucuaugcccaaguc

SEQ ID NO: 19734 - RNA, 19 nt, Homo sapiens
  misc_RNA (1)...(19): siRNA sense strand
caacuugguaacccuggaa

SEQ ID NO: 19735 - RNA, 19 nt, Homo sapiens
  misc_RNA (1)...(19): siRNA sense strand
uuucuuaucacccagauga

SEQ ID NO: 19736 - RNA, 19 nt, Homo sapiens
  misc_RNA (1)...(19): siRNA sense strand
acaaggacucuauuauauc

SEQ ID NO: 19737 - RNA, 19 nt, Homo sapiens
  misc_RNA (1)...(19): siRNA sense strand
cugcaaauacccacaguuc

SEQ ID NO: 19738 - RNA, 19 nt, Homo sapiens
  misc_RNA (1)...(19): siRNA sense strand
ggugaucagaauccucaaa

SEQ ID NO: 19739 - RNA, 19 nt, Homo sapiens
  misc_RNA (1)...(19): siRNA sense strand
aagacaaggacucuauuau

SEQ ID NO: 19740 - RNA, 19 nt, Homo sapiens
  misc_RNA (1)...(19): siRNA sense strand
agauagaagaugaaaggaa

SEQ ID NO: 19741 - RNA, 19 nt, Homo sapiens
  misc_RNA (1)...(19): siRNA sense strand
augauugggucagcacuuu

SEQ ID NO: 19742 - RNA, 19 nt, Homo sapiens
  misc_RNA (1)...(19): siRNA sense strand
gugaucagaauccucaaau

SEQ ID NO: 19743 - RNA, 19 nt, Homo sapiens
  misc_RNA (1)...(19): siRNA sense strand
ucaaauugcggcacauguc

SEQ ID NO: 19744 - RNA, 19 nt, Homo sapiens
  misc_RNA (1)...(19): siRNA sense strand
gaugauugggucagcacuu

SEQ ID NO: 19745 - RNA, 19 nt, Homo sapiens
  misc_RNA (1)...(19): siRNA sense strand
gcccaagucaccuucuguu

SEQ ID NO: 19746 - RNA, 19 nt, Homo sapiens
  misc_RNA (1)...(19): siRNA sense strand
uugaaggcuuugugaagga

SEQ ID NO: 19747 - RNA, 19 nt, Homo sapiens
  misc_RNA (1)...(19): siRNA sense strand
cccgguagauucgagagaa

SEQ ID NO: 19748 - RNA, 19 nt, Homo sapiens
  misc_RNA (1)...(19): siRNA sense strand
uagccagccucugccuaaa

SEQ ID NO: 19749 - RNA, 19 nt, Homo sapiens
  misc_RNA (1)...(19): siRNA sense strand
ucgggaagcuucgagucaa

SEQ ID NO: 19750 - RNA, 19 nt, Homo sapiens
  misc_RNA (1)...(19): siRNA sense strand
caccaugagcaacaacuug

SEQ ID NO: 19751 - RNA, 19 nt, Homo sapiens
  misc_RNA (1)...(19): siRNA sense strand
aaagauccuuauccuuacu

SEQ ID NO: 19752 - RNA, 19 nt, Homo sapiens
  misc_RNA (1)...(19): siRNA sense strand
cuucgguguuugucaaugu

SEQ ID NO: 19753 - RNA, 19 nt, Homo sapiens
  misc_RNA (1)...(19): siRNA sense strand
gaauugcaaccaggugcuu

SEQ ID NO: 19754 - RNA, 19 nt, Homo sapiens
  misc_RNA (1)...(19): siRNA sense strand
acugaacugugaggagauu

SEQ ID NO: 19755 - RNA, 19 nt, Homo sapiens
  misc_RNA (1)...(19): siRNA sense strand
auagccagccucugccuaa

SEQ ID NO: 19756 - RNA, 19 nt, Homo sapiens
  misc_RNA (1)...(19): siRNA sense strand
gauggaacuucgacuuugu

SEQ ID NO: 19757 - RNA, 19 nt, Homo sapiens
  misc_RNA (1)...(19): siRNA sense strand
gcgauggaacuucgacuuu

SEQ ID NO: 19758 - RNA, 19 nt, Homo sapiens
  misc_RNA (1)...(19): siRNA sense strand
cgauggaacuucgacuuug

SEQ ID NO: 19759 - RNA, 19 nt, Homo sapiens
  misc_RNA (1)...(19): siRNA sense strand
cgacugugaugcgcuaaug

SEQ ID NO: 19760 - RNA, 19 nt, Homo sapiens
  misc_RNA (1)...(19): siRNA sense strand
gaccugucacugucuugua

SEQ ID NO: 19761 - RNA, 19 nt, Homo sapiens
  misc_RNA (1)...(19): siRNA sense strand
cagcagaggaagaccaugu

SEQ ID NO: 19762 - RNA, 19 nt, Homo sapiens
  misc_RNA (1)...(19): siRNA sense strand
cauguggaccugucacugu

SEQ ID NO: 19763 - RNA, 19 nt, Homo sapiens
  misc_RNA (1)...(19): siRNA sense strand
gauggaacuucgacuuugu

SEQ ID NO: 19764 - RNA, 19 nt, Homo sapiens
  misc_RNA (1)...(19): siRNA sense strand
gcgauggaacuucgacuuu

SEQ ID NO: 19765 - RNA, 19 nt, Homo sapiens
  misc_RNA (1)...(19): siRNA sense strand
cgauggaacuucgacuuug

SEQ ID NO: 19766 - RNA, 19 nt, Homo sapiens
  misc_RNA (1)...(19): siRNA sense strand
cgacugugaugcgcuaaug

SEQ ID NO: 19767 - RNA, 19 nt, Homo sapiens
  misc_RNA (1)...(19): siRNA sense strand
gaccugucacugucuugua

SEQ ID NO: 19768 - RNA, 19 nt, Homo sapiens
  misc_RNA (1)...(19): siRNA sense strand
cagcagaggaagaccaugu

SEQ ID NO: 19769 - RNA, 19 nt, Homo sapiens
  misc_RNA (1)...(19): siRNA sense strand
cauguggaccugucacugu

SEQ ID NO: 19770 - RNA, 19 nt, Homo sapiens
  misc_RNA (1)...(19): siRNA sense strand
cggagcagcugccuagugu

SEQ ID NO: 19771 - RNA, 19 nt, Homo sapiens
  misc_RNA (1)...(19): siRNA sense strand
ccgcugggauuacgacuuc

SEQ ID NO: 19772 - RNA, 19 nt, Homo sapiens
  misc_RNA (1)...(19): siRNA sense strand
ggccucugaucuccgauuu

SEQ ID NO: 19773 - RNA, 19 nt, Homo sapiens
  misc_RNA (1)...(19): siRNA sense strand
ccucugaucuccgauuucu

SEQ ID NO: 19774 - RNA, 19 nt, Homo sapiens
  misc_RNA (1)...(19): siRNA sense strand
gaccuucccaguacuagug

SEQ ID NO: 19775 - RNA, 19 nt, Homo sapiens
  misc_RNA (1)...(19): siRNA sense strand
ucugaucuccgauuucuuc

SEQ ID NO: 19776 - RNA, 19 nt, Homo sapiens
  misc_RNA (1)...(19): siRNA sense strand
gaacgccgaggaccagaac

SEQ ID NO: 19777 - RNA, 19 nt, Homo sapiens
  misc_RNA (1)...(19): siRNA sense strand
gaagucgucgggcgauguc

SEQ ID NO: 19778 - RNA, 19 nt, Homo sapiens
  misc_RNA (1)...(19): siRNA sense strand
cagcugcacucggggauuu

SEQ ID NO: 19779 - RNA, 19 nt, Homo sapiens
  misc_RNA (1)...(19): siRNA sense strand
ggacagaucugcaaagaga

SEQ ID NO: 19780 - RNA, 19 nt, Homo sapiens
  misc_RNA (1)...(19): siRNA sense strand
ucaagcagcuguucacaaa

SEQ ID NO: 19781 - RNA, 19 nt, Homo sapiens
  misc_RNA (1)...(19): siRNA sense strand
gcaaagagaucaacgucau

SEQ ID NO: 19782 - RNA, 19 nt, Homo sapiens
  misc_RNA (1)...(19): siRNA sense strand
caagguagcuuuccaggau

SEQ ID NO: 19783 - RNA, 19 nt, Homo sapiens
  misc_RNA (1)...(19): siRNA sense strand
gaacgugucuguggucuuc

SEQ ID NO: 19784 - RNA, 19 nt, Homo sapiens
  misc_RNA (1)...(19): siRNA sense strand
caaagacuguuuccaacuu

SEQ ID NO: 19785 - RNA, 19 nt, Homo sapiens
  misc_RNA (1)...(19): siRNA sense strand
ggucaauucuucagugaug

SEQ ID NO: 19786 - RNA, 19 nt, Homo sapiens
  misc_RNA (1)...(19): siRNA sense strand
ucacaagggucauuucauc

SEQ ID NO: 19787 - RNA, 19 nt, Homo sapiens
  misc_RNA (1)...(19): siRNA sense strand
gaagccaaguccauugaug

SEQ ID NO: 19788 - RNA, 19 nt, Homo sapiens
  misc_RNA (1)...(19): siRNA sense strand
ucacaaauuucaucuccuu

SEQ ID NO: 19789 - RNA, 19 nt, Homo sapiens
  misc_RNA (1)...(19): siRNA sense strand
cgagccagcuacccagaua

SEQ ID NO: 19790 - RNA, 19 nt, Homo sapiens
  misc_RNA (1)...(19): siRNA sense strand
aagcagcuguucacaaauu

SEQ ID NO: 19791 - RNA, 19 nt, Homo sapiens
  misc_RNA (1)...(19): siRNA sense strand
gagauuaucacucgagaug

SEQ ID NO: 19792 - RNA, 19 nt, Homo sapiens
  misc_RNA (1)...(19): siRNA sense strand
cccaagaucuccugccaaa

SEQ ID NO: 19793 - RNA, 19 nt, Homo sapiens
  misc_RNA (1)...(19): siRNA sense strand
gagaucgacucugccauug

SEQ ID NO: 19794 - RNA, 19 nt, Homo sapiens
  misc_RNA (1)...(19): siRNA sense strand
ucuuaagccucuuggauuu

SEQ ID NO: 19795 - RNA, 19 nt, Homo sapiens
  misc_RNA (1)...(19): siRNA sense strand
cgucaucucuaacaucaug

SEQ ID NO: 19796 - RNA, 19 nt, Homo sapiens
  misc_RNA (1)...(19): siRNA sense strand
ccauugaugucuccauuca

SEQ ID NO: 19797 - RNA, 19 nt, Homo sapiens
  misc_RNA (1)...(19): siRNA sense strand
guauugaucaguccauuga

SEQ ID NO: 19798 - RNA, 19 nt, Homo sapiens
  misc_RNA (1)...(19): siRNA sense strand
gcaacauucuguagcuuac

SEQ ID NO: 19799 - RNA, 19 nt, Homo sapiens
  misc_RNA (1)...(19): siRNA sense strand
caucaacccugagauuauc

SEQ ID NO: 19800 - RNA, 19 nt, Homo sapiens
  misc_RNA (1)...(19): siRNA sense strand
gaucgacucugccauugac

SEQ ID NO: 19801 - RNA, 19 nt, Homo sapiens
  misc_RNA (1)...(19): siRNA sense strand
gaagggacagaucugcaaa

SEQ ID NO: 19802 - RNA, 19 nt, Homo sapiens
  misc_RNA (1)...(19): siRNA sense strand
gauggugaaauuccucuuu

SEQ ID NO: 19803 - RNA, 19 nt, Homo sapiens
  misc_RNA (1)...(19): siRNA sense strand
caucaucaacccugagauu

SEQ ID NO: 19804 - RNA, 19 nt, Homo sapiens
  misc_RNA (1)...(19): siRNA sense strand
cgagaucgacucugccauu

SEQ ID NO: 19805 - RNA, 19 nt, Homo sapiens
  misc_RNA (1)...(19): siRNA sense strand
gcccaugccugcuccaaag

SEQ ID NO: 19806 - RNA, 19 nt, Homo sapiens
  misc_RNA (1)...(19): siRNA sense strand
aaagacuguuuccaacuug

SEQ ID NO: 19807 - RNA, 19 nt, Homo sapiens
  misc_RNA (1)...(19): siRNA sense strand
caccaaagacuguuuccaa

SEQ ID NO: 19808 - RNA, 19 nt, Homo sapiens
  misc_RNA (1)...(19): siRNA sense strand
guccauugaugucuccauu

SEQ ID NO: 19809 - RNA, 19 nt, Homo sapiens
  misc_RNA (1)...(19): siRNA sense strand
uuacagcccucaugaacag

SEQ ID NO: 19810 - RNA, 19 nt, Homo sapiens
  misc_RNA (1)...(19): siRNA sense strand
ggucauuucaucuacaaga

SEQ ID NO: 19811 - RNA, 19 nt, Homo sapiens
  misc_RNA (1)...(19): siRNA sense strand
cuaccugucuuuccauaag

SEQ ID NO: 19812 - RNA, 19 nt, Homo sapiens
  misc_RNA (1)...(19): siRNA sense strand
gcccagaccagcaacauuc

SEQ ID NO: 19813 - RNA, 19 nt, Homo sapiens
  misc_RNA (1)...(19): siRNA sense strand
ccuuucagauggagacauu

SEQ ID NO: 19814 - RNA, 19 nt, Homo sapiens
  misc_RNA (1)...(19): siRNA sense strand
ccugguggcuggguauuga

SEQ ID NO: 19815 - RNA, 19 nt, Homo sapiens
  misc_RNA (1)...(19): siRNA sense strand
caagggucauuucaucuac

SEQ ID NO: 19816 - RNA, 19 nt, Homo sapiens
  misc_RNA (1)...(19): siRNA sense strand
gucauuucaucuacaagaa

SEQ ID NO: 19817 - RNA, 19 nt, Homo sapiens
  misc_RNA (1)...(19): siRNA sense strand
aagaggauaucgugacuac

SEQ ID NO: 19818 - RNA, 19 nt, Homo sapiens
  misc_RNA (1)...(19): siRNA sense strand
uuacacauuugaagaggau

SEQ ID NO: 19819 - RNA, 19 nt, Homo sapiens
  misc_RNA (1)...(19): siRNA sense strand
guggucaauucuucaguga

SEQ ID NO: 19820 - RNA, 19 nt, Homo sapiens
  misc_RNA (1)...(19): siRNA sense strand
gacaggugaucccgucauc

SEQ ID NO: 19821 - RNA, 19 nt, Homo sapiens
  misc_RNA (1)...(19): siRNA sense strand
gaagaggauaucgugacua

SEQ ID NO: 19822 - RNA, 19 nt, Homo sapiens
  misc_RNA (1)...(19): siRNA sense strand
acaagggucauuucaucua

SEQ ID NO: 19823 - RNA, 19 nt, Homo sapiens
  misc_RNA (1)...(19): siRNA sense strand
auugaugucuccauucaga

SEQ ID NO: 19824 - RNA, 19 nt, Homo sapiens
  misc_RNA (1)...(19): siRNA sense strand
ugaagaggauaucgugacu

SEQ ID NO: 19825 - RNA, 19 nt, Homo sapiens
  misc_RNA (1)...(19): siRNA sense strand
caacgucaucucuaacauc

SEQ ID NO: 19826 - RNA, 19 nt, Homo sapiens
  misc_RNA (1)...(19): siRNA sense strand
gccauugaccuccagauca

SEQ ID NO: 19827 - RNA, 19 nt, Homo sapiens
  misc_RNA (1)...(19): siRNA sense strand
ucaucaacccugagauuau

SEQ ID NO: 19828 - RNA, 19 nt, Homo sapiens
  misc_RNA (1)...(19): siRNA sense strand
aacgucaucucuaacauca

SEQ ID NO: 19829 - RNA, 19 nt, Homo sapiens
  misc_RNA (1)...(19): siRNA sense strand
gagucguggucaauucuuc

SEQ ID NO: 19830 - RNA, 19 nt, Homo sapiens
  misc_RNA (1)...(19): siRNA sense strand
uagcuuacacauuugaaga

SEQ ID NO: 19831 - RNA, 19 nt, Homo sapiens
  misc_RNA (1)...(19): siRNA sense strand
ggguauugaucaguccauu

SEQ ID NO: 19832 - RNA, 19 nt, Homo sapiens
  misc_RNA (1)...(19): siRNA sense strand
guuuccaacuugacugaga

SEQ ID NO: 19833 - RNA, 19 nt, Homo sapiens
  misc_RNA (1)...(19): siRNA sense strand
ccagcaacauucuguagcu

SEQ ID NO: 19834 - RNA, 19 nt, Homo sapiens
  misc_RNA (1)...(19): siRNA sense strand
ucaaguauggguugcacaa

SEQ ID NO: 19835 - RNA, 19 nt, Homo sapiens
  misc_RNA (1)...(19): siRNA sense strand
cccugaagcugguccugaa

SEQ ID NO: 19836 - RNA, 19 nt, Homo sapiens
  misc_RNA (1)...(19): siRNA sense strand
caacaccaaccaggaaauc

SEQ ID NO: 19837 - RNA, 19 nt, Homo sapiens
  misc_RNA (1)...(19): siRNA sense strand
caucacaagggucauuuca

SEQ ID NO: 19838 - RNA, 19 nt, Homo sapiens
  misc_RNA (1)...(19): siRNA sense strand
caaauuucaucuccuucac

SEQ ID NO: 19839 - RNA, 19 nt, Homo sapiens
  misc_RNA (1)...(19): siRNA sense strand
cagcaacauucuguagcuu

SEQ ID NO: 19840 - RNA, 19 nt, Homo sapiens
  misc_RNA (1)...(19): siRNA sense strand
gaccagcaacauucuguag

SEQ ID NO: 19841 - RNA, 19 nt, Homo sapiens
  misc_RNA (1)...(19): siRNA sense strand
acaagggagucguggucaa

SEQ ID NO: 19842 - RNA, 19 nt, Homo sapiens
  misc_RNA (1)...(19): siRNA sense strand
gccucaagaugcccaagau

SEQ ID NO: 19843 - RNA, 19 nt, Homo sapiens
  misc_RNA (1)...(19): siRNA sense strand
agggacagaucugcaaaga

SEQ ID NO: 19844 - RNA, 19 nt, Homo sapiens
  misc_RNA (1)...(19): siRNA sense strand
ugaagggacagaucugcaa

SEQ ID NO: 19845 - RNA, 19 nt, Homo sapiens
  misc_RNA (1)...(19): siRNA sense strand
caagggagucguggucaau

SEQ ID NO: 19846 - RNA, 19 nt, Homo sapiens
  misc_RNA (1)...(19): siRNA sense strand
gaugggagacgaguucaag

SEQ ID NO: 19847 - RNA, 19 nt, Homo sapiens
  misc_RNA (1)...(19): siRNA sense strand
gguauugaucaguccauug

SEQ ID NO: 19848 - RNA, 19 nt, Homo sapiens
  misc_RNA (1)...(19): siRNA sense strand
gacaucaucaacccugaga

SEQ ID NO: 19849 - RNA, 19 nt, Homo sapiens
  misc_RNA (1)...(19): siRNA sense strand
gugagccucuucgacauca

SEQ ID NO: 19850 - RNA, 19 nt, Homo sapiens
  misc_RNA (1)...(19): siRNA sense strand
gguggacauuucccugaca

SEQ ID NO: 19851 - RNA, 19 nt, Homo sapiens
  misc_RNA (1)...(19): siRNA sense strand
acaaauuucaucuccuuca

SEQ ID NO: 19852 - RNA, 19 nt, Homo sapiens
  misc_RNA (1)...(19): siRNA sense strand
gcgugagccucuucgacau

SEQ ID NO: 19853 - RNA, 19 nt, Homo sapiens
  misc_RNA (1)...(19): siRNA sense strand
ggaagccaaguccauugau

SEQ ID NO: 19854 - RNA, 19 nt, Homo sapiens
  misc_RNA (1)...(19): siRNA sense strand
caaagagaucaacgucauc

SEQ ID NO: 19855 - RNA, 19 nt, Homo sapiens
  misc_RNA (1)...(19): siRNA sense strand
ccaaagacuguuuccaacu

SEQ ID NO: 19856 - RNA, 19 nt, Homo sapiens
  misc_RNA (1)...(19): siRNA sense strand
ucaacgucaucucuaacau

SEQ ID NO: 19857 - RNA, 19 nt, Homo sapiens
  misc_RNA (1)...(19): siRNA sense strand
cagcuguucacaaauuuca

SEQ ID NO: 19858 - RNA, 19 nt, Homo sapiens
  misc_RNA (1)...(19): siRNA sense strand
aagacuguuuccaacuuga

SEQ ID NO: 19859 - RNA, 19 nt, Homo sapiens
  misc_RNA (1)...(19): siRNA sense strand
gcgagaaggccaugaugcu

SEQ ID NO: 19860 - RNA, 19 nt, Homo sapiens
  misc_RNA (1)...(19): siRNA sense strand
acaccaaccaggaaaucuu

SEQ ID NO: 19861 - RNA, 19 nt, Homo sapiens
  misc_RNA (1)...(19): siRNA sense strand
gaccugugacucugguaga

SEQ ID NO: 19862 - RNA, 19 nt, Homo sapiens
  misc_RNA (1)...(19): siRNA sense strand
agagcuuccugcagucaau

SEQ ID NO: 19863 - RNA, 19 nt, Homo sapiens
  misc_RNA (1)...(19): siRNA sense strand
gaucaagcagcuguucaca

SEQ ID NO: 19864 - RNA, 19 nt, Homo sapiens
  misc_RNA (1)...(19): siRNA sense strand
ggaaggucccucagacauc

SEQ ID NO: 19865 - RNA, 19 nt, Homo sapiens
  misc_RNA (1)...(19): siRNA sense strand
ccucagacauccccgauug

SEQ ID NO: 19866 - RNA, 19 nt, Homo sapiens
  misc_RNA (1)...(19): siRNA sense strand
ggaaggucccucagacauc

SEQ ID NO: 19867 - RNA, 19 nt, Homo sapiens
  misc_RNA (1)...(19): siRNA sense strand
ccucagacauccccgauug

SEQ ID NO: 19868 - RNA, 19 nt, Homo sapiens
  misc_RNA (1)...(19): siRNA sense strand
gaacagaacugcagcauga

SEQ ID NO: 19869 - RNA, 19 nt, Homo sapiens
  misc_RNA (1)...(19): siRNA sense strand
ccaaagugcuccugcagua

SEQ ID NO: 19870 - RNA, 19 nt, Homo sapiens
  misc_RNA (1)...(19): siRNA sense strand
uggcaaagcuauuuaaaga

SEQ ID NO: 19871 - RNA, 19 nt, Homo sapiens
  misc_RNA (1)...(19): siRNA sense strand
uaacuggccugguauucua

SEQ ID NO: 19872 - RNA, 19 nt, Homo sapiens
  misc_RNA (1)...(19): siRNA sense strand
gagcaucucugucuuacug

SEQ ID NO: 19873 - RNA, 19 nt, Homo sapiens
  misc_RNA (1)...(19): siRNA sense strand
caaugcagauggugacuuu

SEQ ID NO: 19874 - RNA, 19 nt, Homo sapiens
  misc_RNA (1)...(19): siRNA sense strand
gcaaagcuauuuaaagacu

SEQ ID NO: 19875 - RNA, 19 nt, Homo sapiens
  misc_RNA (1)...(19): siRNA sense strand
ggacaucaccuaccacuuc

SEQ ID NO: 19876 - RNA, 19 nt, Homo sapiens
  misc_RNA (1)...(19): siRNA sense strand
caauguggaugaaguaaau

SEQ ID NO: 19877 - RNA, 19 nt, Homo sapiens
  misc_RNA (1)...(19): siRNA sense strand
gauggugacuuugcuauug

SEQ ID NO: 19878 - RNA, 19 nt, Homo sapiens
  misc_RNA (1)...(19): siRNA sense strand
gcccagaccuuguucucua

SEQ ID NO: 19879 - RNA, 19 nt, Homo sapiens
  misc_RNA (1)...(19): siRNA sense strand
ggaaguacguugcaauggu

SEQ ID NO: 19880 - RNA, 19 nt, Homo sapiens
  misc_RNA (1)...(19): siRNA sense strand
cuucuuaacuggccuggua

SEQ ID NO: 19881 - RNA, 19 nt, Homo sapiens
  misc_RNA (1)...(19): siRNA sense strand
gaccaggagucuaacaaug

SEQ ID NO: 19882 - RNA, 19 nt, Homo sapiens
  misc_RNA (1)...(19): siRNA sense strand
gggagugggugaucaagga

SEQ ID NO: 19883 - RNA, 19 nt, Homo sapiens
  misc_RNA (1)...(19): siRNA sense strand
uaaaucagaucgugacaac

SEQ ID NO: 19884 - RNA, 19 nt, Homo sapiens
  misc_RNA (1)...(19): siRNA sense strand
ugaauuaaaucagcaagga

SEQ ID NO: 19885 - RNA, 19 nt, Homo sapiens
  misc_RNA (1)...(19): siRNA sense strand
gcugugcccuugauuggaa

SEQ ID NO: 19886 - RNA, 19 nt, Homo sapiens
  misc_RNA (1)...(19): siRNA sense strand
gaaaagaccauccagagaa

SEQ ID NO: 19887 - RNA, 19 nt, Homo sapiens
  misc_RNA (1)...(19): siRNA sense strand
gacacuaucccaaauauca

SEQ ID NO: 19888 - RNA, 19 nt, Homo sapiens
  misc_RNA (1)...(19): siRNA sense strand
gaucaucgucacccacuuu

SEQ ID NO: 19889 - RNA, 19 nt, Homo sapiens
  misc_RNA (1)...(19): siRNA sense strand
cagaagacauugauaucuc

SEQ ID NO: 19890 - RNA, 19 nt, Homo sapiens
  misc_RNA (1)...(19): siRNA sense strand
gcaggucgacucauugaau

SEQ ID NO: 19891 - RNA, 19 nt, Homo sapiens
  misc_RNA (1)...(19): siRNA sense strand
aaacagcaauggguggauu

SEQ ID NO: 19892 - RNA, 19 nt, Homo sapiens
  misc_RNA (1)...(19): siRNA sense strand
caggucgacucauugaauu

SEQ ID NO: 19893 - RNA, 19 nt, Homo sapiens
  misc_RNA (1)...(19): siRNA sense strand
cagagaccaugaagucaga

SEQ ID NO: 19894 - RNA, 19 nt, Homo sapiens
  misc_RNA (1)...(19): siRNA sense strand
ugauaucucugacauuucu

SEQ ID NO: 19895 - RNA, 19 nt, Homo sapiens
  misc_RNA (1)...(19): siRNA sense strand
caaccaaugugcgucugaa

SEQ ID NO: 19896 - RNA, 19 nt, Homo sapiens
  misc_RNA (1)...(19): siRNA sense strand
aaauucacauuccuucaga

SEQ ID NO: 19897 - RNA, 19 nt, Homo sapiens
  misc_RNA (1)...(19): siRNA sense strand
gaaaauacaugcuguucac

SEQ ID NO: 19898 - RNA, 19 nt, Homo sapiens
  misc_RNA (1)...(19): siRNA sense strand
uaucgacacuaucccaaau

SEQ ID NO: 19899 - RNA, 19 nt, Homo sapiens
  misc_RNA (1)...(19): siRNA sense strand
gucauugccuccaucauca

SEQ ID NO: 19900 - RNA, 19 nt, Homo sapiens
  misc_RNA (1)...(19): siRNA sense strand
ggaagcacuccgugaccua

SEQ ID NO: 19901 - RNA, 19 nt, Homo sapiens
  misc_RNA (1)...(19): siRNA sense strand
ggucgacucauugaauuaa

SEQ ID NO: 19902 - RNA, 19 nt, Homo sapiens
  misc_RNA (1)...(19): siRNA sense strand
cagaccuuguucucuauaa

SEQ ID NO: 19903 - RNA, 19 nt, Homo sapiens
  misc_RNA (1)...(19): siRNA sense strand
ggagucuucaugcuuguuu

SEQ ID NO: 19904 - RNA, 19 nt, Homo sapiens
  misc_RNA (1)...(19): siRNA sense strand
ccacuuucccuuugaugaa

SEQ ID NO: 19905 - RNA, 19 nt, Homo sapiens
  misc_RNA (1)...(19): siRNA sense strand
guuugcaggucgacucauu

SEQ ID NO: 19906 - RNA, 19 nt, Homo sapiens
  misc_RNA (1)...(19): siRNA sense strand
gcagauggugacuuugcua

SEQ ID NO: 19907 - RNA, 19 nt, Homo sapiens
  misc_RNA (1)...(19): siRNA sense strand
ggacaccuccagccaucuu

SEQ ID NO: 19908 - RNA, 19 nt, Homo sapiens
  misc_RNA (1)...(19): siRNA sense strand
ucacccacuuucccuuuga

SEQ ID NO: 19909 - RNA, 19 nt, Homo sapiens
  misc_RNA (1)...(19): siRNA sense strand
ucgacacuaucccaaauau

SEQ ID NO: 19910 - RNA, 19 nt, Homo sapiens
  misc_RNA (1)...(19): siRNA sense strand
ccaaugugcgucugaaaca

SEQ ID NO: 19911 - RNA, 19 nt, Homo sapiens
  misc_RNA (1)...(19): siRNA sense strand
gcucuucuccuucuuaacu

SEQ ID NO: 19912 - RNA, 19 nt, Homo sapiens
  misc_RNA (1)...(19): siRNA sense strand
cuccugcucuuuagccuuu

SEQ ID NO: 19913 - RNA, 19 nt, Homo sapiens
  misc_RNA (1)...(19): siRNA sense strand
agcaauggguggauuacaa

SEQ ID NO: 19914 - RNA, 19 nt, Homo sapiens
  misc_RNA (1)...(19): siRNA sense strand
ugacuauggcggugugaaa

SEQ ID NO: 19915 - RNA, 19 nt, Homo sapiens
  misc_RNA (1)...(19): siRNA sense strand
ccaucgagggcaucaagua

SEQ ID NO: 19916 - RNA, 19 nt, Homo sapiens
  misc_RNA (1)...(19): siRNA sense strand
ccucuccuccugcucuuua

SEQ ID NO: 19917 - RNA, 19 nt, Homo sapiens
  misc_RNA (1)...(19): siRNA sense strand
aaaagaccauccagagaaa

SEQ ID NO: 19918 - RNA, 19 nt, Homo sapiens
  misc_RNA (1)...(19): siRNA sense strand
gaagcacuccgugaccuau

SEQ ID NO: 19919 - RNA, 19 nt, Homo sapiens
  misc_RNA (1)...(19): siRNA sense strand
ucacugucaucgucaucaa

SEQ ID NO: 19920 - RNA, 19 nt, Homo sapiens
  misc_RNA (1)...(19): siRNA sense strand
uauucuaccugcccacaga

SEQ ID NO: 19921 - RNA, 19 nt, Homo sapiens
  misc_RNA (1)...(19): siRNA sense strand
gaauuaaaucagcaaggau

SEQ ID NO: 19922 - RNA, 19 nt, Homo sapiens
  misc_RNA (1)...(19): siRNA sense strand
ccagugcugugcccuugau

SEQ ID NO: 19923 - RNA, 19 nt, Homo sapiens
  misc_RNA (1)...(19): siRNA sense strand
agaagacauugauaucucu

SEQ ID NO: 19924 - RNA, 19 nt, Homo sapiens
  misc_RNA (1)...(19): siRNA sense strand
gguggcaaagcuauuuaaa

SEQ ID NO: 19925 - RNA, 19 nt, Homo sapiens
  misc_RNA (1)...(19): siRNA sense strand
ucugagcaucucugucuua

SEQ ID NO: 19926 - RNA, 19 nt, Homo sapiens
  misc_RNA (1)...(19): siRNA sense strand
ggaauccagaugacuaugg

SEQ ID NO: 19927 - RNA, 19 nt, Homo sapiens
  misc_RNA (1)...(19): siRNA sense strand
uggaugaaguaaaucagau

SEQ ID NO: 19928 - RNA, 19 nt, Homo sapiens
  misc_RNA (1)...(19): siRNA sense strand
ucgcagagaccaugaaguc

SEQ ID NO: 19929 - RNA, 19 nt, Homo sapiens
  misc_RNA (1)...(19): siRNA sense strand
guccugggcuccgaacaug

SEQ ID NO: 19930 - RNA, 19 nt, Homo sapiens
  misc_RNA (1)...(19): siRNA sense strand
ucacauuccuucagaaaag

SEQ ID NO: 19931 - RNA, 19 nt, Homo sapiens
  misc_RNA (1)...(19): siRNA sense strand
gcucugucguggccaucaa

SEQ ID NO: 19932 - RNA, 19 nt, Homo sapiens
  misc_RNA (1)...(19): siRNA sense strand
uuuaaaagcuacugugaga

SEQ ID NO: 19933 - RNA, 19 nt, Homo sapiens
  misc_RNA (1)...(19): siRNA sense strand
gcaauggguggauuacaac

SEQ ID NO: 19934 - RNA, 19 nt, Homo sapiens
  misc_RNA (1)...(19): siRNA sense strand
acauugauaucucugacau

SEQ ID NO: 19935 - RNA, 19 nt, Homo sapiens
  misc_RNA (1)...(19): siRNA sense strand
gaucgugacaaccaaugug

SEQ ID NO: 19936 - RNA, 19 nt, Homo sapiens
  misc_RNA (1)...(19): siRNA sense strand
ucaauguggaugaaguaaa

SEQ ID NO: 19937 - RNA, 19 nt, Homo sapiens
  misc_RNA (1)...(19): siRNA sense strand
agccagaccugagcaacuu

SEQ ID NO: 19938 - RNA, 19 nt, Homo sapiens
  misc_RNA (1)...(19): siRNA sense strand
ggugauggaccacauacuc

SEQ ID NO: 19939 - RNA, 19 nt, Homo sapiens
  misc_RNA (1)...(19): siRNA sense strand
guaaaucagaucgugacaa

SEQ ID NO: 19940 - RNA, 19 nt, Homo sapiens
  misc_RNA (1)...(19): siRNA sense strand
cugcucuucuccuucuuaa

SEQ ID NO: 19941 - RNA, 19 nt, Homo sapiens
  misc_RNA (1)...(19): siRNA sense strand
cgucauugccuccaucauc

SEQ ID NO: 19942 - RNA, 19 nt, Homo sapiens
  misc_RNA (1)...(19): siRNA sense strand
gucgacucauugaauuaaa

SEQ ID NO: 19943 - RNA, 19 nt, Homo sapiens
  misc_RNA (1)...(19): siRNA sense strand
cuauaacaaugcagauggu

SEQ ID NO: 19944 - RNA, 19 nt, Homo sapiens
  misc_RNA (1)...(19): siRNA sense strand
gagucuucaugcuuguuug

SEQ ID NO: 19945 - RNA, 19 nt, Homo sapiens
  misc_RNA (1)...(19): siRNA sense strand
ggaugaaguaaaucagauc

SEQ ID NO: 19946 - RNA, 19 nt, Homo sapiens
  misc_RNA (1)...(19): siRNA sense strand
ucacccagcacccauguca

SEQ ID NO: 19947 - RNA, 19 nt, Homo sapiens
  misc_RNA (1)...(19): siRNA sense strand
ccagaccuuguucucuaua

SEQ ID NO: 19948 - RNA, 19 nt, Homo sapiens
  misc_RNA (1)...(19): siRNA sense strand
guggaaguacguugcaaug

SEQ ID NO: 19949 - RNA, 19 nt, Homo sapiens
  misc_RNA (1)...(19): siRNA sense strand
gaguggaaguacguugcaa

SEQ ID NO: 19950 - RNA, 19 nt, Homo sapiens
  misc_RNA (1)...(19): siRNA sense strand
aaucagaucgugacaacca

SEQ ID NO: 19951 - RNA, 19 nt, Homo sapiens
  misc_RNA (1)...(19): siRNA sense strand
acaccuccagccaucuuua

SEQ ID NO: 19952 - RNA, 19 nt, Homo sapiens
  misc_RNA (1)...(19): siRNA sense strand
cccagaccuuguucucuau

SEQ ID NO: 19953 - RNA, 19 nt, Homo sapiens
  misc_RNA (1)...(19): siRNA sense strand
ccaacugggugcggaaggu

SEQ ID NO: 19954 - RNA, 19 nt, Homo sapiens
  misc_RNA (1)...(19): siRNA sense strand
auggguggauuacaaccua

SEQ ID NO: 19955 - RNA, 19 nt, Homo sapiens
  misc_RNA (1)...(19): siRNA sense strand
guggaugaaguaaaucaga

SEQ ID NO: 19956 - RNA, 19 nt, Homo sapiens
  misc_RNA (1)...(19): siRNA sense strand
cgucacccacuuucccuuu

SEQ ID NO: 19957 - RNA, 19 nt, Homo sapiens
  misc_RNA (1)...(19): siRNA sense strand
aaagugcuccugcaguaca

SEQ ID NO: 19958 - RNA, 19 nt, Homo sapiens
  misc_RNA (1)...(19): siRNA sense strand
ucgagggcaucaaguacau

SEQ ID NO: 19959 - RNA, 19 nt, Homo sapiens
  misc_RNA (1)...(19): siRNA sense strand
uacagaagacauugauauc

SEQ ID NO: 19960 - RNA, 19 nt, Homo sapiens
  misc_RNA (1)...(19): siRNA sense strand
aauacaugcuguucaccau

SEQ ID NO: 19961 - RNA, 19 nt, Homo sapiens
  misc_RNA (1)...(19): siRNA sense strand
uuacugucuuugacugugu

SEQ ID NO: 19962 - RNA, 19 nt, Homo sapiens
  misc_RNA (1)...(19): siRNA sense strand
caucgucaacgucaucauc

SEQ ID NO: 19963 - RNA, 19 nt, Homo sapiens
  misc_RNA (1)...(19): siRNA sense strand
gucacccacuuucccuuug

SEQ ID NO: 19964 - RNA, 19 nt, Homo sapiens
  misc_RNA (1)...(19): siRNA sense strand
caccuccagccaucuuuaa

SEQ ID NO: 19965 - RNA, 19 nt, Homo sapiens
  misc_RNA (1)...(19): siRNA sense strand
ggaaugcccuugacaacau

SEQ ID NO: 19966 - RNA, 19 nt, Homo sapiens
  misc_RNA (1)...(19): siRNA sense strand
gcaagaccaucaacaagau

SEQ ID NO: 19967 - RNA, 19 nt, Homo sapiens
  misc_RNA (1)...(19): siRNA sense strand
acacagaggccuauacuga

SEQ ID NO: 19968 - RNA, 19 nt, Homo sapiens
  misc_RNA (1)...(19): siRNA sense strand
cggaggagcugauacugaa

SEQ ID NO: 19969 - RNA, 19 nt, Homo sapiens
  misc_RNA (1)...(19): siRNA sense strand
ugacgaaucucaucucacu

SEQ ID NO: 19970 - RNA, 19 nt, Homo sapiens
  misc_RNA (1)...(19): siRNA sense strand
caauauugauggccaguuc

SEQ ID NO: 19971 - RNA, 19 nt, Homo sapiens
  misc_RNA (1)...(19): siRNA sense strand
aaucucaucucacugaaug

SEQ ID NO: 19972 - RNA, 19 nt, Homo sapiens
  misc_RNA (1)...(19): siRNA sense strand
acgaggaacugcgucuuua

SEQ ID NO: 19973 - RNA, 19 nt, Homo sapiens
  misc_RNA (1)...(19): siRNA sense strand
cugggcagguuccuuauuu

SEQ ID NO: 19974 - RNA, 19 nt, Homo sapiens
  misc_RNA (1)...(19): siRNA sense strand
ggcaagaccaucaacaaga

SEQ ID NO: 19975 - RNA, 19 nt, Homo sapiens
  misc_RNA (1)...(19): siRNA sense strand
acagaggccuauacugaga

SEQ ID NO: 19976 - RNA, 19 nt, Homo sapiens
  misc_RNA (1)...(19): siRNA sense strand
cgccguguauccagccuua

SEQ ID NO: 19977 - RNA, 19 nt, Homo sapiens
  misc_RNA (1)...(19): siRNA sense strand
caccaucucuucaacaacu

SEQ ID NO: 19978 - RNA, 19 nt, Homo sapiens
  misc_RNA (1)...(19): siRNA sense strand
agacugacgucaucuacuc

SEQ ID NO: 19979 - RNA, 19 nt, Homo sapiens
  misc_RNA (1)...(19): siRNA sense strand
cuacagcaaggacgacuuu

SEQ ID NO: 19980 - RNA, 19 nt, Homo sapiens
  misc_RNA (1)...(19): siRNA sense strand
gcggaggagcugauacuga

SEQ ID NO: 19981 - RNA, 19 nt, Homo sapiens
  misc_RNA (1)...(19): siRNA sense strand
gaagagguggaguucacuu

SEQ ID NO: 19982 - RNA, 19 nt, Homo sapiens
  misc_RNA (1)...(19): siRNA sense strand
gaaugcccuugacaacauc

SEQ ID NO: 19983 - RNA, 19 nt, Homo sapiens
  misc_RNA (1)...(19): siRNA sense strand
gaggaacugcgucuuuauc

SEQ ID NO: 19984 - RNA, 19 nt, Homo sapiens
  misc_RNA (1)...(19): siRNA sense strand
gaggauacugucaccauca

SEQ ID NO: 19985 - RNA, 19 nt, Homo sapiens
  misc_RNA (1)...(19): siRNA sense strand
cgucgucggugggcuuauu

SEQ ID NO: 19986 - RNA, 19 nt, Homo sapiens
  misc_RNA (1)...(19): siRNA sense strand
cgaaucucaucucacugaa

SEQ ID NO: 19987 - RNA, 19 nt, Homo sapiens
  misc_RNA (1)...(19): siRNA sense strand
gcucucagacguacaaugc

SEQ ID NO: 19988 - RNA, 19 nt, Homo sapiens
  misc_RNA (1)...(19): siRNA sense strand
ggaacugcgucuuuaucac

SEQ ID NO: 19989 - RNA, 19 nt, Homo sapiens
  misc_RNA (1)...(19): siRNA sense strand
guuccucauugcccagaaa

SEQ ID NO: 19990 - RNA, 19 nt, Homo sapiens
  misc_RNA (1)...(19): siRNA sense strand
cgagugggccaucgacuuc

SEQ ID NO: 19991 - RNA, 19 nt, Homo sapiens
  misc_RNA (1)...(19): siRNA sense strand
gacguacaaugccgaagag

SEQ ID NO: 19992 - RNA, 19 nt, Homo sapiens
  misc_RNA (1)...(19): siRNA sense strand
gagguggaguucacuuuug

SEQ ID NO: 19993 - RNA, 19 nt, Homo sapiens
  misc_RNA (1)...(19): siRNA sense strand
gccgagagcacgagagauc

SEQ ID NO: 19994 - RNA, 19 nt, Homo sapiens
  misc_RNA (1)...(19): siRNA sense strand
gaacgaggaacugcgucuu

SEQ ID NO: 19995 - RNA, 19 nt, Homo sapiens
  misc_RNA (1)...(19): siRNA sense strand
ccgaagagguggaguucac

SEQ ID NO: 19996 - RNA, 19 nt, Homo sapiens
  misc_RNA (1)...(19): siRNA sense strand
gggaaugcccuugacaaca

SEQ ID NO: 19997 - RNA, 19 nt, Homo sapiens
  misc_RNA (1)...(19): siRNA sense strand
ccugacgaaucucaucuca

SEQ ID NO: 19998 - RNA, 19 nt, Homo sapiens
  misc_RNA (1)...(19): siRNA sense strand
ccgcucuucuacgucauua

SEQ ID NO: 19999 - RNA, 19 nt, Homo sapiens
  misc_RNA (1)...(19): siRNA sense strand
gcgagugggccaucgacuu

SEQ ID NO: 20000 - RNA, 19 nt, Homo sapiens
  misc_RNA (1)...(19): siRNA sense strand
acuagcgucuggauuggaa

SEQ ID NO: 20001 - RNA, 19 nt, Homo sapiens
  misc_RNA (1)...(19): siRNA sense strand
acgaaucucaucucacuga

SEQ ID NO: 20002 - RNA, 19 nt, Homo sapiens
  misc_RNA (1)...(19): siRNA sense strand
ccacuagcgucuggauugg

SEQ ID NO: 20003 - RNA, 19 nt, Homo sapiens
  misc_RNA (1)...(19): siRNA sense strand
ggagacugacgucaucuac

SEQ ID NO: 20004 - RNA, 19 nt, Homo sapiens
  misc_RNA (1)...(19): siRNA sense strand
agacguacaaugccgaaga

SEQ ID NO: 20005 - RNA, 19 nt, Homo sapiens
  misc_RNA (1)...(19): siRNA sense strand
gaaucucaucucacugaau

SEQ ID NO: 20006 - RNA, 19 nt, Homo sapiens
  misc_RNA (1)...(19): siRNA sense strand
cuacgucauuaacaucauc

SEQ ID NO: 20007 - RNA, 19 nt, Homo sapiens
  misc_RNA (1)...(19): siRNA sense strand
gggagacugacgucaucua

SEQ ID NO: 20008 - RNA, 19 nt, Homo sapiens
  misc_RNA (1)...(19): siRNA sense strand
uggaaucgauuggcaggau

SEQ ID NO: 20009 - RNA, 19 nt, Homo sapiens
  misc_RNA (1)...(19): siRNA sense strand
ggaggagcugauacugaaa

SEQ ID NO: 20010 - RNA, 19 nt, Homo sapiens
  misc_RNA (1)...(19): siRNA sense strand
cgaggaacugcgucuuuau

SEQ ID NO: 20011 - RNA, 19 nt, Homo sapiens
  misc_RNA (1)...(19): siRNA sense strand
cgacacagaggccuauacu

SEQ ID NO: 20012 - RNA, 19 nt, Homo sapiens
  misc_RNA (1)...(19): siRNA sense strand
caucuacucgcucaucauc

SEQ ID NO: 20013 - RNA, 19 nt, Homo sapiens
  misc_RNA (1)...(19): siRNA sense strand
aggauuaccgacucaacua

SEQ ID NO: 20014 - RNA, 19 nt, Homo sapiens
  misc_RNA (1)...(19): siRNA sense strand
gucaucuacucgcucauca

SEQ ID NO: 20015 - RNA, 19 nt, Homo sapiens
  misc_RNA (1)...(19): siRNA sense strand
gaacagauaacuaugcuua

SEQ ID NO: 20016 - RNA, 19 nt, Homo sapiens
  misc_RNA (1)...(19): siRNA sense strand
agacagagauguugaaaga

SEQ ID NO: 20017 - RNA, 19 nt, Homo sapiens
  misc_RNA (1)...(19): siRNA sense strand
gaagggagauacauguuau

SEQ ID NO: 20018 - RNA, 19 nt, Homo sapiens
  misc_RNA (1)...(19): siRNA sense strand
gaaaguuaauggcuuaugu

SEQ ID NO: 20019 - RNA, 19 nt, Homo sapiens
  misc_RNA (1)...(19): siRNA sense strand
ggacuggaauuaaauaaag

SEQ ID NO: 20020 - RNA, 19 nt, Homo sapiens
  misc_RNA (1)...(19): siRNA sense strand
gagcagcagugaugaagaa

SEQ ID NO: 20021 - RNA, 19 nt, Homo sapiens
  misc_RNA (1)...(19): siRNA sense strand
cgaaugaggcucuggaaua

SEQ ID NO: 20022 - RNA, 19 nt, Homo sapiens
  misc_RNA (1)...(19): siRNA sense strand
gaaugaggcucuggaauag

SEQ ID NO: 20023 - RNA, 19 nt, Homo sapiens
  misc_RNA (1)...(19): siRNA sense strand
gcucauaaugggaaaguua

SEQ ID NO: 20024 - RNA, 19 nt, Homo sapiens
  misc_RNA (1)...(19): siRNA sense strand
gauguuugauuacucuuga

SEQ ID NO: 20025 - RNA, 19 nt, Homo sapiens
  misc_RNA (1)...(19): siRNA sense strand
gucacaagcuguugaauca

SEQ ID NO: 20026 - RNA, 19 nt, Homo sapiens
  misc_RNA (1)...(19): siRNA sense strand
ggaauuaacacccuugaca

SEQ ID NO: 20027 - RNA, 19 nt, Homo sapiens
  misc_RNA (1)...(19): siRNA sense strand
acagagauguugaaagaau

SEQ ID NO: 20028 - RNA, 19 nt, Homo sapiens
  misc_RNA (1)...(19): siRNA sense strand
cagacaaucuuauuacaca

SEQ ID NO: 20029 - RNA, 19 nt, Homo sapiens
  misc_RNA (1)...(19): siRNA sense strand
guacagugguauccucaug

SEQ ID NO: 20030 - RNA, 19 nt, Homo sapiens
  misc_RNA (1)...(19): siRNA sense strand
ugggaaaguuaauggcuua

SEQ ID NO: 20031 - RNA, 19 nt, Homo sapiens
  misc_RNA (1)...(19): siRNA sense strand
caucauaugucuccagucu

SEQ ID NO: 20032 - RNA, 19 nt, Homo sapiens
  misc_RNA (1)...(19): siRNA sense strand
uggcugcaguucagaauuu

SEQ ID NO: 20033 - RNA, 19 nt, Homo sapiens
  misc_RNA (1)...(19): siRNA sense strand
uuaacacccuugacauuga

SEQ ID NO: 20034 - RNA, 19 nt, Homo sapiens
  misc_RNA (1)...(19): siRNA sense strand
cagcagugaugaagaagga

SEQ ID NO: 20035 - RNA, 19 nt, Homo sapiens
  misc_RNA (1)...(19): siRNA sense strand
acaauuaaauccggccuuu

SEQ ID NO: 20036 - RNA, 19 nt, Homo sapiens
  misc_RNA (1)...(19): siRNA sense strand
gcaaacacugcucauaaug

SEQ ID NO: 20037 - RNA, 19 nt, Homo sapiens
  misc_RNA (1)...(19): siRNA sense strand
uaacacccuugacauugaa

SEQ ID NO: 20038 - RNA, 19 nt, Homo sapiens
  misc_RNA (1)...(19): siRNA sense strand
ugaagggagauacauguua

SEQ ID NO: 20039 - RNA, 19 nt, Homo sapiens
  misc_RNA (1)...(19): siRNA sense strand
acaaacugcagauguauuu

SEQ ID NO: 20040 - RNA, 19 nt, Homo sapiens
  misc_RNA (1)...(19): siRNA sense strand
caccauugcuguuuauaca

SEQ ID NO: 20041 - RNA, 19 nt, Homo sapiens
  misc_RNA (1)...(19): siRNA sense strand
caggagaacagauaacuau

SEQ ID NO: 20042 - RNA, 19 nt, Homo sapiens
  misc_RNA (1)...(19): siRNA sense strand
gagaacagauaacuaugcu

SEQ ID NO: 20043 - RNA, 19 nt, Homo sapiens
  misc_RNA (1)...(19): siRNA sense strand
ccagcagacaaucuuauua

SEQ ID NO: 20044 - RNA, 19 nt, Homo sapiens
  misc_RNA (1)...(19): siRNA sense strand
gguagcaguugguacuaga

SEQ ID NO: 20045 - RNA, 19 nt, Homo sapiens
  misc_RNA (1)...(19): siRNA sense strand
gauuguacuuuaugaccuu

SEQ ID NO: 20046 - RNA, 19 nt, Homo sapiens
  misc_RNA (1)...(19): siRNA sense strand
guuaucaggugguucagau

SEQ ID NO: 20047 - RNA, 19 nt, Homo sapiens
  misc_RNA (1)...(19): siRNA sense strand
caggaacuuuauaguggua

SEQ ID NO: 20048 - RNA, 19 nt, Homo sapiens
  misc_RNA (1)...(19): siRNA sense strand
aaagcaguguguuccauug

SEQ ID NO: 20049 - RNA, 19 nt, Homo sapiens
  misc_RNA (1)...(19): siRNA sense strand
guucacaucaagcucauuu

SEQ ID NO: 20050 - RNA, 19 nt, Homo sapiens
  misc_RNA (1)...(19): siRNA sense strand
uuacucaggagaacagaua

SEQ ID NO: 20051 - RNA, 19 nt, Homo sapiens
  misc_RNA (1)...(19): siRNA sense strand
ggucacagacaagaaauau

SEQ ID NO: 20052 - RNA, 19 nt, Homo sapiens
  misc_RNA (1)...(19): siRNA sense strand
gaauuaacacccuugacau

SEQ ID NO: 20053 - RNA, 19 nt, Homo sapiens
  misc_RNA (1)...(19): siRNA sense strand
uaaauccggccuuugaaga

SEQ ID NO: 20054 - RNA, 19 nt, Homo sapiens
  misc_RNA (1)...(19): siRNA sense strand
guaaagcaguguguuccau

SEQ ID NO: 20055 - RNA, 19 nt, Homo sapiens
  misc_RNA (1)...(19): siRNA sense strand
ggcuuggguuccauccuua

SEQ ID NO: 20056 - RNA, 19 nt, Homo sapiens
  misc_RNA (1)...(19): siRNA sense strand
gggacuggaauuaaauaaa

SEQ ID NO: 20057 - RNA, 19 nt, Homo sapiens
  misc_RNA (1)...(19): siRNA sense strand
gaugaugagacuacaacaa

SEQ ID NO: 20058 - RNA, 19 nt, Homo sapiens
  misc_RNA (1)...(19): siRNA sense strand
gcuuaagggacauuauaaa

SEQ ID NO: 20059 - RNA, 19 nt, Homo sapiens
  misc_RNA (1)...(19): siRNA sense strand
uaaagacagagauguugaa

SEQ ID NO: 20060 - RNA, 19 nt, Homo sapiens
  misc_RNA (1)...(19): siRNA sense strand
aauuaaauccggccuuuga

SEQ ID NO: 20061 - RNA, 19 nt, Homo sapiens
  misc_RNA (1)...(19): siRNA sense strand
acagauaacuaugcuuaag

SEQ ID NO: 20062 - RNA, 19 nt, Homo sapiens
  misc_RNA (1)...(19): siRNA sense strand
gacuucaccuccucacugu

SEQ ID NO: 20063 - RNA, 19 nt, Homo sapiens
  misc_RNA (1)...(19): siRNA sense strand
auccugauguucacagaua

SEQ ID NO: 20064 - RNA, 19 nt, Homo sapiens
  misc_RNA (1)...(19): siRNA sense strand
gcuguguauuucagucaaa

SEQ ID NO: 20065 - RNA, 19 nt, Homo sapiens
  misc_RNA (1)...(19): siRNA sense strand
gagucaacacggagaguuu

SEQ ID NO: 20066 - RNA, 19 nt, Homo sapiens
  misc_RNA (1)...(19): siRNA sense strand
uaaagcaguguguuccauu

SEQ ID NO: 20067 - RNA, 19 nt, Homo sapiens
  misc_RNA (1)...(19): siRNA sense strand
ggagaacagauaacuaugc

SEQ ID NO: 20068 - RNA, 19 nt, Homo sapiens
  misc_RNA (1)...(19): siRNA sense strand
caaacugcagauguauuua

SEQ ID NO: 20069 - RNA, 19 nt, Homo sapiens
  misc_RNA (1)...(19): siRNA sense strand
caaacacugcucauaaugg

SEQ ID NO: 20070 - RNA, 19 nt, Homo sapiens
  misc_RNA (1)...(19): siRNA sense strand
gaacuccagcagacaaucu

SEQ ID NO: 20071 - RNA, 19 nt, Homo sapiens
  misc_RNA (1)...(19): siRNA sense strand
acuguugacugcuguguau

SEQ ID NO: 20072 - RNA, 19 nt, Homo sapiens
  misc_RNA (1)...(19): siRNA sense strand
augaggcucuggaauaguu

SEQ ID NO: 20073 - RNA, 19 nt, Homo sapiens
  misc_RNA (1)...(19): siRNA sense strand
gacuauaucuuggcaacag

SEQ ID NO: 20074 - RNA, 19 nt, Homo sapiens
  misc_RNA (1)...(19): siRNA sense strand
uagaggacccaaaguacaa

SEQ ID NO: 20075 - RNA, 19 nt, Homo sapiens
  misc_RNA (1)...(19): siRNA sense strand
uuuaugaccuugagaacuc

SEQ ID NO: 20076 - RNA, 19 nt, Homo sapiens
  misc_RNA (1)...(19): siRNA sense strand
cagagauguugaaagaauc

SEQ ID NO: 20077 - RNA, 19 nt, Homo sapiens
  misc_RNA (1)...(19): siRNA sense strand
guucagauggugugauugu

SEQ ID NO: 20078 - RNA, 19 nt, Homo sapiens
  misc_RNA (1)...(19): siRNA sense strand
ugacauugaaccuguugaa

SEQ ID NO: 20079 - RNA, 19 nt, Homo sapiens
  misc_RNA (1)...(19): siRNA sense strand
ugguucagauggugugauu

SEQ ID NO: 20080 - RNA, 19 nt, Homo sapiens
  misc_RNA (1)...(19): siRNA sense strand
ugaucaacauaaugggaaa

SEQ ID NO: 20081 - RNA, 19 nt, Homo sapiens
  misc_RNA (1)...(19): siRNA sense strand
caggauguuugauuacucu

SEQ ID NO: 20082 - RNA, 19 nt, Homo sapiens
  misc_RNA (1)...(19): siRNA sense strand
ggucuccacguuaugacua

SEQ ID NO: 20083 - RNA, 19 nt, Homo sapiens
  misc_RNA (1)...(19): siRNA sense strand
gacaaucuuauuacacaug

SEQ ID NO: 20084 - RNA, 19 nt, Homo sapiens
  misc_RNA (1)...(19): siRNA sense strand
cagcagacaaucuuauuac

SEQ ID NO: 20085 - RNA, 19 nt, Homo sapiens
  misc_RNA (1)...(19): siRNA sense strand
gauggugugauuguacuuu

SEQ ID NO: 20086 - RNA, 19 nt, Homo sapiens
  misc_RNA (1)...(19): siRNA sense strand
augaugagacuacaacaaa

SEQ ID NO: 20087 - RNA, 19 nt, Homo sapiens
  misc_RNA (1)...(19): siRNA sense strand
uggcuuggguuccauccuu

SEQ ID NO: 20088 - RNA, 19 nt, Homo sapiens
  misc_RNA (1)...(19): siRNA sense strand
ggaaaguuaauggcuuaug

SEQ ID NO: 20089 - RNA, 19 nt, Homo sapiens
  misc_RNA (1)...(19): siRNA sense strand
uggauccuguucucacauu

SEQ ID NO: 20090 - RNA, 19 nt, Homo sapiens
  misc_RNA (1)...(19): siRNA sense strand
aauuaacacccuugacauu

SEQ ID NO: 20091 - RNA, 19 nt, Homo sapiens
  misc_RNA (1)...(19): siRNA sense strand
auggugugauuguacuuua

SEQ ID NO: 20092 - RNA, 19 nt, Homo sapiens
  misc_RNA (1)...(19): siRNA sense strand
gcaccauugcuguuuauac

SEQ ID NO: 20093 - RNA, 19 nt, Homo sapiens
  misc_RNA (1)...(19): siRNA sense strand
guaaaauuaugggauguga

SEQ ID NO: 20094 - RNA, 19 nt, Homo sapiens
  misc_RNA (1)...(19): siRNA sense strand
cagggucacagacaagaaa

SEQ ID NO: 20095 - RNA, 19 nt, Homo sapiens
  misc_RNA (1)...(19): siRNA sense strand
ugacugcuguguauuucag

SEQ ID NO: 20096 - RNA, 19 nt, Homo sapiens
  misc_RNA (1)...(19): siRNA sense strand
guugacugcuguguauuuc

SEQ ID NO: 20097 - RNA, 19 nt, Homo sapiens
  misc_RNA (1)...(19): siRNA sense strand
ucaggagaacagauaacua

SEQ ID NO: 20098 - RNA, 19 nt, Homo sapiens
  misc_RNA (1)...(19): siRNA sense strand
gagaacuccagcagacaau

SEQ ID NO: 20099 - RNA, 19 nt, Homo sapiens
  misc_RNA (1)...(19): siRNA sense strand
ugguacagauaaucgaaug

SEQ ID NO: 20100 - RNA, 19 nt, Homo sapiens
  misc_RNA (1)...(19): siRNA sense strand
cauaaugggaaaguuaaug

SEQ ID NO: 20101 - RNA, 19 nt, Homo sapiens
  misc_RNA (1)...(19): siRNA sense strand
cauguuaucaggugguuca

SEQ ID NO: 20102 - RNA, 19 nt, Homo sapiens
  misc_RNA (1)...(19): siRNA sense strand
ggauguuugauuacucuug

SEQ ID NO: 20103 - RNA, 19 nt, Homo sapiens
  misc_RNA (1)...(19): siRNA sense strand
aauaaagacagagauguug

SEQ ID NO: 20104 - RNA, 19 nt, Homo sapiens
  misc_RNA (1)...(19): siRNA sense strand
gcagacaaucuuauuacac

SEQ ID NO: 20105 - RNA, 19 nt, Homo sapiens
  misc_RNA (1)...(19): siRNA sense strand
uggguuccauccuuauaug

SEQ ID NO: 20106 - RNA, 19 nt, Homo sapiens
  misc_RNA (1)...(19): siRNA sense strand
aaagacagagauguugaaa

SEQ ID NO: 20107 - RNA, 19 nt, Homo sapiens
  misc_RNA (1)...(19): siRNA sense strand
gugugauuguacuuuauga

SEQ ID NO: 20108 - RNA, 19 nt, Homo sapiens
  misc_RNA (1)...(19): siRNA sense strand
guacagauaaucgaaugag

SEQ ID NO: 20109 - RNA, 19 nt, Homo sapiens
  misc_RNA (1)...(19): siRNA sense strand
ugagaacuccagcagacaa

SEQ ID NO: 20110 - RNA, 19 nt, Homo sapiens
  misc_RNA (1)...(19): siRNA sense strand
gggauacaaauacauuaca

SEQ ID NO: 20111 - RNA, 19 nt, Homo sapiens
  misc_RNA (1)...(19): siRNA sense strand
acucugaaaguaugggaua

SEQ ID NO: 20112 - RNA, 19 nt, Homo sapiens
  misc_RNA (1)...(19): siRNA sense strand
gugagaagagcaucaggau

SEQ ID NO: 20113 - RNA, 19 nt, Homo sapiens
  misc_RNA (1)...(19): siRNA sense strand
ggagcagcagugaugaaga

SEQ ID NO: 20114 - RNA, 19 nt, Homo sapiens
  misc_RNA (1)...(19): siRNA sense strand
ggugugauuguacuuuaug

SEQ ID NO: 20115 - RNA, 19 nt, Homo sapiens
  misc_RNA (1)...(19): siRNA sense strand
ggaaccagcucagcaaaua

SEQ ID NO: 20116 - RNA, 19 nt, Homo sapiens
  misc_RNA (1)...(19): siRNA sense strand
gaugguggcuguuaucuug

SEQ ID NO: 20117 - RNA, 19 nt, Homo sapiens
  misc_RNA (1)...(19): siRNA sense strand
gaagaucucucuggcaaga

SEQ ID NO: 20118 - RNA, 19 nt, Homo sapiens
  misc_RNA (1)...(19): siRNA sense strand
cagcaaauauaccaucuuu

SEQ ID NO: 20119 - RNA, 19 nt, Homo sapiens
  misc_RNA (1)...(19): siRNA sense strand
gcuaggagcugcauuugga

SEQ ID NO: 20120 - RNA, 19 nt, Homo sapiens
  misc_RNA (1)...(19): siRNA sense strand
gaggaucacuauucuaaau

SEQ ID NO: 20121 - RNA, 19 nt, Homo sapiens
  misc_RNA (1)...(19): siRNA sense strand
ucaagaagcuacccuacuu

SEQ ID NO: 20122 - RNA, 19 nt, Homo sapiens
  misc_RNA (1)...(19): siRNA sense strand
ugaaggaacuaccagcuuu

SEQ ID NO: 20123 - RNA, 19 nt, Homo sapiens
  misc_RNA (1)...(19): siRNA sense strand
gcaaauucaugucuguguu

SEQ ID NO: 20124 - RNA, 19 nt, Homo sapiens
  misc_RNA (1)...(19): siRNA sense strand
gaaggaauaccucacaaug

SEQ ID NO: 20125 - RNA, 19 nt, Homo sapiens
  misc_RNA (1)...(19): siRNA sense strand
guucagcgccuuuguguuu

SEQ ID NO: 20126 - RNA, 19 nt, Homo sapiens
  misc_RNA (1)...(19): siRNA sense strand
ggacugcccucugagaaug

SEQ ID NO: 20127 - RNA, 19 nt, Homo sapiens
  misc_RNA (1)...(19): siRNA sense strand
gauaacaugucaccugaag

SEQ ID NO: 20128 - RNA, 19 nt, Homo sapiens
  misc_RNA (1)...(19): siRNA sense strand
aggaauaccucacaaugaa

SEQ ID NO: 20129 - RNA, 19 nt, Homo sapiens
  misc_RNA (1)...(19): siRNA sense strand
gcgaagccaucaguacuuu

SEQ ID NO: 20130 - RNA, 19 nt, Homo sapiens
  misc_RNA (1)...(19): siRNA sense strand
cgaauuaacgggucagauu

SEQ ID NO: 20131 - RNA, 19 nt, Homo sapiens
  misc_RNA (1)...(19): siRNA sense strand
gugauuugcuucgaauuaa

SEQ ID NO: 20132 - RNA, 19 nt, Homo sapiens
  misc_RNA (1)...(19): siRNA sense strand
caugucaccugaagagauu

SEQ ID NO: 20133 - RNA, 19 nt, Homo sapiens
  misc_RNA (1)...(19): siRNA sense strand
gcaaggaugaggaucacua

SEQ ID NO: 20134 - RNA, 19 nt, Homo sapiens
  misc_RNA (1)...(19): siRNA sense strand
ggacagguggugagaagaa

SEQ ID NO: 20135 - RNA, 19 nt, Homo sapiens
  misc_RNA (1)...(19): siRNA sense strand
ggaucacuauucuaaaugu

SEQ ID NO: 20136 - RNA, 19 nt, Homo sapiens
  misc_RNA (1)...(19): siRNA sense strand
ggaugaggaugaacugauc

SEQ ID NO: 20137 - RNA, 19 nt, Homo sapiens
  misc_RNA (1)...(19): siRNA sense strand
gcucacauccugcccauga

SEQ ID NO: 20138 - RNA, 19 nt, Homo sapiens
  misc_RNA (1)...(19): siRNA sense strand
ggucaacguugucaucauc

SEQ ID NO: 20139 - RNA, 19 nt, Homo sapiens
  misc_RNA (1)...(19): siRNA sense strand
gaauuaacgggucagauug

SEQ ID NO: 20140 - RNA, 19 nt, Homo sapiens
  misc_RNA (1)...(19): siRNA sense strand
gcucuuuccugaugguauu

SEQ ID NO: 20141 - RNA, 19 nt, Homo sapiens
  misc_RNA (1)...(19): siRNA sense strand
gaaccaauuuccgaaugga

SEQ ID NO: 20142 - RNA, 19 nt, Homo sapiens
  misc_RNA (1)...(19): siRNA sense strand
gcuacggacugcccucuga

SEQ ID NO: 20143 - RNA, 19 nt, Homo sapiens
  misc_RNA (1)...(19): siRNA sense strand
ggaugaggaucacuauucu

SEQ ID NO: 20144 - RNA, 19 nt, Homo sapiens
  misc_RNA (1)...(19): siRNA sense strand
ggagcuggccgacaucuug

SEQ ID NO: 20145 - RNA, 19 nt, Homo sapiens
  misc_RNA (1)...(19): siRNA sense strand
caccaucacugcucuguuc

SEQ ID NO: 20146 - RNA, 19 nt, Homo sapiens
  misc_RNA (1)...(19): siRNA sense strand
ccagucagcuguguggauu

SEQ ID NO: 20147 - RNA, 19 nt, Homo sapiens
  misc_RNA (1)...(19): siRNA sense strand
gccaugcucuuuccugaug

SEQ ID NO: 20148 - RNA, 19 nt, Homo sapiens
  misc_RNA (1)...(19): siRNA sense strand
caucaucuuucucuucuuc

SEQ ID NO: 20149 - RNA, 19 nt, Homo sapiens
  misc_RNA (1)...(19): siRNA sense strand
ccugggagcuguauuugug

SEQ ID NO: 20150 - RNA, 19 nt, Homo sapiens
  misc_RNA (1)...(19): siRNA sense strand
acauagggaugcccaagaa

SEQ ID NO: 20151 - RNA, 19 nt, Homo sapiens
  misc_RNA (1)...(19): siRNA sense strand
caagguagagggcgaguug

SEQ ID NO: 20152 - RNA, 19 nt, Homo sapiens
  misc_RNA (1)...(19): siRNA sense strand
ugucggagcugccuuacga

SEQ ID NO: 20153 - RNA, 19 nt, Homo sapiens
  misc_RNA (1)...(19): siRNA sense strand
auucauggcuggagaguug

SEQ ID NO: 20154 - RNA, 19 nt, Homo sapiens
  misc_RNA (1)...(19): siRNA sense strand
ccauacuacuacucugaua

SEQ ID NO: 20155 - RNA, 19 nt, Homo sapiens
  misc_RNA (1)...(19): siRNA sense strand
ccacagacgaggaggauga

SEQ ID NO: 20156 - RNA, 19 nt, Homo sapiens
  misc_RNA (1)...(19): siRNA sense strand
caagacucauacccuguuu

SEQ ID NO: 20157 - RNA, 19 nt, Homo sapiens
  misc_RNA (1)...(19): siRNA sense strand
gaagacaggcuccaguucu

SEQ ID NO: 20158 - RNA, 19 nt, Homo sapiens
  misc_RNA (1)...(19): siRNA sense strand
cagaaccaauuuccgaaug

SEQ ID NO: 20159 - RNA, 19 nt, Homo sapiens
  misc_RNA (1)...(19): siRNA sense strand
aagacaggcuccaguucua

SEQ ID NO: 20160 - RNA, 19 nt, Homo sapiens
  misc_RNA (1)...(19): siRNA sense strand
ggaugaggaugaggacgaa

SEQ ID NO: 20161 - RNA, 19 nt, Homo sapiens
  misc_RNA (1)...(19): siRNA sense strand
gcuguauccuggaauuguu

SEQ ID NO: 20162 - RNA, 19 nt, Homo sapiens
  misc_RNA (1)...(19): siRNA sense strand
ggagucggcuguuguuuug

SEQ ID NO: 20163 - RNA, 19 nt, Homo sapiens
  misc_RNA (1)...(19): siRNA sense strand
ggaauaccucacaaugaaa

SEQ ID NO: 20164 - RNA, 19 nt, Homo sapiens
  misc_RNA (1)...(19): siRNA sense strand
gagcauggacuacgucagu

SEQ ID NO: 20165 - RNA, 19 nt, Homo sapiens
  misc_RNA (1)...(19): siRNA sense strand
ccaggauuccacagauuua

SEQ ID NO: 20166 - RNA, 19 nt, Homo sapiens
  misc_RNA (1)...(19): siRNA sense strand
ggucaccuccaccuacuuu

SEQ ID NO: 20167 - RNA, 19 nt, Homo sapiens
  misc_RNA (1)...(19): siRNA sense strand
gaaccagcucagcaaauau

SEQ ID NO: 20168 - RNA, 19 nt, Homo sapiens
  misc_RNA (1)...(19): siRNA sense strand
gaagccaucaguacuuugu

SEQ ID NO: 20169 - RNA, 19 nt, Homo sapiens
  misc_RNA (1)...(19): siRNA sense strand
gaacuacuggagaggauuc

SEQ ID NO: 20170 - RNA, 19 nt, Homo sapiens
  misc_RNA (1)...(19): siRNA sense strand
agacaacccugcacaagac

SEQ ID NO: 20171 - RNA, 19 nt, Homo sapiens
  misc_RNA (1)...(19): siRNA sense strand
ugagccagccugucuguuu

SEQ ID NO: 20172 - RNA, 19 nt, Homo sapiens
  misc_RNA (1)...(19): siRNA sense strand
gguacgugaugugaaguuu

SEQ ID NO: 20173 - RNA, 19 nt, Homo sapiens
  misc_RNA (1)...(19): siRNA sense strand
gucaugaaguucuggaugu

SEQ ID NO: 20174 - RNA, 19 nt, Homo sapiens
  misc_RNA (1)...(19): siRNA sense strand
caacaauacaugggugaaa

SEQ ID NO: 20175 - RNA, 19 nt, Homo sapiens
  misc_RNA (1)...(19): siRNA sense strand
ucagccaguuucuugcuaa

SEQ ID NO: 20176 - RNA, 19 nt, Homo sapiens
  misc_RNA (1)...(19): siRNA sense strand
gaauggauuuccccuuuga

SEQ ID NO: 20177 - RNA, 19 nt, Homo sapiens
  misc_RNA (1)...(19): siRNA sense strand
gacagguggugagaagaaa

SEQ ID NO: 20178 - RNA, 19 nt, Homo sapiens
  misc_RNA (1)...(19): siRNA sense strand
uaacaugucaccugaagag

SEQ ID NO: 20179 - RNA, 19 nt, Homo sapiens
  misc_RNA (1)...(19): siRNA sense strand
ggacuacgucagugccaaa

SEQ ID NO: 20180 - RNA, 19 nt, Homo sapiens
  misc_RNA (1)...(19): siRNA sense strand
cgaggaggaugaggaugaa

SEQ ID NO: 20181 - RNA, 19 nt, Homo sapiens
  misc_RNA (1)...(19): siRNA sense strand
aagaggagcuggccgacau

SEQ ID NO: 20182 - RNA, 19 nt, Homo sapiens
  misc_RNA (1)...(19): siRNA sense strand
gagcuguauuuguguaucu

SEQ ID NO: 20183 - RNA, 19 nt, Homo sapiens
  misc_RNA (1)...(19): siRNA sense strand
ggaauuguuaccuuuguca

SEQ ID NO: 20184 - RNA, 19 nt, Homo sapiens
  misc_RNA (1)...(19): siRNA sense strand
ggacagcaaggaugaggau

SEQ ID NO: 20185 - RNA, 19 nt, Homo sapiens
  misc_RNA (1)...(19): siRNA sense strand
ugugauuugcuucgaauua

SEQ ID NO: 20186 - RNA, 19 nt, Homo sapiens
  misc_RNA (1)...(19): siRNA sense strand
gcugugauuugcuucgaau

SEQ ID NO: 20187 - RNA, 19 nt, Homo sapiens
  misc_RNA (1)...(19): siRNA sense strand
gaauaccucacaaugaaag

SEQ ID NO: 20188 - RNA, 19 nt, Homo sapiens
  misc_RNA (1)...(19): siRNA sense strand
uuugauuccugcuguauug

SEQ ID NO: 20189 - RNA, 19 nt, Homo sapiens
  misc_RNA (1)...(19): siRNA sense strand
caugguacgugaugugaag

SEQ ID NO: 20190 - RNA, 19 nt, Homo sapiens
  misc_RNA (1)...(19): siRNA sense strand
ccacauugccagcaucugu

SEQ ID NO: 20191 - RNA, 19 nt, Homo sapiens
  misc_RNA (1)...(19): siRNA sense strand
ccaauuuccgaauggauuu

SEQ ID NO: 20192 - RNA, 19 nt, Homo sapiens
  misc_RNA (1)...(19): siRNA sense strand
caccaggaaugggucaauu

SEQ ID NO: 20193 - RNA, 19 nt, Homo sapiens
  misc_RNA (1)...(19): siRNA sense strand
cagacaacccugcacaaga

SEQ ID NO: 20194 - RNA, 19 nt, Homo sapiens
  misc_RNA (1)...(19): siRNA sense strand
aaccagcucagcaaauaua

SEQ ID NO: 20195 - RNA, 19 nt, Homo sapiens
  misc_RNA (1)...(19): siRNA sense strand
gcugguaggagaaaucaug

SEQ ID NO: 20196 - RNA, 19 nt, Homo sapiens
  misc_RNA (1)...(19): siRNA sense strand
guaccaguauaugcccuuu

SEQ ID NO: 20197 - RNA, 19 nt, Homo sapiens
  misc_RNA (1)...(19): siRNA sense strand
cgaaaugaagacaauacuu

SEQ ID NO: 20198 - RNA, 19 nt, Homo sapiens
  misc_RNA (1)...(19): siRNA sense strand
gagccagccugucuguuuu

SEQ ID NO: 20199 - RNA, 19 nt, Homo sapiens
  misc_RNA (1)...(19): siRNA sense strand
accaguauaugcccuuuga

SEQ ID NO: 20200 - RNA, 19 nt, Homo sapiens
  misc_RNA (1)...(19): siRNA sense strand
gcccucagccaguuucuug

SEQ ID NO: 20201 - RNA, 19 nt, Homo sapiens
  misc_RNA (1)...(19): siRNA sense strand
ucagcaaauucaugucugu

SEQ ID NO: 20202 - RNA, 19 nt, Homo sapiens
  misc_RNA (1)...(19): siRNA sense strand
caaauucaugucuguguuc

SEQ ID NO: 20203 - RNA, 19 nt, Homo sapiens
  misc_RNA (1)...(19): siRNA sense strand
gauuuauggccaucacaaa

SEQ ID NO: 20204 - RNA, 19 nt, Homo sapiens
  misc_RNA (1)...(19): siRNA sense strand
ggaaggcugguaggagaaa

SEQ ID NO: 20205 - RNA, 19 nt, Homo sapiens
  misc_RNA (1)...(19): siRNA sense strand
acaaggcccucagccaguu

SEQ ID NO: 20206 - RNA, 19 nt, Homo sapiens
  misc_RNA (1)...(19): siRNA sense strand
guucuaccguggacagcaa

SEQ ID NO: 20207 - RNA, 19 nt, Homo sapiens
  misc_RNA (1)...(19): siRNA sense strand
uuauggccaucacaaagaa

SEQ ID NO: 20208 - RNA, 19 nt, Homo sapiens
  misc_RNA (1)...(19): siRNA sense strand
caacccaggauuccacaga

SEQ ID NO: 20209 - RNA, 19 nt, Homo sapiens
  misc_RNA (1)...(19): siRNA sense strand
gcccgaguccuucgccuuu

SEQ ID NO: 20210 - RNA, 19 nt, Homo sapiens
  misc_RNA (1)...(19): siRNA sense strand
uacgugaugugaaguuugu

SEQ ID NO: 20211 - RNA, 19 nt, Homo sapiens
  misc_RNA (1)...(19): siRNA sense strand
cugcagcccucucucuaug

SEQ ID NO: 20212 - RNA, 19 nt, Homo sapiens
  misc_RNA (1)...(19): siRNA sense strand
gaagaaaauuaggggaaga

SEQ ID NO: 20213 - RNA, 19 nt, Homo sapiens
  misc_RNA (1)...(19): siRNA sense strand
gaugguauuuuguuugaug

SEQ ID NO: 20214 - RNA, 19 nt, Homo sapiens
  misc_RNA (1)...(19): siRNA sense strand
gaucacuauucuaaauguc

SEQ ID NO: 20215 - RNA, 19 nt, Homo sapiens
  misc_RNA (1)...(19): siRNA sense strand
ggacuuggcuguugagagu

SEQ ID NO: 20216 - RNA, 19 nt, Homo sapiens
  misc_RNA (1)...(19): siRNA sense strand
gaaccuucauucccucuuu

SEQ ID NO: 20217 - RNA, 19 nt, Homo sapiens
  misc_RNA (1)...(19): siRNA sense strand
gggcagcgcuuaccucuuc

SEQ ID NO: 20218 - RNA, 19 nt, Homo sapiens
  misc_RNA (1)...(19): siRNA sense strand
gcgcuuaccucuucuguca

SEQ ID NO: 20219 - RNA, 19 nt, Homo sapiens
  misc_RNA (1)...(19): siRNA sense strand
ggucaugucuucccacuuc

SEQ ID NO: 20220 - RNA, 19 nt, Homo sapiens
  misc_RNA (1)...(19): siRNA sense strand
gcaucgaggucaugucuuc

SEQ ID NO: 20221 - RNA, 19 nt, Homo sapiens
  misc_RNA (1)...(19): siRNA sense strand
gaucaccaaucccaucaug

SEQ ID NO: 20222 - RNA, 19 nt, Homo sapiens
  misc_RNA (1)...(19): siRNA sense strand
gcaccgucauugucaagaa

SEQ ID NO: 20223 - RNA, 19 nt, Homo sapiens
  misc_RNA (1)...(19): siRNA sense strand
gcaccugucugugaugaug

SEQ ID NO: 20224 - RNA, 19 nt, Homo sapiens
  misc_RNA (1)...(19): siRNA sense strand
ucaagaagcugccauaccu

SEQ ID NO: 20225 - RNA, 19 nt, Homo sapiens
  misc_RNA (1)...(19): siRNA sense strand
ggacugguacuuccugaug

SEQ ID NO: 20226 - RNA, 19 nt, Homo sapiens
  misc_RNA (1)...(19): siRNA sense strand
uggaguggcugaagcagaa

SEQ ID NO: 20227 - RNA, 19 nt, Homo sapiens
  misc_RNA (1)...(19): siRNA sense strand
gggcguggccacagucuuu

SEQ ID NO: 20228 - RNA, 19 nt, Homo sapiens
  misc_RNA (1)...(19): siRNA sense strand
cgaggugaccggccagaua

SEQ ID NO: 20229 - RNA, 19 nt, Homo sapiens
  misc_RNA (1)...(19): siRNA sense strand
gagaugaagaaagcaauuu

SEQ ID NO: 20230 - RNA, 19 nt, Homo sapiens
  misc_RNA (1)...(19): siRNA sense strand
ggagaugaagaaagcaauu

SEQ ID NO: 20231 - RNA, 19 nt, Homo sapiens
  misc_RNA (1)...(19): siRNA sense strand
gagaacaagagcaagcaaa

SEQ ID NO: 20232 - RNA, 19 nt, Homo sapiens
  misc_RNA (1)...(19): siRNA sense strand
ucaccacacuggccaagga

SEQ ID NO: 20233 - RNA, 19 nt, Homo sapiens
  misc_RNA (1)...(19): siRNA sense strand
gacugguacuuccugauga

SEQ ID NO: 20234 - RNA, 19 nt, Homo sapiens
  misc_RNA (1)...(19): siRNA sense strand
guacuucaugcccaucuuu

SEQ ID NO: 20235 - RNA, 19 nt, Homo sapiens
  misc_RNA (1)...(19): siRNA sense strand
gagcacagagucccagauc

SEQ ID NO: 20236 - RNA, 19 nt, Homo sapiens
  misc_RNA (1)...(19): siRNA sense strand
cgaccugccugagaucuuc

SEQ ID NO: 20237 - RNA, 19 nt, Homo sapiens
  misc_RNA (1)...(19): siRNA sense strand
ccauggacuuggcuguuga

SEQ ID NO: 20238 - RNA, 19 nt, Homo sapiens
  misc_RNA (1)...(19): siRNA sense strand
gaccaucaccucccucuac

SEQ ID NO: 20239 - RNA, 19 nt, Homo sapiens
  misc_RNA (1)...(19): siRNA sense strand
cagaaccagugacccugaa

SEQ ID NO: 20240 - RNA, 19 nt, Homo sapiens
  misc_RNA (1)...(19): siRNA sense strand
gaggugaccggccagauag

SEQ ID NO: 20241 - RNA, 19 nt, Homo sapiens
  misc_RNA (1)...(19): siRNA sense strand
cuucucggcuguccaugaa

SEQ ID NO: 20242 - RNA, 19 nt, Homo sapiens
  misc_RNA (1)...(19): siRNA sense strand
ggguggagaugaagaaagc

SEQ ID NO: 20243 - RNA, 19 nt, Homo sapiens
  misc_RNA (1)...(19): siRNA sense strand
uggaggagguggucaaggu

SEQ ID NO: 20244 - RNA, 19 nt, Homo sapiens
  misc_RNA (1)...(19): siRNA sense strand
ggguggagcacuucaugaa

SEQ ID NO: 20245 - RNA, 19 nt, Homo sapiens
  misc_RNA (1)...(19): siRNA sense strand
gauggcaccgucauuguca

SEQ ID NO: 20246 - RNA, 19 nt, Homo sapiens
  misc_RNA (1)...(19): siRNA sense strand
uuggaggacuaccuggaua

SEQ ID NO: 20247 - RNA, 19 nt, Homo sapiens
  misc_RNA (1)...(19): siRNA sense strand
gggcgcugaugacccagaa

SEQ ID NO: 20248 - RNA, 19 nt, Homo sapiens
  misc_RNA (1)...(19): siRNA sense strand
uggacucgcuguucgacaa

SEQ ID NO: 20249 - RNA, 19 nt, Homo sapiens
  misc_RNA (1)...(19): siRNA sense strand
aggacuaccuggauaucaa

SEQ ID NO: 20250 - RNA, 19 nt, Homo sapiens
  misc_RNA (1)...(19): siRNA sense strand
gugcaccugucugugauga

SEQ ID NO: 20251 - RNA, 19 nt, Homo sapiens
  misc_RNA (1)...(19): siRNA sense strand
caauuuccaaccugacaaa

SEQ ID NO: 20252 - RNA, 19 nt, Homo sapiens
  misc_RNA (1)...(19): siRNA sense strand
gcacagagucccagauccu

SEQ ID NO: 20253 - RNA, 19 nt, Homo sapiens
  misc_RNA (1)...(19): siRNA sense strand
ucaccucccucuacaagac

SEQ ID NO: 20254 - RNA, 19 nt, Homo sapiens
  misc_RNA (1)...(19): siRNA sense strand
ggaggagguggucaagguu

SEQ ID NO: 20255 - RNA, 19 nt, Homo sapiens
  misc_RNA (1)...(19): siRNA sense strand
ccagcaagccuguguacuc

SEQ ID NO: 20256 - RNA, 19 nt, Homo sapiens
  misc_RNA (1)...(19): siRNA sense strand
gcaauuuccaaccugacaa

SEQ ID NO: 20257 - RNA, 19 nt, Homo sapiens
  misc_RNA (1)...(19): siRNA sense strand
gaggguggagcacuucaug

SEQ ID NO: 20258 - RNA, 19 nt, Homo sapiens
  misc_RNA (1)...(19): siRNA sense strand
gaaguucuggaugcugauu

SEQ ID NO: 20259 - RNA, 19 nt, Homo sapiens
  misc_RNA (1)...(19): siRNA sense strand
ggcuucaucaggaacaaua

SEQ ID NO: 20260 - RNA, 19 nt, Homo sapiens
  misc_RNA (1)...(19): siRNA sense strand
gcgugaggguggagcacuu

SEQ ID NO: 20261 - RNA, 19 nt, Homo sapiens
  misc_RNA (1)...(19): siRNA sense strand
gcgcaccaguggcuguaca

SEQ ID NO: 20262 - RNA, 19 nt, Homo sapiens
  misc_RNA (1)...(19): siRNA sense strand
uguccuggguggagaugaa

SEQ ID NO: 20263 - RNA, 19 nt, Homo sapiens
  misc_RNA (1)...(19): siRNA sense strand
gcccucgucucuuucucuu

SEQ ID NO: 20264 - RNA, 19 nt, Homo sapiens
  misc_RNA (1)...(19): siRNA sense strand
ugccagcccuccuucuaug

SEQ ID NO: 20265 - RNA, 19 nt, Homo sapiens
  misc_RNA (1)...(19): siRNA sense strand
cuguggcccucgucucuuu

SEQ ID NO: 20266 - RNA, 19 nt, Homo sapiens
  misc_RNA (1)...(19): siRNA sense strand
cgaaucuucuuuggcuuca

SEQ ID NO: 20267 - RNA, 19 nt, Homo sapiens
  misc_RNA (1)...(19): siRNA sense strand
cuucauucccucuuuguga

SEQ ID NO: 20268 - RNA, 19 nt, Homo sapiens
  misc_RNA (1)...(19): siRNA sense strand
acaauagguucagcuccaa

SEQ ID NO: 20269 - RNA, 19 nt, Homo sapiens
  misc_RNA (1)...(19): siRNA sense strand
ggacuaccuggauaucaag

SEQ ID NO: 20270 - RNA, 19 nt, Homo sapiens
  misc_RNA (1)...(19): siRNA sense strand
uaucucuccuggacugugu

SEQ ID NO: 20271 - RNA, 19 nt, Homo sapiens
  misc_RNA (1)...(19): siRNA sense strand
gagcgcaccaguggcugua

SEQ ID NO: 20272 - RNA, 19 nt, Homo sapiens
  misc_RNA (1)...(19): siRNA sense strand
caucaccucccucuacaag

SEQ ID NO: 20273 - RNA, 19 nt, Homo sapiens
  misc_RNA (1)...(19): siRNA sense strand
cagagacuucccugcauga

SEQ ID NO: 20274 - RNA, 19 nt, Homo sapiens
  misc_RNA (1)...(19): siRNA sense strand
gguacuucaugcccaucuu

SEQ ID NO: 20275 - RNA, 19 nt, Homo sapiens
  misc_RNA (1)...(19): siRNA sense strand
aaucuucuuuggcuucauc

SEQ ID NO: 20276 - RNA, 19 nt, Homo sapiens
  misc_RNA (1)...(19): siRNA sense strand
ugucagcgaaucuucuuug

SEQ ID NO: 20277 - RNA, 19 nt, Homo sapiens
  misc_RNA (1)...(19): siRNA sense strand
ggguggacguucccuucga

SEQ ID NO: 20278 - RNA, 19 nt, Homo sapiens
  misc_RNA (1)...(19): siRNA sense strand
gaggacuaccuggauauca

SEQ ID NO: 20279 - RNA, 19 nt, Homo sapiens
  misc_RNA (1)...(19): siRNA sense strand
cagcccuccuucuaugaug

SEQ ID NO: 20280 - RNA, 19 nt, Homo sapiens
  misc_RNA (1)...(19): siRNA sense strand
cagcaucgaggucaugucu

SEQ ID NO: 20281 - RNA, 19 nt, Homo sapiens
  misc_RNA (1)...(19): siRNA sense strand
ucaugcccaucuuugucua

SEQ ID NO: 20282 - RNA, 19 nt, Homo sapiens
  misc_RNA (1)...(19): siRNA sense strand
caauagguucagcuccaaa

SEQ ID NO: 20283 - RNA, 19 nt, Homo sapiens
  misc_RNA (1)...(19): siRNA sense strand
ucuuugagcuguugaaccu

SEQ ID NO: 20284 - RNA, 19 nt, Homo sapiens
  misc_RNA (1)...(19): siRNA sense strand
gggcgaggacugguacuuc

SEQ ID NO: 20285 - RNA, 19 nt, Homo sapiens
  misc_RNA (1)...(19): siRNA sense strand
gaaucaagauccugaaaua

SEQ ID NO: 20286 - RNA, 19 nt, Homo sapiens
  misc_RNA (1)...(19): siRNA sense strand
gaaccugacugucuucuuu

SEQ ID NO: 20287 - RNA, 19 nt, Homo sapiens
  misc_RNA (1)...(19): siRNA sense strand
uaucauggcuucuguauau

SEQ ID NO: 20288 - RNA, 19 nt, Homo sapiens
  misc_RNA (1)...(19): siRNA sense strand
gaaggaagacgaagaacua

SEQ ID NO: 20289 - RNA, 19 nt, Homo sapiens
  misc_RNA (1)...(19): siRNA sense strand
cuacggagcucugggauua

SEQ ID NO: 20290 - RNA, 19 nt, Homo sapiens
  misc_RNA (1)...(19): siRNA sense strand
cuaagaaucugaagacauu

SEQ ID NO: 20291 - RNA, 19 nt, Homo sapiens
  misc_RNA (1)...(19): siRNA sense strand
ggaugaaucucgacccuuu

SEQ ID NO: 20292 - RNA, 19 nt, Homo sapiens
  misc_RNA (1)...(19): siRNA sense strand
ggaacagaguuuaaugaaa

SEQ ID NO: 20293 - RNA, 19 nt, Homo sapiens
  misc_RNA (1)...(19): siRNA sense strand
gacaggagcuggaaaguca

SEQ ID NO: 20294 - RNA, 19 nt, Homo sapiens
  misc_RNA (1)...(19): siRNA sense strand
ggacacaucugccauucga

SEQ ID NO: 20295 - RNA, 19 nt, Homo sapiens
  misc_RNA (1)...(19): siRNA sense strand
gggauuagcccaagguaua

SEQ ID NO: 20296 - RNA, 19 nt, Homo sapiens
  misc_RNA (1)...(19): siRNA sense strand
gagaaggguauaaaucuua

SEQ ID NO: 20297 - RNA, 19 nt, Homo sapiens
  misc_RNA (1)...(19): siRNA sense strand
gagagaagcugaccaucau

SEQ ID NO: 20298 - RNA, 19 nt, Homo sapiens
  misc_RNA (1)...(19): siRNA sense strand
gcacauggcuccugguuuu

SEQ ID NO: 20299 - RNA, 19 nt, Homo sapiens
  misc_RNA (1)...(19): siRNA sense strand
ggaaguugaugaagagaug

SEQ ID NO: 20300 - RNA, 19 nt, Homo sapiens
  misc_RNA (1)...(19): siRNA sense strand
acaaaucccuggacccuuu

SEQ ID NO: 20301 - RNA, 19 nt, Homo sapiens
  misc_RNA (1)...(19): siRNA sense strand
caagugaccgugacacaua

SEQ ID NO: 20302 - RNA, 19 nt, Homo sapiens
  misc_RNA (1)...(19): siRNA sense strand
caucaaauaucuugcacaa

SEQ ID NO: 20303 - RNA, 19 nt, Homo sapiens
  misc_RNA (1)...(19): siRNA sense strand
gacaaacguuuaaagauca

SEQ ID NO: 20304 - RNA, 19 nt, Homo sapiens
  misc_RNA (1)...(19): siRNA sense strand
gaacaagaaucagagucaa

SEQ ID NO: 20305 - RNA, 19 nt, Homo sapiens
  misc_RNA (1)...(19): siRNA sense strand
gaagaugcagccuccauaa

SEQ ID NO: 20306 - RNA, 19 nt, Homo sapiens
  misc_RNA (1)...(19): siRNA sense strand
gggaaauccuccuugauau

SEQ ID NO: 20307 - RNA, 19 nt, Homo sapiens
  misc_RNA (1)...(19): siRNA sense strand
gaagagagagcugcagaaa

SEQ ID NO: 20308 - RNA, 19 nt, Homo sapiens
  misc_RNA (1)...(19): siRNA sense strand
caaacugccucuucagaau

SEQ ID NO: 20309 - RNA, 19 nt, Homo sapiens
  misc_RNA (1)...(19): siRNA sense strand
gaaauagagaccaacauug

SEQ ID NO: 20310 - RNA, 19 nt, Homo sapiens
  misc_RNA (1)...(19): siRNA sense strand
ugaauagccugaaggaaga

SEQ ID NO: 20311 - RNA, 19 nt, Homo sapiens
  misc_RNA (1)...(19): siRNA sense strand
ccauuacccucuucaauau

SEQ ID NO: 20312 - RNA, 19 nt, Homo sapiens
  misc_RNA (1)...(19): siRNA sense strand
ugaaauugcugaucuccuu

SEQ ID NO: 20313 - RNA, 19 nt, Homo sapiens
  misc_RNA (1)...(19): siRNA sense strand
agacaaacguuuaaagauc

SEQ ID NO: 20314 - RNA, 19 nt, Homo sapiens
  misc_RNA (1)...(19): siRNA sense strand
gcgaauaacugaguacaca

SEQ ID NO: 20315 - RNA, 19 nt, Homo sapiens
  misc_RNA (1)...(19): siRNA sense strand
ggaagaaagagcucaagaa

SEQ ID NO: 20316 - RNA, 19 nt, Homo sapiens
  misc_RNA (1)...(19): siRNA sense strand
gaggaugucugggaaguug

SEQ ID NO: 20317 - RNA, 19 nt, Homo sapiens
  misc_RNA (1)...(19): siRNA sense strand
uaaggaagcuggcauugag

SEQ ID NO: 20318 - RNA, 19 nt, Homo sapiens
  misc_RNA (1)...(19): siRNA sense strand
gaagacauuucuaagacau

SEQ ID NO: 20319 - RNA, 19 nt, Homo sapiens
  misc_RNA (1)...(19): siRNA sense strand
ccacagagcggcuagagaa

SEQ ID NO: 20320 - RNA, 19 nt, Homo sapiens
  misc_RNA (1)...(19): siRNA sense strand
guggauagcaacaauauuu

SEQ ID NO: 20321 - RNA, 19 nt, Homo sapiens
  misc_RNA (1)...(19): siRNA sense strand
gaacaauuguagagaaagg

SEQ ID NO: 20322 - RNA, 19 nt, Homo sapiens
  misc_RNA (1)...(19): siRNA sense strand
gaaagucaucccucacaaa

SEQ ID NO: 20323 - RNA, 19 nt, Homo sapiens
  misc_RNA (1)...(19): siRNA sense strand
ggaaagucaucccucacaa

SEQ ID NO: 20324 - RNA, 19 nt, Homo sapiens
  misc_RNA (1)...(19): siRNA sense strand
gagaagagagaacagcuuu

SEQ ID NO: 20325 - RNA, 19 nt, Homo sapiens
  misc_RNA (1)...(19): siRNA sense strand
ccauagagcuggcccuugu

SEQ ID NO: 20326 - RNA, 19 nt, Homo sapiens
  misc_RNA (1)...(19): siRNA sense strand
ucaaguggaugagauugua

SEQ ID NO: 20327 - RNA, 19 nt, Homo sapiens
  misc_RNA (1)...(19): siRNA sense strand
ugacaaagccaugcaguuu

SEQ ID NO: 20328 - RNA, 19 nt, Homo sapiens
  misc_RNA (1)...(19): siRNA sense strand
cagagcggcuagagaagua

SEQ ID NO: 20329 - RNA, 19 nt, Homo sapiens
  misc_RNA (1)...(19): siRNA sense strand
ggccagagcuaccuaccaa

SEQ ID NO: 20330 - RNA, 19 nt, Homo sapiens
  misc_RNA (1)...(19): siRNA sense strand
guaucagguuugccaguua

SEQ ID NO: 20331 - RNA, 19 nt, Homo sapiens
  misc_RNA (1)...(19): siRNA sense strand
agaaagagcucaagaaccu

SEQ ID NO: 20332 - RNA, 19 nt, Homo sapiens
  misc_RNA (1)...(19): siRNA sense strand
cugaagaacugcuacaaau

SEQ ID NO: 20333 - RNA, 19 nt, Homo sapiens
  misc_RNA (1)...(19): siRNA sense strand
ccacagcaguccuggauuc

SEQ ID NO: 20334 - RNA, 19 nt, Homo sapiens
  misc_RNA (1)...(19): siRNA sense strand
gaaauccuccuugauauca

SEQ ID NO: 20335 - RNA, 19 nt, Homo sapiens
  misc_RNA (1)...(19): siRNA sense strand
guugggacccucagucuua

SEQ ID NO: 20336 - RNA, 19 nt, Homo sapiens
  misc_RNA (1)...(19): siRNA sense strand
gaauaacugaguacacaaa

SEQ ID NO: 20337 - RNA, 19 nt, Homo sapiens
  misc_RNA (1)...(19): siRNA sense strand
caucugaagucccugagaa

SEQ ID NO: 20338 - RNA, 19 nt, Homo sapiens
  misc_RNA (1)...(19): siRNA sense strand
acacuuagccgcaguucua

SEQ ID NO: 20339 - RNA, 19 nt, Homo sapiens
  misc_RNA (1)...(19): siRNA sense strand
gaagaaagagcucaagaac

SEQ ID NO: 20340 - RNA, 19 nt, Homo sapiens
  misc_RNA (1)...(19): siRNA sense strand
acaaugguguguacagaaa

SEQ ID NO: 20341 - RNA, 19 nt, Homo sapiens
  misc_RNA (1)...(19): siRNA sense strand
cuagacaacgggaagauua

SEQ ID NO: 20342 - RNA, 19 nt, Homo sapiens
  misc_RNA (1)...(19): siRNA sense strand
guggucagauuaucauuga

SEQ ID NO: 20343 - RNA, 19 nt, Homo sapiens
  misc_RNA (1)...(19): siRNA sense strand
ggacacuguuggcuuuguu

SEQ ID NO: 20344 - RNA, 19 nt, Homo sapiens
  misc_RNA (1)...(19): siRNA sense strand
aaggagaguuugcuaagaa

SEQ ID NO: 20345 - RNA, 19 nt, Homo sapiens
  misc_RNA (1)...(19): siRNA sense strand
ggagagaaggguauaaauc

SEQ ID NO: 20346 - RNA, 19 nt, Homo sapiens
  misc_RNA (1)...(19): siRNA sense strand
gcuagugaaugacaucuuc

SEQ ID NO: 20347 - RNA, 19 nt, Homo sapiens
  misc_RNA (1)...(19): siRNA sense strand
caucauccauagcuucauu

SEQ ID NO: 20348 - RNA, 19 nt, Homo sapiens
  misc_RNA (1)...(19): siRNA sense strand
gagaaacagugaaccugau

SEQ ID NO: 20349 - RNA, 19 nt, Homo sapiens
  misc_RNA (1)...(19): siRNA sense strand
uggcucaccucaagucuuu

SEQ ID NO: 20350 - RNA, 19 nt, Homo sapiens
  misc_RNA (1)...(19): siRNA sense strand
gcagcuggauuacaugcuu

SEQ ID NO: 20351 - RNA, 19 nt, Homo sapiens
  misc_RNA (1)...(19): siRNA sense strand
ggucaaguguucuacagau

SEQ ID NO: 20352 - RNA, 19 nt, Homo sapiens
  misc_RNA (1)...(19): siRNA sense strand
acacaaaaguggaaaauga

SEQ ID NO: 20353 - RNA, 19 nt, Homo sapiens
  misc_RNA (1)...(19): siRNA sense strand
caucagaaauagagaccaa

SEQ ID NO: 20354 - RNA, 19 nt, Homo sapiens
  misc_RNA (1)...(19): siRNA sense strand
ccaauggccuguugaaagg

SEQ ID NO: 20355 - RNA, 19 nt, Homo sapiens
  misc_RNA (1)...(19): siRNA sense strand
cgacaugacugcaauuuug

SEQ ID NO: 20356 - RNA, 19 nt, Homo sapiens
  misc_RNA (1)...(19): siRNA sense strand
agagagagcugcagaaagc

SEQ ID NO: 20357 - RNA, 19 nt, Homo sapiens
  misc_RNA (1)...(19): siRNA sense strand
caagguauauuuguguuca

SEQ ID NO: 20358 - RNA, 19 nt, Homo sapiens
  misc_RNA (1)...(19): siRNA sense strand
gagauccucuaccaccaaa

SEQ ID NO: 20359 - RNA, 19 nt, Homo sapiens
  misc_RNA (1)...(19): siRNA sense strand
gagagaaggguauaaaucu

SEQ ID NO: 20360 - RNA, 19 nt, Homo sapiens
  misc_RNA (1)...(19): siRNA sense strand
ugggaaauccuccuugaua

SEQ ID NO: 20361 - RNA, 19 nt, Homo sapiens
  misc_RNA (1)...(19): siRNA sense strand
aaagaagucugggaccaaa

SEQ ID NO: 20362 - RNA, 19 nt, Homo sapiens
  misc_RNA (1)...(19): siRNA sense strand
ggaagacgaagaacuagug

SEQ ID NO: 20363 - RNA, 19 nt, Homo sapiens
  misc_RNA (1)...(19): siRNA sense strand
agaagaagacgaugacuau

SEQ ID NO: 20364 - RNA, 19 nt, Homo sapiens
  misc_RNA (1)...(19): siRNA sense strand
gaggagauuuggcugagau

SEQ ID NO: 20365 - RNA, 19 nt, Homo sapiens
  misc_RNA (1)...(19): siRNA sense strand
cccagaagcucauggaugu

SEQ ID NO: 20366 - RNA, 19 nt, Homo sapiens
  misc_RNA (1)...(19): siRNA sense strand
ugaaaucauuccuacugaa

SEQ ID NO: 20367 - RNA, 19 nt, Homo sapiens
  misc_RNA (1)...(19): siRNA sense strand
caacagguggcuugcaauu

SEQ ID NO: 20368 - RNA, 19 nt, Homo sapiens
  misc_RNA (1)...(19): siRNA sense strand
cagcaguccuggauucaga

SEQ ID NO: 20369 - RNA, 19 nt, Homo sapiens
  misc_RNA (1)...(19): siRNA sense strand
gcgauacuguccaccaaga

SEQ ID NO: 20370 - RNA, 19 nt, Homo sapiens
  misc_RNA (1)...(19): siRNA sense strand
ugucuuaucuaucuucuuc

SEQ ID NO: 20371 - RNA, 19 nt, Homo sapiens
  misc_RNA (1)...(19): siRNA sense strand
uacugaagcuagugaauga

SEQ ID NO: 20372 - RNA, 19 nt, Homo sapiens
  misc_RNA (1)...(19): siRNA sense strand
guucaaaacuuucuacaug

SEQ ID NO: 20373 - RNA, 19 nt, Homo sapiens
  misc_RNA (1)...(19): siRNA sense strand
gaguagauauugcuuccau

SEQ ID NO: 20374 - RNA, 19 nt, Homo sapiens
  misc_RNA (1)...(19): siRNA sense strand
aaugacaucuucacguuug

SEQ ID NO: 20375 - RNA, 19 nt, Homo sapiens
  misc_RNA (1)...(19): siRNA sense strand
acacauagcaugcacuuuc

SEQ ID NO: 20376 - RNA, 19 nt, Homo sapiens
  misc_RNA (1)...(19): siRNA sense strand
cauggacagugacaaggua

SEQ ID NO: 20377 - RNA, 19 nt, Homo sapiens
  misc_RNA (1)...(19): siRNA sense strand
ccuugaugaugguuauuua

SEQ ID NO: 20378 - RNA, 19 nt, Homo sapiens
  misc_RNA (1)...(19): siRNA sense strand
caaauaauccaucauccau

SEQ ID NO: 20379 - RNA, 19 nt, Homo sapiens
  misc_RNA (1)...(19): siRNA sense strand
agaaauagagaccaacauu

SEQ ID NO: 20380 - RNA, 19 nt, Homo sapiens
  misc_RNA (1)...(19): siRNA sense strand
aauauucgucuuccaguua

SEQ ID NO: 20381 - RNA, 19 nt, Homo sapiens
  misc_RNA (1)...(19): siRNA sense strand
guagauauugcuuccauug

SEQ ID NO: 20382 - RNA, 19 nt, Homo sapiens
  misc_RNA (1)...(19): siRNA sense strand
gcacucaauaucacacaaa

SEQ ID NO: 20383 - RNA, 19 nt, Homo sapiens
  misc_RNA (1)...(19): siRNA sense strand
gcgagaccguaucagguuu

SEQ ID NO: 20384 - RNA, 19 nt, Homo sapiens
  misc_RNA (1)...(19): siRNA sense strand
agacgaagaacuagugaaa

SEQ ID NO: 20385 - RNA, 19 nt, Homo sapiens
  misc_RNA (1)...(19): siRNA sense strand
ggacuggaaucuuuacuug

SEQ ID NO: 20386 - RNA, 19 nt, Homo sapiens
  misc_RNA (1)...(19): siRNA sense strand
gaaagggacucauguuugg

SEQ ID NO: 20387 - RNA, 19 nt, Homo sapiens
  misc_RNA (1)...(19): siRNA sense strand
gaguaaagguauagcagua

SEQ ID NO: 20388 - RNA, 19 nt, Homo sapiens
  misc_RNA (1)...(19): siRNA sense strand
gaacucccauaccauuuga

SEQ ID NO: 20389 - RNA, 19 nt, Homo sapiens
  misc_RNA (1)...(19): siRNA sense strand
ggagaaaugggaccaauug

SEQ ID NO: 20390 - RNA, 19 nt, Homo sapiens
  misc_RNA (1)...(19): siRNA sense strand
caucaucgaucucacagaa

SEQ ID NO: 20391 - RNA, 19 nt, Homo sapiens
  misc_RNA (1)...(19): siRNA sense strand
ccuaguggcuccaauguga

SEQ ID NO: 20392 - RNA, 19 nt, Homo sapiens
  misc_RNA (1)...(19): siRNA sense strand
ggguaggccuguauaagaa

SEQ ID NO: 20393 - RNA, 19 nt, Homo sapiens
  misc_RNA (1)...(19): siRNA sense strand
cccaaggacuggaaucuuu

SEQ ID NO: 20394 - RNA, 19 nt, Homo sapiens
  misc_RNA (1)...(19): siRNA sense strand
guacaccuaugaugaauac

SEQ ID NO: 20395 - RNA, 19 nt, Homo sapiens
  misc_RNA (1)...(19): siRNA sense strand
ggagagagaggaccauaug

SEQ ID NO: 20396 - RNA, 19 nt, Homo sapiens
  misc_RNA (1)...(19): siRNA sense strand
gaaugccugugucugcuuu

SEQ ID NO: 20397 - RNA, 19 nt, Homo sapiens
  misc_RNA (1)...(19): siRNA sense strand
guuauucucuccaaagcuu

SEQ ID NO: 20398 - RNA, 19 nt, Homo sapiens
  misc_RNA (1)...(19): siRNA sense strand
gcuaguauccuugaacuug

SEQ ID NO: 20399 - RNA, 19 nt, Homo sapiens
  misc_RNA (1)...(19): siRNA sense strand
cagcuggcauagcaacuaa

SEQ ID NO: 20400 - RNA, 19 nt, Homo sapiens
  misc_RNA (1)...(19): siRNA sense strand
ugaaagggacucauguuug

SEQ ID NO: 20401 - RNA, 19 nt, Homo sapiens
  misc_RNA (1)...(19): siRNA sense strand
ccaaggacuggaaucuuua

SEQ ID NO: 20402 - RNA, 19 nt, Homo sapiens
  misc_RNA (1)...(19): siRNA sense strand
ggaacucccauaccauuug

SEQ ID NO: 20403 - RNA, 19 nt, Homo sapiens
  misc_RNA (1)...(19): siRNA sense strand
caacuaagggccucaaugg

SEQ ID NO: 20404 - RNA, 19 nt, Homo sapiens
  misc_RNA (1)...(19): siRNA sense strand
cagcugggccugcaggaua

SEQ ID NO: 20405 - RNA, 19 nt, Homo sapiens
  misc_RNA (1)...(19): siRNA sense strand
ggaaugcccggacacaaug

SEQ ID NO: 20406 - RNA, 19 nt, Homo sapiens
  misc_RNA (1)...(19): siRNA sense strand
ggagugccaucaucgaucu

SEQ ID NO: 20407 - RNA, 19 nt, Homo sapiens
  misc_RNA (1)...(19): siRNA sense strand
guaaagguauagcaguaag

SEQ ID NO: 20408 - RNA, 19 nt, Homo sapiens
  misc_RNA (1)...(19): siRNA sense strand
uaauguacaccuaugauga

SEQ ID NO: 20409 - RNA, 19 nt, Homo sapiens
  misc_RNA (1)...(19): siRNA sense strand
gugaaagggacucauguuu

SEQ ID NO: 20410 - RNA, 19 nt, Homo sapiens
  misc_RNA (1)...(19): siRNA sense strand
gguacuagaggcccuauug

SEQ ID NO: 20411 - RNA, 19 nt, Homo sapiens
  misc_RNA (1)...(19): siRNA sense strand
ccauaaagaguaaagguau

SEQ ID NO: 20412 - RNA, 19 nt, Homo sapiens
  misc_RNA (1)...(19): siRNA sense strand
cgagucaaauggccuauac

SEQ ID NO: 20413 - RNA, 19 nt, Homo sapiens
  misc_RNA (1)...(19): siRNA sense strand
ucagauaccaggaauauac

SEQ ID NO: 20414 - RNA, 19 nt, Homo sapiens
  misc_RNA (1)...(19): siRNA sense strand
guaagaggagagcaaggua

SEQ ID NO: 20415 - RNA, 19 nt, Homo sapiens
  misc_RNA (1)...(19): siRNA sense strand
caaagcuuacccagcaaua

SEQ ID NO: 20416 - RNA, 19 nt, Homo sapiens
  misc_RNA (1)...(19): siRNA sense strand
uggagaggcuggcccaaga

SEQ ID NO: 20417 - RNA, 19 nt, Homo sapiens
  misc_RNA (1)...(19): siRNA sense strand
gggaaugcccggacacaau

SEQ ID NO: 20418 - RNA, 19 nt, Homo sapiens
  misc_RNA (1)...(19): siRNA sense strand
gcugaacgauaccaaaugc

SEQ ID NO: 20419 - RNA, 19 nt, Homo sapiens
  misc_RNA (1)...(19): siRNA sense strand
aauaggaacucccauacca

SEQ ID NO: 20420 - RNA, 19 nt, Homo sapiens
  misc_RNA (1)...(19): siRNA sense strand
gcaauaggaacucccauac

SEQ ID NO: 20421 - RNA, 19 nt, Homo sapiens
  misc_RNA (1)...(19): siRNA sense strand
caccaggcauuccaggauu

SEQ ID NO: 20422 - RNA, 19 nt, Homo sapiens
  misc_RNA (1)...(19): siRNA sense strand
gcaacuaagggccucaaug

SEQ ID NO: 20423 - RNA, 19 nt, Homo sapiens
  misc_RNA (1)...(19): siRNA sense strand
ccuacaccauaaagaguaa

SEQ ID NO: 20424 - RNA, 19 nt, Homo sapiens
  misc_RNA (1)...(19): siRNA sense strand
aaaccaggguacccaggaa

SEQ ID NO: 20425 - RNA, 19 nt, Homo sapiens
  misc_RNA (1)...(19): siRNA sense strand
ucccauaccauuugauaaa

SEQ ID NO: 20426 - RNA, 19 nt, Homo sapiens
  misc_RNA (1)...(19): siRNA sense strand
guaauguacaccuaugaug

SEQ ID NO: 20427 - RNA, 19 nt, Homo sapiens
  misc_RNA (1)...(19): siRNA sense strand
accaucagcuguagggaaa

SEQ ID NO: 20428 - RNA, 19 nt, Homo sapiens
  misc_RNA (1)...(19): siRNA sense strand
ggacagccaggcaucaaag

SEQ ID NO: 20429 - RNA, 19 nt, Homo sapiens
  misc_RNA (1)...(19): siRNA sense strand
ugccaggacucccaggaaa

SEQ ID NO: 20430 - RNA, 19 nt, Homo sapiens
  misc_RNA (1)...(19): siRNA sense strand
guaggccuguauaagaaug

SEQ ID NO: 20431 - RNA, 19 nt, Homo sapiens
  misc_RNA (1)...(19): siRNA sense strand
acaggcaacagcauuauga

SEQ ID NO: 20432 - RNA, 19 nt, Homo sapiens
  misc_RNA (1)...(19): siRNA sense strand
ugguaugaauggacagaaa

SEQ ID NO: 20433 - RNA, 19 nt, Homo sapiens
  misc_RNA (1)...(19): siRNA sense strand
gauaccaggaauauacuau

SEQ ID NO: 20434 - RNA, 19 nt, Homo sapiens
  misc_RNA (1)...(19): siRNA sense strand
auaacaggcaacagcauua

SEQ ID NO: 20435 - RNA, 19 nt, Homo sapiens
  misc_RNA (1)...(19): siRNA sense strand
uaggaacucccauaccauu

SEQ ID NO: 20436 - RNA, 19 nt, Homo sapiens
  misc_RNA (1)...(19): siRNA sense strand
caaaggugauagagguuuu

SEQ ID NO: 20437 - RNA, 19 nt, Homo sapiens
  misc_RNA (1)...(19): siRNA sense strand
uauaacaggcaacagcauu

SEQ ID NO: 20438 - RNA, 19 nt, Homo sapiens
  misc_RNA (1)...(19): siRNA sense strand
gggagaaaugggaccaauu

SEQ ID NO: 20439 - RNA, 19 nt, Homo sapiens
  misc_RNA (1)...(19): siRNA sense strand
aggagucccugguaugaau

SEQ ID NO: 20440 - RNA, 19 nt, Homo sapiens
  misc_RNA (1)...(19): siRNA sense strand
ggccagaaggcauuggaaa

SEQ ID NO: 20441 - RNA, 19 nt, Homo sapiens
  misc_RNA (1)...(19): siRNA sense strand
ucgaugguccuaaggguaa

SEQ ID NO: 20442 - RNA, 19 nt, Homo sapiens
  misc_RNA (1)...(19): siRNA sense strand
caccaaaggcuaccuggau

SEQ ID NO: 20443 - RNA, 19 nt, Homo sapiens
  misc_RNA (1)...(19): siRNA sense strand
uggguaggccuguauaaga

SEQ ID NO: 20444 - RNA, 19 nt, Homo sapiens
  misc_RNA (1)...(19): siRNA sense strand
ugucagauaccaggaauau

SEQ ID NO: 20445 - RNA, 19 nt, Homo sapiens
  misc_RNA (1)...(19): siRNA sense strand
uaacaggcaacagcauuau

SEQ ID NO: 20446 - RNA, 19 nt, Homo sapiens
  misc_RNA (1)...(19): siRNA sense strand
uucauucccuacaccauaa

SEQ ID NO: 20447 - RNA, 19 nt, Homo sapiens
  misc_RNA (1)...(19): siRNA sense strand
acuggaaucuuuacuuguc

SEQ ID NO: 20448 - RNA, 19 nt, Homo sapiens
  misc_RNA (1)...(19): siRNA sense strand
uauaaaggcaggccaaagg

SEQ ID NO: 20449 - RNA, 19 nt, Homo sapiens
  misc_RNA (1)...(19): siRNA sense strand
cuucauucccuacaccaua

SEQ ID NO: 20450 - RNA, 19 nt, Homo sapiens
  misc_RNA (1)...(19): siRNA sense strand
uuacuguuauucucuccaa

SEQ ID NO: 20451 - RNA, 19 nt, Homo sapiens
  misc_RNA (1)...(19): siRNA sense strand
agagagaggaccauaugga

SEQ ID NO: 20452 - RNA, 19 nt, Homo sapiens
  misc_RNA (1)...(19): siRNA sense strand
uaugaugaauacaccaaag

SEQ ID NO: 20453 - RNA, 19 nt, Homo sapiens
  misc_RNA (1)...(19): siRNA sense strand
agacacaguucuucauucc

SEQ ID NO: 20454 - RNA, 19 nt, Homo sapiens
  misc_RNA (1)...(19): siRNA sense strand
ucaaaggugauagagguuu

SEQ ID NO: 20455 - RNA, 19 nt, Homo sapiens
  misc_RNA (1)...(19): siRNA sense strand
aaaccaggcuacggaaguc

SEQ ID NO: 20456 - RNA, 19 nt, Homo sapiens
  misc_RNA (1)...(19): siRNA sense strand
ccacuacccaacaccaaga

SEQ ID NO: 20457 - RNA, 19 nt, Homo sapiens
  misc_RNA (1)...(19): siRNA sense strand
uaaaggggauccaggaagu

SEQ ID NO: 20458 - RNA, 19 nt, Homo sapiens
  misc_RNA (1)...(19): siRNA sense strand
aauguacaccuaugaugaa

SEQ ID NO: 20459 - RNA, 19 nt, Homo sapiens
  misc_RNA (1)...(19): siRNA sense strand
gaauggcaccccuguaaug

SEQ ID NO: 20460 - RNA, 19 nt, Homo sapiens
  misc_RNA (1)...(19): siRNA sense strand
caacaccaagacacaguuc

SEQ ID NO: 20461 - RNA, 19 nt, Homo sapiens
  misc_RNA (1)...(19): siRNA sense strand
ucaucgaucucacagaaaa

SEQ ID NO: 20462 - RNA, 19 nt, Homo sapiens
  misc_RNA (1)...(19): siRNA sense strand
ggaaugccugugucugcuu

SEQ ID NO: 20463 - RNA, 19 nt, Homo sapiens
  misc_RNA (1)...(19): siRNA sense strand
ggaauuucugugccaggaa

SEQ ID NO: 20464 - RNA, 19 nt, Homo sapiens
  misc_RNA (1)...(19): siRNA sense strand
uggcccagcuggcauagca

SEQ ID NO: 20465 - RNA, 19 nt, Homo sapiens
  misc_RNA (1)...(19): siRNA sense strand
uaaagguauagcaguaaga

SEQ ID NO: 20466 - RNA, 19 nt, Homo sapiens
  misc_RNA (1)...(19): siRNA sense strand
ccagcuggcauagcaacua

SEQ ID NO: 20467 - RNA, 19 nt, Homo sapiens
  misc_RNA (1)...(19): siRNA sense strand
ccaaaggcuaccuggauca

SEQ ID NO: 20468 - RNA, 19 nt, Homo sapiens
  misc_RNA (1)...(19): siRNA sense strand
cuugguucauggaguguuu

SEQ ID NO: 20469 - RNA, 19 nt, Homo sapiens
  misc_RNA (1)...(19): siRNA sense strand
caggagagagaggaccaua

SEQ ID NO: 20470 - RNA, 19 nt, Homo sapiens
  misc_RNA (1)...(19): siRNA sense strand
uauguccacuccucuuucu

SEQ ID NO: 20471 - RNA, 19 nt, Homo sapiens
  misc_RNA (1)...(19): siRNA sense strand
ccaaugccgagucaaaugg

SEQ ID NO: 20472 - RNA, 19 nt, Homo sapiens
  misc_RNA (1)...(19): siRNA sense strand
aggauucccugggucuaaa

SEQ ID NO: 20473 - RNA, 19 nt, Homo sapiens
  misc_RNA (1)...(19): siRNA sense strand
ccaccaggcauuccaggau

SEQ ID NO: 20474 - RNA, 19 nt, Homo sapiens
  misc_RNA (1)...(19): siRNA sense strand
cgggagaaaugggaccaau

SEQ ID NO: 20475 - RNA, 19 nt, Homo sapiens
  misc_RNA (1)...(19): siRNA sense strand
aaaaggugauccuggaguu

SEQ ID NO: 20476 - RNA, 19 nt, Homo sapiens
  misc_RNA (1)...(19): siRNA sense strand
gguaugaauggacagaaag

SEQ ID NO: 20477 - RNA, 19 nt, Homo sapiens
  misc_RNA (1)...(19): siRNA sense strand
guacuagaggcccuauugg

SEQ ID NO: 20478 - RNA, 19 nt, Homo sapiens
  misc_RNA (1)...(19): siRNA sense strand
gccagaaggcauuggaaag

SEQ ID NO: 20479 - RNA, 19 nt, Homo sapiens
  misc_RNA (1)...(19): siRNA sense strand
ggaagaagcuaaugaugga

SEQ ID NO: 20480 - RNA, 19 nt, Homo sapiens
  misc_RNA (1)...(19): siRNA sense strand
ggacagaauuggaugaugu

SEQ ID NO: 20481 - RNA, 19 nt, Homo sapiens
  misc_RNA (1)...(19): siRNA sense strand
aaacaaagccugacucaug

SEQ ID NO: 20482 - RNA, 19 nt, Homo sapiens
  misc_RNA (1)...(19): siRNA sense strand
caacacaccugcuaagaag

SEQ ID NO: 20483 - RNA, 19 nt, Homo sapiens
  misc_RNA (1)...(19): siRNA sense strand
gaagaaguauugcugucaa

SEQ ID NO: 20484 - RNA, 19 nt, Homo sapiens
  misc_RNA (1)...(19): siRNA sense strand
ccacaagacuuacauccuu

SEQ ID NO: 20485 - RNA, 19 nt, Homo sapiens
  misc_RNA (1)...(19): siRNA sense strand
caaacgagauggaacugaa

SEQ ID NO: 20486 - RNA, 19 nt, Homo sapiens
  misc_RNA (1)...(19): siRNA sense strand
gccaggagauucagcagua

SEQ ID NO: 20487 - RNA, 19 nt, Homo sapiens
  misc_RNA (1)...(19): siRNA sense strand
ggaccucucgucuuacuua

SEQ ID NO: 20488 - RNA, 19 nt, Homo sapiens
  misc_RNA (1)...(19): siRNA sense strand
gcacaaggacugcaaguuc

SEQ ID NO: 20489 - RNA, 19 nt, Homo sapiens
  misc_RNA (1)...(19): siRNA sense strand
gugcgcagcuucauuguug

SEQ ID NO: 20490 - RNA, 19 nt, Homo sapiens
  misc_RNA (1)...(19): siRNA sense strand
cagcauggauagaauagaa

SEQ ID NO: 20491 - RNA, 19 nt, Homo sapiens
  misc_RNA (1)...(19): siRNA sense strand
gcaaguuccugauccuaga

SEQ ID NO: 20492 - RNA, 19 nt, Homo sapiens
  misc_RNA (1)...(19): siRNA sense strand
ggucaucgaugcucacugu

SEQ ID NO: 20493 - RNA, 19 nt, Homo sapiens
  misc_RNA (1)...(19): siRNA sense strand
gaauuugcaucuucuucaa

SEQ ID NO: 20494 - RNA, 19 nt, Homo sapiens
  misc_RNA (1)...(19): siRNA sense strand
agacaaaggugaccaaguc

SEQ ID NO: 20495 - RNA, 19 nt, Homo sapiens
  misc_RNA (1)...(19): siRNA sense strand
ggacagcauggauagaaua

SEQ ID NO: 20496 - RNA, 19 nt, Homo sapiens
  misc_RNA (1)...(19): siRNA sense strand
aaagcaagcugccuacaau

SEQ ID NO: 20497 - RNA, 19 nt, Homo sapiens
  misc_RNA (1)...(19): siRNA sense strand
gagcagaccuggacaaaau

SEQ ID NO: 20498 - RNA, 19 nt, Homo sapiens
  misc_RNA (1)...(19): siRNA sense strand
aaauugggcugcacaguga

SEQ ID NO: 20499 - RNA, 19 nt, Homo sapiens
  misc_RNA (1)...(19): siRNA sense strand
gagcaaggccucccagguu

SEQ ID NO: 20500 - RNA, 19 nt, Homo sapiens
  misc_RNA (1)...(19): siRNA sense strand
uacauaaacucaacuggaa

SEQ ID NO: 20501 - RNA, 19 nt, Homo sapiens
  misc_RNA (1)...(19): siRNA sense strand
cacaagacuuacauccuua

SEQ ID NO: 20502 - RNA, 19 nt, Homo sapiens
  misc_RNA (1)...(19): siRNA sense strand
acaguaaccacaagacuua

SEQ ID NO: 20503 - RNA, 19 nt, Homo sapiens
  misc_RNA (1)...(19): siRNA sense strand
ugaagucacugagagaauu

SEQ ID NO: 20504 - RNA, 19 nt, Homo sapiens
  misc_RNA (1)...(19): siRNA sense strand
gaucaucaaguaccaugua

SEQ ID NO: 20505 - RNA, 19 nt, Homo sapiens
  misc_RNA (1)...(19): siRNA sense strand
gcuccgaggugaaguagga

SEQ ID NO: 20506 - RNA, 19 nt, Homo sapiens
  misc_RNA (1)...(19): siRNA sense strand
gaaaggaaaacucacguua

SEQ ID NO: 20507 - RNA, 19 nt, Homo sapiens
  misc_RNA (1)...(19): siRNA sense strand
ggaguacccucggaaggaa

SEQ ID NO: 20508 - RNA, 19 nt, Homo sapiens
  misc_RNA (1)...(19): siRNA sense strand
uggaugauguuaagcguuu

SEQ ID NO: 20509 - RNA, 19 nt, Homo sapiens
  misc_RNA (1)...(19): siRNA sense strand
gcagagcgaugaccuuuug

SEQ ID NO: 20510 - RNA, 19 nt, Homo sapiens
  misc_RNA (1)...(19): siRNA sense strand
agaaggagaagaaguauug

SEQ ID NO: 20511 - RNA, 19 nt, Homo sapiens
  misc_RNA (1)...(19): siRNA sense strand
ggagccggcuggagaaaca

SEQ ID NO: 20512 - RNA, 19 nt, Homo sapiens
  misc_RNA (1)...(19): siRNA sense strand
gugacaguauuagaucuua

SEQ ID NO: 20513 - RNA, 19 nt, Homo sapiens
  misc_RNA (1)...(19): siRNA sense strand
cuggagaucuggauuacaa

SEQ ID NO: 20514 - RNA, 19 nt, Homo sapiens
  misc_RNA (1)...(19): siRNA sense strand
gcagaaggcggcauguaug

SEQ ID NO: 20515 - RNA, 19 nt, Homo sapiens
  misc_RNA (1)...(19): siRNA sense strand
ugagagaauugucacugaa

SEQ ID NO: 20516 - RNA, 19 nt, Homo sapiens
  misc_RNA (1)...(19): siRNA sense strand
caacaccaaugccuacucu

SEQ ID NO: 20517 - RNA, 19 nt, Homo sapiens
  misc_RNA (1)...(19): siRNA sense strand
agaauuggaugauguuaag

SEQ ID NO: 20518 - RNA, 19 nt, Homo sapiens
  misc_RNA (1)...(19): siRNA sense strand
ggccaugccuccaccucua

SEQ ID NO: 20519 - RNA, 19 nt, Homo sapiens
  misc_RNA (1)...(19): siRNA sense strand
ggaauuugcaucuucuuca

SEQ ID NO: 20520 - RNA, 19 nt, Homo sapiens
  misc_RNA (1)...(19): siRNA sense strand
gaugugcgcagcuucauug

SEQ ID NO: 20521 - RNA, 19 nt, Homo sapiens
  misc_RNA (1)...(19): siRNA sense strand
cugcagauauccacagcua

SEQ ID NO: 20522 - RNA, 19 nt, Homo sapiens
  misc_RNA (1)...(19): siRNA sense strand
gaccaccacugcagauauc

SEQ ID NO: 20523 - RNA, 19 nt, Homo sapiens
  misc_RNA (1)...(19): siRNA sense strand
gcagauauccacagcuaca

SEQ ID NO: 20524 - RNA, 19 nt, Homo sapiens
  misc_RNA (1)...(19): siRNA sense strand
caaaggugaccaagucuau

SEQ ID NO: 20525 - RNA, 19 nt, Homo sapiens
  misc_RNA (1)...(19): siRNA sense strand
gagagaauugucacugaaa

SEQ ID NO: 20526 - RNA, 19 nt, Homo sapiens
  misc_RNA (1)...(19): siRNA sense strand
uggaugagcuggagaggau

SEQ ID NO: 20527 - RNA, 19 nt, Homo sapiens
  misc_RNA (1)...(19): siRNA sense strand
ccacccagguccacaagga

SEQ ID NO: 20528 - RNA, 19 nt, Homo sapiens
  misc_RNA (1)...(19): siRNA sense strand
caagccacguugugagcua

SEQ ID NO: 20529 - RNA, 19 nt, Homo sapiens
  misc_RNA (1)...(19): siRNA sense strand
gggagauccuggcauggaa

SEQ ID NO: 20530 - RNA, 19 nt, Homo sapiens
  misc_RNA (1)...(19): siRNA sense strand
ggaccuaucacaacaacau

SEQ ID NO: 20531 - RNA, 19 nt, Homo sapiens
  misc_RNA (1)...(19): siRNA sense strand
cggagaaggagaagaagua

SEQ ID NO: 20532 - RNA, 19 nt, Homo sapiens
  misc_RNA (1)...(19): siRNA sense strand
guagucgcauucucagcua

SEQ ID NO: 20533 - RNA, 19 nt, Homo sapiens
  misc_RNA (1)...(19): siRNA sense strand
cugaguacaugcagaguga

SEQ ID NO: 20534 - RNA, 19 nt, Homo sapiens
  misc_RNA (1)...(19): siRNA sense strand
gggcggagaaggagaagaa

SEQ ID NO: 20535 - RNA, 19 nt, Homo sapiens
  misc_RNA (1)...(19): siRNA sense strand
ggacuucuuccaaacuuau

SEQ ID NO: 20536 - RNA, 19 nt, Homo sapiens
  misc_RNA (1)...(19): siRNA sense strand
ggcagcagcggcuacauaa

SEQ ID NO: 20537 - RNA, 19 nt, Homo sapiens
  misc_RNA (1)...(19): siRNA sense strand
cccaggacaucaagaaguu

SEQ ID NO: 20538 - RNA, 19 nt, Homo sapiens
  misc_RNA (1)...(19): siRNA sense strand
caggcaagaucgugacuuc

SEQ ID NO: 20539 - RNA, 19 nt, Homo sapiens
  misc_RNA (1)...(19): siRNA sense strand
ugaaggcgcguguggauga

SEQ ID NO: 20540 - RNA, 19 nt, Homo sapiens
  misc_RNA (1)...(19): siRNA sense strand
ggacagcgggaaggucuuu

SEQ ID NO: 20541 - RNA, 19 nt, Homo sapiens
  misc_RNA (1)...(19): siRNA sense strand
gaucguuccuguccaacuc

SEQ ID NO: 20542 - RNA, 19 nt, Homo sapiens
  misc_RNA (1)...(19): siRNA sense strand
ugacuuugcuggagaucug

SEQ ID NO: 20543 - RNA, 19 nt, Homo sapiens
  misc_RNA (1)...(19): siRNA sense strand
gcucaucccuccucaacac

SEQ ID NO: 20544 - RNA, 19 nt, Homo sapiens
  misc_RNA (1)...(19): siRNA sense strand
gcagagugacaguauuaga

SEQ ID NO: 20545 - RNA, 19 nt, Homo sapiens
  misc_RNA (1)...(19): siRNA sense strand
gcucuuggcauuccuagug

SEQ ID NO: 20546 - RNA, 19 nt, Homo sapiens
  misc_RNA (1)...(19): siRNA sense strand
cccaagaggugaacaaggu

SEQ ID NO: 20547 - RNA, 19 nt, Homo sapiens
  misc_RNA (1)...(19): siRNA sense strand
gcacauccuccucaguguu

SEQ ID NO: 20548 - RNA, 19 nt, Homo sapiens
  misc_RNA (1)...(19): siRNA sense strand
ucagcuacaugucgaguuc

SEQ ID NO: 20549 - RNA, 19 nt, Homo sapiens
  misc_RNA (1)...(19): siRNA sense strand
gaagucacugagagaauug

SEQ ID NO: 20550 - RNA, 19 nt, Homo sapiens
  misc_RNA (1)...(19): siRNA sense strand
aaagacaacacaccugcua

SEQ ID NO: 20551 - RNA, 19 nt, Homo sapiens
  misc_RNA (1)...(19): siRNA sense strand
uauuagaucuuaccuaucc

SEQ ID NO: 20552 - RNA, 19 nt, Homo sapiens
  misc_RNA (1)...(19): siRNA sense strand
gagaucuggauuacaauga

SEQ ID NO: 20553 - RNA, 19 nt, Homo sapiens
  misc_RNA (1)...(19): siRNA sense strand
gaucagcuaccucacaagu

SEQ ID NO: 20554 - RNA, 19 nt, Homo sapiens
  misc_RNA (1)...(19): siRNA sense strand
gagcugaguagucgcauuc

SEQ ID NO: 20555 - RNA, 19 nt, Homo sapiens
  misc_RNA (1)...(19): siRNA sense strand
gucaguaccuacgucagua

SEQ ID NO: 20556 - RNA, 19 nt, Homo sapiens
  misc_RNA (1)...(19): siRNA sense strand
cagaauuggaugauguuaa

SEQ ID NO: 20557 - RNA, 19 nt, Homo sapiens
  misc_RNA (1)...(19): siRNA sense strand
uccuacagcucuuccauga

SEQ ID NO: 20558 - RNA, 19 nt, Homo sapiens
  misc_RNA (1)...(19): siRNA sense strand
agcaguacaucucugagua

SEQ ID NO: 20559 - RNA, 19 nt, Homo sapiens
  misc_RNA (1)...(19): siRNA sense strand
ccagggaccucagggacuu

SEQ ID NO: 20560 - RNA, 19 nt, Homo sapiens
  misc_RNA (1)...(19): siRNA sense strand
gggacagcauggauagaau

SEQ ID NO: 20561 - RNA, 19 nt, Homo sapiens
  misc_RNA (1)...(19): siRNA sense strand
gggagucgaucggcaagug

SEQ ID NO: 20562 - RNA, 19 nt, Homo sapiens
  misc_RNA (1)...(19): siRNA sense strand
gcgaugaccuuuugcacaa

SEQ ID NO: 20563 - RNA, 19 nt, Homo sapiens
  misc_RNA (1)...(19): siRNA sense strand
aggaagcccuggcccuaaa

SEQ ID NO: 20564 - RNA, 19 nt, Homo sapiens
  misc_RNA (1)...(19): siRNA sense strand
gaggaagcccuggcccuaa

SEQ ID NO: 20565 - RNA, 19 nt, Homo sapiens
  misc_RNA (1)...(19): siRNA sense strand
cugagagaauugucacuga

SEQ ID NO: 20566 - RNA, 19 nt, Homo sapiens
  misc_RNA (1)...(19): siRNA sense strand
ggaucagucuucggaguuc

SEQ ID NO: 20567 - RNA, 19 nt, Homo sapiens
  misc_RNA (1)...(19): siRNA sense strand
ggagaucuggauuacaaug

SEQ ID NO: 20568 - RNA, 19 nt, Homo sapiens
  misc_RNA (1)...(19): siRNA sense strand
ggaccugucaccaccauca

SEQ ID NO: 20569 - RNA, 19 nt, Homo sapiens
  misc_RNA (1)...(19): siRNA sense strand
caaaggugauccggguguu

SEQ ID NO: 20570 - RNA, 19 nt, Homo sapiens
  misc_RNA (1)...(19): siRNA sense strand
uuacugggaugccuggaau

SEQ ID NO: 20571 - RNA, 19 nt, Homo sapiens
  misc_RNA (1)...(19): siRNA sense strand
gagccuggcaugagagguu

SEQ ID NO: 20572 - RNA, 19 nt, Homo sapiens
  misc_RNA (1)...(19): siRNA sense strand
gaggaagaagcuaaugaug

SEQ ID NO: 20573 - RNA, 19 nt, Homo sapiens
  misc_RNA (1)...(19): siRNA sense strand
aggaggagcucuggauguu

SEQ ID NO: 20574 - RNA, 19 nt, Homo sapiens
  misc_RNA (1)...(19): siRNA sense strand
caaacacgagagagugaaa

SEQ ID NO: 20575 - RNA, 19 nt, Homo sapiens
  misc_RNA (1)...(19): siRNA sense strand
gagaaggagaagaaguauu

SEQ ID NO: 20576 - RNA, 19 nt, Homo sapiens
  misc_RNA (1)...(19): siRNA sense strand
gagagugaaauucgaguuc

SEQ ID NO: 20577 - RNA, 19 nt, Homo sapiens
  misc_RNA (1)...(19): siRNA sense strand
cugcggaccucauggacuu

SEQ ID NO: 20578 - RNA, 19 nt, Homo sapiens
  misc_RNA (1)...(19): siRNA sense strand
ggagaaggagaagaaguau

SEQ ID NO: 20579 - RNA, 19 nt, Homo sapiens
  misc_RNA (1)...(19): siRNA sense strand
ggaagaagcuaaugaugga

SEQ ID NO: 20580 - RNA, 19 nt, Homo sapiens
  misc_RNA (1)...(19): siRNA sense strand
ggacagaauuggaugaugu

SEQ ID NO: 20581 - RNA, 19 nt, Homo sapiens
  misc_RNA (1)...(19): siRNA sense strand
aaacaaagccugacucaug

SEQ ID NO: 20582 - RNA, 19 nt, Homo sapiens
  misc_RNA (1)...(19): siRNA sense strand
caacacaccugcuaagaag

SEQ ID NO: 20583 - RNA, 19 nt, Homo sapiens
  misc_RNA (1)...(19): siRNA sense strand
gaagaaguauugcugucaa

SEQ ID NO: 20584 - RNA, 19 nt, Homo sapiens
  misc_RNA (1)...(19): siRNA sense strand
ccacaagacuuacauccuu

SEQ ID NO: 20585 - RNA, 19 nt, Homo sapiens
  misc_RNA (1)...(19): siRNA sense strand
caaacgagauggaacugaa

SEQ ID NO: 20586 - RNA, 19 nt, Homo sapiens
  misc_RNA (1)...(19): siRNA sense strand
gccaggagauucagcagua

SEQ ID NO: 20587 - RNA, 19 nt, Homo sapiens
  misc_RNA (1)...(19): siRNA sense strand
ggaccucucgucuuacuua

SEQ ID NO: 20588 - RNA, 19 nt, Homo sapiens
  misc_RNA (1)...(19): siRNA sense strand
gcacaaggacugcaaguuc

SEQ ID NO: 20589 - RNA, 19 nt, Homo sapiens
  misc_RNA (1)...(19): siRNA sense strand
gugcgcagcuucauuguug

SEQ ID NO: 20590 - RNA, 19 nt, Homo sapiens
  misc_RNA (1)...(19): siRNA sense strand
cagcauggauagaauagaa

SEQ ID NO: 20591 - RNA, 19 nt, Homo sapiens
  misc_RNA (1)...(19): siRNA sense strand
gcaaguuccugauccuaga

SEQ ID NO: 20592 - RNA, 19 nt, Homo sapiens
  misc_RNA (1)...(19): siRNA sense strand
ggucaucgaugcucacugu

SEQ ID NO: 20593 - RNA, 19 nt, Homo sapiens
  misc_RNA (1)...(19): siRNA sense strand
gaauuugcaucuucuucaa

SEQ ID NO: 20594 - RNA, 19 nt, Homo sapiens
  misc_RNA (1)...(19): siRNA sense strand
agacaaaggugaccaaguc

SEQ ID NO: 20595 - RNA, 19 nt, Homo sapiens
  misc_RNA (1)...(19): siRNA sense strand
ggacagcauggauagaaua

SEQ ID NO: 20596 - RNA, 19 nt, Homo sapiens
  misc_RNA (1)...(19): siRNA sense strand
aaagcaagcugccuacaau

SEQ ID NO: 20597 - RNA, 19 nt, Homo sapiens
  misc_RNA (1)...(19): siRNA sense strand
gagcagaccuggacaaaau

SEQ ID NO: 20598 - RNA, 19 nt, Homo sapiens
  misc_RNA (1)...(19): siRNA sense strand
aaauugggcugcacaguga

SEQ ID NO: 20599 - RNA, 19 nt, Homo sapiens
  misc_RNA (1)...(19): siRNA sense strand
gagcaaggccucccagguu

SEQ ID NO: 20600 - RNA, 19 nt, Homo sapiens
  misc_RNA (1)...(19): siRNA sense strand
uacauaaacucaacuggaa

SEQ ID NO: 20601 - RNA, 19 nt, Homo sapiens
  misc_RNA (1)...(19): siRNA sense strand
cacaagacuuacauccuua

SEQ ID NO: 20602 - RNA, 19 nt, Homo sapiens
  misc_RNA (1)...(19): siRNA sense strand
acaguaaccacaagacuua

SEQ ID NO: 20603 - RNA, 19 nt, Homo sapiens
  misc_RNA (1)...(19): siRNA sense strand
ugaagucacugagagaauu

SEQ ID NO: 20604 - RNA, 19 nt, Homo sapiens
  misc_RNA (1)...(19): siRNA sense strand
gaucaucaaguaccaugua

SEQ ID NO: 20605 - RNA, 19 nt, Homo sapiens
  misc_RNA (1)...(19): siRNA sense strand
gcuccgaggugaaguagga

SEQ ID NO: 20606 - RNA, 19 nt, Homo sapiens
  misc_RNA (1)...(19): siRNA sense strand
gaaaggaaaacucacguua

SEQ ID NO: 20607 - RNA, 19 nt, Homo sapiens
  misc_RNA (1)...(19): siRNA sense strand
ggaguacccucggaaggaa

SEQ ID NO: 20608 - RNA, 19 nt, Homo sapiens
  misc_RNA (1)...(19): siRNA sense strand
uggaugauguuaagcguuu

SEQ ID NO: 20609 - RNA, 19 nt, Homo sapiens
  misc_RNA (1)...(19): siRNA sense strand
gcagagcgaugaccuuuug

SEQ ID NO: 20610 - RNA, 19 nt, Homo sapiens
  misc_RNA (1)...(19): siRNA sense strand
agaaggagaagaaguauug

SEQ ID NO: 20611 - RNA, 19 nt, Homo sapiens
  misc_RNA (1)...(19): siRNA sense strand
ggagccggcuggagaaaca

SEQ ID NO: 20612 - RNA, 19 nt, Homo sapiens
  misc_RNA (1)...(19): siRNA sense strand
gugacaguauuagaucuua

SEQ ID NO: 20613 - RNA, 19 nt, Homo sapiens
  misc_RNA (1)...(19): siRNA sense strand
cuggagaucuggauuacaa

SEQ ID NO: 20614 - RNA, 19 nt, Homo sapiens
  misc_RNA (1)...(19): siRNA sense strand
gcagaaggcggcauguaug

SEQ ID NO: 20615 - RNA, 19 nt, Homo sapiens
  misc_RNA (1)...(19): siRNA sense strand
ugagagaauugucacugaa

SEQ ID NO: 20616 - RNA, 19 nt, Homo sapiens
  misc_RNA (1)...(19): siRNA sense strand
caacaccaaugccuacucu

SEQ ID NO: 20617 - RNA, 19 nt, Homo sapiens
  misc_RNA (1)...(19): siRNA sense strand
agaauuggaugauguuaag

SEQ ID NO: 20618 - RNA, 19 nt, Homo sapiens
  misc_RNA (1)...(19): siRNA sense strand
ggccaugccuccaccucua

SEQ ID NO: 20619 - RNA, 19 nt, Homo sapiens
  misc_RNA (1)...(19): siRNA sense strand
ggaauuugcaucuucuuca

SEQ ID NO: 20620 - RNA, 19 nt, Homo sapiens
  misc_RNA (1)...(19): siRNA sense strand
gaugugcgcagcuucauug

SEQ ID NO: 20621 - RNA, 19 nt, Homo sapiens
  misc_RNA (1)...(19): siRNA sense strand
cugcagauauccacagcua

SEQ ID NO: 20622 - RNA, 19 nt, Homo sapiens
  misc_RNA (1)...(19): siRNA sense strand
gaccaccacugcagauauc

SEQ ID NO: 20623 - RNA, 19 nt, Homo sapiens
  misc_RNA (1)...(19): siRNA sense strand
gcagauauccacagcuaca

SEQ ID NO: 20624 - RNA, 19 nt, Homo sapiens
  misc_RNA (1)...(19): siRNA sense strand
caaaggugaccaagucuau

SEQ ID NO: 20625 - RNA, 19 nt, Homo sapiens
  misc_RNA (1)...(19): siRNA sense strand
gagagaauugucacugaaa

SEQ ID NO: 20626 - RNA, 19 nt, Homo sapiens
  misc_RNA (1)...(19): siRNA sense strand
uggaugagcuggagaggau

SEQ ID NO: 20627 - RNA, 19 nt, Homo sapiens
  misc_RNA (1)...(19): siRNA sense strand
ccacccagguccacaagga

SEQ ID NO: 20628 - RNA, 19 nt, Homo sapiens
  misc_RNA (1)...(19): siRNA sense strand
caagccacguugugagcua

SEQ ID NO: 20629 - RNA, 19 nt, Homo sapiens
  misc_RNA (1)...(19): siRNA sense strand
gggagauccuggcauggaa

SEQ ID NO: 20630 - RNA, 19 nt, Homo sapiens
  misc_RNA (1)...(19): siRNA sense strand
ggaccuaucacaacaacau

SEQ ID NO: 20631 - RNA, 19 nt, Homo sapiens
  misc_RNA (1)...(19): siRNA sense strand
cggagaaggagaagaagua

SEQ ID NO: 20632 - RNA, 19 nt, Homo sapiens
  misc_RNA (1)...(19): siRNA sense strand
guagucgcauucucagcua

SEQ ID NO: 20633 - RNA, 19 nt, Homo sapiens
  misc_RNA (1)...(19): siRNA sense strand
cugaguacaugcagaguga

SEQ ID NO: 20634 - RNA, 19 nt, Homo sapiens
  misc_RNA (1)...(19): siRNA sense strand
gggcggagaaggagaagaa

SEQ ID NO: 20635 - RNA, 19 nt, Homo sapiens
  misc_RNA (1)...(19): siRNA sense strand
ggacuucuuccaaacuuau

SEQ ID NO: 20636 - RNA, 19 nt, Homo sapiens
  misc_RNA (1)...(19): siRNA sense strand
ggcagcagcggcuacauaa

SEQ ID NO: 20637 - RNA, 19 nt, Homo sapiens
  misc_RNA (1)...(19): siRNA sense strand
cccaggacaucaagaaguu

SEQ ID NO: 20638 - RNA, 19 nt, Homo sapiens
  misc_RNA (1)...(19): siRNA sense strand
caggcaagaucgugacuuc

SEQ ID NO: 20639 - RNA, 19 nt, Homo sapiens
  misc_RNA (1)...(19): siRNA sense strand
ugaaggcgcguguggauga

SEQ ID NO: 20640 - RNA, 19 nt, Homo sapiens
  misc_RNA (1)...(19): siRNA sense strand
ggacagcgggaaggucuuu

SEQ ID NO: 20641 - RNA, 19 nt, Homo sapiens
  misc_RNA (1)...(19): siRNA sense strand
gaucguuccuguccaacuc

SEQ ID NO: 20642 - RNA, 19 nt, Homo sapiens
  misc_RNA (1)...(19): siRNA sense strand
ugacuuugcuggagaucug

SEQ ID NO: 20643 - RNA, 19 nt, Homo sapiens
  misc_RNA (1)...(19): siRNA sense strand
gcucaucccuccucaacac

SEQ ID NO: 20644 - RNA, 19 nt, Homo sapiens
  misc_RNA (1)...(19): siRNA sense strand
gcagagugacaguauuaga

SEQ ID NO: 20645 - RNA, 19 nt, Homo sapiens
  misc_RNA (1)...(19): siRNA sense strand
gcucuuggcauuccuagug

SEQ ID NO: 20646 - RNA, 19 nt, Homo sapiens
  misc_RNA (1)...(19): siRNA sense strand
cccaagaggugaacaaggu

SEQ ID NO: 20647 - RNA, 19 nt, Homo sapiens
  misc_RNA (1)...(19): siRNA sense strand
gcacauccuccucaguguu

SEQ ID NO: 20648 - RNA, 19 nt, Homo sapiens
  misc_RNA (1)...(19): siRNA sense strand
ucagcuacaugucgaguuc

SEQ ID NO: 20649 - RNA, 19 nt, Homo sapiens
  misc_RNA (1)...(19): siRNA sense strand
gaagucacugagagaauug

SEQ ID NO: 20650 - RNA, 19 nt, Homo sapiens
  misc_RNA (1)...(19): siRNA sense strand
aaagacaacacaccugcua

SEQ ID NO: 20651 - RNA, 19 nt, Homo sapiens
  misc_RNA (1)...(19): siRNA sense strand
uauuagaucuuaccuaucc

SEQ ID NO: 20652 - RNA, 19 nt, Homo sapiens
  misc_RNA (1)...(19): siRNA sense strand
gagaucuggauuacaauga

SEQ ID NO: 20653 - RNA, 19 nt, Homo sapiens
  misc_RNA (1)...(19): siRNA sense strand
gaucagcuaccucacaagu

SEQ ID NO: 20654 - RNA, 19 nt, Homo sapiens
  misc_RNA (1)...(19): siRNA sense strand
gagcugaguagucgcauuc

SEQ ID NO: 20655 - RNA, 19 nt, Homo sapiens
  misc_RNA (1)...(19): siRNA sense strand
gucaguaccuacgucagua

SEQ ID NO: 20656 - RNA, 19 nt, Homo sapiens
  misc_RNA (1)...(19): siRNA sense strand
cagaauuggaugauguuaa

SEQ ID NO: 20657 - RNA, 19 nt, Homo sapiens
  misc_RNA (1)...(19): siRNA sense strand
uccuacagcucuuccauga

SEQ ID NO: 20658 - RNA, 19 nt, Homo sapiens
  misc_RNA (1)...(19): siRNA sense strand
agcaguacaucucugagua

SEQ ID NO: 20659 - RNA, 19 nt, Homo sapiens
  misc_RNA (1)...(19): siRNA sense strand
ccagggaccucagggacuu

SEQ ID NO: 20660 - RNA, 19 nt, Homo sapiens
  misc_RNA (1)...(19): siRNA sense strand
gggacagcauggauagaau

SEQ ID NO: 20661 - RNA, 19 nt, Homo sapiens
  misc_RNA (1)...(19): siRNA sense strand
gggagucgaucggcaagug

SEQ ID NO: 20662 - RNA, 19 nt, Homo sapiens
  misc_RNA (1)...(19): siRNA sense strand
gcgaugaccuuuugcacaa

SEQ ID NO: 20663 - RNA, 19 nt, Homo sapiens
  misc_RNA (1)...(19): siRNA sense strand
aggaagcccuggcccuaaa

SEQ ID NO: 20664 - RNA, 19 nt, Homo sapiens
  misc_RNA (1)...(19): siRNA sense strand
gaggaagcccuggcccuaa

SEQ ID NO: 20665 - RNA, 19 nt, Homo sapiens
  misc_RNA (1)...(19): siRNA sense strand
cugagagaauugucacuga

SEQ ID NO: 20666 - RNA, 19 nt, Homo sapiens
  misc_RNA (1)...(19): siRNA sense strand
ggaucagucuucggaguuc

SEQ ID NO: 20667 - RNA, 19 nt, Homo sapiens
  misc_RNA (1)...(19): siRNA sense strand
ggagaucuggauuacaaug

SEQ ID NO: 20668 - RNA, 19 nt, Homo sapiens
  misc_RNA (1)...(19): siRNA sense strand
ggaccugucaccaccauca

SEQ ID NO: 20669 - RNA, 19 nt, Homo sapiens
  misc_RNA (1)...(19): siRNA sense strand
caaaggugauccggguguu

SEQ ID NO: 20670 - RNA, 19 nt, Homo sapiens
  misc_RNA (1)...(19): siRNA sense strand
uuacugggaugccuggaau

SEQ ID NO: 20671 - RNA, 19 nt, Homo sapiens
  misc_RNA (1)...(19): siRNA sense strand
gagccuggcaugagagguu

SEQ ID NO: 20672 - RNA, 19 nt, Homo sapiens
  misc_RNA (1)...(19): siRNA sense strand
gaggaagaagcuaaugaug

SEQ ID NO: 20673 - RNA, 19 nt, Homo sapiens
  misc_RNA (1)...(19): siRNA sense strand
aggaggagcucuggauguu

SEQ ID NO: 20674 - RNA, 19 nt, Homo sapiens
  misc_RNA (1)...(19): siRNA sense strand
caaacacgagagagugaaa

SEQ ID NO: 20675 - RNA, 19 nt, Homo sapiens
  misc_RNA (1)...(19): siRNA sense strand
gagaaggagaagaaguauu

SEQ ID NO: 20676 - RNA, 19 nt, Homo sapiens
  misc_RNA (1)...(19): siRNA sense strand
gagagugaaauucgaguuc

SEQ ID NO: 20677 - RNA, 19 nt, Homo sapiens
  misc_RNA (1)...(19): siRNA sense strand
cugcggaccucauggacuu

SEQ ID NO: 20678 - RNA, 19 nt, Homo sapiens
  misc_RNA (1)...(19): siRNA sense strand
ggagaaggagaagaaguau

SEQ ID NO: 20679 - RNA, 19 nt, Homo sapiens
  misc_RNA (1)...(19): siRNA sense strand
gaaaucaaccggaggaauu

SEQ ID NO: 20680 - RNA, 19 nt, Homo sapiens
  misc_RNA (1)...(19): siRNA sense strand
cagaagaacugguacauca

SEQ ID NO: 20681 - RNA, 19 nt, Homo sapiens
  misc_RNA (1)...(19): siRNA sense strand
gaagacaucccaccaauca

SEQ ID NO: 20682 - RNA, 19 nt, Homo sapiens
  misc_RNA (1)...(19): siRNA sense strand
gcgaugacgugaucuguga

SEQ ID NO: 20683 - RNA, 19 nt, Homo sapiens
  misc_RNA (1)...(19): siRNA sense strand
gagcaugaccgauggauuc

SEQ ID NO: 20684 - RNA, 19 nt, Homo sapiens
  misc_RNA (1)...(19): siRNA sense strand
ggaauucggcuucgacguu

SEQ ID NO: 20685 - RNA, 19 nt, Homo sapiens
  misc_RNA (1)...(19): siRNA sense strand
gaacagcguggccuacaug

SEQ ID NO: 20686 - RNA, 19 nt, Homo sapiens
  misc_RNA (1)...(19): siRNA sense strand
caauggugcuccugguauu

SEQ ID NO: 20687 - RNA, 19 nt, Homo sapiens
  misc_RNA (1)...(19): siRNA sense strand
ccaaucaccugcguacaga

SEQ ID NO: 20688 - RNA, 19 nt, Homo sapiens
  misc_RNA (1)...(19): siRNA sense strand
caaagaaggcggcaaaggu

SEQ ID NO: 20689 - RNA, 19 nt, Homo sapiens
  misc_RNA (1)...(19): siRNA sense strand
gcaagguguugugcgauga

SEQ ID NO: 20690 - RNA, 19 nt, Homo sapiens
  misc_RNA (1)...(19): siRNA sense strand
ucagggugcucgaggauug

SEQ ID NO: 20691 - RNA, 19 nt, Homo sapiens
  misc_RNA (1)...(19): siRNA sense strand
gggaaugccuggugaacgu

SEQ ID NO: 20692 - RNA, 19 nt, Homo sapiens
  misc_RNA (1)...(19): siRNA sense strand
gcaagaggcgagagagguu

SEQ ID NO: 20693 - RNA, 19 nt, Homo sapiens
  misc_RNA (1)...(19): siRNA sense strand
ccagcugucuuauggcuau

SEQ ID NO: 20694 - RNA, 19 nt, Homo sapiens
  misc_RNA (1)...(19): siRNA sense strand
cggccaaccuggugcuaaa

SEQ ID NO: 20695 - RNA, 19 nt, Homo sapiens
  misc_RNA (1)...(19): siRNA sense strand
gcaacagccgcuucaccua

SEQ ID NO: 20696 - RNA, 19 nt, Homo sapiens
  misc_RNA (1)...(19): siRNA sense strand
gccgugaccucaagaugug

SEQ ID NO: 20697 - RNA, 19 nt, Homo sapiens
  misc_RNA (1)...(19): siRNA sense strand
agagaaggcucacgauggu

SEQ ID NO: 20698 - RNA, 19 nt, Homo sapiens
  misc_RNA (1)...(19): siRNA sense strand
ggaaagaauggagaugaug

SEQ ID NO: 20699 - RNA, 19 nt, Homo sapiens
  misc_RNA (1)...(19): siRNA sense strand
gaagggacacagagguuuc

SEQ ID NO: 20700 - RNA, 19 nt, Homo sapiens
  misc_RNA (1)...(19): siRNA sense strand
caaggucccucuggagcaa

SEQ ID NO: 20701 - RNA, 19 nt, Homo sapiens
  misc_RNA (1)...(19): siRNA sense strand
ugauggcucuccuggcaaa

SEQ ID NO: 20702 - RNA, 19 nt, Homo sapiens
  misc_RNA (1)...(19): siRNA sense strand
gcuacuaccgggcugauga

SEQ ID NO: 20703 - RNA, 19 nt, Homo sapiens
  misc_RNA (1)...(19): siRNA sense strand
caaagucuucugcaacaug

SEQ ID NO: 20704 - RNA, 19 nt, Homo sapiens
  misc_RNA (1)...(19): siRNA sense strand
cagcuggccucccuggaau

SEQ ID NO: 20705 - RNA, 19 nt, Homo sapiens
  misc_RNA (1)...(19): siRNA sense strand
gccagcagaucgagaacau

SEQ ID NO: 20706 - RNA, 19 nt, Homo sapiens
  misc_RNA (1)...(19): siRNA sense strand
uuauggcuaugaugagaaa

SEQ ID NO: 20707 - RNA, 19 nt, Homo sapiens
  misc_RNA (1)...(19): siRNA sense strand
gagcgugguggaccuggua

SEQ ID NO: 20708 - RNA, 19 nt, Homo sapiens
  misc_RNA (1)...(19): siRNA sense strand
cacagagguuucagugguu

SEQ ID NO: 20709 - RNA, 19 nt, Homo sapiens
  misc_RNA (1)...(19): siRNA sense strand
gggcugaugaugccaaugu

SEQ ID NO: 20710 - RNA, 19 nt, Homo sapiens
  misc_RNA (1)...(19): siRNA sense strand
agaaggcccugcuccucaa

SEQ ID NO: 20711 - RNA, 19 nt, Homo sapiens
  misc_RNA (1)...(19): siRNA sense strand
acaagaggcaugucugguu

SEQ ID NO: 20712 - RNA, 19 nt, Homo sapiens
  misc_RNA (1)...(19): siRNA sense strand
ccaucaaagucuucugcaa

SEQ ID NO: 20713 - RNA, 19 nt, Homo sapiens
  misc_RNA (1)...(19): siRNA sense strand
gaguggagaguacuggauu

SEQ ID NO: 20714 - RNA, 19 nt, Homo sapiens
  misc_RNA (1)...(19): siRNA sense strand
uggaaagaauggagaugau

SEQ ID NO: 20715 - RNA, 19 nt, Homo sapiens
  misc_RNA (1)...(19): siRNA sense strand
gcaagaaccccaaggacaa

SEQ ID NO: 20716 - RNA, 19 nt, Homo sapiens
  misc_RNA (1)...(19): siRNA sense strand
uggugaaccuggcaaacaa

SEQ ID NO: 20717 - RNA, 19 nt, Homo sapiens
  misc_RNA (1)...(19): siRNA sense strand
aggcaaaccuggugaacag

SEQ ID NO: 20718 - RNA, 19 nt, Homo sapiens
  misc_RNA (1)...(19): siRNA sense strand
guugugcgaugacgugauc

SEQ ID NO: 20719 - RNA, 19 nt, Homo sapiens
  misc_RNA (1)...(19): siRNA sense strand
acgaagacaucccaccaau

SEQ ID NO: 20720 - RNA, 19 nt, Homo sapiens
  misc_RNA (1)...(19): siRNA sense strand
ccagccaccucaagagaag

SEQ ID NO: 20721 - RNA, 19 nt, Homo sapiens
  misc_RNA (1)...(19): siRNA sense strand
cggcaacgauggugcuaag

SEQ ID NO: 20722 - RNA, 19 nt, Homo sapiens
  misc_RNA (1)...(19): siRNA sense strand
gcaaagaaggcggcaaagg

SEQ ID NO: 20723 - RNA, 19 nt, Homo sapiens
  misc_RNA (1)...(19): siRNA sense strand
ccaauggugcuccugguau

SEQ ID NO: 20724 - RNA, 19 nt, Homo sapiens
  misc_RNA (1)...(19): siRNA sense strand
acagagguuucagugguuu

SEQ ID NO: 20725 - RNA, 19 nt, Homo sapiens
  misc_RNA (1)...(19): siRNA sense strand
gggccaagacgaagacauc

SEQ ID NO: 20726 - RNA, 19 nt, Homo sapiens
  misc_RNA (1)...(19): siRNA sense strand
gauuccaguucgaguaugg

SEQ ID NO: 20727 - RNA, 19 nt, Homo sapiens
  misc_RNA (1)...(19): siRNA sense strand
uggaaacccuggugcugau

SEQ ID NO: 20728 - RNA, 19 nt, Homo sapiens
  misc_RNA (1)...(19): siRNA sense strand
uggcuucccuggugcuguu

SEQ ID NO: 20729 - RNA, 19 nt, Homo sapiens
  misc_RNA (1)...(19): siRNA sense strand
gccaauggugcuccuggua

SEQ ID NO: 20730 - RNA, 19 nt, Homo sapiens
  misc_RNA (1)...(19): siRNA sense strand
uggacagccuggugcuaaa

SEQ ID NO: 20731 - RNA, 19 nt, Homo sapiens
  misc_RNA (1)...(19): siRNA sense strand
ugucuuauggcuaugauga

SEQ ID NO: 20732 - RNA, 19 nt, Homo sapiens
  misc_RNA (1)...(19): siRNA sense strand
uggcaaagaaggcggcaaa

SEQ ID NO: 20733 - RNA, 19 nt, Homo sapiens
  misc_RNA (1)...(19): siRNA sense strand
gccaagggucugacuggaa

SEQ ID NO: 20734 - RNA, 19 nt, Homo sapiens
  misc_RNA (1)...(19): siRNA sense strand
ccaguguggcccagaagaa

SEQ ID NO: 20735 - RNA, 19 nt, Homo sapiens
  misc_RNA (1)...(19): siRNA sense strand
cagcgcugguuucgacuuc

SEQ ID NO: 20736 - RNA, 19 nt, Homo sapiens
  misc_RNA (1)...(19): siRNA sense strand
caagaggcgagagagguuu

SEQ ID NO: 20737 - RNA, 19 nt, Homo sapiens
  misc_RNA (1)...(19): siRNA sense strand
uggcgagccuggagcuuca

SEQ ID NO: 20738 - RNA, 19 nt, Homo sapiens
  misc_RNA (1)...(19): siRNA sense strand
ucaccuaccacugcaagaa

SEQ ID NO: 20739 - RNA, 19 nt, Homo sapiens
  misc_RNA (1)...(19): siRNA sense strand
gacgaagacaucccaccaa

SEQ ID NO: 20740 - RNA, 19 nt, Homo sapiens
  misc_RNA (1)...(19): siRNA sense strand
ugucgguccugcuggcaaa

SEQ ID NO: 20741 - RNA, 19 nt, Homo sapiens
  misc_RNA (1)...(19): siRNA sense strand
ugaagggacacagagguuu

SEQ ID NO: 20742 - RNA, 19 nt, Homo sapiens
  misc_RNA (1)...(19): siRNA sense strand
ucuuauggcuaugaugaga

SEQ ID NO: 20743 - RNA, 19 nt, Homo sapiens
  misc_RNA (1)...(19): siRNA sense strand
ggaagaguggagaguacug

SEQ ID NO: 20744 - RNA, 19 nt, Homo sapiens
  misc_RNA (1)...(19): siRNA sense strand
uggcagcccugguccugau

SEQ ID NO: 20745 - RNA, 19 nt, Homo sapiens
  misc_RNA (1)...(19): siRNA sense strand
ggaccugguagccgugguu

SEQ ID NO: 20746 - RNA, 19 nt, Homo sapiens
  misc_RNA (1)...(19): siRNA sense strand
ccaagaggaaggccaaguc

SEQ ID NO: 20747 - RNA, 19 nt, Homo sapiens
  misc_RNA (1)...(19): siRNA sense strand
uggccugccuggugagaga

SEQ ID NO: 20748 - RNA, 19 nt, Homo sapiens
  misc_RNA (1)...(19): siRNA sense strand
uggacguccuggugaaguu

SEQ ID NO: 20749 - RNA, 19 nt, Homo sapiens
  misc_RNA (1)...(19): siRNA sense strand
acugguacaucagcaagaa

SEQ ID NO: 20750 - RNA, 19 nt, Homo sapiens
  misc_RNA (1)...(19): siRNA sense strand
ugaccgagacguguggaaa

SEQ ID NO: 20751 - RNA, 19 nt, Homo sapiens
  misc_RNA (1)...(19): siRNA sense strand
gcaccugccgugaccucaa

SEQ ID NO: 20752 - RNA, 19 nt, Homo sapiens
  misc_RNA (1)...(19): siRNA sense strand
ggaaaugauggugcuacug

SEQ ID NO: 20753 - RNA, 19 nt, Homo sapiens
  misc_RNA (1)...(19): siRNA sense strand
agacuggcaaccucaagaa

SEQ ID NO: 20754 - RNA, 19 nt, Homo sapiens
  misc_RNA (1)...(19): siRNA sense strand
ggauuccaguucgaguaug

SEQ ID NO: 20755 - RNA, 19 nt, Homo sapiens
  misc_RNA (1)...(19): siRNA sense strand
ggacguccuggugaaguug

SEQ ID NO: 20756 - RNA, 19 nt, Homo sapiens
  misc_RNA (1)...(19): siRNA sense strand
aggcuggugugaugggauu

SEQ ID NO: 20757 - RNA, 19 nt, Homo sapiens
  misc_RNA (1)...(19): siRNA sense strand
gugacgagaccaagaacug

SEQ ID NO: 20758 - RNA, 19 nt, Homo sapiens
  misc_RNA (1)...(19): siRNA sense strand
caagggucccgcuggugaa

SEQ ID NO: 20759 - RNA, 19 nt, Homo sapiens
  misc_RNA (1)...(19): siRNA sense strand
aucaaagucuucugcaaca

SEQ ID NO: 20760 - RNA, 19 nt, Homo sapiens
  misc_RNA (1)...(19): siRNA sense strand
ugagccagcagaucgagaa

SEQ ID NO: 20761 - RNA, 19 nt, Homo sapiens
  misc_RNA (1)...(19): siRNA sense strand
uaaaggcgaaccuggugau

SEQ ID NO: 20762 - RNA, 19 nt, Homo sapiens
  misc_RNA (1)...(19): siRNA sense strand
ggguguuccuggagaccuu

SEQ ID NO: 20763 - RNA, 19 nt, Homo sapiens
  misc_RNA (1)...(19): siRNA sense strand
uacagaacggccucaggua

SEQ ID NO: 20764 - RNA, 19 nt, Homo sapiens
  misc_RNA (1)...(19): siRNA sense strand
cccagaacaucaccuacca

SEQ ID NO: 20765 - RNA, 19 nt, Homo sapiens
  misc_RNA (1)...(19): siRNA sense strand
acagggcgacagaggcaua

SEQ ID NO: 20766 - RNA, 19 nt, Homo sapiens
  misc_RNA (1)...(19): siRNA sense strand
gauggcguccguggucuga

SEQ ID NO: 20767 - RNA, 19 nt, Homo sapiens
  misc_RNA (1)...(19): siRNA sense strand
gccuggcccuguugguguu

SEQ ID NO: 20768 - RNA, 19 nt, Homo sapiens
  misc_RNA (1)...(19): siRNA sense strand
gaacuuugcugcucaguau

SEQ ID NO: 20769 - RNA, 19 nt, Homo sapiens
  misc_RNA (1)...(19): siRNA sense strand
ggaaauggcuacccaacuu

SEQ ID NO: 20770 - RNA, 19 nt, Homo sapiens
  misc_RNA (1)...(19): siRNA sense strand
gaacagcauugcauacaug

SEQ ID NO: 20771 - RNA, 19 nt, Homo sapiens
  misc_RNA (1)...(19): siRNA sense strand
gcagccaguuugaauauaa

SEQ ID NO: 20772 - RNA, 19 nt, Homo sapiens
  misc_RNA (1)...(19): siRNA sense strand
ggaaagagaggcccuaaug

SEQ ID NO: 20773 - RNA, 19 nt, Homo sapiens
  misc_RNA (1)...(19): siRNA sense strand
gccaagaacugguauagga

SEQ ID NO: 20774 - RNA, 19 nt, Homo sapiens
  misc_RNA (1)...(19): siRNA sense strand
cuacagggcucuaaugaug

SEQ ID NO: 20775 - RNA, 19 nt, Homo sapiens
  misc_RNA (1)...(19): siRNA sense strand
ccugaaggcucuagaaaga

SEQ ID NO: 20776 - RNA, 19 nt, Homo sapiens
  misc_RNA (1)...(19): siRNA sense strand
caaaguauacugugauuuc

SEQ ID NO: 20777 - RNA, 19 nt, Homo sapiens
  misc_RNA (1)...(19): siRNA sense strand
uggcagagcuggcgucaug

SEQ ID NO: 20778 - RNA, 19 nt, Homo sapiens
  misc_RNA (1)...(19): siRNA sense strand
gcaacagcagguucacuua

SEQ ID NO: 20779 - RNA, 19 nt, Homo sapiens
  misc_RNA (1)...(19): siRNA sense strand
acaauggucuggauggauu

SEQ ID NO: 20780 - RNA, 19 nt, Homo sapiens
  misc_RNA (1)...(19): siRNA sense strand
uggccgaacuggagaagua

SEQ ID NO: 20781 - RNA, 19 nt, Homo sapiens
  misc_RNA (1)...(19): siRNA sense strand
cuaaugauguugaacuugu

SEQ ID NO: 20782 - RNA, 19 nt, Homo sapiens
  misc_RNA (1)...(19): siRNA sense strand
cccagucuguuucaaauaa

SEQ ID NO: 20783 - RNA, 19 nt, Homo sapiens
  misc_RNA (1)...(19): siRNA sense strand
agaggaaacuguaagaaag

SEQ ID NO: 20784 - RNA, 19 nt, Homo sapiens
  misc_RNA (1)...(19): siRNA sense strand
uggcaaggcuggugaagau

SEQ ID NO: 20785 - RNA, 19 nt, Homo sapiens
  misc_RNA (1)...(19): siRNA sense strand
gggugaaccuggucucaga

SEQ ID NO: 20786 - RNA, 19 nt, Homo sapiens
  misc_RNA (1)...(19): siRNA sense strand
caaggacuaugaaguugau

SEQ ID NO: 20787 - RNA, 19 nt, Homo sapiens
  misc_RNA (1)...(19): siRNA sense strand
cgccugcccuuccuugaua

SEQ ID NO: 20788 - RNA, 19 nt, Homo sapiens
  misc_RNA (1)...(19): siRNA sense strand
gaaauggcuacccaacuug

SEQ ID NO: 20789 - RNA, 19 nt, Homo sapiens
  misc_RNA (1)...(19): siRNA sense strand
aggcagagauggugaagau

SEQ ID NO: 20790 - RNA, 19 nt, Homo sapiens
  misc_RNA (1)...(19): siRNA sense strand
ggacauuggcccagucugu

SEQ ID NO: 20791 - RNA, 19 nt, Homo sapiens
  misc_RNA (1)...(19): siRNA sense strand
ugaagucucucaacaacca

SEQ ID NO: 20792 - RNA, 19 nt, Homo sapiens
  misc_RNA (1)...(19): siRNA sense strand
gaagauggucacccuggaa

SEQ ID NO: 20793 - RNA, 19 nt, Homo sapiens
  misc_RNA (1)...(19): siRNA sense strand
ggugagagaggacguguug

SEQ ID NO: 20794 - RNA, 19 nt, Homo sapiens
  misc_RNA (1)...(19): siRNA sense strand
gaaguugaugcuacucuga

SEQ ID NO: 20795 - RNA, 19 nt, Homo sapiens
  misc_RNA (1)...(19): siRNA sense strand
gggaagcccuggugaacgu

SEQ ID NO: 20796 - RNA, 19 nt, Homo sapiens
  misc_RNA (1)...(19): siRNA sense strand
gaaagagaggcccuaaugg

SEQ ID NO: 20797 - RNA, 19 nt, Homo sapiens
  misc_RNA (1)...(19): siRNA sense strand
agaaguaggugcaguuggu

SEQ ID NO: 20798 - RNA, 19 nt, Homo sapiens
  misc_RNA (1)...(19): siRNA sense strand
cagguucacuuacacuguu

SEQ ID NO: 20799 - RNA, 19 nt, Homo sapiens
  misc_RNA (1)...(19): siRNA sense strand
ucucagaggugaaauuggu

SEQ ID NO: 20800 - RNA, 19 nt, Homo sapiens
  misc_RNA (1)...(19): siRNA sense strand
uguaagcgguggugguuau

SEQ ID NO: 20801 - RNA, 19 nt, Homo sapiens
  misc_RNA (1)...(19): siRNA sense strand
ugacuuugguuacgaugga

SEQ ID NO: 20802 - RNA, 19 nt, Homo sapiens
  misc_RNA (1)...(19): siRNA sense strand
caacaugccaaucuuuaca

SEQ ID NO: 20803 - RNA, 19 nt, Homo sapiens
  misc_RNA (1)...(19): siRNA sense strand
caaagggccuaagggugaa

SEQ ID NO: 20804 - RNA, 19 nt, Homo sapiens
  misc_RNA (1)...(19): siRNA sense strand
ggaacuuugcugcucagua

SEQ ID NO: 20805 - RNA, 19 nt, Homo sapiens
  misc_RNA (1)...(19): siRNA sense strand
gaggagagccuggcaacau

SEQ ID NO: 20806 - RNA, 19 nt, Homo sapiens
  misc_RNA (1)...(19): siRNA sense strand
cggacgaccuggugagaga

SEQ ID NO: 20807 - RNA, 19 nt, Homo sapiens
  misc_RNA (1)...(19): siRNA sense strand
uggauucccuggacccaaa

SEQ ID NO: 20808 - RNA, 19 nt, Homo sapiens
  misc_RNA (1)...(19): siRNA sense strand
ggcccagucuguuucaaau

SEQ ID NO: 20809 - RNA, 19 nt, Homo sapiens
  misc_RNA (1)...(19): siRNA sense strand
gcacaugccgugacuugag

SEQ ID NO: 20810 - RNA, 19 nt, Homo sapiens
  misc_RNA (1)...(19): siRNA sense strand
gugguuaugacuuugguua

SEQ ID NO: 20811 - RNA, 19 nt, Homo sapiens
  misc_RNA (1)...(19): siRNA sense strand
aagaggaaacuguaagaaa

SEQ ID NO: 20812 - RNA, 19 nt, Homo sapiens
  misc_RNA (1)...(19): siRNA sense strand
aggagagccuggcaacauu

SEQ ID NO: 20813 - RNA, 19 nt, Homo sapiens
  misc_RNA (1)...(19): siRNA sense strand
ggaccaaugggcuuaaugg

SEQ ID NO: 20814 - RNA, 19 nt, Homo sapiens
  misc_RNA (1)...(19): siRNA sense strand
acagggcucuaaugauguu

SEQ ID NO: 20815 - RNA, 19 nt, Homo sapiens
  misc_RNA (1)...(19): siRNA sense strand
ccaacuaugccucucagaa

SEQ ID NO: 20816 - RNA, 19 nt, Homo sapiens
  misc_RNA (1)...(19): siRNA sense strand
ggcagccaguuugaauaua

SEQ ID NO: 20817 - RNA, 19 nt, Homo sapiens
  misc_RNA (1)...(19): siRNA sense strand
gggcacugcugguccaucu

SEQ ID NO: 20818 - RNA, 19 nt, Homo sapiens
  misc_RNA (1)...(19): siRNA sense strand
aaccaaggaugcacuaugg

SEQ ID NO: 20819 - RNA, 19 nt, Homo sapiens
  misc_RNA (1)...(19): siRNA sense strand
ccgaggaccuaauggagau

SEQ ID NO: 20820 - RNA, 19 nt, Homo sapiens
  misc_RNA (1)...(19): siRNA sense strand
ucacuuacacuguucuugu

SEQ ID NO: 20821 - RNA, 19 nt, Homo sapiens
  misc_RNA (1)...(19): siRNA sense strand
caacuaugccucucagaac

SEQ ID NO: 20822 - RNA, 19 nt, Homo sapiens
  misc_RNA (1)...(19): siRNA sense strand
gcuaggagaaacuaucaau

SEQ ID NO: 20823 - RNA, 19 nt, Homo sapiens
  misc_RNA (1)...(19): siRNA sense strand
gaaaacaucccagccaaga

SEQ ID NO: 20824 - RNA, 19 nt, Homo sapiens
  misc_RNA (1)...(19): siRNA sense strand
ugaaggcucuagaaagaac

SEQ ID NO: 20825 - RNA, 19 nt, Homo sapiens
  misc_RNA (1)...(19): siRNA sense strand
gggugaaccugguccucuu

SEQ ID NO: 20826 - RNA, 19 nt, Homo sapiens
  misc_RNA (1)...(19): siRNA sense strand
ggagagccuggcaacauug

SEQ ID NO: 20827 - RNA, 19 nt, Homo sapiens
  misc_RNA (1)...(19): siRNA sense strand
ggugagagaggaguuguug

SEQ ID NO: 20828 - RNA, 19 nt, Homo sapiens
  misc_RNA (1)...(19): siRNA sense strand
caagaggaaacuguaagaa

SEQ ID NO: 20829 - RNA, 19 nt, Homo sapiens
  misc_RNA (1)...(19): siRNA sense strand
gggucuccauggugaguuu

SEQ ID NO: 20830 - RNA, 19 nt, Homo sapiens
  misc_RNA (1)...(19): siRNA sense strand
gucaugggcccuccuggua

SEQ ID NO: 20831 - RNA, 19 nt, Homo sapiens
  misc_RNA (1)...(19): siRNA sense strand
ugagagaggaguuguugga

SEQ ID NO: 20832 - RNA, 19 nt, Homo sapiens
  misc_RNA (1)...(19): siRNA sense strand
gggcucuaaugauguugaa

SEQ ID NO: 20833 - RNA, 19 nt, Homo sapiens
  misc_RNA (1)...(19): siRNA sense strand
gaaacacgucuggcuagga

SEQ ID NO: 20834 - RNA, 19 nt, Homo sapiens
  misc_RNA (1)...(19): siRNA sense strand
cacaugccgugacuugaga

SEQ ID NO: 20835 - RNA, 19 nt, Homo sapiens
  misc_RNA (1)...(19): siRNA sense strand
ugcaaggucugccugguau

SEQ ID NO: 20836 - RNA, 19 nt, Homo sapiens
  misc_RNA (1)...(19): siRNA sense strand
ggagaaguaggugcaguug

SEQ ID NO: 20837 - RNA, 19 nt, Homo sapiens
  misc_RNA (1)...(19): siRNA sense strand
ggucucagaggugaaauug

SEQ ID NO: 20838 - RNA, 19 nt, Homo sapiens
  misc_RNA (1)...(19): siRNA sense strand
uaaaggucaugcuggucuu

SEQ ID NO: 20839 - RNA, 19 nt, Homo sapiens
  misc_RNA (1)...(19): siRNA sense strand
ggagcaaacggccuuacug

SEQ ID NO: 20840 - RNA, 19 nt, Homo sapiens
  misc_RNA (1)...(19): siRNA sense strand
gaggggugcugcuggcaua

SEQ ID NO: 20841 - RNA, 19 nt, Homo sapiens
  misc_RNA (1)...(19): siRNA sense strand
ggcaacagcagguucacuu

SEQ ID NO: 20842 - RNA, 19 nt, Homo sapiens
  misc_RNA (1)...(19): siRNA sense strand
gguauaggagcuccaagga

SEQ ID NO: 20843 - RNA, 19 nt, Homo sapiens
  misc_RNA (1)...(19): siRNA sense strand
ccaaggacuaugaaguuga

SEQ ID NO: 20844 - RNA, 19 nt, Homo sapiens
  misc_RNA (1)...(19): siRNA sense strand
cauggaaaccguggugaaa

SEQ ID NO: 20845 - RNA, 19 nt, Homo sapiens
  misc_RNA (1)...(19): siRNA sense strand
gcaacaugccaaucuuuac

SEQ ID NO: 20846 - RNA, 19 nt, Homo sapiens
  misc_RNA (1)...(19): siRNA sense strand
cuagcaacaugccaaucuu

SEQ ID NO: 20847 - RNA, 19 nt, Homo sapiens
  misc_RNA (1)...(19): siRNA sense strand
gcuccaaggacaagaaaca

SEQ ID NO: 20848 - RNA, 19 nt, Homo sapiens
  misc_RNA (1)...(19): siRNA sense strand
uggcccagcugguccaaau

SEQ ID NO: 20849 - RNA, 19 nt, Homo sapiens
  misc_RNA (1)...(19): siRNA sense strand
cagccaguuugaauauaau

SEQ ID NO: 20850 - RNA, 19 nt, Homo sapiens
  misc_RNA (1)...(19): siRNA sense strand
gagcuccaaggacaagaaa

SEQ ID NO: 20851 - RNA, 19 nt, Homo sapiens
  misc_RNA (1)...(19): siRNA sense strand
acagggugcucgugguuuc

SEQ ID NO: 20852 - RNA, 19 nt, Homo sapiens
  misc_RNA (1)...(19): siRNA sense strand
uagcaacaugccaaucuuu

SEQ ID NO: 20853 - RNA, 19 nt, Homo sapiens
  misc_RNA (1)...(19): siRNA sense strand
acucugaagucucucaaca

SEQ ID NO: 20854 - RNA, 19 nt, Homo sapiens
  misc_RNA (1)...(19): siRNA sense strand
cccaaggacuaugaaguug

SEQ ID NO: 20855 - RNA, 19 nt, Homo sapiens
  misc_RNA (1)...(19): siRNA sense strand
cgguggugguuaugacuuu

SEQ ID NO: 20856 - RNA, 19 nt, Homo sapiens
  misc_RNA (1)...(19): siRNA sense strand
uagaggaccacguggagaa

SEQ ID NO: 20857 - RNA, 19 nt, Homo sapiens
  misc_RNA (1)...(19): siRNA sense strand
gggacacaauggucuggau

SEQ ID NO: 20858 - RNA, 19 nt, Homo sapiens
  misc_RNA (1)...(19): siRNA sense strand
gcugguccaucugguccua

SEQ ID NO: 20859 - RNA, 19 nt, Homo sapiens
  misc_RNA (1)...(19): siRNA sense strand
gcccagucuguuucaaaua

SEQ ID NO: 20860 - RNA, 19 nt, Homo sapiens
  misc_RNA (1)...(19): siRNA sense strand
gcagguucacuuacacugu

SEQ ID NO: 20861 - RNA, 19 nt, Homo sapiens
  misc_RNA (1)...(19): siRNA sense strand
ggagcuccaaggacaagaa

SEQ ID NO: 20862 - RNA, 19 nt, Homo sapiens
  misc_RNA (1)...(19): siRNA sense strand
guggagcagugguuacuac

SEQ ID NO: 20863 - RNA, 19 nt, Homo sapiens
  misc_RNA (1)...(19): siRNA sense strand
cagaguggagcagugguua

SEQ ID NO: 20864 - RNA, 19 nt, Homo sapiens
  misc_RNA (1)...(19): siRNA sense strand
guuaugacuuugguuacga

SEQ ID NO: 20865 - RNA, 19 nt, Homo sapiens
  misc_RNA (1)...(19): siRNA sense strand
ccuuaugccuagcaacaug

SEQ ID NO: 20866 - RNA, 19 nt, Homo sapiens
  misc_RNA (1)...(19): siRNA sense strand
uaagggagagcccggugaa

SEQ ID NO: 20867 - RNA, 19 nt, Homo sapiens
  misc_RNA (1)...(19): siRNA sense strand
gacauuggcccagucuguu

SEQ ID NO: 20868 - RNA, 19 nt, Homo sapiens
  misc_RNA (1)...(19): siRNA sense strand
caaaggacaucgaggauuc

SEQ ID NO: 20869 - RNA, 19 nt, Homo sapiens
  misc_RNA (1)...(19): siRNA sense strand
gagaugaaccaauggauuu

SEQ ID NO: 20870 - RNA, 19 nt, Homo sapiens
  misc_RNA (1)...(19): siRNA sense strand
cagaggagcugcuggagaa

SEQ ID NO: 20871 - RNA, 19 nt, Homo sapiens
  misc_RNA (1)...(19): siRNA sense strand
ucucugcgaugacauaaua

SEQ ID NO: 20872 - RNA, 19 nt, Homo sapiens
  misc_RNA (1)...(19): siRNA sense strand
caaauuggaugcuaucaag

SEQ ID NO: 20873 - RNA, 19 nt, Homo sapiens
  misc_RNA (1)...(19): siRNA sense strand
caaauagaaagccucauua

SEQ ID NO: 20874 - RNA, 19 nt, Homo sapiens
  misc_RNA (1)...(19): siRNA sense strand
ccagaaccaugccaaauau

SEQ ID NO: 20875 - RNA, 19 nt, Homo sapiens
  misc_RNA (1)...(19): siRNA sense strand
ugaaggaaauagcaaauuc

SEQ ID NO: 20876 - RNA, 19 nt, Homo sapiens
  misc_RNA (1)...(19): siRNA sense strand
caucgaggauucccuggua

SEQ ID NO: 20877 - RNA, 19 nt, Homo sapiens
  misc_RNA (1)...(19): siRNA sense strand
caaauucaccuacacaguu

SEQ ID NO: 20878 - RNA, 19 nt, Homo sapiens
  misc_RNA (1)...(19): siRNA sense strand
ggagaauguugugcaguuu

SEQ ID NO: 20879 - RNA, 19 nt, Homo sapiens
  misc_RNA (1)...(19): siRNA sense strand
caucacauaucacugcaaa

SEQ ID NO: 20880 - RNA, 19 nt, Homo sapiens
  misc_RNA (1)...(19): siRNA sense strand
ccgaugagauuaugacuuc

SEQ ID NO: 20881 - RNA, 19 nt, Homo sapiens
  misc_RNA (1)...(19): siRNA sense strand
gccagaaccaugccaaaua

SEQ ID NO: 20882 - RNA, 19 nt, Homo sapiens
  misc_RNA (1)...(19): siRNA sense strand
caacaccgaugagauuaug

SEQ ID NO: 20883 - RNA, 19 nt, Homo sapiens
  misc_RNA (1)...(19): siRNA sense strand
uaagaauggugccaaagga

SEQ ID NO: 20884 - RNA, 19 nt, Homo sapiens
  misc_RNA (1)...(19): siRNA sense strand
gcugugagacuaccuauug

SEQ ID NO: 20885 - RNA, 19 nt, Homo sapiens
  misc_RNA (1)...(19): siRNA sense strand
ggaggaugguugcacgaaa

SEQ ID NO: 20886 - RNA, 19 nt, Homo sapiens
  misc_RNA (1)...(19): siRNA sense strand
gauuaugacuucacucaag

SEQ ID NO: 20887 - RNA, 19 nt, Homo sapiens
  misc_RNA (1)...(19): siRNA sense strand
gaaauucugccauccugaa

SEQ ID NO: 20888 - RNA, 19 nt, Homo sapiens
  misc_RNA (1)...(19): siRNA sense strand
uaaccaaggaugcaaauug

SEQ ID NO: 20889 - RNA, 19 nt, Homo sapiens
  misc_RNA (1)...(19): siRNA sense strand
ggagaugaaccaauggauu

SEQ ID NO: 20890 - RNA, 19 nt, Homo sapiens
  misc_RNA (1)...(19): siRNA sense strand
aaacacugguggacagauu

SEQ ID NO: 20891 - RNA, 19 nt, Homo sapiens
  misc_RNA (1)...(19): siRNA sense strand
gaacuauucuccccaguau

SEQ ID NO: 20892 - RNA, 19 nt, Homo sapiens
  misc_RNA (1)...(19): siRNA sense strand
gaaauagcaaauucaccua

SEQ ID NO: 20893 - RNA, 19 nt, Homo sapiens
  misc_RNA (1)...(19): siRNA sense strand
gaacguggaccuccuggau

SEQ ID NO: 20894 - RNA, 19 nt, Homo sapiens
  misc_RNA (1)...(19): siRNA sense strand
uggauucccugguaugaaa

SEQ ID NO: 20895 - RNA, 19 nt, Homo sapiens
  misc_RNA (1)...(19): siRNA sense strand
gcauaagugccaauccuuu

SEQ ID NO: 20896 - RNA, 19 nt, Homo sapiens
  misc_RNA (1)...(19): siRNA sense strand
aggaaugccuggagaaaga

SEQ ID NO: 20897 - RNA, 19 nt, Homo sapiens
  misc_RNA (1)...(19): siRNA sense strand
gaaggaaauagcaaauuca

SEQ ID NO: 20898 - RNA, 19 nt, Homo sapiens
  misc_RNA (1)...(19): siRNA sense strand
cuaucaagguauucuguaa

SEQ ID NO: 20899 - RNA, 19 nt, Homo sapiens
  misc_RNA (1)...(19): siRNA sense strand
gaaauggugacccugguau

SEQ ID NO: 20900 - RNA, 19 nt, Homo sapiens
  misc_RNA (1)...(19): siRNA sense strand
gagauuaugacuucacuca

SEQ ID NO: 20901 - RNA, 19 nt, Homo sapiens
  misc_RNA (1)...(19): siRNA sense strand
uggagaaccuggugcaaau

SEQ ID NO: 20902 - RNA, 19 nt, Homo sapiens
  misc_RNA (1)...(19): siRNA sense strand
cuacugguccucagaacua

SEQ ID NO: 20903 - RNA, 19 nt, Homo sapiens
  misc_RNA (1)...(19): siRNA sense strand
gcaaauuggaugcuaucaa

SEQ ID NO: 20904 - RNA, 19 nt, Homo sapiens
  misc_RNA (1)...(19): siRNA sense strand
gaugcaaauuggaugcuau

SEQ ID NO: 20905 - RNA, 19 nt, Homo sapiens
  misc_RNA (1)...(19): siRNA sense strand
acaaauagaaagccucauu

SEQ ID NO: 20906 - RNA, 19 nt, Homo sapiens
  misc_RNA (1)...(19): siRNA sense strand
ucacucaagucuguuaaug

SEQ ID NO: 20907 - RNA, 19 nt, Homo sapiens
  misc_RNA (1)...(19): siRNA sense strand
uccaggagcugcaggagaa

SEQ ID NO: 20908 - RNA, 19 nt, Homo sapiens
  misc_RNA (1)...(19): siRNA sense strand
cuucaucccacuauuauuu

SEQ ID NO: 20909 - RNA, 19 nt, Homo sapiens
  misc_RNA (1)...(19): siRNA sense strand
cccagaacaucacauauca

SEQ ID NO: 20910 - RNA, 19 nt, Homo sapiens
  misc_RNA (1)...(19): siRNA sense strand
gauggugguuuucaguuua

SEQ ID NO: 20911 - RNA, 19 nt, Homo sapiens
  misc_RNA (1)...(19): siRNA sense strand
ggaugcaaauuggaugcua

SEQ ID NO: 20912 - RNA, 19 nt, Homo sapiens
  misc_RNA (1)...(19): siRNA sense strand
uuauggagaugaaccaaug

SEQ ID NO: 20913 - RNA, 19 nt, Homo sapiens
  misc_RNA (1)...(19): siRNA sense strand
cugaagauguccuugaugu

SEQ ID NO: 20914 - RNA, 19 nt, Homo sapiens
  misc_RNA (1)...(19): siRNA sense strand
gccaauccuuugaauguuc

SEQ ID NO: 20915 - RNA, 19 nt, Homo sapiens
  misc_RNA (1)...(19): siRNA sense strand
augugacgaucaagaauua

SEQ ID NO: 20916 - RNA, 19 nt, Homo sapiens
  misc_RNA (1)...(19): siRNA sense strand
cuacggcaauccugaacuu

SEQ ID NO: 20917 - RNA, 19 nt, Homo sapiens
  misc_RNA (1)...(19): siRNA sense strand
gaaccaugccaaauaugug

SEQ ID NO: 20918 - RNA, 19 nt, Homo sapiens
  misc_RNA (1)...(19): siRNA sense strand
acucaagucuguuaaugga

SEQ ID NO: 20919 - RNA, 19 nt, Homo sapiens
  misc_RNA (1)...(19): siRNA sense strand
caguggaccuccuggcaaa

SEQ ID NO: 20920 - RNA, 19 nt, Homo sapiens
  misc_RNA (1)...(19): siRNA sense strand
caagggugaucguggugaa

SEQ ID NO: 20921 - RNA, 19 nt, Homo sapiens
  misc_RNA (1)...(19): siRNA sense strand
ggauggaucaccuggagaa

SEQ ID NO: 20922 - RNA, 19 nt, Homo sapiens
  misc_RNA (1)...(19): siRNA sense strand
ggucaguccuaugcggaua

SEQ ID NO: 20923 - RNA, 19 nt, Homo sapiens
  misc_RNA (1)...(19): siRNA sense strand
uggagaauguugugcaguu

SEQ ID NO: 20924 - RNA, 19 nt, Homo sapiens
  misc_RNA (1)...(19): siRNA sense strand
caaagguccagcugggaua

SEQ ID NO: 20925 - RNA, 19 nt, Homo sapiens
  misc_RNA (1)...(19): siRNA sense strand
gcaaggaaugccuggagaa

SEQ ID NO: 20926 - RNA, 19 nt, Homo sapiens
  misc_RNA (1)...(19): siRNA sense strand
ugucaagucuggaguagca

SEQ ID NO: 20927 - RNA, 19 nt, Homo sapiens
  misc_RNA (1)...(19): siRNA sense strand
auagaaagccucauuaguc

SEQ ID NO: 20928 - RNA, 19 nt, Homo sapiens
  misc_RNA (1)...(19): siRNA sense strand
acacagaggcuucgaugga

SEQ ID NO: 20929 - RNA, 19 nt, Homo sapiens
  misc_RNA (1)...(19): siRNA sense strand
cagcugggauaccuggauu

SEQ ID NO: 20930 - RNA, 19 nt, Homo sapiens
  misc_RNA (1)...(19): siRNA sense strand
gauccguucucugcgauga

SEQ ID NO: 20931 - RNA, 19 nt, Homo sapiens
  misc_RNA (1)...(19): siRNA sense strand
gaggaugguugcacgaaac

SEQ ID NO: 20932 - RNA, 19 nt, Homo sapiens
  misc_RNA (1)...(19): siRNA sense strand
gcaaauucaccuacacagu

SEQ ID NO: 20933 - RNA, 19 nt, Homo sapiens
  misc_RNA (1)...(19): siRNA sense strand
ucaggccaguggaaaugua

SEQ ID NO: 20934 - RNA, 19 nt, Homo sapiens
  misc_RNA (1)...(19): siRNA sense strand
gaucaggccaguggaaaug

SEQ ID NO: 20935 - RNA, 19 nt, Homo sapiens
  misc_RNA (1)...(19): siRNA sense strand
aaauagcauugcauacaug

SEQ ID NO: 20936 - RNA, 19 nt, Homo sapiens
  misc_RNA (1)...(19): siRNA sense strand
gggacacgcuggugcucaa

SEQ ID NO: 20937 - RNA, 19 nt, Homo sapiens
  misc_RNA (1)...(19): siRNA sense strand
aaagauggagaaucaggua

SEQ ID NO: 20938 - RNA, 19 nt, Homo sapiens
  misc_RNA (1)...(19): siRNA sense strand
aaauucaccuacacaguuc

SEQ ID NO: 20939 - RNA, 19 nt, Homo sapiens
  misc_RNA (1)...(19): siRNA sense strand
cagccgagcuucccagaac

SEQ ID NO: 20940 - RNA, 19 nt, Homo sapiens
  misc_RNA (1)...(19): siRNA sense strand
gugccaauccuuugaaugu

SEQ ID NO: 20941 - RNA, 19 nt, Homo sapiens
  misc_RNA (1)...(19): siRNA sense strand
uggaaagaguggugacaga

SEQ ID NO: 20942 - RNA, 19 nt, Homo sapiens
  misc_RNA (1)...(19): siRNA sense strand
uggaaacccuggaucagau

SEQ ID NO: 20943 - RNA, 19 nt, Homo sapiens
  misc_RNA (1)...(19): siRNA sense strand
caaggaaugccuggagaaa

SEQ ID NO: 20944 - RNA, 19 nt, Homo sapiens
  misc_RNA (1)...(19): siRNA sense strand
uggaaaagauggagaauca

SEQ ID NO: 20945 - RNA, 19 nt, Homo sapiens
  misc_RNA (1)...(19): siRNA sense strand
uggagaaccuggcagagau

SEQ ID NO: 20946 - RNA, 19 nt, Homo sapiens
  misc_RNA (1)...(19): siRNA sense strand
uaaagaaggcccugaagcu

SEQ ID NO: 20947 - RNA, 19 nt, Homo sapiens
  misc_RNA (1)...(19): siRNA sense strand
gaagauggcaaggauggau

SEQ ID NO: 20948 - RNA, 19 nt, Homo sapiens
  misc_RNA (1)...(19): siRNA sense strand
ugacauuggugguccugau

SEQ ID NO: 20949 - RNA, 19 nt, Homo sapiens
  misc_RNA (1)...(19): siRNA sense strand
gauauugcacccuaugaca

SEQ ID NO: 20950 - RNA, 19 nt, Homo sapiens
  misc_RNA (1)...(19): siRNA sense strand
gaaccuggaagagauggaa

SEQ ID NO: 20951 - RNA, 19 nt, Homo sapiens
  misc_RNA (1)...(19): siRNA sense strand
gaugucaagucuggaguag

SEQ ID NO: 20952 - RNA, 19 nt, Homo sapiens
  misc_RNA (1)...(19): siRNA sense strand
ggauggugguuuucaguuu

SEQ ID NO: 20953 - RNA, 19 nt, Homo sapiens
  misc_RNA (1)...(19): siRNA sense strand
gagaauguugugcaguuug

SEQ ID NO: 20954 - RNA, 19 nt, Homo sapiens
  misc_RNA (1)...(19): siRNA sense strand
cauaagugccaauccuuug

SEQ ID NO: 20955 - RNA, 19 nt, Homo sapiens
  misc_RNA (1)...(19): siRNA sense strand
gcuaucaagguauucugua

SEQ ID NO: 20956 - RNA, 19 nt, Homo sapiens
  misc_RNA (1)...(19): siRNA sense strand
uggaugcuaucaagguauu

SEQ ID NO: 20957 - RNA, 19 nt, Homo sapiens
  misc_RNA (1)...(19): siRNA sense strand
caucugguccugcuggaaa

SEQ ID NO: 20958 - RNA, 19 nt, Homo sapiens
  misc_RNA (1)...(19): siRNA sense strand
ggaaagaauggugaaacug

SEQ ID NO: 20959 - RNA, 19 nt, Homo sapiens
  misc_RNA (1)...(19): siRNA sense strand
cguuggcccuguuugcuuu

SEQ ID NO: 20960 - RNA, 19 nt, Homo sapiens
  misc_RNA (1)...(19): siRNA sense strand
aaacagucuuugaauaucg

SEQ ID NO: 20961 - RNA, 19 nt, Homo sapiens
  misc_RNA (1)...(19): siRNA sense strand
uggugaaccuggugguaaa

SEQ ID NO: 20962 - RNA, 19 nt, Homo sapiens
  misc_RNA (1)...(19): siRNA sense strand
agaaggcccugaagcugau

SEQ ID NO: 20963 - RNA, 19 nt, Homo sapiens
  misc_RNA (1)...(19): siRNA sense strand
caguggaaauguaaagaag

SEQ ID NO: 20964 - RNA, 19 nt, Homo sapiens
  misc_RNA (1)...(19): siRNA sense strand
gucuguuaauggacaaaua

SEQ ID NO: 20965 - RNA, 19 nt, Homo sapiens
  misc_RNA (1)...(19): siRNA sense strand
cgagguaacagaggugaaa

SEQ ID NO: 20966 - RNA, 19 nt, Homo sapiens
  misc_RNA (1)...(19): siRNA sense strand
ggggaaacaugcauaagug

SEQ ID NO: 20967 - RNA, 19 nt, Homo sapiens
  misc_RNA (1)...(19): siRNA sense strand
ccaguggaaauguaaagaa

SEQ ID NO: 20968 - RNA, 19 nt, Homo sapiens
  misc_RNA (1)...(19): siRNA sense strand
caacaaagguucuaaagga

SEQ ID NO: 20969 - RNA, 19 nt, Homo sapiens
  misc_RNA (1)...(19): siRNA sense strand
gagaagauauagaacuuga

SEQ ID NO: 20970 - RNA, 19 nt, Homo sapiens
  misc_RNA (1)...(19): siRNA sense strand
caacaaggcagaagaggua

SEQ ID NO: 20971 - RNA, 19 nt, Homo sapiens
  misc_RNA (1)...(19): siRNA sense strand
agagauaucccacguaaua

SEQ ID NO: 20972 - RNA, 19 nt, Homo sapiens
  misc_RNA (1)...(19): siRNA sense strand
ccaaggacuuccaggcuua

SEQ ID NO: 20973 - RNA, 19 nt, Homo sapiens
  misc_RNA (1)...(19): siRNA sense strand
ccaaggacgugauggaauu

SEQ ID NO: 20974 - RNA, 19 nt, Homo sapiens
  misc_RNA (1)...(19): siRNA sense strand
gcagcuggcuugaaaggaa

SEQ ID NO: 20975 - RNA, 19 nt, Homo sapiens
  misc_RNA (1)...(19): siRNA sense strand
ucagagauaucccacguaa

SEQ ID NO: 20976 - RNA, 19 nt, Homo sapiens
  misc_RNA (1)...(19): siRNA sense strand
uauaagaggugaccaagga

SEQ ID NO: 20977 - RNA, 19 nt, Homo sapiens
  misc_RNA (1)...(19): siRNA sense strand
caaagaggauauccaggaa

SEQ ID NO: 20978 - RNA, 19 nt, Homo sapiens
  misc_RNA (1)...(19): siRNA sense strand
gaacaaggagauaaaggaa

SEQ ID NO: 20979 - RNA, 19 nt, Homo sapiens
  misc_RNA (1)...(19): siRNA sense strand
gaagauauagaacuugaug

SEQ ID NO: 20980 - RNA, 19 nt, Homo sapiens
  misc_RNA (1)...(19): siRNA sense strand
ccaccaggcucaagaggaa

SEQ ID NO: 20981 - RNA, 19 nt, Homo sapiens
  misc_RNA (1)...(19): siRNA sense strand
gaaagagugauaggacaua

SEQ ID NO: 20982 - RNA, 19 nt, Homo sapiens
  misc_RNA (1)...(19): siRNA sense strand
gaaagggcuuggauggaau

SEQ ID NO: 20983 - RNA, 19 nt, Homo sapiens
  misc_RNA (1)...(19): siRNA sense strand
agaaagggcuuggauggaa

SEQ ID NO: 20984 - RNA, 19 nt, Homo sapiens
  misc_RNA (1)...(19): siRNA sense strand
gaccaggccucccagguau

SEQ ID NO: 20985 - RNA, 19 nt, Homo sapiens
  misc_RNA (1)...(19): siRNA sense strand
guaaagggccagagaggaa

SEQ ID NO: 20986 - RNA, 19 nt, Homo sapiens
  misc_RNA (1)...(19): siRNA sense strand
cagcaaggguugugucugu

SEQ ID NO: 20987 - RNA, 19 nt, Homo sapiens
  misc_RNA (1)...(19): siRNA sense strand
acaaggagauaaaggaaau

SEQ ID NO: 20988 - RNA, 19 nt, Homo sapiens
  misc_RNA (1)...(19): siRNA sense strand
ggaacaaggagauaaagga

SEQ ID NO: 20989 - RNA, 19 nt, Homo sapiens
  misc_RNA (1)...(19): siRNA sense strand
ggaccaccaggaacaguua

SEQ ID NO: 20990 - RNA, 19 nt, Homo sapiens
  misc_RNA (1)...(19): siRNA sense strand
gaaagccuauuccaucaac

SEQ ID NO: 20991 - RNA, 19 nt, Homo sapiens
  misc_RNA (1)...(19): siRNA sense strand
caagggagaaccagcagua

SEQ ID NO: 20992 - RNA, 19 nt, Homo sapiens
  misc_RNA (1)...(19): siRNA sense strand
gagccuggguuaccuggaa

SEQ ID NO: 20993 - RNA, 19 nt, Homo sapiens
  misc_RNA (1)...(19): siRNA sense strand
auacaggucuuccaggauu

SEQ ID NO: 20994 - RNA, 19 nt, Homo sapiens
  misc_RNA (1)...(19): siRNA sense strand
ccacaggcauagaaggauu

SEQ ID NO: 20995 - RNA, 19 nt, Homo sapiens
  misc_RNA (1)...(19): siRNA sense strand
guacacagugcccuuauau

SEQ ID NO: 20996 - RNA, 19 nt, Homo sapiens
  misc_RNA (1)...(19): siRNA sense strand
ggaaaugaagggcuugaug

SEQ ID NO: 20997 - RNA, 19 nt, Homo sapiens
  misc_RNA (1)...(19): siRNA sense strand
ucaaaggauucgcaggaaa

SEQ ID NO: 20998 - RNA, 19 nt, Homo sapiens
  misc_RNA (1)...(19): siRNA sense strand
aaagggugcuccugcuaaa

SEQ ID NO: 20999 - RNA, 19 nt, Homo sapiens
  misc_RNA (1)...(19): siRNA sense strand
gaacccuggugcucaagga

SEQ ID NO: 21000 - RNA, 19 nt, Homo sapiens
  misc_RNA (1)...(19): siRNA sense strand
aggcuuaaauggauugaaa

SEQ ID NO: 21001 - RNA, 19 nt, Homo sapiens
  misc_RNA (1)...(19): siRNA sense strand
ggacuuccaggcuuaaaug

SEQ ID NO: 21002 - RNA, 19 nt, Homo sapiens
  misc_RNA (1)...(19): siRNA sense strand
ugugaaagcuggggaauua

SEQ ID NO: 21003 - RNA, 19 nt, Homo sapiens
  misc_RNA (1)...(19): siRNA sense strand
uaacagaacggaccucaag

SEQ ID NO: 21004 - RNA, 19 nt, Homo sapiens
  misc_RNA (1)...(19): siRNA sense strand
ccuauuccaucaacuguga

SEQ ID NO: 21005 - RNA, 19 nt, Homo sapiens
  misc_RNA (1)...(19): siRNA sense strand
gggauuuccuggagccauu

SEQ ID NO: 21006 - RNA, 19 nt, Homo sapiens
  misc_RNA (1)...(19): siRNA sense strand
aaagggagacccaggaauu

SEQ ID NO: 21007 - RNA, 19 nt, Homo sapiens
  misc_RNA (1)...(19): siRNA sense strand
gcaaggguugugucuguaa

SEQ ID NO: 21008 - RNA, 19 nt, Homo sapiens
  misc_RNA (1)...(19): siRNA sense strand
uaucuagggucuccaggaa

SEQ ID NO: 21009 - RNA, 19 nt, Homo sapiens
  misc_RNA (1)...(19): siRNA sense strand
cauuggcccuccaggauuu

SEQ ID NO: 21010 - RNA, 19 nt, Homo sapiens
  misc_RNA (1)...(19): siRNA sense strand
ggaaagaaaggagaaaugg

SEQ ID NO: 21011 - RNA, 19 nt, Homo sapiens
  misc_RNA (1)...(19): siRNA sense strand
aaagagugauaggacauaa

SEQ ID NO: 21012 - RNA, 19 nt, Homo sapiens
  misc_RNA (1)...(19): siRNA sense strand
uccagggagucauguaaua

SEQ ID NO: 21013 - RNA, 19 nt, Homo sapiens
  misc_RNA (1)...(19): siRNA sense strand
ggucugcccggugcaauua

SEQ ID NO: 21014 - RNA, 19 nt, Homo sapiens
  misc_RNA (1)...(19): siRNA sense strand
caaggguugugucuguaaa

SEQ ID NO: 21015 - RNA, 19 nt, Homo sapiens
  misc_RNA (1)...(19): siRNA sense strand
ucacuggguuguccuggaa

SEQ ID NO: 21016 - RNA, 19 nt, Homo sapiens
  misc_RNA (1)...(19): siRNA sense strand
agaaucauauggaucugaa

SEQ ID NO: 21017 - RNA, 19 nt, Homo sapiens
  misc_RNA (1)...(19): siRNA sense strand
ggaaagccagguccucaug

SEQ ID NO: 21018 - RNA, 19 nt, Homo sapiens
  misc_RNA (1)...(19): siRNA sense strand
aggcgcagcuggcuugaaa

SEQ ID NO: 21019 - RNA, 19 nt, Homo sapiens
  misc_RNA (1)...(19): siRNA sense strand
aagaggauauccaggaaau

SEQ ID NO: 21020 - RNA, 19 nt, Homo sapiens
  misc_RNA (1)...(19): siRNA sense strand
caaaggauucgcaggaaau

SEQ ID NO: 21021 - RNA, 19 nt, Homo sapiens
  misc_RNA (1)...(19): siRNA sense strand
aaccaggucucaaaggauu

SEQ ID NO: 21022 - RNA, 19 nt, Homo sapiens
  misc_RNA (1)...(19): siRNA sense strand
uuacggacuugucggugua

SEQ ID NO: 21023 - RNA, 19 nt, Homo sapiens
  misc_RNA (1)...(19): siRNA sense strand
ggagacccuggcacacuua

SEQ ID NO: 21024 - RNA, 19 nt, Homo sapiens
  misc_RNA (1)...(19): siRNA sense strand
agaaccaggucucaaagga

SEQ ID NO: 21025 - RNA, 19 nt, Homo sapiens
  misc_RNA (1)...(19): siRNA sense strand
ugauugggaugaugggauu

SEQ ID NO: 21026 - RNA, 19 nt, Homo sapiens
  misc_RNA (1)...(19): siRNA sense strand
gggugaagauggcauuaag

SEQ ID NO: 21027 - RNA, 19 nt, Homo sapiens
  misc_RNA (1)...(19): siRNA sense strand
uaaguggauugccaggauu

SEQ ID NO: 21028 - RNA, 19 nt, Homo sapiens
  misc_RNA (1)...(19): siRNA sense strand
aggagaagauauagaacuu

SEQ ID NO: 21029 - RNA, 19 nt, Homo sapiens
  misc_RNA (1)...(19): siRNA sense strand
gggaaagaaaggagaaaug

SEQ ID NO: 21030 - RNA, 19 nt, Homo sapiens
  misc_RNA (1)...(19): siRNA sense strand
ccaggaacaguuauuguga

SEQ ID NO: 21031 - RNA, 19 nt, Homo sapiens
  misc_RNA (1)...(19): siRNA sense strand
gggcaugccagguucuaaa

SEQ ID NO: 21032 - RNA, 19 nt, Homo sapiens
  misc_RNA (1)...(19): siRNA sense strand
ggaccuccaggaccaauug

SEQ ID NO: 21033 - RNA, 19 nt, Homo sapiens
  misc_RNA (1)...(19): siRNA sense strand
uguacacagugcccuuaua

SEQ ID NO: 21034 - RNA, 19 nt, Homo sapiens
  misc_RNA (1)...(19): siRNA sense strand
ugucaggugugcaugaaga

SEQ ID NO: 21035 - RNA, 19 nt, Homo sapiens
  misc_RNA (1)...(19): siRNA sense strand
gaaccaggucucaaaggau

SEQ ID NO: 21036 - RNA, 19 nt, Homo sapiens
  misc_RNA (1)...(19): siRNA sense strand
gaccaagguuuuccaggua

SEQ ID NO: 21037 - RNA, 19 nt, Homo sapiens
  misc_RNA (1)...(19): siRNA sense strand
uggccaggcuugaaaggaa

SEQ ID NO: 21038 - RNA, 19 nt, Homo sapiens
  misc_RNA (1)...(19): siRNA sense strand
gcagggacccaagggcuuu

SEQ ID NO: 21039 - RNA, 19 nt, Homo sapiens
  misc_RNA (1)...(19): siRNA sense strand
caugccagguucuaaagga

SEQ ID NO: 21040 - RNA, 19 nt, Homo sapiens
  misc_RNA (1)...(19): siRNA sense strand
ccuggcacacuuaagauua

SEQ ID NO: 21041 - RNA, 19 nt, Homo sapiens
  misc_RNA (1)...(19): siRNA sense strand
agagccagguuauucagaa

SEQ ID NO: 21042 - RNA, 19 nt, Homo sapiens
  misc_RNA (1)...(19): siRNA sense strand
gauaagggagagccagguu

SEQ ID NO: 21043 - RNA, 19 nt, Homo sapiens
  misc_RNA (1)...(19): siRNA sense strand
ggaccuagaggaccuaagg

SEQ ID NO: 21044 - RNA, 19 nt, Homo sapiens
  misc_RNA (1)...(19): siRNA sense strand
gcugucaggugugcaugaa

SEQ ID NO: 21045 - RNA, 19 nt, Homo sapiens
  misc_RNA (1)...(19): siRNA sense strand
gcaacaaagguucuaaagg

SEQ ID NO: 21046 - RNA, 19 nt, Homo sapiens
  misc_RNA (1)...(19): siRNA sense strand
gacccuggcacacuuaaga

SEQ ID NO: 21047 - RNA, 19 nt, Homo sapiens
  misc_RNA (1)...(19): siRNA sense strand
gggugcugcugguuugaaa

SEQ ID NO: 21048 - RNA, 19 nt, Homo sapiens
  misc_RNA (1)...(19): siRNA sense strand
uaagggagagccagguuau

SEQ ID NO: 21049 - RNA, 19 nt, Homo sapiens
  misc_RNA (1)...(19): siRNA sense strand
caagggcuuuccaggacuu

SEQ ID NO: 21050 - RNA, 19 nt, Homo sapiens
  misc_RNA (1)...(19): siRNA sense strand
ccaggaaucccaggaguug

SEQ ID NO: 21051 - RNA, 19 nt, Homo sapiens
  misc_RNA (1)...(19): siRNA sense strand
uggaaguccuggaucauca

SEQ ID NO: 21052 - RNA, 19 nt, Homo sapiens
  misc_RNA (1)...(19): siRNA sense strand
ccaacagaauauuaugaca

SEQ ID NO: 21053 - RNA, 19 nt, Homo sapiens
  misc_RNA (1)...(19): siRNA sense strand
gacauuggcccuccaggau

SEQ ID NO: 21054 - RNA, 19 nt, Homo sapiens
  misc_RNA (1)...(19): siRNA sense strand
agaccaggccucccaggua

SEQ ID NO: 21055 - RNA, 19 nt, Homo sapiens
  misc_RNA (1)...(19): siRNA sense strand
ggaccaggaacaccagguu

SEQ ID NO: 21056 - RNA, 19 nt, Homo sapiens
  misc_RNA (1)...(19): siRNA sense strand
gagaaagggcuuggaugga

SEQ ID NO: 21057 - RNA, 19 nt, Homo sapiens
  misc_RNA (1)...(19): siRNA sense strand
ggguuucccuggguuaaug

SEQ ID NO: 21058 - RNA, 19 nt, Homo sapiens
  misc_RNA (1)...(19): siRNA sense strand
gagguaagccaggcaagga

SEQ ID NO: 21059 - RNA, 19 nt, Homo sapiens
  misc_RNA (1)...(19): siRNA sense strand
ccagggaugccagguuuaa

SEQ ID NO: 21060 - RNA, 19 nt, Homo sapiens
  misc_RNA (1)...(19): siRNA sense strand
aggugaagauggagugauu

SEQ ID NO: 21061 - RNA, 19 nt, Homo sapiens
  misc_RNA (1)...(19): siRNA sense strand
ggacugccaggcuaucuag

SEQ ID NO: 21062 - RNA, 19 nt, Homo sapiens
  misc_RNA (1)...(19): siRNA sense strand
auaaguggauugccaggau

SEQ ID NO: 21063 - RNA, 19 nt, Homo sapiens
  misc_RNA (1)...(19): siRNA sense strand
ggaccaauggguauaagag

SEQ ID NO: 21064 - RNA, 19 nt, Homo sapiens
  misc_RNA (1)...(19): siRNA sense strand
ggaauuccaggucaucaag

SEQ ID NO: 21065 - RNA, 19 nt, Homo sapiens
  misc_RNA (1)...(19): siRNA sense strand
gaccaggaacaccagguuu

SEQ ID NO: 21066 - RNA, 19 nt, Homo sapiens
  misc_RNA (1)...(19): siRNA sense strand
cuccaggucuuccaggauu

SEQ ID NO: 21067 - RNA, 19 nt, Homo sapiens
  misc_RNA (1)...(19): siRNA sense strand
gaccaaggacgugauggaa

SEQ ID NO: 21068 - RNA, 19 nt, Homo sapiens
  misc_RNA (1)...(19): siRNA sense strand
caacaaagguucuaaagga

SEQ ID NO: 21069 - RNA, 19 nt, Homo sapiens
  misc_RNA (1)...(19): siRNA sense strand
gagaagauauagaacuuga

SEQ ID NO: 21070 - RNA, 19 nt, Homo sapiens
  misc_RNA (1)...(19): siRNA sense strand
caacaaggcagaagaggua

SEQ ID NO: 21071 - RNA, 19 nt, Homo sapiens
  misc_RNA (1)...(19): siRNA sense strand
agagauaucccacguaaua

SEQ ID NO: 21072 - RNA, 19 nt, Homo sapiens
  misc_RNA (1)...(19): siRNA sense strand
ccaaggacuuccaggcuua

SEQ ID NO: 21073 - RNA, 19 nt, Homo sapiens
  misc_RNA (1)...(19): siRNA sense strand
ccaaggacgugauggaauu

SEQ ID NO: 21074 - RNA, 19 nt, Homo sapiens
  misc_RNA (1)...(19): siRNA sense strand
gcagcuggcuugaaaggaa

SEQ ID NO: 21075 - RNA, 19 nt, Homo sapiens
  misc_RNA (1)...(19): siRNA sense strand
ucagagauaucccacguaa

SEQ ID NO: 21076 - RNA, 19 nt, Homo sapiens
  misc_RNA (1)...(19): siRNA sense strand
uauaagaggugaccaagga

SEQ ID NO: 21077 - RNA, 19 nt, Homo sapiens
  misc_RNA (1)...(19): siRNA sense strand
caaagaggauauccaggaa

SEQ ID NO: 21078 - RNA, 19 nt, Homo sapiens
  misc_RNA (1)...(19): siRNA sense strand
gaacaaggagauaaaggaa

SEQ ID NO: 21079 - RNA, 19 nt, Homo sapiens
  misc_RNA (1)...(19): siRNA sense strand
gaaaagacacugaagcuaa

SEQ ID NO: 21080 - RNA, 19 nt, Homo sapiens
  misc_RNA (1)...(19): siRNA sense strand
gaagauauagaacuugaug

SEQ ID NO: 21081 - RNA, 19 nt, Homo sapiens
  misc_RNA (1)...(19): siRNA sense strand
ccaccaggcucaagaggaa

SEQ ID NO: 21082 - RNA, 19 nt, Homo sapiens
  misc_RNA (1)...(19): siRNA sense strand
gaaagagugauaggacaua

SEQ ID NO: 21083 - RNA, 19 nt, Homo sapiens
  misc_RNA (1)...(19): siRNA sense strand
gaaagggcuuggauggaau

SEQ ID NO: 21084 - RNA, 19 nt, Homo sapiens
  misc_RNA (1)...(19): siRNA sense strand
agaaagggcuuggauggaa

SEQ ID NO: 21085 - RNA, 19 nt, Homo sapiens
  misc_RNA (1)...(19): siRNA sense strand
gaccaggccucccagguau

SEQ ID NO: 21086 - RNA, 19 nt, Homo sapiens
  misc_RNA (1)...(19): siRNA sense strand
guaaagggccagagaggaa

SEQ ID NO: 21087 - RNA, 19 nt, Homo sapiens
  misc_RNA (1)...(19): siRNA sense strand
cagcaaggguugugucugu

SEQ ID NO: 21088 - RNA, 19 nt, Homo sapiens
  misc_RNA (1)...(19): siRNA sense strand
acaaggagauaaaggaaau

SEQ ID NO: 21089 - RNA, 19 nt, Homo sapiens
  misc_RNA (1)...(19): siRNA sense strand
ggaacaaggagauaaagga

SEQ ID NO: 21090 - RNA, 19 nt, Homo sapiens
  misc_RNA (1)...(19): siRNA sense strand
ggaccaccaggaacaguua

SEQ ID NO: 21091 - RNA, 19 nt, Homo sapiens
  misc_RNA (1)...(19): siRNA sense strand
gaacaaaguaaugacagaa

SEQ ID NO: 21092 - RNA, 19 nt, Homo sapiens
  misc_RNA (1)...(19): siRNA sense strand
gaaagccuauuccaucaac

SEQ ID NO: 21093 - RNA, 19 nt, Homo sapiens
  misc_RNA (1)...(19): siRNA sense strand
caagggagaaccagcagua

SEQ ID NO: 21094 - RNA, 19 nt, Homo sapiens
  misc_RNA (1)...(19): siRNA sense strand
gagccuggguuaccuggaa

SEQ ID NO: 21095 - RNA, 19 nt, Homo sapiens
  misc_RNA (1)...(19): siRNA sense strand
auacaggucuuccaggauu

SEQ ID NO: 21096 - RNA, 19 nt, Homo sapiens
  misc_RNA (1)...(19): siRNA sense strand
ccacaggcauagaaggauu

SEQ ID NO: 21097 - RNA, 19 nt, Homo sapiens
  misc_RNA (1)...(19): siRNA sense strand
guacacagugcccuuauau

SEQ ID NO: 21098 - RNA, 19 nt, Homo sapiens
  misc_RNA (1)...(19): siRNA sense strand
ggaaaugaagggcuugaug

SEQ ID NO: 21099 - RNA, 19 nt, Homo sapiens
  misc_RNA (1)...(19): siRNA sense strand
ucaaaggauucgcaggaaa

SEQ ID NO: 21100 - RNA, 19 nt, Homo sapiens
  misc_RNA (1)...(19): siRNA sense strand
aaagggugcuccugcuaaa

SEQ ID NO: 21101 - RNA, 19 nt, Homo sapiens
  misc_RNA (1)...(19): siRNA sense strand
gaacccuggugcucaagga

SEQ ID NO: 21102 - RNA, 19 nt, Homo sapiens
  misc_RNA (1)...(19): siRNA sense strand
aggcuuaaauggauugaaa

SEQ ID NO: 21103 - RNA, 19 nt, Homo sapiens
  misc_RNA (1)...(19): siRNA sense strand
ggacuuccaggcuuaaaug

SEQ ID NO: 21104 - RNA, 19 nt, Homo sapiens
  misc_RNA (1)...(19): siRNA sense strand
ugugaaagcuggggaauua

SEQ ID NO: 21105 - RNA, 19 nt, Homo sapiens
  misc_RNA (1)...(19): siRNA sense strand
uaacagaacggaccucaag

SEQ ID NO: 21106 - RNA, 19 nt, Homo sapiens
  misc_RNA (1)...(19): siRNA sense strand
ccuauuccaucaacuguga

SEQ ID NO: 21107 - RNA, 19 nt, Homo sapiens
  misc_RNA (1)...(19): siRNA sense strand
gggauuuccuggagccauu

SEQ ID NO: 21108 - RNA, 19 nt, Homo sapiens
  misc_RNA (1)...(19): siRNA sense strand
aaagggagacccaggaauu

SEQ ID NO: 21109 - RNA, 19 nt, Homo sapiens
  misc_RNA (1)...(19): siRNA sense strand
gcaaggguugugucuguaa

SEQ ID NO: 21110 - RNA, 19 nt, Homo sapiens
  misc_RNA (1)...(19): siRNA sense strand
uaucuagggucuccaggaa

SEQ ID NO: 21111 - RNA, 19 nt, Homo sapiens
  misc_RNA (1)...(19): siRNA sense strand
cauuggcccuccaggauuu

SEQ ID NO: 21112 - RNA, 19 nt, Homo sapiens
  misc_RNA (1)...(19): siRNA sense strand
ggaaagaaaggagaaaugg

SEQ ID NO: 21113 - RNA, 19 nt, Homo sapiens
  misc_RNA (1)...(19): siRNA sense strand
aaagagugauaggacauaa

SEQ ID NO: 21114 - RNA, 19 nt, Homo sapiens
  misc_RNA (1)...(19): siRNA sense strand
uccagggagucauguaaua

SEQ ID NO: 21115 - RNA, 19 nt, Homo sapiens
  misc_RNA (1)...(19): siRNA sense strand
ggucugcccggugcaauua

SEQ ID NO: 21116 - RNA, 19 nt, Homo sapiens
  misc_RNA (1)...(19): siRNA sense strand
caaggguugugucuguaaa

SEQ ID NO: 21117 - RNA, 19 nt, Homo sapiens
  misc_RNA (1)...(19): siRNA sense strand
ucacuggguuguccuggaa

SEQ ID NO: 21118 - RNA, 19 nt, Homo sapiens
  misc_RNA (1)...(19): siRNA sense strand
agaaucauauggaucugaa

SEQ ID NO: 21119 - RNA, 19 nt, Homo sapiens
  misc_RNA (1)...(19): siRNA sense strand
ggaaagccagguccucaug

SEQ ID NO: 21120 - RNA, 19 nt, Homo sapiens
  misc_RNA (1)...(19): siRNA sense strand
aggcgcagcuggcuugaaa

SEQ ID NO: 21121 - RNA, 19 nt, Homo sapiens
  misc_RNA (1)...(19): siRNA sense strand
aagaggauauccaggaaau

SEQ ID NO: 21122 - RNA, 19 nt, Homo sapiens
  misc_RNA (1)...(19): siRNA sense strand
caaaggauucgcaggaaau

SEQ ID NO: 21123 - RNA, 19 nt, Homo sapiens
  misc_RNA (1)...(19): siRNA sense strand
aaccaggucucaaaggauu

SEQ ID NO: 21124 - RNA, 19 nt, Homo sapiens
  misc_RNA (1)...(19): siRNA sense strand
gggugaagauggcauuaag

SEQ ID NO: 21125 - RNA, 19 nt, Homo sapiens
  misc_RNA (1)...(19): siRNA sense strand
agaacaaaguaaugacaga

SEQ ID NO: 21126 - RNA, 19 nt, Homo sapiens
  misc_RNA (1)...(19): siRNA sense strand
ggagacccuggcacacuua

SEQ ID NO: 21127 - RNA, 19 nt, Homo sapiens
  misc_RNA (1)...(19): siRNA sense strand
uaaguggauugccaggauu

SEQ ID NO: 21128 - RNA, 19 nt, Homo sapiens
  misc_RNA (1)...(19): siRNA sense strand
agaaccaggucucaaagga

SEQ ID NO: 21129 - RNA, 19 nt, Homo sapiens
  misc_RNA (1)...(19): siRNA sense strand
ugauugggaugaugggauu

SEQ ID NO: 21130 - RNA, 19 nt, Homo sapiens
  misc_RNA (1)...(19): siRNA sense strand
uuacggacuugucggugua

SEQ ID NO: 21131 - RNA, 19 nt, Homo sapiens
  misc_RNA (1)...(19): siRNA sense strand
aggagaagauauagaacuu

SEQ ID NO: 21132 - RNA, 19 nt, Homo sapiens
  misc_RNA (1)...(19): siRNA sense strand
gggaaagaaaggagaaaug

SEQ ID NO: 21133 - RNA, 19 nt, Homo sapiens
  misc_RNA (1)...(19): siRNA sense strand
ccaggaacaguuauuguga

SEQ ID NO: 21134 - RNA, 19 nt, Homo sapiens
  misc_RNA (1)...(19): siRNA sense strand
gggcaugccagguucuaaa

SEQ ID NO: 21135 - RNA, 19 nt, Homo sapiens
  misc_RNA (1)...(19): siRNA sense strand
aaaagacacugaagcuaaa

SEQ ID NO: 21136 - RNA, 19 nt, Homo sapiens
  misc_RNA (1)...(19): siRNA sense strand
ggaccuccaggaccaauug

SEQ ID NO: 21137 - RNA, 19 nt, Homo sapiens
  misc_RNA (1)...(19): siRNA sense strand
uguacacagugcccuuaua

SEQ ID NO: 21138 - RNA, 19 nt, Homo sapiens
  misc_RNA (1)...(19): siRNA sense strand
acaaaguaaugacagaaca

SEQ ID NO: 21139 - RNA, 19 nt, Homo sapiens
  misc_RNA (1)...(19): siRNA sense strand
ugucaggugugcaugaaga

SEQ ID NO: 21140 - RNA, 19 nt, Homo sapiens
  misc_RNA (1)...(19): siRNA sense strand
gaaccaggucucaaaggau

SEQ ID NO: 21141 - RNA, 19 nt, Homo sapiens
  misc_RNA (1)...(19): siRNA sense strand
gaccaagguuuuccaggua

SEQ ID NO: 21142 - RNA, 19 nt, Homo sapiens
  misc_RNA (1)...(19): siRNA sense strand
uggccaggcuugaaaggaa

SEQ ID NO: 21143 - RNA, 19 nt, Homo sapiens
  misc_RNA (1)...(19): siRNA sense strand
gcagggacccaagggcuuu

SEQ ID NO: 21144 - RNA, 19 nt, Homo sapiens
  misc_RNA (1)...(19): siRNA sense strand
caugccagguucuaaagga

SEQ ID NO: 21145 - RNA, 19 nt, Homo sapiens
  misc_RNA (1)...(19): siRNA sense strand
ccuggcacacuuaagauua

SEQ ID NO: 21146 - RNA, 19 nt, Homo sapiens
  misc_RNA (1)...(19): siRNA sense strand
agagccagguuauucagaa

SEQ ID NO: 21147 - RNA, 19 nt, Homo sapiens
  misc_RNA (1)...(19): siRNA sense strand
gauaagggagagccagguu

SEQ ID NO: 21148 - RNA, 19 nt, Homo sapiens
  misc_RNA (1)...(19): siRNA sense strand
ggaccuagaggaccuaagg

SEQ ID NO: 21149 - RNA, 19 nt, Homo sapiens
  misc_RNA (1)...(19): siRNA sense strand
caagggcuuuccaggacuu

SEQ ID NO: 21150 - RNA, 19 nt, Homo sapiens
  misc_RNA (1)...(19): siRNA sense strand
gcugucaggugugcaugaa

SEQ ID NO: 21151 - RNA, 19 nt, Homo sapiens
  misc_RNA (1)...(19): siRNA sense strand
gcaacaaagguucuaaagg

SEQ ID NO: 21152 - RNA, 19 nt, Homo sapiens
  misc_RNA (1)...(19): siRNA sense strand
gacccuggcacacuuaaga

SEQ ID NO: 21153 - RNA, 19 nt, Homo sapiens
  misc_RNA (1)...(19): siRNA sense strand
gggugcugcugguuugaaa

SEQ ID NO: 21154 - RNA, 19 nt, Homo sapiens
  misc_RNA (1)...(19): siRNA sense strand
uaagggagagccagguuau

SEQ ID NO: 21155 - RNA, 19 nt, Homo sapiens
  misc_RNA (1)...(19): siRNA sense strand
ccaggaaucccaggaguug

SEQ ID NO: 21156 - RNA, 19 nt, Homo sapiens
  misc_RNA (1)...(19): siRNA sense strand
uggaaguccuggaucauca

SEQ ID NO: 21157 - RNA, 19 nt, Homo sapiens
  misc_RNA (1)...(19): siRNA sense strand
ccaacagaauauuaugaca

SEQ ID NO: 21158 - RNA, 19 nt, Homo sapiens
  misc_RNA (1)...(19): siRNA sense strand
gacauuggcccuccaggau

SEQ ID NO: 21159 - RNA, 19 nt, Homo sapiens
  misc_RNA (1)...(19): siRNA sense strand
agaccaggccucccaggua

SEQ ID NO: 21160 - RNA, 19 nt, Homo sapiens
  misc_RNA (1)...(19): siRNA sense strand
ggaccaggaacaccagguu

SEQ ID NO: 21161 - RNA, 19 nt, Homo sapiens
  misc_RNA (1)...(19): siRNA sense strand
gagaaagggcuuggaugga

SEQ ID NO: 21162 - RNA, 19 nt, Homo sapiens
  misc_RNA (1)...(19): siRNA sense strand
ggguuucccuggguuaaug

SEQ ID NO: 21163 - RNA, 19 nt, Homo sapiens
  misc_RNA (1)...(19): siRNA sense strand
cauccuaaagaacaaagua

SEQ ID NO: 21164 - RNA, 19 nt, Homo sapiens
  misc_RNA (1)...(19): siRNA sense strand
gagguaagccaggcaagga

SEQ ID NO: 21165 - RNA, 19 nt, Homo sapiens
  misc_RNA (1)...(19): siRNA sense strand
ccagggaugccagguuuaa

SEQ ID NO: 21166 - RNA, 19 nt, Homo sapiens
  misc_RNA (1)...(19): siRNA sense strand
aggugaagauggagugauu

SEQ ID NO: 21167 - RNA, 19 nt, Homo sapiens
  misc_RNA (1)...(19): siRNA sense strand
ggacugccaggcuaucuag

SEQ ID NO: 21168 - RNA, 19 nt, Homo sapiens
  misc_RNA (1)...(19): siRNA sense strand
caacaaagguucuaaagga

SEQ ID NO: 21169 - RNA, 19 nt, Homo sapiens
  misc_RNA (1)...(19): siRNA sense strand
gagaagauauagaacuuga

SEQ ID NO: 21170 - RNA, 19 nt, Homo sapiens
  misc_RNA (1)...(19): siRNA sense strand
caacaaggcagaagaggua

SEQ ID NO: 21171 - RNA, 19 nt, Homo sapiens
  misc_RNA (1)...(19): siRNA sense strand
agagauaucccacguaaua

SEQ ID NO: 21172 - RNA, 19 nt, Homo sapiens
  misc_RNA (1)...(19): siRNA sense strand
ccaaggacuuccaggcuua

SEQ ID NO: 21173 - RNA, 19 nt, Homo sapiens
  misc_RNA (1)...(19): siRNA sense strand
ccaaggacgugauggaauu

SEQ ID NO: 21174 - RNA, 19 nt, Homo sapiens
  misc_RNA (1)...(19): siRNA sense strand
gcagcuggcuugaaaggaa

SEQ ID NO: 21175 - RNA, 19 nt, Homo sapiens
  misc_RNA (1)...(19): siRNA sense strand
ucagagauaucccacguaa

SEQ ID NO: 21176 - RNA, 19 nt, Homo sapiens
  misc_RNA (1)...(19): siRNA sense strand
uauaagaggugaccaagga

SEQ ID NO: 21177 - RNA, 19 nt, Homo sapiens
  misc_RNA (1)...(19): siRNA sense strand
caaagaggauauccaggaa

SEQ ID NO: 21178 - RNA, 19 nt, Homo sapiens
  misc_RNA (1)...(19): siRNA sense strand
gaacaaggagauaaaggaa

SEQ ID NO: 21179 - RNA, 19 nt, Homo sapiens
  misc_RNA (1)...(19): siRNA sense strand
gaagauauagaacuugaug

SEQ ID NO: 21180 - RNA, 19 nt, Homo sapiens
  misc_RNA (1)...(19): siRNA sense strand
ccaccaggcucaagaggaa

SEQ ID NO: 21181 - RNA, 19 nt, Homo sapiens
  misc_RNA (1)...(19): siRNA sense strand
gaaagagugauaggacaua

SEQ ID NO: 21182 - RNA, 19 nt, Homo sapiens
  misc_RNA (1)...(19): siRNA sense strand
gaaagggcuuggauggaau

SEQ ID NO: 21183 - RNA, 19 nt, Homo sapiens
  misc_RNA (1)...(19): siRNA sense strand
agaaagggcuuggauggaa

SEQ ID NO: 21184 - RNA, 19 nt, Homo sapiens
  misc_RNA (1)...(19): siRNA sense strand
gaccaggccucccagguau

SEQ ID NO: 21185 - RNA, 19 nt, Homo sapiens
  misc_RNA (1)...(19): siRNA sense strand
guaaagggccagagaggaa

SEQ ID NO: 21186 - RNA, 19 nt, Homo sapiens
  misc_RNA (1)...(19): siRNA sense strand
cagcaaggguugugucugu

SEQ ID NO: 21187 - RNA, 19 nt, Homo sapiens
  misc_RNA (1)...(19): siRNA sense strand
acaaggagauaaaggaaau

SEQ ID NO: 21188 - RNA, 19 nt, Homo sapiens
  misc_RNA (1)...(19): siRNA sense strand
ggaacaaggagauaaagga

SEQ ID NO: 21189 - RNA, 19 nt, Homo sapiens
  misc_RNA (1)...(19): siRNA sense strand
ggaccaccaggaacaguua

SEQ ID NO: 21190 - RNA, 19 nt, Homo sapiens
  misc_RNA (1)...(19): siRNA sense strand
caagggagaaccagcagua

SEQ ID NO: 21191 - RNA, 19 nt, Homo sapiens
  misc_RNA (1)...(19): siRNA sense strand
gagccuggguuaccuggaa

SEQ ID NO: 21192 - RNA, 19 nt, Homo sapiens
  misc_RNA (1)...(19): siRNA sense strand
auacaggucuuccaggauu

SEQ ID NO: 21193 - RNA, 19 nt, Homo sapiens
  misc_RNA (1)...(19): siRNA sense strand
ccacaggcauagaaggauu

SEQ ID NO: 21194 - RNA, 19 nt, Homo sapiens
  misc_RNA (1)...(19): siRNA sense strand
guacacagugcccuuauau

SEQ ID NO: 21195 - RNA, 19 nt, Homo sapiens
  misc_RNA (1)...(19): siRNA sense strand
ggaaaugaagggcuugaug

SEQ ID NO: 21196 - RNA, 19 nt, Homo sapiens
  misc_RNA (1)...(19): siRNA sense strand
ucaaaggauucgcaggaaa

SEQ ID NO: 21197 - RNA, 19 nt, Homo sapiens
  misc_RNA (1)...(19): siRNA sense strand
aaagggugcuccugcuaaa

SEQ ID NO: 21198 - RNA, 19 nt, Homo sapiens
  misc_RNA (1)...(19): siRNA sense strand
gaacccuggugcucaagga

SEQ ID NO: 21199 - RNA, 19 nt, Homo sapiens
  misc_RNA (1)...(19): siRNA sense strand
aggcuuaaauggauugaaa

SEQ ID NO: 21200 - RNA, 19 nt, Homo sapiens
  misc_RNA (1)...(19): siRNA sense strand
ggacuuccaggcuuaaaug

SEQ ID NO: 21201 - RNA, 19 nt, Homo sapiens
  misc_RNA (1)...(19): siRNA sense strand
uaacagaacggaccucaag

SEQ ID NO: 21202 - RNA, 19 nt, Homo sapiens
  misc_RNA (1)...(19): siRNA sense strand
gggauuuccuggagccauu

SEQ ID NO: 21203 - RNA, 19 nt, Homo sapiens
  misc_RNA (1)...(19): siRNA sense strand
aaagggagacccaggaauu

SEQ ID NO: 21204 - RNA, 19 nt, Homo sapiens
  misc_RNA (1)...(19): siRNA sense strand
gcaaggguugugucuguaa

SEQ ID NO: 21205 - RNA, 19 nt, Homo sapiens
  misc_RNA (1)...(19): siRNA sense strand
uaucuagggucuccaggaa

SEQ ID NO: 21206 - RNA, 19 nt, Homo sapiens
  misc_RNA (1)...(19): siRNA sense strand
cauuggcccuccaggauuu

SEQ ID NO: 21207 - RNA, 19 nt, Homo sapiens
  misc_RNA (1)...(19): siRNA sense strand
ggaaagaaaggagaaaugg

SEQ ID NO: 21208 - RNA, 19 nt, Homo sapiens
  misc_RNA (1)...(19): siRNA sense strand
aaagagugauaggacauaa

SEQ ID NO: 21209 - RNA, 19 nt, Homo sapiens
  misc_RNA (1)...(19): siRNA sense strand
uccagggagucauguaaua

SEQ ID NO: 21210 - RNA, 19 nt, Homo sapiens
  misc_RNA (1)...(19): siRNA sense strand
ggucugcccggugcaauua

SEQ ID NO: 21211 - RNA, 19 nt, Homo sapiens
  misc_RNA (1)...(19): siRNA sense strand
caaggguugugucuguaaa

SEQ ID NO: 21212 - RNA, 19 nt, Homo sapiens
  misc_RNA (1)...(19): siRNA sense strand
ucacuggguuguccuggaa

SEQ ID NO: 21213 - RNA, 19 nt, Homo sapiens
  misc_RNA (1)...(19): siRNA sense strand
agaaucauauggaucugaa

SEQ ID NO: 21214 - RNA, 19 nt, Homo sapiens
  misc_RNA (1)...(19): siRNA sense strand
ggaaagccagguccucaug

SEQ ID NO: 21215 - RNA, 19 nt, Homo sapiens
  misc_RNA (1)...(19): siRNA sense strand
aggcgcagcuggcuugaaa

SEQ ID NO: 21216 - RNA, 19 nt, Homo sapiens
  misc_RNA (1)...(19): siRNA sense strand
aagaggauauccaggaaau

SEQ ID NO: 21217 - RNA, 19 nt, Homo sapiens
  misc_RNA (1)...(19): siRNA sense strand
caaaggauucgcaggaaau

SEQ ID NO: 21218 - RNA, 19 nt, Homo sapiens
  misc_RNA (1)...(19): siRNA sense strand
aaccaggucucaaaggauu

SEQ ID NO: 21219 - RNA, 19 nt, Homo sapiens
  misc_RNA (1)...(19): siRNA sense strand
uuacggacuugucggugua

SEQ ID NO: 21220 - RNA, 19 nt, Homo sapiens
  misc_RNA (1)...(19): siRNA sense strand
ggagacccuggcacacuua

SEQ ID NO: 21221 - RNA, 19 nt, Homo sapiens
  misc_RNA (1)...(19): siRNA sense strand
agaaccaggucucaaagga

SEQ ID NO: 21222 - RNA, 19 nt, Homo sapiens
  misc_RNA (1)...(19): siRNA sense strand
ugauugggaugaugggauu

SEQ ID NO: 21223 - RNA, 19 nt, Homo sapiens
  misc_RNA (1)...(19): siRNA sense strand
gggugaagauggcauuaag

SEQ ID NO: 21224 - RNA, 19 nt, Homo sapiens
  misc_RNA (1)...(19): siRNA sense strand
uaaguggauugccaggauu

SEQ ID NO: 21225 - RNA, 19 nt, Homo sapiens
  misc_RNA (1)...(19): siRNA sense strand
aggagaagauauagaacuu

SEQ ID NO: 21226 - RNA, 19 nt, Homo sapiens
  misc_RNA (1)...(19): siRNA sense strand
gggaaagaaaggagaaaug

SEQ ID NO: 21227 - RNA, 19 nt, Homo sapiens
  misc_RNA (1)...(19): siRNA sense strand
ccaggaacaguuauuguga

SEQ ID NO: 21228 - RNA, 19 nt, Homo sapiens
  misc_RNA (1)...(19): siRNA sense strand
gggcaugccagguucuaaa

SEQ ID NO: 21229 - RNA, 19 nt, Homo sapiens
  misc_RNA (1)...(19): siRNA sense strand
ggaccuccaggaccaauug

SEQ ID NO: 21230 - RNA, 19 nt, Homo sapiens
  misc_RNA (1)...(19): siRNA sense strand
uguacacagugcccuuaua

SEQ ID NO: 21231 - RNA, 19 nt, Homo sapiens
  misc_RNA (1)...(19): siRNA sense strand
gaaccaggucucaaaggau

SEQ ID NO: 21232 - RNA, 19 nt, Homo sapiens
  misc_RNA (1)...(19): siRNA sense strand
gaccaagguuuuccaggua

SEQ ID NO: 21233 - RNA, 19 nt, Homo sapiens
  misc_RNA (1)...(19): siRNA sense strand
uggccaggcuugaaaggaa

SEQ ID NO: 21234 - RNA, 19 nt, Homo sapiens
  misc_RNA (1)...(19): siRNA sense strand
gcagggacccaagggcuuu

SEQ ID NO: 21235 - RNA, 19 nt, Homo sapiens
  misc_RNA (1)...(19): siRNA sense strand
caugccagguucuaaagga

SEQ ID NO: 21236 - RNA, 19 nt, Homo sapiens
  misc_RNA (1)...(19): siRNA sense strand
ccuggcacacuuaagauua

SEQ ID NO: 21237 - RNA, 19 nt, Homo sapiens
  misc_RNA (1)...(19): siRNA sense strand
agagccagguuauucagaa

SEQ ID NO: 21238 - RNA, 19 nt, Homo sapiens
  misc_RNA (1)...(19): siRNA sense strand
gauaagggagagccagguu

SEQ ID NO: 21239 - RNA, 19 nt, Homo sapiens
  misc_RNA (1)...(19): siRNA sense strand
ggaccuagaggaccuaagg

SEQ ID NO: 21240 - RNA, 19 nt, Homo sapiens
  misc_RNA (1)...(19): siRNA sense strand
gcaacaaagguucuaaagg

SEQ ID NO: 21241 - RNA, 19 nt, Homo sapiens
  misc_RNA (1)...(19): siRNA sense strand
gacccuggcacacuuaaga

SEQ ID NO: 21242 - RNA, 19 nt, Homo sapiens
  misc_RNA (1)...(19): siRNA sense strand
uaagggagagccagguuau

SEQ ID NO: 21243 - RNA, 19 nt, Homo sapiens
  misc_RNA (1)...(19): siRNA sense strand
caagggcuuuccaggacuu

SEQ ID NO: 21244 - RNA, 19 nt, Homo sapiens
  misc_RNA (1)...(19): siRNA sense strand
ccaggaaucccaggaguug

SEQ ID NO: 21245 - RNA, 19 nt, Homo sapiens
  misc_RNA (1)...(19): siRNA sense strand
uggaaguccuggaucauca

SEQ ID NO: 21246 - RNA, 19 nt, Homo sapiens
  misc_RNA (1)...(19): siRNA sense strand
ccaacagaauauuaugaca

SEQ ID NO: 21247 - RNA, 19 nt, Homo sapiens
  misc_RNA (1)...(19): siRNA sense strand
gggugcugcugguuugaaa

SEQ ID NO: 21248 - RNA, 19 nt, Homo sapiens
  misc_RNA (1)...(19): siRNA sense strand
gacauuggcccuccaggau

SEQ ID NO: 21249 - RNA, 19 nt, Homo sapiens
  misc_RNA (1)...(19): siRNA sense strand
agaccaggccucccaggua

SEQ ID NO: 21250 - RNA, 19 nt, Homo sapiens
  misc_RNA (1)...(19): siRNA sense strand
ggaccaggaacaccagguu

SEQ ID NO: 21251 - RNA, 19 nt, Homo sapiens
  misc_RNA (1)...(19): siRNA sense strand
gagaaagggcuuggaugga

SEQ ID NO: 21252 - RNA, 19 nt, Homo sapiens
  misc_RNA (1)...(19): siRNA sense strand
ggguuucccuggguuaaug

SEQ ID NO: 21253 - RNA, 19 nt, Homo sapiens
  misc_RNA (1)...(19): siRNA sense strand
gagguaagccaggcaagga

SEQ ID NO: 21254 - RNA, 19 nt, Homo sapiens
  misc_RNA (1)...(19): siRNA sense strand
ccagggaugccagguuuaa

SEQ ID NO: 21255 - RNA, 19 nt, Homo sapiens
  misc_RNA (1)...(19): siRNA sense strand
aggugaagauggagugauu

SEQ ID NO: 21256 - RNA, 19 nt, Homo sapiens
  misc_RNA (1)...(19): siRNA sense strand
ggacugccaggcuaucuag

SEQ ID NO: 21257 - RNA, 19 nt, Homo sapiens
  misc_RNA (1)...(19): siRNA sense strand
auaaguggauugccaggau

SEQ ID NO: 21258 - RNA, 19 nt, Homo sapiens
  misc_RNA (1)...(19): siRNA sense strand
ggaccaauggguauaagag

SEQ ID NO: 21259 - RNA, 19 nt, Homo sapiens
  misc_RNA (1)...(19): siRNA sense strand
ggaauuccaggucaucaag

SEQ ID NO: 21260 - RNA, 19 nt, Homo sapiens
  misc_RNA (1)...(19): siRNA sense strand
gaccaggaacaccagguuu

SEQ ID NO: 21261 - RNA, 19 nt, Homo sapiens
  misc_RNA (1)...(19): siRNA sense strand
ggaaaacccggaaaagaug

SEQ ID NO: 21262 - RNA, 19 nt, Homo sapiens
  misc_RNA (1)...(19): siRNA sense strand
gaccaaggacgugauggaa

SEQ ID NO: 21263 - RNA, 19 nt, Homo sapiens
  misc_RNA (1)...(19): siRNA sense strand
cuccaggucuuccaggauu

SEQ ID NO: 21264 - RNA, 19 nt, Homo sapiens
  misc_RNA (1)...(19): siRNA sense strand
cgggugauaugggaaagaa

SEQ ID NO: 21265 - RNA, 19 nt, Homo sapiens
  misc_RNA (1)...(19): siRNA sense strand
ggagaagauauagaacuug

SEQ ID NO: 21266 - RNA, 19 nt, Homo sapiens
  misc_RNA (1)...(19): siRNA sense strand
ggagagcucaguguuucaa

SEQ ID NO: 21267 - RNA, 19 nt, Homo sapiens
  misc_RNA (1)...(19): siRNA sense strand
uggcccaccuggacauuug

SEQ ID NO: 21268 - RNA, 19 nt, Homo sapiens
  misc_RNA (1)...(19): siRNA sense strand
caacaaagguucuaaagga

SEQ ID NO: 21269 - RNA, 19 nt, Homo sapiens
  misc_RNA (1)...(19): siRNA sense strand
gagaagauauagaacuuga

SEQ ID NO: 21270 - RNA, 19 nt, Homo sapiens
  misc_RNA (1)...(19): siRNA sense strand
caacaaggcagaagaggua

SEQ ID NO: 21271 - RNA, 19 nt, Homo sapiens
  misc_RNA (1)...(19): siRNA sense strand
agagauaucccacguaaua

SEQ ID NO: 21272 - RNA, 19 nt, Homo sapiens
  misc_RNA (1)...(19): siRNA sense strand
ccaaggacuuccaggcuua

SEQ ID NO: 21273 - RNA, 19 nt, Homo sapiens
  misc_RNA (1)...(19): siRNA sense strand
ccaaggacgugauggaauu

SEQ ID NO: 21274 - RNA, 19 nt, Homo sapiens
  misc_RNA (1)...(19): siRNA sense strand
gcagcuggcuugaaaggaa

SEQ ID NO: 21275 - RNA, 19 nt, Homo sapiens
  misc_RNA (1)...(19): siRNA sense strand
ucagagauaucccacguaa

SEQ ID NO: 21276 - RNA, 19 nt, Homo sapiens
  misc_RNA (1)...(19): siRNA sense strand
uauaagaggugaccaagga

SEQ ID NO: 21277 - RNA, 19 nt, Homo sapiens
  misc_RNA (1)...(19): siRNA sense strand
caaagaggauauccaggaa

SEQ ID NO: 21278 - RNA, 19 nt, Homo sapiens
  misc_RNA (1)...(19): siRNA sense strand
gaacaaggagauaaaggaa

SEQ ID NO: 21279 - RNA, 19 nt, Homo sapiens
  misc_RNA (1)...(19): siRNA sense strand
gaagauauagaacuugaug

SEQ ID NO: 21280 - RNA, 19 nt, Homo sapiens
  misc_RNA (1)...(19): siRNA sense strand
ccaccaggcucaagaggaa

SEQ ID NO: 21281 - RNA, 19 nt, Homo sapiens
  misc_RNA (1)...(19): siRNA sense strand
gaaagagugauaggacaua

SEQ ID NO: 21282 - RNA, 19 nt, Homo sapiens
  misc_RNA (1)...(19): siRNA sense strand
gaaagggcuuggauggaau

SEQ ID NO: 21283 - RNA, 19 nt, Homo sapiens
  misc_RNA (1)...(19): siRNA sense strand
agaaagggcuuggauggaa

SEQ ID NO: 21284 - RNA, 19 nt, Homo sapiens
  misc_RNA (1)...(19): siRNA sense strand
gaccaggccucccagguau

SEQ ID NO: 21285 - RNA, 19 nt, Homo sapiens
  misc_RNA (1)...(19): siRNA sense strand
guaaagggccagagaggaa

SEQ ID NO: 21286 - RNA, 19 nt, Homo sapiens
  misc_RNA (1)...(19): siRNA sense strand
cagcaaggguugugucugu

SEQ ID NO: 21287 - RNA, 19 nt, Homo sapiens
  misc_RNA (1)...(19): siRNA sense strand
acaaggagauaaaggaaau

SEQ ID NO: 21288 - RNA, 19 nt, Homo sapiens
  misc_RNA (1)...(19): siRNA sense strand
ggaacaaggagauaaagga

SEQ ID NO: 21289 - RNA, 19 nt, Homo sapiens
  misc_RNA (1)...(19): siRNA sense strand
ggaccaccaggaacaguua

SEQ ID NO: 21290 - RNA, 19 nt, Homo sapiens
  misc_RNA (1)...(19): siRNA sense strand
caagggagaaccagcagua

SEQ ID NO: 21291 - RNA, 19 nt, Homo sapiens
  misc_RNA (1)...(19): siRNA sense strand
gagccuggguuaccuggaa

SEQ ID NO: 21292 - RNA, 19 nt, Homo sapiens
  misc_RNA (1)...(19): siRNA sense strand
auacaggucuuccaggauu

SEQ ID NO: 21293 - RNA, 19 nt, Homo sapiens
  misc_RNA (1)...(19): siRNA sense strand
ccacaggcauagaaggauu

SEQ ID NO: 21294 - RNA, 19 nt, Homo sapiens
  misc_RNA (1)...(19): siRNA sense strand
guacacagugcccuuauau

SEQ ID NO: 21295 - RNA, 19 nt, Homo sapiens
  misc_RNA (1)...(19): siRNA sense strand
ggaaaugaagggcuugaug

SEQ ID NO: 21296 - RNA, 19 nt, Homo sapiens
  misc_RNA (1)...(19): siRNA sense strand
ucaaaggauucgcaggaaa

SEQ ID NO: 21297 - RNA, 19 nt, Homo sapiens
  misc_RNA (1)...(19): siRNA sense strand
aaagggugcuccugcuaaa

SEQ ID NO: 21298 - RNA, 19 nt, Homo sapiens
  misc_RNA (1)...(19): siRNA sense strand
gaacccuggugcucaagga

SEQ ID NO: 21299 - RNA, 19 nt, Homo sapiens
  misc_RNA (1)...(19): siRNA sense strand
aggcuuaaauggauugaaa

SEQ ID NO: 21300 - RNA, 19 nt, Homo sapiens
  misc_RNA (1)...(19): siRNA sense strand
ggacuuccaggcuuaaaug

SEQ ID NO: 21301 - RNA, 19 nt, Homo sapiens
  misc_RNA (1)...(19): siRNA sense strand
uaacagaacggaccucaag

SEQ ID NO: 21302 - RNA, 19 nt, Homo sapiens
  misc_RNA (1)...(19): siRNA sense strand
gggauuuccuggagccauu

SEQ ID NO: 21303 - RNA, 19 nt, Homo sapiens
  misc_RNA (1)...(19): siRNA sense strand
aaagggagacccaggaauu

SEQ ID NO: 21304 - RNA, 19 nt, Homo sapiens
  misc_RNA (1)...(19): siRNA sense strand
gcaaggguugugucuguaa

SEQ ID NO: 21305 - RNA, 19 nt, Homo sapiens
  misc_RNA (1)...(19): siRNA sense strand
uaucuagggucuccaggaa

SEQ ID NO: 21306 - RNA, 19 nt, Homo sapiens
  misc_RNA (1)...(19): siRNA sense strand
cauuggcccuccaggauuu

SEQ ID NO: 21307 - RNA, 19 nt, Homo sapiens
  misc_RNA (1)...(19): siRNA sense strand
ggaaagaaaggagaaaugg

SEQ ID NO: 21308 - RNA, 19 nt, Homo sapiens
  misc_RNA (1)...(19): siRNA sense strand
aaagagugauaggacauaa

SEQ ID NO: 21309 - RNA, 19 nt, Homo sapiens
  misc_RNA (1)...(19): siRNA sense strand
uccagggagucauguaaua

SEQ ID NO: 21310 - RNA, 19 nt, Homo sapiens
  misc_RNA (1)...(19): siRNA sense strand
ggucugcccggugcaauua

SEQ ID NO: 21311 - RNA, 19 nt, Homo sapiens
  misc_RNA (1)...(19): siRNA sense strand
caaggguugugucuguaaa

SEQ ID NO: 21312 - RNA, 19 nt, Homo sapiens
  misc_RNA (1)...(19): siRNA sense strand
ucacuggguuguccuggaa

SEQ ID NO: 21313 - RNA, 19 nt, Homo sapiens
  misc_RNA (1)...(19): siRNA sense strand
agaaucauauggaucugaa

SEQ ID NO: 21314 - RNA, 19 nt, Homo sapiens
  misc_RNA (1)...(19): siRNA sense strand
ggaaagccagguccucaug

SEQ ID NO: 21315 - RNA, 19 nt, Homo sapiens
  misc_RNA (1)...(19): siRNA sense strand
aggcgcagcuggcuugaaa

SEQ ID NO: 21316 - RNA, 19 nt, Homo sapiens
  misc_RNA (1)...(19): siRNA sense strand
aagaggauauccaggaaau

SEQ ID NO: 21317 - RNA, 19 nt, Homo sapiens
  misc_RNA (1)...(19): siRNA sense strand
caaaggauucgcaggaaau

SEQ ID NO: 21318 - RNA, 19 nt, Homo sapiens
  misc_RNA (1)...(19): siRNA sense strand
aaccaggucucaaaggauu

SEQ ID NO: 21319 - RNA, 19 nt, Homo sapiens
  misc_RNA (1)...(19): siRNA sense strand
uuacggacuugucggugua

SEQ ID NO: 21320 - RNA, 19 nt, Homo sapiens
  misc_RNA (1)...(19): siRNA sense strand
ggagacccuggcacacuua

SEQ ID NO: 21321 - RNA, 19 nt, Homo sapiens
  misc_RNA (1)...(19): siRNA sense strand
agaaccaggucucaaagga

SEQ ID NO: 21322 - RNA, 19 nt, Homo sapiens
  misc_RNA (1)...(19): siRNA sense strand
ugauugggaugaugggauu

SEQ ID NO: 21323 - RNA, 19 nt, Homo sapiens
  misc_RNA (1)...(19): siRNA sense strand
gggugaagauggcauuaag

SEQ ID NO: 21324 - RNA, 19 nt, Homo sapiens
  misc_RNA (1)...(19): siRNA sense strand
uaaguggauugccaggauu

SEQ ID NO: 21325 - RNA, 19 nt, Homo sapiens
  misc_RNA (1)...(19): siRNA sense strand
aggagaagauauagaacuu

SEQ ID NO: 21326 - RNA, 19 nt, Homo sapiens
  misc_RNA (1)...(19): siRNA sense strand
gggaaagaaaggagaaaug

SEQ ID NO: 21327 - RNA, 19 nt, Homo sapiens
  misc_RNA (1)...(19): siRNA sense strand
ccaggaacaguuauuguga

SEQ ID NO: 21328 - RNA, 19 nt, Homo sapiens
  misc_RNA (1)...(19): siRNA sense strand
gggcaugccagguucuaaa

SEQ ID NO: 21329 - RNA, 19 nt, Homo sapiens
  misc_RNA (1)...(19): siRNA sense strand
ggaccuccaggaccaauug

SEQ ID NO: 21330 - RNA, 19 nt, Homo sapiens
  misc_RNA (1)...(19): siRNA sense strand
uguacacagugcccuuaua

SEQ ID NO: 21331 - RNA, 19 nt, Homo sapiens
  misc_RNA (1)...(19): siRNA sense strand
gaaccaggucucaaaggau

SEQ ID NO: 21332 - RNA, 19 nt, Homo sapiens
  misc_RNA (1)...(19): siRNA sense strand
gaccaagguuuuccaggua

SEQ ID NO: 21333 - RNA, 19 nt, Homo sapiens
  misc_RNA (1)...(19): siRNA sense strand
uggccaggcuugaaaggaa

SEQ ID NO: 21334 - RNA, 19 nt, Homo sapiens
  misc_RNA (1)...(19): siRNA sense strand
gcagggacccaagggcuuu

SEQ ID NO: 21335 - RNA, 19 nt, Homo sapiens
  misc_RNA (1)...(19): siRNA sense strand
caugccagguucuaaagga

SEQ ID NO: 21336 - RNA, 19 nt, Homo sapiens
  misc_RNA (1)...(19): siRNA sense strand
ccuggcacacuuaagauua

SEQ ID NO: 21337 - RNA, 19 nt, Homo sapiens
  misc_RNA (1)...(19): siRNA sense strand
agagccagguuauucagaa

SEQ ID NO: 21338 - RNA, 19 nt, Homo sapiens
  misc_RNA (1)...(19): siRNA sense strand
gauaagggagagccagguu

SEQ ID NO: 21339 - RNA, 19 nt, Homo sapiens
  misc_RNA (1)...(19): siRNA sense strand
ggaccuagaggaccuaagg

SEQ ID NO: 21340 - RNA, 19 nt, Homo sapiens
  misc_RNA (1)...(19): siRNA sense strand
gcaacaaagguucuaaagg

SEQ ID NO: 21341 - RNA, 19 nt, Homo sapiens
  misc_RNA (1)...(19): siRNA sense strand
gacccuggcacacuuaaga

SEQ ID NO: 21342 - RNA, 19 nt, Homo sapiens
  misc_RNA (1)...(19): siRNA sense strand
uaagggagagccagguuau

SEQ ID NO: 21343 - RNA, 19 nt, Homo sapiens
  misc_RNA (1)...(19): siRNA sense strand
caagggcuuuccaggacuu

SEQ ID NO: 21344 - RNA, 19 nt, Homo sapiens
  misc_RNA (1)...(19): siRNA sense strand
ccaggaaucccaggaguug

SEQ ID NO: 21345 - RNA, 19 nt, Homo sapiens
  misc_RNA (1)...(19): siRNA sense strand
uggaaguccuggaucauca

SEQ ID NO: 21346 - RNA, 19 nt, Homo sapiens
  misc_RNA (1)...(19): siRNA sense strand
ccaacagaauauuaugaca

SEQ ID NO: 21347 - RNA, 19 nt, Homo sapiens
  misc_RNA (1)...(19): siRNA sense strand
gggugcugcugguuugaaa

SEQ ID NO: 21348 - RNA, 19 nt, Homo sapiens
  misc_RNA (1)...(19): siRNA sense strand
gacauuggcccuccaggau

SEQ ID NO: 21349 - RNA, 19 nt, Homo sapiens
  misc_RNA (1)...(19): siRNA sense strand
agaccaggccucccaggua

SEQ ID NO: 21350 - RNA, 19 nt, Homo sapiens
  misc_RNA (1)...(19): siRNA sense strand
ggaccaggaacaccagguu

SEQ ID NO: 21351 - RNA, 19 nt, Homo sapiens
  misc_RNA (1)...(19): siRNA sense strand
gagaaagggcuuggaugga

SEQ ID NO: 21352 - RNA, 19 nt, Homo sapiens
  misc_RNA (1)...(19): siRNA sense strand
ggguuucccuggguuaaug

SEQ ID NO: 21353 - RNA, 19 nt, Homo sapiens
  misc_RNA (1)...(19): siRNA sense strand
gagguaagccaggcaagga

SEQ ID NO: 21354 - RNA, 19 nt, Homo sapiens
  misc_RNA (1)...(19): siRNA sense strand
ccagggaugccagguuuaa

SEQ ID NO: 21355 - RNA, 19 nt, Homo sapiens
  misc_RNA (1)...(19): siRNA sense strand
aggugaagauggagugauu

SEQ ID NO: 21356 - RNA, 19 nt, Homo sapiens
  misc_RNA (1)...(19): siRNA sense strand
ggacugccaggcuaucuag

SEQ ID NO: 21357 - RNA, 19 nt, Homo sapiens
  misc_RNA (1)...(19): siRNA sense strand
auaaguggauugccaggau

SEQ ID NO: 21358 - RNA, 19 nt, Homo sapiens
  misc_RNA (1)...(19): siRNA sense strand
ggaccaauggguauaagag

SEQ ID NO: 21359 - RNA, 19 nt, Homo sapiens
  misc_RNA (1)...(19): siRNA sense strand
ggaauuccaggucaucaag

SEQ ID NO: 21360 - RNA, 19 nt, Homo sapiens
  misc_RNA (1)...(19): siRNA sense strand
gaccaggaacaccagguuu

SEQ ID NO: 21361 - RNA, 19 nt, Homo sapiens
  misc_RNA (1)...(19): siRNA sense strand
ggaaaacccggaaaagaug

SEQ ID NO: 21362 - RNA, 19 nt, Homo sapiens
  misc_RNA (1)...(19): siRNA sense strand
gaccaaggacgugauggaa

SEQ ID NO: 21363 - RNA, 19 nt, Homo sapiens
  misc_RNA (1)...(19): siRNA sense strand
cuccaggucuuccaggauu

SEQ ID NO: 21364 - RNA, 19 nt, Homo sapiens
  misc_RNA (1)...(19): siRNA sense strand
cgggugauaugggaaagaa

SEQ ID NO: 21365 - RNA, 19 nt, Homo sapiens
  misc_RNA (1)...(19): siRNA sense strand
ggagaagauauagaacuug

SEQ ID NO: 21366 - RNA, 19 nt, Homo sapiens
  misc_RNA (1)...(19): siRNA sense strand
ggagagcucaguguuucaa

SEQ ID NO: 21367 - RNA, 19 nt, Homo sapiens
  misc_RNA (1)...(19): siRNA sense strand
uggcccaccuggacauuug

SEQ ID NO: 21368 - RNA, 19 nt, Homo sapiens
  misc_RNA (1)...(19): siRNA sense strand
caacaaagguucuaaagga

SEQ ID NO: 21369 - RNA, 19 nt, Homo sapiens
  misc_RNA (1)...(19): siRNA sense strand
gagaagauauagaacuuga

SEQ ID NO: 21370 - RNA, 19 nt, Homo sapiens
  misc_RNA (1)...(19): siRNA sense strand
caacaaggcagaagaggua

SEQ ID NO: 21371 - RNA, 19 nt, Homo sapiens
  misc_RNA (1)...(19): siRNA sense strand
agagauaucccacguaaua

SEQ ID NO: 21372 - RNA, 19 nt, Homo sapiens
  misc_RNA (1)...(19): siRNA sense strand
ccaaggacuuccaggcuua

SEQ ID NO: 21373 - RNA, 19 nt, Homo sapiens
  misc_RNA (1)...(19): siRNA sense strand
ccaaggacgugauggaauu

SEQ ID NO: 21374 - RNA, 19 nt, Homo sapiens
  misc_RNA (1)...(19): siRNA sense strand
gcagcuggcuugaaaggaa

SEQ ID NO: 21375 - RNA, 19 nt, Homo sapiens
  misc_RNA (1)...(19): siRNA sense strand
ucagagauaucccacguaa

SEQ ID NO: 21376 - RNA, 19 nt, Homo sapiens
  misc_RNA (1)...(19): siRNA sense strand
uauaagaggugaccaagga

SEQ ID NO: 21377 - RNA, 19 nt, Homo sapiens
  misc_RNA (1)...(19): siRNA sense strand
caaagaggauauccaggaa

SEQ ID NO: 21378 - RNA, 19 nt, Homo sapiens
  misc_RNA (1)...(19): siRNA sense strand
gaacaaggagauaaaggaa

SEQ ID NO: 21379 - RNA, 19 nt, Homo sapiens
  misc_RNA (1)...(19): siRNA sense strand
gaagauauagaacuugaug

SEQ ID NO: 21380 - RNA, 19 nt, Homo sapiens
  misc_RNA (1)...(19): siRNA sense strand
ccaccaggcucaagaggaa

SEQ ID NO: 21381 - RNA, 19 nt, Homo sapiens
  misc_RNA (1)...(19): siRNA sense strand
gaaagagugauaggacaua

SEQ ID NO: 21382 - RNA, 19 nt, Homo sapiens
  misc_RNA (1)...(19): siRNA sense strand
gaaagggcuuggauggaau

SEQ ID NO: 21383 - RNA, 19 nt, Homo sapiens
  misc_RNA (1)...(19): siRNA sense strand
agaaagggcuuggauggaa

SEQ ID NO: 21384 - RNA, 19 nt, Homo sapiens
  misc_RNA (1)...(19): siRNA sense strand
gaccaggccucccagguau

SEQ ID NO: 21385 - RNA, 19 nt, Homo sapiens
  misc_RNA (1)...(19): siRNA sense strand
guaaagggccagagaggaa

SEQ ID NO: 21386 - RNA, 19 nt, Homo sapiens
  misc_RNA (1)...(19): siRNA sense strand
cagcaaggguugugucugu

SEQ ID NO: 21387 - RNA, 19 nt, Homo sapiens
  misc_RNA (1)...(19): siRNA sense strand
acaaggagauaaaggaaau

SEQ ID NO: 21388 - RNA, 19 nt, Homo sapiens
  misc_RNA (1)...(19): siRNA sense strand
ggaacaaggagauaaagga

SEQ ID NO: 21389 - RNA, 19 nt, Homo sapiens
  misc_RNA (1)...(19): siRNA sense strand
ggaccaccaggaacaguua

SEQ ID NO: 21390 - RNA, 19 nt, Homo sapiens
  misc_RNA (1)...(19): siRNA sense strand
gaaagccuauuccaucaac

SEQ ID NO: 21391 - RNA, 19 nt, Homo sapiens
  misc_RNA (1)...(19): siRNA sense strand
caagggagaaccagcagua

SEQ ID NO: 21392 - RNA, 19 nt, Homo sapiens
  misc_RNA (1)...(19): siRNA sense strand
gagccuggguuaccuggaa

SEQ ID NO: 21393 - RNA, 19 nt, Homo sapiens
  misc_RNA (1)...(19): siRNA sense strand
auacaggucuuccaggauu

SEQ ID NO: 21394 - RNA, 19 nt, Homo sapiens
  misc_RNA (1)...(19): siRNA sense strand
ccacaggcauagaaggauu

SEQ ID NO: 21395 - RNA, 19 nt, Homo sapiens
  misc_RNA (1)...(19): siRNA sense strand
guacacagugcccuuauau

SEQ ID NO: 21396 - RNA, 19 nt, Homo sapiens
  misc_RNA (1)...(19): siRNA sense strand
ggaaaugaagggcuugaug

SEQ ID NO: 21397 - RNA, 19 nt, Homo sapiens
  misc_RNA (1)...(19): siRNA sense strand
ucaaaggauucgcaggaaa

SEQ ID NO: 21398 - RNA, 19 nt, Homo sapiens
  misc_RNA (1)...(19): siRNA sense strand
aaagggugcuccugcuaaa

SEQ ID NO: 21399 - RNA, 19 nt, Homo sapiens
  misc_RNA (1)...(19): siRNA sense strand
gaacccuggugcucaagga

SEQ ID NO: 21400 - RNA, 19 nt, Homo sapiens
  misc_RNA (1)...(19): siRNA sense strand
aggcuuaaauggauugaaa

SEQ ID NO: 21401 - RNA, 19 nt, Homo sapiens
  misc_RNA (1)...(19): siRNA sense strand
ggacuuccaggcuuaaaug

SEQ ID NO: 21402 - RNA, 19 nt, Homo sapiens
  misc_RNA (1)...(19): siRNA sense strand
uaacagaacggaccucaag

SEQ ID NO: 21403 - RNA, 19 nt, Homo sapiens
  misc_RNA (1)...(19): siRNA sense strand
ccuauuccaucaacuguga

SEQ ID NO: 21404 - RNA, 19 nt, Homo sapiens
  misc_RNA (1)...(19): siRNA sense strand
gggauuuccuggagccauu

SEQ ID NO: 21405 - RNA, 19 nt, Homo sapiens
  misc_RNA (1)...(19): siRNA sense strand
aaagggagacccaggaauu

SEQ ID NO: 21406 - RNA, 19 nt, Homo sapiens
  misc_RNA (1)...(19): siRNA sense strand
gcaaggguugugucuguaa

SEQ ID NO: 21407 - RNA, 19 nt, Homo sapiens
  misc_RNA (1)...(19): siRNA sense strand
uaucuagggucuccaggaa

SEQ ID NO: 21408 - RNA, 19 nt, Homo sapiens
  misc_RNA (1)...(19): siRNA sense strand
cauuggcccuccaggauuu

SEQ ID NO: 21409 - RNA, 19 nt, Homo sapiens
  misc_RNA (1)...(19): siRNA sense strand
ggaaagaaaggagaaaugg

SEQ ID NO: 21410 - RNA, 19 nt, Homo sapiens
  misc_RNA (1)...(19): siRNA sense strand
aaagagugauaggacauaa

SEQ ID NO: 21411 - RNA, 19 nt, Homo sapiens
  misc_RNA (1)...(19): siRNA sense strand
uccagggagucauguaaua

SEQ ID NO: 21412 - RNA, 19 nt, Homo sapiens
  misc_RNA (1)...(19): siRNA sense strand
ggucugcccggugcaauua

SEQ ID NO: 21413 - RNA, 19 nt, Homo sapiens
  misc_RNA (1)...(19): siRNA sense strand
caaggguugugucuguaaa

SEQ ID NO: 21414 - RNA, 19 nt, Homo sapiens
  misc_RNA (1)...(19): siRNA sense strand
ucacuggguuguccuggaa

SEQ ID NO: 21415 - RNA, 19 nt, Homo sapiens
  misc_RNA (1)...(19): siRNA sense strand
agaaucauauggaucugaa

SEQ ID NO: 21416 - RNA, 19 nt, Homo sapiens
  misc_RNA (1)...(19): siRNA sense strand
ggaaagccagguccucaug

SEQ ID NO: 21417 - RNA, 19 nt, Homo sapiens
  misc_RNA (1)...(19): siRNA sense strand
aggcgcagcuggcuugaaa

SEQ ID NO: 21418 - RNA, 19 nt, Homo sapiens
  misc_RNA (1)...(19): siRNA sense strand
aagaggauauccaggaaau

SEQ ID NO: 21419 - RNA, 19 nt, Homo sapiens
  misc_RNA (1)...(19): siRNA sense strand
caaaggauucgcaggaaau

SEQ ID NO: 21420 - RNA, 19 nt, Homo sapiens
  misc_RNA (1)...(19): siRNA sense strand
aaccaggucucaaaggauu

SEQ ID NO: 21421 - RNA, 19 nt, Homo sapiens
  misc_RNA (1)...(19): siRNA sense strand
uuacggacuugucggugua

SEQ ID NO: 21422 - RNA, 19 nt, Homo sapiens
  misc_RNA (1)...(19): siRNA sense strand
ggagacccuggcacacuua

SEQ ID NO: 21423 - RNA, 19 nt, Homo sapiens
  misc_RNA (1)...(19): siRNA sense strand
uaaguggauugccaggauu

SEQ ID NO: 21424 - RNA, 19 nt, Homo sapiens
  misc_RNA (1)...(19): siRNA sense strand
agaaccaggucucaaagga

SEQ ID NO: 21425 - RNA, 19 nt, Homo sapiens
  misc_RNA (1)...(19): siRNA sense strand
ugauugggaugaugggauu

SEQ ID NO: 21426 - RNA, 19 nt, Homo sapiens
  misc_RNA (1)...(19): siRNA sense strand
gggugaagauggcauuaag

SEQ ID NO: 21427 - RNA, 19 nt, Homo sapiens
  misc_RNA (1)...(19): siRNA sense strand
aggagaagauauagaacuu

SEQ ID NO: 21428 - RNA, 19 nt, Homo sapiens
  misc_RNA (1)...(19): siRNA sense strand
gggaaagaaaggagaaaug

SEQ ID NO: 21429 - RNA, 19 nt, Homo sapiens
  misc_RNA (1)...(19): siRNA sense strand
ccaggaacaguuauuguga

SEQ ID NO: 21430 - RNA, 19 nt, Homo sapiens
  misc_RNA (1)...(19): siRNA sense strand
gggcaugccagguucuaaa

SEQ ID NO: 21431 - RNA, 19 nt, Homo sapiens
  misc_RNA (1)...(19): siRNA sense strand
ggaccuccaggaccaauug

SEQ ID NO: 21432 - RNA, 19 nt, Homo sapiens
  misc_RNA (1)...(19): siRNA sense strand
uguacacagugcccuuaua

SEQ ID NO: 21433 - RNA, 19 nt, Homo sapiens
  misc_RNA (1)...(19): siRNA sense strand
gaaccaggucucaaaggau

SEQ ID NO: 21434 - RNA, 19 nt, Homo sapiens
  misc_RNA (1)...(19): siRNA sense strand
gaccaagguuuuccaggua

SEQ ID NO: 21435 - RNA, 19 nt, Homo sapiens
  misc_RNA (1)...(19): siRNA sense strand
uggccaggcuugaaaggaa

SEQ ID NO: 21436 - RNA, 19 nt, Homo sapiens
  misc_RNA (1)...(19): siRNA sense strand
gcagggacccaagggcuuu

SEQ ID NO: 21437 - RNA, 19 nt, Homo sapiens
  misc_RNA (1)...(19): siRNA sense strand
caugccagguucuaaagga

SEQ ID NO: 21438 - RNA, 19 nt, Homo sapiens
  misc_RNA (1)...(19): siRNA sense strand
ccuggcacacuuaagauua

SEQ ID NO: 21439 - RNA, 19 nt, Homo sapiens
  misc_RNA (1)...(19): siRNA sense strand
agagccagguuauucagaa

SEQ ID NO: 21440 - RNA, 19 nt, Homo sapiens
  misc_RNA (1)...(19): siRNA sense strand
gauaagggagagccagguu

SEQ ID NO: 21441 - RNA, 19 nt, Homo sapiens
  misc_RNA (1)...(19): siRNA sense strand
ggaccuagaggaccuaagg

SEQ ID NO: 21442 - RNA, 19 nt, Homo sapiens
  misc_RNA (1)...(19): siRNA sense strand
gcaacaaagguucuaaagg

SEQ ID NO: 21443 - RNA, 19 nt, Homo sapiens
  misc_RNA (1)...(19): siRNA sense strand
gacccuggcacacuuaaga

SEQ ID NO: 21444 - RNA, 19 nt, Homo sapiens
  misc_RNA (1)...(19): siRNA sense strand
uaagggagagccagguuau

SEQ ID NO: 21445 - RNA, 19 nt, Homo sapiens
  misc_RNA (1)...(19): siRNA sense strand
caagggcuuuccaggacuu

SEQ ID NO: 21446 - RNA, 19 nt, Homo sapiens
  misc_RNA (1)...(19): siRNA sense strand
ccaggaaucccaggaguug

SEQ ID NO: 21447 - RNA, 19 nt, Homo sapiens
  misc_RNA (1)...(19): siRNA sense strand
gggugcugcugguuugaaa

SEQ ID NO: 21448 - RNA, 19 nt, Homo sapiens
  misc_RNA (1)...(19): siRNA sense strand
uggaaguccuggaucauca

SEQ ID NO: 21449 - RNA, 19 nt, Homo sapiens
  misc_RNA (1)...(19): siRNA sense strand
ccaacagaauauuaugaca

SEQ ID NO: 21450 - RNA, 19 nt, Homo sapiens
  misc_RNA (1)...(19): siRNA sense strand
gacauuggcccuccaggau

SEQ ID NO: 21451 - RNA, 19 nt, Homo sapiens
  misc_RNA (1)...(19): siRNA sense strand
agaccaggccucccaggua

SEQ ID NO: 21452 - RNA, 19 nt, Homo sapiens
  misc_RNA (1)...(19): siRNA sense strand
ggaccaggaacaccagguu

SEQ ID NO: 21453 - RNA, 19 nt, Homo sapiens
  misc_RNA (1)...(19): siRNA sense strand
gagaaagggcuuggaugga

SEQ ID NO: 21454 - RNA, 19 nt, Homo sapiens
  misc_RNA (1)...(19): siRNA sense strand
ggguuucccuggguuaaug

SEQ ID NO: 21455 - RNA, 19 nt, Homo sapiens
  misc_RNA (1)...(19): siRNA sense strand
gagguaagccaggcaagga

SEQ ID NO: 21456 - RNA, 19 nt, Homo sapiens
  misc_RNA (1)...(19): siRNA sense strand
ccagggaugccagguuuaa

SEQ ID NO: 21457 - RNA, 19 nt, Homo sapiens
  misc_RNA (1)...(19): siRNA sense strand
aggugaagauggagugauu

SEQ ID NO: 21458 - RNA, 19 nt, Homo sapiens
  misc_RNA (1)...(19): siRNA sense strand
ggacugccaggcuaucuag

SEQ ID NO: 21459 - RNA, 19 nt, Homo sapiens
  misc_RNA (1)...(19): siRNA sense strand
auaaguggauugccaggau

SEQ ID NO: 21460 - RNA, 19 nt, Homo sapiens
  misc_RNA (1)...(19): siRNA sense strand
ggaccaauggguauaagag

SEQ ID NO: 21461 - RNA, 19 nt, Homo sapiens
  misc_RNA (1)...(19): siRNA sense strand
ggaauuccaggucaucaag

SEQ ID NO: 21462 - RNA, 19 nt, Homo sapiens
  misc_RNA (1)...(19): siRNA sense strand
gaccaggaacaccagguuu

SEQ ID NO: 21463 - RNA, 19 nt, Homo sapiens
  misc_RNA (1)...(19): siRNA sense strand
ggagagcucaguguuucaa

SEQ ID NO: 21464 - RNA, 19 nt, Homo sapiens
  misc_RNA (1)...(19): siRNA sense strand
gaccaaggacgugauggaa

SEQ ID NO: 21465 - RNA, 19 nt, Homo sapiens
  misc_RNA (1)...(19): siRNA sense strand
ggagaagauauagaacuug

SEQ ID NO: 21466 - RNA, 19 nt, Homo sapiens
  misc_RNA (1)...(19): siRNA sense strand
cuccaggucuuccaggauu

SEQ ID NO: 21467 - RNA, 19 nt, Homo sapiens
  misc_RNA (1)...(19): siRNA sense strand
cgggugauaugggaaagaa

SEQ ID NO: 21468 - RNA, 19 nt, Homo sapiens
  misc_RNA (1)...(19): siRNA sense strand
caacaaagguucuaaagga

SEQ ID NO: 21469 - RNA, 19 nt, Homo sapiens
  misc_RNA (1)...(19): siRNA sense strand
gagaagauauagaacuuga

SEQ ID NO: 21470 - RNA, 19 nt, Homo sapiens
  misc_RNA (1)...(19): siRNA sense strand
caacaaggcagaagaggua

SEQ ID NO: 21471 - RNA, 19 nt, Homo sapiens
  misc_RNA (1)...(19): siRNA sense strand
agagauaucccacguaaua

SEQ ID NO: 21472 - RNA, 19 nt, Homo sapiens
  misc_RNA (1)...(19): siRNA sense strand
ccaaggacuuccaggcuua

SEQ ID NO: 21473 - RNA, 19 nt, Homo sapiens
  misc_RNA (1)...(19): siRNA sense strand
ccaaggacgugauggaauu

SEQ ID NO: 21474 - RNA, 19 nt, Homo sapiens
  misc_RNA (1)...(19): siRNA sense strand
gcagcuggcuugaaaggaa

SEQ ID NO: 21475 - RNA, 19 nt, Homo sapiens
  misc_RNA (1)...(19): siRNA sense strand
ucagagauaucccacguaa

SEQ ID NO: 21476 - RNA, 19 nt, Homo sapiens
  misc_RNA (1)...(19): siRNA sense strand
uauaagaggugaccaagga

SEQ ID NO: 21477 - RNA, 19 nt, Homo sapiens
  misc_RNA (1)...(19): siRNA sense strand
caaagaggauauccaggaa

SEQ ID NO: 21478 - RNA, 19 nt, Homo sapiens
  misc_RNA (1)...(19): siRNA sense strand
gaacaaggagauaaaggaa

SEQ ID NO: 21479 - RNA, 19 nt, Homo sapiens
  misc_RNA (1)...(19): siRNA sense strand
gaagauauagaacuugaug

SEQ ID NO: 21480 - RNA, 19 nt, Homo sapiens
  misc_RNA (1)...(19): siRNA sense strand
ccaccaggcucaagaggaa

SEQ ID NO: 21481 - RNA, 19 nt, Homo sapiens
  misc_RNA (1)...(19): siRNA sense strand
gaaagagugauaggacaua

SEQ ID NO: 21482 - RNA, 19 nt, Homo sapiens
  misc_RNA (1)...(19): siRNA sense strand
gaaagggcuuggauggaau

SEQ ID NO: 21483 - RNA, 19 nt, Homo sapiens
  misc_RNA (1)...(19): siRNA sense strand
agaaagggcuuggauggaa

SEQ ID NO: 21484 - RNA, 19 nt, Homo sapiens
  misc_RNA (1)...(19): siRNA sense strand
gaccaggccucccagguau

SEQ ID NO: 21485 - RNA, 19 nt, Homo sapiens
  misc_RNA (1)...(19): siRNA sense strand
guaaagggccagagaggaa

SEQ ID NO: 21486 - RNA, 19 nt, Homo sapiens
  misc_RNA (1)...(19): siRNA sense strand
cagcaaggguugugucugu

SEQ ID NO: 21487 - RNA, 19 nt, Homo sapiens
  misc_RNA (1)...(19): siRNA sense strand
acaaggagauaaaggaaau

SEQ ID NO: 21488 - RNA, 19 nt, Homo sapiens
  misc_RNA (1)...(19): siRNA sense strand
ggaacaaggagauaaagga

SEQ ID NO: 21489 - RNA, 19 nt, Homo sapiens
  misc_RNA (1)...(19): siRNA sense strand
ggaccaccaggaacaguua

SEQ ID NO: 21490 - RNA, 19 nt, Homo sapiens
  misc_RNA (1)...(19): siRNA sense strand
gaaagccuauuccaucaac

SEQ ID NO: 21491 - RNA, 19 nt, Homo sapiens
  misc_RNA (1)...(19): siRNA sense strand
caagggagaaccagcagua

SEQ ID NO: 21492 - RNA, 19 nt, Homo sapiens
  misc_RNA (1)...(19): siRNA sense strand
gagccuggguuaccuggaa

SEQ ID NO: 21493 - RNA, 19 nt, Homo sapiens
  misc_RNA (1)...(19): siRNA sense strand
auacaggucuuccaggauu

SEQ ID NO: 21494 - RNA, 19 nt, Homo sapiens
  misc_RNA (1)...(19): siRNA sense strand
ccacaggcauagaaggauu

SEQ ID NO: 21495 - RNA, 19 nt, Homo sapiens
  misc_RNA (1)...(19): siRNA sense strand
guacacagugcccuuauau

SEQ ID NO: 21496 - RNA, 19 nt, Homo sapiens
  misc_RNA (1)...(19): siRNA sense strand
ggaaaugaagggcuugaug

SEQ ID NO: 21497 - RNA, 19 nt, Homo sapiens
  misc_RNA (1)...(19): siRNA sense strand
ucaaaggauucgcaggaaa

SEQ ID NO: 21498 - RNA, 19 nt, Homo sapiens
  misc_RNA (1)...(19): siRNA sense strand
aaagggugcuccugcuaaa

SEQ ID NO: 21499 - RNA, 19 nt, Homo sapiens
  misc_RNA (1)...(19): siRNA sense strand
gaacccuggugcucaagga

SEQ ID NO: 21500 - RNA, 19 nt, Homo sapiens
  misc_RNA (1)...(19): siRNA sense strand
aggcuuaaauggauugaaa

SEQ ID NO: 21501 - RNA, 19 nt, Homo sapiens
  misc_RNA (1)...(19): siRNA sense strand
ggacuuccaggcuuaaaug

SEQ ID NO: 21502 - RNA, 19 nt, Homo sapiens
  misc_RNA (1)...(19): siRNA sense strand
uaacagaacggaccucaag

SEQ ID NO: 21503 - RNA, 19 nt, Homo sapiens
  misc_RNA (1)...(19): siRNA sense strand
ccuauuccaucaacuguga

SEQ ID NO: 21504 - RNA, 19 nt, Homo sapiens
  misc_RNA (1)...(19): siRNA sense strand
gggauuuccuggagccauu

SEQ ID NO: 21505 - RNA, 19 nt, Homo sapiens
  misc_RNA (1)...(19): siRNA sense strand
aaagggagacccaggaauu

SEQ ID NO: 21506 - RNA, 19 nt, Homo sapiens
  misc_RNA (1)...(19): siRNA sense strand
gcaaggguugugucuguaa

SEQ ID NO: 21507 - RNA, 19 nt, Homo sapiens
  misc_RNA (1)...(19): siRNA sense strand
uaucuagggucuccaggaa

SEQ ID NO: 21508 - RNA, 19 nt, Homo sapiens
  misc_RNA (1)...(19): siRNA sense strand
cauuggcccuccaggauuu

SEQ ID NO: 21509 - RNA, 19 nt, Homo sapiens
  misc_RNA (1)...(19): siRNA sense strand
ggaaagaaaggagaaaugg

SEQ ID NO: 21510 - RNA, 19 nt, Homo sapiens
  misc_RNA (1)...(19): siRNA sense strand
aaagagugauaggacauaa

SEQ ID NO: 21511 - RNA, 19 nt, Homo sapiens
  misc_RNA (1)...(19): siRNA sense strand
uccagggagucauguaaua

SEQ ID NO: 21512 - RNA, 19 nt, Homo sapiens
  misc_RNA (1)...(19): siRNA sense strand
ggucugcccggugcaauua

SEQ ID NO: 21513 - RNA, 19 nt, Homo sapiens
  misc_RNA (1)...(19): siRNA sense strand
caaggguugugucuguaaa

SEQ ID NO: 21514 - RNA, 19 nt, Homo sapiens
  misc_RNA (1)...(19): siRNA sense strand
ucacuggguuguccuggaa

SEQ ID NO: 21515 - RNA, 19 nt, Homo sapiens
  misc_RNA (1)...(19): siRNA sense strand
agaaucauauggaucugaa

SEQ ID NO: 21516 - RNA, 19 nt, Homo sapiens
  misc_RNA (1)...(19): siRNA sense strand
ggaaagccagguccucaug

SEQ ID NO: 21517 - RNA, 19 nt, Homo sapiens
  misc_RNA (1)...(19): siRNA sense strand
aggcgcagcuggcuugaaa

SEQ ID NO: 21518 - RNA, 19 nt, Homo sapiens
  misc_RNA (1)...(19): siRNA sense strand
aagaggauauccaggaaau

SEQ ID NO: 21519 - RNA, 19 nt, Homo sapiens
  misc_RNA (1)...(19): siRNA sense strand
caaaggauucgcaggaaau

SEQ ID NO: 21520 - RNA, 19 nt, Homo sapiens
  misc_RNA (1)...(19): siRNA sense strand
aaccaggucucaaaggauu

SEQ ID NO: 21521 - RNA, 19 nt, Homo sapiens
  misc_RNA (1)...(19): siRNA sense strand
uuacggacuugucggugua

SEQ ID NO: 21522 - RNA, 19 nt, Homo sapiens
  misc_RNA (1)...(19): siRNA sense strand
ggagacccuggcacacuua

SEQ ID NO: 21523 - RNA, 19 nt, Homo sapiens
  misc_RNA (1)...(19): siRNA sense strand
uaaguggauugccaggauu

SEQ ID NO: 21524 - RNA, 19 nt, Homo sapiens
  misc_RNA (1)...(19): siRNA sense strand
agaaccaggucucaaagga

SEQ ID NO: 21525 - RNA, 19 nt, Homo sapiens
  misc_RNA (1)...(19): siRNA sense strand
ugauugggaugaugggauu

SEQ ID NO: 21526 - RNA, 19 nt, Homo sapiens
  misc_RNA (1)...(19): siRNA sense strand
gggugaagauggcauuaag

SEQ ID NO: 21527 - RNA, 19 nt, Homo sapiens
  misc_RNA (1)...(19): siRNA sense strand
aggagaagauauagaacuu

SEQ ID NO: 21528 - RNA, 19 nt, Homo sapiens
  misc_RNA (1)...(19): siRNA sense strand
gggaaagaaaggagaaaug

SEQ ID NO: 21529 - RNA, 19 nt, Homo sapiens
  misc_RNA (1)...(19): siRNA sense strand
ccaggaacaguuauuguga

SEQ ID NO: 21530 - RNA, 19 nt, Homo sapiens
  misc_RNA (1)...(19): siRNA sense strand
gggcaugccagguucuaaa

SEQ ID NO: 21531 - RNA, 19 nt, Homo sapiens
  misc_RNA (1)...(19): siRNA sense strand
ggaccuccaggaccaauug

SEQ ID NO: 21532 - RNA, 19 nt, Homo sapiens
  misc_RNA (1)...(19): siRNA sense strand
uguacacagugcccuuaua

SEQ ID NO: 21533 - RNA, 19 nt, Homo sapiens
  misc_RNA (1)...(19): siRNA sense strand
gaaccaggucucaaaggau

SEQ ID NO: 21534 - RNA, 19 nt, Homo sapiens
  misc_RNA (1)...(19): siRNA sense strand
gaccaagguuuuccaggua

SEQ ID NO: 21535 - RNA, 19 nt, Homo sapiens
  misc_RNA (1)...(19): siRNA sense strand
uggccaggcuugaaaggaa

SEQ ID NO: 21536 - RNA, 19 nt, Homo sapiens
  misc_RNA (1)...(19): siRNA sense strand
gcagggacccaagggcuuu

SEQ ID NO: 21537 - RNA, 19 nt, Homo sapiens
  misc_RNA (1)...(19): siRNA sense strand
caugccagguucuaaagga

SEQ ID NO: 21538 - RNA, 19 nt, Homo sapiens
  misc_RNA (1)...(19): siRNA sense strand
ccuggcacacuuaagauua

SEQ ID NO: 21539 - RNA, 19 nt, Homo sapiens
  misc_RNA (1)...(19): siRNA sense strand
agagccagguuauucagaa

SEQ ID NO: 21540 - RNA, 19 nt, Homo sapiens
  misc_RNA (1)...(19): siRNA sense strand
gauaagggagagccagguu

SEQ ID NO: 21541 - RNA, 19 nt, Homo sapiens
  misc_RNA (1)...(19): siRNA sense strand
ggaccuagaggaccuaagg

SEQ ID NO: 21542 - RNA, 19 nt, Homo sapiens
  misc_RNA (1)...(19): siRNA sense strand
gcaacaaagguucuaaagg

SEQ ID NO: 21543 - RNA, 19 nt, Homo sapiens
  misc_RNA (1)...(19): siRNA sense strand
gacccuggcacacuuaaga

SEQ ID NO: 21544 - RNA, 19 nt, Homo sapiens
  misc_RNA (1)...(19): siRNA sense strand
uaagggagagccagguuau

SEQ ID NO: 21545 - RNA, 19 nt, Homo sapiens
  misc_RNA (1)...(19): siRNA sense strand
caagggcuuuccaggacuu

SEQ ID NO: 21546 - RNA, 19 nt, Homo sapiens
  misc_RNA (1)...(19): siRNA sense strand
ccaggaaucccaggaguug

SEQ ID NO: 21547 - RNA, 19 nt, Homo sapiens
  misc_RNA (1)...(19): siRNA sense strand
gggugcugcugguuugaaa

SEQ ID NO: 21548 - RNA, 19 nt, Homo sapiens
  misc_RNA (1)...(19): siRNA sense strand
uggaaguccuggaucauca

SEQ ID NO: 21549 - RNA, 19 nt, Homo sapiens
  misc_RNA (1)...(19): siRNA sense strand
ccaacagaauauuaugaca

SEQ ID NO: 21550 - RNA, 19 nt, Homo sapiens
  misc_RNA (1)...(19): siRNA sense strand
gacauuggcccuccaggau

SEQ ID NO: 21551 - RNA, 19 nt, Homo sapiens
  misc_RNA (1)...(19): siRNA sense strand
agaccaggccucccaggua

SEQ ID NO: 21552 - RNA, 19 nt, Homo sapiens
  misc_RNA (1)...(19): siRNA sense strand
ggaccaggaacaccagguu

SEQ ID NO: 21553 - RNA, 19 nt, Homo sapiens
  misc_RNA (1)...(19): siRNA sense strand
gagaaagggcuuggaugga

SEQ ID NO: 21554 - RNA, 19 nt, Homo sapiens
  misc_RNA (1)...(19): siRNA sense strand
ggguuucccuggguuaaug

SEQ ID NO: 21555 - RNA, 19 nt, Homo sapiens
  misc_RNA (1)...(19): siRNA sense strand
gagguaagccaggcaagga

SEQ ID NO: 21556 - RNA, 19 nt, Homo sapiens
  misc_RNA (1)...(19): siRNA sense strand
ccagggaugccagguuuaa

SEQ ID NO: 21557 - RNA, 19 nt, Homo sapiens
  misc_RNA (1)...(19): siRNA sense strand
aggugaagauggagugauu

SEQ ID NO: 21558 - RNA, 19 nt, Homo sapiens
  misc_RNA (1)...(19): siRNA sense strand
ggacugccaggcuaucuag

SEQ ID NO: 21559 - RNA, 19 nt, Homo sapiens
  misc_RNA (1)...(19): siRNA sense strand
auaaguggauugccaggau

SEQ ID NO: 21560 - RNA, 19 nt, Homo sapiens
  misc_RNA (1)...(19): siRNA sense strand
ggaccaauggguauaagag

SEQ ID NO: 21561 - RNA, 19 nt, Homo sapiens
  misc_RNA (1)...(19): siRNA sense strand
ggaauuccaggucaucaag

SEQ ID NO: 21562 - RNA, 19 nt, Homo sapiens
  misc_RNA (1)...(19): siRNA sense strand
gaccaggaacaccagguuu

SEQ ID NO: 21563 - RNA, 19 nt, Homo sapiens
  misc_RNA (1)...(19): siRNA sense strand
ggagagcucaguguuucaa

SEQ ID NO: 21564 - RNA, 19 nt, Homo sapiens
  misc_RNA (1)...(19): siRNA sense strand
gaccaaggacgugauggaa

SEQ ID NO: 21565 - RNA, 19 nt, Homo sapiens
  misc_RNA (1)...(19): siRNA sense strand
ggagaagauauagaacuug

SEQ ID NO: 21566 - RNA, 19 nt, Homo sapiens
  misc_RNA (1)...(19): siRNA sense strand
cuccaggucuuccaggauu

SEQ ID NO: 21567 - RNA, 19 nt, Homo sapiens
  misc_RNA (1)...(19): siRNA sense strand
cgggugauaugggaaagaa

SEQ ID NO: 21568 - RNA, 19 nt, Homo sapiens
  misc_RNA (1)...(19): siRNA sense strand
gcacauggauuucuuauua

SEQ ID NO: 21569 - RNA, 19 nt, Homo sapiens
  misc_RNA (1)...(19): siRNA sense strand
ggacagaguaucauaauua

SEQ ID NO: 21570 - RNA, 19 nt, Homo sapiens
  misc_RNA (1)...(19): siRNA sense strand
ccaaggaccucaaggcuua

SEQ ID NO: 21571 - RNA, 19 nt, Homo sapiens
  misc_RNA (1)...(19): siRNA sense strand
gcagaucagugaacagaaa

SEQ ID NO: 21572 - RNA, 19 nt, Homo sapiens
  misc_RNA (1)...(19): siRNA sense strand
gaaccagguaguauaauua

SEQ ID NO: 21573 - RNA, 19 nt, Homo sapiens
  misc_RNA (1)...(19): siRNA sense strand
gaaaggacccaguggagua

SEQ ID NO: 21574 - RNA, 19 nt, Homo sapiens
  misc_RNA (1)...(19): siRNA sense strand
gaaaggagaucagggacuu

SEQ ID NO: 21575 - RNA, 19 nt, Homo sapiens
  misc_RNA (1)...(19): siRNA sense strand
caacuuugcuucaagaaau

SEQ ID NO: 21576 - RNA, 19 nt, Homo sapiens
  misc_RNA (1)...(19): siRNA sense strand
ucagaaaggugaugaagga

SEQ ID NO: 21577 - RNA, 19 nt, Homo sapiens
  misc_RNA (1)...(19): siRNA sense strand
ggaauaugggcuuaaauuu

SEQ ID NO: 21578 - RNA, 19 nt, Homo sapiens
  misc_RNA (1)...(19): siRNA sense strand
gagagaggguuuccagguu

SEQ ID NO: 21579 - RNA, 19 nt, Homo sapiens
  misc_RNA (1)...(19): siRNA sense strand
aaagggugauggaggauua

SEQ ID NO: 21580 - RNA, 19 nt, Homo sapiens
  misc_RNA (1)...(19): siRNA sense strand
gaauaugggcuuaaauuuc

SEQ ID NO: 21581 - RNA, 19 nt, Homo sapiens
  misc_RNA (1)...(19): siRNA sense strand
gaacacuucaggucuauga

SEQ ID NO: 21582 - RNA, 19 nt, Homo sapiens
  misc_RNA (1)...(19): siRNA sense strand
ggaaggacacccaggauug

SEQ ID NO: 21583 - RNA, 19 nt, Homo sapiens
  misc_RNA (1)...(19): siRNA sense strand
ggaaauggagguauuaaag

SEQ ID NO: 21584 - RNA, 19 nt, Homo sapiens
  misc_RNA (1)...(19): siRNA sense strand
caaaggugauccugguauu

SEQ ID NO: 21585 - RNA, 19 nt, Homo sapiens
  misc_RNA (1)...(19): siRNA sense strand
gggaauaugggcuuaaauu

SEQ ID NO: 21586 - RNA, 19 nt, Homo sapiens
  misc_RNA (1)...(19): siRNA sense strand
aggcagagauggugaugua

SEQ ID NO: 21587 - RNA, 19 nt, Homo sapiens
  misc_RNA (1)...(19): siRNA sense strand
gcagaaggcucaggucaag

SEQ ID NO: 21588 - RNA, 19 nt, Homo sapiens
  misc_RNA (1)...(19): siRNA sense strand
caagggagaacguggauuu

SEQ ID NO: 21589 - RNA, 19 nt, Homo sapiens
  misc_RNA (1)...(19): siRNA sense strand
ugaaccagguaguauaauu

SEQ ID NO: 21590 - RNA, 19 nt, Homo sapiens
  misc_RNA (1)...(19): siRNA sense strand
gcugaaagcaggagacuug

SEQ ID NO: 21591 - RNA, 19 nt, Homo sapiens
  misc_RNA (1)...(19): siRNA sense strand
uauaggaccuccaggauca

SEQ ID NO: 21592 - RNA, 19 nt, Homo sapiens
  misc_RNA (1)...(19): siRNA sense strand
caccaggacuuccagguuu

SEQ ID NO: 21593 - RNA, 19 nt, Homo sapiens
  misc_RNA (1)...(19): siRNA sense strand
gaaaagaccaauugaugua

SEQ ID NO: 21594 - RNA, 19 nt, Homo sapiens
  misc_RNA (1)...(19): siRNA sense strand
gaacagaaaagaccaauug

SEQ ID NO: 21595 - RNA, 19 nt, Homo sapiens
  misc_RNA (1)...(19): siRNA sense strand
gcaaggagagccaggcaaa

SEQ ID NO: 21596 - RNA, 19 nt, Homo sapiens
  misc_RNA (1)...(19): siRNA sense strand
gaaggaccaccuggaauuu

SEQ ID NO: 21597 - RNA, 19 nt, Homo sapiens
  misc_RNA (1)...(19): siRNA sense strand
cgaauuagccgaugucaag

SEQ ID NO: 21598 - RNA, 19 nt, Homo sapiens
  misc_RNA (1)...(19): siRNA sense strand
gacuugaggacacgaauua

SEQ ID NO: 21599 - RNA, 19 nt, Homo sapiens
  misc_RNA (1)...(19): siRNA sense strand
caccaggacuccaggguaa

SEQ ID NO: 21600 - RNA, 19 nt, Homo sapiens
  misc_RNA (1)...(19): siRNA sense strand
caacuggucccaaaggauu

SEQ ID NO: 21601 - RNA, 19 nt, Homo sapiens
  misc_RNA (1)...(19): siRNA sense strand
aggauuaccuggacagaaa

SEQ ID NO: 21602 - RNA, 19 nt, Homo sapiens
  misc_RNA (1)...(19): siRNA sense strand
gaaccaggauuugcauuac

SEQ ID NO: 21603 - RNA, 19 nt, Homo sapiens
  misc_RNA (1)...(19): siRNA sense strand
gaaaugacuauucuuacug

SEQ ID NO: 21604 - RNA, 19 nt, Homo sapiens
  misc_RNA (1)...(19): siRNA sense strand
caauugauguagaguuuca

SEQ ID NO: 21605 - RNA, 19 nt, Homo sapiens
  misc_RNA (1)...(19): siRNA sense strand
gcaggugccucuggauuuc

SEQ ID NO: 21606 - RNA, 19 nt, Homo sapiens
  misc_RNA (1)...(19): siRNA sense strand
cggagcaccugguccuaua

SEQ ID NO: 21607 - RNA, 19 nt, Homo sapiens
  misc_RNA (1)...(19): siRNA sense strand
uggaagaauuggucuagaa

SEQ ID NO: 21608 - RNA, 19 nt, Homo sapiens
  misc_RNA (1)...(19): siRNA sense strand
cauuggaacugguauuuca

SEQ ID NO: 21609 - RNA, 19 nt, Homo sapiens
  misc_RNA (1)...(19): siRNA sense strand
aaagggugaugauggaauu

SEQ ID NO: 21610 - RNA, 19 nt, Homo sapiens
  misc_RNA (1)...(19): siRNA sense strand
ccuggaaccuccucuguug

SEQ ID NO: 21611 - RNA, 19 nt, Homo sapiens
  misc_RNA (1)...(19): siRNA sense strand
aaauggagguauuaaagga

SEQ ID NO: 21612 - RNA, 19 nt, Homo sapiens
  misc_RNA (1)...(19): siRNA sense strand
ggacagccaggucuuauag

SEQ ID NO: 21613 - RNA, 19 nt, Homo sapiens
  misc_RNA (1)...(19): siRNA sense strand
ucaggucuaugaaggcuuu

SEQ ID NO: 21614 - RNA, 19 nt, Homo sapiens
  misc_RNA (1)...(19): siRNA sense strand
agagaggguuuccagguuu

SEQ ID NO: 21615 - RNA, 19 nt, Homo sapiens
  misc_RNA (1)...(19): siRNA sense strand
ugaaccaggauuugcauua

SEQ ID NO: 21616 - RNA, 19 nt, Homo sapiens
  misc_RNA (1)...(19): siRNA sense strand
ggugaaccagguaguauaa

SEQ ID NO: 21617 - RNA, 19 nt, Homo sapiens
  misc_RNA (1)...(19): siRNA sense strand
gacaacggaugcaccacaa

SEQ ID NO: 21618 - RNA, 19 nt, Homo sapiens
  misc_RNA (1)...(19): siRNA sense strand
gagaggguuuccagguuug

SEQ ID NO: 21619 - RNA, 19 nt, Homo sapiens
  misc_RNA (1)...(19): siRNA sense strand
uggcuugccugguuugaaa

SEQ ID NO: 21620 - RNA, 19 nt, Homo sapiens
  misc_RNA (1)...(19): siRNA sense strand
cuaccuggcuugccugguu

SEQ ID NO: 21621 - RNA, 19 nt, Homo sapiens
  misc_RNA (1)...(19): siRNA sense strand
gaguggacaaccuggauua

SEQ ID NO: 21622 - RNA, 19 nt, Homo sapiens
  misc_RNA (1)...(19): siRNA sense strand
caaaucuucugggcucaaa

SEQ ID NO: 21623 - RNA, 19 nt, Homo sapiens
  misc_RNA (1)...(19): siRNA sense strand
gaugaaggaccaccuggaa

SEQ ID NO: 21624 - RNA, 19 nt, Homo sapiens
  misc_RNA (1)...(19): siRNA sense strand
gaaaauggccaaccaggaa

SEQ ID NO: 21625 - RNA, 19 nt, Homo sapiens
  misc_RNA (1)...(19): siRNA sense strand
ugaaggaccaccuggaauu

SEQ ID NO: 21626 - RNA, 19 nt, Homo sapiens
  misc_RNA (1)...(19): siRNA sense strand
gagcauccagccauucauu

SEQ ID NO: 21627 - RNA, 19 nt, Homo sapiens
  misc_RNA (1)...(19): siRNA sense strand
gaaauggagguauuaaagg

SEQ ID NO: 21628 - RNA, 19 nt, Homo sapiens
  misc_RNA (1)...(19): siRNA sense strand
ugggacaccuggaagaauu

SEQ ID NO: 21629 - RNA, 19 nt, Homo sapiens
  misc_RNA (1)...(19): siRNA sense strand
ggauccaggucagacuaua

SEQ ID NO: 21630 - RNA, 19 nt, Homo sapiens
  misc_RNA (1)...(19): siRNA sense strand
ggagagccugguggaauua

SEQ ID NO: 21631 - RNA, 19 nt, Homo sapiens
  misc_RNA (1)...(19): siRNA sense strand
ccagagcccaugccaauga

SEQ ID NO: 21632 - RNA, 19 nt, Homo sapiens
  misc_RNA (1)...(19): siRNA sense strand
caguaaaccucagucagaa

SEQ ID NO: 21633 - RNA, 19 nt, Homo sapiens
  misc_RNA (1)...(19): siRNA sense strand
ucaguaaaccucagucaga

SEQ ID NO: 21634 - RNA, 19 nt, Homo sapiens
  misc_RNA (1)...(19): siRNA sense strand
aaugaagggugacaaagga

SEQ ID NO: 21635 - RNA, 19 nt, Homo sapiens
  misc_RNA (1)...(19): siRNA sense strand
gcuggcaacuguagaugug

SEQ ID NO: 21636 - RNA, 19 nt, Homo sapiens
  misc_RNA (1)...(19): siRNA sense strand
gauccaggucagacuauaa

SEQ ID NO: 21637 - RNA, 19 nt, Homo sapiens
  misc_RNA (1)...(19): siRNA sense strand
aaagaccaauugauguaga

SEQ ID NO: 21638 - RNA, 19 nt, Homo sapiens
  misc_RNA (1)...(19): siRNA sense strand
ucagacauguucaguaaac

SEQ ID NO: 21639 - RNA, 19 nt, Homo sapiens
  misc_RNA (1)...(19): siRNA sense strand
uggauuaccugguccuuca

SEQ ID NO: 21640 - RNA, 19 nt, Homo sapiens
  misc_RNA (1)...(19): siRNA sense strand
uuacuggcccugagucuuu

SEQ ID NO: 21641 - RNA, 19 nt, Homo sapiens
  misc_RNA (1)...(19): siRNA sense strand
ugucaagugugcaugaaga

SEQ ID NO: 21642 - RNA, 19 nt, Homo sapiens
  misc_RNA (1)...(19): siRNA sense strand
ugguguaccuggucuuaaa

SEQ ID NO: 21643 - RNA, 19 nt, Homo sapiens
  misc_RNA (1)...(19): siRNA sense strand
gaaugaagggugacaaagg

SEQ ID NO: 21644 - RNA, 19 nt, Homo sapiens
  misc_RNA (1)...(19): siRNA sense strand
ccagguaguauaauuaugu

SEQ ID NO: 21645 - RNA, 19 nt, Homo sapiens
  misc_RNA (1)...(19): siRNA sense strand
gaugucaagugugcaugaa

SEQ ID NO: 21646 - RNA, 19 nt, Homo sapiens
  misc_RNA (1)...(19): siRNA sense strand
caacggaugcaccacaaug

SEQ ID NO: 21647 - RNA, 19 nt, Homo sapiens
  misc_RNA (1)...(19): siRNA sense strand
gaaaggcgacaaaggugau

SEQ ID NO: 21648 - RNA, 19 nt, Homo sapiens
  misc_RNA (1)...(19): siRNA sense strand
aaaggaaccaucggugaua

SEQ ID NO: 21649 - RNA, 19 nt, Homo sapiens
  misc_RNA (1)...(19): siRNA sense strand
ugagaagggugagcaagga

SEQ ID NO: 21650 - RNA, 19 nt, Homo sapiens
  misc_RNA (1)...(19): siRNA sense strand
accaauugauguagaguuu

SEQ ID NO: 21651 - RNA, 19 nt, Homo sapiens
  misc_RNA (1)...(19): siRNA sense strand
caaaggagaaccagguauc

SEQ ID NO: 21652 - RNA, 19 nt, Homo sapiens
  misc_RNA (1)...(19): siRNA sense strand
gggaacacuucaggucuau

SEQ ID NO: 21653 - RNA, 19 nt, Homo sapiens
  misc_RNA (1)...(19): siRNA sense strand
ccugguauuucaagcauug

SEQ ID NO: 21654 - RNA, 19 nt, Homo sapiens
  misc_RNA (1)...(19): siRNA sense strand
caccaggucccaaagguaa

SEQ ID NO: 21655 - RNA, 19 nt, Homo sapiens
  misc_RNA (1)...(19): siRNA sense strand
caaaggauuaccaggcauu

SEQ ID NO: 21656 - RNA, 19 nt, Homo sapiens
  misc_RNA (1)...(19): siRNA sense strand
ggaauaccagguccuaaag

SEQ ID NO: 21657 - RNA, 19 nt, Homo sapiens
  misc_RNA (1)...(19): siRNA sense strand
aggagagccugguggaauu

SEQ ID NO: 21658 - RNA, 19 nt, Homo sapiens
  misc_RNA (1)...(19): siRNA sense strand
ugugggagauccugguuug

SEQ ID NO: 21659 - RNA, 19 nt, Homo sapiens
  misc_RNA (1)...(19): siRNA sense strand
caaagguucugugggagau

SEQ ID NO: 21660 - RNA, 19 nt, Homo sapiens
  misc_RNA (1)...(19): siRNA sense strand
uggacaaccuggaccaaug

SEQ ID NO: 21661 - RNA, 19 nt, Homo sapiens
  misc_RNA (1)...(19): siRNA sense strand
gggugaaccagguaguaua

SEQ ID NO: 21662 - RNA, 19 nt, Homo sapiens
  misc_RNA (1)...(19): siRNA sense strand
cagcugccuucgucgcuuu

SEQ ID NO: 21663 - RNA, 19 nt, Homo sapiens
  misc_RNA (1)...(19): siRNA sense strand
ggaagaauuggucuagaag

SEQ ID NO: 21664 - RNA, 19 nt, Homo sapiens
  misc_RNA (1)...(19): siRNA sense strand
gcaaaggagaaccagguau

SEQ ID NO: 21665 - RNA, 19 nt, Homo sapiens
  misc_RNA (1)...(19): siRNA sense strand
uacaagguguggcaggaaa

SEQ ID NO: 21666 - RNA, 19 nt, Homo sapiens
  misc_RNA (1)...(19): siRNA sense strand
gagguaaaccaggcaaaga

SEQ ID NO: 21667 - RNA, 19 nt, Homo sapiens
  misc_RNA (1)...(19): siRNA sense strand
gggcagaucagugaacaga

SEQ ID NO: 21668 - RNA, 19 nt, Homo sapiens
  misc_RNA (1)...(19): siRNA sense strand
gcacauggauuucuuauua

SEQ ID NO: 21669 - RNA, 19 nt, Homo sapiens
  misc_RNA (1)...(19): siRNA sense strand
ggacagaguaucauaauua

SEQ ID NO: 21670 - RNA, 19 nt, Homo sapiens
  misc_RNA (1)...(19): siRNA sense strand
ccaaggaccucaaggcuua

SEQ ID NO: 21671 - RNA, 19 nt, Homo sapiens
  misc_RNA (1)...(19): siRNA sense strand
gcagaucagugaacagaaa

SEQ ID NO: 21672 - RNA, 19 nt, Homo sapiens
  misc_RNA (1)...(19): siRNA sense strand
gaaccagguaguauaauua

SEQ ID NO: 21673 - RNA, 19 nt, Homo sapiens
  misc_RNA (1)...(19): siRNA sense strand
gaaaggacccaguggagua

SEQ ID NO: 21674 - RNA, 19 nt, Homo sapiens
  misc_RNA (1)...(19): siRNA sense strand
gaaaggagaucagggacuu

SEQ ID NO: 21675 - RNA, 19 nt, Homo sapiens
  misc_RNA (1)...(19): siRNA sense strand
caacuuugcuucaagaaau

SEQ ID NO: 21676 - RNA, 19 nt, Homo sapiens
  misc_RNA (1)...(19): siRNA sense strand
ucagaaaggugaugaagga

SEQ ID NO: 21677 - RNA, 19 nt, Homo sapiens
  misc_RNA (1)...(19): siRNA sense strand
ggaauaugggcuuaaauuu

SEQ ID NO: 21678 - RNA, 19 nt, Homo sapiens
  misc_RNA (1)...(19): siRNA sense strand
gagagaggguuuccagguu

SEQ ID NO: 21679 - RNA, 19 nt, Homo sapiens
  misc_RNA (1)...(19): siRNA sense strand
aaagggugauggaggauua

SEQ ID NO: 21680 - RNA, 19 nt, Homo sapiens
  misc_RNA (1)...(19): siRNA sense strand
gaauaugggcuuaaauuuc

SEQ ID NO: 21681 - RNA, 19 nt, Homo sapiens
  misc_RNA (1)...(19): siRNA sense strand
gaacacuucaggucuauga

SEQ ID NO: 21682 - RNA, 19 nt, Homo sapiens
  misc_RNA (1)...(19): siRNA sense strand
ggaaggacacccaggauug

SEQ ID NO: 21683 - RNA, 19 nt, Homo sapiens
  misc_RNA (1)...(19): siRNA sense strand
ggaaauggagguauuaaag

SEQ ID NO: 21684 - RNA, 19 nt, Homo sapiens
  misc_RNA (1)...(19): siRNA sense strand
caaaggugauccugguauu

SEQ ID NO: 21685 - RNA, 19 nt, Homo sapiens
  misc_RNA (1)...(19): siRNA sense strand
gggaauaugggcuuaaauu

SEQ ID NO: 21686 - RNA, 19 nt, Homo sapiens
  misc_RNA (1)...(19): siRNA sense strand
aggcagagauggugaugua

SEQ ID NO: 21687 - RNA, 19 nt, Homo sapiens
  misc_RNA (1)...(19): siRNA sense strand
gcagaaggcucaggucaag

SEQ ID NO: 21688 - RNA, 19 nt, Homo sapiens
  misc_RNA (1)...(19): siRNA sense strand
caagggagaacguggauuu

SEQ ID NO: 21689 - RNA, 19 nt, Homo sapiens
  misc_RNA (1)...(19): siRNA sense strand
ugaaccagguaguauaauu

SEQ ID NO: 21690 - RNA, 19 nt, Homo sapiens
  misc_RNA (1)...(19): siRNA sense strand
gcugaaagcaggagacuug

SEQ ID NO: 21691 - RNA, 19 nt, Homo sapiens
  misc_RNA (1)...(19): siRNA sense strand
uauaggaccuccaggauca

SEQ ID NO: 21692 - RNA, 19 nt, Homo sapiens
  misc_RNA (1)...(19): siRNA sense strand
caccaggacuuccagguuu

SEQ ID NO: 21693 - RNA, 19 nt, Homo sapiens
  misc_RNA (1)...(19): siRNA sense strand
gaaaagaccaauugaugua

SEQ ID NO: 21694 - RNA, 19 nt, Homo sapiens
  misc_RNA (1)...(19): siRNA sense strand
gaacagaaaagaccaauug

SEQ ID NO: 21695 - RNA, 19 nt, Homo sapiens
  misc_RNA (1)...(19): siRNA sense strand
gcaaggagagccaggcaaa

SEQ ID NO: 21696 - RNA, 19 nt, Homo sapiens
  misc_RNA (1)...(19): siRNA sense strand
gaaggaccaccuggaauuu

SEQ ID NO: 21697 - RNA, 19 nt, Homo sapiens
  misc_RNA (1)...(19): siRNA sense strand
cgaauuagccgaugucaag

SEQ ID NO: 21698 - RNA, 19 nt, Homo sapiens
  misc_RNA (1)...(19): siRNA sense strand
gacuugaggacacgaauua

SEQ ID NO: 21699 - RNA, 19 nt, Homo sapiens
  misc_RNA (1)...(19): siRNA sense strand
caccaggacuccaggguaa

SEQ ID NO: 21700 - RNA, 19 nt, Homo sapiens
  misc_RNA (1)...(19): siRNA sense strand
caacuggucccaaaggauu

SEQ ID NO: 21701 - RNA, 19 nt, Homo sapiens
  misc_RNA (1)...(19): siRNA sense strand
aggauuaccuggacagaaa

SEQ ID NO: 21702 - RNA, 19 nt, Homo sapiens
  misc_RNA (1)...(19): siRNA sense strand
gaaccaggauuugcauuac

SEQ ID NO: 21703 - RNA, 19 nt, Homo sapiens
  misc_RNA (1)...(19): siRNA sense strand
gaaaugacuauucuuacug

SEQ ID NO: 21704 - RNA, 19 nt, Homo sapiens
  misc_RNA (1)...(19): siRNA sense strand
caauugauguagaguuuca

SEQ ID NO: 21705 - RNA, 19 nt, Homo sapiens
  misc_RNA (1)...(19): siRNA sense strand
gcaggugccucuggauuuc

SEQ ID NO: 21706 - RNA, 19 nt, Homo sapiens
  misc_RNA (1)...(19): siRNA sense strand
cggagcaccugguccuaua

SEQ ID NO: 21707 - RNA, 19 nt, Homo sapiens
  misc_RNA (1)...(19): siRNA sense strand
uggaagaauuggucuagaa

SEQ ID NO: 21708 - RNA, 19 nt, Homo sapiens
  misc_RNA (1)...(19): siRNA sense strand
cauuggaacugguauuuca

SEQ ID NO: 21709 - RNA, 19 nt, Homo sapiens
  misc_RNA (1)...(19): siRNA sense strand
aaagggugaugauggaauu

SEQ ID NO: 21710 - RNA, 19 nt, Homo sapiens
  misc_RNA (1)...(19): siRNA sense strand
ccuggaaccuccucuguug

SEQ ID NO: 21711 - RNA, 19 nt, Homo sapiens
  misc_RNA (1)...(19): siRNA sense strand
aaauggagguauuaaagga

SEQ ID NO: 21712 - RNA, 19 nt, Homo sapiens
  misc_RNA (1)...(19): siRNA sense strand
ggacagccaggucuuauag

SEQ ID NO: 21713 - RNA, 19 nt, Homo sapiens
  misc_RNA (1)...(19): siRNA sense strand
ucaggucuaugaaggcuuu

SEQ ID NO: 21714 - RNA, 19 nt, Homo sapiens
  misc_RNA (1)...(19): siRNA sense strand
agagaggguuuccagguuu

SEQ ID NO: 21715 - RNA, 19 nt, Homo sapiens
  misc_RNA (1)...(19): siRNA sense strand
ugaaccaggauuugcauua

SEQ ID NO: 21716 - RNA, 19 nt, Homo sapiens
  misc_RNA (1)...(19): siRNA sense strand
ggugaaccagguaguauaa

SEQ ID NO: 21717 - RNA, 19 nt, Homo sapiens
  misc_RNA (1)...(19): siRNA sense strand
gacaacggaugcaccacaa

SEQ ID NO: 21718 - RNA, 19 nt, Homo sapiens
  misc_RNA (1)...(19): siRNA sense strand
gagaggguuuccagguuug

SEQ ID NO: 21719 - RNA, 19 nt, Homo sapiens
  misc_RNA (1)...(19): siRNA sense strand
uggcuugccugguuugaaa

SEQ ID NO: 21720 - RNA, 19 nt, Homo sapiens
  misc_RNA (1)...(19): siRNA sense strand
cuaccuggcuugccugguu

SEQ ID NO: 21721 - RNA, 19 nt, Homo sapiens
  misc_RNA (1)...(19): siRNA sense strand
gaguggacaaccuggauua

SEQ ID NO: 21722 - RNA, 19 nt, Homo sapiens
  misc_RNA (1)...(19): siRNA sense strand
caaaucuucugggcucaaa

SEQ ID NO: 21723 - RNA, 19 nt, Homo sapiens
  misc_RNA (1)...(19): siRNA sense strand
gaugaaggaccaccuggaa

SEQ ID NO: 21724 - RNA, 19 nt, Homo sapiens
  misc_RNA (1)...(19): siRNA sense strand
gaaaauggccaaccaggaa

SEQ ID NO: 21725 - RNA, 19 nt, Homo sapiens
  misc_RNA (1)...(19): siRNA sense strand
ugaaggaccaccuggaauu

SEQ ID NO: 21726 - RNA, 19 nt, Homo sapiens
  misc_RNA (1)...(19): siRNA sense strand
gagcauccagccauucauu

SEQ ID NO: 21727 - RNA, 19 nt, Homo sapiens
  misc_RNA (1)...(19): siRNA sense strand
gaaauggagguauuaaagg

SEQ ID NO: 21728 - RNA, 19 nt, Homo sapiens
  misc_RNA (1)...(19): siRNA sense strand
ugggacaccuggaagaauu

SEQ ID NO: 21729 - RNA, 19 nt, Homo sapiens
  misc_RNA (1)...(19): siRNA sense strand
ggauccaggucagacuaua

SEQ ID NO: 21730 - RNA, 19 nt, Homo sapiens
  misc_RNA (1)...(19): siRNA sense strand
ggagagccugguggaauua

SEQ ID NO: 21731 - RNA, 19 nt, Homo sapiens
  misc_RNA (1)...(19): siRNA sense strand
ccagagcccaugccaauga

SEQ ID NO: 21732 - RNA, 19 nt, Homo sapiens
  misc_RNA (1)...(19): siRNA sense strand
caguaaaccucagucagaa

SEQ ID NO: 21733 - RNA, 19 nt, Homo sapiens
  misc_RNA (1)...(19): siRNA sense strand
ucaguaaaccucagucaga

SEQ ID NO: 21734 - RNA, 19 nt, Homo sapiens
  misc_RNA (1)...(19): siRNA sense strand
aaugaagggugacaaagga

SEQ ID NO: 21735 - RNA, 19 nt, Homo sapiens
  misc_RNA (1)...(19): siRNA sense strand
gcuggcaacuguagaugug

SEQ ID NO: 21736 - RNA, 19 nt, Homo sapiens
  misc_RNA (1)...(19): siRNA sense strand
gauccaggucagacuauaa

SEQ ID NO: 21737 - RNA, 19 nt, Homo sapiens
  misc_RNA (1)...(19): siRNA sense strand
aaagaccaauugauguaga

SEQ ID NO: 21738 - RNA, 19 nt, Homo sapiens
  misc_RNA (1)...(19): siRNA sense strand
ucagacauguucaguaaac

SEQ ID NO: 21739 - RNA, 19 nt, Homo sapiens
  misc_RNA (1)...(19): siRNA sense strand
uggauuaccugguccuuca

SEQ ID NO: 21740 - RNA, 19 nt, Homo sapiens
  misc_RNA (1)...(19): siRNA sense strand
uuacuggcccugagucuuu

SEQ ID NO: 21741 - RNA, 19 nt, Homo sapiens
  misc_RNA (1)...(19): siRNA sense strand
ugucaagugugcaugaaga

SEQ ID NO: 21742 - RNA, 19 nt, Homo sapiens
  misc_RNA (1)...(19): siRNA sense strand
ugguguaccuggucuuaaa

SEQ ID NO: 21743 - RNA, 19 nt, Homo sapiens
  misc_RNA (1)...(19): siRNA sense strand
gaaugaagggugacaaagg

SEQ ID NO: 21744 - RNA, 19 nt, Homo sapiens
  misc_RNA (1)...(19): siRNA sense strand
ccagguaguauaauuaugu

SEQ ID NO: 21745 - RNA, 19 nt, Homo sapiens
  misc_RNA (1)...(19): siRNA sense strand
gaugucaagugugcaugaa

SEQ ID NO: 21746 - RNA, 19 nt, Homo sapiens
  misc_RNA (1)...(19): siRNA sense strand
caacggaugcaccacaaug

SEQ ID NO: 21747 - RNA, 19 nt, Homo sapiens
  misc_RNA (1)...(19): siRNA sense strand
gaaaggcgacaaaggugau

SEQ ID NO: 21748 - RNA, 19 nt, Homo sapiens
  misc_RNA (1)...(19): siRNA sense strand
aaaggaaccaucggugaua

SEQ ID NO: 21749 - RNA, 19 nt, Homo sapiens
  misc_RNA (1)...(19): siRNA sense strand
ugagaagggugagcaagga

SEQ ID NO: 21750 - RNA, 19 nt, Homo sapiens
  misc_RNA (1)...(19): siRNA sense strand
accaauugauguagaguuu

SEQ ID NO: 21751 - RNA, 19 nt, Homo sapiens
  misc_RNA (1)...(19): siRNA sense strand
caaaggagaaccagguauc

SEQ ID NO: 21752 - RNA, 19 nt, Homo sapiens
  misc_RNA (1)...(19): siRNA sense strand
gggaacacuucaggucuau

SEQ ID NO: 21753 - RNA, 19 nt, Homo sapiens
  misc_RNA (1)...(19): siRNA sense strand
ccugguauuucaagcauug

SEQ ID NO: 21754 - RNA, 19 nt, Homo sapiens
  misc_RNA (1)...(19): siRNA sense strand
caccaggucccaaagguaa

SEQ ID NO: 21755 - RNA, 19 nt, Homo sapiens
  misc_RNA (1)...(19): siRNA sense strand
caaaggauuaccaggcauu

SEQ ID NO: 21756 - RNA, 19 nt, Homo sapiens
  misc_RNA (1)...(19): siRNA sense strand
ggaauaccagguccuaaag

SEQ ID NO: 21757 - RNA, 19 nt, Homo sapiens
  misc_RNA (1)...(19): siRNA sense strand
aggagagccugguggaauu

SEQ ID NO: 21758 - RNA, 19 nt, Homo sapiens
  misc_RNA (1)...(19): siRNA sense strand
ugugggagauccugguuug

SEQ ID NO: 21759 - RNA, 19 nt, Homo sapiens
  misc_RNA (1)...(19): siRNA sense strand
caaagguucugugggagau

SEQ ID NO: 21760 - RNA, 19 nt, Homo sapiens
  misc_RNA (1)...(19): siRNA sense strand
uggacaaccuggaccaaug

SEQ ID NO: 21761 - RNA, 19 nt, Homo sapiens
  misc_RNA (1)...(19): siRNA sense strand
gggugaaccagguaguaua

SEQ ID NO: 21762 - RNA, 19 nt, Homo sapiens
  misc_RNA (1)...(19): siRNA sense strand
cagcugccuucgucgcuuu

SEQ ID NO: 21763 - RNA, 19 nt, Homo sapiens
  misc_RNA (1)...(19): siRNA sense strand
ggaagaauuggucuagaag

SEQ ID NO: 21764 - RNA, 19 nt, Homo sapiens
  misc_RNA (1)...(19): siRNA sense strand
gcaaaggagaaccagguau

SEQ ID NO: 21765 - RNA, 19 nt, Homo sapiens
  misc_RNA (1)...(19): siRNA sense strand
uacaagguguggcaggaaa

SEQ ID NO: 21766 - RNA, 19 nt, Homo sapiens
  misc_RNA (1)...(19): siRNA sense strand
gagguaaaccaggcaaaga

SEQ ID NO: 21767 - RNA, 19 nt, Homo sapiens
  misc_RNA (1)...(19): siRNA sense strand
gggcagaucagugaacaga

SEQ ID NO: 21768 - RNA, 19 nt, Homo sapiens
  misc_RNA (1)...(19): siRNA sense strand
gcacauggauuucuuauua

SEQ ID NO: 21769 - RNA, 19 nt, Homo sapiens
  misc_RNA (1)...(19): siRNA sense strand
ggacagaguaucauaauua

SEQ ID NO: 21770 - RNA, 19 nt, Homo sapiens
  misc_RNA (1)...(19): siRNA sense strand
ccaaggaccucaaggcuua

SEQ ID NO: 21771 - RNA, 19 nt, Homo sapiens
  misc_RNA (1)...(19): siRNA sense strand
gcagaucagugaacagaaa

SEQ ID NO: 21772 - RNA, 19 nt, Homo sapiens
  misc_RNA (1)...(19): siRNA sense strand
gaaccagguaguauaauua

SEQ ID NO: 21773 - RNA, 19 nt, Homo sapiens
  misc_RNA (1)...(19): siRNA sense strand
gaaaggacccaguggagua

SEQ ID NO: 21774 - RNA, 19 nt, Homo sapiens
  misc_RNA (1)...(19): siRNA sense strand
gaaaggagaucagggacuu

SEQ ID NO: 21775 - RNA, 19 nt, Homo sapiens
  misc_RNA (1)...(19): siRNA sense strand
caacuuugcuucaagaaau

SEQ ID NO: 21776 - RNA, 19 nt, Homo sapiens
  misc_RNA (1)...(19): siRNA sense strand
ucagaaaggugaugaagga

SEQ ID NO: 21777 - RNA, 19 nt, Homo sapiens
  misc_RNA (1)...(19): siRNA sense strand
ggaauaugggcuuaaauuu

SEQ ID NO: 21778 - RNA, 19 nt, Homo sapiens
  misc_RNA (1)...(19): siRNA sense strand
gagagaggguuuccagguu

SEQ ID NO: 21779 - RNA, 19 nt, Homo sapiens
  misc_RNA (1)...(19): siRNA sense strand
aaagggugauggaggauua

SEQ ID NO: 21780 - RNA, 19 nt, Homo sapiens
  misc_RNA (1)...(19): siRNA sense strand
gaauaugggcuuaaauuuc

SEQ ID NO: 21781 - RNA, 19 nt, Homo sapiens
  misc_RNA (1)...(19): siRNA sense strand
gaacacuucaggucuauga

SEQ ID NO: 21782 - RNA, 19 nt, Homo sapiens
  misc_RNA (1)...(19): siRNA sense strand
ggaaggacacccaggauug

SEQ ID NO: 21783 - RNA, 19 nt, Homo sapiens
  misc_RNA (1)...(19): siRNA sense strand
ggaaauggagguauuaaag

SEQ ID NO: 21784 - RNA, 19 nt, Homo sapiens
  misc_RNA (1)...(19): siRNA sense strand
caaaggugauccugguauu

SEQ ID NO: 21785 - RNA, 19 nt, Homo sapiens
  misc_RNA (1)...(19): siRNA sense strand
gggaauaugggcuuaaauu

SEQ ID NO: 21786 - RNA, 19 nt, Homo sapiens
  misc_RNA (1)...(19): siRNA sense strand
aggcagagauggugaugua

SEQ ID NO: 21787 - RNA, 19 nt, Homo sapiens
  misc_RNA (1)...(19): siRNA sense strand
gcagaaggcucaggucaag

SEQ ID NO: 21788 - RNA, 19 nt, Homo sapiens
  misc_RNA (1)...(19): siRNA sense strand
caagggagaacguggauuu

SEQ ID NO: 21789 - RNA, 19 nt, Homo sapiens
  misc_RNA (1)...(19): siRNA sense strand
ugaaccagguaguauaauu

SEQ ID NO: 21790 - RNA, 19 nt, Homo sapiens
  misc_RNA (1)...(19): siRNA sense strand
gcugaaagcaggagacuug

SEQ ID NO: 21791 - RNA, 19 nt, Homo sapiens
  misc_RNA (1)...(19): siRNA sense strand
uauaggaccuccaggauca

SEQ ID NO: 21792 - RNA, 19 nt, Homo sapiens
  misc_RNA (1)...(19): siRNA sense strand
caccaggacuuccagguuu

SEQ ID NO: 21793 - RNA, 19 nt, Homo sapiens
  misc_RNA (1)...(19): siRNA sense strand
gaaaagaccaauugaugua

SEQ ID NO: 21794 - RNA, 19 nt, Homo sapiens
  misc_RNA (1)...(19): siRNA sense strand
gaacagaaaagaccaauug

SEQ ID NO: 21795 - RNA, 19 nt, Homo sapiens
  misc_RNA (1)...(19): siRNA sense strand
gcaaggagagccaggcaaa

SEQ ID NO: 21796 - RNA, 19 nt, Homo sapiens
  misc_RNA (1)...(19): siRNA sense strand
gaaggaccaccuggaauuu

SEQ ID NO: 21797 - RNA, 19 nt, Homo sapiens
  misc_RNA (1)...(19): siRNA sense strand
cgaauuagccgaugucaag

SEQ ID NO: 21798 - RNA, 19 nt, Homo sapiens
  misc_RNA (1)...(19): siRNA sense strand
gacuugaggacacgaauua

SEQ ID NO: 21799 - RNA, 19 nt, Homo sapiens
  misc_RNA (1)...(19): siRNA sense strand
caccaggacuccaggguaa

SEQ ID NO: 21800 - RNA, 19 nt, Homo sapiens
  misc_RNA (1)...(19): siRNA sense strand
caacuggucccaaaggauu

SEQ ID NO: 21801 - RNA, 19 nt, Homo sapiens
  misc_RNA (1)...(19): siRNA sense strand
aggauuaccuggacagaaa

SEQ ID NO: 21802 - RNA, 19 nt, Homo sapiens
  misc_RNA (1)...(19): siRNA sense strand
gaaccaggauuugcauuac

SEQ ID NO: 21803 - RNA, 19 nt, Homo sapiens
  misc_RNA (1)...(19): siRNA sense strand
gaaaugacuauucuuacug

SEQ ID NO: 21804 - RNA, 19 nt, Homo sapiens
  misc_RNA (1)...(19): siRNA sense strand
caauugauguagaguuuca

SEQ ID NO: 21805 - RNA, 19 nt, Homo sapiens
  misc_RNA (1)...(19): siRNA sense strand
gcaggugccucuggauuuc

SEQ ID NO: 21806 - RNA, 19 nt, Homo sapiens
  misc_RNA (1)...(19): siRNA sense strand
cggagcaccugguccuaua

SEQ ID NO: 21807 - RNA, 19 nt, Homo sapiens
  misc_RNA (1)...(19): siRNA sense strand
uggaagaauuggucuagaa

SEQ ID NO: 21808 - RNA, 19 nt, Homo sapiens
  misc_RNA (1)...(19): siRNA sense strand
cauuggaacugguauuuca

SEQ ID NO: 21809 - RNA, 19 nt, Homo sapiens
  misc_RNA (1)...(19): siRNA sense strand
aaagggugaugauggaauu

SEQ ID NO: 21810 - RNA, 19 nt, Homo sapiens
  misc_RNA (1)...(19): siRNA sense strand
ccuggaaccuccucuguug

SEQ ID NO: 21811 - RNA, 19 nt, Homo sapiens
  misc_RNA (1)...(19): siRNA sense strand
aaauggagguauuaaagga

SEQ ID NO: 21812 - RNA, 19 nt, Homo sapiens
  misc_RNA (1)...(19): siRNA sense strand
ggacagccaggucuuauag

SEQ ID NO: 21813 - RNA, 19 nt, Homo sapiens
  misc_RNA (1)...(19): siRNA sense strand
ucaggucuaugaaggcuuu

SEQ ID NO: 21814 - RNA, 19 nt, Homo sapiens
  misc_RNA (1)...(19): siRNA sense strand
agagaggguuuccagguuu

SEQ ID NO: 21815 - RNA, 19 nt, Homo sapiens
  misc_RNA (1)...(19): siRNA sense strand
ugaaccaggauuugcauua

SEQ ID NO: 21816 - RNA, 19 nt, Homo sapiens
  misc_RNA (1)...(19): siRNA sense strand
ggugaaccagguaguauaa

SEQ ID NO: 21817 - RNA, 19 nt, Homo sapiens
  misc_RNA (1)...(19): siRNA sense strand
gacaacggaugcaccacaa

SEQ ID NO: 21818 - RNA, 19 nt, Homo sapiens
  misc_RNA (1)...(19): siRNA sense strand
gagaggguuuccagguuug

SEQ ID NO: 21819 - RNA, 19 nt, Homo sapiens
  misc_RNA (1)...(19): siRNA sense strand
uggcuugccugguuugaaa

SEQ ID NO: 21820 - RNA, 19 nt, Homo sapiens
  misc_RNA (1)...(19): siRNA sense strand
cuaccuggcuugccugguu

SEQ ID NO: 21821 - RNA, 19 nt, Homo sapiens
  misc_RNA (1)...(19): siRNA sense strand
gaguggacaaccuggauua

SEQ ID NO: 21822 - RNA, 19 nt, Homo sapiens
  misc_RNA (1)...(19): siRNA sense strand
caaaucuucugggcucaaa

SEQ ID NO: 21823 - RNA, 19 nt, Homo sapiens
  misc_RNA (1)...(19): siRNA sense strand
gaugaaggaccaccuggaa

SEQ ID NO: 21824 - RNA, 19 nt, Homo sapiens
  misc_RNA (1)...(19): siRNA sense strand
gaaaauggccaaccaggaa

SEQ ID NO: 21825 - RNA, 19 nt, Homo sapiens
  misc_RNA (1)...(19): siRNA sense strand
ugaaggaccaccuggaauu

SEQ ID NO: 21826 - RNA, 19 nt, Homo sapiens
  misc_RNA (1)...(19): siRNA sense strand
gagcauccagccauucauu

SEQ ID NO: 21827 - RNA, 19 nt, Homo sapiens
  misc_RNA (1)...(19): siRNA sense strand
gaaauggagguauuaaagg

SEQ ID NO: 21828 - RNA, 19 nt, Homo sapiens
  misc_RNA (1)...(19): siRNA sense strand
ugggacaccuggaagaauu

SEQ ID NO: 21829 - RNA, 19 nt, Homo sapiens
  misc_RNA (1)...(19): siRNA sense strand
ggauccaggucagacuaua

SEQ ID NO: 21830 - RNA, 19 nt, Homo sapiens
  misc_RNA (1)...(19): siRNA sense strand
ggagagccugguggaauua

SEQ ID NO: 21831 - RNA, 19 nt, Homo sapiens
  misc_RNA (1)...(19): siRNA sense strand
ccagagcccaugccaauga

SEQ ID NO: 21832 - RNA, 19 nt, Homo sapiens
  misc_RNA (1)...(19): siRNA sense strand
caguaaaccucagucagaa

SEQ ID NO: 21833 - RNA, 19 nt, Homo sapiens
  misc_RNA (1)...(19): siRNA sense strand
ucaguaaaccucagucaga

SEQ ID NO: 21834 - RNA, 19 nt, Homo sapiens
  misc_RNA (1)...(19): siRNA sense strand
aaugaagggugacaaagga

SEQ ID NO: 21835 - RNA, 19 nt, Homo sapiens
  misc_RNA (1)...(19): siRNA sense strand
gcuggcaacuguagaugug

SEQ ID NO: 21836 - RNA, 19 nt, Homo sapiens
  misc_RNA (1)...(19): siRNA sense strand
gauccaggucagacuauaa

SEQ ID NO: 21837 - RNA, 19 nt, Homo sapiens
  misc_RNA (1)...(19): siRNA sense strand
aaagaccaauugauguaga

SEQ ID NO: 21838 - RNA, 19 nt, Homo sapiens
  misc_RNA (1)...(19): siRNA sense strand
ucagacauguucaguaaac

SEQ ID NO: 21839 - RNA, 19 nt, Homo sapiens
  misc_RNA (1)...(19): siRNA sense strand
uggauuaccugguccuuca

SEQ ID NO: 21840 - RNA, 19 nt, Homo sapiens
  misc_RNA (1)...(19): siRNA sense strand
uuacuggcccugagucuuu

SEQ ID NO: 21841 - RNA, 19 nt, Homo sapiens
  misc_RNA (1)...(19): siRNA sense strand
ugucaagugugcaugaaga

SEQ ID NO: 21842 - RNA, 19 nt, Homo sapiens
  misc_RNA (1)...(19): siRNA sense strand
ugguguaccuggucuuaaa

SEQ ID NO: 21843 - RNA, 19 nt, Homo sapiens
  misc_RNA (1)...(19): siRNA sense strand
gaaugaagggugacaaagg

SEQ ID NO: 21844 - RNA, 19 nt, Homo sapiens
  misc_RNA (1)...(19): siRNA sense strand
ccagguaguauaauuaugu

SEQ ID NO: 21845 - RNA, 19 nt, Homo sapiens
  misc_RNA (1)...(19): siRNA sense strand
gaugucaagugugcaugaa

SEQ ID NO: 21846 - RNA, 19 nt, Homo sapiens
  misc_RNA (1)...(19): siRNA sense strand
caacggaugcaccacaaug

SEQ ID NO: 21847 - RNA, 19 nt, Homo sapiens
  misc_RNA (1)...(19): siRNA sense strand
gaaaggcgacaaaggugau

SEQ ID NO: 21848 - RNA, 19 nt, Homo sapiens
  misc_RNA (1)...(19): siRNA sense strand
aaaggaaccaucggugaua

SEQ ID NO: 21849 - RNA, 19 nt, Homo sapiens
  misc_RNA (1)...(19): siRNA sense strand
ugagaagggugagcaagga

SEQ ID NO: 21850 - RNA, 19 nt, Homo sapiens
  misc_RNA (1)...(19): siRNA sense strand
accaauugauguagaguuu

SEQ ID NO: 21851 - RNA, 19 nt, Homo sapiens
  misc_RNA (1)...(19): siRNA sense strand
caaaggagaaccagguauc

SEQ ID NO: 21852 - RNA, 19 nt, Homo sapiens
  misc_RNA (1)...(19): siRNA sense strand
gggaacacuucaggucuau

SEQ ID NO: 21853 - RNA, 19 nt, Homo sapiens
  misc_RNA (1)...(19): siRNA sense strand
ccugguauuucaagcauug

SEQ ID NO: 21854 - RNA, 19 nt, Homo sapiens
  misc_RNA (1)...(19): siRNA sense strand
caccaggucccaaagguaa

SEQ ID NO: 21855 - RNA, 19 nt, Homo sapiens
  misc_RNA (1)...(19): siRNA sense strand
caaaggauuaccaggcauu

SEQ ID NO: 21856 - RNA, 19 nt, Homo sapiens
  misc_RNA (1)...(19): siRNA sense strand
ggaauaccagguccuaaag

SEQ ID NO: 21857 - RNA, 19 nt, Homo sapiens
  misc_RNA (1)...(19): siRNA sense strand
aggagagccugguggaauu

SEQ ID NO: 21858 - RNA, 19 nt, Homo sapiens
  misc_RNA (1)...(19): siRNA sense strand
ugugggagauccugguuug

SEQ ID NO: 21859 - RNA, 19 nt, Homo sapiens
  misc_RNA (1)...(19): siRNA sense strand
caaagguucugugggagau

SEQ ID NO: 21860 - RNA, 19 nt, Homo sapiens
  misc_RNA (1)...(19): siRNA sense strand
uggacaaccuggaccaaug

SEQ ID NO: 21861 - RNA, 19 nt, Homo sapiens
  misc_RNA (1)...(19): siRNA sense strand
gggugaaccagguaguaua

SEQ ID NO: 21862 - RNA, 19 nt, Homo sapiens
  misc_RNA (1)...(19): siRNA sense strand
cagcugccuucgucgcuuu

SEQ ID NO: 21863 - RNA, 19 nt, Homo sapiens
  misc_RNA (1)...(19): siRNA sense strand
ggaagaauuggucuagaag

SEQ ID NO: 21864 - RNA, 19 nt, Homo sapiens
  misc_RNA (1)...(19): siRNA sense strand
gcaaaggagaaccagguau

SEQ ID NO: 21865 - RNA, 19 nt, Homo sapiens
  misc_RNA (1)...(19): siRNA sense strand
uacaagguguggcaggaaa

SEQ ID NO: 21866 - RNA, 19 nt, Homo sapiens
  misc_RNA (1)...(19): siRNA sense strand
gagguaaaccaggcaaaga

SEQ ID NO: 21867 - RNA, 19 nt, Homo sapiens
  misc_RNA (1)...(19): siRNA sense strand
gggcagaucagugaacaga

SEQ ID NO: 21868 - RNA, 19 nt, Homo sapiens
  misc_RNA (1)...(19): siRNA sense strand
caacuugccugauggaaua

SEQ ID NO: 21869 - RNA, 19 nt, Homo sapiens
  misc_RNA (1)...(19): siRNA sense strand
gcagaaaggugaugaaggu

SEQ ID NO: 21870 - RNA, 19 nt, Homo sapiens
  misc_RNA (1)...(19): siRNA sense strand
ggaaacugcucuccuaugu

SEQ ID NO: 21871 - RNA, 19 nt, Homo sapiens
  misc_RNA (1)...(19): siRNA sense strand
caaaggagaugauggugaa

SEQ ID NO: 21872 - RNA, 19 nt, Homo sapiens
  misc_RNA (1)...(19): siRNA sense strand
gaaccaggauaccaucuau

SEQ ID NO: 21873 - RNA, 19 nt, Homo sapiens
  misc_RNA (1)...(19): siRNA sense strand
cguggaagcugccaaagaa

SEQ ID NO: 21874 - RNA, 19 nt, Homo sapiens
  misc_RNA (1)...(19): siRNA sense strand
cagcagaucuccugaaggu

SEQ ID NO: 21875 - RNA, 19 nt, Homo sapiens
  misc_RNA (1)...(19): siRNA sense strand
caaggaugcuccagggauu

SEQ ID NO: 21876 - RNA, 19 nt, Homo sapiens
  misc_RNA (1)...(19): siRNA sense strand
gggagaagauggcccugaa

SEQ ID NO: 21877 - RNA, 19 nt, Homo sapiens
  misc_RNA (1)...(19): siRNA sense strand
ccaaggacccacaggauuu

SEQ ID NO: 21878 - RNA, 19 nt, Homo sapiens
  misc_RNA (1)...(19): siRNA sense strand
cgacaucaauggcaucauc

SEQ ID NO: 21879 - RNA, 19 nt, Homo sapiens
  misc_RNA (1)...(19): siRNA sense strand
agauggcccuccaggauua

SEQ ID NO: 21880 - RNA, 19 nt, Homo sapiens
  misc_RNA (1)...(19): siRNA sense strand
ccaauccagaugaauauua

SEQ ID NO: 21881 - RNA, 19 nt, Homo sapiens
  misc_RNA (1)...(19): siRNA sense strand
gggacacccuggcaaagaa

SEQ ID NO: 21882 - RNA, 19 nt, Homo sapiens
  misc_RNA (1)...(19): siRNA sense strand
aagaaaggcuaccagaaga

SEQ ID NO: 21883 - RNA, 19 nt, Homo sapiens
  misc_RNA (1)...(19): siRNA sense strand
gaacaaggucucccaggau

SEQ ID NO: 21884 - RNA, 19 nt, Homo sapiens
  misc_RNA (1)...(19): siRNA sense strand
ggaccaaagggcucuauug

SEQ ID NO: 21885 - RNA, 19 nt, Homo sapiens
  misc_RNA (1)...(19): siRNA sense strand
caagaaaggcuaccagaag

SEQ ID NO: 21886 - RNA, 19 nt, Homo sapiens
  misc_RNA (1)...(19): siRNA sense strand
ggaaggugcggaugacuug

SEQ ID NO: 21887 - RNA, 19 nt, Homo sapiens
  misc_RNA (1)...(19): siRNA sense strand
gcgagggugagaccuauua

SEQ ID NO: 21888 - RNA, 19 nt, Homo sapiens
  misc_RNA (1)...(19): siRNA sense strand
ggacuucuccauccuaaca

SEQ ID NO: 21889 - RNA, 19 nt, Homo sapiens
  misc_RNA (1)...(19): siRNA sense strand
gauggcaaguggcacagaa

SEQ ID NO: 21890 - RNA, 19 nt, Homo sapiens
  misc_RNA (1)...(19): siRNA sense strand
aaagggcucuauuggauuc

SEQ ID NO: 21891 - RNA, 19 nt, Homo sapiens
  misc_RNA (1)...(19): siRNA sense strand
ugagaccuauuacuacgaa

SEQ ID NO: 21892 - RNA, 19 nt, Homo sapiens
  misc_RNA (1)...(19): siRNA sense strand
gggagacgauggagaaagg

SEQ ID NO: 21893 - RNA, 19 nt, Homo sapiens
  misc_RNA (1)...(19): siRNA sense strand
aaagaagaccaccaaauuc

SEQ ID NO: 21894 - RNA, 19 nt, Homo sapiens
  misc_RNA (1)...(19): siRNA sense strand
gaagacgguucuggagauc

SEQ ID NO: 21895 - RNA, 19 nt, Homo sapiens
  misc_RNA (1)...(19): siRNA sense strand
ucaauggcaucaucguguu

SEQ ID NO: 21896 - RNA, 19 nt, Homo sapiens
  misc_RNA (1)...(19): siRNA sense strand
gaagggugaagacggcuuu

SEQ ID NO: 21897 - RNA, 19 nt, Homo sapiens
  misc_RNA (1)...(19): siRNA sense strand
ggacugaaaggcaaugaag

SEQ ID NO: 21898 - RNA, 19 nt, Homo sapiens
  misc_RNA (1)...(19): siRNA sense strand
caauccagaugaauauuac

SEQ ID NO: 21899 - RNA, 19 nt, Homo sapiens
  misc_RNA (1)...(19): siRNA sense strand
aauacugggucgauccuaa

SEQ ID NO: 21900 - RNA, 19 nt, Homo sapiens
  misc_RNA (1)...(19): siRNA sense strand
uaccaucuaugaagggauu

SEQ ID NO: 21901 - RNA, 19 nt, Homo sapiens
  misc_RNA (1)...(19): siRNA sense strand
aaaagaagaccaccaaauu

SEQ ID NO: 21902 - RNA, 19 nt, Homo sapiens
  misc_RNA (1)...(19): siRNA sense strand
uuucacaacuugccugaug

SEQ ID NO: 21903 - RNA, 19 nt, Homo sapiens
  misc_RNA (1)...(19): siRNA sense strand
cagcuuaugauuacuguga

SEQ ID NO: 21904 - RNA, 19 nt, Homo sapiens
  misc_RNA (1)...(19): siRNA sense strand
gcucucagcguccacaaga

SEQ ID NO: 21905 - RNA, 19 nt, Homo sapiens
  misc_RNA (1)...(19): siRNA sense strand
uccugaagguucuagauuu

SEQ ID NO: 21906 - RNA, 19 nt, Homo sapiens
  misc_RNA (1)...(19): siRNA sense strand
cggcugugcuaccaagaaa

SEQ ID NO: 21907 - RNA, 19 nt, Homo sapiens
  misc_RNA (1)...(19): siRNA sense strand
ccaagaaaggcuaccagaa

SEQ ID NO: 21908 - RNA, 19 nt, Homo sapiens
  misc_RNA (1)...(19): siRNA sense strand
caaagggcucuauuggauu

SEQ ID NO: 21909 - RNA, 19 nt, Homo sapiens
  misc_RNA (1)...(19): siRNA sense strand
aaagauggcccuccaggau

SEQ ID NO: 21910 - RNA, 19 nt, Homo sapiens
  misc_RNA (1)...(19): siRNA sense strand
ccgaagaccuagggaagga

SEQ ID NO: 21911 - RNA, 19 nt, Homo sapiens
  misc_RNA (1)...(19): siRNA sense strand
gauggaauaacaaagacaa

SEQ ID NO: 21912 - RNA, 19 nt, Homo sapiens
  misc_RNA (1)...(19): siRNA sense strand
agacggcuuuccuggguuu

SEQ ID NO: 21913 - RNA, 19 nt, Homo sapiens
  misc_RNA (1)...(19): siRNA sense strand
ggaguucacugaggaaacg

SEQ ID NO: 21914 - RNA, 19 nt, Homo sapiens
  misc_RNA (1)...(19): siRNA sense strand
ggagauugagcagaugaaa

SEQ ID NO: 21915 - RNA, 19 nt, Homo sapiens
  misc_RNA (1)...(19): siRNA sense strand
ccgggcagcuuaugauuac

SEQ ID NO: 21916 - RNA, 19 nt, Homo sapiens
  misc_RNA (1)...(19): siRNA sense strand
cucugaagcuggagauuga

SEQ ID NO: 21917 - RNA, 19 nt, Homo sapiens
  misc_RNA (1)...(19): siRNA sense strand
gccagcagaucuccugaag

SEQ ID NO: 21918 - RNA, 19 nt, Homo sapiens
  misc_RNA (1)...(19): siRNA sense strand
caggguauccagcagauug

SEQ ID NO: 21919 - RNA, 19 nt, Homo sapiens
  misc_RNA (1)...(19): siRNA sense strand
gaaacugcucuccuaugug

SEQ ID NO: 21920 - RNA, 19 nt, Homo sapiens
  misc_RNA (1)...(19): siRNA sense strand
ugacaaaggagaugauggu

SEQ ID NO: 21921 - RNA, 19 nt, Homo sapiens
  misc_RNA (1)...(19): siRNA sense strand
ccuccaggauuacgugguu

SEQ ID NO: 21922 - RNA, 19 nt, Homo sapiens
  misc_RNA (1)...(19): siRNA sense strand
aaagggagaaccagcgauu

SEQ ID NO: 21923 - RNA, 19 nt, Homo sapiens
  misc_RNA (1)...(19): siRNA sense strand
gcucucccgucuuccucua

SEQ ID NO: 21924 - RNA, 19 nt, Homo sapiens
  misc_RNA (1)...(19): siRNA sense strand
caacugugaaagccaagaa

SEQ ID NO: 21925 - RNA, 19 nt, Homo sapiens
  misc_RNA (1)...(19): siRNA sense strand
ugaagcgucacagaaauuu

SEQ ID NO: 21926 - RNA, 19 nt, Homo sapiens
  misc_RNA (1)...(19): siRNA sense strand
cggagaugauggucccaaa

SEQ ID NO: 21927 - RNA, 19 nt, Homo sapiens
  misc_RNA (1)...(19): siRNA sense strand
ucuauuggauucccuggau

SEQ ID NO: 21928 - RNA, 19 nt, Homo sapiens
  misc_RNA (1)...(19): siRNA sense strand
ccuugauccucgacuguaa

SEQ ID NO: 21929 - RNA, 19 nt, Homo sapiens
  misc_RNA (1)...(19): siRNA sense strand
cauccuaacaacugugaaa

SEQ ID NO: 21930 - RNA, 19 nt, Homo sapiens
  misc_RNA (1)...(19): siRNA sense strand
gggaaacugcucuccuaug

SEQ ID NO: 21931 - RNA, 19 nt, Homo sapiens
  misc_RNA (1)...(19): siRNA sense strand
gaaggcagacagggagaga

SEQ ID NO: 21932 - RNA, 19 nt, Homo sapiens
  misc_RNA (1)...(19): siRNA sense strand
ggaauaacaaagacaacag

SEQ ID NO: 21933 - RNA, 19 nt, Homo sapiens
  misc_RNA (1)...(19): siRNA sense strand
caggauaccaucuaugaag

SEQ ID NO: 21934 - RNA, 19 nt, Homo sapiens
  misc_RNA (1)...(19): siRNA sense strand
uccggaaccuugacgagaa

SEQ ID NO: 21935 - RNA, 19 nt, Homo sapiens
  misc_RNA (1)...(19): siRNA sense strand
augaugaccucaccuaugg

SEQ ID NO: 21936 - RNA, 19 nt, Homo sapiens
  misc_RNA (1)...(19): siRNA sense strand
ccugauggaauaacaaaga

SEQ ID NO: 21937 - RNA, 19 nt, Homo sapiens
  misc_RNA (1)...(19): siRNA sense strand
aggaaugccuggacaaacu

SEQ ID NO: 21938 - RNA, 19 nt, Homo sapiens
  misc_RNA (1)...(19): siRNA sense strand
gaucuucggcucucucaac

SEQ ID NO: 21939 - RNA, 19 nt, Homo sapiens
  misc_RNA (1)...(19): siRNA sense strand
gagaugauggucccaaagg

SEQ ID NO: 21940 - RNA, 19 nt, Homo sapiens
  misc_RNA (1)...(19): siRNA sense strand
guacccugcgucugcauuu

SEQ ID NO: 21941 - RNA, 19 nt, Homo sapiens
  misc_RNA (1)...(19): siRNA sense strand
ggaagacaaggaccaaagg

SEQ ID NO: 21942 - RNA, 19 nt, Homo sapiens
  misc_RNA (1)...(19): siRNA sense strand
agggugagaccuauuacua

SEQ ID NO: 21943 - RNA, 19 nt, Homo sapiens
  misc_RNA (1)...(19): siRNA sense strand
cgacuucccagauggugaa

SEQ ID NO: 21944 - RNA, 19 nt, Homo sapiens
  misc_RNA (1)...(19): siRNA sense strand
cgacgggaauggcgagaac

SEQ ID NO: 21945 - RNA, 19 nt, Homo sapiens
  misc_RNA (1)...(19): siRNA sense strand
cgaaccaggauaccaucua

SEQ ID NO: 21946 - RNA, 19 nt, Homo sapiens
  misc_RNA (1)...(19): siRNA sense strand
ggcaaguggcacagaauug

SEQ ID NO: 21947 - RNA, 19 nt, Homo sapiens
  misc_RNA (1)...(19): siRNA sense strand
gaagcgucacagaaauuug

SEQ ID NO: 21948 - RNA, 19 nt, Homo sapiens
  misc_RNA (1)...(19): siRNA sense strand
cggcuuuccuggguuuaaa

SEQ ID NO: 21949 - RNA, 19 nt, Homo sapiens
  misc_RNA (1)...(19): siRNA sense strand
ugauggagccagaggaaug

SEQ ID NO: 21950 - RNA, 19 nt, Homo sapiens
  misc_RNA (1)...(19): siRNA sense strand
gggaaggugcggaugacuu

SEQ ID NO: 21951 - RNA, 19 nt, Homo sapiens
  misc_RNA (1)...(19): siRNA sense strand
uggaugaggagguguuuga

SEQ ID NO: 21952 - RNA, 19 nt, Homo sapiens
  misc_RNA (1)...(19): siRNA sense strand
ggagaagacggagauaagg

SEQ ID NO: 21953 - RNA, 19 nt, Homo sapiens
  misc_RNA (1)...(19): siRNA sense strand
caagguuuacugcaacuuc

SEQ ID NO: 21954 - RNA, 19 nt, Homo sapiens
  misc_RNA (1)...(19): siRNA sense strand
ucucagcguccacaagaaa

SEQ ID NO: 21955 - RNA, 19 nt, Homo sapiens
  misc_RNA (1)...(19): siRNA sense strand
gcccggaugucgcuuacag

SEQ ID NO: 21956 - RNA, 19 nt, Homo sapiens
  misc_RNA (1)...(19): siRNA sense strand
gcgagaacuacguggacua

SEQ ID NO: 21957 - RNA, 19 nt, Homo sapiens
  misc_RNA (1)...(19): siRNA sense strand
gcagacagggagagaaagg

SEQ ID NO: 21958 - RNA, 19 nt, Homo sapiens
  misc_RNA (1)...(19): siRNA sense strand
gaaggucccagaggcuuuc

SEQ ID NO: 21959 - RNA, 19 nt, Homo sapiens
  misc_RNA (1)...(19): siRNA sense strand
aggcgagacugguuuccaa

SEQ ID NO: 21960 - RNA, 19 nt, Homo sapiens
  misc_RNA (1)...(19): siRNA sense strand
uaugaugaccucaccuaug

SEQ ID NO: 21961 - RNA, 19 nt, Homo sapiens
  misc_RNA (1)...(19): siRNA sense strand
cuuacagagucaccaaaga

SEQ ID NO: 21962 - RNA, 19 nt, Homo sapiens
  misc_RNA (1)...(19): siRNA sense strand
cuacacgcccucaccguau

SEQ ID NO: 21963 - RNA, 19 nt, Homo sapiens
  misc_RNA (1)...(19): siRNA sense strand
agacgguucuggagaucga

SEQ ID NO: 21964 - RNA, 19 nt, Homo sapiens
  misc_RNA (1)...(19): siRNA sense strand
gggagcucuuggacugaaa

SEQ ID NO: 21965 - RNA, 19 nt, Homo sapiens
  misc_RNA (1)...(19): siRNA sense strand
ccugaagguucuagauuuu

SEQ ID NO: 21966 - RNA, 19 nt, Homo sapiens
  misc_RNA (1)...(19): siRNA sense strand
gggccuugcuggaaaagaa

SEQ ID NO: 21967 - RNA, 19 nt, Homo sapiens
  misc_RNA (1)...(19): siRNA sense strand
aggagauucuggucccaaa

SEQ ID NO: 21968 - RNA, 19 nt, Homo sapiens
  misc_RNA (1)...(19): siRNA sense strand
gaacaucacuuacaucugu

SEQ ID NO: 21969 - RNA, 19 nt, Homo sapiens
  misc_RNA (1)...(19): siRNA sense strand
gaaauagccugcacucaga

SEQ ID NO: 21970 - RNA, 19 nt, Homo sapiens
  misc_RNA (1)...(19): siRNA sense strand
gcaaaugacuuagauauca

SEQ ID NO: 21971 - RNA, 19 nt, Homo sapiens
  misc_RNA (1)...(19): siRNA sense strand
guaaaucuccugacaauaa

SEQ ID NO: 21972 - RNA, 19 nt, Homo sapiens
  misc_RNA (1)...(19): siRNA sense strand
gaccaccaaucaccuaaua

SEQ ID NO: 21973 - RNA, 19 nt, Homo sapiens
  misc_RNA (1)...(19): siRNA sense strand
ugacagagguggcauagga

SEQ ID NO: 21974 - RNA, 19 nt, Homo sapiens
  misc_RNA (1)...(19): siRNA sense strand
ugacaaaggugaucaugga

SEQ ID NO: 21975 - RNA, 19 nt, Homo sapiens
  misc_RNA (1)...(19): siRNA sense strand
ugaaggauauggugaagaa

SEQ ID NO: 21976 - RNA, 19 nt, Homo sapiens
  misc_RNA (1)...(19): siRNA sense strand
gguauggucuugauaugaa

SEQ ID NO: 21977 - RNA, 19 nt, Homo sapiens
  misc_RNA (1)...(19): siRNA sense strand
gaauauagaacacagaaug

SEQ ID NO: 21978 - RNA, 19 nt, Homo sapiens
  misc_RNA (1)...(19): siRNA sense strand
gaagggagaugcugguucu

SEQ ID NO: 21979 - RNA, 19 nt, Homo sapiens
  misc_RNA (1)...(19): siRNA sense strand
ggaaugcuguccugucugu

SEQ ID NO: 21980 - RNA, 19 nt, Homo sapiens
  misc_RNA (1)...(19): siRNA sense strand
ggagagagagggagacuug

SEQ ID NO: 21981 - RNA, 19 nt, Homo sapiens
  misc_RNA (1)...(19): siRNA sense strand
uggaaucccuggaccauuu

SEQ ID NO: 21982 - RNA, 19 nt, Homo sapiens
  misc_RNA (1)...(19): siRNA sense strand
gaaccuggcagaaauggaa

SEQ ID NO: 21983 - RNA, 19 nt, Homo sapiens
  misc_RNA (1)...(19): siRNA sense strand
aaagggagaaccaggauua

SEQ ID NO: 21984 - RNA, 19 nt, Homo sapiens
  misc_RNA (1)...(19): siRNA sense strand
ggagguggcaauacaaauu

SEQ ID NO: 21985 - RNA, 19 nt, Homo sapiens
  misc_RNA (1)...(19): siRNA sense strand
ggaaacaggagaaacaugu

SEQ ID NO: 21986 - RNA, 19 nt, Homo sapiens
  misc_RNA (1)...(19): siRNA sense strand
ggauggugcuguuggagaa

SEQ ID NO: 21987 - RNA, 19 nt, Homo sapiens
  misc_RNA (1)...(19): siRNA sense strand
ugacuuagauaucaaagca

SEQ ID NO: 21988 - RNA, 19 nt, Homo sapiens
  misc_RNA (1)...(19): siRNA sense strand
caguaaaucuccugacaau

SEQ ID NO: 21989 - RNA, 19 nt, Homo sapiens
  misc_RNA (1)...(19): siRNA sense strand
agacgaggaugaaggauau

SEQ ID NO: 21990 - RNA, 19 nt, Homo sapiens
  misc_RNA (1)...(19): siRNA sense strand
gggaauggcuggaggacau

SEQ ID NO: 21991 - RNA, 19 nt, Homo sapiens
  misc_RNA (1)...(19): siRNA sense strand
ggaagaagacgaggaugaa

SEQ ID NO: 21992 - RNA, 19 nt, Homo sapiens
  misc_RNA (1)...(19): siRNA sense strand
gaaauugggccaguuuguu

SEQ ID NO: 21993 - RNA, 19 nt, Homo sapiens
  misc_RNA (1)...(19): siRNA sense strand
gcucuaagcggaauggaaa

SEQ ID NO: 21994 - RNA, 19 nt, Homo sapiens
  misc_RNA (1)...(19): siRNA sense strand
caaagcagagggaaauauu

SEQ ID NO: 21995 - RNA, 19 nt, Homo sapiens
  misc_RNA (1)...(19): siRNA sense strand
gaaacaggagaaacaugua

SEQ ID NO: 21996 - RNA, 19 nt, Homo sapiens
  misc_RNA (1)...(19): siRNA sense strand
gggcagagaggaauuguug

SEQ ID NO: 21997 - RNA, 19 nt, Homo sapiens
  misc_RNA (1)...(19): siRNA sense strand
gaagugggauuugcaggau

SEQ ID NO: 21998 - RNA, 19 nt, Homo sapiens
  misc_RNA (1)...(19): siRNA sense strand
gcaaacccauccaguguac

SEQ ID NO: 21999 - RNA, 19 nt, Homo sapiens
  misc_RNA (1)...(19): siRNA sense strand
gugaugaccuaaagcuuug

SEQ ID NO: 22000 - RNA, 19 nt, Homo sapiens
  misc_RNA (1)...(19): siRNA sense strand
gaugaaagcaugccagauc

SEQ ID NO: 22001 - RNA, 19 nt, Homo sapiens
  misc_RNA (1)...(19): siRNA sense strand
ggacugugccgacccugua

SEQ ID NO: 22002 - RNA, 19 nt, Homo sapiens
  misc_RNA (1)...(19): siRNA sense strand
gaacaaggaagugcuggaa

SEQ ID NO: 22003 - RNA, 19 nt, Homo sapiens
  misc_RNA (1)...(19): siRNA sense strand
gccaaagggugcucaagga

SEQ ID NO: 22004 - RNA, 19 nt, Homo sapiens
  misc_RNA (1)...(19): siRNA sense strand
aggauauggugaagaaaua

SEQ ID NO: 22005 - RNA, 19 nt, Homo sapiens
  misc_RNA (1)...(19): siRNA sense strand
ggcaauuugucucaauaaa

SEQ ID NO: 22006 - RNA, 19 nt, Homo sapiens
  misc_RNA (1)...(19): siRNA sense strand
aaagaagccucccagaaca

SEQ ID NO: 22007 - RNA, 19 nt, Homo sapiens
  misc_RNA (1)...(19): siRNA sense strand
ggcaggaccuccaggauca

SEQ ID NO: 22008 - RNA, 19 nt, Homo sapiens
  misc_RNA (1)...(19): siRNA sense strand
ucaaauggcuggguuggau

SEQ ID NO: 22009 - RNA, 19 nt, Homo sapiens
  misc_RNA (1)...(19): siRNA sense strand
ggccagauguacuuaaaca

SEQ ID NO: 22010 - RNA, 19 nt, Homo sapiens
  misc_RNA (1)...(19): siRNA sense strand
gggcaaaugacuuagauau

SEQ ID NO: 22011 - RNA, 19 nt, Homo sapiens
  misc_RNA (1)...(19): siRNA sense strand
agaccucuccucauucuua

SEQ ID NO: 22012 - RNA, 19 nt, Homo sapiens
  misc_RNA (1)...(19): siRNA sense strand
caaagcagaguggugaaua

SEQ ID NO: 22013 - RNA, 19 nt, Homo sapiens
  misc_RNA (1)...(19): siRNA sense strand
caccaggucuucaagguau

SEQ ID NO: 22014 - RNA, 19 nt, Homo sapiens
  misc_RNA (1)...(19): siRNA sense strand
caagaccucuccucauucu

SEQ ID NO: 22015 - RNA, 19 nt, Homo sapiens
  misc_RNA (1)...(19): siRNA sense strand
ugaaagaggagaacaagga

SEQ ID NO: 22016 - RNA, 19 nt, Homo sapiens
  misc_RNA (1)...(19): siRNA sense strand
aaagggugcucaaggagaa

SEQ ID NO: 22017 - RNA, 19 nt, Homo sapiens
  misc_RNA (1)...(19): siRNA sense strand
gcaauaggaacugauggua

SEQ ID NO: 22018 - RNA, 19 nt, Homo sapiens
  misc_RNA (1)...(19): siRNA sense strand
gagggucucaguucgcuua

SEQ ID NO: 22019 - RNA, 19 nt, Homo sapiens
  misc_RNA (1)...(19): siRNA sense strand
uaggauacauggacgauca

SEQ ID NO: 22020 - RNA, 19 nt, Homo sapiens
  misc_RNA (1)...(19): siRNA sense strand
gagguggcaauacaaauuu

SEQ ID NO: 22021 - RNA, 19 nt, Homo sapiens
  misc_RNA (1)...(19): siRNA sense strand
guagucagauugaaaccau

SEQ ID NO: 22022 - RNA, 19 nt, Homo sapiens
  misc_RNA (1)...(19): siRNA sense strand
agcaagaccucuccucauu

SEQ ID NO: 22023 - RNA, 19 nt, Homo sapiens
  misc_RNA (1)...(19): siRNA sense strand
gaaagaggaauugcaggaa

SEQ ID NO: 22024 - RNA, 19 nt, Homo sapiens
  misc_RNA (1)...(19): siRNA sense strand
gaaguuggagcaccugguu

SEQ ID NO: 22025 - RNA, 19 nt, Homo sapiens
  misc_RNA (1)...(19): siRNA sense strand
uccgggagcucguggauuu

SEQ ID NO: 22026 - RNA, 19 nt, Homo sapiens
  misc_RNA (1)...(19): siRNA sense strand
gcacaugguaugccuggaa

SEQ ID NO: 22027 - RNA, 19 nt, Homo sapiens
  misc_RNA (1)...(19): siRNA sense strand
uccaggcucugaugguuua

SEQ ID NO: 22028 - RNA, 19 nt, Homo sapiens
  misc_RNA (1)...(19): siRNA sense strand
caagauagaaugccaggau

SEQ ID NO: 22029 - RNA, 19 nt, Homo sapiens
  misc_RNA (1)...(19): siRNA sense strand
ggugaauacuggauugauc

SEQ ID NO: 22030 - RNA, 19 nt, Homo sapiens
  misc_RNA (1)...(19): siRNA sense strand
ugaagucacucaguaguca

SEQ ID NO: 22031 - RNA, 19 nt, Homo sapiens
  misc_RNA (1)...(19): siRNA sense strand
cggagcaguuggcccguua

SEQ ID NO: 22032 - RNA, 19 nt, Homo sapiens
  misc_RNA (1)...(19): siRNA sense strand
ggucucaguucgcuuaugg

SEQ ID NO: 22033 - RNA, 19 nt, Homo sapiens
  misc_RNA (1)...(19): siRNA sense strand
caacauggaaacaggagaa

SEQ ID NO: 22034 - RNA, 19 nt, Homo sapiens
  misc_RNA (1)...(19): siRNA sense strand
cagauccacuuccugaguu

SEQ ID NO: 22035 - RNA, 19 nt, Homo sapiens
  misc_RNA (1)...(19): siRNA sense strand
aaacagggacauuuggaaa

SEQ ID NO: 22036 - RNA, 19 nt, Homo sapiens
  misc_RNA (1)...(19): siRNA sense strand
gaaaugugggcaagacugu

SEQ ID NO: 22037 - RNA, 19 nt, Homo sapiens
  misc_RNA (1)...(19): siRNA sense strand
acaaggaagugcuggaauc

SEQ ID NO: 22038 - RNA, 19 nt, Homo sapiens
  misc_RNA (1)...(19): siRNA sense strand
ucagggaauugauggagaa

SEQ ID NO: 22039 - RNA, 19 nt, Homo sapiens
  misc_RNA (1)...(19): siRNA sense strand
caacgaggugcacauggua

SEQ ID NO: 22040 - RNA, 19 nt, Homo sapiens
  misc_RNA (1)...(19): siRNA sense strand
aaagcagagggaaauauua

SEQ ID NO: 22041 - RNA, 19 nt, Homo sapiens
  misc_RNA (1)...(19): siRNA sense strand
gccaguaaaucuccugaca

SEQ ID NO: 22042 - RNA, 19 nt, Homo sapiens
  misc_RNA (1)...(19): siRNA sense strand
gaccuaaagcuuugccauu

SEQ ID NO: 22043 - RNA, 19 nt, Homo sapiens
  misc_RNA (1)...(19): siRNA sense strand
ugaaggcccuaaaggugaa

SEQ ID NO: 22044 - RNA, 19 nt, Homo sapiens
  misc_RNA (1)...(19): siRNA sense strand
agagggaaauauuagauuc

SEQ ID NO: 22045 - RNA, 19 nt, Homo sapiens
  misc_RNA (1)...(19): siRNA sense strand
gcagagggaaauauuagau

SEQ ID NO: 22046 - RNA, 19 nt, Homo sapiens
  misc_RNA (1)...(19): siRNA sense strand
ggagaccaccaaucaccua

SEQ ID NO: 22047 - RNA, 19 nt, Homo sapiens
  misc_RNA (1)...(19): siRNA sense strand
uaaccaaggaucuguugaa

SEQ ID NO: 22048 - RNA, 19 nt, Homo sapiens
  misc_RNA (1)...(19): siRNA sense strand
gggagaaccaggauuagug

SEQ ID NO: 22049 - RNA, 19 nt, Homo sapiens
  misc_RNA (1)...(19): siRNA sense strand
aaauugggccaguuuguuu

SEQ ID NO: 22050 - RNA, 19 nt, Homo sapiens
  misc_RNA (1)...(19): siRNA sense strand
caaaggggcaaaugacuua

SEQ ID NO: 22051 - RNA, 19 nt, Homo sapiens
  misc_RNA (1)...(19): siRNA sense strand
gcacgugugaugaccuaaa

SEQ ID NO: 22052 - RNA, 19 nt, Homo sapiens
  misc_RNA (1)...(19): siRNA sense strand
gaagggccacagaggcuuu

SEQ ID NO: 22053 - RNA, 19 nt, Homo sapiens
  misc_RNA (1)...(19): siRNA sense strand
uaaaguugguccuuauggu

SEQ ID NO: 22054 - RNA, 19 nt, Homo sapiens
  misc_RNA (1)...(19): siRNA sense strand
uggaaaagaugguaaaguu

SEQ ID NO: 22055 - RNA, 19 nt, Homo sapiens
  misc_RNA (1)...(19): siRNA sense strand
ccuccaggcuccauaggaa

SEQ ID NO: 22056 - RNA, 19 nt, Homo sapiens
  misc_RNA (1)...(19): siRNA sense strand
aaauggaaauccuggugaa

SEQ ID NO: 22057 - RNA, 19 nt, Homo sapiens
  misc_RNA (1)...(19): siRNA sense strand
gggaauugauggagaacca

SEQ ID NO: 22058 - RNA, 19 nt, Homo sapiens
  misc_RNA (1)...(19): siRNA sense strand
uguccugucuguucacaaa

SEQ ID NO: 22059 - RNA, 19 nt, Homo sapiens
  misc_RNA (1)...(19): siRNA sense strand
aaacugggcggaagcaaga

SEQ ID NO: 22060 - RNA, 19 nt, Homo sapiens
  misc_RNA (1)...(19): siRNA sense strand
aggcacagcuggaaaugau

SEQ ID NO: 22061 - RNA, 19 nt, Homo sapiens
  misc_RNA (1)...(19): siRNA sense strand
ggacacaaaggucuugaag

SEQ ID NO: 22062 - RNA, 19 nt, Homo sapiens
  misc_RNA (1)...(19): siRNA sense strand
ggacaacgaggugcacaug

SEQ ID NO: 22063 - RNA, 19 nt, Homo sapiens
  misc_RNA (1)...(19): siRNA sense strand
ggaugaaggauauggugaa

SEQ ID NO: 22064 - RNA, 19 nt, Homo sapiens
  misc_RNA (1)...(19): siRNA sense strand
gccauucucugugacaaga

SEQ ID NO: 22065 - RNA, 19 nt, Homo sapiens
  misc_RNA (1)...(19): siRNA sense strand
ugggaaaccuggagaagca

SEQ ID NO: 22066 - RNA, 19 nt, Homo sapiens
  misc_RNA (1)...(19): siRNA sense strand
cauucucugugacaagaua

SEQ ID NO: 22067 - RNA, 19 nt, Homo sapiens
  misc_RNA (1)...(19): siRNA sense strand
ccauuacucagaugacuuu

SEQ ID NO: 22068 - RNA, 19 nt, Homo sapiens
  misc_RNA (1)...(19): siRNA sense strand
gaacugaccauccagaaua

SEQ ID NO: 22069 - RNA, 19 nt, Homo sapiens
  misc_RNA (1)...(19): siRNA sense strand
ggacacagcugcccaaagg

SEQ ID NO: 22070 - RNA, 19 nt, Homo sapiens
  misc_RNA (1)...(19): siRNA sense strand
gccaguggauuucggauua

SEQ ID NO: 22071 - RNA, 19 nt, Homo sapiens
  misc_RNA (1)...(19): siRNA sense strand
gaaaggagaacguggagaa

SEQ ID NO: 22072 - RNA, 19 nt, Homo sapiens
  misc_RNA (1)...(19): siRNA sense strand
ggucacagcucacagauac

SEQ ID NO: 22073 - RNA, 19 nt, Homo sapiens
  misc_RNA (1)...(19): siRNA sense strand
gaauggugcugcaggcaaa

SEQ ID NO: 22074 - RNA, 19 nt, Homo sapiens
  misc_RNA (1)...(19): siRNA sense strand
gggcacaccugucuccauu

SEQ ID NO: 22075 - RNA, 19 nt, Homo sapiens
  misc_RNA (1)...(19): siRNA sense strand
gggcuuggauggugacaaa

SEQ ID NO: 22076 - RNA, 19 nt, Homo sapiens
  misc_RNA (1)...(19): siRNA sense strand
ggaaacugcuggcaucaag

SEQ ID NO: 22077 - RNA, 19 nt, Homo sapiens
  misc_RNA (1)...(19): siRNA sense strand
guacugcccucugauguga

SEQ ID NO: 22078 - RNA, 19 nt, Homo sapiens
  misc_RNA (1)...(19): siRNA sense strand
gcacaccugucuccauugu

SEQ ID NO: 22079 - RNA, 19 nt, Homo sapiens
  misc_RNA (1)...(19): siRNA sense strand
gcacugacgcuucuguuga

SEQ ID NO: 22080 - RNA, 19 nt, Homo sapiens
  misc_RNA (1)...(19): siRNA sense strand
cagcucaucugucaccauu

SEQ ID NO: 22081 - RNA, 19 nt, Homo sapiens
  misc_RNA (1)...(19): siRNA sense strand
gccagcagcucaucuguca

SEQ ID NO: 22082 - RNA, 19 nt, Homo sapiens
  misc_RNA (1)...(19): siRNA sense strand
cuugagaggugacauauuc

SEQ ID NO: 22083 - RNA, 19 nt, Homo sapiens
  misc_RNA (1)...(19): siRNA sense strand
ccacauccauccuccuuuc

SEQ ID NO: 22084 - RNA, 19 nt, Homo sapiens
  misc_RNA (1)...(19): siRNA sense strand
gaugaugaguacucugaau

SEQ ID NO: 22085 - RNA, 19 nt, Homo sapiens
  misc_RNA (1)...(19): siRNA sense strand
acaccugucuccauuguug

SEQ ID NO: 22086 - RNA, 19 nt, Homo sapiens
  misc_RNA (1)...(19): siRNA sense strand
gcucaucugucaccauuac

SEQ ID NO: 22087 - RNA, 19 nt, Homo sapiens
  misc_RNA (1)...(19): siRNA sense strand
gcauccagcuacauccuau

SEQ ID NO: 22088 - RNA, 19 nt, Homo sapiens
  misc_RNA (1)...(19): siRNA sense strand
gagaaaucccaguugguuu

SEQ ID NO: 22089 - RNA, 19 nt, Homo sapiens
  misc_RNA (1)...(19): siRNA sense strand
guggaucgguugcuggaaa

SEQ ID NO: 22090 - RNA, 19 nt, Homo sapiens
  misc_RNA (1)...(19): siRNA sense strand
gaggagagccuggaagugu

SEQ ID NO: 22091 - RNA, 19 nt, Homo sapiens
  misc_RNA (1)...(19): siRNA sense strand
ucagacagcauucgacuug

SEQ ID NO: 22092 - RNA, 19 nt, Homo sapiens
  misc_RNA (1)...(19): siRNA sense strand
gagggaaugccaaccguuu

SEQ ID NO: 22093 - RNA, 19 nt, Homo sapiens
  misc_RNA (1)...(19): siRNA sense strand
gggcugcaauucuccaugu

SEQ ID NO: 22094 - RNA, 19 nt, Homo sapiens
  misc_RNA (1)...(19): siRNA sense strand
ucacuggagccacagcuua

SEQ ID NO: 22095 - RNA, 19 nt, Homo sapiens
  misc_RNA (1)...(19): siRNA sense strand
gaagggagacaagggagaa

SEQ ID NO: 22096 - RNA, 19 nt, Homo sapiens
  misc_RNA (1)...(19): siRNA sense strand
gggagagccuggugacaag

SEQ ID NO: 22097 - RNA, 19 nt, Homo sapiens
  misc_RNA (1)...(19): siRNA sense strand
ugggaaaccuggccugaau

SEQ ID NO: 22098 - RNA, 19 nt, Homo sapiens
  misc_RNA (1)...(19): siRNA sense strand
gggcuucccuggagcagau

SEQ ID NO: 22099 - RNA, 19 nt, Homo sapiens
  misc_RNA (1)...(19): siRNA sense strand
guggagaccugggaugaga

SEQ ID NO: 22100 - RNA, 19 nt, Homo sapiens
  misc_RNA (1)...(19): siRNA sense strand
ugacugugauugcccucua

SEQ ID NO: 22101 - RNA, 19 nt, Homo sapiens
  misc_RNA (1)...(19): siRNA sense strand
ugucggaccuaaaggagaa

SEQ ID NO: 22102 - RNA, 19 nt, Homo sapiens
  misc_RNA (1)...(19): siRNA sense strand
gaagggagagaaaggagau

SEQ ID NO: 22103 - RNA, 19 nt, Homo sapiens
  misc_RNA (1)...(19): siRNA sense strand
aaaccuggccugaauggaa

SEQ ID NO: 22104 - RNA, 19 nt, Homo sapiens
  misc_RNA (1)...(19): siRNA sense strand
ugucaggcauccuucacua

SEQ ID NO: 22105 - RNA, 19 nt, Homo sapiens
  misc_RNA (1)...(19): siRNA sense strand
gaguauacggugcauguga

SEQ ID NO: 22106 - RNA, 19 nt, Homo sapiens
  misc_RNA (1)...(19): siRNA sense strand
gcguggagcuccugguauc

SEQ ID NO: 22107 - RNA, 19 nt, Homo sapiens
  misc_RNA (1)...(19): siRNA sense strand
uggcgucucuuacaucuuc

SEQ ID NO: 22108 - RNA, 19 nt, Homo sapiens
  misc_RNA (1)...(19): siRNA sense strand
ggaccagagcugccuguga

SEQ ID NO: 22109 - RNA, 19 nt, Homo sapiens
  misc_RNA (1)...(19): siRNA sense strand
guucaucgcaucuggauca

SEQ ID NO: 22110 - RNA, 19 nt, Homo sapiens
  misc_RNA (1)...(19): siRNA sense strand
gcaggaaggccaggagaga

SEQ ID NO: 22111 - RNA, 19 nt, Homo sapiens
  misc_RNA (1)...(19): siRNA sense strand
ccgcugacauuguguucuu

SEQ ID NO: 22112 - RNA, 19 nt, Homo sapiens
  misc_RNA (1)...(19): siRNA sense strand
cgaaauggcagcccuggau

SEQ ID NO: 22113 - RNA, 19 nt, Homo sapiens
  misc_RNA (1)...(19): siRNA sense strand
aggacgagauggugaaguu

SEQ ID NO: 22114 - RNA, 19 nt, Homo sapiens
  misc_RNA (1)...(19): siRNA sense strand
ggaacugaccauccagaau

SEQ ID NO: 22115 - RNA, 19 nt, Homo sapiens
  misc_RNA (1)...(19): siRNA sense strand
aguauucuguggaggagua

SEQ ID NO: 22116 - RNA, 19 nt, Homo sapiens
  misc_RNA (1)...(19): siRNA sense strand
agguuggccugcugucuua

SEQ ID NO: 22117 - RNA, 19 nt, Homo sapiens
  misc_RNA (1)...(19): siRNA sense strand
ccauguggcuggcguggau

SEQ ID NO: 22118 - RNA, 19 nt, Homo sapiens
  misc_RNA (1)...(19): siRNA sense strand
gaccgugagcacccuauuu

SEQ ID NO: 22119 - RNA, 19 nt, Homo sapiens
  misc_RNA (1)...(19): siRNA sense strand
ggagaacagggcagagaug

SEQ ID NO: 22120 - RNA, 19 nt, Homo sapiens
  misc_RNA (1)...(19): siRNA sense strand
ggagaggauggacgaaaug

SEQ ID NO: 22121 - RNA, 19 nt, Homo sapiens
  misc_RNA (1)...(19): siRNA sense strand
uuacgccgcugacauugug

SEQ ID NO: 22122 - RNA, 19 nt, Homo sapiens
  misc_RNA (1)...(19): siRNA sense strand
cgacuuggaugacguucag

SEQ ID NO: 22123 - RNA, 19 nt, Homo sapiens
  misc_RNA (1)...(19): siRNA sense strand
cccaugaccuuggcauuau

SEQ ID NO: 22124 - RNA, 19 nt, Homo sapiens
  misc_RNA (1)...(19): siRNA sense strand
ggcuuaauguggugauguu

SEQ ID NO: 22125 - RNA, 19 nt, Homo sapiens
  misc_RNA (1)...(19): siRNA sense strand
agacagcauucgacuugga

SEQ ID NO: 22126 - RNA, 19 nt, Homo sapiens
  misc_RNA (1)...(19): siRNA sense strand
uggagaggauggacgaaau

SEQ ID NO: 22127 - RNA, 19 nt, Homo sapiens
  misc_RNA (1)...(19): siRNA sense strand
gggugaggcuggagagaag

SEQ ID NO: 22128 - RNA, 19 nt, Homo sapiens
  misc_RNA (1)...(19): siRNA sense strand
ggccugagaggacaaguug

SEQ ID NO: 22129 - RNA, 19 nt, Homo sapiens
  misc_RNA (1)...(19): siRNA sense strand
ggugaugguucugcuagug

SEQ ID NO: 22130 - RNA, 19 nt, Homo sapiens
  misc_RNA (1)...(19): siRNA sense strand
ccacaugccacucaagaca

SEQ ID NO: 22131 - RNA, 19 nt, Homo sapiens
  misc_RNA (1)...(19): siRNA sense strand
gccacaggauacaggguuu

SEQ ID NO: 22132 - RNA, 19 nt, Homo sapiens
  misc_RNA (1)...(19): siRNA sense strand
gaaacuccacuugcuguuc

SEQ ID NO: 22133 - RNA, 19 nt, Homo sapiens
  misc_RNA (1)...(19): siRNA sense strand
cagccaauccuugagagua

SEQ ID NO: 22134 - RNA, 19 nt, Homo sapiens
  misc_RNA (1)...(19): siRNA sense strand
gaagcuccuugggauagug

SEQ ID NO: 22135 - RNA, 19 nt, Homo sapiens
  misc_RNA (1)...(19): siRNA sense strand
caagggugaccgaggcuuu

SEQ ID NO: 22136 - RNA, 19 nt, Homo sapiens
  misc_RNA (1)...(19): siRNA sense strand
caucggcuuuccuggagaa

SEQ ID NO: 22137 - RNA, 19 nt, Homo sapiens
  misc_RNA (1)...(19): siRNA sense strand
aaccuggccugaauggaaa

SEQ ID NO: 22138 - RNA, 19 nt, Homo sapiens
  misc_RNA (1)...(19): siRNA sense strand
gcuacaagguccaguacac

SEQ ID NO: 22139 - RNA, 19 nt, Homo sapiens
  misc_RNA (1)...(19): siRNA sense strand
ucaaugacuucagcaucuu

SEQ ID NO: 22140 - RNA, 19 nt, Homo sapiens
  misc_RNA (1)...(19): siRNA sense strand
ccacaggggucuccagguu

SEQ ID NO: 22141 - RNA, 19 nt, Homo sapiens
  misc_RNA (1)...(19): siRNA sense strand
agagaaaucccaguugguu

SEQ ID NO: 22142 - RNA, 19 nt, Homo sapiens
  misc_RNA (1)...(19): siRNA sense strand
ucggaccacugcccuagaa

SEQ ID NO: 22143 - RNA, 19 nt, Homo sapiens
  misc_RNA (1)...(19): siRNA sense strand
caaggugucuguggaugag

SEQ ID NO: 22144 - RNA, 19 nt, Homo sapiens
  misc_RNA (1)...(19): siRNA sense strand
ggaaaccuggccugaaugg

SEQ ID NO: 22145 - RNA, 19 nt, Homo sapiens
  misc_RNA (1)...(19): siRNA sense strand
gacccggguuugccuggaa

SEQ ID NO: 22146 - RNA, 19 nt, Homo sapiens
  misc_RNA (1)...(19): siRNA sense strand
uggugaaguuggagagaaa

SEQ ID NO: 22147 - RNA, 19 nt, Homo sapiens
  misc_RNA (1)...(19): siRNA sense strand
ccacccggcuugguucuuc

SEQ ID NO: 22148 - RNA, 19 nt, Homo sapiens
  misc_RNA (1)...(19): siRNA sense strand
ccacuguucccacugaaug

SEQ ID NO: 22149 - RNA, 19 nt, Homo sapiens
  misc_RNA (1)...(19): siRNA sense strand
caccagauacucccaggaa

SEQ ID NO: 22150 - RNA, 19 nt, Homo sapiens
  misc_RNA (1)...(19): siRNA sense strand
ggaaacuccacuugcuguu

SEQ ID NO: 22151 - RNA, 19 nt, Homo sapiens
  misc_RNA (1)...(19): siRNA sense strand
ggccggaacugaccaucca

SEQ ID NO: 22152 - RNA, 19 nt, Homo sapiens
  misc_RNA (1)...(19): siRNA sense strand
guaccaagugacugugauu

SEQ ID NO: 22153 - RNA, 19 nt, Homo sapiens
  misc_RNA (1)...(19): siRNA sense strand
uggaaaagauggagacaga

SEQ ID NO: 22154 - RNA, 19 nt, Homo sapiens
  misc_RNA (1)...(19): siRNA sense strand
uggcagcccuggaucaucu

SEQ ID NO: 22155 - RNA, 19 nt, Homo sapiens
  misc_RNA (1)...(19): siRNA sense strand
ucccaugaccuuggcauua

SEQ ID NO: 22156 - RNA, 19 nt, Homo sapiens
  misc_RNA (1)...(19): siRNA sense strand
gggaagauggucagaaagg

SEQ ID NO: 22157 - RNA, 19 nt, Homo sapiens
  misc_RNA (1)...(19): siRNA sense strand
ggugggaccugcuguugcu

SEQ ID NO: 22158 - RNA, 19 nt, Homo sapiens
  misc_RNA (1)...(19): siRNA sense strand
cugcagauccucaaugcuu

SEQ ID NO: 22159 - RNA, 19 nt, Homo sapiens
  misc_RNA (1)...(19): siRNA sense strand
ccaaggugucuguggauga

SEQ ID NO: 22160 - RNA, 19 nt, Homo sapiens
  misc_RNA (1)...(19): siRNA sense strand
gagcggacuggaugggaaa

SEQ ID NO: 22161 - RNA, 19 nt, Homo sapiens
  misc_RNA (1)...(19): siRNA sense strand
gcccagagaaaucccaguu

SEQ ID NO: 22162 - RNA, 19 nt, Homo sapiens
  misc_RNA (1)...(19): siRNA sense strand
ggaggaagggagagaaagg

SEQ ID NO: 22163 - RNA, 19 nt, Homo sapiens
  misc_RNA (1)...(19): siRNA sense strand
gagccuggcgucucuuaca

SEQ ID NO: 22164 - RNA, 19 nt, Homo sapiens
  misc_RNA (1)...(19): siRNA sense strand
cagcacagggagagaguga

SEQ ID NO: 22165 - RNA, 19 nt, Homo sapiens
  misc_RNA (1)...(19): siRNA sense strand
ugaagcgaguugccucaca

SEQ ID NO: 22166 - RNA, 19 nt, Homo sapiens
  misc_RNA (1)...(19): siRNA sense strand
gaucgacucggugacuuug

SEQ ID NO: 22167 - RNA, 19 nt, Homo sapiens
  misc_RNA (1)...(19): siRNA sense strand
gcagucaucguggcucgaa

SEQ ID NO: 22168 - RNA, 19 nt, Homo sapiens
  misc_RNA (1)...(19): siRNA sense strand
gacaagaaguccuaucguu

SEQ ID NO: 22169 - RNA, 19 nt, Homo sapiens
  misc_RNA (1)...(19): siRNA sense strand
ggagaucacguuccugaaa

SEQ ID NO: 22170 - RNA, 19 nt, Homo sapiens
  misc_RNA (1)...(19): siRNA sense strand
ggaagcagauggagcaaac

SEQ ID NO: 22171 - RNA, 19 nt, Homo sapiens
  misc_RNA (1)...(19): siRNA sense strand
gagggcacguuccauguga

SEQ ID NO: 22172 - RNA, 19 nt, Homo sapiens
  misc_RNA (1)...(19): siRNA sense strand
ggacagugauggcgauggu

SEQ ID NO: 22173 - RNA, 19 nt, Homo sapiens
  misc_RNA (1)...(19): siRNA sense strand
ugaacacggucacggauga

SEQ ID NO: 22174 - RNA, 19 nt, Homo sapiens
  misc_RNA (1)...(19): siRNA sense strand
gcagauggagcaaacguau

SEQ ID NO: 22175 - RNA, 19 nt, Homo sapiens
  misc_RNA (1)...(19): siRNA sense strand
cagacaaggugguagacaa

SEQ ID NO: 22176 - RNA, 19 nt, Homo sapiens
  misc_RNA (1)...(19): siRNA sense strand
cgaguccgcuguaucaaca

SEQ ID NO: 22177 - RNA, 19 nt, Homo sapiens
  misc_RNA (1)...(19): siRNA sense strand
cgacuuugaugcagacaag

SEQ ID NO: 22178 - RNA, 19 nt, Homo sapiens
  misc_RNA (1)...(19): siRNA sense strand
ggguuacacugccuucaau

SEQ ID NO: 22179 - RNA, 19 nt, Homo sapiens
  misc_RNA (1)...(19): siRNA sense strand
ggaacgcucuguggcauac

SEQ ID NO: 22180 - RNA, 19 nt, Homo sapiens
  misc_RNA (1)...(19): siRNA sense strand
gagaucacguuccugaaaa

SEQ ID NO: 22181 - RNA, 19 nt, Homo sapiens
  misc_RNA (1)...(19): siRNA sense strand
uaugcgggcuucaucuuug

SEQ ID NO: 22182 - RNA, 19 nt, Homo sapiens
  misc_RNA (1)...(19): siRNA sense strand
ugugagaccgggcaacaua

SEQ ID NO: 22183 - RNA, 19 nt, Homo sapiens
  misc_RNA (1)...(19): siRNA sense strand
cgacaccgccugcguucuu

SEQ ID NO: 22184 - RNA, 19 nt, Homo sapiens
  misc_RNA (1)...(19): siRNA sense strand
gcacugcaccgacgucaac

SEQ ID NO: 22185 - RNA, 19 nt, Homo sapiens
  misc_RNA (1)...(19): siRNA sense strand
ggaugccugugacaacugu

SEQ ID NO: 22186 - RNA, 19 nt, Homo sapiens
  misc_RNA (1)...(19): siRNA sense strand
cgacgacgacgacgacaau

SEQ ID NO: 22187 - RNA, 19 nt, Homo sapiens
  misc_RNA (1)...(19): siRNA sense strand
gagccuggcauccaacuca

SEQ ID NO: 22188 - RNA, 19 nt, Homo sapiens
  misc_RNA (1)...(19): siRNA sense strand
gagaucgugcagacaauga

SEQ ID NO: 22189 - RNA, 19 nt, Homo sapiens
  misc_RNA (1)...(19): siRNA sense strand
ccaacuggguggugcucaa

SEQ ID NO: 22190 - RNA, 19 nt, Homo sapiens
  misc_RNA (1)...(19): siRNA sense strand
gaagaacgacgaccaaaag

SEQ ID NO: 22191 - RNA, 19 nt, Homo sapiens
  misc_RNA (1)...(19): siRNA sense strand
gagggugacgcgcagauug

SEQ ID NO: 22192 - RNA, 19 nt, Homo sapiens
  misc_RNA (1)...(19): siRNA sense strand
gcagaugcuucgggaacug

SEQ ID NO: 22193 - RNA, 19 nt, Homo sapiens
  misc_RNA (1)...(19): siRNA sense strand
gcaaccaggccgacaacug

SEQ ID NO: 22194 - RNA, 19 nt, Homo sapiens
  misc_RNA (1)...(19): siRNA sense strand
gggagaucgugcagacaau

SEQ ID NO: 22195 - RNA, 19 nt, Homo sapiens
  misc_RNA (1)...(19): siRNA sense strand
ucaauggcguggacuucga

SEQ ID NO: 22196 - RNA, 19 nt, Homo sapiens
  misc_RNA (1)...(19): siRNA sense strand
ggaaggacccgcgaaacgu

SEQ ID NO: 22197 - RNA, 19 nt, Homo sapiens
  misc_RNA (1)...(19): siRNA sense strand
agauggagcaaacguauug

SEQ ID NO: 22198 - RNA, 19 nt, Homo sapiens
  misc_RNA (1)...(19): siRNA sense strand
cgacagcaacguggucuug

SEQ ID NO: 22199 - RNA, 19 nt, Homo sapiens
  misc_RNA (1)...(19): siRNA sense strand
gcaacacggacgaggacaa

SEQ ID NO: 22200 - RNA, 19 nt, Homo sapiens
  misc_RNA (1)...(19): siRNA sense strand
caucagggugcgauucuau

SEQ ID NO: 22201 - RNA, 19 nt, Homo sapiens
  misc_RNA (1)...(19): siRNA sense strand
ggaggacucagaccacgau

SEQ ID NO: 22202 - RNA, 19 nt, Homo sapiens
  misc_RNA (1)...(19): siRNA sense strand
gaccagaaggacagugaug

SEQ ID NO: 22203 - RNA, 19 nt, Homo sapiens
  misc_RNA (1)...(19): siRNA sense strand
acaaggugguagacaagau

SEQ ID NO: 22204 - RNA, 19 nt, Homo sapiens
  misc_RNA (1)...(19): siRNA sense strand
ccagaagaacgacgaccaa

SEQ ID NO: 22205 - RNA, 19 nt, Homo sapiens
  misc_RNA (1)...(19): siRNA sense strand
ggagaucgugcagacaaug

SEQ ID NO: 22206 - RNA, 19 nt, Homo sapiens
  misc_RNA (1)...(19): siRNA sense strand
cguuaccgcugcaaugaca

SEQ ID NO: 22207 - RNA, 19 nt, Homo sapiens
  misc_RNA (1)...(19): siRNA sense strand
acucaaggcugugaagucu

SEQ ID NO: 22208 - RNA, 19 nt, Homo sapiens
  misc_RNA (1)...(19): siRNA sense strand
gacaucaacgagugugaga

SEQ ID NO: 22209 - RNA, 19 nt, Homo sapiens
  misc_RNA (1)...(19): siRNA sense strand
acagcaacguggucuugga

SEQ ID NO: 22210 - RNA, 19 nt, Homo sapiens
  misc_RNA (1)...(19): siRNA sense strand
ucagggugcgauucuauga

SEQ ID NO: 22211 - RNA, 19 nt, Homo sapiens
  misc_RNA (1)...(19): siRNA sense strand
gugagaccgggcaacauaa

SEQ ID NO: 22212 - RNA, 19 nt, Homo sapiens
  misc_RNA (1)...(19): siRNA sense strand
cagaagaacgacgaccaaa

SEQ ID NO: 22213 - RNA, 19 nt, Homo sapiens
  misc_RNA (1)...(19): siRNA sense strand
gcuucuacguggucaugug

SEQ ID NO: 22214 - RNA, 19 nt, Homo sapiens
  misc_RNA (1)...(19): siRNA sense strand
agacggacaucaggacucu

SEQ ID NO: 22215 - RNA, 19 nt, Homo sapiens
  misc_RNA (1)...(19): siRNA sense strand
cgacuaugcgggcuucauc

SEQ ID NO: 22216 - RNA, 19 nt, Homo sapiens
  misc_RNA (1)...(19): siRNA sense strand
ucagggagaucacguuccu

SEQ ID NO: 22217 - RNA, 19 nt, Homo sapiens
  misc_RNA (1)...(19): siRNA sense strand
ggagggugacgcgcagauu

SEQ ID NO: 22218 - RNA, 19 nt, Homo sapiens
  misc_RNA (1)...(19): siRNA sense strand
ugacggagucccugacagu

SEQ ID NO: 22219 - RNA, 19 nt, Homo sapiens
  misc_RNA (1)...(19): siRNA sense strand
gaaacguggguuggaagga

SEQ ID NO: 22220 - RNA, 19 nt, Homo sapiens
  misc_RNA (1)...(19): siRNA sense strand
ccaacuccgugugcaucaa

SEQ ID NO: 22221 - RNA, 19 nt, Homo sapiens
  misc_RNA (1)...(19): siRNA sense strand
gggaacugcaggaaaccaa

SEQ ID NO: 22222 - RNA, 19 nt, Homo sapiens
  misc_RNA (1)...(19): siRNA sense strand
cuucagggccuuccagaca

SEQ ID NO: 22223 - RNA, 19 nt, Homo sapiens
  misc_RNA (1)...(19): siRNA sense strand
cagaccagaaggacaguga

SEQ ID NO: 22224 - RNA, 19 nt, Homo sapiens
  misc_RNA (1)...(19): siRNA sense strand
caacacggacgaggacaag

SEQ ID NO: 22225 - RNA, 19 nt, Homo sapiens
  misc_RNA (1)...(19): siRNA sense strand
caaggugguagacaagauc

SEQ ID NO: 22226 - RNA, 19 nt, Homo sapiens
  misc_RNA (1)...(19): siRNA sense strand
ccaggacgacuuugaugca

SEQ ID NO: 22227 - RNA, 19 nt, Homo sapiens
  misc_RNA (1)...(19): siRNA sense strand
caacguggucuuggacaca

SEQ ID NO: 22228 - RNA, 19 nt, Homo sapiens
  misc_RNA (1)...(19): siRNA sense strand
cuaugcgggcuucaucuuu

SEQ ID NO: 22229 - RNA, 19 nt, Homo sapiens
  misc_RNA (1)...(19): siRNA sense strand
agacaagaucgacgugugu

SEQ ID NO: 22230 - RNA, 19 nt, Homo sapiens
  misc_RNA (1)...(19): siRNA sense strand
gaaugaaucuugguacuua

SEQ ID NO: 22231 - RNA, 19 nt, Homo sapiens
  misc_RNA (1)...(19): siRNA sense strand
gaagucaacugguaucuga

SEQ ID NO: 22232 - RNA, 19 nt, Homo sapiens
  misc_RNA (1)...(19): siRNA sense strand
guacacagaugaaaccuuu

SEQ ID NO: 22233 - RNA, 19 nt, Homo sapiens
  misc_RNA (1)...(19): siRNA sense strand
uaaggaagaugaagacuuu

SEQ ID NO: 22234 - RNA, 19 nt, Homo sapiens
  misc_RNA (1)...(19): siRNA sense strand
gaaaucaucuggaacuaug

SEQ ID NO: 22235 - RNA, 19 nt, Homo sapiens
  misc_RNA (1)...(19): siRNA sense strand
aaacaaagaugaugaggaa

SEQ ID NO: 22236 - RNA, 19 nt, Homo sapiens
  misc_RNA (1)...(19): siRNA sense strand
gcaaaccucuucccucaaa

SEQ ID NO: 22237 - RNA, 19 nt, Homo sapiens
  misc_RNA (1)...(19): siRNA sense strand
ggaaggagauggcaauugu

SEQ ID NO: 22238 - RNA, 19 nt, Homo sapiens
  misc_RNA (1)...(19): siRNA sense strand
gagaugaagucaacuggua

SEQ ID NO: 22239 - RNA, 19 nt, Homo sapiens
  misc_RNA (1)...(19): siRNA sense strand
guauagacaucuucacuaa

SEQ ID NO: 22240 - RNA, 19 nt, Homo sapiens
  misc_RNA (1)...(19): siRNA sense strand
acagagaguucuacaguua

SEQ ID NO: 22241 - RNA, 19 nt, Homo sapiens
  misc_RNA (1)...(19): siRNA sense strand
gaugaaaccuuuaggacaa

SEQ ID NO: 22242 - RNA, 19 nt, Homo sapiens
  misc_RNA (1)...(19): siRNA sense strand
gagaaaagcugaagaagaa

SEQ ID NO: 22243 - RNA, 19 nt, Homo sapiens
  misc_RNA (1)...(19): siRNA sense strand
gaaaggaaguuuacaugca

SEQ ID NO: 22244 - RNA, 19 nt, Homo sapiens
  misc_RNA (1)...(19): siRNA sense strand
gagauucggucguguggua

SEQ ID NO: 22245 - RNA, 19 nt, Homo sapiens
  misc_RNA (1)...(19): siRNA sense strand
ggaauuugcccuucuguuu

SEQ ID NO: 22246 - RNA, 19 nt, Homo sapiens
  misc_RNA (1)...(19): siRNA sense strand
uaacaagucuucaucaaag

SEQ ID NO: 22247 - RNA, 19 nt, Homo sapiens
  misc_RNA (1)...(19): siRNA sense strand
ggagagaggacauacuaua

SEQ ID NO: 22248 - RNA, 19 nt, Homo sapiens
  misc_RNA (1)...(19): siRNA sense strand
ucgaagaccuuacuugaaa

SEQ ID NO: 22249 - RNA, 19 nt, Homo sapiens
  misc_RNA (1)...(19): siRNA sense strand
ucaaagagcagaugacaaa

SEQ ID NO: 22250 - RNA, 19 nt, Homo sapiens
  misc_RNA (1)...(19): siRNA sense strand
ggccauagcuuccaauaca

SEQ ID NO: 22251 - RNA, 19 nt, Homo sapiens
  misc_RNA (1)...(19): siRNA sense strand
ggagagaggcccugaagaa

SEQ ID NO: 22252 - RNA, 19 nt, Homo sapiens
  misc_RNA (1)...(19): siRNA sense strand
caucggaccuuuaauaauc

SEQ ID NO: 22253 - RNA, 19 nt, Homo sapiens
  misc_RNA (1)...(19): siRNA sense strand
gcaaugaaauagacuuaca

SEQ ID NO: 22254 - RNA, 19 nt, Homo sapiens
  misc_RNA (1)...(19): siRNA sense strand
aaaaggagcugcaucauuu

SEQ ID NO: 22255 - RNA, 19 nt, Homo sapiens
  misc_RNA (1)...(19): siRNA sense strand
cagagaaaguugacaaaga

SEQ ID NO: 22256 - RNA, 19 nt, Homo sapiens
  misc_RNA (1)...(19): siRNA sense strand
gaacaagguaccacaagaa

SEQ ID NO: 22257 - RNA, 19 nt, Homo sapiens
  misc_RNA (1)...(19): siRNA sense strand
caggagagcaguauacaua

SEQ ID NO: 22258 - RNA, 19 nt, Homo sapiens
  misc_RNA (1)...(19): siRNA sense strand
ggagacaccaucagaguaa

SEQ ID NO: 22259 - RNA, 19 nt, Homo sapiens
  misc_RNA (1)...(19): siRNA sense strand
ggacucaucggaccuuuaa

SEQ ID NO: 22260 - RNA, 19 nt, Homo sapiens
  misc_RNA (1)...(19): siRNA sense strand
gagcagaugacaaaguaua

SEQ ID NO: 22261 - RNA, 19 nt, Homo sapiens
  misc_RNA (1)...(19): siRNA sense strand
gaacauaccaaacccuaga

SEQ ID NO: 22262 - RNA, 19 nt, Homo sapiens
  misc_RNA (1)...(19): siRNA sense strand
gggaaugggcaaugaaaua

SEQ ID NO: 22263 - RNA, 19 nt, Homo sapiens
  misc_RNA (1)...(19): siRNA sense strand
gaaguaggacccacuaaug

SEQ ID NO: 22264 - RNA, 19 nt, Homo sapiens
  misc_RNA (1)...(19): siRNA sense strand
aagagcagaugacaaagua

SEQ ID NO: 22265 - RNA, 19 nt, Homo sapiens
  misc_RNA (1)...(19): siRNA sense strand
cagaaacauucaccuauga

SEQ ID NO: 22266 - RNA, 19 nt, Homo sapiens
  misc_RNA (1)...(19): siRNA sense strand
caagguaccacaagaauug

SEQ ID NO: 22267 - RNA, 19 nt, Homo sapiens
  misc_RNA (1)...(19): siRNA sense strand
gcaauugugugacuaggau

SEQ ID NO: 22268 - RNA, 19 nt, Homo sapiens
  misc_RNA (1)...(19): siRNA sense strand
ggaagcauguuagacacua

SEQ ID NO: 22269 - RNA, 19 nt, Homo sapiens
  misc_RNA (1)...(19): siRNA sense strand
gaacuaccguauugacaca

SEQ ID NO: 22270 - RNA, 19 nt, Homo sapiens
  misc_RNA (1)...(19): siRNA sense strand
ugacuaggauuuaccauuc

SEQ ID NO: 22271 - RNA, 19 nt, Homo sapiens
  misc_RNA (1)...(19): siRNA sense strand
gaauugggagacuauauaa

SEQ ID NO: 22272 - RNA, 19 nt, Homo sapiens
  misc_RNA (1)...(19): siRNA sense strand
ggcaagcacugacuaacaa

SEQ ID NO: 22273 - RNA, 19 nt, Homo sapiens
  misc_RNA (1)...(19): siRNA sense strand
gagaguaacagaauguauu

SEQ ID NO: 22274 - RNA, 19 nt, Homo sapiens
  misc_RNA (1)...(19): siRNA sense strand
gagaauuuguggugauguu

SEQ ID NO: 22275 - RNA, 19 nt, Homo sapiens
  misc_RNA (1)...(19): siRNA sense strand
ggagauggcaauuguguga

SEQ ID NO: 22276 - RNA, 19 nt, Homo sapiens
  misc_RNA (1)...(19): siRNA sense strand
uacaguuacuccaacauua

SEQ ID NO: 22277 - RNA, 19 nt, Homo sapiens
  misc_RNA (1)...(19): siRNA sense strand
gauagcacauuccguguuc

SEQ ID NO: 22278 - RNA, 19 nt, Homo sapiens
  misc_RNA (1)...(19): siRNA sense strand
aacaagaacuaccguauug

SEQ ID NO: 22279 - RNA, 19 nt, Homo sapiens
  misc_RNA (1)...(19): siRNA sense strand
gaauuggaggcucuuauaa

SEQ ID NO: 22280 - RNA, 19 nt, Homo sapiens
  misc_RNA (1)...(19): siRNA sense strand
gaacaucugggaauucuag

SEQ ID NO: 22281 - RNA, 19 nt, Homo sapiens
  misc_RNA (1)...(19): siRNA sense strand
agaguaaccuuccauaaca

SEQ ID NO: 22282 - RNA, 19 nt, Homo sapiens
  misc_RNA (1)...(19): siRNA sense strand
gcccuucuguuucuaguuu

SEQ ID NO: 22283 - RNA, 19 nt, Homo sapiens
  misc_RNA (1)...(19): siRNA sense strand
caaagaugaugaggaauuc

SEQ ID NO: 22284 - RNA, 19 nt, Homo sapiens
  misc_RNA (1)...(19): siRNA sense strand
gaaucuaaaccaucugaaa

SEQ ID NO: 22285 - RNA, 19 nt, Homo sapiens
  misc_RNA (1)...(19): siRNA sense strand
ccacaaggcccuacucaau

SEQ ID NO: 22286 - RNA, 19 nt, Homo sapiens
  misc_RNA (1)...(19): siRNA sense strand
gaaacgacuugggauuaug

SEQ ID NO: 22287 - RNA, 19 nt, Homo sapiens
  misc_RNA (1)...(19): siRNA sense strand
agaaagauguagacaagga

SEQ ID NO: 22288 - RNA, 19 nt, Homo sapiens
  misc_RNA (1)...(19): siRNA sense strand
acagaaagauguagacaag

SEQ ID NO: 22289 - RNA, 19 nt, Homo sapiens
  misc_RNA (1)...(19): siRNA sense strand
gauauugccucaggacuca

SEQ ID NO: 22290 - RNA, 19 nt, Homo sapiens
  misc_RNA (1)...(19): siRNA sense strand
gcaauaaaaugcaugcuau

SEQ ID NO: 22291 - RNA, 19 nt, Homo sapiens
  misc_RNA (1)...(19): siRNA sense strand
guaacaagucuucaucaaa

SEQ ID NO: 22292 - RNA, 19 nt, Homo sapiens
  misc_RNA (1)...(19): siRNA sense strand
gcacgcagcuuucuuucac

SEQ ID NO: 22293 - RNA, 19 nt, Homo sapiens
  misc_RNA (1)...(19): siRNA sense strand
guuagacacuacuacauug

SEQ ID NO: 22294 - RNA, 19 nt, Homo sapiens
  misc_RNA (1)...(19): siRNA sense strand
ccucuacaguggauuaauu

SEQ ID NO: 22295 - RNA, 19 nt, Homo sapiens
  misc_RNA (1)...(19): siRNA sense strand
ggaccucuacaguggauua

SEQ ID NO: 22296 - RNA, 19 nt, Homo sapiens
  misc_RNA (1)...(19): siRNA sense strand
ggagcugcaucauuuacaa

SEQ ID NO: 22297 - RNA, 19 nt, Homo sapiens
  misc_RNA (1)...(19): siRNA sense strand
gagagaggacauacuauau

SEQ ID NO: 22298 - RNA, 19 nt, Homo sapiens
  misc_RNA (1)...(19): siRNA sense strand
aaaggaaguuuacaugcaa

SEQ ID NO: 22299 - RNA, 19 nt, Homo sapiens
  misc_RNA (1)...(19): siRNA sense strand
ggaucccacuaaagauaua

SEQ ID NO: 22300 - RNA, 19 nt, Homo sapiens
  misc_RNA (1)...(19): siRNA sense strand
gcuaagauguauuauucug

SEQ ID NO: 22301 - RNA, 19 nt, Homo sapiens
  misc_RNA (1)...(19): siRNA sense strand
gaacaacgagggcacauac

SEQ ID NO: 22302 - RNA, 19 nt, Homo sapiens
  misc_RNA (1)...(19): siRNA sense strand
gagaggcccugaagaagag

SEQ ID NO: 22303 - RNA, 19 nt, Homo sapiens
  misc_RNA (1)...(19): siRNA sense strand
gauuuaccauucccacauu

SEQ ID NO: 22304 - RNA, 19 nt, Homo sapiens
  misc_RNA (1)...(19): siRNA sense strand
ccaagaacaccuggaauuu

SEQ ID NO: 22305 - RNA, 19 nt, Homo sapiens
  misc_RNA (1)...(19): siRNA sense strand
gaaacucucacuuacguau

SEQ ID NO: 22306 - RNA, 19 nt, Homo sapiens
  misc_RNA (1)...(19): siRNA sense strand
gagcagaauguuucaaaug

SEQ ID NO: 22307 - RNA, 19 nt, Homo sapiens
  misc_RNA (1)...(19): siRNA sense strand
gauccugugugucuagcua

SEQ ID NO: 22308 - RNA, 19 nt, Homo sapiens
  misc_RNA (1)...(19): siRNA sense strand
uaacaagaacuaccguauu

SEQ ID NO: 22309 - RNA, 19 nt, Homo sapiens
  misc_RNA (1)...(19): siRNA sense strand
guaccuagaagacaacauu

SEQ ID NO: 22310 - RNA, 19 nt, Homo sapiens
  misc_RNA (1)...(19): siRNA sense strand
cacaaggcccuacucaaua

SEQ ID NO: 22311 - RNA, 19 nt, Homo sapiens
  misc_RNA (1)...(19): siRNA sense strand
ggagacaaagucaaaauua

SEQ ID NO: 22312 - RNA, 19 nt, Homo sapiens
  misc_RNA (1)...(19): siRNA sense strand
uugaaugccuuacaacuga

SEQ ID NO: 22313 - RNA, 19 nt, Homo sapiens
  misc_RNA (1)...(19): siRNA sense strand
ugaacaagguaccacaaga

SEQ ID NO: 22314 - RNA, 19 nt, Homo sapiens
  misc_RNA (1)...(19): siRNA sense strand
ugaaacgacuugggauuau

SEQ ID NO: 22315 - RNA, 19 nt, Homo sapiens
  misc_RNA (1)...(19): siRNA sense strand
gagaggacauacuauaucg

SEQ ID NO: 22316 - RNA, 19 nt, Homo sapiens
  misc_RNA (1)...(19): siRNA sense strand
gaacggagagacacagcaa

SEQ ID NO: 22317 - RNA, 19 nt, Homo sapiens
  misc_RNA (1)...(19): siRNA sense strand
acagaaacauucaccuaug

SEQ ID NO: 22318 - RNA, 19 nt, Homo sapiens
  misc_RNA (1)...(19): siRNA sense strand
ccacagaaacauucaccua

SEQ ID NO: 22319 - RNA, 19 nt, Homo sapiens
  misc_RNA (1)...(19): siRNA sense strand
uaacagcaccuggaaguga

SEQ ID NO: 22320 - RNA, 19 nt, Homo sapiens
  misc_RNA (1)...(19): siRNA sense strand
caagaacaccuggaauuug

SEQ ID NO: 22321 - RNA, 19 nt, Homo sapiens
  misc_RNA (1)...(19): siRNA sense strand
ccgagaaaguaaacaaaga

SEQ ID NO: 22322 - RNA, 19 nt, Homo sapiens
  misc_RNA (1)...(19): siRNA sense strand
agaagaacaucugggaauu

SEQ ID NO: 22323 - RNA, 19 nt, Homo sapiens
  misc_RNA (1)...(19): siRNA sense strand
uauauucacugggcuuauu

SEQ ID NO: 22324 - RNA, 19 nt, Homo sapiens
  misc_RNA (1)...(19): siRNA sense strand
gggcaaugaaauagacuua

SEQ ID NO: 22325 - RNA, 19 nt, Homo sapiens
  misc_RNA (1)...(19): siRNA sense strand
guacaaacagagaguucua

SEQ ID NO: 22326 - RNA, 19 nt, Homo sapiens
  misc_RNA (1)...(19): siRNA sense strand
gcagaauguuucaaaugca

SEQ ID NO: 22327 - RNA, 19 nt, Homo sapiens
  misc_RNA (1)...(19): siRNA sense strand
ggaauauacuuuucaggaa

SEQ ID NO: 22328 - RNA, 19 nt, Homo sapiens
  misc_RNA (1)...(19): siRNA sense strand
cgauguacauggaauauac

SEQ ID NO: 22329 - RNA, 19 nt, Homo sapiens
  misc_RNA (1)...(19): siRNA sense strand
gcaaaugggagacagaaag

SEQ ID NO: 22330 - RNA, 19 nt, Homo sapiens
  misc_RNA (1)...(19): siRNA sense strand
gcaaagaauuccugaagaa

SEQ ID NO: 22331 - RNA, 19 nt, Homo sapiens
  misc_RNA (1)...(19): siRNA sense strand
gcaaauccaucaaaaguua

SEQ ID NO: 22332 - RNA, 19 nt, Homo sapiens
  misc_RNA (1)...(19): siRNA sense strand
caucacagcugcuaaggaa

SEQ ID NO: 22333 - RNA, 19 nt, Homo sapiens
  misc_RNA (1)...(19): siRNA sense strand
gggcagagcucaggcagaa

SEQ ID NO: 22334 - RNA, 19 nt, Homo sapiens
  misc_RNA (1)...(19): siRNA sense strand
gcacagaagccucucuuga

SEQ ID NO: 22335 - RNA, 19 nt, Homo sapiens
  misc_RNA (1)...(19): siRNA sense strand
ggcagaagcugaugaguag

SEQ ID NO: 22336 - RNA, 19 nt, Homo sapiens
  misc_RNA (1)...(19): siRNA sense strand
ugaaguacauucucucaga

SEQ ID NO: 22337 - RNA, 19 nt, Homo sapiens
  misc_RNA (1)...(19): siRNA sense strand
uggcauaccugaccaguga

SEQ ID NO: 22338 - RNA, 19 nt, Homo sapiens
  misc_RNA (1)...(19): siRNA sense strand
cgagcugacugaugccuua

SEQ ID NO: 22339 - RNA, 19 nt, Homo sapiens
  misc_RNA (1)...(19): siRNA sense strand
agaagccucucuugaauga

SEQ ID NO: 22340 - RNA, 19 nt, Homo sapiens
  misc_RNA (1)...(19): siRNA sense strand
ccacagagccagccagcua

SEQ ID NO: 22341 - RNA, 19 nt, Homo sapiens
  misc_RNA (1)...(19): siRNA sense strand
ggaucaagaugggaacauu

SEQ ID NO: 22342 - RNA, 19 nt, Homo sapiens
  misc_RNA (1)...(19): siRNA sense strand
gagaggaggcaaagaauuc

SEQ ID NO: 22343 - RNA, 19 nt, Homo sapiens
  misc_RNA (1)...(19): siRNA sense strand
gaggagagccugaggaaag

SEQ ID NO: 22344 - RNA, 19 nt, Homo sapiens
  misc_RNA (1)...(19): siRNA sense strand
gaagacaccauuaggagau

SEQ ID NO: 22345 - RNA, 19 nt, Homo sapiens
  misc_RNA (1)...(19): siRNA sense strand
gcugagcccugacgcaguu

SEQ ID NO: 22346 - RNA, 19 nt, Homo sapiens
  misc_RNA (1)...(19): siRNA sense strand
ggcaaagaauuccugaaga

SEQ ID NO: 22347 - RNA, 19 nt, Homo sapiens
  misc_RNA (1)...(19): siRNA sense strand
gacccugguuugauaugua

SEQ ID NO: 22348 - RNA, 19 nt, Homo sapiens
  misc_RNA (1)...(19): siRNA sense strand
gaaggcaaauccaucaaaa

SEQ ID NO: 22349 - RNA, 19 nt, Homo sapiens
  misc_RNA (1)...(19): siRNA sense strand
acagaagccucucuugaau

SEQ ID NO: 22350 - RNA, 19 nt, Homo sapiens
  misc_RNA (1)...(19): siRNA sense strand
cuagaugacuuccccauua

SEQ ID NO: 22351 - RNA, 19 nt, Homo sapiens
  misc_RNA (1)...(19): siRNA sense strand
ggagaaggccuuagaagac

SEQ ID NO: 22352 - RNA, 19 nt, Homo sapiens
  misc_RNA (1)...(19): siRNA sense strand
ugaaaacccucacuauuga

SEQ ID NO: 22353 - RNA, 19 nt, Homo sapiens
  misc_RNA (1)...(19): siRNA sense strand
gcagauaaaccacaauguc

SEQ ID NO: 22354 - RNA, 19 nt, Homo sapiens
  misc_RNA (1)...(19): siRNA sense strand
gaggugcucugaggccuuu

SEQ ID NO: 22355 - RNA, 19 nt, Homo sapiens
  misc_RNA (1)...(19): siRNA sense strand
ggacaaacagaauaaacau

SEQ ID NO: 22356 - RNA, 19 nt, Homo sapiens
  misc_RNA (1)...(19): siRNA sense strand
gguaugcuguucaugacaa

SEQ ID NO: 22357 - RNA, 19 nt, Homo sapiens
  misc_RNA (1)...(19): siRNA sense strand
gaccaaagaagcagcaaug

SEQ ID NO: 22358 - RNA, 19 nt, Homo sapiens
  misc_RNA (1)...(19): siRNA sense strand
gaaauccaggcacaucuga

SEQ ID NO: 22359 - RNA, 19 nt, Homo sapiens
  misc_RNA (1)...(19): siRNA sense strand
gcugcaaugucucuuccua

SEQ ID NO: 22360 - RNA, 19 nt, Homo sapiens
  misc_RNA (1)...(19): siRNA sense strand
ucgggacccugguuugaua

SEQ ID NO: 22361 - RNA, 19 nt, Homo sapiens
  misc_RNA (1)...(19): siRNA sense strand
cacagaagccucucuugaa

SEQ ID NO: 22362 - RNA, 19 nt, Homo sapiens
  misc_RNA (1)...(19): siRNA sense strand
ucagagaggaggcaaagaa

SEQ ID NO: 22363 - RNA, 19 nt, Homo sapiens
  misc_RNA (1)...(19): siRNA sense strand
aaacuugaagacaccauua

SEQ ID NO: 22364 - RNA, 19 nt, Homo sapiens
  misc_RNA (1)...(19): siRNA sense strand
caagagacucauacgcuuu

SEQ ID NO: 22365 - RNA, 19 nt, Homo sapiens
  misc_RNA (1)...(19): siRNA sense strand
caagaugggaacauuguga

SEQ ID NO: 22366 - RNA, 19 nt, Homo sapiens
  misc_RNA (1)...(19): siRNA sense strand
gaacaauuuugcaagaguu

SEQ ID NO: 22367 - RNA, 19 nt, Homo sapiens
  misc_RNA (1)...(19): siRNA sense strand
gggccuaccuggucaaugc

SEQ ID NO: 22368 - RNA, 19 nt, Homo sapiens
  misc_RNA (1)...(19): siRNA sense strand
gagacuccguuguucugaa

SEQ ID NO: 22369 - RNA, 19 nt, Homo sapiens
  misc_RNA (1)...(19): siRNA sense strand
gcucgagacuccguuguuc

SEQ ID NO: 22370 - RNA, 19 nt, Homo sapiens
  misc_RNA (1)...(19): siRNA sense strand
ucugauggcuuugguguug

SEQ ID NO: 22371 - RNA, 19 nt, Homo sapiens
  misc_RNA (1)...(19): siRNA sense strand
gcacaucugaaguacauuc

SEQ ID NO: 22372 - RNA, 19 nt, Homo sapiens
  misc_RNA (1)...(19): siRNA sense strand
gcugguugcucuggacaaa

SEQ ID NO: 22373 - RNA, 19 nt, Homo sapiens
  misc_RNA (1)...(19): siRNA sense strand
gaucaagaugggaacauug

SEQ ID NO: 22374 - RNA, 19 nt, Homo sapiens
  misc_RNA (1)...(19): siRNA sense strand
cuuaaagacuggcaucaca

SEQ ID NO: 22375 - RNA, 19 nt, Homo sapiens
  misc_RNA (1)...(19): siRNA sense strand
uguggucucugauggcuuu

SEQ ID NO: 22376 - RNA, 19 nt, Homo sapiens
  misc_RNA (1)...(19): siRNA sense strand
gccauccgguuucugaaga

SEQ ID NO: 22377 - RNA, 19 nt, Homo sapiens
  misc_RNA (1)...(19): siRNA sense strand
caucugaaguacauucucu

SEQ ID NO: 22378 - RNA, 19 nt, Homo sapiens
  misc_RNA (1)...(19): siRNA sense strand
gcaaugggccagggcuuug

SEQ ID NO: 22379 - RNA, 19 nt, Homo sapiens
  misc_RNA (1)...(19): siRNA sense strand
uggauaggcugcaaugucu

SEQ ID NO: 22380 - RNA, 19 nt, Homo sapiens
  misc_RNA (1)...(19): siRNA sense strand
gacacuaucaccuucaaga

SEQ ID NO: 22381 - RNA, 19 nt, Homo sapiens
  misc_RNA (1)...(19): siRNA sense strand
ggcagacaguggccaccua

SEQ ID NO: 22382 - RNA, 19 nt, Homo sapiens
  misc_RNA (1)...(19): siRNA sense strand
aagaauuccugaagaagca

SEQ ID NO: 22383 - RNA, 19 nt, Homo sapiens
  misc_RNA (1)...(19): siRNA sense strand
ggacccugguuugauaugu

SEQ ID NO: 22384 - RNA, 19 nt, Homo sapiens
  misc_RNA (1)...(19): siRNA sense strand
caggaaaacagaacaauuu

SEQ ID NO: 22385 - RNA, 19 nt, Homo sapiens
  misc_RNA (1)...(19): siRNA sense strand
aagccucucuugaaugaug

SEQ ID NO: 22386 - RNA, 19 nt, Homo sapiens
  misc_RNA (1)...(19): siRNA sense strand
cuuccucucuguccuggua

SEQ ID NO: 22387 - RNA, 19 nt, Homo sapiens
  misc_RNA (1)...(19): siRNA sense strand
cuggugagcuucagcagau

SEQ ID NO: 22388 - RNA, 19 nt, Homo sapiens
  misc_RNA (1)...(19): siRNA sense strand
gcugacugaugccuuaaag

SEQ ID NO: 22389 - RNA, 19 nt, Homo sapiens
  misc_RNA (1)...(19): siRNA sense strand
aggcacaucugaaguacau

SEQ ID NO: 22390 - RNA, 19 nt, Homo sapiens
  misc_RNA (1)...(19): siRNA sense strand
ggaaauccaggcacaucug

SEQ ID NO: 22391 - RNA, 19 nt, Homo sapiens
  misc_RNA (1)...(19): siRNA sense strand
aggcagaagcugaugagua

SEQ ID NO: 22392 - RNA, 19 nt, Homo sapiens
  misc_RNA (1)...(19): siRNA sense strand
aaaguggacucggcagugu

SEQ ID NO: 22393 - RNA, 19 nt, Homo sapiens
  misc_RNA (1)...(19): siRNA sense strand
gcugaugaguaguggcaau

SEQ ID NO: 22394 - RNA, 19 nt, Homo sapiens
  misc_RNA (1)...(19): siRNA sense strand
gggcagauaaaccacaaug

SEQ ID NO: 22395 - RNA, 19 nt, Homo sapiens
  misc_RNA (1)...(19): siRNA sense strand
aagacaccauuaggagaua

SEQ ID NO: 22396 - RNA, 19 nt, Homo sapiens
  misc_RNA (1)...(19): siRNA sense strand
uggagaaggccuuagaaga

SEQ ID NO: 22397 - RNA, 19 nt, Homo sapiens
  misc_RNA (1)...(19): siRNA sense strand
gggcuuugaccgacacuug

SEQ ID NO: 22398 - RNA, 19 nt, Homo sapiens
  misc_RNA (1)...(19): siRNA sense strand
cggccuccgucuauacaaa

SEQ ID NO: 22399 - RNA, 19 nt, Homo sapiens
  misc_RNA (1)...(19): siRNA sense strand
ugcagaaacucaacuucga

SEQ ID NO: 22400 - RNA, 19 nt, Homo sapiens
  misc_RNA (1)...(19): siRNA sense strand
gaugaguaguggcaaugag

SEQ ID NO: 22401 - RNA, 19 nt, Homo sapiens
  misc_RNA (1)...(19): siRNA sense strand
aaaaugggauuggaaaaga

SEQ ID NO: 22402 - RNA, 19 nt, Homo sapiens
  misc_RNA (1)...(19): siRNA sense strand
uaucuuugauguccuggau

SEQ ID NO: 22403 - RNA, 19 nt, Homo sapiens
  misc_RNA (1)...(19): siRNA sense strand
ggacucggcaguguucugu

SEQ ID NO: 22404 - RNA, 19 nt, Homo sapiens
  misc_RNA (1)...(19): siRNA sense strand
caucuugccugagcucuac

SEQ ID NO: 22405 - RNA, 19 nt, Homo sapiens
  misc_RNA (1)...(19): siRNA sense strand
acucuucacugaugacaag

SEQ ID NO: 22406 - RNA, 19 nt, Homo sapiens
  misc_RNA (1)...(19): siRNA sense strand
uagaugacuuccccauuaa

SEQ ID NO: 22407 - RNA, 19 nt, Homo sapiens
  misc_RNA (1)...(19): siRNA sense strand
caaacuugaagacaccauu

SEQ ID NO: 22408 - RNA, 19 nt, Homo sapiens
  misc_RNA (1)...(19): siRNA sense strand
caaagaauuccugaagaag

SEQ ID NO: 22409 - RNA, 19 nt, Homo sapiens
  misc_RNA (1)...(19): siRNA sense strand
agaaggcaaauccaucaaa

SEQ ID NO: 22410 - RNA, 19 nt, Homo sapiens
  misc_RNA (1)...(19): siRNA sense strand
gcacugccgcauucaagca

SEQ ID NO: 22411 - RNA, 19 nt, Homo sapiens
  misc_RNA (1)...(19): siRNA sense strand
gggcaaccaacaugacugu

SEQ ID NO: 22412 - RNA, 19 nt, Homo sapiens
  misc_RNA (1)...(19): siRNA sense strand
gguguuggguaugcuguuc

SEQ ID NO: 22413 - RNA, 19 nt, Homo sapiens
  misc_RNA (1)...(19): siRNA sense strand
guguggcagugcucagauu

SEQ ID NO: 22414 - RNA, 19 nt, Homo sapiens
  misc_RNA (1)...(19): siRNA sense strand
caaacccagucgggaugaa

SEQ ID NO: 22415 - RNA, 19 nt, Homo sapiens
  misc_RNA (1)...(19): siRNA sense strand
uuucaacucaacucguuua

SEQ ID NO: 22416 - RNA, 19 nt, Homo sapiens
  misc_RNA (1)...(19): siRNA sense strand
ggauaugucccaguauuuu

SEQ ID NO: 22417 - RNA, 19 nt, Homo sapiens
  misc_RNA (1)...(19): siRNA sense strand
cagaagcugaugaguagug

SEQ ID NO: 22418 - RNA, 19 nt, Homo sapiens
  misc_RNA (1)...(19): siRNA sense strand
gagcagcccagcagugaac

SEQ ID NO: 22419 - RNA, 19 nt, Homo sapiens
  misc_RNA (1)...(19): siRNA sense strand
ugacugaugccuuaaagac

SEQ ID NO: 22420 - RNA, 19 nt, Homo sapiens
  misc_RNA (1)...(19): siRNA sense strand
gaaaaugggauuggaaaag

SEQ ID NO: 22421 - RNA, 19 nt, Homo sapiens
  misc_RNA (1)...(19): siRNA sense strand
cagaagccucucuugaaug

SEQ ID NO: 22422 - RNA, 19 nt, Homo sapiens
  misc_RNA (1)...(19): siRNA sense strand
uggauaugucccaguauuu

SEQ ID NO: 22423 - RNA, 19 nt, Homo sapiens
  misc_RNA (1)...(19): siRNA sense strand
uuagaaggcaaauccauca

SEQ ID NO: 22424 - RNA, 19 nt, Homo sapiens
  misc_RNA (1)...(19): siRNA sense strand
uggcuuugguguuggguau

SEQ ID NO: 22425 - RNA, 19 nt, Homo sapiens
  misc_RNA (1)...(19): siRNA sense strand
agagaggaggcaaagaauu

SEQ ID NO: 22426 - RNA, 19 nt, Homo sapiens
  misc_RNA (1)...(19): siRNA sense strand
cagaauaaacauacaagcu

SEQ ID NO: 22427 - RNA, 19 nt, Homo sapiens
  misc_RNA (1)...(19): siRNA sense strand
cuugaaugauggccaguuc

SEQ ID NO: 22428 - RNA, 19 nt, Homo sapiens
  misc_RNA (1)...(19): siRNA sense strand
cagagaggaggcaaagaau

SEQ ID NO: 22429 - RNA, 19 nt, Homo sapiens
  misc_RNA (1)...(19): siRNA sense strand
agacaccuccugguccuaa

SEQ ID NO: 22430 - RNA, 19 nt, Homo sapiens
  misc_RNA (1)...(19): siRNA sense strand
gaaggcagguucuguccua

SEQ ID NO: 22431 - RNA, 19 nt, Homo sapiens
  misc_RNA (1)...(19): siRNA sense strand
ggaagaagauggaaaucau

SEQ ID NO: 22432 - RNA, 19 nt, Homo sapiens
  misc_RNA (1)...(19): siRNA sense strand
gaagaagauggaaaucaua

SEQ ID NO: 22433 - RNA, 19 nt, Homo sapiens
  misc_RNA (1)...(19): siRNA sense strand
gcgagcaguuuguguuuga

SEQ ID NO: 22434 - RNA, 19 nt, Homo sapiens
  misc_RNA (1)...(19): siRNA sense strand
gaagauggaaaucauagau

SEQ ID NO: 22435 - RNA, 19 nt, Homo sapiens
  misc_RNA (1)...(19): siRNA sense strand
gcacaagaucauccucuau

SEQ ID NO: 22436 - RNA, 19 nt, Homo sapiens
  misc_RNA (1)...(19): siRNA sense strand
gcacguggguuggcuacca

SEQ ID NO: 22437 - RNA, 19 nt, Homo sapiens
  misc_RNA (1)...(19): siRNA sense strand
aggagaaggugucaucugu

SEQ ID NO: 22438 - RNA, 19 nt, Homo sapiens
  misc_RNA (1)...(19): siRNA sense strand
ggagaagggagacuacaag

SEQ ID NO: 22439 - RNA, 19 nt, Homo sapiens
  misc_RNA (1)...(19): siRNA sense strand
gggaagaagauggaaauca

SEQ ID NO: 22440 - RNA, 19 nt, Homo sapiens
  misc_RNA (1)...(19): siRNA sense strand
caaggacagcagcgacuuu

SEQ ID NO: 22441 - RNA, 19 nt, Homo sapiens
  misc_RNA (1)...(19): siRNA sense strand
ggcagguucuguccuagug

SEQ ID NO: 22442 - RNA, 19 nt, Homo sapiens
  misc_RNA (1)...(19): siRNA sense strand
gggcgagcaguuuguguuu

SEQ ID NO: 22443 - RNA, 19 nt, Homo sapiens
  misc_RNA (1)...(19): siRNA sense strand
gcuaugaacaggccaacug

SEQ ID NO: 22444 - RNA, 19 nt, Homo sapiens
  misc_RNA (1)...(19): siRNA sense strand
caucaucuuugagcaggaa

SEQ ID NO: 22445 - RNA, 19 nt, Homo sapiens
  misc_RNA (1)...(19): siRNA sense strand
gccaagagcacaagaucau

SEQ ID NO: 22446 - RNA, 19 nt, Homo sapiens
  misc_RNA (1)...(19): siRNA sense strand
gcaagggcgagcaguuugu

SEQ ID NO: 22447 - RNA, 19 nt, Homo sapiens
  misc_RNA (1)...(19): siRNA sense strand
cacaagaucauccucuaug

SEQ ID NO: 22448 - RNA, 19 nt, Homo sapiens
  misc_RNA (1)...(19): siRNA sense strand
caaaguggacagccaagag

SEQ ID NO: 22449 - RNA, 19 nt, Homo sapiens
  misc_RNA (1)...(19): siRNA sense strand
ggcgagcaguuuguguuug

SEQ ID NO: 22450 - RNA, 19 nt, Homo sapiens
  misc_RNA (1)...(19): siRNA sense strand
gcaagccacagucccucaa

SEQ ID NO: 22451 - RNA, 19 nt, Homo sapiens
  misc_RNA (1)...(19): siRNA sense strand
ccacucgcaugagcucaau

SEQ ID NO: 22452 - RNA, 19 nt, Homo sapiens
  misc_RNA (1)...(19): siRNA sense strand
gagcaguuuguguuugaga

SEQ ID NO: 22453 - RNA, 19 nt, Homo sapiens
  misc_RNA (1)...(19): siRNA sense strand
agcacaagaucauccucua

SEQ ID NO: 22454 - RNA, 19 nt, Homo sapiens
  misc_RNA (1)...(19): siRNA sense strand
ggacagccaagagcacaag

SEQ ID NO: 22455 - RNA, 19 nt, Homo sapiens
  misc_RNA (1)...(19): siRNA sense strand
aagaagauggaaaucauag

SEQ ID NO: 22456 - RNA, 19 nt, Homo sapiens
  misc_RNA (1)...(19): siRNA sense strand
uaccaggaauuacuauguu

SEQ ID NO: 22457 - RNA, 19 nt, Homo sapiens
  misc_RNA (1)...(19): siRNA sense strand
ggaagaagggcuccaccau

SEQ ID NO: 22458 - RNA, 19 nt, Homo sapiens
  misc_RNA (1)...(19): siRNA sense strand
gaucggaggcaccaucaag

SEQ ID NO: 22459 - RNA, 19 nt, Homo sapiens
  misc_RNA (1)...(19): siRNA sense strand
uugugugccugcuggagua

SEQ ID NO: 22460 - RNA, 19 nt, Homo sapiens
  misc_RNA (1)...(19): siRNA sense strand
uuaccaggaauuacuaugu

SEQ ID NO: 22461 - RNA, 19 nt, Homo sapiens
  misc_RNA (1)...(19): siRNA sense strand
gagcggcaucuaccuacug

SEQ ID NO: 22462 - RNA, 19 nt, Homo sapiens
  misc_RNA (1)...(19): siRNA sense strand
gaagacaacuggacaggaa

SEQ ID NO: 22463 - RNA, 19 nt, Homo sapiens
  misc_RNA (1)...(19): siRNA sense strand
guacacacaucaucucuuu

SEQ ID NO: 22464 - RNA, 19 nt, Homo sapiens
  misc_RNA (1)...(19): siRNA sense strand
ggacaggaaucucaccuuu

SEQ ID NO: 22465 - RNA, 19 nt, Homo sapiens
  misc_RNA (1)...(19): siRNA sense strand
gaagauguguucagcuaug

SEQ ID NO: 22466 - RNA, 19 nt, Homo sapiens
  misc_RNA (1)...(19): siRNA sense strand
caacugggauaaugaauuc

SEQ ID NO: 22467 - RNA, 19 nt, Homo sapiens
  misc_RNA (1)...(19): siRNA sense strand
ccauggagcugaacgaauu

SEQ ID NO: 22468 - RNA, 19 nt, Homo sapiens
  misc_RNA (1)...(19): siRNA sense strand
gcuaugagguggugauguu

SEQ ID NO: 22469 - RNA, 19 nt, Homo sapiens
  misc_RNA (1)...(19): siRNA sense strand
gaagugggacaauacauuu

SEQ ID NO: 22470 - RNA, 19 nt, Homo sapiens
  misc_RNA (1)...(19): siRNA sense strand
gcaagucaacacccuaaua

SEQ ID NO: 22471 - RNA, 19 nt, Homo sapiens
  misc_RNA (1)...(19): siRNA sense strand
gcacuucacucugcgauuc

SEQ ID NO: 22472 - RNA, 19 nt, Homo sapiens
  misc_RNA (1)...(19): siRNA sense strand
gaacugggcugugaaugag

SEQ ID NO: 22473 - RNA, 19 nt, Homo sapiens
  misc_RNA (1)...(19): siRNA sense strand
ggaacugggcugugaauga

SEQ ID NO: 22474 - RNA, 19 nt, Homo sapiens
  misc_RNA (1)...(19): siRNA sense strand
ggaagugggacaauacauu

SEQ ID NO: 22475 - RNA, 19 nt, Homo sapiens
  misc_RNA (1)...(19): siRNA sense strand
ggacacacaugccuuugag

SEQ ID NO: 22476 - RNA, 19 nt, Homo sapiens
  misc_RNA (1)...(19): siRNA sense strand
gaaucucaccuuucauaaa

SEQ ID NO: 22477 - RNA, 19 nt, Homo sapiens
  misc_RNA (1)...(19): siRNA sense strand
gaaacccuccuaugacuug

SEQ ID NO: 22478 - RNA, 19 nt, Homo sapiens
  misc_RNA (1)...(19): siRNA sense strand
gcuggaaacccuccuauga

SEQ ID NO: 22479 - RNA, 19 nt, Homo sapiens
  misc_RNA (1)...(19): siRNA sense strand
acaggaaucucaccuuuca

SEQ ID NO: 22480 - RNA, 19 nt, Homo sapiens
  misc_RNA (1)...(19): siRNA sense strand
gcaauaacgccaccaaucu

SEQ ID NO: 22481 - RNA, 19 nt, Homo sapiens
  misc_RNA (1)...(19): siRNA sense strand
caagaugcguggaaacuac

SEQ ID NO: 22482 - RNA, 19 nt, Homo sapiens
  misc_RNA (1)...(19): siRNA sense strand
ucaagacaauugcaaguca

SEQ ID NO: 22483 - RNA, 19 nt, Homo sapiens
  misc_RNA (1)...(19): siRNA sense strand
ccaccaaucugaagcucaa

SEQ ID NO: 22484 - RNA, 19 nt, Homo sapiens
  misc_RNA (1)...(19): siRNA sense strand
caacaagaguucgaagaca

SEQ ID NO: 22485 - RNA, 19 nt, Homo sapiens
  misc_RNA (1)...(19): siRNA sense strand
gaacuuggagacaggcaaa

SEQ ID NO: 22486 - RNA, 19 nt, Homo sapiens
  misc_RNA (1)...(19): siRNA sense strand
aaauggaagugggacaaua

SEQ ID NO: 22487 - RNA, 19 nt, Homo sapiens
  misc_RNA (1)...(19): siRNA sense strand
gcaccaugaugaggagaaa

SEQ ID NO: 22488 - RNA, 19 nt, Homo sapiens
  misc_RNA (1)...(19): siRNA sense strand
ggaaucucaccuuucauaa

SEQ ID NO: 22489 - RNA, 19 nt, Homo sapiens
  misc_RNA (1)...(19): siRNA sense strand
caccauugcacaucuauuu

SEQ ID NO: 22490 - RNA, 19 nt, Homo sapiens
  misc_RNA (1)...(19): siRNA sense strand
uuugugaucuucuucauug

SEQ ID NO: 22491 - RNA, 19 nt, Homo sapiens
  misc_RNA (1)...(19): siRNA sense strand
ccggaggucuuacuuugaa

SEQ ID NO: 22492 - RNA, 19 nt, Homo sapiens
  misc_RNA (1)...(19): siRNA sense strand
gcucgaaagagaauaaaga

SEQ ID NO: 22493 - RNA, 19 nt, Homo sapiens
  misc_RNA (1)...(19): siRNA sense strand
aaacaaagcaucuccaacu

SEQ ID NO: 22494 - RNA, 19 nt, Homo sapiens
  misc_RNA (1)...(19): siRNA sense strand
caagacaauugcaagucaa

SEQ ID NO: 22495 - RNA, 19 nt, Homo sapiens
  misc_RNA (1)...(19): siRNA sense strand
ucacaggccugaaacaaaa

SEQ ID NO: 22496 - RNA, 19 nt, Homo sapiens
  misc_RNA (1)...(19): siRNA sense strand
gaguuuggcugugcauaau

SEQ ID NO: 22497 - RNA, 19 nt, Homo sapiens
  misc_RNA (1)...(19): siRNA sense strand
gucgaaaucugcuguccuu

SEQ ID NO: 22498 - RNA, 19 nt, Homo sapiens
  misc_RNA (1)...(19): siRNA sense strand
guagcacucucugaacuug

SEQ ID NO: 22499 - RNA, 19 nt, Homo sapiens
  misc_RNA (1)...(19): siRNA sense strand
ugaaugcccgagucaauaa

SEQ ID NO: 22500 - RNA, 19 nt, Homo sapiens
  misc_RNA (1)...(19): siRNA sense strand
caacuggacaggaaucuca

SEQ ID NO: 22501 - RNA, 19 nt, Homo sapiens
  misc_RNA (1)...(19): siRNA sense strand
gugaaugcccgagucaaua

SEQ ID NO: 22502 - RNA, 19 nt, Homo sapiens
  misc_RNA (1)...(19): siRNA sense strand
gaucacaggccugaaacaa

SEQ ID NO: 22503 - RNA, 19 nt, Homo sapiens
  misc_RNA (1)...(19): siRNA sense strand
gugauaagcaggaguuuca

SEQ ID NO: 22504 - RNA, 19 nt, Homo sapiens
  misc_RNA (1)...(19): siRNA sense strand
gaaaucugcuguccuuccu

SEQ ID NO: 22505 - RNA, 19 nt, Homo sapiens
  misc_RNA (1)...(19): siRNA sense strand
gaaacccugaguaaacaaa

SEQ ID NO: 22506 - RNA, 19 nt, Homo sapiens
  misc_RNA (1)...(19): siRNA sense strand
gcugaaacccugaguaaac

SEQ ID NO: 22507 - RNA, 19 nt, Homo sapiens
  misc_RNA (1)...(19): siRNA sense strand
aagcaggaguuucaagaug

SEQ ID NO: 22508 - RNA, 19 nt, Homo sapiens
  misc_RNA (1)...(19): siRNA sense strand
ucacaccauugcacaucua

SEQ ID NO: 22509 - RNA, 19 nt, Homo sapiens
  misc_RNA (1)...(19): siRNA sense strand
ccauugcacaucuauuuaa

SEQ ID NO: 22510 - RNA, 19 nt, Homo sapiens
  misc_RNA (1)...(19): siRNA sense strand
gagaauaaagaacccugaa

SEQ ID NO: 22511 - RNA, 19 nt, Homo sapiens
  misc_RNA (1)...(19): siRNA sense strand
uaccuaagauagcgguuga

SEQ ID NO: 22512 - RNA, 19 nt, Homo sapiens
  misc_RNA (1)...(19): siRNA sense strand
uuaccggguuuaugauauu

SEQ ID NO: 22513 - RNA, 19 nt, Homo sapiens
  misc_RNA (1)...(19): siRNA sense strand
aacaagaguucgaagacaa

SEQ ID NO: 22514 - RNA, 19 nt, Homo sapiens
  misc_RNA (1)...(19): siRNA sense strand
guaaacaaagcaucuccaa

SEQ ID NO: 22515 - RNA, 19 nt, Homo sapiens
  misc_RNA (1)...(19): siRNA sense strand
caacagaagguggucauca

SEQ ID NO: 22516 - RNA, 19 nt, Homo sapiens
  misc_RNA (1)...(19): siRNA sense strand
cguggaaacuaccuaagau

SEQ ID NO: 22517 - RNA, 19 nt, Homo sapiens
  misc_RNA (1)...(19): siRNA sense strand
gaagaagggguucaaaaug

SEQ ID NO: 22518 - RNA, 19 nt, Homo sapiens
  misc_RNA (1)...(19): siRNA sense strand
aggaaucucaccuuucaua

SEQ ID NO: 22519 - RNA, 19 nt, Homo sapiens
  misc_RNA (1)...(19): siRNA sense strand
ccaacugggauaaugaauu

SEQ ID NO: 22520 - RNA, 19 nt, Homo sapiens
  misc_RNA (1)...(19): siRNA sense strand
guugaacgucuuccucuuu

SEQ ID NO: 22521 - RNA, 19 nt, Homo sapiens
  misc_RNA (1)...(19): siRNA sense strand
guuuggcugugcauaauau

SEQ ID NO: 22522 - RNA, 19 nt, Homo sapiens
  misc_RNA (1)...(19): siRNA sense strand
guggaaacuaccuaagaua

SEQ ID NO: 22523 - RNA, 19 nt, Homo sapiens
  misc_RNA (1)...(19): siRNA sense strand
caagucaacacccuaauac

SEQ ID NO: 22524 - RNA, 19 nt, Homo sapiens
  misc_RNA (1)...(19): siRNA sense strand
ucaagucagucugguacaa

SEQ ID NO: 22525 - RNA, 19 nt, Homo sapiens
  misc_RNA (1)...(19): siRNA sense strand
gagcuacagaugaagaaga

SEQ ID NO: 22526 - RNA, 19 nt, Homo sapiens
  misc_RNA (1)...(19): siRNA sense strand
gaacgucuuccucuuuguc

SEQ ID NO: 22527 - RNA, 19 nt, Homo sapiens
  misc_RNA (1)...(19): siRNA sense strand
aauguggaaugguguguga

SEQ ID NO: 22528 - RNA, 19 nt, Homo sapiens
  misc_RNA (1)...(19): siRNA sense strand
caacaaggaaaacuucuaa

SEQ ID NO: 22529 - RNA, 19 nt, Homo sapiens
  misc_RNA (1)...(19): siRNA sense strand
uggcugaaacccugaguaa

SEQ ID NO: 22530 - RNA, 19 nt, Homo sapiens
  misc_RNA (1)...(19): siRNA sense strand
ccuaugacuuggaaaugga

SEQ ID NO: 22531 - RNA, 19 nt, Homo sapiens
  misc_RNA (1)...(19): siRNA sense strand
acacacaucaucucuuugu

SEQ ID NO: 22532 - RNA, 19 nt, Homo sapiens
  misc_RNA (1)...(19): siRNA sense strand
ggaaacccuccuaugacuu

SEQ ID NO: 22533 - RNA, 19 nt, Homo sapiens
  misc_RNA (1)...(19): siRNA sense strand
gcaggcaucacuggaguug

SEQ ID NO: 22534 - RNA, 19 nt, Homo sapiens
  misc_RNA (1)...(19): siRNA sense strand
cugaaacccugaguaaaca

SEQ ID NO: 22535 - RNA, 19 nt, Homo sapiens
  misc_RNA (1)...(19): siRNA sense strand
caagucagucugguacaaa

SEQ ID NO: 22536 - RNA, 19 nt, Homo sapiens
  misc_RNA (1)...(19): siRNA sense strand
gcguggaaacuaccuaaga

SEQ ID NO: 22537 - RNA, 19 nt, Homo sapiens
  misc_RNA (1)...(19): siRNA sense strand
gcagaccgcagagaguuug

SEQ ID NO: 22538 - RNA, 19 nt, Homo sapiens
  misc_RNA (1)...(19): siRNA sense strand
uugaacgucuuccucuuug

SEQ ID NO: 22539 - RNA, 19 nt, Homo sapiens
  misc_RNA (1)...(19): siRNA sense strand
ucagucugguacaaauauu

SEQ ID NO: 22540 - RNA, 19 nt, Homo sapiens
  misc_RNA (1)...(19): siRNA sense strand
ucgcauccauucucaaguc

SEQ ID NO: 22541 - RNA, 19 nt, Homo sapiens
  misc_RNA (1)...(19): siRNA sense strand
gggcagaccgcagagaguu

SEQ ID NO: 22542 - RNA, 19 nt, Homo sapiens
  misc_RNA (1)...(19): siRNA sense strand
gaugauugcacuucacucu

SEQ ID NO: 22543 - RNA, 19 nt, Homo sapiens
  misc_RNA (1)...(19): siRNA sense strand
ggagacaggcaaaaugaaa

SEQ ID NO: 22544 - RNA, 19 nt, Homo sapiens
  misc_RNA (1)...(19): siRNA sense strand
ggauaaugaauucaagaca

SEQ ID NO: 22545 - RNA, 19 nt, Homo sapiens
  misc_RNA (1)...(19): siRNA sense strand
caauaacgccaccaaucug

SEQ ID NO: 22546 - RNA, 19 nt, Homo sapiens
  misc_RNA (1)...(19): siRNA sense strand
gguugaacgucuuccucuu

SEQ ID NO: 22547 - RNA, 19 nt, Homo sapiens
  misc_RNA (1)...(19): siRNA sense strand
uggaaacccuccuaugacu

SEQ ID NO: 22548 - RNA, 19 nt, Homo sapiens
  misc_RNA (1)...(19): siRNA sense strand
caauuuugcucgaaagaga

SEQ ID NO: 22549 - RNA, 19 nt, Homo sapiens
  misc_RNA (1)...(19): siRNA sense strand
cauggaugauugcacuuca

SEQ ID NO: 22550 - RNA, 19 nt, Homo sapiens
  misc_RNA (1)...(19): siRNA sense strand
gggacacacaugccuuuga

SEQ ID NO: 22551 - RNA, 19 nt, Homo sapiens
  misc_RNA (1)...(19): siRNA sense strand
agaguuuggcugugcauaa

SEQ ID NO: 22552 - RNA, 19 nt, Homo sapiens
  misc_RNA (1)...(19): siRNA sense strand
acgcugugccucauauuaa

SEQ ID NO: 22553 - RNA, 19 nt, Homo sapiens
  misc_RNA (1)...(19): siRNA sense strand
gucaauaauucugauccuu

SEQ ID NO: 22554 - RNA, 19 nt, Homo sapiens
  misc_RNA (1)...(19): siRNA sense strand
ucaacugcaugcugauucu

SEQ ID NO: 22555 - RNA, 19 nt, Homo sapiens
  misc_RNA (1)...(19): siRNA sense strand
ucaagaugcguggaaacua

SEQ ID NO: 22556 - RNA, 19 nt, Homo sapiens
  misc_RNA (1)...(19): siRNA sense strand
ggucccauguuucuguauc

SEQ ID NO: 22557 - RNA, 19 nt, Homo sapiens
  misc_RNA (1)...(19): siRNA sense strand
gauauuccaccuaaguucu

SEQ ID NO: 22558 - RNA, 19 nt, Homo sapiens
  misc_RNA (1)...(19): siRNA sense strand
cacgcugugccucauauua

SEQ ID NO: 22559 - RNA, 19 nt, Homo sapiens
  misc_RNA (1)...(19): siRNA sense strand
aauaaagaacccugaagga

SEQ ID NO: 22560 - RNA, 19 nt, Homo sapiens
  misc_RNA (1)...(19): siRNA sense strand
cauccauucucaagucagu

SEQ ID NO: 22561 - RNA, 19 nt, Homo sapiens
  misc_RNA (1)...(19): siRNA sense strand
ggagugcauuucauuuuca

SEQ ID NO: 22562 - RNA, 19 nt, Homo sapiens
  misc_RNA (1)...(19): siRNA sense strand
gaaaugaucugcugaauaa

SEQ ID NO: 22563 - RNA, 19 nt, Homo sapiens
  misc_RNA (1)...(19): siRNA sense strand
ccaaggaggugcuuauuaa

SEQ ID NO: 22564 - RNA, 19 nt, Homo sapiens
  misc_RNA (1)...(19): siRNA sense strand
gcacagaaguuaucaucaa

SEQ ID NO: 22565 - RNA, 19 nt, Homo sapiens
  misc_RNA (1)...(19): siRNA sense strand
ggaccucgcuccuguauag

SEQ ID NO: 22566 - RNA, 19 nt, Homo sapiens
  misc_RNA (1)...(19): siRNA sense strand
gaagaucauuugucaggaa

SEQ ID NO: 22567 - RNA, 19 nt, Homo sapiens
  misc_RNA (1)...(19): siRNA sense strand
gaacucagauaauggcaau

SEQ ID NO: 22568 - RNA, 19 nt, Homo sapiens
  misc_RNA (1)...(19): siRNA sense strand
ggaaaucaguacauugugu

SEQ ID NO: 22569 - RNA, 19 nt, Homo sapiens
  misc_RNA (1)...(19): siRNA sense strand
uacccuagcuuauuuguuu

SEQ ID NO: 22570 - RNA, 19 nt, Homo sapiens
  misc_RNA (1)...(19): siRNA sense strand
gaaguuaucaucaaucugu

SEQ ID NO: 22571 - RNA, 19 nt, Homo sapiens
  misc_RNA (1)...(19): siRNA sense strand
ggacaagggcacagaaguu

SEQ ID NO: 22572 - RNA, 19 nt, Homo sapiens
  misc_RNA (1)...(19): siRNA sense strand
cagagcugcuuucagauaa

SEQ ID NO: 22573 - RNA, 19 nt, Homo sapiens
  misc_RNA (1)...(19): siRNA sense strand
gacaagggcacagaaguua

SEQ ID NO: 22574 - RNA, 19 nt, Homo sapiens
  misc_RNA (1)...(19): siRNA sense strand
cgaaaugaucugcugaaua

SEQ ID NO: 22575 - RNA, 19 nt, Homo sapiens
  misc_RNA (1)...(19): siRNA sense strand
gcacaccaacuaucaguga

SEQ ID NO: 22576 - RNA, 19 nt, Homo sapiens
  misc_RNA (1)...(19): siRNA sense strand
agacauggccauaugcaua

SEQ ID NO: 22577 - RNA, 19 nt, Homo sapiens
  misc_RNA (1)...(19): siRNA sense strand
auucagagcugcuuucaga

SEQ ID NO: 22578 - RNA, 19 nt, Homo sapiens
  misc_RNA (1)...(19): siRNA sense strand
uaaccaaugucaucuccuu

SEQ ID NO: 22579 - RNA, 19 nt, Homo sapiens
  misc_RNA (1)...(19): siRNA sense strand
uggagaagaucauuuguca

SEQ ID NO: 22580 - RNA, 19 nt, Homo sapiens
  misc_RNA (1)...(19): siRNA sense strand
aagaugaacucagauaaug

SEQ ID NO: 22581 - RNA, 19 nt, Homo sapiens
  misc_RNA (1)...(19): siRNA sense strand
caccaagacuacagugauu

SEQ ID NO: 22582 - RNA, 19 nt, Homo sapiens
  misc_RNA (1)...(19): siRNA sense strand
gccaaggaggugcuuauua

SEQ ID NO: 22583 - RNA, 19 nt, Homo sapiens
  misc_RNA (1)...(19): siRNA sense strand
gacauggccauaugcauaa

SEQ ID NO: 22584 - RNA, 19 nt, Homo sapiens
  misc_RNA (1)...(19): siRNA sense strand
gcacaauccucaggugaag

SEQ ID NO: 22585 - RNA, 19 nt, Homo sapiens
  misc_RNA (1)...(19): siRNA sense strand
ucagagcugcuuucagaua

SEQ ID NO: 22586 - RNA, 19 nt, Homo sapiens
  misc_RNA (1)...(19): siRNA sense strand
guggcucucuugcugcuua

SEQ ID NO: 22587 - RNA, 19 nt, Homo sapiens
  misc_RNA (1)...(19): siRNA sense strand
caagaugaacucagauaau

SEQ ID NO: 22588 - RNA, 19 nt, Homo sapiens
  misc_RNA (1)...(19): siRNA sense strand
gaucagaagcuggagaaga

SEQ ID NO: 22589 - RNA, 19 nt, Homo sapiens
  misc_RNA (1)...(19): siRNA sense strand
uucaauaccuccuacaaga

SEQ ID NO: 22590 - RNA, 19 nt, Homo sapiens
  misc_RNA (1)...(19): siRNA sense strand
ucagauaaccacauucuca

SEQ ID NO: 22591 - RNA, 19 nt, Homo sapiens
  misc_RNA (1)...(19): siRNA sense strand
gcuuucagauaaccacauu

SEQ ID NO: 22592 - RNA, 19 nt, Homo sapiens
  misc_RNA (1)...(19): siRNA sense strand
aagccaagaugaacucaga

SEQ ID NO: 22593 - RNA, 19 nt, Homo sapiens
  misc_RNA (1)...(19): siRNA sense strand
uagacaaccugagcaaaga

SEQ ID NO: 22594 - RNA, 19 nt, Homo sapiens
  misc_RNA (1)...(19): siRNA sense strand
ccaagaugaacucagauaa

SEQ ID NO: 22595 - RNA, 19 nt, Homo sapiens
  misc_RNA (1)...(19): siRNA sense strand
cagaaguuaucaucaaucu

SEQ ID NO: 22596 - RNA, 19 nt, Homo sapiens
  misc_RNA (1)...(19): siRNA sense strand
acgaggagauugaccagaa

SEQ ID NO: 22597 - RNA, 19 nt, Homo sapiens
  misc_RNA (1)...(19): siRNA sense strand
caucuauucuguucguaug

SEQ ID NO: 22598 - RNA, 19 nt, Homo sapiens
  misc_RNA (1)...(19): siRNA sense strand
gcaccaagacuacagugau

SEQ ID NO: 22599 - RNA, 19 nt, Homo sapiens
  misc_RNA (1)...(19): siRNA sense strand
gccaagaugaacucagaua

SEQ ID NO: 22600 - RNA, 19 nt, Homo sapiens
  misc_RNA (1)...(19): siRNA sense strand
ccauaugcauaacaacuuc

SEQ ID NO: 22601 - RNA, 19 nt, Homo sapiens
  misc_RNA (1)...(19): siRNA sense strand
caggaaaucaguacauugu

SEQ ID NO: 22602 - RNA, 19 nt, Homo sapiens
  misc_RNA (1)...(19): siRNA sense strand
cacagaaguuaucaucaau

SEQ ID NO: 22603 - RNA, 19 nt, Homo sapiens
  misc_RNA (1)...(19): siRNA sense strand
gucaggaaaucaguacauu

SEQ ID NO: 22604 - RNA, 19 nt, Homo sapiens
  misc_RNA (1)...(19): siRNA sense strand
gacccugaguugaauguca

SEQ ID NO: 22605 - RNA, 19 nt, Homo sapiens
  misc_RNA (1)...(19): siRNA sense strand
guccauagacaucuccuuu

SEQ ID NO: 22606 - RNA, 19 nt, Homo sapiens
  misc_RNA (1)...(19): siRNA sense strand
gcauaacaacuucuucaag

SEQ ID NO: 22607 - RNA, 19 nt, Homo sapiens
  misc_RNA (1)...(19): siRNA sense strand
caauaccuccuacaagaau

SEQ ID NO: 22608 - RNA, 19 nt, Homo sapiens
  misc_RNA (1)...(19): siRNA sense strand
ccaacaaccguaaggguau

SEQ ID NO: 22609 - RNA, 19 nt, Homo sapiens
  misc_RNA (1)...(19): siRNA sense strand
guucaugccugagcguuuc

SEQ ID NO: 22610 - RNA, 19 nt, Homo sapiens
  misc_RNA (1)...(19): siRNA sense strand
ugaagaagaagcucuacga

SEQ ID NO: 22611 - RNA, 19 nt, Homo sapiens
  misc_RNA (1)...(19): siRNA sense strand
ccaaugucaucuccuugau

SEQ ID NO: 22612 - RNA, 19 nt, Homo sapiens
  misc_RNA (1)...(19): siRNA sense strand
ccaagguggucuuucugau

SEQ ID NO: 22613 - RNA, 19 nt, Homo sapiens
  misc_RNA (1)...(19): siRNA sense strand
gcaccagccggaucaguuc

SEQ ID NO: 22614 - RNA, 19 nt, Homo sapiens
  misc_RNA (1)...(19): siRNA sense strand
caacuaucagugaccguaa

SEQ ID NO: 22615 - RNA, 19 nt, Homo sapiens
  misc_RNA (1)...(19): siRNA sense strand
gcccagaucaagauucaga

SEQ ID NO: 22616 - RNA, 19 nt, Homo sapiens
  misc_RNA (1)...(19): siRNA sense strand
gggcacagaaguuaucauc

SEQ ID NO: 22617 - RNA, 19 nt, Homo sapiens
  misc_RNA (1)...(19): siRNA sense strand
cgaggagauugaccagaau

SEQ ID NO: 22618 - RNA, 19 nt, Homo sapiens
  misc_RNA (1)...(19): siRNA sense strand
caacaaccguaaggguauc

SEQ ID NO: 22619 - RNA, 19 nt, Homo sapiens
  misc_RNA (1)...(19): siRNA sense strand
ucugaucgacucuuucaaa

SEQ ID NO: 22620 - RNA, 19 nt, Homo sapiens
  misc_RNA (1)...(19): siRNA sense strand
gaagcucuacgaggagauu

SEQ ID NO: 22621 - RNA, 19 nt, Homo sapiens
  misc_RNA (1)...(19): siRNA sense strand
ucaauaccuccuacaagaa

SEQ ID NO: 22622 - RNA, 19 nt, Homo sapiens
  misc_RNA (1)...(19): siRNA sense strand
aagaucauuugucaggaaa

SEQ ID NO: 22623 - RNA, 19 nt, Homo sapiens
  misc_RNA (1)...(19): siRNA sense strand
ucaaggauggcgaucagaa

SEQ ID NO: 22624 - RNA, 19 nt, Homo sapiens
  misc_RNA (1)...(19): siRNA sense strand
aucagaagcuggagaagau

SEQ ID NO: 22625 - RNA, 19 nt, Homo sapiens
  misc_RNA (1)...(19): siRNA sense strand
aauggcaacucuagacauc

SEQ ID NO: 22626 - RNA, 19 nt, Homo sapiens
  misc_RNA (1)...(19): siRNA sense strand
ccaacaugcuggacacacu

SEQ ID NO: 22627 - RNA, 19 nt, Homo sapiens
  misc_RNA (1)...(19): siRNA sense strand
gcgaucagaagcuggagaa

SEQ ID NO: 22628 - RNA, 19 nt, Homo sapiens
  misc_RNA (1)...(19): siRNA sense strand
guucaaggauggcgaucag

SEQ ID NO: 22629 - RNA, 19 nt, Homo sapiens
  misc_RNA (1)...(19): siRNA sense strand
caaauggcaacucuagaca

SEQ ID NO: 22630 - RNA, 19 nt, Homo sapiens
  misc_RNA (1)...(19): siRNA sense strand
ccugagcguuucuugaauc

SEQ ID NO: 22631 - RNA, 19 nt, Homo sapiens
  misc_RNA (1)...(19): siRNA sense strand
gggcgcugcaucacaauga

SEQ ID NO: 22632 - RNA, 19 nt, Homo sapiens
  misc_RNA (1)...(19): siRNA sense strand
caagggcacagaaguuauc

SEQ ID NO: 22633 - RNA, 19 nt, Homo sapiens
  misc_RNA (1)...(19): siRNA sense strand
cguaugggcaccaagacua

SEQ ID NO: 22634 - RNA, 19 nt, Homo sapiens
  misc_RNA (1)...(19): siRNA sense strand
ucaguacauugugugauau

SEQ ID NO: 22635 - RNA, 19 nt, Homo sapiens
  misc_RNA (1)...(19): siRNA sense strand
caagguggucuuucugauc

SEQ ID NO: 22636 - RNA, 19 nt, Homo sapiens
  misc_RNA (1)...(19): siRNA sense strand
gagaaauuccggagugacu

SEQ ID NO: 22637 - RNA, 19 nt, Homo sapiens
  misc_RNA (1)...(19): siRNA sense strand
ugaguugaaugucauacag

SEQ ID NO: 22638 - RNA, 19 nt, Homo sapiens
  misc_RNA (1)...(19): siRNA sense strand
aaugucaucuccuugaucu

SEQ ID NO: 22639 - RNA, 19 nt, Homo sapiens
  misc_RNA (1)...(19): siRNA sense strand
ccauagacaucuccuuucc

SEQ ID NO: 22640 - RNA, 19 nt, Homo sapiens
  misc_RNA (1)...(19): siRNA sense strand
ugcuuacccuagcuuauuu

SEQ ID NO: 22641 - RNA, 19 nt, Homo sapiens
  misc_RNA (1)...(19): siRNA sense strand
gaagcuggagaagaucauu

SEQ ID NO: 22642 - RNA, 19 nt, Homo sapiens
  misc_RNA (1)...(19): siRNA sense strand
gccauaugcauaacaacuu

SEQ ID NO: 22643 - RNA, 19 nt, Homo sapiens
  misc_RNA (1)...(19): siRNA sense strand
ggagauugaccagaaugug

SEQ ID NO: 22644 - RNA, 19 nt, Homo sapiens
  misc_RNA (1)...(19): siRNA sense strand
ggccucaaauggcaacucu

SEQ ID NO: 22645 - RNA, 19 nt, Homo sapiens
  misc_RNA (1)...(19): siRNA sense strand
uggcccagaucaagauuca

SEQ ID NO: 22646 - RNA, 19 nt, Homo sapiens
  misc_RNA (1)...(19): siRNA sense strand
caucuccuuuccugucuuc

SEQ ID NO: 22647 - RNA, 19 nt, Homo sapiens
  misc_RNA (1)...(19): siRNA sense strand
aguugaaugucauacagaa

SEQ ID NO: 22648 - RNA, 19 nt, Homo sapiens
  misc_RNA (1)...(19): siRNA sense strand
ucaggaaaucaguacauug

SEQ ID NO: 22649 - RNA, 19 nt, Homo sapiens
  misc_RNA (1)...(19): siRNA sense strand
ggcugaggguagcaccuaa

SEQ ID NO: 22650 - RNA, 19 nt, Homo sapiens
  misc_RNA (1)...(19): siRNA sense strand
ccaagacuacagugauugu

SEQ ID NO: 22651 - RNA, 19 nt, Homo sapiens
  misc_RNA (1)...(19): siRNA sense strand
acaauccucaggugaagaa

SEQ ID NO: 22652 - RNA, 19 nt, Homo sapiens
  misc_RNA (1)...(19): siRNA sense strand
ccucaaauggcaacucuag

SEQ ID NO: 22653 - RNA, 19 nt, Homo sapiens
  misc_RNA (1)...(19): siRNA sense strand
uuaagaagggcaaggacuu

SEQ ID NO: 22654 - RNA, 19 nt, Homo sapiens
  misc_RNA (1)...(19): siRNA sense strand
ucaaauggcaacucuagac

SEQ ID NO: 22655 - RNA, 19 nt, Homo sapiens
  misc_RNA (1)...(19): siRNA sense strand
ggcaccagccggaucaguu

SEQ ID NO: 22656 - RNA, 19 nt, Homo sapiens
  misc_RNA (1)...(19): siRNA sense strand
ugaguuugcuguggacaag

SEQ ID NO: 22657 - RNA, 19 nt, Homo sapiens
  misc_RNA (1)...(19): siRNA sense strand
ccacaaggccaacguugac

SEQ ID NO: 22658 - RNA, 19 nt, Homo sapiens
  misc_RNA (1)...(19): siRNA sense strand
gaggagauugaccagaaug

SEQ ID NO: 22659 - RNA, 19 nt, Homo sapiens
  misc_RNA (1)...(19): siRNA sense strand
ccacauucucaccaccaua

SEQ ID NO: 22660 - RNA, 19 nt, Homo sapiens
  misc_RNA (1)...(19): siRNA sense strand
caagauucagagcugcuuu

SEQ ID NO: 22661 - RNA, 19 nt, Homo sapiens
  misc_RNA (1)...(19): siRNA sense strand
ugccugagcguuucuugaa

SEQ ID NO: 22662 - RNA, 19 nt, Homo sapiens
  misc_RNA (1)...(19): siRNA sense strand
ucaaggaccugaaugagaa

SEQ ID NO: 22663 - RNA, 19 nt, Homo sapiens
  misc_RNA (1)...(19): siRNA sense strand
gaucccaucugcccuauau

SEQ ID NO: 22664 - RNA, 19 nt, Homo sapiens
  misc_RNA (1)...(19): siRNA sense strand
agaagcagcuggaugagaa

SEQ ID NO: 22665 - RNA, 19 nt, Homo sapiens
  misc_RNA (1)...(19): siRNA sense strand
caacaagagacacaaguuu

SEQ ID NO: 22666 - RNA, 19 nt, Homo sapiens
  misc_RNA (1)...(19): siRNA sense strand
aaaugcagcugcgcucuua

SEQ ID NO: 22667 - RNA, 19 nt, Homo sapiens
  misc_RNA (1)...(19): siRNA sense strand
gacaagguguuaagugaga

SEQ ID NO: 22668 - RNA, 19 nt, Homo sapiens
  misc_RNA (1)...(19): siRNA sense strand
cuagucaaccugaauaaua

SEQ ID NO: 22669 - RNA, 19 nt, Homo sapiens
  misc_RNA (1)...(19): siRNA sense strand
ccuggagccucauguauuu

SEQ ID NO: 22670 - RNA, 19 nt, Homo sapiens
  misc_RNA (1)...(19): siRNA sense strand
gcagggcgaugauuucaag

SEQ ID NO: 22671 - RNA, 19 nt, Homo sapiens
  misc_RNA (1)...(19): siRNA sense strand
gugagaaggugauuaucuu

SEQ ID NO: 22672 - RNA, 19 nt, Homo sapiens
  misc_RNA (1)...(19): siRNA sense strand
gaucaaccaugaccagaag

SEQ ID NO: 22673 - RNA, 19 nt, Homo sapiens
  misc_RNA (1)...(19): siRNA sense strand
guaaaccaguggcagauca

SEQ ID NO: 22674 - RNA, 19 nt, Homo sapiens
  misc_RNA (1)...(19): siRNA sense strand
caacccaucugaguuccua

SEQ ID NO: 22675 - RNA, 19 nt, Homo sapiens
  misc_RNA (1)...(19): siRNA sense strand
aaacccagcugacuucauc

SEQ ID NO: 22676 - RNA, 19 nt, Homo sapiens
  misc_RNA (1)...(19): siRNA sense strand
ccaaaggccugaagaaucc

SEQ ID NO: 22677 - RNA, 19 nt, Homo sapiens
  misc_RNA (1)...(19): siRNA sense strand
ggucagagcauguccuuca

SEQ ID NO: 22678 - RNA, 19 nt, Homo sapiens
  misc_RNA (1)...(19): siRNA sense strand
ucgacaagguguuaaguga

SEQ ID NO: 22679 - RNA, 19 nt, Homo sapiens
  misc_RNA (1)...(19): siRNA sense strand
uaagugagaaggugauuau

SEQ ID NO: 22680 - RNA, 19 nt, Homo sapiens
  misc_RNA (1)...(19): siRNA sense strand
cuacagguaugugguggua

SEQ ID NO: 22681 - RNA, 19 nt, Homo sapiens
  misc_RNA (1)...(19): siRNA sense strand
ggucaaggagcacuacaaa

SEQ ID NO: 22682 - RNA, 19 nt, Homo sapiens
  misc_RNA (1)...(19): siRNA sense strand
ggagcuagacacagugauu

SEQ ID NO: 22683 - RNA, 19 nt, Homo sapiens
  misc_RNA (1)...(19): siRNA sense strand
gagcuggguuugacacagu

SEQ ID NO: 22684 - RNA, 19 nt, Homo sapiens
  misc_RNA (1)...(19): siRNA sense strand
ggaccugaaugagaaguuc

SEQ ID NO: 22685 - RNA, 19 nt, Homo sapiens
  misc_RNA (1)...(19): siRNA sense strand
gcugggaggucuuucucuu

SEQ ID NO: 22686 - RNA, 19 nt, Homo sapiens
  misc_RNA (1)...(19): siRNA sense strand
gagaaggugauuaucuuug

SEQ ID NO: 22687 - RNA, 19 nt, Homo sapiens
  misc_RNA (1)...(19): siRNA sense strand
ucacagacagccugauuga

SEQ ID NO: 22688 - RNA, 19 nt, Homo sapiens
  misc_RNA (1)...(19): siRNA sense strand
cagcugacuucaucccuau

SEQ ID NO: 22689 - RNA, 19 nt, Homo sapiens
  misc_RNA (1)...(19): siRNA sense strand
agaauggccugaaaaguuu

SEQ ID NO: 22690 - RNA, 19 nt, Homo sapiens
  misc_RNA (1)...(19): siRNA sense strand
gcugugagcacuuccaaau

SEQ ID NO: 22691 - RNA, 19 nt, Homo sapiens
  misc_RNA (1)...(19): siRNA sense strand
aagaggagcuagacacagu

SEQ ID NO: 22692 - RNA, 19 nt, Homo sapiens
  misc_RNA (1)...(19): siRNA sense strand
ugucugguauucuggguaa

SEQ ID NO: 22693 - RNA, 19 nt, Homo sapiens
  misc_RNA (1)...(19): siRNA sense strand
gaacugcuuagccuaguca

SEQ ID NO: 22694 - RNA, 19 nt, Homo sapiens
  misc_RNA (1)...(19): siRNA sense strand
ggucaacccaucugaguuc

SEQ ID NO: 22695 - RNA, 19 nt, Homo sapiens
  misc_RNA (1)...(19): siRNA sense strand
ucauuaacaucgucuugga

SEQ ID NO: 22696 - RNA, 19 nt, Homo sapiens
  misc_RNA (1)...(19): siRNA sense strand
gaucauuaacaucgucuug

SEQ ID NO: 22697 - RNA, 19 nt, Homo sapiens
  misc_RNA (1)...(19): siRNA sense strand
caucuucugucugguauuc

SEQ ID NO: 22698 - RNA, 19 nt, Homo sapiens
  misc_RNA (1)...(19): siRNA sense strand
ugcagaagauggucaagga

SEQ ID NO: 22699 - RNA, 19 nt, Homo sapiens
  misc_RNA (1)...(19): siRNA sense strand
gguauguggugguaucagu

SEQ ID NO: 22700 - RNA, 19 nt, Homo sapiens
  misc_RNA (1)...(19): siRNA sense strand
acaagagacacaaguuuga

SEQ ID NO: 22701 - RNA, 19 nt, Homo sapiens
  misc_RNA (1)...(19): siRNA sense strand
ggcccgaccucuacaccuu

SEQ ID NO: 22702 - RNA, 19 nt, Homo sapiens
  misc_RNA (1)...(19): siRNA sense strand
ggcguugugucuuuguaaa

SEQ ID NO: 22703 - RNA, 19 nt, Homo sapiens
  misc_RNA (1)...(19): siRNA sense strand
gagcuagacacagugauug

SEQ ID NO: 22704 - RNA, 19 nt, Homo sapiens
  misc_RNA (1)...(19): siRNA sense strand
caagagacacaaguuugaa

SEQ ID NO: 22705 - RNA, 19 nt, Homo sapiens
  misc_RNA (1)...(19): siRNA sense strand
caaggggcguugugucuuu

SEQ ID NO: 22706 - RNA, 19 nt, Homo sapiens
  misc_RNA (1)...(19): siRNA sense strand
agaaggugauuaucuuugg

SEQ ID NO: 22707 - RNA, 19 nt, Homo sapiens
  misc_RNA (1)...(19): siRNA sense strand
ccuucacccucaucaguaa

SEQ ID NO: 22708 - RNA, 19 nt, Homo sapiens
  misc_RNA (1)...(19): siRNA sense strand
ccucauguauuuggugaug

SEQ ID NO: 22709 - RNA, 19 nt, Homo sapiens
  misc_RNA (1)...(19): siRNA sense strand
ccacaaccaccaagaacug

SEQ ID NO: 22710 - RNA, 19 nt, Homo sapiens
  misc_RNA (1)...(19): siRNA sense strand
caucugugccauuugcuuu

SEQ ID NO: 22711 - RNA, 19 nt, Homo sapiens
  misc_RNA (1)...(19): siRNA sense strand
uggaagagcaugugagcaa

SEQ ID NO: 22712 - RNA, 19 nt, Homo sapiens
  misc_RNA (1)...(19): siRNA sense strand
caaggaugagccagcagua

SEQ ID NO: 22713 - RNA, 19 nt, Homo sapiens
  misc_RNA (1)...(19): siRNA sense strand
ugagaaggugauuaucuuu

SEQ ID NO: 22714 - RNA, 19 nt, Homo sapiens
  misc_RNA (1)...(19): siRNA sense strand
aguggcagaucaaccauga

SEQ ID NO: 22715 - RNA, 19 nt, Homo sapiens
  misc_RNA (1)...(19): siRNA sense strand
gagaagcagcuggaugaga

SEQ ID NO: 22716 - RNA, 19 nt, Homo sapiens
  misc_RNA (1)...(19): siRNA sense strand
gcugagguccugauaagca

SEQ ID NO: 22717 - RNA, 19 nt, Homo sapiens
  misc_RNA (1)...(19): siRNA sense strand
ggaggcugagguccugaua

SEQ ID NO: 22718 - RNA, 19 nt, Homo sapiens
  misc_RNA (1)...(19): siRNA sense strand
cagaauggccugaaaaguu

SEQ ID NO: 22719 - RNA, 19 nt, Homo sapiens
  misc_RNA (1)...(19): siRNA sense strand
gcugucagaugagaagauc

SEQ ID NO: 22720 - RNA, 19 nt, Homo sapiens
  misc_RNA (1)...(19): siRNA sense strand
gguaaucagggccucaaga

SEQ ID NO: 22721 - RNA, 19 nt, Homo sapiens
  misc_RNA (1)...(19): siRNA sense strand
ugugagcacuuccaaaugc

SEQ ID NO: 22722 - RNA, 19 nt, Homo sapiens
  misc_RNA (1)...(19): siRNA sense strand
gcacaacaagagacacaag

SEQ ID NO: 22723 - RNA, 19 nt, Homo sapiens
  misc_RNA (1)...(19): siRNA sense strand
aggagaagcagcuggauga

SEQ ID NO: 22724 - RNA, 19 nt, Homo sapiens
  misc_RNA (1)...(19): siRNA sense strand
acagguauguggugguauc

SEQ ID NO: 22725 - RNA, 19 nt, Homo sapiens
  misc_RNA (1)...(19): siRNA sense strand
aggcugagguccugauaag

SEQ ID NO: 22726 - RNA, 19 nt, Homo sapiens
  misc_RNA (1)...(19): siRNA sense strand
gaggagcuagacacaguga

SEQ ID NO: 22727 - RNA, 19 nt, Homo sapiens
  misc_RNA (1)...(19): siRNA sense strand
gcacguugcaggagcugau

SEQ ID NO: 22728 - RNA, 19 nt, Homo sapiens
  misc_RNA (1)...(19): siRNA sense strand
caaaugcagcugcgcucuu

SEQ ID NO: 22729 - RNA, 19 nt, Homo sapiens
  misc_RNA (1)...(19): siRNA sense strand
gggcguugugucuuuguaa

SEQ ID NO: 22730 - RNA, 19 nt, Homo sapiens
  misc_RNA (1)...(19): siRNA sense strand
gacuucaucccuauucuuc

SEQ ID NO: 22731 - RNA, 19 nt, Homo sapiens
  misc_RNA (1)...(19): siRNA sense strand
gaggcugagguccugauaa

SEQ ID NO: 22732 - RNA, 19 nt, Homo sapiens
  misc_RNA (1)...(19): siRNA sense strand
cccaaaggccugaagaauc

SEQ ID NO: 22733 - RNA, 19 nt, Homo sapiens
  misc_RNA (1)...(19): siRNA sense strand
aacaagagacacaaguuug

SEQ ID NO: 22734 - RNA, 19 nt, Homo sapiens
  misc_RNA (1)...(19): siRNA sense strand
acaacaagagacacaaguu

SEQ ID NO: 22735 - RNA, 19 nt, Homo sapiens
  misc_RNA (1)...(19): siRNA sense strand
ccaagaggagcuagacaca

SEQ ID NO: 22736 - RNA, 19 nt, Homo sapiens
  misc_RNA (1)...(19): siRNA sense strand
acccaacccuucccugaau

SEQ ID NO: 22737 - RNA, 19 nt, Homo sapiens
  misc_RNA (1)...(19): siRNA sense strand
ugaccacaaccaccaagaa

SEQ ID NO: 22738 - RNA, 19 nt, Homo sapiens
  misc_RNA (1)...(19): siRNA sense strand
ggaugagccagcaguaugg

SEQ ID NO: 22739 - RNA, 19 nt, Homo sapiens
  misc_RNA (1)...(19): siRNA sense strand
uggaugagaacgccaaugu

SEQ ID NO: 22740 - RNA, 19 nt, Homo sapiens
  misc_RNA (1)...(19): siRNA sense strand
ugucaucuucugucuggua

SEQ ID NO: 22741 - RNA, 19 nt, Homo sapiens
  misc_RNA (1)...(19): siRNA sense strand
ccaauguccagcugucaga

SEQ ID NO: 22742 - RNA, 19 nt, Homo sapiens
  misc_RNA (1)...(19): siRNA sense strand
gugcugcagauccgaauug

SEQ ID NO: 22743 - RNA, 19 nt, Homo sapiens
  misc_RNA (1)...(19): siRNA sense strand
gcgugaagguggacaugac

SEQ ID NO: 22744 - RNA, 19 nt, Homo sapiens
  misc_RNA (1)...(19): siRNA sense strand
guccagcugucagaugaga

SEQ ID NO: 22745 - RNA, 19 nt, Homo sapiens
  misc_RNA (1)...(19): siRNA sense strand
ccacauccgggacaucaca

SEQ ID NO: 22746 - RNA, 19 nt, Homo sapiens
  misc_RNA (1)...(19): siRNA sense strand
cuggagaccuuccgacacu

SEQ ID NO: 22747 - RNA, 19 nt, Homo sapiens
  misc_RNA (1)...(19): siRNA sense strand
caucgucuuggaccucuuu

SEQ ID NO: 22748 - RNA, 19 nt, Homo sapiens
  misc_RNA (1)...(19): siRNA sense strand
guuucuccauugccucuga

SEQ ID NO: 22749 - RNA, 19 nt, Homo sapiens
  misc_RNA (1)...(19): siRNA sense strand
caaccaugaccagaagcua

SEQ ID NO: 22750 - RNA, 19 nt, Homo sapiens
  misc_RNA (1)...(19): siRNA sense strand
aagagacacaaguuugaaa

SEQ ID NO: 22751 - RNA, 19 nt, Homo sapiens
  misc_RNA (1)...(19): siRNA sense strand
guaaucagggccucaagac

SEQ ID NO: 22752 - RNA, 19 nt, Homo sapiens
  misc_RNA (1)...(19): siRNA sense strand
gaaacccagcugacuucau

SEQ ID NO: 22753 - RNA, 19 nt, Homo sapiens
  misc_RNA (1)...(19): siRNA sense strand
ugucaucugugccauuugc

SEQ ID NO: 22754 - RNA, 19 nt, Homo sapiens
  misc_RNA (1)...(19): siRNA sense strand
gaccacaaccaccaagaac

SEQ ID NO: 22755 - RNA, 19 nt, Homo sapiens
  misc_RNA (1)...(19): siRNA sense strand
gucaucuucugucugguau

SEQ ID NO: 22756 - RNA, 19 nt, Homo sapiens
  misc_RNA (1)...(19): siRNA sense strand
ucuggccucugucaucuuc

SEQ ID NO: 22757 - RNA, 19 nt, Homo sapiens
  misc_RNA (1)...(19): siRNA sense strand
aagagcaugugagcaagga

SEQ ID NO: 22758 - RNA, 19 nt, Homo sapiens
  misc_RNA (1)...(19): siRNA sense strand
gcugacuucaucccuauuc

SEQ ID NO: 22759 - RNA, 19 nt, Homo sapiens
  misc_RNA (1)...(19): siRNA sense strand
gaauuucaguuauggucua

SEQ ID NO: 22760 - RNA, 19 nt, Homo sapiens
  misc_RNA (1)...(19): siRNA sense strand
ccauggagcuccuugauag

SEQ ID NO: 22761 - RNA, 19 nt, Homo sapiens
  misc_RNA (1)...(19): siRNA sense strand
gaacguaccggccacuauc

SEQ ID NO: 22762 - RNA, 19 nt, Homo sapiens
  misc_RNA (1)...(19): siRNA sense strand
ccauuaaacccaagucauu

SEQ ID NO: 22763 - RNA, 19 nt, Homo sapiens
  misc_RNA (1)...(19): siRNA sense strand
caaaugagccugcgaaaau

SEQ ID NO: 22764 - RNA, 19 nt, Homo sapiens
  misc_RNA (1)...(19): siRNA sense strand
gaccugaccagcagaguga

SEQ ID NO: 22765 - RNA, 19 nt, Homo sapiens
  misc_RNA (1)...(19): siRNA sense strand
aaacccaagucauuuaaag

SEQ ID NO: 22766 - RNA, 19 nt, Homo sapiens
  misc_RNA (1)...(19): siRNA sense strand
gcaacuucauccuggacaa

SEQ ID NO: 22767 - RNA, 19 nt, Homo sapiens
  misc_RNA (1)...(19): siRNA sense strand
ccaagucauuuaaagucaa

SEQ ID NO: 22768 - RNA, 19 nt, Homo sapiens
  misc_RNA (1)...(19): siRNA sense strand
gggaccgucugccuuguau

SEQ ID NO: 22769 - RNA, 19 nt, Homo sapiens
  misc_RNA (1)...(19): siRNA sense strand
gcuaccacauucccaagga

SEQ ID NO: 22770 - RNA, 19 nt, Homo sapiens
  misc_RNA (1)...(19): siRNA sense strand
cacuaucacugacaucuuc

SEQ ID NO: 22771 - RNA, 19 nt, Homo sapiens
  misc_RNA (1)...(19): siRNA sense strand
guccuggccuuccuuuaug

SEQ ID NO: 22772 - RNA, 19 nt, Homo sapiens
  misc_RNA (1)...(19): siRNA sense strand
ggccuaacccggagaacuu

SEQ ID NO: 22773 - RNA, 19 nt, Homo sapiens
  misc_RNA (1)...(19): siRNA sense strand
cgucaugagugccgugugu

SEQ ID NO: 22774 - RNA, 19 nt, Homo sapiens
  misc_RNA (1)...(19): siRNA sense strand
gcggugcauuggcgaagaa

SEQ ID NO: 22775 - RNA, 19 nt, Homo sapiens
  misc_RNA (1)...(19): siRNA sense strand
cauuaaacccaagucauuu

SEQ ID NO: 22776 - RNA, 19 nt, Homo sapiens
  misc_RNA (1)...(19): siRNA sense strand
cgacaugauggacgccuuu

SEQ ID NO: 22777 - RNA, 19 nt, Homo sapiens
  misc_RNA (1)...(19): siRNA sense strand
uaaacccgcuguccaucca

SEQ ID NO: 22778 - RNA, 19 nt, Homo sapiens
  misc_RNA (1)...(19): siRNA sense strand
gcucaccagugcgauuuca

SEQ ID NO: 22779 - RNA, 19 nt, Homo sapiens
  misc_RNA (1)...(19): siRNA sense strand
caacuucagcaacuucauc

SEQ ID NO: 22780 - RNA, 19 nt, Homo sapiens
  misc_RNA (1)...(19): siRNA sense strand
cccaagucauuuaaaguca

SEQ ID NO: 22781 - RNA, 19 nt, Homo sapiens
  misc_RNA (1)...(19): siRNA sense strand
gcagcucaaccgcaacuuc

SEQ ID NO: 22782 - RNA, 19 nt, Homo sapiens
  misc_RNA (1)...(19): siRNA sense strand
aguggucugugaaucauga

SEQ ID NO: 22783 - RNA, 19 nt, Homo sapiens
  misc_RNA (1)...(19): siRNA sense strand
caugauggacgccuuuauc

SEQ ID NO: 22784 - RNA, 19 nt, Homo sapiens
  misc_RNA (1)...(19): siRNA sense strand
cagcucaaccgcaacuuca

SEQ ID NO: 22785 - RNA, 19 nt, Homo sapiens
  misc_RNA (1)...(19): siRNA sense strand
gugcauuggcgaagaacuu

SEQ ID NO: 22786 - RNA, 19 nt, Homo sapiens
  misc_RNA (1)...(19): siRNA sense strand
ccaguggucugugaaucau

SEQ ID NO: 22787 - RNA, 19 nt, Homo sapiens
  misc_RNA (1)...(19): siRNA sense strand
ugucuugggcuaccacauu

SEQ ID NO: 22788 - RNA, 19 nt, Homo sapiens
  misc_RNA (1)...(19): siRNA sense strand
gcuuugugccugucacuau

SEQ ID NO: 22789 - RNA, 19 nt, Homo sapiens
  misc_RNA (1)...(19): siRNA sense strand
ggacgccuuuauccucucu

SEQ ID NO: 22790 - RNA, 19 nt, Homo sapiens
  misc_RNA (1)...(19): siRNA sense strand
gacaugauggacgccuuua

SEQ ID NO: 22791 - RNA, 19 nt, Homo sapiens
  misc_RNA (1)...(19): siRNA sense strand
ugucggugcuggccacugu

SEQ ID NO: 22792 - RNA, 19 nt, Homo sapiens
  misc_RNA (1)...(19): siRNA sense strand
cguggccacugaucggaaa

SEQ ID NO: 22793 - RNA, 19 nt, Homo sapiens
  misc_RNA (1)...(19): siRNA sense strand
ucaugagugccguguguuu

SEQ ID NO: 22794 - RNA, 19 nt, Homo sapiens
  misc_RNA (1)...(19): siRNA sense strand
aaauuuacaagccaaggaa

SEQ ID NO: 22795 - RNA, 19 nt, Homo sapiens
  misc_RNA (1)...(19): siRNA sense strand
ugauagugcuguccaaaau

SEQ ID NO: 22796 - RNA, 19 nt, Homo sapiens
  misc_RNA (1)...(19): siRNA sense strand
ugccaacaccucugucuug

SEQ ID NO: 22797 - RNA, 19 nt, Homo sapiens
  misc_RNA (1)...(19): siRNA sense strand
ugcccuggcugcaguacuu

SEQ ID NO: 22798 - RNA, 19 nt, Homo sapiens
  misc_RNA (1)...(19): siRNA sense strand
ucagggccaacccaaauga

SEQ ID NO: 22799 - RNA, 19 nt, Homo sapiens
  misc_RNA (1)...(19): siRNA sense strand
uuucuaagaugcagcuuuu

SEQ ID NO: 22800 - RNA, 19 nt, Homo sapiens
  misc_RNA (1)...(19): siRNA sense strand
uguccuggccuuccuuuau

SEQ ID NO: 22801 - RNA, 19 nt, Homo sapiens
  misc_RNA (1)...(19): siRNA sense strand
gagaacguaccggccacua

SEQ ID NO: 22802 - RNA, 19 nt, Homo sapiens
  misc_RNA (1)...(19): siRNA sense strand
gaccgucugccuuguaugg

SEQ ID NO: 22803 - RNA, 19 nt, Homo sapiens
  misc_RNA (1)...(19): siRNA sense strand
ccagcagagugaugauuuu

SEQ ID NO: 22804 - RNA, 19 nt, Homo sapiens
  misc_RNA (1)...(19): siRNA sense strand
gaccagcagagugaugauu

SEQ ID NO: 22805 - RNA, 19 nt, Homo sapiens
  misc_RNA (1)...(19): siRNA sense strand
ccaaggacacugugguuuu

SEQ ID NO: 22806 - RNA, 19 nt, Homo sapiens
  misc_RNA (1)...(19): siRNA sense strand
agcccaaccugcccuaugu

SEQ ID NO: 22807 - RNA, 19 nt, Homo sapiens
  misc_RNA (1)...(19): siRNA sense strand
gcgcuucuccagcuuugug

SEQ ID NO: 22808 - RNA, 19 nt, Homo sapiens
  misc_RNA (1)...(19): siRNA sense strand
auagugcuguccaaaauuu

SEQ ID NO: 22809 - RNA, 19 nt, Homo sapiens
  misc_RNA (1)...(19): siRNA sense strand
ggcaaaaggcggugcauug

SEQ ID NO: 22810 - RNA, 19 nt, Homo sapiens
  misc_RNA (1)...(19): siRNA sense strand
cuuugugccugucacuauu

SEQ ID NO: 22811 - RNA, 19 nt, Homo sapiens
  misc_RNA (1)...(19): siRNA sense strand
gucuugggcuaccacauuc

SEQ ID NO: 22812 - RNA, 19 nt, Homo sapiens
  misc_RNA (1)...(19): siRNA sense strand
agaccacgcuccugcuacu

SEQ ID NO: 22813 - RNA, 19 nt, Homo sapiens
  misc_RNA (1)...(19): siRNA sense strand
ccacuaucacugacaucuu

SEQ ID NO: 22814 - RNA, 19 nt, Homo sapiens
  misc_RNA (1)...(19): siRNA sense strand
gagggaccgucugccuugu

SEQ ID NO: 22815 - RNA, 19 nt, Homo sapiens
  misc_RNA (1)...(19): siRNA sense strand
gaucaaggacgacaacuua

SEQ ID NO: 22816 - RNA, 19 nt, Homo sapiens
  misc_RNA (1)...(19): siRNA sense strand
ggagggacaugauggacua

SEQ ID NO: 22817 - RNA, 19 nt, Homo sapiens
  misc_RNA (1)...(19): siRNA sense strand
gcacugagaccacagcaaa

SEQ ID NO: 22818 - RNA, 19 nt, Homo sapiens
  misc_RNA (1)...(19): siRNA sense strand
gaccugagccacuuaccua

SEQ ID NO: 22819 - RNA, 19 nt, Homo sapiens
  misc_RNA (1)...(19): siRNA sense strand
gaugcagccuuuccaagug

SEQ ID NO: 22820 - RNA, 19 nt, Homo sapiens
  misc_RNA (1)...(19): siRNA sense strand
ccacugguccauccaaauu

SEQ ID NO: 22821 - RNA, 19 nt, Homo sapiens
  misc_RNA (1)...(19): siRNA sense strand
ggagaggccacaugaguuc

SEQ ID NO: 22822 - RNA, 19 nt, Homo sapiens
  misc_RNA (1)...(19): siRNA sense strand
caagaggaccauugaggaa

SEQ ID NO: 22823 - RNA, 19 nt, Homo sapiens
  misc_RNA (1)...(19): siRNA sense strand
gcagugucauccucaagau

SEQ ID NO: 22824 - RNA, 19 nt, Homo sapiens
  misc_RNA (1)...(19): siRNA sense strand
caaggacgacaacuuaaug

SEQ ID NO: 22825 - RNA, 19 nt, Homo sapiens
  misc_RNA (1)...(19): siRNA sense strand
ggaaagcccacaagaagcu

SEQ ID NO: 22826 - RNA, 19 nt, Homo sapiens
  misc_RNA (1)...(19): siRNA sense strand
cggcugcccuugcucaaug

SEQ ID NO: 22827 - RNA, 19 nt, Homo sapiens
  misc_RNA (1)...(19): siRNA sense strand
ggagcuagaccacgaacug

SEQ ID NO: 22828 - RNA, 19 nt, Homo sapiens
  misc_RNA (1)...(19): siRNA sense strand
ugaagcaggccauagagaa

SEQ ID NO: 22829 - RNA, 19 nt, Homo sapiens
  misc_RNA (1)...(19): siRNA sense strand
gaagcaggccauagagaag

SEQ ID NO: 22830 - RNA, 19 nt, Homo sapiens
  misc_RNA (1)...(19): siRNA sense strand
caacuuaaugccugccuau

SEQ ID NO: 22831 - RNA, 19 nt, Homo sapiens
  misc_RNA (1)...(19): siRNA sense strand
gggagaggccacaugaguu

SEQ ID NO: 22832 - RNA, 19 nt, Homo sapiens
  misc_RNA (1)...(19): siRNA sense strand
ggacgugauucccuuucuc

SEQ ID NO: 22833 - RNA, 19 nt, Homo sapiens
  misc_RNA (1)...(19): siRNA sense strand
ugaggaagccauggucaaa

SEQ ID NO: 22834 - RNA, 19 nt, Homo sapiens
  misc_RNA (1)...(19): siRNA sense strand
caugaguucuggccugauc

SEQ ID NO: 22835 - RNA, 19 nt, Homo sapiens
  misc_RNA (1)...(19): siRNA sense strand
ccaaauuguggacgugauu

SEQ ID NO: 22836 - RNA, 19 nt, Homo sapiens
  misc_RNA (1)...(19): siRNA sense strand
ucaaggacgacaacuuaau

SEQ ID NO: 22837 - RNA, 19 nt, Homo sapiens
  misc_RNA (1)...(19): siRNA sense strand
caagaugcagccuuuccaa

SEQ ID NO: 22838 - RNA, 19 nt, Homo sapiens
  misc_RNA (1)...(19): siRNA sense strand
ugagggcacagucaucauu

SEQ ID NO: 22839 - RNA, 19 nt, Homo sapiens
  misc_RNA (1)...(19): siRNA sense strand
gggacaugauggacuacau

SEQ ID NO: 22840 - RNA, 19 nt, Homo sapiens
  misc_RNA (1)...(19): siRNA sense strand
cugagccacuuaccuacaa

SEQ ID NO: 22841 - RNA, 19 nt, Homo sapiens
  misc_RNA (1)...(19): siRNA sense strand
cuggaaagcccacaagaag

SEQ ID NO: 22842 - RNA, 19 nt, Homo sapiens
  misc_RNA (1)...(19): siRNA sense strand
ugacccaggaguucuguga

SEQ ID NO: 22843 - RNA, 19 nt, Homo sapiens
  misc_RNA (1)...(19): siRNA sense strand
acuacucccugcucuggaa

SEQ ID NO: 22844 - RNA, 19 nt, Homo sapiens
  misc_RNA (1)...(19): siRNA sense strand
aagaugugguggugcugaa

SEQ ID NO: 22845 - RNA, 19 nt, Homo sapiens
  misc_RNA (1)...(19): siRNA sense strand
gacgugauucccuuucuca

SEQ ID NO: 22846 - RNA, 19 nt, Homo sapiens
  misc_RNA (1)...(19): siRNA sense strand
gagggcacagucaucauuc

SEQ ID NO: 22847 - RNA, 19 nt, Homo sapiens
  misc_RNA (1)...(19): siRNA sense strand
gcagcugacccaggaguuc

SEQ ID NO: 22848 - RNA, 19 nt, Homo sapiens
  misc_RNA (1)...(19): siRNA sense strand
ccauagagaagagggauca

SEQ ID NO: 22849 - RNA, 19 nt, Homo sapiens
  misc_RNA (1)...(19): siRNA sense strand
guauccaggagguguuaaa

SEQ ID NO: 22850 - RNA, 19 nt, Homo sapiens
  misc_RNA (1)...(19): siRNA sense strand
ucuggaaagcccacaagaa

SEQ ID NO: 22851 - RNA, 19 nt, Homo sapiens
  misc_RNA (1)...(19): siRNA sense strand
ggaggagcuagaccacgaa

SEQ ID NO: 22852 - RNA, 19 nt, Homo sapiens
  misc_RNA (1)...(19): siRNA sense strand
gccugccuauuacaaaugu

SEQ ID NO: 22853 - RNA, 19 nt, Homo sapiens
  misc_RNA (1)...(19): siRNA sense strand
cuccucaccugcagcauca

SEQ ID NO: 22854 - RNA, 19 nt, Homo sapiens
  misc_RNA (1)...(19): siRNA sense strand
caagaucaaggacgacaac

SEQ ID NO: 22855 - RNA, 19 nt, Homo sapiens
  misc_RNA (1)...(19): siRNA sense strand
gaacgacacucaucaccaa

SEQ ID NO: 22856 - RNA, 19 nt, Homo sapiens
  misc_RNA (1)...(19): siRNA sense strand
gagagcagcuucaaugaug

SEQ ID NO: 22857 - RNA, 19 nt, Homo sapiens
  misc_RNA (1)...(19): siRNA sense strand
ggagaucgacgacgugaua

SEQ ID NO: 22858 - RNA, 19 nt, Homo sapiens
  misc_RNA (1)...(19): siRNA sense strand
uggaugagcugcuaacuga

SEQ ID NO: 22859 - RNA, 19 nt, Homo sapiens
  misc_RNA (1)...(19): siRNA sense strand
gcauggagcucuuccucuu

SEQ ID NO: 22860 - RNA, 19 nt, Homo sapiens
  misc_RNA (1)...(19): siRNA sense strand
ccacugccgugauucauga

SEQ ID NO: 22861 - RNA, 19 nt, Homo sapiens
  misc_RNA (1)...(19): siRNA sense strand
gaugagaaccugcgcauag

SEQ ID NO: 22862 - RNA, 19 nt, Homo sapiens
  misc_RNA (1)...(19): siRNA sense strand
cuacaccacugccgugauu

SEQ ID NO: 22863 - RNA, 19 nt, Homo sapiens
  misc_RNA (1)...(19): siRNA sense strand
cauaugacaucccgugaca

SEQ ID NO: 22864 - RNA, 19 nt, Homo sapiens
  misc_RNA (1)...(19): siRNA sense strand
ugucaucggugcugaagga

SEQ ID NO: 22865 - RNA, 19 nt, Homo sapiens
  misc_RNA (1)...(19): siRNA sense strand
gaaggaggagucgggcuuu

SEQ ID NO: 22866 - RNA, 19 nt, Homo sapiens
  misc_RNA (1)...(19): siRNA sense strand
gacaucccgugacaucgaa

SEQ ID NO: 22867 - RNA, 19 nt, Homo sapiens
  misc_RNA (1)...(19): siRNA sense strand
ccugagagcagcuucaaug

SEQ ID NO: 22868 - RNA, 19 nt, Homo sapiens
  misc_RNA (1)...(19): siRNA sense strand
cagcuucaaugaugagaac

SEQ ID NO: 22869 - RNA, 19 nt, Homo sapiens
  misc_RNA (1)...(19): siRNA sense strand
agagcagcuucaaugauga

SEQ ID NO: 22870 - RNA, 19 nt, Homo sapiens
  misc_RNA (1)...(19): siRNA sense strand
uaagggaacgacacucauc

SEQ ID NO: 22871 - RNA, 19 nt, Homo sapiens
  misc_RNA (1)...(19): siRNA sense strand
ugacaucccgugacaucga

SEQ ID NO: 22872 - RNA, 19 nt, Homo sapiens
  misc_RNA (1)...(19): siRNA sense strand
ugggcaaccugcugcaugu

SEQ ID NO: 22873 - RNA, 19 nt, Homo sapiens
  misc_RNA (1)...(19): siRNA sense strand
ggaggagucgggcuuucug

SEQ ID NO: 22874 - RNA, 19 nt, Homo sapiens
  misc_RNA (1)...(19): siRNA sense strand
cugcagcacuucagcuucu

SEQ ID NO: 22875 - RNA, 19 nt, Homo sapiens
  misc_RNA (1)...(19): siRNA sense strand
uaugacaucccgugacauc

SEQ ID NO: 22876 - RNA, 19 nt, Homo sapiens
  misc_RNA (1)...(19): siRNA sense strand
ccuaagggaacgacacuca

SEQ ID NO: 22877 - RNA, 19 nt, Homo sapiens
  misc_RNA (1)...(19): siRNA sense strand
gagcucuuccucuucuuca

SEQ ID NO: 22878 - RNA, 19 nt, Homo sapiens
  misc_RNA (1)...(19): siRNA sense strand
ugagagcagcuucaaugau

SEQ ID NO: 22879 - RNA, 19 nt, Homo sapiens
  misc_RNA (1)...(19): siRNA sense strand
ggagcucuuccucuucuuc

SEQ ID NO: 22880 - RNA, 19 nt, Homo sapiens
  misc_RNA (1)...(19): siRNA sense strand
uaacugagcacaggaugac

SEQ ID NO: 22881 - RNA, 19 nt, Homo sapiens
  misc_RNA (1)...(19): siRNA sense strand
ucacugggcugaaguuuaa

SEQ ID NO: 22882 - RNA, 19 nt, Homo sapiens
  misc_RNA (1)...(19): siRNA sense strand
caacuaggcugcaagacuu

SEQ ID NO: 22883 - RNA, 19 nt, Homo sapiens
  misc_RNA (1)...(19): siRNA sense strand
ucaguucgcuuaaugaauu

SEQ ID NO: 22884 - RNA, 19 nt, Homo sapiens
  misc_RNA (1)...(19): siRNA sense strand
caacgcagcuuguuucagu

SEQ ID NO: 22885 - RNA, 19 nt, Homo sapiens
  misc_RNA (1)...(19): siRNA sense strand
cagaagaccuccgagauug

SEQ ID NO: 22886 - RNA, 19 nt, Homo sapiens
  misc_RNA (1)...(19): siRNA sense strand
gaacauggacggcaaagag

SEQ ID NO: 22887 - RNA, 19 nt, Homo sapiens
  misc_RNA (1)...(19): siRNA sense strand
ggacaaacccaccuucauc

SEQ ID NO: 22888 - RNA, 19 nt, Homo sapiens
  misc_RNA (1)...(19): siRNA sense strand
gauggaaacucagggaaga

SEQ ID NO: 22889 - RNA, 19 nt, Homo sapiens
  misc_RNA (1)...(19): siRNA sense strand
gaacaacuaggcugcaaga

SEQ ID NO: 22890 - RNA, 19 nt, Homo sapiens
  misc_RNA (1)...(19): siRNA sense strand
gaagaccuccgagauugua

SEQ ID NO: 22891 - RNA, 19 nt, Homo sapiens
  misc_RNA (1)...(19): siRNA sense strand
cagggaagaugauguguca

SEQ ID NO: 22892 - RNA, 19 nt, Homo sapiens
  misc_RNA (1)...(19): siRNA sense strand
gauaucaugcucuggaauu

SEQ ID NO: 22893 - RNA, 19 nt, Homo sapiens
  misc_RNA (1)...(19): siRNA sense strand
gagauaucaugcucuggaa

SEQ ID NO: 22894 - RNA, 19 nt, Homo sapiens
  misc_RNA (1)...(19): siRNA sense strand
gaugaugugucagcucuau

SEQ ID NO: 22895 - RNA, 19 nt, Homo sapiens
  misc_RNA (1)...(19): siRNA sense strand
ccagaagaccuccgagauu

SEQ ID NO: 22896 - RNA, 19 nt, Homo sapiens
  misc_RNA (1)...(19): siRNA sense strand
gagcaucacugggcugaag

SEQ ID NO: 22897 - RNA, 19 nt, Homo sapiens
  misc_RNA (1)...(19): siRNA sense strand
ugcacacucuggauucuua

SEQ ID NO: 22898 - RNA, 19 nt, Homo sapiens
  misc_RNA (1)...(19): siRNA sense strand
ggcaucaguucgcuuaaug

SEQ ID NO: 22899 - RNA, 19 nt, Homo sapiens
  misc_RNA (1)...(19): siRNA sense strand
ggaacgugauccugcugaa

SEQ ID NO: 22900 - RNA, 19 nt, Homo sapiens
  misc_RNA (1)...(19): siRNA sense strand
gaagagcgagauccgaguu

SEQ ID NO: 22901 - RNA, 19 nt, Homo sapiens
  misc_RNA (1)...(19): siRNA sense strand
agagcgagauccgaguuua

SEQ ID NO: 22902 - RNA, 19 nt, Homo sapiens
  misc_RNA (1)...(19): siRNA sense strand
caaacccaccuucaucaaa

SEQ ID NO: 22903 - RNA, 19 nt, Homo sapiens
  misc_RNA (1)...(19): siRNA sense strand
gaccuccgagauuguauua

SEQ ID NO: 22904 - RNA, 19 nt, Homo sapiens
  misc_RNA (1)...(19): siRNA sense strand
aaacccaccuucaucaaag

SEQ ID NO: 22905 - RNA, 19 nt, Homo sapiens
  misc_RNA (1)...(19): siRNA sense strand
ccacagauccugccaccau

SEQ ID NO: 22906 - RNA, 19 nt, Homo sapiens
  misc_RNA (1)...(19): siRNA sense strand
aaguuuaacccucucaaua

SEQ ID NO: 22907 - RNA, 19 nt, Homo sapiens
  misc_RNA (1)...(19): siRNA sense strand
gaaguuuaacccucucaau

SEQ ID NO: 22908 - RNA, 19 nt, Homo sapiens
  misc_RNA (1)...(19): siRNA sense strand
gacaaacccaccuucauca

SEQ ID NO: 22909 - RNA, 19 nt, Homo sapiens
  misc_RNA (1)...(19): siRNA sense strand
gcucagacaccaucaacau

SEQ ID NO: 22910 - RNA, 19 nt, Homo sapiens
  misc_RNA (1)...(19): siRNA sense strand
gccgauacccagauccuaa

SEQ ID NO: 22911 - RNA, 19 nt, Homo sapiens
  misc_RNA (1)...(19): siRNA sense strand
ugaggacgaucgacguguu

SEQ ID NO: 22912 - RNA, 19 nt, Homo sapiens
  misc_RNA (1)...(19): siRNA sense strand
gggaacaacuaggcugcaa

SEQ ID NO: 22913 - RNA, 19 nt, Homo sapiens
  misc_RNA (1)...(19): siRNA sense strand
ggccacagccuccguagau

SEQ ID NO: 22914 - RNA, 19 nt, Homo sapiens
  misc_RNA (1)...(19): siRNA sense strand
ggcaacauucuacgaguuu

SEQ ID NO: 22915 - RNA, 19 nt, Homo sapiens
  misc_RNA (1)...(19): siRNA sense strand
gcuuuggaaucucagaaug

SEQ ID NO: 22916 - RNA, 19 nt, Homo sapiens
  misc_RNA (1)...(19): siRNA sense strand
ggaaacucagggaagauga

SEQ ID NO: 22917 - RNA, 19 nt, Homo sapiens
  misc_RNA (1)...(19): siRNA sense strand
cguguucgauggaaacuca

SEQ ID NO: 22918 - RNA, 19 nt, Homo sapiens
  misc_RNA (1)...(19): siRNA sense strand
gauacccagauccuaauuu

SEQ ID NO: 22919 - RNA, 19 nt, Homo sapiens
  misc_RNA (1)...(19): siRNA sense strand
ugacgcauguggcccugaa

SEQ ID NO: 22920 - RNA, 19 nt, Homo sapiens
  misc_RNA (1)...(19): siRNA sense strand
gaacccaugcugugauugg

SEQ ID NO: 22921 - RNA, 19 nt, Homo sapiens
  misc_RNA (1)...(19): siRNA sense strand
ucuggauucuuaccggaua

SEQ ID NO: 22922 - RNA, 19 nt, Homo sapiens
  misc_RNA (1)...(19): siRNA sense strand
auacccagauccuaauuuc

SEQ ID NO: 22923 - RNA, 19 nt, Homo sapiens
  misc_RNA (1)...(19): siRNA sense strand
gcagaagaugugacucaga

SEQ ID NO: 22924 - RNA, 19 nt, Homo sapiens
  misc_RNA (1)...(19): siRNA sense strand
ucaauggagggaacaacua

SEQ ID NO: 22925 - RNA, 19 nt, Homo sapiens
  misc_RNA (1)...(19): siRNA sense strand
gguccuagcagaagaugug

SEQ ID NO: 22926 - RNA, 19 nt, Homo sapiens
  misc_RNA (1)...(19): siRNA sense strand
ggauucuuaccggauauua

SEQ ID NO: 22927 - RNA, 19 nt, Homo sapiens
  misc_RNA (1)...(19): siRNA sense strand
gaaacucagggaagaugau

SEQ ID NO: 22928 - RNA, 19 nt, Homo sapiens
  misc_RNA (1)...(19): siRNA sense strand
aaaagaaagugacgcaugu

SEQ ID NO: 22929 - RNA, 19 nt, Homo sapiens
  misc_RNA (1)...(19): siRNA sense strand
ucagcucuaugacccagaa

SEQ ID NO: 22930 - RNA, 19 nt, Homo sapiens
  misc_RNA (1)...(19): siRNA sense strand
caucaguucgcuuaaugaa

SEQ ID NO: 22931 - RNA, 19 nt, Homo sapiens
  misc_RNA (1)...(19): siRNA sense strand
gcaucaguucgcuuaauga

SEQ ID NO: 22932 - RNA, 19 nt, Homo sapiens
  misc_RNA (1)...(19): siRNA sense strand
cccaagaaacgcccagaaa

SEQ ID NO: 22933 - RNA, 19 nt, Homo sapiens
  misc_RNA (1)...(19): siRNA sense strand
ugaugugucagcucuauga

SEQ ID NO: 22934 - RNA, 19 nt, Homo sapiens
  misc_RNA (1)...(19): siRNA sense strand
cugaacccaugcugugauu

SEQ ID NO: 22935 - RNA, 19 nt, Homo sapiens
  misc_RNA (1)...(19): siRNA sense strand
uagcagaagaugugacuca

SEQ ID NO: 22936 - RNA, 19 nt, Homo sapiens
  misc_RNA (1)...(19): siRNA sense strand
ggacccuccaccagcauaa

SEQ ID NO: 22937 - RNA, 19 nt, Homo sapiens
  misc_RNA (1)...(19): siRNA sense strand
ccaagaaacgcccagaaac

SEQ ID NO: 22938 - RNA, 19 nt, Homo sapiens
  misc_RNA (1)...(19): siRNA sense strand
cccagauccuaauuucaaa

SEQ ID NO: 22939 - RNA, 19 nt, Homo sapiens
  misc_RNA (1)...(19): siRNA sense strand
cuggaugugucugcuagua

SEQ ID NO: 22940 - RNA, 19 nt, Homo sapiens
  misc_RNA (1)...(19): siRNA sense strand
uuaacccucucaauaccaa

SEQ ID NO: 22941 - RNA, 19 nt, Homo sapiens
  misc_RNA (1)...(19): siRNA sense strand
ccacagccuccguagauca

SEQ ID NO: 22942 - RNA, 19 nt, Homo sapiens
  misc_RNA (1)...(19): siRNA sense strand
ucucaauaccaaccaguuu

SEQ ID NO: 22943 - RNA, 19 nt, Homo sapiens
  misc_RNA (1)...(19): siRNA sense strand
gcaccucacacccaucaag

SEQ ID NO: 22944 - RNA, 19 nt, Homo sapiens
  misc_RNA (1)...(19): siRNA sense strand
gcgccagguuagagggaaa

SEQ ID NO: 22945 - RNA, 19 nt, Homo sapiens
  misc_RNA (1)...(19): siRNA sense strand
uaaaggcaacauucuacga

SEQ ID NO: 22946 - RNA, 19 nt, Homo sapiens
  misc_RNA (1)...(19): siRNA sense strand
aggcaacauucuacgaguu

SEQ ID NO: 22947 - RNA, 19 nt, Homo sapiens
  misc_RNA (1)...(19): siRNA sense strand
auaucaugcucuggaauuu

SEQ ID NO: 22948 - RNA, 19 nt, Homo sapiens
  misc_RNA (1)...(19): siRNA sense strand
gaagccaggacacggaagu

SEQ ID NO: 22949 - RNA, 19 nt, Homo sapiens
  misc_RNA (1)...(19): siRNA sense strand
ucuaugacccagaaucuuc

SEQ ID NO: 22950 - RNA, 19 nt, Homo sapiens
  misc_RNA (1)...(19): siRNA sense strand
caagaaacgcccagaaacc

SEQ ID NO: 22951 - RNA, 19 nt, Homo sapiens
  misc_RNA (1)...(19): siRNA sense strand
ggagcuggagggagcauca

SEQ ID NO: 22952 - RNA, 19 nt, Homo sapiens
  misc_RNA (1)...(19): siRNA sense strand
gcucuaugacccagaaucu

SEQ ID NO: 22953 - RNA, 19 nt, Homo sapiens
  misc_RNA (1)...(19): siRNA sense strand
caauggagggaacaacuag

SEQ ID NO: 22954 - RNA, 19 nt, Homo sapiens
  misc_RNA (1)...(19): siRNA sense strand
gagcuuuggaaucucagaa

SEQ ID NO: 22955 - RNA, 19 nt, Homo sapiens
  misc_RNA (1)...(19): siRNA sense strand
ucuggcaucaguucgcuua

SEQ ID NO: 22956 - RNA, 19 nt, Homo sapiens
  misc_RNA (1)...(19): siRNA sense strand
acccagauccuaauuucaa

SEQ ID NO: 22957 - RNA, 19 nt, Homo sapiens
  misc_RNA (1)...(19): siRNA sense strand
ugucaacgcagcuuguuuc

SEQ ID NO: 22958 - RNA, 19 nt, Homo sapiens
  misc_RNA (1)...(19): siRNA sense strand
ucaauaccaaccaguuuua

SEQ ID NO: 22959 - RNA, 19 nt, Homo sapiens
  misc_RNA (1)...(19): siRNA sense strand
uggcaucaguucgcuuaau

SEQ ID NO: 22960 - RNA, 19 nt, Homo sapiens
  misc_RNA (1)...(19): siRNA sense strand
ucagacaccaucaacaucu

SEQ ID NO: 22961 - RNA, 19 nt, Homo sapiens
  misc_RNA (1)...(19): siRNA sense strand
gacuuuaaaggcaacauuc

SEQ ID NO: 22962 - RNA, 19 nt, Homo sapiens
  misc_RNA (1)...(19): siRNA sense strand
caaaaguuguaccccuuau

SEQ ID NO: 22963 - RNA, 19 nt, Homo sapiens
  misc_RNA (1)...(19): siRNA sense strand
ccuccgagauuguauuacg

SEQ ID NO: 22964 - RNA, 19 nt, Homo sapiens
  misc_RNA (1)...(19): siRNA sense strand
guuaccacauucucaucug

SEQ ID NO: 22965 - RNA, 19 nt, Homo sapiens
  misc_RNA (1)...(19): siRNA sense strand
cagcaccucacacccauca

SEQ ID NO: 22966 - RNA, 19 nt, Homo sapiens
  misc_RNA (1)...(19): siRNA sense strand
gagggaagaugucucagua

SEQ ID NO: 22967 - RNA, 19 nt, Homo sapiens
  misc_RNA (1)...(19): siRNA sense strand
gaacucaggaacaaacauu

SEQ ID NO: 22968 - RNA, 19 nt, Homo sapiens
  misc_RNA (1)...(19): siRNA sense strand
gaccugagcuggaggaacu

SEQ ID NO: 22969 - RNA, 19 nt, Homo sapiens
  misc_RNA (1)...(19): siRNA sense strand
caucaagguuuacuucaag

SEQ ID NO: 22970 - RNA, 19 nt, Homo sapiens
  misc_RNA (1)...(19): siRNA sense strand
ggccagggcuucgugaaug

SEQ ID NO: 22971 - RNA, 19 nt, Homo sapiens
  misc_RNA (1)...(19): siRNA sense strand
ucaucaagguuuacuucaa

SEQ ID NO: 22972 - RNA, 19 nt, Homo sapiens
  misc_RNA (1)...(19): siRNA sense strand
gccagggcuucgugaauga

SEQ ID NO: 22973 - RNA, 19 nt, Homo sapiens
  misc_RNA (1)...(19): siRNA sense strand
gcagauuggagacaccauu

SEQ ID NO: 22974 - RNA, 19 nt, Homo sapiens
  misc_RNA (1)...(19): siRNA sense strand
uggaggaacucaggaacaa

SEQ ID NO: 22975 - RNA, 19 nt, Homo sapiens
  misc_RNA (1)...(19): siRNA sense strand
ggucaucaagguuuacuuc

SEQ ID NO: 22976 - RNA, 19 nt, Homo sapiens
  misc_RNA (1)...(19): siRNA sense strand
uguacagucugcucaugaa

SEQ ID NO: 22977 - RNA, 19 nt, Homo sapiens
  misc_RNA (1)...(19): siRNA sense strand
ccucucggcucgaauugau

SEQ ID NO: 22978 - RNA, 19 nt, Homo sapiens
  misc_RNA (1)...(19): siRNA sense strand
cuggagagcaugcagauug

SEQ ID NO: 22979 - RNA, 19 nt, Homo sapiens
  misc_RNA (1)...(19): siRNA sense strand
ggagggaagaugucucagu

SEQ ID NO: 22980 - RNA, 19 nt, Homo sapiens
  misc_RNA (1)...(19): siRNA sense strand
ccaaccagaccgagaagga

SEQ ID NO: 22981 - RNA, 19 nt, Homo sapiens
  misc_RNA (1)...(19): siRNA sense strand
cggcucgaauugauggaaa

SEQ ID NO: 22982 - RNA, 19 nt, Homo sapiens
  misc_RNA (1)...(19): siRNA sense strand
ccuaucaucaggacaguga

SEQ ID NO: 22983 - RNA, 19 nt, Homo sapiens
  misc_RNA (1)...(19): siRNA sense strand
ggaggaacucaggaacaaa

SEQ ID NO: 22984 - RNA, 19 nt, Homo sapiens
  misc_RNA (1)...(19): siRNA sense strand
gaggaacucaggaacaaac

SEQ ID NO: 22985 - RNA, 19 nt, Homo sapiens
  misc_RNA (1)...(19): siRNA sense strand
gcgcugcuucgucuucuga

SEQ ID NO: 22986 - RNA, 19 nt, Homo sapiens
  misc_RNA (1)...(19): siRNA sense strand
cagauuggagacaccauug

SEQ ID NO: 22987 - RNA, 19 nt, Homo sapiens
  misc_RNA (1)...(19): siRNA sense strand
ggagcgcugcuucgucuuc

SEQ ID NO: 22988 - RNA, 19 nt, Homo sapiens
  misc_RNA (1)...(19): siRNA sense strand
ugaagucugugggcaugau

SEQ ID NO: 22989 - RNA, 19 nt, Homo sapiens
  misc_RNA (1)...(19): siRNA sense strand
ggacccugaugaccacacu

SEQ ID NO: 22990 - RNA, 19 nt, Homo sapiens
  misc_RNA (1)...(19): siRNA sense strand
cuaccucucggcucgaauu

SEQ ID NO: 22991 - RNA, 19 nt, Homo sapiens
  misc_RNA (1)...(19): siRNA sense strand
cuccagcgaugaugacaag

SEQ ID NO: 22992 - RNA, 19 nt, Homo sapiens
  misc_RNA (1)...(19): siRNA sense strand
gaugauccgggaccaccuu

SEQ ID NO: 22993 - RNA, 19 nt, Homo sapiens
  misc_RNA (1)...(19): siRNA sense strand
cgagagcccggacaucaag

SEQ ID NO: 22994 - RNA, 19 nt, Homo sapiens
  misc_RNA (1)...(19): siRNA sense strand
gcucaucgaccgggagauc

SEQ ID NO: 22995 - RNA, 19 nt, Homo sapiens
  misc_RNA (1)...(19): siRNA sense strand
gagcgcugcuucgucuucu

SEQ ID NO: 22996 - RNA, 19 nt, Homo sapiens
  misc_RNA (1)...(19): siRNA sense strand
gagggaagaugucucagua

SEQ ID NO: 22997 - RNA, 19 nt, Homo sapiens
  misc_RNA (1)...(19): siRNA sense strand
gaacucaggaacaaacauu

SEQ ID NO: 22998 - RNA, 19 nt, Homo sapiens
  misc_RNA (1)...(19): siRNA sense strand
gaccugagcuggaggaacu

SEQ ID NO: 22999 - RNA, 19 nt, Homo sapiens
  misc_RNA (1)...(19): siRNA sense strand
caucaagguuuacuucaag

SEQ ID NO: 23000 - RNA, 19 nt, Homo sapiens
  misc_RNA (1)...(19): siRNA sense strand
ggccagggcuucgugaaug

SEQ ID NO: 23001 - RNA, 19 nt, Homo sapiens
  misc_RNA (1)...(19): siRNA sense strand
ucaucaagguuuacuucaa

SEQ ID NO: 23002 - RNA, 19 nt, Homo sapiens
  misc_RNA (1)...(19): siRNA sense strand
gccagggcuucgugaauga

SEQ ID NO: 23003 - RNA, 19 nt, Homo sapiens
  misc_RNA (1)...(19): siRNA sense strand
gcagauuggagacaccauu

SEQ ID NO: 23004 - RNA, 19 nt, Homo sapiens
  misc_RNA (1)...(19): siRNA sense strand
uggaggaacucaggaacaa

SEQ ID NO: 23005 - RNA, 19 nt, Homo sapiens
  misc_RNA (1)...(19): siRNA sense strand
ggucaucaagguuuacuuc

SEQ ID NO: 23006 - RNA, 19 nt, Homo sapiens
  misc_RNA (1)...(19): siRNA sense strand
ccucucggcucgaauugau

SEQ ID NO: 23007 - RNA, 19 nt, Homo sapiens
  misc_RNA (1)...(19): siRNA sense strand
cuggagagcaugcagauug

SEQ ID NO: 23008 - RNA, 19 nt, Homo sapiens
  misc_RNA (1)...(19): siRNA sense strand
ggagggaagaugucucagu

SEQ ID NO: 23009 - RNA, 19 nt, Homo sapiens
  misc_RNA (1)...(19): siRNA sense strand
ccaaccagaccgagaagga

SEQ ID NO: 23010 - RNA, 19 nt, Homo sapiens
  misc_RNA (1)...(19): siRNA sense strand
cggcucgaauugauggaaa

SEQ ID NO: 23011 - RNA, 19 nt, Homo sapiens
  misc_RNA (1)...(19): siRNA sense strand
ccuaucaucaggacaguga

SEQ ID NO: 23012 - RNA, 19 nt, Homo sapiens
  misc_RNA (1)...(19): siRNA sense strand
ggaggaacucaggaacaaa

SEQ ID NO: 23013 - RNA, 19 nt, Homo sapiens
  misc_RNA (1)...(19): siRNA sense strand
gaggaacucaggaacaaac

SEQ ID NO: 23014 - RNA, 19 nt, Homo sapiens
  misc_RNA (1)...(19): siRNA sense strand
gcgcugcuucgucuucuga

SEQ ID NO: 23015 - RNA, 19 nt, Homo sapiens
  misc_RNA (1)...(19): siRNA sense strand
cagauuggagacaccauug

SEQ ID NO: 23016 - RNA, 19 nt, Homo sapiens
  misc_RNA (1)...(19): siRNA sense strand
ggagcgcugcuucgucuuc

SEQ ID NO: 23017 - RNA, 19 nt, Homo sapiens
  misc_RNA (1)...(19): siRNA sense strand
ugaagucugugggcaugau

SEQ ID NO: 23018 - RNA, 19 nt, Homo sapiens
  misc_RNA (1)...(19): siRNA sense strand
ggacccugaugaccacacu

SEQ ID NO: 23019 - RNA, 19 nt, Homo sapiens
  misc_RNA (1)...(19): siRNA sense strand
cuaccucucggcucgaauu

SEQ ID NO: 23020 - RNA, 19 nt, Homo sapiens
  misc_RNA (1)...(19): siRNA sense strand
cuccagcgaugaugacaag

SEQ ID NO: 23021 - RNA, 19 nt, Homo sapiens
  misc_RNA (1)...(19): siRNA sense strand
gaugauccgggaccaccuu

SEQ ID NO: 23022 - RNA, 19 nt, Homo sapiens
  misc_RNA (1)...(19): siRNA sense strand
cgagagcccggacaucaag

SEQ ID NO: 23023 - RNA, 19 nt, Homo sapiens
  misc_RNA (1)...(19): siRNA sense strand
gcucaucgaccgggagauc

SEQ ID NO: 23024 - RNA, 19 nt, Homo sapiens
  misc_RNA (1)...(19): siRNA sense strand
gagcgcugcuucgucuucu

SEQ ID NO: 23025 - RNA, 19 nt, Homo sapiens
  misc_RNA (1)...(19): siRNA sense strand
gaacaacucucauuauuac

SEQ ID NO: 23026 - RNA, 19 nt, Homo sapiens
  misc_RNA (1)...(19): siRNA sense strand
gaaguucgcuugaauuuag

SEQ ID NO: 23027 - RNA, 19 nt, Homo sapiens
  misc_RNA (1)...(19): siRNA sense strand
uauuaaagcugcccaguua

SEQ ID NO: 23028 - RNA, 19 nt, Homo sapiens
  misc_RNA (1)...(19): siRNA sense strand
caauggauauggaaagaua

SEQ ID NO: 23029 - RNA, 19 nt, Homo sapiens
  misc_RNA (1)...(19): siRNA sense strand
guacaaaguugggaaauuc

SEQ ID NO: 23030 - RNA, 19 nt, Homo sapiens
  misc_RNA (1)...(19): siRNA sense strand
aguaauagguguagaauug

SEQ ID NO: 23031 - RNA, 19 nt, Homo sapiens
  misc_RNA (1)...(19): siRNA sense strand
ccaaauaucuaugccauug

SEQ ID NO: 23032 - RNA, 19 nt, Homo sapiens
  misc_RNA (1)...(19): siRNA sense strand
cgacgacccuuuacuaaga

SEQ ID NO: 23033 - RNA, 19 nt, Homo sapiens
  misc_RNA (1)...(19): siRNA sense strand
gcacucagguuauugauac

SEQ ID NO: 23034 - RNA, 19 nt, Homo sapiens
  misc_RNA (1)...(19): siRNA sense strand
uagaagagcugggaauuga

SEQ ID NO: 23035 - RNA, 19 nt, Homo sapiens
  misc_RNA (1)...(19): siRNA sense strand
guucagaaguuacuccuuu

SEQ ID NO: 23036 - RNA, 19 nt, Homo sapiens
  misc_RNA (1)...(19): siRNA sense strand
gaagagcaguugaaagaag

SEQ ID NO: 23037 - RNA, 19 nt, Homo sapiens
  misc_RNA (1)...(19): siRNA sense strand
gaggauauguugcugcuau

SEQ ID NO: 23038 - RNA, 19 nt, Homo sapiens
  misc_RNA (1)...(19): siRNA sense strand
gcaaagacuuggugcagau

SEQ ID NO: 23039 - RNA, 19 nt, Homo sapiens
  misc_RNA (1)...(19): siRNA sense strand
agaauaagguuguucaugu

SEQ ID NO: 23040 - RNA, 19 nt, Homo sapiens
  misc_RNA (1)...(19): siRNA sense strand
gaauugaaauguccgaagu

SEQ ID NO: 23041 - RNA, 19 nt, Homo sapiens
  misc_RNA (1)...(19): siRNA sense strand
cagaagagcaguugaaaga

SEQ ID NO: 23042 - RNA, 19 nt, Homo sapiens
  misc_RNA (1)...(19): siRNA sense strand
gaaaucgacagacagagua

SEQ ID NO: 23043 - RNA, 19 nt, Homo sapiens
  misc_RNA (1)...(19): siRNA sense strand
ucaagucacugcuacgaaa

SEQ ID NO: 23044 - RNA, 19 nt, Homo sapiens
  misc_RNA (1)...(19): siRNA sense strand
uacaggugcuuuaucuuua

SEQ ID NO: 23045 - RNA, 19 nt, Homo sapiens
  misc_RNA (1)...(19): siRNA sense strand
gaagauccuugggcagaaa

SEQ ID NO: 23046 - RNA, 19 nt, Homo sapiens
  misc_RNA (1)...(19): siRNA sense strand
caagagaggccauuucaau

SEQ ID NO: 23047 - RNA, 19 nt, Homo sapiens
  misc_RNA (1)...(19): siRNA sense strand
gaauaagguuguucauguc

SEQ ID NO: 23048 - RNA, 19 nt, Homo sapiens
  misc_RNA (1)...(19): siRNA sense strand
gacaaaugcugacacagau

SEQ ID NO: 23049 - RNA, 19 nt, Homo sapiens
  misc_RNA (1)...(19): siRNA sense strand
gggcagaaaucgacagaca

SEQ ID NO: 23050 - RNA, 19 nt, Homo sapiens
  misc_RNA (1)...(19): siRNA sense strand
cagcagagcuaagacaaau

SEQ ID NO: 23051 - RNA, 19 nt, Homo sapiens
  misc_RNA (1)...(19): siRNA sense strand
gaaucacgauagaugaaga

SEQ ID NO: 23052 - RNA, 19 nt, Homo sapiens
  misc_RNA (1)...(19): siRNA sense strand
cuggagaaaugguaaauga

SEQ ID NO: 23053 - RNA, 19 nt, Homo sapiens
  misc_RNA (1)...(19): siRNA sense strand
gaaagaagaggguauugag

SEQ ID NO: 23054 - RNA, 19 nt, Homo sapiens
  misc_RNA (1)...(19): siRNA sense strand
gguauugaguacaaaguug

SEQ ID NO: 23055 - RNA, 19 nt, Homo sapiens
  misc_RNA (1)...(19): siRNA sense strand
agauauagcuagagucugu

SEQ ID NO: 23056 - RNA, 19 nt, Homo sapiens
  misc_RNA (1)...(19): siRNA sense strand
gaagauauagcuagagucu

SEQ ID NO: 23057 - RNA, 19 nt, Homo sapiens
  misc_RNA (1)...(19): siRNA sense strand
gcagaaaucgacagacaga

SEQ ID NO: 23058 - RNA, 19 nt, Homo sapiens
  misc_RNA (1)...(19): siRNA sense strand
gauugaugcugauguaaca

SEQ ID NO: 23059 - RNA, 19 nt, Homo sapiens
  misc_RNA (1)...(19): siRNA sense strand
ggagcauccugugaagaua

SEQ ID NO: 23060 - RNA, 19 nt, Homo sapiens
  misc_RNA (1)...(19): siRNA sense strand
uaagacaaaugcugacaca

SEQ ID NO: 23061 - RNA, 19 nt, Homo sapiens
  misc_RNA (1)...(19): siRNA sense strand
gguggaacaugcuugaaug

SEQ ID NO: 23062 - RNA, 19 nt, Homo sapiens
  misc_RNA (1)...(19): siRNA sense strand
cuacaggugcuuuaucuuu

SEQ ID NO: 23063 - RNA, 19 nt, Homo sapiens
  misc_RNA (1)...(19): siRNA sense strand
gauauguugcugcuauuaa

SEQ ID NO: 23064 - RNA, 19 nt, Homo sapiens
  misc_RNA (1)...(19): siRNA sense strand
cacgauagaugaagauaca

SEQ ID NO: 23065 - RNA, 19 nt, Homo sapiens
  misc_RNA (1)...(19): siRNA sense strand
gccgauugaugcugaugua

SEQ ID NO: 23066 - RNA, 19 nt, Homo sapiens
  misc_RNA (1)...(19): siRNA sense strand
ggagaaaugguaaaugaag

SEQ ID NO: 23067 - RNA, 19 nt, Homo sapiens
  misc_RNA (1)...(19): siRNA sense strand
aagaagaggguauugagua

SEQ ID NO: 23068 - RNA, 19 nt, Homo sapiens
  misc_RNA (1)...(19): siRNA sense strand
ugguaaagcugaaguuauc

SEQ ID NO: 23069 - RNA, 19 nt, Homo sapiens
  misc_RNA (1)...(19): siRNA sense strand
gucaauaccagauuucaaa

SEQ ID NO: 23070 - RNA, 19 nt, Homo sapiens
  misc_RNA (1)...(19): siRNA sense strand
gcaucuagaggaauugaaa

SEQ ID NO: 23071 - RNA, 19 nt, Homo sapiens
  misc_RNA (1)...(19): siRNA sense strand
guacugggagcacauauuc

SEQ ID NO: 23072 - RNA, 19 nt, Homo sapiens
  misc_RNA (1)...(19): siRNA sense strand
gagaggccauuucaaucga

SEQ ID NO: 23073 - RNA, 19 nt, Homo sapiens
  misc_RNA (1)...(19): siRNA sense strand
ucacaaagcagaggaugaa

SEQ ID NO: 23074 - RNA, 19 nt, Homo sapiens
  misc_RNA (1)...(19): siRNA sense strand
ugugacagcaguugaauuu

SEQ ID NO: 23075 - RNA, 19 nt, Homo sapiens
  misc_RNA (1)...(19): siRNA sense strand
gaaaagaugguuguuauug

SEQ ID NO: 23076 - RNA, 19 nt, Homo sapiens
  misc_RNA (1)...(19): siRNA sense strand
cagaaaagaugguuguuau

SEQ ID NO: 23077 - RNA, 19 nt, Homo sapiens
  misc_RNA (1)...(19): siRNA sense strand
acaggugcuuuaucuuuaa

SEQ ID NO: 23078 - RNA, 19 nt, Homo sapiens
  misc_RNA (1)...(19): siRNA sense strand
gauggcggcacucagguua

SEQ ID NO: 23079 - RNA, 19 nt, Homo sapiens
  misc_RNA (1)...(19): siRNA sense strand
cauccgaccuuaucagaag

SEQ ID NO: 23080 - RNA, 19 nt, Homo sapiens
  misc_RNA (1)...(19): siRNA sense strand
ggauauguugcugcuauua

SEQ ID NO: 23081 - RNA, 19 nt, Homo sapiens
  misc_RNA (1)...(19): siRNA sense strand
gaauuuagacaagaugaug

SEQ ID NO: 23082 - RNA, 19 nt, Homo sapiens
  misc_RNA (1)...(19): siRNA sense strand
gugaagauauagcuagagu

SEQ ID NO: 23083 - RNA, 19 nt, Homo sapiens
  misc_RNA (1)...(19): siRNA sense strand
agacaaaugcugacacaga

SEQ ID NO: 23084 - RNA, 19 nt, Homo sapiens
  misc_RNA (1)...(19): siRNA sense strand
gcuaacagcagagcuaaga

SEQ ID NO: 23085 - RNA, 19 nt, Homo sapiens
  misc_RNA (1)...(19): siRNA sense strand
gauacaauagugucaucua

SEQ ID NO: 23086 - RNA, 19 nt, Homo sapiens
  misc_RNA (1)...(19): siRNA sense strand
gagcuggagucguguguac

SEQ ID NO: 23087 - RNA, 19 nt, Homo sapiens
  misc_RNA (1)...(19): siRNA sense strand
agaauuggguucaguuugg

SEQ ID NO: 23088 - RNA, 19 nt, Homo sapiens
  misc_RNA (1)...(19): siRNA sense strand
acaagaugauggagcagaa

SEQ ID NO: 23089 - RNA, 19 nt, Homo sapiens
  misc_RNA (1)...(19): siRNA sense strand
uggcaaaucaaucaacuuu

SEQ ID NO: 23090 - RNA, 19 nt, Homo sapiens
  misc_RNA (1)...(19): siRNA sense strand
gcaaaucagaagagcaguu

SEQ ID NO: 23091 - RNA, 19 nt, Homo sapiens
  misc_RNA (1)...(19): siRNA sense strand
gaaggcauuaucuguguug

SEQ ID NO: 23092 - RNA, 19 nt, Homo sapiens
  misc_RNA (1)...(19): siRNA sense strand
gguagaauuccagucaaua

SEQ ID NO: 23093 - RNA, 19 nt, Homo sapiens
  misc_RNA (1)...(19): siRNA sense strand
gugauguacucuugguuug

SEQ ID NO: 23094 - RNA, 19 nt, Homo sapiens
  misc_RNA (1)...(19): siRNA sense strand
ucauguagguggaguugga

SEQ ID NO: 23095 - RNA, 19 nt, Homo sapiens
  misc_RNA (1)...(19): siRNA sense strand
agaugaagauacaauagug

SEQ ID NO: 23096 - RNA, 19 nt, Homo sapiens
  misc_RNA (1)...(19): siRNA sense strand
cauuaucuguguugaagga

SEQ ID NO: 23097 - RNA, 19 nt, Homo sapiens
  misc_RNA (1)...(19): siRNA sense strand
ggcauuaucuguguugaag

SEQ ID NO: 23098 - RNA, 19 nt, Homo sapiens
  misc_RNA (1)...(19): siRNA sense strand
ggaugaaggcauuaucugu

SEQ ID NO: 23099 - RNA, 19 nt, Homo sapiens
  misc_RNA (1)...(19): siRNA sense strand
ugaaacacuugguggaaca

SEQ ID NO: 23100 - RNA, 19 nt, Homo sapiens
  misc_RNA (1)...(19): siRNA sense strand
gagguagaauuccagucaa

SEQ ID NO: 23101 - RNA, 19 nt, Homo sapiens
  misc_RNA (1)...(19): siRNA sense strand
gaguuggaauugauaugga

SEQ ID NO: 23102 - RNA, 19 nt, Homo sapiens
  misc_RNA (1)...(19): siRNA sense strand
aaagaugguuguuauuggu

SEQ ID NO: 23103 - RNA, 19 nt, Homo sapiens
  misc_RNA (1)...(19): siRNA sense strand
uaagguuguucaugucaau

SEQ ID NO: 23104 - RNA, 19 nt, Homo sapiens
  misc_RNA (1)...(19): siRNA sense strand
cagauggcauggugaagau

SEQ ID NO: 23105 - RNA, 19 nt, Homo sapiens
  misc_RNA (1)...(19): siRNA sense strand
gacgacccuuuacuaagaa

SEQ ID NO: 23106 - RNA, 19 nt, Homo sapiens
  misc_RNA (1)...(19): siRNA sense strand
ccaagaagucagauggaaa

SEQ ID NO: 23107 - RNA, 19 nt, Homo sapiens
  misc_RNA (1)...(19): siRNA sense strand
ccauuucaaucgaauaucu

SEQ ID NO: 23108 - RNA, 19 nt, Homo sapiens
  misc_RNA (1)...(19): siRNA sense strand
caaaucagaagagcaguug

SEQ ID NO: 23109 - RNA, 19 nt, Homo sapiens
  misc_RNA (1)...(19): siRNA sense strand
ggugguaaagcugaaguua

SEQ ID NO: 23110 - RNA, 19 nt, Homo sapiens
  misc_RNA (1)...(19): siRNA sense strand
gccacggguucagaaguua

SEQ ID NO: 23111 - RNA, 19 nt, Homo sapiens
  misc_RNA (1)...(19): siRNA sense strand
aaaugaagcugcucuugcu

SEQ ID NO: 23112 - RNA, 19 nt, Homo sapiens
  misc_RNA (1)...(19): siRNA sense strand
aagagcaguugaaagaaga

SEQ ID NO: 23113 - RNA, 19 nt, Homo sapiens
  misc_RNA (1)...(19): siRNA sense strand
ccaguuaggcuucaagaca

SEQ ID NO: 23114 - RNA, 19 nt, Homo sapiens
  misc_RNA (1)...(19): siRNA sense strand
guagaauuggguucaguuu

SEQ ID NO: 23115 - RNA, 19 nt, Homo sapiens
  misc_RNA (1)...(19): siRNA sense strand
uguaguugcugguccaaug

SEQ ID NO: 23116 - RNA, 19 nt, Homo sapiens
  misc_RNA (1)...(19): siRNA sense strand
gagcauccugugaagauau

SEQ ID NO: 23117 - RNA, 19 nt, Homo sapiens
  misc_RNA (1)...(19): siRNA sense strand
cagugccucugagaacuua

SEQ ID NO: 23118 - RNA, 19 nt, Homo sapiens
  misc_RNA (1)...(19): siRNA sense strand
aagaggguauugaguacaa

SEQ ID NO: 23119 - RNA, 19 nt, Homo sapiens
  misc_RNA (1)...(19): siRNA sense strand
guccaaugcuggcucacaa

SEQ ID NO: 23120 - RNA, 19 nt, Homo sapiens
  misc_RNA (1)...(19): siRNA sense strand
uggaauugauauggagaua

SEQ ID NO: 23121 - RNA, 19 nt, Homo sapiens
  misc_RNA (1)...(19): siRNA sense strand
ugaaagaagaggguauuga

SEQ ID NO: 23122 - RNA, 19 nt, Homo sapiens
  misc_RNA (1)...(19): siRNA sense strand
gacccuuuacuaagaauuu

SEQ ID NO: 23123 - RNA, 19 nt, Homo sapiens
  misc_RNA (1)...(19): siRNA sense strand
gccaagagaggccauuuca

SEQ ID NO: 23124 - RNA, 19 nt, Homo sapiens
  misc_RNA (1)...(19): siRNA sense strand
gauguacucuugguuugca

SEQ ID NO: 23125 - RNA, 19 nt, Homo sapiens
  misc_RNA (1)...(19): siRNA sense strand
gugagaagcuggagaauaa

SEQ ID NO: 23126 - RNA, 19 nt, Homo sapiens
  misc_RNA (1)...(19): siRNA sense strand
gaagagggacccauuaaua

SEQ ID NO: 23127 - RNA, 19 nt, Homo sapiens
  misc_RNA (1)...(19): siRNA sense strand
cagaagagcuguccaacua

SEQ ID NO: 23128 - RNA, 19 nt, Homo sapiens
  misc_RNA (1)...(19): siRNA sense strand
gcaaugagaugccugaaau

SEQ ID NO: 23129 - RNA, 19 nt, Homo sapiens
  misc_RNA (1)...(19): siRNA sense strand
gaaaccaguuccacguaua

SEQ ID NO: 23130 - RNA, 19 nt, Homo sapiens
  misc_RNA (1)...(19): siRNA sense strand
gaagaaauguguaucaacu

SEQ ID NO: 23131 - RNA, 19 nt, Homo sapiens
  misc_RNA (1)...(19): siRNA sense strand
ggaccuugguguaaagaua

SEQ ID NO: 23132 - RNA, 19 nt, Homo sapiens
  misc_RNA (1)...(19): siRNA sense strand
ggaauugacucugcugaaa

SEQ ID NO: 23133 - RNA, 19 nt, Homo sapiens
  misc_RNA (1)...(19): siRNA sense strand
gaagagcuguccaacuaau

SEQ ID NO: 23134 - RNA, 19 nt, Homo sapiens
  misc_RNA (1)...(19): siRNA sense strand
gcaguaccuuggaacauuu

SEQ ID NO: 23135 - RNA, 19 nt, Homo sapiens
  misc_RNA (1)...(19): siRNA sense strand
guagguggaugcaauuuau

SEQ ID NO: 23136 - RNA, 19 nt, Homo sapiens
  misc_RNA (1)...(19): siRNA sense strand
aaagagaggcguacccuua

SEQ ID NO: 23137 - RNA, 19 nt, Homo sapiens
  misc_RNA (1)...(19): siRNA sense strand
ggucuucaguuucuccaua

SEQ ID NO: 23138 - RNA, 19 nt, Homo sapiens
  misc_RNA (1)...(19): siRNA sense strand
gaaaagcauugaagaacua

SEQ ID NO: 23139 - RNA, 19 nt, Homo sapiens
  misc_RNA (1)...(19): siRNA sense strand
ucacaaguauugcaaacaa

SEQ ID NO: 23140 - RNA, 19 nt, Homo sapiens
  misc_RNA (1)...(19): siRNA sense strand
cguaugauguagugaauuu

SEQ ID NO: 23141 - RNA, 19 nt, Homo sapiens
  misc_RNA (1)...(19): siRNA sense strand
gaaaagaaauccugauaag

SEQ ID NO: 23142 - RNA, 19 nt, Homo sapiens
  misc_RNA (1)...(19): siRNA sense strand
gagaguauccuggcuuuaa

SEQ ID NO: 23143 - RNA, 19 nt, Homo sapiens
  misc_RNA (1)...(19): siRNA sense strand
cgcaagagcugcaaaggaa

SEQ ID NO: 23144 - RNA, 19 nt, Homo sapiens
  misc_RNA (1)...(19): siRNA sense strand
ccaagaaauuagacaagaa

SEQ ID NO: 23145 - RNA, 19 nt, Homo sapiens
  misc_RNA (1)...(19): siRNA sense strand
cagaugcccuggaguuaaa

SEQ ID NO: 23146 - RNA, 19 nt, Homo sapiens
  misc_RNA (1)...(19): siRNA sense strand
gaaugaagaugaagaucag

SEQ ID NO: 23147 - RNA, 19 nt, Homo sapiens
  misc_RNA (1)...(19): siRNA sense strand
ggacagcaaucagaccuau

SEQ ID NO: 23148 - RNA, 19 nt, Homo sapiens
  misc_RNA (1)...(19): siRNA sense strand
gcaaagcgaacuacauaug

SEQ ID NO: 23149 - RNA, 19 nt, Homo sapiens
  misc_RNA (1)...(19): siRNA sense strand
cuugguacauucacaaaua

SEQ ID NO: 23150 - RNA, 19 nt, Homo sapiens
  misc_RNA (1)...(19): siRNA sense strand
cuaccaggcuauacaguuu

SEQ ID NO: 23151 - RNA, 19 nt, Homo sapiens
  misc_RNA (1)...(19): siRNA sense strand
gcauauuggugucaaagug

SEQ ID NO: 23152 - RNA, 19 nt, Homo sapiens
  misc_RNA (1)...(19): siRNA sense strand
gaaaugacucuuagcacuu

SEQ ID NO: 23153 - RNA, 19 nt, Homo sapiens
  misc_RNA (1)...(19): siRNA sense strand
cuacugcacuggccucaaa

SEQ ID NO: 23154 - RNA, 19 nt, Homo sapiens
  misc_RNA (1)...(19): siRNA sense strand
uaggcaagcuguucagauu

SEQ ID NO: 23155 - RNA, 19 nt, Homo sapiens
  misc_RNA (1)...(19): siRNA sense strand
caauuuauaugccacugaa

SEQ ID NO: 23156 - RNA, 19 nt, Homo sapiens
  misc_RNA (1)...(19): siRNA sense strand
gcacugcaguaccuuggaa

SEQ ID NO: 23157 - RNA, 19 nt, Homo sapiens
  misc_RNA (1)...(19): siRNA sense strand
ucaaggauguaauaggaaa

SEQ ID NO: 23158 - RNA, 19 nt, Homo sapiens
  misc_RNA (1)...(19): siRNA sense strand
ccacuucggccaagaaauu

SEQ ID NO: 23159 - RNA, 19 nt, Homo sapiens
  misc_RNA (1)...(19): siRNA sense strand
gacaacaccuuaugaacca

SEQ ID NO: 23160 - RNA, 19 nt, Homo sapiens
  misc_RNA (1)...(19): siRNA sense strand
aaucagaccuauugcuuug

SEQ ID NO: 23161 - RNA, 19 nt, Homo sapiens
  misc_RNA (1)...(19): siRNA sense strand
auauugagcucaucaguga

SEQ ID NO: 23162 - RNA, 19 nt, Homo sapiens
  misc_RNA (1)...(19): siRNA sense strand
ggaaugaagaugaagauca

SEQ ID NO: 23163 - RNA, 19 nt, Homo sapiens
  misc_RNA (1)...(19): siRNA sense strand
ugaaugaaaugacucuuag

SEQ ID NO: 23164 - RNA, 19 nt, Homo sapiens
  misc_RNA (1)...(19): siRNA sense strand
agaauauguuggugguuua

SEQ ID NO: 23165 - RNA, 19 nt, Homo sapiens
  misc_RNA (1)...(19): siRNA sense strand
uagcugaacucauggacaa

SEQ ID NO: 23166 - RNA, 19 nt, Homo sapiens
  misc_RNA (1)...(19): siRNA sense strand
gaaaacggcugcauauugg

SEQ ID NO: 23167 - RNA, 19 nt, Homo sapiens
  misc_RNA (1)...(19): siRNA sense strand
cagaaacuaugcaaacuag

SEQ ID NO: 23168 - RNA, 19 nt, Homo sapiens
  misc_RNA (1)...(19): siRNA sense strand
ccacggaagguuauaguaa

SEQ ID NO: 23169 - RNA, 19 nt, Homo sapiens
  misc_RNA (1)...(19): siRNA sense strand
gugaaugaaaugacucuua

SEQ ID NO: 23170 - RNA, 19 nt, Homo sapiens
  misc_RNA (1)...(19): siRNA sense strand
gcuccuuucugaauauuga

SEQ ID NO: 23171 - RNA, 19 nt, Homo sapiens
  misc_RNA (1)...(19): siRNA sense strand
agaaguagauccagaaacu

SEQ ID NO: 23172 - RNA, 19 nt, Homo sapiens
  misc_RNA (1)...(19): siRNA sense strand
gaaaauggaaugaagauga

SEQ ID NO: 23173 - RNA, 19 nt, Homo sapiens
  misc_RNA (1)...(19): siRNA sense strand
gcaaugaguaucccacaga

SEQ ID NO: 23174 - RNA, 19 nt, Homo sapiens
  misc_RNA (1)...(19): siRNA sense strand
gagcagaugcccuggaguu

SEQ ID NO: 23175 - RNA, 19 nt, Homo sapiens
  misc_RNA (1)...(19): siRNA sense strand
ggacagagcaagaugaaac

SEQ ID NO: 23176 - RNA, 19 nt, Homo sapiens
  misc_RNA (1)...(19): siRNA sense strand
ggaauagguuugccagaac

SEQ ID NO: 23177 - RNA, 19 nt, Homo sapiens
  misc_RNA (1)...(19): siRNA sense strand
gccaagaaauuagacaaga

SEQ ID NO: 23178 - RNA, 19 nt, Homo sapiens
  misc_RNA (1)...(19): siRNA sense strand
uuauggagcugcuaagaug

SEQ ID NO: 23179 - RNA, 19 nt, Homo sapiens
  misc_RNA (1)...(19): siRNA sense strand
gcagaugcccuggaguuaa

SEQ ID NO: 23180 - RNA, 19 nt, Homo sapiens
  misc_RNA (1)...(19): siRNA sense strand
gaaauggccggauugaagu

SEQ ID NO: 23181 - RNA, 19 nt, Homo sapiens
  misc_RNA (1)...(19): siRNA sense strand
ucacaaauacguacaguca

SEQ ID NO: 23182 - RNA, 19 nt, Homo sapiens
  misc_RNA (1)...(19): siRNA sense strand
cacggaagguuauaguaaa

SEQ ID NO: 23183 - RNA, 19 nt, Homo sapiens
  misc_RNA (1)...(19): siRNA sense strand
aagaauauguuggugguuu

SEQ ID NO: 23184 - RNA, 19 nt, Homo sapiens
  misc_RNA (1)...(19): siRNA sense strand
ccacagaucagaaauccuu

SEQ ID NO: 23185 - RNA, 19 nt, Homo sapiens
  misc_RNA (1)...(19): siRNA sense strand
gagggacccauuaauauug

SEQ ID NO: 23186 - RNA, 19 nt, Homo sapiens
  misc_RNA (1)...(19): siRNA sense strand
aaaggaagguggugccaau

SEQ ID NO: 23187 - RNA, 19 nt, Homo sapiens
  misc_RNA (1)...(19): siRNA sense strand
ccaaaugucacugauauug

SEQ ID NO: 23188 - RNA, 19 nt, Homo sapiens
  misc_RNA (1)...(19): siRNA sense strand
ugagugauccuaaaguaaa

SEQ ID NO: 23189 - RNA, 19 nt, Homo sapiens
  misc_RNA (1)...(19): siRNA sense strand
ggaagaaaagugugaauuu

SEQ ID NO: 23190 - RNA, 19 nt, Homo sapiens
  misc_RNA (1)...(19): siRNA sense strand
aaaugacucuuagcacuuu

SEQ ID NO: 23191 - RNA, 19 nt, Homo sapiens
  misc_RNA (1)...(19): siRNA sense strand
agauugagcuaaugaagga

SEQ ID NO: 23192 - RNA, 19 nt, Homo sapiens
  misc_RNA (1)...(19): siRNA sense strand
gcaaguauaaguugugcuu

SEQ ID NO: 23193 - RNA, 19 nt, Homo sapiens
  misc_RNA (1)...(19): siRNA sense strand
caaacaagaacuauuaugg

SEQ ID NO: 23194 - RNA, 19 nt, Homo sapiens
  misc_RNA (1)...(19): siRNA sense strand
ggcguacccuuaucuguga

SEQ ID NO: 23195 - RNA, 19 nt, Homo sapiens
  misc_RNA (1)...(19): siRNA sense strand
gcccuggaguuaaauuuau

SEQ ID NO: 23196 - RNA, 19 nt, Homo sapiens
  misc_RNA (1)...(19): siRNA sense strand
guggugaugucguugguuu

SEQ ID NO: 23197 - RNA, 19 nt, Homo sapiens
  misc_RNA (1)...(19): siRNA sense strand
ucugagugauccuaaagua

SEQ ID NO: 23198 - RNA, 19 nt, Homo sapiens
  misc_RNA (1)...(19): siRNA sense strand
uauaaguugugcuuccuuu

SEQ ID NO: 23199 - RNA, 19 nt, Homo sapiens
  misc_RNA (1)...(19): siRNA sense strand
gagaagcuggagaauaauu

SEQ ID NO: 23200 - RNA, 19 nt, Homo sapiens
  misc_RNA (1)...(19): siRNA sense strand
gcaaacaagaacuauuaug

SEQ ID NO: 23201 - RNA, 19 nt, Homo sapiens
  misc_RNA (1)...(19): siRNA sense strand
uggaacauuuggugaauug

SEQ ID NO: 23202 - RNA, 19 nt, Homo sapiens
  misc_RNA (1)...(19): siRNA sense strand
acaaauacguacagucaca

SEQ ID NO: 23203 - RNA, 19 nt, Homo sapiens
  misc_RNA (1)...(19): siRNA sense strand
acucugacaucacuauauu

SEQ ID NO: 23204 - RNA, 19 nt, Homo sapiens
  misc_RNA (1)...(19): siRNA sense strand
uggaauagguuugccagaa

SEQ ID NO: 23205 - RNA, 19 nt, Homo sapiens
  misc_RNA (1)...(19): siRNA sense strand
acguauagcugaacucaug

SEQ ID NO: 23206 - RNA, 19 nt, Homo sapiens
  misc_RNA (1)...(19): siRNA sense strand
ggagaauuguugcuaugca

SEQ ID NO: 23207 - RNA, 19 nt, Homo sapiens
  misc_RNA (1)...(19): siRNA sense strand
ugugguaaaugcuacauga

SEQ ID NO: 23208 - RNA, 19 nt, Homo sapiens
  misc_RNA (1)...(19): siRNA sense strand
agaaauguguaucaacugu

SEQ ID NO: 23209 - RNA, 19 nt, Homo sapiens
  misc_RNA (1)...(19): siRNA sense strand
gaugaagaaauguguauca

SEQ ID NO: 23210 - RNA, 19 nt, Homo sapiens
  misc_RNA (1)...(19): siRNA sense strand
aaaguggucuucaguuucu

SEQ ID NO: 23211 - RNA, 19 nt, Homo sapiens
  misc_RNA (1)...(19): siRNA sense strand
ccaagaagucugaggauuc

SEQ ID NO: 23212 - RNA, 19 nt, Homo sapiens
  misc_RNA (1)...(19): siRNA sense strand
gccaagaagucugaggauu

SEQ ID NO: 23213 - RNA, 19 nt, Homo sapiens
  misc_RNA (1)...(19): siRNA sense strand
guacauucacaaauacgua

SEQ ID NO: 23214 - RNA, 19 nt, Homo sapiens
  misc_RNA (1)...(19): siRNA sense strand
ggugaaugauggaaagcaa

SEQ ID NO: 23215 - RNA, 19 nt, Homo sapiens
  misc_RNA (1)...(19): siRNA sense strand
agaguauccuggcuuuaaa

SEQ ID NO: 23216 - RNA, 19 nt, Homo sapiens
  misc_RNA (1)...(19): siRNA sense strand
gaaaacaagauuagacuga

SEQ ID NO: 23217 - RNA, 19 nt, Homo sapiens
  misc_RNA (1)...(19): siRNA sense strand
aaaugucacugauauugug

SEQ ID NO: 23218 - RNA, 19 nt, Homo sapiens
  misc_RNA (1)...(19): siRNA sense strand
caauauggagcuuccguuu

SEQ ID NO: 23219 - RNA, 19 nt, Homo sapiens
  misc_RNA (1)...(19): siRNA sense strand
caagaaacauuggaaaaga

SEQ ID NO: 23220 - RNA, 19 nt, Homo sapiens
  misc_RNA (1)...(19): siRNA sense strand
ggaaugguauguccaaccu

SEQ ID NO: 23221 - RNA, 19 nt, Homo sapiens
  misc_RNA (1)...(19): siRNA sense strand
ccagaaacuaugcaaacua

SEQ ID NO: 23222 - RNA, 19 nt, Homo sapiens
  misc_RNA (1)...(19): siRNA sense strand
gaaguagauccagaaacua

SEQ ID NO: 23223 - RNA, 19 nt, Homo sapiens
  misc_RNA (1)...(19): siRNA sense strand
cggcggacaucgagaguau

SEQ ID NO: 23224 - RNA, 19 nt, Homo sapiens
  misc_RNA (1)...(19): siRNA sense strand
aaagcgaacuacauaugga

SEQ ID NO: 23225 - RNA, 19 nt, Homo sapiens
  misc_RNA (1)...(19): siRNA sense strand
gaaccaacaucuauaagaa

SEQ ID NO: 23226 - RNA, 19 nt, Homo sapiens
  misc_RNA (1)...(19): siRNA sense strand
gaagaaagauuacaguacu

SEQ ID NO: 23227 - RNA, 19 nt, Homo sapiens
  misc_RNA (1)...(19): siRNA sense strand
gaagaaccaacaucuauaa

SEQ ID NO: 23228 - RNA, 19 nt, Homo sapiens
  misc_RNA (1)...(19): siRNA sense strand
ggauuuauauguacuguug

SEQ ID NO: 23229 - RNA, 19 nt, Homo sapiens
  misc_RNA (1)...(19): siRNA sense strand
ccuaacaacucgaauaauu

SEQ ID NO: 23230 - RNA, 19 nt, Homo sapiens
  misc_RNA (1)...(19): siRNA sense strand
ggacaacaaucagauagaa

SEQ ID NO: 23231 - RNA, 19 nt, Homo sapiens
  misc_RNA (1)...(19): siRNA sense strand
gaagacaucauaagacauu

SEQ ID NO: 23232 - RNA, 19 nt, Homo sapiens
  misc_RNA (1)...(19): siRNA sense strand
caaauacgauuauccacuu

SEQ ID NO: 23233 - RNA, 19 nt, Homo sapiens
  misc_RNA (1)...(19): siRNA sense strand
uaacauagucuguggagua

SEQ ID NO: 23234 - RNA, 19 nt, Homo sapiens
  misc_RNA (1)...(19): siRNA sense strand
gauuggauuuguagugaua

SEQ ID NO: 23235 - RNA, 19 nt, Homo sapiens
  misc_RNA (1)...(19): siRNA sense strand
ggaagaaccaacaucuaua

SEQ ID NO: 23236 - RNA, 19 nt, Homo sapiens
  misc_RNA (1)...(19): siRNA sense strand
gaaaggacaaauaugauug

SEQ ID NO: 23237 - RNA, 19 nt, Homo sapiens
  misc_RNA (1)...(19): siRNA sense strand
gaauuguccucucuuuguu

SEQ ID NO: 23238 - RNA, 19 nt, Homo sapiens
  misc_RNA (1)...(19): siRNA sense strand
uaaaucagcgcuucaaaga

SEQ ID NO: 23239 - RNA, 19 nt, Homo sapiens
  misc_RNA (1)...(19): siRNA sense strand
acgaagagcuggacaacaa

SEQ ID NO: 23240 - RNA, 19 nt, Homo sapiens
  misc_RNA (1)...(19): siRNA sense strand
gaugcaguuugcugaaaua

SEQ ID NO: 23241 - RNA, 19 nt, Homo sapiens
  misc_RNA (1)...(19): siRNA sense strand
gcaguguccuuucuugaug

SEQ ID NO: 23242 - RNA, 19 nt, Homo sapiens
  misc_RNA (1)...(19): siRNA sense strand
uauaugaggugccaguuga

SEQ ID NO: 23243 - RNA, 19 nt, Homo sapiens
  misc_RNA (1)...(19): siRNA sense strand
ggaucaagguagaugugua

SEQ ID NO: 23244 - RNA, 19 nt, Homo sapiens
  misc_RNA (1)...(19): siRNA sense strand
caagguagauguguauauc

SEQ ID NO: 23245 - RNA, 19 nt, Homo sapiens
  misc_RNA (1)...(19): siRNA sense strand
ucacagugcuuucuggaau

SEQ ID NO: 23246 - RNA, 19 nt, Homo sapiens
  misc_RNA (1)...(19): siRNA sense strand
guacugcccucuccagauc

SEQ ID NO: 23247 - RNA, 19 nt, Homo sapiens
  misc_RNA (1)...(19): siRNA sense strand
caucuugguugccagcaua

SEQ ID NO: 23248 - RNA, 19 nt, Homo sapiens
  misc_RNA (1)...(19): siRNA sense strand
ccacagaccugccuuucca

SEQ ID NO: 23249 - RNA, 19 nt, Homo sapiens
  misc_RNA (1)...(19): siRNA sense strand
uaucgaugcuguuggcuuu

SEQ ID NO: 23250 - RNA, 19 nt, Homo sapiens
  misc_RNA (1)...(19): siRNA sense strand
acuacaagguuuagcauuu

SEQ ID NO: 23251 - RNA, 19 nt, Homo sapiens
  misc_RNA (1)...(19): siRNA sense strand
caccugacguggagacuuu

SEQ ID NO: 23252 - RNA, 19 nt, Homo sapiens
  misc_RNA (1)...(19): siRNA sense strand
aaucagcgcuucaaagaca

SEQ ID NO: 23253 - RNA, 19 nt, Homo sapiens
  misc_RNA (1)...(19): siRNA sense strand
cagcauaccggcuuaaaga

SEQ ID NO: 23254 - RNA, 19 nt, Homo sapiens
  misc_RNA (1)...(19): siRNA sense strand
cauagucuguggaguauuc

SEQ ID NO: 23255 - RNA, 19 nt, Homo sapiens
  misc_RNA (1)...(19): siRNA sense strand
cuacggcugugacuuuaaa

SEQ ID NO: 23256 - RNA, 19 nt, Homo sapiens
  misc_RNA (1)...(19): siRNA sense strand
ccuggcagcuuuagcauug

SEQ ID NO: 23257 - RNA, 19 nt, Homo sapiens
  misc_RNA (1)...(19): siRNA sense strand
cagcgucuauucccucaaa

SEQ ID NO: 23258 - RNA, 19 nt, Homo sapiens
  misc_RNA (1)...(19): siRNA sense strand
cauaaaagauucugacgaa

SEQ ID NO: 23259 - RNA, 19 nt, Homo sapiens
  misc_RNA (1)...(19): siRNA sense strand
aagaaugguugcucaguga

SEQ ID NO: 23260 - RNA, 19 nt, Homo sapiens
  misc_RNA (1)...(19): siRNA sense strand
cgaaaggacaaauaugauu

SEQ ID NO: 23261 - RNA, 19 nt, Homo sapiens
  misc_RNA (1)...(19): siRNA sense strand
cuacaagguuuagcauuug

SEQ ID NO: 23262 - RNA, 19 nt, Homo sapiens
  misc_RNA (1)...(19): siRNA sense strand
ggcgaaaggacaaauauga

SEQ ID NO: 23263 - RNA, 19 nt, Homo sapiens
  misc_RNA (1)...(19): siRNA sense strand
gaaugguugcucagugaua

SEQ ID NO: 23264 - RNA, 19 nt, Homo sapiens
  misc_RNA (1)...(19): siRNA sense strand
acaaauggaggauuacgua

SEQ ID NO: 23265 - RNA, 19 nt, Homo sapiens
  misc_RNA (1)...(19): siRNA sense strand
gaucaagguagauguguau

SEQ ID NO: 23266 - RNA, 19 nt, Homo sapiens
  misc_RNA (1)...(19): siRNA sense strand
agaccugccuuuccacauu

SEQ ID NO: 23267 - RNA, 19 nt, Homo sapiens
  misc_RNA (1)...(19): siRNA sense strand
uaauuuggaucaugaccuu

SEQ ID NO: 23268 - RNA, 19 nt, Homo sapiens
  misc_RNA (1)...(19): siRNA sense strand
cauaccggcuuaaagaaug

SEQ ID NO: 23269 - RNA, 19 nt, Homo sapiens
  misc_RNA (1)...(19): siRNA sense strand
caacaaucagauagaagua

SEQ ID NO: 23270 - RNA, 19 nt, Homo sapiens
  misc_RNA (1)...(19): siRNA sense strand
ggagagcacaggaggcaaa

SEQ ID NO: 23271 - RNA, 19 nt, Homo sapiens
  misc_RNA (1)...(19): siRNA sense strand
gaaauaaaucagcgcuuca

SEQ ID NO: 23272 - RNA, 19 nt, Homo sapiens
  misc_RNA (1)...(19): siRNA sense strand
gcaguggccuuuucaguug

SEQ ID NO: 23273 - RNA, 19 nt, Homo sapiens
  misc_RNA (1)...(19): siRNA sense strand
ugacuggaaugaugaucuu

SEQ ID NO: 23274 - RNA, 19 nt, Homo sapiens
  misc_RNA (1)...(19): siRNA sense strand
gauugucguucuagccauu

SEQ ID NO: 23275 - RNA, 19 nt, Homo sapiens
  misc_RNA (1)...(19): siRNA sense strand
gaccugccuuuccacauug

SEQ ID NO: 23276 - RNA, 19 nt, Homo sapiens
  misc_RNA (1)...(19): siRNA sense strand
uugguuguauccauuguua

SEQ ID NO: 23277 - RNA, 19 nt, Homo sapiens
  misc_RNA (1)...(19): siRNA sense strand
cagaaggagugaaaauuuu

SEQ ID NO: 23278 - RNA, 19 nt, Homo sapiens
  misc_RNA (1)...(19): siRNA sense strand
uaaagggaaugcugaugca

SEQ ID NO: 23279 - RNA, 19 nt, Homo sapiens
  misc_RNA (1)...(19): siRNA sense strand
acagauugcugggcuuauu

SEQ ID NO: 23280 - RNA, 19 nt, Homo sapiens
  misc_RNA (1)...(19): siRNA sense strand
cggauuggauuuguaguga

SEQ ID NO: 23281 - RNA, 19 nt, Homo sapiens
  misc_RNA (1)...(19): siRNA sense strand
agacauuucuggaucaucu

SEQ ID NO: 23282 - RNA, 19 nt, Homo sapiens
  misc_RNA (1)...(19): siRNA sense strand
cagcuaguguggcauuuca

SEQ ID NO: 23283 - RNA, 19 nt, Homo sapiens
  misc_RNA (1)...(19): siRNA sense strand
ucacaaauagagaagacua

SEQ ID NO: 23284 - RNA, 19 nt, Homo sapiens
  misc_RNA (1)...(19): siRNA sense strand
gaucuuccucucaacauug

SEQ ID NO: 23285 - RNA, 19 nt, Homo sapiens
  misc_RNA (1)...(19): siRNA sense strand
ggaaugcugaugcaguuug

SEQ ID NO: 23286 - RNA, 19 nt, Homo sapiens
  misc_RNA (1)...(19): siRNA sense strand
gguuguauccauuguuaaa

SEQ ID NO: 23287 - RNA, 19 nt, Homo sapiens
  misc_RNA (1)...(19): siRNA sense strand
gcucagugauauuguuucu

SEQ ID NO: 23288 - RNA, 19 nt, Homo sapiens
  misc_RNA (1)...(19): siRNA sense strand
caaauggaggauuacguaa

SEQ ID NO: 23289 - RNA, 19 nt, Homo sapiens
  misc_RNA (1)...(19): siRNA sense strand
gaagugaaaagcucaauau

SEQ ID NO: 23290 - RNA, 19 nt, Homo sapiens
  misc_RNA (1)...(19): siRNA sense strand
gcuuaaccgguaugaauuu

SEQ ID NO: 23291 - RNA, 19 nt, Homo sapiens
  misc_RNA (1)...(19): siRNA sense strand
aggaagacaucauaagaca

SEQ ID NO: 23292 - RNA, 19 nt, Homo sapiens
  misc_RNA (1)...(19): siRNA sense strand
gcauaccggcuuaaagaau

SEQ ID NO: 23293 - RNA, 19 nt, Homo sapiens
  misc_RNA (1)...(19): siRNA sense strand
cagccucauucucgacuuu

SEQ ID NO: 23294 - RNA, 19 nt, Homo sapiens
  misc_RNA (1)...(19): siRNA sense strand
uggaagaaccaacaucuau

SEQ ID NO: 23295 - RNA, 19 nt, Homo sapiens
  misc_RNA (1)...(19): siRNA sense strand
guauaucguuggaacugau

SEQ ID NO: 23296 - RNA, 19 nt, Homo sapiens
  misc_RNA (1)...(19): siRNA sense strand
gaaagauuacaguacuuca

SEQ ID NO: 23297 - RNA, 19 nt, Homo sapiens
  misc_RNA (1)...(19): siRNA sense strand
ccaguuggcuuuugggauu

SEQ ID NO: 23298 - RNA, 19 nt, Homo sapiens
  misc_RNA (1)...(19): siRNA sense strand
ucagcaguguccuuucuug

SEQ ID NO: 23299 - RNA, 19 nt, Homo sapiens
  misc_RNA (1)...(19): siRNA sense strand
gauugaacccuuugggaau

SEQ ID NO: 23300 - RNA, 19 nt, Homo sapiens
  misc_RNA (1)...(19): siRNA sense strand
acaggaagacaucauaaga

SEQ ID NO: 23301 - RNA, 19 nt, Homo sapiens
  misc_RNA (1)...(19): siRNA sense strand
agagaagacuaauauugca

SEQ ID NO: 23302 - RNA, 19 nt, Homo sapiens
  misc_RNA (1)...(19): siRNA sense strand
aagcuuaaccgguaugaau

SEQ ID NO: 23303 - RNA, 19 nt, Homo sapiens
  misc_RNA (1)...(19): siRNA sense strand
agaauuguccucucuuugu

SEQ ID NO: 23304 - RNA, 19 nt, Homo sapiens
  misc_RNA (1)...(19): siRNA sense strand
gugauauuguuucugguau

SEQ ID NO: 23305 - RNA, 19 nt, Homo sapiens
  misc_RNA (1)...(19): siRNA sense strand
gcuggacaacaaucagaua

SEQ ID NO: 23306 - RNA, 19 nt, Homo sapiens
  misc_RNA (1)...(19): siRNA sense strand
gcgaaaggacaaauaugau

SEQ ID NO: 23307 - RNA, 19 nt, Homo sapiens
  misc_RNA (1)...(19): siRNA sense strand
gguaucagcacagggauug

SEQ ID NO: 23308 - RNA, 19 nt, Homo sapiens
  misc_RNA (1)...(19): siRNA sense strand
uacguaaucggguauauga

SEQ ID NO: 23309 - RNA, 19 nt, Homo sapiens
  misc_RNA (1)...(19): siRNA sense strand
gagcuggacaacaaucaga

SEQ ID NO: 23310 - RNA, 19 nt, Homo sapiens
  misc_RNA (1)...(19): siRNA sense strand
gaagagcuggacaacaauc

SEQ ID NO: 23311 - RNA, 19 nt, Homo sapiens
  misc_RNA (1)...(19): siRNA sense strand
gcugaaauaggcagauugu

SEQ ID NO: 23312 - RNA, 19 nt, Homo sapiens
  misc_RNA (1)...(19): siRNA sense strand
caucucaaaguguguugua

SEQ ID NO: 23313 - RNA, 19 nt, Homo sapiens
  misc_RNA (1)...(19): siRNA sense strand
ccagaucgcaaugcaacua

SEQ ID NO: 23314 - RNA, 19 nt, Homo sapiens
  misc_RNA (1)...(19): siRNA sense strand
agacaggaagacaucauaa

SEQ ID NO: 23315 - RNA, 19 nt, Homo sapiens
  misc_RNA (1)...(19): siRNA sense strand
aaacuuaucgaugcuguug

SEQ ID NO: 23316 - RNA, 19 nt, Homo sapiens
  misc_RNA (1)...(19): siRNA sense strand
guccaucuccuaucuacuu

SEQ ID NO: 23317 - RNA, 19 nt, Homo sapiens
  misc_RNA (1)...(19): siRNA sense strand
ggccguacuacaagguuua

SEQ ID NO: 23318 - RNA, 19 nt, Homo sapiens
  misc_RNA (1)...(19): siRNA sense strand
ccagaaggagugaaaauuu

SEQ ID NO: 23319 - RNA, 19 nt, Homo sapiens
  misc_RNA (1)...(19): siRNA sense strand
ugaugcaguuugcugaaau

SEQ ID NO: 23320 - RNA, 19 nt, Homo sapiens
  misc_RNA (1)...(19): siRNA sense strand
agggaaugcugaugcaguu

SEQ ID NO: 23321 - RNA, 19 nt, Homo sapiens
  misc_RNA (1)...(19): siRNA sense strand
gcuuauuggugccaucauc

SEQ ID NO: 23322 - RNA, 19 nt, Homo sapiens
  misc_RNA (1)...(19): siRNA sense strand
ggauuggauuuguagugau

SEQ ID NO: 23323 - RNA, 19 nt, Homo sapiens
  misc_RNA (1)...(19): siRNA sense strand
uggguuguaugcauccuuu

SEQ ID NO: 23324 - RNA, 19 nt, Homo sapiens
  misc_RNA (1)...(19): siRNA sense strand
gaugaagaaagauuacagu

SEQ ID NO: 23325 - RNA, 19 nt, Homo sapiens
  misc_RNA (1)...(19): siRNA sense strand
gaaauaggccuacuuguug

SEQ ID NO: 23326 - RNA, 19 nt, Homo sapiens
  misc_RNA (1)...(19): siRNA sense strand
acaguuaucugguuuguua

SEQ ID NO: 23327 - RNA, 19 nt, Homo sapiens
  misc_RNA (1)...(19): siRNA sense strand
gaaaucagauacaaacuuc

SEQ ID NO: 23328 - RNA, 19 nt, Homo sapiens
  misc_RNA (1)...(19): siRNA sense strand
acaagaaccuucagacuaa

SEQ ID NO: 23329 - RNA, 19 nt, Homo sapiens
  misc_RNA (1)...(19): siRNA sense strand
ccaaagaacucaaugaaca

SEQ ID NO: 23330 - RNA, 19 nt, Homo sapiens
  misc_RNA (1)...(19): siRNA sense strand
gaaagaaguucgcagagau

SEQ ID NO: 23331 - RNA, 19 nt, Homo sapiens
  misc_RNA (1)...(19): siRNA sense strand
gaaaguaaagagcaacaua

SEQ ID NO: 23332 - RNA, 19 nt, Homo sapiens
  misc_RNA (1)...(19): siRNA sense strand
ggaguacugugccuuauga

SEQ ID NO: 23333 - RNA, 19 nt, Homo sapiens
  misc_RNA (1)...(19): siRNA sense strand
gcaaagacauugguuaaag

SEQ ID NO: 23334 - RNA, 19 nt, Homo sapiens
  misc_RNA (1)...(19): siRNA sense strand
ggauacaugucuucagaaa

SEQ ID NO: 23335 - RNA, 19 nt, Homo sapiens
  misc_RNA (1)...(19): siRNA sense strand
guacugacuucaagcaauu

SEQ ID NO: 23336 - RNA, 19 nt, Homo sapiens
  misc_RNA (1)...(19): siRNA sense strand
uaauaaagguggcuuggaa

SEQ ID NO: 23337 - RNA, 19 nt, Homo sapiens
  misc_RNA (1)...(19): siRNA sense strand
ccauagugcuccuuccuua

SEQ ID NO: 23338 - RNA, 19 nt, Homo sapiens
  misc_RNA (1)...(19): siRNA sense strand
gaagaaggcagcaaagaga

SEQ ID NO: 23339 - RNA, 19 nt, Homo sapiens
  misc_RNA (1)...(19): siRNA sense strand
caagaaacaugguuacaca

SEQ ID NO: 23340 - RNA, 19 nt, Homo sapiens
  misc_RNA (1)...(19): siRNA sense strand
caaagacauugguuaaaga

SEQ ID NO: 23341 - RNA, 19 nt, Homo sapiens
  misc_RNA (1)...(19): siRNA sense strand
caagagaaaucagauacaa

SEQ ID NO: 23342 - RNA, 19 nt, Homo sapiens
  misc_RNA (1)...(19): siRNA sense strand
aguaauagcuccuuuguuc

SEQ ID NO: 23343 - RNA, 19 nt, Homo sapiens
  misc_RNA (1)...(19): siRNA sense strand
ugaaggaaaugacaguuau

SEQ ID NO: 23344 - RNA, 19 nt, Homo sapiens
  misc_RNA (1)...(19): siRNA sense strand
gaucuuaucaccagccuuu

SEQ ID NO: 23345 - RNA, 19 nt, Homo sapiens
  misc_RNA (1)...(19): siRNA sense strand
ugaaauaggccuacuuguu

SEQ ID NO: 23346 - RNA, 19 nt, Homo sapiens
  misc_RNA (1)...(19): siRNA sense strand
caacggagaauauugcaaa

SEQ ID NO: 23347 - RNA, 19 nt, Homo sapiens
  misc_RNA (1)...(19): siRNA sense strand
agacucagcugaaggaaau

SEQ ID NO: 23348 - RNA, 19 nt, Homo sapiens
  misc_RNA (1)...(19): siRNA sense strand
guaccagaauggaaccuaa

SEQ ID NO: 23349 - RNA, 19 nt, Homo sapiens
  misc_RNA (1)...(19): siRNA sense strand
uaucaucccuuccuucuuc

SEQ ID NO: 23350 - RNA, 19 nt, Homo sapiens
  misc_RNA (1)...(19): siRNA sense strand
caaagggaaucaaguacug

SEQ ID NO: 23351 - RNA, 19 nt, Homo sapiens
  misc_RNA (1)...(19): siRNA sense strand
gcgaugggcuucuuucaag

SEQ ID NO: 23352 - RNA, 19 nt, Homo sapiens
  misc_RNA (1)...(19): siRNA sense strand
ccaagaaccugucuauggu

SEQ ID NO: 23353 - RNA, 19 nt, Homo sapiens
  misc_RNA (1)...(19): siRNA sense strand
uaucauaggauccuuauug

SEQ ID NO: 23354 - RNA, 19 nt, Homo sapiens
  misc_RNA (1)...(19): siRNA sense strand
caaugcagaccuuaucaua

SEQ ID NO: 23355 - RNA, 19 nt, Homo sapiens
  misc_RNA (1)...(19): siRNA sense strand
gaaaugucagugcaacuuu

SEQ ID NO: 23356 - RNA, 19 nt, Homo sapiens
  misc_RNA (1)...(19): siRNA sense strand
guacugugccuuaugauug

SEQ ID NO: 23357 - RNA, 19 nt, Homo sapiens
  misc_RNA (1)...(19): siRNA sense strand
gggagcacauuauuaaauc

SEQ ID NO: 23358 - RNA, 19 nt, Homo sapiens
  misc_RNA (1)...(19): siRNA sense strand
auacaugucuucagaaaca

SEQ ID NO: 23359 - RNA, 19 nt, Homo sapiens
  misc_RNA (1)...(19): siRNA sense strand
ggugugggcucacucauca

SEQ ID NO: 23360 - RNA, 19 nt, Homo sapiens
  misc_RNA (1)...(19): siRNA sense strand
cuuuauagcuggaguuuau

SEQ ID NO: 23361 - RNA, 19 nt, Homo sapiens
  misc_RNA (1)...(19): siRNA sense strand
uggcagcacuguaaccuuu

SEQ ID NO: 23362 - RNA, 19 nt, Homo sapiens
  misc_RNA (1)...(19): siRNA sense strand
ugaaagaaguucgcagaga

SEQ ID NO: 23363 - RNA, 19 nt, Homo sapiens
  misc_RNA (1)...(19): siRNA sense strand
gcagggauccacacacuga

SEQ ID NO: 23364 - RNA, 19 nt, Homo sapiens
  misc_RNA (1)...(19): siRNA sense strand
ucacuauucuuacaucuca

SEQ ID NO: 23365 - RNA, 19 nt, Homo sapiens
  misc_RNA (1)...(19): siRNA sense strand
gcaaagagaaagaucaaag

SEQ ID NO: 23366 - RNA, 19 nt, Homo sapiens
  misc_RNA (1)...(19): siRNA sense strand
gacauugguuaaagaauca

SEQ ID NO: 23367 - RNA, 19 nt, Homo sapiens
  misc_RNA (1)...(19): siRNA sense strand
uaacagcccugguucuuuu

SEQ ID NO: 23368 - RNA, 19 nt, Homo sapiens
  misc_RNA (1)...(19): siRNA sense strand
aaacaugguuacacaguca

SEQ ID NO: 23369 - RNA, 19 nt, Homo sapiens
  misc_RNA (1)...(19): siRNA sense strand
gaaccugucuauggucugu

SEQ ID NO: 23370 - RNA, 19 nt, Homo sapiens
  misc_RNA (1)...(19): siRNA sense strand
ccuuggagcugcauacuau

SEQ ID NO: 23371 - RNA, 19 nt, Homo sapiens
  misc_RNA (1)...(19): siRNA sense strand
gcacugcuaaguacugaaa

SEQ ID NO: 23372 - RNA, 19 nt, Homo sapiens
  misc_RNA (1)...(19): siRNA sense strand
gggagcccuucguaaauuu

SEQ ID NO: 23373 - RNA, 19 nt, Homo sapiens
  misc_RNA (1)...(19): siRNA sense strand
ugagauguuugccaagaaa

SEQ ID NO: 23374 - RNA, 19 nt, Homo sapiens
  misc_RNA (1)...(19): siRNA sense strand
cccaaaauguggaguauua

SEQ ID NO: 23375 - RNA, 19 nt, Homo sapiens
  misc_RNA (1)...(19): siRNA sense strand
caaagagaaagaucaaaga

SEQ ID NO: 23376 - RNA, 19 nt, Homo sapiens
  misc_RNA (1)...(19): siRNA sense strand
uugaaucugugucugcuua

SEQ ID NO: 23377 - RNA, 19 nt, Homo sapiens
  misc_RNA (1)...(19): siRNA sense strand
ggaaaugacaguuauccau

SEQ ID NO: 23378 - RNA, 19 nt, Homo sapiens
  misc_RNA (1)...(19): siRNA sense strand
gaaguucgcagagauuaug

SEQ ID NO: 23379 - RNA, 19 nt, Homo sapiens
  misc_RNA (1)...(19): siRNA sense strand
uaauagcuccuuuguucua

SEQ ID NO: 23380 - RNA, 19 nt, Homo sapiens
  misc_RNA (1)...(19): siRNA sense strand
uaguauugcuggacauauu

SEQ ID NO: 23381 - RNA, 19 nt, Homo sapiens
  misc_RNA (1)...(19): siRNA sense strand
gaugugaugucaggcuuga

SEQ ID NO: 23382 - RNA, 19 nt, Homo sapiens
  misc_RNA (1)...(19): siRNA sense strand
agacauugguuaaagaauc

SEQ ID NO: 23383 - RNA, 19 nt, Homo sapiens
  misc_RNA (1)...(19): siRNA sense strand
aagcaaaccaggaaaugua

SEQ ID NO: 23384 - RNA, 19 nt, Homo sapiens
  misc_RNA (1)...(19): siRNA sense strand
accaaucucugugaucuua

SEQ ID NO: 23385 - RNA, 19 nt, Homo sapiens
  misc_RNA (1)...(19): siRNA sense strand
ugagacaguugaccgagaa

SEQ ID NO: 23386 - RNA, 19 nt, Homo sapiens
  misc_RNA (1)...(19): siRNA sense strand
acagaaagcuggcuaugac

SEQ ID NO: 23387 - RNA, 19 nt, Homo sapiens
  misc_RNA (1)...(19): siRNA sense strand
guaaagagcaacauaacgu

SEQ ID NO: 23388 - RNA, 19 nt, Homo sapiens
  misc_RNA (1)...(19): siRNA sense strand
uacaagaaccuucagacua

SEQ ID NO: 23389 - RNA, 19 nt, Homo sapiens
  misc_RNA (1)...(19): siRNA sense strand
ccacauuagccucucauuu

SEQ ID NO: 23390 - RNA, 19 nt, Homo sapiens
  misc_RNA (1)...(19): siRNA sense strand
uuacaucucaggccaagua

SEQ ID NO: 23391 - RNA, 19 nt, Homo sapiens
  misc_RNA (1)...(19): siRNA sense strand
ggagcacauuauuaaauca

SEQ ID NO: 23392 - RNA, 19 nt, Homo sapiens
  misc_RNA (1)...(19): siRNA sense strand
gaguauguguucccaaugg

SEQ ID NO: 23393 - RNA, 19 nt, Homo sapiens
  misc_RNA (1)...(19): siRNA sense strand
ggaagaaggcagcaaagag

SEQ ID NO: 23394 - RNA, 19 nt, Homo sapiens
  misc_RNA (1)...(19): siRNA sense strand
ucagaaacauccauaagac

SEQ ID NO: 23395 - RNA, 19 nt, Homo sapiens
  misc_RNA (1)...(19): siRNA sense strand
acucaucacuaccuggaua

SEQ ID NO: 23396 - RNA, 19 nt, Homo sapiens
  misc_RNA (1)...(19): siRNA sense strand
gcagcacuguaaccuuuau

SEQ ID NO: 23397 - RNA, 19 nt, Homo sapiens
  misc_RNA (1)...(19): siRNA sense strand
caucagacaggauauguga

SEQ ID NO: 23398 - RNA, 19 nt, Homo sapiens
  misc_RNA (1)...(19): siRNA sense strand
gccaagaaccugucuaugg

SEQ ID NO: 23399 - RNA, 19 nt, Homo sapiens
  misc_RNA (1)...(19): siRNA sense strand
cagugcaacuuucccauga

SEQ ID NO: 23400 - RNA, 19 nt, Homo sapiens
  misc_RNA (1)...(19): siRNA sense strand
guaauaucaucccuuccuu

SEQ ID NO: 23401 - RNA, 19 nt, Homo sapiens
  misc_RNA (1)...(19): siRNA sense strand
cuauugaacuuguuguugu

SEQ ID NO: 23402 - RNA, 19 nt, Homo sapiens
  misc_RNA (1)...(19): siRNA sense strand
gaaagcuggcuaugacaau

SEQ ID NO: 23403 - RNA, 19 nt, Homo sapiens
  misc_RNA (1)...(19): siRNA sense strand
ugaacuuguuguuguugua

SEQ ID NO: 23404 - RNA, 19 nt, Homo sapiens
  misc_RNA (1)...(19): siRNA sense strand
caaccaaagaacucaauga

SEQ ID NO: 23405 - RNA, 19 nt, Homo sapiens
  misc_RNA (1)...(19): siRNA sense strand
gaaucaacaggcugccaua

SEQ ID NO: 23406 - RNA, 19 nt, Homo sapiens
  misc_RNA (1)...(19): siRNA sense strand
gaucaaugcagaccuuauc

SEQ ID NO: 23407 - RNA, 19 nt, Homo sapiens
  misc_RNA (1)...(19): siRNA sense strand
ggucugagucuuaguagug

SEQ ID NO: 23408 - RNA, 19 nt, Homo sapiens
  misc_RNA (1)...(19): siRNA sense strand
ugucaacccaaucuuaaua

SEQ ID NO: 23409 - RNA, 19 nt, Homo sapiens
  misc_RNA (1)...(19): siRNA sense strand
gccaaagaguucacugcuu

SEQ ID NO: 23410 - RNA, 19 nt, Homo sapiens
  misc_RNA (1)...(19): siRNA sense strand
gcuguccucugcacugcua

SEQ ID NO: 23411 - RNA, 19 nt, Homo sapiens
  misc_RNA (1)...(19): siRNA sense strand
ccagugcaguccagccaaa

SEQ ID NO: 23412 - RNA, 19 nt, Homo sapiens
  misc_RNA (1)...(19): siRNA sense strand
ccaauggucugagucuuag

SEQ ID NO: 23413 - RNA, 19 nt, Homo sapiens
  misc_RNA (1)...(19): siRNA sense strand
ggagcugcauacuauagug

SEQ ID NO: 23414 - RNA, 19 nt, Homo sapiens
  misc_RNA (1)...(19): siRNA sense strand
cuauuuccaucauugguuu

SEQ ID NO: 23415 - RNA, 19 nt, Homo sapiens
  misc_RNA (1)...(19): siRNA sense strand
gauugugggcauauuauug

SEQ ID NO: 23416 - RNA, 19 nt, Homo sapiens
  misc_RNA (1)...(19): siRNA sense strand
ucaacaggcugccauacuc

SEQ ID NO: 23417 - RNA, 19 nt, Homo sapiens
  misc_RNA (1)...(19): siRNA sense strand
uguuguagcagccacauua

SEQ ID NO: 23418 - RNA, 19 nt, Homo sapiens
  misc_RNA (1)...(19): siRNA sense strand
cacuucaaauccaagcuua

SEQ ID NO: 23419 - RNA, 19 nt, Homo sapiens
  misc_RNA (1)...(19): siRNA sense strand
ccuuaggaaugguuucaaa

SEQ ID NO: 23420 - RNA, 19 nt, Homo sapiens
  misc_RNA (1)...(19): siRNA sense strand
cccaauggucugagucuua

SEQ ID NO: 23421 - RNA, 19 nt, Homo sapiens
  misc_RNA (1)...(19): siRNA sense strand
ggagcccuucguaaauuua

SEQ ID NO: 23422 - RNA, 19 nt, Homo sapiens
  misc_RNA (1)...(19): siRNA sense strand
guaacagcccugguucuuu

SEQ ID NO: 23423 - RNA, 19 nt, Homo sapiens
  misc_RNA (1)...(19): siRNA sense strand
ucagcuuucugguguggua

SEQ ID NO: 23424 - RNA, 19 nt, Homo sapiens
  misc_RNA (1)...(19): siRNA sense strand
cuggauacaugucuucaga

SEQ ID NO: 23425 - RNA, 19 nt, Homo sapiens
  misc_RNA (1)...(19): siRNA sense strand
caucuuaaaugccguguuu

SEQ ID NO: 23426 - RNA, 19 nt, Homo sapiens
  misc_RNA (1)...(19): siRNA sense strand
gcuaugaaauugaugaaga

SEQ ID NO: 23427 - RNA, 19 nt, Homo sapiens
  misc_RNA (1)...(19): siRNA sense strand
uaaaugccguguuugguuu

SEQ ID NO: 23428 - RNA, 19 nt, Homo sapiens
  misc_RNA (1)...(19): siRNA sense strand
ggaaccucauugauuauuu

SEQ ID NO: 23429 - RNA, 19 nt, Homo sapiens
  misc_RNA (1)...(19): siRNA sense strand
agaaagccauguucauauu

SEQ ID NO: 23430 - RNA, 19 nt, Homo sapiens
  misc_RNA (1)...(19): siRNA sense strand
ccagaaagccauguucaua

SEQ ID NO: 23431 - RNA, 19 nt, Homo sapiens
  misc_RNA (1)...(19): siRNA sense strand
cagaaaggaucacagaugu

SEQ ID NO: 23432 - RNA, 19 nt, Homo sapiens
  misc_RNA (1)...(19): siRNA sense strand
gcagaaaggaucacagaug

SEQ ID NO: 23433 - RNA, 19 nt, Homo sapiens
  misc_RNA (1)...(19): siRNA sense strand
gggcagaagcggagccuua

SEQ ID NO: 23434 - RNA, 19 nt, Homo sapiens
  misc_RNA (1)...(19): siRNA sense strand
gaaagccauguucauauuu

SEQ ID NO: 23435 - RNA, 19 nt, Homo sapiens
  misc_RNA (1)...(19): siRNA sense strand
cuucaaacaucaccuugua

SEQ ID NO: 23436 - RNA, 19 nt, Homo sapiens
  misc_RNA (1)...(19): siRNA sense strand
gcaagaucaucgcagagaa

SEQ ID NO: 23437 - RNA, 19 nt, Homo sapiens
  misc_RNA (1)...(19): siRNA sense strand
gaccggaaccucauugauu

SEQ ID NO: 23438 - RNA, 19 nt, Homo sapiens
  misc_RNA (1)...(19): siRNA sense strand
agaaggaucuggacgacaa

SEQ ID NO: 23439 - RNA, 19 nt, Homo sapiens
  misc_RNA (1)...(19): siRNA sense strand
gggaagacaucaagcucaa

SEQ ID NO: 23440 - RNA, 19 nt, Homo sapiens
  misc_RNA (1)...(19): siRNA sense strand
gaucaucgcagagaauauu

SEQ ID NO: 23441 - RNA, 19 nt, Homo sapiens
  misc_RNA (1)...(19): siRNA sense strand
ccacaugcuucaaacauca

SEQ ID NO: 23442 - RNA, 19 nt, Homo sapiens
  misc_RNA (1)...(19): siRNA sense strand
gggaggcacugcagaagga

SEQ ID NO: 23443 - RNA, 19 nt, Homo sapiens
  misc_RNA (1)...(19): siRNA sense strand
cgagguccaucuucauauu

SEQ ID NO: 23444 - RNA, 19 nt, Homo sapiens
  misc_RNA (1)...(19): siRNA sense strand
accggaaccucauugauua

SEQ ID NO: 23445 - RNA, 19 nt, Homo sapiens
  misc_RNA (1)...(19): siRNA sense strand
gagcagaaaggaucacaga

SEQ ID NO: 23446 - RNA, 19 nt, Homo sapiens
  misc_RNA (1)...(19): siRNA sense strand
guucauauuucucagcaau

SEQ ID NO: 23447 - RNA, 19 nt, Homo sapiens
  misc_RNA (1)...(19): siRNA sense strand
guacaaggaucaguuacag

SEQ ID NO: 23448 - RNA, 19 nt, Homo sapiens
  misc_RNA (1)...(19): siRNA sense strand
agccuuuccucgacuauua

SEQ ID NO: 23449 - RNA, 19 nt, Homo sapiens
  misc_RNA (1)...(19): siRNA sense strand
cagaaagccauguucauau

SEQ ID NO: 23450 - RNA, 19 nt, Homo sapiens
  misc_RNA (1)...(19): siRNA sense strand
cagaguggcugaggagaug

SEQ ID NO: 23451 - RNA, 19 nt, Homo sapiens
  misc_RNA (1)...(19): siRNA sense strand
gaagacaucaagcucaaag

SEQ ID NO: 23452 - RNA, 19 nt, Homo sapiens
  misc_RNA (1)...(19): siRNA sense strand
gaaagcagagggaagacau

SEQ ID NO: 23453 - RNA, 19 nt, Homo sapiens
  misc_RNA (1)...(19): siRNA sense strand
uggcacagcagcuuaauug

SEQ ID NO: 23454 - RNA, 19 nt, Homo sapiens
  misc_RNA (1)...(19): siRNA sense strand
ggacgacaaccucuuugga

SEQ ID NO: 23455 - RNA, 19 nt, Homo sapiens
  misc_RNA (1)...(19): siRNA sense strand
acaaggaucaguuacaguu

SEQ ID NO: 23456 - RNA, 19 nt, Homo sapiens
  misc_RNA (1)...(19): siRNA sense strand
aaagccauguucauauuuc

SEQ ID NO: 23457 - RNA, 19 nt, Homo sapiens
  misc_RNA (1)...(19): siRNA sense strand
gagguccaucuucauauuu

SEQ ID NO: 23458 - RNA, 19 nt, Homo sapiens
  misc_RNA (1)...(19): siRNA sense strand
cagauguggcuuuggauuu

SEQ ID NO: 23459 - RNA, 19 nt, Homo sapiens
  misc_RNA (1)...(19): siRNA sense strand
acauugcacuuuccacaug

SEQ ID NO: 23460 - RNA, 19 nt, Homo sapiens
  misc_RNA (1)...(19): siRNA sense strand
gcagagggaagacaucaag

SEQ ID NO: 23461 - RNA, 19 nt, Homo sapiens
  misc_RNA (1)...(19): siRNA sense strand
gaugcaugcaggccucaua

SEQ ID NO: 23462 - RNA, 19 nt, Homo sapiens
  misc_RNA (1)...(19): siRNA sense strand
uuaaaugccguguuugguu

SEQ ID NO: 23463 - RNA, 19 nt, Homo sapiens
  misc_RNA (1)...(19): siRNA sense strand
gcacagcagcuuaauugac

SEQ ID NO: 23464 - RNA, 19 nt, Homo sapiens
  misc_RNA (1)...(19): siRNA sense strand
gcaugcaggccucauagau

SEQ ID NO: 23465 - RNA, 19 nt, Homo sapiens
  misc_RNA (1)...(19): siRNA sense strand
caagaucaucgcagagaau

SEQ ID NO: 23466 - RNA, 19 nt, Homo sapiens
  misc_RNA (1)...(19): siRNA sense strand
gaaauugaugaagacauug

SEQ ID NO: 23467 - RNA, 19 nt, Homo sapiens
  misc_RNA (1)...(19): siRNA sense strand
ggaauacaaacaccuaaaa

SEQ ID NO: 23468 - RNA, 19 nt, Homo sapiens
  misc_RNA (1)...(19): siRNA sense strand
gguccaucuucauauuuga

SEQ ID NO: 23469 - RNA, 19 nt, Homo sapiens
  misc_RNA (1)...(19): siRNA sense strand
gugacuauguccaccuguu

SEQ ID NO: 23470 - RNA, 19 nt, Homo sapiens
  misc_RNA (1)...(19): siRNA sense strand
caacccaaagcccaagaaa

SEQ ID NO: 23471 - RNA, 19 nt, Homo sapiens
  misc_RNA (1)...(19): siRNA sense strand
gucccgaggcuaugaaauu

SEQ ID NO: 23472 - RNA, 19 nt, Homo sapiens
  misc_RNA (1)...(19): siRNA sense strand
acaucaagcucaaagacau

SEQ ID NO: 23473 - RNA, 19 nt, Homo sapiens
  misc_RNA (1)...(19): siRNA sense strand
ucaagccuuuccucgacua

SEQ ID NO: 23474 - RNA, 19 nt, Homo sapiens
  misc_RNA (1)...(19): siRNA sense strand
ugaaauggauaagaugcau

SEQ ID NO: 23475 - RNA, 19 nt, Homo sapiens
  misc_RNA (1)...(19): siRNA sense strand
gcacuuuccacaugcuuca

SEQ ID NO: 23476 - RNA, 19 nt, Homo sapiens
  misc_RNA (1)...(19): siRNA sense strand
ugacuauguccaccuguuu

SEQ ID NO: 23477 - RNA, 19 nt, Homo sapiens
  misc_RNA (1)...(19): siRNA sense strand
aggguggucugaacaguga

SEQ ID NO: 23478 - RNA, 19 nt, Homo sapiens
  misc_RNA (1)...(19): siRNA sense strand
gcagaguggcugaggagau

SEQ ID NO: 23479 - RNA, 19 nt, Homo sapiens
  misc_RNA (1)...(19): siRNA sense strand
agauguggcuuuggauuuc

SEQ ID NO: 23480 - RNA, 19 nt, Homo sapiens
  misc_RNA (1)...(19): siRNA sense strand
ugccguguuugguuucaua

SEQ ID NO: 23481 - RNA, 19 nt, Homo sapiens
  misc_RNA (1)...(19): siRNA sense strand
ucaaacaucaccuuguaca

SEQ ID NO: 23482 - RNA, 19 nt, Homo sapiens
  misc_RNA (1)...(19): siRNA sense strand
caguuacaguuguggauuc

SEQ ID NO: 23483 - RNA, 19 nt, Homo sapiens
  misc_RNA (1)...(19): siRNA sense strand
ucgcagagaauauuuacga

SEQ ID NO: 23484 - RNA, 19 nt, Homo sapiens
  misc_RNA (1)...(19): siRNA sense strand
ccgaggcuaugaaauugau

SEQ ID NO: 23485 - RNA, 19 nt, Homo sapiens
  misc_RNA (1)...(19): siRNA sense strand
ucccgaggcuaugaaauug

SEQ ID NO: 23486 - RNA, 19 nt, Homo sapiens
  misc_RNA (1)...(19): siRNA sense strand
caaacaucaccuuguacaa

SEQ ID NO: 23487 - RNA, 19 nt, Homo sapiens
  misc_RNA (1)...(19): siRNA sense strand
gaggcuaugaaauugauga

SEQ ID NO: 23488 - RNA, 19 nt, Homo sapiens
  misc_RNA (1)...(19): siRNA sense strand
ggaagacaucaagcucaaa

SEQ ID NO: 23489 - RNA, 19 nt, Homo sapiens
  misc_RNA (1)...(19): siRNA sense strand
aaggaucaguuacaguugu

SEQ ID NO: 23490 - RNA, 19 nt, Homo sapiens
  misc_RNA (1)...(19): siRNA sense strand
guggaaagcagagggaaga

SEQ ID NO: 23491 - RNA, 19 nt, Homo sapiens
  misc_RNA (1)...(19): siRNA sense strand
uggcugaggagaugacauu

SEQ ID NO: 23492 - RNA, 19 nt, Homo sapiens
  misc_RNA (1)...(19): siRNA sense strand
gaugaagacauuguaagca

SEQ ID NO: 23493 - RNA, 19 nt, Homo sapiens
  misc_RNA (1)...(19): siRNA sense strand
caucaagcucaaagacauu

SEQ ID NO: 23494 - RNA, 19 nt, Homo sapiens
  misc_RNA (1)...(19): siRNA sense strand
caaccucuuuggacagcau

SEQ ID NO: 23495 - RNA, 19 nt, Homo sapiens
  misc_RNA (1)...(19): siRNA sense strand
uuacgaggguggucugaac

SEQ ID NO: 23496 - RNA, 19 nt, Homo sapiens
  misc_RNA (1)...(19): siRNA sense strand
gacaucaagcucaaagaca

SEQ ID NO: 23497 - RNA, 19 nt, Homo sapiens
  misc_RNA (1)...(19): siRNA sense strand
gcgagguccaucuucauau

SEQ ID NO: 23498 - RNA, 19 nt, Homo sapiens
  misc_RNA (1)...(19): siRNA sense strand
caaggaucaguuacaguug

SEQ ID NO: 23499 - RNA, 19 nt, Homo sapiens
  misc_RNA (1)...(19): siRNA sense strand
caugcaggccucauagaug

SEQ ID NO: 23500 - RNA, 19 nt, Homo sapiens
  misc_RNA (1)...(19): siRNA sense strand
aagaucaucgcagagaaua

SEQ ID NO: 23501 - RNA, 19 nt, Homo sapiens
  misc_RNA (1)...(19): siRNA sense strand
ggaaagcagagggaagaca

SEQ ID NO: 23502 - RNA, 19 nt, Homo sapiens
  misc_RNA (1)...(19): siRNA sense strand
ggucugaacagugacuaug

SEQ ID NO: 23503 - RNA, 19 nt, Homo sapiens
  misc_RNA (1)...(19): siRNA sense strand
ucaucgcagagaauauuua

SEQ ID NO: 23504 - RNA, 19 nt, Homo sapiens
  misc_RNA (1)...(19): siRNA sense strand
guucaccaaguuagauuau

SEQ ID NO: 23505 - RNA, 19 nt, Homo sapiens
  misc_RNA (1)...(19): siRNA sense strand
gacuauguccaccuguuug

SEQ ID NO: 23506 - RNA, 19 nt, Homo sapiens
  misc_RNA (1)...(19): siRNA sense strand
ugugcgagguccaucuuca

SEQ ID NO: 23507 - RNA, 19 nt, Homo sapiens
  misc_RNA (1)...(19): siRNA sense strand
ugcgagguccaucuucaua

SEQ ID NO: 23508 - RNA, 19 nt, Homo sapiens
  misc_RNA (1)...(19): siRNA sense strand
ccaaagaggagagaguuuu

SEQ ID NO: 23509 - RNA, 19 nt, Homo sapiens
  misc_RNA (1)...(19): siRNA sense strand
cuaugaaauugaugaagac

SEQ ID NO: 23510 - RNA, 19 nt, Homo sapiens
  misc_RNA (1)...(19): siRNA sense strand
uggaauacaaacaccuaaa

SEQ ID NO: 23511 - RNA, 19 nt, Homo sapiens
  misc_RNA (1)...(19): siRNA sense strand
gauguggcuuuggauuucu

SEQ ID NO: 23512 - RNA, 19 nt, Homo sapiens
  misc_RNA (1)...(19): siRNA sense strand
ucauauuucucagcaaugc

SEQ ID NO: 23513 - RNA, 19 nt, Homo sapiens
  misc_RNA (1)...(19): siRNA sense strand
agguccaucuucauauuug

SEQ ID NO: 23514 - RNA, 19 nt, Homo sapiens
  misc_RNA (1)...(19): siRNA sense strand
ucugaacagugacuauguc

SEQ ID NO: 23515 - RNA, 19 nt, Homo sapiens
  misc_RNA (1)...(19): siRNA sense strand
caaggagugugucuacuau

SEQ ID NO: 23516 - RNA, 19 nt, Homo sapiens
  misc_RNA (1)...(19): siRNA sense strand
gaucaacacucccgaacag

SEQ ID NO: 23517 - RNA, 19 nt, Homo sapiens
  misc_RNA (1)...(19): siRNA sense strand
gcacgugcuucaccuacaa

SEQ ID NO: 23518 - RNA, 19 nt, Homo sapiens
  misc_RNA (1)...(19): siRNA sense strand
gaacagacggugcccuaug

SEQ ID NO: 23519 - RNA, 19 nt, Homo sapiens
  misc_RNA (1)...(19): siRNA sense strand
gaagucaaggaccaacaaa

SEQ ID NO: 23520 - RNA, 19 nt, Homo sapiens
  misc_RNA (1)...(19): siRNA sense strand
ggacaucauuuggaucaac

SEQ ID NO: 23521 - RNA, 19 nt, Homo sapiens
  misc_RNA (1)...(19): siRNA sense strand
aggagugugucuacuauug

SEQ ID NO: 23522 - RNA, 19 nt, Homo sapiens
  misc_RNA (1)...(19): siRNA sense strand
gacaucauuuggaucaaca

SEQ ID NO: 23523 - RNA, 19 nt, Homo sapiens
  misc_RNA (1)...(19): siRNA sense strand
ggacgucagcaguaauuca

SEQ ID NO: 23524 - RNA, 19 nt, Homo sapiens
  misc_RNA (1)...(19): siRNA sense strand
acaaggagugugucuacua

SEQ ID NO: 23525 - RNA, 19 nt, Homo sapiens
  misc_RNA (1)...(19): siRNA sense strand
gaagggaagguugaaguca

SEQ ID NO: 23526 - RNA, 19 nt, Homo sapiens
  misc_RNA (1)...(19): siRNA sense strand
ggaagggaagguugaaguc

SEQ ID NO: 23527 - RNA, 19 nt, Homo sapiens
  misc_RNA (1)...(19): siRNA sense strand
gacgucagcaguaauucaa

SEQ ID NO: 23528 - RNA, 19 nt, Homo sapiens
  misc_RNA (1)...(19): siRNA sense strand
ggaaucugcagcucucaca

SEQ ID NO: 23529 - RNA, 19 nt, Homo sapiens
  misc_RNA (1)...(19): siRNA sense strand
ucaaggaccaacaaagcaa

SEQ ID NO: 23530 - RNA, 19 nt, Homo sapiens
  misc_RNA (1)...(19): siRNA sense strand
ccacugcagccagaucuga

SEQ ID NO: 23531 - RNA, 19 nt, Homo sapiens
  misc_RNA (1)...(19): siRNA sense strand
ugaagucaaggaccaacaa

SEQ ID NO: 23532 - RNA, 19 nt, Homo sapiens
  misc_RNA (1)...(19): siRNA sense strand
ggaucaacacucccgaaca

SEQ ID NO: 23533 - RNA, 19 nt, Homo sapiens
  misc_RNA (1)...(19): siRNA sense strand
aacagacggugcccuaugg

SEQ ID NO: 23534 - RNA, 19 nt, Homo sapiens
  misc_RNA (1)...(19): siRNA sense strand
ucaccuacaaggacaagga

SEQ ID NO: 23535 - RNA, 19 nt, Homo sapiens
  misc_RNA (1)...(19): siRNA sense strand
acaaggacaaggagugugu

SEQ ID NO: 23536 - RNA, 19 nt, Homo sapiens
  misc_RNA (1)...(19): siRNA sense strand
gcgcuuguguggggagaua

SEQ ID NO: 23537 - RNA, 19 nt, Homo sapiens
  misc_RNA (1)...(19): siRNA sense strand
gcagaggacuggccauuug

SEQ ID NO: 23538 - RNA, 19 nt, Homo sapiens
  misc_RNA (1)...(19): siRNA sense strand
ucaaggagacuuucaaaua

SEQ ID NO: 23539 - RNA, 19 nt, Homo sapiens
  misc_RNA (1)...(19): siRNA sense strand
ucacugaauuccugcauua

SEQ ID NO: 23540 - RNA, 19 nt, Homo sapiens
  misc_RNA (1)...(19): siRNA sense strand
gcagauugcuuuaaaugau

SEQ ID NO: 23541 - RNA, 19 nt, Homo sapiens
  misc_RNA (1)...(19): siRNA sense strand
gaagcucacucuuuauaau

SEQ ID NO: 23542 - RNA, 19 nt, Homo sapiens
  misc_RNA (1)...(19): siRNA sense strand
gcaugcagauugcuuuaaa

SEQ ID NO: 23543 - RNA, 19 nt, Homo sapiens
  misc_RNA (1)...(19): siRNA sense strand
caaggagacuuucaaauac

SEQ ID NO: 23544 - RNA, 19 nt, Homo sapiens
  misc_RNA (1)...(19): siRNA sense strand
ggacagcaguagaaauugu

SEQ ID NO: 23545 - RNA, 19 nt, Homo sapiens
  misc_RNA (1)...(19): siRNA sense strand
gaaguuaucugcgaaucug

SEQ ID NO: 23546 - RNA, 19 nt, Homo sapiens
  misc_RNA (1)...(19): siRNA sense strand
guauuggacuauauuggua

SEQ ID NO: 23547 - RNA, 19 nt, Homo sapiens
  misc_RNA (1)...(19): siRNA sense strand
ggaguagaauuaaaggaau

SEQ ID NO: 23548 - RNA, 19 nt, Homo sapiens
  misc_RNA (1)...(19): siRNA sense strand
cuaaugaccugugaaaugu

SEQ ID NO: 23549 - RNA, 19 nt, Homo sapiens
  misc_RNA (1)...(19): siRNA sense strand
uguguaagcuggugccuuu

SEQ ID NO: 23550 - RNA, 19 nt, Homo sapiens
  misc_RNA (1)...(19): siRNA sense strand
cccaauagaugugaacuuu

SEQ ID NO: 23551 - RNA, 19 nt, Homo sapiens
  misc_RNA (1)...(19): siRNA sense strand
gcgaaacggucccaauauc

SEQ ID NO: 23552 - RNA, 19 nt, Homo sapiens
  misc_RNA (1)...(19): siRNA sense strand
ugugaaauguugagaaaga

SEQ ID NO: 23553 - RNA, 19 nt, Homo sapiens
  misc_RNA (1)...(19): siRNA sense strand
gaaacggucccaauaucuu

SEQ ID NO: 23554 - RNA, 19 nt, Homo sapiens
  misc_RNA (1)...(19): siRNA sense strand
gaucaaggagacuuucaaa

SEQ ID NO: 23555 - RNA, 19 nt, Homo sapiens
  misc_RNA (1)...(19): siRNA sense strand
gaacuccacacuucugaga

SEQ ID NO: 23556 - RNA, 19 nt, Homo sapiens
  misc_RNA (1)...(19): siRNA sense strand
gcaaaccgcagagauaaug

SEQ ID NO: 23557 - RNA, 19 nt, Homo sapiens
  misc_RNA (1)...(19): siRNA sense strand
ccugugaaauguugagaaa

SEQ ID NO: 23558 - RNA, 19 nt, Homo sapiens
  misc_RNA (1)...(19): siRNA sense strand
ucagaaugaucccaauaga

SEQ ID NO: 23559 - RNA, 19 nt, Homo sapiens
  misc_RNA (1)...(19): siRNA sense strand
uaaaugaucaccuaaagca

SEQ ID NO: 23560 - RNA, 19 nt, Homo sapiens
  misc_RNA (1)...(19): siRNA sense strand
agaaugaucccaauagaug

SEQ ID NO: 23561 - RNA, 19 nt, Homo sapiens
  misc_RNA (1)...(19): siRNA sense strand
caauagaugugaacuuuug

SEQ ID NO: 23562 - RNA, 19 nt, Homo sapiens
  misc_RNA (1)...(19): siRNA sense strand
gcuguugcuucuuggagua

SEQ ID NO: 23563 - RNA, 19 nt, Homo sapiens
  misc_RNA (1)...(19): siRNA sense strand
uaacccaauugcucuguau

SEQ ID NO: 23564 - RNA, 19 nt, Homo sapiens
  misc_RNA (1)...(19): siRNA sense strand
cgaaucugcuugcuucauc

SEQ ID NO: 23565 - RNA, 19 nt, Homo sapiens
  misc_RNA (1)...(19): siRNA sense strand
caauugcucuguauuuggu

SEQ ID NO: 23566 - RNA, 19 nt, Homo sapiens
  misc_RNA (1)...(19): siRNA sense strand
ggacuacaaaggaaguuau

SEQ ID NO: 23567 - RNA, 19 nt, Homo sapiens
  misc_RNA (1)...(19): siRNA sense strand
uucugaagcucacucuuua

SEQ ID NO: 23568 - RNA, 19 nt, Homo sapiens
  misc_RNA (1)...(19): siRNA sense strand
agacagcuuucaugcaguu

SEQ ID NO: 23569 - RNA, 19 nt, Homo sapiens
  misc_RNA (1)...(19): siRNA sense strand
uaaugacgccacccacuaa

SEQ ID NO: 23570 - RNA, 19 nt, Homo sapiens
  misc_RNA (1)...(19): siRNA sense strand
gaugugaacuuuugagcuu

SEQ ID NO: 23571 - RNA, 19 nt, Homo sapiens
  misc_RNA (1)...(19): siRNA sense strand
uaugugcucugaguauuga

SEQ ID NO: 23572 - RNA, 19 nt, Homo sapiens
  misc_RNA (1)...(19): siRNA sense strand
gugaaauguugagaaagaa

SEQ ID NO: 23573 - RNA, 19 nt, Homo sapiens
  misc_RNA (1)...(19): siRNA sense strand
cugaagcucacucuuuaua

SEQ ID NO: 23574 - RNA, 19 nt, Homo sapiens
  misc_RNA (1)...(19): siRNA sense strand
cagauugcuuuaaaugauc

SEQ ID NO: 23575 - RNA, 19 nt, Homo sapiens
  misc_RNA (1)...(19): siRNA sense strand
cccaauugcucuguauuug

SEQ ID NO: 23576 - RNA, 19 nt, Homo sapiens
  misc_RNA (1)...(19): siRNA sense strand
ggacuauauugguaucaac

SEQ ID NO: 23577 - RNA, 19 nt, Homo sapiens
  misc_RNA (1)...(19): siRNA sense strand
acacuaaugaccugugaaa

SEQ ID NO: 23578 - RNA, 19 nt, Homo sapiens
  misc_RNA (1)...(19): siRNA sense strand
ugauuuggguggucucugu

SEQ ID NO: 23579 - RNA, 19 nt, Homo sapiens
  misc_RNA (1)...(19): siRNA sense strand
ugaagcucacucuuuauaa

SEQ ID NO: 23580 - RNA, 19 nt, Homo sapiens
  misc_RNA (1)...(19): siRNA sense strand
acuaaugaccugugaaaug

SEQ ID NO: 23581 - RNA, 19 nt, Homo sapiens
  misc_RNA (1)...(19): siRNA sense strand
agccauagguuuugauaua

SEQ ID NO: 23582 - RNA, 19 nt, Homo sapiens
  misc_RNA (1)...(19): siRNA sense strand
gcuggugccuuucauacag

SEQ ID NO: 23583 - RNA, 19 nt, Homo sapiens
  misc_RNA (1)...(19): siRNA sense strand
aaugaccugugaaauguug

SEQ ID NO: 23584 - RNA, 19 nt, Homo sapiens
  misc_RNA (1)...(19): siRNA sense strand
ucagaagacagcuuucaug

SEQ ID NO: 23585 - RNA, 19 nt, Homo sapiens
  misc_RNA (1)...(19): siRNA sense strand
ugagcuuucuguugguauu

SEQ ID NO: 23586 - RNA, 19 nt, Homo sapiens
  misc_RNA (1)...(19): siRNA sense strand
ccaaggacccaucgagauc

SEQ ID NO: 23587 - RNA, 19 nt, Homo sapiens
  misc_RNA (1)...(19): siRNA sense strand
gaaugaucccaauagaugu

SEQ ID NO: 23588 - RNA, 19 nt, Homo sapiens
  misc_RNA (1)...(19): siRNA sense strand
aaggagacuuucaaauaca

SEQ ID NO: 23589 - RNA, 19 nt, Homo sapiens
  misc_RNA (1)...(19): siRNA sense strand
gagucuaugugcucugagu

SEQ ID NO: 23590 - RNA, 19 nt, Homo sapiens
  misc_RNA (1)...(19): siRNA sense strand
cagcuuucaugcaguuuua

SEQ ID NO: 23591 - RNA, 19 nt, Homo sapiens
  misc_RNA (1)...(19): siRNA sense strand
gguucuggcugucccugaa

SEQ ID NO: 23592 - RNA, 19 nt, Homo sapiens
  misc_RNA (1)...(19): siRNA sense strand
uaagcuggugccuuucaua

SEQ ID NO: 23593 - RNA, 19 nt, Homo sapiens
  misc_RNA (1)...(19): siRNA sense strand
gguauuggacuauauuggu

SEQ ID NO: 23594 - RNA, 19 nt, Homo sapiens
  misc_RNA (1)...(19): siRNA sense strand
gacagggccacuccgcuuu

SEQ ID NO: 23595 - RNA, 19 nt, Homo sapiens
  misc_RNA (1)...(19): siRNA sense strand
auacacuaaugaccuguga

SEQ ID NO: 23596 - RNA, 19 nt, Homo sapiens
  misc_RNA (1)...(19): siRNA sense strand
uggaguagaauuaaaggaa

SEQ ID NO: 23597 - RNA, 19 nt, Homo sapiens
  misc_RNA (1)...(19): siRNA sense strand
aaacggucccaauaucuug

SEQ ID NO: 23598 - RNA, 19 nt, Homo sapiens
  misc_RNA (1)...(19): siRNA sense strand
cuauauugguaucaacaug

SEQ ID NO: 23599 - RNA, 19 nt, Homo sapiens
  misc_RNA (1)...(19): siRNA sense strand
ucuaugugcucugaguauu

SEQ ID NO: 23600 - RNA, 19 nt, Homo sapiens
  misc_RNA (1)...(19): siRNA sense strand
caugcagauugcuuuaaau

SEQ ID NO: 23601 - RNA, 19 nt, Homo sapiens
  misc_RNA (1)...(19): siRNA sense strand
cgaaacggucccaauaucu

SEQ ID NO: 23602 - RNA, 19 nt, Homo sapiens
  misc_RNA (1)...(19): siRNA sense strand
guaagcuggugccuuucau

SEQ ID NO: 23603 - RNA, 19 nt, Homo sapiens
  misc_RNA (1)...(19): siRNA sense strand
ugggagaccugcugcacau

SEQ ID NO: 23604 - RNA, 19 nt, Homo sapiens
  misc_RNA (1)...(19): siRNA sense strand
gacagcaguagaaauuguu

SEQ ID NO: 23605 - RNA, 19 nt, Homo sapiens
  misc_RNA (1)...(19): siRNA sense strand
uuaacccaauugcucugua

SEQ ID NO: 23606 - RNA, 19 nt, Homo sapiens
  misc_RNA (1)...(19): siRNA sense strand
cagaaugaucccaauagau

SEQ ID NO: 23607 - RNA, 19 nt, Homo sapiens
  misc_RNA (1)...(19): siRNA sense strand
cauuggccaucacugcauu

SEQ ID NO: 23608 - RNA, 19 nt, Homo sapiens
  misc_RNA (1)...(19): siRNA sense strand
ggaaguuaucugcgaaucu

SEQ ID NO: 23609 - RNA, 19 nt, Homo sapiens
  misc_RNA (1)...(19): siRNA sense strand
gccauagguuuugauauaa

SEQ ID NO: 23610 - RNA, 19 nt, Homo sapiens
  misc_RNA (1)...(19): siRNA sense strand
gaagccauagguuuugaua

SEQ ID NO: 23611 - RNA, 19 nt, Homo sapiens
  misc_RNA (1)...(19): siRNA sense strand
cugcggaggugccuaaagg

SEQ ID NO: 23612 - RNA, 19 nt, Homo sapiens
  misc_RNA (1)...(19): siRNA sense strand
gggaacuccacacuucuga

SEQ ID NO: 23613 - RNA, 19 nt, Homo sapiens
  misc_RNA (1)...(19): siRNA sense strand
auaaugacgccacccacua

SEQ ID NO: 23614 - RNA, 19 nt, Homo sapiens
  misc_RNA (1)...(19): siRNA sense strand
gaacaagugcaugcgaaac

SEQ ID NO: 23615 - RNA, 19 nt, Homo sapiens
  misc_RNA (1)...(19): siRNA sense strand
gccaaggacccaucgagau

SEQ ID NO: 23616 - RNA, 19 nt, Homo sapiens
  misc_RNA (1)...(19): siRNA sense strand
ggcagaggacuggccauuu

SEQ ID NO: 23617 - RNA, 19 nt, Homo sapiens
  misc_RNA (1)...(19): siRNA sense strand
guaucaacauggcuucacu

SEQ ID NO: 23618 - RNA, 19 nt, Homo sapiens
  misc_RNA (1)...(19): siRNA sense strand
ugcuuuaaaugaucaccua

SEQ ID NO: 23619 - RNA, 19 nt, Homo sapiens
  misc_RNA (1)...(19): siRNA sense strand
cuacaaaggaaguuaucug

SEQ ID NO: 23620 - RNA, 19 nt, Homo sapiens
  misc_RNA (1)...(19): siRNA sense strand
uugcaaaccgcagagauaa

SEQ ID NO: 23621 - RNA, 19 nt, Homo sapiens
  misc_RNA (1)...(19): siRNA sense strand
augcgaaacggucccaaua

SEQ ID NO: 23622 - RNA, 19 nt, Homo sapiens
  misc_RNA (1)...(19): siRNA sense strand
gagaucaaggagacuuuca

SEQ ID NO: 23623 - RNA, 19 nt, Homo sapiens
  misc_RNA (1)...(19): siRNA sense strand
auggacagcaguagaaauu

SEQ ID NO: 23624 - RNA, 19 nt, Homo sapiens
  misc_RNA (1)...(19): siRNA sense strand
uuugcaaaccgcagagaua

SEQ ID NO: 23625 - RNA, 19 nt, Homo sapiens
  misc_RNA (1)...(19): siRNA sense strand
auucugaagcucacucuuu

SEQ ID NO: 23626 - RNA, 19 nt, Homo sapiens
  misc_RNA (1)...(19): siRNA sense strand
caaaccgcagagauaauga

SEQ ID NO: 23627 - RNA, 19 nt, Homo sapiens
  misc_RNA (1)...(19): siRNA sense strand
gguggucucugugguucug

SEQ ID NO: 23628 - RNA, 19 nt, Homo sapiens
  misc_RNA (1)...(19): siRNA sense strand
guugguauuggacuauauu

SEQ ID NO: 23629 - RNA, 19 nt, Homo sapiens
  misc_RNA (1)...(19): siRNA sense strand
uggcaugcagauugcuuua

SEQ ID NO: 23630 - RNA, 19 nt, Homo sapiens
  misc_RNA (1)...(19): siRNA sense strand
ucugagaauuaucuacaag

SEQ ID NO: 23631 - RNA, 19 nt, Homo sapiens
  misc_RNA (1)...(19): siRNA sense strand
caaggacccaucgagauca

SEQ ID NO: 23632 - RNA, 19 nt, Homo sapiens
  misc_RNA (1)...(19): siRNA sense strand
gagaauuaucuacaagaac

SEQ ID NO: 23633 - RNA, 19 nt, Homo sapiens
  misc_RNA (1)...(19): siRNA sense strand
cugagucuaugugcucuga

SEQ ID NO: 23634 - RNA, 19 nt, Homo sapiens
  misc_RNA (1)...(19): siRNA sense strand
agaacaagugcaugcgaaa

SEQ ID NO: 23635 - RNA, 19 nt, Homo sapiens
  misc_RNA (1)...(19): siRNA sense strand
gagacuuucaaauacauca

SEQ ID NO: 23636 - RNA, 19 nt, Homo sapiens
  misc_RNA (1)...(19): siRNA sense strand
gcagaggacuggccauuug

SEQ ID NO: 23637 - RNA, 19 nt, Homo sapiens
  misc_RNA (1)...(19): siRNA sense strand
ucaaggagacuuucaaaua

SEQ ID NO: 23638 - RNA, 19 nt, Homo sapiens
  misc_RNA (1)...(19): siRNA sense strand
ucacugaauuccugcauua

SEQ ID NO: 23639 - RNA, 19 nt, Homo sapiens
  misc_RNA (1)...(19): siRNA sense strand
gcagauugcuuuaaaugau

SEQ ID NO: 23640 - RNA, 19 nt, Homo sapiens
  misc_RNA (1)...(19): siRNA sense strand
gaagcucacucuuuauaau

SEQ ID NO: 23641 - RNA, 19 nt, Homo sapiens
  misc_RNA (1)...(19): siRNA sense strand
gcaugcagauugcuuuaaa

SEQ ID NO: 23642 - RNA, 19 nt, Homo sapiens
  misc_RNA (1)...(19): siRNA sense strand
caaggagacuuucaaauac

SEQ ID NO: 23643 - RNA, 19 nt, Homo sapiens
  misc_RNA (1)...(19): siRNA sense strand
ggacagcaguagaaauugu

SEQ ID NO: 23644 - RNA, 19 nt, Homo sapiens
  misc_RNA (1)...(19): siRNA sense strand
ggaaauaagcuaguaaugu

SEQ ID NO: 23645 - RNA, 19 nt, Homo sapiens
  misc_RNA (1)...(19): siRNA sense strand
gaaguuaucugcgaaucug

SEQ ID NO: 23646 - RNA, 19 nt, Homo sapiens
  misc_RNA (1)...(19): siRNA sense strand
guauuggacuauauuggua

SEQ ID NO: 23647 - RNA, 19 nt, Homo sapiens
  misc_RNA (1)...(19): siRNA sense strand
ccaacaauguggccagaaa

SEQ ID NO: 23648 - RNA, 19 nt, Homo sapiens
  misc_RNA (1)...(19): siRNA sense strand
ugaaugugaugguacagua

SEQ ID NO: 23649 - RNA, 19 nt, Homo sapiens
  misc_RNA (1)...(19): siRNA sense strand
ggaguagaauuaaaggaau

SEQ ID NO: 23650 - RNA, 19 nt, Homo sapiens
  misc_RNA (1)...(19): siRNA sense strand
cuaaugaccugugaaaugu

SEQ ID NO: 23651 - RNA, 19 nt, Homo sapiens
  misc_RNA (1)...(19): siRNA sense strand
uguguaagcuggugccuuu

SEQ ID NO: 23652 - RNA, 19 nt, Homo sapiens
  misc_RNA (1)...(19): siRNA sense strand
ccagaaagaaagagcaaua

SEQ ID NO: 23653 - RNA, 19 nt, Homo sapiens
  misc_RNA (1)...(19): siRNA sense strand
ggccacauguuggaaauaa

SEQ ID NO: 23654 - RNA, 19 nt, Homo sapiens
  misc_RNA (1)...(19): siRNA sense strand
cccaauagaugugaacuuu

SEQ ID NO: 23655 - RNA, 19 nt, Homo sapiens
  misc_RNA (1)...(19): siRNA sense strand
gcgaaacggucccaauauc

SEQ ID NO: 23656 - RNA, 19 nt, Homo sapiens
  misc_RNA (1)...(19): siRNA sense strand
ugugaaauguugagaaaga

SEQ ID NO: 23657 - RNA, 19 nt, Homo sapiens
  misc_RNA (1)...(19): siRNA sense strand
gaaacggucccaauaucuu

SEQ ID NO: 23658 - RNA, 19 nt, Homo sapiens
  misc_RNA (1)...(19): siRNA sense strand
gaucaaggagacuuucaaa

SEQ ID NO: 23659 - RNA, 19 nt, Homo sapiens
  misc_RNA (1)...(19): siRNA sense strand
gaacuccacacuucugaga

SEQ ID NO: 23660 - RNA, 19 nt, Homo sapiens
  misc_RNA (1)...(19): siRNA sense strand
gcaaaccgcagagauaaug

SEQ ID NO: 23661 - RNA, 19 nt, Homo sapiens
  misc_RNA (1)...(19): siRNA sense strand
ccugugaaauguugagaaa

SEQ ID NO: 23662 - RNA, 19 nt, Homo sapiens
  misc_RNA (1)...(19): siRNA sense strand
ucagaaugaucccaauaga

SEQ ID NO: 23663 - RNA, 19 nt, Homo sapiens
  misc_RNA (1)...(19): siRNA sense strand
uaaaugaucaccuaaagca

SEQ ID NO: 23664 - RNA, 19 nt, Homo sapiens
  misc_RNA (1)...(19): siRNA sense strand
agaaugaucccaauagaug

SEQ ID NO: 23665 - RNA, 19 nt, Homo sapiens
  misc_RNA (1)...(19): siRNA sense strand
caauagaugugaacuuuug

SEQ ID NO: 23666 - RNA, 19 nt, Homo sapiens
  misc_RNA (1)...(19): siRNA sense strand
gcuguugcuucuuggagua

SEQ ID NO: 23667 - RNA, 19 nt, Homo sapiens
  misc_RNA (1)...(19): siRNA sense strand
caauguggccagaaagaaa

SEQ ID NO: 23668 - RNA, 19 nt, Homo sapiens
  misc_RNA (1)...(19): siRNA sense strand
uaacccaauugcucuguau

SEQ ID NO: 23669 - RNA, 19 nt, Homo sapiens
  misc_RNA (1)...(19): siRNA sense strand
cgaaucugcuugcuucauc

SEQ ID NO: 23670 - RNA, 19 nt, Homo sapiens
  misc_RNA (1)...(19): siRNA sense strand
caauugcucuguauuuggu

SEQ ID NO: 23671 - RNA, 19 nt, Homo sapiens
  misc_RNA (1)...(19): siRNA sense strand
ggacuacaaaggaaguuau

SEQ ID NO: 23672 - RNA, 19 nt, Homo sapiens
  misc_RNA (1)...(19): siRNA sense strand
gaaugugaugguacaguaa

SEQ ID NO: 23673 - RNA, 19 nt, Homo sapiens
  misc_RNA (1)...(19): siRNA sense strand
uucugaagcucacucuuua

SEQ ID NO: 23674 - RNA, 19 nt, Homo sapiens
  misc_RNA (1)...(19): siRNA sense strand
agacagcuuucaugcaguu

SEQ ID NO: 23675 - RNA, 19 nt, Homo sapiens
  misc_RNA (1)...(19): siRNA sense strand
uaaugacgccacccacuaa

SEQ ID NO: 23676 - RNA, 19 nt, Homo sapiens
  misc_RNA (1)...(19): siRNA sense strand
gaugugaacuuuugagcuu

SEQ ID NO: 23677 - RNA, 19 nt, Homo sapiens
  misc_RNA (1)...(19): siRNA sense strand
uaugugcucugaguauuga

SEQ ID NO: 23678 - RNA, 19 nt, Homo sapiens
  misc_RNA (1)...(19): siRNA sense strand
cagaaagaaagagcaauaa

SEQ ID NO: 23679 - RNA, 19 nt, Homo sapiens
  misc_RNA (1)...(19): siRNA sense strand
gugaaauguugagaaagaa

SEQ ID NO: 23680 - RNA, 19 nt, Homo sapiens
  misc_RNA (1)...(19): siRNA sense strand
cugaagcucacucuuuaua

SEQ ID NO: 23681 - RNA, 19 nt, Homo sapiens
  misc_RNA (1)...(19): siRNA sense strand
cagauugcuuuaaaugauc

SEQ ID NO: 23682 - RNA, 19 nt, Homo sapiens
  misc_RNA (1)...(19): siRNA sense strand
cccaauugcucuguauuug

SEQ ID NO: 23683 - RNA, 19 nt, Homo sapiens
  misc_RNA (1)...(19): siRNA sense strand
ggacuauauugguaucaac

SEQ ID NO: 23684 - RNA, 19 nt, Homo sapiens
  misc_RNA (1)...(19): siRNA sense strand
acacuaaugaccugugaaa

SEQ ID NO: 23685 - RNA, 19 nt, Homo sapiens
  misc_RNA (1)...(19): siRNA sense strand
ugauuuggguggucucugu

SEQ ID NO: 23686 - RNA, 19 nt, Homo sapiens
  misc_RNA (1)...(19): siRNA sense strand
ugaagcucacucuuuauaa

SEQ ID NO: 23687 - RNA, 19 nt, Homo sapiens
  misc_RNA (1)...(19): siRNA sense strand
acuaaugaccugugaaaug

SEQ ID NO: 23688 - RNA, 19 nt, Homo sapiens
  misc_RNA (1)...(19): siRNA sense strand
agccauagguuuugauaua

SEQ ID NO: 23689 - RNA, 19 nt, Homo sapiens
  misc_RNA (1)...(19): siRNA sense strand
gcuggugccuuucauacag

SEQ ID NO: 23690 - RNA, 19 nt, Homo sapiens
  misc_RNA (1)...(19): siRNA sense strand
aaugaccugugaaauguug

SEQ ID NO: 23691 - RNA, 19 nt, Homo sapiens
  misc_RNA (1)...(19): siRNA sense strand
ccaaggacccaucgagauc

SEQ ID NO: 23692 - RNA, 19 nt, Homo sapiens
  misc_RNA (1)...(19): siRNA sense strand
ugagcuuucuguugguauu

SEQ ID NO: 23693 - RNA, 19 nt, Homo sapiens
  misc_RNA (1)...(19): siRNA sense strand
ucagaagacagcuuucaug

SEQ ID NO: 23694 - RNA, 19 nt, Homo sapiens
  misc_RNA (1)...(19): siRNA sense strand
aaggagacuuucaaauaca

SEQ ID NO: 23695 - RNA, 19 nt, Homo sapiens
  misc_RNA (1)...(19): siRNA sense strand
gaaugaucccaauagaugu

SEQ ID NO: 23696 - RNA, 19 nt, Homo sapiens
  misc_RNA (1)...(19): siRNA sense strand
gagucuaugugcucugagu

SEQ ID NO: 23697 - RNA, 19 nt, Homo sapiens
  misc_RNA (1)...(19): siRNA sense strand
cagcuuucaugcaguuuua

SEQ ID NO: 23698 - RNA, 19 nt, Homo sapiens
  misc_RNA (1)...(19): siRNA sense strand
gguucuggcugucccugaa

SEQ ID NO: 23699 - RNA, 19 nt, Homo sapiens
  misc_RNA (1)...(19): siRNA sense strand
uaagcuggugccuuucaua

SEQ ID NO: 23700 - RNA, 19 nt, Homo sapiens
  misc_RNA (1)...(19): siRNA sense strand
gacagggccacuccgcuuu

SEQ ID NO: 23701 - RNA, 19 nt, Homo sapiens
  misc_RNA (1)...(19): siRNA sense strand
gguauuggacuauauuggu

SEQ ID NO: 23702 - RNA, 19 nt, Homo sapiens
  misc_RNA (1)...(19): siRNA sense strand
auacacuaaugaccuguga

SEQ ID NO: 23703 - RNA, 19 nt, Homo sapiens
  misc_RNA (1)...(19): siRNA sense strand
uggaguagaauuaaaggaa

SEQ ID NO: 23704 - RNA, 19 nt, Homo sapiens
  misc_RNA (1)...(19): siRNA sense strand
aaacggucccaauaucuug

SEQ ID NO: 23705 - RNA, 19 nt, Homo sapiens
  misc_RNA (1)...(19): siRNA sense strand
cuauauugguaucaacaug

SEQ ID NO: 23706 - RNA, 19 nt, Homo sapiens
  misc_RNA (1)...(19): siRNA sense strand
ucuaugugcucugaguauu

SEQ ID NO: 23707 - RNA, 19 nt, Homo sapiens
  misc_RNA (1)...(19): siRNA sense strand
caugcagauugcuuuaaau

SEQ ID NO: 23708 - RNA, 19 nt, Homo sapiens
  misc_RNA (1)...(19): siRNA sense strand
cgaaacggucccaauaucu

SEQ ID NO: 23709 - RNA, 19 nt, Homo sapiens
  misc_RNA (1)...(19): siRNA sense strand
guaagcuggugccuuucau

SEQ ID NO: 23710 - RNA, 19 nt, Homo sapiens
  misc_RNA (1)...(19): siRNA sense strand
ugggagaccugcugcacau

SEQ ID NO: 23711 - RNA, 19 nt, Homo sapiens
  misc_RNA (1)...(19): siRNA sense strand
gacagcaguagaaauuguu

SEQ ID NO: 23712 - RNA, 19 nt, Homo sapiens
  misc_RNA (1)...(19): siRNA sense strand
uuaacccaauugcucugua

SEQ ID NO: 23713 - RNA, 19 nt, Homo sapiens
  misc_RNA (1)...(19): siRNA sense strand
cagaaugaucccaauagau

SEQ ID NO: 23714 - RNA, 19 nt, Homo sapiens
  misc_RNA (1)...(19): siRNA sense strand
cauuggccaucacugcauu

SEQ ID NO: 23715 - RNA, 19 nt, Homo sapiens
  misc_RNA (1)...(19): siRNA sense strand
ggaaguuaucugcgaaucu

SEQ ID NO: 23716 - RNA, 19 nt, Homo sapiens
  misc_RNA (1)...(19): siRNA sense strand
gccauagguuuugauauaa

SEQ ID NO: 23717 - RNA, 19 nt, Homo sapiens
  misc_RNA (1)...(19): siRNA sense strand
auaaugacgccacccacua

SEQ ID NO: 23718 - RNA, 19 nt, Homo sapiens
  misc_RNA (1)...(19): siRNA sense strand
cugcggaggugccuaaagg

SEQ ID NO: 23719 - RNA, 19 nt, Homo sapiens
  misc_RNA (1)...(19): siRNA sense strand
gccaaggacccaucgagau

SEQ ID NO: 23720 - RNA, 19 nt, Homo sapiens
  misc_RNA (1)...(19): siRNA sense strand
gaacaagugcaugcgaaac

SEQ ID NO: 23721 - RNA, 19 nt, Homo sapiens
  misc_RNA (1)...(19): siRNA sense strand
gaagccauagguuuugaua

SEQ ID NO: 23722 - RNA, 19 nt, Homo sapiens
  misc_RNA (1)...(19): siRNA sense strand
gggaacuccacacuucuga

SEQ ID NO: 23723 - RNA, 19 nt, Homo sapiens
  misc_RNA (1)...(19): siRNA sense strand
ggcagaggacuggccauuu

SEQ ID NO: 23724 - RNA, 19 nt, Homo sapiens
  misc_RNA (1)...(19): siRNA sense strand
guaauguuguuuucuguca

SEQ ID NO: 23725 - RNA, 19 nt, Homo sapiens
  misc_RNA (1)...(19): siRNA sense strand
guaucaacauggcuucacu

SEQ ID NO: 23726 - RNA, 19 nt, Homo sapiens
  misc_RNA (1)...(19): siRNA sense strand
ugcuuuaaaugaucaccua

SEQ ID NO: 23727 - RNA, 19 nt, Homo sapiens
  misc_RNA (1)...(19): siRNA sense strand
cuacaaaggaaguuaucug

SEQ ID NO: 23728 - RNA, 19 nt, Homo sapiens
  misc_RNA (1)...(19): siRNA sense strand
uugcaaaccgcagagauaa

SEQ ID NO: 23729 - RNA, 19 nt, Homo sapiens
  misc_RNA (1)...(19): siRNA sense strand
gagaucaaggagacuuuca

SEQ ID NO: 23730 - RNA, 19 nt, Homo sapiens
  misc_RNA (1)...(19): siRNA sense strand
uauugaaugugaugguaca

SEQ ID NO: 23731 - RNA, 19 nt, Homo sapiens
  misc_RNA (1)...(19): siRNA sense strand
uguuggaaauaagcuagua

SEQ ID NO: 23732 - RNA, 19 nt, Homo sapiens
  misc_RNA (1)...(19): siRNA sense strand
augcgaaacggucccaaua

SEQ ID NO: 23733 - RNA, 19 nt, Homo sapiens
  misc_RNA (1)...(19): siRNA sense strand
auucugaagcucacucuuu

SEQ ID NO: 23734 - RNA, 19 nt, Homo sapiens
  misc_RNA (1)...(19): siRNA sense strand
caaaccgcagagauaauga

SEQ ID NO: 23735 - RNA, 19 nt, Homo sapiens
  misc_RNA (1)...(19): siRNA sense strand
uuugcaaaccgcagagaua

SEQ ID NO: 23736 - RNA, 19 nt, Homo sapiens
  misc_RNA (1)...(19): siRNA sense strand
ggaaagcccugacggacuu

SEQ ID NO: 23737 - RNA, 19 nt, Homo sapiens
  misc_RNA (1)...(19): siRNA sense strand
ugaaugacguccuuccuaa

SEQ ID NO: 23738 - RNA, 19 nt, Homo sapiens
  misc_RNA (1)...(19): siRNA sense strand
ggacuucauucaagaggaa

SEQ ID NO: 23739 - RNA, 19 nt, Homo sapiens
  misc_RNA (1)...(19): siRNA sense strand
gagauggcgucuaccagaa

SEQ ID NO: 23740 - RNA, 19 nt, Homo sapiens
  misc_RNA (1)...(19): siRNA sense strand
ugacggacuucauucaaga

SEQ ID NO: 23741 - RNA, 19 nt, Homo sapiens
  misc_RNA (1)...(19): siRNA sense strand
uguacgagcucaucgagaa

SEQ ID NO: 23742 - RNA, 19 nt, Homo sapiens
  misc_RNA (1)...(19): siRNA sense strand
gagcuacacucccacuucu

SEQ ID NO: 23743 - RNA, 19 nt, Homo sapiens
  misc_RNA (1)...(19): siRNA sense strand
caagucggcuguggagaug

SEQ ID NO: 23744 - RNA, 19 nt, Homo sapiens
  misc_RNA (1)...(19): siRNA sense strand
gggacugggugcauaucuu

SEQ ID NO: 23745 - RNA, 19 nt, Homo sapiens
  misc_RNA (1)...(19): siRNA sense strand
ggacugggugcauaucuuc

SEQ ID NO: 23746 - RNA, 19 nt, Homo sapiens
  misc_RNA (1)...(19): siRNA sense strand
cggaaugaaugacguccuu

SEQ ID NO: 23747 - RNA, 19 nt, Homo sapiens
  misc_RNA (1)...(19): siRNA sense strand
gaggaauuccagcaucuga

SEQ ID NO: 23748 - RNA, 19 nt, Homo sapiens
  misc_RNA (1)...(19): siRNA sense strand
ucuggaaccugaaguugau

SEQ ID NO: 23749 - RNA, 19 nt, Homo sapiens
  misc_RNA (1)...(19): siRNA sense strand
uaacaguccgcccuacuuc

SEQ ID NO: 23750 - RNA, 19 nt, Homo sapiens
  misc_RNA (1)...(19): siRNA sense strand
ggaauuccagcaucugaag

SEQ ID NO: 23751 - RNA, 19 nt, Homo sapiens
  misc_RNA (1)...(19): siRNA sense strand
gcuacacucccacuucuuc

SEQ ID NO: 23752 - RNA, 19 nt, Homo sapiens
  misc_RNA (1)...(19): siRNA sense strand
uccagcaucugaagacuca

SEQ ID NO: 23753 - RNA, 19 nt, Homo sapiens
  misc_RNA (1)...(19): siRNA sense strand
ugacguccuuccuaacagu

SEQ ID NO: 23754 - RNA, 19 nt, Homo sapiens
  misc_RNA (1)...(19): siRNA sense strand
ggaccaaguacaugaacca

SEQ ID NO: 23755 - RNA, 19 nt, Homo sapiens
  misc_RNA (1)...(19): siRNA sense strand
ucaucaccguguccaauca

SEQ ID NO: 23756 - RNA, 19 nt, Homo sapiens
  misc_RNA (1)...(19): siRNA sense strand
gaauuccagcaucugaaga

SEQ ID NO: 23757 - RNA, 19 nt, Homo sapiens
  misc_RNA (1)...(19): siRNA sense strand
gcgccugauugcugagugu

SEQ ID NO: 23758 - RNA, 19 nt, Homo sapiens
  misc_RNA (1)...(19): siRNA sense strand
aagaggaauuccagcaucu

SEQ ID NO: 23759 - RNA, 19 nt, Homo sapiens
  misc_RNA (1)...(19): siRNA sense strand
gggauggacuucauuuugg

SEQ ID NO: 23760 - RNA, 19 nt, Homo sapiens
  misc_RNA (1)...(19): siRNA sense strand
ccuguggcaugucggaaug

SEQ ID NO: 23761 - RNA, 19 nt, Homo sapiens
  misc_RNA (1)...(19): siRNA sense strand
uggcaugucggaaugaaug

SEQ ID NO: 23762 - RNA, 19 nt, Homo sapiens
  misc_RNA (1)...(19): siRNA sense strand
cuaacaguccgcccuacuu

SEQ ID NO: 23763 - RNA, 19 nt, Homo sapiens
  misc_RNA (1)...(19): siRNA sense strand
ggauggacuucauuuugga

SEQ ID NO: 23764 - RNA, 19 nt, Homo sapiens
  misc_RNA (1)...(19): siRNA sense strand
caucuggaaccugaaguug

SEQ ID NO: 23765 - RNA, 19 nt, Homo sapiens
  misc_RNA (1)...(19): siRNA sense strand
acaagucggcuguggagau

SEQ ID NO: 23766 - RNA, 19 nt, Homo sapiens
  misc_RNA (1)...(19): siRNA sense strand
ucagugcccugccuguacu

SEQ ID NO: 23767 - RNA, 19 nt, Homo sapiens
  misc_RNA (1)...(19): siRNA sense strand
ggaaagcccugacggacuu

SEQ ID NO: 23768 - RNA, 19 nt, Homo sapiens
  misc_RNA (1)...(19): siRNA sense strand
ugaaugacguccuuccuaa

SEQ ID NO: 23769 - RNA, 19 nt, Homo sapiens
  misc_RNA (1)...(19): siRNA sense strand
ggacuucauucaagaggaa

SEQ ID NO: 23770 - RNA, 19 nt, Homo sapiens
  misc_RNA (1)...(19): siRNA sense strand
gagauggcgucuaccagaa

SEQ ID NO: 23771 - RNA, 19 nt, Homo sapiens
  misc_RNA (1)...(19): siRNA sense strand
ugacggacuucauucaaga

SEQ ID NO: 23772 - RNA, 19 nt, Homo sapiens
  misc_RNA (1)...(19): siRNA sense strand
uguacgagcucaucgagaa

SEQ ID NO: 23773 - RNA, 19 nt, Homo sapiens
  misc_RNA (1)...(19): siRNA sense strand
gagcuacacucccacuucu

SEQ ID NO: 23774 - RNA, 19 nt, Homo sapiens
  misc_RNA (1)...(19): siRNA sense strand
caagucggcuguggagaug

SEQ ID NO: 23775 - RNA, 19 nt, Homo sapiens
  misc_RNA (1)...(19): siRNA sense strand
gggacugggugcauaucuu

SEQ ID NO: 23776 - RNA, 19 nt, Homo sapiens
  misc_RNA (1)...(19): siRNA sense strand
ggacugggugcauaucuuc

SEQ ID NO: 23777 - RNA, 19 nt, Homo sapiens
  misc_RNA (1)...(19): siRNA sense strand
cggaaugaaugacguccuu

SEQ ID NO: 23778 - RNA, 19 nt, Homo sapiens
  misc_RNA (1)...(19): siRNA sense strand
gaggaauuccagcaucuga

SEQ ID NO: 23779 - RNA, 19 nt, Homo sapiens
  misc_RNA (1)...(19): siRNA sense strand
ucuggaaccugaaguugau

SEQ ID NO: 23780 - RNA, 19 nt, Homo sapiens
  misc_RNA (1)...(19): siRNA sense strand
uaacaguccgcccuacuuc

SEQ ID NO: 23781 - RNA, 19 nt, Homo sapiens
  misc_RNA (1)...(19): siRNA sense strand
ggaauuccagcaucugaag

SEQ ID NO: 23782 - RNA, 19 nt, Homo sapiens
  misc_RNA (1)...(19): siRNA sense strand
gcuacacucccacuucuuc

SEQ ID NO: 23783 - RNA, 19 nt, Homo sapiens
  misc_RNA (1)...(19): siRNA sense strand
uccagcaucugaagacuca

SEQ ID NO: 23784 - RNA, 19 nt, Homo sapiens
  misc_RNA (1)...(19): siRNA sense strand
ugacguccuuccuaacagu

SEQ ID NO: 23785 - RNA, 19 nt, Homo sapiens
  misc_RNA (1)...(19): siRNA sense strand
ggaccaaguacaugaacca

SEQ ID NO: 23786 - RNA, 19 nt, Homo sapiens
  misc_RNA (1)...(19): siRNA sense strand
ucaucaccguguccaauca

SEQ ID NO: 23787 - RNA, 19 nt, Homo sapiens
  misc_RNA (1)...(19): siRNA sense strand
gaauuccagcaucugaaga

SEQ ID NO: 23788 - RNA, 19 nt, Homo sapiens
  misc_RNA (1)...(19): siRNA sense strand
gcgccugauugcugagugu

SEQ ID NO: 23789 - RNA, 19 nt, Homo sapiens
  misc_RNA (1)...(19): siRNA sense strand
aagaggaauuccagcaucu

SEQ ID NO: 23790 - RNA, 19 nt, Homo sapiens
  misc_RNA (1)...(19): siRNA sense strand
gggauggacuucauuuugg

SEQ ID NO: 23791 - RNA, 19 nt, Homo sapiens
  misc_RNA (1)...(19): siRNA sense strand
ccuguggcaugucggaaug

SEQ ID NO: 23792 - RNA, 19 nt, Homo sapiens
  misc_RNA (1)...(19): siRNA sense strand
uggcaugucggaaugaaug

SEQ ID NO: 23793 - RNA, 19 nt, Homo sapiens
  misc_RNA (1)...(19): siRNA sense strand
cuaacaguccgcccuacuu

SEQ ID NO: 23794 - RNA, 19 nt, Homo sapiens
  misc_RNA (1)...(19): siRNA sense strand
ggauggacuucauuuugga

SEQ ID NO: 23795 - RNA, 19 nt, Homo sapiens
  misc_RNA (1)...(19): siRNA sense strand
caucuggaaccugaaguug

SEQ ID NO: 23796 - RNA, 19 nt, Homo sapiens
  misc_RNA (1)...(19): siRNA sense strand
acaagucggcuguggagau

SEQ ID NO: 23797 - RNA, 19 nt, Homo sapiens
  misc_RNA (1)...(19): siRNA sense strand
ucagugcccugccuguacu

SEQ ID NO: 23798 - RNA, 19 nt, Homo sapiens
  misc_RNA (1)...(19): siRNA sense strand
ggaaagcccugacggacuu

SEQ ID NO: 23799 - RNA, 19 nt, Homo sapiens
  misc_RNA (1)...(19): siRNA sense strand
ugaaugacguccuuccuaa

SEQ ID NO: 23800 - RNA, 19 nt, Homo sapiens
  misc_RNA (1)...(19): siRNA sense strand
ggacuucauucaagaggaa

SEQ ID NO: 23801 - RNA, 19 nt, Homo sapiens
  misc_RNA (1)...(19): siRNA sense strand
gagauggcgucuaccagaa

SEQ ID NO: 23802 - RNA, 19 nt, Homo sapiens
  misc_RNA (1)...(19): siRNA sense strand
ugacggacuucauucaaga

SEQ ID NO: 23803 - RNA, 19 nt, Homo sapiens
  misc_RNA (1)...(19): siRNA sense strand
uguacgagcucaucgagaa

SEQ ID NO: 23804 - RNA, 19 nt, Homo sapiens
  misc_RNA (1)...(19): siRNA sense strand
gagcuacacucccacuucu

SEQ ID NO: 23805 - RNA, 19 nt, Homo sapiens
  misc_RNA (1)...(19): siRNA sense strand
caagucggcuguggagaug

SEQ ID NO: 23806 - RNA, 19 nt, Homo sapiens
  misc_RNA (1)...(19): siRNA sense strand
gggacugggugcauaucuu

SEQ ID NO: 23807 - RNA, 19 nt, Homo sapiens
  misc_RNA (1)...(19): siRNA sense strand
ggacugggugcauaucuuc

SEQ ID NO: 23808 - RNA, 19 nt, Homo sapiens
  misc_RNA (1)...(19): siRNA sense strand
cggaaugaaugacguccuu

SEQ ID NO: 23809 - RNA, 19 nt, Homo sapiens
  misc_RNA (1)...(19): siRNA sense strand
gaggaauuccagcaucuga

SEQ ID NO: 23810 - RNA, 19 nt, Homo sapiens
  misc_RNA (1)...(19): siRNA sense strand
ucuggaaccugaaguugau

SEQ ID NO: 23811 - RNA, 19 nt, Homo sapiens
  misc_RNA (1)...(19): siRNA sense strand
uaacaguccgcccuacuuc

SEQ ID NO: 23812 - RNA, 19 nt, Homo sapiens
  misc_RNA (1)...(19): siRNA sense strand
ggaauuccagcaucugaag

SEQ ID NO: 23813 - RNA, 19 nt, Homo sapiens
  misc_RNA (1)...(19): siRNA sense strand
gcuacacucccacuucuuc

SEQ ID NO: 23814 - RNA, 19 nt, Homo sapiens
  misc_RNA (1)...(19): siRNA sense strand
uccagcaucugaagacuca

SEQ ID NO: 23815 - RNA, 19 nt, Homo sapiens
  misc_RNA (1)...(19): siRNA sense strand
ugacguccuuccuaacagu

SEQ ID NO: 23816 - RNA, 19 nt, Homo sapiens
  misc_RNA (1)...(19): siRNA sense strand
ggaccaaguacaugaacca

SEQ ID NO: 23817 - RNA, 19 nt, Homo sapiens
  misc_RNA (1)...(19): siRNA sense strand
ucaucaccguguccaauca

SEQ ID NO: 23818 - RNA, 19 nt, Homo sapiens
  misc_RNA (1)...(19): siRNA sense strand
gaauuccagcaucugaaga

SEQ ID NO: 23819 - RNA, 19 nt, Homo sapiens
  misc_RNA (1)...(19): siRNA sense strand
gcgccugauugcugagugu

SEQ ID NO: 23820 - RNA, 19 nt, Homo sapiens
  misc_RNA (1)...(19): siRNA sense strand
aagaggaauuccagcaucu

SEQ ID NO: 23821 - RNA, 19 nt, Homo sapiens
  misc_RNA (1)...(19): siRNA sense strand
gggauggacuucauuuugg

SEQ ID NO: 23822 - RNA, 19 nt, Homo sapiens
  misc_RNA (1)...(19): siRNA sense strand
ccuguggcaugucggaaug

SEQ ID NO: 23823 - RNA, 19 nt, Homo sapiens
  misc_RNA (1)...(19): siRNA sense strand
uggcaugucggaaugaaug

SEQ ID NO: 23824 - RNA, 19 nt, Homo sapiens
  misc_RNA (1)...(19): siRNA sense strand
cuaacaguccgcccuacuu

SEQ ID NO: 23825 - RNA, 19 nt, Homo sapiens
  misc_RNA (1)...(19): siRNA sense strand
ggauggacuucauuuugga

SEQ ID NO: 23826 - RNA, 19 nt, Homo sapiens
  misc_RNA (1)...(19): siRNA sense strand
caucuggaaccugaaguug

SEQ ID NO: 23827 - RNA, 19 nt, Homo sapiens
  misc_RNA (1)...(19): siRNA sense strand
acaagucggcuguggagau

SEQ ID NO: 23828 - RNA, 19 nt, Homo sapiens
  misc_RNA (1)...(19): siRNA sense strand
ucagugcccugccuguacu

SEQ ID NO: 23829 - RNA, 19 nt, Homo sapiens
  misc_RNA (1)...(19): siRNA sense strand
ggaaagcccugacggacuu

SEQ ID NO: 23830 - RNA, 19 nt, Homo sapiens
  misc_RNA (1)...(19): siRNA sense strand
ugaaugacguccuuccuaa

SEQ ID NO: 23831 - RNA, 19 nt, Homo sapiens
  misc_RNA (1)...(19): siRNA sense strand
ggacuucauucaagaggaa

SEQ ID NO: 23832 - RNA, 19 nt, Homo sapiens
  misc_RNA (1)...(19): siRNA sense strand
gagauggcgucuaccagaa

SEQ ID NO: 23833 - RNA, 19 nt, Homo sapiens
  misc_RNA (1)...(19): siRNA sense strand
ugacggacuucauucaaga

SEQ ID NO: 23834 - RNA, 19 nt, Homo sapiens
  misc_RNA (1)...(19): siRNA sense strand
uguacgagcucaucgagaa

SEQ ID NO: 23835 - RNA, 19 nt, Homo sapiens
  misc_RNA (1)...(19): siRNA sense strand
gagcuacacucccacuucu

SEQ ID NO: 23836 - RNA, 19 nt, Homo sapiens
  misc_RNA (1)...(19): siRNA sense strand
caagucggcuguggagaug

SEQ ID NO: 23837 - RNA, 19 nt, Homo sapiens
  misc_RNA (1)...(19): siRNA sense strand
gggacugggugcauaucuu

SEQ ID NO: 23838 - RNA, 19 nt, Homo sapiens
  misc_RNA (1)...(19): siRNA sense strand
ggacugggugcauaucuuc

SEQ ID NO: 23839 - RNA, 19 nt, Homo sapiens
  misc_RNA (1)...(19): siRNA sense strand
cggaaugaaugacguccuu

SEQ ID NO: 23840 - RNA, 19 nt, Homo sapiens
  misc_RNA (1)...(19): siRNA sense strand
gaggaauuccagcaucuga

SEQ ID NO: 23841 - RNA, 19 nt, Homo sapiens
  misc_RNA (1)...(19): siRNA sense strand
ucuggaaccugaaguugau

SEQ ID NO: 23842 - RNA, 19 nt, Homo sapiens
  misc_RNA (1)...(19): siRNA sense strand
uaacaguccgcccuacuuc

SEQ ID NO: 23843 - RNA, 19 nt, Homo sapiens
  misc_RNA (1)...(19): siRNA sense strand
ggaauuccagcaucugaag

SEQ ID NO: 23844 - RNA, 19 nt, Homo sapiens
  misc_RNA (1)...(19): siRNA sense strand
gcuacacucccacuucuuc

SEQ ID NO: 23845 - RNA, 19 nt, Homo sapiens
  misc_RNA (1)...(19): siRNA sense strand
uccagcaucugaagacuca

SEQ ID NO: 23846 - RNA, 19 nt, Homo sapiens
  misc_RNA (1)...(19): siRNA sense strand
ugacguccuuccuaacagu

SEQ ID NO: 23847 - RNA, 19 nt, Homo sapiens
  misc_RNA (1)...(19): siRNA sense strand
ggaccaaguacaugaacca

SEQ ID NO: 23848 - RNA, 19 nt, Homo sapiens
  misc_RNA (1)...(19): siRNA sense strand
ucaucaccguguccaauca

SEQ ID NO: 23849 - RNA, 19 nt, Homo sapiens
  misc_RNA (1)...(19): siRNA sense strand
gaauuccagcaucugaaga

SEQ ID NO: 23850 - RNA, 19 nt, Homo sapiens
  misc_RNA (1)...(19): siRNA sense strand
gcgccugauugcugagugu

SEQ ID NO: 23851 - RNA, 19 nt, Homo sapiens
  misc_RNA (1)...(19): siRNA sense strand
aagaggaauuccagcaucu

SEQ ID NO: 23852 - RNA, 19 nt, Homo sapiens
  misc_RNA (1)...(19): siRNA sense strand
gggauggacuucauuuugg

SEQ ID NO: 23853 - RNA, 19 nt, Homo sapiens
  misc_RNA (1)...(19): siRNA sense strand
ccuguggcaugucggaaug

SEQ ID NO: 23854 - RNA, 19 nt, Homo sapiens
  misc_RNA (1)...(19): siRNA sense strand
uggcaugucggaaugaaug

SEQ ID NO: 23855 - RNA, 19 nt, Homo sapiens
  misc_RNA (1)...(19): siRNA sense strand
cuaacaguccgcccuacuu

SEQ ID NO: 23856 - RNA, 19 nt, Homo sapiens
  misc_RNA (1)...(19): siRNA sense strand
ggauggacuucauuuugga

SEQ ID NO: 23857 - RNA, 19 nt, Homo sapiens
  misc_RNA (1)...(19): siRNA sense strand
caucuggaaccugaaguug

SEQ ID NO: 23858 - RNA, 19 nt, Homo sapiens
  misc_RNA (1)...(19): siRNA sense strand
acaagucggcuguggagau

SEQ ID NO: 23859 - RNA, 19 nt, Homo sapiens
  misc_RNA (1)...(19): siRNA sense strand
ucagugcccugccuguacu

SEQ ID NO: 23860 - RNA, 19 nt, Homo sapiens
  misc_RNA (1)...(19): siRNA sense strand
uguacgagcucaucgagaa

SEQ ID NO: 23861 - RNA, 19 nt, Homo sapiens
  misc_RNA (1)...(19): siRNA sense strand
ucuggaaccugaaguugau

SEQ ID NO: 23862 - RNA, 19 nt, Homo sapiens
  misc_RNA (1)...(19): siRNA sense strand
ggaccaaguacaugaacca

SEQ ID NO: 23863 - RNA, 19 nt, Homo sapiens
  misc_RNA (1)...(19): siRNA sense strand
ucaucaccguguccaauca

SEQ ID NO: 23864 - RNA, 19 nt, Homo sapiens
  misc_RNA (1)...(19): siRNA sense strand
caucuggaaccugaaguug

SEQ ID NO: 23865 - RNA, 19 nt, Homo sapiens
  misc_RNA (1)...(19): siRNA sense strand
gaaaccagaccuucacuua

SEQ ID NO: 23866 - RNA, 19 nt, Homo sapiens
  misc_RNA (1)...(19): siRNA sense strand
ccagaaggcauaaucaaua

SEQ ID NO: 23867 - RNA, 19 nt, Homo sapiens
  misc_RNA (1)...(19): siRNA sense strand
ccaggucucuucccaauga

SEQ ID NO: 23868 - RNA, 19 nt, Homo sapiens
  misc_RNA (1)...(19): siRNA sense strand
gaaggcauaaucaauauug

SEQ ID NO: 23869 - RNA, 19 nt, Homo sapiens
  misc_RNA (1)...(19): siRNA sense strand
cagaaggcauaaucaauau

SEQ ID NO: 23870 - RNA, 19 nt, Homo sapiens
  misc_RNA (1)...(19): siRNA sense strand
ugacaugacuggagagaag

SEQ ID NO: 23871 - RNA, 19 nt, Homo sapiens
  misc_RNA (1)...(19): siRNA sense strand
ggagauggcaugaucaaca

SEQ ID NO: 23872 - RNA, 19 nt, Homo sapiens
  misc_RNA (1)...(19): siRNA sense strand
gagauggcaugaucaacau

SEQ ID NO: 23873 - RNA, 19 nt, Homo sapiens
  misc_RNA (1)...(19): siRNA sense strand
ccacgucggugaccaucuu

SEQ ID NO: 23874 - RNA, 19 nt, Homo sapiens
  misc_RNA (1)...(19): siRNA sense strand
cagagagaccuacauggua

SEQ ID NO: 23875 - RNA, 19 nt, Homo sapiens
  misc_RNA (1)...(19): siRNA sense strand
ucuacaauccguaacuuua

SEQ ID NO: 23876 - RNA, 19 nt, Homo sapiens
  misc_RNA (1)...(19): siRNA sense strand
ucacuccacucucuacaau

SEQ ID NO: 23877 - RNA, 19 nt, Homo sapiens
  misc_RNA (1)...(19): siRNA sense strand
gcauaagcccuuccagugu

SEQ ID NO: 23878 - RNA, 19 nt, Homo sapiens
  misc_RNA (1)...(19): siRNA sense strand
ggccggagauggcaugauc

SEQ ID NO: 23879 - RNA, 19 nt, Homo sapiens
  misc_RNA (1)...(19): siRNA sense strand
aaccagaccuucacuuaca

SEQ ID NO: 23880 - RNA, 19 nt, Homo sapiens
  misc_RNA (1)...(19): siRNA sense strand
gagagaagaggucguugga

SEQ ID NO: 23881 - RNA, 19 nt, Homo sapiens
  misc_RNA (1)...(19): siRNA sense strand
gugaccaucuuucccaaug

SEQ ID NO: 23882 - RNA, 19 nt, Homo sapiens
  misc_RNA (1)...(19): siRNA sense strand
ggcauaaucaauauuguga

SEQ ID NO: 23883 - RNA, 19 nt, Homo sapiens
  misc_RNA (1)...(19): siRNA sense strand
gaacggaguggccggagau

SEQ ID NO: 23884 - RNA, 19 nt, Homo sapiens
  misc_RNA (1)...(19): siRNA sense strand
caguaacucucagugguuu

SEQ ID NO: 23885 - RNA, 19 nt, Homo sapiens
  misc_RNA (1)...(19): siRNA sense strand
gaaaguuugcccggaguga

SEQ ID NO: 23886 - RNA, 19 nt, Homo sapiens
  misc_RNA (1)...(19): siRNA sense strand
cgccaaggccguagacaaa

SEQ ID NO: 23887 - RNA, 19 nt, Homo sapiens
  misc_RNA (1)...(19): siRNA sense strand
gguacccugugcagcagua

SEQ ID NO: 23888 - RNA, 19 nt, Homo sapiens
  misc_RNA (1)...(19): siRNA sense strand
gaccaccucaccacccaua

SEQ ID NO: 23889 - RNA, 19 nt, Homo sapiens
  misc_RNA (1)...(19): siRNA sense strand
gucguuggaucucccauau

SEQ ID NO: 23890 - RNA, 19 nt, Homo sapiens
  misc_RNA (1)...(19): siRNA sense strand
cuacuguggccgaaaguuu

SEQ ID NO: 23891 - RNA, 19 nt, Homo sapiens
  misc_RNA (1)...(19): siRNA sense strand
ugacuacuguggccgaaag

SEQ ID NO: 23892 - RNA, 19 nt, Homo sapiens
  misc_RNA (1)...(19): siRNA sense strand
ccagagagaccuacauggu

SEQ ID NO: 23893 - RNA, 19 nt, Homo sapiens
  misc_RNA (1)...(19): siRNA sense strand
cagcuuugcucccgucucu

SEQ ID NO: 23894 - RNA, 19 nt, Homo sapiens
  misc_RNA (1)...(19): siRNA sense strand
gauggcaugaucaacauug

SEQ ID NO: 23895 - RNA, 19 nt, Homo sapiens
  misc_RNA (1)...(19): siRNA sense strand
ggaagcgccacaccaagau

SEQ ID NO: 23896 - RNA, 19 nt, Homo sapiens
  misc_RNA (1)...(19): siRNA sense strand
gaauccacacugggcauaa

SEQ ID NO: 23897 - RNA, 19 nt, Homo sapiens
  misc_RNA (1)...(19): siRNA sense strand
aguaacagcagcagucuug

SEQ ID NO: 23898 - RNA, 19 nt, Homo sapiens
  misc_RNA (1)...(19): siRNA sense strand
ggucguuggaucucccaua

SEQ ID NO: 23899 - RNA, 19 nt, Homo sapiens
  misc_RNA (1)...(19): siRNA sense strand
ccaaugaucccagacuauc

SEQ ID NO: 23900 - RNA, 19 nt, Homo sapiens
  misc_RNA (1)...(19): siRNA sense strand
ucccaaugaucccagacua

SEQ ID NO: 23901 - RNA, 19 nt, Homo sapiens
  misc_RNA (1)...(19): siRNA sense strand
ccaguaacucucagugguu

SEQ ID NO: 23902 - RNA, 19 nt, Homo sapiens
  misc_RNA (1)...(19): siRNA sense strand
ugggcaaguucuccauuga

SEQ ID NO: 23903 - RNA, 19 nt, Homo sapiens
  misc_RNA (1)...(19): siRNA sense strand
caccgccuccuccuccuua

SEQ ID NO: 23904 - RNA, 19 nt, Homo sapiens
  misc_RNA (1)...(19): siRNA sense strand
ccauaucccagcagcuuug

SEQ ID NO: 23905 - RNA, 19 nt, Homo sapiens
  misc_RNA (1)...(19): siRNA sense strand
agaggaagcgccacaccaa

SEQ ID NO: 23906 - RNA, 19 nt, Homo sapiens
  misc_RNA (1)...(19): siRNA sense strand
ugacacggcacauccgaau

SEQ ID NO: 23907 - RNA, 19 nt, Homo sapiens
  misc_RNA (1)...(19): siRNA sense strand
ucugaggccucgcaaguac

SEQ ID NO: 23908 - RNA, 19 nt, Homo sapiens
  misc_RNA (1)...(19): siRNA sense strand
gaagaggucguuggaucuc

SEQ ID NO: 23909 - RNA, 19 nt, Homo sapiens
  misc_RNA (1)...(19): siRNA sense strand
gcccuucgccugugacuac

SEQ ID NO: 23910 - RNA, 19 nt, Homo sapiens
  misc_RNA (1)...(19): siRNA sense strand
ggaucugcaugcgcaacuu

SEQ ID NO: 23911 - RNA, 19 nt, Homo sapiens
  misc_RNA (1)...(19): siRNA sense strand
gcucccgucucugcaccua

SEQ ID NO: 23912 - RNA, 19 nt, Homo sapiens
  misc_RNA (1)...(19): siRNA sense strand
cgaauccacacugggcaua

SEQ ID NO: 23913 - RNA, 19 nt, Homo sapiens
  misc_RNA (1)...(19): siRNA sense strand
ccuagaaaccagaccuuca

SEQ ID NO: 23914 - RNA, 19 nt, Homo sapiens
  misc_RNA (1)...(19): siRNA sense strand
gaucugcaugcgcaacuuc

SEQ ID NO: 23915 - RNA, 19 nt, Homo sapiens
  misc_RNA (1)...(19): siRNA sense strand
guagacaaaaucccaguaa

SEQ ID NO: 23916 - RNA, 19 nt, Homo sapiens
  misc_RNA (1)...(19): siRNA sense strand
ucucuacaauccguaacuu

SEQ ID NO: 23917 - RNA, 19 nt, Homo sapiens
  misc_RNA (1)...(19): siRNA sense strand
ccacucacuccacucucua

SEQ ID NO: 23918 - RNA, 19 nt, Homo sapiens
  misc_RNA (1)...(19): siRNA sense strand
gaacugggaggccccuuug

SEQ ID NO: 23919 - RNA, 19 nt, Homo sapiens
  misc_RNA (1)...(19): siRNA sense strand
gccaccaccuccaccucuu

SEQ ID NO: 23920 - RNA, 19 nt, Homo sapiens
  misc_RNA (1)...(19): siRNA sense strand
cccaacagacccagcaaga

SEQ ID NO: 23921 - RNA, 19 nt, Homo sapiens
  misc_RNA (1)...(19): siRNA sense strand
acccaggucucuucccaau

SEQ ID NO: 23922 - RNA, 19 nt, Homo sapiens
  misc_RNA (1)...(19): siRNA sense strand
ucccgucucugcaccuaga

SEQ ID NO: 23923 - RNA, 19 nt, Homo sapiens
  misc_RNA (1)...(19): siRNA sense strand
cccaccaccuccuuccuau

SEQ ID NO: 23924 - RNA, 19 nt, Homo sapiens
  misc_RNA (1)...(19): siRNA sense strand
gaagaggagugcaaggaua

SEQ ID NO: 23925 - RNA, 19 nt, Homo sapiens
  misc_RNA (1)...(19): siRNA sense strand
guaguaggaucaacucgua

SEQ ID NO: 23926 - RNA, 19 nt, Homo sapiens
  misc_RNA (1)...(19): siRNA sense strand
gcacgggccuguaguagga

SEQ ID NO: 23927 - RNA, 19 nt, Homo sapiens
  misc_RNA (1)...(19): siRNA sense strand
gaucaacucguaggcuuua

SEQ ID NO: 23928 - RNA, 19 nt, Homo sapiens
  misc_RNA (1)...(19): siRNA sense strand
uagcuucucugacuugaau

SEQ ID NO: 23929 - RNA, 19 nt, Homo sapiens
  misc_RNA (1)...(19): siRNA sense strand
ggacaacuacgcagaucuu

SEQ ID NO: 23930 - RNA, 19 nt, Homo sapiens
  misc_RNA (1)...(19): siRNA sense strand
gaccuguccuauuauccua

SEQ ID NO: 23931 - RNA, 19 nt, Homo sapiens
  misc_RNA (1)...(19): siRNA sense strand
acaaugacgacuacuauga

SEQ ID NO: 23932 - RNA, 19 nt, Homo sapiens
  misc_RNA (1)...(19): siRNA sense strand
acgcagaucuuucggauac

SEQ ID NO: 23933 - RNA, 19 nt, Homo sapiens
  misc_RNA (1)...(19): siRNA sense strand
gcacuaccgcccuguuuca

SEQ ID NO: 23934 - RNA, 19 nt, Homo sapiens
  misc_RNA (1)...(19): siRNA sense strand
gggaugcagauauguauga

SEQ ID NO: 23935 - RNA, 19 nt, Homo sapiens
  misc_RNA (1)...(19): siRNA sense strand
gaucguccucuucuucauu

SEQ ID NO: 23936 - RNA, 19 nt, Homo sapiens
  misc_RNA (1)...(19): siRNA sense strand
caaugacgacuacuaugaa

SEQ ID NO: 23937 - RNA, 19 nt, Homo sapiens
  misc_RNA (1)...(19): siRNA sense strand
auaccgagcugaccaccuu

SEQ ID NO: 23938 - RNA, 19 nt, Homo sapiens
  misc_RNA (1)...(19): siRNA sense strand
gggcuacaaugacgacuac

SEQ ID NO: 23939 - RNA, 19 nt, Homo sapiens
  misc_RNA (1)...(19): siRNA sense strand
cuacaaugacgacuacuau

SEQ ID NO: 23940 - RNA, 19 nt, Homo sapiens
  misc_RNA (1)...(19): siRNA sense strand
ucuuauagcuucucugacu

SEQ ID NO: 23941 - RNA, 19 nt, Homo sapiens
  misc_RNA (1)...(19): siRNA sense strand
gcuacaaugacgacuacua

SEQ ID NO: 23942 - RNA, 19 nt, Homo sapiens
  misc_RNA (1)...(19): siRNA sense strand
caacuacgcagaucuuucg

SEQ ID NO: 23943 - RNA, 19 nt, Homo sapiens
  misc_RNA (1)...(19): siRNA sense strand
ugacuugaauucgacuaga

SEQ ID NO: 23944 - RNA, 19 nt, Homo sapiens
  misc_RNA (1)...(19): siRNA sense strand
ccaggugcaugaugacgau

SEQ ID NO: 23945 - RNA, 19 nt, Homo sapiens
  misc_RNA (1)...(19): siRNA sense strand
ggaugcagauauguaugau

SEQ ID NO: 23946 - RNA, 19 nt, Homo sapiens
  misc_RNA (1)...(19): siRNA sense strand
ccucuuauagcuucucuga

SEQ ID NO: 23947 - RNA, 19 nt, Homo sapiens
  misc_RNA (1)...(19): siRNA sense strand
gagcaagggcuacaaugac

SEQ ID NO: 23948 - RNA, 19 nt, Homo sapiens
  misc_RNA (1)...(19): siRNA sense strand
ggaucaacucguaggcuuu

SEQ ID NO: 23949 - RNA, 19 nt, Homo sapiens
  misc_RNA (1)...(19): siRNA sense strand
agagcaagggcuacaauga

SEQ ID NO: 23950 - RNA, 19 nt, Homo sapiens
  misc_RNA (1)...(19): siRNA sense strand
caucaucuuccucuucaug

SEQ ID NO: 23951 - RNA, 19 nt, Homo sapiens
  misc_RNA (1)...(19): siRNA sense strand
gacuugaauucgacuagag

SEQ ID NO: 23952 - RNA, 19 nt, Homo sapiens
  misc_RNA (1)...(19): siRNA sense strand
gcuguccgccagucaguga

SEQ ID NO: 23953 - RNA, 19 nt, Homo sapiens
  misc_RNA (1)...(19): siRNA sense strand
ucccagaugcugacgcuuu

SEQ ID NO: 23954 - RNA, 19 nt, Homo sapiens
  misc_RNA (1)...(19): siRNA sense strand
cuucuucauuuaccacuuc

SEQ ID NO: 23955 - RNA, 19 nt, Homo sapiens
  misc_RNA (1)...(19): siRNA sense strand
ggugcaugaugacgaucuu

SEQ ID NO: 23956 - RNA, 19 nt, Homo sapiens
  misc_RNA (1)...(19): siRNA sense strand
gacaacuacgcagaucuuu

SEQ ID NO: 23957 - RNA, 19 nt, Homo sapiens
  misc_RNA (1)...(19): siRNA sense strand
cucaucaucuuccucuuca

SEQ ID NO: 23958 - RNA, 19 nt, Homo sapiens
  misc_RNA (1)...(19): siRNA sense strand
cccagaugcugacgcuuuc

SEQ ID NO: 23959 - RNA, 19 nt, Homo sapiens
  misc_RNA (1)...(19): siRNA sense strand
ugacgacuacuaugaagag

SEQ ID NO: 23960 - RNA, 19 nt, Homo sapiens
  misc_RNA (1)...(19): siRNA sense strand
ccagagcaagggcuacaau

SEQ ID NO: 23961 - RNA, 19 nt, Homo sapiens
  misc_RNA (1)...(19): siRNA sense strand
uauagcuucucugacuuga

SEQ ID NO: 23962 - RNA, 19 nt, Homo sapiens
  misc_RNA (1)...(19): siRNA sense strand
ugaagaggagugcaaggau

SEQ ID NO: 23963 - RNA, 19 nt, Homo sapiens
  misc_RNA (1)...(19): siRNA sense strand
aaugacgacuacuaugaag

SEQ ID NO: 23964 - RNA, 19 nt, Homo sapiens
  misc_RNA (1)...(19): siRNA sense strand
gugacuucauucccagaug

SEQ ID NO: 23965 - RNA, 19 nt, Homo sapiens
  misc_RNA (1)...(19): siRNA sense strand
gacgacuacuaugaagaga

SEQ ID NO: 23966 - RNA, 19 nt, Homo sapiens
  misc_RNA (1)...(19): siRNA sense strand
ccacagagcugccauccuu

SEQ ID NO: 23967 - RNA, 19 nt, Homo sapiens
  misc_RNA (1)...(19): siRNA sense strand
ggacaggggugacaaguuu

SEQ ID NO: 23968 - RNA, 19 nt, Homo sapiens
  misc_RNA (1)...(19): siRNA sense strand
cagaaacaguccauuguga

SEQ ID NO: 23969 - RNA, 19 nt, Homo sapiens
  misc_RNA (1)...(19): siRNA sense strand
gaggugacauauaccacua

SEQ ID NO: 23970 - RNA, 19 nt, Homo sapiens
  misc_RNA (1)...(19): siRNA sense strand
caaguaugaucagcaauga

SEQ ID NO: 23971 - RNA, 19 nt, Homo sapiens
  misc_RNA (1)...(19): siRNA sense strand
ccauaggacugucuucaug

SEQ ID NO: 23972 - RNA, 19 nt, Homo sapiens
  misc_RNA (1)...(19): siRNA sense strand
gcaaguaugaucagcaaug

SEQ ID NO: 23973 - RNA, 19 nt, Homo sapiens
  misc_RNA (1)...(19): siRNA sense strand
gagaauacuccuucaagau

SEQ ID NO: 23974 - RNA, 19 nt, Homo sapiens
  misc_RNA (1)...(19): siRNA sense strand
gaauacuccuucaagaucu

SEQ ID NO: 23975 - RNA, 19 nt, Homo sapiens
  misc_RNA (1)...(19): siRNA sense strand
gcaaugaggcgguggucaa

SEQ ID NO: 23976 - RNA, 19 nt, Homo sapiens
  misc_RNA (1)...(19): siRNA sense strand
cagcaaguaugaucagcaa

SEQ ID NO: 23977 - RNA, 19 nt, Homo sapiens
  misc_RNA (1)...(19): siRNA sense strand
ccaugacccugguacuaaa

SEQ ID NO: 23978 - RNA, 19 nt, Homo sapiens
  misc_RNA (1)...(19): siRNA sense strand
gcagaaacaguccauugug

SEQ ID NO: 23979 - RNA, 19 nt, Homo sapiens
  misc_RNA (1)...(19): siRNA sense strand
ccaaugccauccuugaagu

SEQ ID NO: 23980 - RNA, 19 nt, Homo sapiens
  misc_RNA (1)...(19): siRNA sense strand
uucaagaucuuuccagaga

SEQ ID NO: 23981 - RNA, 19 nt, Homo sapiens
  misc_RNA (1)...(19): siRNA sense strand
gccaugacccugguacuaa

SEQ ID NO: 23982 - RNA, 19 nt, Homo sapiens
  misc_RNA (1)...(19): siRNA sense strand
gaucuggaccacuggagaa

SEQ ID NO: 23983 - RNA, 19 nt, Homo sapiens
  misc_RNA (1)...(19): siRNA sense strand
aaacauucguggcuucaag

SEQ ID NO: 23984 - RNA, 19 nt, Homo sapiens
  misc_RNA (1)...(19): siRNA sense strand
cauuugaagugcaccauca

SEQ ID NO: 23985 - RNA, 19 nt, Homo sapiens
  misc_RNA (1)...(19): siRNA sense strand
cuaaagaaagagcuuguug

SEQ ID NO: 23986 - RNA, 19 nt, Homo sapiens
  misc_RNA (1)...(19): siRNA sense strand
ucacgggccugaccuucug

SEQ ID NO: 23987 - RNA, 19 nt, Homo sapiens
  misc_RNA (1)...(19): siRNA sense strand
caacauggacagccucucu

SEQ ID NO: 23988 - RNA, 19 nt, Homo sapiens
  misc_RNA (1)...(19): siRNA sense strand
gcaggugucagcaaguaug

SEQ ID NO: 23989 - RNA, 19 nt, Homo sapiens
  misc_RNA (1)...(19): siRNA sense strand
ucaagaucuuuccagagaa

SEQ ID NO: 23990 - RNA, 19 nt, Homo sapiens
  misc_RNA (1)...(19): siRNA sense strand
gccaagggcaacuguguga

SEQ ID NO: 23991 - RNA, 19 nt, Homo sapiens
  misc_RNA (1)...(19): siRNA sense strand
ccacuagccaggucucgaa

SEQ ID NO: 23992 - RNA, 19 nt, Homo sapiens
  misc_RNA (1)...(19): siRNA sense strand
agaauacuccuucaagauc

SEQ ID NO: 23993 - RNA, 19 nt, Homo sapiens
  misc_RNA (1)...(19): siRNA sense strand
cuucugguccucaguguaa

SEQ ID NO: 23994 - RNA, 19 nt, Homo sapiens
  misc_RNA (1)...(19): siRNA sense strand
cgaguuccugcuccaguua

SEQ ID NO: 23995 - RNA, 19 nt, Homo sapiens
  misc_RNA (1)...(19): siRNA sense strand
ccacugcacuuggccuaca

SEQ ID NO: 23996 - RNA, 19 nt, Homo sapiens
  misc_RNA (1)...(19): siRNA sense strand
augaggcgguggucaauau

SEQ ID NO: 23997 - RNA, 19 nt, Homo sapiens
  misc_RNA (1)...(19): siRNA sense strand
gagcuuguugcgcauuuga

SEQ ID NO: 23998 - RNA, 19 nt, Homo sapiens
  misc_RNA (1)...(19): siRNA sense strand
ggccagcauugucucacuu

SEQ ID NO: 23999 - RNA, 19 nt, Homo sapiens
  misc_RNA (1)...(19): siRNA sense strand
ccgaguuccugcuccaguu

SEQ ID NO: 24000 - RNA, 19 nt, Homo sapiens
  misc_RNA (1)...(19): siRNA sense strand
gcugcacucugguacaucu

SEQ ID NO: 24001 - RNA, 19 nt, Homo sapiens
  misc_RNA (1)...(19): siRNA sense strand
ggacggugacggugaaggu

SEQ ID NO: 24002 - RNA, 19 nt, Homo sapiens
  misc_RNA (1)...(19): siRNA sense strand
gaccaggaaguccauagga

SEQ ID NO: 24003 - RNA, 19 nt, Homo sapiens
  misc_RNA (1)...(19): siRNA sense strand
agcauugucucacuucaug

SEQ ID NO: 24004 - RNA, 19 nt, Homo sapiens
  misc_RNA (1)...(19): siRNA sense strand
cacaguacccauacccaaa

SEQ ID NO: 24005 - RNA, 19 nt, Homo sapiens
  misc_RNA (1)...(19): siRNA sense strand
gugcugggcaucaccuuug

SEQ ID NO: 24006 - RNA, 19 nt, Homo sapiens
  misc_RNA (1)...(19): siRNA sense strand
ucacugcugcacucuggua

SEQ ID NO: 24007 - RNA, 19 nt, Homo sapiens
  misc_RNA (1)...(19): siRNA sense strand
aagagcuuguugcgcauuu

SEQ ID NO: 24008 - RNA, 19 nt, Homo sapiens
  misc_RNA (1)...(19): siRNA sense strand
ugacccugguacuaaagaa

SEQ ID NO: 24009 - RNA, 19 nt, Homo sapiens
  misc_RNA (1)...(19): siRNA sense strand
augcaggugucagcaagua

SEQ ID NO: 24010 - RNA, 19 nt, Homo sapiens
  misc_RNA (1)...(19): siRNA sense strand
aaggugcacugccucaaca

SEQ ID NO: 24011 - RNA, 19 nt, Homo sapiens
  misc_RNA (1)...(19): siRNA sense strand
cuucuacacaguacccaua

SEQ ID NO: 24012 - RNA, 19 nt, Homo sapiens
  misc_RNA (1)...(19): siRNA sense strand
gacccugguacuaaagaaa

SEQ ID NO: 24013 - RNA, 19 nt, Homo sapiens
  misc_RNA (1)...(19): siRNA sense strand
ggaggcaccguggaacuca

SEQ ID NO: 24014 - RNA, 19 nt, Homo sapiens
  misc_RNA (1)...(19): siRNA sense strand
ugagggaggcaccguggaa

SEQ ID NO: 24015 - RNA, 19 nt, Homo sapiens
  misc_RNA (1)...(19): siRNA sense strand
cuccaggcauccaagcaaa

SEQ ID NO: 24016 - RNA, 19 nt, Homo sapiens
  misc_RNA (1)...(19): siRNA sense strand
gcacucugguacaucuacu

SEQ ID NO: 24017 - RNA, 19 nt, Homo sapiens
  misc_RNA (1)...(19): siRNA sense strand
cgacgccaaccacaacaug

SEQ ID NO: 24018 - RNA, 19 nt, Homo sapiens
  misc_RNA (1)...(19): siRNA sense strand
acauggacagccucucuuu

SEQ ID NO: 24019 - RNA, 19 nt, Homo sapiens
  misc_RNA (1)...(19): siRNA sense strand
cuggaccacuggagaauac

SEQ ID NO: 24020 - RNA, 19 nt, Homo sapiens
  misc_RNA (1)...(19): siRNA sense strand
ggugucagcaaguaugauc

SEQ ID NO: 24021 - RNA, 19 nt, Homo sapiens
  misc_RNA (1)...(19): siRNA sense strand
ucagcuuccuccuccacuu

SEQ ID NO: 24022 - RNA, 19 nt, Homo sapiens
  misc_RNA (1)...(19): siRNA sense strand
gaaguggacugcaacaugu

SEQ ID NO: 24023 - RNA, 19 nt, Homo sapiens
  misc_RNA (1)...(19): siRNA sense strand
gaaccuaaccaacuauaaa

SEQ ID NO: 24024 - RNA, 19 nt, Homo sapiens
  misc_RNA (1)...(19): siRNA sense strand
caagccacauucccaauuu

SEQ ID NO: 24025 - RNA, 19 nt, Homo sapiens
  misc_RNA (1)...(19): siRNA sense strand
ggacaucacucagaacuac

SEQ ID NO: 24026 - RNA, 19 nt, Homo sapiens
  misc_RNA (1)...(19): siRNA sense strand
gaacggagaaggccagaga

SEQ ID NO: 24027 - RNA, 19 nt, Homo sapiens
  misc_RNA (1)...(19): siRNA sense strand
gagaacaccuuccuuagac

SEQ ID NO: 24028 - RNA, 19 nt, Homo sapiens
  misc_RNA (1)...(19): siRNA sense strand
gcgaggacaucacucagaa

SEQ ID NO: 24029 - RNA, 19 nt, Homo sapiens
  misc_RNA (1)...(19): siRNA sense strand
ggaagacauugccauuugu

SEQ ID NO: 24030 - RNA, 19 nt, Homo sapiens
  misc_RNA (1)...(19): siRNA sense strand
gaccacaccuugccaucaa

SEQ ID NO: 24031 - RNA, 19 nt, Homo sapiens
  misc_RNA (1)...(19): siRNA sense strand
gaagacauugccauuugua

SEQ ID NO: 24032 - RNA, 19 nt, Homo sapiens
  misc_RNA (1)...(19): siRNA sense strand
ggaaguggacugcaacaug

SEQ ID NO: 24033 - RNA, 19 nt, Homo sapiens
  misc_RNA (1)...(19): siRNA sense strand
gccaagcucuggaggaaga

SEQ ID NO: 24034 - RNA, 19 nt, Homo sapiens
  misc_RNA (1)...(19): siRNA sense strand
gagcagccuuccaagauca

SEQ ID NO: 24035 - RNA, 19 nt, Homo sapiens
  misc_RNA (1)...(19): siRNA sense strand
gagagcagccuuccaagau

SEQ ID NO: 24036 - RNA, 19 nt, Homo sapiens
  misc_RNA (1)...(19): siRNA sense strand
ucacucagaacuacaagua

SEQ ID NO: 24037 - RNA, 19 nt, Homo sapiens
  misc_RNA (1)...(19): siRNA sense strand
cagugacgcugguuaauca

SEQ ID NO: 24038 - RNA, 19 nt, Homo sapiens
  misc_RNA (1)...(19): siRNA sense strand
gaacuacaaguauccugaa

SEQ ID NO: 24039 - RNA, 19 nt, Homo sapiens
  misc_RNA (1)...(19): siRNA sense strand
gagaggagcuacagauucc

SEQ ID NO: 24040 - RNA, 19 nt, Homo sapiens
  misc_RNA (1)...(19): siRNA sense strand
aggaagacauugccauuug

SEQ ID NO: 24041 - RNA, 19 nt, Homo sapiens
  misc_RNA (1)...(19): siRNA sense strand
uaugauggauggcagauuc

SEQ ID NO: 24042 - RNA, 19 nt, Homo sapiens
  misc_RNA (1)...(19): siRNA sense strand
gaaaauggaacgugagaaa

SEQ ID NO: 24043 - RNA, 19 nt, Homo sapiens
  misc_RNA (1)...(19): siRNA sense strand
gcaacaacaucagcaccaa

SEQ ID NO: 24044 - RNA, 19 nt, Homo sapiens
  misc_RNA (1)...(19): siRNA sense strand
gagagaggagcuacagauu

SEQ ID NO: 24045 - RNA, 19 nt, Homo sapiens
  misc_RNA (1)...(19): siRNA sense strand
ggccuguucuucuccaauu

SEQ ID NO: 24046 - RNA, 19 nt, Homo sapiens
  misc_RNA (1)...(19): siRNA sense strand
cgagaacaccuuccuuaga

SEQ ID NO: 24047 - RNA, 19 nt, Homo sapiens
  misc_RNA (1)...(19): siRNA sense strand
uaucaagagcugugacuuu

SEQ ID NO: 24048 - RNA, 19 nt, Homo sapiens
  misc_RNA (1)...(19): siRNA sense strand
gguccaggcuguacacuac

SEQ ID NO: 24049 - RNA, 19 nt, Homo sapiens
  misc_RNA (1)...(19): siRNA sense strand
gcgcauggaguacuuguug

SEQ ID NO: 24050 - RNA, 19 nt, Homo sapiens
  misc_RNA (1)...(19): siRNA sense strand
ggagagcagccuuccaaga

SEQ ID NO: 24051 - RNA, 19 nt, Homo sapiens
  misc_RNA (1)...(19): siRNA sense strand
uaaaggaagugggauggau

SEQ ID NO: 24052 - RNA, 19 nt, Homo sapiens
  misc_RNA (1)...(19): siRNA sense strand
uccagaaccuaaccaacua

SEQ ID NO: 24053 - RNA, 19 nt, Homo sapiens
  misc_RNA (1)...(19): siRNA sense strand
gcaaggacaagcagguaga

SEQ ID NO: 24054 - RNA, 19 nt, Homo sapiens
  misc_RNA (1)...(19): siRNA sense strand
ccucauguguggucuggaa

SEQ ID NO: 24055 - RNA, 19 nt, Homo sapiens
  misc_RNA (1)...(19): siRNA sense strand
ccagaauggucucaucuac

SEQ ID NO: 24056 - RNA, 19 nt, Homo sapiens
  misc_RNA (1)...(19): siRNA sense strand
cuccagaacucccuagaug

SEQ ID NO: 24057 - RNA, 19 nt, Homo sapiens
  misc_RNA (1)...(19): siRNA sense strand
gaaagcagagcaguaucaa

SEQ ID NO: 24058 - RNA, 19 nt, Homo sapiens
  misc_RNA (1)...(19): siRNA sense strand
gagagucgagaaagagaaa

SEQ ID NO: 24059 - RNA, 19 nt, Homo sapiens
  misc_RNA (1)...(19): siRNA sense strand
ggacacuggaguugacuga

SEQ ID NO: 24060 - RNA, 19 nt, Homo sapiens
  misc_RNA (1)...(19): siRNA sense strand
gagcaaggacaagcaggua

SEQ ID NO: 24061 - RNA, 19 nt, Homo sapiens
  misc_RNA (1)...(19): siRNA sense strand
acaagcagguagagaagug

SEQ ID NO: 24062 - RNA, 19 nt, Homo sapiens
  misc_RNA (1)...(19): siRNA sense strand
ugacugacuccaacacaaa

SEQ ID NO: 24063 - RNA, 19 nt, Homo sapiens
  misc_RNA (1)...(19): siRNA sense strand
caccaugugugccaaguuc

SEQ ID NO: 24064 - RNA, 19 nt, Homo sapiens
  misc_RNA (1)...(19): siRNA sense strand
caacacacucugaauccaa

SEQ ID NO: 24065 - RNA, 19 nt, Homo sapiens
  misc_RNA (1)...(19): siRNA sense strand
ccaagggugugggcaguga

SEQ ID NO: 24066 - RNA, 19 nt, Homo sapiens
  misc_RNA (1)...(19): siRNA sense strand
aaauggaacgugagaaaga

SEQ ID NO: 24067 - RNA, 19 nt, Homo sapiens
  misc_RNA (1)...(19): siRNA sense strand
caagagcugugacuuucag

SEQ ID NO: 24068 - RNA, 19 nt, Homo sapiens
  misc_RNA (1)...(19): siRNA sense strand
ggacaagcagguagagaag

SEQ ID NO: 24069 - RNA, 19 nt, Homo sapiens
  misc_RNA (1)...(19): siRNA sense strand
ugccauaaaugccucaugu

SEQ ID NO: 24070 - RNA, 19 nt, Homo sapiens
  misc_RNA (1)...(19): siRNA sense strand
caacuccucuugggucagu

SEQ ID NO: 24071 - RNA, 19 nt, Homo sapiens
  misc_RNA (1)...(19): siRNA sense strand
cagagaaagcagagcagua

SEQ ID NO: 24072 - RNA, 19 nt, Homo sapiens
  misc_RNA (1)...(19): siRNA sense strand
uggagagagucgagaaaga

SEQ ID NO: 24073 - RNA, 19 nt, Homo sapiens
  misc_RNA (1)...(19): siRNA sense strand
gcauggaguacuuguugaa

SEQ ID NO: 24074 - RNA, 19 nt, Homo sapiens
  misc_RNA (1)...(19): siRNA sense strand
ccauaaaugccucaugugu

SEQ ID NO: 24075 - RNA, 19 nt, Homo sapiens
  misc_RNA (1)...(19): siRNA sense strand
agagaaagcagagcaguau

SEQ ID NO: 24076 - RNA, 19 nt, Homo sapiens
  misc_RNA (1)...(19): siRNA sense strand
gcagugcagcuggcaauug

SEQ ID NO: 24077 - RNA, 19 nt, Homo sapiens
  misc_RNA (1)...(19): siRNA sense strand
caucaccuguuuucauuaa

SEQ ID NO: 24078 - RNA, 19 nt, Homo sapiens
  misc_RNA (1)...(19): siRNA sense strand
gcaacacacucugaaucca

SEQ ID NO: 24079 - RNA, 19 nt, Homo sapiens
  misc_RNA (1)...(19): siRNA sense strand
cccgagaacaccuuccuua

SEQ ID NO: 24080 - RNA, 19 nt, Homo sapiens
  misc_RNA (1)...(19): siRNA sense strand
gagagagucgagaaagaga

SEQ ID NO: 24081 - RNA, 19 nt, Homo sapiens
  misc_RNA (1)...(19): siRNA sense strand
acucagaacuacaaguauc

SEQ ID NO: 24082 - RNA, 19 nt, Homo sapiens
  misc_RNA (1)...(19): siRNA sense strand
ccaagccacauucccaauu

SEQ ID NO: 24083 - RNA, 19 nt, Homo sapiens
  misc_RNA (1)...(19): siRNA sense strand
gcucagugccaaccuggaa

SEQ ID NO: 24084 - RNA, 19 nt, Homo sapiens
  misc_RNA (1)...(19): siRNA sense strand
ggagagagucgagaaagag

SEQ ID NO: 24085 - RNA, 19 nt, Homo sapiens
  misc_RNA (1)...(19): siRNA sense strand
cccaagugcuccuaaugga

SEQ ID NO: 24086 - RNA, 19 nt, Homo sapiens
  misc_RNA (1)...(19): siRNA sense strand
ggauggaugcccuggguau

SEQ ID NO: 24087 - RNA, 19 nt, Homo sapiens
  misc_RNA (1)...(19): siRNA sense strand
ucaggaagacauugccauu

SEQ ID NO: 24088 - RNA, 19 nt, Homo sapiens
  misc_RNA (1)...(19): siRNA sense strand
gaggccgaccuguguauga

SEQ ID NO: 24089 - RNA, 19 nt, Homo sapiens
  misc_RNA (1)...(19): siRNA sense strand
cuacaacgguguccuugcu

SEQ ID NO: 24090 - RNA, 19 nt, Homo sapiens
  misc_RNA (1)...(19): siRNA sense strand
gguguuggcugcuguugcu

SEQ ID NO: 24091 - RNA, 19 nt, Homo sapiens
  misc_RNA (1)...(19): siRNA sense strand
gugggcgucuucucauaga

SEQ ID NO: 24092 - RNA, 19 nt, Homo sapiens
  misc_RNA (1)...(19): siRNA sense strand
cagaaccuaaccaacuaua

SEQ ID NO: 24093 - RNA, 19 nt, Homo sapiens
  misc_RNA (1)...(19): siRNA sense strand
cagugcagcuggcaauugg

SEQ ID NO: 24094 - RNA, 19 nt, Homo sapiens
  misc_RNA (1)...(19): siRNA sense strand
cgacccaagugcuccuaau

SEQ ID NO: 24095 - RNA, 19 nt, Homo sapiens
  misc_RNA (1)...(19): siRNA sense strand
agaauggucucaucuaccu

SEQ ID NO: 24096 - RNA, 19 nt, Homo sapiens
  misc_RNA (1)...(19): siRNA sense strand
agaaagcagagcaguauca

SEQ ID NO: 24097 - RNA, 19 nt, Homo sapiens
  misc_RNA (1)...(19): siRNA sense strand
caggaagacauugccauuu

SEQ ID NO: 24098 - RNA, 19 nt, Homo sapiens
  misc_RNA (1)...(19): siRNA sense strand
uagcugcuuugcucaggaa

SEQ ID NO: 24099 - RNA, 19 nt, Homo sapiens
  misc_RNA (1)...(19): siRNA sense strand
ggccagagaggcagaaucu

SEQ ID NO: 24100 - RNA, 19 nt, Homo sapiens
  misc_RNA (1)...(19): siRNA sense strand
cggugggcgucuucucaua

SEQ ID NO: 24101 - RNA, 19 nt, Homo sapiens
  misc_RNA (1)...(19): siRNA sense strand
agacauugccauuuguaga

SEQ ID NO: 24102 - RNA, 19 nt, Homo sapiens
  misc_RNA (1)...(19): siRNA sense strand
ucaccaucauccuguacuu

SEQ ID NO: 24103 - RNA, 19 nt, Homo sapiens
  misc_RNA (1)...(19): siRNA sense strand
cacucugaauccaaccuua

SEQ ID NO: 24104 - RNA, 19 nt, Homo sapiens
  misc_RNA (1)...(19): siRNA sense strand
uaauaaccaucggccuguu

SEQ ID NO: 24105 - RNA, 19 nt, Homo sapiens
  misc_RNA (1)...(19): siRNA sense strand
ccagcagugucagaccuuu

SEQ ID NO: 24106 - RNA, 19 nt, Homo sapiens
  misc_RNA (1)...(19): siRNA sense strand
cugccaagcucuggaggaa

SEQ ID NO: 24107 - RNA, 19 nt, Homo sapiens
  misc_RNA (1)...(19): siRNA sense strand
aagaggugcuggagagagu

SEQ ID NO: 24108 - RNA, 19 nt, Homo sapiens
  misc_RNA (1)...(19): siRNA sense strand
gaugggacacuggaguuga

SEQ ID NO: 24109 - RNA, 19 nt, Homo sapiens
  misc_RNA (1)...(19): siRNA sense strand
gacccaagugcuccuaaug

SEQ ID NO: 24110 - RNA, 19 nt, Homo sapiens
  misc_RNA (1)...(19): siRNA sense strand
gaagaagguggcccucacu

SEQ ID NO: 24111 - RNA, 19 nt, Homo sapiens
  misc_RNA (1)...(19): siRNA sense strand
agagcagccuuccaagauc

SEQ ID NO: 24112 - RNA, 19 nt, Homo sapiens
  misc_RNA (1)...(19): siRNA sense strand
gguagccccugaacuauca

SEQ ID NO: 24113 - RNA, 19 nt, Homo sapiens
  misc_RNA (1)...(19): siRNA sense strand
ccagagacucacuguggaa

SEQ ID NO: 24114 - RNA, 19 nt, Homo sapiens
  misc_RNA (1)...(19): siRNA sense strand
aauccaaccuuagcugcuu

SEQ ID NO: 24115 - RNA, 19 nt, Homo sapiens
  misc_RNA (1)...(19): siRNA sense strand
gccuguucuucuccaauuu

SEQ ID NO: 24116 - RNA, 19 nt, Homo sapiens
  misc_RNA (1)...(19): siRNA sense strand
gaggacaucacucagaacu

SEQ ID NO: 24117 - RNA, 19 nt, Homo sapiens
  misc_RNA (1)...(19): siRNA sense strand
gagcuacagauuccguuca

SEQ ID NO: 24118 - RNA, 19 nt, Homo sapiens
  misc_RNA (1)...(19): siRNA sense strand
caagaugccagagaaagca

SEQ ID NO: 24119 - RNA, 19 nt, Homo sapiens
  misc_RNA (1)...(19): siRNA sense strand
ucaccgccauggcaacaca

SEQ ID NO: 24120 - RNA, 19 nt, Homo sapiens
  misc_RNA (1)...(19): siRNA sense strand
ggcccucacugcacaaacu

SEQ ID NO: 24121 - RNA, 19 nt, Homo sapiens
  misc_RNA (1)...(19): siRNA sense strand
agagaggagcuacagauuc

SEQ ID NO: 24122 - RNA, 19 nt, Homo sapiens
  misc_RNA (1)...(19): siRNA sense strand
gaacauggcuuugguuuua

SEQ ID NO: 24123 - RNA, 19 nt, Homo sapiens
  misc_RNA (1)...(19): siRNA sense strand
gaggaaacuuugccacuug

SEQ ID NO: 24124 - RNA, 19 nt, Homo sapiens
  misc_RNA (1)...(19): siRNA sense strand
ugaagaaagucaucuccua

SEQ ID NO: 24125 - RNA, 19 nt, Homo sapiens
  misc_RNA (1)...(19): siRNA sense strand
ucccugaucugcacuaaua

SEQ ID NO: 24126 - RNA, 19 nt, Homo sapiens
  misc_RNA (1)...(19): siRNA sense strand
ugaaaggccugcacuugaa

SEQ ID NO: 24127 - RNA, 19 nt, Homo sapiens
  misc_RNA (1)...(19): siRNA sense strand
ccaacuaccugaagaaagu

SEQ ID NO: 24128 - RNA, 19 nt, Homo sapiens
  misc_RNA (1)...(19): siRNA sense strand
caacagauacccucacuuc

SEQ ID NO: 24129 - RNA, 19 nt, Homo sapiens
  misc_RNA (1)...(19): siRNA sense strand
ggacagcugcuuccacuau

SEQ ID NO: 24130 - RNA, 19 nt, Homo sapiens
  misc_RNA (1)...(19): siRNA sense strand
ggaagaagcagguggagau

SEQ ID NO: 24131 - RNA, 19 nt, Homo sapiens
  misc_RNA (1)...(19): siRNA sense strand
acccaaagcucaucuccua

SEQ ID NO: 24132 - RNA, 19 nt, Homo sapiens
  misc_RNA (1)...(19): siRNA sense strand
caaagcucaucuccuauuc

SEQ ID NO: 24133 - RNA, 19 nt, Homo sapiens
  misc_RNA (1)...(19): siRNA sense strand
uagaaauccuccucacuuc

SEQ ID NO: 24134 - RNA, 19 nt, Homo sapiens
  misc_RNA (1)...(19): siRNA sense strand
ccaaagcucaucuccuauu

SEQ ID NO: 24135 - RNA, 19 nt, Homo sapiens
  misc_RNA (1)...(19): siRNA sense strand
gugaaaggccugcacuuga

SEQ ID NO: 24136 - RNA, 19 nt, Homo sapiens
  misc_RNA (1)...(19): siRNA sense strand
cagauacccucacuucaag

SEQ ID NO: 24137 - RNA, 19 nt, Homo sapiens
  misc_RNA (1)...(19): siRNA sense strand
gggucuggcugccuauauu

SEQ ID NO: 24138 - RNA, 19 nt, Homo sapiens
  misc_RNA (1)...(19): siRNA sense strand
gaagaagcagguggagauu

SEQ ID NO: 24139 - RNA, 19 nt, Homo sapiens
  misc_RNA (1)...(19): siRNA sense strand
cuagaaauccuccucacuu

SEQ ID NO: 24140 - RNA, 19 nt, Homo sapiens
  misc_RNA (1)...(19): siRNA sense strand
cguaggcucugcucugaau

SEQ ID NO: 24141 - RNA, 19 nt, Homo sapiens
  misc_RNA (1)...(19): siRNA sense strand
acagauacccucacuucaa

SEQ ID NO: 24142 - RNA, 19 nt, Homo sapiens
  misc_RNA (1)...(19): siRNA sense strand
ggaugacccagaagcauga

SEQ ID NO: 24143 - RNA, 19 nt, Homo sapiens
  misc_RNA (1)...(19): siRNA sense strand
gacagcugcuuccacuaug

SEQ ID NO: 24144 - RNA, 19 nt, Homo sapiens
  misc_RNA (1)...(19): siRNA sense strand
caucuccuauuccuacaug

SEQ ID NO: 24145 - RNA, 19 nt, Homo sapiens
  misc_RNA (1)...(19): siRNA sense strand
agaggaaacuuugccacuu

SEQ ID NO: 24146 - RNA, 19 nt, Homo sapiens
  misc_RNA (1)...(19): siRNA sense strand
gaggauggaggccuggaaa

SEQ ID NO: 24147 - RNA, 19 nt, Homo sapiens
  misc_RNA (1)...(19): siRNA sense strand
aaacuuugccacuugaaga

SEQ ID NO: 24148 - RNA, 19 nt, Homo sapiens
  misc_RNA (1)...(19): siRNA sense strand
gaaauccuccucacuucag

SEQ ID NO: 24149 - RNA, 19 nt, Homo sapiens
  misc_RNA (1)...(19): siRNA sense strand
uacccucacuucaagacua

SEQ ID NO: 24150 - RNA, 19 nt, Homo sapiens
  misc_RNA (1)...(19): siRNA sense strand
ugaggagauccacgacuua

SEQ ID NO: 24151 - RNA, 19 nt, Homo sapiens
  misc_RNA (1)...(19): siRNA sense strand
gacagcauccgcccuuuca

SEQ ID NO: 24152 - RNA, 19 nt, Homo sapiens
  misc_RNA (1)...(19): siRNA sense strand
gauggaggccuggaaagga

SEQ ID NO: 24153 - RNA, 19 nt, Homo sapiens
  misc_RNA (1)...(19): siRNA sense strand
agaaagucaucuccuacug

SEQ ID NO: 24154 - RNA, 19 nt, Homo sapiens
  misc_RNA (1)...(19): siRNA sense strand
gcuuugccaucuacugguu

SEQ ID NO: 24155 - RNA, 19 nt, Homo sapiens
  misc_RNA (1)...(19): siRNA sense strand
ggaucgauaaguuccguuu

SEQ ID NO: 24156 - RNA, 19 nt, Homo sapiens
  misc_RNA (1)...(19): siRNA sense strand
accagaggaucgauaaguu

SEQ ID NO: 24157 - RNA, 19 nt, Homo sapiens
  misc_RNA (1)...(19): siRNA sense strand
guucaucucccgggacaaa

SEQ ID NO: 24158 - RNA, 19 nt, Homo sapiens
  misc_RNA (1)...(19): siRNA sense strand
gaaacuuugccacuugaag

SEQ ID NO: 24159 - RNA, 19 nt, Homo sapiens
  misc_RNA (1)...(19): siRNA sense strand
ggacaacaggcaccaucau

SEQ ID NO: 24160 - RNA, 19 nt, Homo sapiens
  misc_RNA (1)...(19): siRNA sense strand
gugcugggcuuugccaucu

SEQ ID NO: 24161 - RNA, 19 nt, Homo sapiens
  misc_RNA (1)...(19): siRNA sense strand
uggacgaccugcugaccaa

SEQ ID NO: 24162 - RNA, 19 nt, Homo sapiens
  misc_RNA (1)...(19): siRNA sense strand
gaucaucccacuccugacu

SEQ ID NO: 24163 - RNA, 19 nt, Homo sapiens
  misc_RNA (1)...(19): siRNA sense strand
gacaacaggcaccaucauc

SEQ ID NO: 24164 - RNA, 19 nt, Homo sapiens
  misc_RNA (1)...(19): siRNA sense strand
caacaggcaccaucaucuc

SEQ ID NO: 24165 - RNA, 19 nt, Homo sapiens
  misc_RNA (1)...(19): siRNA sense strand
ccagaggaucgauaaguuc

SEQ ID NO: 24166 - RNA, 19 nt, Homo sapiens
  misc_RNA (1)...(19): siRNA sense strand
gcacuugaacauggcuuug

SEQ ID NO: 24167 - RNA, 19 nt, Homo sapiens
  misc_RNA (1)...(19): siRNA sense strand
aggaaacuuugccacuuga

SEQ ID NO: 24168 - RNA, 19 nt, Homo sapiens
  misc_RNA (1)...(19): siRNA sense strand
ccuacuggcggaaugaauu

SEQ ID NO: 24169 - RNA, 19 nt, Homo sapiens
  misc_RNA (1)...(19): siRNA sense strand
gucaugcucuacuggacaa

SEQ ID NO: 24170 - RNA, 19 nt, Homo sapiens
  misc_RNA (1)...(19): siRNA sense strand
ggucccugaucugcacuaa

SEQ ID NO: 24171 - RNA, 19 nt, Homo sapiens
  misc_RNA (1)...(19): siRNA sense strand
ccugagcgaugagcacguu

SEQ ID NO: 24172 - RNA, 19 nt, Homo sapiens
  misc_RNA (1)...(19): siRNA sense strand
ucaucccacuccugacuga

SEQ ID NO: 24173 - RNA, 19 nt, Homo sapiens
  misc_RNA (1)...(19): siRNA sense strand
augaggagauccacgacuu

SEQ ID NO: 24174 - RNA, 19 nt, Homo sapiens
  misc_RNA (1)...(19): siRNA sense strand
ggagauccacgacuuacac

SEQ ID NO: 24175 - RNA, 19 nt, Homo sapiens
  misc_RNA (1)...(19): siRNA sense strand
gagggagagcggcuacaug

SEQ ID NO: 24176 - RNA, 19 nt, Homo sapiens
  misc_RNA (1)...(19): siRNA sense strand
cgugaaaggccugcacuug

SEQ ID NO: 24177 - RNA, 19 nt, Homo sapiens
  misc_RNA (1)...(19): siRNA sense strand
caacuccaacuaccugaag

SEQ ID NO: 24178 - RNA, 19 nt, Homo sapiens
  misc_RNA (1)...(19): siRNA sense strand
ggaaacuuugccacuugaa

SEQ ID NO: 24179 - RNA, 19 nt, Homo sapiens
  misc_RNA (1)...(19): siRNA sense strand
cccaggacauccgcaaguu

SEQ ID NO: 24180 - RNA, 19 nt, Homo sapiens
  misc_RNA (1)...(19): siRNA sense strand
ggaggauggaggccuggaa

SEQ ID NO: 24181 - RNA, 19 nt, Homo sapiens
  misc_RNA (1)...(19): siRNA sense strand
acccucacuucaagacuaa

SEQ ID NO: 24182 - RNA, 19 nt, Homo sapiens
  misc_RNA (1)...(19): siRNA sense strand
auggaggccuggaaaggaa

SEQ ID NO: 24183 - RNA, 19 nt, Homo sapiens
  misc_RNA (1)...(19): siRNA sense strand
gaaaggccugcacuugaac

SEQ ID NO: 24184 - RNA, 19 nt, Homo sapiens
  misc_RNA (1)...(19): siRNA sense strand
uuacaccagaggaucgaua

SEQ ID NO: 24185 - RNA, 19 nt, Homo sapiens
  misc_RNA (1)...(19): siRNA sense strand
ggccaccgccaggaucuuu

SEQ ID NO: 24186 - RNA, 19 nt, Homo sapiens
  misc_RNA (1)...(19): siRNA sense strand
gccaucuacugguucaucu

SEQ ID NO: 24187 - RNA, 19 nt, Homo sapiens
  misc_RNA (1)...(19): siRNA sense strand
gcugggcuuugccaucuac

SEQ ID NO: 24188 - RNA, 19 nt, Homo sapiens
  misc_RNA (1)...(19): siRNA sense strand
cgacagcauccgcccuuuc

SEQ ID NO: 24189 - RNA, 19 nt, Homo sapiens
  misc_RNA (1)...(19): siRNA sense strand
ggauggaggccuggaaagg

SEQ ID NO: 24190 - RNA, 19 nt, Homo sapiens
  misc_RNA (1)...(19): siRNA sense strand
ggucuggcugccuauauuc

SEQ ID NO: 24191 - RNA, 19 nt, Homo sapiens
  misc_RNA (1)...(19): siRNA sense strand
gggauguggagcugcugua

SEQ ID NO: 24192 - RNA, 19 nt, Homo sapiens
  misc_RNA (1)...(19): siRNA sense strand
ccacaucaaugaaguagug

SEQ ID NO: 24193 - RNA, 19 nt, Homo sapiens
  misc_RNA (1)...(19): siRNA sense strand
ccuaccagcucgaggauga

SEQ ID NO: 24194 - RNA, 19 nt, Homo sapiens
  misc_RNA (1)...(19): siRNA sense strand
gaugaaggcucagaagcau

SEQ ID NO: 24195 - RNA, 19 nt, Homo sapiens
  misc_RNA (1)...(19): siRNA sense strand
gcggugcgcuucugguguu

SEQ ID NO: 24196 - RNA, 19 nt, Homo sapiens
  misc_RNA (1)...(19): siRNA sense strand
ggacauaguggccauggau

SEQ ID NO: 24197 - RNA, 19 nt, Homo sapiens
  misc_RNA (1)...(19): siRNA sense strand
gcaacuacagcuucuccua

SEQ ID NO: 24198 - RNA, 19 nt, Homo sapiens
  misc_RNA (1)...(19): siRNA sense strand
uggaggacuugguguguuu

SEQ ID NO: 24199 - RNA, 19 nt, Homo sapiens
  misc_RNA (1)...(19): siRNA sense strand
gcccagagagcgaguuuga

SEQ ID NO: 24200 - RNA, 19 nt, Homo sapiens
  misc_RNA (1)...(19): siRNA sense strand
ggaugaaggcucagaagca

SEQ ID NO: 24201 - RNA, 19 nt, Homo sapiens
  misc_RNA (1)...(19): siRNA sense strand
gcuauguggcuugcucuua

SEQ ID NO: 24202 - RNA, 19 nt, Homo sapiens
  misc_RNA (1)...(19): siRNA sense strand
gagcggccacguaguguug

SEQ ID NO: 24203 - RNA, 19 nt, Homo sapiens
  misc_RNA (1)...(19): siRNA sense strand
cuauguggcuugcucuuag

SEQ ID NO: 24204 - RNA, 19 nt, Homo sapiens
  misc_RNA (1)...(19): siRNA sense strand
ccagagagcgaguuugaag

SEQ ID NO: 24205 - RNA, 19 nt, Homo sapiens
  misc_RNA (1)...(19): siRNA sense strand
caucugcuuuggccucgaa

SEQ ID NO: 24206 - RNA, 19 nt, Homo sapiens
  misc_RNA (1)...(19): siRNA sense strand
acucuggcaucucaacuga

SEQ ID NO: 24207 - RNA, 19 nt, Homo sapiens
  misc_RNA (1)...(19): siRNA sense strand
ugacgagagcggccacgua

SEQ ID NO: 24208 - RNA, 19 nt, Homo sapiens
  misc_RNA (1)...(19): siRNA sense strand
gagcccagagagcgaguuu

SEQ ID NO: 24209 - RNA, 19 nt, Homo sapiens
  misc_RNA (1)...(19): siRNA sense strand
ccaggucggcucccuuugu

SEQ ID NO: 24210 - RNA, 19 nt, Homo sapiens
  misc_RNA (1)...(19): siRNA sense strand
caggucggcucccuuuguc

SEQ ID NO: 24211 - RNA, 19 nt, Homo sapiens
  misc_RNA (1)...(19): siRNA sense strand
gauaucaccgugucaucca

SEQ ID NO: 24212 - RNA, 19 nt, Homo sapiens
  misc_RNA (1)...(19): siRNA sense strand
cauaguggccauggaugaa

SEQ ID NO: 24213 - RNA, 19 nt, Homo sapiens
  misc_RNA (1)...(19): siRNA sense strand
cauccacaucaaugaagua

SEQ ID NO: 24214 - RNA, 19 nt, Homo sapiens
  misc_RNA (1)...(19): siRNA sense strand
acuccaacccuuaugagaa

SEQ ID NO: 24215 - RNA, 19 nt, Homo sapiens
  misc_RNA (1)...(19): siRNA sense strand
caaugaaguagugcuccua

SEQ ID NO: 24216 - RNA, 19 nt, Homo sapiens
  misc_RNA (1)...(19): siRNA sense strand
ggaacaagcugcucuuuau

SEQ ID NO: 24217 - RNA, 19 nt, Homo sapiens
  misc_RNA (1)...(19): siRNA sense strand
gccaucagcuccaaauuug

SEQ ID NO: 24218 - RNA, 19 nt, Homo sapiens
  misc_RNA (1)...(19): siRNA sense strand
gccaaaggcuucaccauca

SEQ ID NO: 24219 - RNA, 19 nt, Homo sapiens
  misc_RNA (1)...(19): siRNA sense strand
gaacugugccagagauuga

SEQ ID NO: 24220 - RNA, 19 nt, Homo sapiens
  misc_RNA (1)...(19): siRNA sense strand
gaucauggcauaccagaga

SEQ ID NO: 24221 - RNA, 19 nt, Homo sapiens
  misc_RNA (1)...(19): siRNA sense strand
gaacaagcugcucuuuauu

SEQ ID NO: 24222 - RNA, 19 nt, Homo sapiens
  misc_RNA (1)...(19): siRNA sense strand
ccaauguggugguuuauag

SEQ ID NO: 24223 - RNA, 19 nt, Homo sapiens
  misc_RNA (1)...(19): siRNA sense strand
gaaggugauugaagagcuu

SEQ ID NO: 24224 - RNA, 19 nt, Homo sapiens
  misc_RNA (1)...(19): siRNA sense strand
acacagagccgcauucuca

SEQ ID NO: 24225 - RNA, 19 nt, Homo sapiens
  misc_RNA (1)...(19): siRNA sense strand
cgacgaggcccacaacauu

SEQ ID NO: 24226 - RNA, 19 nt, Homo sapiens
  misc_RNA (1)...(19): siRNA sense strand
ugaccaaacucaucuacug

SEQ ID NO: 24227 - RNA, 19 nt, Homo sapiens
  misc_RNA (1)...(19): siRNA sense strand
caagaacugugccagagau

SEQ ID NO: 24228 - RNA, 19 nt, Homo sapiens
  misc_RNA (1)...(19): siRNA sense strand
acaagcugcucuuuauuga

SEQ ID NO: 24229 - RNA, 19 nt, Homo sapiens
  misc_RNA (1)...(19): siRNA sense strand
ugaggcggcugcuggagua

SEQ ID NO: 24230 - RNA, 19 nt, Homo sapiens
  misc_RNA (1)...(19): siRNA sense strand
ggccaucagcuccaaauuu

SEQ ID NO: 24231 - RNA, 19 nt, Homo sapiens
  misc_RNA (1)...(19): siRNA sense strand
aagcugcucuuuauugaga

SEQ ID NO: 24232 - RNA, 19 nt, Homo sapiens
  misc_RNA (1)...(19): siRNA sense strand
gaaggacgucgaugggaaa

SEQ ID NO: 24233 - RNA, 19 nt, Homo sapiens
  misc_RNA (1)...(19): siRNA sense strand
ucaccgaccuugcugacuu

SEQ ID NO: 24234 - RNA, 19 nt, Homo sapiens
  misc_RNA (1)...(19): siRNA sense strand
caaccuggaugaccugaag

SEQ ID NO: 24235 - RNA, 19 nt, Homo sapiens
  misc_RNA (1)...(19): siRNA sense strand
ggacgucgaugggaaaugc

SEQ ID NO: 24236 - RNA, 19 nt, Homo sapiens
  misc_RNA (1)...(19): siRNA sense strand
cauacuuccuugcucgaua

SEQ ID NO: 24237 - RNA, 19 nt, Homo sapiens
  misc_RNA (1)...(19): siRNA sense strand
gcaaggccgucguggucuu

SEQ ID NO: 24238 - RNA, 19 nt, Homo sapiens
  misc_RNA (1)...(19): siRNA sense strand
uugagaaggugauugaaga

SEQ ID NO: 24239 - RNA, 19 nt, Homo sapiens
  misc_RNA (1)...(19): siRNA sense strand
gggaggauauugcugugau

SEQ ID NO: 24240 - RNA, 19 nt, Homo sapiens
  misc_RNA (1)...(19): siRNA sense strand
aaacucaucuacugcucaa

SEQ ID NO: 24241 - RNA, 19 nt, Homo sapiens
  misc_RNA (1)...(19): siRNA sense strand
gaucaucggccguggcaau

SEQ ID NO: 24242 - RNA, 19 nt, Homo sapiens
  misc_RNA (1)...(19): siRNA sense strand
gagaacauccagaggaaca

SEQ ID NO: 24243 - RNA, 19 nt, Homo sapiens
  misc_RNA (1)...(19): siRNA sense strand
ggccaucaaacccguauuu

SEQ ID NO: 24244 - RNA, 19 nt, Homo sapiens
  misc_RNA (1)...(19): siRNA sense strand
uggagcagcuagaaucaga

SEQ ID NO: 24245 - RNA, 19 nt, Homo sapiens
  misc_RNA (1)...(19): siRNA sense strand
ugaagaggauagagcagau

SEQ ID NO: 24246 - RNA, 19 nt, Homo sapiens
  misc_RNA (1)...(19): siRNA sense strand
uugcagaccugguguccaa

SEQ ID NO: 24247 - RNA, 19 nt, Homo sapiens
  misc_RNA (1)...(19): siRNA sense strand
gaaaugccacagccucaca

SEQ ID NO: 24248 - RNA, 19 nt, Homo sapiens
  misc_RNA (1)...(19): siRNA sense strand
agaagacggugcucaggau

SEQ ID NO: 24249 - RNA, 19 nt, Homo sapiens
  misc_RNA (1)...(19): siRNA sense strand
ugccagagauugagaaggu

SEQ ID NO: 24250 - RNA, 19 nt, Homo sapiens
  misc_RNA (1)...(19): siRNA sense strand
ccaaaggcuucaccaucau

SEQ ID NO: 24251 - RNA, 19 nt, Homo sapiens
  misc_RNA (1)...(19): siRNA sense strand
gaagaggauagagcagauu

SEQ ID NO: 24252 - RNA, 19 nt, Homo sapiens
  misc_RNA (1)...(19): siRNA sense strand
gcugugauccggaacuaug

SEQ ID NO: 24253 - RNA, 19 nt, Homo sapiens
  misc_RNA (1)...(19): siRNA sense strand
gugucgcccuggagaagua

SEQ ID NO: 24254 - RNA, 19 nt, Homo sapiens
  misc_RNA (1)...(19): siRNA sense strand
ggaggugaccaaacucauc

SEQ ID NO: 24255 - RNA, 19 nt, Homo sapiens
  misc_RNA (1)...(19): siRNA sense strand
ucacagaugccaaccucaa

SEQ ID NO: 24256 - RNA, 19 nt, Homo sapiens
  misc_RNA (1)...(19): siRNA sense strand
gcaaaguguccgagggaau

SEQ ID NO: 24257 - RNA, 19 nt, Homo sapiens
  misc_RNA (1)...(19): siRNA sense strand
ggaggauauugcugugauc

SEQ ID NO: 24258 - RNA, 19 nt, Homo sapiens
  misc_RNA (1)...(19): siRNA sense strand
augccaauguggugguuua

SEQ ID NO: 24259 - RNA, 19 nt, Homo sapiens
  misc_RNA (1)...(19): siRNA sense strand
guguccagguggccaagua

SEQ ID NO: 24260 - RNA, 19 nt, Homo sapiens
  misc_RNA (1)...(19): siRNA sense strand
aggaacaagcugcucuuua

SEQ ID NO: 24261 - RNA, 19 nt, Homo sapiens
  misc_RNA (1)...(19): siRNA sense strand
uugagaacauccagaggaa

SEQ ID NO: 24262 - RNA, 19 nt, Homo sapiens
  misc_RNA (1)...(19): siRNA sense strand
gacgaggcccacaacauug

SEQ ID NO: 24263 - RNA, 19 nt, Homo sapiens
  misc_RNA (1)...(19): siRNA sense strand
gaggaacaagcugcucuuu

SEQ ID NO: 24264 - RNA, 19 nt, Homo sapiens
  misc_RNA (1)...(19): siRNA sense strand
caaaguguccgagggaauc

SEQ ID NO: 24265 - RNA, 19 nt, Homo sapiens
  misc_RNA (1)...(19): siRNA sense strand
aggagacgcugaagaggau

SEQ ID NO: 24266 - RNA, 19 nt, Homo sapiens
  misc_RNA (1)...(19): siRNA sense strand
caggagcaccucacagaug

SEQ ID NO: 24267 - RNA, 19 nt, Homo sapiens
  misc_RNA (1)...(19): siRNA sense strand
ggagaucaccgaccuugcu

SEQ ID NO: 24268 - RNA, 19 nt, Homo sapiens
  misc_RNA (1)...(19): siRNA sense strand
ccgagggaaucgacuuugu

SEQ ID NO: 24269 - RNA, 19 nt, Homo sapiens
  misc_RNA (1)...(19): siRNA sense strand
aacaagcugcucuuuauug

SEQ ID NO: 24270 - RNA, 19 nt, Homo sapiens
  misc_RNA (1)...(19): siRNA sense strand
cacccuccuugcuaacuuu

SEQ ID NO: 24271 - RNA, 19 nt, Homo sapiens
  misc_RNA (1)...(19): siRNA sense strand
cagaggagacgcugaagag

SEQ ID NO: 24272 - RNA, 19 nt, Homo sapiens
  misc_RNA (1)...(19): siRNA sense strand
agauugagaaggugauuga

SEQ ID NO: 24273 - RNA, 19 nt, Homo sapiens
  misc_RNA (1)...(19): siRNA sense strand
uggacgggcuccuggucua

SEQ ID NO: 24274 - RNA, 19 nt, Homo sapiens
  misc_RNA (1)...(19): siRNA sense strand
uggcauaccagagagcaua

SEQ ID NO: 24275 - RNA, 19 nt, Homo sapiens
  misc_RNA (1)...(19): siRNA sense strand
ugucagcaccuacgccaaa

SEQ ID NO: 24276 - RNA, 19 nt, Homo sapiens
  misc_RNA (1)...(19): siRNA sense strand
gccaauguggugguuuaua

SEQ ID NO: 24277 - RNA, 19 nt, Homo sapiens
  misc_RNA (1)...(19): siRNA sense strand
agacggugcucaggaucaa

SEQ ID NO: 24278 - RNA, 19 nt, Homo sapiens
  misc_RNA (1)...(19): siRNA sense strand
gagcguuuccagucuguca

SEQ ID NO: 24279 - RNA, 19 nt, Homo sapiens
  misc_RNA (1)...(19): siRNA sense strand
ucacccuccuugcuaacuu

SEQ ID NO: 24280 - RNA, 19 nt, Homo sapiens
  misc_RNA (1)...(19): siRNA sense strand
gcaugccaauguggugguu

SEQ ID NO: 24281 - RNA, 19 nt, Homo sapiens
  misc_RNA (1)...(19): siRNA sense strand
gaacauccagaggaacaag

SEQ ID NO: 24282 - RNA, 19 nt, Homo sapiens
  misc_RNA (1)...(19): siRNA sense strand
ccgcucacccuccuugcua

SEQ ID NO: 24283 - RNA, 19 nt, Homo sapiens
  misc_RNA (1)...(19): siRNA sense strand
caccguggccuccugguau

SEQ ID NO: 24284 - RNA, 19 nt, Homo sapiens
  misc_RNA (1)...(19): siRNA sense strand
gaagcaggagggcgagaag

SEQ ID NO: 24285 - RNA, 19 nt, Homo sapiens
  misc_RNA (1)...(19): siRNA sense strand
gacagaaccccgaccauug

SEQ ID NO: 24286 - RNA, 19 nt, Homo sapiens
  misc_RNA (1)...(19): siRNA sense strand
gugcucaggaucaaagaga

SEQ ID NO: 24287 - RNA, 19 nt, Homo sapiens
  misc_RNA (1)...(19): siRNA sense strand
cuggagacccugcagaaga

SEQ ID NO: 24288 - RNA, 19 nt, Homo sapiens
  misc_RNA (1)...(19): siRNA sense strand
gaggugaccaaacucaucu

SEQ ID NO: 24289 - RNA, 19 nt, Homo sapiens
  misc_RNA (1)...(19): siRNA sense strand
cuuccuugcucgauacuca

SEQ ID NO: 24290 - RNA, 19 nt, Homo sapiens
  misc_RNA (1)...(19): siRNA sense strand
ucaagaacugugccagaga

SEQ ID NO: 24291 - RNA, 19 nt, Homo sapiens
  misc_RNA (1)...(19): siRNA sense strand
gggcgcaguaccagcauga

SEQ ID NO: 24292 - RNA, 19 nt, Homo sapiens
  misc_RNA (1)...(19): siRNA sense strand
ccgagcaguucuccuacau

SEQ ID NO: 24293 - RNA, 19 nt, Homo sapiens
  misc_RNA (1)...(19): siRNA sense strand
ggucccugcugcauacucu

SEQ ID NO: 24294 - RNA, 19 nt, Homo sapiens
  misc_RNA (1)...(19): siRNA sense strand
gggccauccugcugucagu

SEQ ID NO: 24295 - RNA, 19 nt, Homo sapiens
  misc_RNA (1)...(19): siRNA sense strand
gucugccucugcccuauga

SEQ ID NO: 24296 - RNA, 19 nt, Homo sapiens
  misc_RNA (1)...(19): siRNA sense strand
uaacuuugccacccuuguc

SEQ ID NO: 24297 - RNA, 19 nt, Homo sapiens
  misc_RNA (1)...(19): siRNA sense strand
gcaccgggaagacaguauc

SEQ ID NO: 24298 - RNA, 19 nt, Homo sapiens
  misc_RNA (1)...(19): siRNA sense strand
cgggaccaguuccagauuc

SEQ ID NO: 24299 - RNA, 19 nt, Homo sapiens
  misc_RNA (1)...(19): siRNA sense strand
ccagcuaccaguacaugga

SEQ ID NO: 24300 - RNA, 19 nt, Homo sapiens
  misc_RNA (1)...(19): siRNA sense strand
caucagcuccaaauuugag

SEQ ID NO: 24301 - RNA, 19 nt, Homo sapiens
  misc_RNA (1)...(19): siRNA sense strand
caccgaccuugcugacuuc

SEQ ID NO: 24302 - RNA, 19 nt, Homo sapiens
  misc_RNA (1)...(19): siRNA sense strand
cgagggaaucgacuuugug

SEQ ID NO: 24303 - RNA, 19 nt, Homo sapiens
  misc_RNA (1)...(19): siRNA sense strand
gagaagagcuugcgaaaga

SEQ ID NO: 24304 - RNA, 19 nt, Homo sapiens
  misc_RNA (1)...(19): siRNA sense strand
ggauggagcugcagaauaa

SEQ ID NO: 24305 - RNA, 19 nt, Homo sapiens
  misc_RNA (1)...(19): siRNA sense strand
ggacaaggaugaagaagaa

SEQ ID NO: 24306 - RNA, 19 nt, Homo sapiens
  misc_RNA (1)...(19): siRNA sense strand
gcaccaaaguggaugaaua

SEQ ID NO: 24307 - RNA, 19 nt, Homo sapiens
  misc_RNA (1)...(19): siRNA sense strand
gaacaaacccuauaucuac

SEQ ID NO: 24308 - RNA, 19 nt, Homo sapiens
  misc_RNA (1)...(19): siRNA sense strand
ccacugagcucaucacaga

SEQ ID NO: 24309 - RNA, 19 nt, Homo sapiens
  misc_RNA (1)...(19): siRNA sense strand
gaauaugacuuccggaaug

SEQ ID NO: 24310 - RNA, 19 nt, Homo sapiens
  misc_RNA (1)...(19): siRNA sense strand
caaaguggaugaauaugga

SEQ ID NO: 24311 - RNA, 19 nt, Homo sapiens
  misc_RNA (1)...(19): siRNA sense strand
gggaauauguggcaaucaa

SEQ ID NO: 24312 - RNA, 19 nt, Homo sapiens
  misc_RNA (1)...(19): siRNA sense strand
gagaaugccgcuuaagaaa

SEQ ID NO: 24313 - RNA, 19 nt, Homo sapiens
  misc_RNA (1)...(19): siRNA sense strand
aaacgaaucuugcuguaca

SEQ ID NO: 24314 - RNA, 19 nt, Homo sapiens
  misc_RNA (1)...(19): siRNA sense strand
gcccacagcuguccucaga

SEQ ID NO: 24315 - RNA, 19 nt, Homo sapiens
  misc_RNA (1)...(19): siRNA sense strand
gaaugccgcuuaagaaacu

SEQ ID NO: 24316 - RNA, 19 nt, Homo sapiens
  misc_RNA (1)...(19): siRNA sense strand
gggaaaggaugcaaauucu

SEQ ID NO: 24317 - RNA, 19 nt, Homo sapiens
  misc_RNA (1)...(19): siRNA sense strand
caaccaagcggcagagauu

SEQ ID NO: 24318 - RNA, 19 nt, Homo sapiens
  misc_RNA (1)...(19): siRNA sense strand
ccaggaagcggcacuauga

SEQ ID NO: 24319 - RNA, 19 nt, Homo sapiens
  misc_RNA (1)...(19): siRNA sense strand
gaauuuggcuccagaucca

SEQ ID NO: 24320 - RNA, 19 nt, Homo sapiens
  misc_RNA (1)...(19): siRNA sense strand
ggaccuguuugacuucuau

SEQ ID NO: 24321 - RNA, 19 nt, Homo sapiens
  misc_RNA (1)...(19): siRNA sense strand
ggaaagcccaguucaagau

SEQ ID NO: 24322 - RNA, 19 nt, Homo sapiens
  misc_RNA (1)...(19): siRNA sense strand
gauccgagaaugccgcuua

SEQ ID NO: 24323 - RNA, 19 nt, Homo sapiens
  misc_RNA (1)...(19): siRNA sense strand
gaucaagguuauagcuuca

SEQ ID NO: 24324 - RNA, 19 nt, Homo sapiens
  misc_RNA (1)...(19): siRNA sense strand
ggaugaagaagaagaagaa

SEQ ID NO: 24325 - RNA, 19 nt, Homo sapiens
  misc_RNA (1)...(19): siRNA sense strand
ugacagauccacaggguaa

SEQ ID NO: 24326 - RNA, 19 nt, Homo sapiens
  misc_RNA (1)...(19): siRNA sense strand
caaauaugcccaagacuuc

SEQ ID NO: 24327 - RNA, 19 nt, Homo sapiens
  misc_RNA (1)...(19): siRNA sense strand
gacaauguguuugcccuaa

SEQ ID NO: 24328 - RNA, 19 nt, Homo sapiens
  misc_RNA (1)...(19): siRNA sense strand
gaaaguugccacccugaug

SEQ ID NO: 24329 - RNA, 19 nt, Homo sapiens
  misc_RNA (1)...(19): siRNA sense strand
cagcagcucuuacagaaag

SEQ ID NO: 24330 - RNA, 19 nt, Homo sapiens
  misc_RNA (1)...(19): siRNA sense strand
gcagaauaauggcuacauc

SEQ ID NO: 24331 - RNA, 19 nt, Homo sapiens
  misc_RNA (1)...(19): siRNA sense strand
gcacaacagauacuucguu

SEQ ID NO: 24332 - RNA, 19 nt, Homo sapiens
  misc_RNA (1)...(19): siRNA sense strand
caacagcagcucuuacaga

SEQ ID NO: 24333 - RNA, 19 nt, Homo sapiens
  misc_RNA (1)...(19): siRNA sense strand
ucucuccaguuuacaaaua

SEQ ID NO: 24334 - RNA, 19 nt, Homo sapiens
  misc_RNA (1)...(19): siRNA sense strand
ggaggaagacuuggcguuu

SEQ ID NO: 24335 - RNA, 19 nt, Homo sapiens
  misc_RNA (1)...(19): siRNA sense strand
ugaacaaacccuauaucua

SEQ ID NO: 24336 - RNA, 19 nt, Homo sapiens
  misc_RNA (1)...(19): siRNA sense strand
ggaggaaugacaagauuau

SEQ ID NO: 24337 - RNA, 19 nt, Homo sapiens
  misc_RNA (1)...(19): siRNA sense strand
auuuagagcuugccaguuu

SEQ ID NO: 24338 - RNA, 19 nt, Homo sapiens
  misc_RNA (1)...(19): siRNA sense strand
gauggaauuaugcaguuua

SEQ ID NO: 24339 - RNA, 19 nt, Homo sapiens
  misc_RNA (1)...(19): siRNA sense strand
cgacugaacaaacccuaua

SEQ ID NO: 24340 - RNA, 19 nt, Homo sapiens
  misc_RNA (1)...(19): siRNA sense strand
ccauggaccuguuugacuu

SEQ ID NO: 24341 - RNA, 19 nt, Homo sapiens
  misc_RNA (1)...(19): siRNA sense strand
cgagaaugccgcuuaagaa

SEQ ID NO: 24342 - RNA, 19 nt, Homo sapiens
  misc_RNA (1)...(19): siRNA sense strand
ugaagaggaugaugaagag

SEQ ID NO: 24343 - RNA, 19 nt, Homo sapiens
  misc_RNA (1)...(19): siRNA sense strand
gccaguuucugaucaaguu

SEQ ID NO: 24344 - RNA, 19 nt, Homo sapiens
  misc_RNA (1)...(19): siRNA sense strand
agaaacgaaucuugcugua

SEQ ID NO: 24345 - RNA, 19 nt, Homo sapiens
  misc_RNA (1)...(19): siRNA sense strand
cccuaugucuccugaauuu

SEQ ID NO: 24346 - RNA, 19 nt, Homo sapiens
  misc_RNA (1)...(19): siRNA sense strand
ucacagagacuuucacaag

SEQ ID NO: 24347 - RNA, 19 nt, Homo sapiens
  misc_RNA (1)...(19): siRNA sense strand
gaaaggaggaaugacaaga

SEQ ID NO: 24348 - RNA, 19 nt, Homo sapiens
  misc_RNA (1)...(19): siRNA sense strand
uggagucccugauggaauu

SEQ ID NO: 24349 - RNA, 19 nt, Homo sapiens
  misc_RNA (1)...(19): siRNA sense strand
gaaauggcuuacucaacca

SEQ ID NO: 24350 - RNA, 19 nt, Homo sapiens
  misc_RNA (1)...(19): siRNA sense strand
ggaugaagaggaugaugaa

SEQ ID NO: 24351 - RNA, 19 nt, Homo sapiens
  misc_RNA (1)...(19): siRNA sense strand
gcaaauggacaaggaugaa

SEQ ID NO: 24352 - RNA, 19 nt, Homo sapiens
  misc_RNA (1)...(19): siRNA sense strand
ugacuucuaugagcaaaug

SEQ ID NO: 24353 - RNA, 19 nt, Homo sapiens
  misc_RNA (1)...(19): siRNA sense strand
aacagcagcucuuacagaa

SEQ ID NO: 24354 - RNA, 19 nt, Homo sapiens
  misc_RNA (1)...(19): siRNA sense strand
ggaugaagugcacaccaua

SEQ ID NO: 24355 - RNA, 19 nt, Homo sapiens
  misc_RNA (1)...(19): siRNA sense strand
ugcgaaagauguuuggaaa

SEQ ID NO: 24356 - RNA, 19 nt, Homo sapiens
  misc_RNA (1)...(19): siRNA sense strand
gaagaagaagagacacaga

SEQ ID NO: 24357 - RNA, 19 nt, Homo sapiens
  misc_RNA (1)...(19): siRNA sense strand
uuacaaauaugcccaagac

SEQ ID NO: 24358 - RNA, 19 nt, Homo sapiens
  misc_RNA (1)...(19): siRNA sense strand
gcuucaaggugaucacgaa

SEQ ID NO: 24359 - RNA, 19 nt, Homo sapiens
  misc_RNA (1)...(19): siRNA sense strand
aaggaggaaugacaagauu

SEQ ID NO: 24360 - RNA, 19 nt, Homo sapiens
  misc_RNA (1)...(19): siRNA sense strand
gaaucuugcuguacaccau

SEQ ID NO: 24361 - RNA, 19 nt, Homo sapiens
  misc_RNA (1)...(19): siRNA sense strand
ggaauauguggcaaucaaa

SEQ ID NO: 24362 - RNA, 19 nt, Homo sapiens
  misc_RNA (1)...(19): siRNA sense strand
ggaaaugauugaggaacuc

SEQ ID NO: 24363 - RNA, 19 nt, Homo sapiens
  misc_RNA (1)...(19): siRNA sense strand
gaagucaagcaggaaauga

SEQ ID NO: 24364 - RNA, 19 nt, Homo sapiens
  misc_RNA (1)...(19): siRNA sense strand
gaggaacuccagaaacguu

SEQ ID NO: 24365 - RNA, 19 nt, Homo sapiens
  misc_RNA (1)...(19): siRNA sense strand
ccaggcaucucggcgcuuu

SEQ ID NO: 24366 - RNA, 19 nt, Homo sapiens
  misc_RNA (1)...(19): siRNA sense strand
acacacaggaaauggcuua

SEQ ID NO: 24367 - RNA, 19 nt, Homo sapiens
  misc_RNA (1)...(19): siRNA sense strand
gaagagcuugcgaaagaug

SEQ ID NO: 24368 - RNA, 19 nt, Homo sapiens
  misc_RNA (1)...(19): siRNA sense strand
caacccugauaucaacauu

SEQ ID NO: 24369 - RNA, 19 nt, Homo sapiens
  misc_RNA (1)...(19): siRNA sense strand
gaaagcccaguucaagaug

SEQ ID NO: 24370 - RNA, 19 nt, Homo sapiens
  misc_RNA (1)...(19): siRNA sense strand
caccaaaguggaugaauau

SEQ ID NO: 24371 - RNA, 19 nt, Homo sapiens
  misc_RNA (1)...(19): siRNA sense strand
ccgcgaagaugacaaaauu

SEQ ID NO: 24372 - RNA, 19 nt, Homo sapiens
  misc_RNA (1)...(19): siRNA sense strand
acaaauaugcccaagacuu

SEQ ID NO: 24373 - RNA, 19 nt, Homo sapiens
  misc_RNA (1)...(19): siRNA sense strand
acagauacuucguugaaag

SEQ ID NO: 24374 - RNA, 19 nt, Homo sapiens
  misc_RNA (1)...(19): siRNA sense strand
uucaagcgcuuuaggaaau

SEQ ID NO: 24375 - RNA, 19 nt, Homo sapiens
  misc_RNA (1)...(19): siRNA sense strand
aauaugacuuccggaauga

SEQ ID NO: 24376 - RNA, 19 nt, Homo sapiens
  misc_RNA (1)...(19): siRNA sense strand
acagagacuuucacaagca

SEQ ID NO: 24377 - RNA, 19 nt, Homo sapiens
  misc_RNA (1)...(19): siRNA sense strand
aagcacaaccccaaaauua

SEQ ID NO: 24378 - RNA, 19 nt, Homo sapiens
  misc_RNA (1)...(19): siRNA sense strand
gcaacucagcuguuucugu

SEQ ID NO: 24379 - RNA, 19 nt, Homo sapiens
  misc_RNA (1)...(19): siRNA sense strand
ucuugaagcacaacagaua

SEQ ID NO: 24380 - RNA, 19 nt, Homo sapiens
  misc_RNA (1)...(19): siRNA sense strand
gcagagauucuugguagau

SEQ ID NO: 24381 - RNA, 19 nt, Homo sapiens
  misc_RNA (1)...(19): siRNA sense strand
caaggaugaagaagaagaa

SEQ ID NO: 24382 - RNA, 19 nt, Homo sapiens
  misc_RNA (1)...(19): siRNA sense strand
ucaggaagcucagcaagac

SEQ ID NO: 24383 - RNA, 19 nt, Homo sapiens
  misc_RNA (1)...(19): siRNA sense strand
ggugacacuucguuugauc

SEQ ID NO: 24384 - RNA, 19 nt, Homo sapiens
  misc_RNA (1)...(19): siRNA sense strand
uguuugcccuaaaggaaua

SEQ ID NO: 24385 - RNA, 19 nt, Homo sapiens
  misc_RNA (1)...(19): siRNA sense strand
acaauguguuugcccuaaa

SEQ ID NO: 24386 - RNA, 19 nt, Homo sapiens
  misc_RNA (1)...(19): siRNA sense strand
gaggucuggugcccuaugu

SEQ ID NO: 24387 - RNA, 19 nt, Homo sapiens
  misc_RNA (1)...(19): siRNA sense strand
gagccagugugccgaccaa

SEQ ID NO: 24388 - RNA, 19 nt, Homo sapiens
  misc_RNA (1)...(19): siRNA sense strand
ucaaggugaucacgaaacu

SEQ ID NO: 24389 - RNA, 19 nt, Homo sapiens
  misc_RNA (1)...(19): siRNA sense strand
caauguguuugcccuaaag

SEQ ID NO: 24390 - RNA, 19 nt, Homo sapiens
  misc_RNA (1)...(19): siRNA sense strand
ugucaacccugauaucaac

SEQ ID NO: 24391 - RNA, 19 nt, Homo sapiens
  misc_RNA (1)...(19): siRNA sense strand
ugaagaagaagaagaagag

SEQ ID NO: 24392 - RNA, 19 nt, Homo sapiens
  misc_RNA (1)...(19): siRNA sense strand
gaagaagaagaagaagaga

SEQ ID NO: 24393 - RNA, 19 nt, Homo sapiens
  misc_RNA (1)...(19): siRNA sense strand
caccaugaguucuaugucu

SEQ ID NO: 24394 - RNA, 19 nt, Homo sapiens
  misc_RNA (1)...(19): siRNA sense strand
guaggugacacuucguuug

SEQ ID NO: 24395 - RNA, 19 nt, Homo sapiens
  misc_RNA (1)...(19): siRNA sense strand
cccaacaaauuuagagcuu

SEQ ID NO: 24396 - RNA, 19 nt, Homo sapiens
  misc_RNA (1)...(19): siRNA sense strand
cgauggccauaucuucuug

SEQ ID NO: 24397 - RNA, 19 nt, Homo sapiens
  misc_RNA (1)...(19): siRNA sense strand
gauugaggaacuccagaaa

SEQ ID NO: 24398 - RNA, 19 nt, Homo sapiens
  misc_RNA (1)...(19): siRNA sense strand
ggugguggcuggggaauuu

SEQ ID NO: 24399 - RNA, 19 nt, Homo sapiens
  misc_RNA (1)...(19): siRNA sense strand
gaggaagacuuggcguuuu

SEQ ID NO: 24400 - RNA, 19 nt, Homo sapiens
  misc_RNA (1)...(19): siRNA sense strand
gcauggaggaggaagacuu

SEQ ID NO: 24401 - RNA, 19 nt, Homo sapiens
  misc_RNA (1)...(19): siRNA sense strand
ggaugagucaggcaccaaa

SEQ ID NO: 24402 - RNA, 19 nt, Homo sapiens
  misc_RNA (1)...(19): siRNA sense strand
caccauaccagccaagaug

SEQ ID NO: 24403 - RNA, 19 nt, Homo sapiens
  misc_RNA (1)...(19): siRNA sense strand
caugaaaucuugacugaua

SEQ ID NO: 24404 - RNA, 19 nt, Homo sapiens
  misc_RNA (1)...(19): siRNA sense strand
gaaauugacucggaagaaa

SEQ ID NO: 24405 - RNA, 19 nt, Homo sapiens
  misc_RNA (1)...(19): siRNA sense strand
gaacgcaccugcugcugua

SEQ ID NO: 24406 - RNA, 19 nt, Homo sapiens
  misc_RNA (1)...(19): siRNA sense strand
gaaagaagaugcuaaacgu

SEQ ID NO: 24407 - RNA, 19 nt, Homo sapiens
  misc_RNA (1)...(19): siRNA sense strand
gaacgaacuuugcccauau

SEQ ID NO: 24408 - RNA, 19 nt, Homo sapiens
  misc_RNA (1)...(19): siRNA sense strand
gaaggaagcucccgugaag

SEQ ID NO: 24409 - RNA, 19 nt, Homo sapiens
  misc_RNA (1)...(19): siRNA sense strand
cuaaagagcaugagaauuu

SEQ ID NO: 24410 - RNA, 19 nt, Homo sapiens
  misc_RNA (1)...(19): siRNA sense strand
gaacagugaugaaggacuu

SEQ ID NO: 24411 - RNA, 19 nt, Homo sapiens
  misc_RNA (1)...(19): siRNA sense strand
gauccuggcuguugauauu

SEQ ID NO: 24412 - RNA, 19 nt, Homo sapiens
  misc_RNA (1)...(19): siRNA sense strand
gaagucaucuccaugugaa

SEQ ID NO: 24413 - RNA, 19 nt, Homo sapiens
  misc_RNA (1)...(19): siRNA sense strand
gaagaaaugcguauaaaca

SEQ ID NO: 24414 - RNA, 19 nt, Homo sapiens
  misc_RNA (1)...(19): siRNA sense strand
gaaagaauuugagcuacuu

SEQ ID NO: 24415 - RNA, 19 nt, Homo sapiens
  misc_RNA (1)...(19): siRNA sense strand
caugggaacucaauagaaa

SEQ ID NO: 24416 - RNA, 19 nt, Homo sapiens
  misc_RNA (1)...(19): siRNA sense strand
ggagaaagaauuugagcua

SEQ ID NO: 24417 - RNA, 19 nt, Homo sapiens
  misc_RNA (1)...(19): siRNA sense strand
gaaagugaaucugauggaa

SEQ ID NO: 24418 - RNA, 19 nt, Homo sapiens
  misc_RNA (1)...(19): siRNA sense strand
gaacuuugcccauaugaga

SEQ ID NO: 24419 - RNA, 19 nt, Homo sapiens
  misc_RNA (1)...(19): siRNA sense strand
caaaagagaugaagcacua

SEQ ID NO: 24420 - RNA, 19 nt, Homo sapiens
  misc_RNA (1)...(19): siRNA sense strand
gaagagaggcauaacaaau

SEQ ID NO: 24421 - RNA, 19 nt, Homo sapiens
  misc_RNA (1)...(19): siRNA sense strand
gaagaugcuaaacguauua

SEQ ID NO: 24422 - RNA, 19 nt, Homo sapiens
  misc_RNA (1)...(19): siRNA sense strand
gcaagaaacaaguagcaua

SEQ ID NO: 24423 - RNA, 19 nt, Homo sapiens
  misc_RNA (1)...(19): siRNA sense strand
cgauagauauugagucuga

SEQ ID NO: 24424 - RNA, 19 nt, Homo sapiens
  misc_RNA (1)...(19): siRNA sense strand
ggaagaaagugaaucugau

SEQ ID NO: 24425 - RNA, 19 nt, Homo sapiens
  misc_RNA (1)...(19): siRNA sense strand
gcagaagaaaugcguauaa

SEQ ID NO: 24426 - RNA, 19 nt, Homo sapiens
  misc_RNA (1)...(19): siRNA sense strand
ugacugauaugaaagaguu

SEQ ID NO: 24427 - RNA, 19 nt, Homo sapiens
  misc_RNA (1)...(19): siRNA sense strand
gaauuugagcuacuugaua

SEQ ID NO: 24428 - RNA, 19 nt, Homo sapiens
  misc_RNA (1)...(19): siRNA sense strand
ggagaaagaagaugcuaaa

SEQ ID NO: 24429 - RNA, 19 nt, Homo sapiens
  misc_RNA (1)...(19): siRNA sense strand
ccauggaaauucucaauga

SEQ ID NO: 24430 - RNA, 19 nt, Homo sapiens
  misc_RNA (1)...(19): siRNA sense strand
ggaagauccuggcuguuga

SEQ ID NO: 24431 - RNA, 19 nt, Homo sapiens
  misc_RNA (1)...(19): siRNA sense strand
ggaauaccguuuacugcaa

SEQ ID NO: 24432 - RNA, 19 nt, Homo sapiens
  misc_RNA (1)...(19): siRNA sense strand
aagaggagcuggagaguga

SEQ ID NO: 24433 - RNA, 19 nt, Homo sapiens
  misc_RNA (1)...(19): siRNA sense strand
ccaagaacuuuacuagcua

SEQ ID NO: 24434 - RNA, 19 nt, Homo sapiens
  misc_RNA (1)...(19): siRNA sense strand
gaagcacuacccagucuua

SEQ ID NO: 24435 - RNA, 19 nt, Homo sapiens
  misc_RNA (1)...(19): siRNA sense strand
gaauacaugcgguggauuu

SEQ ID NO: 24436 - RNA, 19 nt, Homo sapiens
  misc_RNA (1)...(19): siRNA sense strand
gcugugacauguaugcuaa

SEQ ID NO: 24437 - RNA, 19 nt, Homo sapiens
  misc_RNA (1)...(19): siRNA sense strand
gaaaccugaucucgacaaa

SEQ ID NO: 24438 - RNA, 19 nt, Homo sapiens
  misc_RNA (1)...(19): siRNA sense strand
ggaccggaauaaguuaaua

SEQ ID NO: 24439 - RNA, 19 nt, Homo sapiens
  misc_RNA (1)...(19): siRNA sense strand
cagaagaaaugcguauaaa

SEQ ID NO: 24440 - RNA, 19 nt, Homo sapiens
  misc_RNA (1)...(19): siRNA sense strand
gaacgaagacagaugaauc

SEQ ID NO: 24441 - RNA, 19 nt, Homo sapiens
  misc_RNA (1)...(19): siRNA sense strand
gcaugucuauagaaacuuu

SEQ ID NO: 24442 - RNA, 19 nt, Homo sapiens
  misc_RNA (1)...(19): siRNA sense strand
ggcaagauauuaauuugga

SEQ ID NO: 24443 - RNA, 19 nt, Homo sapiens
  misc_RNA (1)...(19): siRNA sense strand
ugacauguaugcuaaggaa

SEQ ID NO: 24444 - RNA, 19 nt, Homo sapiens
  misc_RNA (1)...(19): siRNA sense strand
agacacagcuccgaauuga

SEQ ID NO: 24445 - RNA, 19 nt, Homo sapiens
  misc_RNA (1)...(19): siRNA sense strand
gauaagaccuaauccucau

SEQ ID NO: 24446 - RNA, 19 nt, Homo sapiens
  misc_RNA (1)...(19): siRNA sense strand
ggaaaugaaucagcaacau

SEQ ID NO: 24447 - RNA, 19 nt, Homo sapiens
  misc_RNA (1)...(19): siRNA sense strand
gaaucucuguuuccuguau

SEQ ID NO: 24448 - RNA, 19 nt, Homo sapiens
  misc_RNA (1)...(19): siRNA sense strand
ugaaacacaugcugaagug

SEQ ID NO: 24449 - RNA, 19 nt, Homo sapiens
  misc_RNA (1)...(19): siRNA sense strand
uaagacaguugcagaagug

SEQ ID NO: 24450 - RNA, 19 nt, Homo sapiens
  misc_RNA (1)...(19): siRNA sense strand
gaaacagacuuuggugaag

SEQ ID NO: 24451 - RNA, 19 nt, Homo sapiens
  misc_RNA (1)...(19): siRNA sense strand
gaagugcaaagugugauua

SEQ ID NO: 24452 - RNA, 19 nt, Homo sapiens
  misc_RNA (1)...(19): siRNA sense strand
gaacuuuacuagcuaugca

SEQ ID NO: 24453 - RNA, 19 nt, Homo sapiens
  misc_RNA (1)...(19): siRNA sense strand
gcgcagaagaacauuauuu

SEQ ID NO: 24454 - RNA, 19 nt, Homo sapiens
  misc_RNA (1)...(19): siRNA sense strand
gaagaaagugaaucugaug

SEQ ID NO: 24455 - RNA, 19 nt, Homo sapiens
  misc_RNA (1)...(19): siRNA sense strand
gagaguaaauucgauucuu

SEQ ID NO: 24456 - RNA, 19 nt, Homo sapiens
  misc_RNA (1)...(19): siRNA sense strand
agugaugagucuaugauua

SEQ ID NO: 24457 - RNA, 19 nt, Homo sapiens
  misc_RNA (1)...(19): siRNA sense strand
gcacguagccagcacuaau

SEQ ID NO: 24458 - RNA, 19 nt, Homo sapiens
  misc_RNA (1)...(19): siRNA sense strand
caacucaaaggcuugcuua

SEQ ID NO: 24459 - RNA, 19 nt, Homo sapiens
  misc_RNA (1)...(19): siRNA sense strand
gcagaagaacauuauuuga

SEQ ID NO: 24460 - RNA, 19 nt, Homo sapiens
  misc_RNA (1)...(19): siRNA sense strand
cgagaacagugaugaagga

SEQ ID NO: 24461 - RNA, 19 nt, Homo sapiens
  misc_RNA (1)...(19): siRNA sense strand
acaaauaccuuagaagagu

SEQ ID NO: 24462 - RNA, 19 nt, Homo sapiens
  misc_RNA (1)...(19): siRNA sense strand
aagagaggcauaacaaaua

SEQ ID NO: 24463 - RNA, 19 nt, Homo sapiens
  misc_RNA (1)...(19): siRNA sense strand
caagcagaauucccugaaa

SEQ ID NO: 24464 - RNA, 19 nt, Homo sapiens
  misc_RNA (1)...(19): siRNA sense strand
ucauaauccucaagcgaua

SEQ ID NO: 24465 - RNA, 19 nt, Homo sapiens
  misc_RNA (1)...(19): siRNA sense strand
gaacagcagaccacugaau

SEQ ID NO: 24466 - RNA, 19 nt, Homo sapiens
  misc_RNA (1)...(19): siRNA sense strand
gugaugagucuaugauuaa

SEQ ID NO: 24467 - RNA, 19 nt, Homo sapiens
  misc_RNA (1)...(19): siRNA sense strand
gacugaagccuuuccgaua

SEQ ID NO: 24468 - RNA, 19 nt, Homo sapiens
  misc_RNA (1)...(19): siRNA sense strand
gaaccagcauauagaacau

SEQ ID NO: 24469 - RNA, 19 nt, Homo sapiens
  misc_RNA (1)...(19): siRNA sense strand
caagugaugaugaaacaaa

SEQ ID NO: 24470 - RNA, 19 nt, Homo sapiens
  misc_RNA (1)...(19): siRNA sense strand
agaacgaacuuugcccaua

SEQ ID NO: 24471 - RNA, 19 nt, Homo sapiens
  misc_RNA (1)...(19): siRNA sense strand
gaaugaaacacaugcugaa

SEQ ID NO: 24472 - RNA, 19 nt, Homo sapiens
  misc_RNA (1)...(19): siRNA sense strand
gaaggcaguaugaagauga

SEQ ID NO: 24473 - RNA, 19 nt, Homo sapiens
  misc_RNA (1)...(19): siRNA sense strand
aaacagacuuuggugaaga

SEQ ID NO: 24474 - RNA, 19 nt, Homo sapiens
  misc_RNA (1)...(19): siRNA sense strand
ugagaaagaugcggaagau

SEQ ID NO: 24475 - RNA, 19 nt, Homo sapiens
  misc_RNA (1)...(19): siRNA sense strand
ggaaauugacucggaagaa

SEQ ID NO: 24476 - RNA, 19 nt, Homo sapiens
  misc_RNA (1)...(19): siRNA sense strand
acugaagccuuuccgauaa

SEQ ID NO: 24477 - RNA, 19 nt, Homo sapiens
  misc_RNA (1)...(19): siRNA sense strand
ggaaaaggaauaccguuua

SEQ ID NO: 24478 - RNA, 19 nt, Homo sapiens
  misc_RNA (1)...(19): siRNA sense strand
gaaaagacaagccaucaaa

SEQ ID NO: 24479 - RNA, 19 nt, Homo sapiens
  misc_RNA (1)...(19): siRNA sense strand
accagcagcucuagugaua

SEQ ID NO: 24480 - RNA, 19 nt, Homo sapiens
  misc_RNA (1)...(19): siRNA sense strand
acacagcuccgaauugauu

SEQ ID NO: 24481 - RNA, 19 nt, Homo sapiens
  misc_RNA (1)...(19): siRNA sense strand
ucaaacccgugguggauga

SEQ ID NO: 24482 - RNA, 19 nt, Homo sapiens
  misc_RNA (1)...(19): siRNA sense strand
gcauauagaacauguccaa

SEQ ID NO: 24483 - RNA, 19 nt, Homo sapiens
  misc_RNA (1)...(19): siRNA sense strand
caagaacuuuacuagcuau

SEQ ID NO: 24484 - RNA, 19 nt, Homo sapiens
  misc_RNA (1)...(19): siRNA sense strand
ccaaagauaagaccuaauc

SEQ ID NO: 24485 - RNA, 19 nt, Homo sapiens
  misc_RNA (1)...(19): siRNA sense strand
caaaggccguggaaccaau

SEQ ID NO: 24486 - RNA, 19 nt, Homo sapiens
  misc_RNA (1)...(19): siRNA sense strand
gauaagugaugagucuaug

SEQ ID NO: 24487 - RNA, 19 nt, Homo sapiens
  misc_RNA (1)...(19): siRNA sense strand
gcucugcaaacucuuauuu

SEQ ID NO: 24488 - RNA, 19 nt, Homo sapiens
  misc_RNA (1)...(19): siRNA sense strand
gggaagauccuggcuguug

SEQ ID NO: 24489 - RNA, 19 nt, Homo sapiens
  misc_RNA (1)...(19): siRNA sense strand
gaugcuaaacguauuaaga

SEQ ID NO: 24490 - RNA, 19 nt, Homo sapiens
  misc_RNA (1)...(19): siRNA sense strand
gaacagaacgaagacagau

SEQ ID NO: 24491 - RNA, 19 nt, Homo sapiens
  misc_RNA (1)...(19): siRNA sense strand
uuacggacauugcaacuca

SEQ ID NO: 24492 - RNA, 19 nt, Homo sapiens
  misc_RNA (1)...(19): siRNA sense strand
acaggaagcugagaaagau

SEQ ID NO: 24493 - RNA, 19 nt, Homo sapiens
  misc_RNA (1)...(19): siRNA sense strand
aaaccaagcacuuaaagga

SEQ ID NO: 24494 - RNA, 19 nt, Homo sapiens
  misc_RNA (1)...(19): siRNA sense strand
caucaaaacugccuucaga

SEQ ID NO: 24495 - RNA, 19 nt, Homo sapiens
  misc_RNA (1)...(19): siRNA sense strand
cagaagagaggcauaacaa

SEQ ID NO: 24496 - RNA, 19 nt, Homo sapiens
  misc_RNA (1)...(19): siRNA sense strand
agaagaugcuaaacguauu

SEQ ID NO: 24497 - RNA, 19 nt, Homo sapiens
  misc_RNA (1)...(19): siRNA sense strand
agugauaucuggcuguuug

SEQ ID NO: 24498 - RNA, 19 nt, Homo sapiens
  misc_RNA (1)...(19): siRNA sense strand
gcacagcagaauucacuga

SEQ ID NO: 24499 - RNA, 19 nt, Homo sapiens
  misc_RNA (1)...(19): siRNA sense strand
aguaaagcaugaaaucuug

SEQ ID NO: 24500 - RNA, 19 nt, Homo sapiens
  misc_RNA (1)...(19): siRNA sense strand
gccaggagcagaagaaaug

SEQ ID NO: 24501 - RNA, 19 nt, Homo sapiens
  misc_RNA (1)...(19): siRNA sense strand
caucaagccugaaaagaaa

SEQ ID NO: 24502 - RNA, 19 nt, Homo sapiens
  misc_RNA (1)...(19): siRNA sense strand
cauggaaauucucaaugaa

SEQ ID NO: 24503 - RNA, 19 nt, Homo sapiens
  misc_RNA (1)...(19): siRNA sense strand
ggaaagugaugcugaauuu

SEQ ID NO: 24504 - RNA, 19 nt, Homo sapiens
  misc_RNA (1)...(19): siRNA sense strand
uaaaggagcugaaguaaau

SEQ ID NO: 24505 - RNA, 19 nt, Homo sapiens
  misc_RNA (1)...(19): siRNA sense strand
gaagcaagguuguaauaaa

SEQ ID NO: 24506 - RNA, 19 nt, Homo sapiens
  misc_RNA (1)...(19): siRNA sense strand
ggagauugaugaugacuuu

SEQ ID NO: 24507 - RNA, 19 nt, Homo sapiens
  misc_RNA (1)...(19): siRNA sense strand
gcaugugucuuacgagaua

SEQ ID NO: 24508 - RNA, 19 nt, Homo sapiens
  misc_RNA (1)...(19): siRNA sense strand
gaagucagaugucaagaug

SEQ ID NO: 24509 - RNA, 19 nt, Homo sapiens
  misc_RNA (1)...(19): siRNA sense strand
gaagaguugucagugauua

SEQ ID NO: 24510 - RNA, 19 nt, Homo sapiens
  misc_RNA (1)...(19): siRNA sense strand
caaagaaguuuacaggauu

SEQ ID NO: 24511 - RNA, 19 nt, Homo sapiens
  misc_RNA (1)...(19): siRNA sense strand
gcagagacaucaacaggaa

SEQ ID NO: 24512 - RNA, 19 nt, Homo sapiens
  misc_RNA (1)...(19): siRNA sense strand
gaagagggcuuugcaguuc

SEQ ID NO: 24513 - RNA, 19 nt, Homo sapiens
  misc_RNA (1)...(19): siRNA sense strand
aaacagaguugucaucuau

SEQ ID NO: 24514 - RNA, 19 nt, Homo sapiens
  misc_RNA (1)...(19): siRNA sense strand
ucaaaggucuuccugauga

SEQ ID NO: 24515 - RNA, 19 nt, Homo sapiens
  misc_RNA (1)...(19): siRNA sense strand
gaaacuaauucgagauguu

SEQ ID NO: 24516 - RNA, 19 nt, Homo sapiens
  misc_RNA (1)...(19): siRNA sense strand
caaccacccugaucucuuu

SEQ ID NO: 24517 - RNA, 19 nt, Homo sapiens
  misc_RNA (1)...(19): siRNA sense strand
gaaggaauuuggaaacuca

SEQ ID NO: 24518 - RNA, 19 nt, Homo sapiens
  misc_RNA (1)...(19): siRNA sense strand
gaaaugggauugggcaaga

SEQ ID NO: 24519 - RNA, 19 nt, Homo sapiens
  misc_RNA (1)...(19): siRNA sense strand
ugagaaaucugugcacuuu

SEQ ID NO: 24520 - RNA, 19 nt, Homo sapiens
  misc_RNA (1)...(19): siRNA sense strand
ccuaagaacucuaagcauu

SEQ ID NO: 24521 - RNA, 19 nt, Homo sapiens
  misc_RNA (1)...(19): siRNA sense strand
ggucugagcuacagcaaga

SEQ ID NO: 24522 - RNA, 19 nt, Homo sapiens
  misc_RNA (1)...(19): siRNA sense strand
gcaguaacuucuaaucgaa

SEQ ID NO: 24523 - RNA, 19 nt, Homo sapiens
  misc_RNA (1)...(19): siRNA sense strand
gagauaccauaaauccaua

SEQ ID NO: 24524 - RNA, 19 nt, Homo sapiens
  misc_RNA (1)...(19): siRNA sense strand
ggaggacgauucugaggaa

SEQ ID NO: 24525 - RNA, 19 nt, Homo sapiens
  misc_RNA (1)...(19): siRNA sense strand
gaggacacauccauauuug

SEQ ID NO: 24526 - RNA, 19 nt, Homo sapiens
  misc_RNA (1)...(19): siRNA sense strand
ccaaagaaguuuacaggau

SEQ ID NO: 24527 - RNA, 19 nt, Homo sapiens
  misc_RNA (1)...(19): siRNA sense strand
gcaagaccauccagauaau

SEQ ID NO: 24528 - RNA, 19 nt, Homo sapiens
  misc_RNA (1)...(19): siRNA sense strand
gaucaggacucgugguuca

SEQ ID NO: 24529 - RNA, 19 nt, Homo sapiens
  misc_RNA (1)...(19): siRNA sense strand
gagcagaggugaaaauuga

SEQ ID NO: 24530 - RNA, 19 nt, Homo sapiens
  misc_RNA (1)...(19): siRNA sense strand
gaguagauuugguaagaaa

SEQ ID NO: 24531 - RNA, 19 nt, Homo sapiens
  misc_RNA (1)...(19): siRNA sense strand
gaacagagcaaugacgauu

SEQ ID NO: 24532 - RNA, 19 nt, Homo sapiens
  misc_RNA (1)...(19): siRNA sense strand
ccagauaauugccuucuug

SEQ ID NO: 24533 - RNA, 19 nt, Homo sapiens
  misc_RNA (1)...(19): siRNA sense strand
ggacucgugguucaaauua

SEQ ID NO: 24534 - RNA, 19 nt, Homo sapiens
  misc_RNA (1)...(19): siRNA sense strand
ggaagaagcaagguuguaa

SEQ ID NO: 24535 - RNA, 19 nt, Homo sapiens
  misc_RNA (1)...(19): siRNA sense strand
gaaaaggaauucuaacuuc

SEQ ID NO: 24536 - RNA, 19 nt, Homo sapiens
  misc_RNA (1)...(19): siRNA sense strand
caaauccaaugaucucuau

SEQ ID NO: 24537 - RNA, 19 nt, Homo sapiens
  misc_RNA (1)...(19): siRNA sense strand
gugaagagucugaguauuu

SEQ ID NO: 24538 - RNA, 19 nt, Homo sapiens
  misc_RNA (1)...(19): siRNA sense strand
gaugaaagcauugaugaaa

SEQ ID NO: 24539 - RNA, 19 nt, Homo sapiens
  misc_RNA (1)...(19): siRNA sense strand
ccagaagaguugucaguga

SEQ ID NO: 24540 - RNA, 19 nt, Homo sapiens
  misc_RNA (1)...(19): siRNA sense strand
gcaagaaagugguggugau

SEQ ID NO: 24541 - RNA, 19 nt, Homo sapiens
  misc_RNA (1)...(19): siRNA sense strand
ucaagaaacuccagaagag

SEQ ID NO: 24542 - RNA, 19 nt, Homo sapiens
  misc_RNA (1)...(19): siRNA sense strand
ugagaaacuucaucgcuuu

SEQ ID NO: 24543 - RNA, 19 nt, Homo sapiens
  misc_RNA (1)...(19): siRNA sense strand
caaacagaguugucaucua

SEQ ID NO: 24544 - RNA, 19 nt, Homo sapiens
  misc_RNA (1)...(19): siRNA sense strand
caagugugcaugugucuua

SEQ ID NO: 24545 - RNA, 19 nt, Homo sapiens
  misc_RNA (1)...(19): siRNA sense strand
gcacguugccuguguuuau

SEQ ID NO: 24546 - RNA, 19 nt, Homo sapiens
  misc_RNA (1)...(19): siRNA sense strand
ggaguuugaauccaaguua

SEQ ID NO: 24547 - RNA, 19 nt, Homo sapiens
  misc_RNA (1)...(19): siRNA sense strand
ugauggagaugaagauuau

SEQ ID NO: 24548 - RNA, 19 nt, Homo sapiens
  misc_RNA (1)...(19): siRNA sense strand
cgagaacuauugagaaauc

SEQ ID NO: 24549 - RNA, 19 nt, Homo sapiens
  misc_RNA (1)...(19): siRNA sense strand
gagcgagcauggagaauag

SEQ ID NO: 24550 - RNA, 19 nt, Homo sapiens
  misc_RNA (1)...(19): siRNA sense strand
cgacagaaguauaauaagg

SEQ ID NO: 24551 - RNA, 19 nt, Homo sapiens
  misc_RNA (1)...(19): siRNA sense strand
cacaucaucugaagagaaa

SEQ ID NO: 24552 - RNA, 19 nt, Homo sapiens
  misc_RNA (1)...(19): siRNA sense strand
uaccauaaauccauaccua

SEQ ID NO: 24553 - RNA, 19 nt, Homo sapiens
  misc_RNA (1)...(19): siRNA sense strand
gagauggaauaaacugaga

SEQ ID NO: 24554 - RNA, 19 nt, Homo sapiens
  misc_RNA (1)...(19): siRNA sense strand
ggcaagaccauccagauaa

SEQ ID NO: 24555 - RNA, 19 nt, Homo sapiens
  misc_RNA (1)...(19): siRNA sense strand
guacccagaucccucagaa

SEQ ID NO: 24556 - RNA, 19 nt, Homo sapiens
  misc_RNA (1)...(19): siRNA sense strand
ccagagcacugaaacaagu

SEQ ID NO: 24557 - RNA, 19 nt, Homo sapiens
  misc_RNA (1)...(19): siRNA sense strand
ucaagacagccacugauua

SEQ ID NO: 24558 - RNA, 19 nt, Homo sapiens
  misc_RNA (1)...(19): siRNA sense strand
gggcaagaccauccagaua

SEQ ID NO: 24559 - RNA, 19 nt, Homo sapiens
  misc_RNA (1)...(19): siRNA sense strand
ggaaacggcagaagaaagu

SEQ ID NO: 24560 - RNA, 19 nt, Homo sapiens
  misc_RNA (1)...(19): siRNA sense strand
ggaaaaugauuguuguuga

SEQ ID NO: 24561 - RNA, 19 nt, Homo sapiens
  misc_RNA (1)...(19): siRNA sense strand
agagaaaucugaggcuaaa

SEQ ID NO: 24562 - RNA, 19 nt, Homo sapiens
  misc_RNA (1)...(19): siRNA sense strand
uaugagcuauuuacucuga

SEQ ID NO: 24563 - RNA, 19 nt, Homo sapiens
  misc_RNA (1)...(19): siRNA sense strand
uuaaggagauggaauaaac

SEQ ID NO: 24564 - RNA, 19 nt, Homo sapiens
  misc_RNA (1)...(19): siRNA sense strand
agaaacaucugagaccaaa

SEQ ID NO: 24565 - RNA, 19 nt, Homo sapiens
  misc_RNA (1)...(19): siRNA sense strand
ugaaguaaaugcaguaacu

SEQ ID NO: 24566 - RNA, 19 nt, Homo sapiens
  misc_RNA (1)...(19): siRNA sense strand
ggagcgagcauggagaaua

SEQ ID NO: 24567 - RNA, 19 nt, Homo sapiens
  misc_RNA (1)...(19): siRNA sense strand
gaaaggaagaagcaagguu

SEQ ID NO: 24568 - RNA, 19 nt, Homo sapiens
  misc_RNA (1)...(19): siRNA sense strand
aagaguagauuugguaaga

SEQ ID NO: 24569 - RNA, 19 nt, Homo sapiens
  misc_RNA (1)...(19): siRNA sense strand
gaguggcaauucuacauga

SEQ ID NO: 24570 - RNA, 19 nt, Homo sapiens
  misc_RNA (1)...(19): siRNA sense strand
gaggaauucugggagauga

SEQ ID NO: 24571 - RNA, 19 nt, Homo sapiens
  misc_RNA (1)...(19): siRNA sense strand
caugaaaccgguuccuaua

SEQ ID NO: 24572 - RNA, 19 nt, Homo sapiens
  misc_RNA (1)...(19): siRNA sense strand
guaaaugcaguaacuucua

SEQ ID NO: 24573 - RNA, 19 nt, Homo sapiens
  misc_RNA (1)...(19): siRNA sense strand
gcucaccgaugcaaaauaa

SEQ ID NO: 24574 - RNA, 19 nt, Homo sapiens
  misc_RNA (1)...(19): siRNA sense strand
ggacgauucugaggaaagu

SEQ ID NO: 24575 - RNA, 19 nt, Homo sapiens
  misc_RNA (1)...(19): siRNA sense strand
gagcaaugacgauuauguu

SEQ ID NO: 24576 - RNA, 19 nt, Homo sapiens
  misc_RNA (1)...(19): siRNA sense strand
gaugguaccacuacaauag

SEQ ID NO: 24577 - RNA, 19 nt, Homo sapiens
  misc_RNA (1)...(19): siRNA sense strand
ugaagagucugaguauuuc

SEQ ID NO: 24578 - RNA, 19 nt, Homo sapiens
  misc_RNA (1)...(19): siRNA sense strand
acagagcaaugacgauuau

SEQ ID NO: 24579 - RNA, 19 nt, Homo sapiens
  misc_RNA (1)...(19): siRNA sense strand
ugcaggagauugaugauga

SEQ ID NO: 24580 - RNA, 19 nt, Homo sapiens
  misc_RNA (1)...(19): siRNA sense strand
ccacagaggaggaggaaga

SEQ ID NO: 24581 - RNA, 19 nt, Homo sapiens
  misc_RNA (1)...(19): siRNA sense strand
caucugagaccaaagcaaa

SEQ ID NO: 24582 - RNA, 19 nt, Homo sapiens
  misc_RNA (1)...(19): siRNA sense strand
cagaagaguugucagugau

SEQ ID NO: 24583 - RNA, 19 nt, Homo sapiens
  misc_RNA (1)...(19): siRNA sense strand
guucccugcuucuaacaua

SEQ ID NO: 24584 - RNA, 19 nt, Homo sapiens
  misc_RNA (1)...(19): siRNA sense strand
acacccaaaugccaucuaa

SEQ ID NO: 24585 - RNA, 19 nt, Homo sapiens
  misc_RNA (1)...(19): siRNA sense strand
caaauagagugcuaaaaga

SEQ ID NO: 24586 - RNA, 19 nt, Homo sapiens
  misc_RNA (1)...(19): siRNA sense strand
agaagcaagugacugugua

SEQ ID NO: 24587 - RNA, 19 nt, Homo sapiens
  misc_RNA (1)...(19): siRNA sense strand
aaagugaugcugaauuuga

SEQ ID NO: 24588 - RNA, 19 nt, Homo sapiens
  misc_RNA (1)...(19): siRNA sense strand
ugaggacacauccauauuu

SEQ ID NO: 24589 - RNA, 19 nt, Homo sapiens
  misc_RNA (1)...(19): siRNA sense strand
ggaaacucaagccagaaua

SEQ ID NO: 24590 - RNA, 19 nt, Homo sapiens
  misc_RNA (1)...(19): siRNA sense strand
gggagauacugcaggaguu

SEQ ID NO: 24591 - RNA, 19 nt, Homo sapiens
  misc_RNA (1)...(19): siRNA sense strand
ccaaggaacagagcaauga

SEQ ID NO: 24592 - RNA, 19 nt, Homo sapiens
  misc_RNA (1)...(19): siRNA sense strand
ucgaagugauccuuugaaa

SEQ ID NO: 24593 - RNA, 19 nt, Homo sapiens
  misc_RNA (1)...(19): siRNA sense strand
caaccugucaguaauaaug

SEQ ID NO: 24594 - RNA, 19 nt, Homo sapiens
  misc_RNA (1)...(19): siRNA sense strand
ugaggaaagugaugcugaa

SEQ ID NO: 24595 - RNA, 19 nt, Homo sapiens
  misc_RNA (1)...(19): siRNA sense strand
gaguuugaauccaaguuau

SEQ ID NO: 24596 - RNA, 19 nt, Homo sapiens
  misc_RNA (1)...(19): siRNA sense strand
ucuaugagcuauuuacucu

SEQ ID NO: 24597 - RNA, 19 nt, Homo sapiens
  misc_RNA (1)...(19): siRNA sense strand
uuacagaugagcagcauaa

SEQ ID NO: 24598 - RNA, 19 nt, Homo sapiens
  misc_RNA (1)...(19): siRNA sense strand
cagaugagcagcauaaagu

SEQ ID NO: 24599 - RNA, 19 nt, Homo sapiens
  misc_RNA (1)...(19): siRNA sense strand
gaaaaggcguuaccagaag

SEQ ID NO: 24600 - RNA, 19 nt, Homo sapiens
  misc_RNA (1)...(19): siRNA sense strand
gaagagacccuggagaaac

SEQ ID NO: 24601 - RNA, 19 nt, Homo sapiens
  misc_RNA (1)...(19): siRNA sense strand
cgacaucccuaaggcaaau

SEQ ID NO: 24602 - RNA, 19 nt, Homo sapiens
  misc_RNA (1)...(19): siRNA sense strand
gaaguuuacaggauucuca

SEQ ID NO: 24603 - RNA, 19 nt, Homo sapiens
  misc_RNA (1)...(19): siRNA sense strand
gaacugacaccauugauuu

SEQ ID NO: 24604 - RNA, 19 nt, Homo sapiens
  misc_RNA (1)...(19): siRNA sense strand
caagaucucuguaaaguag

SEQ ID NO: 24605 - RNA, 19 nt, Homo sapiens
  misc_RNA (1)...(19): siRNA sense strand
ugaaaugacugagauauug

SEQ ID NO: 24606 - RNA, 19 nt, Homo sapiens
  misc_RNA (1)...(19): siRNA sense strand
ugacugagauauugaagaa

SEQ ID NO: 24607 - RNA, 19 nt, Homo sapiens
  misc_RNA (1)...(19): siRNA sense strand
uaagguaguuccugaaaug

SEQ ID NO: 24608 - RNA, 19 nt, Homo sapiens
  misc_RNA (1)...(19): siRNA sense strand
gaaguguccugcuuaguag

SEQ ID NO: 24609 - RNA, 19 nt, Homo sapiens
  misc_RNA (1)...(19): siRNA sense strand
gcuaacaggugccaaagug

SEQ ID NO: 24610 - RNA, 19 nt, Homo sapiens
  misc_RNA (1)...(19): siRNA sense strand
cagaggaacugacaccauu

SEQ ID NO: 24611 - RNA, 19 nt, Homo sapiens
  misc_RNA (1)...(19): siRNA sense strand
cagaguggcuugaccagaa

SEQ ID NO: 24612 - RNA, 19 nt, Homo sapiens
  misc_RNA (1)...(19): siRNA sense strand
gguaauagcugagcaugca

SEQ ID NO: 24613 - RNA, 19 nt, Homo sapiens
  misc_RNA (1)...(19): siRNA sense strand
gaaaaggcaucaaguacuu

SEQ ID NO: 24614 - RNA, 19 nt, Homo sapiens
  misc_RNA (1)...(19): siRNA sense strand
gaaaugcucuauguacagu

SEQ ID NO: 24615 - RNA, 19 nt, Homo sapiens
  misc_RNA (1)...(19): siRNA sense strand
ugaaguguccugcuuagua

SEQ ID NO: 24616 - RNA, 19 nt, Homo sapiens
  misc_RNA (1)...(19): siRNA sense strand
gcaccagaacuuuauauug

SEQ ID NO: 24617 - RNA, 19 nt, Homo sapiens
  misc_RNA (1)...(19): siRNA sense strand
cuuaguagcuggaaccaaa

SEQ ID NO: 24618 - RNA, 19 nt, Homo sapiens
  misc_RNA (1)...(19): siRNA sense strand
gaaaugacugagauauuga

SEQ ID NO: 24619 - RNA, 19 nt, Homo sapiens
  misc_RNA (1)...(19): siRNA sense strand
uagcugagcaugcaaauga

SEQ ID NO: 24620 - RNA, 19 nt, Homo sapiens
  misc_RNA (1)...(19): siRNA sense strand
gaagugugaugagaaagug

SEQ ID NO: 24621 - RNA, 19 nt, Homo sapiens
  misc_RNA (1)...(19): siRNA sense strand
gcacccauuacuuuaaaua

SEQ ID NO: 24622 - RNA, 19 nt, Homo sapiens
  misc_RNA (1)...(19): siRNA sense strand
ggcacaagaucucuguaaa

SEQ ID NO: 24623 - RNA, 19 nt, Homo sapiens
  misc_RNA (1)...(19): siRNA sense strand
cucagaagcaguucaauua

SEQ ID NO: 24624 - RNA, 19 nt, Homo sapiens
  misc_RNA (1)...(19): siRNA sense strand
uaaaguagcaggcauagca

SEQ ID NO: 24625 - RNA, 19 nt, Homo sapiens
  misc_RNA (1)...(19): siRNA sense strand
acauuuagcugggaugaaa

SEQ ID NO: 24626 - RNA, 19 nt, Homo sapiens
  misc_RNA (1)...(19): siRNA sense strand
caccagaacuuuauauugc

SEQ ID NO: 24627 - RNA, 19 nt, Homo sapiens
  misc_RNA (1)...(19): siRNA sense strand
ugacuuggcagaucaacua

SEQ ID NO: 24628 - RNA, 19 nt, Homo sapiens
  misc_RNA (1)...(19): siRNA sense strand
gaggugaaguguccugcuu

SEQ ID NO: 24629 - RNA, 19 nt, Homo sapiens
  misc_RNA (1)...(19): siRNA sense strand
ggaacugacaccauugauu

SEQ ID NO: 24630 - RNA, 19 nt, Homo sapiens
  misc_RNA (1)...(19): siRNA sense strand
cacaagaucucuguaaagu

SEQ ID NO: 24631 - RNA, 19 nt, Homo sapiens
  misc_RNA (1)...(19): siRNA sense strand
uagcacccauuacuuuaaa

SEQ ID NO: 24632 - RNA, 19 nt, Homo sapiens
  misc_RNA (1)...(19): siRNA sense strand
aaagacagcaagacaauug

SEQ ID NO: 24633 - RNA, 19 nt, Homo sapiens
  misc_RNA (1)...(19): siRNA sense strand
cagaagcaguucaauuaca

SEQ ID NO: 24634 - RNA, 19 nt, Homo sapiens
  misc_RNA (1)...(19): siRNA sense strand
gcacaagaucucuguaaag

SEQ ID NO: 24635 - RNA, 19 nt, Homo sapiens
  misc_RNA (1)...(19): siRNA sense strand
gaagaguggagagaacuuu

SEQ ID NO: 24636 - RNA, 19 nt, Homo sapiens
  misc_RNA (1)...(19): siRNA sense strand
gcaggaaaugcucuaugua

SEQ ID NO: 24637 - RNA, 19 nt, Homo sapiens
  misc_RNA (1)...(19): siRNA sense strand
gugacaagguggcacaaga

SEQ ID NO: 24638 - RNA, 19 nt, Homo sapiens
  misc_RNA (1)...(19): siRNA sense strand
aguggcagauuauggaaua

SEQ ID NO: 24639 - RNA, 19 nt, Homo sapiens
  misc_RNA (1)...(19): siRNA sense strand
gagcaucugccuucggaaa

SEQ ID NO: 24640 - RNA, 19 nt, Homo sapiens
  misc_RNA (1)...(19): siRNA sense strand
gaaagacagcaagacaauu

SEQ ID NO: 24641 - RNA, 19 nt, Homo sapiens
  misc_RNA (1)...(19): siRNA sense strand
cagaguagcagccaaacuu

SEQ ID NO: 24642 - RNA, 19 nt, Homo sapiens
  misc_RNA (1)...(19): siRNA sense strand
gaugagaaagugaaagugu

SEQ ID NO: 24643 - RNA, 19 nt, Homo sapiens
  misc_RNA (1)...(19): siRNA sense strand
guacaaaggccuacuucca

SEQ ID NO: 24644 - RNA, 19 nt, Homo sapiens
  misc_RNA (1)...(19): siRNA sense strand
gaugaaagacagcaagaca

SEQ ID NO: 24645 - RNA, 19 nt, Homo sapiens
  misc_RNA (1)...(19): siRNA sense strand
uugcuacgauuucagagua

SEQ ID NO: 24646 - RNA, 19 nt, Homo sapiens
  misc_RNA (1)...(19): siRNA sense strand
uauguacagugaaguguga

SEQ ID NO: 24647 - RNA, 19 nt, Homo sapiens
  misc_RNA (1)...(19): siRNA sense strand
uauaugacuuggcagauca

SEQ ID NO: 24648 - RNA, 19 nt, Homo sapiens
  misc_RNA (1)...(19): siRNA sense strand
gcaucugccuucggaaaga

SEQ ID NO: 24649 - RNA, 19 nt, Homo sapiens
  misc_RNA (1)...(19): siRNA sense strand
ugagaaagugaaaguguuu

SEQ ID NO: 24650 - RNA, 19 nt, Homo sapiens
  misc_RNA (1)...(19): siRNA sense strand
ugacaucauugcaaucaag

SEQ ID NO: 24651 - RNA, 19 nt, Homo sapiens
  misc_RNA (1)...(19): siRNA sense strand
gguagugccaguucagaaa

SEQ ID NO: 24652 - RNA, 19 nt, Homo sapiens
  misc_RNA (1)...(19): siRNA sense strand
ggcagauuauggaauaguu

SEQ ID NO: 24653 - RNA, 19 nt, Homo sapiens
  misc_RNA (1)...(19): siRNA sense strand
ugaaagacagcaagacaau

SEQ ID NO: 24654 - RNA, 19 nt, Homo sapiens
  misc_RNA (1)...(19): siRNA sense strand
ccaaguggcagauuaugga

SEQ ID NO: 24655 - RNA, 19 nt, Homo sapiens
  misc_RNA (1)...(19): siRNA sense strand
guacuucaccaguggaaau

SEQ ID NO: 24656 - RNA, 19 nt, Homo sapiens
  misc_RNA (1)...(19): siRNA sense strand
gaggaacugacaccauuga

SEQ ID NO: 24657 - RNA, 19 nt, Homo sapiens
  misc_RNA (1)...(19): siRNA sense strand
ccuagcacccauuacuuua

SEQ ID NO: 24658 - RNA, 19 nt, Homo sapiens
  misc_RNA (1)...(19): siRNA sense strand
aauaguagcaccagaacuu

SEQ ID NO: 24659 - RNA, 19 nt, Homo sapiens
  misc_RNA (1)...(19): siRNA sense strand
ggugaaguguccugcuuag

SEQ ID NO: 24660 - RNA, 19 nt, Homo sapiens
  misc_RNA (1)...(19): siRNA sense strand
gaacuauuuaugcaggaaa

SEQ ID NO: 24661 - RNA, 19 nt, Homo sapiens
  misc_RNA (1)...(19): siRNA sense strand
agugaagugugaugagaaa

SEQ ID NO: 24662 - RNA, 19 nt, Homo sapiens
  misc_RNA (1)...(19): siRNA sense strand
ugcaggaaaugcucuaugu

SEQ ID NO: 24663 - RNA, 19 nt, Homo sapiens
  misc_RNA (1)...(19): siRNA sense strand
ggaaaugcucuauguacag

SEQ ID NO: 24664 - RNA, 19 nt, Homo sapiens
  misc_RNA (1)...(19): siRNA sense strand
cccgauuucugacaucauu

SEQ ID NO: 24665 - RNA, 19 nt, Homo sapiens
  misc_RNA (1)...(19): siRNA sense strand
gguaguuccugaaaugacu

SEQ ID NO: 24666 - RNA, 19 nt, Homo sapiens
  misc_RNA (1)...(19): siRNA sense strand
gaaccaaaugugacaaggu

SEQ ID NO: 24667 - RNA, 19 nt, Homo sapiens
  misc_RNA (1)...(19): siRNA sense strand
gcagauuauggaauaguug

SEQ ID NO: 24668 - RNA, 19 nt, Homo sapiens
  misc_RNA (1)...(19): siRNA sense strand
ugugagaacuauuuaugca

SEQ ID NO: 24669 - RNA, 19 nt, Homo sapiens
  misc_RNA (1)...(19): siRNA sense strand
acagugaagugugaugaga

SEQ ID NO: 24670 - RNA, 19 nt, Homo sapiens
  misc_RNA (1)...(19): siRNA sense strand
guacagugaagugugauga

SEQ ID NO: 24671 - RNA, 19 nt, Homo sapiens
  misc_RNA (1)...(19): siRNA sense strand
uaauaaagacccagaagcu

SEQ ID NO: 24672 - RNA, 19 nt, Homo sapiens
  misc_RNA (1)...(19): siRNA sense strand
uaguagcaccagaacuuua

SEQ ID NO: 24673 - RNA, 19 nt, Homo sapiens
  misc_RNA (1)...(19): siRNA sense strand
gaguagcagccaaacuuga

SEQ ID NO: 24674 - RNA, 19 nt, Homo sapiens
  misc_RNA (1)...(19): siRNA sense strand
gacccagaagcuccaauuu

SEQ ID NO: 24675 - RNA, 19 nt, Homo sapiens
  misc_RNA (1)...(19): siRNA sense strand
agaguggcuugaccagaaa

SEQ ID NO: 24676 - RNA, 19 nt, Homo sapiens
  misc_RNA (1)...(19): siRNA sense strand
caauuacacacacaucugu

SEQ ID NO: 24677 - RNA, 19 nt, Homo sapiens
  misc_RNA (1)...(19): siRNA sense strand
gaacuuuauauugcuguug

SEQ ID NO: 24678 - RNA, 19 nt, Homo sapiens
  misc_RNA (1)...(19): siRNA sense strand
uggcuugaccagaaauuaa

SEQ ID NO: 24679 - RNA, 19 nt, Homo sapiens
  misc_RNA (1)...(19): siRNA sense strand
aggaaaugcucuauguaca

SEQ ID NO: 24680 - RNA, 19 nt, Homo sapiens
  misc_RNA (1)...(19): siRNA sense strand
uagcuggaaccaaauguga

SEQ ID NO: 24681 - RNA, 19 nt, Homo sapiens
  misc_RNA (1)...(19): siRNA sense strand
ccucauugcuacgauuuca

SEQ ID NO: 24682 - RNA, 19 nt, Homo sapiens
  misc_RNA (1)...(19): siRNA sense strand
uuaagguaguuccugaaau

SEQ ID NO: 24683 - RNA, 19 nt, Homo sapiens
  misc_RNA (1)...(19): siRNA sense strand
ggagccauccaacauuuag

SEQ ID NO: 24684 - RNA, 19 nt, Homo sapiens
  misc_RNA (1)...(19): siRNA sense strand
caucugccuucggaaagaa

SEQ ID NO: 24685 - RNA, 19 nt, Homo sapiens
  misc_RNA (1)...(19): siRNA sense strand
caacauuuagcugggauga

SEQ ID NO: 24686 - RNA, 19 nt, Homo sapiens
  misc_RNA (1)...(19): siRNA sense strand
caggaaaugcucuauguac

SEQ ID NO: 24687 - RNA, 19 nt, Homo sapiens
  misc_RNA (1)...(19): siRNA sense strand
cuagcacccauuacuuuaa

SEQ ID NO: 24688 - RNA, 19 nt, Homo sapiens
  misc_RNA (1)...(19): siRNA sense strand
acaagaucucuguaaagua

SEQ ID NO: 24689 - RNA, 19 nt, Homo sapiens
  misc_RNA (1)...(19): siRNA sense strand
aaugcucuauguacaguga

SEQ ID NO: 24690 - RNA, 19 nt, Homo sapiens
  misc_RNA (1)...(19): siRNA sense strand
caucauugcaaucaaguca

SEQ ID NO: 24691 - RNA, 19 nt, Homo sapiens
  misc_RNA (1)...(19): siRNA sense strand
uuucugacaucauugcaau

SEQ ID NO: 24692 - RNA, 19 nt, Homo sapiens
  misc_RNA (1)...(19): siRNA sense strand
gcccagaguagcagccaaa

SEQ ID NO: 24693 - RNA, 19 nt, Homo sapiens
  misc_RNA (1)...(19): siRNA sense strand
uggcacaagaucucuguaa

SEQ ID NO: 24694 - RNA, 19 nt, Homo sapiens
  misc_RNA (1)...(19): siRNA sense strand
aagaguggagagaacuuua

SEQ ID NO: 24695 - RNA, 19 nt, Homo sapiens
  misc_RNA (1)...(19): siRNA sense strand
uggcucagcaugaugugua

SEQ ID NO: 24696 - RNA, 19 nt, Homo sapiens
  misc_RNA (1)...(19): siRNA sense strand
cugaaaugacugagauauu

SEQ ID NO: 24697 - RNA, 19 nt, Homo sapiens
  misc_RNA (1)...(19): siRNA sense strand
cccagaagcuccaauuuuc

SEQ ID NO: 24698 - RNA, 19 nt, Homo sapiens
  misc_RNA (1)...(19): siRNA sense strand
gggaugaaagacagcaaga

SEQ ID NO: 24699 - RNA, 19 nt, Homo sapiens
  misc_RNA (1)...(19): siRNA sense strand
guagcaccagaacuuuaua

SEQ ID NO: 24700 - RNA, 19 nt, Homo sapiens
  misc_RNA (1)...(19): siRNA sense strand
ucagcaugauguguacaaa

SEQ ID NO: 24701 - RNA, 19 nt, Homo sapiens
  misc_RNA (1)...(19): siRNA sense strand
agaguggagagaacuuuaa

SEQ ID NO: 24702 - RNA, 19 nt, Homo sapiens
  misc_RNA (1)...(19): siRNA sense strand
ugacaagguggcacaagau

SEQ ID NO: 24703 - RNA, 19 nt, Homo sapiens
  misc_RNA (1)...(19): siRNA sense strand
gaaccaagcugccgucaua

SEQ ID NO: 24704 - RNA, 19 nt, Homo sapiens
  misc_RNA (1)...(19): siRNA sense strand
cgacagagcugcaugaaua

SEQ ID NO: 24705 - RNA, 19 nt, Homo sapiens
  misc_RNA (1)...(19): siRNA sense strand
ggaaguacaugcugguauu

SEQ ID NO: 24706 - RNA, 19 nt, Homo sapiens
  misc_RNA (1)...(19): siRNA sense strand
gaagaaauaccgagacauu

SEQ ID NO: 24707 - RNA, 19 nt, Homo sapiens
  misc_RNA (1)...(19): siRNA sense strand
gaugagagauuguuauuac

SEQ ID NO: 24708 - RNA, 19 nt, Homo sapiens
  misc_RNA (1)...(19): siRNA sense strand
gaacacagcgguaggaaug

SEQ ID NO: 24709 - RNA, 19 nt, Homo sapiens
  misc_RNA (1)...(19): siRNA sense strand
ccacaaauauuaucacuac

SEQ ID NO: 24710 - RNA, 19 nt, Homo sapiens
  misc_RNA (1)...(19): siRNA sense strand
caaauucacugcagucauc

SEQ ID NO: 24711 - RNA, 19 nt, Homo sapiens
  misc_RNA (1)...(19): siRNA sense strand
gacaggagcugcuauuuac

SEQ ID NO: 24712 - RNA, 19 nt, Homo sapiens
  misc_RNA (1)...(19): siRNA sense strand
gcacauaucacguaacagu

SEQ ID NO: 24713 - RNA, 19 nt, Homo sapiens
  misc_RNA (1)...(19): siRNA sense strand
uggcagagcuucccugaga

SEQ ID NO: 24714 - RNA, 19 nt, Homo sapiens
  misc_RNA (1)...(19): siRNA sense strand
ugacaggagcugcuauuua

SEQ ID NO: 24715 - RNA, 19 nt, Homo sapiens
  misc_RNA (1)...(19): siRNA sense strand
gccauucucugaagugauu

SEQ ID NO: 24716 - RNA, 19 nt, Homo sapiens
  misc_RNA (1)...(19): siRNA sense strand
ggagagagcaagguuauga

SEQ ID NO: 24717 - RNA, 19 nt, Homo sapiens
  misc_RNA (1)...(19): siRNA sense strand
ucucugaagugauuaauug

SEQ ID NO: 24718 - RNA, 19 nt, Homo sapiens
  misc_RNA (1)...(19): siRNA sense strand
cauaucacguaacaguuua

SEQ ID NO: 24719 - RNA, 19 nt, Homo sapiens
  misc_RNA (1)...(19): siRNA sense strand
gaaggagagagcaagguua

SEQ ID NO: 24720 - RNA, 19 nt, Homo sapiens
  misc_RNA (1)...(19): siRNA sense strand
gauaaaauccuagcacuua

SEQ ID NO: 24721 - RNA, 19 nt, Homo sapiens
  misc_RNA (1)...(19): siRNA sense strand
caacaacagagguggauuu

SEQ ID NO: 24722 - RNA, 19 nt, Homo sapiens
  misc_RNA (1)...(19): siRNA sense strand
cgacccaacuuugauguuu

SEQ ID NO: 24723 - RNA, 19 nt, Homo sapiens
  misc_RNA (1)...(19): siRNA sense strand
gagagauuguuauuacaga

SEQ ID NO: 24724 - RNA, 19 nt, Homo sapiens
  misc_RNA (1)...(19): siRNA sense strand
caaaguggacgaacgacua

SEQ ID NO: 24725 - RNA, 19 nt, Homo sapiens
  misc_RNA (1)...(19): siRNA sense strand
gagcugcuauuuaccacaa

SEQ ID NO: 24726 - RNA, 19 nt, Homo sapiens
  misc_RNA (1)...(19): siRNA sense strand
gcucucagcuggcucuugu

SEQ ID NO: 24727 - RNA, 19 nt, Homo sapiens
  misc_RNA (1)...(19): siRNA sense strand
caccaggaaugccuuauau

SEQ ID NO: 24728 - RNA, 19 nt, Homo sapiens
  misc_RNA (1)...(19): siRNA sense strand
gggaaaugcugcacaaugc

SEQ ID NO: 24729 - RNA, 19 nt, Homo sapiens
  misc_RNA (1)...(19): siRNA sense strand
gagacaacaccgaguauga

SEQ ID NO: 24730 - RNA, 19 nt, Homo sapiens
  misc_RNA (1)...(19): siRNA sense strand
gcacaaugccacuuucugu

SEQ ID NO: 24731 - RNA, 19 nt, Homo sapiens
  misc_RNA (1)...(19): siRNA sense strand
gagcuucccugagaggauu

SEQ ID NO: 24732 - RNA, 19 nt, Homo sapiens
  misc_RNA (1)...(19): siRNA sense strand
ucagauuccuggaggcuuu

SEQ ID NO: 24733 - RNA, 19 nt, Homo sapiens
  misc_RNA (1)...(19): siRNA sense strand
ucaagcacauaucacguaa

SEQ ID NO: 24734 - RNA, 19 nt, Homo sapiens
  misc_RNA (1)...(19): siRNA sense strand
cucaguaugugcacaauuu

SEQ ID NO: 24735 - RNA, 19 nt, Homo sapiens
  misc_RNA (1)...(19): siRNA sense strand
agaagaagcaguauaagga

SEQ ID NO: 24736 - RNA, 19 nt, Homo sapiens
  misc_RNA (1)...(19): siRNA sense strand
guacugugcccagaucaua

SEQ ID NO: 24737 - RNA, 19 nt, Homo sapiens
  misc_RNA (1)...(19): siRNA sense strand
gcuucaaagucuacguaua

SEQ ID NO: 24738 - RNA, 19 nt, Homo sapiens
  misc_RNA (1)...(19): siRNA sense strand
acaaucaggucuauucauc

SEQ ID NO: 24739 - RNA, 19 nt, Homo sapiens
  misc_RNA (1)...(19): siRNA sense strand
caaucaaagugacccagaa

SEQ ID NO: 24740 - RNA, 19 nt, Homo sapiens
  misc_RNA (1)...(19): siRNA sense strand
gauccaaagugcagagucu

SEQ ID NO: 24741 - RNA, 19 nt, Homo sapiens
  misc_RNA (1)...(19): siRNA sense strand
cguaacaguuuaauaugga

SEQ ID NO: 24742 - RNA, 19 nt, Homo sapiens
  misc_RNA (1)...(19): siRNA sense strand
gaacaaugguaggaaucau

SEQ ID NO: 24743 - RNA, 19 nt, Homo sapiens
  misc_RNA (1)...(19): siRNA sense strand
agaaauaccgagacauuga

SEQ ID NO: 24744 - RNA, 19 nt, Homo sapiens
  misc_RNA (1)...(19): siRNA sense strand
cauaggcgaugagagauug

SEQ ID NO: 24745 - RNA, 19 nt, Homo sapiens
  misc_RNA (1)...(19): siRNA sense strand
ccaggaaugccuuauauca

SEQ ID NO: 24746 - RNA, 19 nt, Homo sapiens
  misc_RNA (1)...(19): siRNA sense strand
gcgaugagagauuguuauu

SEQ ID NO: 24747 - RNA, 19 nt, Homo sapiens
  misc_RNA (1)...(19): siRNA sense strand
gaagaacacagcgguagga

SEQ ID NO: 24748 - RNA, 19 nt, Homo sapiens
  misc_RNA (1)...(19): siRNA sense strand
aagcacauaucacguaaca

SEQ ID NO: 24749 - RNA, 19 nt, Homo sapiens
  misc_RNA (1)...(19): siRNA sense strand
ucaaagugacccagaagaa

SEQ ID NO: 24750 - RNA, 19 nt, Homo sapiens
  misc_RNA (1)...(19): siRNA sense strand
gaaaaucgccgaaaguuac

SEQ ID NO: 24751 - RNA, 19 nt, Homo sapiens
  misc_RNA (1)...(19): siRNA sense strand
ggucuauucaucaggauaa

SEQ ID NO: 24752 - RNA, 19 nt, Homo sapiens
  misc_RNA (1)...(19): siRNA sense strand
ugacagggauaggaucaga

SEQ ID NO: 24753 - RNA, 19 nt, Homo sapiens
  misc_RNA (1)...(19): siRNA sense strand
ggcugacccugaccacuuu

SEQ ID NO: 24754 - RNA, 19 nt, Homo sapiens
  misc_RNA (1)...(19): siRNA sense strand
gcacuuggccugacuacac

SEQ ID NO: 24755 - RNA, 19 nt, Homo sapiens
  misc_RNA (1)...(19): siRNA sense strand
cccagaagaagcaguauaa

SEQ ID NO: 24756 - RNA, 19 nt, Homo sapiens
  misc_RNA (1)...(19): siRNA sense strand
uaccacaguauucaucuua

SEQ ID NO: 24757 - RNA, 19 nt, Homo sapiens
  misc_RNA (1)...(19): siRNA sense strand
uuagacagcagacacaauu

SEQ ID NO: 24758 - RNA, 19 nt, Homo sapiens
  misc_RNA (1)...(19): siRNA sense strand
cugaagugauuaauuggaa

SEQ ID NO: 24759 - RNA, 19 nt, Homo sapiens
  misc_RNA (1)...(19): siRNA sense strand
gccaaagccagcaucagua

SEQ ID NO: 24760 - RNA, 19 nt, Homo sapiens
  misc_RNA (1)...(19): siRNA sense strand
ccacaguauucaucuuauc

SEQ ID NO: 24761 - RNA, 19 nt, Homo sapiens
  misc_RNA (1)...(19): siRNA sense strand
gcagccacuucugggauaa

SEQ ID NO: 24762 - RNA, 19 nt, Homo sapiens
  misc_RNA (1)...(19): siRNA sense strand
gauuucgccuucacagugu

SEQ ID NO: 24763 - RNA, 19 nt, Homo sapiens
  misc_RNA (1)...(19): siRNA sense strand
ggaguugccauucucugaa

SEQ ID NO: 24764 - RNA, 19 nt, Homo sapiens
  misc_RNA (1)...(19): siRNA sense strand
gauuccagcgugcacauuu

SEQ ID NO: 24765 - RNA, 19 nt, Homo sapiens
  misc_RNA (1)...(19): siRNA sense strand
gggcugacccugaccacuu

SEQ ID NO: 24766 - RNA, 19 nt, Homo sapiens
  misc_RNA (1)...(19): siRNA sense strand
uucggaggcuugcaguuua

SEQ ID NO: 24767 - RNA, 19 nt, Homo sapiens
  misc_RNA (1)...(19): siRNA sense strand
acauaucacguaacaguuu

SEQ ID NO: 24768 - RNA, 19 nt, Homo sapiens
  misc_RNA (1)...(19): siRNA sense strand
aaacuuccgacccaacuuu

SEQ ID NO: 24769 - RNA, 19 nt, Homo sapiens
  misc_RNA (1)...(19): siRNA sense strand
gauuucacccuuugcaaga

SEQ ID NO: 24770 - RNA, 19 nt, Homo sapiens
  misc_RNA (1)...(19): siRNA sense strand
ggaacaaugguaggaauca

SEQ ID NO: 24771 - RNA, 19 nt, Homo sapiens
  misc_RNA (1)...(19): siRNA sense strand
cagaauauucaagcacaua

SEQ ID NO: 24772 - RNA, 19 nt, Homo sapiens
  misc_RNA (1)...(19): siRNA sense strand
gacccaacuuugauguuuc

SEQ ID NO: 24773 - RNA, 19 nt, Homo sapiens
  misc_RNA (1)...(19): siRNA sense strand
ccgaguaugagaaguauga

SEQ ID NO: 24774 - RNA, 19 nt, Homo sapiens
  misc_RNA (1)...(19): siRNA sense strand
gaaauaccgagacauugag

SEQ ID NO: 24775 - RNA, 19 nt, Homo sapiens
  misc_RNA (1)...(19): siRNA sense strand
gcucuugucucgcccuuuu

SEQ ID NO: 24776 - RNA, 19 nt, Homo sapiens
  misc_RNA (1)...(19): siRNA sense strand
uuacagauuccuucuacaa

SEQ ID NO: 24777 - RNA, 19 nt, Homo sapiens
  misc_RNA (1)...(19): siRNA sense strand
uauuacagauuccuucuac

SEQ ID NO: 24778 - RNA, 19 nt, Homo sapiens
  misc_RNA (1)...(19): siRNA sense strand
gggaguugccauucucuga

SEQ ID NO: 24779 - RNA, 19 nt, Homo sapiens
  misc_RNA (1)...(19): siRNA sense strand
ggccaaagccagcaucagu

SEQ ID NO: 24780 - RNA, 19 nt, Homo sapiens
  misc_RNA (1)...(19): siRNA sense strand
acagagacaacaccgagua

SEQ ID NO: 24781 - RNA, 19 nt, Homo sapiens
  misc_RNA (1)...(19): siRNA sense strand
guggaacaaugguaggaau

SEQ ID NO: 24782 - RNA, 19 nt, Homo sapiens
  misc_RNA (1)...(19): siRNA sense strand
ccaguacugugcccagauc

SEQ ID NO: 24783 - RNA, 19 nt, Homo sapiens
  misc_RNA (1)...(19): siRNA sense strand
caacuccagcaucuacaaa

SEQ ID NO: 24784 - RNA, 19 nt, Homo sapiens
  misc_RNA (1)...(19): siRNA sense strand
cgaugagagauuguuauua

SEQ ID NO: 24785 - RNA, 19 nt, Homo sapiens
  misc_RNA (1)...(19): siRNA sense strand
acaccgaguaugagaagua

SEQ ID NO: 24786 - RNA, 19 nt, Homo sapiens
  misc_RNA (1)...(19): siRNA sense strand
gaccaguugucaccucagu

SEQ ID NO: 24787 - RNA, 19 nt, Homo sapiens
  misc_RNA (1)...(19): siRNA sense strand
cagcugguuuggcuacaug

SEQ ID NO: 24788 - RNA, 19 nt, Homo sapiens
  misc_RNA (1)...(19): siRNA sense strand
cgcagccacuucugggaua

SEQ ID NO: 24789 - RNA, 19 nt, Homo sapiens
  misc_RNA (1)...(19): siRNA sense strand
acacggugcuuucaacaac

SEQ ID NO: 24790 - RNA, 19 nt, Homo sapiens
  misc_RNA (1)...(19): siRNA sense strand
caacaccgaguaugagaag

SEQ ID NO: 24791 - RNA, 19 nt, Homo sapiens
  misc_RNA (1)...(19): siRNA sense strand
gacaacaccgaguaugaga

SEQ ID NO: 24792 - RNA, 19 nt, Homo sapiens
  misc_RNA (1)...(19): siRNA sense strand
ccaguugucaccucaguau

SEQ ID NO: 24793 - RNA, 19 nt, Homo sapiens
  misc_RNA (1)...(19): siRNA sense strand
gaucagacaccaggaaugc

SEQ ID NO: 24794 - RNA, 19 nt, Homo sapiens
  misc_RNA (1)...(19): siRNA sense strand
cagccagccugaagaacau

SEQ ID NO: 24795 - RNA, 19 nt, Homo sapiens
  misc_RNA (1)...(19): siRNA sense strand
ggacgaacgacuacuccau

SEQ ID NO: 24796 - RNA, 19 nt, Homo sapiens
  misc_RNA (1)...(19): siRNA sense strand
gaguugccauucucugaag

SEQ ID NO: 24797 - RNA, 19 nt, Homo sapiens
  misc_RNA (1)...(19): siRNA sense strand
acaccaggaaugccuuaua

SEQ ID NO: 24798 - RNA, 19 nt, Homo sapiens
  misc_RNA (1)...(19): siRNA sense strand
caaagugacccagaagaag

SEQ ID NO: 24799 - RNA, 19 nt, Homo sapiens
  misc_RNA (1)...(19): siRNA sense strand
gaagcaguauaaggagaca

SEQ ID NO: 24800 - RNA, 19 nt, Homo sapiens
  misc_RNA (1)...(19): siRNA sense strand
ggccaauugugaggacauu

SEQ ID NO: 24801 - RNA, 19 nt, Homo sapiens
  misc_RNA (1)...(19): siRNA sense strand
agacauugagcgacuuuga

SEQ ID NO: 24802 - RNA, 19 nt, Homo sapiens
  misc_RNA (1)...(19): siRNA sense strand
ugacccagaagaagcagua

SEQ ID NO: 24803 - RNA, 19 nt, Homo sapiens
  misc_RNA (1)...(19): siRNA sense strand
gaagagagcaucugugguu

SEQ ID NO: 24804 - RNA, 19 nt, Homo sapiens
  misc_RNA (1)...(19): siRNA sense strand
cauaugaacugugaagaua

SEQ ID NO: 24805 - RNA, 19 nt, Homo sapiens
  misc_RNA (1)...(19): siRNA sense strand
gugcgucggucaaguauaa

SEQ ID NO: 24806 - RNA, 19 nt, Homo sapiens
  misc_RNA (1)...(19): siRNA sense strand
ucaaaugacuggaauguag

SEQ ID NO: 24807 - RNA, 19 nt, Homo sapiens
  misc_RNA (1)...(19): siRNA sense strand
ggucaaacauggagaguca

SEQ ID NO: 24808 - RNA, 19 nt, Homo sapiens
  misc_RNA (1)...(19): siRNA sense strand
gagagcaucugugguugua

SEQ ID NO: 24809 - RNA, 19 nt, Homo sapiens
  misc_RNA (1)...(19): siRNA sense strand
guacagagaggaccuagaa

SEQ ID NO: 24810 - RNA, 19 nt, Homo sapiens
  misc_RNA (1)...(19): siRNA sense strand
caaguuugcuucagucuuc

SEQ ID NO: 24811 - RNA, 19 nt, Homo sapiens
  misc_RNA (1)...(19): siRNA sense strand
ucagauguguacaguauuu

SEQ ID NO: 24812 - RNA, 19 nt, Homo sapiens
  misc_RNA (1)...(19): siRNA sense strand
guauaucuaugcucugaaa

SEQ ID NO: 24813 - RNA, 19 nt, Homo sapiens
  misc_RNA (1)...(19): siRNA sense strand
gugaagauauugccaugaa

SEQ ID NO: 24814 - RNA, 19 nt, Homo sapiens
  misc_RNA (1)...(19): siRNA sense strand
gcagaaugcacacguguuu

SEQ ID NO: 24815 - RNA, 19 nt, Homo sapiens
  misc_RNA (1)...(19): siRNA sense strand
cgaaucaccuguuguucaa

SEQ ID NO: 24816 - RNA, 19 nt, Homo sapiens
  misc_RNA (1)...(19): siRNA sense strand
gagcugacccuguccugua

SEQ ID NO: 24817 - RNA, 19 nt, Homo sapiens
  misc_RNA (1)...(19): siRNA sense strand
caccgaaucuacuauauca

SEQ ID NO: 24818 - RNA, 19 nt, Homo sapiens
  misc_RNA (1)...(19): siRNA sense strand
ugucagauguguacaguau

SEQ ID NO: 24819 - RNA, 19 nt, Homo sapiens
  misc_RNA (1)...(19): siRNA sense strand
caacauuggcagcuuauga

SEQ ID NO: 24820 - RNA, 19 nt, Homo sapiens
  misc_RNA (1)...(19): siRNA sense strand
gaaaagaugucagaugugu

SEQ ID NO: 24821 - RNA, 19 nt, Homo sapiens
  misc_RNA (1)...(19): siRNA sense strand
uagaugggcuuucacuaga

SEQ ID NO: 24822 - RNA, 19 nt, Homo sapiens
  misc_RNA (1)...(19): siRNA sense strand
guacgaaucaccuguuguu

SEQ ID NO: 24823 - RNA, 19 nt, Homo sapiens
  misc_RNA (1)...(19): siRNA sense strand
cagagugcaucaacaaguu

SEQ ID NO: 24824 - RNA, 19 nt, Homo sapiens
  misc_RNA (1)...(19): siRNA sense strand
ugaauaaguggaaguauga

SEQ ID NO: 24825 - RNA, 19 nt, Homo sapiens
  misc_RNA (1)...(19): siRNA sense strand
gaaaagcaguuaucaaggu

SEQ ID NO: 24826 - RNA, 19 nt, Homo sapiens
  misc_RNA (1)...(19): siRNA sense strand
guaaccguuucuucccuua

SEQ ID NO: 24827 - RNA, 19 nt, Homo sapiens
  misc_RNA (1)...(19): siRNA sense strand
gaucucaguugcagaaugc

SEQ ID NO: 24828 - RNA, 19 nt, Homo sapiens
  misc_RNA (1)...(19): siRNA sense strand
ccaaagacagauugaagaa

SEQ ID NO: 24829 - RNA, 19 nt, Homo sapiens
  misc_RNA (1)...(19): siRNA sense strand
ucauuaugcugaccucuga

SEQ ID NO: 24830 - RNA, 19 nt, Homo sapiens
  misc_RNA (1)...(19): siRNA sense strand
cuacuugucgucuggaaua

SEQ ID NO: 24831 - RNA, 19 nt, Homo sapiens
  misc_RNA (1)...(19): siRNA sense strand
cgaaugaaguguccauggu

SEQ ID NO: 24832 - RNA, 19 nt, Homo sapiens
  misc_RNA (1)...(19): siRNA sense strand
guacuuccagucaauuaaa

SEQ ID NO: 24833 - RNA, 19 nt, Homo sapiens
  misc_RNA (1)...(19): siRNA sense strand
gguagaugcucauaugaac

SEQ ID NO: 24834 - RNA, 19 nt, Homo sapiens
  misc_RNA (1)...(19): siRNA sense strand
cagcauuccugucuauagu

SEQ ID NO: 24835 - RNA, 19 nt, Homo sapiens
  misc_RNA (1)...(19): siRNA sense strand
ucaacaaguuugcuucagu

SEQ ID NO: 24836 - RNA, 19 nt, Homo sapiens
  misc_RNA (1)...(19): siRNA sense strand
acauggagagucaguguua

SEQ ID NO: 24837 - RNA, 19 nt, Homo sapiens
  misc_RNA (1)...(19): siRNA sense strand
ggucagagugcaucaacaa

SEQ ID NO: 24838 - RNA, 19 nt, Homo sapiens
  misc_RNA (1)...(19): siRNA sense strand
ggaucucaguugcagaaug

SEQ ID NO: 24839 - RNA, 19 nt, Homo sapiens
  misc_RNA (1)...(19): siRNA sense strand
ggccauugaugaugauauc

SEQ ID NO: 24840 - RNA, 19 nt, Homo sapiens
  misc_RNA (1)...(19): siRNA sense strand
ucgaugugcuuaaccagaa

SEQ ID NO: 24841 - RNA, 19 nt, Homo sapiens
  misc_RNA (1)...(19): siRNA sense strand
guguauaucuaugcucuga

SEQ ID NO: 24842 - RNA, 19 nt, Homo sapiens
  misc_RNA (1)...(19): siRNA sense strand
ugacuggaauguagagaag

SEQ ID NO: 24843 - RNA, 19 nt, Homo sapiens
  misc_RNA (1)...(19): siRNA sense strand
caaaauccggguuccauua

SEQ ID NO: 24844 - RNA, 19 nt, Homo sapiens
  misc_RNA (1)...(19): siRNA sense strand
uagaagcccuccaggucaa

SEQ ID NO: 24845 - RNA, 19 nt, Homo sapiens
  misc_RNA (1)...(19): siRNA sense strand
gcaauacuuccuccuguca

SEQ ID NO: 24846 - RNA, 19 nt, Homo sapiens
  misc_RNA (1)...(19): siRNA sense strand
uaaaugcaccaaccucuca

SEQ ID NO: 24847 - RNA, 19 nt, Homo sapiens
  misc_RNA (1)...(19): siRNA sense strand
gaugucagauguguacagu

SEQ ID NO: 24848 - RNA, 19 nt, Homo sapiens
  misc_RNA (1)...(19): siRNA sense strand
uuucuucccuuaugaugaa

SEQ ID NO: 24849 - RNA, 19 nt, Homo sapiens
  misc_RNA (1)...(19): siRNA sense strand
gaagauauugccaugaacu

SEQ ID NO: 24850 - RNA, 19 nt, Homo sapiens
  misc_RNA (1)...(19): siRNA sense strand
ccaagcaccgaaucuacua

SEQ ID NO: 24851 - RNA, 19 nt, Homo sapiens
  misc_RNA (1)...(19): siRNA sense strand
accaugagaugaauaagug

SEQ ID NO: 24852 - RNA, 19 nt, Homo sapiens
  misc_RNA (1)...(19): siRNA sense strand
aagcuguucuggccauuga

SEQ ID NO: 24853 - RNA, 19 nt, Homo sapiens
  misc_RNA (1)...(19): siRNA sense strand
caaaugacuggaauguaga

SEQ ID NO: 24854 - RNA, 19 nt, Homo sapiens
  misc_RNA (1)...(19): siRNA sense strand
gggaccaugagaugaauaa

SEQ ID NO: 24855 - RNA, 19 nt, Homo sapiens
  misc_RNA (1)...(19): siRNA sense strand
gaugaaaucgagacagaag

SEQ ID NO: 24856 - RNA, 19 nt, Homo sapiens
  misc_RNA (1)...(19): siRNA sense strand
caaagacagauugaagaaa

SEQ ID NO: 24857 - RNA, 19 nt, Homo sapiens
  misc_RNA (1)...(19): siRNA sense strand
cugaaguucuugacuggaa

SEQ ID NO: 24858 - RNA, 19 nt, Homo sapiens
  misc_RNA (1)...(19): siRNA sense strand
agcaccaggucuucgauua

SEQ ID NO: 24859 - RNA, 19 nt, Homo sapiens
  misc_RNA (1)...(19): siRNA sense strand
gagagucaguguuaguacu

SEQ ID NO: 24860 - RNA, 19 nt, Homo sapiens
  misc_RNA (1)...(19): siRNA sense strand
gaacacacugcgcaucaag

SEQ ID NO: 24861 - RNA, 19 nt, Homo sapiens
  misc_RNA (1)...(19): siRNA sense strand
gcaccgaaucuacuauauc

SEQ ID NO: 24862 - RNA, 19 nt, Homo sapiens
  misc_RNA (1)...(19): siRNA sense strand
gaagaaaagaugucagaug

SEQ ID NO: 24863 - RNA, 19 nt, Homo sapiens
  misc_RNA (1)...(19): siRNA sense strand
ggguagaugcucauaugaa

SEQ ID NO: 24864 - RNA, 19 nt, Homo sapiens
  misc_RNA (1)...(19): siRNA sense strand
cuggguagaugcucauaug

SEQ ID NO: 24865 - RNA, 19 nt, Homo sapiens
  misc_RNA (1)...(19): siRNA sense strand
uaugaggucuggcgggaau

SEQ ID NO: 24866 - RNA, 19 nt, Homo sapiens
  misc_RNA (1)...(19): siRNA sense strand
ugucagcauuccugucuau

SEQ ID NO: 24867 - RNA, 19 nt, Homo sapiens
  misc_RNA (1)...(19): siRNA sense strand
ccauaguccucaccuacga

SEQ ID NO: 24868 - RNA, 19 nt, Homo sapiens
  misc_RNA (1)...(19): siRNA sense strand
caucuccuaugaagaaugg

SEQ ID NO: 24869 - RNA, 19 nt, Homo sapiens
  misc_RNA (1)...(19): siRNA sense strand
cccugcagauuaucaauga

SEQ ID NO: 24870 - RNA, 19 nt, Homo sapiens
  misc_RNA (1)...(19): siRNA sense strand
gcguacuuccagucaauua

SEQ ID NO: 24871 - RNA, 19 nt, Homo sapiens
  misc_RNA (1)...(19): siRNA sense strand
uugaagaaaugcagagaca

SEQ ID NO: 24872 - RNA, 19 nt, Homo sapiens
  misc_RNA (1)...(19): siRNA sense strand
aagaaaagaugucagaugu

SEQ ID NO: 24873 - RNA, 19 nt, Homo sapiens
  misc_RNA (1)...(19): siRNA sense strand
aguauugagcgauguguua

SEQ ID NO: 24874 - RNA, 19 nt, Homo sapiens
  misc_RNA (1)...(19): siRNA sense strand
ucucagacagugacuacua

SEQ ID NO: 24875 - RNA, 19 nt, Homo sapiens
  misc_RNA (1)...(19): siRNA sense strand
cgugagcaauccacucuuc

SEQ ID NO: 24876 - RNA, 19 nt, Homo sapiens
  misc_RNA (1)...(19): siRNA sense strand
ccagucaauuaaagccauu

SEQ ID NO: 24877 - RNA, 19 nt, Homo sapiens
  misc_RNA (1)...(19): siRNA sense strand
auugcagacuccuauauuu

SEQ ID NO: 24878 - RNA, 19 nt, Homo sapiens
  misc_RNA (1)...(19): siRNA sense strand
uguuaguacucgauaaaug

SEQ ID NO: 24879 - RNA, 19 nt, Homo sapiens
  misc_RNA (1)...(19): siRNA sense strand
cggcaaggcuacgauguca

SEQ ID NO: 24880 - RNA, 19 nt, Homo sapiens
  misc_RNA (1)...(19): siRNA sense strand
uaacacagcccuggauguc

SEQ ID NO: 24881 - RNA, 19 nt, Homo sapiens
  misc_RNA (1)...(19): siRNA sense strand
gcuguggcuucaacccaaa

SEQ ID NO: 24882 - RNA, 19 nt, Homo sapiens
  misc_RNA (1)...(19): siRNA sense strand
ggaccaugccucucaaggu

SEQ ID NO: 24883 - RNA, 19 nt, Homo sapiens
  misc_RNA (1)...(19): siRNA sense strand
augaauaaguggaaguaug

SEQ ID NO: 24884 - RNA, 19 nt, Homo sapiens
  misc_RNA (1)...(19): siRNA sense strand
aaauccggguuccauuaaa

SEQ ID NO: 24885 - RNA, 19 nt, Homo sapiens
  misc_RNA (1)...(19): siRNA sense strand
aggcuacgaugucagcauu

SEQ ID NO: 24886 - RNA, 19 nt, Homo sapiens
  misc_RNA (1)...(19): siRNA sense strand
gaacugcucauggccaucu

SEQ ID NO: 24887 - RNA, 19 nt, Homo sapiens
  misc_RNA (1)...(19): siRNA sense strand
gaccaugagaugaauaagu

SEQ ID NO: 24888 - RNA, 19 nt, Homo sapiens
  misc_RNA (1)...(19): siRNA sense strand
gcugccaucuccuaugaag

SEQ ID NO: 24889 - RNA, 19 nt, Homo sapiens
  misc_RNA (1)...(19): siRNA sense strand
aagcguacuuccagucaau

SEQ ID NO: 24890 - RNA, 19 nt, Homo sapiens
  misc_RNA (1)...(19): siRNA sense strand
gaugucagcauuccugucu

SEQ ID NO: 24891 - RNA, 19 nt, Homo sapiens
  misc_RNA (1)...(19): siRNA sense strand
gcugaaaacaaguuaagua

SEQ ID NO: 24892 - RNA, 19 nt, Homo sapiens
  misc_RNA (1)...(19): siRNA sense strand
gaagaccaagcaccgaauc

SEQ ID NO: 24893 - RNA, 19 nt, Homo sapiens
  misc_RNA (1)...(19): siRNA sense strand
cagaacacacugcgcauca

SEQ ID NO: 24894 - RNA, 19 nt, Homo sapiens
  misc_RNA (1)...(19): siRNA sense strand
aaaagcaguuaucaaggua

SEQ ID NO: 24895 - RNA, 19 nt, Homo sapiens
  misc_RNA (1)...(19): siRNA sense strand
caaaaugccuggggauauc

SEQ ID NO: 24896 - RNA, 19 nt, Homo sapiens
  misc_RNA (1)...(19): siRNA sense strand
augaugaaaucgagacaga

SEQ ID NO: 24897 - RNA, 19 nt, Homo sapiens
  misc_RNA (1)...(19): siRNA sense strand
ugccaucuccuaugaagaa

SEQ ID NO: 24898 - RNA, 19 nt, Homo sapiens
  misc_RNA (1)...(19): siRNA sense strand
cauaugcugccaucuccua

SEQ ID NO: 24899 - RNA, 19 nt, Homo sapiens
  misc_RNA (1)...(19): siRNA sense strand
uggccacccugcagauuau

SEQ ID NO: 24900 - RNA, 19 nt, Homo sapiens
  misc_RNA (1)...(19): siRNA sense strand
gccuuucucugaaguucuu

SEQ ID NO: 24901 - RNA, 19 nt, Homo sapiens
  misc_RNA (1)...(19): siRNA sense strand
aaacauggagagucagugu

SEQ ID NO: 24902 - RNA, 19 nt, Homo sapiens
  misc_RNA (1)...(19): siRNA sense strand
gagucugaguggacgaaug

SEQ ID NO: 24903 - RNA, 19 nt, Homo sapiens
  misc_RNA (1)...(19): siRNA sense strand
gaaaggacaccucgaaaga

SEQ ID NO: 24904 - RNA, 19 nt, Homo sapiens
  misc_RNA (1)...(19): siRNA sense strand
gaauacaccugcaccuguu

SEQ ID NO: 24905 - RNA, 19 nt, Homo sapiens
  misc_RNA (1)...(19): siRNA sense strand
gaagaaaggacaccucgaa

SEQ ID NO: 24906 - RNA, 19 nt, Homo sapiens
  misc_RNA (1)...(19): siRNA sense strand
gaagagaccugcucauacg

SEQ ID NO: 24907 - RNA, 19 nt, Homo sapiens
  misc_RNA (1)...(19): siRNA sense strand
ucacaaaggagaccuauga

SEQ ID NO: 24908 - RNA, 19 nt, Homo sapiens
  misc_RNA (1)...(19): siRNA sense strand
cauaacguccucuccauua

SEQ ID NO: 24909 - RNA, 19 nt, Homo sapiens
  misc_RNA (1)...(19): siRNA sense strand
caaaggagaccuaugacuu

SEQ ID NO: 24910 - RNA, 19 nt, Homo sapiens
  misc_RNA (1)...(19): siRNA sense strand
cgaaagagagugcauggaa

SEQ ID NO: 24911 - RNA, 19 nt, Homo sapiens
  misc_RNA (1)...(19): siRNA sense strand
gcgacaagacgaaugaauu

SEQ ID NO: 24912 - RNA, 19 nt, Homo sapiens
  misc_RNA (1)...(19): siRNA sense strand
gaaccagggcaaauguaaa

SEQ ID NO: 24913 - RNA, 19 nt, Homo sapiens
  misc_RNA (1)...(19): siRNA sense strand
ggaagagaccugcucauac

SEQ ID NO: 24914 - RNA, 19 nt, Homo sapiens
  misc_RNA (1)...(19): siRNA sense strand
aaggacaccucgaaagaga

SEQ ID NO: 24915 - RNA, 19 nt, Homo sapiens
  misc_RNA (1)...(19): siRNA sense strand
gcaccuguuuagaaggauu

SEQ ID NO: 24916 - RNA, 19 nt, Homo sapiens
  misc_RNA (1)...(19): siRNA sense strand
acaacaaccucaccaggau

SEQ ID NO: 24917 - RNA, 19 nt, Homo sapiens
  misc_RNA (1)...(19): siRNA sense strand
gcacgucacccgcuucaag

SEQ ID NO: 24918 - RNA, 19 nt, Homo sapiens
  misc_RNA (1)...(19): siRNA sense strand
gccaauuccuuucuugaag

SEQ ID NO: 24919 - RNA, 19 nt, Homo sapiens
  misc_RNA (1)...(19): siRNA sense strand
uugaagagaugaagaaagg

SEQ ID NO: 24920 - RNA, 19 nt, Homo sapiens
  misc_RNA (1)...(19): siRNA sense strand
uggaagagaccugcucaua

SEQ ID NO: 24921 - RNA, 19 nt, Homo sapiens
  misc_RNA (1)...(19): siRNA sense strand
gguacacccuggcugacaa

SEQ ID NO: 24922 - RNA, 19 nt, Homo sapiens
  misc_RNA (1)...(19): siRNA sense strand
cccaucaccuuccgcauga

SEQ ID NO: 24923 - RNA, 19 nt, Homo sapiens
  misc_RNA (1)...(19): siRNA sense strand
uaacguccucuccauuaaa

SEQ ID NO: 24924 - RNA, 19 nt, Homo sapiens
  misc_RNA (1)...(19): siRNA sense strand
gaucgacagguccaugaaa

SEQ ID NO: 24925 - RNA, 19 nt, Homo sapiens
  misc_RNA (1)...(19): siRNA sense strand
uccagcagcuucaucauca

SEQ ID NO: 24926 - RNA, 19 nt, Homo sapiens
  misc_RNA (1)...(19): siRNA sense strand
auaacguccucuccauuaa

SEQ ID NO: 24927 - RNA, 19 nt, Homo sapiens
  misc_RNA (1)...(19): siRNA sense strand
gcacaaccgguucacaaag

SEQ ID NO: 24928 - RNA, 19 nt, Homo sapiens
  misc_RNA (1)...(19): siRNA sense strand
aaagagagugcauggaaga

SEQ ID NO: 24929 - RNA, 19 nt, Homo sapiens
  misc_RNA (1)...(19): siRNA sense strand
ccacgcugaugacgcagaa

SEQ ID NO: 24930 - RNA, 19 nt, Homo sapiens
  misc_RNA (1)...(19): siRNA sense strand
aaaggagaccuaugacuuc

SEQ ID NO: 24931 - RNA, 19 nt, Homo sapiens
  misc_RNA (1)...(19): siRNA sense strand
gagcgaguucuacauccua

SEQ ID NO: 24932 - RNA, 19 nt, Homo sapiens
  misc_RNA (1)...(19): siRNA sense strand
caaagauggcgaccagugu

SEQ ID NO: 24933 - RNA, 19 nt, Homo sapiens
  misc_RNA (1)...(19): siRNA sense strand
gaggguuucugugguggaa

SEQ ID NO: 24934 - RNA, 19 nt, Homo sapiens
  misc_RNA (1)...(19): siRNA sense strand
gaccaguccuugccagaac

SEQ ID NO: 24935 - RNA, 19 nt, Homo sapiens
  misc_RNA (1)...(19): siRNA sense strand
gagggccaauuccuuucuu

SEQ ID NO: 24936 - RNA, 19 nt, Homo sapiens
  misc_RNA (1)...(19): siRNA sense strand
caccugcaccuguuuagaa

SEQ ID NO: 24937 - RNA, 19 nt, Homo sapiens
  misc_RNA (1)...(19): siRNA sense strand
gaucgugggaggccaggaa

SEQ ID NO: 24938 - RNA, 19 nt, Homo sapiens
  misc_RNA (1)...(19): siRNA sense strand
ggccaauuccuuucuugaa

SEQ ID NO: 24939 - RNA, 19 nt, Homo sapiens
  misc_RNA (1)...(19): siRNA sense strand
ccaccaggcucaagaugcu

SEQ ID NO: 24940 - RNA, 19 nt, Homo sapiens
  misc_RNA (1)...(19): siRNA sense strand
ggucaccgccuuccucaag

SEQ ID NO: 24941 - RNA, 19 nt, Homo sapiens
  misc_RNA (1)...(19): siRNA sense strand
ggacagcgacaagacgaau

SEQ ID NO: 24942 - RNA, 19 nt, Homo sapiens
  misc_RNA (1)...(19): siRNA sense strand
caucaucacccagaacaug

SEQ ID NO: 24943 - RNA, 19 nt, Homo sapiens
  misc_RNA (1)...(19): siRNA sense strand
agaaccagggcaaauguaa

SEQ ID NO: 24944 - RNA, 19 nt, Homo sapiens
  misc_RNA (1)...(19): siRNA sense strand
cacgagggccaauuccuuu

SEQ ID NO: 24945 - RNA, 19 nt, Homo sapiens
  misc_RNA (1)...(19): siRNA sense strand
caacggcaaggccugcauu

SEQ ID NO: 24946 - RNA, 19 nt, Homo sapiens
  misc_RNA (1)...(19): siRNA sense strand
cacaaccgguucacaaagg

SEQ ID NO: 24947 - RNA, 19 nt, Homo sapiens
  misc_RNA (1)...(19): siRNA sense strand
ggacaccucgaaagagagu

SEQ ID NO: 24948 - RNA, 19 nt, Homo sapiens
  misc_RNA (1)...(19): siRNA sense strand
ccagaaccagggcaaaugu

SEQ ID NO: 24949 - RNA, 19 nt, Homo sapiens
  misc_RNA (1)...(19): siRNA sense strand
ucacgagggccaauuccuu

SEQ ID NO: 24950 - RNA, 19 nt, Homo sapiens
  misc_RNA (1)...(19): siRNA sense strand
agaaggauucgaaggcaaa

SEQ ID NO: 24951 - RNA, 19 nt, Homo sapiens
  misc_RNA (1)...(19): siRNA sense strand
cagaaccagggcaaaugua

SEQ ID NO: 24952 - RNA, 19 nt, Homo sapiens
  misc_RNA (1)...(19): siRNA sense strand
ggaaguacgggaucuacac

SEQ ID NO: 24953 - RNA, 19 nt, Homo sapiens
  misc_RNA (1)...(19): siRNA sense strand
aagcacaaccgguucacaa

SEQ ID NO: 24954 - RNA, 19 nt, Homo sapiens
  misc_RNA (1)...(19): siRNA sense strand
cugcaccuguuuagaagga

SEQ ID NO: 24955 - RNA, 19 nt, Homo sapiens
  misc_RNA (1)...(19): siRNA sense strand
gggccaauuccuuucuuga

SEQ ID NO: 24956 - RNA, 19 nt, Homo sapiens
  misc_RNA (1)...(19): siRNA sense strand
aagaaaggacaccucgaaa

SEQ ID NO: 24957 - RNA, 19 nt, Homo sapiens
  misc_RNA (1)...(19): siRNA sense strand
gucauaacguccucuccau

SEQ ID NO: 24958 - RNA, 19 nt, Homo sapiens
  misc_RNA (1)...(19): siRNA sense strand
agaaaggacaccucgaaag

SEQ ID NO: 24959 - RNA, 19 nt, Homo sapiens
  misc_RNA (1)...(19): siRNA sense strand
ucaccgccuuccucaagug

SEQ ID NO: 24960 - RNA, 19 nt, Homo sapiens
  misc_RNA (1)...(19): siRNA sense strand
acaaccgguucacaaagga

SEQ ID NO: 24961 - RNA, 19 nt, Homo sapiens
  misc_RNA (1)...(19): siRNA sense strand
ccaguucugccacgaggaa

SEQ ID NO: 24962 - RNA, 19 nt, Homo sapiens
  misc_RNA (1)...(19): siRNA sense strand
ggaucgacagguccaugaa

SEQ ID NO: 24963 - RNA, 19 nt, Homo sapiens
  misc_RNA (1)...(19): siRNA sense strand
ucauaacguccucuccauu

SEQ ID NO: 24964 - RNA, 19 nt, Homo sapiens
  misc_RNA (1)...(19): siRNA sense strand
gccagaaccagggcaaaug

SEQ ID NO: 24965 - RNA, 19 nt, Homo sapiens
  misc_RNA (1)...(19): siRNA sense strand
gaccuaugacuucgacauc

SEQ ID NO: 24966 - RNA, 19 nt, Homo sapiens
  misc_RNA (1)...(19): siRNA sense strand
cuaccaagccaagagauuc

SEQ ID NO: 24967 - RNA, 19 nt, Homo sapiens
  misc_RNA (1)...(19): siRNA sense strand
auacaccugcaccuguuua

SEQ ID NO: 24968 - RNA, 19 nt, Homo sapiens
  misc_RNA (1)...(19): siRNA sense strand
gaccugcucauacgaagag

SEQ ID NO: 24969 - RNA, 19 nt, Homo sapiens
  misc_RNA (1)...(19): siRNA sense strand
acagcgacaagacgaauga

SEQ ID NO: 24970 - RNA, 19 nt, Homo sapiens
  misc_RNA (1)...(19): siRNA sense strand
ccuucgaccugcuugacuu

SEQ ID NO: 24971 - RNA, 19 nt, Homo sapiens
  misc_RNA (1)...(19): siRNA sense strand
ccugacagcaucacaugga

SEQ ID NO: 24972 - RNA, 19 nt, Homo sapiens
  misc_RNA (1)...(19): siRNA sense strand
uaacggcagcccacugucu

SEQ ID NO: 24973 - RNA, 19 nt, Homo sapiens
  misc_RNA (1)...(19): siRNA sense strand
gauggcgaccagugugaga

SEQ ID NO: 24974 - RNA, 19 nt, Homo sapiens
  misc_RNA (1)...(19): siRNA sense strand
caaaggagauagaaaugua

SEQ ID NO: 24975 - RNA, 19 nt, Homo sapiens
  misc_RNA (1)...(19): siRNA sense strand
gcagaaagcggguaugaua

SEQ ID NO: 24976 - RNA, 19 nt, Homo sapiens
  misc_RNA (1)...(19): siRNA sense strand
uaacgaagcucgauaaagu

SEQ ID NO: 24977 - RNA, 19 nt, Homo sapiens
  misc_RNA (1)...(19): siRNA sense strand
ggaaaccaguggauauuaa

SEQ ID NO: 24978 - RNA, 19 nt, Homo sapiens
  misc_RNA (1)...(19): siRNA sense strand
gaaagacaguguuacagaa

SEQ ID NO: 24979 - RNA, 19 nt, Homo sapiens
  misc_RNA (1)...(19): siRNA sense strand
gcaaugcucacaccaaaua

SEQ ID NO: 24980 - RNA, 19 nt, Homo sapiens
  misc_RNA (1)...(19): siRNA sense strand
gagaguggauugcccagua

SEQ ID NO: 24981 - RNA, 19 nt, Homo sapiens
  misc_RNA (1)...(19): siRNA sense strand
aaacggaucuccaacuaaa

SEQ ID NO: 24982 - RNA, 19 nt, Homo sapiens
  misc_RNA (1)...(19): siRNA sense strand
gauguuuacucuucacuuu

SEQ ID NO: 24983 - RNA, 19 nt, Homo sapiens
  misc_RNA (1)...(19): siRNA sense strand
gaauaacgaagcucgauaa

SEQ ID NO: 24984 - RNA, 19 nt, Homo sapiens
  misc_RNA (1)...(19): siRNA sense strand
gaaagcggguaugauauug

SEQ ID NO: 24985 - RNA, 19 nt, Homo sapiens
  misc_RNA (1)...(19): siRNA sense strand
agaaaucuuugucuccuua

SEQ ID NO: 24986 - RNA, 19 nt, Homo sapiens
  misc_RNA (1)...(19): siRNA sense strand
gaggaggcaucucuggaua

SEQ ID NO: 24987 - RNA, 19 nt, Homo sapiens
  misc_RNA (1)...(19): siRNA sense strand
ucaaacggaucuccaacua

SEQ ID NO: 24988 - RNA, 19 nt, Homo sapiens
  misc_RNA (1)...(19): siRNA sense strand
gguaugauauugccuuguu

SEQ ID NO: 24989 - RNA, 19 nt, Homo sapiens
  misc_RNA (1)...(19): siRNA sense strand
gaggacacaucuuucuuug

SEQ ID NO: 24990 - RNA, 19 nt, Homo sapiens
  misc_RNA (1)...(19): siRNA sense strand
gaaggacaccugcuuugaa

SEQ ID NO: 24991 - RNA, 19 nt, Homo sapiens
  misc_RNA (1)...(19): siRNA sense strand
ccaaagaaucucaaagaaa

SEQ ID NO: 24992 - RNA, 19 nt, Homo sapiens
  misc_RNA (1)...(19): siRNA sense strand
gcacuuaccacccaagaug

SEQ ID NO: 24993 - RNA, 19 nt, Homo sapiens
  misc_RNA (1)...(19): siRNA sense strand
gauauugccuuguugaaac

SEQ ID NO: 24994 - RNA, 19 nt, Homo sapiens
  misc_RNA (1)...(19): siRNA sense strand
guucugccauucuucauuu

SEQ ID NO: 24995 - RNA, 19 nt, Homo sapiens
  misc_RNA (1)...(19): siRNA sense strand
ccaugacacugauuucuug

SEQ ID NO: 24996 - RNA, 19 nt, Homo sapiens
  misc_RNA (1)...(19): siRNA sense strand
gaucccacccgaugguuua

SEQ ID NO: 24997 - RNA, 19 nt, Homo sapiens
  misc_RNA (1)...(19): siRNA sense strand
ggauacacauuaagguugu

SEQ ID NO: 24998 - RNA, 19 nt, Homo sapiens
  misc_RNA (1)...(19): siRNA sense strand
cagaaacacugccaagagu

SEQ ID NO: 24999 - RNA, 19 nt, Homo sapiens
  misc_RNA (1)...(19): siRNA sense strand
uuacacagauucucaacga

SEQ ID NO: 25000 - RNA, 19 nt, Homo sapiens
  misc_RNA (1)...(19): siRNA sense strand
ggacauuacuacggucuuc

SEQ ID NO: 25001 - RNA, 19 nt, Homo sapiens
  misc_RNA (1)...(19): siRNA sense strand
cagaaacugugcaccaaug

SEQ ID NO: 25002 - RNA, 19 nt, Homo sapiens
  misc_RNA (1)...(19): siRNA sense strand
uuucuaaucuggcuuguau

SEQ ID NO: 25003 - RNA, 19 nt, Homo sapiens
  misc_RNA (1)...(19): siRNA sense strand
gaaagccaagauacccuua

SEQ ID NO: 25004 - RNA, 19 nt, Homo sapiens
  misc_RNA (1)...(19): siRNA sense strand
ugacucaguuguugaagga

SEQ ID NO: 25005 - RNA, 19 nt, Homo sapiens
  misc_RNA (1)...(19): siRNA sense strand
gugaaugugugacucaguu

SEQ ID NO: 25006 - RNA, 19 nt, Homo sapiens
  misc_RNA (1)...(19): siRNA sense strand
gaauaggacagcagcgauu

SEQ ID NO: 25007 - RNA, 19 nt, Homo sapiens
  misc_RNA (1)...(19): siRNA sense strand
gcccaaagaaucucaaaga

SEQ ID NO: 25008 - RNA, 19 nt, Homo sapiens
  misc_RNA (1)...(19): siRNA sense strand
uaacauuugucuacugaag

SEQ ID NO: 25009 - RNA, 19 nt, Homo sapiens
  misc_RNA (1)...(19): siRNA sense strand
uuacuuguguccugaaaga

SEQ ID NO: 25010 - RNA, 19 nt, Homo sapiens
  misc_RNA (1)...(19): siRNA sense strand
ggacauaaaauaacccaua

SEQ ID NO: 25011 - RNA, 19 nt, Homo sapiens
  misc_RNA (1)...(19): siRNA sense strand
ucacgaggccugccagaaa

SEQ ID NO: 25012 - RNA, 19 nt, Homo sapiens
  misc_RNA (1)...(19): siRNA sense strand
ggccgaaucugcacucauc

SEQ ID NO: 25013 - RNA, 19 nt, Homo sapiens
  misc_RNA (1)...(19): siRNA sense strand
gguauucuuucaagcaaug

SEQ ID NO: 25014 - RNA, 19 nt, Homo sapiens
  misc_RNA (1)...(19): siRNA sense strand
ggcgaaggcugugcucaaa

SEQ ID NO: 25015 - RNA, 19 nt, Homo sapiens
  misc_RNA (1)...(19): siRNA sense strand
gccaagauacccuuaguga

SEQ ID NO: 25016 - RNA, 19 nt, Homo sapiens
  misc_RNA (1)...(19): siRNA sense strand
uaaaguggugucuggauuu

SEQ ID NO: 25017 - RNA, 19 nt, Homo sapiens
  misc_RNA (1)...(19): siRNA sense strand
caagugguacauuucauuu

SEQ ID NO: 25018 - RNA, 19 nt, Homo sapiens
  misc_RNA (1)...(19): siRNA sense strand
cccaaagaaucucaaagaa

SEQ ID NO: 25019 - RNA, 19 nt, Homo sapiens
  misc_RNA (1)...(19): siRNA sense strand
ggaggcaucucuggauaca

SEQ ID NO: 25020 - RNA, 19 nt, Homo sapiens
  misc_RNA (1)...(19): siRNA sense strand
gaagagugccagaagagau

SEQ ID NO: 25021 - RNA, 19 nt, Homo sapiens
  misc_RNA (1)...(19): siRNA sense strand
ggacaccugcuuugaagga

SEQ ID NO: 25022 - RNA, 19 nt, Homo sapiens
  misc_RNA (1)...(19): siRNA sense strand
ccauaugccugccuuccaa

SEQ ID NO: 25023 - RNA, 19 nt, Homo sapiens
  misc_RNA (1)...(19): siRNA sense strand
guagagucaccuaagauuu

SEQ ID NO: 25024 - RNA, 19 nt, Homo sapiens
  misc_RNA (1)...(19): siRNA sense strand
ugaaagacaguguuacaga

SEQ ID NO: 25025 - RNA, 19 nt, Homo sapiens
  misc_RNA (1)...(19): siRNA sense strand
ggaauggcccaaagaaucu

SEQ ID NO: 25026 - RNA, 19 nt, Homo sapiens
  misc_RNA (1)...(19): siRNA sense strand
uggaaaccacagugaauua

SEQ ID NO: 25027 - RNA, 19 nt, Homo sapiens
  misc_RNA (1)...(19): siRNA sense strand
gaagagauacagaggacau

SEQ ID NO: 25028 - RNA, 19 nt, Homo sapiens
  misc_RNA (1)...(19): siRNA sense strand
gguagagucaccuaagauu

SEQ ID NO: 25029 - RNA, 19 nt, Homo sapiens
  misc_RNA (1)...(19): siRNA sense strand
gagauacagaggacauaaa

SEQ ID NO: 25030 - RNA, 19 nt, Homo sapiens
  misc_RNA (1)...(19): siRNA sense strand
gaagggaagggcaaguguu

SEQ ID NO: 25031 - RNA, 19 nt, Homo sapiens
  misc_RNA (1)...(19): siRNA sense strand
agaaagcggguaugauauu

SEQ ID NO: 25032 - RNA, 19 nt, Homo sapiens
  misc_RNA (1)...(19): siRNA sense strand
auaaaguggugucuggauu

SEQ ID NO: 25033 - RNA, 19 nt, Homo sapiens
  misc_RNA (1)...(19): siRNA sense strand
caacgaagagugccagaag

SEQ ID NO: 25034 - RNA, 19 nt, Homo sapiens
  misc_RNA (1)...(19): siRNA sense strand
caaacggaucuccaacuaa

SEQ ID NO: 25035 - RNA, 19 nt, Homo sapiens
  misc_RNA (1)...(19): siRNA sense strand
gccagaaacugugcaccaa

SEQ ID NO: 25036 - RNA, 19 nt, Homo sapiens
  misc_RNA (1)...(19): siRNA sense strand
acagugaauuacacagauu

SEQ ID NO: 25037 - RNA, 19 nt, Homo sapiens
  misc_RNA (1)...(19): siRNA sense strand
aagggaagggcaaguguua

SEQ ID NO: 25038 - RNA, 19 nt, Homo sapiens
  misc_RNA (1)...(19): siRNA sense strand
aaagacaguguuacagaaa

SEQ ID NO: 25039 - RNA, 19 nt, Homo sapiens
  misc_RNA (1)...(19): siRNA sense strand
cgaaggcugugcucaaagg

SEQ ID NO: 25040 - RNA, 19 nt, Homo sapiens
  misc_RNA (1)...(19): siRNA sense strand
gcagcgauuucuggguauu

SEQ ID NO: 25041 - RNA, 19 nt, Homo sapiens
  misc_RNA (1)...(19): siRNA sense strand
gaaaccacagugaauuaca

SEQ ID NO: 25042 - RNA, 19 nt, Homo sapiens
  misc_RNA (1)...(19): siRNA sense strand
ccaguguucugccauucuu

SEQ ID NO: 25043 - RNA, 19 nt, Homo sapiens
  misc_RNA (1)...(19): siRNA sense strand
ccugugcacuuucuaaucu

SEQ ID NO: 25044 - RNA, 19 nt, Homo sapiens
  misc_RNA (1)...(19): siRNA sense strand
gccagguagucugcacuua

SEQ ID NO: 25045 - RNA, 19 nt, Homo sapiens
  misc_RNA (1)...(19): siRNA sense strand
gaaaucuuugucuccuuaa

SEQ ID NO: 25046 - RNA, 19 nt, Homo sapiens
  misc_RNA (1)...(19): siRNA sense strand
ccacagugaauuacacaga

SEQ ID NO: 25047 - RNA, 19 nt, Homo sapiens
  misc_RNA (1)...(19): siRNA sense strand
agaggacacaucuuucuuu

SEQ ID NO: 25048 - RNA, 19 nt, Homo sapiens
  misc_RNA (1)...(19): siRNA sense strand
ucaagugguacauuucauu

SEQ ID NO: 25049 - RNA, 19 nt, Homo sapiens
  misc_RNA (1)...(19): siRNA sense strand
cacccaagauguuuacucu

SEQ ID NO: 25050 - RNA, 19 nt, Homo sapiens
  misc_RNA (1)...(19): siRNA sense strand
acaaugaggucuggcaucu

SEQ ID NO: 25051 - RNA, 19 nt, Homo sapiens
  misc_RNA (1)...(19): siRNA sense strand
aagagugccagaagagaua

SEQ ID NO: 25052 - RNA, 19 nt, Homo sapiens
  misc_RNA (1)...(19): siRNA sense strand
acaaaauacucuccagaaa

SEQ ID NO: 25053 - RNA, 19 nt, Homo sapiens
  misc_RNA (1)...(19): siRNA sense strand
uaaugaguguaccaccaaa

SEQ ID NO: 25054 - RNA, 19 nt, Homo sapiens
  misc_RNA (1)...(19): siRNA sense strand
aggcaucucuggauacaca

SEQ ID NO: 25055 - RNA, 19 nt, Homo sapiens
  misc_RNA (1)...(19): siRNA sense strand
cugaaauccugugcacuuu

SEQ ID NO: 25056 - RNA, 19 nt, Homo sapiens
  misc_RNA (1)...(19): siRNA sense strand
gggacaccaaccagaauaa

SEQ ID NO: 25057 - RNA, 19 nt, Homo sapiens
  misc_RNA (1)...(19): siRNA sense strand
caucucuggauacacauua

SEQ ID NO: 25058 - RNA, 19 nt, Homo sapiens
  misc_RNA (1)...(19): siRNA sense strand
gauaaaguggugucuggau

SEQ ID NO: 25059 - RNA, 19 nt, Homo sapiens
  misc_RNA (1)...(19): siRNA sense strand
aaggacaccugcuuugaag

SEQ ID NO: 25060 - RNA, 19 nt, Homo sapiens
  misc_RNA (1)...(19): siRNA sense strand
guaugauauugccuuguug

SEQ ID NO: 25061 - RNA, 19 nt, Homo sapiens
  misc_RNA (1)...(19): siRNA sense strand
uggaaaccaguggauauua

SEQ ID NO: 25062 - RNA, 19 nt, Homo sapiens
  misc_RNA (1)...(19): siRNA sense strand
ucacaccaagcgccaagua

SEQ ID NO: 25063 - RNA, 19 nt, Homo sapiens
  misc_RNA (1)...(19): siRNA sense strand
ugaaggacaccugcuuuga

SEQ ID NO: 25064 - RNA, 19 nt, Homo sapiens
  misc_RNA (1)...(19): siRNA sense strand
cagaaagcggguaugauau

SEQ ID NO: 25065 - RNA, 19 nt, Homo sapiens
  misc_RNA (1)...(19): siRNA sense strand
ucaucccgguugcuuguuu

SEQ ID NO: 25066 - RNA, 19 nt, Homo sapiens
  misc_RNA (1)...(19): siRNA sense strand
agaauaacgaagcucgaua

SEQ ID NO: 25067 - RNA, 19 nt, Homo sapiens
  misc_RNA (1)...(19): siRNA sense strand
cacagugaauuacacagau

SEQ ID NO: 25068 - RNA, 19 nt, Homo sapiens
  misc_RNA (1)...(19): siRNA sense strand
guccugaaagacaguguua

SEQ ID NO: 25069 - RNA, 19 nt, Homo sapiens
  misc_RNA (1)...(19): siRNA sense strand
acagcaacaucgacagugu

SEQ ID NO: 25070 - RNA, 19 nt, Homo sapiens
  misc_RNA (1)...(19): siRNA sense strand
uguuuacucuucacuuuca

SEQ ID NO: 25071 - RNA, 19 nt, Homo sapiens
  misc_RNA (1)...(19): siRNA sense strand
gggcgaaggcugugcucaa

SEQ ID NO: 25072 - RNA, 19 nt, Homo sapiens
  misc_RNA (1)...(19): siRNA sense strand
ccaaaggagauagaaaugu

SEQ ID NO: 25073 - RNA, 19 nt, Homo sapiens
  misc_RNA (1)...(19): siRNA sense strand
ggaaaccacagugaauuac

SEQ ID NO: 25074 - RNA, 19 nt, Homo sapiens
  misc_RNA (1)...(19): siRNA sense strand
caaaggagauagaaaugua

SEQ ID NO: 25075 - RNA, 19 nt, Homo sapiens
  misc_RNA (1)...(19): siRNA sense strand
gcagaaagcggguaugaua

SEQ ID NO: 25076 - RNA, 19 nt, Homo sapiens
  misc_RNA (1)...(19): siRNA sense strand
uaacgaagcucgauaaagu

SEQ ID NO: 25077 - RNA, 19 nt, Homo sapiens
  misc_RNA (1)...(19): siRNA sense strand
ggaaaccaguggauauuaa

SEQ ID NO: 25078 - RNA, 19 nt, Homo sapiens
  misc_RNA (1)...(19): siRNA sense strand
gaaagacaguguuacagaa

SEQ ID NO: 25079 - RNA, 19 nt, Homo sapiens
  misc_RNA (1)...(19): siRNA sense strand
gcaaugcucacaccaaaua

SEQ ID NO: 25080 - RNA, 19 nt, Homo sapiens
  misc_RNA (1)...(19): siRNA sense strand
gagaguggauugcccagua

SEQ ID NO: 25081 - RNA, 19 nt, Homo sapiens
  misc_RNA (1)...(19): siRNA sense strand
aaacggaucuccaacuaaa

SEQ ID NO: 25082 - RNA, 19 nt, Homo sapiens
  misc_RNA (1)...(19): siRNA sense strand
gauguuuacucuucacuuu

SEQ ID NO: 25083 - RNA, 19 nt, Homo sapiens
  misc_RNA (1)...(19): siRNA sense strand
gaauaacgaagcucgauaa

SEQ ID NO: 25084 - RNA, 19 nt, Homo sapiens
  misc_RNA (1)...(19): siRNA sense strand
gaaagcggguaugauauug

SEQ ID NO: 25085 - RNA, 19 nt, Homo sapiens
  misc_RNA (1)...(19): siRNA sense strand
agaaaucuuugucuccuua

SEQ ID NO: 25086 - RNA, 19 nt, Homo sapiens
  misc_RNA (1)...(19): siRNA sense strand
gaggaggcaucucuggaua

SEQ ID NO: 25087 - RNA, 19 nt, Homo sapiens
  misc_RNA (1)...(19): siRNA sense strand
ucaaacggaucuccaacua

SEQ ID NO: 25088 - RNA, 19 nt, Homo sapiens
  misc_RNA (1)...(19): siRNA sense strand
gguaugauauugccuuguu

SEQ ID NO: 25089 - RNA, 19 nt, Homo sapiens
  misc_RNA (1)...(19): siRNA sense strand
gaggacacaucuuucuuug

SEQ ID NO: 25090 - RNA, 19 nt, Homo sapiens
  misc_RNA (1)...(19): siRNA sense strand
gaaggacaccugcuuugaa

SEQ ID NO: 25091 - RNA, 19 nt, Homo sapiens
  misc_RNA (1)...(19): siRNA sense strand
ccaaagaaucucaaagaaa

SEQ ID NO: 25092 - RNA, 19 nt, Homo sapiens
  misc_RNA (1)...(19): siRNA sense strand
gcacuuaccacccaagaug

SEQ ID NO: 25093 - RNA, 19 nt, Homo sapiens
  misc_RNA (1)...(19): siRNA sense strand
gauauugccuuguugaaac

SEQ ID NO: 25094 - RNA, 19 nt, Homo sapiens
  misc_RNA (1)...(19): siRNA sense strand
guucugccauucuucauuu

SEQ ID NO: 25095 - RNA, 19 nt, Homo sapiens
  misc_RNA (1)...(19): siRNA sense strand
ccaugacacugauuucuug

SEQ ID NO: 25096 - RNA, 19 nt, Homo sapiens
  misc_RNA (1)...(19): siRNA sense strand
gaucccacccgaugguuua

SEQ ID NO: 25097 - RNA, 19 nt, Homo sapiens
  misc_RNA (1)...(19): siRNA sense strand
ggauacacauuaagguugu

SEQ ID NO: 25098 - RNA, 19 nt, Homo sapiens
  misc_RNA (1)...(19): siRNA sense strand
cagaaacacugccaagagu

SEQ ID NO: 25099 - RNA, 19 nt, Homo sapiens
  misc_RNA (1)...(19): siRNA sense strand
uuacacagauucucaacga

SEQ ID NO: 25100 - RNA, 19 nt, Homo sapiens
  misc_RNA (1)...(19): siRNA sense strand
ggacauuacuacggucuuc

SEQ ID NO: 25101 - RNA, 19 nt, Homo sapiens
  misc_RNA (1)...(19): siRNA sense strand
cagaaacugugcaccaaug

SEQ ID NO: 25102 - RNA, 19 nt, Homo sapiens
  misc_RNA (1)...(19): siRNA sense strand
uuucuaaucuggcuuguau

SEQ ID NO: 25103 - RNA, 19 nt, Homo sapiens
  misc_RNA (1)...(19): siRNA sense strand
gaaagccaagauacccuua

SEQ ID NO: 25104 - RNA, 19 nt, Homo sapiens
  misc_RNA (1)...(19): siRNA sense strand
ugacucaguuguugaagga

SEQ ID NO: 25105 - RNA, 19 nt, Homo sapiens
  misc_RNA (1)...(19): siRNA sense strand
gugaaugugugacucaguu

SEQ ID NO: 25106 - RNA, 19 nt, Homo sapiens
  misc_RNA (1)...(19): siRNA sense strand
gaauaggacagcagcgauu

SEQ ID NO: 25107 - RNA, 19 nt, Homo sapiens
  misc_RNA (1)...(19): siRNA sense strand
gcccaaagaaucucaaaga

SEQ ID NO: 25108 - RNA, 19 nt, Homo sapiens
  misc_RNA (1)...(19): siRNA sense strand
uaacauuugucuacugaag

SEQ ID NO: 25109 - RNA, 19 nt, Homo sapiens
  misc_RNA (1)...(19): siRNA sense strand
uuacuuguguccugaaaga

SEQ ID NO: 25110 - RNA, 19 nt, Homo sapiens
  misc_RNA (1)...(19): siRNA sense strand
ggacauaaaauaacccaua

SEQ ID NO: 25111 - RNA, 19 nt, Homo sapiens
  misc_RNA (1)...(19): siRNA sense strand
ucacgaggccugccagaaa

SEQ ID NO: 25112 - RNA, 19 nt, Homo sapiens
  misc_RNA (1)...(19): siRNA sense strand
ggccgaaucugcacucauc

SEQ ID NO: 25113 - RNA, 19 nt, Homo sapiens
  misc_RNA (1)...(19): siRNA sense strand
gguauucuuucaagcaaug

SEQ ID NO: 25114 - RNA, 19 nt, Homo sapiens
  misc_RNA (1)...(19): siRNA sense strand
ggcgaaggcugugcucaaa

SEQ ID NO: 25115 - RNA, 19 nt, Homo sapiens
  misc_RNA (1)...(19): siRNA sense strand
gccaagauacccuuaguga

SEQ ID NO: 25116 - RNA, 19 nt, Homo sapiens
  misc_RNA (1)...(19): siRNA sense strand
uaaaguggugucuggauuu

SEQ ID NO: 25117 - RNA, 19 nt, Homo sapiens
  misc_RNA (1)...(19): siRNA sense strand
caagugguacauuucauuu

SEQ ID NO: 25118 - RNA, 19 nt, Homo sapiens
  misc_RNA (1)...(19): siRNA sense strand
cccaaagaaucucaaagaa

SEQ ID NO: 25119 - RNA, 19 nt, Homo sapiens
  misc_RNA (1)...(19): siRNA sense strand
ggaggcaucucuggauaca

SEQ ID NO: 25120 - RNA, 19 nt, Homo sapiens
  misc_RNA (1)...(19): siRNA sense strand
gaagagugccagaagagau

SEQ ID NO: 25121 - RNA, 19 nt, Homo sapiens
  misc_RNA (1)...(19): siRNA sense strand
ggacaccugcuuugaagga

SEQ ID NO: 25122 - RNA, 19 nt, Homo sapiens
  misc_RNA (1)...(19): siRNA sense strand
ccauaugccugccuuccaa

SEQ ID NO: 25123 - RNA, 19 nt, Homo sapiens
  misc_RNA (1)...(19): siRNA sense strand
guagagucaccuaagauuu

SEQ ID NO: 25124 - RNA, 19 nt, Homo sapiens
  misc_RNA (1)...(19): siRNA sense strand
ugaaagacaguguuacaga

SEQ ID NO: 25125 - RNA, 19 nt, Homo sapiens
  misc_RNA (1)...(19): siRNA sense strand
ggaauggcccaaagaaucu

SEQ ID NO: 25126 - RNA, 19 nt, Homo sapiens
  misc_RNA (1)...(19): siRNA sense strand
uggaaaccacagugaauua

SEQ ID NO: 25127 - RNA, 19 nt, Homo sapiens
  misc_RNA (1)...(19): siRNA sense strand
gaagagauacagaggacau

SEQ ID NO: 25128 - RNA, 19 nt, Homo sapiens
  misc_RNA (1)...(19): siRNA sense strand
gguagagucaccuaagauu

SEQ ID NO: 25129 - RNA, 19 nt, Homo sapiens
  misc_RNA (1)...(19): siRNA sense strand
gagauacagaggacauaaa

SEQ ID NO: 25130 - RNA, 19 nt, Homo sapiens
  misc_RNA (1)...(19): siRNA sense strand
gaagggaagggcaaguguu

SEQ ID NO: 25131 - RNA, 19 nt, Homo sapiens
  misc_RNA (1)...(19): siRNA sense strand
agaaagcggguaugauauu

SEQ ID NO: 25132 - RNA, 19 nt, Homo sapiens
  misc_RNA (1)...(19): siRNA sense strand
auaaaguggugucuggauu

SEQ ID NO: 25133 - RNA, 19 nt, Homo sapiens
  misc_RNA (1)...(19): siRNA sense strand
caacgaagagugccagaag

SEQ ID NO: 25134 - RNA, 19 nt, Homo sapiens
  misc_RNA (1)...(19): siRNA sense strand
caaacggaucuccaacuaa

SEQ ID NO: 25135 - RNA, 19 nt, Homo sapiens
  misc_RNA (1)...(19): siRNA sense strand
gccagaaacugugcaccaa

SEQ ID NO: 25136 - RNA, 19 nt, Homo sapiens
  misc_RNA (1)...(19): siRNA sense strand
acagugaauuacacagauu

SEQ ID NO: 25137 - RNA, 19 nt, Homo sapiens
  misc_RNA (1)...(19): siRNA sense strand
aagggaagggcaaguguua

SEQ ID NO: 25138 - RNA, 19 nt, Homo sapiens
  misc_RNA (1)...(19): siRNA sense strand
aaagacaguguuacagaaa

SEQ ID NO: 25139 - RNA, 19 nt, Homo sapiens
  misc_RNA (1)...(19): siRNA sense strand
cgaaggcugugcucaaagg

SEQ ID NO: 25140 - RNA, 19 nt, Homo sapiens
  misc_RNA (1)...(19): siRNA sense strand
gcagcgauuucuggguauu

SEQ ID NO: 25141 - RNA, 19 nt, Homo sapiens
  misc_RNA (1)...(19): siRNA sense strand
gaaaccacagugaauuaca

SEQ ID NO: 25142 - RNA, 19 nt, Homo sapiens
  misc_RNA (1)...(19): siRNA sense strand
ccaguguucugccauucuu

SEQ ID NO: 25143 - RNA, 19 nt, Homo sapiens
  misc_RNA (1)...(19): siRNA sense strand
ccugugcacuuucuaaucu

SEQ ID NO: 25144 - RNA, 19 nt, Homo sapiens
  misc_RNA (1)...(19): siRNA sense strand
gccagguagucugcacuua

SEQ ID NO: 25145 - RNA, 19 nt, Homo sapiens
  misc_RNA (1)...(19): siRNA sense strand
gaaaucuuugucuccuuaa

SEQ ID NO: 25146 - RNA, 19 nt, Homo sapiens
  misc_RNA (1)...(19): siRNA sense strand
ccacagugaauuacacaga

SEQ ID NO: 25147 - RNA, 19 nt, Homo sapiens
  misc_RNA (1)...(19): siRNA sense strand
agaggacacaucuuucuuu

SEQ ID NO: 25148 - RNA, 19 nt, Homo sapiens
  misc_RNA (1)...(19): siRNA sense strand
ucaagugguacauuucauu

SEQ ID NO: 25149 - RNA, 19 nt, Homo sapiens
  misc_RNA (1)...(19): siRNA sense strand
cacccaagauguuuacucu

SEQ ID NO: 25150 - RNA, 19 nt, Homo sapiens
  misc_RNA (1)...(19): siRNA sense strand
acaaugaggucuggcaucu

SEQ ID NO: 25151 - RNA, 19 nt, Homo sapiens
  misc_RNA (1)...(19): siRNA sense strand
aagagugccagaagagaua

SEQ ID NO: 25152 - RNA, 19 nt, Homo sapiens
  misc_RNA (1)...(19): siRNA sense strand
acaaaauacucuccagaaa

SEQ ID NO: 25153 - RNA, 19 nt, Homo sapiens
  misc_RNA (1)...(19): siRNA sense strand
uaaugaguguaccaccaaa

SEQ ID NO: 25154 - RNA, 19 nt, Homo sapiens
  misc_RNA (1)...(19): siRNA sense strand
aggcaucucuggauacaca

SEQ ID NO: 25155 - RNA, 19 nt, Homo sapiens
  misc_RNA (1)...(19): siRNA sense strand
cugaaauccugugcacuuu

SEQ ID NO: 25156 - RNA, 19 nt, Homo sapiens
  misc_RNA (1)...(19): siRNA sense strand
gggacaccaaccagaauaa

SEQ ID NO: 25157 - RNA, 19 nt, Homo sapiens
  misc_RNA (1)...(19): siRNA sense strand
caucucuggauacacauua

SEQ ID NO: 25158 - RNA, 19 nt, Homo sapiens
  misc_RNA (1)...(19): siRNA sense strand
gauaaaguggugucuggau

SEQ ID NO: 25159 - RNA, 19 nt, Homo sapiens
  misc_RNA (1)...(19): siRNA sense strand
aaggacaccugcuuugaag

SEQ ID NO: 25160 - RNA, 19 nt, Homo sapiens
  misc_RNA (1)...(19): siRNA sense strand
guaugauauugccuuguug

SEQ ID NO: 25161 - RNA, 19 nt, Homo sapiens
  misc_RNA (1)...(19): siRNA sense strand
uggaaaccaguggauauua

SEQ ID NO: 25162 - RNA, 19 nt, Homo sapiens
  misc_RNA (1)...(19): siRNA sense strand
ucacaccaagcgccaagua

SEQ ID NO: 25163 - RNA, 19 nt, Homo sapiens
  misc_RNA (1)...(19): siRNA sense strand
ugaaggacaccugcuuuga

SEQ ID NO: 25164 - RNA, 19 nt, Homo sapiens
  misc_RNA (1)...(19): siRNA sense strand
cagaaagcggguaugauau

SEQ ID NO: 25165 - RNA, 19 nt, Homo sapiens
  misc_RNA (1)...(19): siRNA sense strand
ucaucccgguugcuuguuu

SEQ ID NO: 25166 - RNA, 19 nt, Homo sapiens
  misc_RNA (1)...(19): siRNA sense strand
agaauaacgaagcucgaua

SEQ ID NO: 25167 - RNA, 19 nt, Homo sapiens
  misc_RNA (1)...(19): siRNA sense strand
cacagugaauuacacagau

SEQ ID NO: 25168 - RNA, 19 nt, Homo sapiens
  misc_RNA (1)...(19): siRNA sense strand
guccugaaagacaguguua

SEQ ID NO: 25169 - RNA, 19 nt, Homo sapiens
  misc_RNA (1)...(19): siRNA sense strand
acagcaacaucgacagugu

SEQ ID NO: 25170 - RNA, 19 nt, Homo sapiens
  misc_RNA (1)...(19): siRNA sense strand
uguuuacucuucacuuuca

SEQ ID NO: 25171 - RNA, 19 nt, Homo sapiens
  misc_RNA (1)...(19): siRNA sense strand
gggcgaaggcugugcucaa

SEQ ID NO: 25172 - RNA, 19 nt, Homo sapiens
  misc_RNA (1)...(19): siRNA sense strand
ccaaaggagauagaaaugu

SEQ ID NO: 25173 - RNA, 19 nt, Homo sapiens
  misc_RNA (1)...(19): siRNA sense strand
ggaaaccacagugaauuac

SEQ ID NO: 25174 - RNA, 19 nt, Homo sapiens
  misc_RNA (1)...(19): siRNA sense strand
gaacgugacugccgagcaa

SEQ ID NO: 25175 - RNA, 19 nt, Homo sapiens
  misc_RNA (1)...(19): siRNA sense strand
ggaaaccacugccagaaag

SEQ ID NO: 25176 - RNA, 19 nt, Homo sapiens
  misc_RNA (1)...(19): siRNA sense strand
ccaaggagcauaaguacaa

SEQ ID NO: 25177 - RNA, 19 nt, Homo sapiens
  misc_RNA (1)...(19): siRNA sense strand
gaaagaccacugcagcaaa

SEQ ID NO: 25178 - RNA, 19 nt, Homo sapiens
  misc_RNA (1)...(19): siRNA sense strand
ggagggaccugugugaaca

SEQ ID NO: 25179 - RNA, 19 nt, Homo sapiens
  misc_RNA (1)...(19): siRNA sense strand
cacaacaccucacuggaaa

SEQ ID NO: 25180 - RNA, 19 nt, Homo sapiens
  misc_RNA (1)...(19): siRNA sense strand
ccacaaauguacccacaag

SEQ ID NO: 25181 - RNA, 19 nt, Homo sapiens
  misc_RNA (1)...(19): siRNA sense strand
ccacaacaccucacuggaa

SEQ ID NO: 25182 - RNA, 19 nt, Homo sapiens
  misc_RNA (1)...(19): siRNA sense strand
ccucagcccuggugugcua

SEQ ID NO: 25183 - RNA, 19 nt, Homo sapiens
  misc_RNA (1)...(19): siRNA sense strand
guauagaacugagcaagca

SEQ ID NO: 25184 - RNA, 19 nt, Homo sapiens
  misc_RNA (1)...(19): siRNA sense strand
ccacaagaaugagauaugg

SEQ ID NO: 25185 - RNA, 19 nt, Homo sapiens
  misc_RNA (1)...(19): siRNA sense strand
acaccgauguggccuacua

SEQ ID NO: 25186 - RNA, 19 nt, Homo sapiens
  misc_RNA (1)...(19): siRNA sense strand
agaaugagauaugguauag

SEQ ID NO: 25187 - RNA, 19 nt, Homo sapiens
  misc_RNA (1)...(19): siRNA sense strand
ggagucaacacuuucgauu

SEQ ID NO: 25188 - RNA, 19 nt, Homo sapiens
  misc_RNA (1)...(19): siRNA sense strand
gagauaugguauagaacug

SEQ ID NO: 25189 - RNA, 19 nt, Homo sapiens
  misc_RNA (1)...(19): siRNA sense strand
caaggagcauaaguacaaa

SEQ ID NO: 25190 - RNA, 19 nt, Homo sapiens
  misc_RNA (1)...(19): siRNA sense strand
aaggcaagcugcuaugaug

SEQ ID NO: 25191 - RNA, 19 nt, Homo sapiens
  misc_RNA (1)...(19): siRNA sense strand
acaagaaugagauauggua

SEQ ID NO: 25192 - RNA, 19 nt, Homo sapiens
  misc_RNA (1)...(19): siRNA sense strand
gaaaccacugccagaaaga

SEQ ID NO: 25193 - RNA, 19 nt, Homo sapiens
  misc_RNA (1)...(19): siRNA sense strand
gcaacaagccaggcgucua

SEQ ID NO: 25194 - RNA, 19 nt, Homo sapiens
  misc_RNA (1)...(19): siRNA sense strand
caacaagccaggcgucuac

SEQ ID NO: 25195 - RNA, 19 nt, Homo sapiens
  misc_RNA (1)...(19): siRNA sense strand
gcacacagucguucucacu

SEQ ID NO: 25196 - RNA, 19 nt, Homo sapiens
  misc_RNA (1)...(19): siRNA sense strand
gcagcuguaccacaaaugu

SEQ ID NO: 25197 - RNA, 19 nt, Homo sapiens
  misc_RNA (1)...(19): siRNA sense strand
gagcuuggagucaacacuu

SEQ ID NO: 25198 - RNA, 19 nt, Homo sapiens
  misc_RNA (1)...(19): siRNA sense strand
aaagaccacugcagcaaac

SEQ ID NO: 25199 - RNA, 19 nt, Homo sapiens
  misc_RNA (1)...(19): siRNA sense strand
aagcagcuguggccagaug

SEQ ID NO: 25200 - RNA, 19 nt, Homo sapiens
  misc_RNA (1)...(19): siRNA sense strand
gcacgaccuggcucuguug

SEQ ID NO: 25201 - RNA, 19 nt, Homo sapiens
  misc_RNA (1)...(19): siRNA sense strand
ccuacuaccuggccuggau

SEQ ID NO: 25202 - RNA, 19 nt, Homo sapiens
  misc_RNA (1)...(19): siRNA sense strand
gcauaaguacaaagcugaa

SEQ ID NO: 25203 - RNA, 19 nt, Homo sapiens
  misc_RNA (1)...(19): siRNA sense strand
ugaaagaccacugcagcaa

SEQ ID NO: 25204 - RNA, 19 nt, Homo sapiens
  misc_RNA (1)...(19): siRNA sense strand
caagaaugagauaugguau

SEQ ID NO: 25205 - RNA, 19 nt, Homo sapiens
  misc_RNA (1)...(19): siRNA sense strand
cggcagcuguaccacaaau

SEQ ID NO: 25206 - RNA, 19 nt, Homo sapiens
  misc_RNA (1)...(19): siRNA sense strand
aaaggagggaccuguguga

SEQ ID NO: 25207 - RNA, 19 nt, Homo sapiens
  misc_RNA (1)...(19): siRNA sense strand
cagcuguaccacaaaugua

SEQ ID NO: 25208 - RNA, 19 nt, Homo sapiens
  misc_RNA (1)...(19): siRNA sense strand
uggaaaccacugccagaaa

SEQ ID NO: 25209 - RNA, 19 nt, Homo sapiens
  misc_RNA (1)...(19): siRNA sense strand
gagucaacacuuucgauuc

SEQ ID NO: 25210 - RNA, 19 nt, Homo sapiens
  misc_RNA (1)...(19): siRNA sense strand
ccaaggcaagcugcuauga

SEQ ID NO: 25211 - RNA, 19 nt, Homo sapiens
  misc_RNA (1)...(19): siRNA sense strand
gaacccggacaacgacauc

SEQ ID NO: 25212 - RNA, 19 nt, Homo sapiens
  misc_RNA (1)...(19): siRNA sense strand
caaggcaagcugcuaugau

SEQ ID NO: 25213 - RNA, 19 nt, Homo sapiens
  misc_RNA (1)...(19): siRNA sense strand
gagcacacagucguucuca

SEQ ID NO: 25214 - RNA, 19 nt, Homo sapiens
  misc_RNA (1)...(19): siRNA sense strand
ugagauaugguauagaacu

SEQ ID NO: 25215 - RNA, 19 nt, Homo sapiens
  misc_RNA (1)...(19): siRNA sense strand
agucaacacuuucgauucc

SEQ ID NO: 25216 - RNA, 19 nt, Homo sapiens
  misc_RNA (1)...(19): siRNA sense strand
gcuccugucgccuuacguu

SEQ ID NO: 25217 - RNA, 19 nt, Homo sapiens
  misc_RNA (1)...(19): siRNA sense strand
ugaagagcacacagucguu

SEQ ID NO: 25218 - RNA, 19 nt, Homo sapiens
  misc_RNA (1)...(19): siRNA sense strand
caccaaggcaagcugcuau

SEQ ID NO: 25219 - RNA, 19 nt, Homo sapiens
  misc_RNA (1)...(19): siRNA sense strand
ccaagaaggucaagaagaa

SEQ ID NO: 25220 - RNA, 19 nt, Homo sapiens
  misc_RNA (1)...(19): siRNA sense strand
ggagauggcaugauggaua

SEQ ID NO: 25221 - RNA, 19 nt, Homo sapiens
  misc_RNA (1)...(19): siRNA sense strand
gaaagaaagagaagaguau

SEQ ID NO: 25222 - RNA, 19 nt, Homo sapiens
  misc_RNA (1)...(19): siRNA sense strand
ggaaauuaauugugaccaa

SEQ ID NO: 25223 - RNA, 19 nt, Homo sapiens
  misc_RNA (1)...(19): siRNA sense strand
gaacgugaauuccaaacuc

SEQ ID NO: 25224 - RNA, 19 nt, Homo sapiens
  misc_RNA (1)...(19): siRNA sense strand
gagauggcaugauggauau

SEQ ID NO: 25225 - RNA, 19 nt, Homo sapiens
  misc_RNA (1)...(19): siRNA sense strand
cacagaaggugucaugaaa

SEQ ID NO: 25226 - RNA, 19 nt, Homo sapiens
  misc_RNA (1)...(19): siRNA sense strand
aagaagauguuccgugaaa

SEQ ID NO: 25227 - RNA, 19 nt, Homo sapiens
  misc_RNA (1)...(19): siRNA sense strand
gcagagggcagucuuucua

SEQ ID NO: 25228 - RNA, 19 nt, Homo sapiens
  misc_RNA (1)...(19): siRNA sense strand
uaacaagaccaaugaagaa

SEQ ID NO: 25229 - RNA, 19 nt, Homo sapiens
  misc_RNA (1)...(19): siRNA sense strand
aagaguauguccugaauga

SEQ ID NO: 25230 - RNA, 19 nt, Homo sapiens
  misc_RNA (1)...(19): siRNA sense strand
aaagaaacccugcgaaaug

SEQ ID NO: 25231 - RNA, 19 nt, Homo sapiens
  misc_RNA (1)...(19): siRNA sense strand
ggaguaacaagaccaauga

SEQ ID NO: 25232 - RNA, 19 nt, Homo sapiens
  misc_RNA (1)...(19): siRNA sense strand
ccaccacacugacaaguau

SEQ ID NO: 25233 - RNA, 19 nt, Homo sapiens
  misc_RNA (1)...(19): siRNA sense strand
aaauagcgauggcauguau

SEQ ID NO: 25234 - RNA, 19 nt, Homo sapiens
  misc_RNA (1)...(19): siRNA sense strand
gagcaguuccacccaauaa

SEQ ID NO: 25235 - RNA, 19 nt, Homo sapiens
  misc_RNA (1)...(19): siRNA sense strand
uaagaaagauggcacucau

SEQ ID NO: 25236 - RNA, 19 nt, Homo sapiens
  misc_RNA (1)...(19): siRNA sense strand
caaauggaccucucuggaa

SEQ ID NO: 25237 - RNA, 19 nt, Homo sapiens
  misc_RNA (1)...(19): siRNA sense strand
guaacaagaccaaugaaga

SEQ ID NO: 25238 - RNA, 19 nt, Homo sapiens
  misc_RNA (1)...(19): siRNA sense strand
ccuagaaacugcccugaug

SEQ ID NO: 25239 - RNA, 19 nt, Homo sapiens
  misc_RNA (1)...(19): siRNA sense strand
caagaccaaugaagaagau

SEQ ID NO: 25240 - RNA, 19 nt, Homo sapiens
  misc_RNA (1)...(19): siRNA sense strand
cagaaggugucaugaaauc

SEQ ID NO: 25241 - RNA, 19 nt, Homo sapiens
  misc_RNA (1)...(19): siRNA sense strand
gaaacagacacguacauuc

SEQ ID NO: 25242 - RNA, 19 nt, Homo sapiens
  misc_RNA (1)...(19): siRNA sense strand
ucacagcucgcaucaauga

SEQ ID NO: 25243 - RNA, 19 nt, Homo sapiens
  misc_RNA (1)...(19): siRNA sense strand
ugucacagcucgcaucaau

SEQ ID NO: 25244 - RNA, 19 nt, Homo sapiens
  misc_RNA (1)...(19): siRNA sense strand
gaaaucaagguccaacguu

SEQ ID NO: 25245 - RNA, 19 nt, Homo sapiens
  misc_RNA (1)...(19): siRNA sense strand
gacaauaucuaugccuaug

SEQ ID NO: 25246 - RNA, 19 nt, Homo sapiens
  misc_RNA (1)...(19): siRNA sense strand
ugaagaugaugcuguguau

SEQ ID NO: 25247 - RNA, 19 nt, Homo sapiens
  misc_RNA (1)...(19): siRNA sense strand
ugaccuuccuguuggauuu

SEQ ID NO: 25248 - RNA, 19 nt, Homo sapiens
  misc_RNA (1)...(19): siRNA sense strand
gaaggugucaugaaaucaa

SEQ ID NO: 25249 - RNA, 19 nt, Homo sapiens
  misc_RNA (1)...(19): siRNA sense strand
gaagauguuccgugaaauc

SEQ ID NO: 25250 - RNA, 19 nt, Homo sapiens
  misc_RNA (1)...(19): siRNA sense strand
acacguacauucucuucaa

SEQ ID NO: 25251 - RNA, 19 nt, Homo sapiens
  misc_RNA (1)...(19): siRNA sense strand
aagacgaccuuccauguga

SEQ ID NO: 25252 - RNA, 19 nt, Homo sapiens
  misc_RNA (1)...(19): siRNA sense strand
ggauauuacugauacuuac

SEQ ID NO: 25253 - RNA, 19 nt, Homo sapiens
  misc_RNA (1)...(19): siRNA sense strand
ggacaaugagaaagaaaga

SEQ ID NO: 25254 - RNA, 19 nt, Homo sapiens
  misc_RNA (1)...(19): siRNA sense strand
gaacaagggaaccuacauc

SEQ ID NO: 25255 - RNA, 19 nt, Homo sapiens
  misc_RNA (1)...(19): siRNA sense strand
caaagacgaccuuccaugu

SEQ ID NO: 25256 - RNA, 19 nt, Homo sapiens
  misc_RNA (1)...(19): siRNA sense strand
caaacaaauuggaggagau

SEQ ID NO: 25257 - RNA, 19 nt, Homo sapiens
  misc_RNA (1)...(19): siRNA sense strand
caacagcgaccucauuuac

SEQ ID NO: 25258 - RNA, 19 nt, Homo sapiens
  misc_RNA (1)...(19): siRNA sense strand
ugauaaugaugccaauuug

SEQ ID NO: 25259 - RNA, 19 nt, Homo sapiens
  misc_RNA (1)...(19): siRNA sense strand
gccuauagucucagaguua

SEQ ID NO: 25260 - RNA, 19 nt, Homo sapiens
  misc_RNA (1)...(19): siRNA sense strand
gaacuaccacugcuggaau

SEQ ID NO: 25261 - RNA, 19 nt, Homo sapiens
  misc_RNA (1)...(19): siRNA sense strand
gguaguugguucugacaug

SEQ ID NO: 25262 - RNA, 19 nt, Homo sapiens
  misc_RNA (1)...(19): siRNA sense strand
ggccaugucugcuuccaau

SEQ ID NO: 25263 - RNA, 19 nt, Homo sapiens
  misc_RNA (1)...(19): siRNA sense strand
guaguugguucugacauga

SEQ ID NO: 25264 - RNA, 19 nt, Homo sapiens
  misc_RNA (1)...(19): siRNA sense strand
cagccaacaucaccuucua

SEQ ID NO: 25265 - RNA, 19 nt, Homo sapiens
  misc_RNA (1)...(19): siRNA sense strand
gagauuggcccuagaaacu

SEQ ID NO: 25266 - RNA, 19 nt, Homo sapiens
  misc_RNA (1)...(19): siRNA sense strand
ccaagauugucaugagaga

SEQ ID NO: 25267 - RNA, 19 nt, Homo sapiens
  misc_RNA (1)...(19): siRNA sense strand
gcacucaugugguggaaaa

SEQ ID NO: 25268 - RNA, 19 nt, Homo sapiens
  misc_RNA (1)...(19): siRNA sense strand
gagaagaguauguccugaa

SEQ ID NO: 25269 - RNA, 19 nt, Homo sapiens
  misc_RNA (1)...(19): siRNA sense strand
cuguguaucuggacaauga

SEQ ID NO: 25270 - RNA, 19 nt, Homo sapiens
  misc_RNA (1)...(19): siRNA sense strand
ggaugguccuggaguaaca

SEQ ID NO: 25271 - RNA, 19 nt, Homo sapiens
  misc_RNA (1)...(19): siRNA sense strand
gauggcaugauggauauua

SEQ ID NO: 25272 - RNA, 19 nt, Homo sapiens
  misc_RNA (1)...(19): siRNA sense strand
uggaggagauggcaugaug

SEQ ID NO: 25273 - RNA, 19 nt, Homo sapiens
  misc_RNA (1)...(19): siRNA sense strand
gagcuauggucaguuugaa

SEQ ID NO: 25274 - RNA, 19 nt, Homo sapiens
  misc_RNA (1)...(19): siRNA sense strand
agaagaguauguccugaau

SEQ ID NO: 25275 - RNA, 19 nt, Homo sapiens
  misc_RNA (1)...(19): siRNA sense strand
ccacauugggaaauuaauu

SEQ ID NO: 25276 - RNA, 19 nt, Homo sapiens
  misc_RNA (1)...(19): siRNA sense strand
caugucugcuuccaauuug

SEQ ID NO: 25277 - RNA, 19 nt, Homo sapiens
  misc_RNA (1)...(19): siRNA sense strand
gaagaugggaacgugaauu

SEQ ID NO: 25278 - RNA, 19 nt, Homo sapiens
  misc_RNA (1)...(19): siRNA sense strand
uggaagcguugacauucua

SEQ ID NO: 25279 - RNA, 19 nt, Homo sapiens
  misc_RNA (1)...(19): siRNA sense strand
agaaagaaagagaagagua

SEQ ID NO: 25280 - RNA, 19 nt, Homo sapiens
  misc_RNA (1)...(19): siRNA sense strand
aagaaacccugcgaaaugu

SEQ ID NO: 25281 - RNA, 19 nt, Homo sapiens
  misc_RNA (1)...(19): siRNA sense strand
gcguucaccuguucaagga

SEQ ID NO: 25282 - RNA, 19 nt, Homo sapiens
  misc_RNA (1)...(19): siRNA sense strand
gaaugaagcauggaugaca

SEQ ID NO: 25283 - RNA, 19 nt, Homo sapiens
  misc_RNA (1)...(19): siRNA sense strand
gaaaacaacaagcugauug

SEQ ID NO: 25284 - RNA, 19 nt, Homo sapiens
  misc_RNA (1)...(19): siRNA sense strand
gcgucaaccugcaagaguu

SEQ ID NO: 25285 - RNA, 19 nt, Homo sapiens
  misc_RNA (1)...(19): siRNA sense strand
ggagcuauggucaguuuga

SEQ ID NO: 25286 - RNA, 19 nt, Homo sapiens
  misc_RNA (1)...(19): siRNA sense strand
aaacagacacguacauucu

SEQ ID NO: 25287 - RNA, 19 nt, Homo sapiens
  misc_RNA (1)...(19): siRNA sense strand
ggccaagauugucaugaga

SEQ ID NO: 25288 - RNA, 19 nt, Homo sapiens
  misc_RNA (1)...(19): siRNA sense strand
gggccaagauugucaugag

SEQ ID NO: 25289 - RNA, 19 nt, Homo sapiens
  misc_RNA (1)...(19): siRNA sense strand
gagcagugacucccugaga

SEQ ID NO: 25290 - RNA, 19 nt, Homo sapiens
  misc_RNA (1)...(19): siRNA sense strand
aaggagagaugggacacua

SEQ ID NO: 25291 - RNA, 19 nt, Homo sapiens
  misc_RNA (1)...(19): siRNA sense strand
gcguugacauucuauugga

SEQ ID NO: 25292 - RNA, 19 nt, Homo sapiens
  misc_RNA (1)...(19): siRNA sense strand
ggacaauaucuaugccuau

SEQ ID NO: 25293 - RNA, 19 nt, Homo sapiens
  misc_RNA (1)...(19): siRNA sense strand
uacauucucuucaauccuu

SEQ ID NO: 25294 - RNA, 19 nt, Homo sapiens
  misc_RNA (1)...(19): siRNA sense strand
gaaauuccgcauguauguu

SEQ ID NO: 25295 - RNA, 19 nt, Homo sapiens
  misc_RNA (1)...(19): siRNA sense strand
uagaaacugcccugaugua

SEQ ID NO: 25296 - RNA, 19 nt, Homo sapiens
  misc_RNA (1)...(19): siRNA sense strand
aagaugaccugcccacagu

SEQ ID NO: 25297 - RNA, 19 nt, Homo sapiens
  misc_RNA (1)...(19): siRNA sense strand
ccaugucugcuuccaauuu

SEQ ID NO: 25298 - RNA, 19 nt, Homo sapiens
  misc_RNA (1)...(19): siRNA sense strand
ccuggacacuugccuguau

SEQ ID NO: 25299 - RNA, 19 nt, Homo sapiens
  misc_RNA (1)...(19): siRNA sense strand
cuggagcuauggucaguuu

SEQ ID NO: 25300 - RNA, 19 nt, Homo sapiens
  misc_RNA (1)...(19): siRNA sense strand
gaagaagauguuccgugaa

SEQ ID NO: 25301 - RNA, 19 nt, Homo sapiens
  misc_RNA (1)...(19): siRNA sense strand
ugauggauauuacugauac

SEQ ID NO: 25302 - RNA, 19 nt, Homo sapiens
  misc_RNA (1)...(19): siRNA sense strand
gaaagauggcacucaugug

SEQ ID NO: 25303 - RNA, 19 nt, Homo sapiens
  misc_RNA (1)...(19): siRNA sense strand
ggucugcaauggugaaugc

SEQ ID NO: 25304 - RNA, 19 nt, Homo sapiens
  misc_RNA (1)...(19): siRNA sense strand
acacuugccuguaugugau

SEQ ID NO: 25305 - RNA, 19 nt, Homo sapiens
  misc_RNA (1)...(19): siRNA sense strand
gcuauggucaguuugaaga

SEQ ID NO: 25306 - RNA, 19 nt, Homo sapiens
  misc_RNA (1)...(19): siRNA sense strand
gugaagaugaugcugugua

SEQ ID NO: 25307 - RNA, 19 nt, Homo sapiens
  misc_RNA (1)...(19): siRNA sense strand
ucacgagcguucaccuguu

SEQ ID NO: 25308 - RNA, 19 nt, Homo sapiens
  misc_RNA (1)...(19): siRNA sense strand
ucaagaagaagagagauug

SEQ ID NO: 25309 - RNA, 19 nt, Homo sapiens
  misc_RNA (1)...(19): siRNA sense strand
gacacuugccuguauguga

SEQ ID NO: 25310 - RNA, 19 nt, Homo sapiens
  misc_RNA (1)...(19): siRNA sense strand
gggauguucuggccaagca

SEQ ID NO: 25311 - RNA, 19 nt, Homo sapiens
  misc_RNA (1)...(19): siRNA sense strand
acagcgaccucauuuacau

SEQ ID NO: 25312 - RNA, 19 nt, Homo sapiens
  misc_RNA (1)...(19): siRNA sense strand
ggaacuaccacugcuggaa

SEQ ID NO: 25313 - RNA, 19 nt, Homo sapiens
  misc_RNA (1)...(19): siRNA sense strand
gaauaccggagcucugaga

SEQ ID NO: 25314 - RNA, 19 nt, Homo sapiens
  misc_RNA (1)...(19): siRNA sense strand
gauccugggacaauaucua

SEQ ID NO: 25315 - RNA, 19 nt, Homo sapiens
  misc_RNA (1)...(19): siRNA sense strand
ugccaaagaugacgaaggu

SEQ ID NO: 25316 - RNA, 19 nt, Homo sapiens
  misc_RNA (1)...(19): siRNA sense strand
cauuacagcuaagaaagau

SEQ ID NO: 25317 - RNA, 19 nt, Homo sapiens
  misc_RNA (1)...(19): siRNA sense strand
gagggcagucuuucuaugu

SEQ ID NO: 25318 - RNA, 19 nt, Homo sapiens
  misc_RNA (1)...(19): siRNA sense strand
caugauggauauuacugau

SEQ ID NO: 25319 - RNA, 19 nt, Homo sapiens
  misc_RNA (1)...(19): siRNA sense strand
gaaggucauugaucaguuu

SEQ ID NO: 25320 - RNA, 19 nt, Homo sapiens
  misc_RNA (1)...(19): siRNA sense strand
aaagagagcuccuggaauc

SEQ ID NO: 25321 - RNA, 19 nt, Homo sapiens
  misc_RNA (1)...(19): siRNA sense strand
guaccagacuuucuucaau

SEQ ID NO: 25322 - RNA, 19 nt, Homo sapiens
  misc_RNA (1)...(19): siRNA sense strand
gaaauauggcuucuacaca

SEQ ID NO: 25323 - RNA, 19 nt, Homo sapiens
  misc_RNA (1)...(19): siRNA sense strand
cugcaugucuggaagguaa

SEQ ID NO: 25324 - RNA, 19 nt, Homo sapiens
  misc_RNA (1)...(19): siRNA sense strand
ccgcaucacugacaacaug

SEQ ID NO: 25325 - RNA, 19 nt, Homo sapiens
  misc_RNA (1)...(19): siRNA sense strand
cgaaagagagcuccuggaa

SEQ ID NO: 25326 - RNA, 19 nt, Homo sapiens
  misc_RNA (1)...(19): siRNA sense strand
agaagucgcuggaggacaa

SEQ ID NO: 25327 - RNA, 19 nt, Homo sapiens
  misc_RNA (1)...(19): siRNA sense strand
cgggaagccuggcgacuuu

SEQ ID NO: 25328 - RNA, 19 nt, Homo sapiens
  misc_RNA (1)...(19): siRNA sense strand
uacagaaggucauugauca

SEQ ID NO: 25329 - RNA, 19 nt, Homo sapiens
  misc_RNA (1)...(19): siRNA sense strand
gggccagccucaucaguga

SEQ ID NO: 25330 - RNA, 19 nt, Homo sapiens
  misc_RNA (1)...(19): siRNA sense strand
guacugcgaccucaacuau

SEQ ID NO: 25331 - RNA, 19 nt, Homo sapiens
  misc_RNA (1)...(19): siRNA sense strand
ggauacagaaggucauuga

SEQ ID NO: 25332 - RNA, 19 nt, Homo sapiens
  misc_RNA (1)...(19): siRNA sense strand
gagagcuccuggaauccua

SEQ ID NO: 25333 - RNA, 19 nt, Homo sapiens
  misc_RNA (1)...(19): siRNA sense strand
aacaaccgcugguaucaaa

SEQ ID NO: 25334 - RNA, 19 nt, Homo sapiens
  misc_RNA (1)...(19): siRNA sense strand
gaaagagagcuccuggaau

SEQ ID NO: 25335 - RNA, 19 nt, Homo sapiens
  misc_RNA (1)...(19): siRNA sense strand
aggagucgcuacccacaua

SEQ ID NO: 25336 - RNA, 19 nt, Homo sapiens
  misc_RNA (1)...(19): siRNA sense strand
cugaagaaguggauacaga

SEQ ID NO: 25337 - RNA, 19 nt, Homo sapiens
  misc_RNA (1)...(19): siRNA sense strand
ccacauaagccugaaauca

SEQ ID NO: 25338 - RNA, 19 nt, Homo sapiens
  misc_RNA (1)...(19): siRNA sense strand
acaagaacuucaccgagaa

SEQ ID NO: 25339 - RNA, 19 nt, Homo sapiens
  misc_RNA (1)...(19): siRNA sense strand
gcgaaacauugaaaagaua

SEQ ID NO: 25340 - RNA, 19 nt, Homo sapiens
  misc_RNA (1)...(19): siRNA sense strand
gcaccaggacuucaacuca

SEQ ID NO: 25341 - RNA, 19 nt, Homo sapiens
  misc_RNA (1)...(19): siRNA sense strand
cacauaagccugaaaucaa

SEQ ID NO: 25342 - RNA, 19 nt, Homo sapiens
  misc_RNA (1)...(19): siRNA sense strand
ggacccuggugcuacacua

SEQ ID NO: 25343 - RNA, 19 nt, Homo sapiens
  misc_RNA (1)...(19): siRNA sense strand
gggccgaccuacaggagaa

SEQ ID NO: 25344 - RNA, 19 nt, Homo sapiens
  misc_RNA (1)...(19): siRNA sense strand
gaaccuggaccgggacauu

SEQ ID NO: 25345 - RNA, 19 nt, Homo sapiens
  misc_RNA (1)...(19): siRNA sense strand
gcaagcaccaggacuucaa

SEQ ID NO: 25346 - RNA, 19 nt, Homo sapiens
  misc_RNA (1)...(19): siRNA sense strand
uccgaaggcuccaguguga

SEQ ID NO: 25347 - RNA, 19 nt, Homo sapiens
  misc_RNA (1)...(19): siRNA sense strand
ugaccgggaugggaaauau

SEQ ID NO: 25348 - RNA, 19 nt, Homo sapiens
  misc_RNA (1)...(19): siRNA sense strand
gguacgagcgaaacauuga

SEQ ID NO: 25349 - RNA, 19 nt, Homo sapiens
  misc_RNA (1)...(19): siRNA sense strand
ccagugaguaccagacuuu

SEQ ID NO: 25350 - RNA, 19 nt, Homo sapiens
  misc_RNA (1)...(19): siRNA sense strand
gaaucugucaccuccauug

SEQ ID NO: 25351 - RNA, 19 nt, Homo sapiens
  misc_RNA (1)...(19): siRNA sense strand
ggucauugaucaguuugga

SEQ ID NO: 25352 - RNA, 19 nt, Homo sapiens
  misc_RNA (1)...(19): siRNA sense strand
ggaaauauggcuucuacac

SEQ ID NO: 25353 - RNA, 19 nt, Homo sapiens
  misc_RNA (1)...(19): siRNA sense strand
ggacauugcccugaugaag

SEQ ID NO: 25354 - RNA, 19 nt, Homo sapiens
  misc_RNA (1)...(19): siRNA sense strand
acugcgaccucaacuauug

SEQ ID NO: 25355 - RNA, 19 nt, Homo sapiens
  misc_RNA (1)...(19): siRNA sense strand
gacaggagaugggcuggau

SEQ ID NO: 25356 - RNA, 19 nt, Homo sapiens
  misc_RNA (1)...(19): siRNA sense strand
guucugugcugguuacaag

SEQ ID NO: 25357 - RNA, 19 nt, Homo sapiens
  misc_RNA (1)...(19): siRNA sense strand
guuccuggcuccucagcaa

SEQ ID NO: 25358 - RNA, 19 nt, Homo sapiens
  misc_RNA (1)...(19): siRNA sense strand
ugaagaaguggauacagaa

SEQ ID NO: 25359 - RNA, 19 nt, Homo sapiens
  misc_RNA (1)...(19): siRNA sense strand
uaccagacuuucuucaauc

SEQ ID NO: 25360 - RNA, 19 nt, Homo sapiens
  misc_RNA (1)...(19): siRNA sense strand
agaaggucauugaucaguu

SEQ ID NO: 25361 - RNA, 19 nt, Homo sapiens
  misc_RNA (1)...(19): siRNA sense strand
guggugaaccugcccauug

SEQ ID NO: 25362 - RNA, 19 nt, Homo sapiens
  misc_RNA (1)...(19): siRNA sense strand
ccaaggcccugagcaagca

SEQ ID NO: 25363 - RNA, 19 nt, Homo sapiens
  misc_RNA (1)...(19): siRNA sense strand
ucaaaugggcaucgucuca

SEQ ID NO: 25364 - RNA, 19 nt, Homo sapiens
  misc_RNA (1)...(19): siRNA sense strand
gggcucggaugcagagauc

SEQ ID NO: 25365 - RNA, 19 nt, Homo sapiens
  misc_RNA (1)...(19): siRNA sense strand
gaccucuguucgagaagaa

SEQ ID NO: 25366 - RNA, 19 nt, Homo sapiens
  misc_RNA (1)...(19): siRNA sense strand
gaagaaguggauacagaag

SEQ ID NO: 25367 - RNA, 19 nt, Homo sapiens
  misc_RNA (1)...(19): siRNA sense strand
agaaguggauacagaaggu

SEQ ID NO: 25368 - RNA, 19 nt, Homo sapiens
  misc_RNA (1)...(19): siRNA sense strand
caagccugaugaagggaaa

SEQ ID NO: 25369 - RNA, 19 nt, Homo sapiens
  misc_RNA (1)...(19): siRNA sense strand
ugggaaauauggcuucuac

SEQ ID NO: 25370 - RNA, 19 nt, Homo sapiens
  misc_RNA (1)...(19): siRNA sense strand
acauaagccugaaaucaac

SEQ ID NO: 25371 - RNA, 19 nt, Homo sapiens
  misc_RNA (1)...(19): siRNA sense strand
aaaugggcaucgucucaug

SEQ ID NO: 25372 - RNA, 19 nt, Homo sapiens
  misc_RNA (1)...(19): siRNA sense strand
caaccgcugguaucaaaug

SEQ ID NO: 25373 - RNA, 19 nt, Homo sapiens
  misc_RNA (1)...(19): siRNA sense strand
gaacuucaccgagaaugac

SEQ ID NO: 25374 - RNA, 19 nt, Homo sapiens
  misc_RNA (1)...(19): siRNA sense strand
gagaucggcaugucaccuu

SEQ ID NO: 25375 - RNA, 19 nt, Homo sapiens
  misc_RNA (1)...(19): siRNA sense strand
cgaaggcuccagugugaau

SEQ ID NO: 25376 - RNA, 19 nt, Homo sapiens
  misc_RNA (1)...(19): siRNA sense strand
caggagaugggcuggauga

SEQ ID NO: 25377 - RNA, 19 nt, Homo sapiens
  misc_RNA (1)...(19): siRNA sense strand
ggagcagugugucccugau

SEQ ID NO: 25378 - RNA, 19 nt, Homo sapiens
  misc_RNA (1)...(19): siRNA sense strand
ugccuucagugacuacauu

SEQ ID NO: 25379 - RNA, 19 nt, Homo sapiens
  misc_RNA (1)...(19): siRNA sense strand
cgaccucuguucgagaaga

SEQ ID NO: 25380 - RNA, 19 nt, Homo sapiens
  misc_RNA (1)...(19): siRNA sense strand
gugaguaccagacuuucuu

SEQ ID NO: 25381 - RNA, 19 nt, Homo sapiens
  misc_RNA (1)...(19): siRNA sense strand
gagcaagcaccaggacuuc

SEQ ID NO: 25382 - RNA, 19 nt, Homo sapiens
  misc_RNA (1)...(19): siRNA sense strand
ccugaaaucaacuccacua

SEQ ID NO: 25383 - RNA, 19 nt, Homo sapiens
  misc_RNA (1)...(19): siRNA sense strand
uaacaaccgcugguaucaa

SEQ ID NO: 25384 - RNA, 19 nt, Homo sapiens
  misc_RNA (1)...(19): siRNA sense strand
ggagucgcuacccacauaa

SEQ ID NO: 25385 - RNA, 19 nt, Homo sapiens
  misc_RNA (1)...(19): siRNA sense strand
uggugaaccugcccauugu

SEQ ID NO: 25386 - RNA, 19 nt, Homo sapiens
  misc_RNA (1)...(19): siRNA sense strand
gcauugagugccagcuaug

SEQ ID NO: 25387 - RNA, 19 nt, Homo sapiens
  misc_RNA (1)...(19): siRNA sense strand
caagaacuucaccgagaau

SEQ ID NO: 25388 - RNA, 19 nt, Homo sapiens
  misc_RNA (1)...(19): siRNA sense strand
gauguguucugggccaagu

SEQ ID NO: 25389 - RNA, 19 nt, Homo sapiens
  misc_RNA (1)...(19): siRNA sense strand
guacgagcgaaacauugaa

SEQ ID NO: 25390 - RNA, 19 nt, Homo sapiens
  misc_RNA (1)...(19): siRNA sense strand
gaccuucuggugcgcauug

SEQ ID NO: 25391 - RNA, 19 nt, Homo sapiens
  misc_RNA (1)...(19): siRNA sense strand
ccacggcuacggauguguu

SEQ ID NO: 25392 - RNA, 19 nt, Homo sapiens
  misc_RNA (1)...(19): siRNA sense strand
gaagagccccuuuaacaac

SEQ ID NO: 25393 - RNA, 19 nt, Homo sapiens
  misc_RNA (1)...(19): siRNA sense strand
ggauccgcaucacugacaa

SEQ ID NO: 25394 - RNA, 19 nt, Homo sapiens
  misc_RNA (1)...(19): siRNA sense strand
gaacuaccgagggcaugug

SEQ ID NO: 25395 - RNA, 19 nt, Homo sapiens
  misc_RNA (1)...(19): siRNA sense strand
agauaagcuugcugcaugu

SEQ ID NO: 25396 - RNA, 19 nt, Homo sapiens
  misc_RNA (1)...(19): siRNA sense strand
cugugcagcugguggagaa

SEQ ID NO: 25397 - RNA, 19 nt, Homo sapiens
  misc_RNA (1)...(19): siRNA sense strand
ugagcaagcaccaggacuu

SEQ ID NO: 25398 - RNA, 19 nt, Homo sapiens
  misc_RNA (1)...(19): siRNA sense strand
uugaucaguuuggagagua

SEQ ID NO: 25399 - RNA, 19 nt, Homo sapiens
  misc_RNA (1)...(19): siRNA sense strand
gaugggaaauauggcuucu

SEQ ID NO: 25400 - RNA, 19 nt, Homo sapiens
  misc_RNA (1)...(19): siRNA sense strand
gagcgaaacauugaaaaga

SEQ ID NO: 25401 - RNA, 19 nt, Homo sapiens
  misc_RNA (1)...(19): siRNA sense strand
gguacugcgaccucaacua

SEQ ID NO: 25402 - RNA, 19 nt, Homo sapiens
  misc_RNA (1)...(19): siRNA sense strand
auacagaaggucauugauc

SEQ ID NO: 25403 - RNA, 19 nt, Homo sapiens
  misc_RNA (1)...(19): siRNA sense strand
aauauggcuucuacacaca

SEQ ID NO: 25404 - RNA, 19 nt, Homo sapiens
  misc_RNA (1)...(19): siRNA sense strand
gcgcaagggcaaccuagag

SEQ ID NO: 25405 - RNA, 19 nt, Homo sapiens
  misc_RNA (1)...(19): siRNA sense strand
guaccgccaccagugagua

SEQ ID NO: 25406 - RNA, 19 nt, Homo sapiens
  misc_RNA (1)...(19): siRNA sense strand
cauguucugugcugguuac

SEQ ID NO: 25407 - RNA, 19 nt, Homo sapiens
  misc_RNA (1)...(19): siRNA sense strand
gccaggaucaagucacugu

SEQ ID NO: 25408 - RNA, 19 nt, Homo sapiens
  misc_RNA (1)...(19): siRNA sense strand
ucacugacaacauguucug

SEQ ID NO: 25409 - RNA, 19 nt, Homo sapiens
  misc_RNA (1)...(19): siRNA sense strand
ugcgaccucuguucgagaa

SEQ ID NO: 25410 - RNA, 19 nt, Homo sapiens
  misc_RNA (1)...(19): siRNA sense strand
gaucaaggcuucagaguuu

SEQ ID NO: 25411 - RNA, 19 nt, Homo sapiens
  misc_RNA (1)...(19): siRNA sense strand
caaaguaacucaucuaaga

SEQ ID NO: 25412 - RNA, 19 nt, Homo sapiens
  misc_RNA (1)...(19): siRNA sense strand
gaaaguggaucauaucuuc

SEQ ID NO: 25413 - RNA, 19 nt, Homo sapiens
  misc_RNA (1)...(19): siRNA sense strand
caaggaaugugauguauuu

SEQ ID NO: 25414 - RNA, 19 nt, Homo sapiens
  misc_RNA (1)...(19): siRNA sense strand
gaacuuggauguuaacuuc

SEQ ID NO: 25415 - RNA, 19 nt, Homo sapiens
  misc_RNA (1)...(19): siRNA sense strand
ggaauuagguacaguaaau

SEQ ID NO: 25416 - RNA, 19 nt, Homo sapiens
  misc_RNA (1)...(19): siRNA sense strand
gaagaugacucuccugaau

SEQ ID NO: 25417 - RNA, 19 nt, Homo sapiens
  misc_RNA (1)...(19): siRNA sense strand
gaaagaagacuuaagcauu

SEQ ID NO: 25418 - RNA, 19 nt, Homo sapiens
  misc_RNA (1)...(19): siRNA sense strand
gaagauaccacauauaaga

SEQ ID NO: 25419 - RNA, 19 nt, Homo sapiens
  misc_RNA (1)...(19): siRNA sense strand
gcaagucucuguccucuga

SEQ ID NO: 25420 - RNA, 19 nt, Homo sapiens
  misc_RNA (1)...(19): siRNA sense strand
ucagaugccucuacaauaa

SEQ ID NO: 25421 - RNA, 19 nt, Homo sapiens
  misc_RNA (1)...(19): siRNA sense strand
guaaagaugguacagauua

SEQ ID NO: 25422 - RNA, 19 nt, Homo sapiens
  misc_RNA (1)...(19): siRNA sense strand
gaaaaugcaugaucguuua

SEQ ID NO: 25423 - RNA, 19 nt, Homo sapiens
  misc_RNA (1)...(19): siRNA sense strand
gcacugguaucauaucuga

SEQ ID NO: 25424 - RNA, 19 nt, Homo sapiens
  misc_RNA (1)...(19): siRNA sense strand
gagagaauuugucuuacua

SEQ ID NO: 25425 - RNA, 19 nt, Homo sapiens
  misc_RNA (1)...(19): siRNA sense strand
gaaagguagcuaugaaaua

SEQ ID NO: 25426 - RNA, 19 nt, Homo sapiens
  misc_RNA (1)...(19): siRNA sense strand
gauguuaacuuccaugaau

SEQ ID NO: 25427 - RNA, 19 nt, Homo sapiens
  misc_RNA (1)...(19): siRNA sense strand
gaagaugacuaugcugaaa

SEQ ID NO: 25428 - RNA, 19 nt, Homo sapiens
  misc_RNA (1)...(19): siRNA sense strand
gugaaaugcuugaguauga

SEQ ID NO: 25429 - RNA, 19 nt, Homo sapiens
  misc_RNA (1)...(19): siRNA sense strand
ggacuaugcaccuguaaua

SEQ ID NO: 25430 - RNA, 19 nt, Homo sapiens
  misc_RNA (1)...(19): siRNA sense strand
cagacuggcugcagcauua

SEQ ID NO: 25431 - RNA, 19 nt, Homo sapiens
  misc_RNA (1)...(19): siRNA sense strand
gagcauaacuacucuugga

SEQ ID NO: 25432 - RNA, 19 nt, Homo sapiens
  misc_RNA (1)...(19): siRNA sense strand
gaaaagaagucccgaaguu

SEQ ID NO: 25433 - RNA, 19 nt, Homo sapiens
  misc_RNA (1)...(19): siRNA sense strand
gcacugaauucguuucuuc

SEQ ID NO: 25434 - RNA, 19 nt, Homo sapiens
  misc_RNA (1)...(19): siRNA sense strand
aaacaucucuucccacaga

SEQ ID NO: 25435 - RNA, 19 nt, Homo sapiens
  misc_RNA (1)...(19): siRNA sense strand
aaucacagcuucuucguuu

SEQ ID NO: 25436 - RNA, 19 nt, Homo sapiens
  misc_RNA (1)...(19): siRNA sense strand
cagaagauaccacauauaa

SEQ ID NO: 25437 - RNA, 19 nt, Homo sapiens
  misc_RNA (1)...(19): siRNA sense strand
ugaagacucugaugauauu

SEQ ID NO: 25438 - RNA, 19 nt, Homo sapiens
  misc_RNA (1)...(19): siRNA sense strand
agacacagcuguuaacaau

SEQ ID NO: 25439 - RNA, 19 nt, Homo sapiens
  misc_RNA (1)...(19): siRNA sense strand
guacaaagggaaacagaua

SEQ ID NO: 25440 - RNA, 19 nt, Homo sapiens
  misc_RNA (1)...(19): siRNA sense strand
cagcagaauuugccucuaa

SEQ ID NO: 25441 - RNA, 19 nt, Homo sapiens
  misc_RNA (1)...(19): siRNA sense strand
aaagaagacuuaagcauuc

SEQ ID NO: 25442 - RNA, 19 nt, Homo sapiens
  misc_RNA (1)...(19): siRNA sense strand
gaauuugccucuaaaccuu

SEQ ID NO: 25443 - RNA, 19 nt, Homo sapiens
  misc_RNA (1)...(19): siRNA sense strand
ggaauucuugguccuauua

SEQ ID NO: 25444 - RNA, 19 nt, Homo sapiens
  misc_RNA (1)...(19): siRNA sense strand
acacagcuguuaacaauug

SEQ ID NO: 25445 - RNA, 19 nt, Homo sapiens
  misc_RNA (1)...(19): siRNA sense strand
ccaaucauuuccagguuua

SEQ ID NO: 25446 - RNA, 19 nt, Homo sapiens
  misc_RNA (1)...(19): siRNA sense strand
caugagagaauuugucuua

SEQ ID NO: 25447 - RNA, 19 nt, Homo sapiens
  misc_RNA (1)...(19): siRNA sense strand
gaauuuaauccacugguua

SEQ ID NO: 25448 - RNA, 19 nt, Homo sapiens
  misc_RNA (1)...(19): siRNA sense strand
gagggaaaguggaucauau

SEQ ID NO: 25449 - RNA, 19 nt, Homo sapiens
  misc_RNA (1)...(19): siRNA sense strand
ucaagacccugaucaaaug

SEQ ID NO: 25450 - RNA, 19 nt, Homo sapiens
  misc_RNA (1)...(19): siRNA sense strand
gagcagaggcggcacauga

SEQ ID NO: 25451 - RNA, 19 nt, Homo sapiens
  misc_RNA (1)...(19): siRNA sense strand
gagcugaaguggaugaugu

SEQ ID NO: 25452 - RNA, 19 nt, Homo sapiens
  misc_RNA (1)...(19): siRNA sense strand
ucagugaaaugcuugagua

SEQ ID NO: 25453 - RNA, 19 nt, Homo sapiens
  misc_RNA (1)...(19): siRNA sense strand
ggacacagaagacguuuga

SEQ ID NO: 25454 - RNA, 19 nt, Homo sapiens
  misc_RNA (1)...(19): siRNA sense strand
acuaagcacugguaucaua

SEQ ID NO: 25455 - RNA, 19 nt, Homo sapiens
  misc_RNA (1)...(19): siRNA sense strand
caauaaacagcaccaguua

SEQ ID NO: 25456 - RNA, 19 nt, Homo sapiens
  misc_RNA (1)...(19): siRNA sense strand
gcaauaaacagcaccaguu

SEQ ID NO: 25457 - RNA, 19 nt, Homo sapiens
  misc_RNA (1)...(19): siRNA sense strand
aagaagagcugguacuaug

SEQ ID NO: 25458 - RNA, 19 nt, Homo sapiens
  misc_RNA (1)...(19): siRNA sense strand
ggaaacagauauugaagac

SEQ ID NO: 25459 - RNA, 19 nt, Homo sapiens
  misc_RNA (1)...(19): siRNA sense strand
uuacauugcugcugaagaa

SEQ ID NO: 25460 - RNA, 19 nt, Homo sapiens
  misc_RNA (1)...(19): siRNA sense strand
ggaacacuaucaaacauuc

SEQ ID NO: 25461 - RNA, 19 nt, Homo sapiens
  misc_RNA (1)...(19): siRNA sense strand
gaaauucagggauguuaaa

SEQ ID NO: 25462 - RNA, 19 nt, Homo sapiens
  misc_RNA (1)...(19): siRNA sense strand
gagaauacaccuaugaaug

SEQ ID NO: 25463 - RNA, 19 nt, Homo sapiens
  misc_RNA (1)...(19): siRNA sense strand
gaaagaagaugggauuuug

SEQ ID NO: 25464 - RNA, 19 nt, Homo sapiens
  misc_RNA (1)...(19): siRNA sense strand
ggaaagaguagacugaaga

SEQ ID NO: 25465 - RNA, 19 nt, Homo sapiens
  misc_RNA (1)...(19): siRNA sense strand
caaacgccauuucuuauca

SEQ ID NO: 25466 - RNA, 19 nt, Homo sapiens
  misc_RNA (1)...(19): siRNA sense strand
ggaauuuaauccacugguu

SEQ ID NO: 25467 - RNA, 19 nt, Homo sapiens
  misc_RNA (1)...(19): siRNA sense strand
ugagaaagguagcuaugaa

SEQ ID NO: 25468 - RNA, 19 nt, Homo sapiens
  misc_RNA (1)...(19): siRNA sense strand
ggacuaagcacugguauca

SEQ ID NO: 25469 - RNA, 19 nt, Homo sapiens
  misc_RNA (1)...(19): siRNA sense strand
gcuacuauuugcuguguuu

SEQ ID NO: 25470 - RNA, 19 nt, Homo sapiens
  misc_RNA (1)...(19): siRNA sense strand
uaacagaccuacccuucga

SEQ ID NO: 25471 - RNA, 19 nt, Homo sapiens
  misc_RNA (1)...(19): siRNA sense strand
aaaccacaaucuaccauuu

SEQ ID NO: 25472 - RNA, 19 nt, Homo sapiens
  misc_RNA (1)...(19): siRNA sense strand
aaacugauguuaggacaaa

SEQ ID NO: 25473 - RNA, 19 nt, Homo sapiens
  misc_RNA (1)...(19): siRNA sense strand
gcagaucucagucaaauuc

SEQ ID NO: 25474 - RNA, 19 nt, Homo sapiens
  misc_RNA (1)...(19): siRNA sense strand
gcuaugaaauaauccaaga

SEQ ID NO: 25475 - RNA, 19 nt, Homo sapiens
  misc_RNA (1)...(19): siRNA sense strand
uuaaauguaucccagauga

SEQ ID NO: 25476 - RNA, 19 nt, Homo sapiens
  misc_RNA (1)...(19): siRNA sense strand
ucagggauguuaaauguau

SEQ ID NO: 25477 - RNA, 19 nt, Homo sapiens
  misc_RNA (1)...(19): siRNA sense strand
uaacuuccaugaauucuag

SEQ ID NO: 25478 - RNA, 19 nt, Homo sapiens
  misc_RNA (1)...(19): siRNA sense strand
ggucucagcauuuggauaa

SEQ ID NO: 25479 - RNA, 19 nt, Homo sapiens
  misc_RNA (1)...(19): siRNA sense strand
gauauucacucaggcuuga

SEQ ID NO: 25480 - RNA, 19 nt, Homo sapiens
  misc_RNA (1)...(19): siRNA sense strand
gcuaauaggacuacuucua

SEQ ID NO: 25481 - RNA, 19 nt, Homo sapiens
  misc_RNA (1)...(19): siRNA sense strand
aaacaaugguggaucuuau

SEQ ID NO: 25482 - RNA, 19 nt, Homo sapiens
  misc_RNA (1)...(19): siRNA sense strand
ccauacaacccuuucuuua

SEQ ID NO: 25483 - RNA, 19 nt, Homo sapiens
  misc_RNA (1)...(19): siRNA sense strand
gcauuuggauaauuucuca

SEQ ID NO: 25484 - RNA, 19 nt, Homo sapiens
  misc_RNA (1)...(19): siRNA sense strand
uaaggaagauaaugcuguu

SEQ ID NO: 25485 - RNA, 19 nt, Homo sapiens
  misc_RNA (1)...(19): siRNA sense strand
gagcaucucggaauucuug

SEQ ID NO: 25486 - RNA, 19 nt, Homo sapiens
  misc_RNA (1)...(19): siRNA sense strand
auacaacccuuucuuuaga

SEQ ID NO: 25487 - RNA, 19 nt, Homo sapiens
  misc_RNA (1)...(19): siRNA sense strand
agacauaaaucucuacaag

SEQ ID NO: 25488 - RNA, 19 nt, Homo sapiens
  misc_RNA (1)...(19): siRNA sense strand
ggacaacaucaacaaguuu

SEQ ID NO: 25489 - RNA, 19 nt, Homo sapiens
  misc_RNA (1)...(19): siRNA sense strand
gaacaacaccaugaucaga

SEQ ID NO: 25490 - RNA, 19 nt, Homo sapiens
  misc_RNA (1)...(19): siRNA sense strand
gaaauaauccaagauacug

SEQ ID NO: 25491 - RNA, 19 nt, Homo sapiens
  misc_RNA (1)...(19): siRNA sense strand
ggucagagacacacucaaa

SEQ ID NO: 25492 - RNA, 19 nt, Homo sapiens
  misc_RNA (1)...(19): siRNA sense strand
uaacggcaauuauaacaca

SEQ ID NO: 25493 - RNA, 19 nt, Homo sapiens
  misc_RNA (1)...(19): siRNA sense strand
cagcuugccuggccugaaa

SEQ ID NO: 25494 - RNA, 19 nt, Homo sapiens
  misc_RNA (1)...(19): siRNA sense strand
ugaagagcaucucggaauu

SEQ ID NO: 25495 - RNA, 19 nt, Homo sapiens
  misc_RNA (1)...(19): siRNA sense strand
cagcaacaauggaaacaga

SEQ ID NO: 25496 - RNA, 19 nt, Homo sapiens
  misc_RNA (1)...(19): siRNA sense strand
guaaguucacugucaauaa

SEQ ID NO: 25497 - RNA, 19 nt, Homo sapiens
  misc_RNA (1)...(19): siRNA sense strand
cuaauaggacuacuucuaa

SEQ ID NO: 25498 - RNA, 19 nt, Homo sapiens
  misc_RNA (1)...(19): siRNA sense strand
gaagacguuugacaagcaa

SEQ ID NO: 25499 - RNA, 19 nt, Homo sapiens
  misc_RNA (1)...(19): siRNA sense strand
ccaaaggacaugugaagaa

SEQ ID NO: 25500 - RNA, 19 nt, Homo sapiens
  misc_RNA (1)...(19): siRNA sense strand
ccucugaaauguauguaaa

SEQ ID NO: 25501 - RNA, 19 nt, Homo sapiens
  misc_RNA (1)...(19): siRNA sense strand
gaggaacacuaucaaacau

SEQ ID NO: 25502 - RNA, 19 nt, Homo sapiens
  misc_RNA (1)...(19): siRNA sense strand
aaucagaauuccucaaaug

SEQ ID NO: 25503 - RNA, 19 nt, Homo sapiens
  misc_RNA (1)...(19): siRNA sense strand
gaugaagacacagcuguua

SEQ ID NO: 25504 - RNA, 19 nt, Homo sapiens
  misc_RNA (1)...(19): siRNA sense strand
gcugguaccuugaggacaa

SEQ ID NO: 25505 - RNA, 19 nt, Homo sapiens
  misc_RNA (1)...(19): siRNA sense strand
aggcuuacauugacauuaa

SEQ ID NO: 25506 - RNA, 19 nt, Homo sapiens
  misc_RNA (1)...(19): siRNA sense strand
aaauacaggucucagcauu

SEQ ID NO: 25507 - RNA, 19 nt, Homo sapiens
  misc_RNA (1)...(19): siRNA sense strand
ugaaguggaugauguuauc

SEQ ID NO: 25508 - RNA, 19 nt, Homo sapiens
  misc_RNA (1)...(19): siRNA sense strand
ggagacaccuaagccaaga

SEQ ID NO: 25509 - RNA, 19 nt, Homo sapiens
  misc_RNA (1)...(19): siRNA sense strand
gaucagagcaguucaacca

SEQ ID NO: 25510 - RNA, 19 nt, Homo sapiens
  misc_RNA (1)...(19): siRNA sense strand
ggacgaagcuguucuggau

SEQ ID NO: 25511 - RNA, 19 nt, Homo sapiens
  misc_RNA (1)...(19): siRNA sense strand
gaauggagcucaguugugu

SEQ ID NO: 25512 - RNA, 19 nt, Homo sapiens
  misc_RNA (1)...(19): siRNA sense strand
gcacacccacaguugaaua

SEQ ID NO: 25513 - RNA, 19 nt, Homo sapiens
  misc_RNA (1)...(19): siRNA sense strand
acgaagcuguucuggauuu

SEQ ID NO: 25514 - RNA, 19 nt, Homo sapiens
  misc_RNA (1)...(19): siRNA sense strand
ucaaguccaugccagaaug

SEQ ID NO: 25515 - RNA, 19 nt, Homo sapiens
  misc_RNA (1)...(19): siRNA sense strand
gaccagcuccaguccuaua

SEQ ID NO: 25516 - RNA, 19 nt, Homo sapiens
  misc_RNA (1)...(19): siRNA sense strand
acaccagggucucccagua

SEQ ID NO: 25517 - RNA, 19 nt, Homo sapiens
  misc_RNA (1)...(19): siRNA sense strand
ggaccagugugccucaagu

SEQ ID NO: 25518 - RNA, 19 nt, Homo sapiens
  misc_RNA (1)...(19): siRNA sense strand
gugagacgcacaaggauga

SEQ ID NO: 25519 - RNA, 19 nt, Homo sapiens
  misc_RNA (1)...(19): siRNA sense strand
ggcccacuguuucgacaaa

SEQ ID NO: 25520 - RNA, 19 nt, Homo sapiens
  misc_RNA (1)...(19): siRNA sense strand
gaccagcugaucuguguga

SEQ ID NO: 25521 - RNA, 19 nt, Homo sapiens
  misc_RNA (1)...(19): siRNA sense strand
cccgggagaucuucaagga

SEQ ID NO: 25522 - RNA, 19 nt, Homo sapiens
  misc_RNA (1)...(19): siRNA sense strand
gaacuggaggaaccugauc

SEQ ID NO: 25523 - RNA, 19 nt, Homo sapiens
  misc_RNA (1)...(19): siRNA sense strand
ccaaauaucacggaguaca

SEQ ID NO: 25524 - RNA, 19 nt, Homo sapiens
  misc_RNA (1)...(19): siRNA sense strand
aagcuguucuggauuucuu

SEQ ID NO: 25525 - RNA, 19 nt, Homo sapiens
  misc_RNA (1)...(19): siRNA sense strand
cagcuccaguccuauaucu

SEQ ID NO: 25526 - RNA, 19 nt, Homo sapiens
  misc_RNA (1)...(19): siRNA sense strand
guucuggauuucuuacagu

SEQ ID NO: 25527 - RNA, 19 nt, Homo sapiens
  misc_RNA (1)...(19): siRNA sense strand
ggacccugaucaacaccau

SEQ ID NO: 25528 - RNA, 19 nt, Homo sapiens
  misc_RNA (1)...(19): siRNA sense strand
caaauaucacggaguacau

SEQ ID NO: 25529 - RNA, 19 nt, Homo sapiens
  misc_RNA (1)...(19): siRNA sense strand
ccccaaauaucacggagua

SEQ ID NO: 25530 - RNA, 19 nt, Homo sapiens
  misc_RNA (1)...(19): siRNA sense strand
gcccacaugccacccacua

SEQ ID NO: 25531 - RNA, 19 nt, Homo sapiens
  misc_RNA (1)...(19): siRNA sense strand
ggugaauggagcucaguug

SEQ ID NO: 25532 - RNA, 19 nt, Homo sapiens
  misc_RNA (1)...(19): siRNA sense strand
ugaucugugugaacgagaa

SEQ ID NO: 25533 - RNA, 19 nt, Homo sapiens
  misc_RNA (1)...(19): siRNA sense strand
ggagaggacgaagcuguuc

SEQ ID NO: 25534 - RNA, 19 nt, Homo sapiens
  misc_RNA (1)...(19): siRNA sense strand
acaguugaauauccaugug

SEQ ID NO: 25535 - RNA, 19 nt, Homo sapiens
  misc_RNA (1)...(19): siRNA sense strand
ugaauggagcucaguugug

SEQ ID NO: 25536 - RNA, 19 nt, Homo sapiens
  misc_RNA (1)...(19): siRNA sense strand
gugaauggagcucaguugu

SEQ ID NO: 25537 - RNA, 19 nt, Homo sapiens
  misc_RNA (1)...(19): siRNA sense strand
uaucacggaguacauguuc

SEQ ID NO: 25538 - RNA, 19 nt, Homo sapiens
  misc_RNA (1)...(19): siRNA sense strand
agaggacgcuggccuucgu

SEQ ID NO: 25539 - RNA, 19 nt, Homo sapiens
  misc_RNA (1)...(19): siRNA sense strand
augaccagcugaucugugu

SEQ ID NO: 25540 - RNA, 19 nt, Homo sapiens
  misc_RNA (1)...(19): siRNA sense strand
ggacgaagcuguucuggau

SEQ ID NO: 25541 - RNA, 19 nt, Homo sapiens
  misc_RNA (1)...(19): siRNA sense strand
gaauggagcucaguugugu

SEQ ID NO: 25542 - RNA, 19 nt, Homo sapiens
  misc_RNA (1)...(19): siRNA sense strand
gcacacccacaguugaaua

SEQ ID NO: 25543 - RNA, 19 nt, Homo sapiens
  misc_RNA (1)...(19): siRNA sense strand
acgaagcuguucuggauuu

SEQ ID NO: 25544 - RNA, 19 nt, Homo sapiens
  misc_RNA (1)...(19): siRNA sense strand
ucaaguccaugccagaaug

SEQ ID NO: 25545 - RNA, 19 nt, Homo sapiens
  misc_RNA (1)...(19): siRNA sense strand
gaccagcuccaguccuaua

SEQ ID NO: 25546 - RNA, 19 nt, Homo sapiens
  misc_RNA (1)...(19): siRNA sense strand
acaccagggucucccagua

SEQ ID NO: 25547 - RNA, 19 nt, Homo sapiens
  misc_RNA (1)...(19): siRNA sense strand
ggaccagugugccucaagu

SEQ ID NO: 25548 - RNA, 19 nt, Homo sapiens
  misc_RNA (1)...(19): siRNA sense strand
gugagacgcacaaggauga

SEQ ID NO: 25549 - RNA, 19 nt, Homo sapiens
  misc_RNA (1)...(19): siRNA sense strand
ggcccacuguuucgacaaa

SEQ ID NO: 25550 - RNA, 19 nt, Homo sapiens
  misc_RNA (1)...(19): siRNA sense strand
gaccagcugaucuguguga

SEQ ID NO: 25551 - RNA, 19 nt, Homo sapiens
  misc_RNA (1)...(19): siRNA sense strand
cccgggagaucuucaagga

SEQ ID NO: 25552 - RNA, 19 nt, Homo sapiens
  misc_RNA (1)...(19): siRNA sense strand
gaacuggaggaaccugauc

SEQ ID NO: 25553 - RNA, 19 nt, Homo sapiens
  misc_RNA (1)...(19): siRNA sense strand
ccaaauaucacggaguaca

SEQ ID NO: 25554 - RNA, 19 nt, Homo sapiens
  misc_RNA (1)...(19): siRNA sense strand
aagcuguucuggauuucuu

SEQ ID NO: 25555 - RNA, 19 nt, Homo sapiens
  misc_RNA (1)...(19): siRNA sense strand
cagcuccaguccuauaucu

SEQ ID NO: 25556 - RNA, 19 nt, Homo sapiens
  misc_RNA (1)...(19): siRNA sense strand
guucuggauuucuuacagu

SEQ ID NO: 25557 - RNA, 19 nt, Homo sapiens
  misc_RNA (1)...(19): siRNA sense strand
ggacccugaucaacaccau

SEQ ID NO: 25558 - RNA, 19 nt, Homo sapiens
  misc_RNA (1)...(19): siRNA sense strand
caaauaucacggaguacau

SEQ ID NO: 25559 - RNA, 19 nt, Homo sapiens
  misc_RNA (1)...(19): siRNA sense strand
ccccaaauaucacggagua

SEQ ID NO: 25560 - RNA, 19 nt, Homo sapiens
  misc_RNA (1)...(19): siRNA sense strand
gcccacaugccacccacua

SEQ ID NO: 25561 - RNA, 19 nt, Homo sapiens
  misc_RNA (1)...(19): siRNA sense strand
ggugaauggagcucaguug

SEQ ID NO: 25562 - RNA, 19 nt, Homo sapiens
  misc_RNA (1)...(19): siRNA sense strand
ugaucugugugaacgagaa

SEQ ID NO: 25563 - RNA, 19 nt, Homo sapiens
  misc_RNA (1)...(19): siRNA sense strand
ggagaggacgaagcuguuc

SEQ ID NO: 25564 - RNA, 19 nt, Homo sapiens
  misc_RNA (1)...(19): siRNA sense strand
acaguugaauauccaugug

SEQ ID NO: 25565 - RNA, 19 nt, Homo sapiens
  misc_RNA (1)...(19): siRNA sense strand
ugaauggagcucaguugug

SEQ ID NO: 25566 - RNA, 19 nt, Homo sapiens
  misc_RNA (1)...(19): siRNA sense strand
gugaauggagcucaguugu

SEQ ID NO: 25567 - RNA, 19 nt, Homo sapiens
  misc_RNA (1)...(19): siRNA sense strand
uaucacggaguacauguuc

SEQ ID NO: 25568 - RNA, 19 nt, Homo sapiens
  misc_RNA (1)...(19): siRNA sense strand
agaggacgcuggccuucgu

SEQ ID NO: 25569 - RNA, 19 nt, Homo sapiens
  misc_RNA (1)...(19): siRNA sense strand
augaccagcugaucugugu

SEQ ID NO: 25570 - RNA, 19 nt, Homo sapiens
  misc_RNA (1)...(19): siRNA sense strand
ggaguaaaaucucugcuua

SEQ ID NO: 25571 - RNA, 19 nt, Homo sapiens
  misc_RNA (1)...(19): siRNA sense strand
gcauguaugugaaggaguu

SEQ ID NO: 25572 - RNA, 19 nt, Homo sapiens
  misc_RNA (1)...(19): siRNA sense strand
gaugggcugugauuuaaau

SEQ ID NO: 25573 - RNA, 19 nt, Homo sapiens
  misc_RNA (1)...(19): siRNA sense strand
guugaugggcugugauuua

SEQ ID NO: 25574 - RNA, 19 nt, Homo sapiens
  misc_RNA (1)...(19): siRNA sense strand
aauaucagaugcacagauu

SEQ ID NO: 25575 - RNA, 19 nt, Homo sapiens
  misc_RNA (1)...(19): siRNA sense strand
gcugugauuuaaauaguug

SEQ ID NO: 25576 - RNA, 19 nt, Homo sapiens
  misc_RNA (1)...(19): siRNA sense strand
gaaagucacaggaguaacu

SEQ ID NO: 25577 - RNA, 19 nt, Homo sapiens
  misc_RNA (1)...(19): siRNA sense strand
gaauggagaguaaagcaau

SEQ ID NO: 25578 - RNA, 19 nt, Homo sapiens
  misc_RNA (1)...(19): siRNA sense strand
gcacccaacucauuauagc

SEQ ID NO: 25579 - RNA, 19 nt, Homo sapiens
  misc_RNA (1)...(19): siRNA sense strand
uugaugggcugugauuuaa

SEQ ID NO: 25580 - RNA, 19 nt, Homo sapiens
  misc_RNA (1)...(19): siRNA sense strand
gggcugugauuuaaauagu

SEQ ID NO: 25581 - RNA, 19 nt, Homo sapiens
  misc_RNA (1)...(19): siRNA sense strand
ggagaguaaagcaauauca

SEQ ID NO: 25582 - RNA, 19 nt, Homo sapiens
  misc_RNA (1)...(19): siRNA sense strand
gaguaaagcaauaucagau

SEQ ID NO: 25583 - RNA, 19 nt, Homo sapiens
  misc_RNA (1)...(19): siRNA sense strand
aauggagaguaaagcaaua

SEQ ID NO: 25584 - RNA, 19 nt, Homo sapiens
  misc_RNA (1)...(19): siRNA sense strand
ggaauggagaguaaagcaa

SEQ ID NO: 25585 - RNA, 19 nt, Homo sapiens
  misc_RNA (1)...(19): siRNA sense strand
ggauucaucugggauaaaa

SEQ ID NO: 25586 - RNA, 19 nt, Homo sapiens
  misc_RNA (1)...(19): siRNA sense strand
gaauggcaaaguaaagguu

SEQ ID NO: 25587 - RNA, 19 nt, Homo sapiens
  misc_RNA (1)...(19): siRNA sense strand
gcagcacucuucgcaugga

SEQ ID NO: 25588 - RNA, 19 nt, Homo sapiens
  misc_RNA (1)...(19): siRNA sense strand
ggucuucuuuggcaaugug

SEQ ID NO: 25589 - RNA, 19 nt, Homo sapiens
  misc_RNA (1)...(19): siRNA sense strand
ggaaaucaagacuccuuca

SEQ ID NO: 25590 - RNA, 19 nt, Homo sapiens
  misc_RNA (1)...(19): siRNA sense strand
guuacugacucgcuaccuu

SEQ ID NO: 25591 - RNA, 19 nt, Homo sapiens
  misc_RNA (1)...(19): siRNA sense strand
guuugcacccaacucauua

SEQ ID NO: 25592 - RNA, 19 nt, Homo sapiens
  misc_RNA (1)...(19): siRNA sense strand
ggccaucaguggacucucu

SEQ ID NO: 25593 - RNA, 19 nt, Homo sapiens
  misc_RNA (1)...(19): siRNA sense strand
aauuauugcucgauacauc

SEQ ID NO: 25594 - RNA, 19 nt, Homo sapiens
  misc_RNA (1)...(19): siRNA sense strand
guggauucaucugggauaa

SEQ ID NO: 25595 - RNA, 19 nt, Homo sapiens
  misc_RNA (1)...(19): siRNA sense strand
ccaacucauuauagcauuc

SEQ ID NO: 25596 - RNA, 19 nt, Homo sapiens
  misc_RNA (1)...(19): siRNA sense strand
gaguugaugggcugugauu

SEQ ID NO: 25597 - RNA, 19 nt, Homo sapiens
  misc_RNA (1)...(19): siRNA sense strand
ggcugugauuuaaauaguu

SEQ ID NO: 25598 - RNA, 19 nt, Homo sapiens
  misc_RNA (1)...(19): siRNA sense strand
agaguugggugcaccagau

SEQ ID NO: 25599 - RNA, 19 nt, Homo sapiens
  misc_RNA (1)...(19): siRNA sense strand
ccaccuggucuccuucaaa

SEQ ID NO: 25600 - RNA, 19 nt, Homo sapiens
  misc_RNA (1)...(19): siRNA sense strand
uuaccagcauguaugugaa

SEQ ID NO: 25601 - RNA, 19 nt, Homo sapiens
  misc_RNA (1)...(19): siRNA sense strand
gagaguaaagcaauaucag

SEQ ID NO: 25602 - RNA, 19 nt, Homo sapiens
  misc_RNA (1)...(19): siRNA sense strand
agaguaaagcaauaucaga

SEQ ID NO: 25603 - RNA, 19 nt, Homo sapiens
  misc_RNA (1)...(19): siRNA sense strand
gggaauggagaguaaagca

SEQ ID NO: 25604 - RNA, 19 nt, Homo sapiens
  misc_RNA (1)...(19): siRNA sense strand
ggcacaggaccucuacuga

SEQ ID NO: 25605 - RNA, 19 nt, Homo sapiens
  misc_RNA (1)...(19): siRNA sense strand
cugacucgcuaccuucgaa

SEQ ID NO: 25606 - RNA, 19 nt, Homo sapiens
  misc_RNA (1)...(19): siRNA sense strand
uuucagaauggcaaaguaa

SEQ ID NO: 25607 - RNA, 19 nt, Homo sapiens
  misc_RNA (1)...(19): siRNA sense strand
caccuggucuccuucaaaa

SEQ ID NO: 25608 - RNA, 19 nt, Homo sapiens
  misc_RNA (1)...(19): siRNA sense strand
uaucagaugcacagauuac

SEQ ID NO: 25609 - RNA, 19 nt, Homo sapiens
  misc_RNA (1)...(19): siRNA sense strand
gaaaucaagacuccuucac

SEQ ID NO: 25610 - RNA, 19 nt, Homo sapiens
  misc_RNA (1)...(19): siRNA sense strand
gcacagauuacugcuucau

SEQ ID NO: 25611 - RNA, 19 nt, Homo sapiens
  misc_RNA (1)...(19): siRNA sense strand
caauaucagaugcacagau

SEQ ID NO: 25612 - RNA, 19 nt, Homo sapiens
  misc_RNA (1)...(19): siRNA sense strand
aaaucaagacuccuucaca

SEQ ID NO: 25613 - RNA, 19 nt, Homo sapiens
  misc_RNA (1)...(19): siRNA sense strand
cuagacccaccguuacuga

SEQ ID NO: 25614 - RNA, 19 nt, Homo sapiens
  misc_RNA (1)...(19): siRNA sense strand
cuuaccagcauguauguga

SEQ ID NO: 25615 - RNA, 19 nt, Homo sapiens
  misc_RNA (1)...(19): siRNA sense strand
cccaacucauuauagcauu

SEQ ID NO: 25616 - RNA, 19 nt, Homo sapiens
  misc_RNA (1)...(19): siRNA sense strand
ggaguaaaaucucugcuua

SEQ ID NO: 25617 - RNA, 19 nt, Homo sapiens
  misc_RNA (1)...(19): siRNA sense strand
gcauguaugugaaggaguu

SEQ ID NO: 25618 - RNA, 19 nt, Homo sapiens
  misc_RNA (1)...(19): siRNA sense strand
gaugggcugugauuuaaau

SEQ ID NO: 25619 - RNA, 19 nt, Homo sapiens
  misc_RNA (1)...(19): siRNA sense strand
guugaugggcugugauuua

SEQ ID NO: 25620 - RNA, 19 nt, Homo sapiens
  misc_RNA (1)...(19): siRNA sense strand
aauaucagaugcacagauu

SEQ ID NO: 25621 - RNA, 19 nt, Homo sapiens
  misc_RNA (1)...(19): siRNA sense strand
gcugugauuuaaauaguug

SEQ ID NO: 25622 - RNA, 19 nt, Homo sapiens
  misc_RNA (1)...(19): siRNA sense strand
gaaagucacaggaguaacu

SEQ ID NO: 25623 - RNA, 19 nt, Homo sapiens
  misc_RNA (1)...(19): siRNA sense strand
gaauggagaguaaagcaau

SEQ ID NO: 25624 - RNA, 19 nt, Homo sapiens
  misc_RNA (1)...(19): siRNA sense strand
gcacccaacucauuauagc

SEQ ID NO: 25625 - RNA, 19 nt, Homo sapiens
  misc_RNA (1)...(19): siRNA sense strand
uugaugggcugugauuuaa

SEQ ID NO: 25626 - RNA, 19 nt, Homo sapiens
  misc_RNA (1)...(19): siRNA sense strand
gggcugugauuuaaauagu

SEQ ID NO: 25627 - RNA, 19 nt, Homo sapiens
  misc_RNA (1)...(19): siRNA sense strand
ggagaguaaagcaauauca

SEQ ID NO: 25628 - RNA, 19 nt, Homo sapiens
  misc_RNA (1)...(19): siRNA sense strand
gaguaaagcaauaucagau

SEQ ID NO: 25629 - RNA, 19 nt, Homo sapiens
  misc_RNA (1)...(19): siRNA sense strand
aauggagaguaaagcaaua

SEQ ID NO: 25630 - RNA, 19 nt, Homo sapiens
  misc_RNA (1)...(19): siRNA sense strand
ggaauggagaguaaagcaa

SEQ ID NO: 25631 - RNA, 19 nt, Homo sapiens
  misc_RNA (1)...(19): siRNA sense strand
ggauucaucugggauaaaa

SEQ ID NO: 25632 - RNA, 19 nt, Homo sapiens
  misc_RNA (1)...(19): siRNA sense strand
gaauggcaaaguaaagguu

SEQ ID NO: 25633 - RNA, 19 nt, Homo sapiens
  misc_RNA (1)...(19): siRNA sense strand
gcagcacucuucgcaugga

SEQ ID NO: 25634 - RNA, 19 nt, Homo sapiens
  misc_RNA (1)...(19): siRNA sense strand
ggucuucuuuggcaaugug

SEQ ID NO: 25635 - RNA, 19 nt, Homo sapiens
  misc_RNA (1)...(19): siRNA sense strand
ggaaaucaagacuccuuca

SEQ ID NO: 25636 - RNA, 19 nt, Homo sapiens
  misc_RNA (1)...(19): siRNA sense strand
guuacugacucgcuaccuu

SEQ ID NO: 25637 - RNA, 19 nt, Homo sapiens
  misc_RNA (1)...(19): siRNA sense strand
guuugcacccaacucauua

SEQ ID NO: 25638 - RNA, 19 nt, Homo sapiens
  misc_RNA (1)...(19): siRNA sense strand
ggccaucaguggacucucu

SEQ ID NO: 25639 - RNA, 19 nt, Homo sapiens
  misc_RNA (1)...(19): siRNA sense strand
aauuauugcucgauacauc

SEQ ID NO: 25640 - RNA, 19 nt, Homo sapiens
  misc_RNA (1)...(19): siRNA sense strand
guggauucaucugggauaa

SEQ ID NO: 25641 - RNA, 19 nt, Homo sapiens
  misc_RNA (1)...(19): siRNA sense strand
ccaacucauuauagcauuc

SEQ ID NO: 25642 - RNA, 19 nt, Homo sapiens
  misc_RNA (1)...(19): siRNA sense strand
gaguugaugggcugugauu

SEQ ID NO: 25643 - RNA, 19 nt, Homo sapiens
  misc_RNA (1)...(19): siRNA sense strand
ggcugugauuuaaauaguu

SEQ ID NO: 25644 - RNA, 19 nt, Homo sapiens
  misc_RNA (1)...(19): siRNA sense strand
agaguugggugcaccagau

SEQ ID NO: 25645 - RNA, 19 nt, Homo sapiens
  misc_RNA (1)...(19): siRNA sense strand
ccaccuggucuccuucaaa

SEQ ID NO: 25646 - RNA, 19 nt, Homo sapiens
  misc_RNA (1)...(19): siRNA sense strand
uuaccagcauguaugugaa

SEQ ID NO: 25647 - RNA, 19 nt, Homo sapiens
  misc_RNA (1)...(19): siRNA sense strand
gagaguaaagcaauaucag

SEQ ID NO: 25648 - RNA, 19 nt, Homo sapiens
  misc_RNA (1)...(19): siRNA sense strand
agaguaaagcaauaucaga

SEQ ID NO: 25649 - RNA, 19 nt, Homo sapiens
  misc_RNA (1)...(19): siRNA sense strand
gggaauggagaguaaagca

SEQ ID NO: 25650 - RNA, 19 nt, Homo sapiens
  misc_RNA (1)...(19): siRNA sense strand
ggcacaggaccucuacuga

SEQ ID NO: 25651 - RNA, 19 nt, Homo sapiens
  misc_RNA (1)...(19): siRNA sense strand
cugacucgcuaccuucgaa

SEQ ID NO: 25652 - RNA, 19 nt, Homo sapiens
  misc_RNA (1)...(19): siRNA sense strand
uuucagaauggcaaaguaa

SEQ ID NO: 25653 - RNA, 19 nt, Homo sapiens
  misc_RNA (1)...(19): siRNA sense strand
caccuggucuccuucaaaa

SEQ ID NO: 25654 - RNA, 19 nt, Homo sapiens
  misc_RNA (1)...(19): siRNA sense strand
uaucagaugcacagauuac

SEQ ID NO: 25655 - RNA, 19 nt, Homo sapiens
  misc_RNA (1)...(19): siRNA sense strand
gaaaucaagacuccuucac

SEQ ID NO: 25656 - RNA, 19 nt, Homo sapiens
  misc_RNA (1)...(19): siRNA sense strand
gcacagauuacugcuucau

SEQ ID NO: 25657 - RNA, 19 nt, Homo sapiens
  misc_RNA (1)...(19): siRNA sense strand
caauaucagaugcacagau

SEQ ID NO: 25658 - RNA, 19 nt, Homo sapiens
  misc_RNA (1)...(19): siRNA sense strand
aaaucaagacuccuucaca

SEQ ID NO: 25659 - RNA, 19 nt, Homo sapiens
  misc_RNA (1)...(19): siRNA sense strand
cuagacccaccguuacuga

SEQ ID NO: 25660 - RNA, 19 nt, Homo sapiens
  misc_RNA (1)...(19): siRNA sense strand
cuuaccagcauguauguga

SEQ ID NO: 25661 - RNA, 19 nt, Homo sapiens
  misc_RNA (1)...(19): siRNA sense strand
cccaacucauuauagcauu

SEQ ID NO: 25662 - RNA, 19 nt, Homo sapiens
  misc_RNA (1)...(19): siRNA sense strand
ggaaagaacugugaauuag

SEQ ID NO: 25663 - RNA, 19 nt, Homo sapiens
  misc_RNA (1)...(19): siRNA sense strand
gaacaucuuccucaaauuu

SEQ ID NO: 25664 - RNA, 19 nt, Homo sapiens
  misc_RNA (1)...(19): siRNA sense strand
gagaucagcuuuaguucuu

SEQ ID NO: 25665 - RNA, 19 nt, Homo sapiens
  misc_RNA (1)...(19): siRNA sense strand
ggaagggaccaguuucuua

SEQ ID NO: 25666 - RNA, 19 nt, Homo sapiens
  misc_RNA (1)...(19): siRNA sense strand
gaaaggcaaauauggaaua

SEQ ID NO: 25667 - RNA, 19 nt, Homo sapiens
  misc_RNA (1)...(19): siRNA sense strand
caaagcacccaaucauuua

SEQ ID NO: 25668 - RNA, 19 nt, Homo sapiens
  misc_RNA (1)...(19): siRNA sense strand
ggacgaacccuuagugcua

SEQ ID NO: 25669 - RNA, 19 nt, Homo sapiens
  misc_RNA (1)...(19): siRNA sense strand
gaagggaccaguuucuuaa

SEQ ID NO: 25670 - RNA, 19 nt, Homo sapiens
  misc_RNA (1)...(19): siRNA sense strand
cuacaaaguucaccaucua

SEQ ID NO: 25671 - RNA, 19 nt, Homo sapiens
  misc_RNA (1)...(19): siRNA sense strand
caacuacaaugcagcuauu

SEQ ID NO: 25672 - RNA, 19 nt, Homo sapiens
  misc_RNA (1)...(19): siRNA sense strand
ucaaagcacccaaucauuu

SEQ ID NO: 25673 - RNA, 19 nt, Homo sapiens
  misc_RNA (1)...(19): siRNA sense strand
gaacugugaauuagaugua

SEQ ID NO: 25674 - RNA, 19 nt, Homo sapiens
  misc_RNA (1)...(19): siRNA sense strand
ggaacuggacgaacccuua

SEQ ID NO: 25675 - RNA, 19 nt, Homo sapiens
  misc_RNA (1)...(19): siRNA sense strand
gcaaggaugacauuaauuc

SEQ ID NO: 25676 - RNA, 19 nt, Homo sapiens
  misc_RNA (1)...(19): siRNA sense strand
gaagaagcacgagaaguuu

SEQ ID NO: 25677 - RNA, 19 nt, Homo sapiens
  misc_RNA (1)...(19): siRNA sense strand
ugaagagugugcaaugaaa

SEQ ID NO: 25678 - RNA, 19 nt, Homo sapiens
  misc_RNA (1)...(19): siRNA sense strand
caaaguucaccaucuauaa

SEQ ID NO: 25679 - RNA, 19 nt, Homo sapiens
  misc_RNA (1)...(19): siRNA sense strand
gaaagaacugugaauuaga

SEQ ID NO: 25680 - RNA, 19 nt, Homo sapiens
  misc_RNA (1)...(19): siRNA sense strand
gauguggacuauguaaauu

SEQ ID NO: 25681 - RNA, 19 nt, Homo sapiens
  misc_RNA (1)...(19): siRNA sense strand
uguggaggcucuaucguua

SEQ ID NO: 25682 - RNA, 19 nt, Homo sapiens
  misc_RNA (1)...(19): siRNA sense strand
gagagaauguauggaagaa

SEQ ID NO: 25683 - RNA, 19 nt, Homo sapiens
  misc_RNA (1)...(19): siRNA sense strand
gaggcucuaucguuaauga

SEQ ID NO: 25684 - RNA, 19 nt, Homo sapiens
  misc_RNA (1)...(19): siRNA sense strand
uaaaguugaugcauucugu

SEQ ID NO: 25685 - RNA, 19 nt, Homo sapiens
  misc_RNA (1)...(19): siRNA sense strand
ugaagaagcacgagaaguu

SEQ ID NO: 25686 - RNA, 19 nt, Homo sapiens
  misc_RNA (1)...(19): siRNA sense strand
gcaaugaaaggcaaauaug

SEQ ID NO: 25687 - RNA, 19 nt, Homo sapiens
  misc_RNA (1)...(19): siRNA sense strand
gaagcaguauguugaugga

SEQ ID NO: 25688 - RNA, 19 nt, Homo sapiens
  misc_RNA (1)...(19): siRNA sense strand
gaauguuggugucccuuug

SEQ ID NO: 25689 - RNA, 19 nt, Homo sapiens
  misc_RNA (1)...(19): siRNA sense strand
gugcuaaacagcuacguua

SEQ ID NO: 25690 - RNA, 19 nt, Homo sapiens
  misc_RNA (1)...(19): siRNA sense strand
ccaaagagguauaauucag

SEQ ID NO: 25691 - RNA, 19 nt, Homo sapiens
  misc_RNA (1)...(19): siRNA sense strand
gagaauguauggaagaaaa

SEQ ID NO: 25692 - RNA, 19 nt, Homo sapiens
  misc_RNA (1)...(19): siRNA sense strand
ugaguccaauccauguuua

SEQ ID NO: 25693 - RNA, 19 nt, Homo sapiens
  misc_RNA (1)...(19): siRNA sense strand
caaugcagcuauuaauaag

SEQ ID NO: 25694 - RNA, 19 nt, Homo sapiens
  misc_RNA (1)...(19): siRNA sense strand
aggaaagaacugugaauua

SEQ ID NO: 25695 - RNA, 19 nt, Homo sapiens
  misc_RNA (1)...(19): siRNA sense strand
ggugaagagugugcaauga

SEQ ID NO: 25696 - RNA, 19 nt, Homo sapiens
  misc_RNA (1)...(19): siRNA sense strand
gcaggugaacauaauauug

SEQ ID NO: 25697 - RNA, 19 nt, Homo sapiens
  misc_RNA (1)...(19): siRNA sense strand
uggaagaguuucuguuuca

SEQ ID NO: 25698 - RNA, 19 nt, Homo sapiens
  misc_RNA (1)...(19): siRNA sense strand
gcagugccauuuccaugug

SEQ ID NO: 25699 - RNA, 19 nt, Homo sapiens
  misc_RNA (1)...(19): siRNA sense strand
ggccaaagagguauaauuc

SEQ ID NO: 25700 - RNA, 19 nt, Homo sapiens
  misc_RNA (1)...(19): siRNA sense strand
cagcuuuaguucuucagua

SEQ ID NO: 25701 - RNA, 19 nt, Homo sapiens
  misc_RNA (1)...(19): siRNA sense strand
ccacaugucuucgaucuac

SEQ ID NO: 25702 - RNA, 19 nt, Homo sapiens
  misc_RNA (1)...(19): siRNA sense strand
gagguauaauucagguaaa

SEQ ID NO: 25703 - RNA, 19 nt, Homo sapiens
  misc_RNA (1)...(19): siRNA sense strand
gauaacaucacucaaagca

SEQ ID NO: 25704 - RNA, 19 nt, Homo sapiens
  misc_RNA (1)...(19): siRNA sense strand
aaauagugcugauaacaag

SEQ ID NO: 25705 - RNA, 19 nt, Homo sapiens
  misc_RNA (1)...(19): siRNA sense strand
gaucagcuuuaguucuuca

SEQ ID NO: 25706 - RNA, 19 nt, Homo sapiens
  misc_RNA (1)...(19): siRNA sense strand
ggaauacacgaacaucuuc

SEQ ID NO: 25707 - RNA, 19 nt, Homo sapiens
  misc_RNA (1)...(19): siRNA sense strand
gacagaacauacagagcaa

SEQ ID NO: 25708 - RNA, 19 nt, Homo sapiens
  misc_RNA (1)...(19): siRNA sense strand
ugagagagaauguauggaa

SEQ ID NO: 25709 - RNA, 19 nt, Homo sapiens
  misc_RNA (1)...(19): siRNA sense strand
ugacauugcccuucuggaa

SEQ ID NO: 25710 - RNA, 19 nt, Homo sapiens
  misc_RNA (1)...(19): siRNA sense strand
caggugaacauaauauuga

SEQ ID NO: 25711 - RNA, 19 nt, Homo sapiens
  misc_RNA (1)...(19): siRNA sense strand
uacugaagcugaaaccauu

SEQ ID NO: 25712 - RNA, 19 nt, Homo sapiens
  misc_RNA (1)...(19): siRNA sense strand
ggauaucgacuugcagaaa

SEQ ID NO: 25713 - RNA, 19 nt, Homo sapiens
  misc_RNA (1)...(19): siRNA sense strand
ucaauucccuuggcagguu

SEQ ID NO: 25714 - RNA, 19 nt, Homo sapiens
  misc_RNA (1)...(19): siRNA sense strand
acgaacaucuuccucaaau

SEQ ID NO: 25715 - RNA, 19 nt, Homo sapiens
  misc_RNA (1)...(19): siRNA sense strand
cagguaaauuggaagaguu

SEQ ID NO: 25716 - RNA, 19 nt, Homo sapiens
  misc_RNA (1)...(19): siRNA sense strand
gcauugcugacaaggaaua

SEQ ID NO: 25717 - RNA, 19 nt, Homo sapiens
  misc_RNA (1)...(19): siRNA sense strand
uaaguacaaccaugacauu

SEQ ID NO: 25718 - RNA, 19 nt, Homo sapiens
  misc_RNA (1)...(19): siRNA sense strand
ugacuucacucggguuguu

SEQ ID NO: 25719 - RNA, 19 nt, Homo sapiens
  misc_RNA (1)...(19): siRNA sense strand
gauaucgacuugcagaaaa

SEQ ID NO: 25720 - RNA, 19 nt, Homo sapiens
  misc_RNA (1)...(19): siRNA sense strand
gaaggaaagaacugugaau

SEQ ID NO: 25721 - RNA, 19 nt, Homo sapiens
  misc_RNA (1)...(19): siRNA sense strand
gcaguauguugauggagau

SEQ ID NO: 25722 - RNA, 19 nt, Homo sapiens
  misc_RNA (1)...(19): siRNA sense strand
gacaaggaauacacgaaca

SEQ ID NO: 25723 - RNA, 19 nt, Homo sapiens
  misc_RNA (1)...(19): siRNA sense strand
uccaauccauguuuaaaug

SEQ ID NO: 25724 - RNA, 19 nt, Homo sapiens
  misc_RNA (1)...(19): siRNA sense strand
acacgaacaucuuccucaa

SEQ ID NO: 25725 - RNA, 19 nt, Homo sapiens
  misc_RNA (1)...(19): siRNA sense strand
cgaacaucuuccucaaauu

SEQ ID NO: 25726 - RNA, 19 nt, Homo sapiens
  misc_RNA (1)...(19): siRNA sense strand
ugucuucgaucuacaaagu

SEQ ID NO: 25727 - RNA, 19 nt, Homo sapiens
  misc_RNA (1)...(19): siRNA sense strand
uugcaaggaugacauuaau

SEQ ID NO: 25728 - RNA, 19 nt, Homo sapiens
  misc_RNA (1)...(19): siRNA sense strand
gaaguggaagggaccaguu

SEQ ID NO: 25729 - RNA, 19 nt, Homo sapiens
  misc_RNA (1)...(19): siRNA sense strand
ccauguuacugaaguggaa

SEQ ID NO: 25730 - RNA, 19 nt, Homo sapiens
  misc_RNA (1)...(19): siRNA sense strand
acaaaguucaccaucuaua

SEQ ID NO: 25731 - RNA, 19 nt, Homo sapiens
  misc_RNA (1)...(19): siRNA sense strand
ugaaucggccaaagaggua

SEQ ID NO: 25732 - RNA, 19 nt, Homo sapiens
  misc_RNA (1)...(19): siRNA sense strand
gagcaaaagcgaaauguga

SEQ ID NO: 25733 - RNA, 19 nt, Homo sapiens
  misc_RNA (1)...(19): siRNA sense strand
ggaugacauuaauuccuau

SEQ ID NO: 25734 - RNA, 19 nt, Homo sapiens
  misc_RNA (1)...(19): siRNA sense strand
caccaucuauaacaacaug

SEQ ID NO: 25735 - RNA, 19 nt, Homo sapiens
  misc_RNA (1)...(19): siRNA sense strand
ccuuagaguuccacuuguu

SEQ ID NO: 25736 - RNA, 19 nt, Homo sapiens
  misc_RNA (1)...(19): siRNA sense strand
uugcauugcugacaaggaa

SEQ ID NO: 25737 - RNA, 19 nt, Homo sapiens
  misc_RNA (1)...(19): siRNA sense strand
gaacuggacgaacccuuag

SEQ ID NO: 25738 - RNA, 19 nt, Homo sapiens
  misc_RNA (1)...(19): siRNA sense strand
ugaaaacacugaaagaaca

SEQ ID NO: 25739 - RNA, 19 nt, Homo sapiens
  misc_RNA (1)...(19): siRNA sense strand
ggaucuggcuauguaagug

SEQ ID NO: 25740 - RNA, 19 nt, Homo sapiens
  misc_RNA (1)...(19): siRNA sense strand
ugaaaacgccaacaaaauu

SEQ ID NO: 25741 - RNA, 19 nt, Homo sapiens
  misc_RNA (1)...(19): siRNA sense strand
gaaccagcagugccauuuc

SEQ ID NO: 25742 - RNA, 19 nt, Homo sapiens
  misc_RNA (1)...(19): siRNA sense strand
uaugucaacuggauuaagg

SEQ ID NO: 25743 - RNA, 19 nt, Homo sapiens
  misc_RNA (1)...(19): siRNA sense strand
cagcuacguuacaccuauu

SEQ ID NO: 25744 - RNA, 19 nt, Homo sapiens
  misc_RNA (1)...(19): siRNA sense strand
ugucgcaggugaacauaau

SEQ ID NO: 25745 - RNA, 19 nt, Homo sapiens
  misc_RNA (1)...(19): siRNA sense strand
guggaagaguuucuguuuc

SEQ ID NO: 25746 - RNA, 19 nt, Homo sapiens
  misc_RNA (1)...(19): siRNA sense strand
gaagaguuucuguuucaca

SEQ ID NO: 25747 - RNA, 19 nt, Homo sapiens
  misc_RNA (1)...(19): siRNA sense strand
gguagagauucaugucaag

SEQ ID NO: 25748 - RNA, 19 nt, Homo sapiens
  misc_RNA (1)...(19): siRNA sense strand
caugaaggagguagagauu

SEQ ID NO: 25749 - RNA, 19 nt, Homo sapiens
  misc_RNA (1)...(19): siRNA sense strand
cuacaaugcagcuauuaau

SEQ ID NO: 25750 - RNA, 19 nt, Homo sapiens
  misc_RNA (1)...(19): siRNA sense strand
ugguaaaguugaugcauuc

SEQ ID NO: 25751 - RNA, 19 nt, Homo sapiens
  misc_RNA (1)...(19): siRNA sense strand
uggauaacaucacucaaag

SEQ ID NO: 25752 - RNA, 19 nt, Homo sapiens
  misc_RNA (1)...(19): siRNA sense strand
ugagggauaucgacuugca

SEQ ID NO: 25753 - RNA, 19 nt, Homo sapiens
  misc_RNA (1)...(19): siRNA sense strand
gugaagagugugcaaugaa

SEQ ID NO: 25754 - RNA, 19 nt, Homo sapiens
  misc_RNA (1)...(19): siRNA sense strand
ggagaucagcuuuaguucu

SEQ ID NO: 25755 - RNA, 19 nt, Homo sapiens
  misc_RNA (1)...(19): siRNA sense strand
caaauuuggaucuggcuau

SEQ ID NO: 25756 - RNA, 19 nt, Homo sapiens
  misc_RNA (1)...(19): siRNA sense strand
gcuaaacagcuacguuaca

SEQ ID NO: 25757 - RNA, 19 nt, Homo sapiens
  misc_RNA (1)...(19): siRNA sense strand
aagaguuucuguuucacaa

SEQ ID NO: 25758 - RNA, 19 nt, Homo sapiens
  misc_RNA (1)...(19): siRNA sense strand
gaaccuugagagagaaugu

SEQ ID NO: 25759 - RNA, 19 nt, Homo sapiens
  misc_RNA (1)...(19): siRNA sense strand
cguuacaccuauuugcauu

SEQ ID NO: 25760 - RNA, 19 nt, Homo sapiens
  misc_RNA (1)...(19): siRNA sense strand
acagcuacguuacaccuau

SEQ ID NO: 25761 - RNA, 19 nt, Homo sapiens
  misc_RNA (1)...(19): siRNA sense strand
uggagaagaugccaaacca

SEQ ID NO: 25762 - RNA, 19 nt, Homo sapiens
  misc_RNA (1)...(19): siRNA sense strand
ggaaauaaauucacaguca

SEQ ID NO: 25763 - RNA, 19 nt, Homo sapiens
  misc_RNA (1)...(19): siRNA sense strand
gaaacgaacugaauacugu

SEQ ID NO: 25764 - RNA, 19 nt, Homo sapiens
  misc_RNA (1)...(19): siRNA sense strand
ugacagcacuuggaaggua

SEQ ID NO: 25765 - RNA, 19 nt, Homo sapiens
  misc_RNA (1)...(19): siRNA sense strand
gacagacaauggaaacgaa

SEQ ID NO: 25766 - RNA, 19 nt, Homo sapiens
  misc_RNA (1)...(19): siRNA sense strand
gcuugcagcucaugacaau

SEQ ID NO: 25767 - RNA, 19 nt, Homo sapiens
  misc_RNA (1)...(19): siRNA sense strand
gagaaauuauaggugauga

SEQ ID NO: 25768 - RNA, 19 nt, Homo sapiens
  misc_RNA (1)...(19): siRNA sense strand
gaagguagaccggagugaa

SEQ ID NO: 25769 - RNA, 19 nt, Homo sapiens
  misc_RNA (1)...(19): siRNA sense strand
gcugacaauuacacaagaa

SEQ ID NO: 25770 - RNA, 19 nt, Homo sapiens
  misc_RNA (1)...(19): siRNA sense strand
ggaaacgaacugaauacug

SEQ ID NO: 25771 - RNA, 19 nt, Homo sapiens
  misc_RNA (1)...(19): siRNA sense strand
gaauacuguccgagaaauu

SEQ ID NO: 25772 - RNA, 19 nt, Homo sapiens
  misc_RNA (1)...(19): siRNA sense strand
ggacagacaauggaaacga

SEQ ID NO: 25773 - RNA, 19 nt, Homo sapiens
  misc_RNA (1)...(19): siRNA sense strand
aauacuguccgagaaauua

SEQ ID NO: 25774 - RNA, 19 nt, Homo sapiens
  misc_RNA (1)...(19): siRNA sense strand
uuauguguaugaaggagua

SEQ ID NO: 25775 - RNA, 19 nt, Homo sapiens
  misc_RNA (1)...(19): siRNA sense strand
gaaauuauaggugaugaac

SEQ ID NO: 25776 - RNA, 19 nt, Homo sapiens
  misc_RNA (1)...(19): siRNA sense strand
caauggaaacgaacugaau

SEQ ID NO: 25777 - RNA, 19 nt, Homo sapiens
  misc_RNA (1)...(19): siRNA sense strand
gacaauuacacaagaagga

SEQ ID NO: 25778 - RNA, 19 nt, Homo sapiens
  misc_RNA (1)...(19): siRNA sense strand
ugaauacuguccgagaaau

SEQ ID NO: 25779 - RNA, 19 nt, Homo sapiens
  misc_RNA (1)...(19): siRNA sense strand
caccuuuaauuacaaccua

SEQ ID NO: 25780 - RNA, 19 nt, Homo sapiens
  misc_RNA (1)...(19): siRNA sense strand
uugcagcucaugacaauuu

SEQ ID NO: 25781 - RNA, 19 nt, Homo sapiens
  misc_RNA (1)...(19): siRNA sense strand
ccuggagccuugagggaaa

SEQ ID NO: 25782 - RNA, 19 nt, Homo sapiens
  misc_RNA (1)...(19): siRNA sense strand
aauggaaacgaacugaaua

SEQ ID NO: 25783 - RNA, 19 nt, Homo sapiens
  misc_RNA (1)...(19): siRNA sense strand
ugaaggaguagaagccaaa

SEQ ID NO: 25784 - RNA, 19 nt, Homo sapiens
  misc_RNA (1)...(19): siRNA sense strand
uauaggugaugaacuaguc

SEQ ID NO: 25785 - RNA, 19 nt, Homo sapiens
  misc_RNA (1)...(19): siRNA sense strand
gaagcugacaauuacacaa

SEQ ID NO: 25786 - RNA, 19 nt, Homo sapiens
  misc_RNA (1)...(19): siRNA sense strand
caaccuagcagacggaacu

SEQ ID NO: 25787 - RNA, 19 nt, Homo sapiens
  misc_RNA (1)...(19): siRNA sense strand
cuugagggaaauaaacuua

SEQ ID NO: 25788 - RNA, 19 nt, Homo sapiens
  misc_RNA (1)...(19): siRNA sense strand
caaacggacagacaaugga

SEQ ID NO: 25789 - RNA, 19 nt, Homo sapiens
  misc_RNA (1)...(19): siRNA sense strand
gagccuugagggaaauaaa

SEQ ID NO: 25790 - RNA, 19 nt, Homo sapiens
  misc_RNA (1)...(19): siRNA sense strand
ggguguuaauauagugaaa

SEQ ID NO: 25791 - RNA, 19 nt, Homo sapiens
  misc_RNA (1)...(19): siRNA sense strand
caauuacacaagaaggaaa

SEQ ID NO: 25792 - RNA, 19 nt, Homo sapiens
  misc_RNA (1)...(19): siRNA sense strand
gaaucaagcgcuuuucgaa

SEQ ID NO: 25793 - RNA, 19 nt, Homo sapiens
  misc_RNA (1)...(19): siRNA sense strand
acugaauacuguccgagaa

SEQ ID NO: 25794 - RNA, 19 nt, Homo sapiens
  misc_RNA (1)...(19): siRNA sense strand
aaacggacagacaauggaa

SEQ ID NO: 25795 - RNA, 19 nt, Homo sapiens
  misc_RNA (1)...(19): siRNA sense strand
gacaauggaaacgaacuga

SEQ ID NO: 25796 - RNA, 19 nt, Homo sapiens
  misc_RNA (1)...(19): siRNA sense strand
ccagacuuauguguaugaa

SEQ ID NO: 25797 - RNA, 19 nt, Homo sapiens
  misc_RNA (1)...(19): siRNA sense strand
auuugaagcugacaauuac

SEQ ID NO: 25798 - RNA, 19 nt, Homo sapiens
  misc_RNA (1)...(19): siRNA sense strand
aagguagaccggagugaaa

SEQ ID NO: 25799 - RNA, 19 nt, Homo sapiens
  misc_RNA (1)...(19): siRNA sense strand
cagcucaugacaauuugaa

SEQ ID NO: 25800 - RNA, 19 nt, Homo sapiens
  misc_RNA (1)...(19): siRNA sense strand
ucaaacggacagacaaugg

SEQ ID NO: 25801 - RNA, 19 nt, Homo sapiens
  misc_RNA (1)...(19): siRNA sense strand
gcagacggaacugaacuca

SEQ ID NO: 25802 - RNA, 19 nt, Homo sapiens
  misc_RNA (1)...(19): siRNA sense strand
cgagaaauuauaggugaug

SEQ ID NO: 25803 - RNA, 19 nt, Homo sapiens
  misc_RNA (1)...(19): siRNA sense strand
acaauuacacaagaaggaa

SEQ ID NO: 25804 - RNA, 19 nt, Homo sapiens
  misc_RNA (1)...(19): siRNA sense strand
ugaaagagauggauucuaa

SEQ ID NO: 25805 - RNA, 19 nt, Homo sapiens
  misc_RNA (1)...(19): siRNA sense strand
gguaugcaccuauagauua

SEQ ID NO: 25806 - RNA, 19 nt, Homo sapiens
  misc_RNA (1)...(19): siRNA sense strand
gcaagacccucaagauauc

SEQ ID NO: 25807 - RNA, 19 nt, Homo sapiens
  misc_RNA (1)...(19): siRNA sense strand
gugcuuauguugucuaauu

SEQ ID NO: 25808 - RNA, 19 nt, Homo sapiens
  misc_RNA (1)...(19): siRNA sense strand
gaaauugucugagaaggau

SEQ ID NO: 25809 - RNA, 19 nt, Homo sapiens
  misc_RNA (1)...(19): siRNA sense strand
caguagaucuuucuuguga

SEQ ID NO: 25810 - RNA, 19 nt, Homo sapiens
  misc_RNA (1)...(19): siRNA sense strand
gcagagcaauuacugaugu

SEQ ID NO: 25811 - RNA, 19 nt, Homo sapiens
  misc_RNA (1)...(19): siRNA sense strand
gaccagaccuuguacagau

SEQ ID NO: 25812 - RNA, 19 nt, Homo sapiens
  misc_RNA (1)...(19): siRNA sense strand
gagagaaauugucugagaa

SEQ ID NO: 25813 - RNA, 19 nt, Homo sapiens
  misc_RNA (1)...(19): siRNA sense strand
aaacuuaacuccuggauac

SEQ ID NO: 25814 - RNA, 19 nt, Homo sapiens
  misc_RNA (1)...(19): siRNA sense strand
gcacucagauuugauaaag

SEQ ID NO: 25815 - RNA, 19 nt, Homo sapiens
  misc_RNA (1)...(19): siRNA sense strand
ugagagaaauugucugaga

SEQ ID NO: 25816 - RNA, 19 nt, Homo sapiens
  misc_RNA (1)...(19): siRNA sense strand
guagaucuuucuugugauu

SEQ ID NO: 25817 - RNA, 19 nt, Homo sapiens
  misc_RNA (1)...(19): siRNA sense strand
ggaaucgucuuggcauuga

(The sequence listing continues in the following parts.)
